United States Patent Application Publication US 2015/0141320 A1 - sequence listing, part 17

SEQ ID NO: 515235 - DNA, 15 bp, Homo sapiens
agcccgggtctgccc

SEQ ID NO: 515236 - DNA, 15 bp, Homo sapiens
tagcccgggtctgcc

SEQ ID NO: 515237 - DNA, 15 bp, Homo sapiens
ttagcccgggtctgc

SEQ ID NO: 515238 - DNA, 15 bp, Homo sapiens
tttagcccgggtctg

SEQ ID NO: 515239 - DNA, 15 bp, Homo sapiens
gtttagcccgggtct

SEQ ID NO: 515240 - DNA, 15 bp, Homo sapiens
ggtttagcccgggtc

SEQ ID NO: 515241 - DNA, 15 bp, Homo sapiens
tggtttagcccgggt

SEQ ID NO: 515242 - DNA, 15 bp, Homo sapiens
ctggtttagcccggg

SEQ ID NO: 515243 - DNA, 15 bp, Homo sapiens
actggtttagcccgg

SEQ ID NO: 515244 - DNA, 15 bp, Homo sapiens
cactggtttagcccg

SEQ ID NO: 515245 - DNA, 15 bp, Homo sapiens
tcactggtttagccc

SEQ ID NO: 515246 - DNA, 15 bp, Homo sapiens
atcactggtttagcc

SEQ ID NO: 515247 - DNA, 15 bp, Homo sapiens
aatcactggtttagc

SEQ ID NO: 515248 - DNA, 15 bp, Homo sapiens
aaatcactggtttag

SEQ ID NO: 515249 - DNA, 15 bp, Homo sapiens
aaaatcactggttta

SEQ ID NO: 515250 - DNA, 15 bp, Homo sapiens
aaaaatcactggttt

SEQ ID NO: 515251 - DNA, 15 bp, Homo sapiens
aaaaaatcactggtt

SEQ ID NO: 515252 - DNA, 15 bp, Homo sapiens
aaaaaaatcactggt

SEQ ID NO: 515253 - DNA, 15 bp, Homo sapiens
aaaaaaaatcactgg

SEQ ID NO: 515254 - DNA, 15 bp, Homo sapiens
aaaaaaaaatcactg

SEQ ID NO: 515255 - DNA, 15 bp, Homo sapiens
gaaaaaaaaatcact

SEQ ID NO: 515256 - DNA, 15 bp, Homo sapiens
ggaaaaaaaaatcac

SEQ ID NO: 515257 - DNA, 15 bp, Homo sapiens
tggaaaaaaaaatca

SEQ ID NO: 515258 - DNA, 15 bp, Homo sapiens
atggaaaaaaaaatc

SEQ ID NO: 515259 - DNA, 15 bp, Homo sapiens
catggaaaaaaaaat

SEQ ID NO: 515260 - DNA, 15 bp, Homo sapiens
tcatggaaaaaaaaa

SEQ ID NO: 515261 - DNA, 15 bp, Homo sapiens
ttcatggaaaaaaaa

SEQ ID NO: 515262 - DNA, 15 bp, Homo sapiens
attcatggaaaaaaa

SEQ ID NO: 515263 - DNA, 15 bp, Homo sapiens
tattcatggaaaaaa

SEQ ID NO: 515264 - DNA, 15 bp, Homo sapiens
gtattcatggaaaaa

SEQ ID NO: 515265 - DNA, 15 bp, Homo sapiens
cgtattcatggaaaa

SEQ ID NO: 515266 - DNA, 15 bp, Homo sapiens
tcgtattcatggaaa

SEQ ID NO: 515267 - DNA, 15 bp, Homo sapiens
ttcgtattcatggaa

SEQ ID NO: 515268 - DNA, 15 bp, Homo sapiens
cttcgtattcatgga

SEQ ID NO: 515269 - DNA, 15 bp, Homo sapiens
tcttcgtattcatgg

SEQ ID NO: 515270 - DNA, 15 bp, Homo sapiens
ttcttcgtattcatg

SEQ ID NO: 515271 - DNA, 15 bp, Homo sapiens
gttcttcgtattcat

SEQ ID NO: 515272 - DNA, 15 bp, Homo sapiens
ggttcttcgtattca

SEQ ID NO: 515273 - DNA, 15 bp, Homo sapiens
gggttcttcgtattc

SEQ ID NO: 515274 - DNA, 15 bp, Homo sapiens
ggggttcttcgtatt

SEQ ID NO: 515275 - DNA, 15 bp, Homo sapiens
cggggttcttcgtat

SEQ ID NO: 515276 - DNA, 15 bp, Homo sapiens
tcggggttcttcgta

SEQ ID NO: 515277 - DNA, 15 bp, Homo sapiens
atcggggttcttcgt

SEQ ID NO: 515278 - DNA, 15 bp, Homo sapiens
aatcggggttcttcg

SEQ ID NO: 515279 - DNA, 15 bp, Homo sapiens
caatcggggttcttc

SEQ ID NO: 515280 - DNA, 15 bp, Homo sapiens
gcaatcggggttctt

SEQ ID NO: 515281 - DNA, 15 bp, Homo sapiens
tgcaatcggggttct

SEQ ID NO: 515282 - DNA, 15 bp, Homo sapiens
gtgcaatcggggttc

SEQ ID NO: 515283 - DNA, 15 bp, Homo sapiens
agtgcaatcggggtt

SEQ ID NO: 515284 - DNA, 15 bp, Homo sapiens
aagtgcaatcggggt

SEQ ID NO: 515285 - DNA, 15 bp, Homo sapiens
aaagtgcaatcgggg

SEQ ID NO: 515286 - DNA, 15 bp, Homo sapiens
caaagtgcaatcggg

SEQ ID NO: 515287 - DNA, 15 bp, Homo sapiens
gcaaagtgcaatcgg

SEQ ID NO: 515288 - DNA, 15 bp, Homo sapiens
cgcaaagtgcaatcg

SEQ ID NO: 515289 - DNA, 15 bp, Homo sapiens
tcgcaaagtgcaatc

SEQ ID NO: 515290 - DNA, 15 bp, Homo sapiens
ttcgcaaagtgcaat

SEQ ID NO: 515291 - DNA, 15 bp, Homo sapiens
cttcgcaaagtgcaa

SEQ ID NO: 515292 - DNA, 15 bp, Homo sapiens
acttcgcaaagtgca

SEQ ID NO: 515293 - DNA, 15 bp, Homo sapiens
gacttcgcaaagtgc

SEQ ID NO: 515294 - DNA, 15 bp, Homo sapiens
agacttcgcaaagtg

SEQ ID NO: 515295 - DNA, 15 bp, Homo sapiens
cagacttcgcaaagt

SEQ ID NO: 515296 - DNA, 15 bp, Homo sapiens
gcagacttcgcaaag

SEQ ID NO: 515297 - DNA, 15 bp, Homo sapiens
cgcagacttcgcaaa

SEQ ID NO: 515298 - DNA, 15 bp, Homo sapiens
gcgcagacttcgcaa

SEQ ID NO: 515299 - DNA, 15 bp, Homo sapiens
cgcgcagacttcgca

SEQ ID NO: 515300 - DNA, 15 bp, Homo sapiens
acgcgcagacttcgc

SEQ ID NO: 515301 - DNA, 15 bp, Homo sapiens
tacgcgcagacttcg

SEQ ID NO: 515302 - DNA, 15 bp, Homo sapiens
atacgcgcagacttc

SEQ ID NO: 515303 - DNA, 15 bp, Homo sapiens
aatacgcgcagactt

SEQ ID NO: 515304 - DNA, 15 bp, Homo sapiens
gaatacgcgcagact

SEQ ID NO: 515305 - DNA, 15 bp, Homo sapiens
ggaatacgcgcagac

SEQ ID NO: 515306 - DNA, 15 bp, Homo sapiens
aggaatacgcgcaga

SEQ ID NO: 515307 - DNA, 15 bp, Homo sapiens
aaggaatacgcgcag

SEQ ID NO: 515308 - DNA, 15 bp, Homo sapiens
aaaggaatacgcgca

SEQ ID NO: 515309 - DNA, 15 bp, Homo sapiens
taaaggaatacgcgc

SEQ ID NO: 515310 - DNA, 15 bp, Homo sapiens
ataaaggaatacgcg

SEQ ID NO: 515311 - DNA, 15 bp, Homo sapiens
gataaaggaatacgc

SEQ ID NO: 515312 - DNA, 15 bp, Homo sapiens
ggataaaggaatacg

SEQ ID NO: 515313 - DNA, 15 bp, Homo sapiens
gggataaaggaatac

SEQ ID NO: 515314 - DNA, 15 bp, Homo sapiens
cgggataaaggaata

SEQ ID NO: 515315 - DNA, 15 bp, Homo sapiens
gcgggataaaggaat

SEQ ID NO: 515316 - DNA, 15 bp, Homo sapiens
tgcgggataaaggaa

SEQ ID NO: 515317 - DNA, 15 bp, Homo sapiens
ttgcgggataaagga

SEQ ID NO: 515318 - DNA, 15 bp, Homo sapiens
gttgcgggataaagg

SEQ ID NO: 515319 - DNA, 15 bp, Homo sapiens
agttgcgggataaag

SEQ ID NO: 515320 - DNA, 15 bp, Homo sapiens
tagttgcgggataaa

SEQ ID NO: 515321 - DNA, 15 bp, Homo sapiens
ctagttgcgggataa

SEQ ID NO: 515322 - DNA, 15 bp, Homo sapiens
gctagttgcgggata

SEQ ID NO: 515323 - DNA, 15 bp, Homo sapiens
agctagttgcgggat

SEQ ID NO: 515324 - DNA, 15 bp, Homo sapiens
aagctagttgcggga

SEQ ID NO: 515325 - DNA, 15 bp, Homo sapiens
caagctagttgcggg

SEQ ID NO: 515326 - DNA, 15 bp, Homo sapiens
gcaagctagttgcgg

SEQ ID NO: 515327 - DNA, 15 bp, Homo sapiens
agcaagctagttgcg

SEQ ID NO: 515328 - DNA, 15 bp, Homo sapiens
gagcaagctagttgc

SEQ ID NO: 515329 - DNA, 15 bp, Homo sapiens
ggagcaagctagttg

SEQ ID NO: 515330 - DNA, 15 bp, Homo sapiens
gggagcaagctagtt

SEQ ID NO: 515331 - DNA, 15 bp, Homo sapiens
cgggagcaagctagt

SEQ ID NO: 515332 - DNA, 15 bp, Homo sapiens
ccgggagcaagctag

SEQ ID NO: 515333 - DNA, 15 bp, Homo sapiens
cccgggagcaagcta

SEQ ID NO: 515334 - DNA, 15 bp, Homo sapiens
acccgggagcaagct

SEQ ID NO: 515335 - DNA, 15 bp, Homo sapiens
cacccgggagcaagc

SEQ ID NO: 515336 - DNA, 15 bp, Homo sapiens
ccacccgggagcaag

SEQ ID NO: 515337 - DNA, 15 bp, Homo sapiens
tccacccgggagcaa

SEQ ID NO: 515338 - DNA, 15 bp, Homo sapiens
ctccacccgggagca

SEQ ID NO: 515339 - DNA, 15 bp, Homo sapiens
actccacccgggagc

SEQ ID NO: 515340 - DNA, 15 bp, Homo sapiens
cactccacccgggag

SEQ ID NO: 515341 - DNA, 15 bp, Homo sapiens
ccactccacccggga

SEQ ID NO: 515342 - DNA, 15 bp, Homo sapiens
cccactccacccggg

SEQ ID NO: 515343 - DNA, 15 bp, Homo sapiens
gcccactccacccgg

SEQ ID NO: 515344 - DNA, 15 bp, Homo sapiens
tgcccactccacccg

SEQ ID NO: 515345 - DNA, 15 bp, Homo sapiens
gtgcccactccaccc

SEQ ID NO: 515346 - DNA, 15 bp, Homo sapiens
tgtgcccactccacc

SEQ ID NO: 515347 - DNA, 15 bp, Homo sapiens
ctgtgcccactccac

SEQ ID NO: 515348 - DNA, 15 bp, Homo sapiens
actgtgcccactcca

SEQ ID NO: 515349 - DNA, 15 bp, Homo sapiens
cactgtgcccactcc

SEQ ID NO: 515350 - DNA, 15 bp, Homo sapiens
ccactgtgcccactc

SEQ ID NO: 515351 - DNA, 15 bp, Homo sapiens
cccactgtgcccact

SEQ ID NO: 515352 - DNA, 15 bp, Homo sapiens
ccccactgtgcccac

SEQ ID NO: 515353 - DNA, 15 bp, Homo sapiens
tccccactgtgccca

SEQ ID NO: 515354 - DNA, 15 bp, Homo sapiens
ctccccactgtgccc

SEQ ID NO: 515355 - DNA, 15 bp, Homo sapiens
gctccccactgtgcc

SEQ ID NO: 515356 - DNA, 15 bp, Homo sapiens
cgctccccactgtgc

SEQ ID NO: 515357 - DNA, 15 bp, Homo sapiens
ccgctccccactgtg

SEQ ID NO: 515358 - DNA, 15 bp, Homo sapiens
accgctccccactgt

SEQ ID NO: 515359 - DNA, 15 bp, Homo sapiens
gaccgctccccactg

SEQ ID NO: 515360 - DNA, 15 bp, Homo sapiens
tgaccgctccccact

SEQ ID NO: 515361 - DNA, 15 bp, Homo sapiens
ctgaccgctccccac

SEQ ID NO: 515362 - DNA, 15 bp, Homo sapiens
cctgaccgctcccca

SEQ ID NO: 515363 - DNA, 15 bp, Homo sapiens
ccctgaccgctcccc

SEQ ID NO: 515364 - DNA, 15 bp, Homo sapiens
gccctgaccgctccc

SEQ ID NO: 515365 - DNA, 15 bp, Homo sapiens
tgccctgaccgctcc

SEQ ID NO: 515366 - DNA, 15 bp, Homo sapiens
ctgccctgaccgctc

SEQ ID NO: 515367 - DNA, 15 bp, Homo sapiens
cctgccctgaccgct

SEQ ID NO: 515368 - DNA, 15 bp, Homo sapiens
ccctgccctgaccgc

SEQ ID NO: 515369 - DNA, 15 bp, Homo sapiens
gccctgccctgaccg

SEQ ID NO: 515370 - DNA, 15 bp, Homo sapiens
tgccctgccctgacc

SEQ ID NO: 515371 - DNA, 15 bp, Homo sapiens
ctgccctgccctgac

SEQ ID NO: 515372 - DNA, 15 bp, Homo sapiens
cctgccctgccctga

SEQ ID NO: 515373 - DNA, 15 bp, Homo sapiens
ccctgccctgccctg

SEQ ID NO: 515374 - DNA, 15 bp, Homo sapiens
gccctgccctgccct

SEQ ID NO: 515375 - DNA, 15 bp, Homo sapiens
ggccctgccctgccc

SEQ ID NO: 515376 - DNA, 15 bp, Homo sapiens
gggccctgccctgcc

SEQ ID NO: 515377 - DNA, 15 bp, Homo sapiens
tgggccctgccctgc

SEQ ID NO: 515378 - DNA, 15 bp, Homo sapiens
ttgggccctgccctg

SEQ ID NO: 515379 - DNA, 15 bp, Homo sapiens
gttgggccctgccct

SEQ ID NO: 515380 - DNA, 15 bp, Homo sapiens
cgttgggccctgccc

SEQ ID NO: 515381 - DNA, 15 bp, Homo sapiens
gcgttgggccctgcc

SEQ ID NO: 515382 - DNA, 15 bp, Homo sapiens
agcgttgggccctgc

SEQ ID NO: 515383 - DNA, 15 bp, Homo sapiens
cagcgttgggccctg

SEQ ID NO: 515384 - DNA, 15 bp, Homo sapiens
ccagcgttgggccct

SEQ ID NO: 515385 - DNA, 15 bp, Homo sapiens
gccagcgttgggccc

SEQ ID NO: 515386 - DNA, 15 bp, Homo sapiens
ggccagcgttgggcc

SEQ ID NO: 515387 - DNA, 15 bp, Homo sapiens
gggccagcgttgggc

SEQ ID NO: 515388 - DNA, 15 bp, Homo sapiens
ggggccagcgttggg

SEQ ID NO: 515389 - DNA, 15 bp, Homo sapiens
aggggccagcgttgg

SEQ ID NO: 515390 - DNA, 15 bp, Homo sapiens
gaggggccagcgttg

SEQ ID NO: 515391 - DNA, 15 bp, Homo sapiens
cgaggggccagcgtt

SEQ ID NO: 515392 - DNA, 15 bp, Homo sapiens
gcgaggggccagcgt

SEQ ID NO: 515393 - DNA, 15 bp, Homo sapiens
cgcgaggggccagcg

SEQ ID NO: 515394 - DNA, 15 bp, Homo sapiens
ccgcgaggggccagc

SEQ ID NO: 515395 - DNA, 15 bp, Homo sapiens
tccgcgaggggccag

SEQ ID NO: 515396 - DNA, 15 bp, Homo sapiens
ctccgcgaggggcca

SEQ ID NO: 515397 - DNA, 15 bp, Homo sapiens
gctccgcgaggggcc

SEQ ID NO: 515398 - DNA, 15 bp, Homo sapiens
agctccgcgaggggc

SEQ ID NO: 515399 - DNA, 15 bp, Homo sapiens
aagctccgcgagggg

SEQ ID NO: 515400 - DNA, 15 bp, Homo sapiens
aaagctccgcgaggg

SEQ ID NO: 515401 - DNA, 15 bp, Homo sapiens
gaaagctccgcgagg

SEQ ID NO: 515402 - DNA, 15 bp, Homo sapiens
ggaaagctccgcgag

SEQ ID NO: 515403 - DNA, 15 bp, Homo sapiens
gggaaagctccgcga

SEQ ID NO: 515404 - DNA, 15 bp, Homo sapiens
agggaaagctccgcg

SEQ ID NO: 515405 - DNA, 15 bp, Homo sapiens
cagggaaagctccgc

SEQ ID NO: 515406 - DNA, 15 bp, Homo sapiens
ccagggaaagctccg

SEQ ID NO: 515407 - DNA, 15 bp, Homo sapiens
gccagggaaagctcc

SEQ ID NO: 515408 - DNA, 15 bp, Homo sapiens
cgccagggaaagctc

SEQ ID NO: 515409 - DNA, 15 bp, Homo sapiens
gcgccagggaaagct

SEQ ID NO: 515410 - DNA, 15 bp, Homo sapiens
cgcgccagggaaagc

SEQ ID NO: 515411 - DNA, 15 bp, Homo sapiens
tcgcgccagggaaag

SEQ ID NO: 515412 - DNA, 15 bp, Homo sapiens
gtcgcgccagggaaa

SEQ ID NO: 515413 - DNA, 15 bp, Homo sapiens
ggtcgcgccagggaa

SEQ ID NO: 515414 - DNA, 15 bp, Homo sapiens
aggtcgcgccaggga

SEQ ID NO: 515415 - DNA, 15 bp, Homo sapiens
gaggtcgcgccaggg

SEQ ID NO: 515416 - DNA, 15 bp, Homo sapiens
tgaggtcgcgccagg

SEQ ID NO: 515417 - DNA, 15 bp, Homo sapiens
gtgaggtcgcgccag

SEQ ID NO: 515418 - DNA, 15 bp, Homo sapiens
tgtgaggtcgcgcca

SEQ ID NO: 515419 - DNA, 15 bp, Homo sapiens
gtgtgaggtcgcgcc

SEQ ID NO: 515420 - DNA, 15 bp, Homo sapiens
cgtgtgaggtcgcgc

SEQ ID NO: 515421 - DNA, 15 bp, Homo sapiens
ccgtgtgaggtcgcg

SEQ ID NO: 515422 - DNA, 15 bp, Homo sapiens
accgtgtgaggtcgc

SEQ ID NO: 515423 - DNA, 15 bp, Homo sapiens
gaccgtgtgaggtcg

SEQ ID NO: 515424 - DNA, 15 bp, Homo sapiens
cgaccgtgtgaggtc

SEQ ID NO: 515425 - DNA, 15 bp, Homo sapiens
gcgaccgtgtgaggt

SEQ ID NO: 515426 - DNA, 15 bp, Homo sapiens
agcgaccgtgtgagg

SEQ ID NO: 515427 - DNA, 15 bp, Homo sapiens
cagcgaccgtgtgag

SEQ ID NO: 515428 - DNA, 15 bp, Homo sapiens
gcagcgaccgtgtga

SEQ ID NO: 515429 - DNA, 15 bp, Homo sapiens
ggcagcgaccgtgtg

SEQ ID NO: 515430 - DNA, 15 bp, Homo sapiens
aggcagcgaccgtgt

SEQ ID NO: 515431 - DNA, 15 bp, Homo sapiens
gaggcagcgaccgtg

SEQ ID NO: 515432 - DNA, 15 bp, Homo sapiens
agaggcagcgaccgt

SEQ ID NO: 515433 - DNA, 15 bp, Homo sapiens
tagaggcagcgaccg

SEQ ID NO: 515434 - DNA, 15 bp, Homo sapiens
atagaggcagcgacc

SEQ ID NO: 515435 - DNA, 15 bp, Homo sapiens
aatagaggcagcgac

SEQ ID NO: 515436 - DNA, 15 bp, Homo sapiens
gaatagaggcagcga

SEQ ID NO: 515437 - DNA, 15 bp, Homo sapiens
ggaatagaggcagcg

SEQ ID NO: 515438 - DNA, 15 bp, Homo sapiens
cggaatagaggcagc

SEQ ID NO: 515439 - DNA, 15 bp, Homo sapiens
tcggaatagaggcag

SEQ ID NO: 515440 - DNA, 15 bp, Homo sapiens
gtcggaatagaggca

SEQ ID NO: 515441 - DNA, 15 bp, Homo sapiens
ggtcggaatagaggc

SEQ ID NO: 515442 - DNA, 15 bp, Homo sapiens
tggtcggaatagagg

SEQ ID NO: 515443 - DNA, 15 bp, Homo sapiens
gtggtcggaatagag

SEQ ID NO: 515444 - DNA, 15 bp, Homo sapiens
cgtggtcggaataga

SEQ ID NO: 515445 - DNA, 15 bp, Homo sapiens
gcgtggtcggaatag

SEQ ID NO: 515446 - DNA, 15 bp, Homo sapiens
agcgtggtcggaata

SEQ ID NO: 515447 - DNA, 15 bp, Homo sapiens
gagcgtggtcggaat

SEQ ID NO: 515448 - DNA, 15 bp, Homo sapiens
agagcgtggtcggaa

SEQ ID NO: 515449 - DNA, 15 bp, Homo sapiens
cagagcgtggtcgga

SEQ ID NO: 515450 - DNA, 15 bp, Homo sapiens
gcagagcgtggtcgg

SEQ ID NO: 515451 - DNA, 15 bp, Homo sapiens
agcagagcgtggtcg

SEQ ID NO: 515452 - DNA, 15 bp, Homo sapiens
aagcagagcgtggtc

SEQ ID NO: 515453 - DNA, 15 bp, Homo sapiens
gaagcagagcgtggt

SEQ ID NO: 515454 - DNA, 15 bp, Homo sapiens
cgaagcagagcgtgg

SEQ ID NO: 515455 - DNA, 15 bp, Homo sapiens
gcgaagcagagcgtg

SEQ ID NO: 515456 - DNA, 15 bp, Homo sapiens
agcgaagcagagcgt

SEQ ID NO: 515457 - DNA, 15 bp, Homo sapiens
cagcgaagcagagcg

SEQ ID NO: 515458 - DNA, 15 bp, Homo sapiens
ccagcgaagcagagc

SEQ ID NO: 515459 - DNA, 15 bp, Homo sapiens
gccagcgaagcagag

SEQ ID NO: 515460 - DNA, 15 bp, Homo sapiens
agccagcgaagcaga

SEQ ID NO: 515461 - DNA, 15 bp, Homo sapiens
cagccagcgaagcag

SEQ ID NO: 515462 - DNA, 15 bp, Homo sapiens
gcagccagcgaagca

SEQ ID NO: 515463 - DNA, 15 bp, Homo sapiens
cgcagccagcgaagc

SEQ ID NO: 515464 - DNA, 15 bp, Homo sapiens
ccgcagccagcgaag

SEQ ID NO: 515465 - DNA, 15 bp, Homo sapiens
gccgcagccagcgaa

SEQ ID NO: 515466 - DNA, 15 bp, Homo sapiens
agccgcagccagcga

SEQ ID NO: 515467 - DNA, 15 bp, Homo sapiens
gagccgcagccagcg

SEQ ID NO: 515468 - DNA, 15 bp, Homo sapiens
ggagccgcagccagc

SEQ ID NO: 515469 - DNA, 15 bp, Homo sapiens
cggagccgcagccag

SEQ ID NO: 515470 - DNA, 15 bp, Homo sapiens
gcggagccgcagcca

SEQ ID NO: 515471 - DNA, 15 bp, Homo sapiens
ggcggagccgcagcc

SEQ ID NO: 515472 - DNA, 15 bp, Homo sapiens
tggcggagccgcagc

SEQ ID NO: 515473 - DNA, 15 bp, Homo sapiens
ctggcggagccgcag

SEQ ID NO: 515474 - DNA, 15 bp, Homo sapiens
cctggcggagccgca

SEQ ID NO: 515475 - DNA, 15 bp, Homo sapiens
tcctggcggagccgc

SEQ ID NO: 515476 - DNA, 15 bp, Homo sapiens
ttcctggcggagccg

SEQ ID NO: 515477 - DNA, 15 bp, Homo sapiens
attcctggcggagcc

SEQ ID NO: 515478 - DNA, 15 bp, Homo sapiens
gattcctggcggagc

SEQ ID NO: 515479 - DNA, 15 bp, Homo sapiens
ggattcctggcggag

SEQ ID NO: 515480 - DNA, 15 bp, Homo sapiens
cggattcctggcgga

SEQ ID NO: 515481 - DNA, 15 bp, Homo sapiens
tcggattcctggcgg

SEQ ID NO: 515482 - DNA, 15 bp, Homo sapiens
ctcggattcctggcg

SEQ ID NO: 515483 - DNA, 15 bp, Homo sapiens
cctcggattcctggc

SEQ ID NO: 515484 - DNA, 15 bp, Homo sapiens
ccctcggattcctgg

SEQ ID NO: 515485 - DNA, 15 bp, Homo sapiens
cccctcggattcctg

SEQ ID NO: 515486 - DNA, 15 bp, Homo sapiens
ccccctcggattcct

SEQ ID NO: 515487 - DNA, 15 bp, Homo sapiens
gccccctcggattcc

SEQ ID NO: 515488 - DNA, 15 bp, Homo sapiens
cgccccctcggattc

SEQ ID NO: 515489 - DNA, 15 bp, Homo sapiens
gcgccccctcggatt

SEQ ID NO: 515490 - DNA, 15 bp, Homo sapiens
tgcgccccctcggat

SEQ ID NO: 515491 - DNA, 15 bp, Homo sapiens
ctgcgccccctcgga

SEQ ID NO: 515492 - DNA, 15 bp, Homo sapiens
cctgcgccccctcgg

SEQ ID NO: 515493 - DNA, 15 bp, Homo sapiens
gcctgcgccccctcg

SEQ ID NO: 515494 - DNA, 15 bp, Homo sapiens
ggcctgcgccccctc

SEQ ID NO: 515495 - DNA, 15 bp, Homo sapiens
gggcctgcgccccct

SEQ ID NO: 515496 - DNA, 15 bp, Homo sapiens
tgggcctgcgccccc

SEQ ID NO: 515497 - DNA, 15 bp, Homo sapiens
ctgggcctgcgcccc

SEQ ID NO: 515498 - DNA, 15 bp, Homo sapiens
cctgggcctgcgccc

SEQ ID NO: 515499 - DNA, 15 bp, Homo sapiens
gcctgggcctgcgcc

SEQ ID NO: 515500 - DNA, 15 bp, Homo sapiens
agcctgggcctgcgc

SEQ ID NO: 515501 - DNA, 15 bp, Homo sapiens
gagcctgggcctgcg

SEQ ID NO: 515502 - DNA, 15 bp, Homo sapiens
cgagcctgggcctgc

SEQ ID NO: 515503 - DNA, 15 bp, Homo sapiens
ccgagcctgggcctg

SEQ ID NO: 515504 - DNA, 15 bp, Homo sapiens
gccgagcctgggcct

SEQ ID NO: 515505 - DNA, 15 bp, Homo sapiens
ggccgagcctgggcc

SEQ ID NO: 515506 - DNA, 15 bp, Homo sapiens
gggccgagcctgggc

SEQ ID NO: 515507 - DNA, 15 bp, Homo sapiens
agggccgagcctggg

SEQ ID NO: 515508 - DNA, 15 bp, Homo sapiens
tagggccgagcctgg

SEQ ID NO: 515509 - DNA, 15 bp, Homo sapiens
ctagggccgagcctg

SEQ ID NO: 515510 - DNA, 15 bp, Homo sapiens
tctagggccgagcct

SEQ ID NO: 515511 - DNA, 15 bp, Homo sapiens
atctagggccgagcc

SEQ ID NO: 515512 - DNA, 15 bp, Homo sapiens
catctagggccgagc

SEQ ID NO: 515513 - DNA, 15 bp, Homo sapiens
gcatctagggccgag

SEQ ID NO: 515514 - DNA, 15 bp, Homo sapiens
cgcatctagggccga

SEQ ID NO: 515515 - DNA, 15 bp, Homo sapiens
gcgcatctagggccg

SEQ ID NO: 515516 - DNA, 15 bp, Homo sapiens
cgcgcatctagggcc

SEQ ID NO: 515517 - DNA, 15 bp, Homo sapiens
ccgcgcatctagggc

SEQ ID NO: 515518 - DNA, 15 bp, Homo sapiens
tccgcgcatctaggg

SEQ ID NO: 515519 - DNA, 15 bp, Homo sapiens
ttccgcgcatctagg

SEQ ID NO: 515520 - DNA, 15 bp, Homo sapiens
attccgcgcatctag

SEQ ID NO: 515521 - DNA, 15 bp, Homo sapiens
gattccgcgcatcta

SEQ ID NO: 515522 - DNA, 15 bp, Homo sapiens
cgattccgcgcatct

SEQ ID NO: 515523 - DNA, 15 bp, Homo sapiens
gcgattccgcgcatc

SEQ ID NO: 515524 - DNA, 15 bp, Homo sapiens
ggcgattccgcgcat

SEQ ID NO: 515525 - DNA, 15 bp, Homo sapiens
tggcgattccgcgca

SEQ ID NO: 515526 - DNA, 15 bp, Homo sapiens
atggcgattccgcgc

SEQ ID NO: 515527 - DNA, 15 bp, Homo sapiens
gatggcgattccgcg

SEQ ID NO: 515528 - DNA, 15 bp, Homo sapiens
tgatggcgattccgc

SEQ ID NO: 515529 - DNA, 15 bp, Homo sapiens
ctgatggcgattccg

SEQ ID NO: 515530 - DNA, 15 bp, Homo sapiens
gctgatggcgattcc

SEQ ID NO: 515531 - DNA, 15 bp, Homo sapiens
ggctgatggcgattc

SEQ ID NO: 515532 - DNA, 15 bp, Homo sapiens
aggctgatggcgatt

SEQ ID NO: 515533 - DNA, 15 bp, Homo sapiens
aaggctgatggcgat

SEQ ID NO: 515534 - DNA, 15 bp, Homo sapiens
aaaggctgatggcga

SEQ ID NO: 515535 - DNA, 15 bp, Homo sapiens
caaaggctgatggcg

SEQ ID NO: 515536 - DNA, 15 bp, Homo sapiens
gcaaaggctgatggc

SEQ ID NO: 515537 - DNA, 15 bp, Homo sapiens
agcaaaggctgatgg

SEQ ID NO: 515538 - DNA, 15 bp, Homo sapiens
aagcaaaggctgatg

SEQ ID NO: 515539 - DNA, 15 bp, Homo sapiens
taagcaaaggctgat

SEQ ID NO: 515540 - DNA, 15 bp, Homo sapiens
gtaagcaaaggctga

SEQ ID NO: 515541 - DNA, 15 bp, Homo sapiens
tgtaagcaaaggctg

SEQ ID NO: 515542 - DNA, 15 bp, Homo sapiens
gtgtaagcaaaggct

SEQ ID NO: 515543 - DNA, 15 bp, Homo sapiens
ggtgtaagcaaaggc

SEQ ID NO: 515544 - DNA, 15 bp, Homo sapiens
tggtgtaagcaaagg

SEQ ID NO: 515545 - DNA, 15 bp, Homo sapiens
ctggtgtaagcaaag

SEQ ID NO: 515546 - DNA, 15 bp, Homo sapiens
gctggtgtaagcaaa

SEQ ID NO: 515547 - DNA, 15 bp, Homo sapiens
cgctggtgtaagcaa

SEQ ID NO: 515548 - DNA, 15 bp, Homo sapiens
acgctggtgtaagca

SEQ ID NO: 515549 - DNA, 15 bp, Homo sapiens
cacgctggtgtaagc

SEQ ID NO: 515550 - DNA, 15 bp, Homo sapiens
ccacgctggtgtaag

SEQ ID NO: 515551 - DNA, 15 bp, Homo sapiens
gccacgctggtgtaa

SEQ ID NO: 515552 - DNA, 15 bp, Homo sapiens
ggccacgctggtgta

SEQ ID NO: 515553 - DNA, 15 bp, Homo sapiens
cggccacgctggtgt

SEQ ID NO: 515554 - DNA, 15 bp, Homo sapiens
gcggccacgctggtg

SEQ ID NO: 515555 - DNA, 15 bp, Homo sapiens
tgcggccacgctggt

SEQ ID NO: 515556 - DNA, 15 bp, Homo sapiens
ctgcggccacgctgg

SEQ ID NO: 515557 - DNA, 15 bp, Homo sapiens
cctgcggccacgctg

SEQ ID NO: 515558 - DNA, 15 bp, Homo sapiens
ccctgcggccacgct

SEQ ID NO: 515559 - DNA, 15 bp, Homo sapiens
tccctgcggccacgc

SEQ ID NO: 515560 - DNA, 15 bp, Homo sapiens
ttccctgcggccacg

SEQ ID NO: 515561 - DNA, 15 bp, Homo sapiens
tttccctgcggccac

SEQ ID NO: 515562 - DNA, 15 bp, Homo sapiens
gtttccctgcggcca

SEQ ID NO: 515563 - DNA, 15 bp, Homo sapiens
agtttccctgcggcc

SEQ ID NO: 515564 - DNA, 15 bp, Homo sapiens
gagtttccctgcggc

SEQ ID NO: 515565 - DNA, 15 bp, Homo sapiens
ggagtttccctgcgg

SEQ ID NO: 515566 - DNA, 15 bp, Homo sapiens
aggagtttccctgcg

SEQ ID NO: 515567 - DNA, 15 bp, Homo sapiens
aaggagtttccctgc

SEQ ID NO: 515568 - DNA, 15 bp, Homo sapiens
aaaggagtttccctg

SEQ ID NO: 515569 - DNA, 15 bp, Homo sapiens
gaaaggagtttccct

SEQ ID NO: 515570 - DNA, 15 bp, Homo sapiens
agaaaggagtttccc

SEQ ID NO: 515571 - DNA, 15 bp, Homo sapiens
gagaaaggagtttcc

SEQ ID NO: 515572 - DNA, 15 bp, Homo sapiens
agagaaaggagtttc

SEQ ID NO: 515573 - DNA, 15 bp, Homo sapiens
gagagaaaggagttt

SEQ ID NO: 515574 - DNA, 15 bp, Homo sapiens
ggagagaaaggagtt

SEQ ID NO: 515575 - DNA, 15 bp, Homo sapiens
gggagagaaaggagt

SEQ ID NO: 515576 - DNA, 15 bp, Homo sapiens
agggagagaaaggag

SEQ ID NO: 515577 - DNA, 15 bp, Homo sapiens
gagggagagaaagga

SEQ ID NO: 515578 - DNA, 15 bp, Homo sapiens
ggagggagagaaagg

SEQ ID NO: 515579 - DNA, 15 bp, Homo sapiens
tggagggagagaaag

SEQ ID NO: 515580 - DNA, 15 bp, Homo sapiens
ctggagggagagaaa

SEQ ID NO: 515581 - DNA, 15 bp, Homo sapiens
actggagggagagaa

SEQ ID NO: 515582 - DNA, 15 bp, Homo sapiens
cactggagggagaga

SEQ ID NO: 515583 - DNA, 15 bp, Homo sapiens
acactggagggagag

SEQ ID NO: 515584 - DNA, 15 bp, Homo sapiens
gacactggagggaga

SEQ ID NO: 515585 - DNA, 15 bp, Homo sapiens
tgacactggagggag

SEQ ID NO: 515586 - DNA, 15 bp, Homo sapiens
gtgacactggaggga

SEQ ID NO: 515587 - DNA, 15 bp, Homo sapiens
agtgacactggaggg

SEQ ID NO: 515588 - DNA, 15 bp, Homo sapiens
aagtgacactggagg

SEQ ID NO: 515589 - DNA, 15 bp, Homo sapiens
aaagtgacactggag

SEQ ID NO: 515590 - DNA, 15 bp, Homo sapiens
caaagtgacactgga

SEQ ID NO: 515591 - DNA, 15 bp, Homo sapiens
gcaaagtgacactgg

SEQ ID NO: 515592 - DNA, 15 bp, Homo sapiens
cgcaaagtgacactg

SEQ ID NO: 515593 - DNA, 15 bp, Homo sapiens
tcgcaaagtgacact

SEQ ID NO: 515594 - DNA, 15 bp, Homo sapiens
ctcgcaaagtgacac

SEQ ID NO: 515595 - DNA, 15 bp, Homo sapiens
tctcgcaaagtgaca

SEQ ID NO: 515596 - DNA, 15 bp, Homo sapiens
agaataaaagaaaca

SEQ ID NO: 515597 - DNA, 15 bp, Homo sapiens
tagaataaaagaaac

SEQ ID NO: 515598 - DNA, 15 bp, Homo sapiens
gtagaataaaagaaa

SEQ ID NO: 515599 - DNA, 15 bp, Homo sapiens
agtagaataaaagaa

SEQ ID NO: 515600 - DNA, 15 bp, Homo sapiens
tagtagaataaaaga

SEQ ID NO: 515601 - DNA, 15 bp, Homo sapiens
ttagtagaataaaag

SEQ ID NO: 515602 - DNA, 15 bp, Homo sapiens
gttagtagaataaaa

SEQ ID NO: 515603 - DNA, 15 bp, Homo sapiens
tgttagtagaataaa

SEQ ID NO: 515604 - DNA, 15 bp, Homo sapiens
atgttagtagaataa

SEQ ID NO: 515605 - DNA, 15 bp, Homo sapiens
aatgttagtagaata

SEQ ID NO: 515606 - DNA, 15 bp, Homo sapiens
caatgttagtagaat

SEQ ID NO: 515607 - DNA, 15 bp, Homo sapiens
acaatgttagtagaa

SEQ ID NO: 515608 - DNA, 15 bp, Homo sapiens
cacaatgttagtaga

SEQ ID NO: 515609 - DNA, 15 bp, Homo sapiens
acacaatgttagtag

SEQ ID NO: 515610 - DNA, 15 bp, Homo sapiens
aacacaatgttagta

SEQ ID NO: 515611 - DNA, 15 bp, Homo sapiens
aaacacaatgttagt

SEQ ID NO: 515612 - DNA, 15 bp, Homo sapiens
taaacacaatgttag

SEQ ID NO: 515613 - DNA, 15 bp, Homo sapiens
ttaaacacaatgtta

SEQ ID NO: 515614 - DNA, 15 bp, Homo sapiens
attaaacacaatgtt

SEQ ID NO: 515615 - DNA, 15 bp, Homo sapiens
aattaaacacaatgt

SEQ ID NO: 515616 - DNA, 15 bp, Homo sapiens
aaattaaacacaatg

SEQ ID NO: 515617 - DNA, 15 bp, Homo sapiens
caaattaaacacaat

SEQ ID NO: 515618 - DNA, 15 bp, Homo sapiens
gcaaattaaacacaa

SEQ ID NO: 515619 - DNA, 15 bp, Homo sapiens
agcaaattaaacaca

SEQ ID NO: 515620 - DNA, 15 bp, Homo sapiens
gagcaaattaaacac

SEQ ID NO: 515621 - DNA, 15 bp, Homo sapiens
agagcaaattaaaca

SEQ ID NO: 515622 - DNA, 15 bp, Homo sapiens
aagagcaaattaaac

SEQ ID NO: 515623 - DNA, 15 bp, Homo sapiens
gaagagcaaattaaa

SEQ ID NO: 515624 - DNA, 15 bp, Homo sapiens
agaagagcaaattaa

SEQ ID NO: 515625 - DNA, 15 bp, Homo sapiens
aagaagagcaaatta

SEQ ID NO: 515626 - DNA, 15 bp, Homo sapiens
aaagaagagcaaatt

SEQ ID NO: 515627 - DNA, 15 bp, Homo sapiens
aaaagaagagcaaat

SEQ ID NO: 515628 - DNA, 15 bp, Homo sapiens
aaaaagaagagcaaa

SEQ ID NO: 515629 - DNA, 15 bp, Homo sapiens
gaaaaagaagagcaa

SEQ ID NO: 515630 - DNA, 15 bp, Homo sapiens
agaaaaagaagagca

SEQ ID NO: 515631 - DNA, 15 bp, Homo sapiens
tagaaaaagaagagc

SEQ ID NO: 515632 - DNA, 15 bp, Homo sapiens
ctagaaaaagaagag

SEQ ID NO: 515633 - DNA, 15 bp, Homo sapiens
actagaaaaagaaga

SEQ ID NO: 515634 - DNA, 15 bp, Homo sapiens
aactagaaaaagaag

SEQ ID NO: 515635 - DNA, 15 bp, Homo sapiens
aaactagaaaaagaa

SEQ ID NO: 515636 - DNA, 15 bp, Homo sapiens
gaaactagaaaaaga

SEQ ID NO: 515637 - DNA, 15 bp, Homo sapiens
agaaactagaaaaag

SEQ ID NO: 515638 - DNA, 15 bp, Homo sapiens
aagaaactagaaaaa

SEQ ID NO: 515639 - DNA, 15 bp, Homo sapiens
taagaaactagaaaa

SEQ ID NO: 515640 - DNA, 15 bp, Homo sapiens
ttaagaaactagaaa

SEQ ID NO: 515641 - DNA, 15 bp, Homo sapiens
gttaagaaactagaa

SEQ ID NO: 515642 - DNA, 15 bp, Homo sapiens
tgttaagaaactaga

SEQ ID NO: 515643 - DNA, 15 bp, Homo sapiens
atgttaagaaactag

SEQ ID NO: 515644 - DNA, 15 bp, Homo sapiens
tatgttaagaaacta

SEQ ID NO: 515645 - DNA, 15 bp, Homo sapiens
atatgttaagaaact

SEQ ID NO: 515646 - DNA, 15 bp, Homo sapiens
tatatgttaagaaac

SEQ ID NO: 515647 - DNA, 15 bp, Homo sapiens
ttatatgttaagaaa

SEQ ID NO: 515648 - DNA, 15 bp, Homo sapiens
cttatatgttaagaa

SEQ ID NO: 515649 - DNA, 15 bp, Homo sapiens
gcttatatgttaaga

SEQ ID NO: 515650 - DNA, 15 bp, Homo sapiens
agcttatatgttaag

SEQ ID NO: 515651 - DNA, 15 bp, Homo sapiens
cagcttatatgttaa

SEQ ID NO: 515652 - DNA, 15 bp, Homo sapiens
tcagcttatatgtta

SEQ ID NO: 515653 - DNA, 15 bp, Homo sapiens
ctcagcttatatgtt

SEQ ID NO: 515654 - DNA, 15 bp, Homo sapiens
cctcagcttatatgt

SEQ ID NO: 515655 - DNA, 15 bp, Homo sapiens
acctcagcttatatg

SEQ ID NO: 515656 - DNA, 15 bp, Homo sapiens
gacctcagcttatat

SEQ ID NO: 515657 - DNA, 15 bp, Homo sapiens
tgacctcagcttata

SEQ ID NO: 515658 - DNA, 15 bp, Homo sapiens
atgacctcagcttat

SEQ ID NO: 515659 - DNA, 15 bp, Homo sapiens
aatgacctcagctta

SEQ ID NO: 515660 - DNA, 15 bp, Homo sapiens
caatgacctcagctt

SEQ ID NO: 515661 - DNA, 15 bp, Homo sapiens
tcaatgacctcagct

SEQ ID NO: 515662 - DNA, 15 bp, Homo sapiens
atcaatgacctcagc

SEQ ID NO: 515663 - DNA, 15 bp, Homo sapiens
aatcaatgacctcag

SEQ ID NO: 515664 - DNA, 15 bp, Homo sapiens
aaatcaatgacctca

SEQ ID NO: 515665 - DNA, 15 bp, Homo sapiens
caaatcaatgacctc

SEQ ID NO: 515666 - DNA, 15 bp, Homo sapiens
tcaaatcaatgacct

SEQ ID NO: 515667 - DNA, 15 bp, Homo sapiens
ctcaaatcaatgacc

SEQ ID NO: 515668 - DNA, 15 bp, Homo sapiens
cctcaaatcaatgac

SEQ ID NO: 515669 - DNA, 15 bp, Homo sapiens
gcctcaaatcaatga

SEQ ID NO: 515670 - DNA, 15 bp, Homo sapiens
agcctcaaatcaatg

SEQ ID NO: 515671 - DNA, 15 bp, Homo sapiens
tagcctcaaatcaat

SEQ ID NO: 515672 - DNA, 15 bp, Homo sapiens
gtagcctcaaatcaa

SEQ ID NO: 515673 - DNA, 15 bp, Homo sapiens
tgtagcctcaaatca

SEQ ID NO: 515674 - DNA, 15 bp, Homo sapiens
gtgtagcctcaaatc

SEQ ID NO: 515675 - DNA, 15 bp, Homo sapiens
agtgtagcctcaaat

SEQ ID NO: 515676 - DNA, 15 bp, Homo sapiens
tagtgtagcctcaaa

SEQ ID NO: 515677 - DNA, 15 bp, Homo sapiens
ctagtgtagcctcaa

SEQ ID NO: 515678 - DNA, 15 bp, Homo sapiens
gctagtgtagcctca

SEQ ID NO: 515679 - DNA, 15 bp, Homo sapiens
agctagtgtagcctc

SEQ ID NO: 515680 - DNA, 15 bp, Homo sapiens
aagctagtgtagcct

SEQ ID NO: 515681 - DNA, 15 bp, Homo sapiens
gaagctagtgtagcc

SEQ ID NO: 515682 - DNA, 15 bp, Homo sapiens
ggaagctagtgtagc

SEQ ID NO: 515683 - DNA, 15 bp, Homo sapiens
aggaagctagtgtag

SEQ ID NO: 515684 - DNA, 15 bp, Homo sapiens
taggaagctagtgta

SEQ ID NO: 515685 - DNA, 15 bp, Homo sapiens
ataggaagctagtgt

SEQ ID NO: 515686 - DNA, 15 bp, Homo sapiens
cataggaagctagtg

SEQ ID NO: 515687 - DNA, 15 bp, Homo sapiens
ccataggaagctagt

SEQ ID NO: 515688 - DNA, 15 bp, Homo sapiens
gccataggaagctag

SEQ ID NO: 515689 - DNA, 15 bp, Homo sapiens
agccataggaagcta

SEQ ID NO: 515690 - DNA, 15 bp, Homo sapiens
cagccataggaagct

SEQ ID NO: 515691 - DNA, 15 bp, Homo sapiens
acagccataggaagc

SEQ ID NO: 515692 - DNA, 15 bp, Homo sapiens
aacagccataggaag

SEQ ID NO: 515693 - DNA, 15 bp, Homo sapiens
caacagccataggaa

SEQ ID NO: 515694 - DNA, 15 bp, Homo sapiens
acaacagccatagga

SEQ ID NO: 515695 - DNA, 15 bp, Homo sapiens
tacaacagccatagg

SEQ ID NO: 515696 - DNA, 15 bp, Homo sapiens
ttacaacagccatag

SEQ ID NO: 515697 - DNA, 15 bp, Homo sapiens
gttacaacagccata

SEQ ID NO: 515698 - DNA, 15 bp, Homo sapiens
tgttacaacagccat

SEQ ID NO: 515699 - DNA, 15 bp, Homo sapiens
ttgttacaacagcca

SEQ ID NO: 515700 - DNA, 15 bp, Homo sapiens
tttgttacaacagcc

SEQ ID NO: 515701 - DNA, 15 bp, Homo sapiens
atttgttacaacagc

SEQ ID NO: 515702 - DNA, 15 bp, Homo sapiens
aatttgttacaacag

SEQ ID NO: 515703 - DNA, 15 bp, Homo sapiens
taatttgttacaaca

SEQ ID NO: 515704 - DNA, 15 bp, Homo sapiens
gtaatttgttacaac

SEQ ID NO: 515705 - DNA, 15 bp, Homo sapiens
ggtaatttgttacaa

SEQ ID NO: 515706 - DNA, 15 bp, Homo sapiens
tggtaatttgttaca

SEQ ID NO: 515707 - DNA, 15 bp, Homo sapiens
gtggtaatttgttac

SEQ ID NO: 515708 - DNA, 15 bp, Homo sapiens
tgtggtaatttgtta

SEQ ID NO: 515709 - DNA, 15 bp, Homo sapiens
ttgtggtaatttgtt

SEQ ID NO: 515710 - DNA, 15 bp, Homo sapiens
tttgtggtaatttgt

SEQ ID NO: 515711 - DNA, 15 bp, Homo sapiens
gtttgtggtaatttg

SEQ ID NO: 515712 - DNA, 15 bp, Homo sapiens
agtttgtggtaattt

SEQ ID NO: 515713 - DNA, 15 bp, Homo sapiens
gagtttgtggtaatt

SEQ ID NO: 515714 - DNA, 15 bp, Homo sapiens
tgagtttgtggtaat

SEQ ID NO: 515715 - DNA, 15 bp, Homo sapiens
ctgagtttgtggtaa

SEQ ID NO: 515716 - DNA, 15 bp, Homo sapiens
tctgagtttgtggta

SEQ ID NO: 515717 - DNA, 15 bp, Homo sapiens
ctctgagtttgtggt

SEQ ID NO: 515718 - DNA, 15 bp, Homo sapiens
cctctgagtttgtgg

SEQ ID NO: 515719 - DNA, 15 bp, Homo sapiens
gcctctgagtttgtg

SEQ ID NO: 515720 - DNA, 15 bp, Homo sapiens
agcctctgagtttgt

SEQ ID NO: 515721 - DNA, 15 bp, Homo sapiens
aagcctctgagtttg

SEQ ID NO: 515722 - DNA, 15 bp, Homo sapiens
taagcctctgagttt

SEQ ID NO: 515723 - DNA, 15 bp, Homo sapiens
ttaagcctctgagtt

SEQ ID NO: 515724 - DNA, 15 bp, Homo sapiens
tttaagcctctgagt

SEQ ID NO: 515725 - DNA, 15 bp, Homo sapiens
ctttaagcctctgag

SEQ ID NO: 515726 - DNA, 15 bp, Homo sapiens
tctttaagcctctga

SEQ ID NO: 515727 - DNA, 15 bp, Homo sapiens
atctttaagcctctg

SEQ ID NO: 515728 - DNA, 15 bp, Homo sapiens
gatctttaagcctct

SEQ ID NO: 515729 - DNA, 15 bp, Homo sapiens
tgatctttaagcctc

SEQ ID NO: 515730 - DNA, 15 bp, Homo sapiens
ctgatctttaagcct

SEQ ID NO: 515731 - DNA, 15 bp, Homo sapiens
cctgatctttaagcc

SEQ ID NO: 515732 - DNA, 15 bp, Homo sapiens
tcctgatctttaagc

SEQ ID NO: 515733 - DNA, 15 bp, Homo sapiens
ttcctgatctttaag

SEQ ID NO: 515734 - DNA, 15 bp, Homo sapiens
attcctgatctttaa

SEQ ID NO: 515735 - DNA, 15 bp, Homo sapiens
cattcctgatcttta

SEQ ID NO: 515736 - DNA, 15 bp, Homo sapiens
acattcctgatcttt

SEQ ID NO: 515737 - DNA, 15 bp, Homo sapiens
tacattcctgatctt

SEQ ID NO: 515738 - DNA, 15 bp, Homo sapiens
atacattcctgatct

SEQ ID NO: 515739 - DNA, 15 bp, Homo sapiens
aatacattcctgatc

SEQ ID NO: 515740 - DNA, 15 bp, Homo sapiens
gaatacattcctgat

SEQ ID NO: 515741 - DNA, 15 bp, Homo sapiens
agaatacattcctga

SEQ ID NO: 515742 - DNA, 15 bp, Homo sapiens
gagaatacattcctg

SEQ ID NO: 515743 - DNA, 15 bp, Homo sapiens
agagaatacattcct

SEQ ID NO: 515744 - DNA, 15 bp, Homo sapiens
gagagaatacattcc

SEQ ID NO: 515745 - DNA, 15 bp, Homo sapiens
tgagagaatacattc

SEQ ID NO: 515746 - DNA, 15 bp, Homo sapiens
gtgagagaatacatt

SEQ ID NO: 515747 - DNA, 15 bp, Homo sapiens
tgtgagagaatacat

SEQ ID NO: 515748 - DNA, 15 bp, Homo sapiens
ctgtgagagaataca

SEQ ID NO: 515749 - DNA, 15 bp, Homo sapiens
actgtgagagaatac

SEQ ID NO: 515750 - DNA, 15 bp, Homo sapiens
aactgtgagagaata

SEQ ID NO: 515751 - DNA, 15 bp, Homo sapiens
taactgtgagagaat

SEQ ID NO: 515752 - DNA, 15 bp, Homo sapiens
ataactgtgagagaa

SEQ ID NO: 515753 - DNA, 15 bp, Homo sapiens
cataactgtgagaga

SEQ ID NO: 515754 - DNA, 15 bp, Homo sapiens
ccataactgtgagag

SEQ ID NO: 515755 - DNA, 15 bp, Homo sapiens
cccataactgtgaga

SEQ ID NO: 515756 - DNA, 15 bp, Homo sapiens
tcccataactgtgag

SEQ ID NO: 515757 - DNA, 15 bp, Homo sapiens
ctcccataactgtga

SEQ ID NO: 515758 - DNA, 15 bp, Homo sapiens
gctcccataactgtg

SEQ ID NO: 515759 - DNA, 15 bp, Homo sapiens
agctcccataactgt

SEQ ID NO: 515760 - DNA, 15 bp, Homo sapiens
tagctcccataactg

SEQ ID NO: 515761 - DNA, 15 bp, Homo sapiens
ctagctcccataact

SEQ ID NO: 515762 - DNA, 15 bp, Homo sapiens
tctagctcccataac

SEQ ID NO: 515763 - DNA, 15 bp, Homo sapiens
ttctagctcccataa

SEQ ID NO: 515764 - DNA, 15 bp, Homo sapiens
cttctagctcccata

SEQ ID NO: 515765 - DNA, 15 bp, Homo sapiens
acttctagctcccat

SEQ ID NO: 515766 - DNA, 15 bp, Homo sapiens
gacttctagctccca

SEQ ID NO: 515767 - DNA, 15 bp, Homo sapiens
agacttctagctccc

SEQ ID NO: 515768 - DNA, 15 bp, Homo sapiens
cagacttctagctcc

SEQ ID NO: 515769 - DNA, 15 bp, Homo sapiens
tcagacttctagctc

SEQ ID NO: 515770 - DNA, 15 bp, Homo sapiens
ttcagacttctagct

SEQ ID NO: 515771 - DNA, 15 bp, Homo sapiens
tttcagacttctagc

SEQ ID NO: 515772 - DNA, 15 bp, Homo sapiens
atttcagacttctag

SEQ ID NO: 515773 - DNA, 15 bp, Homo sapiens
gatttcagacttcta

SEQ ID NO: 515774 - DNA, 15 bp, Homo sapiens
tgatttcagacttct

SEQ ID NO: 515775 - DNA, 15 bp, Homo sapiens
ttgatttcagacttc

SEQ ID NO: 515776 - DNA, 15 bp, Homo sapiens
cttgatttcagactt

SEQ ID NO: 515777 - DNA, 15 bp, Homo sapiens
ccttgatttcagact

SEQ ID NO: 515778 - DNA, 15 bp, Homo sapiens
accttgatttcagac

SEQ ID NO: 515779 - DNA, 15 bp, Homo sapiens
caccttgatttcaga

SEQ ID NO: 515780 - DNA, 15 bp, Homo sapiens
acaccttgatttcag

SEQ ID NO: 515781 - DNA, 15 bp, Homo sapiens
gacaccttgatttca

SEQ ID NO: 515782 - DNA, 15 bp, Homo sapiens
ggacaccttgatttc

SEQ ID NO: 515783 - DNA, 15 bp, Homo sapiens
cggacaccttgattt

SEQ ID NO: 515784 - DNA, 15 bp, Homo sapiens
gcggacaccttgatt

SEQ ID NO: 515785 - DNA, 15 bp, Homo sapiens
tgcggacaccttgat

SEQ ID NO: 515786 - DNA, 15 bp, Homo sapiens
ctgcggacaccttga

SEQ ID NO: 515787 - DNA, 15 bp, Homo sapiens
tctgcggacaccttg

SEQ ID NO: 515788 - DNA, 15 bp, Homo sapiens
atctgcggacacctt

SEQ ID NO: 515789 - DNA, 15 bp, Homo sapiens
aatctgcggacacct

SEQ ID NO: 515790 - DNA, 15 bp, Homo sapiens
caatctgcggacacc

SEQ ID NO: 515791 - DNA, 15 bp, Homo sapiens
acaatctgcggacac

SEQ ID NO: 515792 - DNA, 15 bp, Homo sapiens
tacaatctgcggaca

SEQ ID NO: 515793 - DNA, 15 bp, Homo sapiens
gtacaatctgcggac

SEQ ID NO: 515794 - DNA, 15 bp, Homo sapiens
agtacaatctgcgga

SEQ ID NO: 515795 - DNA, 15 bp, Homo sapiens
gagtacaatctgcgg

SEQ ID NO: 515796 - DNA, 15 bp, Homo sapiens
agagtacaatctgcg

SEQ ID NO: 515797 - DNA, 15 bp, Homo sapiens
gagagtacaatctgc

SEQ ID NO: 515798 - DNA, 15 bp, Homo sapiens
agagagtacaatctg

SEQ ID NO: 515799 - DNA, 15 bp, Homo sapiens
gagagagtacaatct

SEQ ID NO: 515800 - DNA, 15 bp, Homo sapiens
ggagagagtacaatc

SEQ ID NO: 515801 - DNA, 15 bp, Homo sapiens
tggagagagtacaat

SEQ ID NO: 515802 - DNA, 15 bp, Homo sapiens
ctggagagagtacaa

SEQ ID NO: 515803 - DNA, 15 bp, Homo sapiens
tctggagagagtaca

SEQ ID NO: 515804 - DNA, 15 bp, Homo sapiens
ctctggagagagtac

SEQ ID NO: 515805 - DNA, 15 bp, Homo sapiens
cctctggagagagta

SEQ ID NO: 515806 - DNA, 15 bp, Homo sapiens
gcctctggagagagt

SEQ ID NO: 515807 - DNA, 15 bp, Homo sapiens
agcctctggagagag

SEQ ID NO: 515808 - DNA, 15 bp, Homo sapiens
gagcctctggagaga

SEQ ID NO: 515809 - DNA, 15 bp, Homo sapiens
agagcctctggagag

SEQ ID NO: 515810 - DNA, 15 bp, Homo sapiens
cagagcctctggaga

SEQ ID NO: 515811 - DNA, 15 bp, Homo sapiens
ccagagcctctggag

SEQ ID NO: 515812 - DNA, 15 bp, Homo sapiens
cccagagcctctgga

SEQ ID NO: 515813 - DNA, 15 bp, Homo sapiens
ccccagagcctctgg

SEQ ID NO: 515814 - DNA, 15 bp, Homo sapiens
tccccagagcctctg

SEQ ID NO: 515815 - DNA, 15 bp, Homo sapiens
ctccccagagcctct

SEQ ID NO: 515816 - DNA, 15 bp, Homo sapiens
tctccccagagcctc

SEQ ID NO: 515817 - DNA, 15 bp, Homo sapiens
atctccccagagcct

SEQ ID NO: 515818 - DNA, 15 bp, Homo sapiens
aatctccccagagcc

SEQ ID NO: 515819 - DNA, 15 bp, Homo sapiens
gaatctccccagagc

SEQ ID NO: 515820 - DNA, 15 bp, Homo sapiens
agaatctccccagag

SEQ ID NO: 515821 - DNA, 15 bp, Homo sapiens
cagaatctccccaga

SEQ ID NO: 515822 - DNA, 15 bp, Homo sapiens
acagaatctccccag

SEQ ID NO: 515823 - DNA, 15 bp, Homo sapiens
aacagaatctcccca

SEQ ID NO: 515824 - DNA, 15 bp, Homo sapiens
gaacagaatctcccc

SEQ ID NO: 515825 - DNA, 15 bp, Homo sapiens
ggaacagaatctccc

SEQ ID NO: 515826 - DNA, 15 bp, Homo sapiens
aggaacagaatctcc

SEQ ID NO: 515827 - DNA, 15 bp, Homo sapiens
aaggaacagaatctc

SEQ ID NO: 515828 - DNA, 15 bp, Homo sapiens
caaggaacagaatct

SEQ ID NO: 515829 - DNA, 15 bp, Homo sapiens
gcaaggaacagaatc

SEQ ID NO: 515830 - DNA, 15 bp, Homo sapiens
agcaaggaacagaat

SEQ ID NO: 515831 - DNA, 15 bp, Homo sapiens
aagcaaggaacagaa

SEQ ID NO: 515832 - DNA, 15 bp, Homo sapiens
gaagcaaggaacaga

SEQ ID NO: 515833 - DNA, 15 bp, Homo sapiens
agaagcaaggaacag

SEQ ID NO: 515834 - DNA, 15 bp, Homo sapiens
aagaagcaaggaaca

SEQ ID NO: 515835 - DNA, 15 bp, Homo sapiens
gaagaagcaaggaac

SEQ ID NO: 515836 - DNA, 15 bp, Homo sapiens
ggaagaagcaaggaa

SEQ ID NO: 515837 - DNA, 15 bp, Homo sapiens
tggaagaagcaagga

SEQ ID NO: 515838 - DNA, 15 bp, Homo sapiens
ctggaagaagcaagg

SEQ ID NO: 515839 - DNA, 15 bp, Homo sapiens
gctggaagaagcaag

SEQ ID NO: 515840 - DNA, 15 bp, Homo sapiens
agctggaagaagcaa

SEQ ID NO: 515841 - DNA, 15 bp, Homo sapiens
aagctggaagaagca

SEQ ID NO: 515842 - DNA, 15 bp, Homo sapiens
gaagctggaagaagc

SEQ ID NO: 515843 - DNA, 15 bp, Homo sapiens
agaagctggaagaag

SEQ ID NO: 515844 - DNA, 15 bp, Homo sapiens
cagaagctggaagaa

SEQ ID NO: 515845 - DNA, 15 bp, Homo sapiens
ccagaagctggaaga

SEQ ID NO: 515846 - DNA, 15 bp, Homo sapiens
tccagaagctggaag

SEQ ID NO: 515847 - DNA, 15 bp, Homo sapiens
ctccagaagctggaa

SEQ ID NO: 515848 - DNA, 15 bp, Homo sapiens
cctccagaagctgga

SEQ ID NO: 515849 - DNA, 15 bp, Homo sapiens
gcctccagaagctgg

SEQ ID NO: 515850 - DNA, 15 bp, Homo sapiens
agcctccagaagctg

SEQ ID NO: 515851 - DNA, 15 bp, Homo sapiens
aagcctccagaagct

SEQ ID NO: 515852 - DNA, 15 bp, Homo sapiens
aaagcctccagaagc

SEQ ID NO: 515853 - DNA, 15 bp, Homo sapiens
aaaagcctccagaag

SEQ ID NO: 515854 - DNA, 15 bp, Homo sapiens
caaaagcctccagaa

SEQ ID NO: 515855 - DNA, 15 bp, Homo sapiens
ccaaaagcctccaga

SEQ ID NO: 515856 - DNA, 15 bp, Homo sapiens
gccaaaagcctccag

SEQ ID NO: 515857 - DNA, 15 bp, Homo sapiens
tgccaaaagcctcca

SEQ ID NO: 515858 - DNA, 15 bp, Homo sapiens
atgccaaaagcctcc

SEQ ID NO: 515859 - DNA, 15 bp, Homo sapiens
aatgccaaaagcctc

SEQ ID NO: 515860 - DNA, 15 bp, Homo sapiens
gaatgccaaaagcct

SEQ ID NO: 515861 - DNA, 15 bp, Homo sapiens
tgaatgccaaaagcc

SEQ ID NO: 515862 - DNA, 15 bp, Homo sapiens
atgaatgccaaaagc

SEQ ID NO: 515863 - DNA, 15 bp, Homo sapiens
aatgaatgccaaaag

SEQ ID NO: 515864 - DNA, 15 bp, Homo sapiens
caatgaatgccaaaa

SEQ ID NO: 515865 - DNA, 15 bp, Homo sapiens
ccaatgaatgccaaa

SEQ ID NO: 515866 - DNA, 15 bp, Homo sapiens
gccaatgaatgccaa

SEQ ID NO: 515867 - DNA, 15 bp, Homo sapiens
agccaatgaatgcca

SEQ ID NO: 515868 - DNA, 15 bp, Homo sapiens
aagccaatgaatgcc

SEQ ID NO: 515869 - DNA, 15 bp, Homo sapiens
caagccaatgaatgc

SEQ ID NO: 515870 - DNA, 15 bp, Homo sapiens
acaagccaatgaatg

SEQ ID NO: 515871 - DNA, 15 bp, Homo sapiens
cacaagccaatgaat

SEQ ID NO: 515872 - DNA, 15 bp, Homo sapiens
tcacaagccaatgaa

SEQ ID NO: 515873 - DNA, 15 bp, Homo sapiens
gtcacaagccaatga

SEQ ID NO: 515874 - DNA, 15 bp, Homo sapiens
tgtcacaagccaatg

SEQ ID NO: 515875 - DNA, 15 bp, Homo sapiens
gtgtcacaagccaat

SEQ ID NO: 515876 - DNA, 15 bp, Homo sapiens
tgtgtcacaagccaa

SEQ ID NO: 515877 - DNA, 15 bp, Homo sapiens
atgtgtcacaagcca

SEQ ID NO: 515878 - DNA, 15 bp, Homo sapiens
aatgtgtcacaagcc

SEQ ID NO: 515879 - DNA, 15 bp, Homo sapiens
aaatgtgtcacaagc

SEQ ID NO: 515880 - DNA, 15 bp, Homo sapiens
gaaatgtgtcacaag

SEQ ID NO: 515881 - DNA, 15 bp, Homo sapiens
agaaatgtgtcacaa

SEQ ID NO: 515882 - DNA, 15 bp, Homo sapiens
gagaaatgtgtcaca

SEQ ID NO: 515883 - DNA, 15 bp, Homo sapiens
ggagaaatgtgtcac

SEQ ID NO: 515884 - DNA, 15 bp, Homo sapiens
tggagaaatgtgtca

SEQ ID NO: 515885 - DNA, 15 bp, Homo sapiens
ttggagaaatgtgtc

SEQ ID NO: 515886 - DNA, 15 bp, Homo sapiens
attggagaaatgtgt

SEQ ID NO: 515887 - DNA, 15 bp, Homo sapiens
gattggagaaatgtg

SEQ ID NO: 515888 - DNA, 15 bp, Homo sapiens
agattggagaaatgt

SEQ ID NO: 515889 - DNA, 15 bp, Homo sapiens
cagattggagaaatg

SEQ ID NO: 515890 - DNA, 15 bp, Homo sapiens
acagattggagaaat

SEQ ID NO: 515891 - DNA, 15 bp, Homo sapiens
gacagattggagaaa

SEQ ID NO: 515892 - DNA, 15 bp, Homo sapiens
agacagattggagaa

SEQ ID NO: 515893 - DNA, 15 bp, Homo sapiens
gagacagattggaga

SEQ ID NO: 515894 - DNA, 15 bp, Homo sapiens
ggagacagattggag

SEQ ID NO: 515895 - DNA, 15 bp, Homo sapiens
tggagacagattgga

SEQ ID NO: 515896 - DNA, 15 bp, Homo sapiens
atggagacagattgg

SEQ ID NO: 515897 - DNA, 15 bp, Homo sapiens
aatggagacagattg

SEQ ID NO: 515898 - DNA, 15 bp, Homo sapiens
aaatggagacagatt

SEQ ID NO: 515899 - DNA, 15 bp, Homo sapiens
gaaatggagacagat

SEQ ID NO: 515900 - DNA, 15 bp, Homo sapiens
ggaaatggagacaga

SEQ ID NO: 515901 - DNA, 15 bp, Homo sapiens
tggaaatggagacag

SEQ ID NO: 515902 - DNA, 15 bp, Homo sapiens
gtggaaatggagaca

SEQ ID NO: 515903 - DNA, 15 bp, Homo sapiens
tgtggaaatggagac

SEQ ID NO: 515904 - DNA, 15 bp, Homo sapiens
atgtggaaatggaga

SEQ ID NO: 515905 - DNA, 15 bp, Homo sapiens
catgtggaaatggag

SEQ ID NO: 515906 - DNA, 15 bp, Homo sapiens
ccatgtggaaatgga

SEQ ID NO: 515907 - DNA, 15 bp, Homo sapiens
gccatgtggaaatgg

SEQ ID NO: 515908 - DNA, 15 bp, Homo sapiens
ggccatgtggaaatg

SEQ ID NO: 515909 - DNA, 15 bp, Homo sapiens
aggccatgtggaaat

SEQ ID NO: 515910 - DNA, 15 bp, Homo sapiens
aaggccatgtggaaa

SEQ ID NO: 515911 - DNA, 15 bp, Homo sapiens
gaaggccatgtggaa

SEQ ID NO: 515912 - DNA, 15 bp, Homo sapiens
agaaggccatgtgga

SEQ ID NO: 515913 - DNA, 15 bp, Homo sapiens
aagaaggccatgtgg

SEQ ID NO: 515914 - DNA, 15 bp, Homo sapiens
aaagaaggccatgtg

SEQ ID NO: 515915 - DNA, 15 bp, Homo sapiens
caaagaaggccatgt

SEQ ID NO: 515916 - DNA, 15 bp, Homo sapiens
acaaagaaggccatg

SEQ ID NO: 515917 - DNA, 15 bp, Homo sapiens
tacaaagaaggccat

SEQ ID NO: 515918 - DNA, 15 bp, Homo sapiens
atacaaagaaggcca

SEQ ID NO: 515919 - DNA, 15 bp, Homo sapiens
catacaaagaaggcc

SEQ ID NO: 515920 - DNA, 15 bp, Homo sapiens
acatacaaagaaggc

SEQ ID NO: 515921 - DNA, 15 bp, Homo sapiens
cacatacaaagaagg

SEQ ID NO: 515922 - DNA, 15 bp, Homo sapiens
acacatacaaagaag

SEQ ID NO: 515923 - DNA, 15 bp, Homo sapiens
aacacatacaaagaa

SEQ ID NO: 515924 - DNA, 15 bp, Homo sapiens
aaacacatacaaaga

SEQ ID NO: 515925 - DNA, 15 bp, Homo sapiens
gaaacacatacaaag

SEQ ID NO: 515926 - DNA, 15 bp, Homo sapiens
agaaacacatacaaa

SEQ ID NO: 515927 - DNA, 15 bp, Homo sapiens
gagaaacacatacaa

SEQ ID NO: 515928 - DNA, 15 bp, Homo sapiens
agagaaacacataca

SEQ ID NO: 515929 - DNA, 15 bp, Homo sapiens
aagagaaacacatac

SEQ ID NO: 515930 - DNA, 15 bp, Homo sapiens
aaagagaaacacata

SEQ ID NO: 515931 - DNA, 15 bp, Homo sapiens
caaagagaaacacat

SEQ ID NO: 515932 - DNA, 15 bp, Homo sapiens
acaaagagaaacaca

SEQ ID NO: 515933 - DNA, 15 bp, Homo sapiens
gacaaagagaaacac

SEQ ID NO: 515934 - DNA, 15 bp, Homo sapiens
agacaaagagaaaca

SEQ ID NO: 515935 - DNA, 15 bp, Homo sapiens
gagacaaagagaaac

SEQ ID NO: 515936 - DNA, 15 bp, Homo sapiens
agagacaaagagaaa

SEQ ID NO: 515937 - DNA, 15 bp, Homo sapiens
aagagacaaagagaa

SEQ ID NO: 515938 - DNA, 15 bp, Homo sapiens
taagagacaaagaga

SEQ ID NO: 515939 - DNA, 15 bp, Homo sapiens
ataagagacaaagag

SEQ ID NO: 515940 - DNA, 15 bp, Homo sapiens
tataagagacaaaga

SEQ ID NO: 515941 - DNA, 15 bp, Homo sapiens
ttataagagacaaag

SEQ ID NO: 515942 - DNA, 15 bp, Homo sapiens
tttataagagacaaa

SEQ ID NO: 515943 - DNA, 15 bp, Homo sapiens
ctttataagagacaa

SEQ ID NO: 515944 - DNA, 15 bp, Homo sapiens
tctttataagagaca

SEQ ID NO: 515945 - DNA, 15 bp, Homo sapiens
atctttataagagac

SEQ ID NO: 515946 - DNA, 15 bp, Homo sapiens
catctttataagaga

SEQ ID NO: 515947 - DNA, 15 bp, Homo sapiens
gcatctttataagag

SEQ ID NO: 515948 - DNA, 15 bp, Homo sapiens
agcatctttataaga

SEQ ID NO: 515949 - DNA, 15 bp, Homo sapiens
cagcatctttataag

SEQ ID NO: 515950 - DNA, 15 bp, Homo sapiens
acagcatctttataa

SEQ ID NO: 515951 - DNA, 15 bp, Homo sapiens
cacagcatctttata

SEQ ID NO: 515952 - DNA, 15 bp, Homo sapiens
tcacagcatctttat

SEQ ID NO: 515953 - DNA, 15 bp, Homo sapiens
atcacagcatcttta

SEQ ID NO: 515954 - DNA, 15 bp, Homo sapiens
catcacagcatcttt

SEQ ID NO: 515955 - DNA, 15 bp, Homo sapiens
tcatcacagcatctt

SEQ ID NO: 515956 - DNA, 15 bp, Homo sapiens
gtcatcacagcatct

SEQ ID NO: 515957 - DNA, 15 bp, Homo sapiens
tgtcatcacagcatc

SEQ ID NO: 515958 - DNA, 15 bp, Homo sapiens
gtgtcatcacagcat

SEQ ID NO: 515959 - DNA, 15 bp, Homo sapiens
agtgtcatcacagca

SEQ ID NO: 515960 - DNA, 15 bp, Homo sapiens
cagtgtcatcacagc

SEQ ID NO: 515961 - DNA, 15 bp, Homo sapiens
tcagtgtcatcacag

SEQ ID NO: 515962 - DNA, 15 bp, Homo sapiens
ttcagtgtcatcaca

SEQ ID NO: 515963 - DNA, 15 bp, Homo sapiens
cttcagtgtcatcac

SEQ ID NO: 515964 - DNA, 15 bp, Homo sapiens
acttcagtgtcatca

SEQ ID NO: 515965 - DNA, 15 bp, Homo sapiens
aacttcagtgtcatc

SEQ ID NO: 515966 - DNA, 15 bp, Homo sapiens
gaacttcagtgtcat

SEQ ID NO: 515967 - DNA, 15 bp, Homo sapiens
ggaacttcagtgtca

SEQ ID NO: 515968 - DNA, 15 bp, Homo sapiens
tggaacttcagtgtc

SEQ ID NO: 515969 - DNA, 15 bp, Homo sapiens
gtggaacttcagtgt

SEQ ID NO: 515970 - DNA, 15 bp, Homo sapiens
agtggaacttcagtg

SEQ ID NO: 515971 - DNA, 15 bp, Homo sapiens
gagtggaacttcagt

SEQ ID NO: 515972 - DNA, 15 bp, Homo sapiens
tgagtggaacttcag

SEQ ID NO: 515973 - DNA, 15 bp, Homo sapiens
ctgagtggaacttca

SEQ ID NO: 515974 - DNA, 15 bp, Homo sapiens
tctgagtggaacttc

SEQ ID NO: 515975 - DNA, 15 bp, Homo sapiens
atctgagtggaactt

SEQ ID NO: 515976 - DNA, 15 bp, Homo sapiens
tatctgagtggaact

SEQ ID NO: 515977 - DNA, 15 bp, Homo sapiens
ttatctgagtggaac

SEQ ID NO: 515978 - DNA, 15 bp, Homo sapiens
attatctgagtggaa

SEQ ID NO: 515979 - DNA, 15 bp, Homo sapiens
gattatctgagtgga

SEQ ID NO: 515980 - DNA, 15 bp, Homo sapiens
ggattatctgagtgg

SEQ ID NO: 515981 - DNA, 15 bp, Homo sapiens
tggattatctgagtg

SEQ ID NO: 515982 - DNA, 15 bp, Homo sapiens
ctggattatctgagt

SEQ ID NO: 515983 - DNA, 15 bp, Homo sapiens
cctggattatctgag

SEQ ID NO: 515984 - DNA, 15 bp, Homo sapiens
ccctggattatctga

SEQ ID NO: 515985 - DNA, 15 bp, Homo sapiens
accctggattatctg

SEQ ID NO: 515986 - DNA, 15 bp, Homo sapiens
caccctggattatct

SEQ ID NO: 515987 - DNA, 15 bp, Homo sapiens
tcaccctggattatc

SEQ ID NO: 515988 - DNA, 15 bp, Homo sapiens
atcaccctggattat

SEQ ID NO: 515989 - DNA, 15 bp, Homo sapiens
gatcaccctggatta

SEQ ID NO: 515990 - DNA, 15 bp, Homo sapiens
agatcaccctggatt

SEQ ID NO: 515991 - DNA, 15 bp, Homo sapiens
gagatcaccctggat

SEQ ID NO: 515992 - DNA, 15 bp, Homo sapiens
tgagatcaccctgga

SEQ ID NO: 515993 - DNA, 15 bp, Homo sapiens
atgagatcaccctgg

SEQ ID NO: 515994 - DNA, 15 bp, Homo sapiens
gatgagatcaccctg

SEQ ID NO: 515995 - DNA, 15 bp, Homo sapiens
agatgagatcaccct

SEQ ID NO: 515996 - DNA, 15 bp, Homo sapiens
gagatgagatcaccc

SEQ ID NO: 515997 - DNA, 15 bp, Homo sapiens
tgagatgagatcacc

SEQ ID NO: 515998 - DNA, 15 bp, Homo sapiens
ttgagatgagatcac

SEQ ID NO: 515999 - DNA, 15 bp, Homo sapiens
cttgagatgagatca

SEQ ID NO: 516000 - DNA, 15 bp, Homo sapiens
tcttgagatgagatc

SEQ ID NO: 516001 - DNA, 15 bp, Homo sapiens
atcttgagatgagat

SEQ ID NO: 516002 - DNA, 15 bp, Homo sapiens
aatcttgagatgaga

SEQ ID NO: 516003 - DNA, 15 bp, Homo sapiens
gaatcttgagatgag

SEQ ID NO: 516004 - DNA, 15 bp, Homo sapiens
agaatcttgagatga

SEQ ID NO: 516005 - DNA, 15 bp, Homo sapiens
gagaatcttgagatg

SEQ ID NO: 516006 - DNA, 15 bp, Homo sapiens
tgagaatcttgagat

SEQ ID NO: 516007 - DNA, 15 bp, Homo sapiens
ttgagaatcttgaga

SEQ ID NO: 516008 - DNA, 15 bp, Homo sapiens
attgagaatcttgag

SEQ ID NO: 516009 - DNA, 15 bp, Homo sapiens
aattgagaatcttga

SEQ ID NO: 516010 - DNA, 15 bp, Homo sapiens
taattgagaatcttg

SEQ ID NO: 516011 - DNA, 15 bp, Homo sapiens
ataattgagaatctt

SEQ ID NO: 516012 - DNA, 15 bp, Homo sapiens
tataattgagaatct

SEQ ID NO: 516013 - DNA, 15 bp, Homo sapiens
atataattgagaatc

SEQ ID NO: 516014 - DNA, 15 bp, Homo sapiens
gatataattgagaat

SEQ ID NO: 516015 - DNA, 15 bp, Homo sapiens
agatataattgagaa

SEQ ID NO: 516016 - DNA, 15 bp, Homo sapiens
cagatataattgaga

SEQ ID NO: 516017 - DNA, 15 bp, Homo sapiens
gcagatataattgag

SEQ ID NO: 516018 - DNA, 15 bp, Homo sapiens
tgcagatataattga

SEQ ID NO: 516019 - DNA, 15 bp, Homo sapiens
ttgcagatataattg

SEQ ID NO: 516020 - DNA, 15 bp, Homo sapiens
tttgcagatataatt

SEQ ID NO: 516021 - DNA, 15 bp, Homo sapiens
ctttgcagatataat

SEQ ID NO: 516022 - DNA, 15 bp, Homo sapiens
tctttgcagatataa

SEQ ID NO: 516023 - DNA, 15 bp, Homo sapiens
gtctttgcagatata

SEQ ID NO: 516024 - DNA, 15 bp, Homo sapiens
agtctttgcagatat

SEQ ID NO: 516025 - DNA, 15 bp, Homo sapiens
gagtctttgcagata

SEQ ID NO: 516026 - DNA, 15 bp, Homo sapiens
agagtctttgcagat

SEQ ID NO: 516027 - DNA, 15 bp, Homo sapiens
aagagtctttgcaga

SEQ ID NO: 516028 - DNA, 15 bp, Homo sapiens
aaagagtctttgcag

SEQ ID NO: 516029 - DNA, 15 bp, Homo sapiens
aaaagagtctttgca

SEQ ID NO: 516030 - DNA, 15 bp, Homo sapiens
aaaaagagtctttgc

SEQ ID NO: 516031 - DNA, 15 bp, Homo sapiens
gaaaaagagtctttg

SEQ ID NO: 516032 - DNA, 15 bp, Homo sapiens
ggaaaaagagtcttt

SEQ ID NO: 516033 - DNA, 15 bp, Homo sapiens
tggaaaaagagtctt

SEQ ID NO: 516034 - DNA, 15 bp, Homo sapiens
ttggaaaaagagtct

SEQ ID NO: 516035 - DNA, 15 bp, Homo sapiens
tttggaaaaagagtc

SEQ ID NO: 516036 - DNA, 15 bp, Homo sapiens
atttggaaaaagagt

SEQ ID NO: 516037 - DNA, 15 bp, Homo sapiens
tatttggaaaaagag

SEQ ID NO: 516038 - DNA, 15 bp, Homo sapiens
ttatttggaaaaaga

SEQ ID NO: 516039 - DNA, 15 bp, Homo sapiens
cttatttggaaaaag

SEQ ID NO: 516040 - DNA, 15 bp, Homo sapiens
ccttatttggaaaaa

SEQ ID NO: 516041 - DNA, 15 bp, Homo sapiens
accttatttggaaaa

SEQ ID NO: 516042 - DNA, 15 bp, Homo sapiens
taccttatttggaaa

SEQ ID NO: 516043 - DNA, 15 bp, Homo sapiens
ttaccttatttggaa

SEQ ID NO: 516044 - DNA, 15 bp, Homo sapiens
gttaccttatttgga

SEQ ID NO: 516045 - DNA, 15 bp, Homo sapiens
tgttaccttatttgg

SEQ ID NO: 516046 - DNA, 15 bp, Homo sapiens
atgttaccttatttg

SEQ ID NO: 516047 - DNA, 15 bp, Homo sapiens
aatgttaccttattt

SEQ ID NO: 516048 - DNA, 15 bp, Homo sapiens
gaatgttaccttatt

SEQ ID NO: 516049 - DNA, 15 bp, Homo sapiens
tgaatgttaccttat

SEQ ID NO: 516050 - DNA, 15 bp, Homo sapiens
ttgaatgttacctta

SEQ ID NO: 516051 - DNA, 15 bp, Homo sapiens
tttgaatgttacctt

SEQ ID NO: 516052 - DNA, 15 bp, Homo sapiens
ctttgaatgttacct

SEQ ID NO: 516053 - DNA, 15 bp, Homo sapiens
cctttgaatgttacc

SEQ ID NO: 516054 - DNA, 15 bp, Homo sapiens
acctttgaatgttac

SEQ ID NO: 516055 - DNA, 15 bp, Homo sapiens
aacctttgaatgtta

SEQ ID NO: 516056 - DNA, 15 bp, Homo sapiens
gaacctttgaatgtt

SEQ ID NO: 516057 - DNA, 15 bp, Homo sapiens
agaacctttgaatgt

SEQ ID NO: 516058 - DNA, 15 bp, Homo sapiens
tagaacctttgaatg

SEQ ID NO: 516059 - DNA, 15 bp, Homo sapiens
ctagaacctttgaat

SEQ ID NO: 516060 - DNA, 15 bp, Homo sapiens
actagaacctttgaa

SEQ ID NO: 516061 - DNA, 15 bp, Homo sapiens
cactagaacctttga

SEQ ID NO: 516062 - DNA, 15 bp, Homo sapiens
tcactagaacctttg

SEQ ID NO: 516063 - DNA, 15 bp, Homo sapiens
atcactagaaccttt

SEQ ID NO: 516064 - DNA, 15 bp, Homo sapiens
aatcactagaacctt

SEQ ID NO: 516065 - DNA, 15 bp, Homo sapiens
taatcactagaacct

SEQ ID NO: 516066 - DNA, 15 bp, Homo sapiens
ctaatcactagaacc

SEQ ID NO: 516067 - DNA, 15 bp, Homo sapiens
cctaatcactagaac

SEQ ID NO: 516068 - DNA, 15 bp, Homo sapiens
tcctaatcactagaa

SEQ ID NO: 516069 - DNA, 15 bp, Homo sapiens
atcctaatcactaga

SEQ ID NO: 516070 - DNA, 15 bp, Homo sapiens
catcctaatcactag

SEQ ID NO: 516071 - DNA, 15 bp, Homo sapiens
acatcctaatcacta

SEQ ID NO: 516072 - DNA, 15 bp, Homo sapiens
cacatcctaatcact

SEQ ID NO: 516073 - DNA, 15 bp, Homo sapiens
ccacatcctaatcac

SEQ ID NO: 516074 - DNA, 15 bp, Homo sapiens
tccacatcctaatca

SEQ ID NO: 516075 - DNA, 15 bp, Homo sapiens
gtccacatcctaatc

SEQ ID NO: 516076 - DNA, 15 bp, Homo sapiens
agtccacatcctaat

SEQ ID NO: 516077 - DNA, 15 bp, Homo sapiens
aagtccacatcctaa

SEQ ID NO: 516078 - DNA, 15 bp, Homo sapiens
taagtccacatccta

SEQ ID NO: 516079 - DNA, 15 bp, Homo sapiens
ataagtccacatcct

SEQ ID NO: 516080 - DNA, 15 bp, Homo sapiens
gataagtccacatcc

SEQ ID NO: 516081 - DNA, 15 bp, Homo sapiens
agataagtccacatc

SEQ ID NO: 516082 - DNA, 15 bp, Homo sapiens
aagataagtccacat

SEQ ID NO: 516083 - DNA, 15 bp, Homo sapiens
aaagataagtccaca

SEQ ID NO: 516084 - DNA, 15 bp, Homo sapiens
gaaagataagtccac

SEQ ID NO: 516085 - DNA, 15 bp, Homo sapiens
ggaaagataagtcca

SEQ ID NO: 516086 - DNA, 15 bp, Homo sapiens
tggaaagataagtcc

SEQ ID NO: 516087 - DNA, 15 bp, Homo sapiens
ctggaaagataagtc

SEQ ID NO: 516088 - DNA, 15 bp, Homo sapiens
tctggaaagataagt

SEQ ID NO: 516089 - DNA, 15 bp, Homo sapiens
ttctggaaagataag

SEQ ID NO: 516090 - DNA, 15 bp, Homo sapiens
cttctggaaagataa

SEQ ID NO: 516091 - DNA, 15 bp, Homo sapiens
gcttctggaaagata

SEQ ID NO: 516092 - DNA, 15 bp, Homo sapiens
ggcttctggaaagat

SEQ ID NO: 516093 - DNA, 15 bp, Homo sapiens
tggcttctggaaaga

SEQ ID NO: 516094 - DNA, 15 bp, Homo sapiens
gtggcttctggaaag

SEQ ID NO: 516095 - DNA, 15 bp, Homo sapiens
tgtggcttctggaaa

SEQ ID NO: 516096 - DNA, 15 bp, Homo sapiens
ttgtggcttctggaa

SEQ ID NO: 516097 - DNA, 15 bp, Homo sapiens
attgtggcttctgga

SEQ ID NO: 516098 - DNA, 15 bp, Homo sapiens
aattgtggcttctgg

SEQ ID NO: 516099 - DNA, 15 bp, Homo sapiens
gaattgtggcttctg

SEQ ID NO: 516100 - DNA, 15 bp, Homo sapiens
tgaattgtggcttct

SEQ ID NO: 516101 - DNA, 15 bp, Homo sapiens
ctgaattgtggcttc

SEQ ID NO: 516102 - DNA, 15 bp, Homo sapiens
actgaattgtggctt

SEQ ID NO: 516103 - DNA, 15 bp, Homo sapiens
gactgaattgtggct

SEQ ID NO: 516104 - DNA, 15 bp, Homo sapiens
ggactgaattgtggc

SEQ ID NO: 516105 - DNA, 15 bp, Homo sapiens
tggactgaattgtgg

SEQ ID NO: 516106 - DNA, 15 bp, Homo sapiens
gtggactgaattgtg

SEQ ID NO: 516107 - DNA, 15 bp, Homo sapiens
tgtggactgaattgt

SEQ ID NO: 516108 - DNA, 15 bp, Homo sapiens
gtgtggactgaattg

SEQ ID NO: 516109 - DNA, 15 bp, Homo sapiens
tgtgtggactgaatt

SEQ ID NO: 516110 - DNA, 15 bp, Homo sapiens
ctgtgtggactgaat

SEQ ID NO: 516111 - DNA, 15 bp, Homo sapiens
tctgtgtggactgaa

SEQ ID NO: 516112 - DNA, 15 bp, Homo sapiens
ctctgtgtggactga

SEQ ID NO: 516113 - DNA, 15 bp, Homo sapiens
tctctgtgtggactg

SEQ ID NO: 516114 - DNA, 15 bp, Homo sapiens
gtctctgtgtggact

SEQ ID NO: 516115 - DNA, 15 bp, Homo sapiens
ggtctctgtgtggac

SEQ ID NO: 516116 - DNA, 15 bp, Homo sapiens
aggtctctgtgtgga

SEQ ID NO: 516117 - DNA, 15 bp, Homo sapiens
aaggtctctgtgtgg

SEQ ID NO: 516118 - DNA, 15 bp, Homo sapiens
aaaggtctctgtgtg

SEQ ID NO: 516119 - DNA, 15 bp, Homo sapiens
gaaaggtctctgtgt

SEQ ID NO: 516120 - DNA, 15 bp, Homo sapiens
agaaaggtctctgtg

SEQ ID NO: 516121 - DNA, 15 bp, Homo sapiens
aagaaaggtctctgt

SEQ ID NO: 516122 - DNA, 15 bp, Homo sapiens
gaagaaaggtctctg

SEQ ID NO: 516123 - DNA, 15 bp, Homo sapiens
agaagaaaggtctct

SEQ ID NO: 516124 - DNA, 15 bp, Homo sapiens
aagaagaaaggtctc

SEQ ID NO: 516125 - DNA, 15 bp, Homo sapiens
aaagaagaaaggtct

SEQ ID NO: 516126 - DNA, 15 bp, Homo sapiens
aaaagaagaaaggtc

SEQ ID NO: 516127 - DNA, 15 bp, Homo sapiens
gaaaagaagaaaggt

SEQ ID NO: 516128 - DNA, 15 bp, Homo sapiens
agaaaagaagaaagg

SEQ ID NO: 516129 - DNA, 15 bp, Homo sapiens
tagaaaagaagaaag

SEQ ID NO: 516130 - DNA, 15 bp, Homo sapiens
ttagaaaagaagaaa

SEQ ID NO: 516131 - DNA, 15 bp, Homo sapiens
tttagaaaagaagaa

SEQ ID NO: 516132 - DNA, 15 bp, Homo sapiens
gtttagaaaagaaga

SEQ ID NO: 516133 - DNA, 15 bp, Homo sapiens
tgtttagaaaagaag

SEQ ID NO: 516134 - DNA, 15 bp, Homo sapiens
ctgtttagaaaagaa

SEQ ID NO: 516135 - DNA, 15 bp, Homo sapiens
cctgtttagaaaaga

SEQ ID NO: 516136 - DNA, 15 bp, Homo sapiens
gcctgtttagaaaag

SEQ ID NO: 516137 - DNA, 15 bp, Homo sapiens
tgcctgtttagaaaa

SEQ ID NO: 516138 - DNA, 15 bp, Homo sapiens
atgcctgtttagaaa

SEQ ID NO: 516139 - DNA, 15 bp, Homo sapiens
aatgcctgtttagaa

SEQ ID NO: 516140 - DNA, 15 bp, Homo sapiens
aaatgcctgtttaga

SEQ ID NO: 516141 - DNA, 15 bp, Homo sapiens
taaatgcctgtttag

SEQ ID NO: 516142 - DNA, 15 bp, Homo sapiens
gtaaatgcctgttta

SEQ ID NO: 516143 - DNA, 15 bp, Homo sapiens
agtaaatgcctgttt

SEQ ID NO: 516144 - DNA, 15 bp, Homo sapiens
tagtaaatgcctgtt

SEQ ID NO: 516145 - DNA, 15 bp, Homo sapiens
gtagtaaatgcctgt

SEQ ID NO: 516146 - DNA, 15 bp, Homo sapiens
agtagtaaatgcctg

SEQ ID NO: 516147 - DNA, 15 bp, Homo sapiens
gagtagtaaatgcct

SEQ ID NO: 516148 - DNA, 15 bp, Homo sapiens
tgagtagtaaatgcc

SEQ ID NO: 516149 - DNA, 15 bp, Homo sapiens
ctgagtagtaaatgc

SEQ ID NO: 516150 - DNA, 15 bp, Homo sapiens
tctgagtagtaaatg

SEQ ID NO: 516151 - DNA, 15 bp, Homo sapiens
ttctgagtagtaaat

SEQ ID NO: 516152 - DNA, 15 bp, Homo sapiens
attctgagtagtaaa

SEQ ID NO: 516153 - DNA, 15 bp, Homo sapiens
aattctgagtagtaa

SEQ ID NO: 516154 - DNA, 15 bp, Homo sapiens
aaattctgagtagta

SEQ ID NO: 516155 - DNA, 15 bp, Homo sapiens
gaaattctgagtagt

SEQ ID NO: 516156 - DNA, 15 bp, Homo sapiens
ggaaattctgagtag

SEQ ID NO: 516157 - DNA, 15 bp, Homo sapiens
gggaaattctgagta

SEQ ID NO: 516158 - DNA, 15 bp, Homo sapiens
agggaaattctgagt

SEQ ID NO: 516159 - DNA, 15 bp, Homo sapiens
gagggaaattctgag

SEQ ID NO: 516160 - DNA, 15 bp, Homo sapiens
agagggaaattctga

SEQ ID NO: 516161 - DNA, 15 bp, Homo sapiens
tagagggaaattctg

SEQ ID NO: 516162 - DNA, 15 bp, Homo sapiens
ttagagggaaattct

SEQ ID NO: 516163 - DNA, 15 bp, Homo sapiens
cttagagggaaattc

SEQ ID NO: 516164 - DNA, 15 bp, Homo sapiens
gcttagagggaaatt

SEQ ID NO: 516165 - DNA, 15 bp, Homo sapiens
tgcttagagggaaat

SEQ ID NO: 516166 - DNA, 15 bp, Homo sapiens
gtgcttagagggaaa

SEQ ID NO: 516167 - DNA, 15 bp, Homo sapiens
agtgcttagagggaa

SEQ ID NO: 516168 - DNA, 15 bp, Homo sapiens
tagtgcttagaggga

SEQ ID NO: 516169 - DNA, 15 bp, Homo sapiens
gtagtgcttagaggg

SEQ ID NO: 516170 - DNA, 15 bp, Homo sapiens
agtagtgcttagagg

SEQ ID NO: 516171 - DNA, 15 bp, Homo sapiens
aagtagtgcttagag

SEQ ID NO: 516172 - DNA, 15 bp, Homo sapiens
aaagtagtgcttaga

SEQ ID NO: 516173 - DNA, 15 bp, Homo sapiens
taaagtagtgcttag

SEQ ID NO: 516174 - DNA, 15 bp, Homo sapiens
ctaaagtagtgctta

SEQ ID NO: 516175 - DNA, 15 bp, Homo sapiens
gctaaagtagtgctt

SEQ ID NO: 516176 - DNA, 15 bp, Homo sapiens
agctaaagtagtgct

SEQ ID NO: 516177 - DNA, 15 bp, Homo sapiens
cagctaaagtagtgc

SEQ ID NO: 516178 - DNA, 15 bp, Homo sapiens
gcagctaaagtagtg

SEQ ID NO: 516179 - DNA, 15 bp, Homo sapiens
tgcagctaaagtagt

SEQ ID NO: 516180 - DNA, 15 bp, Homo sapiens
atgcagctaaagtag

SEQ ID NO: 516181 - DNA, 15 bp, Homo sapiens
gatgcagctaaagta

SEQ ID NO: 516182 - DNA, 15 bp, Homo sapiens
ggatgcagctaaagt

SEQ ID NO: 516183 - DNA, 15 bp, Homo sapiens
gggatgcagctaaag

SEQ ID NO: 516184 - DNA, 15 bp, Homo sapiens
tgggatgcagctaaa

SEQ ID NO: 516185 - DNA, 15 bp, Homo sapiens
gtgggatgcagctaa

SEQ ID NO: 516186 - DNA, 15 bp, Homo sapiens
tgtgggatgcagcta

SEQ ID NO: 516187 - DNA, 15 bp, Homo sapiens
gtgtgggatgcagct

SEQ ID NO: 516188 - DNA, 15 bp, Homo sapiens
tgtgtgggatgcagc

SEQ ID NO: 516189 - DNA, 15 bp, Homo sapiens
atgtgtgggatgcag

SEQ ID NO: 516190 - DNA, 15 bp, Homo sapiens
aatgtgtgggatgca

SEQ ID NO: 516191 - DNA, 15 bp, Homo sapiens
aaatgtgtgggatgc

SEQ ID NO: 516192 - DNA, 15 bp, Homo sapiens
aaaatgtgtgggatg

SEQ ID NO: 516193 - DNA, 15 bp, Homo sapiens
aaaaatgtgtgggat

SEQ ID NO: 516194 - DNA, 15 bp, Homo sapiens
taaaaatgtgtggga

SEQ ID NO: 516195 - DNA, 15 bp, Homo sapiens
ataaaaatgtgtggg

SEQ ID NO: 516196 - DNA, 15 bp, Homo sapiens
tataaaaatgtgtgg

SEQ ID NO: 516197 - DNA, 15 bp, Homo sapiens
ctataaaaatgtgtg

SEQ ID NO: 516198 - DNA, 15 bp, Homo sapiens
cctataaaaatgtgt

SEQ ID NO: 516199 - DNA, 15 bp, Homo sapiens
acctataaaaatgtg

SEQ ID NO: 516200 - DNA, 15 bp, Homo sapiens
aacctataaaaatgt

SEQ ID NO: 516201 - DNA, 15 bp, Homo sapiens
taacctataaaaatg

SEQ ID NO: 516202 - DNA, 15 bp, Homo sapiens
ataacctataaaaat

SEQ ID NO: 516203 - DNA, 15 bp, Homo sapiens
cataacctataaaaa

SEQ ID NO: 516204 - DNA, 15 bp, Homo sapiens
acataacctataaaa

SEQ ID NO: 516205 - DNA, 15 bp, Homo sapiens
aacataacctataaa

SEQ ID NO: 516206 - DNA, 15 bp, Homo sapiens
aaacataacctataa

SEQ ID NO: 516207 - DNA, 15 bp, Homo sapiens
aaaacataacctata

SEQ ID NO: 516208 - DNA, 15 bp, Homo sapiens
gaaaacataacctat

SEQ ID NO: 516209 - DNA, 15 bp, Homo sapiens
tgaaaacataaccta

SEQ ID NO: 516210 - DNA, 15 bp, Homo sapiens
ctgaaaacataacct

SEQ ID NO: 516211 - DNA, 15 bp, Homo sapiens
actgaaaacataacc

SEQ ID NO: 516212 - DNA, 15 bp, Homo sapiens
aactgaaaacataac

SEQ ID NO: 516213 - DNA, 15 bp, Homo sapiens
aaactgaaaacataa

SEQ ID NO: 516214 - DNA, 15 bp, Homo sapiens
gaaactgaaaacata

SEQ ID NO: 516215 - DNA, 15 bp, Homo sapiens
tgaaactgaaaacat

SEQ ID NO: 516216 - DNA, 15 bp, Homo sapiens
atgaaactgaaaaca

SEQ ID NO: 516217 - DNA, 15 bp, Homo sapiens
aatgaaactgaaaac

SEQ ID NO: 516218 - DNA, 15 bp, Homo sapiens
aaatgaaactgaaaa

SEQ ID NO: 516219 - DNA, 15 bp, Homo sapiens
aaaatgaaactgaaa

SEQ ID NO: 516220 - DNA, 15 bp, Homo sapiens
gaaaatgaaactgaa

SEQ ID NO: 516221 - DNA, 15 bp, Homo sapiens
tgaaaatgaaactga

SEQ ID NO: 516222 - DNA, 15 bp, Homo sapiens
ttgaaaatgaaactg

SEQ ID NO: 516223 - DNA, 15 bp, Homo sapiens
cttgaaaatgaaact

SEQ ID NO: 516224 - DNA, 15 bp, Homo sapiens
acttgaaaatgaaac

SEQ ID NO: 516225 - DNA, 15 bp, Homo sapiens
gacttgaaaatgaaa

SEQ ID NO: 516226 - DNA, 15 bp, Homo sapiens
tgacttgaaaatgaa

SEQ ID NO: 516227 - DNA, 15 bp, Homo sapiens
ctgacttgaaaatga

SEQ ID NO: 516228 - DNA, 15 bp, Homo sapiens
actgacttgaaaatg

SEQ ID NO: 516229 - DNA, 15 bp, Homo sapiens
cactgacttgaaaat

SEQ ID NO: 516230 - DNA, 15 bp, Homo sapiens
tcactgacttgaaaa

SEQ ID NO: 516231 - DNA, 15 bp, Homo sapiens
ttcactgacttgaaa

SEQ ID NO: 516232 - DNA, 15 bp, Homo sapiens
tttcactgacttgaa

SEQ ID NO: 516233 - DNA, 15 bp, Homo sapiens
ttttcactgacttga

SEQ ID NO: 516234 - DNA, 15 bp, Homo sapiens
gttttcactgacttg

SEQ ID NO: 516235 - DNA, 15 bp, Homo sapiens
tgttttcactgactt

SEQ ID NO: 516236 - DNA, 15 bp, Homo sapiens
atgttttcactgact

SEQ ID NO: 516237 - DNA, 15 bp, Homo sapiens
catgttttcactgac

SEQ ID NO: 516238 - DNA, 15 bp, Homo sapiens
acatgttttcactga

SEQ ID NO: 516239 - DNA, 15 bp, Homo sapiens
aacatgttttcactg

SEQ ID NO: 516240 - DNA, 15 bp, Homo sapiens
gaacatgttttcact

SEQ ID NO: 516241 - DNA, 15 bp, Homo sapiens
tgaacatgttttcac

SEQ ID NO: 516242 - DNA, 15 bp, Homo sapiens
ttgaacatgttttca

SEQ ID NO: 516243 - DNA, 15 bp, Homo sapiens
tttgaacatgttttc

SEQ ID NO: 516244 - DNA, 15 bp, Homo sapiens
atttgaacatgtttt

SEQ ID NO: 516245 - DNA, 15 bp, Homo sapiens
aatttgaacatgttt

SEQ ID NO: 516246 - DNA, 15 bp, Homo sapiens
gaatttgaacatgtt

SEQ ID NO: 516247 - DNA, 15 bp, Homo sapiens
ggaatttgaacatgt

SEQ ID NO: 516248 - DNA, 15 bp, Homo sapiens
gggaatttgaacatg

SEQ ID NO: 516249 - DNA, 15 bp, Homo sapiens
ggggaatttgaacat

SEQ ID NO: 516250 - DNA, 15 bp, Homo sapiens
aggggaatttgaaca

SEQ ID NO: 516251 - DNA, 15 bp, Homo sapiens
aaggggaatttgaac

SEQ ID NO: 516252 - DNA, 15 bp, Homo sapiens
aaaggggaatttgaa

SEQ ID NO: 516253 - DNA, 15 bp, Homo sapiens
aaaaggggaatttga

SEQ ID NO: 516254 - DNA, 15 bp, Homo sapiens
caaaaggggaatttg

SEQ ID NO: 516255 - DNA, 15 bp, Homo sapiens
tcaaaaggggaattt

SEQ ID NO: 516256 - DNA, 15 bp, Homo sapiens
atcaaaaggggaatt

SEQ ID NO: 516257 - DNA, 15 bp, Homo sapiens
catcaaaaggggaat

SEQ ID NO: 516258 - DNA, 15 bp, Homo sapiens
gcatcaaaaggggaa

SEQ ID NO: 516259 - DNA, 15 bp, Homo sapiens
ggcatcaaaagggga

SEQ ID NO: 516260 - DNA, 15 bp, Homo sapiens
aggcatcaaaagggg

SEQ ID NO: 516261 - DNA, 15 bp, Homo sapiens
aaggcatcaaaaggg

SEQ ID NO: 516262 - DNA, 15 bp, Homo sapiens
gaaggcatcaaaagg

SEQ ID NO: 516263 - DNA, 15 bp, Homo sapiens
agaaggcatcaaaag

SEQ ID NO: 516264 - DNA, 15 bp, Homo sapiens
aagaaggcatcaaaa

SEQ ID NO: 516265 - DNA, 15 bp, Homo sapiens
aaagaaggcatcaaa

SEQ ID NO: 516266 - DNA, 15 bp, Homo sapiens
caaagaaggcatcaa

SEQ ID NO: 516267 - DNA, 15 bp, Homo sapiens
tcaaagaaggcatca

SEQ ID NO: 516268 - DNA, 15 bp, Homo sapiens
gtcaaagaaggcatc

SEQ ID NO: 516269 - DNA, 15 bp, Homo sapiens
agtcaaagaaggcat

SEQ ID NO: 516270 - DNA, 15 bp, Homo sapiens
gagtcaaagaaggca

SEQ ID NO: 516271 - DNA, 15 bp, Homo sapiens
agagtcaaagaaggc

SEQ ID NO: 516272 - DNA, 15 bp, Homo sapiens
aagagtcaaagaagg

SEQ ID NO: 516273 - DNA, 15 bp, Homo sapiens
caagagtcaaagaag

SEQ ID NO: 516274 - DNA, 15 bp, Homo sapiens
tcaagagtcaaagaa

SEQ ID NO: 516275 - DNA, 15 bp, Homo sapiens
ctcaagagtcaaaga

SEQ ID NO: 516276 - DNA, 15 bp, Homo sapiens
actcaagagtcaaag

SEQ ID NO: 516277 - DNA, 15 bp, Homo sapiens
aactcaagagtcaaa

SEQ ID NO: 516278 - DNA, 15 bp, Homo sapiens
taactcaagagtcaa

SEQ ID NO: 516279 - DNA, 15 bp, Homo sapiens
ataactcaagagtca

SEQ ID NO: 516280 - DNA, 15 bp, Homo sapiens
tataactcaagagtc

SEQ ID NO: 516281 - DNA, 15 bp, Homo sapiens
ctataactcaagagt

SEQ ID NO: 516282 - DNA, 15 bp, Homo sapiens
tctataactcaagag

SEQ ID NO: 516283 - DNA, 15 bp, Homo sapiens
ctctataactcaaga

SEQ ID NO: 516284 - DNA, 15 bp, Homo sapiens
tctctataactcaag

SEQ ID NO: 516285 - DNA, 15 bp, Homo sapiens
gtctctataactcaa

SEQ ID NO: 516286 - DNA, 15 bp, Homo sapiens
agtctctataactca

SEQ ID NO: 516287 - DNA, 15 bp, Homo sapiens
aagtctctataactc

SEQ ID NO: 516288 - DNA, 15 bp, Homo sapiens
taagtctctataact

SEQ ID NO: 516289 - DNA, 15 bp, Homo sapiens
ataagtctctataac

SEQ ID NO: 516290 - DNA, 15 bp, Homo sapiens
cataagtctctataa

SEQ ID NO: 516291 - DNA, 15 bp, Homo sapiens
acataagtctctata

SEQ ID NO: 516292 - DNA, 15 bp, Homo sapiens
aacataagtctctat

SEQ ID NO: 516293 - DNA, 15 bp, Homo sapiens
gaacataagtctcta

SEQ ID NO: 516294 - DNA, 15 bp, Homo sapiens
agaacataagtctct

SEQ ID NO: 516295 - DNA, 15 bp, Homo sapiens
aagaacataagtctc

SEQ ID NO: 516296 - DNA, 15 bp, Homo sapiens
aaagaacataagtct

SEQ ID NO: 516297 - DNA, 15 bp, Homo sapiens
taaagaacataagtc

SEQ ID NO: 516298 - DNA, 15 bp, Homo sapiens
ttaaagaacataagt

SEQ ID NO: 516299 - DNA, 15 bp, Homo sapiens
attaaagaacataag

SEQ ID NO: 516300 - DNA, 15 bp, Homo sapiens
aattaaagaacataa

SEQ ID NO: 516301 - DNA, 15 bp, Homo sapiens
aaattaaagaacata

SEQ ID NO: 516302 - DNA, 15 bp, Homo sapiens
gaaattaaagaacat

SEQ ID NO: 516303 - DNA, 15 bp, Homo sapiens
agaaattaaagaaca

SEQ ID NO: 516304 - DNA, 15 bp, Homo sapiens
tagaaattaaagaac

SEQ ID NO: 516305 - DNA, 15 bp, Homo sapiens
ttagaaattaaagaa

SEQ ID NO: 516306 - DNA, 15 bp, Homo sapiens
tttagaaattaaaga

SEQ ID NO: 516307 - DNA, 15 bp, Homo sapiens
atttagaaattaaag

SEQ ID NO: 516308 - DNA, 15 bp, Homo sapiens
catttagaaattaaa

SEQ ID NO: 516309 - DNA, 15 bp, Homo sapiens
ccatttagaaattaa

SEQ ID NO: 516310 - DNA, 15 bp, Homo sapiens
accatttagaaatta

SEQ ID NO: 516311 - DNA, 15 bp, Homo sapiens
caccatttagaaatt

SEQ ID NO: 516312 - DNA, 15 bp, Homo sapiens
ccaccatttagaaat

SEQ ID NO: 516313 - DNA, 15 bp, Homo sapiens
accaccatttagaaa

SEQ ID NO: 516314 - DNA, 15 bp, Homo sapiens
aaccaccatttagaa

SEQ ID NO: 516315 - DNA, 15 bp, Homo sapiens
aaaccaccatttaga

SEQ ID NO: 516316 - DNA, 15 bp, Homo sapiens
aaaaccaccatttag

SEQ ID NO: 516317 - DNA, 15 bp, Homo sapiens
gaaaaccaccattta

SEQ ID NO: 516318 - DNA, 15 bp, Homo sapiens
agaaaaccaccattt

SEQ ID NO: 516319 - DNA, 15 bp, Homo sapiens
tagaaaaccaccatt

SEQ ID NO: 516320 - DNA, 15 bp, Homo sapiens
ctagaaaaccaccat

SEQ ID NO: 516321 - DNA, 15 bp, Homo sapiens
tctagaaaaccacca

SEQ ID NO: 516322 - DNA, 15 bp, Homo sapiens
ctctagaaaaccacc

SEQ ID NO: 516323 - DNA, 15 bp, Homo sapiens
tctctagaaaaccac

SEQ ID NO: 516324 - DNA, 15 bp, Homo sapiens
atctctagaaaacca

SEQ ID NO: 516325 - DNA, 15 bp, Homo sapiens
gatctctagaaaacc

SEQ ID NO: 516326 - DNA, 15 bp, Homo sapiens
agatctctagaaaac

SEQ ID NO: 516327 - DNA, 15 bp, Homo sapiens
aagatctctagaaaa

SEQ ID NO: 516328 - DNA, 15 bp, Homo sapiens
caagatctctagaaa

SEQ ID NO: 516329 - DNA, 15 bp, Homo sapiens
gcaagatctctagaa

SEQ ID NO: 516330 - DNA, 15 bp, Homo sapiens
agcaagatctctaga

SEQ ID NO: 516331 - DNA, 15 bp, Homo sapiens
cagcaagatctctag

SEQ ID NO: 516332 - DNA, 15 bp, Homo sapiens
gcagcaagatctcta

SEQ ID NO: 516333 - DNA, 15 bp, Homo sapiens
agcagcaagatctct

SEQ ID NO: 516334 - DNA, 15 bp, Homo sapiens
tagcagcaagatctc

SEQ ID NO: 516335 - DNA, 15 bp, Homo sapiens
atagcagcaagatct

SEQ ID NO: 516336 - DNA, 15 bp, Homo sapiens
aatagcagcaagatc

SEQ ID NO: 516337 - DNA, 15 bp, Homo sapiens
caatagcagcaagat

SEQ ID NO: 516338 - DNA, 15 bp, Homo sapiens
ccaatagcagcaaga

SEQ ID NO: 516339 - DNA, 15 bp, Homo sapiens
accaatagcagcaag

SEQ ID NO: 516340 - DNA, 15 bp, Homo sapiens
aaccaatagcagcaa

SEQ ID NO: 516341 - DNA, 15 bp, Homo sapiens
caaccaatagcagca

SEQ ID NO: 516342 - DNA, 15 bp, Homo sapiens
gcaaccaatagcagc

SEQ ID NO: 516343 - DNA, 15 bp, Homo sapiens
agcaaccaatagcag

SEQ ID NO: 516344 - DNA, 15 bp, Homo sapiens
tagcaaccaatagca

SEQ ID NO: 516345 - DNA, 15 bp, Homo sapiens
ttagcaaccaatagc

SEQ ID NO: 516346 - DNA, 15 bp, Homo sapiens
attagcaaccaatag

SEQ ID NO: 516347 - DNA, 15 bp, Homo sapiens
aattagcaaccaata

SEQ ID NO: 516348 - DNA, 15 bp, Homo sapiens
aaattagcaaccaat

SEQ ID NO: 516349 - DNA, 15 bp, Homo sapiens
caaattagcaaccaa

SEQ ID NO: 516350 - DNA, 15 bp, Homo sapiens
tcaaattagcaacca

SEQ ID NO: 516351 - DNA, 15 bp, Homo sapiens
atcaaattagcaacc

SEQ ID NO: 516352 - DNA, 15 bp, Homo sapiens
aatcaaattagcaac

SEQ ID NO: 516353 - DNA, 15 bp, Homo sapiens
gaatcaaattagcaa

SEQ ID NO: 516354 - DNA, 15 bp, Homo sapiens
agaatcaaattagca

SEQ ID NO: 516355 - DNA, 15 bp, Homo sapiens
cagaatcaaattagc

SEQ ID NO: 516356 - DNA, 15 bp, Homo sapiens
acagaatcaaattag

SEQ ID NO: 516357 - DNA, 15 bp, Homo sapiens
aacagaatcaaatta

SEQ ID NO: 516358 - DNA, 15 bp, Homo sapiens
caacagaatcaaatt

SEQ ID NO: 516359 - DNA, 15 bp, Homo sapiens
acaacagaatcaaat

SEQ ID NO: 516360 - DNA, 15 bp, Homo sapiens
cacaacagaatcaaa

SEQ ID NO: 516361 - DNA, 15 bp, Homo sapiens
tcacaacagaatcaa

SEQ ID NO: 516362 - DNA, 15 bp, Homo sapiens
atcacaacagaatca

SEQ ID NO: 516363 - DNA, 15 bp, Homo sapiens
gatcacaacagaatc

SEQ ID NO: 516364 - DNA, 15 bp, Homo sapiens
tgatcacaacagaat

SEQ ID NO: 516365 - DNA, 15 bp, Homo sapiens
ttgatcacaacagaa

SEQ ID NO: 516366 - DNA, 15 bp, Homo sapiens
cttgatcacaacaga

SEQ ID NO: 516367 - DNA, 15 bp, Homo sapiens
ccttgatcacaacag

SEQ ID NO: 516368 - DNA, 15 bp, Homo sapiens
accttgatcacaaca

SEQ ID NO: 516369 - DNA, 15 bp, Homo sapiens
taccttgatcacaac

SEQ ID NO: 516370 - DNA, 15 bp, Homo sapiens
gtaccttgatcacaa

SEQ ID NO: 516371 - DNA, 15 bp, Homo sapiens
agtaccttgatcaca

SEQ ID NO: 516372 - DNA, 15 bp, Homo sapiens
aagtaccttgatcac

SEQ ID NO: 516373 - DNA, 15 bp, Homo sapiens
caagtaccttgatca

SEQ ID NO: 516374 - DNA, 15 bp, Homo sapiens
ccaagtaccttgatc

SEQ ID NO: 516375 - DNA, 15 bp, Homo sapiens
accaagtaccttgat

SEQ ID NO: 516376 - DNA, 15 bp, Homo sapiens
taccaagtaccttga

SEQ ID NO: 516377 - DNA, 15 bp, Homo sapiens
ataccaagtaccttg

SEQ ID NO: 516378 - DNA, 15 bp, Homo sapiens
cataccaagtacctt

SEQ ID NO: 516379 - DNA, 15 bp, Homo sapiens
tcataccaagtacct

SEQ ID NO: 516380 - DNA, 15 bp, Homo sapiens
gtcataccaagtacc

SEQ ID NO: 516381 - DNA, 15 bp, Homo sapiens
tgtcataccaagtac

SEQ ID NO: 516382 - DNA, 15 bp, Homo sapiens
ctgtcataccaagta

SEQ ID NO: 516383 - DNA, 15 bp, Homo sapiens
cctgtcataccaagt

SEQ ID NO: 516384 - DNA, 15 bp, Homo sapiens
tcctgtcataccaag

SEQ ID NO: 516385 - DNA, 15 bp, Homo sapiens
ttcctgtcataccaa

SEQ ID NO: 516386 - DNA, 15 bp, Homo sapiens
attcctgtcatacca

SEQ ID NO: 516387 - DNA, 15 bp, Homo sapiens
gattcctgtcatacc

SEQ ID NO: 516388 - DNA, 15 bp, Homo sapiens
ggattcctgtcatac

SEQ ID NO: 516389 - DNA, 15 bp, Homo sapiens
aggattcctgtcata

SEQ ID NO: 516390 - DNA, 15 bp, Homo sapiens
aaggattcctgtcat

SEQ ID NO: 516391 - DNA, 15 bp, Homo sapiens
aaaggattcctgtca

SEQ ID NO: 516392 - DNA, 15 bp, Homo sapiens
gaaaggattcctgtc

SEQ ID NO: 516393 - DNA, 15 bp, Homo sapiens
tgaaaggattcctgt

SEQ ID NO: 516394 - DNA, 15 bp, Homo sapiens
ttgaaaggattcctg

SEQ ID NO: 516395 - DNA, 15 bp, Homo sapiens
tttgaaaggattcct

SEQ ID NO: 516396 - DNA, 15 bp, Homo sapiens
atttgaaaggattcc

SEQ ID NO: 516397 - DNA, 15 bp, Homo sapiens
aatttgaaaggattc

SEQ ID NO: 516398 - DNA, 15 bp, Homo sapiens
aaatttgaaaggatt

SEQ ID NO: 516399 - DNA, 15 bp, Homo sapiens
taaatttgaaaggat

SEQ ID NO: 516400 - DNA, 15 bp, Homo sapiens
ataaatttgaaagga

SEQ ID NO: 516401 - DNA, 15 bp, Homo sapiens
aataaatttgaaagg

SEQ ID NO: 516402 - DNA, 15 bp, Homo sapiens
caataaatttgaaag

SEQ ID NO: 516403 - DNA, 15 bp, Homo sapiens
tcaataaatttgaaa

SEQ ID NO: 516404 - DNA, 15 bp, Homo sapiens
ctcaataaatttgaa

SEQ ID NO: 516405 - DNA, 15 bp, Homo sapiens
cctcaataaatttga

SEQ ID NO: 516406 - DNA, 15 bp, Homo sapiens
gcctcaataaatttg

SEQ ID NO: 516407 - DNA, 15 bp, Homo sapiens
agcctcaataaattt

SEQ ID NO: 516408 - DNA, 15 bp, Homo sapiens
aagcctcaataaatt

SEQ ID NO: 516409 - DNA, 15 bp, Homo sapiens
caagcctcaataaat

SEQ ID NO: 516410 - DNA, 15 bp, Homo sapiens
acaagcctcaataaa

SEQ ID NO: 516411 - DNA, 15 bp, Homo sapiens
aacaagcctcaataa

SEQ ID NO: 516412 - DNA, 15 bp, Homo sapiens
aaacaagcctcaata

SEQ ID NO: 516413 - DNA, 15 bp, Homo sapiens
taaacaagcctcaat

SEQ ID NO: 516414 - DNA, 15 bp, Homo sapiens
ttaaacaagcctcaa

SEQ ID NO: 516415 - DNA, 15 bp, Homo sapiens
attaaacaagcctca

SEQ ID NO: 516416 - DNA, 15 bp, Homo sapiens
cattaaacaagcctc

SEQ ID NO: 516417 - DNA, 15 bp, Homo sapiens
ccattaaacaagcct

SEQ ID NO: 516418 - DNA, 15 bp, Homo sapiens
gccattaaacaagcc

SEQ ID NO: 516419 - DNA, 15 bp, Homo sapiens
ggccattaaacaagc

SEQ ID NO: 516420 - DNA, 15 bp, Homo sapiens
gggccattaaacaag

SEQ ID NO: 516421 - DNA, 15 bp, Homo sapiens
tgggccattaaacaa

SEQ ID NO: 516422 - DNA, 15 bp, Homo sapiens
ctgggccattaaaca

SEQ ID NO: 516423 - DNA, 15 bp, Homo sapiens
tctgggccattaaac

SEQ ID NO: 516424 - DNA, 15 bp, Homo sapiens
ttctgggccattaaa

SEQ ID NO: 516425 - DNA, 15 bp, Homo sapiens
tttctgggccattaa

SEQ ID NO: 516426 - DNA, 15 bp, Homo sapiens
ttttctgggccatta

SEQ ID NO: 516427 - DNA, 15 bp, Homo sapiens
attttctgggccatt

SEQ ID NO: 516428 - DNA, 15 bp, Homo sapiens
cattttctgggccat

SEQ ID NO: 516429 - DNA, 15 bp, Homo sapiens
tcattttctgggcca

SEQ ID NO: 516430 - DNA, 15 bp, Homo sapiens
atcattttctgggcc

SEQ ID NO: 516431 - DNA, 15 bp, Homo sapiens
gatcattttctgggc

SEQ ID NO: 516432 - DNA, 15 bp, Homo sapiens
agatcattttctggg

SEQ ID NO: 516433 - DNA, 15 bp, Homo sapiens
cagatcattttctgg

SEQ ID NO: 516434 - DNA, 15 bp, Homo sapiens
acagatcattttctg

SEQ ID NO: 516435 - DNA, 15 bp, Homo sapiens
gacagatcattttct

SEQ ID NO: 516436 - DNA, 15 bp, Homo sapiens
agacagatcattttc

SEQ ID NO: 516437 - DNA, 15 bp, Homo sapiens
aagacagatcatttt

SEQ ID NO: 516438 - DNA, 15 bp, Homo sapiens
caagacagatcattt

SEQ ID NO: 516439 - DNA, 15 bp, Homo sapiens
ccaagacagatcatt

SEQ ID NO: 516440 - DNA, 15 bp, Homo sapiens
accaagacagatcat

SEQ ID NO: 516441 - DNA, 15 bp, Homo sapiens
caccaagacagatca

SEQ ID NO: 516442 - DNA, 15 bp, Homo sapiens
ccaccaagacagatc

SEQ ID NO: 516443 - DNA, 15 bp, Homo sapiens
tccaccaagacagat

SEQ ID NO: 516444 - DNA, 15 bp, Homo sapiens
atccaccaagacaga

SEQ ID NO: 516445 - DNA, 15 bp, Homo sapiens
catccaccaagacag

SEQ ID NO: 516446 - DNA, 15 bp, Homo sapiens
acatccaccaagaca

SEQ ID NO: 516447 - DNA, 15 bp, Homo sapiens
tacatccaccaagac

SEQ ID NO: 516448 - DNA, 15 bp, Homo sapiens
atacatccaccaaga

SEQ ID NO: 516449 - DNA, 15 bp, Homo sapiens
tatacatccaccaag

SEQ ID NO: 516450 - DNA, 15 bp, Homo sapiens
atatacatccaccaa

SEQ ID NO: 516451 - DNA, 15 bp, Homo sapiens
catatacatccacca

SEQ ID NO: 516452 - DNA, 15 bp, Homo sapiens
gcatatacatccacc

SEQ ID NO: 516453 - DNA, 15 bp, Homo sapiens
tgcatatacatccac

SEQ ID NO: 516454 - DNA, 15 bp, Homo sapiens
gtgcatatacatcca

SEQ ID NO: 516455 - DNA, 15 bp, Homo sapiens
tgtgcatatacatcc

SEQ ID NO: 516456 - DNA, 15 bp, Homo sapiens
atgtgcatatacatc

SEQ ID NO: 516457 - DNA, 15 bp, Homo sapiens
aatgtgcatatacat

SEQ ID NO: 516458 - DNA, 15 bp, Homo sapiens
aaatgtgcatataca

SEQ ID NO: 516459 - DNA, 15 bp, Homo sapiens
caaatgtgcatatac

SEQ ID NO: 516460 - DNA, 15 bp, Homo sapiens
tcaaatgtgcatata

SEQ ID NO: 516461 - DNA, 15 bp, Homo sapiens
ttcaaatgtgcatat

SEQ ID NO: 516462 - DNA, 15 bp, Homo sapiens
tttcaaatgtgcata

SEQ ID NO: 516463 - DNA, 15 bp, Homo sapiens
ctttcaaatgtgcat

SEQ ID NO: 516464 - DNA, 15 bp, Homo sapiens
cctttcaaatgtgca

SEQ ID NO: 516465 - DNA, 15 bp, Homo sapiens
tcctttcaaatgtgc

SEQ ID NO: 516466 - DNA, 15 bp, Homo sapiens
ttcctttcaaatgtg

SEQ ID NO: 516467 - DNA, 15 bp, Homo sapiens
attcctttcaaatgt

SEQ ID NO: 516468 - DNA, 15 bp, Homo sapiens
cattcctttcaaatg

SEQ ID NO: 516469 - DNA, 15 bp, Homo sapiens
gcattcctttcaaat

SEQ ID NO: 516470 - DNA, 15 bp, Homo sapiens
agcattcctttcaaa

SEQ ID NO: 516471 - DNA, 15 bp, Homo sapiens
aagcattcctttcaa

SEQ ID NO: 516472 - DNA, 15 bp, Homo sapiens
caagcattcctttca

SEQ ID NO: 516473 - DNA, 15 bp, Homo sapiens
gcaagcattcctttc

SEQ ID NO: 516474 - DNA, 15 bp, Homo sapiens
agcaagcattccttt

SEQ ID NO: 516475 - DNA, 15 bp, Homo sapiens
gagcaagcattcctt

SEQ ID NO: 516476 - DNA, 15 bp, Homo sapiens
agagcaagcattcct

SEQ ID NO: 516477 - DNA, 15 bp, Homo sapiens
cagagcaagcattcc

SEQ ID NO: 516478 - DNA, 15 bp, Homo sapiens
gcagagcaagcattc

SEQ ID NO: 516479 - DNA, 15 bp, Homo sapiens
agcagagcaagcatt

SEQ ID NO: 516480 - DNA, 15 bp, Homo sapiens
cagcagagcaagcat

SEQ ID NO: 516481 - DNA, 15 bp, Homo sapiens
acagcagagcaagca

SEQ ID NO: 516482 - DNA, 15 bp, Homo sapiens
aacagcagagcaagc

SEQ ID NO: 516483 - DNA, 15 bp, Homo sapiens
caacagcagagcaag

SEQ ID NO: 516484 - DNA, 15 bp, Homo sapiens
acaacagcagagcaa

SEQ ID NO: 516485 - DNA, 15 bp, Homo sapiens
aacaacagcagagca

SEQ ID NO: 516486 - DNA, 15 bp, Homo sapiens
caacaacagcagagc

SEQ ID NO: 516487 - DNA, 15 bp, Homo sapiens
tcaacaacagcagag

SEQ ID NO: 516488 - DNA, 15 bp, Homo sapiens
ctcaacaacagcaga

SEQ ID NO: 516489 - DNA, 15 bp, Homo sapiens
actcaacaacagcag

SEQ ID NO: 516490 - DNA, 15 bp, Homo sapiens
cactcaacaacagca

SEQ ID NO: 516491 - DNA, 15 bp, Homo sapiens
ccactcaacaacagc

SEQ ID NO: 516492 - DNA, 15 bp, Homo sapiens
tccactcaacaacag

SEQ ID NO: 516493 - DNA, 15 bp, Homo sapiens
ctccactcaacaaca

SEQ ID NO: 516494 - DNA, 15 bp, Homo sapiens
actccactcaacaac

SEQ ID NO: 516495 - DNA, 15 bp, Homo sapiens
cactccactcaacaa

SEQ ID NO: 516496 - DNA, 15 bp, Homo sapiens
acactccactcaaca

SEQ ID NO: 516497 - DNA, 15 bp, Homo sapiens
cacactccactcaac

SEQ ID NO: 516498 - DNA, 15 bp, Homo sapiens
acacactccactcaa

SEQ ID NO: 516499 - DNA, 15 bp, Homo sapiens
tacacactccactca

SEQ ID NO: 516500 - DNA, 15 bp, Homo sapiens
atacacactccactc

SEQ ID NO: 516501 - DNA, 15 bp, Homo sapiens
tatacacactccact

SEQ ID NO: 516502 - DNA, 15 bp, Homo sapiens
ttatacacactccac

SEQ ID NO: 516503 - DNA, 15 bp, Homo sapiens
tttatacacactcca

SEQ ID NO: 516504 - DNA, 15 bp, Homo sapiens
atttatacacactcc

SEQ ID NO: 516505 - DNA, 15 bp, Homo sapiens
catttatacacactc

SEQ ID NO: 516506 - DNA, 15 bp, Homo sapiens
acatttatacacact

SEQ ID NO: 516507 - DNA, 15 bp, Homo sapiens
gacatttatacacac

SEQ ID NO: 516508 - DNA, 15 bp, Homo sapiens
tgacatttatacaca

SEQ ID NO: 516509 - DNA, 15 bp, Homo sapiens
ttgacatttatacac

SEQ ID NO: 516510 - DNA, 15 bp, Homo sapiens
attgacatttataca

SEQ ID NO: 516511 - DNA, 15 bp, Homo sapiens
aattgacatttatac

SEQ ID NO: 516512 - DNA, 15 bp, Homo sapiens
gaattgacatttata

SEQ ID NO: 516513 - DNA, 15 bp, Homo sapiens
cgaattgacatttat

SEQ ID NO: 516514 - DNA, 15 bp, Homo sapiens
ccgaattgacattta

SEQ ID NO: 516515 - DNA, 15 bp, Homo sapiens
accgaattgacattt

SEQ ID NO: 516516 - DNA, 15 bp, Homo sapiens
gaccgaattgacatt

SEQ ID NO: 516517 - DNA, 15 bp, Homo sapiens
tgaccgaattgacat

SEQ ID NO: 516518 - DNA, 15 bp, Homo sapiens
ttgaccgaattgaca

SEQ ID NO: 516519 - DNA, 15 bp, Homo sapiens
gttgaccgaattgac

SEQ ID NO: 516520 - DNA, 15 bp, Homo sapiens
agttgaccgaattga

SEQ ID NO: 516521 - DNA, 15 bp, Homo sapiens
aagttgaccgaattg

SEQ ID NO: 516522 - DNA, 15 bp, Homo sapiens
caagttgaccgaatt

SEQ ID NO: 516523 - DNA, 15 bp, Homo sapiens
acaagttgaccgaat

SEQ ID NO: 516524 - DNA, 15 bp, Homo sapiens
aacaagttgaccgaa

SEQ ID NO: 516525 - DNA, 15 bp, Homo sapiens
gaacaagttgaccga

SEQ ID NO: 516526 - DNA, 15 bp, Homo sapiens
ggaacaagttgaccg

SEQ ID NO: 516527 - DNA, 15 bp, Homo sapiens
tggaacaagttgacc

SEQ ID NO: 516528 - DNA, 15 bp, Homo sapiens
atggaacaagttgac

SEQ ID NO: 516529 - DNA, 15 bp, Homo sapiens
tatggaacaagttga

SEQ ID NO: 516530 - DNA, 15 bp, Homo sapiens
ctatggaacaagttg

SEQ ID NO: 516531 - DNA, 15 bp, Homo sapiens
actatggaacaagtt

SEQ ID NO: 516532 - DNA, 15 bp, Homo sapiens
cactatggaacaagt

SEQ ID NO: 516533 - DNA, 15 bp, Homo sapiens
acactatggaacaag

SEQ ID NO: 516534 - DNA, 15 bp, Homo sapiens
aacactatggaacaa

SEQ ID NO: 516535 - DNA, 15 bp, Homo sapiens
taacactatggaaca

SEQ ID NO: 516536 - DNA, 15 bp, Homo sapiens
ataacactatggaac

SEQ ID NO: 516537 - DNA, 15 bp, Homo sapiens
aataacactatggaa

SEQ ID NO: 516538 - DNA, 15 bp, Homo sapiens
gaataacactatgga

SEQ ID NO: 516539 - DNA, 15 bp, Homo sapiens
tgaataacactatgg

SEQ ID NO: 516540 - DNA, 15 bp, Homo sapiens
ttgaataacactatg

SEQ ID NO: 516541 - DNA, 15 bp, Homo sapiens
cttgaataacactat

SEQ ID NO: 516542 - DNA, 15 bp, Homo sapiens
acttgaataacacta

SEQ ID NO: 516543 - DNA, 15 bp, Homo sapiens
gacttgaataacact

SEQ ID NO: 516544 - DNA, 15 bp, Homo sapiens
agacttgaataacac

SEQ ID NO: 516545 - DNA, 15 bp, Homo sapiens
aagacttgaataaca

SEQ ID NO: 516546 - DNA, 15 bp, Homo sapiens
gaagacttgaataac

SEQ ID NO: 516547 - DNA, 15 bp, Homo sapiens
ggaagacttgaataa

SEQ ID NO: 516548 - DNA, 15 bp, Homo sapiens
tggaagacttgaata

SEQ ID NO: 516549 - DNA, 15 bp, Homo sapiens
atggaagacttgaat

SEQ ID NO: 516550 - DNA, 15 bp, Homo sapiens
catggaagacttgaa

SEQ ID NO: 516551 - DNA, 15 bp, Homo sapiens
gcatggaagacttga

SEQ ID NO: 516552 - DNA, 15 bp, Homo sapiens
ggcatggaagacttg

SEQ ID NO: 516553 - DNA, 15 bp, Homo sapiens
gggcatggaagactt

SEQ ID NO: 516554 - DNA, 15 bp, Homo sapiens
agggcatggaagact

SEQ ID NO: 516555 - DNA, 15 bp, Homo sapiens
aagggcatggaagac

SEQ ID NO: 516556 - DNA, 15 bp, Homo sapiens
gaagggcatggaaga

SEQ ID NO: 516557 - DNA, 15 bp, Homo sapiens
agaagggcatggaag

SEQ ID NO: 516558 - DNA, 15 bp, Homo sapiens
aagaagggcatggaa

SEQ ID NO: 516559 - DNA, 15 bp, Homo sapiens
caagaagggcatgga

SEQ ID NO: 516560 - DNA, 15 bp, Homo sapiens
acaagaagggcatgg

SEQ ID NO: 516561 - DNA, 15 bp, Homo sapiens
aacaagaagggcatg

SEQ ID NO: 516562 - DNA, 15 bp, Homo sapiens
taacaagaagggcat

SEQ ID NO: 516563 - DNA, 15 bp, Homo sapiens
ataacaagaagggca

SEQ ID NO: 516564 - DNA, 15 bp, Homo sapiens
aataacaagaagggc

SEQ ID NO: 516565 - DNA, 15 bp, Homo sapiens
gaataacaagaaggg

SEQ ID NO: 516566 - DNA, 15 bp, Homo sapiens
agaataacaagaagg

SEQ ID NO: 516567 - DNA, 15 bp, Homo sapiens
cagaataacaagaag

SEQ ID NO: 516568 - DNA, 15 bp, Homo sapiens
acagaataacaagaa

SEQ ID NO: 516569 - DNA, 15 bp, Homo sapiens
gacagaataacaaga

SEQ ID NO: 516570 - DNA, 15 bp, Homo sapiens
agacagaataacaag

SEQ ID NO: 516571 - DNA, 15 bp, Homo sapiens
tagacagaataacaa

SEQ ID NO: 516572 - DNA, 15 bp, Homo sapiens
gtagacagaataaca

SEQ ID NO: 516573 - DNA, 15 bp, Homo sapiens
agtagacagaataac

SEQ ID NO: 516574 - DNA, 15 bp, Homo sapiens
aagtagacagaataa

SEQ ID NO: 516575 - DNA, 15 bp, Homo sapiens
taagtagacagaata

SEQ ID NO: 516576 - DNA, 15 bp, Homo sapiens
ataagtagacagaat

SEQ ID NO: 516577 - DNA, 15 bp, Homo sapiens
aataagtagacagaa

SEQ ID NO: 516578 - DNA, 15 bp, Homo sapiens
caataagtagacaga

SEQ ID NO: 516579 - DNA, 15 bp, Homo sapiens
tcaataagtagacag

SEQ ID NO: 516580 - DNA, 15 bp, Homo sapiens
ctcaataagtagaca

SEQ ID NO: 516581 - DNA, 15 bp, Homo sapiens
tctcaataagtagac

SEQ ID NO: 516582 - DNA, 15 bp, Homo sapiens
ctctcaataagtaga

SEQ ID NO: 516583 - DNA, 15 bp, Homo sapiens
tctctcaataagtag

SEQ ID NO: 516584 - DNA, 15 bp, Homo sapiens
ctctctcaataagta

SEQ ID NO: 516585 - DNA, 15 bp, Homo sapiens
tctctctcaataagt

SEQ ID NO: 516586 - DNA, 15 bp, Homo sapiens
gtctctctcaataag

SEQ ID NO: 516587 - DNA, 15 bp, Homo sapiens
tgtctctctcaataa

SEQ ID NO: 516588 - DNA, 15 bp, Homo sapiens
atgtctctctcaata

SEQ ID NO: 516589 - DNA, 15 bp, Homo sapiens
catgtctctctcaat

SEQ ID NO: 516590 - DNA, 15 bp, Homo sapiens
acatgtctctctcaa

SEQ ID NO: 516591 - DNA, 15 bp, Homo sapiens
aacatgtctctctca

SEQ ID NO: 516592 - DNA, 15 bp, Homo sapiens
caacatgtctctctc

SEQ ID NO: 516593 - DNA, 15 bp, Homo sapiens
tcaacatgtctctct

SEQ ID NO: 516594 - DNA, 15 bp, Homo sapiens
ttcaacatgtctctc

SEQ ID NO: 516595 - DNA, 15 bp, Homo sapiens
tttcaacatgtctct

SEQ ID NO: 516596 - DNA, 15 bp, Homo sapiens
atttcaacatgtctc

SEQ ID NO: 516597 - DNA, 15 bp, Homo sapiens
gatttcaacatgtct

SEQ ID NO: 516598 - DNA, 15 bp, Homo sapiens
agatttcaacatgtc

SEQ ID NO: 516599 - DNA, 15 bp, Homo sapiens
aagatttcaacatgt

SEQ ID NO: 516600 - DNA, 15 bp, Homo sapiens
gaagatttcaacatg

SEQ ID NO: 516601 - DNA, 15 bp, Homo sapiens
tgaagatttcaacat

SEQ ID NO: 516602 - DNA, 15 bp, Homo sapiens
atgaagatttcaaca

SEQ ID NO: 516603 - DNA, 15 bp, Homo sapiens
gatgaagatttcaac

SEQ ID NO: 516604 - DNA, 15 bp, Homo sapiens
agatgaagatttcaa

SEQ ID NO: 516605 - DNA, 15 bp, Homo sapiens
tagatgaagatttca

SEQ ID NO: 516606 - DNA, 15 bp, Homo sapiens
atagatgaagatttc

SEQ ID NO: 516607 - DNA, 15 bp, Homo sapiens
tatagatgaagattt

SEQ ID NO: 516608 - DNA, 15 bp, Homo sapiens
ttatagatgaagatt

SEQ ID NO: 516609 - DNA, 15 bp, Homo sapiens
attatagatgaagat

SEQ ID NO: 516610 - DNA, 15 bp, Homo sapiens
aattatagatgaaga

SEQ ID NO: 516611 - DNA, 15 bp, Homo sapiens
caattatagatgaag

SEQ ID NO: 516612 - DNA, 15 bp, Homo sapiens
acaattatagatgaa

SEQ ID NO: 516613 - DNA, 15 bp, Homo sapiens
cacaattatagatga

SEQ ID NO: 516614 - DNA, 15 bp, Homo sapiens
tcacaattatagatg

SEQ ID NO: 516615 - DNA, 15 bp, Homo sapiens
ctcacaattatagat

SEQ ID NO: 516616 - DNA, 15 bp, Homo sapiens
actcacaattataga

SEQ ID NO: 516617 - DNA, 15 bp, Homo sapiens
aactcacaattatag

SEQ ID NO: 516618 - DNA, 15 bp, Homo sapiens
aaactcacaattata

SEQ ID NO: 516619 - DNA, 15 bp, Homo sapiens
gaaactcacaattat

SEQ ID NO: 516620 - DNA, 15 bp, Homo sapiens
tgaaactcacaatta

SEQ ID NO: 516621 - DNA, 15 bp, Homo sapiens
gtgaaactcacaatt

SEQ ID NO: 516622 - DNA, 15 bp, Homo sapiens
agtgaaactcacaat

SEQ ID NO: 516623 - DNA, 15 bp, Homo sapiens
tagtgaaactcacaa

SEQ ID NO: 516624 - DNA, 15 bp, Homo sapiens
atagtgaaactcaca

SEQ ID NO: 516625 - DNA, 15 bp, Homo sapiens
aatagtgaaactcac

SEQ ID NO: 516626 - DNA, 15 bp, Homo sapiens
gaatagtgaaactca

SEQ ID NO: 516627 - DNA, 15 bp, Homo sapiens
agaatagtgaaactc

SEQ ID NO: 516628 - DNA, 15 bp, Homo sapiens
gagaatagtgaaact

SEQ ID NO: 516629 - DNA, 15 bp, Homo sapiens
ggagaatagtgaaac

SEQ ID NO: 516630 - DNA, 15 bp, Homo sapiens
aggagaatagtgaaa

SEQ ID NO: 516631 - DNA, 15 bp, Homo sapiens
aaggagaatagtgaa

SEQ ID NO: 516632 - DNA, 15 bp, Homo sapiens
taaggagaatagtga

SEQ ID NO: 516633 - DNA, 15 bp, Homo sapiens
ataaggagaatagtg

SEQ ID NO: 516634 - DNA, 15 bp, Homo sapiens
tataaggagaatagt

SEQ ID NO: 516635 - DNA, 15 bp, Homo sapiens
ctataaggagaatag

SEQ ID NO: 516636 - DNA, 15 bp, Homo sapiens
actataaggagaata

SEQ ID NO: 516637 - DNA, 15 bp, Homo sapiens
aactataaggagaat

SEQ ID NO: 516638 - DNA, 15 bp, Homo sapiens
gaactataaggagaa

SEQ ID NO: 516639 - DNA, 15 bp, Homo sapiens
agaactataaggaga

SEQ ID NO: 516640 - DNA, 15 bp, Homo sapiens
tagaactataaggag

SEQ ID NO: 516641 - DNA, 15 bp, Homo sapiens
atagaactataagga

SEQ ID NO: 516642 - DNA, 15 bp, Homo sapiens
gatagaactataagg

SEQ ID NO: 516643 - DNA, 15 bp, Homo sapiens
tgatagaactataag

SEQ ID NO: 516644 - DNA, 15 bp, Homo sapiens
ctgatagaactataa

SEQ ID NO: 516645 - DNA, 15 bp, Homo sapiens
gctgatagaactata

SEQ ID NO: 516646 - DNA, 15 bp, Homo sapiens
agctgatagaactat

SEQ ID NO: 516647 - DNA, 15 bp, Homo sapiens
aagctgatagaacta

SEQ ID NO: 516648 - DNA, 15 bp, Homo sapiens
aaagctgatagaact

SEQ ID NO: 516649 - DNA, 15 bp, Homo sapiens
aaaagctgatagaac

SEQ ID NO: 516650 - DNA, 15 bp, Homo sapiens
caaaagctgatagaa

SEQ ID NO: 516651 - DNA, 15 bp, Homo sapiens
gcaaaagctgataga

SEQ ID NO: 516652 - DNA, 15 bp, Homo sapiens
agcaaaagctgatag

SEQ ID NO: 516653 - DNA, 15 bp, Homo sapiens
aagcaaaagctgata

SEQ ID NO: 516654 - DNA, 15 bp, Homo sapiens
gaagcaaaagctgat

SEQ ID NO: 516655 - DNA, 15 bp, Homo sapiens
tgaagcaaaagctga

SEQ ID NO: 516656 - DNA, 15 bp, Homo sapiens
atgaagcaaaagctg

SEQ ID NO: 516657 - DNA, 15 bp, Homo sapiens
catgaagcaaaagct

SEQ ID NO: 516658 - DNA, 15 bp, Homo sapiens
acatgaagcaaaagc

SEQ ID NO: 516659 - DNA, 15 bp, Homo sapiens
tacatgaagcaaaag

SEQ ID NO: 516660 - DNA, 15 bp, Homo sapiens
atacatgaagcaaaa

SEQ ID NO: 516661 - DNA, 15 bp, Homo sapiens
aatacatgaagcaaa

SEQ ID NO: 516662 - DNA, 15 bp, Homo sapiens
aaatacatgaagcaa

SEQ ID NO: 516663 - DNA, 15 bp, Homo sapiens
aaaatacatgaagca

SEQ ID NO: 516664 - DNA, 15 bp, Homo sapiens
caaaatacatgaagc

SEQ ID NO: 516665 - DNA, 15 bp, Homo sapiens
tcaaaatacatgaag

SEQ ID NO: 516666 - DNA, 15 bp, Homo sapiens
ttcaaaatacatgaa

SEQ ID NO: 516667 - DNA, 15 bp, Homo sapiens
cttcaaaatacatga

SEQ ID NO: 516668 - DNA, 15 bp, Homo sapiens
tcttcaaaatacatg

SEQ ID NO: 516669 - DNA, 15 bp, Homo sapiens
atcttcaaaatacat

SEQ ID NO: 516670 - DNA, 15 bp, Homo sapiens
gatcttcaaaataca

SEQ ID NO: 516671 - DNA, 15 bp, Homo sapiens
agatcttcaaaatac

SEQ ID NO: 516672 - DNA, 15 bp, Homo sapiens
cagatcttcaaaata

SEQ ID NO: 516673 - DNA, 15 bp, Homo sapiens
acagatcttcaaaat

SEQ ID NO: 516674 - DNA, 15 bp, Homo sapiens
aacagatcttcaaaa

SEQ ID NO: 516675 - DNA, 15 bp, Homo sapiens
taacagatcttcaaa

SEQ ID NO: 516676 - DNA, 15 bp, Homo sapiens
gtaacagatcttcaa

SEQ ID NO: 516677 - DNA, 15 bp, Homo sapiens
agtaacagatcttca

SEQ ID NO: 516678 - DNA, 15 bp, Homo sapiens
tagtaacagatcttc

SEQ ID NO: 516679 - DNA, 15 bp, Homo sapiens
ctagtaacagatctt

SEQ ID NO: 516680 - DNA, 15 bp, Homo sapiens
cctagtaacagatct

SEQ ID NO: 516681 - DNA, 15 bp, Homo sapiens
acctagtaacagatc

SEQ ID NO: 516682 - DNA, 15 bp, Homo sapiens
aacctagtaacagat

SEQ ID NO: 516683 - DNA, 15 bp, Homo sapiens
gaacctagtaacaga

SEQ ID NO: 516684 - DNA, 15 bp, Homo sapiens
tgaacctagtaacag

SEQ ID NO: 516685 - DNA, 15 bp, Homo sapiens
atgaacctagtaaca

SEQ ID NO: 516686 - DNA, 15 bp, Homo sapiens
tatgaacctagtaac

SEQ ID NO: 516687 - DNA, 15 bp, Homo sapiens
ttatgaacctagtaa

SEQ ID NO: 516688 - DNA, 15 bp, Homo sapiens
tttatgaacctagta

SEQ ID NO: 516689 - DNA, 15 bp, Homo sapiens
gtttatgaacctagt

SEQ ID NO: 516690 - DNA, 15 bp, Homo sapiens
tgtttatgaacctag

SEQ ID NO: 516691 - DNA, 15 bp, Homo sapiens
gtgtttatgaaccta

SEQ ID NO: 516692 - DNA, 15 bp, Homo sapiens
agtgtttatgaacct

SEQ ID NO: 516693 - DNA, 15 bp, Homo sapiens
aagtgtttatgaacc

SEQ ID NO: 516694 - DNA, 15 bp, Homo sapiens
taagtgtttatgaac

SEQ ID NO: 516695 - DNA, 15 bp, Homo sapiens
ctaagtgtttatgaa

SEQ ID NO: 516696 - DNA, 15 bp, Homo sapiens
cctaagtgtttatga

SEQ ID NO: 516697 - DNA, 15 bp, Homo sapiens
tcctaagtgtttatg

SEQ ID NO: 516698 - DNA, 15 bp, Homo sapiens
atcctaagtgtttat

SEQ ID NO: 516699 - DNA, 15 bp, Homo sapiens
aatcctaagtgttta

SEQ ID NO: 516700 - DNA, 15 bp, Homo sapiens
caatcctaagtgttt

SEQ ID NO: 516701 - DNA, 15 bp, Homo sapiens
acaatcctaagtgtt

SEQ ID NO: 516702 - DNA, 15 bp, Homo sapiens
aacaatcctaagtgt

SEQ ID NO: 516703 - DNA, 15 bp, Homo sapiens
taacaatcctaagtg

SEQ ID NO: 516704 - DNA, 15 bp, Homo sapiens
ataacaatcctaagt

SEQ ID NO: 516705 - DNA, 15 bp, Homo sapiens
cataacaatcctaag

SEQ ID NO: 516706 - DNA, 15 bp, Homo sapiens
acataacaatcctaa

SEQ ID NO: 516707 - DNA, 15 bp, Homo sapiens
gacataacaatccta

SEQ ID NO: 516708 - DNA, 15 bp, Homo sapiens
ggacataacaatcct

SEQ ID NO: 516709 - DNA, 15 bp, Homo sapiens
aggacataacaatcc

SEQ ID NO: 516710 - DNA, 15 bp, Homo sapiens
gaggacataacaatc

SEQ ID NO: 516711 - DNA, 15 bp, Homo sapiens
agaggacataacaat

SEQ ID NO: 516712 - DNA, 15 bp, Homo sapiens
aagaggacataacaa

SEQ ID NO: 516713 - DNA, 15 bp, Homo sapiens
caagaggacataaca

SEQ ID NO: 516714 - DNA, 15 bp, Homo sapiens
tcaagaggacataac

SEQ ID NO: 516715 - DNA, 15 bp, Homo sapiens
ttcaagaggacataa

SEQ ID NO: 516716 - DNA, 15 bp, Homo sapiens
attcaagaggacata

SEQ ID NO: 516717 - DNA, 15 bp, Homo sapiens
aattcaagaggacat

SEQ ID NO: 516718 - DNA, 15 bp, Homo sapiens
gaattcaagaggaca

SEQ ID NO: 516719 - DNA, 15 bp, Homo sapiens
tgaattcaagaggac

SEQ ID NO: 516720 - DNA, 15 bp, Homo sapiens
ttgaattcaagagga

SEQ ID NO: 516721 - DNA, 15 bp, Homo sapiens
attgaattcaagagg

SEQ ID NO: 516722 - DNA, 15 bp, Homo sapiens
tattgaattcaagag

SEQ ID NO: 516723 - DNA, 15 bp, Homo sapiens
atattgaattcaaga

SEQ ID NO: 516724 - DNA, 15 bp, Homo sapiens
aatattgaattcaag

SEQ ID NO: 516725 - DNA, 15 bp, Homo sapiens
aaatattgaattcaa

SEQ ID NO: 516726 - DNA, 15 bp, Homo sapiens
aaaatattgaattca

SEQ ID NO: 516727 - DNA, 15 bp, Homo sapiens
taaaatattgaattc

SEQ ID NO: 516728 - DNA, 15 bp, Homo sapiens
ataaaatattgaatt

SEQ ID NO: 516729 - DNA, 15 bp, Homo sapiens
gataaaatattgaat

SEQ ID NO: 516730 - DNA, 15 bp, Homo sapiens
tgataaaatattgaa

SEQ ID NO: 516731 - DNA, 15 bp, Homo sapiens
atgataaaatattga

SEQ ID NO: 516732 - DNA, 15 bp, Homo sapiens
aatgataaaatattg

SEQ ID NO: 516733 - DNA, 15 bp, Homo sapiens
taatgataaaatatt

SEQ ID NO: 516734 - DNA, 15 bp, Homo sapiens
ataatgataaaatat

SEQ ID NO: 516735 - DNA, 15 bp, Homo sapiens
cataatgataaaata

SEQ ID NO: 516736 - DNA, 15 bp, Homo sapiens
tcataatgataaaat

SEQ ID NO: 516737 - DNA, 15 bp, Homo sapiens
ttcataatgataaaa

SEQ ID NO: 516738 - DNA, 15 bp, Homo sapiens
tttcataatgataaa

SEQ ID NO: 516739 - DNA, 15 bp, Homo sapiens
atttcataatgataa

SEQ ID NO: 516740 - DNA, 15 bp, Homo sapiens
catttcataatgata

SEQ ID NO: 516741 - DNA, 15 bp, Homo sapiens
tcatttcataatgat

SEQ ID NO: 516742 - DNA, 15 bp, Homo sapiens
atcatttcataatga

SEQ ID NO: 516743 - DNA, 15 bp, Homo sapiens
gatcatttcataatg

SEQ ID NO: 516744 - DNA, 15 bp, Homo sapiens
agatcatttcataat

SEQ ID NO: 516745 - DNA, 15 bp, Homo sapiens
gagatcatttcataa

SEQ ID NO: 516746 - DNA, 15 bp, Homo sapiens
agagatcatttcata

SEQ ID NO: 516747 - DNA, 15 bp, Homo sapiens
aagagatcatttcat

SEQ ID NO: 516748 - DNA, 15 bp, Homo sapiens
aaagagatcatttca

SEQ ID NO: 516749 - DNA, 15 bp, Homo sapiens
aaaagagatcatttc

SEQ ID NO: 516750 - DNA, 15 bp, Homo sapiens
aaaaagagatcattt

SEQ ID NO: 516751 - DNA, 15 bp, Homo sapiens
aaaaaagagatcatt

SEQ ID NO: 516752 - DNA, 15 bp, Homo sapiens
taaaaaagagatcat

SEQ ID NO: 516753 - DNA, 15 bp, Homo sapiens
ataaaaaagagatca

SEQ ID NO: 516754 - DNA, 15 bp, Homo sapiens
gataaaaaagagatc

SEQ ID NO: 516755 - DNA, 15 bp, Homo sapiens
agataaaaaagagat

SEQ ID NO: 516756 - DNA, 15 bp, Homo sapiens
gagataaaaaagaga

SEQ ID NO: 516757 - DNA, 15 bp, Homo sapiens
agagataaaaaagag

SEQ ID NO: 516758 - DNA, 15 bp, Homo sapiens
cagagataaaaaaga

SEQ ID NO: 516759 - DNA, 15 bp, Homo sapiens
gcagagataaaaaag

SEQ ID NO: 516760 - DNA, 15 bp, Homo sapiens
agcagagataaaaaa

SEQ ID NO: 516761 - DNA, 15 bp, Homo sapiens
tagcagagataaaaa

SEQ ID NO: 516762 - DNA, 15 bp, Homo sapiens
ttagcagagataaaa

SEQ ID NO: 516763 - DNA, 15 bp, Homo sapiens
attagcagagataaa

SEQ ID NO: 516764 - DNA, 15 bp, Homo sapiens
tattagcagagataa

SEQ ID NO: 516765 - DNA, 15 bp, Homo sapiens
atattagcagagata

SEQ ID NO: 516766 - DNA, 15 bp, Homo sapiens
aatattagcagagat

SEQ ID NO: 516767 - DNA, 15 bp, Homo sapiens
gaatattagcagaga

SEQ ID NO: 516768 - DNA, 15 bp, Homo sapiens
ggaatattagcagag

SEQ ID NO: 516769 - DNA, 15 bp, Homo sapiens
tggaatattagcaga

SEQ ID NO: 516770 - DNA, 15 bp, Homo sapiens
atggaatattagcag

SEQ ID NO: 516771 - DNA, 15 bp, Homo sapiens
catggaatattagca

SEQ ID NO: 516772 - DNA, 15 bp, Homo sapiens
acatggaatattagc

SEQ ID NO: 516773 - DNA, 15 bp, Homo sapiens
aacatggaatattag

SEQ ID NO: 516774 - DNA, 15 bp, Homo sapiens
gaacatggaatatta

SEQ ID NO: 516775 - DNA, 15 bp, Homo sapiens
agaacatggaatatt

SEQ ID NO: 516776 - DNA, 15 bp, Homo sapiens
cagaacatggaatat

SEQ ID NO: 516777 - DNA, 15 bp, Homo sapiens
tcagaacatggaata

SEQ ID NO: 516778 - DNA, 15 bp, Homo sapiens
ttcagaacatggaat

SEQ ID NO: 516779 - DNA, 15 bp, Homo sapiens
cttcagaacatggaa

SEQ ID NO: 516780 - DNA, 15 bp, Homo sapiens
acttcagaacatgga

SEQ ID NO: 516781 - DNA, 15 bp, Homo sapiens
gacttcagaacatgg

SEQ ID NO: 516782 - DNA, 15 bp, Homo sapiens
agacttcagaacatg

SEQ ID NO: 516783 - DNA, 15 bp, Homo sapiens
aagacttcagaacat

SEQ ID NO: 516784 - DNA, 15 bp, Homo sapiens
aaagacttcagaaca

SEQ ID NO: 516785 - DNA, 15 bp, Homo sapiens
aaaagacttcagaac

SEQ ID NO: 516786 - DNA, 15 bp, Homo sapiens
aaaaagacttcagaa

SEQ ID NO: 516787 - DNA, 15 bp, Homo sapiens
gaaaaagacttcaga

SEQ ID NO: 516788 - DNA, 15 bp, Homo sapiens
agaaaaagacttcag

SEQ ID NO: 516789 - DNA, 15 bp, Homo sapiens
cagaaaaagacttca

SEQ ID NO: 516790 - DNA, 15 bp, Homo sapiens
tcagaaaaagacttc

SEQ ID NO: 516791 - DNA, 15 bp, Homo sapiens
atcagaaaaagactt

SEQ ID NO: 516792 - DNA, 15 bp, Homo sapiens
aatcagaaaaagact

SEQ ID NO: 516793 - DNA, 15 bp, Homo sapiens
taatcagaaaaagac

SEQ ID NO: 516794 - DNA, 15 bp, Homo sapiens
ataatcagaaaaaga

SEQ ID NO: 516795 - DNA, 15 bp, Homo sapiens
aataatcagaaaaag

SEQ ID NO: 516796 - DNA, 15 bp, Homo sapiens
aaataatcagaaaaa

SEQ ID NO: 516797 - DNA, 15 bp, Homo sapiens
taaataatcagaaaa

SEQ ID NO: 516798 - DNA, 15 bp, Homo sapiens
ctaaataatcagaaa

SEQ ID NO: 516799 - DNA, 15 bp, Homo sapiens
tctaaataatcagaa

SEQ ID NO: 516800 - DNA, 15 bp, Homo sapiens
gtctaaataatcaga

SEQ ID NO: 516801 - DNA, 15 bp, Homo sapiens
ggtctaaataatcag

SEQ ID NO: 516802 - DNA, 15 bp, Homo sapiens
tggtctaaataatca

SEQ ID NO: 516803 - DNA, 15 bp, Homo sapiens
ctggtctaaataatc

SEQ ID NO: 516804 - DNA, 15 bp, Homo sapiens
actggtctaaataat

SEQ ID NO: 516805 - DNA, 15 bp, Homo sapiens
aactggtctaaataa

SEQ ID NO: 516806 - DNA, 15 bp, Homo sapiens
aaactggtctaaata

SEQ ID NO: 516807 - DNA, 15 bp, Homo sapiens
gaaactggtctaaat

SEQ ID NO: 516808 - DNA, 15 bp, Homo sapiens
tgaaactggtctaaa

SEQ ID NO: 516809 - DNA, 15 bp, Homo sapiens
atgaaactggtctaa

SEQ ID NO: 516810 - DNA, 15 bp, Homo sapiens
aatgaaactggtcta

SEQ ID NO: 516811 - DNA, 15 bp, Homo sapiens
aaatgaaactggtct

SEQ ID NO: 516812 - DNA, 15 bp, Homo sapiens
taaatgaaactggtc

SEQ ID NO: 516813 - DNA, 15 bp, Homo sapiens
ttaaatgaaactggt

SEQ ID NO: 516814 - DNA, 15 bp, Homo sapiens
attaaatgaaactgg

SEQ ID NO: 516815 - DNA, 15 bp, Homo sapiens
tattaaatgaaactg

SEQ ID NO: 516816 - DNA, 15 bp, Homo sapiens
atattaaatgaaact

SEQ ID NO: 516817 - DNA, 15 bp, Homo sapiens
catattaaatgaaac

SEQ ID NO: 516818 - DNA, 15 bp, Homo sapiens
ccatattaaatgaaa

SEQ ID NO: 516819 - DNA, 15 bp, Homo sapiens
accatattaaatgaa

SEQ ID NO: 516820 - DNA, 15 bp, Homo sapiens
aaccatattaaatga

SEQ ID NO: 516821 - DNA, 15 bp, Homo sapiens
taaccatattaaatg

SEQ ID NO: 516822 - DNA, 15 bp, Homo sapiens
ataaccatattaaat

SEQ ID NO: 516823 - DNA, 15 bp, Homo sapiens
aataaccatattaaa

SEQ ID NO: 516824 - DNA, 15 bp, Homo sapiens
caataaccatattaa

SEQ ID NO: 516825 - DNA, 15 bp, Homo sapiens
tcaataaccatatta

SEQ ID NO: 516826 - DNA, 15 bp, Homo sapiens
atcaataaccatatt

SEQ ID NO: 516827 - DNA, 15 bp, Homo sapiens
tatcaataaccatat

SEQ ID NO: 516828 - DNA, 15 bp, Homo sapiens
atatcaataaccata

SEQ ID NO: 516829 - DNA, 15 bp, Homo sapiens
catatcaataaccat

SEQ ID NO: 516830 - DNA, 15 bp, Homo sapiens
acatatcaataacca

SEQ ID NO: 516831 - DNA, 15 bp, Homo sapiens
aacatatcaataacc

SEQ ID NO: 516832 - DNA, 15 bp, Homo sapiens
caacatatcaataac

SEQ ID NO: 516833 - DNA, 15 bp, Homo sapiens
tcaacatatcaataa

SEQ ID NO: 516834 - DNA, 15 bp, Homo sapiens
ctcaacatatcaata

SEQ ID NO: 516835 - DNA, 15 bp, Homo sapiens
actcaacatatcaat

SEQ ID NO: 516836 - DNA, 15 bp, Homo sapiens
aactcaacatatcaa

SEQ ID NO: 516837 - DNA, 15 bp, Homo sapiens
aaactcaacatatca

SEQ ID NO: 516838 - DNA, 15 bp, Homo sapiens
taaactcaacatatc

SEQ ID NO: 516839 - DNA, 15 bp, Homo sapiens
ttaaactcaacatat

SEQ ID NO: 516840 - DNA, 15 bp, Homo sapiens
tttaaactcaacata

SEQ ID NO: 516841 - DNA, 15 bp, Homo sapiens
atttaaactcaacat

SEQ ID NO: 516842 - DNA, 15 bp, Homo sapiens
tatttaaactcaaca

SEQ ID NO: 516843 - DNA, 15 bp, Homo sapiens
atatttaaactcaac

SEQ ID NO: 516844 - DNA, 15 bp, Homo sapiens
tatatttaaactcaa

SEQ ID NO: 516845 - DNA, 15 bp, Homo sapiens
gtatatttaaactca

SEQ ID NO: 516846 - DNA, 15 bp, Homo sapiens
agtatatttaaactc

SEQ ID NO: 516847 - DNA, 15 bp, Homo sapiens
tagtatatttaaact

SEQ ID NO: 516848 - DNA, 15 bp, Homo sapiens
atagtatatttaaac

SEQ ID NO: 516849 - DNA, 15 bp, Homo sapiens
gatagtatatttaaa

SEQ ID NO: 516850 - DNA, 15 bp, Homo sapiens
agatagtatatttaa

SEQ ID NO: 516851 - DNA, 15 bp, Homo sapiens
aagatagtatattta

SEQ ID NO: 516852 - DNA, 15 bp, Homo sapiens
caagatagtatattt

SEQ ID NO: 516853 - DNA, 15 bp, Homo sapiens
gcaagatagtatatt

SEQ ID NO: 516854 - DNA, 15 bp, Homo sapiens
agcaagatagtatat

SEQ ID NO: 516855 - DNA, 15 bp, Homo sapiens
cagcaagatagtata

SEQ ID NO: 516856 - DNA, 15 bp, Homo sapiens
acagcaagatagtat

SEQ ID NO: 516857 - DNA, 15 bp, Homo sapiens
aacagcaagatagta

SEQ ID NO: 516858 - DNA, 15 bp, Homo sapiens
aaacagcaagatagt

SEQ ID NO: 516859 - DNA, 15 bp, Homo sapiens
caaacagcaagatag

SEQ ID NO: 516860 - DNA, 15 bp, Homo sapiens
acaaacagcaagata

SEQ ID NO: 516861 - DNA, 15 bp, Homo sapiens
cacaaacagcaagat

SEQ ID NO: 516862 - DNA, 15 bp, Homo sapiens
acacaaacagcaaga

SEQ ID NO: 516863 - DNA, 15 bp, Homo sapiens
aacacaaacagcaag

SEQ ID NO: 516864 - DNA, 15 bp, Homo sapiens
gaacacaaacagcaa

SEQ ID NO: 516865 - DNA, 15 bp, Homo sapiens
agaacacaaacagca

SEQ ID NO: 516866 - DNA, 15 bp, Homo sapiens
tagaacacaaacagc

SEQ ID NO: 516867 - DNA, 15 bp, Homo sapiens
atagaacacaaacag

SEQ ID NO: 516868 - DNA, 15 bp, Homo sapiens
aatagaacacaaaca

SEQ ID NO: 516869 - DNA, 15 bp, Homo sapiens
aaatagaacacaaac

SEQ ID NO: 516870 - DNA, 15 bp, Homo sapiens
caaatagaacacaaa

SEQ ID NO: 516871 - DNA, 15 bp, Homo sapiens
tcaaatagaacacaa

SEQ ID NO: 516872 - DNA, 15 bp, Homo sapiens
ctcaaatagaacaca

SEQ ID NO: 516873 - DNA, 15 bp, Homo sapiens
tctcaaatagaacac

SEQ ID NO: 516874 - DNA, 15 bp, Homo sapiens
gtctcaaatagaaca

SEQ ID NO: 516875 - DNA, 15 bp, Homo sapiens
agtctcaaatagaac

SEQ ID NO: 516876 - DNA, 15 bp, Homo sapiens
aagtctcaaatagaa

SEQ ID NO: 516877 - DNA, 15 bp, Homo sapiens
gaagtctcaaataga

SEQ ID NO: 516878 - DNA, 15 bp, Homo sapiens
tgaagtctcaaatag

SEQ ID NO: 516879 - DNA, 15 bp, Homo sapiens
ttgaagtctcaaata

SEQ ID NO: 516880 - DNA, 15 bp, Homo sapiens
gttgaagtctcaaat

SEQ ID NO: 516881 - DNA, 15 bp, Homo sapiens
agttgaagtctcaaa

SEQ ID NO: 516882 - DNA, 15 bp, Homo sapiens
tagttgaagtctcaa

SEQ ID NO: 516883 - DNA, 15 bp, Homo sapiens
atagttgaagtctca

SEQ ID NO: 516884 - DNA, 15 bp, Homo sapiens
catagttgaagtctc

SEQ ID NO: 516885 - DNA, 15 bp, Homo sapiens
acatagttgaagtct

SEQ ID NO: 516886 - DNA, 15 bp, Homo sapiens
gacatagttgaagtc

SEQ ID NO: 516887 - DNA, 15 bp, Homo sapiens
agacatagttgaagt

SEQ ID NO: 516888 - DNA, 15 bp, Homo sapiens
aagacatagttgaag

SEQ ID NO: 516889 - DNA, 15 bp, Homo sapiens
gaagacatagttgaa

SEQ ID NO: 516890 - DNA, 15 bp, Homo sapiens
ggaagacatagttga

SEQ ID NO: 516891 - DNA, 15 bp, Homo sapiens
aggaagacatagttg

SEQ ID NO: 516892 - DNA, 15 bp, Homo sapiens
aaggaagacatagtt

SEQ ID NO: 516893 - DNA, 15 bp, Homo sapiens
aaaggaagacatagt

SEQ ID NO: 516894 - DNA, 15 bp, Homo sapiens
aaaaggaagacatag

SEQ ID NO: 516895 - DNA, 15 bp, Homo sapiens
gaaaaggaagacata

SEQ ID NO: 516896 - DNA, 15 bp, Homo sapiens
ggaaaaggaagacat

SEQ ID NO: 516897 - DNA, 15 bp, Homo sapiens
aggaaaaggaagaca

SEQ ID NO: 516898 - DNA, 15 bp, Homo sapiens
gaggaaaaggaagac

SEQ ID NO: 516899 - DNA, 15 bp, Homo sapiens
agaggaaaaggaaga

SEQ ID NO: 516900 - DNA, 15 bp, Homo sapiens
aagaggaaaaggaag

SEQ ID NO: 516901 - DNA, 15 bp, Homo sapiens
aaagaggaaaaggaa

SEQ ID NO: 516902 - DNA, 15 bp, Homo sapiens
aaaagaggaaaagga

SEQ ID NO: 516903 - DNA, 15 bp, Homo sapiens
aaaaagaggaaaagg

SEQ ID NO: 516904 - DNA, 15 bp, Homo sapiens
taaaaagaggaaaag

SEQ ID NO: 516905 - DNA, 15 bp, Homo sapiens
ataaaaagaggaaaa

SEQ ID NO: 516906 - DNA, 15 bp, Homo sapiens
cataaaaagaggaaa

SEQ ID NO: 516907 - DNA, 15 bp, Homo sapiens
gcataaaaagaggaa

SEQ ID NO: 516908 - DNA, 15 bp, Homo sapiens
ggcataaaaagagga

SEQ ID NO: 516909 - DNA, 15 bp, Homo sapiens
aggcataaaaagagg

SEQ ID NO: 516910 - DNA, 15 bp, Homo sapiens
aaggcataaaaagag

SEQ ID NO: 516911 - DNA, 15 bp, Homo sapiens
aaaggcataaaaaga

SEQ ID NO: 516912 - DNA, 15 bp, Homo sapiens
aaaaggcataaaaag

SEQ ID NO: 516913 - DNA, 15 bp, Homo sapiens
aaaaaggcataaaaa

SEQ ID NO: 516914 - DNA, 15 bp, Homo sapiens
aaaaaaggcataaaa

SEQ ID NO: 516915 - DNA, 15 bp, Homo sapiens
aaaaaaaggcataaa

SEQ ID NO: 516916 - DNA, 15 bp, Homo sapiens
caaaaaaaggcataa

SEQ ID NO: 516917 - DNA, 15 bp, Homo sapiens
ccaaaaaaaggcata

SEQ ID NO: 516918 - DNA, 15 bp, Homo sapiens
cccaaaaaaaggcat

SEQ ID NO: 516919 - DNA, 15 bp, Homo sapiens
ccccaaaaaaaggca

SEQ ID NO: 516920 - DNA, 15 bp, Homo sapiens
accccaaaaaaaggc

SEQ ID NO: 516921 - DNA, 15 bp, Homo sapiens
taccccaaaaaaagg

SEQ ID NO: 516922 - DNA, 15 bp, Homo sapiens
ataccccaaaaaaag

SEQ ID NO: 516923 - DNA, 15 bp, Homo sapiens
aataccccaaaaaaa

SEQ ID NO: 516924 - DNA, 15 bp, Homo sapiens
caataccccaaaaaa

SEQ ID NO: 516925 - DNA, 15 bp, Homo sapiens
tcaataccccaaaaa

SEQ ID NO: 516926 - DNA, 15 bp, Homo sapiens
ctcaataccccaaaa

SEQ ID NO: 516927 - DNA, 15 bp, Homo sapiens
actcaataccccaaa

SEQ ID NO: 516928 - DNA, 15 bp, Homo sapiens
cactcaataccccaa

SEQ ID NO: 516929 - DNA, 15 bp, Homo sapiens
acactcaatacccca

SEQ ID NO: 516930 - DNA, 15 bp, Homo sapiens
aacactcaatacccc

SEQ ID NO: 516931 - DNA, 15 bp, Homo sapiens
aaacactcaataccc

SEQ ID NO: 516932 - DNA, 15 bp, Homo sapiens
aaaacactcaatacc

SEQ ID NO: 516933 - DNA, 15 bp, Homo sapiens
gaaaacactcaatac

SEQ ID NO: 516934 - DNA, 15 bp, Homo sapiens
agaaaacactcaata

SEQ ID NO: 516935 - DNA, 15 bp, Homo sapiens
tagaaaacactcaat

SEQ ID NO: 516936 - DNA, 15 bp, Homo sapiens
gtagaaaacactcaa

SEQ ID NO: 516937 - DNA, 15 bp, Homo sapiens
tgtagaaaacactca

SEQ ID NO: 516938 - DNA, 15 bp, Homo sapiens
ttgtagaaaacactc

SEQ ID NO: 516939 - DNA, 15 bp, Homo sapiens
attgtagaaaacact

SEQ ID NO: 516940 - DNA, 15 bp, Homo sapiens
aattgtagaaaacac

SEQ ID NO: 516941 - DNA, 15 bp, Homo sapiens
aaattgtagaaaaca

SEQ ID NO: 516942 - DNA, 15 bp, Homo sapiens
gaaattgtagaaaac

SEQ ID NO: 516943 - DNA, 15 bp, Homo sapiens
tgaaattgtagaaaa

SEQ ID NO: 516944 - DNA, 15 bp, Homo sapiens
atgaaattgtagaaa

SEQ ID NO: 516945 - DNA, 15 bp, Homo sapiens
aatgaaattgtagaa

SEQ ID NO: 516946 - DNA, 15 bp, Homo sapiens
taatgaaattgtaga

SEQ ID NO: 516947 - DNA, 15 bp, Homo sapiens
ataatgaaattgtag

SEQ ID NO: 516948 - DNA, 15 bp, Homo sapiens
tataatgaaattgta

SEQ ID NO: 516949 - DNA, 15 bp, Homo sapiens
atataatgaaattgt

SEQ ID NO: 516950 - DNA, 15 bp, Homo sapiens
gatataatgaaattg

SEQ ID NO: 516951 - DNA, 15 bp, Homo sapiens
agatataatgaaatt

SEQ ID NO: 516952 - DNA, 15 bp, Homo sapiens
gagatataatgaaat

SEQ ID NO: 516953 - DNA, 15 bp, Homo sapiens
ggagatataatgaaa

SEQ ID NO: 516954 - DNA, 15 bp, Homo sapiens
aggagatataatgaa

SEQ ID NO: 516955 - DNA, 15 bp, Homo sapiens
aaggagatataatga

SEQ ID NO: 516956 - DNA, 15 bp, Homo sapiens
aaaggagatataatg

SEQ ID NO: 516957 - DNA, 15 bp, Homo sapiens
aaaaggagatataat

SEQ ID NO: 516958 - DNA, 15 bp, Homo sapiens
aaaaaggagatataa

SEQ ID NO: 516959 - DNA, 15 bp, Homo sapiens
aaaaaaggagatata

SEQ ID NO: 516960 - DNA, 15 bp, Homo sapiens
caaaaaaggagatat

SEQ ID NO: 516961 - DNA, 15 bp, Homo sapiens
gcaaaaaaggagata

SEQ ID NO: 516962 - DNA, 15 bp, Homo sapiens
tgcaaaaaaggagat

SEQ ID NO: 516963 - DNA, 15 bp, Homo sapiens
atgcaaaaaaggaga

SEQ ID NO: 516964 - DNA, 15 bp, Homo sapiens
tatgcaaaaaaggag

SEQ ID NO: 516965 - DNA, 15 bp, Homo sapiens
atatgcaaaaaagga

SEQ ID NO: 516966 - DNA, 15 bp, Homo sapiens
aatatgcaaaaaagg

SEQ ID NO: 516967 - DNA, 15 bp, Homo sapiens
taatatgcaaaaaag

SEQ ID NO: 516968 - DNA, 15 bp, Homo sapiens
ctaatatgcaaaaaa

SEQ ID NO: 516969 - DNA, 15 bp, Homo sapiens
gctaatatgcaaaaa

SEQ ID NO: 516970 - DNA, 15 bp, Homo sapiens
tgctaatatgcaaaa

SEQ ID NO: 516971 - DNA, 15 bp, Homo sapiens
ttgctaatatgcaaa

SEQ ID NO: 516972 - DNA, 15 bp, Homo sapiens
tttgctaatatgcaa

SEQ ID NO: 516973 - DNA, 15 bp, Homo sapiens
ttttgctaatatgca

SEQ ID NO: 516974 - DNA, 15 bp, Homo sapiens
gttttgctaatatgc

SEQ ID NO: 516975 - DNA, 15 bp, Homo sapiens
tgttttgctaatatg

SEQ ID NO: 516976 - DNA, 15 bp, Homo sapiens
atgttttgctaatat

SEQ ID NO: 516977 - DNA, 15 bp, Homo sapiens
aatgttttgctaata

SEQ ID NO: 516978 - DNA, 15 bp, Homo sapiens
aaatgttttgctaat

SEQ ID NO: 516979 - DNA, 15 bp, Homo sapiens
aaaatgttttgctaa

SEQ ID NO: 516980 - DNA, 15 bp, Homo sapiens
gaaaatgttttgcta

SEQ ID NO: 516981 - DNA, 15 bp, Homo sapiens
tgaaaatgttttgct

SEQ ID NO: 516982 - DNA, 15 bp, Homo sapiens
atgaaaatgttttgc

SEQ ID NO: 516983 - DNA, 15 bp, Homo sapiens
catgaaaatgttttg

SEQ ID NO: 516984 - DNA, 15 bp, Homo sapiens
acatgaaaatgtttt

SEQ ID NO: 516985 - DNA, 15 bp, Homo sapiens
cacatgaaaatgttt

SEQ ID NO: 516986 - DNA, 15 bp, Homo sapiens
acacatgaaaatgtt

SEQ ID NO: 516987 - DNA, 15 bp, Homo sapiens
aacacatgaaaatgt

SEQ ID NO: 516988 - DNA, 15 bp, Homo sapiens
caacacatgaaaatg

SEQ ID NO: 516989 - DNA, 15 bp, Homo sapiens
acaacacatgaaaat

SEQ ID NO: 516990 - DNA, 15 bp, Homo sapiens
aacaacacatgaaaa

SEQ ID NO: 516991 - DNA, 15 bp, Homo sapiens
aaacaacacatgaaa

SEQ ID NO: 516992 - DNA, 15 bp, Homo sapiens
aaaacaacacatgaa

SEQ ID NO: 516993 - DNA, 15 bp, Homo sapiens
taaaacaacacatga

SEQ ID NO: 516994 - DNA, 15 bp, Homo sapiens
ctaaaacaacacatg

SEQ ID NO: 516995 - DNA, 15 bp, Homo sapiens
actaaaacaacacat

SEQ ID NO: 516996 - DNA, 15 bp, Homo sapiens
cactaaaacaacaca

SEQ ID NO: 516997 - DNA, 15 bp, Homo sapiens
ccactaaaacaacac

SEQ ID NO: 516998 - DNA, 15 bp, Homo sapiens
accactaaaacaaca

SEQ ID NO: 516999 - DNA, 15 bp, Homo sapiens
aaccactaaaacaac

SEQ ID NO: 517000 - DNA, 15 bp, Homo sapiens
caaccactaaaacaa

SEQ ID NO: 517001 - DNA, 15 bp, Homo sapiens
gcaaccactaaaaca

SEQ ID NO: 517002 - DNA, 15 bp, Homo sapiens
agcaaccactaaaac

SEQ ID NO: 517003 - DNA, 15 bp, Homo sapiens
aagcaaccactaaaa

SEQ ID NO: 517004 - DNA, 15 bp, Homo sapiens
aaagcaaccactaaa

SEQ ID NO: 517005 - DNA, 15 bp, Homo sapiens
caaagcaaccactaa

SEQ ID NO: 517006 - DNA, 15 bp, Homo sapiens
tcaaagcaaccacta

SEQ ID NO: 517007 - DNA, 15 bp, Homo sapiens
ctcaaagcaaccact

SEQ ID NO: 517008 - DNA, 15 bp, Homo sapiens
tctcaaagcaaccac

SEQ ID NO: 517009 - DNA, 15 bp, Homo sapiens
atctcaaagcaacca

SEQ ID NO: 517010 - DNA, 15 bp, Homo sapiens
aatctcaaagcaacc

SEQ ID NO: 517011 - DNA, 15 bp, Homo sapiens
aaatctcaaagcaac

SEQ ID NO: 517012 - DNA, 15 bp, Homo sapiens
taaatctcaaagcaa

SEQ ID NO: 517013 - DNA, 15 bp, Homo sapiens
ttaaatctcaaagca

SEQ ID NO: 517014 - DNA, 15 bp, Homo sapiens
attaaatctcaaagc

SEQ ID NO: 517015 - DNA, 15 bp, Homo sapiens
aattaaatctcaaag

SEQ ID NO: 517016 - DNA, 15 bp, Homo sapiens
aaattaaatctcaaa

SEQ ID NO: 517017 - DNA, 15 bp, Homo sapiens
taaattaaatctcaa

SEQ ID NO: 517018 - DNA, 15 bp, Homo sapiens
ctaaattaaatctca

SEQ ID NO: 517019 - DNA, 15 bp, Homo sapiens
gctaaattaaatctc

SEQ ID NO: 517020 - DNA, 15 bp, Homo sapiens
tgctaaattaaatct

SEQ ID NO: 517021 - DNA, 15 bp, Homo sapiens
atgctaaattaaatc

SEQ ID NO: 517022 - DNA, 15 bp, Homo sapiens
gatgctaaattaaat

SEQ ID NO: 517023 - DNA, 15 bp, Homo sapiens
tgatgctaaattaaa

SEQ ID NO: 517024 - DNA, 15 bp, Homo sapiens
gtgatgctaaattaa

SEQ ID NO: 517025 - DNA, 15 bp, Homo sapiens
tgtgatgctaaatta

SEQ ID NO: 517026 - DNA, 15 bp, Homo sapiens
ctgtgatgctaaatt

SEQ ID NO: 517027 - DNA, 15 bp, Homo sapiens
actgtgatgctaaat

SEQ ID NO: 517028 - DNA, 15 bp, Homo sapiens
gactgtgatgctaaa

SEQ ID NO: 517029 - DNA, 15 bp, Homo sapiens
agactgtgatgctaa

SEQ ID NO: 517030 - DNA, 15 bp, Homo sapiens
tagactgtgatgcta

SEQ ID NO: 517031 - DNA, 15 bp, Homo sapiens
gtagactgtgatgct

SEQ ID NO: 517032 - DNA, 15 bp, Homo sapiens
agtagactgtgatgc

SEQ ID NO: 517033 - DNA, 15 bp, Homo sapiens
aagtagactgtgatg

SEQ ID NO: 517034 - DNA, 15 bp, Homo sapiens
aaagtagactgtgat

SEQ ID NO: 517035 - DNA, 15 bp, Homo sapiens
gaaagtagactgtga

SEQ ID NO: 517036 - DNA, 15 bp, Homo sapiens
tgaaagtagactgtg

SEQ ID NO: 517037 - DNA, 15 bp, Homo sapiens
ttgaaagtagactgt

SEQ ID NO: 517038 - DNA, 15 bp, Homo sapiens
tttgaaagtagactg

SEQ ID NO: 517039 - DNA, 15 bp, Homo sapiens
atttgaaagtagact

SEQ ID NO: 517040 - DNA, 15 bp, Homo sapiens
aatttgaaagtagac

SEQ ID NO: 517041 - DNA, 15 bp, Homo sapiens
taatttgaaagtaga

SEQ ID NO: 517042 - DNA, 15 bp, Homo sapiens
ataatttgaaagtag

SEQ ID NO: 517043 - DNA, 15 bp, Homo sapiens
tataatttgaaagta

SEQ ID NO: 517044 - DNA, 15 bp, Homo sapiens
gtataatttgaaagt

SEQ ID NO: 517045 - DNA, 15 bp, Homo sapiens
agtataatttgaaag

SEQ ID NO: 517046 - DNA, 15 bp, Homo sapiens
tagtataatttgaaa

SEQ ID NO: 517047 - DNA, 15 bp, Homo sapiens
atagtataatttgaa

SEQ ID NO: 517048 - DNA, 15 bp, Homo sapiens
tatagtataatttga

SEQ ID NO: 517049 - DNA, 15 bp, Homo sapiens
gtatagtataatttg

SEQ ID NO: 517050 - DNA, 15 bp, Homo sapiens
ggtatagtataattt

SEQ ID NO: 517051 - DNA, 15 bp, Homo sapiens
tggtatagtataatt

SEQ ID NO: 517052 - DNA, 15 bp, Homo sapiens
gtggtatagtataat

SEQ ID NO: 517053 - DNA, 15 bp, Homo sapiens
ggtggtatagtataa

SEQ ID NO: 517054 - DNA, 15 bp, Homo sapiens
aggtggtatagtata

SEQ ID NO: 517055 - DNA, 15 bp, Homo sapiens
gaggtggtatagtat

SEQ ID NO: 517056 - DNA, 15 bp, Homo sapiens
tgaggtggtatagta

SEQ ID NO: 517057 - DNA, 15 bp, Homo sapiens
atgaggtggtatagt

SEQ ID NO: 517058 - DNA, 15 bp, Homo sapiens
catgaggtggtatag

SEQ ID NO: 517059 - DNA, 15 bp, Homo sapiens
acatgaggtggtata

SEQ ID NO: 517060 - DNA, 15 bp, Homo sapiens
tacatgaggtggtat

SEQ ID NO: 517061 - DNA, 15 bp, Homo sapiens
atacatgaggtggta

SEQ ID NO: 517062 - DNA, 15 bp, Homo sapiens
tatacatgaggtggt

SEQ ID NO: 517063 - DNA, 15 bp, Homo sapiens
ttatacatgaggtgg

SEQ ID NO: 517064 - DNA, 15 bp, Homo sapiens
attatacatgaggtg

SEQ ID NO: 517065 - DNA, 15 bp, Homo sapiens
tattatacatgaggt

SEQ ID NO: 517066 - DNA, 15 bp, Homo sapiens
ctattatacatgagg

SEQ ID NO: 517067 - DNA, 15 bp, Homo sapiens
tctattatacatgag

SEQ ID NO: 517068 - DNA, 15 bp, Homo sapiens
ttctattatacatga

SEQ ID NO: 517069 - DNA, 15 bp, Homo sapiens
cttctattatacatg

SEQ ID NO: 517070 - DNA, 15 bp, Homo sapiens
tcttctattatacat

SEQ ID NO: 517071 - DNA, 15 bp, Homo sapiens
atcttctattataca

SEQ ID NO: 517072 - DNA, 15 bp, Homo sapiens
gatcttctattatac

SEQ ID NO: 517073 - DNA, 15 bp, Homo sapiens
ggatcttctattata

SEQ ID NO: 517074 - DNA, 15 bp, Homo sapiens
aggatcttctattat

SEQ ID NO: 517075 - DNA, 15 bp, Homo sapiens
aaggatcttctatta

SEQ ID NO: 517076 - DNA, 15 bp, Homo sapiens
taaggatcttctatt

SEQ ID NO: 517077 - DNA, 15 bp, Homo sapiens
gtaaggatcttctat

SEQ ID NO: 517078 - DNA, 15 bp, Homo sapiens
tgtaaggatcttcta

SEQ ID NO: 517079 - DNA, 15 bp, Homo sapiens
ttgtaaggatcttct

SEQ ID NO: 517080 - DNA, 15 bp, Homo sapiens
gttgtaaggatcttc

SEQ ID NO: 517081 - DNA, 15 bp, Homo sapiens
agttgtaaggatctt

SEQ ID NO: 517082 - DNA, 15 bp, Homo sapiens
cagttgtaaggatct

SEQ ID NO: 517083 - DNA, 15 bp, Homo sapiens
gcagttgtaaggatc

SEQ ID NO: 517084 - DNA, 15 bp, Homo sapiens
tgcagttgtaaggat

SEQ ID NO: 517085 - DNA, 15 bp, Homo sapiens
gtgcagttgtaagga

SEQ ID NO: 517086 - DNA, 15 bp, Homo sapiens
tgtgcagttgtaagg

SEQ ID NO: 517087 - DNA, 15 bp, Homo sapiens
gtgtgcagttgtaag

SEQ ID NO: 517088 - DNA, 15 bp, Homo sapiens
agtgtgcagttgtaa

SEQ ID NO: 517089 - DNA, 15 bp, Homo sapiens
aagtgtgcagttgta

SEQ ID NO: 517090 - DNA, 15 bp, Homo sapiens
aaagtgtgcagttgt

SEQ ID NO: 517091 - DNA, 15 bp, Homo sapiens
aaaagtgtgcagttg

SEQ ID NO: 517092 - DNA, 15 bp, Homo sapiens
taaaagtgtgcagtt

SEQ ID NO: 517093 - DNA, 15 bp, Homo sapiens
ataaaagtgtgcagt

SEQ ID NO: 517094 - DNA, 15 bp, Homo sapiens
aataaaagtgtgcag

SEQ ID NO: 517095 - DNA, 15 bp, Homo sapiens
taataaaagtgtgca

SEQ ID NO: 517096 - DNA, 15 bp, Homo sapiens
ataataaaagtgtgc

SEQ ID NO: 517097 - DNA, 15 bp, Homo sapiens
aataataaaagtgtg

SEQ ID NO: 517098 - DNA, 15 bp, Homo sapiens
aaataataaaagtgt

SEQ ID NO: 517099 - DNA, 15 bp, Homo sapiens
aaaataataaaagtg

SEQ ID NO: 517100 - DNA, 15 bp, Homo sapiens
gaaaataataaaagt

SEQ ID NO: 517101 - DNA, 15 bp, Homo sapiens
agaaaataataaaag

SEQ ID NO: 517102 - DNA, 15 bp, Homo sapiens
gagaaaataataaaa

SEQ ID NO: 517103 - DNA, 15 bp, Homo sapiens
agagaaaataataaa

SEQ ID NO: 517104 - DNA, 15 bp, Homo sapiens
aagagaaaataataa

SEQ ID NO: 517105 - DNA, 15 bp, Homo sapiens
gaagagaaaataata

SEQ ID NO: 517106 - DNA, 15 bp, Homo sapiens
agaagagaaaataat

SEQ ID NO: 517107 - DNA, 15 bp, Homo sapiens
cagaagagaaaataa

SEQ ID NO: 517108 - DNA, 15 bp, Homo sapiens
ccagaagagaaaata

SEQ ID NO: 517109 - DNA, 15 bp, Homo sapiens
accagaagagaaaat

SEQ ID NO: 517110 - DNA, 15 bp, Homo sapiens
aaccagaagagaaaa

SEQ ID NO: 517111 - DNA, 15 bp, Homo sapiens
aaaccagaagagaaa

SEQ ID NO: 517112 - DNA, 15 bp, Homo sapiens
aaaaccagaagagaa

SEQ ID NO: 517113 - DNA, 15 bp, Homo sapiens
aaaaaccagaagaga

SEQ ID NO: 517114 - DNA, 15 bp, Homo sapiens
caaaaaccagaagag

SEQ ID NO: 517115 - DNA, 15 bp, Homo sapiens
acaaaaaccagaaga

SEQ ID NO: 517116 - DNA, 15 bp, Homo sapiens
cacaaaaaccagaag

SEQ ID NO: 517117 - DNA, 15 bp, Homo sapiens
gcacaaaaaccagaa

SEQ ID NO: 517118 - DNA, 15 bp, Homo sapiens
agcacaaaaaccaga

SEQ ID NO: 517119 - DNA, 15 bp, Homo sapiens
tagcacaaaaaccag

SEQ ID NO: 517120 - DNA, 15 bp, Homo sapiens
atagcacaaaaacca

SEQ ID NO: 517121 - DNA, 15 bp, Homo sapiens
aatagcacaaaaacc

SEQ ID NO: 517122 - DNA, 15 bp, Homo sapiens
caatagcacaaaaac

SEQ ID NO: 517123 - DNA, 15 bp, Homo sapiens
acaatagcacaaaaa

SEQ ID NO: 517124 - DNA, 15 bp, Homo sapiens
gacaatagcacaaaa

SEQ ID NO: 517125 - DNA, 15 bp, Homo sapiens
agacaatagcacaaa

SEQ ID NO: 517126 - DNA, 15 bp, Homo sapiens
aagacaatagcacaa

SEQ ID NO: 517127 - DNA, 15 bp, Homo sapiens
taagacaatagcaca

SEQ ID NO: 517128 - DNA, 15 bp, Homo sapiens
ataagacaatagcac

SEQ ID NO: 517129 - DNA, 15 bp, Homo sapiens
tataagacaatagca

SEQ ID NO: 517130 - DNA, 15 bp, Homo sapiens
atataagacaatagc

SEQ ID NO: 517131 - DNA, 15 bp, Homo sapiens
aatataagacaatag

SEQ ID NO: 517132 - DNA, 15 bp, Homo sapiens
aaatataagacaata

SEQ ID NO: 517133 - DNA, 15 bp, Homo sapiens
aaaatataagacaat

SEQ ID NO: 517134 - DNA, 15 bp, Homo sapiens
taaaatataagacaa

SEQ ID NO: 517135 - DNA, 15 bp, Homo sapiens
gtaaaatataagaca

SEQ ID NO: 517136 - DNA, 15 bp, Homo sapiens
agtaaaatataagac

SEQ ID NO: 517137 - DNA, 15 bp, Homo sapiens
aagtaaaatataaga

SEQ ID NO: 517138 - DNA, 15 bp, Homo sapiens
gaagtaaaatataag

SEQ ID NO: 517139 - DNA, 15 bp, Homo sapiens
agaagtaaaatataa

SEQ ID NO: 517140 - DNA, 15 bp, Homo sapiens
tagaagtaaaatata

SEQ ID NO: 517141 - DNA, 15 bp, Homo sapiens
ttagaagtaaaatat

SEQ ID NO: 517142 - DNA, 15 bp, Homo sapiens
tttagaagtaaaata

SEQ ID NO: 517143 - DNA, 15 bp, Homo sapiens
atttagaagtaaaat

SEQ ID NO: 517144 - DNA, 15 bp, Homo sapiens
tatttagaagtaaaa

SEQ ID NO: 517145 - DNA, 15 bp, Homo sapiens
atatttagaagtaaa

SEQ ID NO: 517146 - DNA, 15 bp, Homo sapiens
tatatttagaagtaa

SEQ ID NO: 517147 - DNA, 15 bp, Homo sapiens
atatatttagaagta

SEQ ID NO: 517148 - DNA, 15 bp, Homo sapiens
gatatatttagaagt

SEQ ID NO: 517149 - DNA, 15 bp, Homo sapiens
ggatatatttagaag

SEQ ID NO: 517150 - DNA, 15 bp, Homo sapiens
tggatatatttagaa

SEQ ID NO: 517151 - DNA, 15 bp, Homo sapiens
gtggatatatttaga

SEQ ID NO: 517152 - DNA, 15 bp, Homo sapiens
tgtggatatatttag

SEQ ID NO: 517153 - DNA, 15 bp, Homo sapiens
ttgtggatatattta

SEQ ID NO: 517154 - DNA, 15 bp, Homo sapiens
attgtggatatattt

SEQ ID NO: 517155 - DNA, 15 bp, Homo sapiens
tattgtggatatatt

SEQ ID NO: 517156 - DNA, 15 bp, Homo sapiens
ttattgtggatatat

SEQ ID NO: 517157 - DNA, 15 bp, Homo sapiens
tttattgtggatata

SEQ ID NO: 517158 - DNA, 15 bp, Homo sapiens
atttattgtggatat

SEQ ID NO: 517159 - DNA, 15 bp, Homo sapiens
catttattgtggata

SEQ ID NO: 517160 - DNA, 15 bp, Homo sapiens
acatttattgtggat

SEQ ID NO: 517161 - DNA, 15 bp, Homo sapiens
aacatttattgtgga

SEQ ID NO: 517162 - DNA, 15 bp, Homo sapiens
aaacatttattgtgg

SEQ ID NO: 517163 - DNA, 15 bp, Homo sapiens
taaacatttattgtg

SEQ ID NO: 517164 - DNA, 15 bp, Homo sapiens
ataaacatttattgt

SEQ ID NO: 517165 - DNA, 15 bp, Homo sapiens
aataaacatttattg

SEQ ID NO: 517166 - DNA, 15 bp, Homo sapiens
taataaacatttatt

SEQ ID NO: 517167 - DNA, 15 bp, Homo sapiens
ataataaacatttat

SEQ ID NO: 517168 - DNA, 15 bp, Homo sapiens
aataataaacattta

SEQ ID NO: 517169 - DNA, 15 bp, Homo sapiens
aaataataaacattt

SEQ ID NO: 517170 - DNA, 15 bp, Homo sapiens
aaaataataaacatt

SEQ ID NO: 517171 - DNA, 15 bp, Homo sapiens
aaaaataataaacat

SEQ ID NO: 517172 - DNA, 15 bp, Homo sapiens
caaaaataataaaca

SEQ ID NO: 517173 - DNA, 15 bp, Homo sapiens
acaaaaataataaac

SEQ ID NO: 517174 - DNA, 15 bp, Homo sapiens
gacaaaaataataaa

SEQ ID NO: 517175 - DNA, 15 bp, Homo sapiens
agacaaaaataataa

SEQ ID NO: 517176 - DNA, 15 bp, Homo sapiens
aagacaaaaataata

SEQ ID NO: 517177 - DNA, 15 bp, Homo sapiens
taagacaaaaataat

SEQ ID NO: 517178 - DNA, 15 bp, Homo sapiens
gtaagacaaaaataa

SEQ ID NO: 517179 - DNA, 15 bp, Homo sapiens
tgtaagacaaaaata

SEQ ID NO: 517180 - DNA, 15 bp, Homo sapiens
gtgtaagacaaaaat

SEQ ID NO: 517181 - DNA, 15 bp, Homo sapiens
tgtgtaagacaaaaa

SEQ ID NO: 517182 - DNA, 15 bp, Homo sapiens
ctgtgtaagacaaaa

SEQ ID NO: 517183 - DNA, 15 bp, Homo sapiens
actgtgtaagacaaa

SEQ ID NO: 517184 - DNA, 15 bp, Homo sapiens
gactgtgtaagacaa

SEQ ID NO: 517185 - DNA, 15 bp, Homo sapiens
tgactgtgtaagaca

SEQ ID NO: 517186 - DNA, 15 bp, Homo sapiens
ctgactgtgtaagac

SEQ ID NO: 517187 - DNA, 15 bp, Homo sapiens
actgactgtgtaaga

SEQ ID NO: 517188 - DNA, 15 bp, Homo sapiens
tactgactgtgtaag

SEQ ID NO: 517189 - DNA, 15 bp, Homo sapiens
ttactgactgtgtaa

SEQ ID NO: 517190 - DNA, 15 bp, Homo sapiens
attactgactgtgta

SEQ ID NO: 517191 - DNA, 15 bp, Homo sapiens
gattactgactgtgt

SEQ ID NO: 517192 - DNA, 15 bp, Homo sapiens
agattactgactgtg

SEQ ID NO: 517193 - DNA, 15 bp, Homo sapiens
aagattactgactgt

SEQ ID NO: 517194 - DNA, 15 bp, Homo sapiens
aaagattactgactg

SEQ ID NO: 517195 - DNA, 15 bp, Homo sapiens
aaaagattactgact

SEQ ID NO: 517196 - DNA, 15 bp, Homo sapiens
taaaagattactgac

SEQ ID NO: 517197 - DNA, 15 bp, Homo sapiens
ttaaaagattactga

SEQ ID NO: 517198 - DNA, 15 bp, Homo sapiens
tttaaaagattactg

SEQ ID NO: 517199 - DNA, 15 bp, Homo sapiens
ctttaaaagattact

SEQ ID NO: 517200 - DNA, 15 bp, Homo sapiens
tctttaaaagattac

SEQ ID NO: 517201 - DNA, 15 bp, Homo sapiens
ctctttaaaagatta

SEQ ID NO: 517202 - DNA, 15 bp, Homo sapiens
tctctttaaaagatt

SEQ ID NO: 517203 - DNA, 15 bp, Homo sapiens
atctctttaaaagat

SEQ ID NO: 517204 - DNA, 15 bp, Homo sapiens
catctctttaaaaga

SEQ ID NO: 517205 - DNA, 15 bp, Homo sapiens
acatctctttaaaag

SEQ ID NO: 517206 - DNA, 15 bp, Homo sapiens
tacatctctttaaaa

SEQ ID NO: 517207 - DNA, 15 bp, Homo sapiens
ttacatctctttaaa

SEQ ID NO: 517208 - DNA, 15 bp, Homo sapiens
tttacatctctttaa

SEQ ID NO: 517209 - DNA, 15 bp, Homo sapiens
atttacatctcttta

SEQ ID NO: 517210 - DNA, 15 bp, Homo sapiens
tatttacatctcttt

SEQ ID NO: 517211 - DNA, 15 bp, Homo sapiens
ctatttacatctctt

SEQ ID NO: 517212 - DNA, 15 bp, Homo sapiens
actatttacatctct

SEQ ID NO: 517213 - DNA, 15 bp, Homo sapiens
tactatttacatctc

SEQ ID NO: 517214 - DNA, 15 bp, Homo sapiens
ttactatttacatct

SEQ ID NO: 517215 - DNA, 15 bp, Homo sapiens
tttactatttacatc

SEQ ID NO: 517216 - DNA, 15 bp, Homo sapiens
ttttactatttacat

SEQ ID NO: 517217 - DNA, 15 bp, Homo sapiens
tttttactatttaca

SEQ ID NO: 517218 - DNA, 15 bp, Homo sapiens
ttttttactatttac

SEQ ID NO: 517219 - DNA, 15 bp, Homo sapiens
tttttttactattta

SEQ ID NO: 517220 - DNA, 15 bp, Homo sapiens
ttttttttactattt

SEQ ID NO: 517221 - DNA, 15 bp, Homo sapiens
attttttttactatt

SEQ ID NO: 517222 - DNA, 15 bp, Homo sapiens
aattttttttactat

SEQ ID NO: 517223 - DNA, 15 bp, Homo sapiens
gaattttttttacta

SEQ ID NO: 517224 - DNA, 15 bp, Homo sapiens
agaattttttttact

SEQ ID NO: 517225 - DNA, 15 bp, Homo sapiens
aagaattttttttac

SEQ ID NO: 517226 - DNA, 15 bp, Homo sapiens
aaagaatttttttta

SEQ ID NO: 517227 - DNA, 15 bp, Homo sapiens
aaaagaatttttttt

SEQ ID NO: 517228 - DNA, 15 bp, Homo sapiens
taaaagaattttttt

SEQ ID NO: 517229 - DNA, 15 bp, Homo sapiens
ataaaagaatttttt

SEQ ID NO: 517230 - DNA, 15 bp, Homo sapiens
tataaaagaattttt

SEQ ID NO: 517231 - DNA, 15 bp, Homo sapiens
atataaaagaatttt

SEQ ID NO: 517232 - DNA, 15 bp, Homo sapiens
aatataaaagaattt

SEQ ID NO: 517233 - DNA, 15 bp, Homo sapiens
aaatataaaagaatt

SEQ ID NO: 517234 - DNA, 15 bp, Homo sapiens
gaaatataaaagaat

SEQ ID NO: 517235 - DNA, 15 bp, Homo sapiens
tgaaatataaaagaa

SEQ ID NO: 517236 - DNA, 15 bp, Homo sapiens
gtgaaatataaaaga

SEQ ID NO: 517237 - DNA, 15 bp, Homo sapiens
tgtgaaatataaaag

SEQ ID NO: 517238 - DNA, 15 bp, Homo sapiens
gtgtgaaatataaaa

SEQ ID NO: 517239 - DNA, 15 bp, Homo sapiens
tgtgtgaaatataaa

SEQ ID NO: 517240 - DNA, 15 bp, Homo sapiens
atgtgtgaaatataa

SEQ ID NO: 517241 - DNA, 15 bp, Homo sapiens
tatgtgtgaaatata

SEQ ID NO: 517242 - DNA, 15 bp, Homo sapiens
ctatgtgtgaaatat

SEQ ID NO: 517243 - DNA, 15 bp, Homo sapiens
actatgtgtgaaata

SEQ ID NO: 517244 - DNA, 15 bp, Homo sapiens
aactatgtgtgaaat

SEQ ID NO: 517245 - DNA, 15 bp, Homo sapiens
taactatgtgtgaaa

SEQ ID NO: 517246 - DNA, 15 bp, Homo sapiens
gtaactatgtgtgaa

SEQ ID NO: 517247 - DNA, 15 bp, Homo sapiens
agtaactatgtgtga

SEQ ID NO: 517248 - DNA, 15 bp, Homo sapiens
tagtaactatgtgtg

SEQ ID NO: 517249 - DNA, 15 bp, Homo sapiens
atagtaactatgtgt

SEQ ID NO: 517250 - DNA, 15 bp, Homo sapiens
aatagtaactatgtg

SEQ ID NO: 517251 - DNA, 15 bp, Homo sapiens
aaatagtaactatgt

SEQ ID NO: 517252 - DNA, 15 bp, Homo sapiens
gaaatagtaactatg

SEQ ID NO: 517253 - DNA, 15 bp, Homo sapiens
agaaatagtaactat

SEQ ID NO: 517254 - DNA, 15 bp, Homo sapiens
cagaaatagtaacta

SEQ ID NO: 517255 - DNA, 15 bp, Homo sapiens
ccagaaatagtaact

SEQ ID NO: 517256 - DNA, 15 bp, Homo sapiens
accagaaatagtaac

SEQ ID NO: 517257 - DNA, 15 bp, Homo sapiens
caccagaaatagtaa

SEQ ID NO: 517258 - DNA, 15 bp, Homo sapiens
gcaccagaaatagta

SEQ ID NO: 517259 - DNA, 15 bp, Homo sapiens
agcaccagaaatagt

SEQ ID NO: 517260 - DNA, 15 bp, Homo sapiens
gagcaccagaaatag

SEQ ID NO: 517261 - DNA, 15 bp, Homo sapiens
agagcaccagaaata

SEQ ID NO: 517262 - DNA, 15 bp, Homo sapiens
aagagcaccagaaat

SEQ ID NO: 517263 - DNA, 15 bp, Homo sapiens
gaagagcaccagaaa

SEQ ID NO: 517264 - DNA, 15 bp, Homo sapiens
tgaagagcaccagaa

SEQ ID NO: 517265 - DNA, 15 bp, Homo sapiens
gtgaagagcaccaga

SEQ ID NO: 517266 - DNA, 15 bp, Homo sapiens
agtgaagagcaccag

SEQ ID NO: 517267 - DNA, 15 bp, Homo sapiens
gagtgaagagcacca

SEQ ID NO: 517268 - DNA, 15 bp, Homo sapiens
ggagtgaagagcacc

SEQ ID NO: 517269 - DNA, 15 bp, Homo sapiens
aggagtgaagagcac

SEQ ID NO: 517270 - DNA, 15 bp, Homo sapiens
aaggagtgaagagca

SEQ ID NO: 517271 - DNA, 15 bp, Homo sapiens
aaaggagtgaagagc

SEQ ID NO: 517272 - DNA, 15 bp, Homo sapiens
caaaggagtgaagag

SEQ ID NO: 517273 - DNA, 15 bp, Homo sapiens
acaaaggagtgaaga

SEQ ID NO: 517274 - DNA, 15 bp, Homo sapiens
cacaaaggagtgaag

SEQ ID NO: 517275 - DNA, 15 bp, Homo sapiens
acacaaaggagtgaa

SEQ ID NO: 517276 - DNA, 15 bp, Homo sapiens
tacacaaaggagtga

SEQ ID NO: 517277 - DNA, 15 bp, Homo sapiens
ctacacaaaggagtg

SEQ ID NO: 517278 - DNA, 15 bp, Homo sapiens
cctacacaaaggagt

SEQ ID NO: 517279 - DNA, 15 bp, Homo sapiens
acctacacaaaggag

SEQ ID NO: 517280 - DNA, 15 bp, Homo sapiens
aacctacacaaagga

SEQ ID NO: 517281 - DNA, 15 bp, Homo sapiens
gaacctacacaaagg

SEQ ID NO: 517282 - DNA, 15 bp, Homo sapiens
tgaacctacacaaag

SEQ ID NO: 517283 - DNA, 15 bp, Homo sapiens
atgaacctacacaaa

SEQ ID NO: 517284 - DNA, 15 bp, Homo sapiens
tatgaacctacacaa

SEQ ID NO: 517285 - DNA, 15 bp, Homo sapiens
atatgaacctacaca

SEQ ID NO: 517286 - DNA, 15 bp, Homo sapiens
aatatgaacctacac

SEQ ID NO: 517287 - DNA, 15 bp, Homo sapiens
aaatatgaacctaca

SEQ ID NO: 517288 - DNA, 15 bp, Homo sapiens
gaaatatgaacctac

SEQ ID NO: 517289 - DNA, 15 bp, Homo sapiens
ggaaatatgaaccta

SEQ ID NO: 517290 - DNA, 15 bp, Homo sapiens
tggaaatatgaacct

SEQ ID NO: 517291 - DNA, 15 bp, Homo sapiens
atggaaatatgaacc

SEQ ID NO: 517292 - DNA, 15 bp, Homo sapiens
gatggaaatatgaac

SEQ ID NO: 517293 - DNA, 15 bp, Homo sapiens
agatggaaatatgaa

SEQ ID NO: 517294 - DNA, 15 bp, Homo sapiens
tagatggaaatatga

SEQ ID NO: 517295 - DNA, 15 bp, Homo sapiens
ctagatggaaatatg

SEQ ID NO: 517296 - DNA, 15 bp, Homo sapiens
actagatggaaatat

SEQ ID NO: 517297 - DNA, 15 bp, Homo sapiens
tactagatggaaata

SEQ ID NO: 517298 - DNA, 15 bp, Homo sapiens
atactagatggaaat

SEQ ID NO: 517299 - DNA, 15 bp, Homo sapiens
aatactagatggaaa

SEQ ID NO: 517300 - DNA, 15 bp, Homo sapiens
taatactagatggaa

SEQ ID NO: 517301 - DNA, 15 bp, Homo sapiens
ataatactagatgga

SEQ ID NO: 517302 - DNA, 15 bp, Homo sapiens
aataatactagatgg

SEQ ID NO: 517303 - DNA, 15 bp, Homo sapiens
aaataatactagatg

SEQ ID NO: 517304 - DNA, 15 bp, Homo sapiens
aaaataatactagat

SEQ ID NO: 517305 - DNA, 15 bp, Homo sapiens
gaaaataatactaga

SEQ ID NO: 517306 - DNA, 15 bp, Homo sapiens
agaaaataatactag

SEQ ID NO: 517307 - DNA, 15 bp, Homo sapiens
aagaaaataatacta

SEQ ID NO: 517308 - DNA, 15 bp, Homo sapiens
taagaaaataatact

SEQ ID NO: 517309 - DNA, 15 bp, Homo sapiens
gtaagaaaataatac

SEQ ID NO: 517310 - DNA, 15 bp, Homo sapiens
tgtaagaaaataata

SEQ ID NO: 517311 - DNA, 15 bp, Homo sapiens
ttgtaagaaaataat

SEQ ID NO: 517312 - DNA, 15 bp, Homo sapiens
tttgtaagaaaataa

SEQ ID NO: 517313 - DNA, 15 bp, Homo sapiens
ctttgtaagaaaata

SEQ ID NO: 517314 - DNA, 15 bp, Homo sapiens
tctttgtaagaaaat

SEQ ID NO: 517315 - DNA, 15 bp, Homo sapiens
ttctttgtaagaaaa

SEQ ID NO: 517316 - DNA, 15 bp, Homo sapiens
attctttgtaagaaa

SEQ ID NO: 517317 - DNA, 15 bp, Homo sapiens
aattctttgtaagaa

SEQ ID NO: 517318 - DNA, 15 bp, Homo sapiens
aaattctttgtaaga

SEQ ID NO: 517319 - DNA, 15 bp, Homo sapiens
gaaattctttgtaag

SEQ ID NO: 517320 - DNA, 15 bp, Homo sapiens
agaaattctttgtaa

SEQ ID NO: 517321 - DNA, 15 bp, Homo sapiens
aagaaattctttgta

SEQ ID NO: 517322 - DNA, 15 bp, Homo sapiens
aaagaaattctttgt

SEQ ID NO: 517323 - DNA, 15 bp, Homo sapiens
aaaagaaattctttg

SEQ ID NO: 517324 - DNA, 15 bp, Homo sapiens
gaaaagaaattcttt

SEQ ID NO: 517325 - DNA, 15 bp, Homo sapiens
tgaaaagaaattctt

SEQ ID NO: 517326 - DNA, 15 bp, Homo sapiens
ttgaaaagaaattct

SEQ ID NO: 517327 - DNA, 15 bp, Homo sapiens
gttgaaaagaaattc

SEQ ID NO: 517328 - DNA, 15 bp, Homo sapiens
tgttgaaaagaaatt

SEQ ID NO: 517329 - DNA, 15 bp, Homo sapiens
atgttgaaaagaaat

SEQ ID NO: 517330 - DNA, 15 bp, Homo sapiens
aatgttgaaaagaaa

SEQ ID NO: 517331 - DNA, 15 bp, Homo sapiens
aaatgttgaaaagaa

SEQ ID NO: 517332 - DNA, 15 bp, Homo sapiens
gaaatgttgaaaaga

SEQ ID NO: 517333 - DNA, 15 bp, Homo sapiens
agaaatgttgaaaag

SEQ ID NO: 517334 - DNA, 15 bp, Homo sapiens
aagaaatgttgaaaa

SEQ ID NO: 517335 - DNA, 15 bp, Homo sapiens
taagaaatgttgaaa

SEQ ID NO: 517336 - DNA, 15 bp, Homo sapiens
ataagaaatgttgaa

SEQ ID NO: 517337 - DNA, 15 bp, Homo sapiens
tataagaaatgttga

SEQ ID NO: 517338 - DNA, 15 bp, Homo sapiens
ctataagaaatgttg

SEQ ID NO: 517339 - DNA, 15 bp, Homo sapiens
actataagaaatgtt

SEQ ID NO: 517340 - DNA, 15 bp, Homo sapiens
tactataagaaatgt

SEQ ID NO: 517341 - DNA, 15 bp, Homo sapiens
gtactataagaaatg

SEQ ID NO: 517342 - DNA, 15 bp, Homo sapiens
agtactataagaaat

SEQ ID NO: 517343 - DNA, 15 bp, Homo sapiens
cagtactataagaaa

SEQ ID NO: 517344 - DNA, 15 bp, Homo sapiens
ccagtactataagaa

SEQ ID NO: 517345 - DNA, 15 bp, Homo sapiens
accagtactataaga

SEQ ID NO: 517346 - DNA, 15 bp, Homo sapiens
caccagtactataag

SEQ ID NO: 517347 - DNA, 15 bp, Homo sapiens
acaccagtactataa

SEQ ID NO: 517348 - DNA, 15 bp, Homo sapiens
cacaccagtactata

SEQ ID NO: 517349 - DNA, 15 bp, Homo sapiens
tcacaccagtactat

SEQ ID NO: 517350 - DNA, 15 bp, Homo sapiens
atcacaccagtacta

SEQ ID NO: 517351 - DNA, 15 bp, Homo sapiens
catcacaccagtact

SEQ ID NO: 517352 - DNA, 15 bp, Homo sapiens
acatcacaccagtac

SEQ ID NO: 517353 - DNA, 15 bp, Homo sapiens
aacatcacaccagta

SEQ ID NO: 517354 - DNA, 15 bp, Homo sapiens
caacatcacaccagt

SEQ ID NO: 517355 - DNA, 15 bp, Homo sapiens
tcaacatcacaccag

SEQ ID NO: 517356 - DNA, 15 bp, Homo sapiens
atcaacatcacacca

SEQ ID NO: 517357 - DNA, 15 bp, Homo sapiens
aatcaacatcacacc

SEQ ID NO: 517358 - DNA, 15 bp, Homo sapiens
taatcaacatcacac

SEQ ID NO: 517359 - DNA, 15 bp, Homo sapiens
ttaatcaacatcaca

SEQ ID NO: 517360 - DNA, 15 bp, Homo sapiens
attaatcaacatcac

SEQ ID NO: 517361 - DNA, 15 bp, Homo sapiens
aattaatcaacatca

SEQ ID NO: 517362 - DNA, 15 bp, Homo sapiens
gaattaatcaacatc

SEQ ID NO: 517363 - DNA, 15 bp, Homo sapiens
agaattaatcaacat

SEQ ID NO: 517364 - DNA, 15 bp, Homo sapiens
aagaattaatcaaca

SEQ ID NO: 517365 - DNA, 15 bp, Homo sapiens
aaagaattaatcaac

SEQ ID NO: 517366 - DNA, 15 bp, Homo sapiens
gaaagaattaatcaa

SEQ ID NO: 517367 - DNA, 15 bp, Homo sapiens
tgaaagaattaatca

SEQ ID NO: 517368 - DNA, 15 bp, Homo sapiens
ctgaaagaattaatc

SEQ ID NO: 517369 - DNA, 15 bp, Homo sapiens
gctgaaagaattaat

SEQ ID NO: 517370 - DNA, 15 bp, Homo sapiens
agctgaaagaattaa

SEQ ID NO: 517371 - DNA, 15 bp, Homo sapiens
aagctgaaagaatta

SEQ ID NO: 517372 - DNA, 15 bp, Homo sapiens
aaagctgaaagaatt

SEQ ID NO: 517373 - DNA, 15 bp, Homo sapiens
caaagctgaaagaat

SEQ ID NO: 517374 - DNA, 15 bp, Homo sapiens
gcaaagctgaaagaa

SEQ ID NO: 517375 - DNA, 15 bp, Homo sapiens
ggcaaagctgaaaga

SEQ ID NO: 517376 - DNA, 15 bp, Homo sapiens
aggcaaagctgaaag

SEQ ID NO: 517377 - DNA, 15 bp, Homo sapiens
caggcaaagctgaaa

SEQ ID NO: 517378 - DNA, 15 bp, Homo sapiens
acaggcaaagctgaa

SEQ ID NO: 517379 - DNA, 15 bp, Homo sapiens
gacaggcaaagctga

SEQ ID NO: 517380 - DNA, 15 bp, Homo sapiens
agacaggcaaagctg

SEQ ID NO: 517381 - DNA, 15 bp, Homo sapiens
aagacaggcaaagct

SEQ ID NO: 517382 - DNA, 15 bp, Homo sapiens
aaagacaggcaaagc

SEQ ID NO: 517383 - DNA, 15 bp, Homo sapiens
taaagacaggcaaag

SEQ ID NO: 517384 - DNA, 15 bp, Homo sapiens
ataaagacaggcaaa

SEQ ID NO: 517385 - DNA, 15 bp, Homo sapiens
aataaagacaggcaa

SEQ ID NO: 517386 - DNA, 15 bp, Homo sapiens
aaataaagacaggca

SEQ ID NO: 517387 - DNA, 15 bp, Homo sapiens
gaaataaagacaggc

SEQ ID NO: 517388 - DNA, 15 bp, Homo sapiens
tgaaataaagacagg

SEQ ID NO: 517389 - DNA, 15 bp, Homo sapiens
atgaaataaagacag

SEQ ID NO: 517390 - DNA, 15 bp, Homo sapiens
gatgaaataaagaca

SEQ ID NO: 517391 - DNA, 15 bp, Homo sapiens
ggatgaaataaagac

SEQ ID NO: 517392 - DNA, 15 bp, Homo sapiens
aggatgaaataaaga

SEQ ID NO: 517393 - DNA, 15 bp, Homo sapiens
gaggatgaaataaag

SEQ ID NO: 517394 - DNA, 15 bp, Homo sapiens
tgaggatgaaataaa

SEQ ID NO: 517395 - DNA, 15 bp, Homo sapiens
atgaggatgaaataa

SEQ ID NO: 517396 - DNA, 15 bp, Homo sapiens
aatgaggatgaaata

SEQ ID NO: 517397 - DNA, 15 bp, Homo sapiens
aaatgaggatgaaat

SEQ ID NO: 517398 - DNA, 15 bp, Homo sapiens
aaaatgaggatgaaa

SEQ ID NO: 517399 - DNA, 15 bp, Homo sapiens
caaaatgaggatgaa

SEQ ID NO: 517400 - DNA, 15 bp, Homo sapiens
gcaaaatgaggatga

SEQ ID NO: 517401 - DNA, 15 bp, Homo sapiens
tgcaaaatgaggatg

SEQ ID NO: 517402 - DNA, 15 bp, Homo sapiens
ttgcaaaatgaggat

SEQ ID NO: 517403 - DNA, 15 bp, Homo sapiens
tttgcaaaatgagga

SEQ ID NO: 517404 - DNA, 15 bp, Homo sapiens
ctttgcaaaatgagg

SEQ ID NO: 517405 - DNA, 15 bp, Homo sapiens
tctttgcaaaatgag

SEQ ID NO: 517406 - DNA, 15 bp, Homo sapiens
atctttgcaaaatga

SEQ ID NO: 517407 - DNA, 15 bp, Homo sapiens
tatctttgcaaaatg

SEQ ID NO: 517408 - DNA, 15 bp, Homo sapiens
atatctttgcaaaat

SEQ ID NO: 517409 - DNA, 15 bp, Homo sapiens
aatatctttgcaaaa

SEQ ID NO: 517410 - DNA, 15 bp, Homo sapiens
aaatatctttgcaaa

SEQ ID NO: 517411 - DNA, 15 bp, Homo sapiens
aaaatatctttgcaa

SEQ ID NO: 517412 - DNA, 15 bp, Homo sapiens
gaaaatatctttgca

SEQ ID NO: 517413 - DNA, 15 bp, Homo sapiens
tgaaaatatctttgc

SEQ ID NO: 517414 - DNA, 15 bp, Homo sapiens
atgaaaatatctttg

SEQ ID NO: 517415 - DNA, 15 bp, Homo sapiens
aatgaaaatatcttt

SEQ ID NO: 517416 - DNA, 15 bp, Homo sapiens
taatgaaaatatctt

SEQ ID NO: 517417 - DNA, 15 bp, Homo sapiens
ctaatgaaaatatct

SEQ ID NO: 517418 - DNA, 15 bp, Homo sapiens
cctaatgaaaatatc

SEQ ID NO: 517419 - DNA, 15 bp, Homo sapiens
acctaatgaaaatat

SEQ ID NO: 517420 - DNA, 15 bp, Homo sapiens
tacctaatgaaaata

SEQ ID NO: 517421 - DNA, 15 bp, Homo sapiens
atacctaatgaaaat

SEQ ID NO: 517422 - DNA, 15 bp, Homo sapiens
tatacctaatgaaaa

SEQ ID NO: 517423 - DNA, 15 bp, Homo sapiens
ctatacctaatgaaa

SEQ ID NO: 517424 - DNA, 15 bp, Homo sapiens
tctatacctaatgaa

SEQ ID NO: 517425 - DNA, 15 bp, Homo sapiens
ttctatacctaatga

SEQ ID NO: 517426 - DNA, 15 bp, Homo sapiens
attctatacctaatg

SEQ ID NO: 517427 - DNA, 15 bp, Homo sapiens
aattctatacctaat

SEQ ID NO: 517428 - DNA, 15 bp, Homo sapiens
taattctatacctaa

SEQ ID NO: 517429 - DNA, 15 bp, Homo sapiens
ataattctataccta

SEQ ID NO: 517430 - DNA, 15 bp, Homo sapiens
tataattctatacct

SEQ ID NO: 517431 - DNA, 15 bp, Homo sapiens
ctataattctatacc

SEQ ID NO: 517432 - DNA, 15 bp, Homo sapiens
cctataattctatac

SEQ ID NO: 517433 - DNA, 15 bp, Homo sapiens
acctataattctata

SEQ ID NO: 517434 - DNA, 15 bp, Homo sapiens
aacctataattctat

SEQ ID NO: 517435 - DNA, 15 bp, Homo sapiens
gaacctataattcta

SEQ ID NO: 517436 - DNA, 15 bp, Homo sapiens
tgaacctataattct

SEQ ID NO: 517437 - DNA, 15 bp, Homo sapiens
gtgaacctataattc

SEQ ID NO: 517438 - DNA, 15 bp, Homo sapiens
tgtgaacctataatt

SEQ ID NO: 517439 - DNA, 15 bp, Homo sapiens
ttgtgaacctataat

SEQ ID NO: 517440 - DNA, 15 bp, Homo sapiens
attgtgaacctataa

SEQ ID NO: 517441 - DNA, 15 bp, Homo sapiens
cattgtgaacctata

SEQ ID NO: 517442 - DNA, 15 bp, Homo sapiens
acattgtgaacctat

SEQ ID NO: 517443 - DNA, 15 bp, Homo sapiens
aacattgtgaaccta

SEQ ID NO: 517444 - DNA, 15 bp, Homo sapiens
aaacattgtgaacct

SEQ ID NO: 517445 - DNA, 15 bp, Homo sapiens
gaaacattgtgaacc

SEQ ID NO: 517446 - DNA, 15 bp, Homo sapiens
agaaacattgtgaac

SEQ ID NO: 517447 - DNA, 15 bp, Homo sapiens
cagaaacattgtgaa

SEQ ID NO: 517448 - DNA, 15 bp, Homo sapiens
ccagaaacattgtga

SEQ ID NO: 517449 - DNA, 15 bp, Homo sapiens
cccagaaacattgtg

SEQ ID NO: 517450 - DNA, 15 bp, Homo sapiens
acccagaaacattgt

SEQ ID NO: 517451 - DNA, 15 bp, Homo sapiens
aacccagaaacattg

SEQ ID NO: 517452 - DNA, 15 bp, Homo sapiens
aaacccagaaacatt

SEQ ID NO: 517453 - DNA, 15 bp, Homo sapiens
aaaacccagaaacat

SEQ ID NO: 517454 - DNA, 15 bp, Homo sapiens
gaaaacccagaaaca

SEQ ID NO: 517455 - DNA, 15 bp, Homo sapiens
agaaaacccagaaac

SEQ ID NO: 517456 - DNA, 15 bp, Homo sapiens
tagaaaacccagaaa

SEQ ID NO: 517457 - DNA, 15 bp, Homo sapiens
gtagaaaacccagaa

SEQ ID NO: 517458 - DNA, 15 bp, Homo sapiens
ggtagaaaacccaga

SEQ ID NO: 517459 - DNA, 15 bp, Homo sapiens
gggtagaaaacccag

SEQ ID NO: 517460 - DNA, 15 bp, Homo sapiens
ggggtagaaaaccca

SEQ ID NO: 517461 - DNA, 15 bp, Homo sapiens
gggggtagaaaaccc

SEQ ID NO: 517462 - DNA, 15 bp, Homo sapiens
tgggggtagaaaacc

SEQ ID NO: 517463 - DNA, 15 bp, Homo sapiens
ctgggggtagaaaac

SEQ ID NO: 517464 - DNA, 15 bp, Homo sapiens
gctgggggtagaaaa

SEQ ID NO: 517465 - DNA, 15 bp, Homo sapiens
tgctgggggtagaaa

SEQ ID NO: 517466 - DNA, 15 bp, Homo sapiens
gtgctgggggtagaa

SEQ ID NO: 517467 - DNA, 15 bp, Homo sapiens
agtgctgggggtaga

SEQ ID NO: 517468 - DNA, 15 bp, Homo sapiens
aagtgctgggggtag

SEQ ID NO: 517469 - DNA, 15 bp, Homo sapiens
aaagtgctgggggta

SEQ ID NO: 517470 - DNA, 15 bp, Homo sapiens
caaagtgctgggggt

SEQ ID NO: 517471 - DNA, 15 bp, Homo sapiens
tcaaagtgctggggg

SEQ ID NO: 517472 - DNA, 15 bp, Homo sapiens
ttcaaagtgctgggg

SEQ ID NO: 517473 - DNA, 15 bp, Homo sapiens
cttcaaagtgctggg

SEQ ID NO: 517474 - DNA, 15 bp, Homo sapiens
tcttcaaagtgctgg

SEQ ID NO: 517475 - DNA, 15 bp, Homo sapiens
atcttcaaagtgctg

SEQ ID NO: 517476 - DNA, 15 bp, Homo sapiens
catcttcaaagtgct

SEQ ID NO: 517477 - DNA, 15 bp, Homo sapiens
acatcttcaaagtgc

SEQ ID NO: 517478 - DNA, 15 bp, Homo sapiens
aacatcttcaaagtg

SEQ ID NO: 517479 - DNA, 15 bp, Homo sapiens
caacatcttcaaagt

SEQ ID NO: 517480 - DNA, 15 bp, Homo sapiens
acaacatcttcaaag

SEQ ID NO: 517481 - DNA, 15 bp, Homo sapiens
gacaacatcttcaaa

SEQ ID NO: 517482 - DNA, 15 bp, Homo sapiens
ggacaacatcttcaa

SEQ ID NO: 517483 - DNA, 15 bp, Homo sapiens
gggacaacatcttca

SEQ ID NO: 517484 - DNA, 15 bp, Homo sapiens
tgggacaacatcttc

SEQ ID NO: 517485 - DNA, 15 bp, Homo sapiens
ctgggacaacatctt

SEQ ID NO: 517486 - DNA, 15 bp, Homo sapiens
actgggacaacatct

SEQ ID NO: 517487 - DNA, 15 bp, Homo sapiens
cactgggacaacatc

SEQ ID NO: 517488 - DNA, 15 bp, Homo sapiens
acactgggacaacat

SEQ ID NO: 517489 - DNA, 15 bp, Homo sapiens
aacactgggacaaca

SEQ ID NO: 517490 - DNA, 15 bp, Homo sapiens
aaacactgggacaac

SEQ ID NO: 517491 - DNA, 15 bp, Homo sapiens
aaaacactgggacaa

SEQ ID NO: 517492 - DNA, 15 bp, Homo sapiens
gaaaacactgggaca

SEQ ID NO: 517493 - DNA, 15 bp, Homo sapiens
agaaaacactgggac

SEQ ID NO: 517494 - DNA, 15 bp, Homo sapiens
cagaaaacactggga

SEQ ID NO: 517495 - DNA, 15 bp, Homo sapiens
ccagaaaacactggg

SEQ ID NO: 517496 - DNA, 15 bp, Homo sapiens
gccagaaaacactgg

SEQ ID NO: 517497 - DNA, 15 bp, Homo sapiens
agccagaaaacactg

SEQ ID NO: 517498 - DNA, 15 bp, Homo sapiens
cagccagaaaacact

SEQ ID NO: 517499 - DNA, 15 bp, Homo sapiens
tcagccagaaaacac

SEQ ID NO: 517500 - DNA, 15 bp, Homo sapiens
ttcagccagaaaaca

SEQ ID NO: 517501 - DNA, 15 bp, Homo sapiens
tttcagccagaaaac

SEQ ID NO: 517502 - DNA, 15 bp, Homo sapiens
atttcagccagaaaa

SEQ ID NO: 517503 - DNA, 15 bp, Homo sapiens
aatttcagccagaaa

SEQ ID NO: 517504 - DNA, 15 bp, Homo sapiens
caatttcagccagaa

SEQ ID NO: 517505 - DNA, 15 bp, Homo sapiens
acaatttcagccaga

SEQ ID NO: 517506 - DNA, 15 bp, Homo sapiens
aacaatttcagccag

SEQ ID NO: 517507 - DNA, 15 bp, Homo sapiens
aaacaatttcagcca

SEQ ID NO: 517508 - DNA, 15 bp, Homo sapiens
gaaacaatttcagcc

SEQ ID NO: 517509 - DNA, 15 bp, Homo sapiens
ggaaacaatttcagc

SEQ ID NO: 517510 - DNA, 15 bp, Homo sapiens
tggaaacaatttcag

SEQ ID NO: 517511 - DNA, 15 bp, Homo sapiens
ctggaaacaatttca

SEQ ID NO: 517512 - DNA, 15 bp, Homo sapiens
cctggaaacaatttc

SEQ ID NO: 517513 - DNA, 15 bp, Homo sapiens
ccctggaaacaattt

SEQ ID NO: 517514 - DNA, 15 bp, Homo sapiens
tccctggaaacaatt

SEQ ID NO: 517515 - DNA, 15 bp, Homo sapiens
gtccctggaaacaat

SEQ ID NO: 517516 - DNA, 15 bp, Homo sapiens
tgtccctggaaacaa

SEQ ID NO: 517517 - DNA, 15 bp, Homo sapiens
ctgtccctggaaaca

SEQ ID NO: 517518 - DNA, 15 bp, Homo sapiens
gctgtccctggaaac

SEQ ID NO: 517519 - DNA, 15 bp, Homo sapiens
tgctgtccctggaaa

SEQ ID NO: 517520 - DNA, 15 bp, Homo sapiens
gtgctgtccctggaa

SEQ ID NO: 517521 - DNA, 15 bp, Homo sapiens
tgtgctgtccctgga

SEQ ID NO: 517522 - DNA, 15 bp, Homo sapiens
ttgtgctgtccctgg

SEQ ID NO: 517523 - DNA, 15 bp, Homo sapiens
tttgtgctgtccctg

SEQ ID NO: 517524 - DNA, 15 bp, Homo sapiens
ttttgtgctgtccct

SEQ ID NO: 517525 - DNA, 15 bp, Homo sapiens
cttttgtgctgtccc

SEQ ID NO: 517526 - DNA, 15 bp, Homo sapiens
acttttgtgctgtcc

SEQ ID NO: 517527 - DNA, 15 bp, Homo sapiens
cacttttgtgctgtc

SEQ ID NO: 517528 - DNA, 15 bp, Homo sapiens
acacttttgtgctgt

SEQ ID NO: 517529 - DNA, 15 bp, Homo sapiens
cacacttttgtgctg

SEQ ID NO: 517530 - DNA, 15 bp, Homo sapiens
ccacacttttgtgct

SEQ ID NO: 517531 - DNA, 15 bp, Homo sapiens
tccacacttttgtgc

SEQ ID NO: 517532 - DNA, 15 bp, Homo sapiens
ctccacacttttgtg

SEQ ID NO: 517533 - DNA, 15 bp, Homo sapiens
gctccacacttttgt

SEQ ID NO: 517534 - DNA, 15 bp, Homo sapiens
tgctccacacttttg

SEQ ID NO: 517535 - DNA, 15 bp, Homo sapiens
gtgctccacactttt

SEQ ID NO: 517536 - DNA, 15 bp, Homo sapiens
agtgctccacacttt

SEQ ID NO: 517537 - DNA, 15 bp, Homo sapiens
cagtgctccacactt

SEQ ID NO: 517538 - DNA, 15 bp, Homo sapiens
ccagtgctccacact

SEQ ID NO: 517539 - DNA, 15 bp, Homo sapiens
cccagtgctccacac

SEQ ID NO: 517540 - DNA, 15 bp, Homo sapiens
tcccagtgctccaca

SEQ ID NO: 517541 - DNA, 15 bp, Homo sapiens
ctcccagtgctccac

SEQ ID NO: 517542 - DNA, 15 bp, Homo sapiens
cctcccagtgctcca

SEQ ID NO: 517543 - DNA, 15 bp, Homo sapiens
ccctcccagtgctcc

SEQ ID NO: 517544 - DNA, 15 bp, Homo sapiens
gccctcccagtgctc

SEQ ID NO: 517545 - DNA, 15 bp, Homo sapiens
agccctcccagtgct

SEQ ID NO: 517546 - DNA, 15 bp, Homo sapiens
aagccctcccagtgc

SEQ ID NO: 517547 - DNA, 15 bp, Homo sapiens
gaagccctcccagtg

SEQ ID NO: 517548 - DNA, 15 bp, Homo sapiens
tgaagccctcccagt

SEQ ID NO: 517549 - DNA, 15 bp, Homo sapiens
gtgaagccctcccag

SEQ ID NO: 517550 - DNA, 15 bp, Homo sapiens
ggtgaagccctccca

SEQ ID NO: 517551 - DNA, 15 bp, Homo sapiens
aggtgaagccctccc

SEQ ID NO: 517552 - DNA, 15 bp, Homo sapiens
gaggtgaagccctcc

SEQ ID NO: 517553 - DNA, 15 bp, Homo sapiens
agaggtgaagccctc

SEQ ID NO: 517554 - DNA, 15 bp, Homo sapiens
tagaggtgaagccct

SEQ ID NO: 517555 - DNA, 15 bp, Homo sapiens
gtagaggtgaagccc

SEQ ID NO: 517556 - DNA, 15 bp, Homo sapiens
ggtagaggtgaagcc

SEQ ID NO: 517557 - DNA, 15 bp, Homo sapiens
aggtagaggtgaagc

SEQ ID NO: 517558 - DNA, 15 bp, Homo sapiens
gaggtagaggtgaag

SEQ ID NO: 517559 - DNA, 15 bp, Homo sapiens
tgaggtagaggtgaa

SEQ ID NO: 517560 - DNA, 15 bp, Homo sapiens
ttgaggtagaggtga

SEQ ID NO: 517561 - DNA, 15 bp, Homo sapiens
gttgaggtagaggtg

SEQ ID NO: 517562 - DNA, 15 bp, Homo sapiens
tgttgaggtagaggt

SEQ ID NO: 517563 - DNA, 15 bp, Homo sapiens
ctgttgaggtagagg

SEQ ID NO: 517564 - DNA, 15 bp, Homo sapiens
actgttgaggtagag

SEQ ID NO: 517565 - DNA, 15 bp, Homo sapiens
gactgttgaggtaga

SEQ ID NO: 517566 - DNA, 15 bp, Homo sapiens
agactgttgaggtag

SEQ ID NO: 517567 - DNA, 15 bp, Homo sapiens
aagactgttgaggta

SEQ ID NO: 517568 - DNA, 15 bp, Homo sapiens
gaagactgttgaggt

SEQ ID NO: 517569 - DNA, 15 bp, Homo sapiens
tgaagactgttgagg

SEQ ID NO: 517570 - DNA, 15 bp, Homo sapiens
gtgaagactgttgag

SEQ ID NO: 517571 - DNA, 15 bp, Homo sapiens
tgtgaagactgttga

SEQ ID NO: 517572 - DNA, 15 bp, Homo sapiens
ttgtgaagactgttg

SEQ ID NO: 517573 - DNA, 15 bp, Homo sapiens
tttgtgaagactgtt

SEQ ID NO: 517574 - DNA, 15 bp, Homo sapiens
gtttgtgaagactgt

SEQ ID NO: 517575 - DNA, 15 bp, Homo sapiens
agtttgtgaagactg

SEQ ID NO: 517576 - DNA, 15 bp, Homo sapiens
gagtttgtgaagact

SEQ ID NO: 517577 - DNA, 15 bp, Homo sapiens
agagtttgtgaagac

SEQ ID NO: 517578 - DNA, 15 bp, Homo sapiens
gagagtttgtgaaga

SEQ ID NO: 517579 - DNA, 15 bp, Homo sapiens
agagagtttgtgaag

SEQ ID NO: 517580 - DNA, 15 bp, Homo sapiens
gagagagtttgtgaa

SEQ ID NO: 517581 - DNA, 15 bp, Homo sapiens
agagagagtttgtga

SEQ ID NO: 517582 - DNA, 15 bp, Homo sapiens
tagagagagtttgtg

SEQ ID NO: 517583 - DNA, 15 bp, Homo sapiens
ttagagagagtttgt

SEQ ID NO: 517584 - DNA, 15 bp, Homo sapiens
attagagagagtttg

SEQ ID NO: 517585 - DNA, 15 bp, Homo sapiens
gattagagagagttt

SEQ ID NO: 517586 - DNA, 15 bp, Homo sapiens
agattagagagagtt

SEQ ID NO: 517587 - DNA, 15 bp, Homo sapiens
gagattagagagagt

SEQ ID NO: 517588 - DNA, 15 bp, Homo sapiens
agagattagagagag

SEQ ID NO: 517589 - DNA, 15 bp, Homo sapiens
cagagattagagaga

SEQ ID NO: 517590 - DNA, 15 bp, Homo sapiens
tcagagattagagag

SEQ ID NO: 517591 - DNA, 15 bp, Homo sapiens
atcagagattagaga

SEQ ID NO: 517592 - DNA, 15 bp, Homo sapiens
tatcagagattagag

SEQ ID NO: 517593 - DNA, 15 bp, Homo sapiens
atatcagagattaga

SEQ ID NO: 517594 - DNA, 15 bp, Homo sapiens
catatcagagattag

SEQ ID NO: 517595 - DNA, 15 bp, Homo sapiens
ccatatcagagatta

SEQ ID NO: 517596 - DNA, 15 bp, Homo sapiens
tccatatcagagatt

SEQ ID NO: 517597 - DNA, 15 bp, Homo sapiens
ttccatatcagagat

SEQ ID NO: 517598 - DNA, 15 bp, Homo sapiens
tttccatatcagaga

SEQ ID NO: 517599 - DNA, 15 bp, Homo sapiens
ttttccatatcagag

SEQ ID NO: 517600 - DNA, 15 bp, Homo sapiens
attttccatatcaga

SEQ ID NO: 517601 - DNA, 15 bp, Homo sapiens
aattttccatatcag

SEQ ID NO: 517602 - DNA, 15 bp, Homo sapiens
taattttccatatca

SEQ ID NO: 517603 - DNA, 15 bp, Homo sapiens
ttaattttccatatc

SEQ ID NO: 517604 - DNA, 15 bp, Homo sapiens
attaattttccatat

SEQ ID NO: 517605 - DNA, 15 bp, Homo sapiens
aattaattttccata

SEQ ID NO: 517606 - DNA, 15 bp, Homo sapiens
aaattaattttccat

SEQ ID NO: 517607 - DNA, 15 bp, Homo sapiens
aaaattaattttcca

SEQ ID NO: 517608 - DNA, 15 bp, Homo sapiens
aaaaattaattttcc

SEQ ID NO: 517609 - DNA, 15 bp, Homo sapiens
taaaaattaattttc

SEQ ID NO: 517610 - DNA, 15 bp, Homo sapiens
ctaaaaattaatttt

SEQ ID NO: 517611 - DNA, 15 bp, Homo sapiens
actaaaaattaattt

SEQ ID NO: 517612 - DNA, 15 bp, Homo sapiens
tactaaaaattaatt

SEQ ID NO: 517613 - DNA, 15 bp, Homo sapiens
ctactaaaaattaat

SEQ ID NO: 517614 - DNA, 15 bp, Homo sapiens
cctactaaaaattaa

SEQ ID NO: 517615 - DNA, 15 bp, Homo sapiens
acctactaaaaatta

SEQ ID NO: 517616 - DNA, 15 bp, Homo sapiens
aacctactaaaaatt

SEQ ID NO: 517617 - DNA, 15 bp, Homo sapiens
caacctactaaaaat

SEQ ID NO: 517618 - DNA, 15 bp, Homo sapiens
acaacctactaaaaa

SEQ ID NO: 517619 - DNA, 15 bp, Homo sapiens
cacaacctactaaaa

SEQ ID NO: 517620 - DNA, 15 bp, Homo sapiens
acacaacctactaaa

SEQ ID NO: 517621 - DNA, 15 bp, Homo sapiens
tacacaacctactaa

SEQ ID NO: 517622 - DNA, 15 bp, Homo sapiens
ttacacaacctacta

SEQ ID NO: 517623 - DNA, 15 bp, Homo sapiens
cttacacaacctact

SEQ ID NO: 517624 - DNA, 15 bp, Homo sapiens
acttacacaacctac

SEQ ID NO: 517625 - DNA, 15 bp, Homo sapiens
cacttacacaaccta

SEQ ID NO: 517626 - DNA, 15 bp, Homo sapiens
tcacttacacaacct

SEQ ID NO: 517627 - DNA, 15 bp, Homo sapiens
ttcacttacacaacc

SEQ ID NO: 517628 - DNA, 15 bp, Homo sapiens
cttcacttacacaac

SEQ ID NO: 517629 - DNA, 15 bp, Homo sapiens
acttcacttacacaa

SEQ ID NO: 517630 - DNA, 15 bp, Homo sapiens
aacttcacttacaca

SEQ ID NO: 517631 - DNA, 15 bp, Homo sapiens
aaacttcacttacac

SEQ ID NO: 517632 - DNA, 15 bp, Homo sapiens
aaaacttcacttaca

SEQ ID NO: 517633 - DNA, 15 bp, Homo sapiens
taaaacttcacttac

SEQ ID NO: 517634 - DNA, 15 bp, Homo sapiens
ataaaacttcactta

SEQ ID NO: 517635 - DNA, 15 bp, Homo sapiens
tataaaacttcactt

SEQ ID NO: 517636 - DNA, 15 bp, Homo sapiens
ctataaaacttcact

SEQ ID NO: 517637 - DNA, 15 bp, Homo sapiens
gctataaaacttcac

SEQ ID NO: 517638 - DNA, 15 bp, Homo sapiens
ggctataaaacttca

SEQ ID NO: 517639 - DNA, 15 bp, Homo sapiens
gggctataaaacttc

SEQ ID NO: 517640 - DNA, 15 bp, Homo sapiens
agggctataaaactt

SEQ ID NO: 517641 - DNA, 15 bp, Homo sapiens
cagggctataaaact

SEQ ID NO: 517642 - DNA, 15 bp, Homo sapiens
gcagggctataaaac

SEQ ID NO: 517643 - DNA, 15 bp, Homo sapiens
agcagggctataaaa

SEQ ID NO: 517644 - DNA, 15 bp, Homo sapiens
aagcagggctataaa

SEQ ID NO: 517645 - DNA, 15 bp, Homo sapiens
gaagcagggctataa

SEQ ID NO: 517646 - DNA, 15 bp, Homo sapiens
ggaagcagggctata

SEQ ID NO: 517647 - DNA, 15 bp, Homo sapiens
gggaagcagggctat

SEQ ID NO: 517648 - DNA, 15 bp, Homo sapiens
tgggaagcagggcta

SEQ ID NO: 517649 - DNA, 15 bp, Homo sapiens
atgggaagcagggct

SEQ ID NO: 517650 - DNA, 15 bp, Homo sapiens
gatgggaagcagggc

SEQ ID NO: 517651 - DNA, 15 bp, Homo sapiens
agatgggaagcaggg

SEQ ID NO: 517652 - DNA, 15 bp, Homo sapiens
cagatgggaagcagg

SEQ ID NO: 517653 - DNA, 15 bp, Homo sapiens
gcagatgggaagcag

SEQ ID NO: 517654 - DNA, 15 bp, Homo sapiens
ggcagatgggaagca

SEQ ID NO: 517655 - DNA, 15 bp, Homo sapiens
aggcagatgggaagc

SEQ ID NO: 517656 - DNA, 15 bp, Homo sapiens
taggcagatgggaag

SEQ ID NO: 517657 - DNA, 15 bp, Homo sapiens
ttaggcagatgggaa

SEQ ID NO: 517658 - DNA, 15 bp, Homo sapiens
tttaggcagatggga

SEQ ID NO: 517659 - DNA, 15 bp, Homo sapiens
atttaggcagatggg

SEQ ID NO: 517660 - DNA, 15 bp, Homo sapiens
catttaggcagatgg

SEQ ID NO: 517661 - DNA, 15 bp, Homo sapiens
ccatttaggcagatg

SEQ ID NO: 517662 - DNA, 15 bp, Homo sapiens
gccatttaggcagat

SEQ ID NO: 517663 - DNA, 15 bp, Homo sapiens
tgccatttaggcaga

SEQ ID NO: 517664 - DNA, 15 bp, Homo sapiens
gtgccatttaggcag

SEQ ID NO: 517665 - DNA, 15 bp, Homo sapiens
tgtgccatttaggca

SEQ ID NO: 517666 - DNA, 15 bp, Homo sapiens
gtgtgccatttaggc

SEQ ID NO: 517667 - DNA, 15 bp, Homo sapiens
tgtgtgccatttagg

SEQ ID NO: 517668 - DNA, 15 bp, Homo sapiens
ttgtgtgccatttag

SEQ ID NO: 517669 - DNA, 15 bp, Homo sapiens
cttgtgtgccattta

SEQ ID NO: 517670 - DNA, 15 bp, Homo sapiens
tcttgtgtgccattt

SEQ ID NO: 517671 - DNA, 15 bp, Homo sapiens
atcttgtgtgccatt

SEQ ID NO: 517672 - DNA, 15 bp, Homo sapiens
aatcttgtgtgccat

SEQ ID NO: 517673 - DNA, 15 bp, Homo sapiens
caatcttgtgtgcca

SEQ ID NO: 517674 - DNA, 15 bp, Homo sapiens
acaatcttgtgtgcc

SEQ ID NO: 517675 - DNA, 15 bp, Homo sapiens
aacaatcttgtgtgc

SEQ ID NO: 517676 - DNA, 15 bp, Homo sapiens
aaacaatcttgtgtg

SEQ ID NO: 517677 - DNA, 15 bp, Homo sapiens
aaaacaatcttgtgt

SEQ ID NO: 517678 - DNA, 15 bp, Homo sapiens
gaaaacaatcttgtg

SEQ ID NO: 517679 - DNA, 15 bp, Homo sapiens
ggaaaacaatcttgt

SEQ ID NO: 517680 - DNA, 15 bp, Homo sapiens
tggaaaacaatcttg

SEQ ID NO: 517681 - DNA, 15 bp, Homo sapiens
atggaaaacaatctt

SEQ ID NO: 517682 - DNA, 15 bp, Homo sapiens
gatggaaaacaatct

SEQ ID NO: 517683 - DNA, 15 bp, Homo sapiens
cgatggaaaacaatc

SEQ ID NO: 517684 - DNA, 15 bp, Homo sapiens
gcgatggaaaacaat

SEQ ID NO: 517685 - DNA, 15 bp, Homo sapiens
ggcgatggaaaacaa

SEQ ID NO: 517686 - DNA, 15 bp, Homo sapiens
tggcgatggaaaaca

SEQ ID NO: 517687 - DNA, 15 bp, Homo sapiens
atggcgatggaaaac

SEQ ID NO: 517688 - DNA, 15 bp, Homo sapiens
tatggcgatggaaaa

SEQ ID NO: 517689 - DNA, 15 bp, Homo sapiens
atatggcgatggaaa

SEQ ID NO: 517690 - DNA, 15 bp, Homo sapiens
gatatggcgatggaa

SEQ ID NO: 517691 - DNA, 15 bp, Homo sapiens
ggatatggcgatgga

SEQ ID NO: 517692 - DNA, 15 bp, Homo sapiens
aggatatggcgatgg

SEQ ID NO: 517693 - DNA, 15 bp, Homo sapiens
gaggatatggcgatg

SEQ ID NO: 517694 - DNA, 15 bp, Homo sapiens
tgaggatatggcgat

SEQ ID NO: 517695 - DNA, 15 bp, Homo sapiens
gtgaggatatggcga

SEQ ID NO: 517696 - DNA, 15 bp, Homo sapiens
agtgaggatatggcg

SEQ ID NO: 517697 - DNA, 15 bp, Homo sapiens
cagtgaggatatggc

SEQ ID NO: 517698 - DNA, 15 bp, Homo sapiens
acagtgaggatatgg

SEQ ID NO: 517699 - DNA, 15 bp, Homo sapiens
tacagtgaggatatg

SEQ ID NO: 517700 - DNA, 15 bp, Homo sapiens
gtacagtgaggatat

SEQ ID NO: 517701 - DNA, 15 bp, Homo sapiens
tgtacagtgaggata

SEQ ID NO: 517702 - DNA, 15 bp, Homo sapiens
atgtacagtgaggat

SEQ ID NO: 517703 - DNA, 15 bp, Homo sapiens
catgtacagtgagga

SEQ ID NO: 517704 - DNA, 15 bp, Homo sapiens
ccatgtacagtgagg

SEQ ID NO: 517705 - DNA, 15 bp, Homo sapiens
tccatgtacagtgag

SEQ ID NO: 517706 - DNA, 15 bp, Homo sapiens
ttccatgtacagtga

SEQ ID NO: 517707 - DNA, 15 bp, Homo sapiens
tttccatgtacagtg

SEQ ID NO: 517708 - DNA, 15 bp, Homo sapiens
atttccatgtacagt

SEQ ID NO: 517709 - DNA, 15 bp, Homo sapiens
aatttccatgtacag

SEQ ID NO: 517710 - DNA, 15 bp, Homo sapiens
gaatttccatgtaca

SEQ ID NO: 517711 - DNA, 15 bp, Homo sapiens
agaatttccatgtac

SEQ ID NO: 517712 - DNA, 15 bp, Homo sapiens
cagaatttccatgta

SEQ ID NO: 517713 - DNA, 15 bp, Homo sapiens
ccagaatttccatgt

SEQ ID NO: 517714 - DNA, 15 bp, Homo sapiens
tccagaatttccatg

SEQ ID NO: 517715 - DNA, 15 bp, Homo sapiens
ttccagaatttccat

SEQ ID NO: 517716 - DNA, 15 bp, Homo sapiens
gttccagaatttcca

SEQ ID NO: 517717 - DNA, 15 bp, Homo sapiens
agttccagaatttcc

SEQ ID NO: 517718 - DNA, 15 bp, Homo sapiens
gagttccagaatttc

SEQ ID NO: 517719 - DNA, 15 bp, Homo sapiens
ggagttccagaattt

SEQ ID NO: 517720 - DNA, 15 bp, Homo sapiens
gggagttccagaatt

SEQ ID NO: 517721 - DNA, 15 bp, Homo sapiens
tgggagttccagaat

SEQ ID NO: 517722 - DNA, 15 bp, Homo sapiens
gtgggagttccagaa

SEQ ID NO: 517723 - DNA, 15 bp, Homo sapiens
ggtgggagttccaga

SEQ ID NO: 517724 - DNA, 15 bp, Homo sapiens
tggtgggagttccag

SEQ ID NO: 517725 - DNA, 15 bp, Homo sapiens
ttggtgggagttcca

SEQ ID NO: 517726 - DNA, 15 bp, Homo sapiens
attggtgggagttcc

SEQ ID NO: 517727 - DNA, 15 bp, Homo sapiens
aattggtgggagttc

SEQ ID NO: 517728 - DNA, 15 bp, Homo sapiens
caattggtgggagtt

SEQ ID NO: 517729 - DNA, 15 bp, Homo sapiens
gcaattggtgggagt

SEQ ID NO: 517730 - DNA, 15 bp, Homo sapiens
agcaattggtgggag

SEQ ID NO: 517731 - DNA, 15 bp, Homo sapiens
aagcaattggtggga

SEQ ID NO: 517732 - DNA, 15 bp, Homo sapiens
gaagcaattggtggg

SEQ ID NO: 517733 - DNA, 15 bp, Homo sapiens
ggaagcaattggtgg

SEQ ID NO: 517734 - DNA, 15 bp, Homo sapiens
tggaagcaattggtg

SEQ ID NO: 517735 - DNA, 15 bp, Homo sapiens
ctggaagcaattggt

SEQ ID NO: 517736 - DNA, 15 bp, Homo sapiens
tctggaagcaattgg

SEQ ID NO: 517737 - DNA, 15 bp, Homo sapiens
ctctggaagcaattg

SEQ ID NO: 517738 - DNA, 15 bp, Homo sapiens
gctctggaagcaatt

SEQ ID NO: 517739 - DNA, 15 bp, Homo sapiens
tgctctggaagcaat

SEQ ID NO: 517740 - DNA, 15 bp, Homo sapiens
ctgctctggaagcaa

SEQ ID NO: 517741 - DNA, 15 bp, Homo sapiens
gctgctctggaagca

SEQ ID NO: 517742 - DNA, 15 bp, Homo sapiens
cgctgctctggaagc

SEQ ID NO: 517743 - DNA, 15 bp, Homo sapiens
ccgctgctctggaag

SEQ ID NO: 517744 - DNA, 15 bp, Homo sapiens
gccgctgctctggaa

SEQ ID NO: 517745 - DNA, 15 bp, Homo sapiens
tgccgctgctctgga

SEQ ID NO: 517746 - DNA, 15 bp, Homo sapiens
gtgccgctgctctgg

SEQ ID NO: 517747 - DNA, 15 bp, Homo sapiens
tgtgccgctgctctg

SEQ ID NO: 517748 - DNA, 15 bp, Homo sapiens
atgtgccgctgctct

SEQ ID NO: 517749 - DNA, 15 bp, Homo sapiens
catgtgccgctgctc

SEQ ID NO: 517750 - DNA, 15 bp, Homo sapiens
acatgtgccgctgct

SEQ ID NO: 517751 - DNA, 15 bp, Homo sapiens
gacatgtgccgctgc

SEQ ID NO: 517752 - DNA, 15 bp, Homo sapiens
tgacatgtgccgctg

SEQ ID NO: 517753 - DNA, 15 bp, Homo sapiens
ctgacatgtgccgct

SEQ ID NO: 517754 - DNA, 15 bp, Homo sapiens
tctgacatgtgccgc

SEQ ID NO: 517755 - DNA, 15 bp, Homo sapiens
ctctgacatgtgccg

SEQ ID NO: 517756 - DNA, 15 bp, Homo sapiens
actctgacatgtgcc

SEQ ID NO: 517757 - DNA, 15 bp, Homo sapiens
aactctgacatgtgc

SEQ ID NO: 517758 - DNA, 15 bp, Homo sapiens
taactctgacatgtg

SEQ ID NO: 517759 - DNA, 15 bp, Homo sapiens
ctaactctgacatgt

SEQ ID NO: 517760 - DNA, 15 bp, Homo sapiens
tctaactctgacatg

SEQ ID NO: 517761 - DNA, 15 bp, Homo sapiens
gtctaactctgacat

SEQ ID NO: 517762 - DNA, 15 bp, Homo sapiens
tgtctaactctgaca

SEQ ID NO: 517763 - DNA, 15 bp, Homo sapiens
atgtctaactctgac

SEQ ID NO: 517764 - DNA, 15 bp, Homo sapiens
aatgtctaactctga

SEQ ID NO: 517765 - DNA, 15 bp, Homo sapiens
gaatgtctaactctg

SEQ ID NO: 517766 - DNA, 15 bp, Homo sapiens
agaatgtctaactct

SEQ ID NO: 517767 - DNA, 15 bp, Homo sapiens
tagaatgtctaactc

SEQ ID NO: 517768 - DNA, 15 bp, Homo sapiens
atagaatgtctaact

SEQ ID NO: 517769 - DNA, 15 bp, Homo sapiens
gatagaatgtctaac

SEQ ID NO: 517770 - DNA, 15 bp, Homo sapiens
tgatagaatgtctaa

SEQ ID NO: 517771 - DNA, 15 bp, Homo sapiens
atgatagaatgtcta

SEQ ID NO: 517772 - DNA, 15 bp, Homo sapiens
gatgatagaatgtct

SEQ ID NO: 517773 - DNA, 15 bp, Homo sapiens
ggatgatagaatgtc

SEQ ID NO: 517774 - DNA, 15 bp, Homo sapiens
gggatgatagaatgt

SEQ ID NO: 517775 - DNA, 15 bp, Homo sapiens
tgggatgatagaatg

SEQ ID NO: 517776 - DNA, 15 bp, Homo sapiens
ttgggatgatagaat

SEQ ID NO: 517777 - DNA, 15 bp, Homo sapiens
attgggatgatagaa

SEQ ID NO: 517778 - DNA, 15 bp, Homo sapiens
aattgggatgataga

SEQ ID NO: 517779 - DNA, 15 bp, Homo sapiens
aaattgggatgatag

SEQ ID NO: 517780 - DNA, 15 bp, Homo sapiens
aaaattgggatgata

SEQ ID NO: 517781 - DNA, 15 bp, Homo sapiens
caaaattgggatgat

SEQ ID NO: 517782 - DNA, 15 bp, Homo sapiens
tcaaaattgggatga

SEQ ID NO: 517783 - DNA, 15 bp, Homo sapiens
ctcaaaattgggatg

SEQ ID NO: 517784 - DNA, 15 bp, Homo sapiens
gctcaaaattgggat

SEQ ID NO: 517785 - DNA, 15 bp, Homo sapiens
ggctcaaaattggga

SEQ ID NO: 517786 - DNA, 15 bp, Homo sapiens
gggctcaaaattggg

SEQ ID NO: 517787 - DNA, 15 bp, Homo sapiens
agggctcaaaattgg

SEQ ID NO: 517788 - DNA, 15 bp, Homo sapiens
aagggctcaaaattg

SEQ ID NO: 517789 - DNA, 15 bp, Homo sapiens
aaagggctcaaaatt

SEQ ID NO: 517790 - DNA, 15 bp, Homo sapiens
gaaagggctcaaaat

SEQ ID NO: 517791 - DNA, 15 bp, Homo sapiens
ggaaagggctcaaaa

SEQ ID NO: 517792 - DNA, 15 bp, Homo sapiens
tggaaagggctcaaa

SEQ ID NO: 517793 - DNA, 15 bp, Homo sapiens
ctggaaagggctcaa

SEQ ID NO: 517794 - DNA, 15 bp, Homo sapiens
cctggaaagggctca

SEQ ID NO: 517795 - DNA, 15 bp, Homo sapiens
tcctggaaagggctc

SEQ ID NO: 517796 - DNA, 15 bp, Homo sapiens
atcctggaaagggct

SEQ ID NO: 517797 - DNA, 15 bp, Homo sapiens
tatcctggaaagggc

SEQ ID NO: 517798 - DNA, 15 bp, Homo sapiens
atatcctggaaaggg

SEQ ID NO: 517799 - DNA, 15 bp, Homo sapiens
tatatcctggaaagg

SEQ ID NO: 517800 - DNA, 15 bp, Homo sapiens
ttatatcctggaaag

SEQ ID NO: 517801 - DNA, 15 bp, Homo sapiens
gttatatcctggaaa

SEQ ID NO: 517802 - DNA, 15 bp, Homo sapiens
agttatatcctggaa

SEQ ID NO: 517803 - DNA, 15 bp, Homo sapiens
cagttatatcctgga

SEQ ID NO: 517804 - DNA, 15 bp, Homo sapiens
gcagttatatcctgg

SEQ ID NO: 517805 - DNA, 15 bp, Homo sapiens
ggcagttatatcctg

SEQ ID NO: 517806 - DNA, 15 bp, Homo sapiens
tggcagttatatcct

SEQ ID NO: 517807 - DNA, 15 bp, Homo sapiens
atggcagttatatcc

SEQ ID NO: 517808 - DNA, 15 bp, Homo sapiens
aatggcagttatatc

SEQ ID NO: 517809 - DNA, 15 bp, Homo sapiens
taatggcagttatat

SEQ ID NO: 517810 - DNA, 15 bp, Homo sapiens
ataatggcagttata

SEQ ID NO: 517811 - DNA, 15 bp, Homo sapiens
aataatggcagttat

SEQ ID NO: 517812 - DNA, 15 bp, Homo sapiens
taataatggcagtta

SEQ ID NO: 517813 - DNA, 15 bp, Homo sapiens
ttaataatggcagtt

SEQ ID NO: 517814 - DNA, 15 bp, Homo sapiens
tttaataatggcagt

SEQ ID NO: 517815 - DNA, 15 bp, Homo sapiens
atttaataatggcag

SEQ ID NO: 517816 - DNA, 15 bp, Homo sapiens
catttaataatggca

SEQ ID NO: 517817 - DNA, 15 bp, Homo sapiens
ccatttaataatggc

SEQ ID NO: 517818 - DNA, 15 bp, Homo sapiens
accatttaataatgg

SEQ ID NO: 517819 - DNA, 15 bp, Homo sapiens
aaccatttaataatg

SEQ ID NO: 517820 - DNA, 15 bp, Homo sapiens
taaccatttaataat

SEQ ID NO: 517821 - DNA, 15 bp, Homo sapiens
ataaccatttaataa

SEQ ID NO: 517822 - DNA, 15 bp, Homo sapiens
aataaccatttaata

SEQ ID NO: 517823 - DNA, 15 bp, Homo sapiens
aaataaccatttaat

SEQ ID NO: 517824 - DNA, 15 bp, Homo sapiens
aaaataaccatttaa

SEQ ID NO: 517825 - DNA, 15 bp, Homo sapiens
aaaaataaccattta

SEQ ID NO: 517826 - DNA, 15 bp, Homo sapiens
aaaaaataaccattt

SEQ ID NO: 517827 - DNA, 15 bp, Homo sapiens
gaaaaaataaccatt

SEQ ID NO: 517828 - DNA, 15 bp, Homo sapiens
agaaaaaataaccat

SEQ ID NO: 517829 - DNA, 15 bp, Homo sapiens
aagaaaaaataacca

SEQ ID NO: 517830 - DNA, 15 bp, Homo sapiens
taagaaaaaataacc

SEQ ID NO: 517831 - DNA, 15 bp, Homo sapiens
gtaagaaaaaataac

SEQ ID NO: 517832 - DNA, 15 bp, Homo sapiens
ggtaagaaaaaataa

SEQ ID NO: 517833 - DNA, 15 bp, Homo sapiens
aggtaagaaaaaata

SEQ ID NO: 517834 - DNA, 15 bp, Homo sapiens
taggtaagaaaaaat

SEQ ID NO: 517835 - DNA, 15 bp, Homo sapiens
ttaggtaagaaaaaa

SEQ ID NO: 517836 - DNA, 15 bp, Homo sapiens
cttaggtaagaaaaa

SEQ ID NO: 517837 - DNA, 15 bp, Homo sapiens
tcttaggtaagaaaa

SEQ ID NO: 517838 - DNA, 15 bp, Homo sapiens
gtcttaggtaagaaa

SEQ ID NO: 517839 - DNA, 15 bp, Homo sapiens
agtcttaggtaagaa

SEQ ID NO: 517840 - DNA, 15 bp, Homo sapiens
aagtcttaggtaaga

SEQ ID NO: 517841 - DNA, 15 bp, Homo sapiens
aaagtcttaggtaag

SEQ ID NO: 517842 - DNA, 15 bp, Homo sapiens
aaaagtcttaggtaa

SEQ ID NO: 517843 - DNA, 15 bp, Homo sapiens
aaaaagtcttaggta

SEQ ID NO: 517844 - DNA, 15 bp, Homo sapiens
taaaaagtcttaggt

SEQ ID NO: 517845 - DNA, 15 bp, Homo sapiens
ttaaaaagtcttagg

SEQ ID NO: 517846 - DNA, 15 bp, Homo sapiens
tttaaaaagtcttag

SEQ ID NO: 517847 - DNA, 15 bp, Homo sapiens
ttttaaaaagtctta

SEQ ID NO: 517848 - DNA, 15 bp, Homo sapiens
attttaaaaagtctt

SEQ ID NO: 517849 - DNA, 15 bp, Homo sapiens
cattttaaaaagtct

SEQ ID NO: 517850 - DNA, 15 bp, Homo sapiens
tcattttaaaaagtc

SEQ ID NO: 517851 - DNA, 15 bp, Homo sapiens
atcattttaaaaagt

SEQ ID NO: 517852 - DNA, 15 bp, Homo sapiens
gatcattttaaaaag

SEQ ID NO: 517853 - DNA, 15 bp, Homo sapiens
ggatcattttaaaaa

SEQ ID NO: 517854 - DNA, 15 bp, Homo sapiens
tggatcattttaaaa

SEQ ID NO: 517855 - DNA, 15 bp, Homo sapiens
atggatcattttaaa

SEQ ID NO: 517856 - DNA, 15 bp, Homo sapiens
catggatcattttaa

SEQ ID NO: 517857 - DNA, 15 bp, Homo sapiens
tcatggatcatttta

SEQ ID NO: 517858 - DNA, 15 bp, Homo sapiens
ttcatggatcatttt

SEQ ID NO: 517859 - DNA, 15 bp, Homo sapiens
cttcatggatcattt

SEQ ID NO: 517860 - DNA, 15 bp, Homo sapiens
tcttcatggatcatt

SEQ ID NO: 517861 - DNA, 15 bp, Homo sapiens
atcttcatggatcat

SEQ ID NO: 517862 - DNA, 15 bp, Homo sapiens
catcttcatggatca

SEQ ID NO: 517863 - DNA, 15 bp, Homo sapiens
acatcttcatggatc

SEQ ID NO: 517864 - DNA, 15 bp, Homo sapiens
tacatcttcatggat

SEQ ID NO: 517865 - DNA, 15 bp, Homo sapiens
gtacatcttcatgga

SEQ ID NO: 517866 - DNA, 15 bp, Homo sapiens
agtacatcttcatgg

SEQ ID NO: 517867 - DNA, 15 bp, Homo sapiens
gagtacatcttcatg

SEQ ID NO: 517868 - DNA, 15 bp, Homo sapiens
agagtacatcttcat

SEQ ID NO: 517869 - DNA, 15 bp, Homo sapiens
aagagtacatcttca

SEQ ID NO: 517870 - DNA, 15 bp, Homo sapiens
aaagagtacatcttc

SEQ ID NO: 517871 - DNA, 15 bp, Homo sapiens
aaaagagtacatctt

SEQ ID NO: 517872 - DNA, 15 bp, Homo sapiens
caaaagagtacatct

SEQ ID NO: 517873 - DNA, 15 bp, Homo sapiens
tcaaaagagtacatc

SEQ ID NO: 517874 - DNA, 15 bp, Homo sapiens
ctcaaaagagtacat

SEQ ID NO: 517875 - DNA, 15 bp, Homo sapiens
cctcaaaagagtaca

SEQ ID NO: 517876 - DNA, 15 bp, Homo sapiens
tcctcaaaagagtac

SEQ ID NO: 517877 - DNA, 15 bp, Homo sapiens
atcctcaaaagagta

SEQ ID NO: 517878 - DNA, 15 bp, Homo sapiens
catcctcaaaagagt

SEQ ID NO: 517879 - DNA, 15 bp, Homo sapiens
gcatcctcaaaagag

SEQ ID NO: 517880 - DNA, 15 bp, Homo sapiens
tgcatcctcaaaaga

SEQ ID NO: 517881 - DNA, 15 bp, Homo sapiens
ttgcatcctcaaaag

SEQ ID NO: 517882 - DNA, 15 bp, Homo sapiens
cttgcatcctcaaaa

SEQ ID NO: 517883 - DNA, 15 bp, Homo sapiens
ccttgcatcctcaaa

SEQ ID NO: 517884 - DNA, 15 bp, Homo sapiens
tccttgcatcctcaa

SEQ ID NO: 517885 - DNA, 15 bp, Homo sapiens
ctccttgcatcctca

SEQ ID NO: 517886 - DNA, 15 bp, Homo sapiens
tctccttgcatcctc

SEQ ID NO: 517887 - DNA, 15 bp, Homo sapiens
ctctccttgcatcct

SEQ ID NO: 517888 - DNA, 15 bp, Homo sapiens
tctctccttgcatcc

SEQ ID NO: 517889 - DNA, 15 bp, Homo sapiens
ttctctccttgcatc

SEQ ID NO: 517890 - DNA, 15 bp, Homo sapiens
attctctccttgcat

SEQ ID NO: 517891 - DNA, 15 bp, Homo sapiens
aattctctccttgca

SEQ ID NO: 517892 - DNA, 15 bp, Homo sapiens
taattctctccttgc

SEQ ID NO: 517893 - DNA, 15 bp, Homo sapiens
gtaattctctccttg

SEQ ID NO: 517894 - DNA, 15 bp, Homo sapiens
tgtaattctctcctt

SEQ ID NO: 517895 - DNA, 15 bp, Homo sapiens
ctgtaattctctcct

SEQ ID NO: 517896 - DNA, 15 bp, Homo sapiens
gctgtaattctctcc

SEQ ID NO: 517897 - DNA, 15 bp, Homo sapiens
tgctgtaattctctc

SEQ ID NO: 517898 - DNA, 15 bp, Homo sapiens
atgctgtaattctct

SEQ ID NO: 517899 - DNA, 15 bp, Homo sapiens
tatgctgtaattctc

SEQ ID NO: 517900 - DNA, 15 bp, Homo sapiens
atatgctgtaattct

SEQ ID NO: 517901 - DNA, 15 bp, Homo sapiens
catatgctgtaattc

SEQ ID NO: 517902 - DNA, 15 bp, Homo sapiens
acatatgctgtaatt

SEQ ID NO: 517903 - DNA, 15 bp, Homo sapiens
aacatatgctgtaat

SEQ ID NO: 517904 - DNA, 15 bp, Homo sapiens
aaacatatgctgtaa

SEQ ID NO: 517905 - DNA, 15 bp, Homo sapiens
aaaacatatgctgta

SEQ ID NO: 517906 - DNA, 15 bp, Homo sapiens
aaaaacatatgctgt

SEQ ID NO: 517907 - DNA, 15 bp, Homo sapiens
taaaaacatatgctg

SEQ ID NO: 517908 - DNA, 15 bp, Homo sapiens
ttaaaaacatatgct

SEQ ID NO: 517909 - DNA, 15 bp, Homo sapiens
cttaaaaacatatgc

SEQ ID NO: 517910 - DNA, 15 bp, Homo sapiens
tcttaaaaacatatg

SEQ ID NO: 517911 - DNA, 15 bp, Homo sapiens
ctcttaaaaacatat

SEQ ID NO: 517912 - DNA, 15 bp, Homo sapiens
cctcttaaaaacata

SEQ ID NO: 517913 - DNA, 15 bp, Homo sapiens
acctcttaaaaacat

SEQ ID NO: 517914 - DNA, 15 bp, Homo sapiens
aacctcttaaaaaca

SEQ ID NO: 517915 - DNA, 15 bp, Homo sapiens
taacctcttaaaaac

SEQ ID NO: 517916 - DNA, 15 bp, Homo sapiens
gtaacctcttaaaaa

SEQ ID NO: 517917 - DNA, 15 bp, Homo sapiens
ggtaacctcttaaaa

SEQ ID NO: 517918 - DNA, 15 bp, Homo sapiens
aggtaacctcttaaa

SEQ ID NO: 517919 - DNA, 15 bp, Homo sapiens
aaggtaacctcttaa

SEQ ID NO: 517920 - DNA, 15 bp, Homo sapiens
caaggtaacctctta

SEQ ID NO: 517921 - DNA, 15 bp, Homo sapiens
acaaggtaacctctt

SEQ ID NO: 517922 - DNA, 15 bp, Homo sapiens
cacaaggtaacctct

SEQ ID NO: 517923 - DNA, 15 bp, Homo sapiens
gcacaaggtaacctc

SEQ ID NO: 517924 - DNA, 15 bp, Homo sapiens
agcacaaggtaacct

SEQ ID NO: 517925 - DNA, 15 bp, Homo sapiens
aagcacaaggtaacc

SEQ ID NO: 517926 - DNA, 15 bp, Homo sapiens
taagcacaaggtaac

SEQ ID NO: 517927 - DNA, 15 bp, Homo sapiens
ttaagcacaaggtaa

SEQ ID NO: 517928 - DNA, 15 bp, Homo sapiens
attaagcacaaggta

SEQ ID NO: 517929 - DNA, 15 bp, Homo sapiens
aattaagcacaaggt

SEQ ID NO: 517930 - DNA, 15 bp, Homo sapiens
caattaagcacaagg

SEQ ID NO: 517931 - DNA, 15 bp, Homo sapiens
tcaattaagcacaag

SEQ ID NO: 517932 - DNA, 15 bp, Homo sapiens
ttcaattaagcacaa

SEQ ID NO: 517933 - DNA, 15 bp, Homo sapiens
cttcaattaagcaca

SEQ ID NO: 517934 - DNA, 15 bp, Homo sapiens
acttcaattaagcac

SEQ ID NO: 517935 - DNA, 15 bp, Homo sapiens
aacttcaattaagca

SEQ ID NO: 517936 - DNA, 15 bp, Homo sapiens
taacttcaattaagc

SEQ ID NO: 517937 - DNA, 15 bp, Homo sapiens
ataacttcaattaag

SEQ ID NO: 517938 - DNA, 15 bp, Homo sapiens
aataacttcaattaa

SEQ ID NO: 517939 - DNA, 15 bp, Homo sapiens
gaataacttcaatta

SEQ ID NO: 517940 - DNA, 15 bp, Homo sapiens
tgaataacttcaatt

SEQ ID NO: 517941 - DNA, 15 bp, Homo sapiens
atgaataacttcaat

SEQ ID NO: 517942 - DNA, 15 bp, Homo sapiens
aatgaataacttcaa

SEQ ID NO: 517943 - DNA, 15 bp, Homo sapiens
taatgaataacttca

SEQ ID NO: 517944 - DNA, 15 bp, Homo sapiens
ttaatgaataacttc

SEQ ID NO: 517945 - DNA, 15 bp, Homo sapiens
tttaatgaataactt

SEQ ID NO: 517946 - DNA, 15 bp, Homo sapiens
ctttaatgaataact

SEQ ID NO: 517947 - DNA, 15 bp, Homo sapiens
actttaatgaataac

SEQ ID NO: 517948 - DNA, 15 bp, Homo sapiens
gactttaatgaataa

SEQ ID NO: 517949 - DNA, 15 bp, Homo sapiens
agactttaatgaata

SEQ ID NO: 517950 - DNA, 15 bp, Homo sapiens
aagactttaatgaat

SEQ ID NO: 517951 - DNA, 15 bp, Homo sapiens
taagactttaatgaa

SEQ ID NO: 517952 - DNA, 15 bp, Homo sapiens
gtaagactttaatga

SEQ ID NO: 517953 - DNA, 15 bp, Homo sapiens
tgtaagactttaatg

SEQ ID NO: 517954 - DNA, 15 bp, Homo sapiens
ttgtaagactttaat

SEQ ID NO: 517955 - DNA, 15 bp, Homo sapiens
tttgtaagactttaa

SEQ ID NO: 517956 - DNA, 15 bp, Homo sapiens
gtttgtaagacttta

SEQ ID NO: 517957 - DNA, 15 bp, Homo sapiens
agtttgtaagacttt

SEQ ID NO: 517958 - DNA, 15 bp, Homo sapiens
tagtttgtaagactt

SEQ ID NO: 517959 - DNA, 15 bp, Homo sapiens
atagtttgtaagact

SEQ ID NO: 517960 - DNA, 15 bp, Homo sapiens
catagtttgtaagac

SEQ ID NO: 517961 - DNA, 15 bp, Homo sapiens
acatagtttgtaaga

SEQ ID NO: 517962 - DNA, 15 bp, Homo sapiens
gacatagtttgtaag

SEQ ID NO: 517963 - DNA, 15 bp, Homo sapiens
agacatagtttgtaa

SEQ ID NO: 517964 - DNA, 15 bp, Homo sapiens
aagacatagtttgta

SEQ ID NO: 517965 - DNA, 15 bp, Homo sapiens
taagacatagtttgt

SEQ ID NO: 517966 - DNA, 15 bp, Homo sapiens
ctaagacatagtttg

SEQ ID NO: 517967 - DNA, 15 bp, Homo sapiens
cctaagacatagttt

SEQ ID NO: 517968 - DNA, 15 bp, Homo sapiens
tcctaagacatagtt

SEQ ID NO: 517969 - DNA, 15 bp, Homo sapiens
ctcctaagacatagt

SEQ ID NO: 517970 - DNA, 15 bp, Homo sapiens
tctcctaagacatag

SEQ ID NO: 517971 - DNA, 15 bp, Homo sapiens
ttctcctaagacata

SEQ ID NO: 517972 - DNA, 15 bp, Homo sapiens
gttctcctaagacat

SEQ ID NO: 517973 - DNA, 15 bp, Homo sapiens
tgttctcctaagaca

SEQ ID NO: 517974 - DNA, 15 bp, Homo sapiens
atgttctcctaagac

SEQ ID NO: 517975 - DNA, 15 bp, Homo sapiens
tatgttctcctaaga

SEQ ID NO: 517976 - DNA, 15 bp, Homo sapiens
ctatgttctcctaag

SEQ ID NO: 517977 - DNA, 15 bp, Homo sapiens
tctatgttctcctaa

SEQ ID NO: 517978 - DNA, 15 bp, Homo sapiens
ttctatgttctccta

SEQ ID NO: 517979 - DNA, 15 bp, Homo sapiens
attctatgttctcct

SEQ ID NO: 517980 - DNA, 15 bp, Homo sapiens
aattctatgttctcc

SEQ ID NO: 517981 - DNA, 15 bp, Homo sapiens
aaattctatgttctc

SEQ ID NO: 517982 - DNA, 15 bp, Homo sapiens
gaaattctatgttct

SEQ ID NO: 517983 - DNA, 15 bp, Homo sapiens
tgaaattctatgttc

SEQ ID NO: 517984 - DNA, 15 bp, Homo sapiens
ctgaaattctatgtt

SEQ ID NO: 517985 - DNA, 15 bp, Homo sapiens
tctgaaattctatgt

SEQ ID NO: 517986 - DNA, 15 bp, Homo sapiens
gtctgaaattctatg

SEQ ID NO: 517987 - DNA, 15 bp, Homo sapiens
ggtctgaaattctat

SEQ ID NO: 517988 - DNA, 15 bp, Homo sapiens
tggtctgaaattcta

SEQ ID NO: 517989 - DNA, 15 bp, Homo sapiens
ttggtctgaaattct

SEQ ID NO: 517990 - DNA, 15 bp, Homo sapiens
attggtctgaaattc

SEQ ID NO: 517991 - DNA, 15 bp, Homo sapiens
tattggtctgaaatt

SEQ ID NO: 517992 - DNA, 15 bp, Homo sapiens
ctattggtctgaaat

SEQ ID NO: 517993 - DNA, 15 bp, Homo sapiens
actattggtctgaaa

SEQ ID NO: 517994 - DNA, 15 bp, Homo sapiens
tactattggtctgaa

SEQ ID NO: 517995 - DNA, 15 bp, Homo sapiens
ttactattggtctga

SEQ ID NO: 517996 - DNA, 15 bp, Homo sapiens
cttactattggtctg

SEQ ID NO: 517997 - DNA, 15 bp, Homo sapiens
tcttactattggtct

SEQ ID NO: 517998 - DNA, 15 bp, Homo sapiens
ttcttactattggtc

SEQ ID NO: 517999 - DNA, 15 bp, Homo sapiens
tttcttactattggt

SEQ ID NO: 518000 - DNA, 15 bp, Homo sapiens
atttcttactattgg

SEQ ID NO: 518001 - DNA, 15 bp, Homo sapiens
catttcttactattg

SEQ ID NO: 518002 - DNA, 15 bp, Homo sapiens
gcatttcttactatt

SEQ ID NO: 518003 - DNA, 15 bp, Homo sapiens
tgcatttcttactat

SEQ ID NO: 518004 - DNA, 15 bp, Homo sapiens
atgcatttcttacta

SEQ ID NO: 518005 - DNA, 15 bp, Homo sapiens
aatgcatttcttact

SEQ ID NO: 518006 - DNA, 15 bp, Homo sapiens
taatgcatttcttac

SEQ ID NO: 518007 - DNA, 15 bp, Homo sapiens
ctaatgcatttctta

SEQ ID NO: 518008 - DNA, 15 bp, Homo sapiens
gctaatgcatttctt

SEQ ID NO: 518009 - DNA, 15 bp, Homo sapiens
ggctaatgcatttct

SEQ ID NO: 518010 - DNA, 15 bp, Homo sapiens
aggctaatgcatttc

SEQ ID NO: 518011 - DNA, 15 bp, Homo sapiens
caggctaatgcattt

SEQ ID NO: 518012 - DNA, 15 bp, Homo sapiens
ccaggctaatgcatt

SEQ ID NO: 518013 - DNA, 15 bp, Homo sapiens
cccaggctaatgcat

SEQ ID NO: 518014 - DNA, 15 bp, Homo sapiens
gcccaggctaatgca

SEQ ID NO: 518015 - DNA, 15 bp, Homo sapiens
ggcccaggctaatgc

SEQ ID NO: 518016 - DNA, 15 bp, Homo sapiens
aggcccaggctaatg

SEQ ID NO: 518017 - DNA, 15 bp, Homo sapiens
aaggcccaggctaat

SEQ ID NO: 518018 - DNA, 15 bp, Homo sapiens
aaaggcccaggctaa

SEQ ID NO: 518019 - DNA, 15 bp, Homo sapiens
aaaaggcccaggcta

SEQ ID NO: 518020 - DNA, 15 bp, Homo sapiens
caaaaggcccaggct

SEQ ID NO: 518021 - DNA, 15 bp, Homo sapiens
tcaaaaggcccaggc

SEQ ID NO: 518022 - DNA, 15 bp, Homo sapiens
ctcaaaaggcccagg

SEQ ID NO: 518023 - DNA, 15 bp, Homo sapiens
tctcaaaaggcccag

SEQ ID NO: 518024 - DNA, 15 bp, Homo sapiens
gtctcaaaaggccca

SEQ ID NO: 518025 - DNA, 15 bp, Homo sapiens
ggtctcaaaaggccc

SEQ ID NO: 518026 - DNA, 15 bp, Homo sapiens
tggtctcaaaaggcc

SEQ ID NO: 518027 - DNA, 15 bp, Homo sapiens
ttggtctcaaaaggc

SEQ ID NO: 518028 - DNA, 15 bp, Homo sapiens
tttggtctcaaaagg

SEQ ID NO: 518029 - DNA, 15 bp, Homo sapiens
ctttggtctcaaaag

SEQ ID NO: 518030 - DNA, 15 bp, Homo sapiens
gctttggtctcaaaa

SEQ ID NO: 518031 - DNA, 15 bp, Homo sapiens
agctttggtctcaaa

SEQ ID NO: 518032 - DNA, 15 bp, Homo sapiens
aagctttggtctcaa

SEQ ID NO: 518033 - DNA, 15 bp, Homo sapiens
caagctttggtctca

SEQ ID NO: 518034 - DNA, 15 bp, Homo sapiens
ccaagctttggtctc

SEQ ID NO: 518035 - DNA, 15 bp, Homo sapiens
cccaagctttggtct

SEQ ID NO: 518036 - DNA, 15 bp, Homo sapiens
ccccaagctttggtc

SEQ ID NO: 518037 - DNA, 15 bp, Homo sapiens
tccccaagctttggt

SEQ ID NO: 518038 - DNA, 15 bp, Homo sapiens
ttccccaagctttgg

SEQ ID NO: 518039 - DNA, 15 bp, Homo sapiens
gttccccaagctttg

SEQ ID NO: 518040 - DNA, 15 bp, Homo sapiens
tgttccccaagcttt

SEQ ID NO: 518041 - DNA, 15 bp, Homo sapiens
gtgttccccaagctt

SEQ ID NO: 518042 - DNA, 15 bp, Homo sapiens
agtgttccccaagct

SEQ ID NO: 518043 - DNA, 15 bp, Homo sapiens
gagtgttccccaagc

SEQ ID NO: 518044 - DNA, 15 bp, Homo sapiens
agagtgttccccaag

SEQ ID NO: 518045 - DNA, 15 bp, Homo sapiens
aagagtgttccccaa

SEQ ID NO: 518046 - DNA, 15 bp, Homo sapiens
taagagtgttcccca

SEQ ID NO: 518047 - DNA, 15 bp, Homo sapiens
ctaagagtgttcccc

SEQ ID NO: 518048 - DNA, 15 bp, Homo sapiens
tctaagagtgttccc

SEQ ID NO: 518049 - DNA, 15 bp, Homo sapiens
atctaagagtgttcc

SEQ ID NO: 518050 - DNA, 15 bp, Homo sapiens
tatctaagagtgttc

SEQ ID NO: 518051 - DNA, 15 bp, Homo sapiens
ttatctaagagtgtt

SEQ ID NO: 518052 - DNA, 15 bp, Homo sapiens
tttatctaagagtgt

SEQ ID NO: 518053 - DNA, 15 bp, Homo sapiens
ctttatctaagagtg

SEQ ID NO: 518054 - DNA, 15 bp, Homo sapiens
cctttatctaagagt

SEQ ID NO: 518055 - DNA, 15 bp, Homo sapiens
tcctttatctaagag

SEQ ID NO: 518056 - DNA, 15 bp, Homo sapiens
ttcctttatctaaga

SEQ ID NO: 518057 - DNA, 15 bp, Homo sapiens
attcctttatctaag

SEQ ID NO: 518058 - DNA, 15 bp, Homo sapiens
tattcctttatctaa

SEQ ID NO: 518059 - DNA, 15 bp, Homo sapiens
ctattcctttatcta

SEQ ID NO: 518060 - DNA, 15 bp, Homo sapiens
actattcctttatct

SEQ ID NO: 518061 - DNA, 15 bp, Homo sapiens
gactattcctttatc

SEQ ID NO: 518062 - DNA, 15 bp, Homo sapiens
agactattcctttat

SEQ ID NO: 518063 - DNA, 15 bp, Homo sapiens
aagactattccttta

SEQ ID NO: 518064 - DNA, 15 bp, Homo sapiens
caagactattccttt

SEQ ID NO: 518065 - DNA, 15 bp, Homo sapiens
ccaagactattcctt

SEQ ID NO: 518066 - DNA, 15 bp, Homo sapiens
gccaagactattcct

SEQ ID NO: 518067 - DNA, 15 bp, Homo sapiens
agccaagactattcc

SEQ ID NO: 518068 - DNA, 15 bp, Homo sapiens
cagccaagactattc

SEQ ID NO: 518069 - DNA, 15 bp, Homo sapiens
ccagccaagactatt

SEQ ID NO: 518070 - DNA, 15 bp, Homo sapiens
tccagccaagactat

SEQ ID NO: 518071 - DNA, 15 bp, Homo sapiens
gtccagccaagacta

SEQ ID NO: 518072 - DNA, 15 bp, Homo sapiens
ggtccagccaagact

SEQ ID NO: 518073 - DNA, 15 bp, Homo sapiens
gggtccagccaagac

SEQ ID NO: 518074 - DNA, 15 bp, Homo sapiens
agggtccagccaaga

SEQ ID NO: 518075 - DNA, 15 bp, Homo sapiens
aagggtccagccaag

SEQ ID NO: 518076 - DNA, 15 bp, Homo sapiens
gaagggtccagccaa

SEQ ID NO: 518077 - DNA, 15 bp, Homo sapiens
ggaagggtccagcca

SEQ ID NO: 518078 - DNA, 15 bp, Homo sapiens
aggaagggtccagcc

SEQ ID NO: 518079 - DNA, 15 bp, Homo sapiens
aaggaagggtccagc

SEQ ID NO: 518080 - DNA, 15 bp, Homo sapiens
gaaggaagggtccag

SEQ ID NO: 518081 - DNA, 15 bp, Homo sapiens
agaaggaagggtcca

SEQ ID NO: 518082 - DNA, 15 bp, Homo sapiens
cagaaggaagggtcc

SEQ ID NO: 518083 - DNA, 15 bp, Homo sapiens
ccagaaggaagggtc

SEQ ID NO: 518084 - DNA, 15 bp, Homo sapiens
gccagaaggaagggt

SEQ ID NO: 518085 - DNA, 15 bp, Homo sapiens
tgccagaaggaaggg

SEQ ID NO: 518086 - DNA, 15 bp, Homo sapiens
ttgccagaaggaagg

SEQ ID NO: 518087 - DNA, 15 bp, Homo sapiens
cttgccagaaggaag

SEQ ID NO: 518088 - DNA, 15 bp, Homo sapiens
tcttgccagaaggaa

SEQ ID NO: 518089 - DNA, 15 bp, Homo sapiens
atcttgccagaagga

SEQ ID NO: 518090 - DNA, 15 bp, Homo sapiens
tatcttgccagaagg

SEQ ID NO: 518091 - DNA, 15 bp, Homo sapiens
gtatcttgccagaag

SEQ ID NO: 518092 - DNA, 15 bp, Homo sapiens
tgtatcttgccagaa

SEQ ID NO: 518093 - DNA, 15 bp, Homo sapiens
atgtatcttgccaga

SEQ ID NO: 518094 - DNA, 15 bp, Homo sapiens
aatgtatcttgccag

SEQ ID NO: 518095 - DNA, 15 bp, Homo sapiens
gaatgtatcttgcca

SEQ ID NO: 518096 - DNA, 15 bp, Homo sapiens
ggaatgtatcttgcc

SEQ ID NO: 518097 - DNA, 15 bp, Homo sapiens
tggaatgtatcttgc

SEQ ID NO: 518098 - DNA, 15 bp, Homo sapiens
ctggaatgtatcttg

SEQ ID NO: 518099 - DNA, 15 bp, Homo sapiens
cctggaatgtatctt

SEQ ID NO: 518100 - DNA, 15 bp, Homo sapiens
gcctggaatgtatct

SEQ ID NO: 518101 - DNA, 15 bp, Homo sapiens
tgcctggaatgtatc

SEQ ID NO: 518102 - DNA, 15 bp, Homo sapiens
atgcctggaatgtat

SEQ ID NO: 518103 - DNA, 15 bp, Homo sapiens
aatgcctggaatgta

SEQ ID NO: 518104 - DNA, 15 bp, Homo sapiens
aaatgcctggaatgt

SEQ ID NO: 518105 - DNA, 15 bp, Homo sapiens
aaaatgcctggaatg

SEQ ID NO: 518106 - DNA, 15 bp, Homo sapiens
caaaatgcctggaat

SEQ ID NO: 518107 - DNA, 15 bp, Homo sapiens
ccaaaatgcctggaa

SEQ ID NO: 518108 - DNA, 15 bp, Homo sapiens
gccaaaatgcctgga

SEQ ID NO: 518109 - DNA, 15 bp, Homo sapiens
tgccaaaatgcctgg

SEQ ID NO: 518110 - DNA, 15 bp, Homo sapiens
atgccaaaatgcctg

SEQ ID NO: 518111 - DNA, 15 bp, Homo sapiens
aatgccaaaatgcct

SEQ ID NO: 518112 - DNA, 15 bp, Homo sapiens
gaatgccaaaatgcc

SEQ ID NO: 518113 - DNA, 15 bp, Homo sapiens
tgaatgccaaaatgc

SEQ ID NO: 518114 - DNA, 15 bp, Homo sapiens
atgaatgccaaaatg

SEQ ID NO: 518115 - DNA, 15 bp, Homo sapiens
tatgaatgccaaaat

SEQ ID NO: 518116 - DNA, 15 bp, Homo sapiens
atatgaatgccaaaa

SEQ ID NO: 518117 - DNA, 15 bp, Homo sapiens
aatatgaatgccaaa

SEQ ID NO: 518118 - DNA, 15 bp, Homo sapiens
taatatgaatgccaa

SEQ ID NO: 518119 - DNA, 15 bp, Homo sapiens
gtaatatgaatgcca

SEQ ID NO: 518120 - DNA, 15 bp, Homo sapiens
tgtaatatgaatgcc

SEQ ID NO: 518121 - DNA, 15 bp, Homo sapiens
ttgtaatatgaatgc

SEQ ID NO: 518122 - DNA, 15 bp, Homo sapiens
cttgtaatatgaatg

SEQ ID NO: 518123 - DNA, 15 bp, Homo sapiens
tcttgtaatatgaat

SEQ ID NO: 518124 - DNA, 15 bp, Homo sapiens
ctcttgtaatatgaa

SEQ ID NO: 518125 - DNA, 15 bp, Homo sapiens
tctcttgtaatatga

SEQ ID NO: 518126 - DNA, 15 bp, Homo sapiens
ttctcttgtaatatg

SEQ ID NO: 518127 - DNA, 15 bp, Homo sapiens
tttctcttgtaatat

SEQ ID NO: 518128 - DNA, 15 bp, Homo sapiens
ctttctcttgtaata

SEQ ID NO: 518129 - DNA, 15 bp, Homo sapiens
cctttctcttgtaat

SEQ ID NO: 518130 - DNA, 15 bp, Homo sapiens
acctttctcttgtaa

SEQ ID NO: 518131 - DNA, 15 bp, Homo sapiens
tacctttctcttgta

SEQ ID NO: 518132 - DNA, 15 bp, Homo sapiens
ttacctttctcttgt

SEQ ID NO: 518133 - DNA, 15 bp, Homo sapiens
attacctttctcttg

SEQ ID NO: 518134 - DNA, 15 bp, Homo sapiens
tattacctttctctt

SEQ ID NO: 518135 - DNA, 15 bp, Homo sapiens
atattacctttctct

SEQ ID NO: 518136 - DNA, 15 bp, Homo sapiens
tatattacctttctc

SEQ ID NO: 518137 - DNA, 15 bp, Homo sapiens
atatattacctttct

SEQ ID NO: 518138 - DNA, 15 bp, Homo sapiens
aatatattacctttc

SEQ ID NO: 518139 - DNA, 15 bp, Homo sapiens
gaatatattaccttt

SEQ ID NO: 518140 - DNA, 15 bp, Homo sapiens
ggaatatattacctt

SEQ ID NO: 518141 - DNA, 15 bp, Homo sapiens
gggaatatattacct

SEQ ID NO: 518142 - DNA, 15 bp, Homo sapiens
agggaatatattacc

SEQ ID NO: 518143 - DNA, 15 bp, Homo sapiens
tagggaatatattac

SEQ ID NO: 518144 - DNA, 15 bp, Homo sapiens
atagggaatatatta

SEQ ID NO: 518145 - DNA, 15 bp, Homo sapiens
aatagggaatatatt

SEQ ID NO: 518146 - DNA, 15 bp, Homo sapiens
aaatagggaatatat

SEQ ID NO: 518147 - DNA, 15 bp, Homo sapiens
aaaatagggaatata

SEQ ID NO: 518148 - DNA, 15 bp, Homo sapiens
aaaaatagggaatat

SEQ ID NO: 518149 - DNA, 15 bp, Homo sapiens
taaaaatagggaata

SEQ ID NO: 518150 - DNA, 15 bp, Homo sapiens
ataaaaatagggaat

SEQ ID NO: 518151 - DNA, 15 bp, Homo sapiens
tataaaaatagggaa

SEQ ID NO: 518152 - DNA, 15 bp, Homo sapiens
ctataaaaataggga

SEQ ID NO: 518153 - DNA, 15 bp, Homo sapiens
tctataaaaataggg

SEQ ID NO: 518154 - DNA, 15 bp, Homo sapiens
atctataaaaatagg

SEQ ID NO: 518155 - DNA, 15 bp, Homo sapiens
catctataaaaatag

SEQ ID NO: 518156 - DNA, 15 bp, Homo sapiens
tcatctataaaaata

SEQ ID NO: 518157 - DNA, 15 bp, Homo sapiens
ctcatctataaaaat

SEQ ID NO: 518158 - DNA, 15 bp, Homo sapiens
cctcatctataaaaa

SEQ ID NO: 518159 - DNA, 15 bp, Homo sapiens
tcctcatctataaaa

SEQ ID NO: 518160 - DNA, 15 bp, Homo sapiens
ttcctcatctataaa

SEQ ID NO: 518161 - DNA, 15 bp, Homo sapiens
tttcctcatctataa

SEQ ID NO: 518162 - DNA, 15 bp, Homo sapiens
gtttcctcatctata

SEQ ID NO: 518163 - DNA, 15 bp, Homo sapiens
ggtttcctcatctat

SEQ ID NO: 518164 - DNA, 15 bp, Homo sapiens
cggtttcctcatcta

SEQ ID NO: 518165 - DNA, 15 bp, Homo sapiens
tcggtttcctcatct

SEQ ID NO: 518166 - DNA, 15 bp, Homo sapiens
ttcggtttcctcatc

SEQ ID NO: 518167 - DNA, 15 bp, Homo sapiens
cttcggtttcctcat

SEQ ID NO: 518168 - DNA, 15 bp, Homo sapiens
gcttcggtttcctca

SEQ ID NO: 518169 - DNA, 15 bp, Homo sapiens
ggcttcggtttcctc

SEQ ID NO: 518170 - DNA, 15 bp, Homo sapiens
gggcttcggtttcct

SEQ ID NO: 518171 - DNA, 15 bp, Homo sapiens
tgggcttcggtttcc

SEQ ID NO: 518172 - DNA, 15 bp, Homo sapiens
ctgggcttcggtttc

SEQ ID NO: 518173 - DNA, 15 bp, Homo sapiens
tctgggcttcggttt

SEQ ID NO: 518174 - DNA, 15 bp, Homo sapiens
ttctgggcttcggtt

SEQ ID NO: 518175 - DNA, 15 bp, Homo sapiens
tttctgggcttcggt

SEQ ID NO: 518176 - DNA, 15 bp, Homo sapiens
ctttctgggcttcgg

SEQ ID NO: 518177 - DNA, 15 bp, Homo sapiens
cctttctgggcttcg

SEQ ID NO: 518178 - DNA, 15 bp, Homo sapiens
acctttctgggcttc

SEQ ID NO: 518179 - DNA, 15 bp, Homo sapiens
aacctttctgggctt

SEQ ID NO: 518180 - DNA, 15 bp, Homo sapiens
taacctttctgggct

SEQ ID NO: 518181 - DNA, 15 bp, Homo sapiens
ttaacctttctgggc

SEQ ID NO: 518182 - DNA, 15 bp, Homo sapiens
cttaacctttctggg

SEQ ID NO: 518183 - DNA, 15 bp, Homo sapiens
acttaacctttctgg

SEQ ID NO: 518184 - DNA, 15 bp, Homo sapiens
tacttaacctttctg

SEQ ID NO: 518185 - DNA, 15 bp, Homo sapiens
ttacttaacctttct

SEQ ID NO: 518186 - DNA, 15 bp, Homo sapiens
tttacttaacctttc

SEQ ID NO: 518187 - DNA, 15 bp, Homo sapiens
atttacttaaccttt

SEQ ID NO: 518188 - DNA, 15 bp, Homo sapiens
aatttacttaacctt

SEQ ID NO: 518189 - DNA, 15 bp, Homo sapiens
caatttacttaacct

SEQ ID NO: 518190 - DNA, 15 bp, Homo sapiens
gcaatttacttaacc

SEQ ID NO: 518191 - DNA, 15 bp, Homo sapiens
agcaatttacttaac

SEQ ID NO: 518192 - DNA, 15 bp, Homo sapiens
cagcaatttacttaa

SEQ ID NO: 518193 - DNA, 15 bp, Homo sapiens
tcagcaatttactta

SEQ ID NO: 518194 - DNA, 15 bp, Homo sapiens
ttcagcaatttactt

SEQ ID NO: 518195 - DNA, 15 bp, Homo sapiens
cttcagcaatttact

SEQ ID NO: 518196 - DNA, 15 bp, Homo sapiens
tcttcagcaatttac

SEQ ID NO: 518197 - DNA, 15 bp, Homo sapiens
atcttcagcaattta

SEQ ID NO: 518198 - DNA, 15 bp, Homo sapiens
gatcttcagcaattt

SEQ ID NO: 518199 - DNA, 15 bp, Homo sapiens
tgatcttcagcaatt

SEQ ID NO: 518200 - DNA, 15 bp, Homo sapiens
gtgatcttcagcaat

SEQ ID NO: 518201 - DNA, 15 bp, Homo sapiens
tgtgatcttcagcaa

SEQ ID NO: 518202 - DNA, 15 bp, Homo sapiens
atgtgatcttcagca

SEQ ID NO: 518203 - DNA, 15 bp, Homo sapiens
catgtgatcttcagc

SEQ ID NO: 518204 - DNA, 15 bp, Homo sapiens
ccatgtgatcttcag

SEQ ID NO: 518205 - DNA, 15 bp, Homo sapiens
gccatgtgatcttca

SEQ ID NO: 518206 - DNA, 15 bp, Homo sapiens
agccatgtgatcttc

SEQ ID NO: 518207 - DNA, 15 bp, Homo sapiens
tagccatgtgatctt

SEQ ID NO: 518208 - DNA, 15 bp, Homo sapiens
ctagccatgtgatct

SEQ ID NO: 518209 - DNA, 15 bp, Homo sapiens
actagccatgtgatc

SEQ ID NO: 518210 - DNA, 15 bp, Homo sapiens
tactagccatgtgat

SEQ ID NO: 518211 - DNA, 15 bp, Homo sapiens
ttactagccatgtga

SEQ ID NO: 518212 - DNA, 15 bp, Homo sapiens
cttactagccatgtg

SEQ ID NO: 518213 - DNA, 15 bp, Homo sapiens
acttactagccatgt

SEQ ID NO: 518214 - DNA, 15 bp, Homo sapiens
tacttactagccatg

SEQ ID NO: 518215 - DNA, 15 bp, Homo sapiens
ctacttactagccat

SEQ ID NO: 518216 - DNA, 15 bp, Homo sapiens
actacttactagcca

SEQ ID NO: 518217 - DNA, 15 bp, Homo sapiens
tactacttactagcc

SEQ ID NO: 518218 - DNA, 15 bp, Homo sapiens
ctactacttactagc

SEQ ID NO: 518219 - DNA, 15 bp, Homo sapiens
tctactacttactag

SEQ ID NO: 518220 - DNA, 15 bp, Homo sapiens
ttctactacttacta

SEQ ID NO: 518221 - DNA, 15 bp, Homo sapiens
gttctactacttact

SEQ ID NO: 518222 - DNA, 15 bp, Homo sapiens
agttctactacttac

SEQ ID NO: 518223 - DNA, 15 bp, Homo sapiens
tagttctactactta

SEQ ID NO: 518224 - DNA, 15 bp, Homo sapiens
ttagttctactactt

SEQ ID NO: 518225 - DNA, 15 bp, Homo sapiens
cttagttctactact

SEQ ID NO: 518226 - DNA, 15 bp, Homo sapiens
acttagttctactac

SEQ ID NO: 518227 - DNA, 15 bp, Homo sapiens
aacttagttctacta

SEQ ID NO: 518228 - DNA, 15 bp, Homo sapiens
aaacttagttctact

SEQ ID NO: 518229 - DNA, 15 bp, Homo sapiens
aaaacttagttctac

SEQ ID NO: 518230 - DNA, 15 bp, Homo sapiens
caaaacttagttcta

SEQ ID NO: 518231 - DNA, 15 bp, Homo sapiens
tcaaaacttagttct

SEQ ID NO: 518232 - DNA, 15 bp, Homo sapiens
atcaaaacttagttc

SEQ ID NO: 518233 - DNA, 15 bp, Homo sapiens
aatcaaaacttagtt

SEQ ID NO: 518234 - DNA, 15 bp, Homo sapiens
caatcaaaacttagt

SEQ ID NO: 518235 - DNA, 15 bp, Homo sapiens
acaatcaaaacttag

SEQ ID NO: 518236 - DNA, 15 bp, Homo sapiens
gacaatcaaaactta

SEQ ID NO: 518237 - DNA, 15 bp, Homo sapiens
tgacaatcaaaactt

SEQ ID NO: 518238 - DNA, 15 bp, Homo sapiens
ttgacaatcaaaact

SEQ ID NO: 518239 - DNA, 15 bp, Homo sapiens
gttgacaatcaaaac

SEQ ID NO: 518240 - DNA, 15 bp, Homo sapiens
tgttgacaatcaaaa

SEQ ID NO: 518241 - DNA, 15 bp, Homo sapiens
atgttgacaatcaaa

SEQ ID NO: 518242 - DNA, 15 bp, Homo sapiens
catgttgacaatcaa

SEQ ID NO: 518243 - DNA, 15 bp, Homo sapiens
acatgttgacaatca

SEQ ID NO: 518244 - DNA, 15 bp, Homo sapiens
gacatgttgacaatc

SEQ ID NO: 518245 - DNA, 15 bp, Homo sapiens
tgacatgttgacaat

SEQ ID NO: 518246 - DNA, 15 bp, Homo sapiens
atgacatgttgacaa

SEQ ID NO: 518247 - DNA, 15 bp, Homo sapiens
tatgacatgttgaca

SEQ ID NO: 518248 - DNA, 15 bp, Homo sapiens
atatgacatgttgac

SEQ ID NO: 518249 - DNA, 15 bp, Homo sapiens
aatatgacatgttga

SEQ ID NO: 518250 - DNA, 15 bp, Homo sapiens
gaatatgacatgttg

SEQ ID NO: 518251 - DNA, 15 bp, Homo sapiens
ggaatatgacatgtt

SEQ ID NO: 518252 - DNA, 15 bp, Homo sapiens
tggaatatgacatgt

SEQ ID NO: 518253 - DNA, 15 bp, Homo sapiens
ttggaatatgacatg

SEQ ID NO: 518254 - DNA, 15 bp, Homo sapiens
tttggaatatgacat

SEQ ID NO: 518255 - DNA, 15 bp, Homo sapiens
gtttggaatatgaca

SEQ ID NO: 518256 - DNA, 15 bp, Homo sapiens
ggtttggaatatgac

SEQ ID NO: 518257 - DNA, 15 bp, Homo sapiens
tggtttggaatatga

SEQ ID NO: 518258 - DNA, 15 bp, Homo sapiens
gtggtttggaatatg

SEQ ID NO: 518259 - DNA, 15 bp, Homo sapiens
tgtggtttggaatat

SEQ ID NO: 518260 - DNA, 15 bp, Homo sapiens
ttgtggtttggaata

SEQ ID NO: 518261 - DNA, 15 bp, Homo sapiens
cttgtggtttggaat

SEQ ID NO: 518262 - DNA, 15 bp, Homo sapiens
tcttgtggtttggaa

SEQ ID NO: 518263 - DNA, 15 bp, Homo sapiens
ctcttgtggtttgga

SEQ ID NO: 518264 - DNA, 15 bp, Homo sapiens
cctcttgtggtttgg

SEQ ID NO: 518265 - DNA, 15 bp, Homo sapiens
tcctcttgtggtttg

SEQ ID NO: 518266 - DNA, 15 bp, Homo sapiens
ctcctcttgtggttt

SEQ ID NO: 518267 - DNA, 15 bp, Homo sapiens
actcctcttgtggtt

SEQ ID NO: 518268 - DNA, 15 bp, Homo sapiens
gactcctcttgtggt

SEQ ID NO: 518269 - DNA, 15 bp, Homo sapiens
tgactcctcttgtgg

SEQ ID NO: 518270 - DNA, 15 bp, Homo sapiens
atgactcctcttgtg

SEQ ID NO: 518271 - DNA, 15 bp, Homo sapiens
aatgactcctcttgt

SEQ ID NO: 518272 - DNA, 15 bp, Homo sapiens
caatgactcctcttg

SEQ ID NO: 518273 - DNA, 15 bp, Homo sapiens
gcaatgactcctctt

SEQ ID NO: 518274 - DNA, 15 bp, Homo sapiens
ggcaatgactcctct

SEQ ID NO: 518275 - DNA, 15 bp, Homo sapiens
aggcaatgactcctc

SEQ ID NO: 518276 - DNA, 15 bp, Homo sapiens
taggcaatgactcct

SEQ ID NO: 518277 - DNA, 15 bp, Homo sapiens
ttaggcaatgactcc

SEQ ID NO: 518278 - DNA, 15 bp, Homo sapiens
tttaggcaatgactc

SEQ ID NO: 518279 - DNA, 15 bp, Homo sapiens
atttaggcaatgact

SEQ ID NO: 518280 - DNA, 15 bp, Homo sapiens
tatttaggcaatgac

SEQ ID NO: 518281 - DNA, 15 bp, Homo sapiens
ttatttaggcaatga

SEQ ID NO: 518282 - DNA, 15 bp, Homo sapiens
attatttaggcaatg

SEQ ID NO: 518283 - DNA, 15 bp, Homo sapiens
gattatttaggcaat

SEQ ID NO: 518284 - DNA, 15 bp, Homo sapiens
tgattatttaggcaa

SEQ ID NO: 518285 - DNA, 15 bp, Homo sapiens
ctgattatttaggca

SEQ ID NO: 518286 - DNA, 15 bp, Homo sapiens
tctgattatttaggc

SEQ ID NO: 518287 - DNA, 15 bp, Homo sapiens
gtctgattatttagg

SEQ ID NO: 518288 - DNA, 15 bp, Homo sapiens
ggtctgattatttag

SEQ ID NO: 518289 - DNA, 15 bp, Homo sapiens
aggtctgattattta

SEQ ID NO: 518290 - DNA, 15 bp, Homo sapiens
aaggtctgattattt

SEQ ID NO: 518291 - DNA, 15 bp, Homo sapiens
aaaggtctgattatt

SEQ ID NO: 518292 - DNA, 15 bp, Homo sapiens
taaaggtctgattat

SEQ ID NO: 518293 - DNA, 15 bp, Homo sapiens
ttaaaggtctgatta

SEQ ID NO: 518294 - DNA, 15 bp, Homo sapiens
tttaaaggtctgatt

SEQ ID NO: 518295 - DNA, 15 bp, Homo sapiens
ctttaaaggtctgat

SEQ ID NO: 518296 - DNA, 15 bp, Homo sapiens
tctttaaaggtctga

SEQ ID NO: 518297 - DNA, 15 bp, Homo sapiens
ttctttaaaggtctg

SEQ ID NO: 518298 - DNA, 15 bp, Homo sapiens
attctttaaaggtct

SEQ ID NO: 518299 - DNA, 15 bp, Homo sapiens
aattctttaaaggtc

SEQ ID NO: 518300 - DNA, 15 bp, Homo sapiens
caattctttaaaggt

SEQ ID NO: 518301 - DNA, 15 bp, Homo sapiens
acaattctttaaagg

SEQ ID NO: 518302 - DNA, 15 bp, Homo sapiens
gacaattctttaaag

SEQ ID NO: 518303 - DNA, 15 bp, Homo sapiens
agacaattctttaaa

SEQ ID NO: 518304 - DNA, 15 bp, Homo sapiens
tagacaattctttaa

SEQ ID NO: 518305 - DNA, 15 bp, Homo sapiens
gtagacaattcttta

SEQ ID NO: 518306 - DNA, 15 bp, Homo sapiens
ggtagacaattcttt

SEQ ID NO: 518307 - DNA, 15 bp, Homo sapiens
aggtagacaattctt

SEQ ID NO: 518308 - DNA, 15 bp, Homo sapiens
taggtagacaattct

SEQ ID NO: 518309 - DNA, 15 bp, Homo sapiens
ataggtagacaattc

SEQ ID NO: 518310 - DNA, 15 bp, Homo sapiens
gataggtagacaatt

SEQ ID NO: 518311 - DNA, 15 bp, Homo sapiens
ggataggtagacaat

SEQ ID NO: 518312 - DNA, 15 bp, Homo sapiens
gggataggtagacaa

SEQ ID NO: 518313 - DNA, 15 bp, Homo sapiens
ggggataggtagaca

SEQ ID NO: 518314 - DNA, 15 bp, Homo sapiens
gggggataggtagac

SEQ ID NO: 518315 - DNA, 15 bp, Homo sapiens
tgggggataggtaga

SEQ ID NO: 518316 - DNA, 15 bp, Homo sapiens
atgggggataggtag

SEQ ID NO: 518317 - DNA, 15 bp, Homo sapiens
aatgggggataggta

SEQ ID NO: 518318 - DNA, 15 bp, Homo sapiens
gaatgggggataggt

SEQ ID NO: 518319 - DNA, 15 bp, Homo sapiens
tgaatgggggatagg

SEQ ID NO: 518320 - DNA, 15 bp, Homo sapiens
ttgaatgggggatag

SEQ ID NO: 518321 - DNA, 15 bp, Homo sapiens
gttgaatgggggata

SEQ ID NO: 518322 - DNA, 15 bp, Homo sapiens
tgttgaatgggggat

SEQ ID NO: 518323 - DNA, 15 bp, Homo sapiens
atgttgaatggggga

SEQ ID NO: 518324 - DNA, 15 bp, Homo sapiens
gatgttgaatggggg

SEQ ID NO: 518325 - DNA, 15 bp, Homo sapiens
agatgttgaatgggg

SEQ ID NO: 518326 - DNA, 15 bp, Homo sapiens
aagatgttgaatggg

SEQ ID NO: 518327 - DNA, 15 bp, Homo sapiens
caagatgttgaatgg

SEQ ID NO: 518328 - DNA, 15 bp, Homo sapiens
tcaagatgttgaatg

SEQ ID NO: 518329 - DNA, 15 bp, Homo sapiens
ttcaagatgttgaat

SEQ ID NO: 518330 - DNA, 15 bp, Homo sapiens
tttcaagatgttgaa

SEQ ID NO: 518331 - DNA, 15 bp, Homo sapiens
atttcaagatgttga

SEQ ID NO: 518332 - DNA, 15 bp, Homo sapiens
aatttcaagatgttg

SEQ ID NO: 518333 - DNA, 15 bp, Homo sapiens
aaatttcaagatgtt

SEQ ID NO: 518334 - DNA, 15 bp, Homo sapiens
aaaatttcaagatgt

SEQ ID NO: 518335 - DNA, 15 bp, Homo sapiens
taaaatttcaagatg

SEQ ID NO: 518336 - DNA, 15 bp, Homo sapiens
ataaaatttcaagat

SEQ ID NO: 518337 - DNA, 15 bp, Homo sapiens
tataaaatttcaaga

SEQ ID NO: 518338 - DNA, 15 bp, Homo sapiens
ctataaaatttcaag

SEQ ID NO: 518339 - DNA, 15 bp, Homo sapiens
actataaaatttcaa

SEQ ID NO: 518340 - DNA, 15 bp, Homo sapiens
aactataaaatttca

SEQ ID NO: 518341 - DNA, 15 bp, Homo sapiens
taactataaaatttc

SEQ ID NO: 518342 - DNA, 15 bp, Homo sapiens
ataactataaaattt

SEQ ID NO: 518343 - DNA, 15 bp, Homo sapiens
aataactataaaatt

SEQ ID NO: 518344 - DNA, 15 bp, Homo sapiens
aaataactataaaat

SEQ ID NO: 518345 - DNA, 15 bp, Homo sapiens
aaaataactataaaa

SEQ ID NO: 518346 - DNA, 15 bp, Homo sapiens
caaaataactataaa

SEQ ID NO: 518347 - DNA, 15 bp, Homo sapiens
tcaaaataactataa

SEQ ID NO: 518348 - DNA, 15 bp, Homo sapiens
gtcaaaataactata

SEQ ID NO: 518349 - DNA, 15 bp, Homo sapiens
tgtcaaaataactat

SEQ ID NO: 518350 - DNA, 15 bp, Homo sapiens
ctgtcaaaataacta

SEQ ID NO: 518351 - DNA, 15 bp, Homo sapiens
gctgtcaaaataact

SEQ ID NO: 518352 - DNA, 15 bp, Homo sapiens
tgctgtcaaaataac

SEQ ID NO: 518353 - DNA, 15 bp, Homo sapiens
ttgctgtcaaaataa

SEQ ID NO: 518354 - DNA, 15 bp, Homo sapiens
cttgctgtcaaaata

SEQ ID NO: 518355 - DNA, 15 bp, Homo sapiens
tcttgctgtcaaaat

SEQ ID NO: 518356 - DNA, 15 bp, Homo sapiens
atcttgctgtcaaaa

SEQ ID NO: 518357 - DNA, 15 bp, Homo sapiens
tatcttgctgtcaaa

SEQ ID NO: 518358 - DNA, 15 bp, Homo sapiens
ctatcttgctgtcaa

SEQ ID NO: 518359 - DNA, 15 bp, Homo sapiens
actatcttgctgtca

SEQ ID NO: 518360 - DNA, 15 bp, Homo sapiens
aactatcttgctgtc

SEQ ID NO: 518361 - DNA, 15 bp, Homo sapiens
gaactatcttgctgt

SEQ ID NO: 518362 - DNA, 15 bp, Homo sapiens
tgaactatcttgctg

SEQ ID NO: 518363 - DNA, 15 bp, Homo sapiens
ttgaactatcttgct

SEQ ID NO: 518364 - DNA, 15 bp, Homo sapiens
tttgaactatcttgc

SEQ ID NO: 518365 - DNA, 15 bp, Homo sapiens
atttgaactatcttg

SEQ ID NO: 518366 - DNA, 15 bp, Homo sapiens
tatttgaactatctt

SEQ ID NO: 518367 - DNA, 15 bp, Homo sapiens
atatttgaactatct

SEQ ID NO: 518368 - DNA, 15 bp, Homo sapiens
gatatttgaactatc

SEQ ID NO: 518369 - DNA, 15 bp, Homo sapiens
agatatttgaactat

SEQ ID NO: 518370 - DNA, 15 bp, Homo sapiens
tagatatttgaacta

SEQ ID NO: 518371 - DNA, 15 bp, Homo sapiens
gtagatatttgaact

SEQ ID NO: 518372 - DNA, 15 bp, Homo sapiens
agtagatatttgaac

SEQ ID NO: 518373 - DNA, 15 bp, Homo sapiens
gagtagatatttgaa

SEQ ID NO: 518374 - DNA, 15 bp, Homo sapiens
tgagtagatatttga

SEQ ID NO: 518375 - DNA, 15 bp, Homo sapiens
atgagtagatatttg

SEQ ID NO: 518376 - DNA, 15 bp, Homo sapiens
gatgagtagatattt

SEQ ID NO: 518377 - DNA, 15 bp, Homo sapiens
agatgagtagatatt

SEQ ID NO: 518378 - DNA, 15 bp, Homo sapiens
cagatgagtagatat

SEQ ID NO: 518379 - DNA, 15 bp, Homo sapiens
gcagatgagtagata

SEQ ID NO: 518380 - DNA, 15 bp, Homo sapiens
agcagatgagtagat

SEQ ID NO: 518381 - DNA, 15 bp, Homo sapiens
aagcagatgagtaga

SEQ ID NO: 518382 - DNA, 15 bp, Homo sapiens
caagcagatgagtag

SEQ ID NO: 518383 - DNA, 15 bp, Homo sapiens
ccaagcagatgagta

SEQ ID NO: 518384 - DNA, 15 bp, Homo sapiens
cccaagcagatgagt

SEQ ID NO: 518385 - DNA, 15 bp, Homo sapiens
ccccaagcagatgag

SEQ ID NO: 518386 - DNA, 15 bp, Homo sapiens
tccccaagcagatga

SEQ ID NO: 518387 - DNA, 15 bp, Homo sapiens
ctccccaagcagatg

SEQ ID NO: 518388 - DNA, 15 bp, Homo sapiens
actccccaagcagat

SEQ ID NO: 518389 - DNA, 15 bp, Homo sapiens
aactccccaagcaga

SEQ ID NO: 518390 - DNA, 15 bp, Homo sapiens
aaactccccaagcag

SEQ ID NO: 518391 - DNA, 15 bp, Homo sapiens
gaaactccccaagca

SEQ ID NO: 518392 - DNA, 15 bp, Homo sapiens
agaaactccccaagc

SEQ ID NO: 518393 - DNA, 15 bp, Homo sapiens
aagaaactccccaag

SEQ ID NO: 518394 - DNA, 15 bp, Homo sapiens
aaagaaactccccaa

SEQ ID NO: 518395 - DNA, 15 bp, Homo sapiens
caaagaaactcccca

SEQ ID NO: 518396 - DNA, 15 bp, Homo sapiens
acaaagaaactcccc

SEQ ID NO: 518397 - DNA, 15 bp, Homo sapiens
tacaaagaaactccc

SEQ ID NO: 518398 - DNA, 15 bp, Homo sapiens
atacaaagaaactcc

SEQ ID NO: 518399 - DNA, 15 bp, Homo sapiens
aatacaaagaaactc

SEQ ID NO: 518400 - DNA, 15 bp, Homo sapiens
taatacaaagaaact

SEQ ID NO: 518401 - DNA, 15 bp, Homo sapiens
gtaatacaaagaaac

SEQ ID NO: 518402 - DNA, 15 bp, Homo sapiens
agtaatacaaagaaa

SEQ ID NO: 518403 - DNA, 15 bp, Homo sapiens
gagtaatacaaagaa

SEQ ID NO: 518404 - DNA, 15 bp, Homo sapiens
ggagtaatacaaaga

SEQ ID NO: 518405 - DNA, 15 bp, Homo sapiens
gggagtaatacaaag

SEQ ID NO: 518406 - DNA, 15 bp, Homo sapiens
agggagtaatacaaa

SEQ ID NO: 518407 - DNA, 15 bp, Homo sapiens
aagggagtaatacaa

SEQ ID NO: 518408 - DNA, 15 bp, Homo sapiens
caagggagtaataca

SEQ ID NO: 518409 - DNA, 15 bp, Homo sapiens
acaagggagtaatac

SEQ ID NO: 518410 - DNA, 15 bp, Homo sapiens
gacaagggagtaata

SEQ ID NO: 518411 - DNA, 15 bp, Homo sapiens
agacaagggagtaat

SEQ ID NO: 518412 - DNA, 15 bp, Homo sapiens
tagacaagggagtaa

SEQ ID NO: 518413 - DNA, 15 bp, Homo sapiens
ctagacaagggagta

SEQ ID NO: 518414 - DNA, 15 bp, Homo sapiens
gctagacaagggagt

SEQ ID NO: 518415 - DNA, 15 bp, Homo sapiens
agctagacaagggag

SEQ ID NO: 518416 - DNA, 15 bp, Homo sapiens
gagctagacaaggga

SEQ ID NO: 518417 - DNA, 15 bp, Homo sapiens
ggagctagacaaggg

SEQ ID NO: 518418 - DNA, 15 bp, Homo sapiens
cggagctagacaagg

SEQ ID NO: 518419 - DNA, 15 bp, Homo sapiens
acggagctagacaag

SEQ ID NO: 518420 - DNA, 15 bp, Homo sapiens
tacggagctagacaa

SEQ ID NO: 518421 - DNA, 15 bp, Homo sapiens
ctacggagctagaca

SEQ ID NO: 518422 - DNA, 15 bp, Homo sapiens
tctacggagctagac

SEQ ID NO: 518423 - DNA, 15 bp, Homo sapiens
atctacggagctaga

SEQ ID NO: 518424 - DNA, 15 bp, Homo sapiens
catctacggagctag

SEQ ID NO: 518425 - DNA, 15 bp, Homo sapiens
acatctacggagcta

SEQ ID NO: 518426 - DNA, 15 bp, Homo sapiens
gacatctacggagct

SEQ ID NO: 518427 - DNA, 15 bp, Homo sapiens
tgacatctacggagc

SEQ ID NO: 518428 - DNA, 15 bp, Homo sapiens
ttgacatctacggag

SEQ ID NO: 518429 - DNA, 15 bp, Homo sapiens
tttgacatctacgga

SEQ ID NO: 518430 - DNA, 15 bp, Homo sapiens
gtttgacatctacgg

SEQ ID NO: 518431 - DNA, 15 bp, Homo sapiens
agtttgacatctacg

SEQ ID NO: 518432 - DNA, 15 bp, Homo sapiens
aagtttgacatctac

SEQ ID NO: 518433 - DNA, 15 bp, Homo sapiens
aaagtttgacatcta

SEQ ID NO: 518434 - DNA, 15 bp, Homo sapiens
taaagtttgacatct

SEQ ID NO: 518435 - DNA, 15 bp, Homo sapiens
ttaaagtttgacatc

SEQ ID NO: 518436 - DNA, 15 bp, Homo sapiens
attaaagtttgacat

SEQ ID NO: 518437 - DNA, 15 bp, Homo sapiens
cattaaagtttgaca

SEQ ID NO: 518438 - DNA, 15 bp, Homo sapiens
acattaaagtttgac

SEQ ID NO: 518439 - DNA, 15 bp, Homo sapiens
cacattaaagtttga

SEQ ID NO: 518440 - DNA, 15 bp, Homo sapiens
ccacattaaagtttg

SEQ ID NO: 518441 - DNA, 15 bp, Homo sapiens
tccacattaaagttt

SEQ ID NO: 518442 - DNA, 15 bp, Homo sapiens
gtccacattaaagtt

SEQ ID NO: 518443 - DNA, 15 bp, Homo sapiens
tgtccacattaaagt

SEQ ID NO: 518444 - DNA, 15 bp, Homo sapiens
ttgtccacattaaag

SEQ ID NO: 518445 - DNA, 15 bp, Homo sapiens
tttgtccacattaaa

SEQ ID NO: 518446 - DNA, 15 bp, Homo sapiens
ttttgtccacattaa

SEQ ID NO: 518447 - DNA, 15 bp, Homo sapiens
tttttgtccacatta

SEQ ID NO: 518448 - DNA, 15 bp, Homo sapiens
atttttgtccacatt

SEQ ID NO: 518449 - DNA, 15 bp, Homo sapiens
aatttttgtccacat

SEQ ID NO: 518450 - DNA, 15 bp, Homo sapiens
taatttttgtccaca

SEQ ID NO: 518451 - DNA, 15 bp, Homo sapiens
ataatttttgtccac

SEQ ID NO: 518452 - DNA, 15 bp, Homo sapiens
aataatttttgtcca

SEQ ID NO: 518453 - DNA, 15 bp, Homo sapiens
gaataatttttgtcc

SEQ ID NO: 518454 - DNA, 15 bp, Homo sapiens
agaataatttttgtc

SEQ ID NO: 518455 - DNA, 15 bp, Homo sapiens
tagaataatttttgt

SEQ ID NO: 518456 - DNA, 15 bp, Homo sapiens
atagaataatttttg

SEQ ID NO: 518457 - DNA, 15 bp, Homo sapiens
gatagaataattttt

SEQ ID NO: 518458 - DNA, 15 bp, Homo sapiens
tgatagaataatttt

SEQ ID NO: 518459 - DNA, 15 bp, Homo sapiens
ttgatagaataattt

SEQ ID NO: 518460 - DNA, 15 bp, Homo sapiens
tttgatagaataatt

SEQ ID NO: 518461 - DNA, 15 bp, Homo sapiens
ctttgatagaataat

SEQ ID NO: 518462 - DNA, 15 bp, Homo sapiens
actttgatagaataa

SEQ ID NO: 518463 - DNA, 15 bp, Homo sapiens
tactttgatagaata

SEQ ID NO: 518464 - DNA, 15 bp, Homo sapiens
atactttgatagaat

SEQ ID NO: 518465 - DNA, 15 bp, Homo sapiens
tatactttgatagaa

SEQ ID NO: 518466 - DNA, 15 bp, Homo sapiens
ttatactttgataga

SEQ ID NO: 518467 - DNA, 15 bp, Homo sapiens
attatactttgatag

SEQ ID NO: 518468 - DNA, 15 bp, Homo sapiens
gattatactttgata

SEQ ID NO: 518469 - DNA, 15 bp, Homo sapiens
agattatactttgat

SEQ ID NO: 518470 - DNA, 15 bp, Homo sapiens
gagattatactttga

SEQ ID NO: 518471 - DNA, 15 bp, Homo sapiens
tgagattatactttg

SEQ ID NO: 518472 - DNA, 15 bp, Homo sapiens
ttgagattatacttt

SEQ ID NO: 518473 - DNA, 15 bp, Homo sapiens
tttgagattatactt

SEQ ID NO: 518474 - DNA, 15 bp, Homo sapiens
atttgagattatact

SEQ ID NO: 518475 - DNA, 15 bp, Homo sapiens
aatttgagattatac

SEQ ID NO: 518476 - DNA, 15 bp, Homo sapiens
aaatttgagattata

SEQ ID NO: 518477 - DNA, 15 bp, Homo sapiens
aaaatttgagattat

SEQ ID NO: 518478 - DNA, 15 bp, Homo sapiens
caaaatttgagatta

SEQ ID NO: 518479 - DNA, 15 bp, Homo sapiens
acaaaatttgagatt

SEQ ID NO: 518480 - DNA, 15 bp, Homo sapiens
aacaaaatttgagat

SEQ ID NO: 518481 - DNA, 15 bp, Homo sapiens
taacaaaatttgaga

SEQ ID NO: 518482 - DNA, 15 bp, Homo sapiens
gtaacaaaatttgag

SEQ ID NO: 518483 - DNA, 15 bp, Homo sapiens
ggtaacaaaatttga

SEQ ID NO: 518484 - DNA, 15 bp, Homo sapiens
tggtaacaaaatttg

SEQ ID NO: 518485 - DNA, 15 bp, Homo sapiens
atggtaacaaaattt

SEQ ID NO: 518486 - DNA, 15 bp, Homo sapiens
aatggtaacaaaatt

SEQ ID NO: 518487 - DNA, 15 bp, Homo sapiens
aaatggtaacaaaat

SEQ ID NO: 518488 - DNA, 15 bp, Homo sapiens
gaaatggtaacaaaa

SEQ ID NO: 518489 - DNA, 15 bp, Homo sapiens
tgaaatggtaacaaa

SEQ ID NO: 518490 - DNA, 15 bp, Homo sapiens
atgaaatggtaacaa

SEQ ID NO: 518491 - DNA, 15 bp, Homo sapiens
gatgaaatggtaaca

SEQ ID NO: 518492 - DNA, 15 bp, Homo sapiens
tgatgaaatggtaac

SEQ ID NO: 518493 - DNA, 15 bp, Homo sapiens
ctgatgaaatggtaa

SEQ ID NO: 518494 - DNA, 15 bp, Homo sapiens
actgatgaaatggta

SEQ ID NO: 518495 - DNA, 15 bp, Homo sapiens
aactgatgaaatggt

SEQ ID NO: 518496 - DNA, 15 bp, Homo sapiens
aaactgatgaaatgg

SEQ ID NO: 518497 - DNA, 15 bp, Homo sapiens
aaaactgatgaaatg

SEQ ID NO: 518498 - DNA, 15 bp, Homo sapiens
gaaaactgatgaaat

SEQ ID NO: 518499 - DNA, 15 bp, Homo sapiens
agaaaactgatgaaa

SEQ ID NO: 518500 - DNA, 15 bp, Homo sapiens
tagaaaactgatgaa

SEQ ID NO: 518501 - DNA, 15 bp, Homo sapiens
ctagaaaactgatga

SEQ ID NO: 518502 - DNA, 15 bp, Homo sapiens
cctagaaaactgatg

SEQ ID NO: 518503 - DNA, 15 bp, Homo sapiens
ccctagaaaactgat

SEQ ID NO: 518504 - DNA, 15 bp, Homo sapiens
accctagaaaactga

SEQ ID NO: 518505 - DNA, 15 bp, Homo sapiens
taccctagaaaactg

SEQ ID NO: 518506 - DNA, 15 bp, Homo sapiens
gtaccctagaaaact

SEQ ID NO: 518507 - DNA, 15 bp, Homo sapiens
agtaccctagaaaac

SEQ ID NO: 518508 - DNA, 15 bp, Homo sapiens
aagtaccctagaaaa

SEQ ID NO: 518509 - DNA, 15 bp, Homo sapiens
aaagtaccctagaaa

SEQ ID NO: 518510 - DNA, 15 bp, Homo sapiens
aaaagtaccctagaa

SEQ ID NO: 518511 - DNA, 15 bp, Homo sapiens
caaaagtaccctaga

SEQ ID NO: 518512 - DNA, 15 bp, Homo sapiens
ccaaaagtaccctag

SEQ ID NO: 518513 - DNA, 15 bp, Homo sapiens
accaaaagtacccta

SEQ ID NO: 518514 - DNA, 15 bp, Homo sapiens
taccaaaagtaccct

SEQ ID NO: 518515 - DNA, 15 bp, Homo sapiens
ataccaaaagtaccc

SEQ ID NO: 518516 - DNA, 15 bp, Homo sapiens
aataccaaaagtacc

SEQ ID NO: 518517 - DNA, 15 bp, Homo sapiens
taataccaaaagtac

SEQ ID NO: 518518 - DNA, 15 bp, Homo sapiens
ataataccaaaagta

SEQ ID NO: 518519 - DNA, 15 bp, Homo sapiens
aataataccaaaagt

SEQ ID NO: 518520 - DNA, 15 bp, Homo sapiens
taataataccaaaag

SEQ ID NO: 518521 - DNA, 15 bp, Homo sapiens
ttaataataccaaaa

SEQ ID NO: 518522 - DNA, 15 bp, Homo sapiens
tttaataataccaaa

SEQ ID NO: 518523 - DNA, 15 bp, Homo sapiens
atttaataataccaa

SEQ ID NO: 518524 - DNA, 15 bp, Homo sapiens
aatttaataatacca

SEQ ID NO: 518525 - DNA, 15 bp, Homo sapiens
aaatttaataatacc

SEQ ID NO: 518526 - DNA, 15 bp, Homo sapiens
aaaatttaataatac

SEQ ID NO: 518527 - DNA, 15 bp, Homo sapiens
taaaatttaataata

SEQ ID NO: 518528 - DNA, 15 bp, Homo sapiens
gtaaaatttaataat

SEQ ID NO: 518529 - DNA, 15 bp, Homo sapiens
ggtaaaatttaataa

SEQ ID NO: 518530 - DNA, 15 bp, Homo sapiens
aggtaaaatttaata

SEQ ID NO: 518531 - DNA, 15 bp, Homo sapiens
aaggtaaaatttaat

SEQ ID NO: 518532 - DNA, 15 bp, Homo sapiens
taaggtaaaatttaa

SEQ ID NO: 518533 - DNA, 15 bp, Homo sapiens
ttaaggtaaaattta

SEQ ID NO: 518534 - DNA, 15 bp, Homo sapiens
cttaaggtaaaattt

SEQ ID NO: 518535 - DNA, 15 bp, Homo sapiens
ccttaaggtaaaatt

SEQ ID NO: 518536 - DNA, 15 bp, Homo sapiens
tccttaaggtaaaat

SEQ ID NO: 518537 - DNA, 15 bp, Homo sapiens
ctccttaaggtaaaa

SEQ ID NO: 518538 - DNA, 15 bp, Homo sapiens
actccttaaggtaaa

SEQ ID NO: 518539 - DNA, 15 bp, Homo sapiens
cactccttaaggtaa

SEQ ID NO: 518540 - DNA, 15 bp, Homo sapiens
acactccttaaggta

SEQ ID NO: 518541 - DNA, 15 bp, Homo sapiens
gacactccttaaggt

SEQ ID NO: 518542 - DNA, 15 bp, Homo sapiens
tgacactccttaagg

SEQ ID NO: 518543 - DNA, 15 bp, Homo sapiens
atgacactccttaag

SEQ ID NO: 518544 - DNA, 15 bp, Homo sapiens
tatgacactccttaa

SEQ ID NO: 518545 - DNA, 15 bp, Homo sapiens
atatgacactcctta

SEQ ID NO: 518546 - DNA, 15 bp, Homo sapiens
aatatgacactcctt

SEQ ID NO: 518547 - DNA, 15 bp, Homo sapiens
aaatatgacactcct

SEQ ID NO: 518548 - DNA, 15 bp, Homo sapiens
aaaatatgacactcc

SEQ ID NO: 518549 - DNA, 15 bp, Homo sapiens
taaaatatgacactc

SEQ ID NO: 518550 - DNA, 15 bp, Homo sapiens
ttaaaatatgacact

SEQ ID NO: 518551 - DNA, 15 bp, Homo sapiens
tttaaaatatgacac

SEQ ID NO: 518552 - DNA, 15 bp, Homo sapiens
gtttaaaatatgaca

SEQ ID NO: 518553 - DNA, 15 bp, Homo sapiens
cgtttaaaatatgac

SEQ ID NO: 518554 - DNA, 15 bp, Homo sapiens
acgtttaaaatatga

SEQ ID NO: 518555 - DNA, 15 bp, Homo sapiens
tacgtttaaaatatg

SEQ ID NO: 518556 - DNA, 15 bp, Homo sapiens
ttacgtttaaaatat

SEQ ID NO: 518557 - DNA, 15 bp, Homo sapiens
gttacgtttaaaata

SEQ ID NO: 518558 - DNA, 15 bp, Homo sapiens
tgttacgtttaaaat

SEQ ID NO: 518559 - DNA, 15 bp, Homo sapiens
ttgttacgtttaaaa

SEQ ID NO: 518560 - DNA, 15 bp, Homo sapiens
gttgttacgtttaaa

SEQ ID NO: 518561 - DNA, 15 bp, Homo sapiens
agttgttacgtttaa

SEQ ID NO: 518562 - DNA, 15 bp, Homo sapiens
tagttgttacgttta

SEQ ID NO: 518563 - DNA, 15 bp, Homo sapiens
ttagttgttacgttt

SEQ ID NO: 518564 - DNA, 15 bp, Homo sapiens
attagttgttacgtt

SEQ ID NO: 518565 - DNA, 15 bp, Homo sapiens
aattagttgttacgt

SEQ ID NO: 518566 - DNA, 15 bp, Homo sapiens
caattagttgttacg

SEQ ID NO: 518567 - DNA, 15 bp, Homo sapiens
acaattagttgttac

SEQ ID NO: 518568 - DNA, 15 bp, Homo sapiens
aacaattagttgtta

SEQ ID NO: 518569 - DNA, 15 bp, Homo sapiens
taacaattagttgtt

SEQ ID NO: 518570 - DNA, 15 bp, Homo sapiens
ataacaattagttgt

SEQ ID NO: 518571 - DNA, 15 bp, Homo sapiens
cataacaattagttg

SEQ ID NO: 518572 - DNA, 15 bp, Homo sapiens
ccataacaattagtt

SEQ ID NO: 518573 - DNA, 15 bp, Homo sapiens
tccataacaattagt

SEQ ID NO: 518574 - DNA, 15 bp, Homo sapiens
ttccataacaattag

SEQ ID NO: 518575 - DNA, 15 bp, Homo sapiens
gttccataacaatta

SEQ ID NO: 518576 - DNA, 15 bp, Homo sapiens
ggttccataacaatt

SEQ ID NO: 518577 - DNA, 15 bp, Homo sapiens
tggttccataacaat

SEQ ID NO: 518578 - DNA, 15 bp, Homo sapiens
gtggttccataacaa

SEQ ID NO: 518579 - DNA, 15 bp, Homo sapiens
tgtggttccataaca

SEQ ID NO: 518580 - DNA, 15 bp, Homo sapiens
gtgtggttccataac

SEQ ID NO: 518581 - DNA, 15 bp, Homo sapiens
agtgtggttccataa

SEQ ID NO: 518582 - DNA, 15 bp, Homo sapiens
cagtgtggttccata

SEQ ID NO: 518583 - DNA, 15 bp, Homo sapiens
acagtgtggttccat

SEQ ID NO: 518584 - DNA, 15 bp, Homo sapiens
tacagtgtggttcca

SEQ ID NO: 518585 - DNA, 15 bp, Homo sapiens
atacagtgtggttcc

SEQ ID NO: 518586 - DNA, 15 bp, Homo sapiens
aatacagtgtggttc

SEQ ID NO: 518587 - DNA, 15 bp, Homo sapiens
taatacagtgtggtt

SEQ ID NO: 518588 - DNA, 15 bp, Homo sapiens
ataatacagtgtggt

SEQ ID NO: 518589 - DNA, 15 bp, Homo sapiens
aataatacagtgtgg

SEQ ID NO: 518590 - DNA, 15 bp, Homo sapiens
aaataatacagtgtg

SEQ ID NO: 518591 - DNA, 15 bp, Homo sapiens
gaaataatacagtgt

SEQ ID NO: 518592 - DNA, 15 bp, Homo sapiens
ggaaataatacagtg

SEQ ID NO: 518593 - DNA, 15 bp, Homo sapiens
tggaaataatacagt

SEQ ID NO: 518594 - DNA, 15 bp, Homo sapiens
gtggaaataatacag

SEQ ID NO: 518595 - DNA, 15 bp, Homo sapiens
agtggaaataataca

SEQ ID NO: 518596 - DNA, 15 bp, Homo sapiens
tagtggaaataatac

SEQ ID NO: 518597 - DNA, 15 bp, Homo sapiens
atagtggaaataata

SEQ ID NO: 518598 - DNA, 15 bp, Homo sapiens
tatagtggaaataat

SEQ ID NO: 518599 - DNA, 15 bp, Homo sapiens
atatagtggaaataa

SEQ ID NO: 518600 - DNA, 15 bp, Homo sapiens
aatatagtggaaata

SEQ ID NO: 518601 - DNA, 15 bp, Homo sapiens
gaatatagtggaaat

SEQ ID NO: 518602 - DNA, 15 bp, Homo sapiens
tgaatatagtggaaa

SEQ ID NO: 518603 - DNA, 15 bp, Homo sapiens
ttgaatatagtggaa

SEQ ID NO: 518604 - DNA, 15 bp, Homo sapiens
attgaatatagtgga

SEQ ID NO: 518605 - DNA, 15 bp, Homo sapiens
cattgaatatagtgg

SEQ ID NO: 518606 - DNA, 15 bp, Homo sapiens
gcattgaatatagtg

SEQ ID NO: 518607 - DNA, 15 bp, Homo sapiens
agcattgaatatagt

SEQ ID NO: 518608 - DNA, 15 bp, Homo sapiens
aagcattgaatatag

SEQ ID NO: 518609 - DNA, 15 bp, Homo sapiens
gaagcattgaatata

SEQ ID NO: 518610 - DNA, 15 bp, Homo sapiens
agaagcattgaatat

SEQ ID NO: 518611 - DNA, 15 bp, Homo sapiens
gagaagcattgaata

SEQ ID NO: 518612 - DNA, 15 bp, Homo sapiens
agagaagcattgaat

SEQ ID NO: 518613 - DNA, 15 bp, Homo sapiens
tagagaagcattgaa

SEQ ID NO: 518614 - DNA, 15 bp, Homo sapiens
ttagagaagcattga

SEQ ID NO: 518615 - DNA, 15 bp, Homo sapiens
attagagaagcattg

SEQ ID NO: 518616 - DNA, 15 bp, Homo sapiens
aattagagaagcatt

SEQ ID NO: 518617 - DNA, 15 bp, Homo sapiens
aaattagagaagcat

SEQ ID NO: 518618 - DNA, 15 bp, Homo sapiens
aaaattagagaagca

SEQ ID NO: 518619 - DNA, 15 bp, Homo sapiens
gaaaattagagaagc

SEQ ID NO: 518620 - DNA, 15 bp, Homo sapiens
tgaaaattagagaag

SEQ ID NO: 518621 - DNA, 15 bp, Homo sapiens
ttgaaaattagagaa

SEQ ID NO: 518622 - DNA, 15 bp, Homo sapiens
gttgaaaattagaga

SEQ ID NO: 518623 - DNA, 15 bp, Homo sapiens
tgttgaaaattagag

SEQ ID NO: 518624 - DNA, 15 bp, Homo sapiens
ttgttgaaaattaga

SEQ ID NO: 518625 - DNA, 15 bp, Homo sapiens
tttgttgaaaattag

SEQ ID NO: 518626 - DNA, 15 bp, Homo sapiens
atttgttgaaaatta

SEQ ID NO: 518627 - DNA, 15 bp, Homo sapiens
tatttgttgaaaatt

SEQ ID NO: 518628 - DNA, 15 bp, Homo sapiens
ctatttgttgaaaat

SEQ ID NO: 518629 - DNA, 15 bp, Homo sapiens
actatttgttgaaaa

SEQ ID NO: 518630 - DNA, 15 bp, Homo sapiens
aactatttgttgaaa

SEQ ID NO: 518631 - DNA, 15 bp, Homo sapiens
aaactatttgttgaa

SEQ ID NO: 518632 - DNA, 15 bp, Homo sapiens
gaaactatttgttga

SEQ ID NO: 518633 - DNA, 15 bp, Homo sapiens
ggaaactatttgttg

SEQ ID NO: 518634 - DNA, 15 bp, Homo sapiens
tggaaactatttgtt

SEQ ID NO: 518635 - DNA, 15 bp, Homo sapiens
ctggaaactatttgt

SEQ ID NO: 518636 - DNA, 15 bp, Homo sapiens
actggaaactatttg

SEQ ID NO: 518637 - DNA, 15 bp, Homo sapiens
gactggaaactattt

SEQ ID NO: 518638 - DNA, 15 bp, Homo sapiens
ggactggaaactatt

SEQ ID NO: 518639 - DNA, 15 bp, Homo sapiens
aggactggaaactat

SEQ ID NO: 518640 - DNA, 15 bp, Homo sapiens
aaggactggaaacta

SEQ ID NO: 518641 - DNA, 15 bp, Homo sapiens
aaaggactggaaact

SEQ ID NO: 518642 - DNA, 15 bp, Homo sapiens
aaaaggactggaaac

SEQ ID NO: 518643 - DNA, 15 bp, Homo sapiens
caaaaggactggaaa

SEQ ID NO: 518644 - DNA, 15 bp, Homo sapiens
ccaaaaggactggaa

SEQ ID NO: 518645 - DNA, 15 bp, Homo sapiens
tccaaaaggactgga

SEQ ID NO: 518646 - DNA, 15 bp, Homo sapiens
ttccaaaaggactgg

SEQ ID NO: 518647 - DNA, 15 bp, Homo sapiens
tttccaaaaggactg

SEQ ID NO: 518648 - DNA, 15 bp, Homo sapiens
ttttccaaaaggact

SEQ ID NO: 518649 - DNA, 15 bp, Homo sapiens
tttttccaaaaggac

SEQ ID NO: 518650 - DNA, 15 bp, Homo sapiens
atttttccaaaagga

SEQ ID NO: 518651 - DNA, 15 bp, Homo sapiens
catttttccaaaagg

SEQ ID NO: 518652 - DNA, 15 bp, Homo sapiens
acatttttccaaaag

SEQ ID NO: 518653 - DNA, 15 bp, Homo sapiens
tacatttttccaaaa

SEQ ID NO: 518654 - DNA, 15 bp, Homo sapiens
ctacatttttccaaa

SEQ ID NO: 518655 - DNA, 15 bp, Homo sapiens
actacatttttccaa

SEQ ID NO: 518656 - DNA, 15 bp, Homo sapiens
tactacatttttcca

SEQ ID NO: 518657 - DNA, 15 bp, Homo sapiens
ttactacatttttcc

SEQ ID NO: 518658 - DNA, 15 bp, Homo sapiens
attactacatttttc

SEQ ID NO: 518659 - DNA, 15 bp, Homo sapiens
tattactacattttt

SEQ ID NO: 518660 - DNA, 15 bp, Homo sapiens
ttattactacatttt

SEQ ID NO: 518661 - DNA, 15 bp, Homo sapiens
cttattactacattt

SEQ ID NO: 518662 - DNA, 15 bp, Homo sapiens
ccttattactacatt

SEQ ID NO: 518663 - DNA, 15 bp, Homo sapiens
tccttattactacat

SEQ ID NO: 518664 - DNA, 15 bp, Homo sapiens
ttccttattactaca

SEQ ID NO: 518665 - DNA, 15 bp, Homo sapiens
tttccttattactac

SEQ ID NO: 518666 - DNA, 15 bp, Homo sapiens
ttttccttattacta

SEQ ID NO: 518667 - DNA, 15 bp, Homo sapiens
gttttccttattact

SEQ ID NO: 518668 - DNA, 15 bp, Homo sapiens
tgttttccttattac

SEQ ID NO: 518669 - DNA, 15 bp, Homo sapiens
gtgttttccttatta

SEQ ID NO: 518670 - DNA, 15 bp, Homo sapiens
agtgttttccttatt

SEQ ID NO: 518671 - DNA, 15 bp, Homo sapiens
cagtgttttccttat

SEQ ID NO: 518672 - DNA, 15 bp, Homo sapiens
acagtgttttcctta

SEQ ID NO: 518673 - DNA, 15 bp, Homo sapiens
cacagtgttttcctt

SEQ ID NO: 518674 - DNA, 15 bp, Homo sapiens
ccacagtgttttcct

SEQ ID NO: 518675 - DNA, 15 bp, Homo sapiens
cccacagtgttttcc

SEQ ID NO: 518676 - DNA, 15 bp, Homo sapiens
acccacagtgttttc

SEQ ID NO: 518677 - DNA, 15 bp, Homo sapiens
tacccacagtgtttt

SEQ ID NO: 518678 - DNA, 15 bp, Homo sapiens
ttacccacagtgttt

SEQ ID NO: 518679 - DNA, 15 bp, Homo sapiens
cttacccacagtgtt

SEQ ID NO: 518680 - DNA, 15 bp, Homo sapiens
tcttacccacagtgt

SEQ ID NO: 518681 - DNA, 15 bp, Homo sapiens
ctcttacccacagtg

SEQ ID NO: 518682 - DNA, 15 bp, Homo sapiens
actcttacccacagt

SEQ ID NO: 518683 - DNA, 15 bp, Homo sapiens
tactcttacccacag

SEQ ID NO: 518684 - DNA, 15 bp, Homo sapiens
atactcttacccaca

SEQ ID NO: 518685 - DNA, 15 bp, Homo sapiens
tatactcttacccac

SEQ ID NO: 518686 - DNA, 15 bp, Homo sapiens
atatactcttaccca

SEQ ID NO: 518687 - DNA, 15 bp, Homo sapiens
aatatactcttaccc

SEQ ID NO: 518688 - DNA, 15 bp, Homo sapiens
aaatatactcttacc

SEQ ID NO: 518689 - DNA, 15 bp, Homo sapiens
taaatatactcttac

SEQ ID NO: 518690 - DNA, 15 bp, Homo sapiens
gtaaatatactctta

SEQ ID NO: 518691 - DNA, 15 bp, Homo sapiens
ggtaaatatactctt

SEQ ID NO: 518692 - DNA, 15 bp, Homo sapiens
tggtaaatatactct

SEQ ID NO: 518693 - DNA, 15 bp, Homo sapiens
ttggtaaatatactc

SEQ ID NO: 518694 - DNA, 15 bp, Homo sapiens
cttggtaaatatact

SEQ ID NO: 518695 - DNA, 15 bp, Homo sapiens
acttggtaaatatac

SEQ ID NO: 518696 - DNA, 15 bp, Homo sapiens
aacttggtaaatata

SEQ ID NO: 518697 - DNA, 15 bp, Homo sapiens
aaacttggtaaatat

SEQ ID NO: 518698 - DNA, 15 bp, Homo sapiens
taaacttggtaaata

SEQ ID NO: 518699 - DNA, 15 bp, Homo sapiens
ataaacttggtaaat

SEQ ID NO: 518700 - DNA, 15 bp, Homo sapiens
tataaacttggtaaa

SEQ ID NO: 518701 - DNA, 15 bp, Homo sapiens
atataaacttggtaa

SEQ ID NO: 518702 - DNA, 15 bp, Homo sapiens
catataaacttggta

SEQ ID NO: 518703 - DNA, 15 bp, Homo sapiens
tcatataaacttggt

SEQ ID NO: 518704 - DNA, 15 bp, Homo sapiens
gtcatataaacttgg

SEQ ID NO: 518705 - DNA, 15 bp, Homo sapiens
agtcatataaacttg

SEQ ID NO: 518706 - DNA, 15 bp, Homo sapiens
aagtcatataaactt

SEQ ID NO: 518707 - DNA, 15 bp, Homo sapiens
aaagtcatataaact

SEQ ID NO: 518708 - DNA, 15 bp, Homo sapiens
taaagtcatataaac

SEQ ID NO: 518709 - DNA, 15 bp, Homo sapiens
ataaagtcatataaa

SEQ ID NO: 518710 - DNA, 15 bp, Homo sapiens
aataaagtcatataa

SEQ ID NO: 518711 - DNA, 15 bp, Homo sapiens
aaataaagtcatata

SEQ ID NO: 518712 - DNA, 15 bp, Homo sapiens
aaaataaagtcatat

SEQ ID NO: 518713 - DNA, 15 bp, Homo sapiens
taaaataaagtcata

SEQ ID NO: 518714 - DNA, 15 bp, Homo sapiens
ctaaaataaagtcat

SEQ ID NO: 518715 - DNA, 15 bp, Homo sapiens
tctaaaataaagtca

SEQ ID NO: 518716 - DNA, 15 bp, Homo sapiens
atctaaaataaagtc

SEQ ID NO: 518717 - DNA, 15 bp, Homo sapiens
aatctaaaataaagt

SEQ ID NO: 518718 - DNA, 15 bp, Homo sapiens
aaatctaaaataaag

SEQ ID NO: 518719 - DNA, 15 bp, Homo sapiens
gaaatctaaaataaa

SEQ ID NO: 518720 - DNA, 15 bp, Homo sapiens
tgaaatctaaaataa

SEQ ID NO: 518721 - DNA, 15 bp, Homo sapiens
ctgaaatctaaaata

SEQ ID NO: 518722 - DNA, 15 bp, Homo sapiens
cctgaaatctaaaat

SEQ ID NO: 518723 - DNA, 15 bp, Homo sapiens
ccctgaaatctaaaa

SEQ ID NO: 518724 - DNA, 15 bp, Homo sapiens
tccctgaaatctaaa

SEQ ID NO: 518725 - DNA, 15 bp, Homo sapiens
ctccctgaaatctaa

SEQ ID NO: 518726 - DNA, 15 bp, Homo sapiens
actccctgaaatcta

SEQ ID NO: 518727 - DNA, 15 bp, Homo sapiens
cactccctgaaatct

SEQ ID NO: 518728 - DNA, 15 bp, Homo sapiens
acactccctgaaatc

SEQ ID NO: 518729 - DNA, 15 bp, Homo sapiens
cacactccctgaaat

SEQ ID NO: 518730 - DNA, 15 bp, Homo sapiens
tcacactccctgaaa

SEQ ID NO: 518731 - DNA, 15 bp, Homo sapiens
atcacactccctgaa

SEQ ID NO: 518732 - DNA, 15 bp, Homo sapiens
aatcacactccctga

SEQ ID NO: 518733 - DNA, 15 bp, Homo sapiens
taatcacactccctg

SEQ ID NO: 518734 - DNA, 15 bp, Homo sapiens
ttaatcacactccct

SEQ ID NO: 518735 - DNA, 15 bp, Homo sapiens
attaatcacactccc

SEQ ID NO: 518736 - DNA, 15 bp, Homo sapiens
cattaatcacactcc

SEQ ID NO: 518737 - DNA, 15 bp, Homo sapiens
tcattaatcacactc

SEQ ID NO: 518738 - DNA, 15 bp, Homo sapiens
ttcattaatcacact

SEQ ID NO: 518739 - DNA, 15 bp, Homo sapiens
gttcattaatcacac

SEQ ID NO: 518740 - DNA, 15 bp, Homo sapiens
ggttcattaatcaca

SEQ ID NO: 518741 - DNA, 15 bp, Homo sapiens
aggttcattaatcac

SEQ ID NO: 518742 - DNA, 15 bp, Homo sapiens
caggttcattaatca

SEQ ID NO: 518743 - DNA, 15 bp, Homo sapiens
tcaggttcattaatc

SEQ ID NO: 518744 - DNA, 15 bp, Homo sapiens
ttcaggttcattaat

SEQ ID NO: 518745 - DNA, 15 bp, Homo sapiens
cttcaggttcattaa

SEQ ID NO: 518746 - DNA, 15 bp, Homo sapiens
tcttcaggttcatta

SEQ ID NO: 518747 - DNA, 15 bp, Homo sapiens
ctcttcaggttcatt

SEQ ID NO: 518748 - DNA, 15 bp, Homo sapiens
actcttcaggttcat

SEQ ID NO: 518749 - DNA, 15 bp, Homo sapiens
aactcttcaggttca

SEQ ID NO: 518750 - DNA, 15 bp, Homo sapiens
aaactcttcaggttc

SEQ ID NO: 518751 - DNA, 15 bp, Homo sapiens
taaactcttcaggtt

SEQ ID NO: 518752 - DNA, 15 bp, Homo sapiens
ttaaactcttcaggt

SEQ ID NO: 518753 - DNA, 15 bp, Homo sapiens
tttaaactcttcagg

SEQ ID NO: 518754 - DNA, 15 bp, Homo sapiens
atttaaactcttcag

SEQ ID NO: 518755 - DNA, 15 bp, Homo sapiens
aatttaaactcttca

SEQ ID NO: 518756 - DNA, 15 bp, Homo sapiens
gaatttaaactcttc

SEQ ID NO: 518757 - DNA, 15 bp, Homo sapiens
agaatttaaactctt

SEQ ID NO: 518758 - DNA, 15 bp, Homo sapiens
aagaatttaaactct

SEQ ID NO: 518759 - DNA, 15 bp, Homo sapiens
caagaatttaaactc

SEQ ID NO: 518760 - DNA, 15 bp, Homo sapiens
acaagaatttaaact

SEQ ID NO: 518761 - DNA, 15 bp, Homo sapiens
aacaagaatttaaac

SEQ ID NO: 518762 - DNA, 15 bp, Homo sapiens
gaacaagaatttaaa

SEQ ID NO: 518763 - DNA, 15 bp, Homo sapiens
cgaacaagaatttaa

SEQ ID NO: 518764 - DNA, 15 bp, Homo sapiens
acgaacaagaattta

SEQ ID NO: 518765 - DNA, 15 bp, Homo sapiens
tacgaacaagaattt

SEQ ID NO: 518766 - DNA, 15 bp, Homo sapiens
ctacgaacaagaatt

SEQ ID NO: 518767 - DNA, 15 bp, Homo sapiens
actacgaacaagaat

SEQ ID NO: 518768 - DNA, 15 bp, Homo sapiens
cactacgaacaagaa

SEQ ID NO: 518769 - DNA, 15 bp, Homo sapiens
tcactacgaacaaga

SEQ ID NO: 518770 - DNA, 15 bp, Homo sapiens
ctcactacgaacaag

SEQ ID NO: 518771 - DNA, 15 bp, Homo sapiens
cctcactacgaacaa

SEQ ID NO: 518772 - DNA, 15 bp, Homo sapiens
tcctcactacgaaca

SEQ ID NO: 518773 - DNA, 15 bp, Homo sapiens
ttcctcactacgaac

SEQ ID NO: 518774 - DNA, 15 bp, Homo sapiens
cttcctcactacgaa

SEQ ID NO: 518775 - DNA, 15 bp, Homo sapiens
tcttcctcactacga

SEQ ID NO: 518776 - DNA, 15 bp, Homo sapiens
atcttcctcactacg

SEQ ID NO: 518777 - DNA, 15 bp, Homo sapiens
catcttcctcactac

SEQ ID NO: 518778 - DNA, 15 bp, Homo sapiens
tcatcttcctcacta

SEQ ID NO: 518779 - DNA, 15 bp, Homo sapiens
gtcatcttcctcact

SEQ ID NO: 518780 - DNA, 15 bp, Homo sapiens
agtcatcttcctcac

SEQ ID NO: 518781 - DNA, 15 bp, Homo sapiens
aagtcatcttcctca

SEQ ID NO: 518782 - DNA, 15 bp, Homo sapiens
gaagtcatcttcctc

SEQ ID NO: 518783 - DNA, 15 bp, Homo sapiens
agaagtcatcttcct

SEQ ID NO: 518784 - DNA, 15 bp, Homo sapiens
gagaagtcatcttcc

SEQ ID NO: 518785 - DNA, 15 bp, Homo sapiens
tgagaagtcatcttc

SEQ ID NO: 518786 - DNA, 15 bp, Homo sapiens
ttgagaagtcatctt

SEQ ID NO: 518787 - DNA, 15 bp, Homo sapiens
tttgagaagtcatct

SEQ ID NO: 518788 - DNA, 15 bp, Homo sapiens
ttttgagaagtcatc

SEQ ID NO: 518789 - DNA, 15 bp, Homo sapiens
cttttgagaagtcat

SEQ ID NO: 518790 - DNA, 15 bp, Homo sapiens
tcttttgagaagtca

SEQ ID NO: 518791 - DNA, 15 bp, Homo sapiens
gtcttttgagaagtc

SEQ ID NO: 518792 - DNA, 15 bp, Homo sapiens
tgtcttttgagaagt

SEQ ID NO: 518793 - DNA, 15 bp, Homo sapiens
ttgtcttttgagaag

SEQ ID NO: 518794 - DNA, 15 bp, Homo sapiens
tttgtcttttgagaa

SEQ ID NO: 518795 - DNA, 15 bp, Homo sapiens
ctttgtcttttgaga

SEQ ID NO: 518796 - DNA, 15 bp, Homo sapiens
actttgtcttttgag

SEQ ID NO: 518797 - DNA, 15 bp, Homo sapiens
aactttgtcttttga

SEQ ID NO: 518798 - DNA, 15 bp, Homo sapiens
taactttgtcttttg

SEQ ID NO: 518799 - DNA, 15 bp, Homo sapiens
ttaactttgtctttt

SEQ ID NO: 518800 - DNA, 15 bp, Homo sapiens
cttaactttgtcttt

SEQ ID NO: 518801 - DNA, 15 bp, Homo sapiens
gcttaactttgtctt

SEQ ID NO: 518802 - DNA, 15 bp, Homo sapiens
tgcttaactttgtct

SEQ ID NO: 518803 - DNA, 15 bp, Homo sapiens
atgcttaactttgtc

SEQ ID NO: 518804 - DNA, 15 bp, Homo sapiens
catgcttaactttgt

SEQ ID NO: 518805 - DNA, 15 bp, Homo sapiens
ccatgcttaactttg

SEQ ID NO: 518806 - DNA, 15 bp, Homo sapiens
tccatgcttaacttt

SEQ ID NO: 518807 - DNA, 15 bp, Homo sapiens
ttccatgcttaactt

SEQ ID NO: 518808 - DNA, 15 bp, Homo sapiens
cttccatgcttaact

SEQ ID NO: 518809 - DNA, 15 bp, Homo sapiens
acttccatgcttaac

SEQ ID NO: 518810 - DNA, 15 bp, Homo sapiens
aacttccatgcttaa

SEQ ID NO: 518811 - DNA, 15 bp, Homo sapiens
aaacttccatgctta

SEQ ID NO: 518812 - DNA, 15 bp, Homo sapiens
taaacttccatgctt

SEQ ID NO: 518813 - DNA, 15 bp, Homo sapiens
ttaaacttccatgct

SEQ ID NO: 518814 - DNA, 15 bp, Homo sapiens
attaaacttccatgc

SEQ ID NO: 518815 - DNA, 15 bp, Homo sapiens
gattaaacttccatg

SEQ ID NO: 518816 - DNA, 15 bp, Homo sapiens
agattaaacttccat

SEQ ID NO: 518817 - DNA, 15 bp, Homo sapiens
tagattaaacttcca

SEQ ID NO: 518818 - DNA, 15 bp, Homo sapiens
ttagattaaacttcc

SEQ ID NO: 518819 - DNA, 15 bp, Homo sapiens
cttagattaaacttc

SEQ ID NO: 518820 - DNA, 15 bp, Homo sapiens
tcttagattaaactt

SEQ ID NO: 518821 - DNA, 15 bp, Homo sapiens
gtcttagattaaact

SEQ ID NO: 518822 - DNA, 15 bp, Homo sapiens
tgtcttagattaaac

SEQ ID NO: 518823 - DNA, 15 bp, Homo sapiens
ctgtcttagattaaa

SEQ ID NO: 518824 - DNA, 15 bp, Homo sapiens
gctgtcttagattaa

SEQ ID NO: 518825 - DNA, 15 bp, Homo sapiens
tgctgtcttagatta

SEQ ID NO: 518826 - DNA, 15 bp, Homo sapiens
gtgctgtcttagatt

SEQ ID NO: 518827 - DNA, 15 bp, Homo sapiens
ggtgctgtcttagat

SEQ ID NO: 518828 - DNA, 15 bp, Homo sapiens
aggtgctgtcttaga

SEQ ID NO: 518829 - DNA, 15 bp, Homo sapiens
caggtgctgtcttag

SEQ ID NO: 518830 - DNA, 15 bp, Homo sapiens
acaggtgctgtctta

SEQ ID NO: 518831 - DNA, 15 bp, Homo sapiens
gacaggtgctgtctt

SEQ ID NO: 518832 - DNA, 15 bp, Homo sapiens
tgacaggtgctgtct

SEQ ID NO: 518833 - DNA, 15 bp, Homo sapiens
ttgacaggtgctgtc

SEQ ID NO: 518834 - DNA, 15 bp, Homo sapiens
tttgacaggtgctgt

SEQ ID NO: 518835 - DNA, 15 bp, Homo sapiens
gtttgacaggtgctg

SEQ ID NO: 518836 - DNA, 15 bp, Homo sapiens
agtttgacaggtgct

SEQ ID NO: 518837 - DNA, 15 bp, Homo sapiens
aagtttgacaggtgc

SEQ ID NO: 518838 - DNA, 15 bp, Homo sapiens
aaagtttgacaggtg

SEQ ID NO: 518839 - DNA, 15 bp, Homo sapiens
caaagtttgacaggt

SEQ ID NO: 518840 - DNA, 15 bp, Homo sapiens
ccaaagtttgacagg

SEQ ID NO: 518841 - DNA, 15 bp, Homo sapiens
tccaaagtttgacag

SEQ ID NO: 518842 - DNA, 15 bp, Homo sapiens
ctccaaagtttgaca

SEQ ID NO: 518843 - DNA, 15 bp, Homo sapiens
actccaaagtttgac

SEQ ID NO: 518844 - DNA, 15 bp, Homo sapiens
cactccaaagtttga

SEQ ID NO: 518845 - DNA, 15 bp, Homo sapiens
gcactccaaagtttg

SEQ ID NO: 518846 - DNA, 15 bp, Homo sapiens
tgcactccaaagttt

SEQ ID NO: 518847 - DNA, 15 bp, Homo sapiens
atgcactccaaagtt

SEQ ID NO: 518848 - DNA, 15 bp, Homo sapiens
tatgcactccaaagt

SEQ ID NO: 518849 - DNA, 15 bp, Homo sapiens
ttatgcactccaaag

SEQ ID NO: 518850 - DNA, 15 bp, Homo sapiens
cttatgcactccaaa

SEQ ID NO: 518851 - DNA, 15 bp, Homo sapiens
acttatgcactccaa

SEQ ID NO: 518852 - DNA, 15 bp, Homo sapiens
tacttatgcactcca

SEQ ID NO: 518853 - DNA, 15 bp, Homo sapiens
atacttatgcactcc

SEQ ID NO: 518854 - DNA, 15 bp, Homo sapiens
tatacttatgcactc

SEQ ID NO: 518855 - DNA, 15 bp, Homo sapiens
ttatacttatgcact

SEQ ID NO: 518856 - DNA, 15 bp, Homo sapiens
gttatacttatgcac

SEQ ID NO: 518857 - DNA, 15 bp, Homo sapiens
ggttatacttatgca

SEQ ID NO: 518858 - DNA, 15 bp, Homo sapiens
gggttatacttatgc

SEQ ID NO: 518859 - DNA, 15 bp, Homo sapiens
tgggttatacttatg

SEQ ID NO: 518860 - DNA, 15 bp, Homo sapiens
ttgggttatacttat

SEQ ID NO: 518861 - DNA, 15 bp, Homo sapiens
tttgggttatactta

SEQ ID NO: 518862 - DNA, 15 bp, Homo sapiens
ttttgggttatactt

SEQ ID NO: 518863 - DNA, 15 bp, Homo sapiens
tttttgggttatact

SEQ ID NO: 518864 - DNA, 15 bp, Homo sapiens
ctttttgggttatac

SEQ ID NO: 518865 - DNA, 15 bp, Homo sapiens
gctttttgggttata

SEQ ID NO: 518866 - DNA, 15 bp, Homo sapiens
agctttttgggttat

SEQ ID NO: 518867 - DNA, 15 bp, Homo sapiens
aagctttttgggtta

SEQ ID NO: 518868 - DNA, 15 bp, Homo sapiens
caagctttttgggtt

SEQ ID NO: 518869 - DNA, 15 bp, Homo sapiens
acaagctttttgggt

SEQ ID NO: 518870 - DNA, 15 bp, Homo sapiens
aacaagctttttggg

SEQ ID NO: 518871 - DNA, 15 bp, Homo sapiens
aaacaagctttttgg

SEQ ID NO: 518872 - DNA, 15 bp, Homo sapiens
aaaacaagctttttg

SEQ ID NO: 518873 - DNA, 15 bp, Homo sapiens
taaaacaagcttttt

SEQ ID NO: 518874 - DNA, 15 bp, Homo sapiens
ttaaaacaagctttt

SEQ ID NO: 518875 - DNA, 15 bp, Homo sapiens
cttaaaacaagcttt

SEQ ID NO: 518876 - DNA, 15 bp, Homo sapiens
acttaaaacaagctt

SEQ ID NO: 518877 - DNA, 15 bp, Homo sapiens
cacttaaaacaagct

SEQ ID NO: 518878 - DNA, 15 bp, Homo sapiens
acacttaaaacaagc

SEQ ID NO: 518879 - DNA, 15 bp, Homo sapiens
tacacttaaaacaag

SEQ ID NO: 518880 - DNA, 15 bp, Homo sapiens
atacacttaaaacaa

SEQ ID NO: 518881 - DNA, 15 bp, Homo sapiens
tatacacttaaaaca

SEQ ID NO: 518882 - DNA, 15 bp, Homo sapiens
atatacacttaaaac

SEQ ID NO: 518883 - DNA, 15 bp, Homo sapiens
aatatacacttaaaa

SEQ ID NO: 518884 - DNA, 15 bp, Homo sapiens
gaatatacacttaaa

SEQ ID NO: 518885 - DNA, 15 bp, Homo sapiens
agaatatacacttaa

SEQ ID NO: 518886 - DNA, 15 bp, Homo sapiens
aagaatatacactta

SEQ ID NO: 518887 - DNA, 15 bp, Homo sapiens
caagaatatacactt

SEQ ID NO: 518888 - DNA, 15 bp, Homo sapiens
tcaagaatatacact

SEQ ID NO: 518889 - DNA, 15 bp, Homo sapiens
ttcaagaatatacac

SEQ ID NO: 518890 - DNA, 15 bp, Homo sapiens
attcaagaatataca

SEQ ID NO: 518891 - DNA, 15 bp, Homo sapiens
cattcaagaatatac

SEQ ID NO: 518892 - DNA, 15 bp, Homo sapiens
ccattcaagaatata

SEQ ID NO: 518893 - DNA, 15 bp, Homo sapiens
cccattcaagaatat

SEQ ID NO: 518894 - DNA, 15 bp, Homo sapiens
acccattcaagaata

SEQ ID NO: 518895 - DNA, 15 bp, Homo sapiens
cacccattcaagaat

SEQ ID NO: 518896 - DNA, 15 bp, Homo sapiens
acacccattcaagaa

SEQ ID NO: 518897 - DNA, 15 bp, Homo sapiens
aacacccattcaaga

SEQ ID NO: 518898 - DNA, 15 bp, Homo sapiens
gaacacccattcaag

SEQ ID NO: 518899 - DNA, 15 bp, Homo sapiens
agaacacccattcaa

SEQ ID NO: 518900 - DNA, 15 bp, Homo sapiens
cagaacacccattca

SEQ ID NO: 518901 - DNA, 15 bp, Homo sapiens
tcagaacacccattc

SEQ ID NO: 518902 - DNA, 15 bp, Homo sapiens
ctcagaacacccatt

SEQ ID NO: 518903 - DNA, 15 bp, Homo sapiens
actcagaacacccat

SEQ ID NO: 518904 - DNA, 15 bp, Homo sapiens
gactcagaacaccca

SEQ ID NO: 518905 - DNA, 15 bp, Homo sapiens
ggactcagaacaccc

SEQ ID NO: 518906 - DNA, 15 bp, Homo sapiens
tggactcagaacacc

SEQ ID NO: 518907 - DNA, 15 bp, Homo sapiens
ctggactcagaacac

SEQ ID NO: 518908 - DNA, 15 bp, Homo sapiens
actggactcagaaca

SEQ ID NO: 518909 - DNA, 15 bp, Homo sapiens
tactggactcagaac

SEQ ID NO: 518910 - DNA, 15 bp, Homo sapiens
ttactggactcagaa

SEQ ID NO: 518911 - DNA, 15 bp, Homo sapiens
attactggactcaga

SEQ ID NO: 518912 - DNA, 15 bp, Homo sapiens
tattactggactcag

SEQ ID NO: 518913 - DNA, 15 bp, Homo sapiens
ttattactggactca

SEQ ID NO: 518914 - DNA, 15 bp, Homo sapiens
tttattactggactc

SEQ ID NO: 518915 - DNA, 15 bp, Homo sapiens
ttttattactggact

SEQ ID NO: 518916 - DNA, 15 bp, Homo sapiens
tttttattactggac

SEQ ID NO: 518917 - DNA, 15 bp, Homo sapiens
ctttttattactgga

SEQ ID NO: 518918 - DNA, 15 bp, Homo sapiens
actttttattactgg

SEQ ID NO: 518919 - DNA, 15 bp, Homo sapiens
tactttttattactg

SEQ ID NO: 518920 - DNA, 15 bp, Homo sapiens
gtactttttattact

SEQ ID NO: 518921 - DNA, 15 bp, Homo sapiens
tgtactttttattac

SEQ ID NO: 518922 - DNA, 15 bp, Homo sapiens
atgtactttttatta

SEQ ID NO: 518923 - DNA, 15 bp, Homo sapiens
aatgtactttttatt

SEQ ID NO: 518924 - DNA, 15 bp, Homo sapiens
taatgtactttttat

SEQ ID NO: 518925 - DNA, 15 bp, Homo sapiens
ataatgtacttttta

SEQ ID NO: 518926 - DNA, 15 bp, Homo sapiens
gataatgtacttttt

SEQ ID NO: 518927 - DNA, 15 bp, Homo sapiens
agataatgtactttt

SEQ ID NO: 518928 - DNA, 15 bp, Homo sapiens
cagataatgtacttt

SEQ ID NO: 518929 - DNA, 15 bp, Homo sapiens
tcagataatgtactt

SEQ ID NO: 518930 - DNA, 15 bp, Homo sapiens
gtcagataatgtact

SEQ ID NO: 518931 - DNA, 15 bp, Homo sapiens
agtcagataatgtac

SEQ ID NO: 518932 - DNA, 15 bp, Homo sapiens
tagtcagataatgta

SEQ ID NO: 518933 - DNA, 15 bp, Homo sapiens
atagtcagataatgt

SEQ ID NO: 518934 - DNA, 15 bp, Homo sapiens
catagtcagataatg

SEQ ID NO: 518935 - DNA, 15 bp, Homo sapiens
gcatagtcagataat

SEQ ID NO: 518936 - DNA, 15 bp, Homo sapiens
ggcatagtcagataa

SEQ ID NO: 518937 - DNA, 15 bp, Homo sapiens
aggcatagtcagata

SEQ ID NO: 518938 - DNA, 15 bp, Homo sapiens
aaggcatagtcagat

SEQ ID NO: 518939 - DNA, 15 bp, Homo sapiens
aaaggcatagtcaga

SEQ ID NO: 518940 - DNA, 15 bp, Homo sapiens
aaaaggcatagtcag

SEQ ID NO: 518941 - DNA, 15 bp, Homo sapiens
aaaaaggcatagtca

SEQ ID NO: 518942 - DNA, 15 bp, Homo sapiens
gaaaaaggcatagtc

SEQ ID NO: 518943 - DNA, 15 bp, Homo sapiens
tgaaaaaggcatagt

SEQ ID NO: 518944 - DNA, 15 bp, Homo sapiens
ctgaaaaaggcatag

SEQ ID NO: 518945 - DNA, 15 bp, Homo sapiens
tctgaaaaaggcata

SEQ ID NO: 518946 - DNA, 15 bp, Homo sapiens
atctgaaaaaggcat

SEQ ID NO: 518947 - DNA, 15 bp, Homo sapiens
tatctgaaaaaggca

SEQ ID NO: 518948 - DNA, 15 bp, Homo sapiens
ttatctgaaaaaggc

SEQ ID NO: 518949 - DNA, 15 bp, Homo sapiens
attatctgaaaaagg

SEQ ID NO: 518950 - DNA, 15 bp, Homo sapiens
tattatctgaaaaag

SEQ ID NO: 518951 - DNA, 15 bp, Homo sapiens
ttattatctgaaaaa

SEQ ID NO: 518952 - DNA, 15 bp, Homo sapiens
attattatctgaaaa

SEQ ID NO: 518953 - DNA, 15 bp, Homo sapiens
cattattatctgaaa

SEQ ID NO: 518954 - DNA, 15 bp, Homo sapiens
tcattattatctgaa

SEQ ID NO: 518955 - DNA, 15 bp, Homo sapiens
atcattattatctga

SEQ ID NO: 518956 - DNA, 15 bp, Homo sapiens
tatcattattatctg

SEQ ID NO: 518957 - DNA, 15 bp, Homo sapiens
ttatcattattatct

SEQ ID NO: 518958 - DNA, 15 bp, Homo sapiens
tttatcattattatc

SEQ ID NO: 518959 - DNA, 15 bp, Homo sapiens
gtttatcattattat

SEQ ID NO: 518960 - DNA, 15 bp, Homo sapiens
agtttatcattatta

SEQ ID NO: 518961 - DNA, 15 bp, Homo sapiens
gagtttatcattatt

SEQ ID NO: 518962 - DNA, 15 bp, Homo sapiens
agagtttatcattat

SEQ ID NO: 518963 - DNA, 15 bp, Homo sapiens
cagagtttatcatta

SEQ ID NO: 518964 - DNA, 15 bp, Homo sapiens
ccagagtttatcatt

SEQ ID NO: 518965 - DNA, 15 bp, Homo sapiens
tccagagtttatcat

SEQ ID NO: 518966 - DNA, 15 bp, Homo sapiens
gtccagagtttatca

SEQ ID NO: 518967 - DNA, 15 bp, Homo sapiens
tgtccagagtttatc

SEQ ID NO: 518968 - DNA, 15 bp, Homo sapiens
ttgtccagagtttat

SEQ ID NO: 518969 - DNA, 15 bp, Homo sapiens
attgtccagagttta

SEQ ID NO: 518970 - DNA, 15 bp, Homo sapiens
tattgtccagagttt

SEQ ID NO: 518971 - DNA, 15 bp, Homo sapiens
gtattgtccagagtt

SEQ ID NO: 518972 - DNA, 15 bp, Homo sapiens
tgtattgtccagagt

SEQ ID NO: 518973 - DNA, 15 bp, Homo sapiens
gtgtattgtccagag

SEQ ID NO: 518974 - DNA, 15 bp, Homo sapiens
tgtgtattgtccaga

SEQ ID NO: 518975 - DNA, 15 bp, Homo sapiens
gtgtgtattgtccag

SEQ ID NO: 518976 - DNA, 15 bp, Homo sapiens
tgtgtgtattgtcca

SEQ ID NO: 518977 - DNA, 15 bp, Homo sapiens
gtgtgtgtattgtcc

SEQ ID NO: 518978 - DNA, 15 bp, Homo sapiens
tgtgtgtgtattgtc

SEQ ID NO: 518979 - DNA, 15 bp, Homo sapiens
gtgtgtgtgtattgt

SEQ ID NO: 518980 - DNA, 15 bp, Homo sapiens
tgtgtgtgtgtattg

SEQ ID NO: 518981 - DNA, 15 bp, Homo sapiens
gtgtgtgtgtgtatt

SEQ ID NO: 518982 - DNA, 15 bp, Homo sapiens
tgtgtgtgtgtgtat

SEQ ID NO: 518983 - DNA, 15 bp, Homo sapiens
gtgtgtgtgtgtgta

SEQ ID NO: 518984 - DNA, 15 bp, Homo sapiens
tgtgtgtgtgtgtgt

SEQ ID NO: 518985 - DNA, 15 bp, Homo sapiens
gtgtgtgtgtgtgtg

SEQ ID NO: 518986 - DNA, 15 bp, Homo sapiens
ttgtgtgtgtgtgtg

SEQ ID NO: 518987 - DNA, 15 bp, Homo sapiens
tttgtgtgtgtgtgt

SEQ ID NO: 518988 - DNA, 15 bp, Homo sapiens
gtttgtgtgtgtgtg

SEQ ID NO: 518989 - DNA, 15 bp, Homo sapiens
tgtttgtgtgtgtgt

SEQ ID NO: 518990 - DNA, 15 bp, Homo sapiens
gtgtttgtgtgtgtg

SEQ ID NO: 518991 - DNA, 15 bp, Homo sapiens
tgtgtttgtgtgtgt

SEQ ID NO: 518992 - DNA, 15 bp, Homo sapiens
gtgtgtttgtgtgtg

SEQ ID NO: 518993 - DNA, 15 bp, Homo sapiens
tgtgtgtttgtgtgt

SEQ ID NO: 518994 - DNA, 15 bp, Homo sapiens
gtgtgtgtttgtgtg

SEQ ID NO: 518995 - DNA, 15 bp, Homo sapiens
tgtgtgtgtttgtgt

SEQ ID NO: 518996 - DNA, 15 bp, Homo sapiens
gtgtgtgtgtttgtg

SEQ ID NO: 518997 - DNA, 15 bp, Homo sapiens
tgtgtgtgtgtttgt

SEQ ID NO: 518998 - DNA, 15 bp, Homo sapiens
ttgtgtgtgtgtttg

SEQ ID NO: 518999 - DNA, 15 bp, Homo sapiens
attgtgtgtgtgttt

SEQ ID NO: 519000 - DNA, 15 bp, Homo sapiens
aattgtgtgtgtgtt

SEQ ID NO: 519001 - DNA, 15 bp, Homo sapiens
taattgtgtgtgtgt

SEQ ID NO: 519002 - DNA, 15 bp, Homo sapiens
ataattgtgtgtgtg

SEQ ID NO: 519003 - DNA, 15 bp, Homo sapiens
aataattgtgtgtgt

SEQ ID NO: 519004 - DNA, 15 bp, Homo sapiens
aaataattgtgtgtg

SEQ ID NO: 519005 - DNA, 15 bp, Homo sapiens
caaataattgtgtgt

SEQ ID NO: 519006 - DNA, 15 bp, Homo sapiens
tcaaataattgtgtg

SEQ ID NO: 519007 - DNA, 15 bp, Homo sapiens
ttcaaataattgtgt

SEQ ID NO: 519008 - DNA, 15 bp, Homo sapiens
cttcaaataattgtg

SEQ ID NO: 519009 - DNA, 15 bp, Homo sapiens
ccttcaaataattgt

SEQ ID NO: 519010 - DNA, 15 bp, Homo sapiens
gccttcaaataattg

SEQ ID NO: 519011 - DNA, 15 bp, Homo sapiens
tgccttcaaataatt

SEQ ID NO: 519012 - DNA, 15 bp, Homo sapiens
gtgccttcaaataat

SEQ ID NO: 519013 - DNA, 15 bp, Homo sapiens
ggtgccttcaaataa

SEQ ID NO: 519014 - DNA, 15 bp, Homo sapiens
tggtgccttcaaata

SEQ ID NO: 519015 - DNA, 15 bp, Homo sapiens
ctggtgccttcaaat

SEQ ID NO: 519016 - DNA, 15 bp, Homo sapiens
tctggtgccttcaaa

SEQ ID NO: 519017 - DNA, 15 bp, Homo sapiens
ttctggtgccttcaa

SEQ ID NO: 519018 - DNA, 15 bp, Homo sapiens
tttctggtgccttca

SEQ ID NO: 519019 - DNA, 15 bp, Homo sapiens
ctttctggtgccttc

SEQ ID NO: 519020 - DNA, 15 bp, Homo sapiens
actttctggtgcctt

SEQ ID NO: 519021 - DNA, 15 bp, Homo sapiens
cactttctggtgcct

SEQ ID NO: 519022 - DNA, 15 bp, Homo sapiens
ccactttctggtgcc

SEQ ID NO: 519023 - DNA, 15 bp, Homo sapiens
accactttctggtgc

SEQ ID NO: 519024 - DNA, 15 bp, Homo sapiens
gaccactttctggtg

SEQ ID NO: 519025 - DNA, 15 bp, Homo sapiens
tgaccactttctggt

SEQ ID NO: 519026 - DNA, 15 bp, Homo sapiens
ttgaccactttctgg

SEQ ID NO: 519027 - DNA, 15 bp, Homo sapiens
tttgaccactttctg

SEQ ID NO: 519028 - DNA, 15 bp, Homo sapiens
ttttgaccactttct

SEQ ID NO: 519029 - DNA, 15 bp, Homo sapiens
cttttgaccactttc

SEQ ID NO: 519030 - DNA, 15 bp, Homo sapiens
tcttttgaccacttt

SEQ ID NO: 519031 - DNA, 15 bp, Homo sapiens
ttcttttgaccactt

SEQ ID NO: 519032 - DNA, 15 bp, Homo sapiens
cttcttttgaccact

SEQ ID NO: 519033 - DNA, 15 bp, Homo sapiens
tcttcttttgaccac

SEQ ID NO: 519034 - DNA, 15 bp, Homo sapiens
ttcttcttttgacca

SEQ ID NO: 519035 - DNA, 15 bp, Homo sapiens
tttcttcttttgacc

SEQ ID NO: 519036 - DNA, 15 bp, Homo sapiens
ctttcttcttttgac

SEQ ID NO: 519037 - DNA, 15 bp, Homo sapiens
tctttcttcttttga

SEQ ID NO: 519038 - DNA, 15 bp, Homo sapiens
ttctttcttcttttg

SEQ ID NO: 519039 - DNA, 15 bp, Homo sapiens
tttctttcttctttt

SEQ ID NO: 519040 - DNA, 15 bp, Homo sapiens
gtttctttcttcttt

SEQ ID NO: 519041 - DNA, 15 bp, Homo sapiens
agtttctttcttctt

SEQ ID NO: 519042 - DNA, 15 bp, Homo sapiens
cagtttctttcttct

SEQ ID NO: 519043 - DNA, 15 bp, Homo sapiens
tcagtttctttcttc

SEQ ID NO: 519044 - DNA, 15 bp, Homo sapiens
ttcagtttctttctt

SEQ ID NO: 519045 - DNA, 15 bp, Homo sapiens
cttcagtttctttct

SEQ ID NO: 519046 - DNA, 15 bp, Homo sapiens
tcttcagtttctttc

SEQ ID NO: 519047 - DNA, 15 bp, Homo sapiens
ttcttcagtttcttt

SEQ ID NO: 519048 - DNA, 15 bp, Homo sapiens
cttcttcagtttctt

SEQ ID NO: 519049 - DNA, 15 bp, Homo sapiens
acttcttcagtttct

SEQ ID NO: 519050 - DNA, 15 bp, Homo sapiens
aacttcttcagtttc

SEQ ID NO: 519051 - DNA, 15 bp, Homo sapiens
aaacttcttcagttt

SEQ ID NO: 519052 - DNA, 15 bp, Homo sapiens
gaaacttcttcagtt

SEQ ID NO: 519053 - DNA, 15 bp, Homo sapiens
agaaacttcttcagt

SEQ ID NO: 519054 - DNA, 15 bp, Homo sapiens
tagaaacttcttcag

SEQ ID NO: 519055 - DNA, 15 bp, Homo sapiens
ctagaaacttcttca

SEQ ID NO: 519056 - DNA, 15 bp, Homo sapiens
actagaaacttcttc

SEQ ID NO: 519057 - DNA, 15 bp, Homo sapiens
gactagaaacttctt

SEQ ID NO: 519058 - DNA, 15 bp, Homo sapiens
tgactagaaacttct

SEQ ID NO: 519059 - DNA, 15 bp, Homo sapiens
atgactagaaacttc

SEQ ID NO: 519060 - DNA, 15 bp, Homo sapiens
tatgactagaaactt

SEQ ID NO: 519061 - DNA, 15 bp, Homo sapiens
ttatgactagaaact

SEQ ID NO: 519062 - DNA, 15 bp, Homo sapiens
tttatgactagaaac

SEQ ID NO: 519063 - DNA, 15 bp, Homo sapiens
atttatgactagaaa

SEQ ID NO: 519064 - DNA, 15 bp, Homo sapiens
catttatgactagaa

SEQ ID NO: 519065 - DNA, 15 bp, Homo sapiens
ccatttatgactaga

SEQ ID NO: 519066 - DNA, 15 bp, Homo sapiens
tccatttatgactag

SEQ ID NO: 519067 - DNA, 15 bp, Homo sapiens
ttccatttatgacta

SEQ ID NO: 519068 - DNA, 15 bp, Homo sapiens
gttccatttatgact

SEQ ID NO: 519069 - DNA, 15 bp, Homo sapiens
agttccatttatgac

SEQ ID NO: 519070 - DNA, 15 bp, Homo sapiens
tagttccatttatga

SEQ ID NO: 519071 - DNA, 15 bp, Homo sapiens
gtagttccatttatg

SEQ ID NO: 519072 - DNA, 15 bp, Homo sapiens
agtagttccatttat

SEQ ID NO: 519073 - DNA, 15 bp, Homo sapiens
gagtagttccattta

SEQ ID NO: 519074 - DNA, 15 bp, Homo sapiens
tgagtagttccattt

SEQ ID NO: 519075 - DNA, 15 bp, Homo sapiens
gtgagtagttccatt

SEQ ID NO: 519076 - DNA, 15 bp, Homo sapiens
agtgagtagttccat

SEQ ID NO: 519077 - DNA, 15 bp, Homo sapiens
cagtgagtagttcca

SEQ ID NO: 519078 - DNA, 15 bp, Homo sapiens
ccagtgagtagttcc

SEQ ID NO: 519079 - DNA, 15 bp, Homo sapiens
cccagtgagtagttc

SEQ ID NO: 519080 - DNA, 15 bp, Homo sapiens
acccagtgagtagtt

SEQ ID NO: 519081 - DNA, 15 bp, Homo sapiens
tacccagtgagtagt

SEQ ID NO: 519082 - DNA, 15 bp, Homo sapiens
ttacccagtgagtag

SEQ ID NO: 519083 - DNA, 15 bp, Homo sapiens
cttacccagtgagta

SEQ ID NO: 519084 - DNA, 15 bp, Homo sapiens
tcttacccagtgagt

SEQ ID NO: 519085 - DNA, 15 bp, Homo sapiens
ttcttacccagtgag

SEQ ID NO: 519086 - DNA, 15 bp, Homo sapiens
attcttacccagtga

SEQ ID NO: 519087 - DNA, 15 bp, Homo sapiens
aattcttacccagtg

SEQ ID NO: 519088 - DNA, 15 bp, Homo sapiens
taattcttacccagt

SEQ ID NO: 519089 - DNA, 15 bp, Homo sapiens
ttaattcttacccag

SEQ ID NO: 519090 - DNA, 15 bp, Homo sapiens
tttaattcttaccca

SEQ ID NO: 519091 - DNA, 15 bp, Homo sapiens
gtttaattcttaccc

SEQ ID NO: 519092 - DNA, 15 bp, Homo sapiens
agtttaattcttacc

SEQ ID NO: 519093 - DNA, 15 bp, Homo sapiens
aagtttaattcttac

SEQ ID NO: 519094 - DNA, 15 bp, Homo sapiens
taagtttaattctta

SEQ ID NO: 519095 - DNA, 15 bp, Homo sapiens
gtaagtttaattctt

SEQ ID NO: 519096 - DNA, 15 bp, Homo sapiens
tgtaagtttaattct

SEQ ID NO: 519097 - DNA, 15 bp, Homo sapiens
ttgtaagtttaattc

SEQ ID NO: 519098 - DNA, 15 bp, Homo sapiens
cttgtaagtttaatt

SEQ ID NO: 519099 - DNA, 15 bp, Homo sapiens
ccttgtaagtttaat

SEQ ID NO: 519100 - DNA, 15 bp, Homo sapiens
tccttgtaagtttaa

SEQ ID NO: 519101 - DNA, 15 bp, Homo sapiens
atccttgtaagttta

SEQ ID NO: 519102 - DNA, 15 bp, Homo sapiens
tatccttgtaagttt

SEQ ID NO: 519103 - DNA, 15 bp, Homo sapiens
atatccttgtaagtt

SEQ ID NO: 519104 - DNA, 15 bp, Homo sapiens
aatatccttgtaagt

SEQ ID NO: 519105 - DNA, 15 bp, Homo sapiens
gaatatccttgtaag

SEQ ID NO: 519106 - DNA, 15 bp, Homo sapiens
agaatatccttgtaa

SEQ ID NO: 519107 - DNA, 15 bp, Homo sapiens
tagaatatccttgta

SEQ ID NO: 519108 - DNA, 15 bp, Homo sapiens
gtagaatatccttgt

SEQ ID NO: 519109 - DNA, 15 bp, Homo sapiens
agtagaatatccttg

SEQ ID NO: 519110 - DNA, 15 bp, Homo sapiens
cagtagaatatcctt

SEQ ID NO: 519111 - DNA, 15 bp, Homo sapiens
tcagtagaatatcct

SEQ ID NO: 519112 - DNA, 15 bp, Homo sapiens
ctcagtagaatatcc

SEQ ID NO: 519113 - DNA, 15 bp, Homo sapiens
cctcagtagaatatc

SEQ ID NO: 519114 - DNA, 15 bp, Homo sapiens
tcctcagtagaatat

SEQ ID NO: 519115 - DNA, 15 bp, Homo sapiens
gtcctcagtagaata

SEQ ID NO: 519116 - DNA, 15 bp, Homo sapiens
tgtcctcagtagaat

SEQ ID NO: 519117 - DNA, 15 bp, Homo sapiens
ttgtcctcagtagaa

SEQ ID NO: 519118 - DNA, 15 bp, Homo sapiens
attgtcctcagtaga

SEQ ID NO: 519119 - DNA, 15 bp, Homo sapiens
tattgtcctcagtag

SEQ ID NO: 519120 - DNA, 15 bp, Homo sapiens
gtattgtcctcagta

SEQ ID NO: 519121 - DNA, 15 bp, Homo sapiens
agtattgtcctcagt

SEQ ID NO: 519122 - DNA, 15 bp, Homo sapiens
gagtattgtcctcag

SEQ ID NO: 519123 - DNA, 15 bp, Homo sapiens
tgagtattgtcctca

SEQ ID NO: 519124 - DNA, 15 bp, Homo sapiens
atgagtattgtcctc

SEQ ID NO: 519125 - DNA, 15 bp, Homo sapiens
tatgagtattgtcct

SEQ ID NO: 519126 - DNA, 15 bp, Homo sapiens
gtatgagtattgtcc

SEQ ID NO: 519127 - DNA, 15 bp, Homo sapiens
ggtatgagtattgtc

SEQ ID NO: 519128 - DNA, 15 bp, Homo sapiens
tggtatgagtattgt

SEQ ID NO: 519129 - DNA, 15 bp, Homo sapiens
gtggtatgagtattg

SEQ ID NO: 519130 - DNA, 15 bp, Homo sapiens
tgtggtatgagtatt

SEQ ID NO: 519131 - DNA, 15 bp, Homo sapiens
ctgtggtatgagtat

SEQ ID NO: 519132 - DNA, 15 bp, Homo sapiens
tctgtggtatgagta

SEQ ID NO: 519133 - DNA, 15 bp, Homo sapiens
ctctgtggtatgagt

SEQ ID NO: 519134 - DNA, 15 bp, Homo sapiens
gctctgtggtatgag

SEQ ID NO: 519135 - DNA, 15 bp, Homo sapiens
tgctctgtggtatga

SEQ ID NO: 519136 - DNA, 15 bp, Homo sapiens
gtgctctgtggtatg

SEQ ID NO: 519137 - DNA, 15 bp, Homo sapiens
tgtgctctgtggtat

SEQ ID NO: 519138 - DNA, 15 bp, Homo sapiens
ctgtgctctgtggta

SEQ ID NO: 519139 - DNA, 15 bp, Homo sapiens
cctgtgctctgtggt

SEQ ID NO: 519140 - DNA, 15 bp, Homo sapiens
ccctgtgctctgtgg

SEQ ID NO: 519141 - DNA, 15 bp, Homo sapiens
gccctgtgctctgtg

SEQ ID NO: 519142 - DNA, 15 bp, Homo sapiens
tgccctgtgctctgt

SEQ ID NO: 519143 - DNA, 15 bp, Homo sapiens
ttgccctgtgctctg

SEQ ID NO: 519144 - DNA, 15 bp, Homo sapiens
tttgccctgtgctct

SEQ ID NO: 519145 - DNA, 15 bp, Homo sapiens
atttgccctgtgctc

SEQ ID NO: 519146 - DNA, 15 bp, Homo sapiens
tatttgccctgtgct

SEQ ID NO: 519147 - DNA, 15 bp, Homo sapiens
ctatttgccctgtgc

SEQ ID NO: 519148 - DNA, 15 bp, Homo sapiens
tctatttgccctgtg

SEQ ID NO: 519149 - DNA, 15 bp, Homo sapiens
ttctatttgccctgt

SEQ ID NO: 519150 - DNA, 15 bp, Homo sapiens
cttctatttgccctg

SEQ ID NO: 519151 - DNA, 15 bp, Homo sapiens
ccttctatttgccct

SEQ ID NO: 519152 - DNA, 15 bp, Homo sapiens
accttctatttgccc

SEQ ID NO: 519153 - DNA, 15 bp, Homo sapiens
caccttctatttgcc

SEQ ID NO: 519154 - DNA, 15 bp, Homo sapiens
tcaccttctatttgc

SEQ ID NO: 519155 - DNA, 15 bp, Homo sapiens
ctcaccttctatttg

SEQ ID NO: 519156 - DNA, 15 bp, Homo sapiens
gctcaccttctattt

SEQ ID NO: 519157 - DNA, 15 bp, Homo sapiens
cgctcaccttctatt

SEQ ID NO: 519158 - DNA, 15 bp, Homo sapiens
tcgctcaccttctat

SEQ ID NO: 519159 - DNA, 15 bp, Homo sapiens
ttcgctcaccttcta

SEQ ID NO: 519160 - DNA, 15 bp, Homo sapiens
tttcgctcaccttct

SEQ ID NO: 519161 - DNA, 15 bp, Homo sapiens
ttttcgctcaccttc

SEQ ID NO: 519162 - DNA, 15 bp, Homo sapiens
tttttcgctcacctt

SEQ ID NO: 519163 - DNA, 15 bp, Homo sapiens
ttttttcgctcacct

SEQ ID NO: 519164 - DNA, 15 bp, Homo sapiens
attttttcgctcacc

SEQ ID NO: 519165 - DNA, 15 bp, Homo sapiens
gattttttcgctcac

SEQ ID NO: 519166 - DNA, 15 bp, Homo sapiens
ggattttttcgctca

SEQ ID NO: 519167 - DNA, 15 bp, Homo sapiens
tggattttttcgctc

SEQ ID NO: 519168 - DNA, 15 bp, Homo sapiens
ctggattttttcgct

SEQ ID NO: 519169 - DNA, 15 bp, Homo sapiens
actggattttttcgc

SEQ ID NO: 519170 - DNA, 15 bp, Homo sapiens
cactggattttttcg

SEQ ID NO: 519171 - DNA, 15 bp, Homo sapiens
acactggattttttc

SEQ ID NO: 519172 - DNA, 15 bp, Homo sapiens
aacactggatttttt

SEQ ID NO: 519173 - DNA, 15 bp, Homo sapiens
aaacactggattttt

SEQ ID NO: 519174 - DNA, 15 bp, Homo sapiens
aaaacactggatttt

SEQ ID NO: 519175 - DNA, 15 bp, Homo sapiens
aaaaacactggattt

SEQ ID NO: 519176 - DNA, 15 bp, Homo sapiens
aaaaaacactggatt

SEQ ID NO: 519177 - DNA, 15 bp, Homo sapiens
taaaaaacactggat

SEQ ID NO: 519178 - DNA, 15 bp, Homo sapiens
ataaaaaacactgga

SEQ ID NO: 519179 - DNA, 15 bp, Homo sapiens
aataaaaaacactgg

SEQ ID NO: 519180 - DNA, 15 bp, Homo sapiens
aaataaaaaacactg

SEQ ID NO: 519181 - DNA, 15 bp, Homo sapiens
caaataaaaaacact

SEQ ID NO: 519182 - DNA, 15 bp, Homo sapiens
tcaaataaaaaacac

SEQ ID NO: 519183 - DNA, 15 bp, Homo sapiens
ttcaaataaaaaaca

SEQ ID NO: 519184 - DNA, 15 bp, Homo sapiens
cttcaaataaaaaac

SEQ ID NO: 519185 - DNA, 15 bp, Homo sapiens
acttcaaataaaaaa

SEQ ID NO: 519186 - DNA, 15 bp, Homo sapiens
cacttcaaataaaaa

SEQ ID NO: 519187 - DNA, 15 bp, Homo sapiens
acacttcaaataaaa

SEQ ID NO: 519188 - DNA, 15 bp, Homo sapiens
cacacttcaaataaa

SEQ ID NO: 519189 - DNA, 15 bp, Homo sapiens
tcacacttcaaataa

SEQ ID NO: 519190 - DNA, 15 bp, Homo sapiens
ctcacacttcaaata

SEQ ID NO: 519191 - DNA, 15 bp, Homo sapiens
tctcacacttcaaat

SEQ ID NO: 519192 - DNA, 15 bp, Homo sapiens
ctctcacacttcaaa

SEQ ID NO: 519193 - DNA, 15 bp, Homo sapiens
cctctcacacttcaa

SEQ ID NO: 519194 - DNA, 15 bp, Homo sapiens
tcctctcacacttca

SEQ ID NO: 519195 - DNA, 15 bp, Homo sapiens
atcctctcacacttc

SEQ ID NO: 519196 - DNA, 15 bp, Homo sapiens
catcctctcacactt

SEQ ID NO: 519197 - DNA, 15 bp, Homo sapiens
ccatcctctcacact

SEQ ID NO: 519198 - DNA, 15 bp, Homo sapiens
tccatcctctcacac

SEQ ID NO: 519199 - DNA, 15 bp, Homo sapiens
ctccatcctctcaca

SEQ ID NO: 519200 - DNA, 15 bp, Homo sapiens
actccatcctctcac

SEQ ID NO: 519201 - DNA, 15 bp, Homo sapiens
gactccatcctctca

SEQ ID NO: 519202 - DNA, 15 bp, Homo sapiens
tgactccatcctctc

SEQ ID NO: 519203 - DNA, 15 bp, Homo sapiens
ctgactccatcctct

SEQ ID NO: 519204 - DNA, 15 bp, Homo sapiens
cctgactccatcctc

SEQ ID NO: 519205 - DNA, 15 bp, Homo sapiens
ccctgactccatcct

SEQ ID NO: 519206 - DNA, 15 bp, Homo sapiens
cccctgactccatcc

SEQ ID NO: 519207 - DNA, 15 bp, Homo sapiens
gcccctgactccatc

SEQ ID NO: 519208 - DNA, 15 bp, Homo sapiens
agcccctgactccat

SEQ ID NO: 519209 - DNA, 15 bp, Homo sapiens
cagcccctgactcca

SEQ ID NO: 519210 - DNA, 15 bp, Homo sapiens
tcagcccctgactcc

SEQ ID NO: 519211 - DNA, 15 bp, Homo sapiens
ttcagcccctgactc

SEQ ID NO: 519212 - DNA, 15 bp, Homo sapiens
tttcagcccctgact

SEQ ID NO: 519213 - DNA, 15 bp, Homo sapiens
ctttcagcccctgac

SEQ ID NO: 519214 - DNA, 15 bp, Homo sapiens
tctttcagcccctga

SEQ ID NO: 519215 - DNA, 15 bp, Homo sapiens
ttctttcagcccctg

SEQ ID NO: 519216 - DNA, 15 bp, Homo sapiens
attctttcagcccct

SEQ ID NO: 519217 - DNA, 15 bp, Homo sapiens
tattctttcagcccc

SEQ ID NO: 519218 - DNA, 15 bp, Homo sapiens
atattctttcagccc

SEQ ID NO: 519219 - DNA, 15 bp, Homo sapiens
gatattctttcagcc

SEQ ID NO: 519220 - DNA, 15 bp, Homo sapiens
agatattctttcagc

SEQ ID NO: 519221 - DNA, 15 bp, Homo sapiens
cagatattctttcag

SEQ ID NO: 519222 - DNA, 15 bp, Homo sapiens
tcagatattctttca

SEQ ID NO: 519223 - DNA, 15 bp, Homo sapiens
ttcagatattctttc

SEQ ID NO: 519224 - DNA, 15 bp, Homo sapiens
tttcagatattcttt

SEQ ID NO: 519225 - DNA, 15 bp, Homo sapiens
ctttcagatattctt

SEQ ID NO: 519226 - DNA, 15 bp, Homo sapiens
tctttcagatattct

SEQ ID NO: 519227 - DNA, 15 bp, Homo sapiens
atctttcagatattc

SEQ ID NO: 519228 - DNA, 15 bp, Homo sapiens
aatctttcagatatt

SEQ ID NO: 519229 - DNA, 15 bp, Homo sapiens
taatctttcagatat

SEQ ID NO: 519230 - DNA, 15 bp, Homo sapiens
ttaatctttcagata

SEQ ID NO: 519231 - DNA, 15 bp, Homo sapiens
cttaatctttcagat

SEQ ID NO: 519232 - DNA, 15 bp, Homo sapiens
ccttaatctttcaga

SEQ ID NO: 519233 - DNA, 15 bp, Homo sapiens
accttaatctttcag

SEQ ID NO: 519234 - DNA, 15 bp, Homo sapiens
taccttaatctttca

SEQ ID NO: 519235 - DNA, 15 bp, Homo sapiens
ctaccttaatctttc

SEQ ID NO: 519236 - DNA, 15 bp, Homo sapiens
cctaccttaatcttt

SEQ ID NO: 519237 - DNA, 15 bp, Homo sapiens
ccctaccttaatctt

SEQ ID NO: 519238 - DNA, 15 bp, Homo sapiens
tccctaccttaatct

SEQ ID NO: 519239 - DNA, 15 bp, Homo sapiens
ttccctaccttaatc

SEQ ID NO: 519240 - DNA, 15 bp, Homo sapiens
gttccctaccttaat

SEQ ID NO: 519241 - DNA, 15 bp, Homo sapiens
agttccctaccttaa

SEQ ID NO: 519242 - DNA, 15 bp, Homo sapiens
gagttccctacctta

SEQ ID NO: 519243 - DNA, 15 bp, Homo sapiens
ggagttccctacctt

SEQ ID NO: 519244 - DNA, 15 bp, Homo sapiens
aggagttccctacct

SEQ ID NO: 519245 - DNA, 15 bp, Homo sapiens
taggagttccctacc

SEQ ID NO: 519246 - DNA, 15 bp, Homo sapiens
ctaggagttccctac

SEQ ID NO: 519247 - DNA, 15 bp, Homo sapiens
tctaggagttcccta

SEQ ID NO: 519248 - DNA, 15 bp, Homo sapiens
ttctaggagttccct

SEQ ID NO: 519249 - DNA, 15 bp, Homo sapiens
gttctaggagttccc

SEQ ID NO: 519250 - DNA, 15 bp, Homo sapiens
tgttctaggagttcc

SEQ ID NO: 519251 - DNA, 15 bp, Homo sapiens
ctgttctaggagttc

SEQ ID NO: 519252 - DNA, 15 bp, Homo sapiens
tctgttctaggagtt

SEQ ID NO: 519253 - DNA, 15 bp, Homo sapiens
ctctgttctaggagt

SEQ ID NO: 519254 - DNA, 15 bp, Homo sapiens
cctctgttctaggag

SEQ ID NO: 519255 - DNA, 15 bp, Homo sapiens
tcctctgttctagga

SEQ ID NO: 519256 - DNA, 15 bp, Homo sapiens
ttcctctgttctagg

SEQ ID NO: 519257 - DNA, 15 bp, Homo sapiens
attcctctgttctag

SEQ ID NO: 519258 - DNA, 15 bp, Homo sapiens
gattcctctgttcta

SEQ ID NO: 519259 - DNA, 15 bp, Homo sapiens
agattcctctgttct

SEQ ID NO: 519260 - DNA, 15 bp, Homo sapiens
tagattcctctgttc

SEQ ID NO: 519261 - DNA, 15 bp, Homo sapiens
ctagattcctctgtt

SEQ ID NO: 519262 - DNA, 15 bp, Homo sapiens
tctagattcctctgt

SEQ ID NO: 519263 - DNA, 15 bp, Homo sapiens
ctctagattcctctg

SEQ ID NO: 519264 - DNA, 15 bp, Homo sapiens
tctctagattcctct

SEQ ID NO: 519265 - DNA, 15 bp, Homo sapiens
gtctctagattcctc

SEQ ID NO: 519266 - DNA, 15 bp, Homo sapiens
agtctctagattcct

SEQ ID NO: 519267 - DNA, 15 bp, Homo sapiens
gagtctctagattcc

SEQ ID NO: 519268 - DNA, 15 bp, Homo sapiens
agagtctctagattc

SEQ ID NO: 519269 - DNA, 15 bp, Homo sapiens
tagagtctctagatt

SEQ ID NO: 519270 - DNA, 15 bp, Homo sapiens
ttagagtctctagat

SEQ ID NO: 519271 - DNA, 15 bp, Homo sapiens
tttagagtctctaga

SEQ ID NO: 519272 - DNA, 15 bp, Homo sapiens
ttttagagtctctag

SEQ ID NO: 519273 - DNA, 15 bp, Homo sapiens
attttagagtctcta

SEQ ID NO: 519274 - DNA, 15 bp, Homo sapiens
cattttagagtctct

SEQ ID NO: 519275 - DNA, 15 bp, Homo sapiens
acattttagagtctc

SEQ ID NO: 519276 - DNA, 15 bp, Homo sapiens
tacattttagagtct

SEQ ID NO: 519277 - DNA, 15 bp, Homo sapiens
atacattttagagtc

SEQ ID NO: 519278 - DNA, 15 bp, Homo sapiens
aatacattttagagt

SEQ ID NO: 519279 - DNA, 15 bp, Homo sapiens
aaatacattttagag

SEQ ID NO: 519280 - DNA, 15 bp, Homo sapiens
aaaatacattttaga

SEQ ID NO: 519281 - DNA, 15 bp, Homo sapiens
aaaaatacattttag

SEQ ID NO: 519282 - DNA, 15 bp, Homo sapiens
gaaaaatacatttta

SEQ ID NO: 519283 - DNA, 15 bp, Homo sapiens
tgaaaaatacatttt

SEQ ID NO: 519284 - DNA, 15 bp, Homo sapiens
gtgaaaaatacattt

SEQ ID NO: 519285 - DNA, 15 bp, Homo sapiens
tgtgaaaaatacatt

SEQ ID NO: 519286 - DNA, 15 bp, Homo sapiens
ttgtgaaaaatacat

SEQ ID NO: 519287 - DNA, 15 bp, Homo sapiens
attgtgaaaaataca

SEQ ID NO: 519288 - DNA, 15 bp, Homo sapiens
cattgtgaaaaatac

SEQ ID NO: 519289 - DNA, 15 bp, Homo sapiens
ccattgtgaaaaata

SEQ ID NO: 519290 - DNA, 15 bp, Homo sapiens
gccattgtgaaaaat

SEQ ID NO: 519291 - DNA, 15 bp, Homo sapiens
tgccattgtgaaaaa

SEQ ID NO: 519292 - DNA, 15 bp, Homo sapiens
ctgccattgtgaaaa

SEQ ID NO: 519293 - DNA, 15 bp, Homo sapiens
tctgccattgtgaaa

SEQ ID NO: 519294 - DNA, 15 bp, Homo sapiens
atctgccattgtgaa

SEQ ID NO: 519295 - DNA, 15 bp, Homo sapiens
aatctgccattgtga

SEQ ID NO: 519296 - DNA, 15 bp, Homo sapiens
taatctgccattgtg

SEQ ID NO: 519297 - DNA, 15 bp, Homo sapiens
ttaatctgccattgt

SEQ ID NO: 519298 - DNA, 15 bp, Homo sapiens
tttaatctgccattg

SEQ ID NO: 519299 - DNA, 15 bp, Homo sapiens
ttttaatctgccatt

SEQ ID NO: 519300 - DNA, 15 bp, Homo sapiens
attttaatctgccat

SEQ ID NO: 519301 - DNA, 15 bp, Homo sapiens
tattttaatctgcca

SEQ ID NO: 519302 - DNA, 15 bp, Homo sapiens
ttattttaatctgcc

SEQ ID NO: 519303 - DNA, 15 bp, Homo sapiens
tttattttaatctgc

SEQ ID NO: 519304 - DNA, 15 bp, Homo sapiens
ttttattttaatctg

SEQ ID NO: 519305 - DNA, 15 bp, Homo sapiens
tttttattttaatct

SEQ ID NO: 519306 - DNA, 15 bp, Homo sapiens
ttttttattttaatc

SEQ ID NO: 519307 - DNA, 15 bp, Homo sapiens
attttttattttaat

SEQ ID NO: 519308 - DNA, 15 bp, Homo sapiens
aattttttattttaa

SEQ ID NO: 519309 - DNA, 15 bp, Homo sapiens
taattttttatttta

SEQ ID NO: 519310 - DNA, 15 bp, Homo sapiens
gtaattttttatttt

SEQ ID NO: 519311 - DNA, 15 bp, Homo sapiens
agtaattttttattt

SEQ ID NO: 519312 - DNA, 15 bp, Homo sapiens
tagtaattttttatt

SEQ ID NO: 519313 - DNA, 15 bp, Homo sapiens
ctagtaattttttat

SEQ ID NO: 519314 - DNA, 15 bp, Homo sapiens
cctagtaatttttta

SEQ ID NO: 519315 - DNA, 15 bp, Homo sapiens
gcctagtaatttttt

SEQ ID NO: 519316 - DNA, 15 bp, Homo sapiens
tgcctagtaattttt

SEQ ID NO: 519317 - DNA, 15 bp, Homo sapiens
atgcctagtaatttt

SEQ ID NO: 519318 - DNA, 15 bp, Homo sapiens
catgcctagtaattt

SEQ ID NO: 519319 - DNA, 15 bp, Homo sapiens
acatgcctagtaatt

SEQ ID NO: 519320 - DNA, 15 bp, Homo sapiens
cacatgcctagtaat

SEQ ID NO: 519321 - DNA, 15 bp, Homo sapiens
tcacatgcctagtaa

SEQ ID NO: 519322 - DNA, 15 bp, Homo sapiens
ttcacatgcctagta

SEQ ID NO: 519323 - DNA, 15 bp, Homo sapiens
cttcacatgcctagt

SEQ ID NO: 519324 - DNA, 15 bp, Homo sapiens
tcttcacatgcctag

SEQ ID NO: 519325 - DNA, 15 bp, Homo sapiens
gtcttcacatgccta

SEQ ID NO: 519326 - DNA, 15 bp, Homo sapiens
tgtcttcacatgcct

SEQ ID NO: 519327 - DNA, 15 bp, Homo sapiens
atgtcttcacatgcc

SEQ ID NO: 519328 - DNA, 15 bp, Homo sapiens
tatgtcttcacatgc

SEQ ID NO: 519329 - DNA, 15 bp, Homo sapiens
ctatgtcttcacatg

SEQ ID NO: 519330 - DNA, 15 bp, Homo sapiens
tctatgtcttcacat

SEQ ID NO: 519331 - DNA, 15 bp, Homo sapiens
ttctatgtcttcaca

SEQ ID NO: 519332 - DNA, 15 bp, Homo sapiens
cttctatgtcttcac

SEQ ID NO: 519333 - DNA, 15 bp, Homo sapiens
tcttctatgtcttca

SEQ ID NO: 519334 - DNA, 15 bp, Homo sapiens
atcttctatgtcttc

SEQ ID NO: 519335 - DNA, 15 bp, Homo sapiens
tatcttctatgtctt

SEQ ID NO: 519336 - DNA, 15 bp, Homo sapiens
ttatcttctatgtct

SEQ ID NO: 519337 - DNA, 15 bp, Homo sapiens
attatcttctatgtc

SEQ ID NO: 519338 - DNA, 15 bp, Homo sapiens
aattatcttctatgt

SEQ ID NO: 519339 - DNA, 15 bp, Homo sapiens
aaattatcttctatg

SEQ ID NO: 519340 - DNA, 15 bp, Homo sapiens
gaaattatcttctat

SEQ ID NO: 519341 - DNA, 15 bp, Homo sapiens
ggaaattatcttcta

SEQ ID NO: 519342 - DNA, 15 bp, Homo sapiens
tggaaattatcttct

SEQ ID NO: 519343 - DNA, 15 bp, Homo sapiens
ttggaaattatcttc

SEQ ID NO: 519344 - DNA, 15 bp, Homo sapiens
tttggaaattatctt

SEQ ID NO: 519345 - DNA, 15 bp, Homo sapiens
ttttggaaattatct

SEQ ID NO: 519346 - DNA, 15 bp, Homo sapiens
attttggaaattatc

SEQ ID NO: 519347 - DNA, 15 bp, Homo sapiens
gattttggaaattat

SEQ ID NO: 519348 - DNA, 15 bp, Homo sapiens
tgattttggaaatta

SEQ ID NO: 519349 - DNA, 15 bp, Homo sapiens
ctgattttggaaatt

SEQ ID NO: 519350 - DNA, 15 bp, Homo sapiens
tctgattttggaaat

SEQ ID NO: 519351 - DNA, 15 bp, Homo sapiens
ttctgattttggaaa

SEQ ID NO: 519352 - DNA, 15 bp, Homo sapiens
cttctgattttggaa

SEQ ID NO: 519353 - DNA, 15 bp, Homo sapiens
tcttctgattttgga

SEQ ID NO: 519354 - DNA, 15 bp, Homo sapiens
ctcttctgattttgg

SEQ ID NO: 519355 - DNA, 15 bp, Homo sapiens
tctcttctgattttg

SEQ ID NO: 519356 - DNA, 15 bp, Homo sapiens
ttctcttctgatttt

SEQ ID NO: 519357 - DNA, 15 bp, Homo sapiens
attctcttctgattt

SEQ ID NO: 519358 - DNA, 15 bp, Homo sapiens
cattctcttctgatt

SEQ ID NO: 519359 - DNA, 15 bp, Homo sapiens
gcattctcttctgat

SEQ ID NO: 519360 - DNA, 15 bp, Homo sapiens
tgcattctcttctga

SEQ ID NO: 519361 - DNA, 15 bp, Homo sapiens
ctgcattctcttctg

SEQ ID NO: 519362 - DNA, 15 bp, Homo sapiens
actgcattctcttct

SEQ ID NO: 519363 - DNA, 15 bp, Homo sapiens
gactgcattctcttc

SEQ ID NO: 519364 - DNA, 15 bp, Homo sapiens
tgactgcattctctt

SEQ ID NO: 519365 - DNA, 15 bp, Homo sapiens
ttgactgcattctct

SEQ ID NO: 519366 - DNA, 15 bp, Homo sapiens
attgactgcattctc

SEQ ID NO: 519367 - DNA, 15 bp, Homo sapiens
tattgactgcattct

SEQ ID NO: 519368 - DNA, 15 bp, Homo sapiens
ctattgactgcattc

SEQ ID NO: 519369 - DNA, 15 bp, Homo sapiens
tctattgactgcatt

SEQ ID NO: 519370 - DNA, 15 bp, Homo sapiens
ttctattgactgcat

SEQ ID NO: 519371 - DNA, 15 bp, Homo sapiens
cttctattgactgca

SEQ ID NO: 519372 - DNA, 15 bp, Homo sapiens
gcttctattgactgc

SEQ ID NO: 519373 - DNA, 15 bp, Homo sapiens
tgcttctattgactg

SEQ ID NO: 519374 - DNA, 15 bp, Homo sapiens
ttgcttctattgact

SEQ ID NO: 519375 - DNA, 15 bp, Homo sapiens
tttgcttctattgac

SEQ ID NO: 519376 - DNA, 15 bp, Homo sapiens
atttgcttctattga

SEQ ID NO: 519377 - DNA, 15 bp, Homo sapiens
gatttgcttctattg

SEQ ID NO: 519378 - DNA, 15 bp, Homo sapiens
agatttgcttctatt

SEQ ID NO: 519379 - DNA, 15 bp, Homo sapiens
gagatttgcttctat

SEQ ID NO: 519380 - DNA, 15 bp, Homo sapiens
ggagatttgcttcta

SEQ ID NO: 519381 - DNA, 15 bp, Homo sapiens
tggagatttgcttct

SEQ ID NO: 519382 - DNA, 15 bp, Homo sapiens
ctggagatttgcttc

SEQ ID NO: 519383 - DNA, 15 bp, Homo sapiens
cctggagatttgctt

SEQ ID NO: 519384 - DNA, 15 bp, Homo sapiens
acctggagatttgct

SEQ ID NO: 519385 - DNA, 15 bp, Homo sapiens
aacctggagatttgc

SEQ ID NO: 519386 - DNA, 15 bp, Homo sapiens
aaacctggagatttg

SEQ ID NO: 519387 - DNA, 15 bp, Homo sapiens
caaacctggagattt

SEQ ID NO: 519388 - DNA, 15 bp, Homo sapiens
ccaaacctggagatt

SEQ ID NO: 519389 - DNA, 15 bp, Homo sapiens
tccaaacctggagat

SEQ ID NO: 519390 - DNA, 15 bp, Homo sapiens
ttccaaacctggaga

SEQ ID NO: 519391 - DNA, 15 bp, Homo sapiens
attccaaacctggag

SEQ ID NO: 519392 - DNA, 15 bp, Homo sapiens
aattccaaacctgga

SEQ ID NO: 519393 - DNA, 15 bp, Homo sapiens
taattccaaacctgg

SEQ ID NO: 519394 - DNA, 15 bp, Homo sapiens
ctaattccaaacctg

SEQ ID NO: 519395 - DNA, 15 bp, Homo sapiens
gctaattccaaacct

SEQ ID NO: 519396 - DNA, 15 bp, Homo sapiens
tgctaattccaaacc

SEQ ID NO: 519397 - DNA, 15 bp, Homo sapiens
ctgctaattccaaac

SEQ ID NO: 519398 - DNA, 15 bp, Homo sapiens
tctgctaattccaaa

SEQ ID NO: 519399 - DNA, 15 bp, Homo sapiens
ttctgctaattccaa

SEQ ID NO: 519400 - DNA, 15 bp, Homo sapiens
tttctgctaattcca

SEQ ID NO: 519401 - DNA, 15 bp, Homo sapiens
ttttctgctaattcc

SEQ ID NO: 519402 - DNA, 15 bp, Homo sapiens
cttttctgctaattc

SEQ ID NO: 519403 - DNA, 15 bp, Homo sapiens
acttttctgctaatt

SEQ ID NO: 519404 - DNA, 15 bp, Homo sapiens
tacttttctgctaat

SEQ ID NO: 519405 - DNA, 15 bp, Homo sapiens
gtacttttctgctaa

SEQ ID NO: 519406 - DNA, 15 bp, Homo sapiens
tgtacttttctgcta

SEQ ID NO: 519407 - DNA, 15 bp, Homo sapiens
atgtacttttctgct

SEQ ID NO: 519408 - DNA, 15 bp, Homo sapiens
aatgtacttttctgc

SEQ ID NO: 519409 - DNA, 15 bp, Homo sapiens
aaatgtacttttctg

SEQ ID NO: 519410 - DNA, 15 bp, Homo sapiens
taaatgtacttttct

SEQ ID NO: 519411 - DNA, 15 bp, Homo sapiens
ttaaatgtacttttc

SEQ ID NO: 519412 - DNA, 15 bp, Homo sapiens
tttaaatgtactttt

SEQ ID NO: 519413 - DNA, 15 bp, Homo sapiens
ctttaaatgtacttt

SEQ ID NO: 519414 - DNA, 15 bp, Homo sapiens
tctttaaatgtactt

SEQ ID NO: 519415 - DNA, 15 bp, Homo sapiens
ctctttaaatgtact

SEQ ID NO: 519416 - DNA, 15 bp, Homo sapiens
cctctttaaatgtac

SEQ ID NO: 519417 - DNA, 15 bp, Homo sapiens
acctctttaaatgta

SEQ ID NO: 519418 - DNA, 15 bp, Homo sapiens
tacctctttaaatgt

SEQ ID NO: 519419 - DNA, 15 bp, Homo sapiens
atacctctttaaatg

SEQ ID NO: 519420 - DNA, 15 bp, Homo sapiens
tatacctctttaaat

SEQ ID NO: 519421 - DNA, 15 bp, Homo sapiens
atatacctctttaaa

SEQ ID NO: 519422 - DNA, 15 bp, Homo sapiens
tatatacctctttaa

SEQ ID NO: 519423 - DNA, 15 bp, Homo sapiens
atatatacctcttta

SEQ ID NO: 519424 - DNA, 15 bp, Homo sapiens
tatatatacctcttt

SEQ ID NO: 519425 - DNA, 15 bp, Homo sapiens
atatatatacctctt

SEQ ID NO: 519426 - DNA, 15 bp, Homo sapiens
tatatatatacctct

SEQ ID NO: 519427 - DNA, 15 bp, Homo sapiens
atatatatatacctc

SEQ ID NO: 519428 - DNA, 15 bp, Homo sapiens
tatatatatatacct

SEQ ID NO: 519429 - DNA, 15 bp, Homo sapiens
atatatatatatacc

SEQ ID NO: 519430 - DNA, 15 bp, Homo sapiens
tatatatatatatac

SEQ ID NO: 519431 - DNA, 15 bp, Homo sapiens
atatatatatatata

SEQ ID NO: 519432 - DNA, 15 bp, Homo sapiens
tatatatatatatat

SEQ ID NO: 519433 - DNA, 15 bp, Homo sapiens
aatatatatatatat

SEQ ID NO: 519434 - DNA, 15 bp, Homo sapiens
gaatatatatatata

SEQ ID NO: 519435 - DNA, 15 bp, Homo sapiens
cgaatatatatatat

SEQ ID NO: 519436 - DNA, 15 bp, Homo sapiens
tcgaatatatatata

SEQ ID NO: 519437 - DNA, 15 bp, Homo sapiens
ttcgaatatatatat

SEQ ID NO: 519438 - DNA, 15 bp, Homo sapiens
cttcgaatatatata

SEQ ID NO: 519439 - DNA, 15 bp, Homo sapiens
tcttcgaatatatat

SEQ ID NO: 519440 - DNA, 15 bp, Homo sapiens
gtcttcgaatatata

SEQ ID NO: 519441 - DNA, 15 bp, Homo sapiens
tgtcttcgaatatat

SEQ ID NO: 519442 - DNA, 15 bp, Homo sapiens
ttgtcttcgaatata

SEQ ID NO: 519443 - DNA, 15 bp, Homo sapiens
tttgtcttcgaatat

SEQ ID NO: 519444 - DNA, 15 bp, Homo sapiens
atttgtcttcgaata

SEQ ID NO: 519445 - DNA, 15 bp, Homo sapiens
aatttgtcttcgaat

SEQ ID NO: 519446 - DNA, 15 bp, Homo sapiens
taatttgtcttcgaa

SEQ ID NO: 519447 - DNA, 15 bp, Homo sapiens
ttaatttgtcttcga

SEQ ID NO: 519448 - DNA, 15 bp, Homo sapiens
tttaatttgtcttcg

SEQ ID NO: 519449 - DNA, 15 bp, Homo sapiens
ttttaatttgtcttc

SEQ ID NO: 519450 - DNA, 15 bp, Homo sapiens
attttaatttgtctt

SEQ ID NO: 519451 - DNA, 15 bp, Homo sapiens
tattttaatttgtct

SEQ ID NO: 519452 - DNA, 15 bp, Homo sapiens
atattttaatttgtc

SEQ ID NO: 519453 - DNA, 15 bp, Homo sapiens
catattttaatttgt

SEQ ID NO: 519454 - DNA, 15 bp, Homo sapiens
acatattttaatttg

SEQ ID NO: 519455 - DNA, 15 bp, Homo sapiens
gacatattttaattt

SEQ ID NO: 519456 - DNA, 15 bp, Homo sapiens
tgacatattttaatt

SEQ ID NO: 519457 - DNA, 15 bp, Homo sapiens
ttgacatattttaat

SEQ ID NO: 519458 - DNA, 15 bp, Homo sapiens
attgacatattttaa

SEQ ID NO: 519459 - DNA, 15 bp, Homo sapiens
tattgacatatttta

SEQ ID NO: 519460 - DNA, 15 bp, Homo sapiens
ttattgacatatttt

SEQ ID NO: 519461 - DNA, 15 bp, Homo sapiens
gttattgacatattt

SEQ ID NO: 519462 - DNA, 15 bp, Homo sapiens
agttattgacatatt

SEQ ID NO: 519463 - DNA, 15 bp, Homo sapiens
cagttattgacatat

SEQ ID NO: 519464 - DNA, 15 bp, Homo sapiens
tcagttattgacata

SEQ ID NO: 519465 - DNA, 15 bp, Homo sapiens
ttcagttattgacat

SEQ ID NO: 519466 - DNA, 15 bp, Homo sapiens
gttcagttattgaca

SEQ ID NO: 519467 - DNA, 15 bp, Homo sapiens
tgttcagttattgac

SEQ ID NO: 519468 - DNA, 15 bp, Homo sapiens
ttgttcagttattga

SEQ ID NO: 519469 - DNA, 15 bp, Homo sapiens
tttgttcagttattg

SEQ ID NO: 519470 - DNA, 15 bp, Homo sapiens
atttgttcagttatt

SEQ ID NO: 519471 - DNA, 15 bp, Homo sapiens
aatttgttcagttat

SEQ ID NO: 519472 - DNA, 15 bp, Homo sapiens
caatttgttcagtta

SEQ ID NO: 519473 - DNA, 15 bp, Homo sapiens
ccaatttgttcagtt

SEQ ID NO: 519474 - DNA, 15 bp, Homo sapiens
cccaatttgttcagt

SEQ ID NO: 519475 - DNA, 15 bp, Homo sapiens
ccccaatttgttcag

SEQ ID NO: 519476 - DNA, 15 bp, Homo sapiens
tccccaatttgttca

SEQ ID NO: 519477 - DNA, 15 bp, Homo sapiens
ttccccaatttgttc

SEQ ID NO: 519478 - DNA, 15 bp, Homo sapiens
gttccccaatttgtt

SEQ ID NO: 519479 - DNA, 15 bp, Homo sapiens
agttccccaatttgt

SEQ ID NO: 519480 - DNA, 15 bp, Homo sapiens
gagttccccaatttg

SEQ ID NO: 519481 - DNA, 15 bp, Homo sapiens
agagttccccaattt

SEQ ID NO: 519482 - DNA, 15 bp, Homo sapiens
tagagttccccaatt

SEQ ID NO: 519483 - DNA, 15 bp, Homo sapiens
atagagttccccaat

SEQ ID NO: 519484 - DNA, 15 bp, Homo sapiens
gatagagttccccaa

SEQ ID NO: 519485 - DNA, 15 bp, Homo sapiens
tgatagagttcccca

SEQ ID NO: 519486 - DNA, 15 bp, Homo sapiens
ctgatagagttcccc

SEQ ID NO: 519487 - DNA, 15 bp, Homo sapiens
tctgatagagttccc

SEQ ID NO: 519488 - DNA, 15 bp, Homo sapiens
ctctgatagagttcc

SEQ ID NO: 519489 - DNA, 15 bp, Homo sapiens
tctctgatagagttc

SEQ ID NO: 519490 - DNA, 15 bp, Homo sapiens
ttctctgatagagtt

SEQ ID NO: 519491 - DNA, 15 bp, Homo sapiens
tttctctgatagagt

SEQ ID NO: 519492 - DNA, 15 bp, Homo sapiens
atttctctgatagag

SEQ ID NO: 519493 - DNA, 15 bp, Homo sapiens
catttctctgataga

SEQ ID NO: 519494 - DNA, 15 bp, Homo sapiens
ccatttctctgatag

SEQ ID NO: 519495 - DNA, 15 bp, Homo sapiens
tccatttctctgata

SEQ ID NO: 519496 - DNA, 15 bp, Homo sapiens
ttccatttctctgat

SEQ ID NO: 519497 - DNA, 15 bp, Homo sapiens
cttccatttctctga

SEQ ID NO: 519498 - DNA, 15 bp, Homo sapiens
gcttccatttctctg

SEQ ID NO: 519499 - DNA, 15 bp, Homo sapiens
agcttccatttctct

SEQ ID NO: 519500 - DNA, 15 bp, Homo sapiens
tagcttccatttctc

SEQ ID NO: 519501 - DNA, 15 bp, Homo sapiens
atagcttccatttct

SEQ ID NO: 519502 - DNA, 15 bp, Homo sapiens
aatagcttccatttc

SEQ ID NO: 519503 - DNA, 15 bp, Homo sapiens
aaatagcttccattt

SEQ ID NO: 519504 - DNA, 15 bp, Homo sapiens
aaaatagcttccatt

SEQ ID NO: 519505 - DNA, 15 bp, Homo sapiens
taaaatagcttccat

SEQ ID NO: 519506 - DNA, 15 bp, Homo sapiens
ttaaaatagcttcca

SEQ ID NO: 519507 - DNA, 15 bp, Homo sapiens
tttaaaatagcttcc

SEQ ID NO: 519508 - DNA, 15 bp, Homo sapiens
ttttaaaatagcttc

SEQ ID NO: 519509 - DNA, 15 bp, Homo sapiens
tttttaaaatagctt

SEQ ID NO: 519510 - DNA, 15 bp, Homo sapiens
atttttaaaatagct

SEQ ID NO: 519511 - DNA, 15 bp, Homo sapiens
catttttaaaatagc

SEQ ID NO: 519512 - DNA, 15 bp, Homo sapiens
tcatttttaaaatag

SEQ ID NO: 519513 - DNA, 15 bp, Homo sapiens
ttcatttttaaaata

SEQ ID NO: 519514 - DNA, 15 bp, Homo sapiens
attcatttttaaaat

SEQ ID NO: 519515 - DNA, 15 bp, Homo sapiens
aattcatttttaaaa

SEQ ID NO: 519516 - DNA, 15 bp, Homo sapiens
caattcatttttaaa

SEQ ID NO: 519517 - DNA, 15 bp, Homo sapiens
tcaattcatttttaa

SEQ ID NO: 519518 - DNA, 15 bp, Homo sapiens
ttcaattcattttta

SEQ ID NO: 519519 - DNA, 15 bp, Homo sapiens
tttcaattcattttt

SEQ ID NO: 519520 - DNA, 15 bp, Homo sapiens
ttttcaattcatttt

SEQ ID NO: 519521 - DNA, 15 bp, Homo sapiens
attttcaattcattt

SEQ ID NO: 519522 - DNA, 15 bp, Homo sapiens
aattttcaattcatt

SEQ ID NO: 519523 - DNA, 15 bp, Homo sapiens
gaattttcaattcat

SEQ ID NO: 519524 - DNA, 15 bp, Homo sapiens
agaattttcaattca

SEQ ID NO: 519525 - DNA, 15 bp, Homo sapiens
gagaattttcaattc

SEQ ID NO: 519526 - DNA, 15 bp, Homo sapiens
agagaattttcaatt

SEQ ID NO: 519527 - DNA, 15 bp, Homo sapiens
tagagaattttcaat

SEQ ID NO: 519528 - DNA, 15 bp, Homo sapiens
ttagagaattttcaa

SEQ ID NO: 519529 - DNA, 15 bp, Homo sapiens
tttagagaattttca

SEQ ID NO: 519530 - DNA, 15 bp, Homo sapiens
ctttagagaattttc

SEQ ID NO: 519531 - DNA, 15 bp, Homo sapiens
tctttagagaatttt

SEQ ID NO: 519532 - DNA, 15 bp, Homo sapiens
ctctttagagaattt

SEQ ID NO: 519533 - DNA, 15 bp, Homo sapiens
gctctttagagaatt

SEQ ID NO: 519534 - DNA, 15 bp, Homo sapiens
agctctttagagaat

SEQ ID NO: 519535 - DNA, 15 bp, Homo sapiens
tagctctttagagaa

SEQ ID NO: 519536 - DNA, 15 bp, Homo sapiens
atagctctttagaga

SEQ ID NO: 519537 - DNA, 15 bp, Homo sapiens
tatagctctttagag

SEQ ID NO: 519538 - DNA, 15 bp, Homo sapiens
ctatagctctttaga

SEQ ID NO: 519539 - DNA, 15 bp, Homo sapiens
gctatagctctttag

SEQ ID NO: 519540 - DNA, 15 bp, Homo sapiens
cgctatagctcttta

SEQ ID NO: 519541 - DNA, 15 bp, Homo sapiens
acgctatagctcttt

SEQ ID NO: 519542 - DNA, 15 bp, Homo sapiens
gacgctatagctctt

SEQ ID NO: 519543 - DNA, 15 bp, Homo sapiens
agacgctatagctct

SEQ ID NO: 519544 - DNA, 15 bp, Homo sapiens
cagacgctatagctc

SEQ ID NO: 519545 - DNA, 15 bp, Homo sapiens
tcagacgctatagct

SEQ ID NO: 519546 - DNA, 15 bp, Homo sapiens
ttcagacgctatagc

SEQ ID NO: 519547 - DNA, 15 bp, Homo sapiens
tttcagacgctatag

SEQ ID NO: 519548 - DNA, 15 bp, Homo sapiens
atttcagacgctata

SEQ ID NO: 519549 - DNA, 15 bp, Homo sapiens
catttcagacgctat

SEQ ID NO: 519550 - DNA, 15 bp, Homo sapiens
ccatttcagacgcta

SEQ ID NO: 519551 - DNA, 15 bp, Homo sapiens
tccatttcagacgct

SEQ ID NO: 519552 - DNA, 15 bp, Homo sapiens
ttccatttcagacgc

SEQ ID NO: 519553 - DNA, 15 bp, Homo sapiens
tttccatttcagacg

SEQ ID NO: 519554 - DNA, 15 bp, Homo sapiens
ttttccatttcagac

SEQ ID NO: 519555 - DNA, 15 bp, Homo sapiens
cttttccatttcaga

SEQ ID NO: 519556 - DNA, 15 bp, Homo sapiens
tcttttccatttcag

SEQ ID NO: 519557 - DNA, 15 bp, Homo sapiens
ttcttttccatttca

SEQ ID NO: 519558 - DNA, 15 bp, Homo sapiens
tttcttttccatttc

SEQ ID NO: 519559 - DNA, 15 bp, Homo sapiens
ttttcttttccattt

SEQ ID NO: 519560 - DNA, 15 bp, Homo sapiens
tttttcttttccatt

SEQ ID NO: 519561 - DNA, 15 bp, Homo sapiens
atttttcttttccat

SEQ ID NO: 519562 - DNA, 15 bp, Homo sapiens
gatttttcttttcca

SEQ ID NO: 519563 - DNA, 15 bp, Homo sapiens
agatttttcttttcc

SEQ ID NO: 519564 - DNA, 15 bp, Homo sapiens
gagatttttcttttc

SEQ ID NO: 519565 - DNA, 15 bp, Homo sapiens
agagatttttctttt

SEQ ID NO: 519566 - DNA, 15 bp, Homo sapiens
cagagatttttcttt

SEQ ID NO: 519567 - DNA, 15 bp, Homo sapiens
ccagagatttttctt

SEQ ID NO: 519568 - DNA, 15 bp, Homo sapiens
cccagagatttttct

SEQ ID NO: 519569 - DNA, 15 bp, Homo sapiens
tcccagagatttttc

SEQ ID NO: 519570 - DNA, 15 bp, Homo sapiens
atcccagagattttt

SEQ ID NO: 519571 - DNA, 15 bp, Homo sapiens
catcccagagatttt

SEQ ID NO: 519572 - DNA, 15 bp, Homo sapiens
tcatcccagagattt

SEQ ID NO: 519573 - DNA, 15 bp, Homo sapiens
ctcatcccagagatt

SEQ ID NO: 519574 - DNA, 15 bp, Homo sapiens
gctcatcccagagat

SEQ ID NO: 519575 - DNA, 15 bp, Homo sapiens
agctcatcccagaga

SEQ ID NO: 519576 - DNA, 15 bp, Homo sapiens
cagctcatcccagag

SEQ ID NO: 519577 - DNA, 15 bp, Homo sapiens
tcagctcatcccaga

SEQ ID NO: 519578 - DNA, 15 bp, Homo sapiens
ttcagctcatcccag

SEQ ID NO: 519579 - DNA, 15 bp, Homo sapiens
tttcagctcatccca

SEQ ID NO: 519580 - DNA, 15 bp, Homo sapiens
ctttcagctcatccc

SEQ ID NO: 519581 - DNA, 15 bp, Homo sapiens
tctttcagctcatcc

SEQ ID NO: 519582 - DNA, 15 bp, Homo sapiens
ttctttcagctcatc

SEQ ID NO: 519583 - DNA, 15 bp, Homo sapiens
cttctttcagctcat

SEQ ID NO: 519584 - DNA, 15 bp, Homo sapiens
tcttctttcagctca

SEQ ID NO: 519585 - DNA, 15 bp, Homo sapiens
atcttctttcagctc

SEQ ID NO: 519586 - DNA, 15 bp, Homo sapiens
aatcttctttcagct

SEQ ID NO: 519587 - DNA, 15 bp, Homo sapiens
caatcttctttcagc

SEQ ID NO: 519588 - DNA, 15 bp, Homo sapiens
ccaatcttctttcag

SEQ ID NO: 519589 - DNA, 15 bp, Homo sapiens
gccaatcttctttca

SEQ ID NO: 519590 - DNA, 15 bp, Homo sapiens
cgccaatcttctttc

SEQ ID NO: 519591 - DNA, 15 bp, Homo sapiens
tcgccaatcttcttt

SEQ ID NO: 519592 - DNA, 15 bp, Homo sapiens
gtcgccaatcttctt

SEQ ID NO: 519593 - DNA, 15 bp, Homo sapiens
tgtcgccaatcttct

SEQ ID NO: 519594 - DNA, 15 bp, Homo sapiens
ctgtcgccaatcttc

SEQ ID NO: 519595 - DNA, 15 bp, Homo sapiens
gctgtcgccaatctt

SEQ ID NO: 519596 - DNA, 15 bp, Homo sapiens
tgctgtcgccaatct

SEQ ID NO: 519597 - DNA, 15 bp, Homo sapiens
ctgctgtcgccaatc

SEQ ID NO: 519598 - DNA, 15 bp, Homo sapiens
tctgctgtcgccaat

SEQ ID NO: 519599 - DNA, 15 bp, Homo sapiens
ttctgctgtcgccaa

SEQ ID NO: 519600 - DNA, 15 bp, Homo sapiens
cttctgctgtcgcca

SEQ ID NO: 519601 - DNA, 15 bp, Homo sapiens
tcttctgctgtcgcc

SEQ ID NO: 519602 - DNA, 15 bp, Homo sapiens
ctcttctgctgtcgc

SEQ ID NO: 519603 - DNA, 15 bp, Homo sapiens
gctcttctgctgtcg

SEQ ID NO: 519604 - DNA, 15 bp, Homo sapiens
ggctcttctgctgtc

SEQ ID NO: 519605 - DNA, 15 bp, Homo sapiens
tggctcttctgctgt

SEQ ID NO: 519606 - DNA, 15 bp, Homo sapiens
ttggctcttctgctg

SEQ ID NO: 519607 - DNA, 15 bp, Homo sapiens
gttggctcttctgct

SEQ ID NO: 519608 - DNA, 15 bp, Homo sapiens
agttggctcttctgc

SEQ ID NO: 519609 - DNA, 15 bp, Homo sapiens
aagttggctcttctg

SEQ ID NO: 519610 - DNA, 15 bp, Homo sapiens
caagttggctcttct

SEQ ID NO: 519611 - DNA, 15 bp, Homo sapiens
tcaagttggctcttc

SEQ ID NO: 519612 - DNA, 15 bp, Homo sapiens
ttcaagttggctctt

SEQ ID NO: 519613 - DNA, 15 bp, Homo sapiens
attcaagttggctct

SEQ ID NO: 519614 - DNA, 15 bp, Homo sapiens
tattcaagttggctc

SEQ ID NO: 519615 - DNA, 15 bp, Homo sapiens
atattcaagttggct

SEQ ID NO: 519616 - DNA, 15 bp, Homo sapiens
tatattcaagttggc

SEQ ID NO: 519617 - DNA, 15 bp, Homo sapiens
ctatattcaagttgg

SEQ ID NO: 519618 - DNA, 15 bp, Homo sapiens
tctatattcaagttg

SEQ ID NO: 519619 - DNA, 15 bp, Homo sapiens
ttctatattcaagtt

SEQ ID NO: 519620 - DNA, 15 bp, Homo sapiens
attctatattcaagt

SEQ ID NO: 519621 - DNA, 15 bp, Homo sapiens
aattctatattcaag

SEQ ID NO: 519622 - DNA, 15 bp, Homo sapiens
aaattctatattcaa

SEQ ID NO: 519623 - DNA, 15 bp, Homo sapiens
taaattctatattca

SEQ ID NO: 519624 - DNA, 15 bp, Homo sapiens
ataaattctatattc

SEQ ID NO: 519625 - DNA, 15 bp, Homo sapiens
gataaattctatatt

SEQ ID NO: 519626 - DNA, 15 bp, Homo sapiens
ggataaattctatat

SEQ ID NO: 519627 - DNA, 15 bp, Homo sapiens
tggataaattctata

SEQ ID NO: 519628 - DNA, 15 bp, Homo sapiens
ctggataaattctat

SEQ ID NO: 519629 - DNA, 15 bp, Homo sapiens
actggataaattcta

SEQ ID NO: 519630 - DNA, 15 bp, Homo sapiens
gactggataaattct

SEQ ID NO: 519631 - DNA, 15 bp, Homo sapiens
agactggataaattc

SEQ ID NO: 519632 - DNA, 15 bp, Homo sapiens
cagactggataaatt

SEQ ID NO: 519633 - DNA, 15 bp, Homo sapiens
tcagactggataaat

SEQ ID NO: 519634 - DNA, 15 bp, Homo sapiens
ctcagactggataaa

SEQ ID NO: 519635 - DNA, 15 bp, Homo sapiens
tctcagactggataa

SEQ ID NO: 519636 - DNA, 15 bp, Homo sapiens
ttctcagactggata

SEQ ID NO: 519637 - DNA, 15 bp, Homo sapiens
cttctcagactggat

SEQ ID NO: 519638 - DNA, 15 bp, Homo sapiens
gcttctcagactgga

SEQ ID NO: 519639 - DNA, 15 bp, Homo sapiens
tgcttctcagactgg

SEQ ID NO: 519640 - DNA, 15 bp, Homo sapiens
aaggagagggctttt

SEQ ID NO: 519641 - DNA, 15 bp, Homo sapiens
gaaggagagggcttt

SEQ ID NO: 519642 - DNA, 15 bp, Homo sapiens
tgaaggagagggctt

SEQ ID NO: 519643 - DNA, 15 bp, Homo sapiens
ttgaaggagagggct

SEQ ID NO: 519644 - DNA, 15 bp, Homo sapiens
tttgaaggagagggc

SEQ ID NO: 519645 - DNA, 15 bp, Homo sapiens
ttttgaaggagaggg

SEQ ID NO: 519646 - DNA, 15 bp, Homo sapiens
tttttgaaggagagg

SEQ ID NO: 519647 - DNA, 15 bp, Homo sapiens
ttttttgaaggagag

SEQ ID NO: 519648 - DNA, 15 bp, Homo sapiens
attttttgaaggaga

SEQ ID NO: 519649 - DNA, 15 bp, Homo sapiens
tattttttgaaggag

SEQ ID NO: 519650 - DNA, 15 bp, Homo sapiens
gtattttttgaagga

SEQ ID NO: 519651 - DNA, 15 bp, Homo sapiens
tgtattttttgaagg

SEQ ID NO: 519652 - DNA, 15 bp, Homo sapiens
ctgtattttttgaag

SEQ ID NO: 519653 - DNA, 15 bp, Homo sapiens
tctgtattttttgaa

SEQ ID NO: 519654 - DNA, 15 bp, Homo sapiens
gtctgtattttttga

SEQ ID NO: 519655 - DNA, 15 bp, Homo sapiens
tgtctgtattttttg

SEQ ID NO: 519656 - DNA, 15 bp, Homo sapiens
atgtctgtatttttt

SEQ ID NO: 519657 - DNA, 15 bp, Homo sapiens
aatgtctgtattttt

SEQ ID NO: 519658 - DNA, 15 bp, Homo sapiens
aaatgtctgtatttt

SEQ ID NO: 519659 - DNA, 15 bp, Homo sapiens
gaaatgtctgtattt

SEQ ID NO: 519660 - DNA, 15 bp, Homo sapiens
tgaaatgtctgtatt

SEQ ID NO: 519661 - DNA, 15 bp, Homo sapiens
gtgaaatgtctgtat

SEQ ID NO: 519662 - DNA, 15 bp, Homo sapiens
tgtgaaatgtctgta

SEQ ID NO: 519663 - DNA, 15 bp, Homo sapiens
ctgtgaaatgtctgt

SEQ ID NO: 519664 - DNA, 15 bp, Homo sapiens
tctgtgaaatgtctg

SEQ ID NO: 519665 - DNA, 15 bp, Homo sapiens
ttctgtgaaatgtct

SEQ ID NO: 519666 - DNA, 15 bp, Homo sapiens
cttctgtgaaatgtc

SEQ ID NO: 519667 - DNA, 15 bp, Homo sapiens
tcttctgtgaaatgt

SEQ ID NO: 519668 - DNA, 15 bp, Homo sapiens
ctcttctgtgaaatg

SEQ ID NO: 519669 - DNA, 15 bp, Homo sapiens
tctcttctgtgaaat

SEQ ID NO: 519670 - DNA, 15 bp, Homo sapiens
atctcttctgtgaaa

SEQ ID NO: 519671 - DNA, 15 bp, Homo sapiens
catctcttctgtgaa

SEQ ID NO: 519672 - DNA, 15 bp, Homo sapiens
gcatctcttctgtga

SEQ ID NO: 519673 - DNA, 15 bp, Homo sapiens
tgcatctcttctgtg

SEQ ID NO: 519674 - DNA, 15 bp, Homo sapiens
ttgcatctcttctgt

SEQ ID NO: 519675 - DNA, 15 bp, Homo sapiens
tttgcatctcttctg

SEQ ID NO: 519676 - DNA, 15 bp, Homo sapiens
atttgcatctcttct

SEQ ID NO: 519677 - DNA, 15 bp, Homo sapiens
catttgcatctcttc

SEQ ID NO: 519678 - DNA, 15 bp, Homo sapiens
ccatttgcatctctt

SEQ ID NO: 519679 - DNA, 15 bp, Homo sapiens
accatttgcatctct

SEQ ID NO: 519680 - DNA, 15 bp, Homo sapiens
aaccatttgcatctc

SEQ ID NO: 519681 - DNA, 15 bp, Homo sapiens
taaccatttgcatct

SEQ ID NO: 519682 - DNA, 15 bp, Homo sapiens
ttaaccatttgcatc

SEQ ID NO: 519683 - DNA, 15 bp, Homo sapiens
tttaaccatttgcat

SEQ ID NO: 519684 - DNA, 15 bp, Homo sapiens
ttttaaccatttgca

SEQ ID NO: 519685 - DNA, 15 bp, Homo sapiens
gttttaaccatttgc

SEQ ID NO: 519686 - DNA, 15 bp, Homo sapiens
tgttttaaccatttg

SEQ ID NO: 519687 - DNA, 15 bp, Homo sapiens
ttgttttaaccattt

SEQ ID NO: 519688 - DNA, 15 bp, Homo sapiens
attgttttaaccatt

SEQ ID NO: 519689 - DNA, 15 bp, Homo sapiens
gattgttttaaccat

SEQ ID NO: 519690 - DNA, 15 bp, Homo sapiens
ggattgttttaacca

SEQ ID NO: 519691 - DNA, 15 bp, Homo sapiens
cggattgttttaacc

SEQ ID NO: 519692 - DNA, 15 bp, Homo sapiens
acggattgttttaac

SEQ ID NO: 519693 - DNA, 15 bp, Homo sapiens
tacggattgttttaa

SEQ ID NO: 519694 - DNA, 15 bp, Homo sapiens
ttacggattgtttta

SEQ ID NO: 519695 - DNA, 15 bp, Homo sapiens
tttacggattgtttt

SEQ ID NO: 519696 - DNA, 15 bp, Homo sapiens
ctttacggattgttt

SEQ ID NO: 519697 - DNA, 15 bp, Homo sapiens
tctttacggattgtt

SEQ ID NO: 519698 - DNA, 15 bp, Homo sapiens
ctctttacggattgt

SEQ ID NO: 519699 - DNA, 15 bp, Homo sapiens
tctctttacggattg

SEQ ID NO: 519700 - DNA, 15 bp, Homo sapiens
atctctttacggatt

SEQ ID NO: 519701 - DNA, 15 bp, Homo sapiens
catctctttacggat

SEQ ID NO: 519702 - DNA, 15 bp, Homo sapiens
acatctctttacgga

SEQ ID NO: 519703 - DNA, 15 bp, Homo sapiens
gacatctctttacgg

SEQ ID NO: 519704 - DNA, 15 bp, Homo sapiens
agacatctctttacg

SEQ ID NO: 519705 - DNA, 15 bp, Homo sapiens
cagacatctctttac

SEQ ID NO: 519706 - DNA, 15 bp, Homo sapiens
tcagacatctcttta

SEQ ID NO: 519707 - DNA, 15 bp, Homo sapiens
gtcagacatctcttt

SEQ ID NO: 519708 - DNA, 15 bp, Homo sapiens
cgtcagacatctctt

SEQ ID NO: 519709 - DNA, 15 bp, Homo sapiens
acgtcagacatctct

SEQ ID NO: 519710 - DNA, 15 bp, Homo sapiens
gacgtcagacatctc

SEQ ID NO: 519711 - DNA, 15 bp, Homo sapiens
tgacgtcagacatct

SEQ ID NO: 519712 - DNA, 15 bp, Homo sapiens
gtgacgtcagacatc

SEQ ID NO: 519713 - DNA, 15 bp, Homo sapiens
agtgacgtcagacat

SEQ ID NO: 519714 - DNA, 15 bp, Homo sapiens
gagtgacgtcagaca

SEQ ID NO: 519715 - DNA, 15 bp, Homo sapiens
tgagtgacgtcagac

SEQ ID NO: 519716 - DNA, 15 bp, Homo sapiens
atgagtgacgtcaga

SEQ ID NO: 519717 - DNA, 15 bp, Homo sapiens
gatgagtgacgtcag

SEQ ID NO: 519718 - DNA, 15 bp, Homo sapiens
tgatgagtgacgtca

SEQ ID NO: 519719 - DNA, 15 bp, Homo sapiens
atgatgagtgacgtc

SEQ ID NO: 519720 - DNA, 15 bp, Homo sapiens
gatgatgagtgacgt

SEQ ID NO: 519721 - DNA, 15 bp, Homo sapiens
cgatgatgagtgacg

SEQ ID NO: 519722 - DNA, 15 bp, Homo sapiens
tcgatgatgagtgac

SEQ ID NO: 519723 - DNA, 15 bp, Homo sapiens
ttcgatgatgagtga

SEQ ID NO: 519724 - DNA, 15 bp, Homo sapiens
cttcgatgatgagtg

SEQ ID NO: 519725 - DNA, 15 bp, Homo sapiens
tcttcgatgatgagt

SEQ ID NO: 519726 - DNA, 15 bp, Homo sapiens
ttcttcgatgatgag

SEQ ID NO: 519727 - DNA, 15 bp, Homo sapiens
tttcttcgatgatga

SEQ ID NO: 519728 - DNA, 15 bp, Homo sapiens
atttcttcgatgatg

SEQ ID NO: 519729 - DNA, 15 bp, Homo sapiens
catttcttcgatgat

SEQ ID NO: 519730 - DNA, 15 bp, Homo sapiens
gcatttcttcgatga

SEQ ID NO: 519731 - DNA, 15 bp, Homo sapiens
tgcatttcttcgatg

SEQ ID NO: 519732 - DNA, 15 bp, Homo sapiens
ttgcatttcttcgat

SEQ ID NO: 519733 - DNA, 15 bp, Homo sapiens
attgcatttcttcga

SEQ ID NO: 519734 - DNA, 15 bp, Homo sapiens
cattgcatttcttcg

SEQ ID NO: 519735 - DNA, 15 bp, Homo sapiens
gcattgcatttcttc

SEQ ID NO: 519736 - DNA, 15 bp, Homo sapiens
tgcattgcatttctt

SEQ ID NO: 519737 - DNA, 15 bp, Homo sapiens
ttgcattgcatttct

SEQ ID NO: 519738 - DNA, 15 bp, Homo sapiens
gttgcattgcatttc

SEQ ID NO: 519739 - DNA, 15 bp, Homo sapiens
cgttgcattgcattt

SEQ ID NO: 519740 - DNA, 15 bp, Homo sapiens
tcgttgcattgcatt

SEQ ID NO: 519741 - DNA, 15 bp, Homo sapiens
ctcgttgcattgcat

SEQ ID NO: 519742 - DNA, 15 bp, Homo sapiens
tctcgttgcattgca

SEQ ID NO: 519743 - DNA, 15 bp, Homo sapiens
ttctcgttgcattgc

SEQ ID NO: 519744 - DNA, 15 bp, Homo sapiens
cttctcgttgcattg

SEQ ID NO: 519745 - DNA, 15 bp, Homo sapiens
ccttctcgttgcatt

SEQ ID NO: 519746 - DNA, 15 bp, Homo sapiens
accttctcgttgcat

SEQ ID NO: 519747 - DNA, 15 bp, Homo sapiens
taccttctcgttgca

SEQ ID NO: 519748 - DNA, 15 bp, Homo sapiens
ataccttctcgttgc

SEQ ID NO: 519749 - DNA, 15 bp, Homo sapiens
cataccttctcgttg

SEQ ID NO: 519750 - DNA, 15 bp, Homo sapiens
acataccttctcgtt

SEQ ID NO: 519751 - DNA, 15 bp, Homo sapiens
aacataccttctcgt

SEQ ID NO: 519752 - DNA, 15 bp, Homo sapiens
caacataccttctcg

SEQ ID NO: 519753 - DNA, 15 bp, Homo sapiens
tcaacataccttctc

SEQ ID NO: 519754 - DNA, 15 bp, Homo sapiens
ctcaacataccttct

SEQ ID NO: 519755 - DNA, 15 bp, Homo sapiens
cctcaacataccttc

SEQ ID NO: 519756 - DNA, 15 bp, Homo sapiens
gcctcaacatacctt

SEQ ID NO: 519757 - DNA, 15 bp, Homo sapiens
agcctcaacatacct

SEQ ID NO: 519758 - DNA, 15 bp, Homo sapiens
cagcctcaacatacc

SEQ ID NO: 519759 - DNA, 15 bp, Homo sapiens
ccagcctcaacatac

SEQ ID NO: 519760 - DNA, 15 bp, Homo sapiens
cccagcctcaacata

SEQ ID NO: 519761 - DNA, 15 bp, Homo sapiens
acccagcctcaacat

SEQ ID NO: 519762 - DNA, 15 bp, Homo sapiens
cacccagcctcaaca

SEQ ID NO: 519763 - DNA, 15 bp, Homo sapiens
gcacccagcctcaac

SEQ ID NO: 519764 - DNA, 15 bp, Homo sapiens
tgcacccagcctcaa

SEQ ID NO: 519765 - DNA, 15 bp, Homo sapiens
atgcacccagcctca

SEQ ID NO: 519766 - DNA, 15 bp, Homo sapiens
aatgcacccagcctc

SEQ ID NO: 519767 - DNA, 15 bp, Homo sapiens
caatgcacccagcct

SEQ ID NO: 519768 - DNA, 15 bp, Homo sapiens
ccaatgcacccagcc

SEQ ID NO: 519769 - DNA, 15 bp, Homo sapiens
gccaatgcacccagc

SEQ ID NO: 519770 - DNA, 15 bp, Homo sapiens
agccaatgcacccag

SEQ ID NO: 519771 - DNA, 15 bp, Homo sapiens
gagccaatgcaccca

SEQ ID NO: 519772 - DNA, 15 bp, Homo sapiens
tgagccaatgcaccc

SEQ ID NO: 519773 - DNA, 15 bp, Homo sapiens
gtgagccaatgcacc

SEQ ID NO: 519774 - DNA, 15 bp, Homo sapiens
cgtgagccaatgcac

SEQ ID NO: 519775 - DNA, 15 bp, Homo sapiens
gcgtgagccaatgca

SEQ ID NO: 519776 - DNA, 15 bp, Homo sapiens
ggcgtgagccaatgc

SEQ ID NO: 519777 - DNA, 15 bp, Homo sapiens
aggcgtgagccaatg

SEQ ID NO: 519778 - DNA, 15 bp, Homo sapiens
taggcgtgagccaat

SEQ ID NO: 519779 - DNA, 15 bp, Homo sapiens
ataggcgtgagccaa

SEQ ID NO: 519780 - DNA, 15 bp, Homo sapiens
tataggcgtgagcca

SEQ ID NO: 519781 - DNA, 15 bp, Homo sapiens
ttataggcgtgagcc

SEQ ID NO: 519782 - DNA, 15 bp, Homo sapiens
attataggcgtgagc

SEQ ID NO: 519783 - DNA, 15 bp, Homo sapiens
cattataggcgtgag

SEQ ID NO: 519784 - DNA, 15 bp, Homo sapiens
gcattataggcgtga

SEQ ID NO: 519785 - DNA, 15 bp, Homo sapiens
ggcattataggcgtg

SEQ ID NO: 519786 - DNA, 15 bp, Homo sapiens
tggcattataggcgt

SEQ ID NO: 519787 - DNA, 15 bp, Homo sapiens
ctggcattataggcg

SEQ ID NO: 519788 - DNA, 15 bp, Homo sapiens
gctggcattataggc

SEQ ID NO: 519789 - DNA, 15 bp, Homo sapiens
ggctggcattatagg

SEQ ID NO: 519790 - DNA, 15 bp, Homo sapiens
gggctggcattatag

SEQ ID NO: 519791 - DNA, 15 bp, Homo sapiens
agggctggcattata

SEQ ID NO: 519792 - DNA, 15 bp, Homo sapiens
aagggctggcattat

SEQ ID NO: 519793 - DNA, 15 bp, Homo sapiens
aaagggctggcatta

SEQ ID NO: 519794 - DNA, 15 bp, Homo sapiens
caaagggctggcatt

SEQ ID NO: 519795 - DNA, 15 bp, Homo sapiens
ccaaagggctggcat

SEQ ID NO: 519796 - DNA, 15 bp, Homo sapiens
cccaaagggctggca

SEQ ID NO: 519797 - DNA, 15 bp, Homo sapiens
tcccaaagggctggc

SEQ ID NO: 519798 - DNA, 15 bp, Homo sapiens
ctcccaaagggctgg

SEQ ID NO: 519799 - DNA, 15 bp, Homo sapiens
tctcccaaagggctg

SEQ ID NO: 519800 - DNA, 15 bp, Homo sapiens
gtctcccaaagggct

SEQ ID NO: 519801 - DNA, 15 bp, Homo sapiens
ggtctcccaaagggc

SEQ ID NO: 519802 - DNA, 15 bp, Homo sapiens
cggtctcccaaaggg

SEQ ID NO: 519803 - DNA, 15 bp, Homo sapiens
tcggtctcccaaagg

SEQ ID NO: 519804 - DNA, 15 bp, Homo sapiens
ctcggtctcccaaag

SEQ ID NO: 519805 - DNA, 15 bp, Homo sapiens
cctcggtctcccaaa

SEQ ID NO: 519806 - DNA, 15 bp, Homo sapiens
gcctcggtctcccaa

SEQ ID NO: 519807 - DNA, 15 bp, Homo sapiens
cgcctcggtctccca

SEQ ID NO: 519808 - DNA, 15 bp, Homo sapiens
ccgcctcggtctccc

SEQ ID NO: 519809 - DNA, 15 bp, Homo sapiens
cccgcctcggtctcc

SEQ ID NO: 519810 - DNA, 15 bp, Homo sapiens
acccgcctcggtctc

SEQ ID NO: 519811 - DNA, 15 bp, Homo sapiens
cacccgcctcggtct

SEQ ID NO: 519812 - DNA, 15 bp, Homo sapiens
ccacccgcctcggtc

SEQ ID NO: 519813 - DNA, 15 bp, Homo sapiens
tccacccgcctcggt

SEQ ID NO: 519814 - DNA, 15 bp, Homo sapiens
atccacccgcctcgg

SEQ ID NO: 519815 - DNA, 15 bp, Homo sapiens
gatccacccgcctcg

SEQ ID NO: 519816 - DNA, 15 bp, Homo sapiens
tgatccacccgcctc

SEQ ID NO: 519817 - DNA, 15 bp, Homo sapiens
gtgatccacccgcct

SEQ ID NO: 519818 - DNA, 15 bp, Homo sapiens
ggtgatccacccgcc

SEQ ID NO: 519819 - DNA, 15 bp, Homo sapiens
aggtgatccacccgc

SEQ ID NO: 519820 - DNA, 15 bp, Homo sapiens
caggtgatccacccg

SEQ ID NO: 519821 - DNA, 15 bp, Homo sapiens
tcaggtgatccaccc

SEQ ID NO: 519822 - DNA, 15 bp, Homo sapiens
gcctcaggtgatcca

SEQ ID NO: 519823 - DNA, 15 bp, Homo sapiens
tgcctcaggtgatcc

SEQ ID NO: 519824 - DNA, 15 bp, Homo sapiens
ctgcctcaggtgatc

SEQ ID NO: 519825 - DNA, 15 bp, Homo sapiens
cctgcctcaggtgat

SEQ ID NO: 519826 - DNA, 15 bp, Homo sapiens
tcctgcctcaggtga

SEQ ID NO: 519827 - DNA, 15 bp, Homo sapiens
ctcctgcctcaggtg

SEQ ID NO: 519828 - DNA, 15 bp, Homo sapiens
actcctgcctcaggt

SEQ ID NO: 519829 - DNA, 15 bp, Homo sapiens
aactcctgcctcagg

SEQ ID NO: 519830 - DNA, 15 bp, Homo sapiens
gaactcctgcctcag

SEQ ID NO: 519831 - DNA, 15 bp, Homo sapiens
cgaactcctgcctca

SEQ ID NO: 519832 - DNA, 15 bp, Homo sapiens
tcgaactcctgcctc

SEQ ID NO: 519833 - DNA, 15 bp, Homo sapiens
ctcgaactcctgcct

SEQ ID NO: 519834 - DNA, 15 bp, Homo sapiens
tctcgaactcctgcc

SEQ ID NO: 519835 - DNA, 15 bp, Homo sapiens
gtctcgaactcctgc

SEQ ID NO: 519836 - DNA, 15 bp, Homo sapiens
ggtctcgaactcctg

SEQ ID NO: 519837 - DNA, 15 bp, Homo sapiens
tggtctcgaactcct

SEQ ID NO: 519838 - DNA, 15 bp, Homo sapiens
ctggtctcgaactcc

SEQ ID NO: 519839 - DNA, 15 bp, Homo sapiens
gctggtctcgaactc

SEQ ID NO: 519840 - DNA, 15 bp, Homo sapiens
ggctggtctcgaact

SEQ ID NO: 519841 - DNA, 15 bp, Homo sapiens
aggctggtctcgaac

SEQ ID NO: 519842 - DNA, 15 bp, Homo sapiens
tccaggctggtctcg

SEQ ID NO: 519843 - DNA, 15 bp, Homo sapiens
gtccaggctggtctc

SEQ ID NO: 519844 - DNA, 15 bp, Homo sapiens
tgtccaggctggtct

SEQ ID NO: 519845 - DNA, 15 bp, Homo sapiens
ttgtccaggctggtc

SEQ ID NO: 519846 - DNA, 15 bp, Homo sapiens
gttgtccaggctggt

SEQ ID NO: 519847 - DNA, 15 bp, Homo sapiens
tgttgtccaggctgg

SEQ ID NO: 519848 - DNA, 15 bp, Homo sapiens
acccggctaattttt

SEQ ID NO: 519849 - DNA, 15 bp, Homo sapiens
cacccggctaatttt

SEQ ID NO: 519850 - DNA, 15 bp, Homo sapiens
acacccggctaattt

SEQ ID NO: 519851 - DNA, 15 bp, Homo sapiens
cacacccggctaatt

SEQ ID NO: 519852 - DNA, 15 bp, Homo sapiens
ccacacccggctaat

SEQ ID NO: 519853 - DNA, 15 bp, Homo sapiens
accacacccggctaa

SEQ ID NO: 519854 - DNA, 15 bp, Homo sapiens
caccacacccggcta

SEQ ID NO: 519855 - DNA, 15 bp, Homo sapiens
ccaccacacccggct

SEQ ID NO: 519856 - DNA, 15 bp, Homo sapiens
gccaccacacccggc

SEQ ID NO: 519857 - DNA, 15 bp, Homo sapiens
cgccaccacacccgg

SEQ ID NO: 519858 - DNA, 15 bp, Homo sapiens
gcgccaccacacccg

SEQ ID NO: 519859 - DNA, 15 bp, Homo sapiens
tgcgccaccacaccc

SEQ ID NO: 519860 - DNA, 15 bp, Homo sapiens
gtgcgccaccacacc

SEQ ID NO: 519861 - DNA, 15 bp, Homo sapiens
tgtgcgccaccacac

SEQ ID NO: 519862 - DNA, 15 bp, Homo sapiens
gtgtgcgccaccaca

SEQ ID NO: 519863 - DNA, 15 bp, Homo sapiens
ggtgtgcgccaccac

SEQ ID NO: 519864 - DNA, 15 bp, Homo sapiens
aggtgtgcgccacca

SEQ ID NO: 519865 - DNA, 15 bp, Homo sapiens
caggtgtgcgccacc

SEQ ID NO: 519866 - DNA, 15 bp, Homo sapiens
acaggtgtgcgccac

SEQ ID NO: 519867 - DNA, 15 bp, Homo sapiens
tacaggtgtgcgcca

SEQ ID NO: 519868 - DNA, 15 bp, Homo sapiens
ttacaggtgtgcgcc

SEQ ID NO: 519869 - DNA, 15 bp, Homo sapiens
attacaggtgtgcgc

SEQ ID NO: 519870 - DNA, 15 bp, Homo sapiens
gattacaggtgtgcg

SEQ ID NO: 519871 - DNA, 15 bp, Homo sapiens
ggattacaggtgtgc

SEQ ID NO: 519872 - DNA, 15 bp, Homo sapiens
cgagtagctgggatt

SEQ ID NO: 519873 - DNA, 15 bp, Homo sapiens
ccgagtagctgggat

SEQ ID NO: 519874 - DNA, 15 bp, Homo sapiens
cccgagtagctggga

SEQ ID NO: 519875 - DNA, 15 bp, Homo sapiens
tcccgagtagctggg

SEQ ID NO: 519876 - DNA, 15 bp, Homo sapiens
ctcccgagtagctgg

SEQ ID NO: 519877 - DNA, 15 bp, Homo sapiens
tctcccgagtagctg

SEQ ID NO: 519878 - DNA, 15 bp, Homo sapiens
atctcccgagtagct

SEQ ID NO: 519879 - DNA, 15 bp, Homo sapiens
catctcccgagtagc

SEQ ID NO: 519880 - DNA, 15 bp, Homo sapiens
tcatctcccgagtag

SEQ ID NO: 519881 - DNA, 15 bp, Homo sapiens
ctcatctcccgagta

SEQ ID NO: 519882 - DNA, 15 bp, Homo sapiens
cctcatctcccgagt

SEQ ID NO: 519883 - DNA, 15 bp, Homo sapiens
gcctcatctcccgag

SEQ ID NO: 519884 - DNA, 15 bp, Homo sapiens
tgcctcatctcccga

SEQ ID NO: 519885 - DNA, 15 bp, Homo sapiens
ctgcctcatctcccg

SEQ ID NO: 519886 - DNA, 15 bp, Homo sapiens
cctgcctcatctccc

SEQ ID NO: 519887 - DNA, 15 bp, Homo sapiens
tcctgcctcatctcc

SEQ ID NO: 519888 - DNA, 15 bp, Homo sapiens
ctcctgcctcatctc

SEQ ID NO: 519889 - DNA, 15 bp, Homo sapiens
tctcctgcctcatct

SEQ ID NO: 519890 - DNA, 15 bp, Homo sapiens
ttctcctgcctcatc

SEQ ID NO: 519891 - DNA, 15 bp, Homo sapiens
attctcctgcctcat

SEQ ID NO: 519892 - DNA, 15 bp, Homo sapiens
gattctcctgcctca

SEQ ID NO: 519893 - DNA, 15 bp, Homo sapiens
tgattctcctgcctc

SEQ ID NO: 519894 - DNA, 15 bp, Homo sapiens
gtgattctcctgcct

SEQ ID NO: 519895 - DNA, 15 bp, Homo sapiens
agtgattctcctgcc

SEQ ID NO: 519896 - DNA, 15 bp, Homo sapiens
aagtgattctcctgc

SEQ ID NO: 519897 - DNA, 15 bp, Homo sapiens
caagtgattctcctg

SEQ ID NO: 519898 - DNA, 15 bp, Homo sapiens
tcaagtgattctcct

SEQ ID NO: 519899 - DNA, 15 bp, Homo sapiens
ttcaagtgattctcc

SEQ ID NO: 519900 - DNA, 15 bp, Homo sapiens
gttcaagtgattctc

SEQ ID NO: 519901 - DNA, 15 bp, Homo sapiens
ggttcaagtgattct

SEQ ID NO: 519902 - DNA, 15 bp, Homo sapiens
gggttcaagtgattc

SEQ ID NO: 519903 - DNA, 15 bp, Homo sapiens
tgggttcaagtgatt

SEQ ID NO: 519904 - DNA, 15 bp, Homo sapiens
ctgggttcaagtgat

SEQ ID NO: 519905 - DNA, 15 bp, Homo sapiens
cctgggttcaagtga

SEQ ID NO: 519906 - DNA, 15 bp, Homo sapiens
tcctgggttcaagtg

SEQ ID NO: 519907 - DNA, 15 bp, Homo sapiens
gcctcctgggttcaa

SEQ ID NO: 519908 - DNA, 15 bp, Homo sapiens
cgcctcctgggttca

SEQ ID NO: 519909 - DNA, 15 bp, Homo sapiens
ccgcctcctgggttc

SEQ ID NO: 519910 - DNA, 15 bp, Homo sapiens
tccgcctcctgggtt

SEQ ID NO: 519911 - DNA, 15 bp, Homo sapiens
ctccgcctcctgggt

SEQ ID NO: 519912 - DNA, 15 bp, Homo sapiens
gctccgcctcctggg

SEQ ID NO: 519913 - DNA, 15 bp, Homo sapiens
agctccgcctcctgg

SEQ ID NO: 519914 - DNA, 15 bp, Homo sapiens
aagctccgcctcctg

SEQ ID NO: 519915 - DNA, 15 bp, Homo sapiens
caagctccgcctcct

SEQ ID NO: 519916 - DNA, 15 bp, Homo sapiens
gcaagctccgcctcc

SEQ ID NO: 519917 - DNA, 15 bp, Homo sapiens
tgcaagctccgcctc

SEQ ID NO: 519918 - DNA, 15 bp, Homo sapiens
ctgcaagctccgcct

SEQ ID NO: 519919 - DNA, 15 bp, Homo sapiens
actgcaagctccgcc

SEQ ID NO: 519920 - DNA, 15 bp, Homo sapiens
cactgcaagctccgc

SEQ ID NO: 519921 - DNA, 15 bp, Homo sapiens
tcactgcaagctccg

SEQ ID NO: 519922 - DNA, 15 bp, Homo sapiens
ctcactgcaagctcc

SEQ ID NO: 519923 - DNA, 15 bp, Homo sapiens
gctcactgcaagctc

SEQ ID NO: 519924 - DNA, 15 bp, Homo sapiens
ggctcactgcaagct

SEQ ID NO: 519925 - DNA, 15 bp, Homo sapiens
tggctcactgcaagc

SEQ ID NO: 519926 - DNA, 15 bp, Homo sapiens
ttggctcactgcaag

SEQ ID NO: 519927 - DNA, 15 bp, Homo sapiens
cttggctcactgcaa

SEQ ID NO: 519928 - DNA, 15 bp, Homo sapiens
tcttggctcactgca

SEQ ID NO: 519929 - DNA, 15 bp, Homo sapiens
atcttggctcactgc

SEQ ID NO: 519930 - DNA, 15 bp, Homo sapiens
catcttggctcactg

SEQ ID NO: 519931 - DNA, 15 bp, Homo sapiens
ccatcttggctcact

SEQ ID NO: 519932 - DNA, 15 bp, Homo sapiens
gccatcttggctcac

SEQ ID NO: 519933 - DNA, 15 bp, Homo sapiens
cgccatcttggctca

SEQ ID NO: 519934 - DNA, 15 bp, Homo sapiens
acgccatcttggctc

SEQ ID NO: 519935 - DNA, 15 bp, Homo sapiens
gacgccatcttggct

SEQ ID NO: 519936 - DNA, 15 bp, Homo sapiens
tgacgccatcttggc

SEQ ID NO: 519937 - DNA, 15 bp, Homo sapiens
gtgacgccatcttgg

SEQ ID NO: 519938 - DNA, 15 bp, Homo sapiens
agtgacgccatcttg

SEQ ID NO: 519939 - DNA, 15 bp, Homo sapiens
cagtgacgccatctt

SEQ ID NO: 519940 - DNA, 15 bp, Homo sapiens
gcagtgacgccatct

SEQ ID NO: 519941 - DNA, 15 bp, Homo sapiens
tgcagtgacgccatc

SEQ ID NO: 519942 - DNA, 15 bp, Homo sapiens
gtgcagtgacgccat

SEQ ID NO: 519943 - DNA, 15 bp, Homo sapiens
agtgcagtgacgcca

SEQ ID NO: 519944 - DNA, 15 bp, Homo sapiens
gagtgcagtgacgcc

SEQ ID NO: 519945 - DNA, 15 bp, Homo sapiens
ggagtgcagtgacgc

SEQ ID NO: 519946 - DNA, 15 bp, Homo sapiens
tggagtgcagtgacg

SEQ ID NO: 519947 - DNA, 15 bp, Homo sapiens
ctggagtgcagtgac

SEQ ID NO: 519948 - DNA, 15 bp, Homo sapiens
gctggagtgcagtga

SEQ ID NO: 519949 - DNA, 15 bp, Homo sapiens
tgcccaggctggagt

SEQ ID NO: 519950 - DNA, 15 bp, Homo sapiens
ttgcccaggctggag

SEQ ID NO: 519951 - DNA, 15 bp, Homo sapiens
gttgcccaggctgga

SEQ ID NO: 519952 - DNA, 15 bp, Homo sapiens
tgttgcccaggctgg

SEQ ID NO: 519953 - DNA, 15 bp, Homo sapiens
ttgttgcccaggctg

SEQ ID NO: 519954 - DNA, 15 bp, Homo sapiens
cttgttgcccaggct

SEQ ID NO: 519955 - DNA, 15 bp, Homo sapiens
tcttgttgcccaggc

SEQ ID NO: 519956 - DNA, 15 bp, Homo sapiens
ctcttgttgcccagg

SEQ ID NO: 519957 - DNA, 15 bp, Homo sapiens
gctcttgttgcccag

SEQ ID NO: 519958 - DNA, 15 bp, Homo sapiens
ggctcttgttgccca

SEQ ID NO: 519959 - DNA, 15 bp, Homo sapiens
tggctcttgttgccc

SEQ ID NO: 519960 - DNA, 15 bp, Homo sapiens
ctggctcttgttgcc

SEQ ID NO: 519961 - DNA, 15 bp, Homo sapiens
tctggctcttgttgc

SEQ ID NO: 519962 - DNA, 15 bp, Homo sapiens
gtctggctcttgttg

SEQ ID NO: 519963 - DNA, 15 bp, Homo sapiens
agtctggctcttgtt

SEQ ID NO: 519964 - DNA, 15 bp, Homo sapiens
gagtctggctcttgt

SEQ ID NO: 519965 - DNA, 15 bp, Homo sapiens
ggagtctggctcttg

SEQ ID NO: 519966 - DNA, 15 bp, Homo sapiens
cggagtctggctctt

SEQ ID NO: 519967 - DNA, 15 bp, Homo sapiens
acggagtctggctct

SEQ ID NO: 519968 - DNA, 15 bp, Homo sapiens
gacggagtctggctc

SEQ ID NO: 519969 - DNA, 15 bp, Homo sapiens
agacggagtctggct

SEQ ID NO: 519970 - DNA, 15 bp, Homo sapiens
gagacggagtctggc

SEQ ID NO: 519971 - DNA, 15 bp, Homo sapiens
tgagacggagtctgg

SEQ ID NO: 519972 - DNA, 15 bp, Homo sapiens
ttgagacggagtctg

SEQ ID NO: 519973 - DNA, 15 bp, Homo sapiens
tttgagacggagtct

SEQ ID NO: 519974 - DNA, 15 bp, Homo sapiens
ttttgagacggagtc

SEQ ID NO: 519975 - DNA, 15 bp, Homo sapiens
tttttgagacggagt

SEQ ID NO: 519976 - DNA, 15 bp, Homo sapiens
ttttttgagacggag

SEQ ID NO: 519977 - DNA, 15 bp, Homo sapiens
tttttttgagacgga

SEQ ID NO: 519978 - DNA, 15 bp, Homo sapiens
ttttttttgagacgg

SEQ ID NO: 519979 - DNA, 15 bp, Homo sapiens
tttttttttgagacg

SEQ ID NO: 519980 - DNA, 15 bp, Homo sapiens
ctttttttttttgag

SEQ ID NO: 519981 - DNA, 15 bp, Homo sapiens
tctttttttttttga

SEQ ID NO: 519982 - DNA, 15 bp, Homo sapiens
ttctttttttttttg

SEQ ID NO: 519983 - DNA, 15 bp, Homo sapiens
cttcttttttttttt

SEQ ID NO: 519984 - DNA, 15 bp, Homo sapiens
ccttctttttttttt

SEQ ID NO: 519985 - DNA, 15 bp, Homo sapiens
accttcttttttttt

SEQ ID NO: 519986 - DNA, 15 bp, Homo sapiens
taccttctttttttt

SEQ ID NO: 519987 - DNA, 15 bp, Homo sapiens
ataccttcttttttt

SEQ ID NO: 519988 - DNA, 15 bp, Homo sapiens
cataccttctttttt

SEQ ID NO: 519989 - DNA, 15 bp, Homo sapiens
acataccttcttttt

SEQ ID NO: 519990 - DNA, 15 bp, Homo sapiens
aacataccttctttt

SEQ ID NO: 519991 - DNA, 15 bp, Homo sapiens
caacataccttcttt

SEQ ID NO: 519992 - DNA, 15 bp, Homo sapiens
tcaacataccttctt

SEQ ID NO: 519993 - DNA, 15 bp, Homo sapiens
actcaacataccttc

SEQ ID NO: 519994 - DNA, 15 bp, Homo sapiens
aactcaacatacctt

SEQ ID NO: 519995 - DNA, 15 bp, Homo sapiens
aaactcaacatacct

SEQ ID NO: 519996 - DNA, 15 bp, Homo sapiens
aaaactcaacatacc

SEQ ID NO: 519997 - DNA, 15 bp, Homo sapiens
aaaaactcaacatac

SEQ ID NO: 519998 - DNA, 15 bp, Homo sapiens
gaaaaactcaacata

SEQ ID NO: 519999 - DNA, 15 bp, Homo sapiens
tgaaaaactcaacat

SEQ ID NO: 520000 - DNA, 15 bp, Homo sapiens
ctgaaaaactcaaca

SEQ ID NO: 520001 - DNA, 15 bp, Homo sapiens
actgaaaaactcaac

SEQ ID NO: 520002 - DNA, 15 bp, Homo sapiens
aactgaaaaactcaa

SEQ ID NO: 520003 - DNA, 15 bp, Homo sapiens
aaactgaaaaactca

SEQ ID NO: 520004 - DNA, 15 bp, Homo sapiens
taaactgaaaaactc

SEQ ID NO: 520005 - DNA, 15 bp, Homo sapiens
ctaaactgaaaaact

SEQ ID NO: 520006 - DNA, 15 bp, Homo sapiens
gctaaactgaaaaac

SEQ ID NO: 520007 - DNA, 15 bp, Homo sapiens
tgctaaactgaaaaa

SEQ ID NO: 520008 - DNA, 15 bp, Homo sapiens
ctgctaaactgaaaa

SEQ ID NO: 520009 - DNA, 15 bp, Homo sapiens
tctgctaaactgaaa

SEQ ID NO: 520010 - DNA, 15 bp, Homo sapiens
ttctgctaaactgaa

SEQ ID NO: 520011 - DNA, 15 bp, Homo sapiens
attctgctaaactga

SEQ ID NO: 520012 - DNA, 15 bp, Homo sapiens
tattctgctaaactg

SEQ ID NO: 520013 - DNA, 15 bp, Homo sapiens
ttattctgctaaact

SEQ ID NO: 520014 - DNA, 15 bp, Homo sapiens
tttattctgctaaac

SEQ ID NO: 520015 - DNA, 15 bp, Homo sapiens
atttattctgctaaa

SEQ ID NO: 520016 - DNA, 15 bp, Homo sapiens
aatttattctgctaa

SEQ ID NO: 520017 - DNA, 15 bp, Homo sapiens
aaatttattctgcta

SEQ ID NO: 520018 - DNA, 15 bp, Homo sapiens
aaaatttattctgct

SEQ ID NO: 520019 - DNA, 15 bp, Homo sapiens
aaaaatttattctgc

SEQ ID NO: 520020 - DNA, 15 bp, Homo sapiens
aaaaaatttattctg

SEQ ID NO: 520021 - DNA, 15 bp, Homo sapiens
aaaaaaatttattct

SEQ ID NO: 520022 - DNA, 15 bp, Homo sapiens
aaaaaaaatttattc

SEQ ID NO: 520023 - DNA, 15 bp, Homo sapiens
aaaaaaaaatttatt

SEQ ID NO: 520024 - DNA, 15 bp, Homo sapiens
aaaaaaaaaatttat

SEQ ID NO: 520025 - DNA, 15 bp, Homo sapiens
aaaaaaaaaaattta

SEQ ID NO: 520026 - DNA, 15 bp, Homo sapiens
aaaaaaaaaaaattt

SEQ ID NO: 520027 - DNA, 15 bp, Homo sapiens
aaaaaaaaaaaaatt

SEQ ID NO: 520028 - DNA, 15 bp, Homo sapiens
aaaaaaaaaaaaaat

SEQ ID NO: 520029 - DNA, 15 bp, Homo sapiens
cctgtctcaaaaaaa

SEQ ID NO: 520030 - DNA, 15 bp, Homo sapiens
ccctgtctcaaaaaa

SEQ ID NO: 520031 - DNA, 15 bp, Homo sapiens
accctgtctcaaaaa

SEQ ID NO: 520032 - DNA, 15 bp, Homo sapiens
gaccctgtctcaaaa

SEQ ID NO: 520033 - DNA, 15 bp, Homo sapiens
agaccctgtctcaaa

SEQ ID NO: 520034 - DNA, 15 bp, Homo sapiens
gagaccctgtctcaa

SEQ ID NO: 520035 - DNA, 15 bp, Homo sapiens
cgagaccctgtctca

SEQ ID NO: 520036 - DNA, 15 bp, Homo sapiens
gcgagaccctgtctc

SEQ ID NO: 520037 - DNA, 15 bp, Homo sapiens
agcgagaccctgtct

SEQ ID NO: 520038 - DNA, 15 bp, Homo sapiens
cagcgagaccctgtc

SEQ ID NO: 520039 - DNA, 15 bp, Homo sapiens
acagcgagaccctgt

SEQ ID NO: 520040 - DNA, 15 bp, Homo sapiens
cacagcgagaccctg

SEQ ID NO: 520041 - DNA, 15 bp, Homo sapiens
acacagcgagaccct

SEQ ID NO: 520042 - DNA, 15 bp, Homo sapiens
gacacagcgagaccc

SEQ ID NO: 520043 - DNA, 15 bp, Homo sapiens
tgacacagcgagacc

SEQ ID NO: 520044 - DNA, 15 bp, Homo sapiens
gtgacacagcgagac

SEQ ID NO: 520045 - DNA, 15 bp, Homo sapiens
ggtgacacagcgaga

SEQ ID NO: 520046 - DNA, 15 bp, Homo sapiens
gggtgacacagcgag

SEQ ID NO: 520047 - DNA, 15 bp, Homo sapiens
tgggtgacacagcga

SEQ ID NO: 520048 - DNA, 15 bp, Homo sapiens
ctgggtgacacagcg

SEQ ID NO: 520049 - DNA, 15 bp, Homo sapiens
cctgggtgacacagc

SEQ ID NO: 520050 - DNA, 15 bp, Homo sapiens
gcctgggtgacacag

SEQ ID NO: 520051 - DNA, 15 bp, Homo sapiens
agcctgggtgacaca

SEQ ID NO: 520052 - DNA, 15 bp, Homo sapiens
cagcctgggtgacac

SEQ ID NO: 520053 - DNA, 15 bp, Homo sapiens
gctccagcctgggtg

SEQ ID NO: 520054 - DNA, 15 bp, Homo sapiens
ggctccagcctgggt

SEQ ID NO: 520055 - DNA, 15 bp, Homo sapiens
tggctccagcctggg

SEQ ID NO: 520056 - DNA, 15 bp, Homo sapiens
gtggctccagcctgg

SEQ ID NO: 520057 - DNA, 15 bp, Homo sapiens
cgtggctccagcctg

SEQ ID NO: 520058 - DNA, 15 bp, Homo sapiens
ccgtggctccagcct

SEQ ID NO: 520059 - DNA, 15 bp, Homo sapiens
cccgtggctccagcc

SEQ ID NO: 520060 - DNA, 15 bp, Homo sapiens
tcccgtggctccagc

SEQ ID NO: 520061 - DNA, 15 bp, Homo sapiens
atcccgtggctccag

SEQ ID NO: 520062 - DNA, 15 bp, Homo sapiens
tatcccgtggctcca

SEQ ID NO: 520063 - DNA, 15 bp, Homo sapiens
atatcccgtggctcc

SEQ ID NO: 520064 - DNA, 15 bp, Homo sapiens
tatatcccgtggctc

SEQ ID NO: 520065 - DNA, 15 bp, Homo sapiens
atatatcccgtggct

SEQ ID NO: 520066 - DNA, 15 bp, Homo sapiens
aatatatcccgtggc

SEQ ID NO: 520067 - DNA, 15 bp, Homo sapiens
aaatatatcccgtgg

SEQ ID NO: 520068 - DNA, 15 bp, Homo sapiens
taaatatatcccgtg

SEQ ID NO: 520069 - DNA, 15 bp, Homo sapiens
ataaatatatcccgt

SEQ ID NO: 520070 - DNA, 15 bp, Homo sapiens
tataaatatatcccg

SEQ ID NO: 520071 - DNA, 15 bp, Homo sapiens
atataaatatatccc

SEQ ID NO: 520072 - DNA, 15 bp, Homo sapiens
tatataaatatatcc

SEQ ID NO: 520073 - DNA, 15 bp, Homo sapiens
atatataaatatatc

SEQ ID NO: 520074 - DNA, 15 bp, Homo sapiens
aatatataaatatat

SEQ ID NO: 520075 - DNA, 15 bp, Homo sapiens
aaatatataaatata

SEQ ID NO: 520076 - DNA, 15 bp, Homo sapiens
taaatatataaatat

SEQ ID NO: 520077 - DNA, 15 bp, Homo sapiens
ttaaatatataaata

SEQ ID NO: 520078 - DNA, 15 bp, Homo sapiens
tttaaatatataaat

SEQ ID NO: 520079 - DNA, 15 bp, Homo sapiens
ttttaaatatataaa

SEQ ID NO: 520080 - DNA, 15 bp, Homo sapiens
attttaaatatataa

SEQ ID NO: 520081 - DNA, 15 bp, Homo sapiens
tattttaaatatata

SEQ ID NO: 520082 - DNA, 15 bp, Homo sapiens
atattttaaatatat

SEQ ID NO: 520083 - DNA, 15 bp, Homo sapiens
tatattttaaatata

SEQ ID NO: 520084 - DNA, 15 bp, Homo sapiens
atatattttaaatat

SEQ ID NO: 520085 - DNA, 15 bp, Homo sapiens
aatatattttaaata

SEQ ID NO: 520086 - DNA, 15 bp, Homo sapiens
aaatatattttaaat

SEQ ID NO: 520087 - DNA, 15 bp, Homo sapiens
taaatatattttaaa

SEQ ID NO: 520088 - DNA, 15 bp, Homo sapiens
ataaatatattttaa

SEQ ID NO: 520089 - DNA, 15 bp, Homo sapiens
tataaatatatttta

SEQ ID NO: 520090 - DNA, 15 bp, Homo sapiens
ttataaatatatttt

SEQ ID NO: 520091 - DNA, 15 bp, Homo sapiens
attataaatatattt

SEQ ID NO: 520092 - DNA, 15 bp, Homo sapiens
tattataaatatatt

SEQ ID NO: 520093 - DNA, 15 bp, Homo sapiens
atattataaatatat

SEQ ID NO: 520094 - DNA, 15 bp, Homo sapiens
aatattataaatata

SEQ ID NO: 520095 - DNA, 15 bp, Homo sapiens
aaatattataaatat

SEQ ID NO: 520096 - DNA, 15 bp, Homo sapiens
taaatattataaata

SEQ ID NO: 520097 - DNA, 15 bp, Homo sapiens
ataaatattataaat

SEQ ID NO: 520098 - DNA, 15 bp, Homo sapiens
tataaatattataaa

SEQ ID NO: 520099 - DNA, 15 bp, Homo sapiens
atataaatattataa

SEQ ID NO: 520100 - DNA, 15 bp, Homo sapiens
tatataaatattata

SEQ ID NO: 520101 - DNA, 15 bp, Homo sapiens
ctatataaatattat

SEQ ID NO: 520102 - DNA, 15 bp, Homo sapiens
actatataaatatta

SEQ ID NO: 520103 - DNA, 15 bp, Homo sapiens
tactatataaatatt

SEQ ID NO: 520104 - DNA, 15 bp, Homo sapiens
atactatataaatat

SEQ ID NO: 520105 - DNA, 15 bp, Homo sapiens
catactatataaata

SEQ ID NO: 520106 - DNA, 15 bp, Homo sapiens
acatactatataaat

SEQ ID NO: 520107 - DNA, 15 bp, Homo sapiens
tacatactatataaa

SEQ ID NO: 520108 - DNA, 15 bp, Homo sapiens
ttacatactatataa

SEQ ID NO: 520109 - DNA, 15 bp, Homo sapiens
attacatactatata

SEQ ID NO: 520110 - DNA, 15 bp, Homo sapiens
tattacatactatat

SEQ ID NO: 520111 - DNA, 15 bp, Homo sapiens
gtattacatactata

SEQ ID NO: 520112 - DNA, 15 bp, Homo sapiens
tgtattacatactat

SEQ ID NO: 520113 - DNA, 15 bp, Homo sapiens
ttgtattacatacta

SEQ ID NO: 520114 - DNA, 15 bp, Homo sapiens
tttgtattacatact

SEQ ID NO: 520115 - DNA, 15 bp, Homo sapiens
ttttgtattacatac

SEQ ID NO: 520116 - DNA, 15 bp, Homo sapiens
tttttgtattacata

SEQ ID NO: 520117 - DNA, 15 bp, Homo sapiens
atttttgtattacat

SEQ ID NO: 520118 - DNA, 15 bp, Homo sapiens
tatttttgtattaca

SEQ ID NO: 520119 - DNA, 15 bp, Homo sapiens
gtatttttgtattac

SEQ ID NO: 520120 - DNA, 15 bp, Homo sapiens
agtatttttgtatta

SEQ ID NO: 520121 - DNA, 15 bp, Homo sapiens
tagtatttttgtatt

SEQ ID NO: 520122 - DNA, 15 bp, Homo sapiens
atagtatttttgtat

SEQ ID NO: 520123 - DNA, 15 bp, Homo sapiens
tatagtatttttgta

SEQ ID NO: 520124 - DNA, 15 bp, Homo sapiens
atatagtatttttgt

SEQ ID NO: 520125 - DNA, 15 bp, Homo sapiens
tatatagtatttttg

SEQ ID NO: 520126 - DNA, 15 bp, Homo sapiens
atatatagtattttt

SEQ ID NO: 520127 - DNA, 15 bp, Homo sapiens
tatatatagtatttt

SEQ ID NO: 520128 - DNA, 15 bp, Homo sapiens
atatatatagtattt

SEQ ID NO: 520129 - DNA, 15 bp, Homo sapiens
aatatatatagtatt

SEQ ID NO: 520130 - DNA, 15 bp, Homo sapiens
gaatatatatagtat

SEQ ID NO: 520131 - DNA, 15 bp, Homo sapiens
ggaatatatatagta

SEQ ID NO: 520132 - DNA, 15 bp, Homo sapiens
tggaatatatatagt

SEQ ID NO: 520133 - DNA, 15 bp, Homo sapiens
atggaatatatatag

SEQ ID NO: 520134 - DNA, 15 bp, Homo sapiens
tatggaatatatata

SEQ ID NO: 520135 - DNA, 15 bp, Homo sapiens
atatggaatatatat

SEQ ID NO: 520136 - DNA, 15 bp, Homo sapiens
tatatggaatatata

SEQ ID NO: 520137 - DNA, 15 bp, Homo sapiens
ttatatggaatatat

SEQ ID NO: 520138 - DNA, 15 bp, Homo sapiens
tttatatggaatata

SEQ ID NO: 520139 - DNA, 15 bp, Homo sapiens
atttatatggaatat

SEQ ID NO: 520140 - DNA, 15 bp, Homo sapiens
tatttatatggaata

SEQ ID NO: 520141 - DNA, 15 bp, Homo sapiens
atatttatatggaat

SEQ ID NO: 520142 - DNA, 15 bp, Homo sapiens
aatatttatatggaa

SEQ ID NO: 520143 - DNA, 15 bp, Homo sapiens
taatatttatatgga

SEQ ID NO: 520144 - DNA, 15 bp, Homo sapiens
gtaatatttatatgg

SEQ ID NO: 520145 - DNA, 15 bp, Homo sapiens
tgtaatatttatatg

SEQ ID NO: 520146 - DNA, 15 bp, Homo sapiens
atgtaatatttatat

SEQ ID NO: 520147 - DNA, 15 bp, Homo sapiens
tatgtaatatttata

SEQ ID NO: 520148 - DNA, 15 bp, Homo sapiens
atatgtaatatttat

SEQ ID NO: 520149 - DNA, 15 bp, Homo sapiens
tatatgtaatattta

SEQ ID NO: 520150 - DNA, 15 bp, Homo sapiens
ctatatgtaatattt

SEQ ID NO: 520151 - DNA, 15 bp, Homo sapiens
actatatgtaatatt

SEQ ID NO: 520152 - DNA, 15 bp, Homo sapiens
tactatatgtaatat

SEQ ID NO: 520153 - DNA, 15 bp, Homo sapiens
gtactatatgtaata

SEQ ID NO: 520154 - DNA, 15 bp, Homo sapiens
tgtactatatgtaat

SEQ ID NO: 520155 - DNA, 15 bp, Homo sapiens
atgtactatatgtaa

SEQ ID NO: 520156 - DNA, 15 bp, Homo sapiens
tatgtactatatgta

SEQ ID NO: 520157 - DNA, 15 bp, Homo sapiens
ctatgtactatatgt

SEQ ID NO: 520158 - DNA, 15 bp, Homo sapiens
tctatgtactatatg

SEQ ID NO: 520159 - DNA, 15 bp, Homo sapiens
atctatgtactatat

SEQ ID NO: 520160 - DNA, 15 bp, Homo sapiens
tatctatgtactata

SEQ ID NO: 520161 - DNA, 15 bp, Homo sapiens
ttatctatgtactat

SEQ ID NO: 520162 - DNA, 15 bp, Homo sapiens
tttatctatgtacta

SEQ ID NO: 520163 - DNA, 15 bp, Homo sapiens
ttttatctatgtact

SEQ ID NO: 520164 - DNA, 15 bp, Homo sapiens
attttatctatgtac

SEQ ID NO: 520165 - DNA, 15 bp, Homo sapiens
cattttatctatgta

SEQ ID NO: 520166 - DNA, 15 bp, Homo sapiens
acattttatctatgt

SEQ ID NO: 520167 - DNA, 15 bp, Homo sapiens
tacattttatctatg

SEQ ID NO: 520168 - DNA, 15 bp, Homo sapiens
atacattttatctat

SEQ ID NO: 520169 - DNA, 15 bp, Homo sapiens
gatacattttatcta

SEQ ID NO: 520170 - DNA, 15 bp, Homo sapiens
agatacattttatct

SEQ ID NO: 520171 - DNA, 15 bp, Homo sapiens
tagatacattttatc

SEQ ID NO: 520172 - DNA, 15 bp, Homo sapiens
gtagatacattttat

SEQ ID NO: 520173 - DNA, 15 bp, Homo sapiens
ggtagatacatttta

SEQ ID NO: 520174 - DNA, 15 bp, Homo sapiens
cggtagatacatttt

SEQ ID NO: 520175 - DNA, 15 bp, Homo sapiens
gcggtagatacattt

SEQ ID NO: 520176 - DNA, 15 bp, Homo sapiens
agcggtagatacatt

SEQ ID NO: 520177 - DNA, 15 bp, Homo sapiens
aagcggtagatacat

SEQ ID NO: 520178 - DNA, 15 bp, Homo sapiens
caagcggtagataca

SEQ ID NO: 520179 - DNA, 15 bp, Homo sapiens
gcaagcggtagatac

SEQ ID NO: 520180 - DNA, 15 bp, Homo sapiens
ggcaagcggtagata

SEQ ID NO: 520181 - DNA, 15 bp, Homo sapiens
aggcaagcggtagat

SEQ ID NO: 520182 - DNA, 15 bp, Homo sapiens
taggcaagcggtaga

SEQ ID NO: 520183 - DNA, 15 bp, Homo sapiens
ctaggcaagcggtag

SEQ ID NO: 520184 - DNA, 15 bp, Homo sapiens
gctaggcaagcggta

SEQ ID NO: 520185 - DNA, 15 bp, Homo sapiens
agctaggcaagcggt

SEQ ID NO: 520186 - DNA, 15 bp, Homo sapiens
gagctaggcaagcgg

SEQ ID NO: 520187 - DNA, 15 bp, Homo sapiens
agagctaggcaagcg

SEQ ID NO: 520188 - DNA, 15 bp, Homo sapiens
cagagctaggcaagc

SEQ ID NO: 520189 - DNA, 15 bp, Homo sapiens
acagagctaggcaag

SEQ ID NO: 520190 - DNA, 15 bp, Homo sapiens
cacagagctaggcaa

SEQ ID NO: 520191 - DNA, 15 bp, Homo sapiens
tcacagagctaggca

SEQ ID NO: 520192 - DNA, 15 bp, Homo sapiens
ctcacagagctaggc

SEQ ID NO: 520193 - DNA, 15 bp, Homo sapiens
cctcacagagctagg

SEQ ID NO: 520194 - DNA, 15 bp, Homo sapiens
acctcacagagctag

SEQ ID NO: 520195 - DNA, 15 bp, Homo sapiens
tacctcacagagcta

SEQ ID NO: 520196 - DNA, 15 bp, Homo sapiens
gtacctcacagagct

SEQ ID NO: 520197 - DNA, 15 bp, Homo sapiens
tgtacctcacagagc

SEQ ID NO: 520198 - DNA, 15 bp, Homo sapiens
gtgtacctcacagag

SEQ ID NO: 520199 - DNA, 15 bp, Homo sapiens
agtgtacctcacaga

SEQ ID NO: 520200 - DNA, 15 bp, Homo sapiens
aagtgtacctcacag

SEQ ID NO: 520201 - DNA, 15 bp, Homo sapiens
gaagtgtacctcaca

SEQ ID NO: 520202 - DNA, 15 bp, Homo sapiens
agaagtgtacctcac

SEQ ID NO: 520203 - DNA, 15 bp, Homo sapiens
aagaagtgtacctca

SEQ ID NO: 520204 - DNA, 15 bp, Homo sapiens
caagaagtgtacctc

SEQ ID NO: 520205 - DNA, 15 bp, Homo sapiens
ccaagaagtgtacct

SEQ ID NO: 520206 - DNA, 15 bp, Homo sapiens
gccaagaagtgtacc

SEQ ID NO: 520207 - DNA, 15 bp, Homo sapiens
ggccaagaagtgtac

SEQ ID NO: 520208 - DNA, 15 bp, Homo sapiens
gggccaagaagtgta

SEQ ID NO: 520209 - DNA, 15 bp, Homo sapiens
agggccaagaagtgt

SEQ ID NO: 520210 - DNA, 15 bp, Homo sapiens
aagggccaagaagtg

SEQ ID NO: 520211 - DNA, 15 bp, Homo sapiens
gaagggccaagaagt

SEQ ID NO: 520212 - DNA, 15 bp, Homo sapiens
ggaagggccaagaag

SEQ ID NO: 520213 - DNA, 15 bp, Homo sapiens
gggaagggccaagaa

SEQ ID NO: 520214 - DNA, 15 bp, Homo sapiens
ggggaagggccaaga

SEQ ID NO: 520215 - DNA, 15 bp, Homo sapiens
tggggaagggccaag

SEQ ID NO: 520216 - DNA, 15 bp, Homo sapiens
gtggggaagggccaa

SEQ ID NO: 520217 - DNA, 15 bp, Homo sapiens
tgtggggaagggcca

SEQ ID NO: 520218 - DNA, 15 bp, Homo sapiens
ctgtggggaagggcc

SEQ ID NO: 520219 - DNA, 15 bp, Homo sapiens
gctgtggggaagggc

SEQ ID NO: 520220 - DNA, 15 bp, Homo sapiens
agctgtggggaaggg

SEQ ID NO: 520221 - DNA, 15 bp, Homo sapiens
gagctgtggggaagg

SEQ ID NO: 520222 - DNA, 15 bp, Homo sapiens
ggagctgtggggaag

SEQ ID NO: 520223 - DNA, 15 bp, Homo sapiens
cggagctgtggggaa

SEQ ID NO: 520224 - DNA, 15 bp, Homo sapiens
tcggagctgtgggga

SEQ ID NO: 520225 - DNA, 15 bp, Homo sapiens
gtcggagctgtgggg

SEQ ID NO: 520226 - DNA, 15 bp, Homo sapiens
tgtcggagctgtggg

SEQ ID NO: 520227 - DNA, 15 bp, Homo sapiens
atgtcggagctgtgg

SEQ ID NO: 520228 - DNA, 15 bp, Homo sapiens
tatgtcggagctgtg

SEQ ID NO: 520229 - DNA, 15 bp, Homo sapiens
atatgtcggagctgt

SEQ ID NO: 520230 - DNA, 15 bp, Homo sapiens
aatatgtcggagctg

SEQ ID NO: 520231 - DNA, 15 bp, Homo sapiens
gaatatgtcggagct

SEQ ID NO: 520232 - DNA, 15 bp, Homo sapiens
agaatatgtcggagc

SEQ ID NO: 520233 - DNA, 15 bp, Homo sapiens
gagaatatgtcggag

SEQ ID NO: 520234 - DNA, 15 bp, Homo sapiens
ggagaatatgtcgga

SEQ ID NO: 520235 - DNA, 15 bp, Homo sapiens
gggagaatatgtcgg

SEQ ID NO: 520236 - DNA, 15 bp, Homo sapiens
tgggagaatatgtcg

SEQ ID NO: 520237 - DNA, 15 bp, Homo sapiens
ttgggagaatatgtc

SEQ ID NO: 520238 - DNA, 15 bp, Homo sapiens
cttgggagaatatgt

SEQ ID NO: 520239 - DNA, 15 bp, Homo sapiens
gcttgggagaatatg

SEQ ID NO: 520240 - DNA, 15 bp, Homo sapiens
ggcttgggagaatat

SEQ ID NO: 520241 - DNA, 15 bp, Homo sapiens
aggcttgggagaata

SEQ ID NO: 520242 - DNA, 15 bp, Homo sapiens
aaggcttgggagaat

SEQ ID NO: 520243 - DNA, 15 bp, Homo sapiens
gaaggcttgggagaa

SEQ ID NO: 520244 - DNA, 15 bp, Homo sapiens
tgaaggcttgggaga

SEQ ID NO: 520245 - DNA, 15 bp, Homo sapiens
ttgaaggcttgggag

SEQ ID NO: 520246 - DNA, 15 bp, Homo sapiens
cttgaaggcttggga

SEQ ID NO: 520247 - DNA, 15 bp, Homo sapiens
ccttgaaggcttggg

SEQ ID NO: 520248 - DNA, 15 bp, Homo sapiens
accttgaaggcttgg

SEQ ID NO: 520249 - DNA, 15 bp, Homo sapiens
gaccttgaaggcttg

SEQ ID NO: 520250 - DNA, 15 bp, Homo sapiens
ggaccttgaaggctt

SEQ ID NO: 520251 - DNA, 15 bp, Homo sapiens
aggaccttgaaggct

SEQ ID NO: 520252 - DNA, 15 bp, Homo sapiens
aaggaccttgaaggc

SEQ ID NO: 520253 - DNA, 15 bp, Homo sapiens
gaaggaccttgaagg

SEQ ID NO: 520254 - DNA, 15 bp, Homo sapiens
tgaaggaccttgaag

SEQ ID NO: 520255 - DNA, 15 bp, Homo sapiens
ttgaaggaccttgaa

SEQ ID NO: 520256 - DNA, 15 bp, Homo sapiens
attgaaggaccttga

SEQ ID NO: 520257 - DNA, 15 bp, Homo sapiens
tattgaaggaccttg

SEQ ID NO: 520258 - DNA, 15 bp, Homo sapiens
atattgaaggacctt

SEQ ID NO: 520259 - DNA, 15 bp, Homo sapiens
aatattgaaggacct

SEQ ID NO: 520260 - DNA, 15 bp, Homo sapiens
caatattgaaggacc

SEQ ID NO: 520261 - DNA, 15 bp, Homo sapiens
acaatattgaaggac

SEQ ID NO: 520262 - DNA, 15 bp, Homo sapiens
aacaatattgaagga

SEQ ID NO: 520263 - DNA, 15 bp, Homo sapiens
taacaatattgaagg

SEQ ID NO: 520264 - DNA, 15 bp, Homo sapiens
ataacaatattgaag

SEQ ID NO: 520265 - DNA, 15 bp, Homo sapiens
aataacaatattgaa

SEQ ID NO: 520266 - DNA, 15 bp, Homo sapiens
taataacaatattga

SEQ ID NO: 520267 - DNA, 15 bp, Homo sapiens
ctaataacaatattg

SEQ ID NO: 520268 - DNA, 15 bp, Homo sapiens
tctaataacaatatt

SEQ ID NO: 520269 - DNA, 15 bp, Homo sapiens
ctctaataacaatat

SEQ ID NO: 520270 - DNA, 15 bp, Homo sapiens
cctctaataacaata

SEQ ID NO: 520271 - DNA, 15 bp, Homo sapiens
gcctctaataacaat

SEQ ID NO: 520272 - DNA, 15 bp, Homo sapiens
agcctctaataacaa

SEQ ID NO: 520273 - DNA, 15 bp, Homo sapiens
cagcctctaataaca

SEQ ID NO: 520274 - DNA, 15 bp, Homo sapiens
ccagcctctaataac

SEQ ID NO: 520275 - DNA, 15 bp, Homo sapiens
cccagcctctaataa

SEQ ID NO: 520276 - DNA, 15 bp, Homo sapiens
gcccagcctctaata

SEQ ID NO: 520277 - DNA, 15 bp, Homo sapiens
tgcccagcctctaat

SEQ ID NO: 520278 - DNA, 15 bp, Homo sapiens
gtgcccagcctctaa

SEQ ID NO: 520279 - DNA, 15 bp, Homo sapiens
cgtgcccagcctcta

SEQ ID NO: 520280 - DNA, 15 bp, Homo sapiens
ccgtgcccagcctct

SEQ ID NO: 520281 - DNA, 15 bp, Homo sapiens
accgtgcccagcctc

SEQ ID NO: 520282 - DNA, 15 bp, Homo sapiens
caccgtgcccagcct

SEQ ID NO: 520283 - DNA, 15 bp, Homo sapiens
ccaccgtgcccagcc

SEQ ID NO: 520284 - DNA, 15 bp, Homo sapiens
gccaccgtgcccagc

SEQ ID NO: 520285 - DNA, 15 bp, Homo sapiens
agccaccgtgcccag

SEQ ID NO: 520286 - DNA, 15 bp, Homo sapiens
gagccaccgtgccca

SEQ ID NO: 520287 - DNA, 15 bp, Homo sapiens
tgagccaccgtgccc

SEQ ID NO: 520288 - DNA, 15 bp, Homo sapiens
gtgagccaccgtgcc

SEQ ID NO: 520289 - DNA, 15 bp, Homo sapiens
cgtgagccaccgtgc

SEQ ID NO: 520290 - DNA, 15 bp, Homo sapiens
gcgtgagccaccgtg

SEQ ID NO: 520291 - DNA, 15 bp, Homo sapiens
ggcgtgagccaccgt

SEQ ID NO: 520292 - DNA, 15 bp, Homo sapiens
aggcgtgagccaccg

SEQ ID NO: 520293 - DNA, 15 bp, Homo sapiens
caggcgtgagccacc

SEQ ID NO: 520294 - DNA, 15 bp, Homo sapiens
gggattacaggcgtg

SEQ ID NO: 520295 - DNA, 15 bp, Homo sapiens
tgggattacaggcgt

SEQ ID NO: 520296 - DNA, 15 bp, Homo sapiens
ctgggattacaggcg

SEQ ID NO: 520297 - DNA, 15 bp, Homo sapiens
tgcctcggcctccca

SEQ ID NO: 520298 - DNA, 15 bp, Homo sapiens
ctgcctcggcctccc

SEQ ID NO: 520299 - DNA, 15 bp, Homo sapiens
cctgcctcggcctcc

SEQ ID NO: 520300 - DNA, 15 bp, Homo sapiens
acctgcctcggcctc

SEQ ID NO: 520301 - DNA, 15 bp, Homo sapiens
cacctgcctcggcct

SEQ ID NO: 520302 - DNA, 15 bp, Homo sapiens
ccacctgcctcggcc

SEQ ID NO: 520303 - DNA, 15 bp, Homo sapiens
tccacctgcctcggc

SEQ ID NO: 520304 - DNA, 15 bp, Homo sapiens
atccacctgcctcgg

SEQ ID NO: 520305 - DNA, 15 bp, Homo sapiens
gatccacctgcctcg

SEQ ID NO: 520306 - DNA, 15 bp, Homo sapiens
tgatccacctgcctc

SEQ ID NO: 520307 - DNA, 15 bp, Homo sapiens
gtgatccacctgcct

SEQ ID NO: 520308 - DNA, 15 bp, Homo sapiens
cgtgatccacctgcc

SEQ ID NO: 520309 - DNA, 15 bp, Homo sapiens
tcgtgatccacctgc

SEQ ID NO: 520310 - DNA, 15 bp, Homo sapiens
ctcgtgatccacctg

SEQ ID NO: 520311 - DNA, 15 bp, Homo sapiens
cctcgtgatccacct

SEQ ID NO: 520312 - DNA, 15 bp, Homo sapiens
acctcgtgatccacc

SEQ ID NO: 520313 - DNA, 15 bp, Homo sapiens
gacctcgtgatccac

SEQ ID NO: 520314 - DNA, 15 bp, Homo sapiens
tgacctcgtgatcca

SEQ ID NO: 520315 - DNA, 15 bp, Homo sapiens
ctgacctcgtgatcc

SEQ ID NO: 520316 - DNA, 15 bp, Homo sapiens
tctgacctcgtgatc

SEQ ID NO: 520317 - DNA, 15 bp, Homo sapiens
ttctgacctcgtgat

SEQ ID NO: 520318 - DNA, 15 bp, Homo sapiens
tttctgacctcgtga

SEQ ID NO: 520319 - DNA, 15 bp, Homo sapiens
ttttctgacctcgtg

SEQ ID NO: 520320 - DNA, 15 bp, Homo sapiens
attttctgacctcgt

SEQ ID NO: 520321 - DNA, 15 bp, Homo sapiens
gattttctgacctcg

SEQ ID NO: 520322 - DNA, 15 bp, Homo sapiens
ggattttctgacctc

SEQ ID NO: 520323 - DNA, 15 bp, Homo sapiens
tggattttctgacct

SEQ ID NO: 520324 - DNA, 15 bp, Homo sapiens
ctggattttctgacc

SEQ ID NO: 520325 - DNA, 15 bp, Homo sapiens
tctggattttctgac

SEQ ID NO: 520326 - DNA, 15 bp, Homo sapiens
gtctggattttctga

SEQ ID NO: 520327 - DNA, 15 bp, Homo sapiens
ggtctggattttctg

SEQ ID NO: 520328 - DNA, 15 bp, Homo sapiens
tggtctggattttct

SEQ ID NO: 520329 - DNA, 15 bp, Homo sapiens
gtggtctggattttc

SEQ ID NO: 520330 - DNA, 15 bp, Homo sapiens
ggtggtctggatttt

SEQ ID NO: 520331 - DNA, 15 bp, Homo sapiens
gggtggtctggattt

SEQ ID NO: 520332 - DNA, 15 bp, Homo sapiens
agggtggtctggatt

SEQ ID NO: 520333 - DNA, 15 bp, Homo sapiens
tagggtggtctggat

SEQ ID NO: 520334 - DNA, 15 bp, Homo sapiens
ctagggtggtctgga

SEQ ID NO: 520335 - DNA, 15 bp, Homo sapiens
actagggtggtctgg

SEQ ID NO: 520336 - DNA, 15 bp, Homo sapiens
gactagggtggtctg

SEQ ID NO: 520337 - DNA, 15 bp, Homo sapiens
tgactagggtggtct

SEQ ID NO: 520338 - DNA, 15 bp, Homo sapiens
ttgactagggtggtc

SEQ ID NO: 520339 - DNA, 15 bp, Homo sapiens
gttgactagggtggt

SEQ ID NO: 520340 - DNA, 15 bp, Homo sapiens
tgttgactagggtgg

SEQ ID NO: 520341 - DNA, 15 bp, Homo sapiens
gtgttgactagggtg

SEQ ID NO: 520342 - DNA, 15 bp, Homo sapiens
cgtgttgactagggt

SEQ ID NO: 520343 - DNA, 15 bp, Homo sapiens
ccgtgttgactaggg

SEQ ID NO: 520344 - DNA, 15 bp, Homo sapiens
accgtgttgactagg

SEQ ID NO: 520345 - DNA, 15 bp, Homo sapiens
taccgtgttgactag

SEQ ID NO: 520346 - DNA, 15 bp, Homo sapiens
ttaccgtgttgacta

SEQ ID NO: 520347 - DNA, 15 bp, Homo sapiens
tttaccgtgttgact

SEQ ID NO: 520348 - DNA, 15 bp, Homo sapiens
ttttaccgtgttgac

SEQ ID NO: 520349 - DNA, 15 bp, Homo sapiens
gttttaccgtgttga

SEQ ID NO: 520350 - DNA, 15 bp, Homo sapiens
ggttttaccgtgttg

SEQ ID NO: 520351 - DNA, 15 bp, Homo sapiens
gggttttaccgtgtt

SEQ ID NO: 520352 - DNA, 15 bp, Homo sapiens
ggggttttaccgtgt

SEQ ID NO: 520353 - DNA, 15 bp, Homo sapiens
cggggttttaccgtg

SEQ ID NO: 520354 - DNA, 15 bp, Homo sapiens
acggggttttaccgt

SEQ ID NO: 520355 - DNA, 15 bp, Homo sapiens
gacggggttttaccg

SEQ ID NO: 520356 - DNA, 15 bp, Homo sapiens
agacggggttttacc

SEQ ID NO: 520357 - DNA, 15 bp, Homo sapiens
gagacggggttttac

SEQ ID NO: 520358 - DNA, 15 bp, Homo sapiens
agagacggggtttta

SEQ ID NO: 520359 - DNA, 15 bp, Homo sapiens
tagagacggggtttt

SEQ ID NO: 520360 - DNA, 15 bp, Homo sapiens
attagtagagacggg

SEQ ID NO: 520361 - DNA, 15 bp, Homo sapiens
tattagtagagacgg

SEQ ID NO: 520362 - DNA, 15 bp, Homo sapiens
gtattagtagagacg

SEQ ID NO: 520363 - DNA, 15 bp, Homo sapiens
tgtattagtagagac

SEQ ID NO: 520364 - DNA, 15 bp, Homo sapiens
gtgtattagtagaga

SEQ ID NO: 520365 - DNA, 15 bp, Homo sapiens
tgtgtattagtagag

SEQ ID NO: 520366 - DNA, 15 bp, Homo sapiens
gtgtgtattagtaga

SEQ ID NO: 520367 - DNA, 15 bp, Homo sapiens
tgtgtgtattagtag

SEQ ID NO: 520368 - DNA, 15 bp, Homo sapiens
gtgtgtgtattagta

SEQ ID NO: 520369 - DNA, 15 bp, Homo sapiens
tgtgtgtgtattagt

SEQ ID NO: 520370 - DNA, 15 bp, Homo sapiens
gtgtgtgtgtattag

SEQ ID NO: 520371 - DNA, 15 bp, Homo sapiens
tgtgtgtgtgtatta

SEQ ID NO: 520372 - DNA, 15 bp, Homo sapiens
ttgtgtgtgtgtatt

SEQ ID NO: 520373 - DNA, 15 bp, Homo sapiens
tttgtgtgtgtgtat

SEQ ID NO: 520374 - DNA, 15 bp, Homo sapiens
ttttgtgtgtgtgta

SEQ ID NO: 520375 - DNA, 15 bp, Homo sapiens
tttttgtgtgtgtgt

SEQ ID NO: 520376 - DNA, 15 bp, Homo sapiens
ttttttgtgtgtgtg

SEQ ID NO: 520377 - DNA, 15 bp, Homo sapiens
attttttgtgtgtgt

SEQ ID NO: 520378 - DNA, 15 bp, Homo sapiens
aattttttgtgtgtg

SEQ ID NO: 520379 - DNA, 15 bp, Homo sapiens
aaattttttgtgtgt

SEQ ID NO: 520380 - DNA, 15 bp, Homo sapiens
caaattttttgtgtg

SEQ ID NO: 520381 - DNA, 15 bp, Homo sapiens
acaaattttttgtgt

SEQ ID NO: 520382 - DNA, 15 bp, Homo sapiens
gacaaattttttgtg

SEQ ID NO: 520383 - DNA, 15 bp, Homo sapiens
cgacaaattttttgt

SEQ ID NO: 520384 - DNA, 15 bp, Homo sapiens
ccgacaaattttttg

SEQ ID NO: 520385 - DNA, 15 bp, Homo sapiens
cccgacaaatttttt

SEQ ID NO: 520386 - DNA, 15 bp, Homo sapiens
gcccgacaaattttt

SEQ ID NO: 520387 - DNA, 15 bp, Homo sapiens
cgcccgacaaatttt

SEQ ID NO: 520388 - DNA, 15 bp, Homo sapiens
acgcccgacaaattt

SEQ ID NO: 520389 - DNA, 15 bp, Homo sapiens
cacgcccgacaaatt

SEQ ID NO: 520390 - DNA, 15 bp, Homo sapiens
ccacgcccgacaaat

SEQ ID NO: 520391 - DNA, 15 bp, Homo sapiens
accacgcccgacaaa

SEQ ID NO: 520392 - DNA, 15 bp, Homo sapiens
caccacgcccgacaa

SEQ ID NO: 520393 - DNA, 15 bp, Homo sapiens
ccaccacgcccgaca

SEQ ID NO: 520394 - DNA, 15 bp, Homo sapiens
gccaccacgcccgac

SEQ ID NO: 520395 - DNA, 15 bp, Homo sapiens
tgccaccacgcccga

SEQ ID NO: 520396 - DNA, 15 bp, Homo sapiens
gcgtgccaccacgcc

SEQ ID NO: 520397 - DNA, 15 bp, Homo sapiens
cgcgtgccaccacgc

SEQ ID NO: 520398 - DNA, 15 bp, Homo sapiens
gcgcgtgccaccacg

SEQ ID NO: 520399 - DNA, 15 bp, Homo sapiens
ggcgcgtgccaccac

SEQ ID NO: 520400 - DNA, 15 bp, Homo sapiens
aggcgcgtgccacca

SEQ ID NO: 520401 - DNA, 15 bp, Homo sapiens
caggcgcgtgccacc

SEQ ID NO: 520402 - DNA, 15 bp, Homo sapiens
acaggcgcgtgccac

SEQ ID NO: 520403 - DNA, 15 bp, Homo sapiens
tacaggcgcgtgcca

SEQ ID NO: 520404 - DNA, 15 bp, Homo sapiens
ctacaggcgcgtgcc

SEQ ID NO: 520405 - DNA, 15 bp, Homo sapiens
actacaggcgcgtgc

SEQ ID NO: 520406 - DNA, 15 bp, Homo sapiens
gactacaggcgcgtg

SEQ ID NO: 520407 - DNA, 15 bp, Homo sapiens
ggactacaggcgcgt

SEQ ID NO: 520408 - DNA, 15 bp, Homo sapiens
gggactacaggcgcg

SEQ ID NO: 520409 - DNA, 15 bp, Homo sapiens
tgggactacaggcgc

SEQ ID NO: 520410 - DNA, 15 bp, Homo sapiens
ctgggactacaggcg

SEQ ID NO: 520411 - DNA, 15 bp, Homo sapiens
aagtagctgggacta

SEQ ID NO: 520412 - DNA, 15 bp, Homo sapiens
caagtagctgggact

SEQ ID NO: 520413 - DNA, 15 bp, Homo sapiens
ccaagtagctgggac

SEQ ID NO: 520414 - DNA, 15 bp, Homo sapiens
cccaagtagctggga

SEQ ID NO: 520415 - DNA, 15 bp, Homo sapiens
tcccaagtagctggg

SEQ ID NO: 520416 - DNA, 15 bp, Homo sapiens
ctcccaagtagctgg

SEQ ID NO: 520417 - DNA, 15 bp, Homo sapiens
cctcccaagtagctg

SEQ ID NO: 520418 - DNA, 15 bp, Homo sapiens
gcctcccaagtagct

SEQ ID NO: 520419 - DNA, 15 bp, Homo sapiens
agcctcccaagtagc

SEQ ID NO: 520420 - DNA, 15 bp, Homo sapiens
tctgcctcagcctcc

SEQ ID NO: 520421 - DNA, 15 bp, Homo sapiens
ttctgcctcagcctc

SEQ ID NO: 520422 - DNA, 15 bp, Homo sapiens
attctgcctcagcct

SEQ ID NO: 520423 - DNA, 15 bp, Homo sapiens
tattctgcctcagcc

SEQ ID NO: 520424 - DNA, 15 bp, Homo sapiens
ctattctgcctcagc

SEQ ID NO: 520425 - DNA, 15 bp, Homo sapiens
gctattctgcctcag

SEQ ID NO: 520426 - DNA, 15 bp, Homo sapiens
agctattctgcctca

SEQ ID NO: 520427 - DNA, 15 bp, Homo sapiens
aagctattctgcctc

SEQ ID NO: 520428 - DNA, 15 bp, Homo sapiens
caagctattctgcct

SEQ ID NO: 520429 - DNA, 15 bp, Homo sapiens
tcaagctattctgcc

SEQ ID NO: 520430 - DNA, 15 bp, Homo sapiens
ttcaagctattctgc

SEQ ID NO: 520431 - DNA, 15 bp, Homo sapiens
gttcaagctattctg

SEQ ID NO: 520432 - DNA, 15 bp, Homo sapiens
ggttcaagctattct

SEQ ID NO: 520433 - DNA, 15 bp, Homo sapiens
aggttcaagctattc

SEQ ID NO: 520434 - DNA, 15 bp, Homo sapiens
caggttcaagctatt

SEQ ID NO: 520435 - DNA, 15 bp, Homo sapiens
ccaggttcaagctat

SEQ ID NO: 520436 - DNA, 15 bp, Homo sapiens
cccaggttcaagcta

SEQ ID NO: 520437 - DNA, 15 bp, Homo sapiens
tcccaggttcaagct

SEQ ID NO: 520438 - DNA, 15 bp, Homo sapiens
cgcaacctctgcctc

SEQ ID NO: 520439 - DNA, 15 bp, Homo sapiens
ccgcaacctctgcct

SEQ ID NO: 520440 - DNA, 15 bp, Homo sapiens
accgcaacctctgcc

SEQ ID NO: 520441 - DNA, 15 bp, Homo sapiens
gaccgcaacctctgc

SEQ ID NO: 520442 - DNA, 15 bp, Homo sapiens
tgaccgcaacctctg

SEQ ID NO: 520443 - DNA, 15 bp, Homo sapiens
ctgaccgcaacctct

SEQ ID NO: 520444 - DNA, 15 bp, Homo sapiens
gctgaccgcaacctc

SEQ ID NO: 520445 - DNA, 15 bp, Homo sapiens
ggctgaccgcaacct

SEQ ID NO: 520446 - DNA, 15 bp, Homo sapiens
cggctgaccgcaacc

SEQ ID NO: 520447 - DNA, 15 bp, Homo sapiens
tcggctgaccgcaac

SEQ ID NO: 520448 - DNA, 15 bp, Homo sapiens
ctcggctgaccgcaa

SEQ ID NO: 520449 - DNA, 15 bp, Homo sapiens
tctcggctgaccgca

SEQ ID NO: 520450 - DNA, 15 bp, Homo sapiens
atctcggctgaccgc

SEQ ID NO: 520451 - DNA, 15 bp, Homo sapiens
aatctcggctgaccg

SEQ ID NO: 520452 - DNA, 15 bp, Homo sapiens
caatctcggctgacc

SEQ ID NO: 520453 - DNA, 15 bp, Homo sapiens
gcaatctcggctgac

SEQ ID NO: 520454 - DNA, 15 bp, Homo sapiens
cgcaatctcggctga

SEQ ID NO: 520455 - DNA, 15 bp, Homo sapiens
gcgcaatctcggctg

SEQ ID NO: 520456 - DNA, 15 bp, Homo sapiens
ggcgcaatctcggct

SEQ ID NO: 520457 - DNA, 15 bp, Homo sapiens
tggcgcaatctcggc

SEQ ID NO: 520458 - DNA, 15 bp, Homo sapiens
gtggcgcaatctcgg

SEQ ID NO: 520459 - DNA, 15 bp, Homo sapiens
agtggcgcaatctcg

SEQ ID NO: 520460 - DNA, 15 bp, Homo sapiens
cagtggcgcaatctc

SEQ ID NO: 520461 - DNA, 15 bp, Homo sapiens
gcagtggcgcaatct

SEQ ID NO: 520462 - DNA, 15 bp, Homo sapiens
tgcagtggcgcaatc

SEQ ID NO: 520463 - DNA, 15 bp, Homo sapiens
gtgcagtggcgcaat

SEQ ID NO: 520464 - DNA, 15 bp, Homo sapiens
agtgcagtggcgcaa

SEQ ID NO: 520465 - DNA, 15 bp, Homo sapiens
gagtgcagtggcgca

SEQ ID NO: 520466 - DNA, 15 bp, Homo sapiens
aaggctggagtgcag

SEQ ID NO: 520467 - DNA, 15 bp, Homo sapiens
caaggctggagtgca

SEQ ID NO: 520468 - DNA, 15 bp, Homo sapiens
ccaaggctggagtgc

SEQ ID NO: 520469 - DNA, 15 bp, Homo sapiens
gccaaggctggagtg

SEQ ID NO: 520470 - DNA, 15 bp, Homo sapiens
agccaaggctggagt

SEQ ID NO: 520471 - DNA, 15 bp, Homo sapiens
tagccaaggctggag

SEQ ID NO: 520472 - DNA, 15 bp, Homo sapiens
gtagccaaggctgga

SEQ ID NO: 520473 - DNA, 15 bp, Homo sapiens
tgtagccaaggctgg

SEQ ID NO: 520474 - DNA, 15 bp, Homo sapiens
ctgtagccaaggctg

SEQ ID NO: 520475 - DNA, 15 bp, Homo sapiens
tctgtagccaaggct

SEQ ID NO: 520476 - DNA, 15 bp, Homo sapiens
ttctgtagccaaggc

SEQ ID NO: 520477 - DNA, 15 bp, Homo sapiens
gttctgtagccaagg

SEQ ID NO: 520478 - DNA, 15 bp, Homo sapiens
tgttctgtagccaag

SEQ ID NO: 520479 - DNA, 15 bp, Homo sapiens
ttgttctgtagccaa

SEQ ID NO: 520480 - DNA, 15 bp, Homo sapiens
cttgttctgtagcca

SEQ ID NO: 520481 - DNA, 15 bp, Homo sapiens
tcttgttctgtagcc

SEQ ID NO: 520482 - DNA, 15 bp, Homo sapiens
atcttgttctgtagc

SEQ ID NO: 520483 - DNA, 15 bp, Homo sapiens
aatcttgttctgtag

SEQ ID NO: 520484 - DNA, 15 bp, Homo sapiens
gaatcttgttctgta

SEQ ID NO: 520485 - DNA, 15 bp, Homo sapiens
cgaatcttgttctgt

SEQ ID NO: 520486 - DNA, 15 bp, Homo sapiens
ccgaatcttgttctg

SEQ ID NO: 520487 - DNA, 15 bp, Homo sapiens
accgaatcttgttct

SEQ ID NO: 520488 - DNA, 15 bp, Homo sapiens
gaccgaatcttgttc

SEQ ID NO: 520489 - DNA, 15 bp, Homo sapiens
cgaccgaatcttgtt

SEQ ID NO: 520490 - DNA, 15 bp, Homo sapiens
tcgaccgaatcttgt

SEQ ID NO: 520491 - DNA, 15 bp, Homo sapiens
ttcgaccgaatcttg

SEQ ID NO: 520492 - DNA, 15 bp, Homo sapiens
tttcgaccgaatctt

SEQ ID NO: 520493 - DNA, 15 bp, Homo sapiens
atttcgaccgaatct

SEQ ID NO: 520494 - DNA, 15 bp, Homo sapiens
tatttcgaccgaatc

SEQ ID NO: 520495 - DNA, 15 bp, Homo sapiens
atatttcgaccgaat

SEQ ID NO: 520496 - DNA, 15 bp, Homo sapiens
tatatttcgaccgaa

SEQ ID NO: 520497 - DNA, 15 bp, Homo sapiens
atatatttcgaccga

SEQ ID NO: 520498 - DNA, 15 bp, Homo sapiens
tatatatttcgaccg

SEQ ID NO: 520499 - DNA, 15 bp, Homo sapiens
gtatatatttcgacc

SEQ ID NO: 520500 - DNA, 15 bp, Homo sapiens
tgtatatatttcgac

SEQ ID NO: 520501 - DNA, 15 bp, Homo sapiens
atgtatatatttcga

SEQ ID NO: 520502 - DNA, 15 bp, Homo sapiens
catgtatatatttcg

SEQ ID NO: 520503 - DNA, 15 bp, Homo sapiens
acatgtatatatttc

SEQ ID NO: 520504 - DNA, 15 bp, Homo sapiens
tacatgtatatattt

SEQ ID NO: 520505 - DNA, 15 bp, Homo sapiens
atacatgtatatatt

SEQ ID NO: 520506 - DNA, 15 bp, Homo sapiens
tatacatgtatatat

SEQ ID NO: 520507 - DNA, 15 bp, Homo sapiens
atatacatgtatata

SEQ ID NO: 520508 - DNA, 15 bp, Homo sapiens
aatatacatgtatat

SEQ ID NO: 520509 - DNA, 15 bp, Homo sapiens
caatatacatgtata

SEQ ID NO: 520510 - DNA, 15 bp, Homo sapiens
acaatatacatgtat

SEQ ID NO: 520511 - DNA, 15 bp, Homo sapiens
aacaatatacatgta

SEQ ID NO: 520512 - DNA, 15 bp, Homo sapiens
taacaatatacatgt

SEQ ID NO: 520513 - DNA, 15 bp, Homo sapiens
ataacaatatacatg

SEQ ID NO: 520514 - DNA, 15 bp, Homo sapiens
aataacaatatacat

SEQ ID NO: 520515 - DNA, 15 bp, Homo sapiens
taataacaatataca

SEQ ID NO: 520516 - DNA, 15 bp, Homo sapiens
ctaataacaatatac

SEQ ID NO: 520517 - DNA, 15 bp, Homo sapiens
tctaataacaatata

SEQ ID NO: 520518 - DNA, 15 bp, Homo sapiens
ccctctaataacaat

SEQ ID NO: 520519 - DNA, 15 bp, Homo sapiens
gccctctaataacaa

SEQ ID NO: 520520 - DNA, 15 bp, Homo sapiens
agccctctaataaca

SEQ ID NO: 520521 - DNA, 15 bp, Homo sapiens
tagccctctaataac

SEQ ID NO: 520522 - DNA, 15 bp, Homo sapiens
atagccctctaataa

SEQ ID NO: 520523 - DNA, 15 bp, Homo sapiens
catagccctctaata

SEQ ID NO: 520524 - DNA, 15 bp, Homo sapiens
acatagccctctaat

SEQ ID NO: 520525 - DNA, 15 bp, Homo sapiens
cacatagccctctaa

SEQ ID NO: 520526 - DNA, 15 bp, Homo sapiens
ccacatagccctcta

SEQ ID NO: 520527 - DNA, 15 bp, Homo sapiens
tccacatagccctct

SEQ ID NO: 520528 - DNA, 15 bp, Homo sapiens
ttccacatagccctc

SEQ ID NO: 520529 - DNA, 15 bp, Homo sapiens
cttccacatagccct

SEQ ID NO: 520530 - DNA, 15 bp, Homo sapiens
acttccacatagccc

SEQ ID NO: 520531 - DNA, 15 bp, Homo sapiens
tacttccacatagcc

SEQ ID NO: 520532 - DNA, 15 bp, Homo sapiens
ctacttccacatagc

SEQ ID NO: 520533 - DNA, 15 bp, Homo sapiens
gctacttccacatag

SEQ ID NO: 520534 - DNA, 15 bp, Homo sapiens
agctacttccacata

SEQ ID NO: 520535 - DNA, 15 bp, Homo sapiens
tagctacttccacat

SEQ ID NO: 520536 - DNA, 15 bp, Homo sapiens
atagctacttccaca

SEQ ID NO: 520537 - DNA, 15 bp, Homo sapiens
aatagctacttccac

SEQ ID NO: 520538 - DNA, 15 bp, Homo sapiens
taatagctacttcca

SEQ ID NO: 520539 - DNA, 15 bp, Homo sapiens
ttaatagctacttcc

SEQ ID NO: 520540 - DNA, 15 bp, Homo sapiens
tttaatagctacttc

SEQ ID NO: 520541 - DNA, 15 bp, Homo sapiens
gtttaatagctactt

SEQ ID NO: 520542 - DNA, 15 bp, Homo sapiens
tgtttaatagctact

SEQ ID NO: 520543 - DNA, 15 bp, Homo sapiens
gtgtttaatagctac

SEQ ID NO: 520544 - DNA, 15 bp, Homo sapiens
cgtgtttaatagcta

SEQ ID NO: 520545 - DNA, 15 bp, Homo sapiens
tcgtgtttaatagct

SEQ ID NO: 520546 - DNA, 15 bp, Homo sapiens
ctcgtgtttaatagc

SEQ ID NO: 520547 - DNA, 15 bp, Homo sapiens
cctcgtgtttaatag

SEQ ID NO: 520548 - DNA, 15 bp, Homo sapiens
ccctcgtgtttaata

SEQ ID NO: 520549 - DNA, 15 bp, Homo sapiens
gccctcgtgtttaat

SEQ ID NO: 520550 - DNA, 15 bp, Homo sapiens
agccctcgtgtttaa

SEQ ID NO: 520551 - DNA, 15 bp, Homo sapiens
aagccctcgtgttta

SEQ ID NO: 520552 - DNA, 15 bp, Homo sapiens
aaagccctcgtgttt

SEQ ID NO: 520553 - DNA, 15 bp, Homo sapiens
caaagccctcgtgtt

SEQ ID NO: 520554 - DNA, 15 bp, Homo sapiens
tcaaagccctcgtgt

SEQ ID NO: 520555 - DNA, 15 bp, Homo sapiens
ttcaaagccctcgtg

SEQ ID NO: 520556 - DNA, 15 bp, Homo sapiens
cttcaaagccctcgt

SEQ ID NO: 520557 - DNA, 15 bp, Homo sapiens
gcttcaaagccctcg

SEQ ID NO: 520558 - DNA, 15 bp, Homo sapiens
agcttcaaagccctc

SEQ ID NO: 520559 - DNA, 15 bp, Homo sapiens
tagcttcaaagccct

SEQ ID NO: 520560 - DNA, 15 bp, Homo sapiens
ctagcttcaaagccc

SEQ ID NO: 520561 - DNA, 15 bp, Homo sapiens
tctagcttcaaagcc

SEQ ID NO: 520562 - DNA, 15 bp, Homo sapiens
ttctagcttcaaagc

SEQ ID NO: 520563 - DNA, 15 bp, Homo sapiens
attctagcttcaaag

SEQ ID NO: 520564 - DNA, 15 bp, Homo sapiens
aattctagcttcaaa

SEQ ID NO: 520565 - DNA, 15 bp, Homo sapiens
gaattctagcttcaa

SEQ ID NO: 520566 - DNA, 15 bp, Homo sapiens
ggaattctagcttca

SEQ ID NO: 520567 - DNA, 15 bp, Homo sapiens
tggaattctagcttc

SEQ ID NO: 520568 - DNA, 15 bp, Homo sapiens
ttggaattctagctt

SEQ ID NO: 520569 - DNA, 15 bp, Homo sapiens
tttggaattctagct

SEQ ID NO: 520570 - DNA, 15 bp, Homo sapiens
gtttggaattctagc

SEQ ID NO: 520571 - DNA, 15 bp, Homo sapiens
ggtttggaattctag

SEQ ID NO: 520572 - DNA, 15 bp, Homo sapiens
gggtttggaattcta

SEQ ID NO: 520573 - DNA, 15 bp, Homo sapiens
agggtttggaattct

SEQ ID NO: 520574 - DNA, 15 bp, Homo sapiens
aagggtttggaattc

SEQ ID NO: 520575 - DNA, 15 bp, Homo sapiens
gaagggtttggaatt

SEQ ID NO: 520576 - DNA, 15 bp, Homo sapiens
agaagggtttggaat

SEQ ID NO: 520577 - DNA, 15 bp, Homo sapiens
cagaagggtttggaa

SEQ ID NO: 520578 - DNA, 15 bp, Homo sapiens
gcagaagggtttgga

SEQ ID NO: 520579 - DNA, 15 bp, Homo sapiens
tgcagaagggtttgg

SEQ ID NO: 520580 - DNA, 15 bp, Homo sapiens
ttgcagaagggtttg

SEQ ID NO: 520581 - DNA, 15 bp, Homo sapiens
tttgcagaagggttt

SEQ ID NO: 520582 - DNA, 15 bp, Homo sapiens
ctttgcagaagggtt

SEQ ID NO: 520583 - DNA, 15 bp, Homo sapiens
cctttgcagaagggt

SEQ ID NO: 520584 - DNA, 15 bp, Homo sapiens
acctttgcagaaggg

SEQ ID NO: 520585 - DNA, 15 bp, Homo sapiens
cacctttgcagaagg

SEQ ID NO: 520586 - DNA, 15 bp, Homo sapiens
acacctttgcagaag

SEQ ID NO: 520587 - DNA, 15 bp, Homo sapiens
cacacctttgcagaa

SEQ ID NO: 520588 - DNA, 15 bp, Homo sapiens
gcacacctttgcaga

SEQ ID NO: 520589 - DNA, 15 bp, Homo sapiens
agcacacctttgcag

SEQ ID NO: 520590 - DNA, 15 bp, Homo sapiens
gagcacacctttgca

SEQ ID NO: 520591 - DNA, 15 bp, Homo sapiens
agagcacacctttgc

SEQ ID NO: 520592 - DNA, 15 bp, Homo sapiens
gagagcacacctttg

SEQ ID NO: 520593 - DNA, 15 bp, Homo sapiens
tgagagcacaccttt

SEQ ID NO: 520594 - DNA, 15 bp, Homo sapiens
ctgagagcacacctt

SEQ ID NO: 520595 - DNA, 15 bp, Homo sapiens
actgagagcacacct

SEQ ID NO: 520596 - DNA, 15 bp, Homo sapiens
aactgagagcacacc

SEQ ID NO: 520597 - DNA, 15 bp, Homo sapiens
taactgagagcacac

SEQ ID NO: 520598 - DNA, 15 bp, Homo sapiens
ttaactgagagcaca

SEQ ID NO: 520599 - DNA, 15 bp, Homo sapiens
gttaactgagagcac

SEQ ID NO: 520600 - DNA, 15 bp, Homo sapiens
tgttaactgagagca

SEQ ID NO: 520601 - DNA, 15 bp, Homo sapiens
atgttaactgagagc

SEQ ID NO: 520602 - DNA, 15 bp, Homo sapiens
gatgttaactgagag

SEQ ID NO: 520603 - DNA, 15 bp, Homo sapiens
ggatgttaactgaga

SEQ ID NO: 520604 - DNA, 15 bp, Homo sapiens
aggatgttaactgag

SEQ ID NO: 520605 - DNA, 15 bp, Homo sapiens
aaggatgttaactga

SEQ ID NO: 520606 - DNA, 15 bp, Homo sapiens
aaaggatgttaactg

SEQ ID NO: 520607 - DNA, 15 bp, Homo sapiens
taaaggatgttaact

SEQ ID NO: 520608 - DNA, 15 bp, Homo sapiens
ataaaggatgttaac

SEQ ID NO: 520609 - DNA, 15 bp, Homo sapiens
gataaaggatgttaa

SEQ ID NO: 520610 - DNA, 15 bp, Homo sapiens
agataaaggatgtta

SEQ ID NO: 520611 - DNA, 15 bp, Homo sapiens
cagataaaggatgtt

SEQ ID NO: 520612 - DNA, 15 bp, Homo sapiens
acagataaaggatgt

SEQ ID NO: 520613 - DNA, 15 bp, Homo sapiens
tacagataaaggatg

SEQ ID NO: 520614 - DNA, 15 bp, Homo sapiens
ttacagataaaggat

SEQ ID NO: 520615 - DNA, 15 bp, Homo sapiens
cttacagataaagga

SEQ ID NO: 520616 - DNA, 15 bp, Homo sapiens
tcttacagataaagg

SEQ ID NO: 520617 - DNA, 15 bp, Homo sapiens
ctcttacagataaag

SEQ ID NO: 520618 - DNA, 15 bp, Homo sapiens
cctcttacagataaa

SEQ ID NO: 520619 - DNA, 15 bp, Homo sapiens
ccctcttacagataa

SEQ ID NO: 520620 - DNA, 15 bp, Homo sapiens
tccctcttacagata

SEQ ID NO: 520621 - DNA, 15 bp, Homo sapiens
ttccctcttacagat

SEQ ID NO: 520622 - DNA, 15 bp, Homo sapiens
tttccctcttacaga

SEQ ID NO: 520623 - DNA, 15 bp, Homo sapiens
atttccctcttacag

SEQ ID NO: 520624 - DNA, 15 bp, Homo sapiens
gatttccctcttaca

SEQ ID NO: 520625 - DNA, 15 bp, Homo sapiens
tgatttccctcttac

SEQ ID NO: 520626 - DNA, 15 bp, Homo sapiens
ttgatttccctctta

SEQ ID NO: 520627 - DNA, 15 bp, Homo sapiens
tttgatttccctctt

SEQ ID NO: 520628 - DNA, 15 bp, Homo sapiens
ttttgatttccctct

SEQ ID NO: 520629 - DNA, 15 bp, Homo sapiens
attttgatttccctc

SEQ ID NO: 520630 - DNA, 15 bp, Homo sapiens
aattttgatttccct

SEQ ID NO: 520631 - DNA, 15 bp, Homo sapiens
taattttgatttccc

SEQ ID NO: 520632 - DNA, 15 bp, Homo sapiens
ataattttgatttcc

SEQ ID NO: 520633 - DNA, 15 bp, Homo sapiens
aataattttgatttc

SEQ ID NO: 520634 - DNA, 15 bp, Homo sapiens
aaataattttgattt

SEQ ID NO: 520635 - DNA, 15 bp, Homo sapiens
caaataattttgatt

SEQ ID NO: 520636 - DNA, 15 bp, Homo sapiens
tcaaataattttgat

SEQ ID NO: 520637 - DNA, 15 bp, Homo sapiens
atcaaataattttga

SEQ ID NO: 520638 - DNA, 15 bp, Homo sapiens
tatcaaataattttg

SEQ ID NO: 520639 - DNA, 15 bp, Homo sapiens
ttatcaaataatttt

SEQ ID NO: 520640 - DNA, 15 bp, Homo sapiens
attatcaaataattt

SEQ ID NO: 520641 - DNA, 15 bp, Homo sapiens
cattatcaaataatt

SEQ ID NO: 520642 - DNA, 15 bp, Homo sapiens
acattatcaaataat

SEQ ID NO: 520643 - DNA, 15 bp, Homo sapiens
gacattatcaaataa

SEQ ID NO: 520644 - DNA, 15 bp, Homo sapiens
agacattatcaaata

SEQ ID NO: 520645 - DNA, 15 bp, Homo sapiens
aagacattatcaaat

SEQ ID NO: 520646 - DNA, 15 bp, Homo sapiens
caagacattatcaaa

SEQ ID NO: 520647 - DNA, 15 bp, Homo sapiens
tcaagacattatcaa

SEQ ID NO: 520648 - DNA, 15 bp, Homo sapiens
ctcaagacattatca

SEQ ID NO: 520649 - DNA, 15 bp, Homo sapiens
cctcaagacattatc

SEQ ID NO: 520650 - DNA, 15 bp, Homo sapiens
tcctcaagacattat

SEQ ID NO: 520651 - DNA, 15 bp, Homo sapiens
ctcctcaagacatta

SEQ ID NO: 520652 - DNA, 15 bp, Homo sapiens
actcctcaagacatt

SEQ ID NO: 520653 - DNA, 15 bp, Homo sapiens
tactcctcaagacat

SEQ ID NO: 520654 - DNA, 15 bp, Homo sapiens
ttactcctcaagaca

SEQ ID NO: 520655 - DNA, 15 bp, Homo sapiens
tttactcctcaagac

SEQ ID NO: 520656 - DNA, 15 bp, Homo sapiens
atttactcctcaaga

SEQ ID NO: 520657 - DNA, 15 bp, Homo sapiens
catttactcctcaag

SEQ ID NO: 520658 - DNA, 15 bp, Homo sapiens
tcatttactcctcaa

SEQ ID NO: 520659 - DNA, 15 bp, Homo sapiens
ttcatttactcctca

SEQ ID NO: 520660 - DNA, 15 bp, Homo sapiens
cttcatttactcctc

SEQ ID NO: 520661 - DNA, 15 bp, Homo sapiens
gcttcatttactcct

SEQ ID NO: 520662 - DNA, 15 bp, Homo sapiens
tgcttcatttactcc

SEQ ID NO: 520663 - DNA, 15 bp, Homo sapiens
ttgcttcatttactc

SEQ ID NO: 520664 - DNA, 15 bp, Homo sapiens
attgcttcatttact

SEQ ID NO: 520665 - DNA, 15 bp, Homo sapiens
cattgcttcatttac

SEQ ID NO: 520666 - DNA, 15 bp, Homo sapiens
gcattgcttcattta

SEQ ID NO: 520667 - DNA, 15 bp, Homo sapiens
tgcattgcttcattt

SEQ ID NO: 520668 - DNA, 15 bp, Homo sapiens
atgcattgcttcatt

SEQ ID NO: 520669 - DNA, 15 bp, Homo sapiens
tatgcattgcttcat

SEQ ID NO: 520670 - DNA, 15 bp, Homo sapiens
atatgcattgcttca

SEQ ID NO: 520671 - DNA, 15 bp, Homo sapiens
tatatgcattgcttc

SEQ ID NO: 520672 - DNA, 15 bp, Homo sapiens
ttatatgcattgctt

SEQ ID NO: 520673 - DNA, 15 bp, Homo sapiens
tttatatgcattgct

SEQ ID NO: 520674 - DNA, 15 bp, Homo sapiens
gtttatatgcattgc

SEQ ID NO: 520675 - DNA, 15 bp, Homo sapiens
agtttatatgcattg

SEQ ID NO: 520676 - DNA, 15 bp, Homo sapiens
cagtttatatgcatt

SEQ ID NO: 520677 - DNA, 15 bp, Homo sapiens
acagtttatatgcat

SEQ ID NO: 520678 - DNA, 15 bp, Homo sapiens
aacagtttatatgca

SEQ ID NO: 520679 - DNA, 15 bp, Homo sapiens
aaacagtttatatgc

SEQ ID NO: 520680 - DNA, 15 bp, Homo sapiens
taaacagtttatatg

SEQ ID NO: 520681 - DNA, 15 bp, Homo sapiens
ctaaacagtttatat

SEQ ID NO: 520682 - DNA, 15 bp, Homo sapiens
gctaaacagtttata

SEQ ID NO: 520683 - DNA, 15 bp, Homo sapiens
ggctaaacagtttat

SEQ ID NO: 520684 - DNA, 15 bp, Homo sapiens
gggctaaacagttta

SEQ ID NO: 520685 - DNA, 15 bp, Homo sapiens
tgggctaaacagttt

SEQ ID NO: 520686 - DNA, 15 bp, Homo sapiens
ctgggctaaacagtt

SEQ ID NO: 520687 - DNA, 15 bp, Homo sapiens
tctgggctaaacagt

SEQ ID NO: 520688 - DNA, 15 bp, Homo sapiens
gtctgggctaaacag

SEQ ID NO: 520689 - DNA, 15 bp, Homo sapiens
ggtctgggctaaaca

SEQ ID NO: 520690 - DNA, 15 bp, Homo sapiens
cggtctgggctaaac

SEQ ID NO: 520691 - DNA, 15 bp, Homo sapiens
ccggtctgggctaaa

SEQ ID NO: 520692 - DNA, 15 bp, Homo sapiens
accggtctgggctaa

SEQ ID NO: 520693 - DNA, 15 bp, Homo sapiens
gaccggtctgggcta

SEQ ID NO: 520694 - DNA, 15 bp, Homo sapiens
agaccggtctgggct

SEQ ID NO: 520695 - DNA, 15 bp, Homo sapiens
cagaccggtctgggc

SEQ ID NO: 520696 - DNA, 15 bp, Homo sapiens
tcagaccggtctggg

SEQ ID NO: 520697 - DNA, 15 bp, Homo sapiens
ttcagaccggtctgg

SEQ ID NO: 520698 - DNA, 15 bp, Homo sapiens
tttcagaccggtctg

SEQ ID NO: 520699 - DNA, 15 bp, Homo sapiens
ttttcagaccggtct

SEQ ID NO: 520700 - DNA, 15 bp, Homo sapiens
attttcagaccggtc

SEQ ID NO: 520701 - DNA, 15 bp, Homo sapiens
tattttcagaccggt

SEQ ID NO: 520702 - DNA, 15 bp, Homo sapiens
gtattttcagaccgg

SEQ ID NO: 520703 - DNA, 15 bp, Homo sapiens
tgtattttcagaccg

SEQ ID NO: 520704 - DNA, 15 bp, Homo sapiens
atgtattttcagacc

SEQ ID NO: 520705 - DNA, 15 bp, Homo sapiens
tatgtattttcagac

SEQ ID NO: 520706 - DNA, 15 bp, Homo sapiens
atatgtattttcaga

SEQ ID NO: 520707 - DNA, 15 bp, Homo sapiens
aatatgtattttcag

SEQ ID NO: 520708 - DNA, 15 bp, Homo sapiens
caatatgtattttca

SEQ ID NO: 520709 - DNA, 15 bp, Homo sapiens
tcaatatgtattttc

SEQ ID NO: 520710 - DNA, 15 bp, Homo sapiens
ttcaatatgtatttt

SEQ ID NO: 520711 - DNA, 15 bp, Homo sapiens
attcaatatgtattt

SEQ ID NO: 520712 - DNA, 15 bp, Homo sapiens
tattcaatatgtatt

SEQ ID NO: 520713 - DNA, 15 bp, Homo sapiens
ttattcaatatgtat

SEQ ID NO: 520714 - DNA, 15 bp, Homo sapiens
attattcaatatgta

SEQ ID NO: 520715 - DNA, 15 bp, Homo sapiens
aattattcaatatgt

SEQ ID NO: 520716 - DNA, 15 bp, Homo sapiens
aaattattcaatatg

SEQ ID NO: 520717 - DNA, 15 bp, Homo sapiens
taaattattcaatat

SEQ ID NO: 520718 - DNA, 15 bp, Homo sapiens
ataaattattcaata

SEQ ID NO: 520719 - DNA, 15 bp, Homo sapiens
aataaattattcaat

SEQ ID NO: 520720 - DNA, 15 bp, Homo sapiens
gaataaattattcaa

SEQ ID NO: 520721 - DNA, 15 bp, Homo sapiens
agaataaattattca

SEQ ID NO: 520722 - DNA, 15 bp, Homo sapiens
aagaataaattattc

SEQ ID NO: 520723 - DNA, 15 bp, Homo sapiens
taagaataaattatt

SEQ ID NO: 520724 - DNA, 15 bp, Homo sapiens
ataagaataaattat

SEQ ID NO: 520725 - DNA, 15 bp, Homo sapiens
aataagaataaatta

SEQ ID NO: 520726 - DNA, 15 bp, Homo sapiens
aaataagaataaatt

SEQ ID NO: 520727 - DNA, 15 bp, Homo sapiens
aaaataagaataaat

SEQ ID NO: 520728 - DNA, 15 bp, Homo sapiens
caaaataagaataaa

SEQ ID NO: 520729 - DNA, 15 bp, Homo sapiens
gcaaaataagaataa

SEQ ID NO: 520730 - DNA, 15 bp, Homo sapiens
ggcaaaataagaata

SEQ ID NO: 520731 - DNA, 15 bp, Homo sapiens
gggcaaaataagaat

SEQ ID NO: 520732 - DNA, 15 bp, Homo sapiens
tgggcaaaataagaa

SEQ ID NO: 520733 - DNA, 15 bp, Homo sapiens
atgggcaaaataaga

SEQ ID NO: 520734 - DNA, 15 bp, Homo sapiens
aatgggcaaaataag

SEQ ID NO: 520735 - DNA, 15 bp, Homo sapiens
taatgggcaaaataa

SEQ ID NO: 520736 - DNA, 15 bp, Homo sapiens
ataatgggcaaaata

SEQ ID NO: 520737 - DNA, 15 bp, Homo sapiens
tataatgggcaaaat

SEQ ID NO: 520738 - DNA, 15 bp, Homo sapiens
atataatgggcaaaa

SEQ ID NO: 520739 - DNA, 15 bp, Homo sapiens
tatataatgggcaaa

SEQ ID NO: 520740 - DNA, 15 bp, Homo sapiens
ttatataatgggcaa

SEQ ID NO: 520741 - DNA, 15 bp, Homo sapiens
attatataatgggca

SEQ ID NO: 520742 - DNA, 15 bp, Homo sapiens
tattatataatgggc

SEQ ID NO: 520743 - DNA, 15 bp, Homo sapiens
atattatataatggg

SEQ ID NO: 520744 - DNA, 15 bp, Homo sapiens
catattatataatgg

SEQ ID NO: 520745 - DNA, 15 bp, Homo sapiens
gcatattatataatg

SEQ ID NO: 520746 - DNA, 15 bp, Homo sapiens
ggcatattatataat

SEQ ID NO: 520747 - DNA, 15 bp, Homo sapiens
tggcatattatataa

SEQ ID NO: 520748 - DNA, 15 bp, Homo sapiens
ttggcatattatata

SEQ ID NO: 520749 - DNA, 15 bp, Homo sapiens
tttggcatattatat

SEQ ID NO: 520750 - DNA, 15 bp, Homo sapiens
ctttggcatattata

SEQ ID NO: 520751 - DNA, 15 bp, Homo sapiens
actttggcatattat

SEQ ID NO: 520752 - DNA, 15 bp, Homo sapiens
tactttggcatatta

SEQ ID NO: 520753 - DNA, 15 bp, Homo sapiens
ttactttggcatatt

SEQ ID NO: 520754 - DNA, 15 bp, Homo sapiens
cttactttggcatat

SEQ ID NO: 520755 - DNA, 15 bp, Homo sapiens
acttactttggcata

SEQ ID NO: 520756 - DNA, 15 bp, Homo sapiens
cacttactttggcat

SEQ ID NO: 520757 - DNA, 15 bp, Homo sapiens
tcacttactttggca

SEQ ID NO: 520758 - DNA, 15 bp, Homo sapiens
atcacttactttggc

SEQ ID NO: 520759 - DNA, 15 bp, Homo sapiens
aatcacttactttgg

SEQ ID NO: 520760 - DNA, 15 bp, Homo sapiens
taatcacttactttg

SEQ ID NO: 520761 - DNA, 15 bp, Homo sapiens
gtaatcacttacttt

SEQ ID NO: 520762 - DNA, 15 bp, Homo sapiens
cgtaatcacttactt

SEQ ID NO: 520763 - DNA, 15 bp, Homo sapiens
ccgtaatcacttact

SEQ ID NO: 520764 - DNA, 15 bp, Homo sapiens
accgtaatcacttac

SEQ ID NO: 520765 - DNA, 15 bp, Homo sapiens
caccgtaatcactta

SEQ ID NO: 520766 - DNA, 15 bp, Homo sapiens
acaccgtaatcactt

SEQ ID NO: 520767 - DNA, 15 bp, Homo sapiens
cacaccgtaatcact

SEQ ID NO: 520768 - DNA, 15 bp, Homo sapiens
acacaccgtaatcac

SEQ ID NO: 520769 - DNA, 15 bp, Homo sapiens
aacacaccgtaatca

SEQ ID NO: 520770 - DNA, 15 bp, Homo sapiens
aaacacaccgtaatc

SEQ ID NO: 520771 - DNA, 15 bp, Homo sapiens
aaaacacaccgtaat

SEQ ID NO: 520772 - DNA, 15 bp, Homo sapiens
gaaaacacaccgtaa

SEQ ID NO: 520773 - DNA, 15 bp, Homo sapiens
ggaaaacacaccgta

SEQ ID NO: 520774 - DNA, 15 bp, Homo sapiens
gggaaaacacaccgt

SEQ ID NO: 520775 - DNA, 15 bp, Homo sapiens
ggggaaaacacaccg

SEQ ID NO: 520776 - DNA, 15 bp, Homo sapiens
cggggaaaacacacc

SEQ ID NO: 520777 - DNA, 15 bp, Homo sapiens
tcggggaaaacacac

SEQ ID NO: 520778 - DNA, 15 bp, Homo sapiens
gtcggggaaaacaca

SEQ ID NO: 520779 - DNA, 15 bp, Homo sapiens
agtcggggaaaacac

SEQ ID NO: 520780 - DNA, 15 bp, Homo sapiens
tagtcggggaaaaca

SEQ ID NO: 520781 - DNA, 15 bp, Homo sapiens
atagtcggggaaaac

SEQ ID NO: 520782 - DNA, 15 bp, Homo sapiens
catagtcggggaaaa

SEQ ID NO: 520783 - DNA, 15 bp, Homo sapiens
acatagtcggggaaa

SEQ ID NO: 520784 - DNA, 15 bp, Homo sapiens
aacatagtcggggaa

SEQ ID NO: 520785 - DNA, 15 bp, Homo sapiens
caacatagtcgggga

SEQ ID NO: 520786 - DNA, 15 bp, Homo sapiens
gcaacatagtcgggg

SEQ ID NO: 520787 - DNA, 15 bp, Homo sapiens
ggcaacatagtcggg

SEQ ID NO: 520788 - DNA, 15 bp, Homo sapiens
aggcaacatagtcgg

SEQ ID NO: 520789 - DNA, 15 bp, Homo sapiens
taggcaacatagtcg

SEQ ID NO: 520790 - DNA, 15 bp, Homo sapiens
ctaggcaacatagtc

SEQ ID NO: 520791 - DNA, 15 bp, Homo sapiens
cctaggcaacatagt

SEQ ID NO: 520792 - DNA, 15 bp, Homo sapiens
gcctaggcaacatag

SEQ ID NO: 520793 - DNA, 15 bp, Homo sapiens
agcctaggcaacata

SEQ ID NO: 520794 - DNA, 15 bp, Homo sapiens
cagcctaggcaacat

SEQ ID NO: 520795 - DNA, 15 bp, Homo sapiens
ccagcctaggcaaca

SEQ ID NO: 520796 - DNA, 15 bp, Homo sapiens
gccagcctaggcaac

SEQ ID NO: 520797 - DNA, 15 bp, Homo sapiens
ggccagcctaggcaa

SEQ ID NO: 520798 - DNA, 15 bp, Homo sapiens
aggccagcctaggca

SEQ ID NO: 520799 - DNA, 15 bp, Homo sapiens
gaggccagcctaggc

SEQ ID NO: 520800 - DNA, 15 bp, Homo sapiens
cgaggccagcctagg

SEQ ID NO: 520801 - DNA, 15 bp, Homo sapiens
tcgaggccagcctag

SEQ ID NO: 520802 - DNA, 15 bp, Homo sapiens
ttcgaggccagccta

SEQ ID NO: 520803 - DNA, 15 bp, Homo sapiens
gttcgaggccagcct

SEQ ID NO: 520804 - DNA, 15 bp, Homo sapiens
agttcgaggccagcc

SEQ ID NO: 520805 - DNA, 15 bp, Homo sapiens
tagttcgaggccagc

SEQ ID NO: 520806 - DNA, 15 bp, Homo sapiens
gtagttcgaggccag

SEQ ID NO: 520807 - DNA, 15 bp, Homo sapiens
agtagttcgaggcca

SEQ ID NO: 520808 - DNA, 15 bp, Homo sapiens
aagtagttcgaggcc

SEQ ID NO: 520809 - DNA, 15 bp, Homo sapiens
caagtagttcgaggc

SEQ ID NO: 520810 - DNA, 15 bp, Homo sapiens
ccaagtagttcgagg

SEQ ID NO: 520811 - DNA, 15 bp, Homo sapiens
tccaagtagttcgag

SEQ ID NO: 520812 - DNA, 15 bp, Homo sapiens
gtccaagtagttcga

SEQ ID NO: 520813 - DNA, 15 bp, Homo sapiens
cgtccaagtagttcg

SEQ ID NO: 520814 - DNA, 15 bp, Homo sapiens
tcgtccaagtagttc

SEQ ID NO: 520815 - DNA, 15 bp, Homo sapiens
ttcgtccaagtagtt

SEQ ID NO: 520816 - DNA, 15 bp, Homo sapiens
cttcgtccaagtagt

SEQ ID NO: 520817 - DNA, 15 bp, Homo sapiens
gcttcgtccaagtag

SEQ ID NO: 520818 - DNA, 15 bp, Homo sapiens
cgcttcgtccaagta

SEQ ID NO: 520819 - DNA, 15 bp, Homo sapiens
tcgcttcgtccaagt

SEQ ID NO: 520820 - DNA, 15 bp, Homo sapiens
atcgcttcgtccaag

SEQ ID NO: 520821 - DNA, 15 bp, Homo sapiens
gatcgcttcgtccaa

SEQ ID NO: 520822 - DNA, 15 bp, Homo sapiens
ggatcgcttcgtcca

SEQ ID NO: 520823 - DNA, 15 bp, Homo sapiens
aggatcgcttcgtcc

SEQ ID NO: 520824 - DNA, 15 bp, Homo sapiens
gaggatcgcttcgtc

SEQ ID NO: 520825 - DNA, 15 bp, Homo sapiens
tgaggatcgcttcgt

SEQ ID NO: 520826 - DNA, 15 bp, Homo sapiens
ctgaggatcgcttcg

SEQ ID NO: 520827 - DNA, 15 bp, Homo sapiens
gctgaggatcgcttc

SEQ ID NO: 520828 - DNA, 15 bp, Homo sapiens
ggctgaggatcgctt

SEQ ID NO: 520829 - DNA, 15 bp, Homo sapiens
aggctgaggatcgct

SEQ ID NO: 520830 - DNA, 15 bp, Homo sapiens
gaggctgaggatcgc

SEQ ID NO: 520831 - DNA, 15 bp, Homo sapiens
ggaggctgaggatcg

SEQ ID NO: 520832 - DNA, 15 bp, Homo sapiens
aggaggctgaggatc

SEQ ID NO: 520833 - DNA, 15 bp, Homo sapiens
caggaggctgaggat

SEQ ID NO: 520834 - DNA, 15 bp, Homo sapiens
tcaggaggctgagga

SEQ ID NO: 520835 - DNA, 15 bp, Homo sapiens
ttactcaggaggctg

SEQ ID NO: 520836 - DNA, 15 bp, Homo sapiens
gttactcaggaggct

SEQ ID NO: 520837 - DNA, 15 bp, Homo sapiens
agttactcaggaggc

SEQ ID NO: 520838 - DNA, 15 bp, Homo sapiens
cagttactcaggagg

SEQ ID NO: 520839 - DNA, 15 bp, Homo sapiens
ccagttactcaggag

SEQ ID NO: 520840 - DNA, 15 bp, Homo sapiens
cccagttactcagga

SEQ ID NO: 520841 - DNA, 15 bp, Homo sapiens
tcccagttactcagg

SEQ ID NO: 520842 - DNA, 15 bp, Homo sapiens
gtcccagttactcag

SEQ ID NO: 520843 - DNA, 15 bp, Homo sapiens
ggtcccagttactca

SEQ ID NO: 520844 - DNA, 15 bp, Homo sapiens
tggtcccagttactc

SEQ ID NO: 520845 - DNA, 15 bp, Homo sapiens
gtggtcccagttact

SEQ ID NO: 520846 - DNA, 15 bp, Homo sapiens
tgtggtcccagttac

SEQ ID NO: 520847 - DNA, 15 bp, Homo sapiens
ctgtggtcccagtta

SEQ ID NO: 520848 - DNA, 15 bp, Homo sapiens
cctgtggtcccagtt

SEQ ID NO: 520849 - DNA, 15 bp, Homo sapiens
gcctgtggtcccagt

SEQ ID NO: 520850 - DNA, 15 bp, Homo sapiens
ggcctgtggtcccag

SEQ ID NO: 520851 - DNA, 15 bp, Homo sapiens
cggcctgtggtccca

SEQ ID NO: 520852 - DNA, 15 bp, Homo sapiens
ccggcctgtggtccc

SEQ ID NO: 520853 - DNA, 15 bp, Homo sapiens
gccggcctgtggtcc

SEQ ID NO: 520854 - DNA, 15 bp, Homo sapiens
cgccggcctgtggtc

SEQ ID NO: 520855 - DNA, 15 bp, Homo sapiens
gcgccggcctgtggt

SEQ ID NO: 520856 - DNA, 15 bp, Homo sapiens
ggcgccggcctgtgg

SEQ ID NO: 520857 - DNA, 15 bp, Homo sapiens
tggcgccggcctgtg

SEQ ID NO: 520858 - DNA, 15 bp, Homo sapiens
gtggcgccggcctgt

SEQ ID NO: 520859 - DNA, 15 bp, Homo sapiens
ggtggcgccggcctg

SEQ ID NO: 520860 - DNA, 15 bp, Homo sapiens
gggtggcgccggcct

SEQ ID NO: 520861 - DNA, 15 bp, Homo sapiens
agggtggcgccggcc

SEQ ID NO: 520862 - DNA, 15 bp, Homo sapiens
tagggtggcgccggc

SEQ ID NO: 520863 - DNA, 15 bp, Homo sapiens
ctagggtggcgccgg

SEQ ID NO: 520864 - DNA, 15 bp, Homo sapiens
gctagggtggcgccg

SEQ ID NO: 520865 - DNA, 15 bp, Homo sapiens
agctagggtggcgcc

SEQ ID NO: 520866 - DNA, 15 bp, Homo sapiens
aagctagggtggcgc

SEQ ID NO: 520867 - DNA, 15 bp, Homo sapiens
aaagctagggtggcg

SEQ ID NO: 520868 - DNA, 15 bp, Homo sapiens
taaagctagggtggc

SEQ ID NO: 520869 - DNA, 15 bp, Homo sapiens
ttaaagctagggtgg

SEQ ID NO: 520870 - DNA, 15 bp, Homo sapiens
attaaagctagggtg

SEQ ID NO: 520871 - DNA, 15 bp, Homo sapiens
aattaaagctagggt

SEQ ID NO: 520872 - DNA, 15 bp, Homo sapiens
taattaaagctaggg

SEQ ID NO: 520873 - DNA, 15 bp, Homo sapiens
ttaattaaagctagg

SEQ ID NO: 520874 - DNA, 15 bp, Homo sapiens
cttaattaaagctag

SEQ ID NO: 520875 - DNA, 15 bp, Homo sapiens
ccttaattaaagcta

SEQ ID NO: 520876 - DNA, 15 bp, Homo sapiens
gccttaattaaagct

SEQ ID NO: 520877 - DNA, 15 bp, Homo sapiens
ggccttaattaaagc

SEQ ID NO: 520878 - DNA, 15 bp, Homo sapiens
cggccttaattaaag

SEQ ID NO: 520879 - DNA, 15 bp, Homo sapiens
acggccttaattaaa

SEQ ID NO: 520880 - DNA, 15 bp, Homo sapiens
aacggccttaattaa

SEQ ID NO: 520881 - DNA, 15 bp, Homo sapiens
aaacggccttaatta

SEQ ID NO: 520882 - DNA, 15 bp, Homo sapiens
aaaacggccttaatt

SEQ ID NO: 520883 - DNA, 15 bp, Homo sapiens
caaaacggccttaat

SEQ ID NO: 520884 - DNA, 15 bp, Homo sapiens
acaaaacggccttaa

SEQ ID NO: 520885 - DNA, 15 bp, Homo sapiens
aacaaaacggcctta

SEQ ID NO: 520886 - DNA, 15 bp, Homo sapiens
caacaaaacggcctt

SEQ ID NO: 520887 - DNA, 15 bp, Homo sapiens
acaacaaaacggcct

SEQ ID NO: 520888 - DNA, 15 bp, Homo sapiens
aacaacaaaacggcc

SEQ ID NO: 520889 - DNA, 15 bp, Homo sapiens
caacaacaaaacggc

SEQ ID NO: 520890 - DNA, 15 bp, Homo sapiens
acaacaacaaaacgg

SEQ ID NO: 520891 - DNA, 15 bp, Homo sapiens
aacaacaacaaaacg

SEQ ID NO: 520892 - DNA, 15 bp, Homo sapiens
taacaacaacaaaac

SEQ ID NO: 520893 - DNA, 15 bp, Homo sapiens
ataacaacaacaaaa

SEQ ID NO: 520894 - DNA, 15 bp, Homo sapiens
aataacaacaacaaa

SEQ ID NO: 520895 - DNA, 15 bp, Homo sapiens
gaataacaacaacaa

SEQ ID NO: 520896 - DNA, 15 bp, Homo sapiens
ggaataacaacaaca

SEQ ID NO: 520897 - DNA, 15 bp, Homo sapiens
gggaataacaacaac

SEQ ID NO: 520898 - DNA, 15 bp, Homo sapiens
ggggaataacaacaa

SEQ ID NO: 520899 - DNA, 15 bp, Homo sapiens
aggggaataacaaca

SEQ ID NO: 520900 - DNA, 15 bp, Homo sapiens
caggggaataacaac

SEQ ID NO: 520901 - DNA, 15 bp, Homo sapiens
gcaggggaataacaa

SEQ ID NO: 520902 - DNA, 15 bp, Homo sapiens
agcaggggaataaca

SEQ ID NO: 520903 - DNA, 15 bp, Homo sapiens
gagcaggggaataac

SEQ ID NO: 520904 - DNA, 15 bp, Homo sapiens
ggagcaggggaataa

SEQ ID NO: 520905 - DNA, 15 bp, Homo sapiens
tggagcaggggaata

SEQ ID NO: 520906 - DNA, 15 bp, Homo sapiens
gtggagcaggggaat

SEQ ID NO: 520907 - DNA, 15 bp, Homo sapiens
tgtggagcaggggaa

SEQ ID NO: 520908 - DNA, 15 bp, Homo sapiens
gtgtggagcagggga

SEQ ID NO: 520909 - DNA, 15 bp, Homo sapiens
tgtgtggagcagggg

SEQ ID NO: 520910 - DNA, 15 bp, Homo sapiens
ttgtgtggagcaggg

SEQ ID NO: 520911 - DNA, 15 bp, Homo sapiens
cttgtgtggagcagg

SEQ ID NO: 520912 - DNA, 15 bp, Homo sapiens
ccttgtgtggagcag

SEQ ID NO: 520913 - DNA, 15 bp, Homo sapiens
cccttgtgtggagca

SEQ ID NO: 520914 - DNA, 15 bp, Homo sapiens
ccccttgtgtggagc

SEQ ID NO: 520915 - DNA, 15 bp, Homo sapiens
gccccttgtgtggag

SEQ ID NO: 520916 - DNA, 15 bp, Homo sapiens
cgccccttgtgtgga

SEQ ID NO: 520917 - DNA, 15 bp, Homo sapiens
gcgccccttgtgtgg

SEQ ID NO: 520918 - DNA, 15 bp, Homo sapiens
agcgccccttgtgtg

SEQ ID NO: 520919 - DNA, 15 bp, Homo sapiens
cagcgccccttgtgt

SEQ ID NO: 520920 - DNA, 15 bp, Homo sapiens
gcagcgccccttgtg

SEQ ID NO: 520921 - DNA, 15 bp, Homo sapiens
ggcagcgccccttgt

SEQ ID NO: 520922 - DNA, 15 bp, Homo sapiens
cggcagcgccccttg

SEQ ID NO: 520923 - DNA, 15 bp, Homo sapiens
gcggcagcgcccctt

SEQ ID NO: 520924 - DNA, 15 bp, Homo sapiens
agcggcagcgcccct

SEQ ID NO: 520925 - DNA, 15 bp, Homo sapiens
gagcggcagcgcccc

SEQ ID NO: 520926 - DNA, 15 bp, Homo sapiens
ggagcggcagcgccc

SEQ ID NO: 520927 - DNA, 15 bp, Homo sapiens
tggagcggcagcgcc

SEQ ID NO: 520928 - DNA, 15 bp, Homo sapiens
ttggagcggcagcgc

SEQ ID NO: 520929 - DNA, 15 bp, Homo sapiens
cttggagcggcagcg

SEQ ID NO: 520930 - DNA, 15 bp, Homo sapiens
ccttggagcggcagc

SEQ ID NO: 520931 - DNA, 15 bp, Homo sapiens
gccttggagcggcag

SEQ ID NO: 520932 - DNA, 15 bp, Homo sapiens
agccttggagcggca

SEQ ID NO: 520933 - DNA, 15 bp, Homo sapiens
cagccttggagcggc

SEQ ID NO: 520934 - DNA, 15 bp, Homo sapiens
gcagccttggagcgg

SEQ ID NO: 520935 - DNA, 15 bp, Homo sapiens
ggcagccttggagcg

SEQ ID NO: 520936 - DNA, 15 bp, Homo sapiens
tggcagccttggagc

SEQ ID NO: 520937 - DNA, 15 bp, Homo sapiens
ctggcagccttggag

SEQ ID NO: 520938 - DNA, 15 bp, Homo sapiens
cctggcagccttgga

SEQ ID NO: 520939 - DNA, 15 bp, Homo sapiens
ccctggcagccttgg

SEQ ID NO: 520940 - DNA, 15 bp, Homo sapiens
gccctggcagccttg

SEQ ID NO: 520941 - DNA, 15 bp, Homo sapiens
cgccctggcagcctt

SEQ ID NO: 520942 - DNA, 15 bp, Homo sapiens
ccgccctggcagcct

SEQ ID NO: 520943 - DNA, 15 bp, Homo sapiens
cccgccctggcagcc

SEQ ID NO: 520944 - DNA, 15 bp, Homo sapiens
tcccgccctggcagc

SEQ ID NO: 520945 - DNA, 15 bp, Homo sapiens
ctcccgccctggcag

SEQ ID NO: 520946 - DNA, 15 bp, Homo sapiens
actcccgccctggca

SEQ ID NO: 520947 - DNA, 15 bp, Homo sapiens
gactcccgccctggc

SEQ ID NO: 520948 - DNA, 15 bp, Homo sapiens
tgactcccgccctgg

SEQ ID NO: 520949 - DNA, 15 bp, Homo sapiens
ctgactcccgccctg

SEQ ID NO: 520950 - DNA, 15 bp, Homo sapiens
cctgactcccgccct

SEQ ID NO: 520951 - DNA, 15 bp, Homo sapiens
tcctgactcccgccc

SEQ ID NO: 520952 - DNA, 15 bp, Homo sapiens
atcctgactcccgcc

SEQ ID NO: 520953 - DNA, 15 bp, Homo sapiens
catcctgactcccgc

SEQ ID NO: 520954 - DNA, 15 bp, Homo sapiens
ccatcctgactcccg

SEQ ID NO: 520955 - DNA, 15 bp, Homo sapiens
gccatcctgactccc

SEQ ID NO: 520956 - DNA, 15 bp, Homo sapiens
cgccatcctgactcc

SEQ ID NO: 520957 - DNA, 15 bp, Homo sapiens
ccgccatcctgactc

SEQ ID NO: 520958 - DNA, 15 bp, Homo sapiens
tccgccatcctgact

SEQ ID NO: 520959 - DNA, 15 bp, Homo sapiens
ttccgccatcctgac

SEQ ID NO: 520960 - DNA, 15 bp, Homo sapiens
cttccgccatcctga

SEQ ID NO: 520961 - DNA, 15 bp, Homo sapiens
acttccgccatcctg

SEQ ID NO: 520962 - DNA, 15 bp, Homo sapiens
gacttccgccatcct

SEQ ID NO: 520963 - DNA, 15 bp, Homo sapiens
agacttccgccatcc

SEQ ID NO: 520964 - DNA, 15 bp, Homo sapiens
cagacttccgccatc

SEQ ID NO: 520965 - DNA, 15 bp, Homo sapiens
acagacttccgccat

SEQ ID NO: 520966 - DNA, 15 bp, Homo sapiens
gacagacttccgcca

SEQ ID NO: 520967 - DNA, 15 bp, Homo sapiens
agacagacttccgcc

SEQ ID NO: 520968 - DNA, 15 bp, Homo sapiens
tagacagacttccgc

SEQ ID NO: 520969 - DNA, 15 bp, Homo sapiens
ctagacagacttccg

SEQ ID NO: 520970 - DNA, 15 bp, Homo sapiens
gctagacagacttcc

SEQ ID NO: 520971 - DNA, 15 bp, Homo sapiens
ggctagacagacttc

SEQ ID NO: 520972 - DNA, 15 bp, Homo sapiens
tggctagacagactt

SEQ ID NO: 520973 - DNA, 15 bp, Homo sapiens
gtggctagacagact

SEQ ID NO: 520974 - DNA, 15 bp, Homo sapiens
cgtggctagacagac

SEQ ID NO: 520975 - DNA, 15 bp, Homo sapiens
tcgtggctagacaga

SEQ ID NO: 520976 - DNA, 15 bp, Homo sapiens
gtcgtggctagacag

SEQ ID NO: 520977 - DNA, 15 bp, Homo sapiens
ggtcgtggctagaca

SEQ ID NO: 520978 - DNA, 15 bp, Homo sapiens
tggtcgtggctagac

SEQ ID NO: 520979 - DNA, 15 bp, Homo sapiens
gtggtcgtggctaga

SEQ ID NO: 520980 - DNA, 15 bp, Homo sapiens
ggtggtcgtggctag

SEQ ID NO: 520981 - DNA, 15 bp, Homo sapiens
cggtggtcgtggcta

SEQ ID NO: 520982 - DNA, 15 bp, Homo sapiens
gcggtggtcgtggct

SEQ ID NO: 520983 - DNA, 15 bp, Homo sapiens
ggcggtggtcgtggc

SEQ ID NO: 520984 - DNA, 15 bp, Homo sapiens
tggcggtggtcgtgg

SEQ ID NO: 520985 - DNA, 15 bp, Homo sapiens
atggcggtggtcgtg

SEQ ID NO: 520986 - DNA, 15 bp, Homo sapiens
gatggcggtggtcgt

SEQ ID NO: 520987 - DNA, 15 bp, Homo sapiens
tgatggcggtggtcg

SEQ ID NO: 520988 - DNA, 15 bp, Homo sapiens
atgatggcggtggtc

SEQ ID NO: 520989 - DNA, 15 bp, Homo sapiens
catgatggcggtggt

SEQ ID NO: 520990 - DNA, 15 bp, Homo sapiens
ccatgatggcggtgg

SEQ ID NO: 520991 - DNA, 15 bp, Homo sapiens
tccatgatggcggtg

SEQ ID NO: 520992 - DNA, 15 bp, Homo sapiens
ttccatgatggcggt

SEQ ID NO: 520993 - DNA, 15 bp, Homo sapiens
attccatgatggcgg

SEQ ID NO: 520994 - DNA, 15 bp, Homo sapiens
tattccatgatggcg

SEQ ID NO: 520995 - DNA, 15 bp, Homo sapiens
gtattccatgatggc

SEQ ID NO: 520996 - DNA, 15 bp, Homo sapiens
tgtattccatgatgg

SEQ ID NO: 520997 - DNA, 15 bp, Homo sapiens
ctgtattccatgatg

SEQ ID NO: 520998 - DNA, 15 bp, Homo sapiens
cctgtattccatgat

SEQ ID NO: 520999 - DNA, 15 bp, Homo sapiens
gcctgtattccatga

SEQ ID NO: 521000 - DNA, 15 bp, Homo sapiens
ggcctgtattccatg

SEQ ID NO: 521001 - DNA, 15 bp, Homo sapiens
gggcctgtattccat

SEQ ID NO: 521002 - DNA, 15 bp, Homo sapiens
tgggcctgtattcca

SEQ ID NO: 521003 - DNA, 15 bp, Homo sapiens
gtgggcctgtattcc

SEQ ID NO: 521004 - DNA, 15 bp, Homo sapiens
ggtgggcctgtattc

SEQ ID NO: 521005 - DNA, 15 bp, Homo sapiens
aggtgggcctgtatt

SEQ ID NO: 521006 - DNA, 15 bp, Homo sapiens
gaggtgggcctgtat

SEQ ID NO: 521007 - DNA, 15 bp, Homo sapiens
tgaggtgggcctgta

SEQ ID NO: 521008 - DNA, 15 bp, Homo sapiens
gtgaggtgggcctgt

SEQ ID NO: 521009 - DNA, 15 bp, Homo sapiens
ggtgaggtgggcctg

SEQ ID NO: 521010 - DNA, 15 bp, Homo sapiens
gggtgaggtgggcct

SEQ ID NO: 521011 - DNA, 15 bp, Homo sapiens
ggggtgaggtgggcc

SEQ ID NO: 521012 - DNA, 15 bp, Homo sapiens
cggggtgaggtgggc

SEQ ID NO: 521013 - DNA, 15 bp, Homo sapiens
gcggggtgaggtggg

SEQ ID NO: 521014 - DNA, 15 bp, Homo sapiens
cgcggggtgaggtgg

SEQ ID NO: 521015 - DNA, 15 bp, Homo sapiens
ccgcggggtgaggtg

SEQ ID NO: 521016 - DNA, 15 bp, Homo sapiens
cccgcggggtgaggt

SEQ ID NO: 521017 - DNA, 15 bp, Homo sapiens
acccgcggggtgagg

SEQ ID NO: 521018 - DNA, 15 bp, Homo sapiens
cacccgcggggtgag

SEQ ID NO: 521019 - DNA, 15 bp, Homo sapiens
acacccgcggggtga

SEQ ID NO: 521020 - DNA, 15 bp, Homo sapiens
tacacccgcggggtg

SEQ ID NO: 521021 - DNA, 15 bp, Homo sapiens
ctacacccgcggggt

SEQ ID NO: 521022 - DNA, 15 bp, Homo sapiens
gctacacccgcgggg

SEQ ID NO: 521023 - DNA, 15 bp, Homo sapiens
ggctacacccgcggg

SEQ ID NO: 521024 - DNA, 15 bp, Homo sapiens
cggctacacccgcgg

SEQ ID NO: 521025 - DNA, 15 bp, Homo sapiens
gcggctacacccgcg

SEQ ID NO: 521026 - DNA, 15 bp, Homo sapiens
agcggctacacccgc

SEQ ID NO: 521027 - DNA, 15 bp, Homo sapiens
aagcggctacacccg

SEQ ID NO: 521028 - DNA, 15 bp, Homo sapiens
gaagcggctacaccc

SEQ ID NO: 521029 - DNA, 15 bp, Homo sapiens
cgaagcggctacacc

SEQ ID NO: 521030 - DNA, 15 bp, Homo sapiens
acgaagcggctacac

SEQ ID NO: 521031 - DNA, 15 bp, Homo sapiens
tacgaagcggctaca

SEQ ID NO: 521032 - DNA, 15 bp, Homo sapiens
gtacgaagcggctac

SEQ ID NO: 521033 - DNA, 15 bp, Homo sapiens
agtacgaagcggcta

SEQ ID NO: 521034 - DNA, 15 bp, Homo sapiens
cagtacgaagcggct

SEQ ID NO: 521035 - DNA, 15 bp, Homo sapiens
acagtacgaagcggc

SEQ ID NO: 521036 - DNA, 15 bp, Homo sapiens
gacagtacgaagcgg

SEQ ID NO: 521037 - DNA, 15 bp, Homo sapiens
cgacagtacgaagcg

SEQ ID NO: 521038 - DNA, 15 bp, Homo sapiens
gcgacagtacgaagc

SEQ ID NO: 521039 - DNA, 15 bp, Homo sapiens
agcgacagtacgaag

SEQ ID NO: 521040 - DNA, 15 bp, Homo sapiens
aagcgacagtacgaa

SEQ ID NO: 521041 - DNA, 15 bp, Homo sapiens
taagcgacagtacga

SEQ ID NO: 521042 - DNA, 15 bp, Homo sapiens
ctaagcgacagtacg

SEQ ID NO: 521043 - DNA, 15 bp, Homo sapiens
cctaagcgacagtac

SEQ ID NO: 521044 - DNA, 15 bp, Homo sapiens
gcctaagcgacagta

SEQ ID NO: 521045 - DNA, 15 bp, Homo sapiens
ggcctaagcgacagt

SEQ ID NO: 521046 - DNA, 15 bp, Homo sapiens
cggcctaagcgacag

SEQ ID NO: 521047 - DNA, 15 bp, Homo sapiens
tcggcctaagcgaca

SEQ ID NO: 521048 - DNA, 15 bp, Homo sapiens
gtcggcctaagcgac

SEQ ID NO: 521049 - DNA, 15 bp, Homo sapiens
ggtcggcctaagcga

SEQ ID NO: 521050 - DNA, 15 bp, Homo sapiens
gggtcggcctaagcg

SEQ ID NO: 521051 - DNA, 15 bp, Homo sapiens
cgggtcggcctaagc

SEQ ID NO: 521052 - DNA, 15 bp, Homo sapiens
gcgggtcggcctaag

SEQ ID NO: 521053 - DNA, 15 bp, Homo sapiens
agcgggtcggcctaa

SEQ ID NO: 521054 - DNA, 15 bp, Homo sapiens
gagcgggtcggccta

SEQ ID NO: 521055 - DNA, 15 bp, Homo sapiens
cgagcgggtcggcct

SEQ ID NO: 521056 - DNA, 15 bp, Homo sapiens
gcgagcgggtcggcc

SEQ ID NO: 521057 - DNA, 15 bp, Homo sapiens
tgcgagcgggtcggc

SEQ ID NO: 521058 - DNA, 15 bp, Homo sapiens
ctgcgagcgggtcgg

SEQ ID NO: 521059 - DNA, 15 bp, Homo sapiens
gctgcgagcgggtcg

SEQ ID NO: 521060 - DNA, 15 bp, Homo sapiens
cgctgcgagcgggtc

SEQ ID NO: 521061 - DNA, 15 bp, Homo sapiens
tcgctgcgagcgggt

SEQ ID NO: 521062 - DNA, 15 bp, Homo sapiens
gtcgctgcgagcggg

SEQ ID NO: 521063 - DNA, 15 bp, Homo sapiens
tgtcgctgcgagcgg

SEQ ID NO: 521064 - DNA, 15 bp, Homo sapiens
ttgtcgctgcgagcg

SEQ ID NO: 521065 - DNA, 15 bp, Homo sapiens
gttgtcgctgcgagc

SEQ ID NO: 521066 - DNA, 15 bp, Homo sapiens
ggttgtcgctgcgag

SEQ ID NO: 521067 - DNA, 15 bp, Homo sapiens
tggttgtcgctgcga

SEQ ID NO: 521068 - DNA, 15 bp, Homo sapiens
ctggttgtcgctgcg

SEQ ID NO: 521069 - DNA, 15 bp, Homo sapiens
gctggttgtcgctgc

SEQ ID NO: 521070 - DNA, 15 bp, Homo sapiens
ggctggttgtcgctg

SEQ ID NO: 521071 - DNA, 15 bp, Homo sapiens
gggctggttgtcgct

SEQ ID NO: 521072 - DNA, 15 bp, Homo sapiens
agggctggttgtcgc

SEQ ID NO: 521073 - DNA, 15 bp, Homo sapiens
gagggctggttgtcg

SEQ ID NO: 521074 - DNA, 15 bp, Homo sapiens
agagggctggttgtc

SEQ ID NO: 521075 - DNA, 15 bp, Homo sapiens
tagagggctggttgt

SEQ ID NO: 521076 - DNA, 15 bp, Homo sapiens
gtagagggctggttg

SEQ ID NO: 521077 - DNA, 15 bp, Homo sapiens
ggtagagggctggtt

SEQ ID NO: 521078 - DNA, 15 bp, Homo sapiens
aggtagagggctggt

SEQ ID NO: 521079 - DNA, 15 bp, Homo sapiens
gaggtagagggctgg

SEQ ID NO: 521080 - DNA, 15 bp, Homo sapiens
agaggtagagggctg

SEQ ID NO: 521081 - DNA, 15 bp, Homo sapiens
aagaggtagagggct

SEQ ID NO: 521082 - DNA, 15 bp, Homo sapiens
aaagaggtagagggc

SEQ ID NO: 521083 - DNA, 15 bp, Homo sapiens
aaaagaggtagaggg

SEQ ID NO: 521084 - DNA, 15 bp, Homo sapiens
gaaaagaggtagagg

SEQ ID NO: 521085 - DNA, 15 bp, Homo sapiens
cgaaaagaggtagag

SEQ ID NO: 521086 - DNA, 15 bp, Homo sapiens
gcgaaaagaggtaga

SEQ ID NO: 521087 - DNA, 15 bp, Homo sapiens
agcgaaaagaggtag

SEQ ID NO: 521088 - DNA, 15 bp, Homo sapiens
gagcgaaaagaggta

SEQ ID NO: 521089 - DNA, 15 bp, Homo sapiens
agagcgaaaagaggt

SEQ ID NO: 521090 - DNA, 15 bp, Homo sapiens
gagagcgaaaagagg

SEQ ID NO: 521091 - DNA, 15 bp, Homo sapiens
ggagagcgaaaagag

SEQ ID NO: 521092 - DNA, 15 bp, Homo sapiens
gggagagcgaaaaga

SEQ ID NO: 521093 - DNA, 15 bp, Homo sapiens
agggagagcgaaaag

SEQ ID NO: 521094 - DNA, 15 bp, Homo sapiens
aagggagagcgaaaa

SEQ ID NO: 521095 - DNA, 15 bp, Homo sapiens
taagggagagcgaaa

SEQ ID NO: 521096 - DNA, 15 bp, Homo sapiens
ttaagggagagcgaa

SEQ ID NO: 521097 - DNA, 15 bp, Homo sapiens
cttaagggagagcga

SEQ ID NO: 521098 - DNA, 15 bp, Homo sapiens
acttaagggagagcg

SEQ ID NO: 521099 - DNA, 15 bp, Homo sapiens
tacttaagggagagc

SEQ ID NO: 521100 - DNA, 15 bp, Homo sapiens
ttacttaagggagag

SEQ ID NO: 521101 - DNA, 15 bp, Homo sapiens
attacttaagggaga

SEQ ID NO: 521102 - DNA, 15 bp, Homo sapiens
tattacttaagggag

SEQ ID NO: 521103 - DNA, 15 bp, Homo sapiens
ttattacttaaggga

SEQ ID NO: 521104 - DNA, 15 bp, Homo sapiens
tttattacttaaggg

SEQ ID NO: 521105 - DNA, 15 bp, Homo sapiens
gtttattacttaagg

SEQ ID NO: 521106 - DNA, 15 bp, Homo sapiens
ggtttattacttaag

SEQ ID NO: 521107 - DNA, 15 bp, Homo sapiens
cggtttattacttaa

SEQ ID NO: 521108 - DNA, 15 bp, Homo sapiens
acggtttattactta

SEQ ID NO: 521109 - DNA, 15 bp, Homo sapiens
gacggtttattactt

SEQ ID NO: 521110 - DNA, 15 bp, Homo sapiens
agacggtttattact

SEQ ID NO: 521111 - DNA, 15 bp, Homo sapiens
aagacggtttattac

SEQ ID NO: 521112 - DNA, 15 bp, Homo sapiens
aaagacggtttatta

SEQ ID NO: 521113 - DNA, 15 bp, Homo sapiens
gaaagacggtttatt

SEQ ID NO: 521114 - DNA, 15 bp, Homo sapiens
ggaaagacggtttat

SEQ ID NO: 521115 - DNA, 15 bp, Homo sapiens
aggaaagacggttta

SEQ ID NO: 521116 - DNA, 15 bp, Homo sapiens
aaggaaagacggttt

SEQ ID NO: 521117 - DNA, 15 bp, Homo sapiens
taaggaaagacggtt

SEQ ID NO: 521118 - DNA, 15 bp, Homo sapiens
ataaggaaagacggt

SEQ ID NO: 521119 - DNA, 15 bp, Homo sapiens
cataaggaaagacgg

SEQ ID NO: 521120 - DNA, 15 bp, Homo sapiens
tcataaggaaagacg

SEQ ID NO: 521121 - DNA, 15 bp, Homo sapiens
gtcataaggaaagac

SEQ ID NO: 521122 - DNA, 15 bp, Homo sapiens
cgtcataaggaaaga

SEQ ID NO: 521123 - DNA, 15 bp, Homo sapiens
tcgtcataaggaaag

SEQ ID NO: 521124 - DNA, 15 bp, Homo sapiens
ctcgtcataaggaaa

SEQ ID NO: 521125 - DNA, 15 bp, Homo sapiens
actcgtcataaggaa

SEQ ID NO: 521126 - DNA, 15 bp, Homo sapiens
gactcgtcataagga

SEQ ID NO: 521127 - DNA, 15 bp, Homo sapiens
agactcgtcataagg

SEQ ID NO: 521128 - DNA, 15 bp, Homo sapiens
aagactcgtcataag

SEQ ID NO: 521129 - DNA, 15 bp, Homo sapiens
taagactcgtcataa

SEQ ID NO: 521130 - DNA, 15 bp, Homo sapiens
ttaagactcgtcata

SEQ ID NO: 521131 - DNA, 15 bp, Homo sapiens
tttaagactcgtcat

SEQ ID NO: 521132 - DNA, 15 bp, Homo sapiens
gtttaagactcgtca

SEQ ID NO: 521133 - DNA, 15 bp, Homo sapiens
agtttaagactcgtc

SEQ ID NO: 521134 - DNA, 15 bp, Homo sapiens
gagtttaagactcgt

SEQ ID NO: 521135 - DNA, 15 bp, Homo sapiens
agagtttaagactcg

SEQ ID NO: 521136 - DNA, 15 bp, Homo sapiens
aagagtttaagactc

SEQ ID NO: 521137 - DNA, 15 bp, Homo sapiens
aaagagtttaagact

SEQ ID NO: 521138 - DNA, 15 bp, Homo sapiens
caaagagtttaagac

SEQ ID NO: 521139 - DNA, 15 bp, Homo sapiens
ccaaagagtttaaga

SEQ ID NO: 521140 - DNA, 15 bp, Homo sapiens
cccaaagagtttaag

SEQ ID NO: 521141 - DNA, 15 bp, Homo sapiens
tcccaaagagtttaa

SEQ ID NO: 521142 - DNA, 15 bp, Homo sapiens
ctcccaaagagttta

SEQ ID NO: 521143 - DNA, 15 bp, Homo sapiens
cctcccaaagagttt

SEQ ID NO: 521144 - DNA, 15 bp, Homo sapiens
tcctcccaaagagtt

SEQ ID NO: 521145 - DNA, 15 bp, Homo sapiens
ttcctcccaaagagt

SEQ ID NO: 521146 - DNA, 15 bp, Homo sapiens
attcctcccaaagag

SEQ ID NO: 521147 - DNA, 15 bp, Homo sapiens
tattcctcccaaaga

SEQ ID NO: 521148 - DNA, 15 bp, Homo sapiens
ttattcctcccaaag

SEQ ID NO: 521149 - DNA, 15 bp, Homo sapiens
attattcctcccaaa

SEQ ID NO: 521150 - DNA, 15 bp, Homo sapiens
cattattcctcccaa

SEQ ID NO: 521151 - DNA, 15 bp, Homo sapiens
gcattattcctccca

SEQ ID NO: 521152 - DNA, 15 bp, Homo sapiens
ggcattattcctccc

SEQ ID NO: 521153 - DNA, 15 bp, Homo sapiens
cggcattattcctcc

SEQ ID NO: 521154 - DNA, 15 bp, Homo sapiens
ccggcattattcctc

SEQ ID NO: 521155 - DNA, 15 bp, Homo sapiens
gccggcattattcct

SEQ ID NO: 521156 - DNA, 15 bp, Homo sapiens
cgccggcattattcc

SEQ ID NO: 521157 - DNA, 15 bp, Homo sapiens
acgccggcattattc

SEQ ID NO: 521158 - DNA, 15 bp, Homo sapiens
gacgccggcattatt

SEQ ID NO: 521159 - DNA, 15 bp, Homo sapiens
agacgccggcattat

SEQ ID NO: 521160 - DNA, 15 bp, Homo sapiens
aagacgccggcatta

SEQ ID NO: 521161 - DNA, 15 bp, Homo sapiens
gaagacgccggcatt

SEQ ID NO: 521162 - DNA, 15 bp, Homo sapiens
ggaagacgccggcat

SEQ ID NO: 521163 - DNA, 15 bp, Homo sapiens
cggaagacgccggca

SEQ ID NO: 521164 - DNA, 15 bp, Homo sapiens
ccggaagacgccggc

SEQ ID NO: 521165 - DNA, 15 bp, Homo sapiens
tccggaagacgccgg

SEQ ID NO: 521166 - DNA, 15 bp, Homo sapiens
ttccggaagacgccg

SEQ ID NO: 521167 - DNA, 15 bp, Homo sapiens
gttccggaagacgcc

SEQ ID NO: 521168 - DNA, 15 bp, Homo sapiens
ggttccggaagacgc

SEQ ID NO: 521169 - DNA, 15 bp, Homo sapiens
gggttccggaagacg

SEQ ID NO: 521170 - DNA, 15 bp, Homo sapiens
cgggttccggaagac

SEQ ID NO: 521171 - DNA, 15 bp, Homo sapiens
tcgggttccggaaga

SEQ ID NO: 521172 - DNA, 15 bp, Homo sapiens
gtcgggttccggaag

SEQ ID NO: 521173 - DNA, 15 bp, Homo sapiens
ggtcgggttccggaa

SEQ ID NO: 521174 - DNA, 15 bp, Homo sapiens
aggtcgggttccgga

SEQ ID NO: 521175 - DNA, 15 bp, Homo sapiens
gaggtcgggttccgg

SEQ ID NO: 521176 - DNA, 15 bp, Homo sapiens
cgaggtcgggttccg

SEQ ID NO: 521177 - DNA, 15 bp, Homo sapiens
gcgaggtcgggttcc

SEQ ID NO: 521178 - DNA, 15 bp, Homo sapiens
ggcgaggtcgggttc

SEQ ID NO: 521179 - DNA, 15 bp, Homo sapiens
gggcgaggtcgggtt

SEQ ID NO: 521180 - DNA, 15 bp, Homo sapiens
ggggcgaggtcgggt

SEQ ID NO: 521181 - DNA, 15 bp, Homo sapiens
cggggcgaggtcggg

SEQ ID NO: 521182 - DNA, 15 bp, Homo sapiens
acggggcgaggtcgg

SEQ ID NO: 521183 - DNA, 15 bp, Homo sapiens
cacggggcgaggtcg

SEQ ID NO: 521184 - DNA, 15 bp, Homo sapiens
tcacggggcgaggtc

SEQ ID NO: 521185 - DNA, 15 bp, Homo sapiens
gtcacggggcgaggt

SEQ ID NO: 521186 - DNA, 15 bp, Homo sapiens
ggtcacggggcgagg

SEQ ID NO: 521187 - DNA, 15 bp, Homo sapiens
aggtcacggggcgag

SEQ ID NO: 521188 - DNA, 15 bp, Homo sapiens
gaggtcacggggcga

SEQ ID NO: 521189 - DNA, 15 bp, Homo sapiens
tgaggtcacggggcg

SEQ ID NO: 521190 - DNA, 15 bp, Homo sapiens
ctgaggtcacggggc

SEQ ID NO: 521191 - DNA, 15 bp, Homo sapiens
tctgaggtcacgggg

SEQ ID NO: 521192 - DNA, 15 bp, Homo sapiens
ctctgaggtcacggg

SEQ ID NO: 521193 - DNA, 15 bp, Homo sapiens
cctctgaggtcacgg

SEQ ID NO: 521194 - DNA, 15 bp, Homo sapiens
acctctgaggtcacg

SEQ ID NO: 521195 - DNA, 15 bp, Homo sapiens
tacctctgaggtcac

SEQ ID NO: 521196 - DNA, 15 bp, Homo sapiens
atacctctgaggtca

SEQ ID NO: 521197 - DNA, 15 bp, Homo sapiens
tatacctctgaggtc

SEQ ID NO: 521198 - DNA, 15 bp, Homo sapiens
gtatacctctgaggt

SEQ ID NO: 521199 - DNA, 15 bp, Homo sapiens
agtatacctctgagg

SEQ ID NO: 521200 - DNA, 15 bp, Homo sapiens
aagtatacctctgag

SEQ ID NO: 521201 - DNA, 15 bp, Homo sapiens
gaagtatacctctga

SEQ ID NO: 521202 - DNA, 15 bp, Homo sapiens
ggaagtatacctctg

SEQ ID NO: 521203 - DNA, 15 bp, Homo sapiens
cggaagtatacctct

SEQ ID NO: 521204 - DNA, 15 bp, Homo sapiens
ccggaagtatacctc

SEQ ID NO: 521205 - DNA, 15 bp, Homo sapiens
cccggaagtatacct

SEQ ID NO: 521206 - DNA, 15 bp, Homo sapiens
tcccggaagtatacc

SEQ ID NO: 521207 - DNA, 15 bp, Homo sapiens
gtcccggaagtatac

SEQ ID NO: 521208 - DNA, 15 bp, Homo sapiens
tgtcccggaagtata

SEQ ID NO: 521209 - DNA, 15 bp, Homo sapiens
gtgtcccggaagtat

SEQ ID NO: 521210 - DNA, 15 bp, Homo sapiens
cgtgtcccggaagta

SEQ ID NO: 521211 - DNA, 15 bp, Homo sapiens
ccgtgtcccggaagt

SEQ ID NO: 521212 - DNA, 15 bp, Homo sapiens
tccgtgtcccggaag

SEQ ID NO: 521213 - DNA, 15 bp, Homo sapiens
ttccgtgtcccggaa

SEQ ID NO: 521214 - DNA, 15 bp, Homo sapiens
cttccgtgtcccgga

SEQ ID NO: 521215 - DNA, 15 bp, Homo sapiens
acttccgtgtcccgg

SEQ ID NO: 521216 - DNA, 15 bp, Homo sapiens
cacttccgtgtcccg

SEQ ID NO: 521217 - DNA, 15 bp, Homo sapiens
tcacttccgtgtccc

SEQ ID NO: 521218 - DNA, 15 bp, Homo sapiens
gtcacttccgtgtcc

SEQ ID NO: 521219 - DNA, 15 bp, Homo sapiens
ggtcacttccgtgtc

SEQ ID NO: 521220 - DNA, 15 bp, Homo sapiens
gggtcacttccgtgt

SEQ ID NO: 521221 - DNA, 15 bp, Homo sapiens
ggggtcacttccgtg

SEQ ID NO: 521222 - DNA, 15 bp, Homo sapiens
gggggtcacttccgt

SEQ ID NO: 521223 - DNA, 15 bp, Homo sapiens
cgggggtcacttccg

SEQ ID NO: 521224 - DNA, 15 bp, Homo sapiens
acgggggtcacttcc

SEQ ID NO: 521225 - DNA, 15 bp, Homo sapiens
gacgggggtcacttc

SEQ ID NO: 521226 - DNA, 15 bp, Homo sapiens
cgacgggggtcactt

SEQ ID NO: 521227 - DNA, 15 bp, Homo sapiens
gcgacgggggtcact

SEQ ID NO: 521228 - DNA, 15 bp, Homo sapiens
agcgacgggggtcac

SEQ ID NO: 521229 - DNA, 15 bp, Homo sapiens
gagcgacgggggtca

SEQ ID NO: 521230 - DNA, 15 bp, Homo sapiens
ggagcgacgggggtc

SEQ ID NO: 521231 - DNA, 15 bp, Homo sapiens
cggagcgacgggggt

SEQ ID NO: 521232 - DNA, 15 bp, Homo sapiens
gcggagcgacggggg

SEQ ID NO: 521233 - DNA, 15 bp, Homo sapiens
ggcggagcgacgggg

SEQ ID NO: 521234 - DNA, 15 bp, Homo sapiens
gggcggagcgacggg

SEQ ID NO: 521235 - DNA, 15 bp, Homo sapiens
ggggcggagcgacgg

SEQ ID NO: 521236 - DNA, 15 bp, Homo sapiens
gggggcggagcgacg

SEQ ID NO: 521237 - DNA, 15 bp, Homo sapiens
agggggcggagcgac

SEQ ID NO: 521238 - DNA, 15 bp, Homo sapiens
gagggggcggagcga

SEQ ID NO: 521239 - DNA, 15 bp, Homo sapiens
ggagggggcggagcg

SEQ ID NO: 521240 - DNA, 15 bp, Homo sapiens
gggagggggcggagc

SEQ ID NO: 521241 - DNA, 15 bp, Homo sapiens
tgggagggggcggag

SEQ ID NO: 521242 - DNA, 15 bp, Homo sapiens
gtgggagggggcgga

SEQ ID NO: 521243 - DNA, 15 bp, Homo sapiens
agtgggagggggcgg

SEQ ID NO: 521244 - DNA, 15 bp, Homo sapiens
gagtgggagggggcg

SEQ ID NO: 521245 - DNA, 15 bp, Homo sapiens
agagtgggagggggc

SEQ ID NO: 521246 - DNA, 15 bp, Homo sapiens
gagagtgggaggggg

SEQ ID NO: 521247 - DNA, 15 bp, Homo sapiens
agagagtgggagggg

SEQ ID NO: 521248 - DNA, 15 bp, Homo sapiens
gagagagtgggaggg

SEQ ID NO: 521249 - DNA, 15 bp, Homo sapiens
agagagagtgggagg

SEQ ID NO: 521250 - DNA, 15 bp, Homo sapiens
aagagagagtgggag

SEQ ID NO: 521251 - DNA, 15 bp, Homo sapiens
aaagagagagtggga

SEQ ID NO: 521252 - DNA, 15 bp, Homo sapiens
gaaagagagagtggg

SEQ ID NO: 521253 - DNA, 15 bp, Homo sapiens
ggaaagagagagtgg

SEQ ID NO: 521254 - DNA, 15 bp, Homo sapiens
cggaaagagagagtg

SEQ ID NO: 521255 - DNA, 15 bp, Homo sapiens
ccggaaagagagagt

SEQ ID NO: 521256 - DNA, 15 bp, Homo sapiens
accggaaagagagag

SEQ ID NO: 521257 - DNA, 15 bp, Homo sapiens
caccggaaagagaga

SEQ ID NO: 521258 - DNA, 15 bp, Homo sapiens
acaccggaaagagag

SEQ ID NO: 521259 - DNA, 15 bp, Homo sapiens
cacaccggaaagaga

SEQ ID NO: 521260 - DNA, 15 bp, Homo sapiens
ccacaccggaaagag

SEQ ID NO: 521261 - DNA, 15 bp, Homo sapiens
tccacaccggaaaga

SEQ ID NO: 521262 - DNA, 15 bp, Homo sapiens
ctccacaccggaaag

SEQ ID NO: 521263 - DNA, 15 bp, Homo sapiens
actccacaccggaaa

SEQ ID NO: 521264 - DNA, 15 bp, Homo sapiens
gactccacaccggaa

SEQ ID NO: 521265 - DNA, 15 bp, Homo sapiens
agactccacaccgga

SEQ ID NO: 521266 - DNA, 15 bp, Homo sapiens
cagactccacaccgg

SEQ ID NO: 521267 - DNA, 15 bp, Homo sapiens
ccagactccacaccg

SEQ ID NO: 521268 - DNA, 15 bp, Homo sapiens
tccagactccacacc

SEQ ID NO: 521269 - DNA, 15 bp, Homo sapiens
ctccagactccacac

SEQ ID NO: 521270 - DNA, 15 bp, Homo sapiens
tctccagactccaca

SEQ ID NO: 521271 - DNA, 15 bp, Homo sapiens
gtctccagactccac

SEQ ID NO: 521272 - DNA, 15 bp, Homo sapiens
cgtctccagactcca

SEQ ID NO: 521273 - DNA, 15 bp, Homo sapiens
tcgtctccagactcc

SEQ ID NO: 521274 - DNA, 15 bp, Homo sapiens
gtcgtctccagactc

SEQ ID NO: 521275 - DNA, 15 bp, Homo sapiens
cgtcgtctccagact

SEQ ID NO: 521276 - DNA, 15 bp, Homo sapiens
acgtcgtctccagac

SEQ ID NO: 521277 - DNA, 15 bp, Homo sapiens
cacgtcgtctccaga

SEQ ID NO: 521278 - DNA, 15 bp, Homo sapiens
gcacgtcgtctccag

SEQ ID NO: 521279 - DNA, 15 bp, Homo sapiens
tgcacgtcgtctcca

SEQ ID NO: 521280 - DNA, 15 bp, Homo sapiens
ctgcacgtcgtctcc

SEQ ID NO: 521281 - DNA, 15 bp, Homo sapiens
cctgcacgtcgtctc

SEQ ID NO: 521282 - DNA, 15 bp, Homo sapiens
acctgcacgtcgtct

SEQ ID NO: 521283 - DNA, 15 bp, Homo sapiens
tacctgcacgtcgtc

SEQ ID NO: 521284 - DNA, 15 bp, Homo sapiens
ctacctgcacgtcgt

SEQ ID NO: 521285 - DNA, 15 bp, Homo sapiens
cctacctgcacgtcg

SEQ ID NO: 521286 - DNA, 15 bp, Homo sapiens
tcctacctgcacgtc

SEQ ID NO: 521287 - DNA, 15 bp, Homo sapiens
ctcctacctgcacgt

SEQ ID NO: 521288 - DNA, 15 bp, Homo sapiens
cctcctacctgcacg

SEQ ID NO: 521289 - DNA, 15 bp, Homo sapiens
gcctcctacctgcac

SEQ ID NO: 521290 - DNA, 15 bp, Homo sapiens
ggcctcctacctgca

SEQ ID NO: 521291 - DNA, 15 bp, Homo sapiens
gggcctcctacctgc

SEQ ID NO: 521292 - DNA, 15 bp, Homo sapiens
cgggcctcctacctg

SEQ ID NO: 521293 - DNA, 15 bp, Homo sapiens
ccgggcctcctacct

SEQ ID NO: 521294 - DNA, 15 bp, Homo sapiens
cccgggcctcctacc

SEQ ID NO: 521295 - DNA, 15 bp, Homo sapiens
gcccgggcctcctac

SEQ ID NO: 521296 - DNA, 15 bp, Homo sapiens
cgcccgggcctccta

SEQ ID NO: 521297 - DNA, 15 bp, Homo sapiens
gcgcccgggcctcct

SEQ ID NO: 521298 - DNA, 15 bp, Homo sapiens
cgcgcccgggcctcc

SEQ ID NO: 521299 - DNA, 15 bp, Homo sapiens
tcgcgcccgggcctc

SEQ ID NO: 521300 - DNA, 15 bp, Homo sapiens
gtcgcgcccgggcct

SEQ ID NO: 521301 - DNA, 15 bp, Homo sapiens
tgtcgcgcccgggcc

SEQ ID NO: 521302 - DNA, 15 bp, Homo sapiens
ttgtcgcgcccgggc

SEQ ID NO: 521303 - DNA, 15 bp, Homo sapiens
attgtcgcgcccggg

SEQ ID NO: 521304 - DNA, 15 bp, Homo sapiens
gattgtcgcgcccgg

SEQ ID NO: 521305 - DNA, 15 bp, Homo sapiens
cgattgtcgcgcccg

SEQ ID NO: 521306 - DNA, 15 bp, Homo sapiens
ccgattgtcgcgccc

SEQ ID NO: 521307 - DNA, 15 bp, Homo sapiens
cccgattgtcgcgcc

SEQ ID NO: 521308 - DNA, 15 bp, Homo sapiens
ccccgattgtcgcgc

SEQ ID NO: 521309 - DNA, 15 bp, Homo sapiens
cccccgattgtcgcg

SEQ ID NO: 521310 - DNA, 15 bp, Homo sapiens
ccccccgattgtcgc

SEQ ID NO: 521311 - DNA, 15 bp, Homo sapiens
gccccccgattgtcg

SEQ ID NO: 521312 - DNA, 15 bp, Homo sapiens
tgccccccgattgtc

SEQ ID NO: 521313 - DNA, 15 bp, Homo sapiens
atgccccccgattgt

SEQ ID NO: 521314 - DNA, 15 bp, Homo sapiens
gatgccccccgattg

SEQ ID NO: 521315 - DNA, 15 bp, Homo sapiens
ggatgccccccgatt

SEQ ID NO: 521316 - DNA, 15 bp, Homo sapiens
aggatgccccccgat

SEQ ID NO: 521317 - DNA, 15 bp, Homo sapiens
caggatgccccccga

SEQ ID NO: 521318 - DNA, 15 bp, Homo sapiens
gcaggatgccccccg

SEQ ID NO: 521319 - DNA, 15 bp, Homo sapiens
cgcaggatgcccccc

SEQ ID NO: 521320 - DNA, 15 bp, Homo sapiens
ccgcaggatgccccc

SEQ ID NO: 521321 - DNA, 15 bp, Homo sapiens
gccgcaggatgcccc

SEQ ID NO: 521322 - DNA, 15 bp, Homo sapiens
cgccgcaggatgccc

SEQ ID NO: 521323 - DNA, 15 bp, Homo sapiens
tcgccgcaggatgcc

SEQ ID NO: 521324 - DNA, 15 bp, Homo sapiens
ctcgccgcaggatgc

SEQ ID NO: 521325 - DNA, 15 bp, Homo sapiens
cctcgccgcaggatg

SEQ ID NO: 521326 - DNA, 15 bp, Homo sapiens
ccctcgccgcaggat

SEQ ID NO: 521327 - DNA, 15 bp, Homo sapiens
cccctcgccgcagga

SEQ ID NO: 521328 - DNA, 15 bp, Homo sapiens
tcccctcgccgcagg

SEQ ID NO: 521329 - DNA, 15 bp, Homo sapiens
gtcccctcgccgcag

SEQ ID NO: 521330 - DNA, 15 bp, Homo sapiens
ggtcccctcgccgca

SEQ ID NO: 521331 - DNA, 15 bp, Homo sapiens
gggtcccctcgccgc

SEQ ID NO: 521332 - DNA, 15 bp, Homo sapiens
agggtcccctcgccg

SEQ ID NO: 521333 - DNA, 15 bp, Homo sapiens
cagggtcccctcgcc

SEQ ID NO: 521334 - DNA, 15 bp, Homo sapiens
acagggtcccctcgc

SEQ ID NO: 521335 - DNA, 15 bp, Homo sapiens
cacagggtcccctcg

SEQ ID NO: 521336 - DNA, 15 bp, Homo sapiens
ccacagggtcccctc

SEQ ID NO: 521337 - DNA, 15 bp, Homo sapiens
cccacagggtcccct

SEQ ID NO: 521338 - DNA, 15 bp, Homo sapiens
ccccacagggtcccc

SEQ ID NO: 521339 - DNA, 15 bp, Homo sapiens
gccccacagggtccc

SEQ ID NO: 521340 - DNA, 15 bp, Homo sapiens
agccccacagggtcc

SEQ ID NO: 521341 - DNA, 15 bp, Homo sapiens
aagccccacagggtc

SEQ ID NO: 521342 - DNA, 15 bp, Homo sapiens
caagccccacagggt

SEQ ID NO: 521343 - DNA, 15 bp, Homo sapiens
ccaagccccacaggg

SEQ ID NO: 521344 - DNA, 15 bp, Homo sapiens
cccaagccccacagg

SEQ ID NO: 521345 - DNA, 15 bp, Homo sapiens
tcccaagccccacag

SEQ ID NO: 521346 - DNA, 15 bp, Homo sapiens
gtcccaagccccaca

SEQ ID NO: 521347 - DNA, 15 bp, Homo sapiens
cgtcccaagccccac

SEQ ID NO: 521348 - DNA, 15 bp, Homo sapiens
tcgtcccaagcccca

SEQ ID NO: 521349 - DNA, 15 bp, Homo sapiens
ctcgtcccaagcccc

SEQ ID NO: 521350 - DNA, 15 bp, Homo sapiens
tctcgtcccaagccc

SEQ ID NO: 521351 - DNA, 15 bp, Homo sapiens
ctctcgtcccaagcc

SEQ ID NO: 521352 - DNA, 15 bp, Homo sapiens
tctctcgtcccaagc

SEQ ID NO: 521353 - DNA, 15 bp, Homo sapiens
gtctctcgtcccaag

SEQ ID NO: 521354 - DNA, 15 bp, Homo sapiens
cgtctctcgtcccaa

SEQ ID NO: 521355 - DNA, 15 bp, Homo sapiens
ccgtctctcgtccca

SEQ ID NO: 521356 - DNA, 15 bp, Homo sapiens
cccgtctctcgtccc

SEQ ID NO: 521357 - DNA, 15 bp, Homo sapiens
ccccgtctctcgtcc

SEQ ID NO: 521358 - DNA, 15 bp, Homo sapiens
cccccgtctctcgtc

SEQ ID NO: 521359 - DNA, 15 bp, Homo sapiens
acccccgtctctcgt

SEQ ID NO: 521360 - DNA, 15 bp, Homo sapiens
gacccccgtctctcg

SEQ ID NO: 521361 - DNA, 15 bp, Homo sapiens
agacccccgtctctc

SEQ ID NO: 521362 - DNA, 15 bp, Homo sapiens
aagacccccgtctct

SEQ ID NO: 521363 - DNA, 15 bp, Homo sapiens
aaagacccccgtctc

SEQ ID NO: 521364 - DNA, 15 bp, Homo sapiens
gaaagacccccgtct

SEQ ID NO: 521365 - DNA, 15 bp, Homo sapiens
ggaaagacccccgtc

SEQ ID NO: 521366 - DNA, 15 bp, Homo sapiens
cggaaagacccccgt

SEQ ID NO: 521367 - DNA, 15 bp, Homo sapiens
acggaaagacccccg

SEQ ID NO: 521368 - DNA, 15 bp, Homo sapiens
cacggaaagaccccc

SEQ ID NO: 521369 - DNA, 15 bp, Homo sapiens
ccacggaaagacccc

SEQ ID NO: 521370 - DNA, 15 bp, Homo sapiens
cccacggaaagaccc

SEQ ID NO: 521371 - DNA, 15 bp, Homo sapiens
tcccacggaaagacc

SEQ ID NO: 521372 - DNA, 15 bp, Homo sapiens
ttcccacggaaagac

SEQ ID NO: 521373 - DNA, 15 bp, Homo sapiens
gttcccacggaaaga

SEQ ID NO: 521374 - DNA, 15 bp, Homo sapiens
ggttcccacggaaag

SEQ ID NO: 521375 - DNA, 15 bp, Homo sapiens
cggttcccacggaaa

SEQ ID NO: 521376 - DNA, 15 bp, Homo sapiens
tcggttcccacggaa

SEQ ID NO: 521377 - DNA, 15 bp, Homo sapiens
ctcggttcccacgga

SEQ ID NO: 521378 - DNA, 15 bp, Homo sapiens
gctcggttcccacgg

SEQ ID NO: 521379 - DNA, 15 bp, Homo sapiens
agctcggttcccacg

SEQ ID NO: 521380 - DNA, 15 bp, Homo sapiens
tagctcggttcccac

SEQ ID NO: 521381 - DNA, 15 bp, Homo sapiens
ctagctcggttccca

SEQ ID NO: 521382 - DNA, 15 bp, Homo sapiens
cctagctcggttccc

SEQ ID NO: 521383 - DNA, 15 bp, Homo sapiens
acctagctcggttcc

SEQ ID NO: 521384 - DNA, 15 bp, Homo sapiens
cacctagctcggttc

SEQ ID NO: 521385 - DNA, 15 bp, Homo sapiens
gcacctagctcggtt

SEQ ID NO: 521386 - DNA, 15 bp, Homo sapiens
ggcacctagctcggt

SEQ ID NO: 521387 - DNA, 15 bp, Homo sapiens
cggcacctagctcgg

SEQ ID NO: 521388 - DNA, 15 bp, Homo sapiens
ccggcacctagctcg

SEQ ID NO: 521389 - DNA, 15 bp, Homo sapiens
cccggcacctagctc

SEQ ID NO: 521390 - DNA, 15 bp, Homo sapiens
gcccggcacctagct

SEQ ID NO: 521391 - DNA, 15 bp, Homo sapiens
tgcccggcacctagc

SEQ ID NO: 521392 - DNA, 15 bp, Homo sapiens
ttgcccggcacctag

SEQ ID NO: 521393 - DNA, 15 bp, Homo sapiens
cttgcccggcaccta

SEQ ID NO: 521394 - DNA, 15 bp, Homo sapiens
tcttgcccggcacct

SEQ ID NO: 521395 - DNA, 15 bp, Homo sapiens
ctcttgcccggcacc

SEQ ID NO: 521396 - DNA, 15 bp, Homo sapiens
tctcttgcccggcac

SEQ ID NO: 521397 - DNA, 15 bp, Homo sapiens
gtctcttgcccggca

SEQ ID NO: 521398 - DNA, 15 bp, Homo sapiens
cgtctcttgcccggc

SEQ ID NO: 521399 - DNA, 15 bp, Homo sapiens
gcgtctcttgcccgg

SEQ ID NO: 521400 - DNA, 15 bp, Homo sapiens
cgcgtctcttgcccg

SEQ ID NO: 521401 - DNA, 15 bp, Homo sapiens
gcgcgtctcttgccc

SEQ ID NO: 521402 - DNA, 15 bp, Homo sapiens
cgcgcgtctcttgcc

SEQ ID NO: 521403 - DNA, 15 bp, Homo sapiens
ccgcgcgtctcttgc

SEQ ID NO: 521404 - DNA, 15 bp, Homo sapiens
gccgcgcgtctcttg

SEQ ID NO: 521405 - DNA, 15 bp, Homo sapiens
agccgcgcgtctctt

SEQ ID NO: 521406 - DNA, 15 bp, Homo sapiens
cagccgcgcgtctct

SEQ ID NO: 521407 - DNA, 15 bp, Homo sapiens
ccagccgcgcgtctc

SEQ ID NO: 521408 - DNA, 15 bp, Homo sapiens
gccagccgcgcgtct

SEQ ID NO: 521409 - DNA, 15 bp, Homo sapiens
ggccagccgcgcgtc

SEQ ID NO: 521410 - DNA, 15 bp, Homo sapiens
gggccagccgcgcgt

SEQ ID NO: 521411 - DNA, 15 bp, Homo sapiens
tgggccagccgcgcg

SEQ ID NO: 521412 - DNA, 15 bp, Homo sapiens
gtgggccagccgcgc

SEQ ID NO: 521413 - DNA, 15 bp, Homo sapiens
ggtgggccagccgcg

SEQ ID NO: 521414 - DNA, 15 bp, Homo sapiens
aggtgggccagccgc

SEQ ID NO: 521415 - DNA, 15 bp, Homo sapiens
caggtgggccagccg

SEQ ID NO: 521416 - DNA, 15 bp, Homo sapiens
ccaggtgggccagcc

SEQ ID NO: 521417 - DNA, 15 bp, Homo sapiens
tccaggtgggccagc

SEQ ID NO: 521418 - DNA, 15 bp, Homo sapiens
atccaggtgggccag

SEQ ID NO: 521419 - DNA, 15 bp, Homo sapiens
gatccaggtgggcca

SEQ ID NO: 521420 - DNA, 15 bp, Homo sapiens
ggatccaggtgggcc

SEQ ID NO: 521421 - DNA, 15 bp, Homo sapiens
aggatccaggtgggc

SEQ ID NO: 521422 - DNA, 15 bp, Homo sapiens
caggatccaggtggg

SEQ ID NO: 521423 - DNA, 15 bp, Homo sapiens
ccaggatccaggtgg

SEQ ID NO: 521424 - DNA, 15 bp, Homo sapiens
gccaggatccaggtg

SEQ ID NO: 521425 - DNA, 15 bp, Homo sapiens
ggccaggatccaggt

SEQ ID NO: 521426 - DNA, 15 bp, Homo sapiens
tggccaggatccagg

SEQ ID NO: 521427 - DNA, 15 bp, Homo sapiens
ttggccaggatccag

SEQ ID NO: 521428 - DNA, 15 bp, Homo sapiens
gttggccaggatcca

SEQ ID NO: 521429 - DNA, 15 bp, Homo sapiens
agttggccaggatcc

SEQ ID NO: 521430 - DNA, 15 bp, Homo sapiens
gagttggccaggatc

SEQ ID NO: 521431 - DNA, 15 bp, Homo sapiens
cgagttggccaggat

SEQ ID NO: 521432 - DNA, 15 bp, Homo sapiens
ccgagttggccagga

SEQ ID NO: 521433 - DNA, 15 bp, Homo sapiens
cccgagttggccagg

SEQ ID NO: 521434 - DNA, 15 bp, Homo sapiens
tcccgagttggccag

SEQ ID NO: 521435 - DNA, 15 bp, Homo sapiens
atcccgagttggcca

SEQ ID NO: 521436 - DNA, 15 bp, Homo sapiens
aatcccgagttggcc

SEQ ID NO: 521437 - DNA, 15 bp, Homo sapiens
caatcccgagttggc

SEQ ID NO: 521438 - DNA, 15 bp, Homo sapiens
tcaatcccgagttgg

SEQ ID NO: 521439 - DNA, 15 bp, Homo sapiens
ctcaatcccgagttg

SEQ ID NO: 521440 - DNA, 15 bp, Homo sapiens
actcaatcccgagtt

SEQ ID NO: 521441 - DNA, 15 bp, Homo sapiens
aactcaatcccgagt

SEQ ID NO: 521442 - DNA, 15 bp, Homo sapiens
gaactcaatcccgag

SEQ ID NO: 521443 - DNA, 15 bp, Homo sapiens
cgaactcaatcccga

SEQ ID NO: 521444 - DNA, 15 bp, Homo sapiens
acgaactcaatcccg

SEQ ID NO: 521445 - DNA, 15 bp, Homo sapiens
aacgaactcaatccc

SEQ ID NO: 521446 - DNA, 15 bp, Homo sapiens
gaacgaactcaatcc

SEQ ID NO: 521447 - DNA, 15 bp, Homo sapiens
ggaacgaactcaatc

SEQ ID NO: 521448 - DNA, 15 bp, Homo sapiens
aggaacgaactcaat

SEQ ID NO: 521449 - DNA, 15 bp, Homo sapiens
caggaacgaactcaa

SEQ ID NO: 521450 - DNA, 15 bp, Homo sapiens
ccaggaacgaactca

SEQ ID NO: 521451 - DNA, 15 bp, Homo sapiens
accaggaacgaactc

SEQ ID NO: 521452 - DNA, 15 bp, Homo sapiens
gaccaggaacgaact

SEQ ID NO: 521453 - DNA, 15 bp, Homo sapiens
agaccaggaacgaac

SEQ ID NO: 521454 - DNA, 15 bp, Homo sapiens
gagaccaggaacgaa

SEQ ID NO: 521455 - DNA, 15 bp, Homo sapiens
tgagaccaggaacga

SEQ ID NO: 521456 - DNA, 15 bp, Homo sapiens
ctgagaccaggaacg

SEQ ID NO: 521457 - DNA, 15 bp, Homo sapiens
tctgagaccaggaac

SEQ ID NO: 521458 - DNA, 15 bp, Homo sapiens
ttctgagaccaggaa

SEQ ID NO: 521459 - DNA, 15 bp, Homo sapiens
cttctgagaccagga

SEQ ID NO: 521460 - DNA, 15 bp, Homo sapiens
ccttctgagaccagg

SEQ ID NO: 521461 - DNA, 15 bp, Homo sapiens
gccttctgagaccag

SEQ ID NO: 521462 - DNA, 15 bp, Homo sapiens
ggccttctgagacca

SEQ ID NO: 521463 - DNA, 15 bp, Homo sapiens
gggccttctgagacc

SEQ ID NO: 521464 - DNA, 15 bp, Homo sapiens
cgggccttctgagac

SEQ ID NO: 521465 - DNA, 15 bp, Homo sapiens
acgggccttctgaga

SEQ ID NO: 521466 - DNA, 15 bp, Homo sapiens
aacgggccttctgag

SEQ ID NO: 521467 - DNA, 15 bp, Homo sapiens
aaacgggccttctga

SEQ ID NO: 521468 - DNA, 15 bp, Homo sapiens
aaaacgggccttctg

SEQ ID NO: 521469 - DNA, 15 bp, Homo sapiens
caaaacgggccttct

SEQ ID NO: 521470 - DNA, 15 bp, Homo sapiens
gcaaaacgggccttc

SEQ ID NO: 521471 - DNA, 15 bp, Homo sapiens
agcaaaacgggcctt

SEQ ID NO: 521472 - DNA, 15 bp, Homo sapiens
aagcaaaacgggcct

SEQ ID NO: 521473 - DNA, 15 bp, Homo sapiens
aaagcaaaacgggcc

SEQ ID NO: 521474 - DNA, 15 bp, Homo sapiens
gaaagcaaaacgggc

SEQ ID NO: 521475 - DNA, 15 bp, Homo sapiens
tgaaagcaaaacggg

SEQ ID NO: 521476 - DNA, 15 bp, Homo sapiens
ctgaaagcaaaacgg

SEQ ID NO: 521477 - DNA, 15 bp, Homo sapiens
cctgaaagcaaaacg

SEQ ID NO: 521478 - DNA, 15 bp, Homo sapiens
ccctgaaagcaaaac

SEQ ID NO: 521479 - DNA, 15 bp, Homo sapiens
tccctgaaagcaaaa

SEQ ID NO: 521480 - DNA, 15 bp, Homo sapiens
ctccctgaaagcaaa

SEQ ID NO: 521481 - DNA, 15 bp, Homo sapiens
cctccctgaaagcaa

SEQ ID NO: 521482 - DNA, 15 bp, Homo sapiens
tcctccctgaaagca

SEQ ID NO: 521483 - DNA, 15 bp, Homo sapiens
ctcctccctgaaagc

SEQ ID NO: 521484 - DNA, 15 bp, Homo sapiens
gctcctccctgaaag

SEQ ID NO: 521485 - DNA, 15 bp, Homo sapiens
agctcctccctgaaa

SEQ ID NO: 521486 - DNA, 15 bp, Homo sapiens
aagctcctccctgaa

SEQ ID NO: 521487 - DNA, 15 bp, Homo sapiens
caagctcctccctga

SEQ ID NO: 521488 - DNA, 15 bp, Homo sapiens
acaagctcctccctg

SEQ ID NO: 521489 - DNA, 15 bp, Homo sapiens
cacaagctcctccct

SEQ ID NO: 521490 - DNA, 15 bp, Homo sapiens
tcacaagctcctccc

SEQ ID NO: 521491 - DNA, 15 bp, Homo sapiens
ttcacaagctcctcc

SEQ ID NO: 521492 - DNA, 15 bp, Homo sapiens
cttcacaagctcctc

SEQ ID NO: 521493 - DNA, 15 bp, Homo sapiens
acttcacaagctcct

SEQ ID NO: 521494 - DNA, 15 bp, Homo sapiens
tacttcacaagctcc

SEQ ID NO: 521495 - DNA, 15 bp, Homo sapiens
ttacttcacaagctc

SEQ ID NO: 521496 - DNA, 15 bp, Homo sapiens
cttacttcacaagct

SEQ ID NO: 521497 - DNA, 15 bp, Homo sapiens
ccttacttcacaagc

SEQ ID NO: 521498 - DNA, 15 bp, Homo sapiens
cccttacttcacaag

SEQ ID NO: 521499 - DNA, 15 bp, Homo sapiens
acccttacttcacaa

SEQ ID NO: 521500 - DNA, 15 bp, Homo sapiens
cacccttacttcaca

SEQ ID NO: 521501 - DNA, 15 bp, Homo sapiens
tcacccttacttcac

SEQ ID NO: 521502 - DNA, 15 bp, Homo sapiens
ctcacccttacttca

SEQ ID NO: 521503 - DNA, 15 bp, Homo sapiens
actcacccttacttc

SEQ ID NO: 521504 - DNA, 15 bp, Homo sapiens
cactcacccttactt

SEQ ID NO: 521505 - DNA, 15 bp, Homo sapiens
gcactcacccttact

SEQ ID NO: 521506 - DNA, 15 bp, Homo sapiens
cgcactcacccttac

SEQ ID NO: 521507 - DNA, 15 bp, Homo sapiens
ccgcactcaccctta

SEQ ID NO: 521508 - DNA, 15 bp, Homo sapiens
cccgcactcaccctt

SEQ ID NO: 521509 - DNA, 15 bp, Homo sapiens
acccgcactcaccct

SEQ ID NO: 521510 - DNA, 15 bp, Homo sapiens
gacccgcactcaccc

SEQ ID NO: 521511 - DNA, 15 bp, Homo sapiens
ggacccgcactcacc

SEQ ID NO: 521512 - DNA, 15 bp, Homo sapiens
tggacccgcactcac

SEQ ID NO: 521513 - DNA, 15 bp, Homo sapiens
ctggacccgcactca

SEQ ID NO: 521514 - DNA, 15 bp, Homo sapiens
gctggacccgcactc

SEQ ID NO: 521515 - DNA, 15 bp, Homo sapiens
ggctggacccgcact

SEQ ID NO: 521516 - DNA, 15 bp, Homo sapiens
aggctggacccgcac

SEQ ID NO: 521517 - DNA, 15 bp, Homo sapiens
aaggctggacccgca

SEQ ID NO: 521518 - DNA, 15 bp, Homo sapiens
aaaggctggacccgc

SEQ ID NO: 521519 - DNA, 15 bp, Homo sapiens
aaaaggctggacccg

SEQ ID NO: 521520 - DNA, 15 bp, Homo sapiens
taaaaggctggaccc

SEQ ID NO: 521521 - DNA, 15 bp, Homo sapiens
ttaaaaggctggacc

SEQ ID NO: 521522 - DNA, 15 bp, Homo sapiens
cttaaaaggctggac

SEQ ID NO: 521523 - DNA, 15 bp, Homo sapiens
ccttaaaaggctgga

SEQ ID NO: 521524 - DNA, 15 bp, Homo sapiens
gccttaaaaggctgg

SEQ ID NO: 521525 - DNA, 15 bp, Homo sapiens
ggccttaaaaggctg

SEQ ID NO: 521526 - DNA, 15 bp, Homo sapiens
aggccttaaaaggct

SEQ ID NO: 521527 - DNA, 15 bp, Homo sapiens
gaggccttaaaaggc

SEQ ID NO: 521528 - DNA, 15 bp, Homo sapiens
cgaggccttaaaagg

SEQ ID NO: 521529 - DNA, 15 bp, Homo sapiens
ccgaggccttaaaag

SEQ ID NO: 521530 - DNA, 15 bp, Homo sapiens
gccgaggccttaaaa

SEQ ID NO: 521531 - DNA, 15 bp, Homo sapiens
ggccgaggccttaaa

SEQ ID NO: 521532 - DNA, 15 bp, Homo sapiens
gggccgaggccttaa

SEQ ID NO: 521533 - DNA, 15 bp, Homo sapiens
ggggccgaggcctta

SEQ ID NO: 521534 - DNA, 15 bp, Homo sapiens
cggggccgaggcctt

SEQ ID NO: 521535 - DNA, 15 bp, Homo sapiens
gcggggccgaggcct

SEQ ID NO: 521536 - DNA, 15 bp, Homo sapiens
tgcggggccgaggcc

SEQ ID NO: 521537 - DNA, 15 bp, Homo sapiens
ttgcggggccgaggc

SEQ ID NO: 521538 - DNA, 15 bp, Homo sapiens
attgcggggccgagg

SEQ ID NO: 521539 - DNA, 15 bp, Homo sapiens
tattgcggggccgag

SEQ ID NO: 521540 - DNA, 15 bp, Homo sapiens
gtattgcggggccga

SEQ ID NO: 521541 - DNA, 15 bp, Homo sapiens
cgtattgcggggccg

SEQ ID NO: 521542 - DNA, 15 bp, Homo sapiens
ccgtattgcggggcc

SEQ ID NO: 521543 - DNA, 15 bp, Homo sapiens
gccgtattgcggggc

SEQ ID NO: 521544 - DNA, 15 bp, Homo sapiens
ggccgtattgcgggg

SEQ ID NO: 521545 - DNA, 15 bp, Homo sapiens
tggccgtattgcggg

SEQ ID NO: 521546 - DNA, 15 bp, Homo sapiens
gtggccgtattgcgg

SEQ ID NO: 521547 - DNA, 15 bp, Homo sapiens
cgtggccgtattgcg

SEQ ID NO: 521548 - DNA, 15 bp, Homo sapiens
ccgtggccgtattgc

SEQ ID NO: 521549 - DNA, 15 bp, Homo sapiens
gccgtggccgtattg

SEQ ID NO: 521550 - DNA, 15 bp, Homo sapiens
ggccgtggccgtatt

SEQ ID NO: 521551 - DNA, 15 bp, Homo sapiens
tggccgtggccgtat

SEQ ID NO: 521552 - DNA, 15 bp, Homo sapiens
gtggccgtggccgta

SEQ ID NO: 521553 - DNA, 15 bp, Homo sapiens
cgtggccgtggccgt

SEQ ID NO: 521554 - DNA, 15 bp, Homo sapiens
ccgtggccgtggccg

SEQ ID NO: 521555 - DNA, 15 bp, Homo sapiens
gccgtggccgtggcc

SEQ ID NO: 521556 - DNA, 15 bp, Homo sapiens
ggccgtggccgtggc

SEQ ID NO: 521557 - DNA, 15 bp, Homo sapiens
cggccgtggccgtgg

SEQ ID NO: 521558 - DNA, 15 bp, Homo sapiens
gcggccgtggccgtg

SEQ ID NO: 521559 - DNA, 15 bp, Homo sapiens
cgcggccgtggccgt

SEQ ID NO: 521560 - DNA, 15 bp, Homo sapiens
acgcggccgtggccg

SEQ ID NO: 521561 - DNA, 15 bp, Homo sapiens
aacgcggccgtggcc

SEQ ID NO: 521562 - DNA, 15 bp, Homo sapiens
aaacgcggccgtggc

SEQ ID NO: 521563 - DNA, 15 bp, Homo sapiens
caaacgcggccgtgg

SEQ ID NO: 521564 - DNA, 15 bp, Homo sapiens
tcaaacgcggccgtg

SEQ ID NO: 521565 - DNA, 15 bp, Homo sapiens
ctcaaacgcggccgt

SEQ ID NO: 521566 - DNA, 15 bp, Homo sapiens
gctcaaacgcggccg

SEQ ID NO: 521567 - DNA, 15 bp, Homo sapiens
agctcaaacgcggcc

SEQ ID NO: 521568 - DNA, 15 bp, Homo sapiens
cagctcaaacgcggc

SEQ ID NO: 521569 - DNA, 15 bp, Homo sapiens
gcagctcaaacgcgg

SEQ ID NO: 521570 - DNA, 15 bp, Homo sapiens
tgcagctcaaacgcg

SEQ ID NO: 521571 - DNA, 15 bp, Homo sapiens
gtgcagctcaaacgc

SEQ ID NO: 521572 - DNA, 15 bp, Homo sapiens
tgtgcagctcaaacg

SEQ ID NO: 521573 - DNA, 15 bp, Homo sapiens
ctgtgcagctcaaac

SEQ ID NO: 521574 - DNA, 15 bp, Homo sapiens
gctgtgcagctcaaa

SEQ ID NO: 521575 - DNA, 15 bp, Homo sapiens
cgctgtgcagctcaa

SEQ ID NO: 521576 - DNA, 15 bp, Homo sapiens
acgctgtgcagctca

SEQ ID NO: 521577 - DNA, 15 bp, Homo sapiens
tacgctgtgcagctc

SEQ ID NO: 521578 - DNA, 15 bp, Homo sapiens
ctacgctgtgcagct

SEQ ID NO: 521579 - DNA, 15 bp, Homo sapiens
actacgctgtgcagc

SEQ ID NO: 521580 - DNA, 15 bp, Homo sapiens
aactacgctgtgcag

SEQ ID NO: 521581 - DNA, 15 bp, Homo sapiens
caactacgctgtgca

SEQ ID NO: 521582 - DNA, 15 bp, Homo sapiens
tcaactacgctgtgc

SEQ ID NO: 521583 - DNA, 15 bp, Homo sapiens
ctcaactacgctgtg

SEQ ID NO: 521584 - DNA, 15 bp, Homo sapiens
cctcaactacgctgt

SEQ ID NO: 521585 - DNA, 15 bp, Homo sapiens
ccctcaactacgctg

SEQ ID NO: 521586 - DNA, 15 bp, Homo sapiens
tccctcaactacgct

SEQ ID NO: 521587 - DNA, 15 bp, Homo sapiens
ttccctcaactacgc

SEQ ID NO: 521588 - DNA, 15 bp, Homo sapiens
gttccctcaactacg

SEQ ID NO: 521589 - DNA, 15 bp, Homo sapiens
ggttccctcaactac

SEQ ID NO: 521590 - DNA, 15 bp, Homo sapiens
gggttccctcaacta

SEQ ID NO: 521591 - DNA, 15 bp, Homo sapiens
cgggttccctcaact

SEQ ID NO: 521592 - DNA, 15 bp, Homo sapiens
ccgggttccctcaac

SEQ ID NO: 521593 - DNA, 15 bp, Homo sapiens
cccgggttccctcaa

SEQ ID NO: 521594 - DNA, 15 bp, Homo sapiens
tcccgggttccctca

SEQ ID NO: 521595 - DNA, 15 bp, Homo sapiens
gtcccgggttccctc

SEQ ID NO: 521596 - DNA, 15 bp, Homo sapiens
tgtcccgggttccct

SEQ ID NO: 521597 - DNA, 15 bp, Homo sapiens
ctgtcccgggttccc

SEQ ID NO: 521598 - DNA, 15 bp, Homo sapiens
tctgtcccgggttcc

SEQ ID NO: 521599 - DNA, 15 bp, Homo sapiens
gtctgtcccgggttc

SEQ ID NO: 521600 - DNA, 15 bp, Homo sapiens
cgtctgtcccgggtt

SEQ ID NO: 521601 - DNA, 15 bp, Homo sapiens
acgtctgtcccgggt

SEQ ID NO: 521602 - DNA, 15 bp, Homo sapiens
cacgtctgtcccggg

SEQ ID NO: 521603 - DNA, 15 bp, Homo sapiens
ccacgtctgtcccgg

SEQ ID NO: 521604 - DNA, 15 bp, Homo sapiens
cccacgtctgtcccg

SEQ ID NO: 521605 - DNA, 15 bp, Homo sapiens
gcccacgtctgtccc

SEQ ID NO: 521606 - DNA, 15 bp, Homo sapiens
agcccacgtctgtcc

SEQ ID NO: 521607 - DNA, 15 bp, Homo sapiens
gagcccacgtctgtc

SEQ ID NO: 521608 - DNA, 15 bp, Homo sapiens
ggagcccacgtctgt

SEQ ID NO: 521609 - DNA, 15 bp, Homo sapiens
gggagcccacgtctg

SEQ ID NO: 521610 - DNA, 15 bp, Homo sapiens
cgggagcccacgtct

SEQ ID NO: 521611 - DNA, 15 bp, Homo sapiens
gcgggagcccacgtc

SEQ ID NO: 521612 - DNA, 15 bp, Homo sapiens
ggcgggagcccacgt

SEQ ID NO: 521613 - DNA, 15 bp, Homo sapiens
aggcgggagcccacg

SEQ ID NO: 521614 - DNA, 15 bp, Homo sapiens
gaggcgggagcccac

SEQ ID NO: 521615 - DNA, 15 bp, Homo sapiens
agaggcgggagccca

SEQ ID NO: 521616 - DNA, 15 bp, Homo sapiens
tagaggcgggagccc

SEQ ID NO: 521617 - DNA, 15 bp, Homo sapiens
gtagaggcgggagcc

SEQ ID NO: 521618 - DNA, 15 bp, Homo sapiens
ggtagaggcgggagc

SEQ ID NO: 521619 - DNA, 15 bp, Homo sapiens
aggtagaggcgggag

SEQ ID NO: 521620 - DNA, 15 bp, Homo sapiens
gaggtagaggcggga

SEQ ID NO: 521621 - DNA, 15 bp, Homo sapiens
cgaggtagaggcggg

SEQ ID NO: 521622 - DNA, 15 bp, Homo sapiens
gcgaggtagaggcgg

SEQ ID NO: 521623 - DNA, 15 bp, Homo sapiens
ggcgaggtagaggcg

SEQ ID NO: 521624 - DNA, 15 bp, Homo sapiens
tggcgaggtagaggc

SEQ ID NO: 521625 - DNA, 15 bp, Homo sapiens
ttggcgaggtagagg

SEQ ID NO: 521626 - DNA, 15 bp, Homo sapiens
tttggcgaggtagag

SEQ ID NO: 521627 - DNA, 15 bp, Homo sapiens
gtttggcgaggtaga

SEQ ID NO: 521628 - DNA, 15 bp, Homo sapiens
agtttggcgaggtag

SEQ ID NO: 521629 - DNA, 15 bp, Homo sapiens
aagtttggcgaggta

SEQ ID NO: 521630 - DNA, 15 bp, Homo sapiens
aaagtttggcgaggt

SEQ ID NO: 521631 - DNA, 15 bp, Homo sapiens
aaaagtttggcgagg

SEQ ID NO: 521632 - DNA, 15 bp, Homo sapiens
aaaaagtttggcgag

SEQ ID NO: 521633 - DNA, 15 bp, Homo sapiens
aaaaaagtttggcga

SEQ ID NO: 521634 - DNA, 15 bp, Homo sapiens
gaaaaaagtttggcg

SEQ ID NO: 521635 - DNA, 15 bp, Homo sapiens
agaaaaaagtttggc

SEQ ID NO: 521636 - DNA, 15 bp, Homo sapiens
aagaaaaaagtttgg

SEQ ID NO: 521637 - DNA, 15 bp, Homo sapiens
caagaaaaaagtttg

SEQ ID NO: 521638 - DNA, 15 bp, Homo sapiens
ccaagaaaaaagttt

SEQ ID NO: 521639 - DNA, 15 bp, Homo sapiens
accaagaaaaaagtt

SEQ ID NO: 521640 - DNA, 15 bp, Homo sapiens
caccaagaaaaaagt

SEQ ID NO: 521641 - DNA, 15 bp, Homo sapiens
tcaccaagaaaaaag

SEQ ID NO: 521642 - DNA, 15 bp, Homo sapiens
atcaccaagaaaaaa

SEQ ID NO: 521643 - DNA, 15 bp, Homo sapiens
gatcaccaagaaaaa

SEQ ID NO: 521644 - DNA, 15 bp, Homo sapiens
cgatcaccaagaaaa

SEQ ID NO: 521645 - DNA, 15 bp, Homo sapiens
gcgatcaccaagaaa

SEQ ID NO: 521646 - DNA, 15 bp, Homo sapiens
tgcgatcaccaagaa

SEQ ID NO: 521647 - DNA, 15 bp, Homo sapiens
ctgcgatcaccaaga

SEQ ID NO: 521648 - DNA, 15 bp, Homo sapiens
cctgcgatcaccaag

SEQ ID NO: 521649 - DNA, 15 bp, Homo sapiens
gcctgcgatcaccaa

SEQ ID NO: 521650 - DNA, 15 bp, Homo sapiens
ggcctgcgatcacca

SEQ ID NO: 521651 - DNA, 15 bp, Homo sapiens
gggcctgcgatcacc

SEQ ID NO: 521652 - DNA, 15 bp, Homo sapiens
tgggcctgcgatcac

SEQ ID NO: 521653 - DNA, 15 bp, Homo sapiens
gtgggcctgcgatca

SEQ ID NO: 521654 - DNA, 15 bp, Homo sapiens
cgtgggcctgcgatc

SEQ ID NO: 521655 - DNA, 15 bp, Homo sapiens
gcgtgggcctgcgat

SEQ ID NO: 521656 - DNA, 15 bp, Homo sapiens
ggcgtgggcctgcga

SEQ ID NO: 521657 - DNA, 15 bp, Homo sapiens
aggcgtgggcctgcg

SEQ ID NO: 521658 - DNA, 15 bp, Homo sapiens
taggcgtgggcctgc

SEQ ID NO: 521659 - DNA, 15 bp, Homo sapiens
ttaggcgtgggcctg

SEQ ID NO: 521660 - DNA, 15 bp, Homo sapiens
attaggcgtgggcct

SEQ ID NO: 521661 - DNA, 15 bp, Homo sapiens
gattaggcgtgggcc

SEQ ID NO: 521662 - DNA, 15 bp, Homo sapiens
agattaggcgtgggc

SEQ ID NO: 521663 - DNA, 15 bp, Homo sapiens
gagattaggcgtggg

SEQ ID NO: 521664 - DNA, 15 bp, Homo sapiens
cgagattaggcgtgg

SEQ ID NO: 521665 - DNA, 15 bp, Homo sapiens
acgagattaggcgtg

SEQ ID NO: 521666 - DNA, 15 bp, Homo sapiens
aacgagattaggcgt

SEQ ID NO: 521667 - DNA, 15 bp, Homo sapiens
aaacgagattaggcg

SEQ ID NO: 521668 - DNA, 15 bp, Homo sapiens
caaacgagattaggc

SEQ ID NO: 521669 - DNA, 15 bp, Homo sapiens
acaaacgagattagg

SEQ ID NO: 521670 - DNA, 15 bp, Homo sapiens
aacaaacgagattag

SEQ ID NO: 521671 - DNA, 15 bp, Homo sapiens
aaacaaacgagatta

SEQ ID NO: 521672 - DNA, 15 bp, Homo sapiens
gaaacaaacgagatt

SEQ ID NO: 521673 - DNA, 15 bp, Homo sapiens
ggaaacaaacgagat

SEQ ID NO: 521674 - DNA, 15 bp, Homo sapiens
aggaaacaaacgaga

SEQ ID NO: 521675 - DNA, 15 bp, Homo sapiens
gaggaaacaaacgag

SEQ ID NO: 521676 - DNA, 15 bp, Homo sapiens
cgaggaaacaaacga

SEQ ID NO: 521677 - DNA, 15 bp, Homo sapiens
acgaggaaacaaacg

SEQ ID NO: 521678 - DNA, 15 bp, Homo sapiens
aacgaggaaacaaac

SEQ ID NO: 521679 - DNA, 15 bp, Homo sapiens
aaacgaggaaacaaa

SEQ ID NO: 521680 - DNA, 15 bp, Homo sapiens
caaacgaggaaacaa

SEQ ID NO: 521681 - DNA, 15 bp, Homo sapiens
gcaaacgaggaaaca

SEQ ID NO: 521682 - DNA, 15 bp, Homo sapiens
tgcaaacgaggaaac

SEQ ID NO: 521683 - DNA, 15 bp, Homo sapiens
ttgcaaacgaggaaa

SEQ ID NO: 521684 - DNA, 15 bp, Homo sapiens
tttgcaaacgaggaa

SEQ ID NO: 521685 - DNA, 15 bp, Homo sapiens
ttttgcaaacgagga

SEQ ID NO: 521686 - DNA, 15 bp, Homo sapiens
attttgcaaacgagg

SEQ ID NO: 521687 - DNA, 15 bp, Homo sapiens
tattttgcaaacgag

SEQ ID NO: 521688 - DNA, 15 bp, Homo sapiens
ctattttgcaaacga

SEQ ID NO: 521689 - DNA, 15 bp, Homo sapiens
cctattttgcaaacg

SEQ ID NO: 521690 - DNA, 15 bp, Homo sapiens
tcctattttgcaaac

SEQ ID NO: 521691 - DNA, 15 bp, Homo sapiens
ttcctattttgcaaa

SEQ ID NO: 521692 - DNA, 15 bp, Homo sapiens
attcctattttgcaa

SEQ ID NO: 521693 - DNA, 15 bp, Homo sapiens
tattcctattttgca

SEQ ID NO: 521694 - DNA, 15 bp, Homo sapiens
ttattcctattttgc

SEQ ID NO: 521695 - DNA, 15 bp, Homo sapiens
gttattcctattttg

SEQ ID NO: 521696 - DNA, 15 bp, Homo sapiens
tgttattcctatttt

SEQ ID NO: 521697 - DNA, 15 bp, Homo sapiens
ttgttattcctattt

SEQ ID NO: 521698 - DNA, 15 bp, Homo sapiens
attgttattcctatt

SEQ ID NO: 521699 - DNA, 15 bp, Homo sapiens
tattgttattcctat

SEQ ID NO: 521700 - DNA, 15 bp, Homo sapiens
ctattgttattccta

SEQ ID NO: 521701 - DNA, 15 bp, Homo sapiens
gctattgttattcct

SEQ ID NO: 521702 - DNA, 15 bp, Homo sapiens
tgctattgttattcc

SEQ ID NO: 521703 - DNA, 15 bp, Homo sapiens
gtgctattgttattc

SEQ ID NO: 521704 - DNA, 15 bp, Homo sapiens
ggtgctattgttatt

SEQ ID NO: 521705 - DNA, 15 bp, Homo sapiens
cggtgctattgttat

SEQ ID NO: 521706 - DNA, 15 bp, Homo sapiens
tcggtgctattgtta

SEQ ID NO: 521707 - DNA, 15 bp, Homo sapiens
atcggtgctattgtt

SEQ ID NO: 521708 - DNA, 15 bp, Homo sapiens
gatcggtgctattgt

SEQ ID NO: 521709 - DNA, 15 bp, Homo sapiens
ggatcggtgctattg

SEQ ID NO: 521710 - DNA, 15 bp, Homo sapiens
gggatcggtgctatt

SEQ ID NO: 521711 - DNA, 15 bp, Homo sapiens
tgggatcggtgctat

SEQ ID NO: 521712 - DNA, 15 bp, Homo sapiens
atgggatcggtgcta

SEQ ID NO: 521713 - DNA, 15 bp, Homo sapiens
catgggatcggtgct

SEQ ID NO: 521714 - DNA, 15 bp, Homo sapiens
ccatgggatcggtgc

SEQ ID NO: 521715 - DNA, 15 bp, Homo sapiens
cccatgggatcggtg

SEQ ID NO: 521716 - DNA, 15 bp, Homo sapiens
acccatgggatcggt

SEQ ID NO: 521717 - DNA, 15 bp, Homo sapiens
aacccatgggatcgg

SEQ ID NO: 521718 - DNA, 15 bp, Homo sapiens
aaacccatgggatcg

SEQ ID NO: 521719 - DNA, 15 bp, Homo sapiens
caaacccatgggatc

SEQ ID NO: 521720 - DNA, 15 bp, Homo sapiens
acaaacccatgggat

SEQ ID NO: 521721 - DNA, 15 bp, Homo sapiens
tacaaacccatggga

SEQ ID NO: 521722 - DNA, 15 bp, Homo sapiens
ctacaaacccatggg

SEQ ID NO: 521723 - DNA, 15 bp, Homo sapiens
actacaaacccatgg

SEQ ID NO: 521724 - DNA, 15 bp, Homo sapiens
cactacaaacccatg

SEQ ID NO: 521725 - DNA, 15 bp, Homo sapiens
tcactacaaacccat

SEQ ID NO: 521726 - DNA, 15 bp, Homo sapiens
atcactacaaaccca

SEQ ID NO: 521727 - DNA, 15 bp, Homo sapiens
gatcactacaaaccc

SEQ ID NO: 521728 - DNA, 15 bp, Homo sapiens
tgatcactacaaacc

SEQ ID NO: 521729 - DNA, 15 bp, Homo sapiens
atgatcactacaaac

SEQ ID NO: 521730 - DNA, 15 bp, Homo sapiens
aatgatcactacaaa

SEQ ID NO: 521731 - DNA, 15 bp, Homo sapiens
gaatgatcactacaa

SEQ ID NO: 521732 - DNA, 15 bp, Homo sapiens
tgaatgatcactaca

SEQ ID NO: 521733 - DNA, 15 bp, Homo sapiens
ttgaatgatcactac

SEQ ID NO: 521734 - DNA, 15 bp, Homo sapiens
tttgaatgatcacta

SEQ ID NO: 521735 - DNA, 15 bp, Homo sapiens
ctttgaatgatcact

SEQ ID NO: 521736 - DNA, 15 bp, Homo sapiens
tctttgaatgatcac

SEQ ID NO: 521737 - DNA, 15 bp, Homo sapiens
ttctttgaatgatca

SEQ ID NO: 521738 - DNA, 15 bp, Homo sapiens
cttctttgaatgatc

SEQ ID NO: 521739 - DNA, 15 bp, Homo sapiens
ccttctttgaatgat

SEQ ID NO: 521740 - DNA, 15 bp, Homo sapiens
tccttctttgaatga

SEQ ID NO: 521741 - DNA, 15 bp, Homo sapiens
ttccttctttgaatg

SEQ ID NO: 521742 - DNA, 15 bp, Homo sapiens
tttccttctttgaat

SEQ ID NO: 521743 - DNA, 15 bp, Homo sapiens
ctttccttctttgaa

SEQ ID NO: 521744 - DNA, 15 bp, Homo sapiens
gctttccttctttga

SEQ ID NO: 521745 - DNA, 15 bp, Homo sapiens
tgctttccttctttg

SEQ ID NO: 521746 - DNA, 15 bp, Homo sapiens
ctgctttccttcttt

SEQ ID NO: 521747 - DNA, 15 bp, Homo sapiens
cctgctttccttctt

SEQ ID NO: 521748 - DNA, 15 bp, Homo sapiens
ccctgctttccttct

SEQ ID NO: 521749 - DNA, 15 bp, Homo sapiens
tccctgctttccttc

SEQ ID NO: 521750 - DNA, 15 bp, Homo sapiens
ttccctgctttcctt

SEQ ID NO: 521751 - DNA, 15 bp, Homo sapiens
tttccctgctttcct

SEQ ID NO: 521752 - DNA, 15 bp, Homo sapiens
ttttccctgctttcc

SEQ ID NO: 521753 - DNA, 15 bp, Homo sapiens
gttttccctgctttc

SEQ ID NO: 521754 - DNA, 15 bp, Homo sapiens
agttttccctgcttt

SEQ ID NO: 521755 - DNA, 15 bp, Homo sapiens
gagttttccctgctt

SEQ ID NO: 521756 - DNA, 15 bp, Homo sapiens
agagttttccctgct

SEQ ID NO: 521757 - DNA, 15 bp, Homo sapiens
gagagttttccctgc

SEQ ID NO: 521758 - DNA, 15 bp, Homo sapiens
cgagagttttccctg

SEQ ID NO: 521759 - DNA, 15 bp, Homo sapiens
gcgagagttttccct

SEQ ID NO: 521760 - DNA, 15 bp, Homo sapiens
tgcgagagttttccc

SEQ ID NO: 521761 - DNA, 15 bp, Homo sapiens
gtgcgagagttttcc

SEQ ID NO: 521762 - DNA, 15 bp, Homo sapiens
agtgcgagagttttc

SEQ ID NO: 521763 - DNA, 15 bp, Homo sapiens
tagtgcgagagtttt

SEQ ID NO: 521764 - DNA, 15 bp, Homo sapiens
atagtgcgagagttt

SEQ ID NO: 521765 - DNA, 15 bp, Homo sapiens
catagtgcgagagtt

SEQ ID NO: 521766 - DNA, 15 bp, Homo sapiens
acatagtgcgagagt

SEQ ID NO: 521767 - DNA, 15 bp, Homo sapiens
aacatagtgcgagag

SEQ ID NO: 521768 - DNA, 15 bp, Homo sapiens
caacatagtgcgaga

SEQ ID NO: 521769 - DNA, 15 bp, Homo sapiens
ccaacatagtgcgag

SEQ ID NO: 521770 - DNA, 15 bp, Homo sapiens
tccaacatagtgcga

SEQ ID NO: 521771 - DNA, 15 bp, Homo sapiens
atccaacatagtgcg

SEQ ID NO: 521772 - DNA, 15 bp, Homo sapiens
catccaacatagtgc

SEQ ID NO: 521773 - DNA, 15 bp, Homo sapiens
gcatccaacatagtg

SEQ ID NO: 521774 - DNA, 15 bp, Homo sapiens
agcatccaacatagt

SEQ ID NO: 521775 - DNA, 15 bp, Homo sapiens
aagcatccaacatag

SEQ ID NO: 521776 - DNA, 15 bp, Homo sapiens
gaagcatccaacata

SEQ ID NO: 521777 - DNA, 15 bp, Homo sapiens
agaagcatccaacat

SEQ ID NO: 521778 - DNA, 15 bp, Homo sapiens
tagaagcatccaaca

SEQ ID NO: 521779 - DNA, 15 bp, Homo sapiens
ttagaagcatccaac

SEQ ID NO: 521780 - DNA, 15 bp, Homo sapiens
tttagaagcatccaa

SEQ ID NO: 521781 - DNA, 15 bp, Homo sapiens
atttagaagcatcca

SEQ ID NO: 521782 - DNA, 15 bp, Homo sapiens
gatttagaagcatcc

SEQ ID NO: 521783 - DNA, 15 bp, Homo sapiens
agatttagaagcatc

SEQ ID NO: 521784 - DNA, 15 bp, Homo sapiens
cagatttagaagcat

SEQ ID NO: 521785 - DNA, 15 bp, Homo sapiens
ccagatttagaagca

SEQ ID NO: 521786 - DNA, 15 bp, Homo sapiens
cccagatttagaagc

SEQ ID NO: 521787 - DNA, 15 bp, Homo sapiens
gcccagatttagaag

SEQ ID NO: 521788 - DNA, 15 bp, Homo sapiens
cgcccagatttagaa

SEQ ID NO: 521789 - DNA, 15 bp, Homo sapiens
tcgcccagatttaga

SEQ ID NO: 521790 - DNA, 15 bp, Homo sapiens
atcgcccagatttag

SEQ ID NO: 521791 - DNA, 15 bp, Homo sapiens
aatcgcccagattta

SEQ ID NO: 521792 - DNA, 15 bp, Homo sapiens
gaatcgcccagattt

SEQ ID NO: 521793 - DNA, 15 bp, Homo sapiens
agaatcgcccagatt

SEQ ID NO: 521794 - DNA, 15 bp, Homo sapiens
aagaatcgcccagat

SEQ ID NO: 521795 - DNA, 15 bp, Homo sapiens
aaagaatcgcccaga

SEQ ID NO: 521796 - DNA, 15 bp, Homo sapiens
gaaagaatcgcccag

SEQ ID NO: 521797 - DNA, 15 bp, Homo sapiens
ggaaagaatcgccca

SEQ ID NO: 521798 - DNA, 15 bp, Homo sapiens
cggaaagaatcgccc

SEQ ID NO: 521799 - DNA, 15 bp, Homo sapiens
acggaaagaatcgcc

SEQ ID NO: 521800 - DNA, 15 bp, Homo sapiens
aacggaaagaatcgc

SEQ ID NO: 521801 - DNA, 15 bp, Homo sapiens
caacggaaagaatcg

SEQ ID NO: 521802 - DNA, 15 bp, Homo sapiens
gcaacggaaagaatc

SEQ ID NO: 521803 - DNA, 15 bp, Homo sapiens
agcaacggaaagaat

SEQ ID NO: 521804 - DNA, 15 bp, Homo sapiens
cagcaacggaaagaa

SEQ ID NO: 521805 - DNA, 15 bp, Homo sapiens
tcagcaacggaaaga

SEQ ID NO: 521806 - DNA, 15 bp, Homo sapiens
ctcagcaacggaaag

SEQ ID NO: 521807 - DNA, 15 bp, Homo sapiens
actcagcaacggaaa

SEQ ID NO: 521808 - DNA, 15 bp, Homo sapiens
gactcagcaacggaa

SEQ ID NO: 521809 - DNA, 15 bp, Homo sapiens
cgactcagcaacgga

SEQ ID NO: 521810 - DNA, 15 bp, Homo sapiens
ccgactcagcaacgg

SEQ ID NO: 521811 - DNA, 15 bp, Homo sapiens
cccgactcagcaacg

SEQ ID NO: 521812 - DNA, 15 bp, Homo sapiens
gcccgactcagcaac

SEQ ID NO: 521813 - DNA, 15 bp, Homo sapiens
tgcccgactcagcaa

SEQ ID NO: 521814 - DNA, 15 bp, Homo sapiens
gtgcccgactcagca

SEQ ID NO: 521815 - DNA, 15 bp, Homo sapiens
cgtgcccgactcagc

SEQ ID NO: 521816 - DNA, 15 bp, Homo sapiens
acgtgcccgactcag

SEQ ID NO: 521817 - DNA, 15 bp, Homo sapiens
aacgtgcccgactca

SEQ ID NO: 521818 - DNA, 15 bp, Homo sapiens
caacgtgcccgactc

SEQ ID NO: 521819 - DNA, 15 bp, Homo sapiens
gcaacgtgcccgact

SEQ ID NO: 521820 - DNA, 15 bp, Homo sapiens
tgcaacgtgcccgac

SEQ ID NO: 521821 - DNA, 15 bp, Homo sapiens
ttgcaacgtgcccga

SEQ ID NO: 521822 - DNA, 15 bp, Homo sapiens
cttgcaacgtgcccg

SEQ ID NO: 521823 - DNA, 15 bp, Homo sapiens
acttgcaacgtgccc

SEQ ID NO: 521824 - DNA, 15 bp, Homo sapiens
aacttgcaacgtgcc

SEQ ID NO: 521825 - DNA, 15 bp, Homo sapiens
gaacttgcaacgtgc

SEQ ID NO: 521826 - DNA, 15 bp, Homo sapiens
agaacttgcaacgtg

SEQ ID NO: 521827 - DNA, 15 bp, Homo sapiens
cagaacttgcaacgt

SEQ ID NO: 521828 - DNA, 15 bp, Homo sapiens
ccagaacttgcaacg

SEQ ID NO: 521829 - DNA, 15 bp, Homo sapiens
cccagaacttgcaac

SEQ ID NO: 521830 - DNA, 15 bp, Homo sapiens
gcccagaacttgcaa

SEQ ID NO: 521831 - DNA, 15 bp, Homo sapiens
cgcccagaacttgca

SEQ ID NO: 521832 - DNA, 15 bp, Homo sapiens
gcgcccagaacttgc

SEQ ID NO: 521833 - DNA, 15 bp, Homo sapiens
agcgcccagaacttg

SEQ ID NO: 521834 - DNA, 15 bp, Homo sapiens
gagcgcccagaactt

SEQ ID NO: 521835 - DNA, 15 bp, Homo sapiens
tgagcgcccagaact

SEQ ID NO: 521836 - DNA, 15 bp, Homo sapiens
ctgagcgcccagaac

SEQ ID NO: 521837 - DNA, 15 bp, Homo sapiens
cctgagcgcccagaa

SEQ ID NO: 521838 - DNA, 15 bp, Homo sapiens
ccctgagcgcccaga

SEQ ID NO: 521839 - DNA, 15 bp, Homo sapiens
gccctgagcgcccag

SEQ ID NO: 521840 - DNA, 15 bp, Homo sapiens
ggccctgagcgccca

SEQ ID NO: 521841 - DNA, 15 bp, Homo sapiens
gggccctgagcgccc

SEQ ID NO: 521842 - DNA, 15 bp, Homo sapiens
tgggccctgagcgcc

SEQ ID NO: 521843 - DNA, 15 bp, Homo sapiens
ctgggccctgagcgc

SEQ ID NO: 521844 - DNA, 15 bp, Homo sapiens
gctgggccctgagcg

SEQ ID NO: 521845 - DNA, 15 bp, Homo sapiens
tgctgggccctgagc

SEQ ID NO: 521846 - DNA, 15 bp, Homo sapiens
gtgctgggccctgag

SEQ ID NO: 521847 - DNA, 15 bp, Homo sapiens
ggtgctgggccctga

SEQ ID NO: 521848 - DNA, 15 bp, Homo sapiens
tggtgctgggccctg

SEQ ID NO: 521849 - DNA, 15 bp, Homo sapiens
ttggtgctgggccct

SEQ ID NO: 521850 - DNA, 15 bp, Homo sapiens
attggtgctgggccc

SEQ ID NO: 521851 - DNA, 15 bp, Homo sapiens
cattggtgctgggcc

SEQ ID NO: 521852 - DNA, 15 bp, Homo sapiens
acattggtgctgggc

SEQ ID NO: 521853 - DNA, 15 bp, Homo sapiens
aacattggtgctggg

SEQ ID NO: 521854 - DNA, 15 bp, Homo sapiens
aaacattggtgctgg

SEQ ID NO: 521855 - DNA, 15 bp, Homo sapiens
caaacattggtgctg

SEQ ID NO: 521856 - DNA, 15 bp, Homo sapiens
gcaaacattggtgct

SEQ ID NO: 521857 - DNA, 15 bp, Homo sapiens
agcaaacattggtgc

SEQ ID NO: 521858 - DNA, 15 bp, Homo sapiens
cagcaaacattggtg

SEQ ID NO: 521859 - DNA, 15 bp, Homo sapiens
acagcaaacattggt

SEQ ID NO: 521860 - DNA, 15 bp, Homo sapiens
cacagcaaacattgg

SEQ ID NO: 521861 - DNA, 15 bp, Homo sapiens
gcacagcaaacattg

SEQ ID NO: 521862 - DNA, 15 bp, Homo sapiens
cgcacagcaaacatt

SEQ ID NO: 521863 - DNA, 15 bp, Homo sapiens
gcgcacagcaaacat

SEQ ID NO: 521864 - DNA, 15 bp, Homo sapiens
agcgcacagcaaaca

SEQ ID NO: 521865 - DNA, 15 bp, Homo sapiens
aagcgcacagcaaac

SEQ ID NO: 521866 - DNA, 15 bp, Homo sapiens
caagcgcacagcaaa

SEQ ID NO: 521867 - DNA, 15 bp, Homo sapiens
gcaagcgcacagcaa

SEQ ID NO: 521868 - DNA, 15 bp, Homo sapiens
ggcaagcgcacagca

SEQ ID NO: 521869 - DNA, 15 bp, Homo sapiens
gggcaagcgcacagc

SEQ ID NO: 521870 - DNA, 15 bp, Homo sapiens
agggcaagcgcacag

SEQ ID NO: 521871 - DNA, 15 bp, Homo sapiens
cagggcaagcgcaca

SEQ ID NO: 521872 - DNA, 15 bp, Homo sapiens
gcagggcaagcgcac

SEQ ID NO: 521873 - DNA, 15 bp, Homo sapiens
cgcagggcaagcgca

SEQ ID NO: 521874 - DNA, 15 bp, Homo sapiens
acgcagggcaagcgc

SEQ ID NO: 521875 - DNA, 15 bp, Homo sapiens
aacgcagggcaagcg

SEQ ID NO: 521876 - DNA, 15 bp, Homo sapiens
aaacgcagggcaagc

SEQ ID NO: 521877 - DNA, 15 bp, Homo sapiens
taaacgcagggcaag

SEQ ID NO: 521878 - DNA, 15 bp, Homo sapiens
ataaacgcagggcaa

SEQ ID NO: 521879 - DNA, 15 bp, Homo sapiens
tataaacgcagggca

SEQ ID NO: 521880 - DNA, 15 bp, Homo sapiens
atataaacgcagggc

SEQ ID NO: 521881 - DNA, 15 bp, Homo sapiens
tatataaacgcaggg

SEQ ID NO: 521882 - DNA, 15 bp, Homo sapiens
gtatataaacgcagg

SEQ ID NO: 521883 - DNA, 15 bp, Homo sapiens
agtatataaacgcag

SEQ ID NO: 521884 - DNA, 15 bp, Homo sapiens
gagtatataaacgca

SEQ ID NO: 521885 - DNA, 15 bp, Homo sapiens
ggagtatataaacgc

SEQ ID NO: 521886 - DNA, 15 bp, Homo sapiens
aggagtatataaacg

SEQ ID NO: 521887 - DNA, 15 bp, Homo sapiens
caggagtatataaac

SEQ ID NO: 521888 - DNA, 15 bp, Homo sapiens
tcaggagtatataaa

SEQ ID NO: 521889 - DNA, 15 bp, Homo sapiens
atcaggagtatataa

SEQ ID NO: 521890 - DNA, 15 bp, Homo sapiens
catcaggagtatata

SEQ ID NO: 521891 - DNA, 15 bp, Homo sapiens
tcatcaggagtatat

SEQ ID NO: 521892 - DNA, 15 bp, Homo sapiens
gtcatcaggagtata

SEQ ID NO: 521893 - DNA, 15 bp, Homo sapiens
ggtcatcaggagtat

SEQ ID NO: 521894 - DNA, 15 bp, Homo sapiens
tggtcatcaggagta

SEQ ID NO: 521895 - DNA, 15 bp, Homo sapiens
gtggtcatcaggagt

SEQ ID NO: 521896 - DNA, 15 bp, Homo sapiens
agtggtcatcaggag

SEQ ID NO: 521897 - DNA, 15 bp, Homo sapiens
gagtggtcatcagga

SEQ ID NO: 521898 - DNA, 15 bp, Homo sapiens
agagtggtcatcagg

SEQ ID NO: 521899 - DNA, 15 bp, Homo sapiens
cagagtggtcatcag

SEQ ID NO: 521900 - DNA, 15 bp, Homo sapiens
gcagagtggtcatca

SEQ ID NO: 521901 - DNA, 15 bp, Homo sapiens
agcagagtggtcatc

SEQ ID NO: 521902 - DNA, 15 bp, Homo sapiens
gagcagagtggtcat

SEQ ID NO: 521903 - DNA, 15 bp, Homo sapiens
cgagcagagtggtca

SEQ ID NO: 521904 - DNA, 15 bp, Homo sapiens
acgagcagagtggtc

SEQ ID NO: 521905 - DNA, 15 bp, Homo sapiens
aacgagcagagtggt

SEQ ID NO: 521906 - DNA, 15 bp, Homo sapiens
taacgagcagagtgg

SEQ ID NO: 521907 - DNA, 15 bp, Homo sapiens
gtaacgagcagagtg

SEQ ID NO: 521908 - DNA, 15 bp, Homo sapiens
agtaacgagcagagt

SEQ ID NO: 521909 - DNA, 15 bp, Homo sapiens
aagtaacgagcagag

SEQ ID NO: 521910 - DNA, 15 bp, Homo sapiens
aaagtaacgagcaga

SEQ ID NO: 521911 - DNA, 15 bp, Homo sapiens
taaagtaacgagcag

SEQ ID NO: 521912 - DNA, 15 bp, Homo sapiens
ctaaagtaacgagca

SEQ ID NO: 521913 - DNA, 15 bp, Homo sapiens
cctaaagtaacgagc

SEQ ID NO: 521914 - DNA, 15 bp, Homo sapiens
ccctaaagtaacgag

SEQ ID NO: 521915 - DNA, 15 bp, Homo sapiens
cccctaaagtaacga

SEQ ID NO: 521916 - DNA, 15 bp, Homo sapiens
tcccctaaagtaacg

SEQ ID NO: 521917 - DNA, 15 bp, Homo sapiens
atcccctaaagtaac

SEQ ID NO: 521918 - DNA, 15 bp, Homo sapiens
catcccctaaagtaa

SEQ ID NO: 521919 - DNA, 15 bp, Homo sapiens
acatcccctaaagta

SEQ ID NO: 521920 - DNA, 15 bp, Homo sapiens
aacatcccctaaagt

SEQ ID NO: 521921 - DNA, 15 bp, Homo sapiens
taacatcccctaaag

SEQ ID NO: 521922 - DNA, 15 bp, Homo sapiens
ctaacatcccctaaa

SEQ ID NO: 521923 - DNA, 15 bp, Homo sapiens
cctaacatcccctaa

SEQ ID NO: 521924 - DNA, 15 bp, Homo sapiens
tcctaacatccccta

SEQ ID NO: 521925 - DNA, 15 bp, Homo sapiens
ttcctaacatcccct

SEQ ID NO: 521926 - DNA, 15 bp, Homo sapiens
gttcctaacatcccc

SEQ ID NO: 521927 - DNA, 15 bp, Homo sapiens
cgttcctaacatccc

SEQ ID NO: 521928 - DNA, 15 bp, Homo sapiens
ccgttcctaacatcc

SEQ ID NO: 521929 - DNA, 15 bp, Homo sapiens
tccgttcctaacatc

SEQ ID NO: 521930 - DNA, 15 bp, Homo sapiens
ctccgttcctaacat

SEQ ID NO: 521931 - DNA, 15 bp, Homo sapiens
tctccgttcctaaca

SEQ ID NO: 521932 - DNA, 15 bp, Homo sapiens
ttctccgttcctaac

SEQ ID NO: 521933 - DNA, 15 bp, Homo sapiens
tttctccgttcctaa

SEQ ID NO: 521934 - DNA, 15 bp, Homo sapiens
gtttctccgttccta

SEQ ID NO: 521935 - DNA, 15 bp, Homo sapiens
agtttctccgttcct

SEQ ID NO: 521936 - DNA, 15 bp, Homo sapiens
cagtttctccgttcc

SEQ ID NO: 521937 - DNA, 15 bp, Homo sapiens
gcagtttctccgttc

SEQ ID NO: 521938 - DNA, 15 bp, Homo sapiens
tgcagtttctccgtt

SEQ ID NO: 521939 - DNA, 15 bp, Homo sapiens
ttgcagtttctccgt

SEQ ID NO: 521940 - DNA, 15 bp, Homo sapiens
tttgcagtttctccg

SEQ ID NO: 521941 - DNA, 15 bp, Homo sapiens
atttgcagtttctcc

SEQ ID NO: 521942 - DNA, 15 bp, Homo sapiens
aatttgcagtttctc

SEQ ID NO: 521943 - DNA, 15 bp, Homo sapiens
caatttgcagtttct

SEQ ID NO: 521944 - DNA, 15 bp, Homo sapiens
ccaatttgcagtttc

SEQ ID NO: 521945 - DNA, 15 bp, Homo sapiens
gccaatttgcagttt

SEQ ID NO: 521946 - DNA, 15 bp, Homo sapiens
tgccaatttgcagtt

SEQ ID NO: 521947 - DNA, 15 bp, Homo sapiens
atgccaatttgcagt

SEQ ID NO: 521948 - DNA, 15 bp, Homo sapiens
aatgccaatttgcag

SEQ ID NO: 521949 - DNA, 15 bp, Homo sapiens
aaatgccaatttgca

SEQ ID NO: 521950 - DNA, 15 bp, Homo sapiens
taaatgccaatttgc

SEQ ID NO: 521951 - DNA, 15 bp, Homo sapiens
gtaaatgccaatttg

SEQ ID NO: 521952 - DNA, 15 bp, Homo sapiens
agtaaatgccaattt

SEQ ID NO: 521953 - DNA, 15 bp, Homo sapiens
cagtaaatgccaatt

SEQ ID NO: 521954 - DNA, 15 bp, Homo sapiens
tcagtaaatgccaat

SEQ ID NO: 521955 - DNA, 15 bp, Homo sapiens
ttcagtaaatgccaa

SEQ ID NO: 521956 - DNA, 15 bp, Homo sapiens
attcagtaaatgcca

SEQ ID NO: 521957 - DNA, 15 bp, Homo sapiens
cattcagtaaatgcc

SEQ ID NO: 521958 - DNA, 15 bp, Homo sapiens
ccattcagtaaatgc

SEQ ID NO: 521959 - DNA, 15 bp, Homo sapiens
gccattcagtaaatg

SEQ ID NO: 521960 - DNA, 15 bp, Homo sapiens
ggccattcagtaaat

SEQ ID NO: 521961 - DNA, 15 bp, Homo sapiens
tggccattcagtaaa

SEQ ID NO: 521962 - DNA, 15 bp, Homo sapiens
atggccattcagtaa

SEQ ID NO: 521963 - DNA, 15 bp, Homo sapiens
gatggccattcagta

SEQ ID NO: 521964 - DNA, 15 bp, Homo sapiens
tgatggccattcagt

SEQ ID NO: 521965 - DNA, 15 bp, Homo sapiens
atgatggccattcag

SEQ ID NO: 521966 - DNA, 15 bp, Homo sapiens
catgatggccattca

SEQ ID NO: 521967 - DNA, 15 bp, Homo sapiens
gcatgatggccattc

SEQ ID NO: 521968 - DNA, 15 bp, Homo sapiens
ggcatgatggccatt

SEQ ID NO: 521969 - DNA, 15 bp, Homo sapiens
cggcatgatggccat

SEQ ID NO: 521970 - DNA, 15 bp, Homo sapiens
tcggcatgatggcca

SEQ ID NO: 521971 - DNA, 15 bp, Homo sapiens
ttcggcatgatggcc

SEQ ID NO: 521972 - DNA, 15 bp, Homo sapiens
tttcggcatgatggc

SEQ ID NO: 521973 - DNA, 15 bp, Homo sapiens
gtttcggcatgatgg

SEQ ID NO: 521974 - DNA, 15 bp, Homo sapiens
tgtttcggcatgatg

SEQ ID NO: 521975 - DNA, 15 bp, Homo sapiens
atgtttcggcatgat

SEQ ID NO: 521976 - DNA, 15 bp, Homo sapiens
tatgtttcggcatga

SEQ ID NO: 521977 - DNA, 15 bp, Homo sapiens
gtatgtttcggcatg

SEQ ID NO: 521978 - DNA, 15 bp, Homo sapiens
agtatgtttcggcat

SEQ ID NO: 521979 - DNA, 15 bp, Homo sapiens
gagtatgtttcggca

SEQ ID NO: 521980 - DNA, 15 bp, Homo sapiens
tgagtatgtttcggc

SEQ ID NO: 521981 - DNA, 15 bp, Homo sapiens
atgagtatgtttcgg

SEQ ID NO: 521982 - DNA, 15 bp, Homo sapiens
catgagtatgtttcg

SEQ ID NO: 521983 - DNA, 15 bp, Homo sapiens
gcatgagtatgtttc

SEQ ID NO: 521984 - DNA, 15 bp, Homo sapiens
agcatgagtatgttt

SEQ ID NO: 521985 - DNA, 15 bp, Homo sapiens
aagcatgagtatgtt

SEQ ID NO: 521986 - DNA, 15 bp, Homo sapiens
taagcatgagtatgt

SEQ ID NO: 521987 - DNA, 15 bp, Homo sapiens
gtaagcatgagtatg

SEQ ID NO: 521988 - DNA, 15 bp, Homo sapiens
cgtaagcatgagtat

SEQ ID NO: 521989 - DNA, 15 bp, Homo sapiens
acgtaagcatgagta

SEQ ID NO: 521990 - DNA, 15 bp, Homo sapiens
tacgtaagcatgagt

SEQ ID NO: 521991 - DNA, 15 bp, Homo sapiens
atacgtaagcatgag

SEQ ID NO: 521992 - DNA, 15 bp, Homo sapiens
aatacgtaagcatga

SEQ ID NO: 521993 - DNA, 15 bp, Homo sapiens
aaatacgtaagcatg

SEQ ID NO: 521994 - DNA, 15 bp, Homo sapiens
caaatacgtaagcat

SEQ ID NO: 521995 - DNA, 15 bp, Homo sapiens
tcaaatacgtaagca

SEQ ID NO: 521996 - DNA, 15 bp, Homo sapiens
ctcaaatacgtaagc

SEQ ID NO: 521997 - DNA, 15 bp, Homo sapiens
tctcaaatacgtaag

SEQ ID NO: 521998 - DNA, 15 bp, Homo sapiens
atctcaaatacgtaa

SEQ ID NO: 521999 - DNA, 15 bp, Homo sapiens
tatctcaaatacgta

SEQ ID NO: 522000 - DNA, 15 bp, Homo sapiens
atatctcaaatacgt

SEQ ID NO: 522001 - DNA, 15 bp, Homo sapiens
catatctcaaatacg

SEQ ID NO: 522002 - DNA, 15 bp, Homo sapiens
gcatatctcaaatac

SEQ ID NO: 522003 - DNA, 15 bp, Homo sapiens
agcatatctcaaata

SEQ ID NO: 522004 - DNA, 15 bp, Homo sapiens
cagcatatctcaaat

SEQ ID NO: 522005 - DNA, 15 bp, Homo sapiens
ccagcatatctcaaa

SEQ ID NO: 522006 - DNA, 15 bp, Homo sapiens
tccagcatatctcaa

SEQ ID NO: 522007 - DNA, 15 bp, Homo sapiens
ctccagcatatctca

SEQ ID NO: 522008 - DNA, 15 bp, Homo sapiens
gctccagcatatctc

SEQ ID NO: 522009 - DNA, 15 bp, Homo sapiens
ggctccagcatatct

SEQ ID NO: 522010 - DNA, 15 bp, Homo sapiens
aggctccagcatatc

SEQ ID NO: 522011 - DNA, 15 bp, Homo sapiens
aaggctccagcatat

SEQ ID NO: 522012 - DNA, 15 bp, Homo sapiens
aaaggctccagcata

SEQ ID NO: 522013 - DNA, 15 bp, Homo sapiens
gaaaggctccagcat

SEQ ID NO: 522014 - DNA, 15 bp, Homo sapiens
agaaaggctccagca

SEQ ID NO: 522015 - DNA, 15 bp, Homo sapiens
tagaaaggctccagc

SEQ ID NO: 522016 - DNA, 15 bp, Homo sapiens
atagaaaggctccag

SEQ ID NO: 522017 - DNA, 15 bp, Homo sapiens
catagaaaggctcca

SEQ ID NO: 522018 - DNA, 15 bp, Homo sapiens
gcatagaaaggctcc

SEQ ID NO: 522019 - DNA, 15 bp, Homo sapiens
agcatagaaaggctc

SEQ ID NO: 522020 - DNA, 15 bp, Homo sapiens
aagcatagaaaggct

SEQ ID NO: 522021 - DNA, 15 bp, Homo sapiens
gaagcatagaaaggc

SEQ ID NO: 522022 - DNA, 15 bp, Homo sapiens
agaagcatagaaagg

SEQ ID NO: 522023 - DNA, 15 bp, Homo sapiens
gagaagcatagaaag

SEQ ID NO: 522024 - DNA, 15 bp, Homo sapiens
cgagaagcatagaaa

SEQ ID NO: 522025 - DNA, 15 bp, Homo sapiens
tcgagaagcatagaa

SEQ ID NO: 522026 - DNA, 15 bp, Homo sapiens
ctcgagaagcataga

SEQ ID NO: 522027 - DNA, 15 bp, Homo sapiens
cctcgagaagcatag

SEQ ID NO: 522028 - DNA, 15 bp, Homo sapiens
gcctcgagaagcata

SEQ ID NO: 522029 - DNA, 15 bp, Homo sapiens
tgcctcgagaagcat

SEQ ID NO: 522030 - DNA, 15 bp, Homo sapiens
ctgcctcgagaagca

SEQ ID NO: 522031 - DNA, 15 bp, Homo sapiens
tctgcctcgagaagc

SEQ ID NO: 522032 - DNA, 15 bp, Homo sapiens
ttctgcctcgagaag

SEQ ID NO: 522033 - DNA, 15 bp, Homo sapiens
gttctgcctcgagaa

SEQ ID NO: 522034 - DNA, 15 bp, Homo sapiens
agttctgcctcgaga

SEQ ID NO: 522035 - DNA, 15 bp, Homo sapiens
aagttctgcctcgag

SEQ ID NO: 522036 - DNA, 15 bp, Homo sapiens
aaagttctgcctcga

SEQ ID NO: 522037 - DNA, 15 bp, Homo sapiens
caaagttctgcctcg

SEQ ID NO: 522038 - DNA, 15 bp, Homo sapiens
ccaaagttctgcctc

SEQ ID NO: 522039 - DNA, 15 bp, Homo sapiens
cccaaagttctgcct

SEQ ID NO: 522040 - DNA, 15 bp, Homo sapiens
gcccaaagttctgcc

SEQ ID NO: 522041 - DNA, 15 bp, Homo sapiens
agcccaaagttctgc

SEQ ID NO: 522042 - DNA, 15 bp, Homo sapiens
aagcccaaagttctg

SEQ ID NO: 522043 - DNA, 15 bp, Homo sapiens
gaagcccaaagttct

SEQ ID NO: 522044 - DNA, 15 bp, Homo sapiens
agaagcccaaagttc

SEQ ID NO: 522045 - DNA, 15 bp, Homo sapiens
gagaagcccaaagtt

SEQ ID NO: 522046 - DNA, 15 bp, Homo sapiens
agagaagcccaaagt

SEQ ID NO: 522047 - DNA, 15 bp, Homo sapiens
gagagaagcccaaag

SEQ ID NO: 522048 - DNA, 15 bp, Homo sapiens
ggagagaagcccaaa

SEQ ID NO: 522049 - DNA, 15 bp, Homo sapiens
aggagagaagcccaa

SEQ ID NO: 522050 - DNA, 15 bp, Homo sapiens
caggagagaagccca

SEQ ID NO: 522051 - DNA, 15 bp, Homo sapiens
acaggagagaagccc

SEQ ID NO: 522052 - DNA, 15 bp, Homo sapiens
cacaggagagaagcc

SEQ ID NO: 522053 - DNA, 15 bp, Homo sapiens
ccacaggagagaagc

SEQ ID NO: 522054 - DNA, 15 bp, Homo sapiens
gccacaggagagaag

SEQ ID NO: 522055 - DNA, 15 bp, Homo sapiens
cgccacaggagagaa

SEQ ID NO: 522056 - DNA, 15 bp, Homo sapiens
gcgccacaggagaga

SEQ ID NO: 522057 - DNA, 15 bp, Homo sapiens
cgcgccacaggagag

SEQ ID NO: 522058 - DNA, 15 bp, Homo sapiens
acgcgccacaggaga

SEQ ID NO: 522059 - DNA, 15 bp, Homo sapiens
aacgcgccacaggag

SEQ ID NO: 522060 - DNA, 15 bp, Homo sapiens
gaacgcgccacagga

SEQ ID NO: 522061 - DNA, 15 bp, Homo sapiens
ggaacgcgccacagg

SEQ ID NO: 522062 - DNA, 15 bp, Homo sapiens
aggaacgcgccacag

SEQ ID NO: 522063 - DNA, 15 bp, Homo sapiens
aaggaacgcgccaca

SEQ ID NO: 522064 - DNA, 15 bp, Homo sapiens
taaggaacgcgccac

SEQ ID NO: 522065 - DNA, 15 bp, Homo sapiens
gtaaggaacgcgcca

SEQ ID NO: 522066 - DNA, 15 bp, Homo sapiens
tgtaaggaacgcgcc

SEQ ID NO: 522067 - DNA, 15 bp, Homo sapiens
ttgtaaggaacgcgc

SEQ ID NO: 522068 - DNA, 15 bp, Homo sapiens
attgtaaggaacgcg

SEQ ID NO: 522069 - DNA, 15 bp, Homo sapiens
tattgtaaggaacgc

SEQ ID NO: 522070 - DNA, 15 bp, Homo sapiens
ctattgtaaggaacg

SEQ ID NO: 522071 - DNA, 15 bp, Homo sapiens
actattgtaaggaac

SEQ ID NO: 522072 - DNA, 15 bp, Homo sapiens
aactattgtaaggaa

SEQ ID NO: 522073 - DNA, 15 bp, Homo sapiens
taactattgtaagga

SEQ ID NO: 522074 - DNA, 15 bp, Homo sapiens
ttaactattgtaagg

SEQ ID NO: 522075 - DNA, 15 bp, Homo sapiens
gttaactattgtaag

SEQ ID NO: 522076 - DNA, 15 bp, Homo sapiens
cgttaactattgtaa

SEQ ID NO: 522077 - DNA, 15 bp, Homo sapiens
gcgttaactattgta

SEQ ID NO: 522078 - DNA, 15 bp, Homo sapiens
tgcgttaactattgt

SEQ ID NO: 522079 - DNA, 15 bp, Homo sapiens
gtgcgttaactattg

SEQ ID NO: 522080 - DNA, 15 bp, Homo sapiens
agtgcgttaactatt

SEQ ID NO: 522081 - DNA, 15 bp, Homo sapiens
cagtgcgttaactat

SEQ ID NO: 522082 - DNA, 15 bp, Homo sapiens
ccagtgcgttaacta

SEQ ID NO: 522083 - DNA, 15 bp, Homo sapiens
cccagtgcgttaact

SEQ ID NO: 522084 - DNA, 15 bp, Homo sapiens
acccagtgcgttaac

SEQ ID NO: 522085 - DNA, 15 bp, Homo sapiens
gacccagtgcgttaa

SEQ ID NO: 522086 - DNA, 15 bp, Homo sapiens
cgacccagtgcgtta

SEQ ID NO: 522087 - DNA, 15 bp, Homo sapiens
acgacccagtgcgtt

SEQ ID NO: 522088 - DNA, 15 bp, Homo sapiens
cacgacccagtgcgt

SEQ ID NO: 522089 - DNA, 15 bp, Homo sapiens
gcacgacccagtgcg

SEQ ID NO: 522090 - DNA, 15 bp, Homo sapiens
agcacgacccagtgc

SEQ ID NO: 522091 - DNA, 15 bp, Homo sapiens
gagcacgacccagtg

SEQ ID NO: 522092 - DNA, 15 bp, Homo sapiens
tgagcacgacccagt

SEQ ID NO: 522093 - DNA, 15 bp, Homo sapiens
atgagcacgacccag

SEQ ID NO: 522094 - DNA, 15 bp, Homo sapiens
aatgagcacgaccca

SEQ ID NO: 522095 - DNA, 15 bp, Homo sapiens
caatgagcacgaccc

SEQ ID NO: 522096 - DNA, 15 bp, Homo sapiens
ccaatgagcacgacc

SEQ ID NO: 522097 - DNA, 15 bp, Homo sapiens
accaatgagcacgac

SEQ ID NO: 522098 - DNA, 15 bp, Homo sapiens
gaccaatgagcacga

SEQ ID NO: 522099 - DNA, 15 bp, Homo sapiens
agaccaatgagcacg

SEQ ID NO: 522100 - DNA, 15 bp, Homo sapiens
cagaccaatgagcac

SEQ ID NO: 522101 - DNA, 15 bp, Homo sapiens
tcagaccaatgagca

SEQ ID NO: 522102 - DNA, 15 bp, Homo sapiens
atcagaccaatgagc

SEQ ID NO: 522103 - DNA, 15 bp, Homo sapiens
aatcagaccaatgag

SEQ ID NO: 522104 - DNA, 15 bp, Homo sapiens
aaatcagaccaatga

SEQ ID NO: 522105 - DNA, 15 bp, Homo sapiens
caaatcagaccaatg

SEQ ID NO: 522106 - DNA, 15 bp, Homo sapiens
tcaaatcagaccaat

SEQ ID NO: 522107 - DNA, 15 bp, Homo sapiens
ttcaaatcagaccaa

SEQ ID NO: 522108 - DNA, 15 bp, Homo sapiens
cttcaaatcagacca

SEQ ID NO: 522109 - DNA, 15 bp, Homo sapiens
tcttcaaatcagacc

SEQ ID NO: 522110 - DNA, 15 bp, Homo sapiens
atcttcaaatcagac

SEQ ID NO: 522111 - DNA, 15 bp, Homo sapiens
tatcttcaaatcaga

SEQ ID NO: 522112 - DNA, 15 bp, Homo sapiens
ctatcttcaaatcag

SEQ ID NO: 522113 - DNA, 15 bp, Homo sapiens
cctatcttcaaatca

SEQ ID NO: 522114 - DNA, 15 bp, Homo sapiens
tcctatcttcaaatc

SEQ ID NO: 522115 - DNA, 15 bp, Homo sapiens
ttcctatcttcaaat

SEQ ID NO: 522116 - DNA, 15 bp, Homo sapiens
gttcctatcttcaaa

SEQ ID NO: 522117 - DNA, 15 bp, Homo sapiens
tgttcctatcttcaa

SEQ ID NO: 522118 - DNA, 15 bp, Homo sapiens
atgttcctatcttca

SEQ ID NO: 522119 - DNA, 15 bp, Homo sapiens
aatgttcctatcttc

SEQ ID NO: 522120 - DNA, 15 bp, Homo sapiens
aaatgttcctatctt

SEQ ID NO: 522121 - DNA, 15 bp, Homo sapiens
taaatgttcctatct

SEQ ID NO: 522122 - DNA, 15 bp, Homo sapiens
ttaaatgttcctatc

SEQ ID NO: 522123 - DNA, 15 bp, Homo sapiens
gttaaatgttcctat

SEQ ID NO: 522124 - DNA, 15 bp, Homo sapiens
agttaaatgttccta

SEQ ID NO: 522125 - DNA, 15 bp, Homo sapiens
aagttaaatgttcct

SEQ ID NO: 522126 - DNA, 15 bp, Homo sapiens
gaagttaaatgttcc

SEQ ID NO: 522127 - DNA, 15 bp, Homo sapiens
cgaagttaaatgttc

SEQ ID NO: 522128 - DNA, 15 bp, Homo sapiens
acgaagttaaatgtt

SEQ ID NO: 522129 - DNA, 15 bp, Homo sapiens
tacgaagttaaatgt

SEQ ID NO: 522130 - DNA, 15 bp, Homo sapiens
gtacgaagttaaatg

SEQ ID NO: 522131 - DNA, 15 bp, Homo sapiens
tgtacgaagttaaat

SEQ ID NO: 522132 - DNA, 15 bp, Homo sapiens
gtgtacgaagttaaa

SEQ ID NO: 522133 - DNA, 15 bp, Homo sapiens
ggtgtacgaagttaa

SEQ ID NO: 522134 - DNA, 15 bp, Homo sapiens
gggtgtacgaagtta

SEQ ID NO: 522135 - DNA, 15 bp, Homo sapiens
tgggtgtacgaagtt

SEQ ID NO: 522136 - DNA, 15 bp, Homo sapiens
ttgggtgtacgaagt

SEQ ID NO: 522137 - DNA, 15 bp, Homo sapiens
cttgggtgtacgaag

SEQ ID NO: 522138 - DNA, 15 bp, Homo sapiens
tcttgggtgtacgaa

SEQ ID NO: 522139 - DNA, 15 bp, Homo sapiens
gtcttgggtgtacga

SEQ ID NO: 522140 - DNA, 15 bp, Homo sapiens
agtcttgggtgtacg

SEQ ID NO: 522141 - DNA, 15 bp, Homo sapiens
aagtcttgggtgtac

SEQ ID NO: 522142 - DNA, 15 bp, Homo sapiens
taagtcttgggtgta

SEQ ID NO: 522143 - DNA, 15 bp, Homo sapiens
gtaagtcttgggtgt

SEQ ID NO: 522144 - DNA, 15 bp, Homo sapiens
tgtaagtcttgggtg

SEQ ID NO: 522145 - DNA, 15 bp, Homo sapiens
gtgtaagtcttgggt

SEQ ID NO: 522146 - DNA, 15 bp, Homo sapiens
agtgtaagtcttggg

SEQ ID NO: 522147 - DNA, 15 bp, Homo sapiens
aagtgtaagtcttgg

SEQ ID NO: 522148 - DNA, 15 bp, Homo sapiens
caagtgtaagtcttg

SEQ ID NO: 522149 - DNA, 15 bp, Homo sapiens
tcaagtgtaagtctt

SEQ ID NO: 522150 - DNA, 15 bp, Homo sapiens
ttcaagtgtaagtct

SEQ ID NO: 522151 - DNA, 15 bp, Homo sapiens
cttcaagtgtaagtc

SEQ ID NO: 522152 - DNA, 15 bp, Homo sapiens
acttcaagtgtaagt

SEQ ID NO: 522153 - DNA, 15 bp, Homo sapiens
tacttcaagtgtaag

SEQ ID NO: 522154 - DNA, 15 bp, Homo sapiens
gtacttcaagtgtaa

SEQ ID NO: 522155 - DNA, 15 bp, Homo sapiens
agtacttcaagtgta

SEQ ID NO: 522156 - DNA, 15 bp, Homo sapiens
aagtacttcaagtgt

SEQ ID NO: 522157 - DNA, 15 bp, Homo sapiens
taagtacttcaagtg

SEQ ID NO: 522158 - DNA, 15 bp, Homo sapiens
gtaagtacttcaagt

SEQ ID NO: 522159 - DNA, 15 bp, Homo sapiens
agtaagtacttcaag

SEQ ID NO: 522160 - DNA, 15 bp, Homo sapiens
cagtaagtacttcaa

SEQ ID NO: 522161 - DNA, 15 bp, Homo sapiens
acagtaagtacttca

SEQ ID NO: 522162 - DNA, 15 bp, Homo sapiens
cacagtaagtacttc

SEQ ID NO: 522163 - DNA, 15 bp, Homo sapiens
ccacagtaagtactt

SEQ ID NO: 522164 - DNA, 15 bp, Homo sapiens
accacagtaagtact

SEQ ID NO: 522165 - DNA, 15 bp, Homo sapiens
gaccacagtaagtac

SEQ ID NO: 522166 - DNA, 15 bp, Homo sapiens
tgaccacagtaagta

SEQ ID NO: 522167 - DNA, 15 bp, Homo sapiens
gtgaccacagtaagt

SEQ ID NO: 522168 - DNA, 15 bp, Homo sapiens
tgtgaccacagtaag

SEQ ID NO: 522169 - DNA, 15 bp, Homo sapiens
gtgtgaccacagtaa

SEQ ID NO: 522170 - DNA, 15 bp, Homo sapiens
tgtgtgaccacagta

SEQ ID NO: 522171 - DNA, 15 bp, Homo sapiens
gtgtgtgaccacagt

SEQ ID NO: 522172 - DNA, 15 bp, Homo sapiens
agtgtgtgaccacag

SEQ ID NO: 522173 - DNA, 15 bp, Homo sapiens
aagtgtgtgaccaca

SEQ ID NO: 522174 - DNA, 15 bp, Homo sapiens
taagtgtgtgaccac

SEQ ID NO: 522175 - DNA, 15 bp, Homo sapiens
ttaagtgtgtgacca

SEQ ID NO: 522176 - DNA, 15 bp, Homo sapiens
gttaagtgtgtgacc

SEQ ID NO: 522177 - DNA, 15 bp, Homo sapiens
agttaagtgtgtgac

SEQ ID NO: 522178 - DNA, 15 bp, Homo sapiens
tagttaagtgtgtga

SEQ ID NO: 522179 - DNA, 15 bp, Homo sapiens
ttagttaagtgtgtg

SEQ ID NO: 522180 - DNA, 15 bp, Homo sapiens
tttagttaagtgtgt

SEQ ID NO: 522181 - DNA, 15 bp, Homo sapiens
ctttagttaagtgtg

SEQ ID NO: 522182 - DNA, 15 bp, Homo sapiens
actttagttaagtgt

SEQ ID NO: 522183 - DNA, 15 bp, Homo sapiens
aactttagttaagtg

SEQ ID NO: 522184 - DNA, 15 bp, Homo sapiens
aaactttagttaagt

SEQ ID NO: 522185 - DNA, 15 bp, Homo sapiens
taaactttagttaag

SEQ ID NO: 522186 - DNA, 15 bp, Homo sapiens
ataaactttagttaa

SEQ ID NO: 522187 - DNA, 15 bp, Homo sapiens
tataaactttagtta

SEQ ID NO: 522188 - DNA, 15 bp, Homo sapiens
atataaactttagtt

SEQ ID NO: 522189 - DNA, 15 bp, Homo sapiens
tatataaactttagt

SEQ ID NO: 522190 - DNA, 15 bp, Homo sapiens
ctatataaactttag

SEQ ID NO: 522191 - DNA, 15 bp, Homo sapiens
cctatataaacttta

SEQ ID NO: 522192 - DNA, 15 bp, Homo sapiens
ccctatataaacttt

SEQ ID NO: 522193 - DNA, 15 bp, Homo sapiens
tccctatataaactt

SEQ ID NO: 522194 - DNA, 15 bp, Homo sapiens
ttccctatataaact

SEQ ID NO: 522195 - DNA, 15 bp, Homo sapiens
cttccctatataaac

SEQ ID NO: 522196 - DNA, 15 bp, Homo sapiens
ccttccctatataaa

SEQ ID NO: 522197 - DNA, 15 bp, Homo sapiens
gccttccctatataa

SEQ ID NO: 522198 - DNA, 15 bp, Homo sapiens
tgccttccctatata

SEQ ID NO: 522199 - DNA, 15 bp, Homo sapiens
ctgccttccctatat

SEQ ID NO: 522200 - DNA, 15 bp, Homo sapiens
tctgccttccctata

SEQ ID NO: 522201 - DNA, 15 bp, Homo sapiens
ctctgccttccctat

SEQ ID NO: 522202 - DNA, 15 bp, Homo sapiens
cctctgccttcccta

SEQ ID NO: 522203 - DNA, 15 bp, Homo sapiens
tcctctgccttccct

SEQ ID NO: 522204 - DNA, 15 bp, Homo sapiens
ctcctctgccttccc

SEQ ID NO: 522205 - DNA, 15 bp, Homo sapiens
tctcctctgccttcc

SEQ ID NO: 522206 - DNA, 15 bp, Homo sapiens
ctctcctctgccttc

SEQ ID NO: 522207 - DNA, 15 bp, Homo sapiens
tctctcctctgcctt

SEQ ID NO: 522208 - DNA, 15 bp, Homo sapiens
atctctcctctgcct

SEQ ID NO: 522209 - DNA, 15 bp, Homo sapiens
gatctctcctctgcc

SEQ ID NO: 522210 - DNA, 15 bp, Homo sapiens
agatctctcctctgc

SEQ ID NO: 522211 - DNA, 15 bp, Homo sapiens
tagatctctcctctg

SEQ ID NO: 522212 - DNA, 15 bp, Homo sapiens
ctagatctctcctct

SEQ ID NO: 522213 - DNA, 15 bp, Homo sapiens
cctagatctctcctc

SEQ ID NO: 522214 - DNA, 15 bp, Homo sapiens
tcctagatctctcct

SEQ ID NO: 522215 - DNA, 15 bp, Homo sapiens
ttcctagatctctcc

SEQ ID NO: 522216 - DNA, 15 bp, Homo sapiens
gttcctagatctctc

SEQ ID NO: 522217 - DNA, 15 bp, Homo sapiens
tgttcctagatctct

SEQ ID NO: 522218 - DNA, 15 bp, Homo sapiens
gtgttcctagatctc

SEQ ID NO: 522219 - DNA, 15 bp, Homo sapiens
ggtgttcctagatct

SEQ ID NO: 522220 - DNA, 15 bp, Homo sapiens
aggtgttcctagatc

SEQ ID NO: 522221 - DNA, 15 bp, Homo sapiens
caggtgttcctagat

SEQ ID NO: 522222 - DNA, 15 bp, Homo sapiens
tcaggtgttcctaga

SEQ ID NO: 522223 - DNA, 15 bp, Homo sapiens
ctcaggtgttcctag

SEQ ID NO: 522224 - DNA, 15 bp, Homo sapiens
tctcaggtgttccta

SEQ ID NO: 522225 - DNA, 15 bp, Homo sapiens
gtctcaggtgttcct

SEQ ID NO: 522226 - DNA, 15 bp, Homo sapiens
tgtctcaggtgttcc

SEQ ID NO: 522227 - DNA, 15 bp, Homo sapiens
ctgtctcaggtgttc

SEQ ID NO: 522228 - DNA, 15 bp, Homo sapiens
tctgtctcaggtgtt

SEQ ID NO: 522229 - DNA, 15 bp, Homo sapiens
gtctgtctcaggtgt

SEQ ID NO: 522230 - DNA, 15 bp, Homo sapiens
agtctgtctcaggtg

SEQ ID NO: 522231 - DNA, 15 bp, Homo sapiens
tagtctgtctcaggt

SEQ ID NO: 522232 - DNA, 15 bp, Homo sapiens
ctagtctgtctcagg

SEQ ID NO: 522233 - DNA, 15 bp, Homo sapiens
cctagtctgtctcag

SEQ ID NO: 522234 - DNA, 15 bp, Homo sapiens
ccctagtctgtctca

SEQ ID NO: 522235 - DNA, 15 bp, Homo sapiens
accctagtctgtctc

SEQ ID NO: 522236 - DNA, 15 bp, Homo sapiens
taccctagtctgtct

SEQ ID NO: 522237 - DNA, 15 bp, Homo sapiens
ctaccctagtctgtc

SEQ ID NO: 522238 - DNA, 15 bp, Homo sapiens
actaccctagtctgt

SEQ ID NO: 522239 - DNA, 15 bp, Homo sapiens
aactaccctagtctg

SEQ ID NO: 522240 - DNA, 15 bp, Homo sapiens
taactaccctagtct

SEQ ID NO: 522241 - DNA, 15 bp, Homo sapiens
ataactaccctagtc

SEQ ID NO: 522242 - DNA, 15 bp, Homo sapiens
aataactaccctagt

SEQ ID NO: 522243 - DNA, 15 bp, Homo sapiens
aaataactaccctag

SEQ ID NO: 522244 - DNA, 15 bp, Homo sapiens
caaataactacccta

SEQ ID NO: 522245 - DNA, 15 bp, Homo sapiens
acaaataactaccct

SEQ ID NO: 522246 - DNA, 15 bp, Homo sapiens
cacaaataactaccc

SEQ ID NO: 522247 - DNA, 15 bp, Homo sapiens
ccacaaataactacc

SEQ ID NO: 522248 - DNA, 15 bp, Homo sapiens
accacaaataactac

SEQ ID NO: 522249 - DNA, 15 bp, Homo sapiens
caccacaaataacta

SEQ ID NO: 522250 - DNA, 15 bp, Homo sapiens
acaccacaaataact

SEQ ID NO: 522251 - DNA, 15 bp, Homo sapiens
tacaccacaaataac

SEQ ID NO: 522252 - DNA, 15 bp, Homo sapiens
ctacaccacaaataa

SEQ ID NO: 522253 - DNA, 15 bp, Homo sapiens
tctacaccacaaata

SEQ ID NO: 522254 - DNA, 15 bp, Homo sapiens
ctctacaccacaaat

SEQ ID NO: 522255 - DNA, 15 bp, Homo sapiens
cctctacaccacaaa

SEQ ID NO: 522256 - DNA, 15 bp, Homo sapiens
gcctctacaccacaa

SEQ ID NO: 522257 - DNA, 15 bp, Homo sapiens
tgcctctacaccaca

SEQ ID NO: 522258 - DNA, 15 bp, Homo sapiens
atgcctctacaccac

SEQ ID NO: 522259 - DNA, 15 bp, Homo sapiens
gatgcctctacacca

SEQ ID NO: 522260 - DNA, 15 bp, Homo sapiens
agatgcctctacacc

SEQ ID NO: 522261 - DNA, 15 bp, Homo sapiens
aagatgcctctacac

SEQ ID NO: 522262 - DNA, 15 bp, Homo sapiens
caagatgcctctaca

SEQ ID NO: 522263 - DNA, 15 bp, Homo sapiens
ccaagatgcctctac

SEQ ID NO: 522264 - DNA, 15 bp, Homo sapiens
gccaagatgcctcta

SEQ ID NO: 522265 - DNA, 15 bp, Homo sapiens
tgccaagatgcctct

SEQ ID NO: 522266 - DNA, 15 bp, Homo sapiens
ctgccaagatgcctc

SEQ ID NO: 522267 - DNA, 15 bp, Homo sapiens
cctgccaagatgcct

SEQ ID NO: 522268 - DNA, 15 bp, Homo sapiens
tcctgccaagatgcc

SEQ ID NO: 522269 - DNA, 15 bp, Homo sapiens
ctcctgccaagatgc

SEQ ID NO: 522270 - DNA, 15 bp, Homo sapiens
cctcctgccaagatg

SEQ ID NO: 522271 - DNA, 15 bp, Homo sapiens
gcctcctgccaagat

SEQ ID NO: 522272 - DNA, 15 bp, Homo sapiens
tgcctcctgccaaga

SEQ ID NO: 522273 - DNA, 15 bp, Homo sapiens
ctgcctcctgccaag

SEQ ID NO: 522274 - DNA, 15 bp, Homo sapiens
tctgcctcctgccaa

SEQ ID NO: 522275 - DNA, 15 bp, Homo sapiens
ctctgcctcctgcca

SEQ ID NO: 522276 - DNA, 15 bp, Homo sapiens
tctctgcctcctgcc

SEQ ID NO: 522277 - DNA, 15 bp, Homo sapiens
ctctctgcctcctgc

SEQ ID NO: 522278 - DNA, 15 bp, Homo sapiens
actctctgcctcctg

SEQ ID NO: 522279 - DNA, 15 bp, Homo sapiens
cactctctgcctcct

SEQ ID NO: 522280 - DNA, 15 bp, Homo sapiens
gcactctctgcctcc

SEQ ID NO: 522281 - DNA, 15 bp, Homo sapiens
agcactctctgcctc

SEQ ID NO: 522282 - DNA, 15 bp, Homo sapiens
cagcactctctgcct

SEQ ID NO: 522283 - DNA, 15 bp, Homo sapiens
ccagcactctctgcc

SEQ ID NO: 522284 - DNA, 15 bp, Homo sapiens
cccagcactctctgc

SEQ ID NO: 522285 - DNA, 15 bp, Homo sapiens
gcccagcactctctg

SEQ ID NO: 522286 - DNA, 15 bp, Homo sapiens
agcccagcactctct

SEQ ID NO: 522287 - DNA, 15 bp, Homo sapiens
cagcccagcactctc

SEQ ID NO: 522288 - DNA, 15 bp, Homo sapiens
ccagcccagcactct

SEQ ID NO: 522289 - DNA, 15 bp, Homo sapiens
cccagcccagcactc

SEQ ID NO: 522290 - DNA, 15 bp, Homo sapiens
tcccagcccagcact

SEQ ID NO: 522291 - DNA, 15 bp, Homo sapiens
ctcccagcccagcac

SEQ ID NO: 522292 - DNA, 15 bp, Homo sapiens
actcccagcccagca

SEQ ID NO: 522293 - DNA, 15 bp, Homo sapiens
gactcccagcccagc

SEQ ID NO: 522294 - DNA, 15 bp, Homo sapiens
tgactcccagcccag

SEQ ID NO: 522295 - DNA, 15 bp, Homo sapiens
ctgactcccagccca

SEQ ID NO: 522296 - DNA, 15 bp, Homo sapiens
cctgactcccagccc

SEQ ID NO: 522297 - DNA, 15 bp, Homo sapiens
tcctgactcccagcc

SEQ ID NO: 522298 - DNA, 15 bp, Homo sapiens
gtcctgactcccagc

SEQ ID NO: 522299 - DNA, 15 bp, Homo sapiens
tgtcctgactcccag

SEQ ID NO: 522300 - DNA, 15 bp, Homo sapiens
gtgtcctgactccca

SEQ ID NO: 522301 - DNA, 15 bp, Homo sapiens
cgtgtcctgactccc

SEQ ID NO: 522302 - DNA, 15 bp, Homo sapiens
acgtgtcctgactcc

SEQ ID NO: 522303 - DNA, 15 bp, Homo sapiens
aacgtgtcctgactc

SEQ ID NO: 522304 - DNA, 15 bp, Homo sapiens
caacgtgtcctgact

SEQ ID NO: 522305 - DNA, 15 bp, Homo sapiens
acaacgtgtcctgac

SEQ ID NO: 522306 - DNA, 15 bp, Homo sapiens
aacaacgtgtcctga

SEQ ID NO: 522307 - DNA, 15 bp, Homo sapiens
aaacaacgtgtcctg

SEQ ID NO: 522308 - DNA, 15 bp, Homo sapiens
gaaacaacgtgtcct

SEQ ID NO: 522309 - DNA, 15 bp, Homo sapiens
agaaacaacgtgtcc

SEQ ID NO: 522310 - DNA, 15 bp, Homo sapiens
tagaaacaacgtgtc

SEQ ID NO: 522311 - DNA, 15 bp, Homo sapiens
atagaaacaacgtgt

SEQ ID NO: 522312 - DNA, 15 bp, Homo sapiens
catagaaacaacgtg

SEQ ID NO: 522313 - DNA, 15 bp, Homo sapiens
acatagaaacaacgt

SEQ ID NO: 522314 - DNA, 15 bp, Homo sapiens
aacatagaaacaacg

SEQ ID NO: 522315 - DNA, 15 bp, Homo sapiens
aaacatagaaacaac

SEQ ID NO: 522316 - DNA, 15 bp, Homo sapiens
caaacatagaaacaa

SEQ ID NO: 522317 - DNA, 15 bp, Homo sapiens
ccaaacatagaaaca

SEQ ID NO: 522318 - DNA, 15 bp, Homo sapiens
accaaacatagaaac

SEQ ID NO: 522319 - DNA, 15 bp, Homo sapiens
aaccaaacatagaaa

SEQ ID NO: 522320 - DNA, 15 bp, Homo sapiens
aaaccaaacatagaa

SEQ ID NO: 522321 - DNA, 15 bp, Homo sapiens
aaaaccaaacataga

SEQ ID NO: 522322 - DNA, 15 bp, Homo sapiens
caaaaccaaacatag

SEQ ID NO: 522323 - DNA, 15 bp, Homo sapiens
gcaaaaccaaacata

SEQ ID NO: 522324 - DNA, 15 bp, Homo sapiens
ggcaaaaccaaacat

SEQ ID NO: 522325 - DNA, 15 bp, Homo sapiens
tggcaaaaccaaaca

SEQ ID NO: 522326 - DNA, 15 bp, Homo sapiens
gtggcaaaaccaaac

SEQ ID NO: 522327 - DNA, 15 bp, Homo sapiens
agtggcaaaaccaaa

SEQ ID NO: 522328 - DNA, 15 bp, Homo sapiens
cagtggcaaaaccaa

SEQ ID NO: 522329 - DNA, 15 bp, Homo sapiens
acagtggcaaaacca

SEQ ID NO: 522330 - DNA, 15 bp, Homo sapiens
gacagtggcaaaacc

SEQ ID NO: 522331 - DNA, 15 bp, Homo sapiens
agacagtggcaaaac

SEQ ID NO: 522332 - DNA, 15 bp, Homo sapiens
aagacagtggcaaaa

SEQ ID NO: 522333 - DNA, 15 bp, Homo sapiens
aaagacagtggcaaa

SEQ ID NO: 522334 - DNA, 15 bp, Homo sapiens
taaagacagtggcaa

SEQ ID NO: 522335 - DNA, 15 bp, Homo sapiens
gtaaagacagtggca

SEQ ID NO: 522336 - DNA, 15 bp, Homo sapiens
agtaaagacagtggc

SEQ ID NO: 522337 - DNA, 15 bp, Homo sapiens
cagtaaagacagtgg

SEQ ID NO: 522338 - DNA, 15 bp, Homo sapiens
acagtaaagacagtg

SEQ ID NO: 522339 - DNA, 15 bp, Homo sapiens
cacagtaaagacagt

SEQ ID NO: 522340 - DNA, 15 bp, Homo sapiens
tcacagtaaagacag

SEQ ID NO: 522341 - DNA, 15 bp, Homo sapiens
gtcacagtaaagaca

SEQ ID NO: 522342 - DNA, 15 bp, Homo sapiens
ggtcacagtaaagac

SEQ ID NO: 522343 - DNA, 15 bp, Homo sapiens
tggtcacagtaaaga

SEQ ID NO: 522344 - DNA, 15 bp, Homo sapiens
atggtcacagtaaag

SEQ ID NO: 522345 - DNA, 15 bp, Homo sapiens
tatggtcacagtaaa

SEQ ID NO: 522346 - DNA, 15 bp, Homo sapiens
ctatggtcacagtaa

SEQ ID NO: 522347 - DNA, 15 bp, Homo sapiens
cctatggtcacagta

SEQ ID NO: 522348 - DNA, 15 bp, Homo sapiens
gcctatggtcacagt

SEQ ID NO: 522349 - DNA, 15 bp, Homo sapiens
agcctatggtcacag

SEQ ID NO: 522350 - DNA, 15 bp, Homo sapiens
cagcctatggtcaca

SEQ ID NO: 522351 - DNA, 15 bp, Homo sapiens
tcagcctatggtcac

SEQ ID NO: 522352 - DNA, 15 bp, Homo sapiens
ctcagcctatggtca

SEQ ID NO: 522353 - DNA, 15 bp, Homo sapiens
tctcagcctatggtc

SEQ ID NO: 522354 - DNA, 15 bp, Homo sapiens
gtctcagcctatggt

SEQ ID NO: 522355 - DNA, 15 bp, Homo sapiens
tgtctcagcctatgg

SEQ ID NO: 522356 - DNA, 15 bp, Homo sapiens
gtgtctcagcctatg

SEQ ID NO: 522357 - DNA, 15 bp, Homo sapiens
agtgtctcagcctat

SEQ ID NO: 522358 - DNA, 15 bp, Homo sapiens
gagtgtctcagccta

SEQ ID NO: 522359 - DNA, 15 bp, Homo sapiens
agagtgtctcagcct

SEQ ID NO: 522360 - DNA, 15 bp, Homo sapiens
gagagtgtctcagcc

SEQ ID NO: 522361 - DNA, 15 bp, Homo sapiens
agagagtgtctcagc

SEQ ID NO: 522362 - DNA, 15 bp, Homo sapiens
tagagagtgtctcag

SEQ ID NO: 522363 - DNA, 15 bp, Homo sapiens
atagagagtgtctca

SEQ ID NO: 522364 - DNA, 15 bp, Homo sapiens
gatagagagtgtctc

SEQ ID NO: 522365 - DNA, 15 bp, Homo sapiens
agatagagagtgtct

SEQ ID NO: 522366 - DNA, 15 bp, Homo sapiens
aagatagagagtgtc

SEQ ID NO: 522367 - DNA, 15 bp, Homo sapiens
gaagatagagagtgt

SEQ ID NO: 522368 - DNA, 15 bp, Homo sapiens
tgaagatagagagtg

SEQ ID NO: 522369 - DNA, 15 bp, Homo sapiens
gtgaagatagagagt

SEQ ID NO: 522370 - DNA, 15 bp, Homo sapiens
ggtgaagatagagag

SEQ ID NO: 522371 - DNA, 15 bp, Homo sapiens
tggtgaagatagaga

SEQ ID NO: 522372 - DNA, 15 bp, Homo sapiens
atggtgaagatagag

SEQ ID NO: 522373 - DNA, 15 bp, Homo sapiens
gatggtgaagataga

SEQ ID NO: 522374 - DNA, 15 bp, Homo sapiens
agatggtgaagatag

SEQ ID NO: 522375 - DNA, 15 bp, Homo sapiens
cagatggtgaagata

SEQ ID NO: 522376 - DNA, 15 bp, Homo sapiens
gcagatggtgaagat

SEQ ID NO: 522377 - DNA, 15 bp, Homo sapiens
tgcagatggtgaaga

SEQ ID NO: 522378 - DNA, 15 bp, Homo sapiens
ctgcagatggtgaag

SEQ ID NO: 522379 - DNA, 15 bp, Homo sapiens
cctgcagatggtgaa

SEQ ID NO: 522380 - DNA, 15 bp, Homo sapiens
tcctgcagatggtga

SEQ ID NO: 522381 - DNA, 15 bp, Homo sapiens
atcctgcagatggtg

SEQ ID NO: 522382 - DNA, 15 bp, Homo sapiens
tatcctgcagatggt

SEQ ID NO: 522383 - DNA, 15 bp, Homo sapiens
atatcctgcagatgg

SEQ ID NO: 522384 - DNA, 15 bp, Homo sapiens
gatatcctgcagatg

SEQ ID NO: 522385 - DNA, 15 bp, Homo sapiens
cgatatcctgcagat

SEQ ID NO: 522386 - DNA, 15 bp, Homo sapiens
tcgatatcctgcaga

SEQ ID NO: 522387 - DNA, 15 bp, Homo sapiens
atcgatatcctgcag

SEQ ID NO: 522388 - DNA, 15 bp, Homo sapiens
aatcgatatcctgca

SEQ ID NO: 522389 - DNA, 15 bp, Homo sapiens
taatcgatatcctgc

SEQ ID NO: 522390 - DNA, 15 bp, Homo sapiens
ctaatcgatatcctg

SEQ ID NO: 522391 - DNA, 15 bp, Homo sapiens
actaatcgatatcct

SEQ ID NO: 522392 - DNA, 15 bp, Homo sapiens
cactaatcgatatcc

SEQ ID NO: 522393 - DNA, 15 bp, Homo sapiens
acactaatcgatatc

SEQ ID NO: 522394 - DNA, 15 bp, Homo sapiens
aacactaatcgatat

SEQ ID NO: 522395 - DNA, 15 bp, Homo sapiens
taacactaatcgata

SEQ ID NO: 522396 - DNA, 15 bp, Homo sapiens
ctaacactaatcgat

SEQ ID NO: 522397 - DNA, 15 bp, Homo sapiens
actaacactaatcga

SEQ ID NO: 522398 - DNA, 15 bp, Homo sapiens
cactaacactaatcg

SEQ ID NO: 522399 - DNA, 15 bp, Homo sapiens
acactaacactaatc

SEQ ID NO: 522400 - DNA, 15 bp, Homo sapiens
gacactaacactaat

SEQ ID NO: 522401 - DNA, 15 bp, Homo sapiens
agacactaacactaa

SEQ ID NO: 522402 - DNA, 15 bp, Homo sapiens
aagacactaacacta

SEQ ID NO: 522403 - DNA, 15 bp, Homo sapiens
gaagacactaacact

SEQ ID NO: 522404 - DNA, 15 bp, Homo sapiens
agaagacactaacac

SEQ ID NO: 522405 - DNA, 15 bp, Homo sapiens
cagaagacactaaca

SEQ ID NO: 522406 - DNA, 15 bp, Homo sapiens
tcagaagacactaac

SEQ ID NO: 522407 - DNA, 15 bp, Homo sapiens
ttcagaagacactaa

SEQ ID NO: 522408 - DNA, 15 bp, Homo sapiens
tttcagaagacacta

SEQ ID NO: 522409 - DNA, 15 bp, Homo sapiens
ttttcagaagacact

SEQ ID NO: 522410 - DNA, 15 bp, Homo sapiens
attttcagaagacac

SEQ ID NO: 522411 - DNA, 15 bp, Homo sapiens
cattttcagaagaca

SEQ ID NO: 522412 - DNA, 15 bp, Homo sapiens
acattttcagaagac

SEQ ID NO: 522413 - DNA, 15 bp, Homo sapiens
aacattttcagaaga

SEQ ID NO: 522414 - DNA, 15 bp, Homo sapiens
taacattttcagaag

SEQ ID NO: 522415 - DNA, 15 bp, Homo sapiens
ttaacattttcagaa

SEQ ID NO: 522416 - DNA, 15 bp, Homo sapiens
tttaacattttcaga

SEQ ID NO: 522417 - DNA, 15 bp, Homo sapiens
atttaacattttcag

SEQ ID NO: 522418 - DNA, 15 bp, Homo sapiens
aatttaacattttca

SEQ ID NO: 522419 - DNA, 15 bp, Homo sapiens
caatttaacattttc

SEQ ID NO: 522420 - DNA, 15 bp, Homo sapiens
acaatttaacatttt

SEQ ID NO: 522421 - DNA, 15 bp, Homo sapiens
aacaatttaacattt

SEQ ID NO: 522422 - DNA, 15 bp, Homo sapiens
gaacaatttaacatt

SEQ ID NO: 522423 - DNA, 15 bp, Homo sapiens
agaacaatttaacat

SEQ ID NO: 522424 - DNA, 15 bp, Homo sapiens
cagaacaatttaaca

SEQ ID NO: 522425 - DNA, 15 bp, Homo sapiens
tcagaacaatttaac

SEQ ID NO: 522426 - DNA, 15 bp, Homo sapiens
ttcagaacaatttaa

SEQ ID NO: 522427 - DNA, 15 bp, Homo sapiens
gttcagaacaattta

SEQ ID NO: 522428 - DNA, 15 bp, Homo sapiens
tgttcagaacaattt

SEQ ID NO: 522429 - DNA, 15 bp, Homo sapiens
gtgttcagaacaatt

SEQ ID NO: 522430 - DNA, 15 bp, Homo sapiens
ggtgttcagaacaat

SEQ ID NO: 522431 - DNA, 15 bp, Homo sapiens
tggtgttcagaacaa

SEQ ID NO: 522432 - DNA, 15 bp, Homo sapiens
ctggtgttcagaaca

SEQ ID NO: 522433 - DNA, 15 bp, Homo sapiens
cctggtgttcagaac

SEQ ID NO: 522434 - DNA, 15 bp, Homo sapiens
tcctggtgttcagaa

SEQ ID NO: 522435 - DNA, 15 bp, Homo sapiens
ctcctggtgttcaga

SEQ ID NO: 522436 - DNA, 15 bp, Homo sapiens
cctcctggtgttcag

SEQ ID NO: 522437 - DNA, 15 bp, Homo sapiens
acctcctggtgttca

SEQ ID NO: 522438 - DNA, 15 bp, Homo sapiens
aacctcctggtgttc

SEQ ID NO: 522439 - DNA, 15 bp, Homo sapiens
gaacctcctggtgtt

SEQ ID NO: 522440 - DNA, 15 bp, Homo sapiens
tgaacctcctggtgt

SEQ ID NO: 522441 - DNA, 15 bp, Homo sapiens
ctgaacctcctggtg

SEQ ID NO: 522442 - DNA, 15 bp, Homo sapiens
tctgaacctcctggt

SEQ ID NO: 522443 - DNA, 15 bp, Homo sapiens
ttctgaacctcctgg

SEQ ID NO: 522444 - DNA, 15 bp, Homo sapiens
cttctgaacctcctg

SEQ ID NO: 522445 - DNA, 15 bp, Homo sapiens
ccttctgaacctcct

SEQ ID NO: 522446 - DNA, 15 bp, Homo sapiens
gccttctgaacctcc

SEQ ID NO: 522447 - DNA, 15 bp, Homo sapiens
ggccttctgaacctc

SEQ ID NO: 522448 - DNA, 15 bp, Homo sapiens
aggccttctgaacct

SEQ ID NO: 522449 - DNA, 15 bp, Homo sapiens
caggccttctgaacc

SEQ ID NO: 522450 - DNA, 15 bp, Homo sapiens
ccaggccttctgaac

SEQ ID NO: 522451 - DNA, 15 bp, Homo sapiens
cccaggccttctgaa

SEQ ID NO: 522452 - DNA, 15 bp, Homo sapiens
ccccaggccttctga

SEQ ID NO: 522453 - DNA, 15 bp, Homo sapiens
gccccaggccttctg

SEQ ID NO: 522454 - DNA, 15 bp, Homo sapiens
agccccaggccttct

SEQ ID NO: 522455 - DNA, 15 bp, Homo sapiens
aagccccaggccttc

SEQ ID NO: 522456 - DNA, 15 bp, Homo sapiens
aaagccccaggcctt

SEQ ID NO: 522457 - DNA, 15 bp, Homo sapiens
taaagccccaggcct

SEQ ID NO: 522458 - DNA, 15 bp, Homo sapiens
ctaaagccccaggcc

SEQ ID NO: 522459 - DNA, 15 bp, Homo sapiens
cctaaagccccaggc

SEQ ID NO: 522460 - DNA, 15 bp, Homo sapiens
gcctaaagccccagg

SEQ ID NO: 522461 - DNA, 15 bp, Homo sapiens
ggcctaaagccccag

SEQ ID NO: 522462 - DNA, 15 bp, Homo sapiens
cggcctaaagcccca

SEQ ID NO: 522463 - DNA, 15 bp, Homo sapiens
ccggcctaaagcccc

SEQ ID NO: 522464 - DNA, 15 bp, Homo sapiens
tccggcctaaagccc

SEQ ID NO: 522465 - DNA, 15 bp, Homo sapiens
ttccggcctaaagcc

SEQ ID NO: 522466 - DNA, 15 bp, Homo sapiens
cttccggcctaaagc

SEQ ID NO: 522467 - DNA, 15 bp, Homo sapiens
gcttccggcctaaag

SEQ ID NO: 522468 - DNA, 15 bp, Homo sapiens
tgcttccggcctaaa

SEQ ID NO: 522469 - DNA, 15 bp, Homo sapiens
ctgcttccggcctaa

SEQ ID NO: 522470 - DNA, 15 bp, Homo sapiens
actgcttccggccta

SEQ ID NO: 522471 - DNA, 15 bp, Homo sapiens
gactgcttccggcct

SEQ ID NO: 522472 - DNA, 15 bp, Homo sapiens
agactgcttccggcc

SEQ ID NO: 522473 - DNA, 15 bp, Homo sapiens
aagactgcttccggc

SEQ ID NO: 522474 - DNA, 15 bp, Homo sapiens
taagactgcttccgg

SEQ ID NO: 522475 - DNA, 15 bp, Homo sapiens
ataagactgcttccg

SEQ ID NO: 522476 - DNA, 15 bp, Homo sapiens
gataagactgcttcc

SEQ ID NO: 522477 - DNA, 15 bp, Homo sapiens
ggataagactgcttc

SEQ ID NO: 522478 - DNA, 15 bp, Homo sapiens
aggataagactgctt

SEQ ID NO: 522479 - DNA, 15 bp, Homo sapiens
taggataagactgct

SEQ ID NO: 522480 - DNA, 15 bp, Homo sapiens
ctaggataagactgc

SEQ ID NO: 522481 - DNA, 15 bp, Homo sapiens
gctaggataagactg

SEQ ID NO: 522482 - DNA, 15 bp, Homo sapiens
ggctaggataagact

SEQ ID NO: 522483 - DNA, 15 bp, Homo sapiens
aggctaggataagac

SEQ ID NO: 522484 - DNA, 15 bp, Homo sapiens
aaggctaggataaga

SEQ ID NO: 522485 - DNA, 15 bp, Homo sapiens
gaaggctaggataag

SEQ ID NO: 522486 - DNA, 15 bp, Homo sapiens
ggaaggctaggataa

SEQ ID NO: 522487 - DNA, 15 bp, Homo sapiens
tggaaggctaggata

SEQ ID NO: 522488 - DNA, 15 bp, Homo sapiens
gtggaaggctaggat

SEQ ID NO: 522489 - DNA, 15 bp, Homo sapiens
agtggaaggctagga

SEQ ID NO: 522490 - DNA, 15 bp, Homo sapiens
aagtggaaggctagg

SEQ ID NO: 522491 - DNA, 15 bp, Homo sapiens
aaagtggaaggctag

SEQ ID NO: 522492 - DNA, 15 bp, Homo sapiens
gaaagtggaaggcta

SEQ ID NO: 522493 - DNA, 15 bp, Homo sapiens
agaaagtggaaggct

SEQ ID NO: 522494 - DNA, 15 bp, Homo sapiens
gagaaagtggaaggc

SEQ ID NO: 522495 - DNA, 15 bp, Homo sapiens
tgagaaagtggaagg

SEQ ID NO: 522496 - DNA, 15 bp, Homo sapiens
atgagaaagtggaag

SEQ ID NO: 522497 - DNA, 15 bp, Homo sapiens
aatgagaaagtggaa

SEQ ID NO: 522498 - DNA, 15 bp, Homo sapiens
gaatgagaaagtgga

SEQ ID NO: 522499 - DNA, 15 bp, Homo sapiens
tgaatgagaaagtgg

SEQ ID NO: 522500 - DNA, 15 bp, Homo sapiens
atgaatgagaaagtg

SEQ ID NO: 522501 - DNA, 15 bp, Homo sapiens
aatgaatgagaaagt

SEQ ID NO: 522502 - DNA, 15 bp, Homo sapiens
gaatgaatgagaaag

SEQ ID NO: 522503 - DNA, 15 bp, Homo sapiens
agaatgaatgagaaa

SEQ ID NO: 522504 - DNA, 15 bp, Homo sapiens
gagaatgaatgagaa

SEQ ID NO: 522505 - DNA, 15 bp, Homo sapiens
tgagaatgaatgaga

SEQ ID NO: 522506 - DNA, 15 bp, Homo sapiens
gtgagaatgaatgag

SEQ ID NO: 522507 - DNA, 15 bp, Homo sapiens
ggtgagaatgaatga

SEQ ID NO: 522508 - DNA, 15 bp, Homo sapiens
gggtgagaatgaatg

SEQ ID NO: 522509 - DNA, 15 bp, Homo sapiens
cgggtgagaatgaat

SEQ ID NO: 522510 - DNA, 15 bp, Homo sapiens
gcgggtgagaatgaa

SEQ ID NO: 522511 - DNA, 15 bp, Homo sapiens
ggcgggtgagaatga

SEQ ID NO: 522512 - DNA, 15 bp, Homo sapiens
aggcgggtgagaatg

SEQ ID NO: 522513 - DNA, 15 bp, Homo sapiens
aaggcgggtgagaat

SEQ ID NO: 522514 - DNA, 15 bp, Homo sapiens
gaaggcgggtgagaa

SEQ ID NO: 522515 - DNA, 15 bp, Homo sapiens
ggaaggcgggtgaga

SEQ ID NO: 522516 - DNA, 15 bp, Homo sapiens
aggaaggcgggtgag

SEQ ID NO: 522517 - DNA, 15 bp, Homo sapiens
gaggaaggcgggtga

SEQ ID NO: 522518 - DNA, 15 bp, Homo sapiens
ggaggaaggcgggtg

SEQ ID NO: 522519 - DNA, 15 bp, Homo sapiens
aggaggaaggcgggt

SEQ ID NO: 522520 - DNA, 15 bp, Homo sapiens
caggaggaaggcggg

SEQ ID NO: 522521 - DNA, 15 bp, Homo sapiens
acaggaggaaggcgg

SEQ ID NO: 522522 - DNA, 15 bp, Homo sapiens
gacaggaggaaggcg

SEQ ID NO: 522523 - DNA, 15 bp, Homo sapiens
tgacaggaggaaggc

SEQ ID NO: 522524 - DNA, 15 bp, Homo sapiens
ctgacaggaggaagg

SEQ ID NO: 522525 - DNA, 15 bp, Homo sapiens
actgacaggaggaag

SEQ ID NO: 522526 - DNA, 15 bp, Homo sapiens
aactgacaggaggaa

SEQ ID NO: 522527 - DNA, 15 bp, Homo sapiens
aaactgacaggagga

SEQ ID NO: 522528 - DNA, 15 bp, Homo sapiens
gaaactgacaggagg

SEQ ID NO: 522529 - DNA, 15 bp, Homo sapiens
agaaactgacaggag

SEQ ID NO: 522530 - DNA, 15 bp, Homo sapiens
gagaaactgacagga

SEQ ID NO: 522531 - DNA, 15 bp, Homo sapiens
agagaaactgacagg

SEQ ID NO: 522532 - DNA, 15 bp, Homo sapiens
gagagaaactgacag

SEQ ID NO: 522533 - DNA, 15 bp, Homo sapiens
agagagaaactgaca

SEQ ID NO: 522534 - DNA, 15 bp, Homo sapiens
gagagagaaactgac

SEQ ID NO: 522535 - DNA, 15 bp, Homo sapiens
ggagagagaaactga

SEQ ID NO: 522536 - DNA, 15 bp, Homo sapiens
gggagagagaaactg

SEQ ID NO: 522537 - DNA, 15 bp, Homo sapiens
agggagagagaaact

SEQ ID NO: 522538 - DNA, 15 bp, Homo sapiens
aagggagagagaaac

SEQ ID NO: 522539 - DNA, 15 bp, Homo sapiens
taagggagagagaaa

SEQ ID NO: 522540 - DNA, 15 bp, Homo sapiens
ctaagggagagagaa

SEQ ID NO: 522541 - DNA, 15 bp, Homo sapiens
tctaagggagagaga

SEQ ID NO: 522542 - DNA, 15 bp, Homo sapiens
atctaagggagagag

SEQ ID NO: 522543 - DNA, 15 bp, Homo sapiens
gatctaagggagaga

SEQ ID NO: 522544 - DNA, 15 bp, Homo sapiens
agatctaagggagag

SEQ ID NO: 522545 - DNA, 15 bp, Homo sapiens
aagatctaagggaga

SEQ ID NO: 522546 - DNA, 15 bp, Homo sapiens
caagatctaagggag

SEQ ID NO: 522547 - DNA, 15 bp, Homo sapiens
acaagatctaaggga

SEQ ID NO: 522548 - DNA, 15 bp, Homo sapiens
cacaagatctaaggg

SEQ ID NO: 522549 - DNA, 15 bp, Homo sapiens
tcacaagatctaagg

SEQ ID NO: 522550 - DNA, 15 bp, Homo sapiens
gtcacaagatctaag

SEQ ID NO: 522551 - DNA, 15 bp, Homo sapiens
tgtcacaagatctaa

SEQ ID NO: 522552 - DNA, 15 bp, Homo sapiens
ctgtcacaagatcta

SEQ ID NO: 522553 - DNA, 15 bp, Homo sapiens
actgtcacaagatct

SEQ ID NO: 522554 - DNA, 15 bp, Homo sapiens
tactgtcacaagatc

SEQ ID NO: 522555 - DNA, 15 bp, Homo sapiens
atactgtcacaagat

SEQ ID NO: 522556 - DNA, 15 bp, Homo sapiens
catactgtcacaaga

SEQ ID NO: 522557 - DNA, 15 bp, Homo sapiens
tcatactgtcacaag

SEQ ID NO: 522558 - DNA, 15 bp, Homo sapiens
atcatactgtcacaa

SEQ ID NO: 522559 - DNA, 15 bp, Homo sapiens
aatcatactgtcaca

SEQ ID NO: 522560 - DNA, 15 bp, Homo sapiens
caatcatactgtcac

SEQ ID NO: 522561 - DNA, 15 bp, Homo sapiens
gcaatcatactgtca

SEQ ID NO: 522562 - DNA, 15 bp, Homo sapiens
tgcaatcatactgtc

SEQ ID NO: 522563 - DNA, 15 bp, Homo sapiens
ttgcaatcatactgt

SEQ ID NO: 522564 - DNA, 15 bp, Homo sapiens
attgcaatcatactg

SEQ ID NO: 522565 - DNA, 15 bp, Homo sapiens
aattgcaatcatact

SEQ ID NO: 522566 - DNA, 15 bp, Homo sapiens
taattgcaatcatac

SEQ ID NO: 522567 - DNA, 15 bp, Homo sapiens
ataattgcaatcata

SEQ ID NO: 522568 - DNA, 15 bp, Homo sapiens
aataattgcaatcat

SEQ ID NO: 522569 - DNA, 15 bp, Homo sapiens
taataattgcaatca

SEQ ID NO: 522570 - DNA, 15 bp, Homo sapiens
ataataattgcaatc

SEQ ID NO: 522571 - DNA, 15 bp, Homo sapiens
cataataattgcaat

SEQ ID NO: 522572 - DNA, 15 bp, Homo sapiens
tcataataattgcaa

SEQ ID NO: 522573 - DNA, 15 bp, Homo sapiens
ttcataataattgca

SEQ ID NO: 522574 - DNA, 15 bp, Homo sapiens
cttcataataattgc

SEQ ID NO: 522575 - DNA, 15 bp, Homo sapiens
ccttcataataattg

SEQ ID NO: 522576 - DNA, 15 bp, Homo sapiens
accttcataataatt

SEQ ID NO: 522577 - DNA, 15 bp, Homo sapiens
gaccttcataataat

SEQ ID NO: 522578 - DNA, 15 bp, Homo sapiens
tgaccttcataataa

SEQ ID NO: 522579 - DNA, 15 bp, Homo sapiens
atgaccttcataata

SEQ ID NO: 522580 - DNA, 15 bp, Homo sapiens
tatgaccttcataat

SEQ ID NO: 522581 - DNA, 15 bp, Homo sapiens
ttatgaccttcataa

SEQ ID NO: 522582 - DNA, 15 bp, Homo sapiens
attatgaccttcata

SEQ ID NO: 522583 - DNA, 15 bp, Homo sapiens
tattatgaccttcat

SEQ ID NO: 522584 - DNA, 15 bp, Homo sapiens
ctattatgaccttca

SEQ ID NO: 522585 - DNA, 15 bp, Homo sapiens
cctattatgaccttc

SEQ ID NO: 522586 - DNA, 15 bp, Homo sapiens
acctattatgacctt

SEQ ID NO: 522587 - DNA, 15 bp, Homo sapiens
aacctattatgacct

SEQ ID NO: 522588 - DNA, 15 bp, Homo sapiens
taacctattatgacc

SEQ ID NO: 522589 - DNA, 15 bp, Homo sapiens
ctaacctattatgac

SEQ ID NO: 522590 - DNA, 15 bp, Homo sapiens
tctaacctattatga

SEQ ID NO: 522591 - DNA, 15 bp, Homo sapiens
ctctaacctattatg

SEQ ID NO: 522592 - DNA, 15 bp, Homo sapiens
actctaacctattat

SEQ ID NO: 522593 - DNA, 15 bp, Homo sapiens
aactctaacctatta

SEQ ID NO: 522594 - DNA, 15 bp, Homo sapiens
taactctaacctatt

SEQ ID NO: 522595 - DNA, 15 bp, Homo sapiens
ataactctaacctat

SEQ ID NO: 522596 - DNA, 15 bp, Homo sapiens
aataactctaaccta

SEQ ID NO: 522597 - DNA, 15 bp, Homo sapiens
aaataactctaacct

SEQ ID NO: 522598 - DNA, 15 bp, Homo sapiens
taaataactctaacc

SEQ ID NO: 522599 - DNA, 15 bp, Homo sapiens
ctaaataactctaac

SEQ ID NO: 522600 - DNA, 15 bp, Homo sapiens
actaaataactctaa

SEQ ID NO: 522601 - DNA, 15 bp, Homo sapiens
gactaaataactcta

SEQ ID NO: 522602 - DNA, 15 bp, Homo sapiens
agactaaataactct

SEQ ID NO: 522603 - DNA, 15 bp, Homo sapiens
gagactaaataactc

SEQ ID NO: 522604 - DNA, 15 bp, Homo sapiens
tgagactaaataact

SEQ ID NO: 522605 - DNA, 15 bp, Homo sapiens
ctgagactaaataac

SEQ ID NO: 522606 - DNA, 15 bp, Homo sapiens
cctgagactaaataa

SEQ ID NO: 522607 - DNA, 15 bp, Homo sapiens
tcctgagactaaata

SEQ ID NO: 522608 - DNA, 15 bp, Homo sapiens
gtcctgagactaaat

SEQ ID NO: 522609 - DNA, 15 bp, Homo sapiens
ggtcctgagactaaa

SEQ ID NO: 522610 - DNA, 15 bp, Homo sapiens
gggtcctgagactaa

SEQ ID NO: 522611 - DNA, 15 bp, Homo sapiens
tgggtcctgagacta

SEQ ID NO: 522612 - DNA, 15 bp, Homo sapiens
atgggtcctgagact

SEQ ID NO: 522613 - DNA, 15 bp, Homo sapiens
gatgggtcctgagac

SEQ ID NO: 522614 - DNA, 15 bp, Homo sapiens
tgatgggtcctgaga

SEQ ID NO: 522615 - DNA, 15 bp, Homo sapiens
ctgatgggtcctgag

SEQ ID NO: 522616 - DNA, 15 bp, Homo sapiens
tctgatgggtcctga

SEQ ID NO: 522617 - DNA, 15 bp, Homo sapiens
atctgatgggtcctg

SEQ ID NO: 522618 - DNA, 15 bp, Homo sapiens
aatctgatgggtcct

SEQ ID NO: 522619 - DNA, 15 bp, Homo sapiens
aaatctgatgggtcc

SEQ ID NO: 522620 - DNA, 15 bp, Homo sapiens
gaaatctgatgggtc

SEQ ID NO: 522621 - DNA, 15 bp, Homo sapiens
agaaatctgatgggt

SEQ ID NO: 522622 - DNA, 15 bp, Homo sapiens
cagaaatctgatggg

SEQ ID NO: 522623 - DNA, 15 bp, Homo sapiens
tcagaaatctgatgg

SEQ ID NO: 522624 - DNA, 15 bp, Homo sapiens
ctcagaaatctgatg

SEQ ID NO: 522625 - DNA, 15 bp, Homo sapiens
tctcagaaatctgat

SEQ ID NO: 522626 - DNA, 15 bp, Homo sapiens
atctcagaaatctga

SEQ ID NO: 522627 - DNA, 15 bp, Homo sapiens
catctcagaaatctg

SEQ ID NO: 522628 - DNA, 15 bp, Homo sapiens
ccatctcagaaatct

SEQ ID NO: 522629 - DNA, 15 bp, Homo sapiens
cccatctcagaaatc

SEQ ID NO: 522630 - DNA, 15 bp, Homo sapiens
acccatctcagaaat

SEQ ID NO: 522631 - DNA, 15 bp, Homo sapiens
gacccatctcagaaa

SEQ ID NO: 522632 - DNA, 15 bp, Homo sapiens
agacccatctcagaa

SEQ ID NO: 522633 - DNA, 15 bp, Homo sapiens
aagacccatctcaga

SEQ ID NO: 522634 - DNA, 15 bp, Homo sapiens
aaagacccatctcag

SEQ ID NO: 522635 - DNA, 15 bp, Homo sapiens
aaaagacccatctca

SEQ ID NO: 522636 - DNA, 15 bp, Homo sapiens
gaaaagacccatctc

SEQ ID NO: 522637 - DNA, 15 bp, Homo sapiens
ggaaaagacccatct

SEQ ID NO: 522638 - DNA, 15 bp, Homo sapiens
tggaaaagacccatc

SEQ ID NO: 522639 - DNA, 15 bp, Homo sapiens
atggaaaagacccat

SEQ ID NO: 522640 - DNA, 15 bp, Homo sapiens
aatggaaaagaccca

SEQ ID NO: 522641 - DNA, 15 bp, Homo sapiens
taatggaaaagaccc

SEQ ID NO: 522642 - DNA, 15 bp, Homo sapiens
ctaatggaaaagacc

SEQ ID NO: 522643 - DNA, 15 bp, Homo sapiens
gctaatggaaaagac

SEQ ID NO: 522644 - DNA, 15 bp, Homo sapiens
ggctaatggaaaaga

SEQ ID NO: 522645 - DNA, 15 bp, Homo sapiens
aggctaatggaaaag

SEQ ID NO: 522646 - DNA, 15 bp, Homo sapiens
caggctaatggaaaa

SEQ ID NO: 522647 - DNA, 15 bp, Homo sapiens
gcaggctaatggaaa

SEQ ID NO: 522648 - DNA, 15 bp, Homo sapiens
ggcaggctaatggaa

SEQ ID NO: 522649 - DNA, 15 bp, Homo sapiens
aggcaggctaatgga

SEQ ID NO: 522650 - DNA, 15 bp, Homo sapiens
aaggcaggctaatgg

SEQ ID NO: 522651 - DNA, 15 bp, Homo sapiens
aaaggcaggctaatg

SEQ ID NO: 522652 - DNA, 15 bp, Homo sapiens
aaaaggcaggctaat

SEQ ID NO: 522653 - DNA, 15 bp, Homo sapiens
caaaaggcaggctaa

SEQ ID NO: 522654 - DNA, 15 bp, Homo sapiens
ccaaaaggcaggcta

SEQ ID NO: 522655 - DNA, 15 bp, Homo sapiens
tccaaaaggcaggct

SEQ ID NO: 522656 - DNA, 15 bp, Homo sapiens
atccaaaaggcaggc

SEQ ID NO: 522657 - DNA, 15 bp, Homo sapiens
tatccaaaaggcagg

SEQ ID NO: 522658 - DNA, 15 bp, Homo sapiens
atatccaaaaggcag

SEQ ID NO: 522659 - DNA, 15 bp, Homo sapiens
tatatccaaaaggca

SEQ ID NO: 522660 - DNA, 15 bp, Homo sapiens
atatatccaaaaggc

SEQ ID NO: 522661 - DNA, 15 bp, Homo sapiens
aatatatccaaaagg

SEQ ID NO: 522662 - DNA, 15 bp, Homo sapiens
aaatatatccaaaag

SEQ ID NO: 522663 - DNA, 15 bp, Homo sapiens
aaaatatatccaaaa

SEQ ID NO: 522664 - DNA, 15 bp, Homo sapiens
taaaatatatccaaa

SEQ ID NO: 522665 - DNA, 15 bp, Homo sapiens
ctaaaatatatccaa

SEQ ID NO: 522666 - DNA, 15 bp, Homo sapiens
actaaaatatatcca

SEQ ID NO: 522667 - DNA, 15 bp, Homo sapiens
cactaaaatatatcc

SEQ ID NO: 522668 - DNA, 15 bp, Homo sapiens
gcactaaaatatatc

SEQ ID NO: 522669 - DNA, 15 bp, Homo sapiens
ggcactaaaatatat

SEQ ID NO: 522670 - DNA, 15 bp, Homo sapiens
aggcactaaaatata

SEQ ID NO: 522671 - DNA, 15 bp, Homo sapiens
aaggcactaaaatat

SEQ ID NO: 522672 - DNA, 15 bp, Homo sapiens
aaaggcactaaaata

SEQ ID NO: 522673 - DNA, 15 bp, Homo sapiens
caaaggcactaaaat

SEQ ID NO: 522674 - DNA, 15 bp, Homo sapiens
tcaaaggcactaaaa

SEQ ID NO: 522675 - DNA, 15 bp, Homo sapiens
atcaaaggcactaaa

SEQ ID NO: 522676 - DNA, 15 bp, Homo sapiens
tatcaaaggcactaa

SEQ ID NO: 522677 - DNA, 15 bp, Homo sapiens
atatcaaaggcacta

SEQ ID NO: 522678 - DNA, 15 bp, Homo sapiens
aatatcaaaggcact

SEQ ID NO: 522679 - DNA, 15 bp, Homo sapiens
aaatatcaaaggcac

SEQ ID NO: 522680 - DNA, 15 bp, Homo sapiens
caaatatcaaaggca

SEQ ID NO: 522681 - DNA, 15 bp, Homo sapiens
tcaaatatcaaaggc

SEQ ID NO: 522682 - DNA, 15 bp, Homo sapiens
atcaaatatcaaagg

SEQ ID NO: 522683 - DNA, 15 bp, Homo sapiens
catcaaatatcaaag

SEQ ID NO: 522684 - DNA, 15 bp, Homo sapiens
acatcaaatatcaaa

SEQ ID NO: 522685 - DNA, 15 bp, Homo sapiens
aacatcaaatatcaa

SEQ ID NO: 522686 - DNA, 15 bp, Homo sapiens
caacatcaaatatca

SEQ ID NO: 522687 - DNA, 15 bp, Homo sapiens
ccaacatcaaatatc

SEQ ID NO: 522688 - DNA, 15 bp, Homo sapiens
accaacatcaaatat

SEQ ID NO: 522689 - DNA, 15 bp, Homo sapiens
caccaacatcaaata

SEQ ID NO: 522690 - DNA, 15 bp, Homo sapiens
tcaccaacatcaaat

SEQ ID NO: 522691 - DNA, 15 bp, Homo sapiens
gtcaccaacatcaaa

SEQ ID NO: 522692 - DNA, 15 bp, Homo sapiens
tgtcaccaacatcaa

SEQ ID NO: 522693 - DNA, 15 bp, Homo sapiens
ttgtcaccaacatca

SEQ ID NO: 522694 - DNA, 15 bp, Homo sapiens
tttgtcaccaacatc

SEQ ID NO: 522695 - DNA, 15 bp, Homo sapiens
ctttgtcaccaacat

SEQ ID NO: 522696 - DNA, 15 bp, Homo sapiens
tctttgtcaccaaca

SEQ ID NO: 522697 - DNA, 15 bp, Homo sapiens
atctttgtcaccaac

SEQ ID NO: 522698 - DNA, 15 bp, Homo sapiens
aatctttgtcaccaa

SEQ ID NO: 522699 - DNA, 15 bp, Homo sapiens
aaatctttgtcacca

SEQ ID NO: 522700 - DNA, 15 bp, Homo sapiens
taaatctttgtcacc

SEQ ID NO: 522701 - DNA, 15 bp, Homo sapiens
ctaaatctttgtcac

SEQ ID NO: 522702 - DNA, 15 bp, Homo sapiens
actaaatctttgtca

SEQ ID NO: 522703 - DNA, 15 bp, Homo sapiens
aactaaatctttgtc

SEQ ID NO: 522704 - DNA, 15 bp, Homo sapiens
gaactaaatctttgt

SEQ ID NO: 522705 - DNA, 15 bp, Homo sapiens
agaactaaatctttg

SEQ ID NO: 522706 - DNA, 15 bp, Homo sapiens
tagaactaaatcttt

SEQ ID NO: 522707 - DNA, 15 bp, Homo sapiens
ttagaactaaatctt

SEQ ID NO: 522708 - DNA, 15 bp, Homo sapiens
tttagaactaaatct

SEQ ID NO: 522709 - DNA, 15 bp, Homo sapiens
atttagaactaaatc

SEQ ID NO: 522710 - DNA, 15 bp, Homo sapiens
tatttagaactaaat

SEQ ID NO: 522711 - DNA, 15 bp, Homo sapiens
ctatttagaactaaa

SEQ ID NO: 522712 - DNA, 15 bp, Homo sapiens
actatttagaactaa

SEQ ID NO: 522713 - DNA, 15 bp, Homo sapiens
aactatttagaacta

SEQ ID NO: 522714 - DNA, 15 bp, Homo sapiens
caactatttagaact

SEQ ID NO: 522715 - DNA, 15 bp, Homo sapiens
acaactatttagaac

SEQ ID NO: 522716 - DNA, 15 bp, Homo sapiens
cacaactatttagaa

SEQ ID NO: 522717 - DNA, 15 bp, Homo sapiens
ccacaactatttaga

SEQ ID NO: 522718 - DNA, 15 bp, Homo sapiens
cccacaactatttag

SEQ ID NO: 522719 - DNA, 15 bp, Homo sapiens
tcccacaactattta

SEQ ID NO: 522720 - DNA, 15 bp, Homo sapiens
ctcccacaactattt

SEQ ID NO: 522721 - DNA, 15 bp, Homo sapiens
actcccacaactatt

SEQ ID NO: 522722 - DNA, 15 bp, Homo sapiens
gactcccacaactat

SEQ ID NO: 522723 - DNA, 15 bp, Homo sapiens
tgactcccacaacta

SEQ ID NO: 522724 - DNA, 15 bp, Homo sapiens
ttgactcccacaact

SEQ ID NO: 522725 - DNA, 15 bp, Homo sapiens
tttgactcccacaac

SEQ ID NO: 522726 - DNA, 15 bp, Homo sapiens
atttgactcccacaa

SEQ ID NO: 522727 - DNA, 15 bp, Homo sapiens
gatttgactcccaca

SEQ ID NO: 522728 - DNA, 15 bp, Homo sapiens
tgatttgactcccac

SEQ ID NO: 522729 - DNA, 15 bp, Homo sapiens
ctgatttgactccca

SEQ ID NO: 522730 - DNA, 15 bp, Homo sapiens
actgatttgactccc

SEQ ID NO: 522731 - DNA, 15 bp, Homo sapiens
aactgatttgactcc

SEQ ID NO: 522732 - DNA, 15 bp, Homo sapiens
caactgatttgactc

SEQ ID NO: 522733 - DNA, 15 bp, Homo sapiens
gcaactgatttgact

SEQ ID NO: 522734 - DNA, 15 bp, Homo sapiens
tgcaactgatttgac

SEQ ID NO: 522735 - DNA, 15 bp, Homo sapiens
atgcaactgatttga

SEQ ID NO: 522736 - DNA, 15 bp, Homo sapiens
aatgcaactgatttg

SEQ ID NO: 522737 - DNA, 15 bp, Homo sapiens
aaatgcaactgattt

SEQ ID NO: 522738 - DNA, 15 bp, Homo sapiens
aaaatgcaactgatt

SEQ ID NO: 522739 - DNA, 15 bp, Homo sapiens
aaaaatgcaactgat

SEQ ID NO: 522740 - DNA, 15 bp, Homo sapiens
caaaaatgcaactga

SEQ ID NO: 522741 - DNA, 15 bp, Homo sapiens
tcaaaaatgcaactg

SEQ ID NO: 522742 - DNA, 15 bp, Homo sapiens
ttcaaaaatgcaact

SEQ ID NO: 522743 - DNA, 15 bp, Homo sapiens
gttcaaaaatgcaac

SEQ ID NO: 522744 - DNA, 15 bp, Homo sapiens
tgttcaaaaatgcaa

SEQ ID NO: 522745 - DNA, 15 bp, Homo sapiens
atgttcaaaaatgca

SEQ ID NO: 522746 - DNA, 15 bp, Homo sapiens
aatgttcaaaaatgc

SEQ ID NO: 522747 - DNA, 15 bp, Homo sapiens
aaatgttcaaaaatg

SEQ ID NO: 522748 - DNA, 15 bp, Homo sapiens
aaaatgttcaaaaat

SEQ ID NO: 522749 - DNA, 15 bp, Homo sapiens
caaaatgttcaaaaa

SEQ ID NO: 522750 - DNA, 15 bp, Homo sapiens
tcaaaatgttcaaaa

SEQ ID NO: 522751 - DNA, 15 bp, Homo sapiens
ttcaaaatgttcaaa

SEQ ID NO: 522752 - DNA, 15 bp, Homo sapiens
cttcaaaatgttcaa

SEQ ID NO: 522753 - DNA, 15 bp, Homo sapiens
ccttcaaaatgttca

SEQ ID NO: 522754 - DNA, 15 bp, Homo sapiens
cccttcaaaatgttc

SEQ ID NO: 522755 - DNA, 15 bp, Homo sapiens
tcccttcaaaatgtt

SEQ ID NO: 522756 - DNA, 15 bp, Homo sapiens
atcccttcaaaatgt

SEQ ID NO: 522757 - DNA, 15 bp, Homo sapiens
gatcccttcaaaatg

SEQ ID NO: 522758 - DNA, 15 bp, Homo sapiens
tgatcccttcaaaat

SEQ ID NO: 522759 - DNA, 15 bp, Homo sapiens
ctgatcccttcaaaa

SEQ ID NO: 522760 - DNA, 15 bp, Homo sapiens
cctgatcccttcaaa

SEQ ID NO: 522761 - DNA, 15 bp, Homo sapiens
acctgatcccttcaa

SEQ ID NO: 522762 - DNA, 15 bp, Homo sapiens
cacctgatcccttca

SEQ ID NO: 522763 - DNA, 15 bp, Homo sapiens
ccacctgatcccttc

SEQ ID NO: 522764 - DNA, 15 bp, Homo sapiens
tccacctgatccctt

SEQ ID NO: 522765 - DNA, 15 bp, Homo sapiens
ctccacctgatccct

SEQ ID NO: 522766 - DNA, 15 bp, Homo sapiens
gctccacctgatccc

SEQ ID NO: 522767 - DNA, 15 bp, Homo sapiens
tgctccacctgatcc

SEQ ID NO: 522768 - DNA, 15 bp, Homo sapiens
gtgctccacctgatc

SEQ ID NO: 522769 - DNA, 15 bp, Homo sapiens
tgtgctccacctgat

SEQ ID NO: 522770 - DNA, 15 bp, Homo sapiens
ctgtgctccacctga

SEQ ID NO: 522771 - DNA, 15 bp, Homo sapiens
cctgtgctccacctg

SEQ ID NO: 522772 - DNA, 15 bp, Homo sapiens
tcctgtgctccacct

SEQ ID NO: 522773 - DNA, 15 bp, Homo sapiens
ttcctgtgctccacc

SEQ ID NO: 522774 - DNA, 15 bp, Homo sapiens
tttcctgtgctccac

SEQ ID NO: 522775 - DNA, 15 bp, Homo sapiens
ttttcctgtgctcca

SEQ ID NO: 522776 - DNA, 15 bp, Homo sapiens
gttttcctgtgctcc

SEQ ID NO: 522777 - DNA, 15 bp, Homo sapiens
tgttttcctgtgctc

SEQ ID NO: 522778 - DNA, 15 bp, Homo sapiens
ctgttttcctgtgct

SEQ ID NO: 522779 - DNA, 15 bp, Homo sapiens
cctgttttcctgtgc

SEQ ID NO: 522780 - DNA, 15 bp, Homo sapiens
tcctgttttcctgtg

SEQ ID NO: 522781 - DNA, 15 bp, Homo sapiens
ctcctgttttcctgt

SEQ ID NO: 522782 - DNA, 15 bp, Homo sapiens
tctcctgttttcctg

SEQ ID NO: 522783 - DNA, 15 bp, Homo sapiens
atctcctgttttcct

SEQ ID NO: 522784 - DNA, 15 bp, Homo sapiens
catctcctgttttcc

SEQ ID NO: 522785 - DNA, 15 bp, Homo sapiens
tcatctcctgttttc

SEQ ID NO: 522786 - DNA, 15 bp, Homo sapiens
ctcatctcctgtttt

SEQ ID NO: 522787 - DNA, 15 bp, Homo sapiens
tctcatctcctgttt

SEQ ID NO: 522788 - DNA, 15 bp, Homo sapiens
ctctcatctcctgtt

SEQ ID NO: 522789 - DNA, 15 bp, Homo sapiens
cctctcatctcctgt

SEQ ID NO: 522790 - DNA, 15 bp, Homo sapiens
gcctctcatctcctg

SEQ ID NO: 522791 - DNA, 15 bp, Homo sapiens
agcctctcatctcct

SEQ ID NO: 522792 - DNA, 15 bp, Homo sapiens
aagcctctcatctcc

SEQ ID NO: 522793 - DNA, 15 bp, Homo sapiens
caagcctctcatctc

SEQ ID NO: 522794 - DNA, 15 bp, Homo sapiens
tcaagcctctcatct

SEQ ID NO: 522795 - DNA, 15 bp, Homo sapiens
ctcaagcctctcatc

SEQ ID NO: 522796 - DNA, 15 bp, Homo sapiens
cctcaagcctctcat

SEQ ID NO: 522797 - DNA, 15 bp, Homo sapiens
ccctcaagcctctca

SEQ ID NO: 522798 - DNA, 15 bp, Homo sapiens
gccctcaagcctctc

SEQ ID NO: 522799 - DNA, 15 bp, Homo sapiens
agccctcaagcctct

SEQ ID NO: 522800 - DNA, 15 bp, Homo sapiens
cagccctcaagcctc

SEQ ID NO: 522801 - DNA, 15 bp, Homo sapiens
acagccctcaagcct

SEQ ID NO: 522802 - DNA, 15 bp, Homo sapiens
cacagccctcaagcc

SEQ ID NO: 522803 - DNA, 15 bp, Homo sapiens
acacagccctcaagc

SEQ ID NO: 522804 - DNA, 15 bp, Homo sapiens
aacacagccctcaag

SEQ ID NO: 522805 - DNA, 15 bp, Homo sapiens
caacacagccctcaa

SEQ ID NO: 522806 - DNA, 15 bp, Homo sapiens
ccaacacagccctca

SEQ ID NO: 522807 - DNA, 15 bp, Homo sapiens
accaacacagccctc

SEQ ID NO: 522808 - DNA, 15 bp, Homo sapiens
taccaacacagccct

SEQ ID NO: 522809 - DNA, 15 bp, Homo sapiens
ttaccaacacagccc

SEQ ID NO: 522810 - DNA, 15 bp, Homo sapiens
cttaccaacacagcc

SEQ ID NO: 522811 - DNA, 15 bp, Homo sapiens
ccttaccaacacagc

SEQ ID NO: 522812 - DNA, 15 bp, Homo sapiens
cccttaccaacacag

SEQ ID NO: 522813 - DNA, 15 bp, Homo sapiens
acccttaccaacaca

SEQ ID NO: 522814 - DNA, 15 bp, Homo sapiens
gacccttaccaacac

SEQ ID NO: 522815 - DNA, 15 bp, Homo sapiens
ggacccttaccaaca

SEQ ID NO: 522816 - DNA, 15 bp, Homo sapiens
gggacccttaccaac

SEQ ID NO: 522817 - DNA, 15 bp, Homo sapiens
agggacccttaccaa

SEQ ID NO: 522818 - DNA, 15 bp, Homo sapiens
aagggacccttacca

SEQ ID NO: 522819 - DNA, 15 bp, Homo sapiens
caagggacccttacc

SEQ ID NO: 522820 - DNA, 15 bp, Homo sapiens
tcaagggacccttac

SEQ ID NO: 522821 - DNA, 15 bp, Homo sapiens
ttcaagggaccctta

SEQ ID NO: 522822 - DNA, 15 bp, Homo sapiens
attcaagggaccctt

SEQ ID NO: 522823 - DNA, 15 bp, Homo sapiens
aattcaagggaccct

SEQ ID NO: 522824 - DNA, 15 bp, Homo sapiens
gaattcaagggaccc

SEQ ID NO: 522825 - DNA, 15 bp, Homo sapiens
agaattcaagggacc

SEQ ID NO: 522826 - DNA, 15 bp, Homo sapiens
tagaattcaagggac

SEQ ID NO: 522827 - DNA, 15 bp, Homo sapiens
ttagaattcaaggga

SEQ ID NO: 522828 - DNA, 15 bp, Homo sapiens
cttagaattcaaggg

SEQ ID NO: 522829 - DNA, 15 bp, Homo sapiens
gcttagaattcaagg

SEQ ID NO: 522830 - DNA, 15 bp, Homo sapiens
agcttagaattcaag

SEQ ID NO: 522831 - DNA, 15 bp, Homo sapiens
cagcttagaattcaa

SEQ ID NO: 522832 - DNA, 15 bp, Homo sapiens
tcagcttagaattca

SEQ ID NO: 522833 - DNA, 15 bp, Homo sapiens
ctcagcttagaattc

SEQ ID NO: 522834 - DNA, 15 bp, Homo sapiens
cctcagcttagaatt

SEQ ID NO: 522835 - DNA, 15 bp, Homo sapiens
tcctcagcttagaat

SEQ ID NO: 522836 - DNA, 15 bp, Homo sapiens
ctcctcagcttagaa

SEQ ID NO: 522837 - DNA, 15 bp, Homo sapiens
actcctcagcttaga

SEQ ID NO: 522838 - DNA, 15 bp, Homo sapiens
aactcctcagcttag

SEQ ID NO: 522839 - DNA, 15 bp, Homo sapiens
gaactcctcagctta

SEQ ID NO: 522840 - DNA, 15 bp, Homo sapiens
tgaactcctcagctt

SEQ ID NO: 522841 - DNA, 15 bp, Homo sapiens
atgaactcctcagct

SEQ ID NO: 522842 - DNA, 15 bp, Homo sapiens
catgaactcctcagc

SEQ ID NO: 522843 - DNA, 15 bp, Homo sapiens
gcatgaactcctcag

SEQ ID NO: 522844 - DNA, 15 bp, Homo sapiens
tgcatgaactcctca

SEQ ID NO: 522845 - DNA, 15 bp, Homo sapiens
ctgcatgaactcctc

SEQ ID NO: 522846 - DNA, 15 bp, Homo sapiens
cctgcatgaactcct

SEQ ID NO: 522847 - DNA, 15 bp, Homo sapiens
tcctgcatgaactcc

SEQ ID NO: 522848 - DNA, 15 bp, Homo sapiens
ttcctgcatgaactc

SEQ ID NO: 522849 - DNA, 15 bp, Homo sapiens
attcctgcatgaact

SEQ ID NO: 522850 - DNA, 15 bp, Homo sapiens
gattcctgcatgaac

SEQ ID NO: 522851 - DNA, 15 bp, Homo sapiens
tgattcctgcatgaa

SEQ ID NO: 522852 - DNA, 15 bp, Homo sapiens
ttgattcctgcatga

SEQ ID NO: 522853 - DNA, 15 bp, Homo sapiens
cttgattcctgcatg

SEQ ID NO: 522854 - DNA, 15 bp, Homo sapiens
gcttgattcctgcat

SEQ ID NO: 522855 - DNA, 15 bp, Homo sapiens
tgcttgattcctgca

SEQ ID NO: 522856 - DNA, 15 bp, Homo sapiens
ctgcttgattcctgc

SEQ ID NO: 522857 - DNA, 15 bp, Homo sapiens
gctgcttgattcctg

SEQ ID NO: 522858 - DNA, 15 bp, Homo sapiens
agctgcttgattcct

SEQ ID NO: 522859 - DNA, 15 bp, Homo sapiens
gagctgcttgattcc

SEQ ID NO: 522860 - DNA, 15 bp, Homo sapiens
ggagctgcttgattc

SEQ ID NO: 522861 - DNA, 15 bp, Homo sapiens
gggagctgcttgatt

SEQ ID NO: 522862 - DNA, 15 bp, Homo sapiens
agggagctgcttgat

SEQ ID NO: 522863 - DNA, 15 bp, Homo sapiens
gagggagctgcttga

SEQ ID NO: 522864 - DNA, 15 bp, Homo sapiens
cgagggagctgcttg

SEQ ID NO: 522865 - DNA, 15 bp, Homo sapiens
gcgagggagctgctt

SEQ ID NO: 522866 - DNA, 15 bp, Homo sapiens
ggcgagggagctgct

SEQ ID NO: 522867 - DNA, 15 bp, Homo sapiens
gggcgagggagctgc

SEQ ID NO: 522868 - DNA, 15 bp, Homo sapiens
ggggcgagggagctg

SEQ ID NO: 522869 - DNA, 15 bp, Homo sapiens
tggggcgagggagct

SEQ ID NO: 522870 - DNA, 15 bp, Homo sapiens
atggggcgagggagc

SEQ ID NO: 522871 - DNA, 15 bp, Homo sapiens
catggggcgagggag

SEQ ID NO: 522872 - DNA, 15 bp, Homo sapiens
tcatggggcgaggga

SEQ ID NO: 522873 - DNA, 15 bp, Homo sapiens
ttcatggggcgaggg

SEQ ID NO: 522874 - DNA, 15 bp, Homo sapiens
cttcatggggcgagg

SEQ ID NO: 522875 - DNA, 15 bp, Homo sapiens
ccttcatggggcgag

SEQ ID NO: 522876 - DNA, 15 bp, Homo sapiens
cccttcatggggcga

SEQ ID NO: 522877 - DNA, 15 bp, Homo sapiens
acccttcatggggcg

SEQ ID NO: 522878 - DNA, 15 bp, Homo sapiens
cacccttcatggggc

SEQ ID NO: 522879 - DNA, 15 bp, Homo sapiens
acacccttcatgggg

SEQ ID NO: 522880 - DNA, 15 bp, Homo sapiens
aacacccttcatggg

SEQ ID NO: 522881 - DNA, 15 bp, Homo sapiens
taacacccttcatgg

SEQ ID NO: 522882 - DNA, 15 bp, Homo sapiens
ctaacacccttcatg

SEQ ID NO: 522883 - DNA, 15 bp, Homo sapiens
cctaacacccttcat

SEQ ID NO: 522884 - DNA, 15 bp, Homo sapiens
tcctaacacccttca

SEQ ID NO: 522885 - DNA, 15 bp, Homo sapiens
ttcctaacacccttc

SEQ ID NO: 522886 - DNA, 15 bp, Homo sapiens
attcctaacaccctt

SEQ ID NO: 522887 - DNA, 15 bp, Homo sapiens
cattcctaacaccct

SEQ ID NO: 522888 - DNA, 15 bp, Homo sapiens
ccattcctaacaccc

SEQ ID NO: 522889 - DNA, 15 bp, Homo sapiens
accattcctaacacc

SEQ ID NO: 522890 - DNA, 15 bp, Homo sapiens
taccattcctaacac

SEQ ID NO: 522891 - DNA, 15 bp, Homo sapiens
gtaccattcctaaca

SEQ ID NO: 522892 - DNA, 15 bp, Homo sapiens
ggtaccattcctaac

SEQ ID NO: 522893 - DNA, 15 bp, Homo sapiens
tggtaccattcctaa

SEQ ID NO: 522894 - DNA, 15 bp, Homo sapiens
ctggtaccattccta

SEQ ID NO: 522895 - DNA, 15 bp, Homo sapiens
actggtaccattcct

SEQ ID NO: 522896 - DNA, 15 bp, Homo sapiens
tactggtaccattcc

SEQ ID NO: 522897 - DNA, 15 bp, Homo sapiens
gtactggtaccattc

SEQ ID NO: 522898 - DNA, 15 bp, Homo sapiens
tgtactggtaccatt

SEQ ID NO: 522899 - DNA, 15 bp, Homo sapiens
atgtactggtaccat

SEQ ID NO: 522900 - DNA, 15 bp, Homo sapiens
catgtactggtacca

SEQ ID NO: 522901 - DNA, 15 bp, Homo sapiens
ccatgtactggtacc

SEQ ID NO: 522902 - DNA, 15 bp, Homo sapiens
cccatgtactggtac

SEQ ID NO: 522903 - DNA, 15 bp, Homo sapiens
acccatgtactggta

SEQ ID NO: 522904 - DNA, 15 bp, Homo sapiens
tacccatgtactggt

SEQ ID NO: 522905 - DNA, 15 bp, Homo sapiens
ctacccatgtactgg

SEQ ID NO: 522906 - DNA, 15 bp, Homo sapiens
gctacccatgtactg

SEQ ID NO: 522907 - DNA, 15 bp, Homo sapiens
agctacccatgtact

SEQ ID NO: 522908 - DNA, 15 bp, Homo sapiens
cagctacccatgtac

SEQ ID NO: 522909 - DNA, 15 bp, Homo sapiens
acagctacccatgta

SEQ ID NO: 522910 - DNA, 15 bp, Homo sapiens
aacagctacccatgt

SEQ ID NO: 522911 - DNA, 15 bp, Homo sapiens
caacagctacccatg

SEQ ID NO: 522912 - DNA, 15 bp, Homo sapiens
ccaacagctacccat

SEQ ID NO: 522913 - DNA, 15 bp, Homo sapiens
accaacagctaccca

SEQ ID NO: 522914 - DNA, 15 bp, Homo sapiens
gaccaacagctaccc

SEQ ID NO: 522915 - DNA, 15 bp, Homo sapiens
agaccaacagctacc

SEQ ID NO: 522916 - DNA, 15 bp, Homo sapiens
aagaccaacagctac

SEQ ID NO: 522917 - DNA, 15 bp, Homo sapiens
caagaccaacagcta

SEQ ID NO: 522918 - DNA, 15 bp, Homo sapiens
ccaagaccaacagct

SEQ ID NO: 522919 - DNA, 15 bp, Homo sapiens
cccaagaccaacagc

SEQ ID NO: 522920 - DNA, 15 bp, Homo sapiens
acccaagaccaacag

SEQ ID NO: 522921 - DNA, 15 bp, Homo sapiens
aacccaagaccaaca

SEQ ID NO: 522922 - DNA, 15 bp, Homo sapiens
aaacccaagaccaac

SEQ ID NO: 522923 - DNA, 15 bp, Homo sapiens
gaaacccaagaccaa

SEQ ID NO: 522924 - DNA, 15 bp, Homo sapiens
agaaacccaagacca

SEQ ID NO: 522925 - DNA, 15 bp, Homo sapiens
aagaaacccaagacc

SEQ ID NO: 522926 - DNA, 15 bp, Homo sapiens
gaagaaacccaagac

SEQ ID NO: 522927 - DNA, 15 bp, Homo sapiens
agaagaaacccaaga

SEQ ID NO: 522928 - DNA, 15 bp, Homo sapiens
aagaagaaacccaag

SEQ ID NO: 522929 - DNA, 15 bp, Homo sapiens
caagaagaaacccaa

SEQ ID NO: 522930 - DNA, 15 bp, Homo sapiens
gcaagaagaaaccca

SEQ ID NO: 522931 - DNA, 15 bp, Homo sapiens
ggcaagaagaaaccc

SEQ ID NO: 522932 - DNA, 15 bp, Homo sapiens
aggcaagaagaaacc

SEQ ID NO: 522933 - DNA, 15 bp, Homo sapiens
aaggcaagaagaaac

SEQ ID NO: 522934 - DNA, 15 bp, Homo sapiens
aaaggcaagaagaaa

SEQ ID NO: 522935 - DNA, 15 bp, Homo sapiens
aaaaggcaagaagaa

SEQ ID NO: 522936 - DNA, 15 bp, Homo sapiens
caaaaggcaagaaga

SEQ ID NO: 522937 - DNA, 15 bp, Homo sapiens
ccaaaaggcaagaag

SEQ ID NO: 522938 - DNA, 15 bp, Homo sapiens
cccaaaaggcaagaa

SEQ ID NO: 522939 - DNA, 15 bp, Homo sapiens
ccccaaaaggcaaga

SEQ ID NO: 522940 - DNA, 15 bp, Homo sapiens
accccaaaaggcaag

SEQ ID NO: 522941 - DNA, 15 bp, Homo sapiens
caccccaaaaggcaa

SEQ ID NO: 522942 - DNA, 15 bp, Homo sapiens
gcaccccaaaaggca

SEQ ID NO: 522943 - DNA, 15 bp, Homo sapiens
tgcaccccaaaaggc

SEQ ID NO: 522944 - DNA, 15 bp, Homo sapiens
ctgcaccccaaaagg

SEQ ID NO: 522945 - DNA, 15 bp, Homo sapiens
gctgcaccccaaaag

SEQ ID NO: 522946 - DNA, 15 bp, Homo sapiens
ggctgcaccccaaaa

SEQ ID NO: 522947 - DNA, 15 bp, Homo sapiens
aggctgcaccccaaa

SEQ ID NO: 522948 - DNA, 15 bp, Homo sapiens
aaggctgcaccccaa

SEQ ID NO: 522949 - DNA, 15 bp, Homo sapiens
gaaggctgcacccca

SEQ ID NO: 522950 - DNA, 15 bp, Homo sapiens
tgaaggctgcacccc

SEQ ID NO: 522951 - DNA, 15 bp, Homo sapiens
ctgaaggctgcaccc

SEQ ID NO: 522952 - DNA, 15 bp, Homo sapiens
cctgaaggctgcacc

SEQ ID NO: 522953 - DNA, 15 bp, Homo sapiens
gcctgaaggctgcac

SEQ ID NO: 522954 - DNA, 15 bp, Homo sapiens
tgcctgaaggctgca

SEQ ID NO: 522955 - DNA, 15 bp, Homo sapiens
atgcctgaaggctgc

SEQ ID NO: 522956 - DNA, 15 bp, Homo sapiens
gatgcctgaaggctg

SEQ ID NO: 522957 - DNA, 15 bp, Homo sapiens
agatgcctgaaggct

SEQ ID NO: 522958 - DNA, 15 bp, Homo sapiens
cagatgcctgaaggc

SEQ ID NO: 522959 - DNA, 15 bp, Homo sapiens
gcagatgcctgaagg

SEQ ID NO: 522960 - DNA, 15 bp, Homo sapiens
agcagatgcctgaag

SEQ ID NO: 522961 - DNA, 15 bp, Homo sapiens
cagcagatgcctgaa

SEQ ID NO: 522962 - DNA, 15 bp, Homo sapiens
gcagcagatgcctga

SEQ ID NO: 522963 - DNA, 15 bp, Homo sapiens
agcagcagatgcctg

SEQ ID NO: 522964 - DNA, 15 bp, Homo sapiens
tagcagcagatgcct

SEQ ID NO: 522965 - DNA, 15 bp, Homo sapiens
ctagcagcagatgcc

SEQ ID NO: 522966 - DNA, 15 bp, Homo sapiens
tctagcagcagatgc

SEQ ID NO: 522967 - DNA, 15 bp, Homo sapiens
atctagcagcagatg

SEQ ID NO: 522968 - DNA, 15 bp, Homo sapiens
gatctagcagcagat

SEQ ID NO: 522969 - DNA, 15 bp, Homo sapiens
ggatctagcagcaga

SEQ ID NO: 522970 - DNA, 15 bp, Homo sapiens
gggatctagcagcag

SEQ ID NO: 522971 - DNA, 15 bp, Homo sapiens
agggatctagcagca

SEQ ID NO: 522972 - DNA, 15 bp, Homo sapiens
tagggatctagcagc

SEQ ID NO: 522973 - DNA, 15 bp, Homo sapiens
ctagggatctagcag

SEQ ID NO: 522974 - DNA, 15 bp, Homo sapiens
cctagggatctagca

SEQ ID NO: 522975 - DNA, 15 bp, Homo sapiens
gcctagggatctagc

SEQ ID NO: 522976 - DNA, 15 bp, Homo sapiens
agcctagggatctag

SEQ ID NO: 522977 - DNA, 15 bp, Homo sapiens
aagcctagggatcta

SEQ ID NO: 522978 - DNA, 15 bp, Homo sapiens
gaagcctagggatct

SEQ ID NO: 522979 - DNA, 15 bp, Homo sapiens
agaagcctagggatc

SEQ ID NO: 522980 - DNA, 15 bp, Homo sapiens
tagaagcctagggat

SEQ ID NO: 522981 - DNA, 15 bp, Homo sapiens
atagaagcctaggga

SEQ ID NO: 522982 - DNA, 15 bp, Homo sapiens
gatagaagcctaggg

SEQ ID NO: 522983 - DNA, 15 bp, Homo sapiens
agatagaagcctagg

SEQ ID NO: 522984 - DNA, 15 bp, Homo sapiens
aagatagaagcctag

SEQ ID NO: 522985 - DNA, 15 bp, Homo sapiens
caagatagaagccta

SEQ ID NO: 522986 - DNA, 15 bp, Homo sapiens
acaagatagaagcct

SEQ ID NO: 522987 - DNA, 15 bp, Homo sapiens
tacaagatagaagcc

SEQ ID NO: 522988 - DNA, 15 bp, Homo sapiens
ctacaagatagaagc

SEQ ID NO: 522989 - DNA, 15 bp, Homo sapiens
cctacaagatagaag

SEQ ID NO: 522990 - DNA, 15 bp, Homo sapiens
acctacaagatagaa

SEQ ID NO: 522991 - DNA, 15 bp, Homo sapiens
cacctacaagataga

SEQ ID NO: 522992 - DNA, 15 bp, Homo sapiens
gcacctacaagatag

SEQ ID NO: 522993 - DNA, 15 bp, Homo sapiens
agcacctacaagata

SEQ ID NO: 522994 - DNA, 15 bp, Homo sapiens
cagcacctacaagat

SEQ ID NO: 522995 - DNA, 15 bp, Homo sapiens
acagcacctacaaga

SEQ ID NO: 522996 - DNA, 15 bp, Homo sapiens
cacagcacctacaag

SEQ ID NO: 522997 - DNA, 15 bp, Homo sapiens
tcacagcacctacaa

SEQ ID NO: 522998 - DNA, 15 bp, Homo sapiens
ctcacagcacctaca

SEQ ID NO: 522999 - DNA, 15 bp, Homo sapiens
gctcacagcacctac

SEQ ID NO: 523000 - DNA, 15 bp, Homo sapiens
agctcacagcaccta

SEQ ID NO: 523001 - DNA, 15 bp, Homo sapiens
cagctcacagcacct

SEQ ID NO: 523002 - DNA, 15 bp, Homo sapiens
tcagctcacagcacc

SEQ ID NO: 523003 - DNA, 15 bp, Homo sapiens
ctcagctcacagcac

SEQ ID NO: 523004 - DNA, 15 bp, Homo sapiens
gctcagctcacagca

SEQ ID NO: 523005 - DNA, 15 bp, Homo sapiens
agctcagctcacagc

SEQ ID NO: 523006 - DNA, 15 bp, Homo sapiens
cagctcagctcacag

SEQ ID NO: 523007 - DNA, 15 bp, Homo sapiens
acagctcagctcaca

SEQ ID NO: 523008 - DNA, 15 bp, Homo sapiens
aacagctcagctcac

SEQ ID NO: 523009 - DNA, 15 bp, Homo sapiens
caacagctcagctca

SEQ ID NO: 523010 - DNA, 15 bp, Homo sapiens
ccaacagctcagctc

SEQ ID NO: 523011 - DNA, 15 bp, Homo sapiens
accaacagctcagct

SEQ ID NO: 523012 - DNA, 15 bp, Homo sapiens
taccaacagctcagc

SEQ ID NO: 523013 - DNA, 15 bp, Homo sapiens
ctaccaacagctcag

SEQ ID NO: 523014 - DNA, 15 bp, Homo sapiens
actaccaacagctca

SEQ ID NO: 523015 - DNA, 15 bp, Homo sapiens
aactaccaacagctc

SEQ ID NO: 523016 - DNA, 15 bp, Homo sapiens
aaactaccaacagct

SEQ ID NO: 523017 - DNA, 15 bp, Homo sapiens
gaaactaccaacagc

SEQ ID NO: 523018 - DNA, 15 bp, Homo sapiens
agaaactaccaacag

SEQ ID NO: 523019 - DNA, 15 bp, Homo sapiens
cagaaactaccaaca

SEQ ID NO: 523020 - DNA, 15 bp, Homo sapiens
ccagaaactaccaac

SEQ ID NO: 523021 - DNA, 15 bp, Homo sapiens
cccagaaactaccaa

SEQ ID NO: 523022 - DNA, 15 bp, Homo sapiens
ccccagaaactacca

SEQ ID NO: 523023 - DNA, 15 bp, Homo sapiens
tccccagaaactacc

SEQ ID NO: 523024 - DNA, 15 bp, Homo sapiens
ttccccagaaactac

SEQ ID NO: 523025 - DNA, 15 bp, Homo sapiens
tttccccagaaacta

SEQ ID NO: 523026 - DNA, 15 bp, Homo sapiens
ctttccccagaaact

SEQ ID NO: 523027 - DNA, 15 bp, Homo sapiens
cctttccccagaaac

SEQ ID NO: 523028 - DNA, 15 bp, Homo sapiens
tcctttccccagaaa

SEQ ID NO: 523029 - DNA, 15 bp, Homo sapiens
atcctttccccagaa

SEQ ID NO: 523030 - DNA, 15 bp, Homo sapiens
tatcctttccccaga

SEQ ID NO: 523031 - DNA, 15 bp, Homo sapiens
gtatcctttccccag

SEQ ID NO: 523032 - DNA, 15 bp, Homo sapiens
agtatcctttcccca

SEQ ID NO: 523033 - DNA, 15 bp, Homo sapiens
aagtatcctttcccc

SEQ ID NO: 523034 - DNA, 15 bp, Homo sapiens
gaagtatcctttccc

SEQ ID NO: 523035 - DNA, 15 bp, Homo sapiens
agaagtatcctttcc

SEQ ID NO: 523036 - DNA, 15 bp, Homo sapiens
gagaagtatcctttc

SEQ ID NO: 523037 - DNA, 15 bp, Homo sapiens
tgagaagtatccttt

SEQ ID NO: 523038 - DNA, 15 bp, Homo sapiens
atgagaagtatcctt

SEQ ID NO: 523039 - DNA, 15 bp, Homo sapiens
catgagaagtatcct

SEQ ID NO: 523040 - DNA, 15 bp, Homo sapiens
ccatgagaagtatcc

SEQ ID NO: 523041 - DNA, 15 bp, Homo sapiens
accatgagaagtatc

SEQ ID NO: 523042 - DNA, 15 bp, Homo sapiens
taccatgagaagtat

SEQ ID NO: 523043 - DNA, 15 bp, Homo sapiens
gtaccatgagaagta

SEQ ID NO: 523044 - DNA, 15 bp, Homo sapiens
agtaccatgagaagt

SEQ ID NO: 523045 - DNA, 15 bp, Homo sapiens
aagtaccatgagaag

SEQ ID NO: 523046 - DNA, 15 bp, Homo sapiens
aaagtaccatgagaa

SEQ ID NO: 523047 - DNA, 15 bp, Homo sapiens
caaagtaccatgaga

SEQ ID NO: 523048 - DNA, 15 bp, Homo sapiens
gcaaagtaccatgag

SEQ ID NO: 523049 - DNA, 15 bp, Homo sapiens
ggcaaagtaccatga

SEQ ID NO: 523050 - DNA, 15 bp, Homo sapiens
tggcaaagtaccatg

SEQ ID NO: 523051 - DNA, 15 bp, Homo sapiens
atggcaaagtaccat

SEQ ID NO: 523052 - DNA, 15 bp, Homo sapiens
catggcaaagtacca

SEQ ID NO: 523053 - DNA, 15 bp, Homo sapiens
acatggcaaagtacc

SEQ ID NO: 523054 - DNA, 15 bp, Homo sapiens
cacatggcaaagtac

SEQ ID NO: 523055 - DNA, 15 bp, Homo sapiens
ccacatggcaaagta

SEQ ID NO: 523056 - DNA, 15 bp, Homo sapiens
gccacatggcaaagt

SEQ ID NO: 523057 - DNA, 15 bp, Homo sapiens
ggccacatggcaaag

SEQ ID NO: 523058 - DNA, 15 bp, Homo sapiens
tggccacatggcaaa

SEQ ID NO: 523059 - DNA, 15 bp, Homo sapiens
gtggccacatggcaa

SEQ ID NO: 523060 - DNA, 15 bp, Homo sapiens
tgtggccacatggca

SEQ ID NO: 523061 - DNA, 15 bp, Homo sapiens
ctgtggccacatggc

SEQ ID NO: 523062 - DNA, 15 bp, Homo sapiens
actgtggccacatgg

SEQ ID NO: 523063 - DNA, 15 bp, Homo sapiens
aactgtggccacatg

SEQ ID NO: 523064 - DNA, 15 bp, Homo sapiens
caactgtggccacat

SEQ ID NO: 523065 - DNA, 15 bp, Homo sapiens
tcaactgtggccaca

SEQ ID NO: 523066 - DNA, 15 bp, Homo sapiens
atcaactgtggccac

SEQ ID NO: 523067 - DNA, 15 bp, Homo sapiens
tatcaactgtggcca

SEQ ID NO: 523068 - DNA, 15 bp, Homo sapiens
gtatcaactgtggcc

SEQ ID NO: 523069 - DNA, 15 bp, Homo sapiens
ggtatcaactgtggc

SEQ ID NO: 523070 - DNA, 15 bp, Homo sapiens
gggtatcaactgtgg

SEQ ID NO: 523071 - DNA, 15 bp, Homo sapiens
ggggtatcaactgtg

SEQ ID NO: 523072 - DNA, 15 bp, Homo sapiens
gggggtatcaactgt

SEQ ID NO: 523073 - DNA, 15 bp, Homo sapiens
ggggggtatcaactg

SEQ ID NO: 523074 - DNA, 15 bp, Homo sapiens
gggggggtatcaact

SEQ ID NO: 523075 - DNA, 15 bp, Homo sapiens
tgggggggtatcaac

SEQ ID NO: 523076 - DNA, 15 bp, Homo sapiens
ttgggggggtatcaa

SEQ ID NO: 523077 - DNA, 15 bp, Homo sapiens
cttgggggggtatca

SEQ ID NO: 523078 - DNA, 15 bp, Homo sapiens
acttgggggggtatc

SEQ ID NO: 523079 - DNA, 15 bp, Homo sapiens
cacttgggggggtat

SEQ ID NO: 523080 - DNA, 15 bp, Homo sapiens
gcacttgggggggta

SEQ ID NO: 523081 - DNA, 15 bp, Homo sapiens
tgcacttgggggggt

SEQ ID NO: 523082 - DNA, 15 bp, Homo sapiens
ttgcacttggggggg

SEQ ID NO: 523083 - DNA, 15 bp, Homo sapiens
cttgcacttgggggg

SEQ ID NO: 523084 - DNA, 15 bp, Homo sapiens
ccttgcacttggggg

SEQ ID NO: 523085 - DNA, 15 bp, Homo sapiens
tccttgcacttgggg

SEQ ID NO: 523086 - DNA, 15 bp, Homo sapiens
ctccttgcacttggg

SEQ ID NO: 523087 - DNA, 15 bp, Homo sapiens
tctccttgcacttgg

SEQ ID NO: 523088 - DNA, 15 bp, Homo sapiens
ttctccttgcacttg

SEQ ID NO: 523089 - DNA, 15 bp, Homo sapiens
tttctccttgcactt

SEQ ID NO: 523090 - DNA, 15 bp, Homo sapiens
ctttctccttgcact

SEQ ID NO: 523091 - DNA, 15 bp, Homo sapiens
tctttctccttgcac

SEQ ID NO: 523092 - DNA, 15 bp, Homo sapiens
ttctttctccttgca

SEQ ID NO: 523093 - DNA, 15 bp, Homo sapiens
cttctttctccttgc

SEQ ID NO: 523094 - DNA, 15 bp, Homo sapiens
acttctttctccttg

SEQ ID NO: 523095 - DNA, 15 bp, Homo sapiens
aacttctttctcctt

SEQ ID NO: 523096 - DNA, 15 bp, Homo sapiens
aaacttctttctcct

SEQ ID NO: 523097 - DNA, 15 bp, Homo sapiens
aaaacttctttctcc

SEQ ID NO: 523098 - DNA, 15 bp, Homo sapiens
taaaacttctttctc

SEQ ID NO: 523099 - DNA, 15 bp, Homo sapiens
ctaaaacttctttct

SEQ ID NO: 523100 - DNA, 15 bp, Homo sapiens
actaaaacttctttc

SEQ ID NO: 523101 - DNA, 15 bp, Homo sapiens
cactaaaacttcttt

SEQ ID NO: 523102 - DNA, 15 bp, Homo sapiens
tcactaaaacttctt

SEQ ID NO: 523103 - DNA, 15 bp, Homo sapiens
ctcactaaaacttct

SEQ ID NO: 523104 - DNA, 15 bp, Homo sapiens
cctcactaaaacttc

SEQ ID NO: 523105 - DNA, 15 bp, Homo sapiens
gcctcactaaaactt

SEQ ID NO: 523106 - DNA, 15 bp, Homo sapiens
tgcctcactaaaact

SEQ ID NO: 523107 - DNA, 15 bp, Homo sapiens
ctgcctcactaaaac

SEQ ID NO: 523108 - DNA, 15 bp, Homo sapiens
tctgcctcactaaaa

SEQ ID NO: 523109 - DNA, 15 bp, Homo sapiens
ttctgcctcactaaa

SEQ ID NO: 523110 - DNA, 15 bp, Homo sapiens
tttctgcctcactaa

SEQ ID NO: 523111 - DNA, 15 bp, Homo sapiens
atttctgcctcacta

SEQ ID NO: 523112 - DNA, 15 bp, Homo sapiens
catttctgcctcact

SEQ ID NO: 523113 - DNA, 15 bp, Homo sapiens
tcatttctgcctcac

SEQ ID NO: 523114 - DNA, 15 bp, Homo sapiens
ctcatttctgcctca

SEQ ID NO: 523115 - DNA, 15 bp, Homo sapiens
tctcatttctgcctc

SEQ ID NO: 523116 - DNA, 15 bp, Homo sapiens
ctctcatttctgcct

SEQ ID NO: 523117 - DNA, 15 bp, Homo sapiens
tctctcatttctgcc

SEQ ID NO: 523118 - DNA, 15 bp, Homo sapiens
ttctctcatttctgc

SEQ ID NO: 523119 - DNA, 15 bp, Homo sapiens
attctctcatttctg

SEQ ID NO: 523120 - DNA, 15 bp, Homo sapiens
tattctctcatttct

SEQ ID NO: 523121 - DNA, 15 bp, Homo sapiens
gtattctctcatttc

SEQ ID NO: 523122 - DNA, 15 bp, Homo sapiens
tgtattctctcattt

SEQ ID NO: 523123 - DNA, 15 bp, Homo sapiens
ctgtattctctcatt

SEQ ID NO: 523124 - DNA, 15 bp, Homo sapiens
actgtattctctcat

SEQ ID NO: 523125 - DNA, 15 bp, Homo sapiens
tactgtattctctca

SEQ ID NO: 523126 - DNA, 15 bp, Homo sapiens
ctactgtattctctc

SEQ ID NO: 523127 - DNA, 15 bp, Homo sapiens
tctactgtattctct

SEQ ID NO: 523128 - DNA, 15 bp, Homo sapiens
ctctactgtattctc

SEQ ID NO: 523129 - DNA, 15 bp, Homo sapiens
actctactgtattct

SEQ ID NO: 523130 - DNA, 15 bp, Homo sapiens
tactctactgtattc

SEQ ID NO: 523131 - DNA, 15 bp, Homo sapiens
atactctactgtatt

SEQ ID NO: 523132 - DNA, 15 bp, Homo sapiens
aatactctactgtat

SEQ ID NO: 523133 - DNA, 15 bp, Homo sapiens
caatactctactgta

SEQ ID NO: 523134 - DNA, 15 bp, Homo sapiens
ccaatactctactgt

SEQ ID NO: 523135 - DNA, 15 bp, Homo sapiens
tccaatactctactg

SEQ ID NO: 523136 - DNA, 15 bp, Homo sapiens
atccaatactctact

SEQ ID NO: 523137 - DNA, 15 bp, Homo sapiens
catccaatactctac

SEQ ID NO: 523138 - DNA, 15 bp, Homo sapiens
ccatccaatactcta

SEQ ID NO: 523139 - DNA, 15 bp, Homo sapiens
tccatccaatactct

SEQ ID NO: 523140 - DNA, 15 bp, Homo sapiens
ttccatccaatactc

SEQ ID NO: 523141 - DNA, 15 bp, Homo sapiens
cttccatccaatact

SEQ ID NO: 523142 - DNA, 15 bp, Homo sapiens
tcttccatccaatac

SEQ ID NO: 523143 - DNA, 15 bp, Homo sapiens
ttcttccatccaata

SEQ ID NO: 523144 - DNA, 15 bp, Homo sapiens
cttcttccatccaat

SEQ ID NO: 523145 - DNA, 15 bp, Homo sapiens
tcttcttccatccaa

SEQ ID NO: 523146 - DNA, 15 bp, Homo sapiens
gtcttcttccatcca

SEQ ID NO: 523147 - DNA, 15 bp, Homo sapiens
tgtcttcttccatcc

SEQ ID NO: 523148 - DNA, 15 bp, Homo sapiens
ctgtcttcttccatc

SEQ ID NO: 523149 - DNA, 15 bp, Homo sapiens
cctgtcttcttccat

SEQ ID NO: 523150 - DNA, 15 bp, Homo sapiens
ccctgtcttcttcca

SEQ ID NO: 523151 - DNA, 15 bp, Homo sapiens
tccctgtcttcttcc

SEQ ID NO: 523152 - DNA, 15 bp, Homo sapiens
gtccctgtcttcttc

SEQ ID NO: 523153 - DNA, 15 bp, Homo sapiens
tgtccctgtcttctt

SEQ ID NO: 523154 - DNA, 15 bp, Homo sapiens
atgtccctgtcttct

SEQ ID NO: 523155 - DNA, 15 bp, Homo sapiens
catgtccctgtcttc

SEQ ID NO: 523156 - DNA, 15 bp, Homo sapiens
tcatgtccctgtctt

SEQ ID NO: 523157 - DNA, 15 bp, Homo sapiens
ttcatgtccctgtct

SEQ ID NO: 523158 - DNA, 15 bp, Homo sapiens
cttcatgtccctgtc

SEQ ID NO: 523159 - DNA, 15 bp, Homo sapiens
gcttcatgtccctgt

SEQ ID NO: 523160 - DNA, 15 bp, Homo sapiens
tgcttcatgtccctg

SEQ ID NO: 523161 - DNA, 15 bp, Homo sapiens
ctgcttcatgtccct

SEQ ID NO: 523162 - DNA, 15 bp, Homo sapiens
cctgcttcatgtccc

SEQ ID NO: 523163 - DNA, 15 bp, Homo sapiens
tcctgcttcatgtcc

SEQ ID NO: 523164 - DNA, 15 bp, Homo sapiens
gtcctgcttcatgtc

SEQ ID NO: 523165 - DNA, 15 bp, Homo sapiens
agtcctgcttcatgt

SEQ ID NO: 523166 - DNA, 15 bp, Homo sapiens
tagtcctgcttcatg

SEQ ID NO: 523167 - DNA, 15 bp, Homo sapiens
ctagtcctgcttcat

SEQ ID NO: 523168 - DNA, 15 bp, Homo sapiens
cctagtcctgcttca

SEQ ID NO: 523169 - DNA, 15 bp, Homo sapiens
ccctagtcctgcttc

SEQ ID NO: 523170 - DNA, 15 bp, Homo sapiens
accctagtcctgctt

SEQ ID NO: 523171 - DNA, 15 bp, Homo sapiens
aaccctagtcctgct

SEQ ID NO: 523172 - DNA, 15 bp, Homo sapiens
aaaccctagtcctgc

SEQ ID NO: 523173 - DNA, 15 bp, Homo sapiens
gaaaccctagtcctg

SEQ ID NO: 523174 - DNA, 15 bp, Homo sapiens
tgaaaccctagtcct

SEQ ID NO: 523175 - DNA, 15 bp, Homo sapiens
atgaaaccctagtcc

SEQ ID NO: 523176 - DNA, 15 bp, Homo sapiens
aatgaaaccctagtc

SEQ ID NO: 523177 - DNA, 15 bp, Homo sapiens
aaatgaaaccctagt

SEQ ID NO: 523178 - DNA, 15 bp, Homo sapiens
taaatgaaaccctag

SEQ ID NO: 523179 - DNA, 15 bp, Homo sapiens
ttaaatgaaacccta

SEQ ID NO: 523180 - DNA, 15 bp, Homo sapiens
attaaatgaaaccct

SEQ ID NO: 523181 - DNA, 15 bp, Homo sapiens
tattaaatgaaaccc

SEQ ID NO: 523182 - DNA, 15 bp, Homo sapiens
ctattaaatgaaacc

SEQ ID NO: 523183 - DNA, 15 bp, Homo sapiens
gctattaaatgaaac

SEQ ID NO: 523184 - DNA, 15 bp, Homo sapiens
ggctattaaatgaaa

SEQ ID NO: 523185 - DNA, 15 bp, Homo sapiens
tggctattaaatgaa

SEQ ID NO: 523186 - DNA, 15 bp, Homo sapiens
ctggctattaaatga

SEQ ID NO: 523187 - DNA, 15 bp, Homo sapiens
cctggctattaaatg

SEQ ID NO: 523188 - DNA, 15 bp, Homo sapiens
ccctggctattaaat

SEQ ID NO: 523189 - DNA, 15 bp, Homo sapiens
cccctggctattaaa

SEQ ID NO: 523190 - DNA, 15 bp, Homo sapiens
tcccctggctattaa

SEQ ID NO: 523191 - DNA, 15 bp, Homo sapiens
ttcccctggctatta

SEQ ID NO: 523192 - DNA, 15 bp, Homo sapiens
tttcccctggctatt

SEQ ID NO: 523193 - DNA, 15 bp, Homo sapiens
ctttcccctggctat

SEQ ID NO: 523194 - DNA, 15 bp, Homo sapiens
cctttcccctggcta

SEQ ID NO: 523195 - DNA, 15 bp, Homo sapiens
ccctttcccctggct

SEQ ID NO: 523196 - DNA, 15 bp, Homo sapiens
tccctttcccctggc

SEQ ID NO: 523197 - DNA, 15 bp, Homo sapiens
atccctttcccctgg

SEQ ID NO: 523198 - DNA, 15 bp, Homo sapiens
aatccctttcccctg

SEQ ID NO: 523199 - DNA, 15 bp, Homo sapiens
gaatccctttcccct

SEQ ID NO: 523200 - DNA, 15 bp, Homo sapiens
agaatccctttcccc

SEQ ID NO: 523201 - DNA, 15 bp, Homo sapiens
cagaatccctttccc

SEQ ID NO: 523202 - DNA, 15 bp, Homo sapiens
ccagaatccctttcc

SEQ ID NO: 523203 - DNA, 15 bp, Homo sapiens
tccagaatccctttc

SEQ ID NO: 523204 - DNA, 15 bp, Homo sapiens
ttccagaatcccttt

SEQ ID NO: 523205 - DNA, 15 bp, Homo sapiens
tttccagaatccctt

SEQ ID NO: 523206 - DNA, 15 bp, Homo sapiens
atttccagaatccct

SEQ ID NO: 523207 - DNA, 15 bp, Homo sapiens
catttccagaatccc

SEQ ID NO: 523208 - DNA, 15 bp, Homo sapiens
acatttccagaatcc

SEQ ID NO: 523209 - DNA, 15 bp, Homo sapiens
aacatttccagaatc

SEQ ID NO: 523210 - DNA, 15 bp, Homo sapiens
aaacatttccagaat

SEQ ID NO: 523211 - DNA, 15 bp, Homo sapiens
aaaacatttccagaa

SEQ ID NO: 523212 - DNA, 15 bp, Homo sapiens
caaaacatttccaga

SEQ ID NO: 523213 - DNA, 15 bp, Homo sapiens
acaaaacatttccag

SEQ ID NO: 523214 - DNA, 15 bp, Homo sapiens
gacaaaacatttcca

SEQ ID NO: 523215 - DNA, 15 bp, Homo sapiens
agacaaaacatttcc

SEQ ID NO: 523216 - DNA, 15 bp, Homo sapiens
cagacaaaacatttc

SEQ ID NO: 523217 - DNA, 15 bp, Homo sapiens
acagacaaaacattt

SEQ ID NO: 523218 - DNA, 15 bp, Homo sapiens
aacagacaaaacatt

SEQ ID NO: 523219 - DNA, 15 bp, Homo sapiens
taacagacaaaacat

SEQ ID NO: 523220 - DNA, 15 bp, Homo sapiens
ttaacagacaaaaca

SEQ ID NO: 523221 - DNA, 15 bp, Homo sapiens
gttaacagacaaaac

SEQ ID NO: 523222 - DNA, 15 bp, Homo sapiens
ggttaacagacaaaa

SEQ ID NO: 523223 - DNA, 15 bp, Homo sapiens
aggttaacagacaaa

SEQ ID NO: 523224 - DNA, 15 bp, Homo sapiens
aaggttaacagacaa

SEQ ID NO: 523225 - DNA, 15 bp, Homo sapiens
caaggttaacagaca

SEQ ID NO: 523226 - DNA, 15 bp, Homo sapiens
tcaaggttaacagac

SEQ ID NO: 523227 - DNA, 15 bp, Homo sapiens
ctcaaggttaacaga

SEQ ID NO: 523228 - DNA, 15 bp, Homo sapiens
actcaaggttaacag

SEQ ID NO: 523229 - DNA, 15 bp, Homo sapiens
aactcaaggttaaca

SEQ ID NO: 523230 - DNA, 15 bp, Homo sapiens
aaactcaaggttaac

SEQ ID NO: 523231 - DNA, 15 bp, Homo sapiens
gaaactcaaggttaa

SEQ ID NO: 523232 - DNA, 15 bp, Homo sapiens
agaaactcaaggtta

SEQ ID NO: 523233 - DNA, 15 bp, Homo sapiens
aagaaactcaaggtt

SEQ ID NO: 523234 - DNA, 15 bp, Homo sapiens
aaagaaactcaaggt

SEQ ID NO: 523235 - DNA, 15 bp, Homo sapiens
aaaagaaactcaagg

SEQ ID NO: 523236 - DNA, 15 bp, Homo sapiens
gaaaagaaactcaag

SEQ ID NO: 523237 - DNA, 15 bp, Homo sapiens
ggaaaagaaactcaa

SEQ ID NO: 523238 - DNA, 15 bp, Homo sapiens
aggaaaagaaactca

SEQ ID NO: 523239 - DNA, 15 bp, Homo sapiens
aaggaaaagaaactc

SEQ ID NO: 523240 - DNA, 15 bp, Homo sapiens
gaaggaaaagaaact

SEQ ID NO: 523241 - DNA, 15 bp, Homo sapiens
ggaaggaaaagaaac

SEQ ID NO: 523242 - DNA, 15 bp, Homo sapiens
tggaaggaaaagaaa

SEQ ID NO: 523243 - DNA, 15 bp, Homo sapiens
gtggaaggaaaagaa

SEQ ID NO: 523244 - DNA, 15 bp, Homo sapiens
agtggaaggaaaaga

SEQ ID NO: 523245 - DNA, 15 bp, Homo sapiens
gagtggaaggaaaag

SEQ ID NO: 523246 - DNA, 15 bp, Homo sapiens
tgagtggaaggaaaa

SEQ ID NO: 523247 - DNA, 15 bp, Homo sapiens
ctgagtggaaggaaa

SEQ ID NO: 523248 - DNA, 15 bp, Homo sapiens
tctgagtggaaggaa

SEQ ID NO: 523249 - DNA, 15 bp, Homo sapiens
ttctgagtggaagga

SEQ ID NO: 523250 - DNA, 15 bp, Homo sapiens
tttctgagtggaagg

SEQ ID NO: 523251 - DNA, 15 bp, Homo sapiens
atttctgagtggaag

SEQ ID NO: 523252 - DNA, 15 bp, Homo sapiens
catttctgagtggaa

SEQ ID NO: 523253 - DNA, 15 bp, Homo sapiens
ccatttctgagtgga

SEQ ID NO: 523254 - DNA, 15 bp, Homo sapiens
gccatttctgagtgg

SEQ ID NO: 523255 - DNA, 15 bp, Homo sapiens
tgccatttctgagtg

SEQ ID NO: 523256 - DNA, 15 bp, Homo sapiens
gtgccatttctgagt

SEQ ID NO: 523257 - DNA, 15 bp, Homo sapiens
ggtgccatttctgag

SEQ ID NO: 523258 - DNA, 15 bp, Homo sapiens
aggtgccatttctga

SEQ ID NO: 523259 - DNA, 15 bp, Homo sapiens
gaggtgccatttctg

SEQ ID NO: 523260 - DNA, 15 bp, Homo sapiens
cgaggtgccatttct

SEQ ID NO: 523261 - DNA, 15 bp, Homo sapiens
tcgaggtgccatttc

SEQ ID NO: 523262 - DNA, 15 bp, Homo sapiens
ttcgaggtgccattt

SEQ ID NO: 523263 - DNA, 15 bp, Homo sapiens
tttcgaggtgccatt

SEQ ID NO: 523264 - DNA, 15 bp, Homo sapiens
ctttcgaggtgccat

SEQ ID NO: 523265 - DNA, 15 bp, Homo sapiens
cctttcgaggtgcca

SEQ ID NO: 523266 - DNA, 15 bp, Homo sapiens
ccctttcgaggtgcc

SEQ ID NO: 523267 - DNA, 15 bp, Homo sapiens
cccctttcgaggtgc

SEQ ID NO: 523268 - DNA, 15 bp, Homo sapiens
tcccctttcgaggtg

SEQ ID NO: 523269 - DNA, 15 bp, Homo sapiens
ttcccctttcgaggt

SEQ ID NO: 523270 - DNA, 15 bp, Homo sapiens
cttcccctttcgagg

SEQ ID NO: 523271 - DNA, 15 bp, Homo sapiens
ccttcccctttcgag

SEQ ID NO: 523272 - DNA, 15 bp, Homo sapiens
tccttcccctttcga

SEQ ID NO: 523273 - DNA, 15 bp, Homo sapiens
ttccttcccctttcg

SEQ ID NO: 523274 - DNA, 15 bp, Homo sapiens
tttccttcccctttc

SEQ ID NO: 523275 - DNA, 15 bp, Homo sapiens
ttttccttccccttt

SEQ ID NO: 523276 - DNA, 15 bp, Homo sapiens
cttttccttcccctt

SEQ ID NO: 523277 - DNA, 15 bp, Homo sapiens
tcttttccttcccct

SEQ ID NO: 523278 - DNA, 15 bp, Homo sapiens
ttcttttccttcccc

SEQ ID NO: 523279 - DNA, 15 bp, Homo sapiens
cttcttttccttccc

SEQ ID NO: 523280 - DNA, 15 bp, Homo sapiens
ccttcttttccttcc

SEQ ID NO: 523281 - DNA, 15 bp, Homo sapiens
tccttcttttccttc

SEQ ID NO: 523282 - DNA, 15 bp, Homo sapiens
ttccttcttttcctt

SEQ ID NO: 523283 - DNA, 15 bp, Homo sapiens
cttccttcttttcct

SEQ ID NO: 523284 - DNA, 15 bp, Homo sapiens
tcttccttcttttcc

SEQ ID NO: 523285 - DNA, 15 bp, Homo sapiens
ttcttccttcttttc

SEQ ID NO: 523286 - DNA, 15 bp, Homo sapiens
gttcttccttctttt

SEQ ID NO: 523287 - DNA, 15 bp, Homo sapiens
tgttcttccttcttt

SEQ ID NO: 523288 - DNA, 15 bp, Homo sapiens
ctgttcttccttctt

SEQ ID NO: 523289 - DNA, 15 bp, Homo sapiens
cctgttcttccttct

SEQ ID NO: 523290 - DNA, 15 bp, Homo sapiens
acctgttcttccttc

SEQ ID NO: 523291 - DNA, 15 bp, Homo sapiens
gacctgttcttcctt

SEQ ID NO: 523292 - DNA, 15 bp, Homo sapiens
tgacctgttcttcct

SEQ ID NO: 523293 - DNA, 15 bp, Homo sapiens
atgacctgttcttcc

SEQ ID NO: 523294 - DNA, 15 bp, Homo sapiens
gatgacctgttcttc

SEQ ID NO: 523295 - DNA, 15 bp, Homo sapiens
tgatgacctgttctt

SEQ ID NO: 523296 - DNA, 15 bp, Homo sapiens
ctgatgacctgttct

SEQ ID NO: 523297 - DNA, 15 bp, Homo sapiens
gctgatgacctgttc

SEQ ID NO: 523298 - DNA, 15 bp, Homo sapiens
ggctgatgacctgtt

SEQ ID NO: 523299 - DNA, 15 bp, Homo sapiens
aggctgatgacctgt

SEQ ID NO: 523300 - DNA, 15 bp, Homo sapiens
gaggctgatgacctg

SEQ ID NO: 523301 - DNA, 15 bp, Homo sapiens
cgaggctgatgacct

SEQ ID NO: 523302 - DNA, 15 bp, Homo sapiens
ccgaggctgatgacc

SEQ ID NO: 523303 - DNA, 15 bp, Homo sapiens
tccgaggctgatgac

SEQ ID NO: 523304 - DNA, 15 bp, Homo sapiens
gtccgaggctgatga

SEQ ID NO: 523305 - DNA, 15 bp, Homo sapiens
ggtccgaggctgatg

SEQ ID NO: 523306 - DNA, 15 bp, Homo sapiens
aggtccgaggctgat

SEQ ID NO: 523307 - DNA, 15 bp, Homo sapiens
gaggtccgaggctga

SEQ ID NO: 523308 - DNA, 15 bp, Homo sapiens
tgaggtccgaggctg

SEQ ID NO: 523309 - DNA, 15 bp, Homo sapiens
ctgaggtccgaggct

SEQ ID NO: 523310 - DNA, 15 bp, Homo sapiens
cctgaggtccgaggc

SEQ ID NO: 523311 - DNA, 15 bp, Homo sapiens
acctgaggtccgagg

SEQ ID NO: 523312 - DNA, 15 bp, Homo sapiens
cacctgaggtccgag

SEQ ID NO: 523313 - DNA, 15 bp, Homo sapiens
ccacctgaggtccga

SEQ ID NO: 523314 - DNA, 15 bp, Homo sapiens
gccacctgaggtccg

SEQ ID NO: 523315 - DNA, 15 bp, Homo sapiens
agccacctgaggtcc

SEQ ID NO: 523316 - DNA, 15 bp, Homo sapiens
cagccacctgaggtc

SEQ ID NO: 523317 - DNA, 15 bp, Homo sapiens
tcagccacctgaggt

SEQ ID NO: 523318 - DNA, 15 bp, Homo sapiens
ttcagccacctgagg

SEQ ID NO: 523319 - DNA, 15 bp, Homo sapiens
cttcagccacctgag

SEQ ID NO: 523320 - DNA, 15 bp, Homo sapiens
ccttcagccacctga

SEQ ID NO: 523321 - DNA, 15 bp, Homo sapiens
tccttcagccacctg

SEQ ID NO: 523322 - DNA, 15 bp, Homo sapiens
ctccttcagccacct

SEQ ID NO: 523323 - DNA, 15 bp, Homo sapiens
tctccttcagccacc

SEQ ID NO: 523324 - DNA, 15 bp, Homo sapiens
ctctccttcagccac

SEQ ID NO: 523325 - DNA, 15 bp, Homo sapiens
tctctccttcagcca

SEQ ID NO: 523326 - DNA, 15 bp, Homo sapiens
ttctctccttcagcc

SEQ ID NO: 523327 - DNA, 15 bp, Homo sapiens
attctctccttcagc

SEQ ID NO: 523328 - DNA, 15 bp, Homo sapiens
cattctctccttcag

SEQ ID NO: 523329 - DNA, 15 bp, Homo sapiens
acattctctccttca

SEQ ID NO: 523330 - DNA, 15 bp, Homo sapiens
tacattctctccttc

SEQ ID NO: 523331 - DNA, 15 bp, Homo sapiens
atacattctctcctt

SEQ ID NO: 523332 - DNA, 15 bp, Homo sapiens
aatacattctctcct

SEQ ID NO: 523333 - DNA, 15 bp, Homo sapiens
aaatacattctctcc

SEQ ID NO: 523334 - DNA, 15 bp, Homo sapiens
caaatacattctctc

SEQ ID NO: 523335 - DNA, 15 bp, Homo sapiens
ccaaatacattctct

SEQ ID NO: 523336 - DNA, 15 bp, Homo sapiens
accaaatacattctc

SEQ ID NO: 523337 - DNA, 15 bp, Homo sapiens
caccaaatacattct

SEQ ID NO: 523338 - DNA, 15 bp, Homo sapiens
acaccaaatacattc

SEQ ID NO: 523339 - DNA, 15 bp, Homo sapiens
gacaccaaatacatt

SEQ ID NO: 523340 - DNA, 15 bp, Homo sapiens
agacaccaaatacat

SEQ ID NO: 523341 - DNA, 15 bp, Homo sapiens
cagacaccaaataca

SEQ ID NO: 523342 - DNA, 15 bp, Homo sapiens
gcagacaccaaatac

SEQ ID NO: 523343 - DNA, 15 bp, Homo sapiens
ggcagacaccaaata

SEQ ID NO: 523344 - DNA, 15 bp, Homo sapiens
tggcagacaccaaat

SEQ ID NO: 523345 - DNA, 15 bp, Homo sapiens
atggcagacaccaaa

SEQ ID NO: 523346 - DNA, 15 bp, Homo sapiens
tatggcagacaccaa

SEQ ID NO: 523347 - DNA, 15 bp, Homo sapiens
atatggcagacacca

SEQ ID NO: 523348 - DNA, 15 bp, Homo sapiens
gatatggcagacacc

SEQ ID NO: 523349 - DNA, 15 bp, Homo sapiens
agatatggcagacac

SEQ ID NO: 523350 - DNA, 15 bp, Homo sapiens
aagatatggcagaca

SEQ ID NO: 523351 - DNA, 15 bp, Homo sapiens
aaagatatggcagac

SEQ ID NO: 523352 - DNA, 15 bp, Homo sapiens
caaagatatggcaga

SEQ ID NO: 523353 - DNA, 15 bp, Homo sapiens
gcaaagatatggcag

SEQ ID NO: 523354 - DNA, 15 bp, Homo sapiens
tgcaaagatatggca

SEQ ID NO: 523355 - DNA, 15 bp, Homo sapiens
atgcaaagatatggc

SEQ ID NO: 523356 - DNA, 15 bp, Homo sapiens
gatgcaaagatatgg

SEQ ID NO: 523357 - DNA, 15 bp, Homo sapiens
ggatgcaaagatatg

SEQ ID NO: 523358 - DNA, 15 bp, Homo sapiens
aggatgcaaagatat

SEQ ID NO: 523359 - DNA, 15 bp, Homo sapiens
aaggatgcaaagata

SEQ ID NO: 523360 - DNA, 15 bp, Homo sapiens
gaaggatgcaaagat

SEQ ID NO: 523361 - DNA, 15 bp, Homo sapiens
tgaaggatgcaaaga

SEQ ID NO: 523362 - DNA, 15 bp, Homo sapiens
ttgaaggatgcaaag

SEQ ID NO: 523363 - DNA, 15 bp, Homo sapiens
attgaaggatgcaaa

SEQ ID NO: 523364 - DNA, 15 bp, Homo sapiens
cattgaaggatgcaa

SEQ ID NO: 523365 - DNA, 15 bp, Homo sapiens
tcattgaaggatgca

SEQ ID NO: 523366 - DNA, 15 bp, Homo sapiens
gtcattgaaggatgc

SEQ ID NO: 523367 - DNA, 15 bp, Homo sapiens
tgtcattgaaggatg

SEQ ID NO: 523368 - DNA, 15 bp, Homo sapiens
gtgtcattgaaggat

SEQ ID NO: 523369 - DNA, 15 bp, Homo sapiens
agtgtcattgaagga

SEQ ID NO: 523370 - DNA, 15 bp, Homo sapiens
aagtgtcattgaagg

SEQ ID NO: 523371 - DNA, 15 bp, Homo sapiens
aaagtgtcattgaag

SEQ ID NO: 523372 - DNA, 15 bp, Homo sapiens
aaaagtgtcattgaa

SEQ ID NO: 523373 - DNA, 15 bp, Homo sapiens
caaaagtgtcattga

SEQ ID NO: 523374 - DNA, 15 bp, Homo sapiens
acaaaagtgtcattg

SEQ ID NO: 523375 - DNA, 15 bp, Homo sapiens
gacaaaagtgtcatt

SEQ ID NO: 523376 - DNA, 15 bp, Homo sapiens
ggacaaaagtgtcat

SEQ ID NO: 523377 - DNA, 15 bp, Homo sapiens
tggacaaaagtgtca

SEQ ID NO: 523378 - DNA, 15 bp, Homo sapiens
atggacaaaagtgtc

SEQ ID NO: 523379 - DNA, 15 bp, Homo sapiens
catggacaaaagtgt

SEQ ID NO: 523380 - DNA, 15 bp, Homo sapiens
acatggacaaaagtg

SEQ ID NO: 523381 - DNA, 15 bp, Homo sapiens
gacatggacaaaagt

SEQ ID NO: 523382 - DNA, 15 bp, Homo sapiens
tgacatggacaaaag

SEQ ID NO: 523383 - DNA, 15 bp, Homo sapiens
gtgacatggacaaaa

SEQ ID NO: 523384 - DNA, 15 bp, Homo sapiens
agtgacatggacaaa

SEQ ID NO: 523385 - DNA, 15 bp, Homo sapiens
cagtgacatggacaa

SEQ ID NO: 523386 - DNA, 15 bp, Homo sapiens
tcagtgacatggaca

SEQ ID NO: 523387 - DNA, 15 bp, Homo sapiens
atcagtgacatggac

SEQ ID NO: 523388 - DNA, 15 bp, Homo sapiens
gatcagtgacatgga

SEQ ID NO: 523389 - DNA, 15 bp, Homo sapiens
agatcagtgacatgg

SEQ ID NO: 523390 - DNA, 15 bp, Homo sapiens
aagatcagtgacatg

SEQ ID NO: 523391 - DNA, 15 bp, Homo sapiens
aaagatcagtgacat

SEQ ID NO: 523392 - DNA, 15 bp, Homo sapiens
gaaagatcagtgaca

SEQ ID NO: 523393 - DNA, 15 bp, Homo sapiens
agaaagatcagtgac

SEQ ID NO: 523394 - DNA, 15 bp, Homo sapiens
cagaaagatcagtga

SEQ ID NO: 523395 - DNA, 15 bp, Homo sapiens
ccagaaagatcagtg

SEQ ID NO: 523396 - DNA, 15 bp, Homo sapiens
gccagaaagatcagt

SEQ ID NO: 523397 - DNA, 15 bp, Homo sapiens
tgccagaaagatcag

SEQ ID NO: 523398 - DNA, 15 bp, Homo sapiens
ttgccagaaagatca

SEQ ID NO: 523399 - DNA, 15 bp, Homo sapiens
cttgccagaaagatc

SEQ ID NO: 523400 - DNA, 15 bp, Homo sapiens
acttgccagaaagat

SEQ ID NO: 523401 - DNA, 15 bp, Homo sapiens
cacttgccagaaaga

SEQ ID NO: 523402 - DNA, 15 bp, Homo sapiens
tcacttgccagaaag

SEQ ID NO: 523403 - DNA, 15 bp, Homo sapiens
ctcacttgccagaaa

SEQ ID NO: 523404 - DNA, 15 bp, Homo sapiens
actcacttgccagaa

SEQ ID NO: 523405 - DNA, 15 bp, Homo sapiens
tactcacttgccaga

SEQ ID NO: 523406 - DNA, 15 bp, Homo sapiens
gtactcacttgccag

SEQ ID NO: 523407 - DNA, 15 bp, Homo sapiens
ggtactcacttgcca

SEQ ID NO: 523408 - DNA, 15 bp, Homo sapiens
aggtactcacttgcc

SEQ ID NO: 523409 - DNA, 15 bp, Homo sapiens
caggtactcacttgc

SEQ ID NO: 523410 - DNA, 15 bp, Homo sapiens
ccaggtactcacttg

SEQ ID NO: 523411 - DNA, 15 bp, Homo sapiens
cccaggtactcactt

SEQ ID NO: 523412 - DNA, 15 bp, Homo sapiens
acccaggtactcact

SEQ ID NO: 523413 - DNA, 15 bp, Homo sapiens
cacccaggtactcac

SEQ ID NO: 523414 - DNA, 15 bp, Homo sapiens
ccacccaggtactca

SEQ ID NO: 523415 - DNA, 15 bp, Homo sapiens
tccacccaggtactc

SEQ ID NO: 523416 - DNA, 15 bp, Homo sapiens
ctccacccaggtact

SEQ ID NO: 523417 - DNA, 15 bp, Homo sapiens
tctccacccaggtac

SEQ ID NO: 523418 - DNA, 15 bp, Homo sapiens
ctctccacccaggta

SEQ ID NO: 523419 - DNA, 15 bp, Homo sapiens
cctctccacccaggt

SEQ ID NO: 523420 - DNA, 15 bp, Homo sapiens
gcctctccacccagg

SEQ ID NO: 523421 - DNA, 15 bp, Homo sapiens
tgcctctccacccag

SEQ ID NO: 523422 - DNA, 15 bp, Homo sapiens
atgcctctccaccca

SEQ ID NO: 523423 - DNA, 15 bp, Homo sapiens
gatgcctctccaccc

SEQ ID NO: 523424 - DNA, 15 bp, Homo sapiens
ggatgcctctccacc

SEQ ID NO: 523425 - DNA, 15 bp, Homo sapiens
tggatgcctctccac

SEQ ID NO: 523426 - DNA, 15 bp, Homo sapiens
ctggatgcctctcca

SEQ ID NO: 523427 - DNA, 15 bp, Homo sapiens
gctggatgcctctcc

SEQ ID NO: 523428 - DNA, 15 bp, Homo sapiens
agctggatgcctctc

SEQ ID NO: 523429 - DNA, 15 bp, Homo sapiens
cagctggatgcctct

SEQ ID NO: 523430 - DNA, 15 bp, Homo sapiens
ccagctggatgcctc

SEQ ID NO: 523431 - DNA, 15 bp, Homo sapiens
gccagctggatgcct

SEQ ID NO: 523432 - DNA, 15 bp, Homo sapiens
tgccagctggatgcc

SEQ ID NO: 523433 - DNA, 15 bp, Homo sapiens
ttgccagctggatgc

SEQ ID NO: 523434 - DNA, 15 bp, Homo sapiens
tttgccagctggatg

SEQ ID NO: 523435 - DNA, 15 bp, Homo sapiens
ttttgccagctggat

SEQ ID NO: 523436 - DNA, 15 bp, Homo sapiens
cttttgccagctgga

SEQ ID NO: 523437 - DNA, 15 bp, Homo sapiens
ccttttgccagctgg

SEQ ID NO: 523438 - DNA, 15 bp, Homo sapiens
gccttttgccagctg

SEQ ID NO: 523439 - DNA, 15 bp, Homo sapiens
agccttttgccagct

SEQ ID NO: 523440 - DNA, 15 bp, Homo sapiens
cagccttttgccagc

SEQ ID NO: 523441 - DNA, 15 bp, Homo sapiens
tcagccttttgccag

SEQ ID NO: 523442 - DNA, 15 bp, Homo sapiens
ctcagccttttgcca

SEQ ID NO: 523443 - DNA, 15 bp, Homo sapiens
cctcagccttttgcc

SEQ ID NO: 523444 - DNA, 15 bp, Homo sapiens
tcctcagccttttgc

SEQ ID NO: 523445 - DNA, 15 bp, Homo sapiens
ttcctcagccttttg

SEQ ID NO: 523446 - DNA, 15 bp, Homo sapiens
cttcctcagcctttt

SEQ ID NO: 523447 - DNA, 15 bp, Homo sapiens
ccttcctcagccttt

SEQ ID NO: 523448 - DNA, 15 bp, Homo sapiens
gccttcctcagcctt

SEQ ID NO: 523449 - DNA, 15 bp, Homo sapiens
tgccttcctcagcct

SEQ ID NO: 523450 - DNA, 15 bp, Homo sapiens
ttgccttcctcagcc

SEQ ID NO: 523451 - DNA, 15 bp, Homo sapiens
attgccttcctcagc

SEQ ID NO: 523452 - DNA, 15 bp, Homo sapiens
cattgccttcctcag

SEQ ID NO: 523453 - DNA, 15 bp, Homo sapiens
ccattgccttcctca

SEQ ID NO: 523454 - DNA, 15 bp, Homo sapiens
gccattgccttcctc

SEQ ID NO: 523455 - DNA, 15 bp, Homo sapiens
agccattgccttcct

SEQ ID NO: 523456 - DNA, 15 bp, Homo sapiens
cagccattgccttcc

SEQ ID NO: 523457 - DNA, 15 bp, Homo sapiens
ccagccattgccttc

SEQ ID NO: 523458 - DNA, 15 bp, Homo sapiens
cccagccattgcctt

SEQ ID NO: 523459 - DNA, 15 bp, Homo sapiens
tcccagccattgcct

SEQ ID NO: 523460 - DNA, 15 bp, Homo sapiens
gtcccagccattgcc

SEQ ID NO: 523461 - DNA, 15 bp, Homo sapiens
cgtcccagccattgc

SEQ ID NO: 523462 - DNA, 15 bp, Homo sapiens
ccgtcccagccattg

SEQ ID NO: 523463 - DNA, 15 bp, Homo sapiens
cccgtcccagccatt

SEQ ID NO: 523464 - DNA, 15 bp, Homo sapiens
gcccgtcccagccat

SEQ ID NO: 523465 - DNA, 15 bp, Homo sapiens
agcccgtcccagcca

SEQ ID NO: 523466 - DNA, 15 bp, Homo sapiens
tagcccgtcccagcc

SEQ ID NO: 523467 - DNA, 15 bp, Homo sapiens
ctagcccgtcccagc

SEQ ID NO: 523468 - DNA, 15 bp, Homo sapiens
gctagcccgtcccag

SEQ ID NO: 523469 - DNA, 15 bp, Homo sapiens
tgctagcccgtccca

SEQ ID NO: 523470 - DNA, 15 bp, Homo sapiens
ctgctagcccgtccc

SEQ ID NO: 523471 - DNA, 15 bp, Homo sapiens
actgctagcccgtcc

SEQ ID NO: 523472 - DNA, 15 bp, Homo sapiens
aactgctagcccgtc

SEQ ID NO: 523473 - DNA, 15 bp, Homo sapiens
gaactgctagcccgt

SEQ ID NO: 523474 - DNA, 15 bp, Homo sapiens
tgaactgctagcccg

SEQ ID NO: 523475 - DNA, 15 bp, Homo sapiens
ctgaactgctagccc

SEQ ID NO: 523476 - DNA, 15 bp, Homo sapiens
cctgaactgctagcc

SEQ ID NO: 523477 - DNA, 15 bp, Homo sapiens
ccctgaactgctagc

SEQ ID NO: 523478 - DNA, 15 bp, Homo sapiens
cccctgaactgctag

SEQ ID NO: 523479 - DNA, 15 bp, Homo sapiens
tcccctgaactgcta

SEQ ID NO: 523480 - DNA, 15 bp, Homo sapiens
atcccctgaactgct

SEQ ID NO: 523481 - DNA, 15 bp, Homo sapiens
aatcccctgaactgc

SEQ ID NO: 523482 - DNA, 15 bp, Homo sapiens
gaatcccctgaactg

SEQ ID NO: 523483 - DNA, 15 bp, Homo sapiens
agaatcccctgaact

SEQ ID NO: 523484 - DNA, 15 bp, Homo sapiens
gagaatcccctgaac

SEQ ID NO: 523485 - DNA, 15 bp, Homo sapiens
agagaatcccctgaa

SEQ ID NO: 523486 - DNA, 15 bp, Homo sapiens
gagagaatcccctga

SEQ ID NO: 523487 - DNA, 15 bp, Homo sapiens
agagagaatcccctg

SEQ ID NO: 523488 - DNA, 15 bp, Homo sapiens
tagagagaatcccct

SEQ ID NO: 523489 - DNA, 15 bp, Homo sapiens
ttagagagaatcccc

SEQ ID NO: 523490 - DNA, 15 bp, Homo sapiens
tttagagagaatccc

SEQ ID NO: 523491 - DNA, 15 bp, Homo sapiens
ctttagagagaatcc

SEQ ID NO: 523492 - DNA, 15 bp, Homo sapiens
tctttagagagaatc

SEQ ID NO: 523493 - DNA, 15 bp, Homo sapiens
ttctttagagagaat

SEQ ID NO: 523494 - DNA, 15 bp, Homo sapiens
tttctttagagagaa

SEQ ID NO: 523495 - DNA, 15 bp, Homo sapiens
atttctttagagaga

SEQ ID NO: 523496 - DNA, 15 bp, Homo sapiens
catttctttagagag

SEQ ID NO: 523497 - DNA, 15 bp, Homo sapiens
gcatttctttagaga

SEQ ID NO: 523498 - DNA, 15 bp, Homo sapiens
agcatttctttagag

SEQ ID NO: 523499 - DNA, 15 bp, Homo sapiens
cagcatttctttaga

SEQ ID NO: 523500 - DNA, 15 bp, Homo sapiens
acagcatttctttag

SEQ ID NO: 523501 - DNA, 15 bp, Homo sapiens
aacagcatttcttta

SEQ ID NO: 523502 - DNA, 15 bp, Homo sapiens
aaacagcatttcttt

SEQ ID NO: 523503 - DNA, 15 bp, Homo sapiens
aaaacagcatttctt

SEQ ID NO: 523504 - DNA, 15 bp, Homo sapiens
caaaacagcatttct

SEQ ID NO: 523505 - DNA, 15 bp, Homo sapiens
acaaaacagcatttc

SEQ ID NO: 523506 - DNA, 15 bp, Homo sapiens
gacaaaacagcattt

SEQ ID NO: 523507 - DNA, 15 bp, Homo sapiens
ggacaaaacagcatt

SEQ ID NO: 523508 - DNA, 15 bp, Homo sapiens
tggacaaaacagcat

SEQ ID NO: 523509 - DNA, 15 bp, Homo sapiens
ctggacaaaacagca

SEQ ID NO: 523510 - DNA, 15 bp, Homo sapiens
cctggacaaaacagc

SEQ ID NO: 523511 - DNA, 15 bp, Homo sapiens
acctggacaaaacag

SEQ ID NO: 523512 - DNA, 15 bp, Homo sapiens
tacctggacaaaaca

SEQ ID NO: 523513 - DNA, 15 bp, Homo sapiens
ttacctggacaaaac

SEQ ID NO: 523514 - DNA, 15 bp, Homo sapiens
cttacctggacaaaa

SEQ ID NO: 523515 - DNA, 15 bp, Homo sapiens
tcttacctggacaaa

SEQ ID NO: 523516 - DNA, 15 bp, Homo sapiens
ttcttacctggacaa

SEQ ID NO: 523517 - DNA, 15 bp, Homo sapiens
tttcttacctggaca

SEQ ID NO: 523518 - DNA, 15 bp, Homo sapiens
ttttcttacctggac

SEQ ID NO: 523519 - DNA, 15 bp, Homo sapiens
attttcttacctgga

SEQ ID NO: 523520 - DNA, 15 bp, Homo sapiens
cattttcttacctgg

SEQ ID NO: 523521 - DNA, 15 bp, Homo sapiens
acattttcttacctg

SEQ ID NO: 523522 - DNA, 15 bp, Homo sapiens
cacattttcttacct

SEQ ID NO: 523523 - DNA, 15 bp, Homo sapiens
gcacattttcttacc

SEQ ID NO: 523524 - DNA, 15 bp, Homo sapiens
agcacattttcttac

SEQ ID NO: 523525 - DNA, 15 bp, Homo sapiens
aagcacattttctta

SEQ ID NO: 523526 - DNA, 15 bp, Homo sapiens
caagcacattttctt

SEQ ID NO: 523527 - DNA, 15 bp, Homo sapiens
acaagcacattttct

SEQ ID NO: 523528 - DNA, 15 bp, Homo sapiens
gacaagcacattttc

SEQ ID NO: 523529 - DNA, 15 bp, Homo sapiens
ggacaagcacatttt

SEQ ID NO: 523530 - DNA, 15 bp, Homo sapiens
tggacaagcacattt

SEQ ID NO: 523531 - DNA, 15 bp, Homo sapiens
atggacaagcacatt

SEQ ID NO: 523532 - DNA, 15 bp, Homo sapiens
aatggacaagcacat

SEQ ID NO: 523533 - DNA, 15 bp, Homo sapiens
aaatggacaagcaca

SEQ ID NO: 523534 - DNA, 15 bp, Homo sapiens
taaatggacaagcac

SEQ ID NO: 523535 - DNA, 15 bp, Homo sapiens
ctaaatggacaagca

SEQ ID NO: 523536 - DNA, 15 bp, Homo sapiens
gctaaatggacaagc

SEQ ID NO: 523537 - DNA, 15 bp, Homo sapiens
ggctaaatggacaag

SEQ ID NO: 523538 - DNA, 15 bp, Homo sapiens
gggctaaatggacaa

SEQ ID NO: 523539 - DNA, 15 bp, Homo sapiens
tgggctaaatggaca

SEQ ID NO: 523540 - DNA, 15 bp, Homo sapiens
gtgggctaaatggac

SEQ ID NO: 523541 - DNA, 15 bp, Homo sapiens
tgtgggctaaatgga

SEQ ID NO: 523542 - DNA, 15 bp, Homo sapiens
ttgtgggctaaatgg

SEQ ID NO: 523543 - DNA, 15 bp, Homo sapiens
tttgtgggctaaatg

SEQ ID NO: 523544 - DNA, 15 bp, Homo sapiens
atttgtgggctaaat

SEQ ID NO: 523545 - DNA, 15 bp, Homo sapiens
tatttgtgggctaaa

SEQ ID NO: 523546 - DNA, 15 bp, Homo sapiens
atatttgtgggctaa

SEQ ID NO: 523547 - DNA, 15 bp, Homo sapiens
aatatttgtgggcta

SEQ ID NO: 523548 - DNA, 15 bp, Homo sapiens
caatatttgtgggct

SEQ ID NO: 523549 - DNA, 15 bp, Homo sapiens
acaatatttgtgggc

SEQ ID NO: 523550 - DNA, 15 bp, Homo sapiens
cacaatatttgtggg

SEQ ID NO: 523551 - DNA, 15 bp, Homo sapiens
tcacaatatttgtgg

SEQ ID NO: 523552 - DNA, 15 bp, Homo sapiens
atcacaatatttgtg

SEQ ID NO: 523553 - DNA, 15 bp, Homo sapiens
aatcacaatatttgt

SEQ ID NO: 523554 - DNA, 15 bp, Homo sapiens
aaatcacaatatttg

SEQ ID NO: 523555 - DNA, 15 bp, Homo sapiens
gaaatcacaatattt

SEQ ID NO: 523556 - DNA, 15 bp, Homo sapiens
ggaaatcacaatatt

SEQ ID NO: 523557 - DNA, 15 bp, Homo sapiens
gggaaatcacaatat

SEQ ID NO: 523558 - DNA, 15 bp, Homo sapiens
tgggaaatcacaata

SEQ ID NO: 523559 - DNA, 15 bp, Homo sapiens
ctgggaaatcacaat

SEQ ID NO: 523560 - DNA, 15 bp, Homo sapiens
cctgggaaatcacaa

SEQ ID NO: 523561 - DNA, 15 bp, Homo sapiens
ccctgggaaatcaca

SEQ ID NO: 523562 - DNA, 15 bp, Homo sapiens
cccctgggaaatcac

SEQ ID NO: 523563 - DNA, 15 bp, Homo sapiens
acccctgggaaatca

SEQ ID NO: 523564 - DNA, 15 bp, Homo sapiens
aacccctgggaaatc

SEQ ID NO: 523565 - DNA, 15 bp, Homo sapiens
taacccctgggaaat

SEQ ID NO: 523566 - DNA, 15 bp, Homo sapiens
gtaacccctgggaaa

SEQ ID NO: 523567 - DNA, 15 bp, Homo sapiens
tgtaacccctgggaa

SEQ ID NO: 523568 - DNA, 15 bp, Homo sapiens
ttgtaacccctggga

SEQ ID NO: 523569 - DNA, 15 bp, Homo sapiens
cttgtaacccctggg

SEQ ID NO: 523570 - DNA, 15 bp, Homo sapiens
tcttgtaacccctgg

SEQ ID NO: 523571 - DNA, 15 bp, Homo sapiens
ctcttgtaacccctg

SEQ ID NO: 523572 - DNA, 15 bp, Homo sapiens
tctcttgtaacccct

SEQ ID NO: 523573 - DNA, 15 bp, Homo sapiens
ctctcttgtaacccc

SEQ ID NO: 523574 - DNA, 15 bp, Homo sapiens
cctctcttgtaaccc

SEQ ID NO: 523575 - DNA, 15 bp, Homo sapiens
tcctctcttgtaacc

SEQ ID NO: 523576 - DNA, 15 bp, Homo sapiens
ctcctctcttgtaac

SEQ ID NO: 523577 - DNA, 15 bp, Homo sapiens
tctcctctcttgtaa

SEQ ID NO: 523578 - DNA, 15 bp, Homo sapiens
gtctcctctcttgta

SEQ ID NO: 523579 - DNA, 15 bp, Homo sapiens
tgtctcctctcttgt

SEQ ID NO: 523580 - DNA, 15 bp, Homo sapiens
gtgtctcctctcttg

SEQ ID NO: 523581 - DNA, 15 bp, Homo sapiens
tgtgtctcctctctt

SEQ ID NO: 523582 - DNA, 15 bp, Homo sapiens
atgtgtctcctctct

SEQ ID NO: 523583 - DNA, 15 bp, Homo sapiens
aatgtgtctcctctc

SEQ ID NO: 523584 - DNA, 15 bp, Homo sapiens
gaatgtgtctcctct

SEQ ID NO: 523585 - DNA, 15 bp, Homo sapiens
agaatgtgtctcctc

SEQ ID NO: 523586 - DNA, 15 bp, Homo sapiens
aagaatgtgtctcct

SEQ ID NO: 523587 - DNA, 15 bp, Homo sapiens
gaagaatgtgtctcc

SEQ ID NO: 523588 - DNA, 15 bp, Homo sapiens
cgaagaatgtgtctc

SEQ ID NO: 523589 - DNA, 15 bp, Homo sapiens
acgaagaatgtgtct

SEQ ID NO: 523590 - DNA, 15 bp, Homo sapiens
gacgaagaatgtgtc

SEQ ID NO: 523591 - DNA, 15 bp, Homo sapiens
ggacgaagaatgtgt

SEQ ID NO: 523592 - DNA, 15 bp, Homo sapiens
aggacgaagaatgtg

SEQ ID NO: 523593 - DNA, 15 bp, Homo sapiens
aaggacgaagaatgt

SEQ ID NO: 523594 - DNA, 15 bp, Homo sapiens
taaggacgaagaatg

SEQ ID NO: 523595 - DNA, 15 bp, Homo sapiens
gtaaggacgaagaat

SEQ ID NO: 523596 - DNA, 15 bp, Homo sapiens
tgtaaggacgaagaa

SEQ ID NO: 523597 - DNA, 15 bp, Homo sapiens
ctgtaaggacgaaga

SEQ ID NO: 523598 - DNA, 15 bp, Homo sapiens
gctgtaaggacgaag

SEQ ID NO: 523599 - DNA, 15 bp, Homo sapiens
cgctgtaaggacgaa

SEQ ID NO: 523600 - DNA, 15 bp, Homo sapiens
acgctgtaaggacga

SEQ ID NO: 523601 - DNA, 15 bp, Homo sapiens
cacgctgtaaggacg

SEQ ID NO: 523602 - DNA, 15 bp, Homo sapiens
tcacgctgtaaggac

SEQ ID NO: 523603 - DNA, 15 bp, Homo sapiens
atcacgctgtaagga

SEQ ID NO: 523604 - DNA, 15 bp, Homo sapiens
catcacgctgtaagg

SEQ ID NO: 523605 - DNA, 15 bp, Homo sapiens
ccatcacgctgtaag

SEQ ID NO: 523606 - DNA, 15 bp, Homo sapiens
accatcacgctgtaa

SEQ ID NO: 523607 - DNA, 15 bp, Homo sapiens
gaccatcacgctgta

SEQ ID NO: 523608 - DNA, 15 bp, Homo sapiens
tgaccatcacgctgt

SEQ ID NO: 523609 - DNA, 15 bp, Homo sapiens
atgaccatcacgctg

SEQ ID NO: 523610 - DNA, 15 bp, Homo sapiens
aatgaccatcacgct

SEQ ID NO: 523611 - DNA, 15 bp, Homo sapiens
caatgaccatcacgc

SEQ ID NO: 523612 - DNA, 15 bp, Homo sapiens
tcaatgaccatcacg

SEQ ID NO: 523613 - DNA, 15 bp, Homo sapiens
ttcaatgaccatcac

SEQ ID NO: 523614 - DNA, 15 bp, Homo sapiens
attcaatgaccatca

SEQ ID NO: 523615 - DNA, 15 bp, Homo sapiens
gattcaatgaccatc

SEQ ID NO: 523616 - DNA, 15 bp, Homo sapiens
ggattcaatgaccat

SEQ ID NO: 523617 - DNA, 15 bp, Homo sapiens
aggattcaatgacca

SEQ ID NO: 523618 - DNA, 15 bp, Homo sapiens
aaggattcaatgacc

SEQ ID NO: 523619 - DNA, 15 bp, Homo sapiens
caaggattcaatgac

SEQ ID NO: 523620 - DNA, 15 bp, Homo sapiens
ccaaggattcaatga

SEQ ID NO: 523621 - DNA, 15 bp, Homo sapiens
accaaggattcaatg

SEQ ID NO: 523622 - DNA, 15 bp, Homo sapiens
aaccaaggattcaat

SEQ ID NO: 523623 - DNA, 15 bp, Homo sapiens
aaaccaaggattcaa

SEQ ID NO: 523624 - DNA, 15 bp, Homo sapiens
gaaaccaaggattca

SEQ ID NO: 523625 - DNA, 15 bp, Homo sapiens
agaaaccaaggattc

SEQ ID NO: 523626 - DNA, 15 bp, Homo sapiens
aagaaaccaaggatt

SEQ ID NO: 523627 - DNA, 15 bp, Homo sapiens
caagaaaccaaggat

SEQ ID NO: 523628 - DNA, 15 bp, Homo sapiens
ccaagaaaccaagga

SEQ ID NO: 523629 - DNA, 15 bp, Homo sapiens
cccaagaaaccaagg

SEQ ID NO: 523630 - DNA, 15 bp, Homo sapiens
tcccaagaaaccaag

SEQ ID NO: 523631 - DNA, 15 bp, Homo sapiens
ttcccaagaaaccaa

SEQ ID NO: 523632 - DNA, 15 bp, Homo sapiens
attcccaagaaacca

SEQ ID NO: 523633 - DNA, 15 bp, Homo sapiens
aattcccaagaaacc

SEQ ID NO: 523634 - DNA, 15 bp, Homo sapiens
taattcccaagaaac

SEQ ID NO: 523635 - DNA, 15 bp, Homo sapiens
ataattcccaagaaa

SEQ ID NO: 523636 - DNA, 15 bp, Homo sapiens
gataattcccaagaa

SEQ ID NO: 523637 - DNA, 15 bp, Homo sapiens
agataattcccaaga

SEQ ID NO: 523638 - DNA, 15 bp, Homo sapiens
aagataattcccaag

SEQ ID NO: 523639 - DNA, 15 bp, Homo sapiens
gaagataattcccaa

SEQ ID NO: 523640 - DNA, 15 bp, Homo sapiens
agaagataattccca

SEQ ID NO: 523641 - DNA, 15 bp, Homo sapiens
aagaagataattccc

SEQ ID NO: 523642 - DNA, 15 bp, Homo sapiens
aaagaagataattcc

SEQ ID NO: 523643 - DNA, 15 bp, Homo sapiens
gaaagaagataattc

SEQ ID NO: 523644 - DNA, 15 bp, Homo sapiens
ggaaagaagataatt

SEQ ID NO: 523645 - DNA, 15 bp, Homo sapiens
gggaaagaagataat

SEQ ID NO: 523646 - DNA, 15 bp, Homo sapiens
agggaaagaagataa

SEQ ID NO: 523647 - DNA, 15 bp, Homo sapiens
tagggaaagaagata

SEQ ID NO: 523648 - DNA, 15 bp, Homo sapiens
ctagggaaagaagat

SEQ ID NO: 523649 - DNA, 15 bp, Homo sapiens
actagggaaagaaga

SEQ ID NO: 523650 - DNA, 15 bp, Homo sapiens
aactagggaaagaag

SEQ ID NO: 523651 - DNA, 15 bp, Homo sapiens
gaactagggaaagaa

SEQ ID NO: 523652 - DNA, 15 bp, Homo sapiens
ggaactagggaaaga

SEQ ID NO: 523653 - DNA, 15 bp, Homo sapiens
gggaactagggaaag

SEQ ID NO: 523654 - DNA, 15 bp, Homo sapiens
agggaactagggaaa

SEQ ID NO: 523655 - DNA, 15 bp, Homo sapiens
aagggaactagggaa

SEQ ID NO: 523656 - DNA, 15 bp, Homo sapiens
aaagggaactaggga

SEQ ID NO: 523657 - DNA, 15 bp, Homo sapiens
caaagggaactaggg

SEQ ID NO: 523658 - DNA, 15 bp, Homo sapiens
gcaaagggaactagg

SEQ ID NO: 523659 - DNA, 15 bp, Homo sapiens
tgcaaagggaactag

SEQ ID NO: 523660 - DNA, 15 bp, Homo sapiens
ctgcaaagggaacta

SEQ ID NO: 523661 - DNA, 15 bp, Homo sapiens
cctgcaaagggaact

SEQ ID NO: 523662 - DNA, 15 bp, Homo sapiens
tcctgcaaagggaac

SEQ ID NO: 523663 - DNA, 15 bp, Homo sapiens
ctcctgcaaagggaa

SEQ ID NO: 523664 - DNA, 15 bp, Homo sapiens
gctcctgcaaaggga

SEQ ID NO: 523665 - DNA, 15 bp, Homo sapiens
tgctcctgcaaaggg

SEQ ID NO: 523666 - DNA, 15 bp, Homo sapiens
ctgctcctgcaaagg

SEQ ID NO: 523667 - DNA, 15 bp, Homo sapiens
gctgctcctgcaaag

SEQ ID NO: 523668 - DNA, 15 bp, Homo sapiens
tgctgctcctgcaaa

SEQ ID NO: 523669 - DNA, 15 bp, Homo sapiens
ctgctgctcctgcaa

SEQ ID NO: 523670 - DNA, 15 bp, Homo sapiens
actgctgctcctgca

SEQ ID NO: 523671 - DNA, 15 bp, Homo sapiens
cactgctgctcctgc

SEQ ID NO: 523672 - DNA, 15 bp, Homo sapiens
ccactgctgctcctg

SEQ ID NO: 523673 - DNA, 15 bp, Homo sapiens
tccactgctgctcct

SEQ ID NO: 523674 - DNA, 15 bp, Homo sapiens
gtccactgctgctcc

SEQ ID NO: 523675 - DNA, 15 bp, Homo sapiens
agtccactgctgctc

SEQ ID NO: 523676 - DNA, 15 bp, Homo sapiens
cagtccactgctgct

SEQ ID NO: 523677 - DNA, 15 bp, Homo sapiens
gcagtccactgctgc

SEQ ID NO: 523678 - DNA, 15 bp, Homo sapiens
tgcagtccactgctg

SEQ ID NO: 523679 - DNA, 15 bp, Homo sapiens
ttgcagtccactgct

SEQ ID NO: 523680 - DNA, 15 bp, Homo sapiens
cttgcagtccactgc

SEQ ID NO: 523681 - DNA, 15 bp, Homo sapiens
acttgcagtccactg

SEQ ID NO: 523682 - DNA, 15 bp, Homo sapiens
cacttgcagtccact

SEQ ID NO: 523683 - DNA, 15 bp, Homo sapiens
ccacttgcagtccac

SEQ ID NO: 523684 - DNA, 15 bp, Homo sapiens
cccacttgcagtcca

SEQ ID NO: 523685 - DNA, 15 bp, Homo sapiens
gcccacttgcagtcc

SEQ ID NO: 523686 - DNA, 15 bp, Homo sapiens
agcccacttgcagtc

SEQ ID NO: 523687 - DNA, 15 bp, Homo sapiens
gagcccacttgcagt

SEQ ID NO: 523688 - DNA, 15 bp, Homo sapiens
agagcccacttgcag

SEQ ID NO: 523689 - DNA, 15 bp, Homo sapiens
cagagcccacttgca

SEQ ID NO: 523690 - DNA, 15 bp, Homo sapiens
ccagagcccacttgc

SEQ ID NO: 523691 - DNA, 15 bp, Homo sapiens
cccagagcccacttg

SEQ ID NO: 523692 - DNA, 15 bp, Homo sapiens
acccagagcccactt

SEQ ID NO: 523693 - DNA, 15 bp, Homo sapiens
cacccagagcccact

SEQ ID NO: 523694 - DNA, 15 bp, Homo sapiens
gcacccagagcccac

SEQ ID NO: 523695 - DNA, 15 bp, Homo sapiens
cgcacccagagccca

SEQ ID NO: 523696 - DNA, 15 bp, Homo sapiens
ccgcacccagagccc

SEQ ID NO: 523697 - DNA, 15 bp, Homo sapiens
cccgcacccagagcc

SEQ ID NO: 523698 - DNA, 15 bp, Homo sapiens
acccgcacccagagc

SEQ ID NO: 523699 - DNA, 15 bp, Homo sapiens
aacccgcacccagag

SEQ ID NO: 523700 - DNA, 15 bp, Homo sapiens
gaacccgcacccaga

SEQ ID NO: 523701 - DNA, 15 bp, Homo sapiens
cgaacccgcacccag

SEQ ID NO: 523702 - DNA, 15 bp, Homo sapiens
tcgaacccgcaccca

SEQ ID NO: 523703 - DNA, 15 bp, Homo sapiens
gtcgaacccgcaccc

SEQ ID NO: 523704 - DNA, 15 bp, Homo sapiens
cgtcgaacccgcacc

SEQ ID NO: 523705 - DNA, 15 bp, Homo sapiens
ccgtcgaacccgcac

SEQ ID NO: 523706 - DNA, 15 bp, Homo sapiens
gccgtcgaacccgca

SEQ ID NO: 523707 - DNA, 15 bp, Homo sapiens
ggccgtcgaacccgc

SEQ ID NO: 523708 - DNA, 15 bp, Homo sapiens
tggccgtcgaacccg

SEQ ID NO: 523709 - DNA, 15 bp, Homo sapiens
atggccgtcgaaccc

SEQ ID NO: 523710 - DNA, 15 bp, Homo sapiens
aatggccgtcgaacc

SEQ ID NO: 523711 - DNA, 15 bp, Homo sapiens
aaatggccgtcgaac

SEQ ID NO: 523712 - DNA, 15 bp, Homo sapiens
taaatggccgtcgaa

SEQ ID NO: 523713 - DNA, 15 bp, Homo sapiens
ctaaatggccgtcga

SEQ ID NO: 523714 - DNA, 15 bp, Homo sapiens
gctaaatggccgtcg

SEQ ID NO: 523715 - DNA, 15 bp, Homo sapiens
tgctaaatggccgtc

SEQ ID NO: 523716 - DNA, 15 bp, Homo sapiens
ttgctaaatggccgt

SEQ ID NO: 523717 - DNA, 15 bp, Homo sapiens
cttgctaaatggccg

SEQ ID NO: 523718 - DNA, 15 bp, Homo sapiens
acttgctaaatggcc

SEQ ID NO: 523719 - DNA, 15 bp, Homo sapiens
aacttgctaaatggc

SEQ ID NO: 523720 - DNA, 15 bp, Homo sapiens
caacttgctaaatgg

SEQ ID NO: 523721 - DNA, 15 bp, Homo sapiens
acaacttgctaaatg

SEQ ID NO: 523722 - DNA, 15 bp, Homo sapiens
cacaacttgctaaat

SEQ ID NO: 523723 - DNA, 15 bp, Homo sapiens
tcacaacttgctaaa

SEQ ID NO: 523724 - DNA, 15 bp, Homo sapiens
gtcacaacttgctaa

SEQ ID NO: 523725 - DNA, 15 bp, Homo sapiens
agtcacaacttgcta

SEQ ID NO: 523726 - DNA, 15 bp, Homo sapiens
aagtcacaacttgct

SEQ ID NO: 523727 - DNA, 15 bp, Homo sapiens
caagtcacaacttgc

SEQ ID NO: 523728 - DNA, 15 bp, Homo sapiens
acaagtcacaacttg

SEQ ID NO: 523729 - DNA, 15 bp, Homo sapiens
cacaagtcacaactt

SEQ ID NO: 523730 - DNA, 15 bp, Homo sapiens
acacaagtcacaact

SEQ ID NO: 523731 - DNA, 15 bp, Homo sapiens
cacacaagtcacaac

SEQ ID NO: 523732 - DNA, 15 bp, Homo sapiens
tcacacaagtcacaa

SEQ ID NO: 523733 - DNA, 15 bp, Homo sapiens
ttcacacaagtcaca

SEQ ID NO: 523734 - DNA, 15 bp, Homo sapiens
tttcacacaagtcac

SEQ ID NO: 523735 - DNA, 15 bp, Homo sapiens
atttcacacaagtca

SEQ ID NO: 523736 - DNA, 15 bp, Homo sapiens
gatttcacacaagtc

SEQ ID NO: 523737 - DNA, 15 bp, Homo sapiens
tgatttcacacaagt

SEQ ID NO: 523738 - DNA, 15 bp, Homo sapiens
gtgatttcacacaag

SEQ ID NO: 523739 - DNA, 15 bp, Homo sapiens
agtgatttcacacaa

SEQ ID NO: 523740 - DNA, 15 bp, Homo sapiens
gagtgatttcacaca

SEQ ID NO: 523741 - DNA, 15 bp, Homo sapiens
tgagtgatttcacac

SEQ ID NO: 523742 - DNA, 15 bp, Homo sapiens
ctgagtgatttcaca

SEQ ID NO: 523743 - DNA, 15 bp, Homo sapiens
tctgagtgatttcac

SEQ ID NO: 523744 - DNA, 15 bp, Homo sapiens
atctgagtgatttca

SEQ ID NO: 523745 - DNA, 15 bp, Homo sapiens
aatctgagtgatttc

SEQ ID NO: 523746 - DNA, 15 bp, Homo sapiens
gaatctgagtgattt

SEQ ID NO: 523747 - DNA, 15 bp, Homo sapiens
agaatctgagtgatt

SEQ ID NO: 523748 - DNA, 15 bp, Homo sapiens
cagaatctgagtgat

SEQ ID NO: 523749 - DNA, 15 bp, Homo sapiens
tcagaatctgagtga

SEQ ID NO: 523750 - DNA, 15 bp, Homo sapiens
ctcagaatctgagtg

SEQ ID NO: 523751 - DNA, 15 bp, Homo sapiens
actcagaatctgagt

SEQ ID NO: 523752 - DNA, 15 bp, Homo sapiens
aactcagaatctgag

SEQ ID NO: 523753 - DNA, 15 bp, Homo sapiens
aaactcagaatctga

SEQ ID NO: 523754 - DNA, 15 bp, Homo sapiens
aaaactcagaatctg

SEQ ID NO: 523755 - DNA, 15 bp, Homo sapiens
caaaactcagaatct

SEQ ID NO: 523756 - DNA, 15 bp, Homo sapiens
ccaaaactcagaatc

SEQ ID NO: 523757 - DNA, 15 bp, Homo sapiens
accaaaactcagaat

SEQ ID NO: 523758 - DNA, 15 bp, Homo sapiens
aaccaaaactcagaa

SEQ ID NO: 523759 - DNA, 15 bp, Homo sapiens
aaaccaaaactcaga

SEQ ID NO: 523760 - DNA, 15 bp, Homo sapiens
gaaaccaaaactcag

SEQ ID NO: 523761 - DNA, 15 bp, Homo sapiens
ggaaaccaaaactca

SEQ ID NO: 523762 - DNA, 15 bp, Homo sapiens
aggaaaccaaaactc

SEQ ID NO: 523763 - DNA, 15 bp, Homo sapiens
gaggaaaccaaaact

SEQ ID NO: 523764 - DNA, 15 bp, Homo sapiens
tgaggaaaccaaaac

SEQ ID NO: 523765 - DNA, 15 bp, Homo sapiens
atgaggaaaccaaaa

SEQ ID NO: 523766 - DNA, 15 bp, Homo sapiens
tatgaggaaaccaaa

SEQ ID NO: 523767 - DNA, 15 bp, Homo sapiens
atatgaggaaaccaa

SEQ ID NO: 523768 - DNA, 15 bp, Homo sapiens
catatgaggaaacca

SEQ ID NO: 523769 - DNA, 15 bp, Homo sapiens
acatatgaggaaacc

SEQ ID NO: 523770 - DNA, 15 bp, Homo sapiens
tacatatgaggaaac

SEQ ID NO: 523771 - DNA, 15 bp, Homo sapiens
ttacatatgaggaaa

SEQ ID NO: 523772 - DNA, 15 bp, Homo sapiens
tttacatatgaggaa

SEQ ID NO: 523773 - DNA, 15 bp, Homo sapiens
ttttacatatgagga

SEQ ID NO: 523774 - DNA, 15 bp, Homo sapiens
attttacatatgagg

SEQ ID NO: 523775 - DNA, 15 bp, Homo sapiens
aattttacatatgag

SEQ ID NO: 523776 - DNA, 15 bp, Homo sapiens
taattttacatatga

SEQ ID NO: 523777 - DNA, 15 bp, Homo sapiens
ctaattttacatatg

SEQ ID NO: 523778 - DNA, 15 bp, Homo sapiens
cctaattttacatat

SEQ ID NO: 523779 - DNA, 15 bp, Homo sapiens
tcctaattttacata

SEQ ID NO: 523780 - DNA, 15 bp, Homo sapiens
gtcctaattttacat

SEQ ID NO: 523781 - DNA, 15 bp, Homo sapiens
tgtcctaattttaca

SEQ ID NO: 523782 - DNA, 15 bp, Homo sapiens
ctgtcctaattttac

SEQ ID NO: 523783 - DNA, 15 bp, Homo sapiens
actgtcctaatttta

SEQ ID NO: 523784 - DNA, 15 bp, Homo sapiens
tactgtcctaatttt

SEQ ID NO: 523785 - DNA, 15 bp, Homo sapiens
ttactgtcctaattt

SEQ ID NO: 523786 - DNA, 15 bp, Homo sapiens
attactgtcctaatt

SEQ ID NO: 523787 - DNA, 15 bp, Homo sapiens
cattactgtcctaat

SEQ ID NO: 523788 - DNA, 15 bp, Homo sapiens
acattactgtcctaa

SEQ ID NO: 523789 - DNA, 15 bp, Homo sapiens
gacattactgtccta

SEQ ID NO: 523790 - DNA, 15 bp, Homo sapiens
agacattactgtcct

SEQ ID NO: 523791 - DNA, 15 bp, Homo sapiens
tagacattactgtcc

SEQ ID NO: 523792 - DNA, 15 bp, Homo sapiens
gtagacattactgtc

SEQ ID NO: 523793 - DNA, 15 bp, Homo sapiens
ggtagacattactgt

SEQ ID NO: 523794 - DNA, 15 bp, Homo sapiens
aggtagacattactg

SEQ ID NO: 523795 - DNA, 15 bp, Homo sapiens
aaggtagacattact

SEQ ID NO: 523796 - DNA, 15 bp, Homo sapiens
caaggtagacattac

SEQ ID NO: 523797 - DNA, 15 bp, Homo sapiens
acaaggtagacatta

SEQ ID NO: 523798 - DNA, 15 bp, Homo sapiens
cacaaggtagacatt

SEQ ID NO: 523799 - DNA, 15 bp, Homo sapiens
ccacaaggtagacat

SEQ ID NO: 523800 - DNA, 15 bp, Homo sapiens
tccacaaggtagaca

SEQ ID NO: 523801 - DNA, 15 bp, Homo sapiens
ctccacaaggtagac

SEQ ID NO: 523802 - DNA, 15 bp, Homo sapiens
actccacaaggtaga

SEQ ID NO: 523803 - DNA, 15 bp, Homo sapiens
tactccacaaggtag

SEQ ID NO: 523804 - DNA, 15 bp, Homo sapiens
ttactccacaaggta

SEQ ID NO: 523805 - DNA, 15 bp, Homo sapiens
attactccacaaggt

SEQ ID NO: 523806 - DNA, 15 bp, Homo sapiens
cattactccacaagg

SEQ ID NO: 523807 - DNA, 15 bp, Homo sapiens
ccattactccacaag

SEQ ID NO: 523808 - DNA, 15 bp, Homo sapiens
accattactccacaa

SEQ ID NO: 523809 - DNA, 15 bp, Homo sapiens
taccattactccaca

SEQ ID NO: 523810 - DNA, 15 bp, Homo sapiens
ttaccattactccac

SEQ ID NO: 523811 - DNA, 15 bp, Homo sapiens
cttaccattactcca

SEQ ID NO: 523812 - DNA, 15 bp, Homo sapiens
ccttaccattactcc

SEQ ID NO: 523813 - DNA, 15 bp, Homo sapiens
tccttaccattactc

SEQ ID NO: 523814 - DNA, 15 bp, Homo sapiens
atccttaccattact

SEQ ID NO: 523815 - DNA, 15 bp, Homo sapiens
aatccttaccattac

SEQ ID NO: 523816 - DNA, 15 bp, Homo sapiens
taatccttaccatta

SEQ ID NO: 523817 - DNA, 15 bp, Homo sapiens
ttaatccttaccatt

SEQ ID NO: 523818 - DNA, 15 bp, Homo sapiens
tttaatccttaccat

SEQ ID NO: 523819 - DNA, 15 bp, Homo sapiens
atttaatccttacca

SEQ ID NO: 523820 - DNA, 15 bp, Homo sapiens
catttaatccttacc

SEQ ID NO: 523821 - DNA, 15 bp, Homo sapiens
gcatttaatccttac

SEQ ID NO: 523822 - DNA, 15 bp, Homo sapiens
tgcatttaatcctta

SEQ ID NO: 523823 - DNA, 15 bp, Homo sapiens
ttgcatttaatcctt

SEQ ID NO: 523824 - DNA, 15 bp, Homo sapiens
tttgcatttaatcct

SEQ ID NO: 523825 - DNA, 15 bp, Homo sapiens
ttttgcatttaatcc

SEQ ID NO: 523826 - DNA, 15 bp, Homo sapiens
cttttgcatttaatc

SEQ ID NO: 523827 - DNA, 15 bp, Homo sapiens
acttttgcatttaat

SEQ ID NO: 523828 - DNA, 15 bp, Homo sapiens
tacttttgcatttaa

SEQ ID NO: 523829 - DNA, 15 bp, Homo sapiens
ctacttttgcattta

SEQ ID NO: 523830 - DNA, 15 bp, Homo sapiens
tctacttttgcattt

SEQ ID NO: 523831 - DNA, 15 bp, Homo sapiens
atctacttttgcatt

SEQ ID NO: 523832 - DNA, 15 bp, Homo sapiens
tatctacttttgcat

SEQ ID NO: 523833 - DNA, 15 bp, Homo sapiens
atatctacttttgca

SEQ ID NO: 523834 - DNA, 15 bp, Homo sapiens
tatatctacttttgc

SEQ ID NO: 523835 - DNA, 15 bp, Homo sapiens
atatatctacttttg

SEQ ID NO: 523836 - DNA, 15 bp, Homo sapiens
tatatatctactttt

SEQ ID NO: 523837 - DNA, 15 bp, Homo sapiens
ttatatatctacttt

SEQ ID NO: 523838 - DNA, 15 bp, Homo sapiens
tttatatatctactt

SEQ ID NO: 523839 - DNA, 15 bp, Homo sapiens
ttttatatatctact

SEQ ID NO: 523840 - DNA, 15 bp, Homo sapiens
attttatatatctac

SEQ ID NO: 523841 - DNA, 15 bp, Homo sapiens
cattttatatatcta

SEQ ID NO: 523842 - DNA, 15 bp, Homo sapiens
acattttatatatct

SEQ ID NO: 523843 - DNA, 15 bp, Homo sapiens
aacattttatatatc

SEQ ID NO: 523844 - DNA, 15 bp, Homo sapiens
taacattttatatat

SEQ ID NO: 523845 - DNA, 15 bp, Homo sapiens
ttaacattttatata

SEQ ID NO: 523846 - DNA, 15 bp, Homo sapiens
attaacattttatat

SEQ ID NO: 523847 - DNA, 15 bp, Homo sapiens
tattaacattttata

SEQ ID NO: 523848 - DNA, 15 bp, Homo sapiens
gtattaacattttat

SEQ ID NO: 523849 - DNA, 15 bp, Homo sapiens
agtattaacatttta

SEQ ID NO: 523850 - DNA, 15 bp, Homo sapiens
cagtattaacatttt

SEQ ID NO: 523851 - DNA, 15 bp, Homo sapiens
tcagtattaacattt

SEQ ID NO: 523852 - DNA, 15 bp, Homo sapiens
ctcagtattaacatt

SEQ ID NO: 523853 - DNA, 15 bp, Homo sapiens
actcagtattaacat

SEQ ID NO: 523854 - DNA, 15 bp, Homo sapiens
tactcagtattaaca

SEQ ID NO: 523855 - DNA, 15 bp, Homo sapiens
atactcagtattaac

SEQ ID NO: 523856 - DNA, 15 bp, Homo sapiens
tatactcagtattaa

SEQ ID NO: 523857 - DNA, 15 bp, Homo sapiens
ctatactcagtatta

SEQ ID NO: 523858 - DNA, 15 bp, Homo sapiens
gctatactcagtatt

SEQ ID NO: 523859 - DNA, 15 bp, Homo sapiens
agctatactcagtat

SEQ ID NO: 523860 - DNA, 15 bp, Homo sapiens
tagctatactcagta

SEQ ID NO: 523861 - DNA, 15 bp, Homo sapiens
atagctatactcagt

SEQ ID NO: 523862 - DNA, 15 bp, Homo sapiens
tatagctatactcag

SEQ ID NO: 523863 - DNA, 15 bp, Homo sapiens
atatagctatactca

SEQ ID NO: 523864 - DNA, 15 bp, Homo sapiens
aatatagctatactc

SEQ ID NO: 523865 - DNA, 15 bp, Homo sapiens
caatatagctatact

SEQ ID NO: 523866 - DNA, 15 bp, Homo sapiens
ccaatatagctatac

SEQ ID NO: 523867 - DNA, 15 bp, Homo sapiens
cccaatatagctata

SEQ ID NO: 523868 - DNA, 15 bp, Homo sapiens
gcccaatatagctat

SEQ ID NO: 523869 - DNA, 15 bp, Homo sapiens
ggcccaatatagcta

SEQ ID NO: 523870 - DNA, 15 bp, Homo sapiens
tggcccaatatagct

SEQ ID NO: 523871 - DNA, 15 bp, Homo sapiens
atggcccaatatagc

SEQ ID NO: 523872 - DNA, 15 bp, Homo sapiens
aatggcccaatatag

SEQ ID NO: 523873 - DNA, 15 bp, Homo sapiens
gaatggcccaatata

SEQ ID NO: 523874 - DNA, 15 bp, Homo sapiens
tgaatggcccaatat

SEQ ID NO: 523875 - DNA, 15 bp, Homo sapiens
ttgaatggcccaata

SEQ ID NO: 523876 - DNA, 15 bp, Homo sapiens
gttgaatggcccaat

SEQ ID NO: 523877 - DNA, 15 bp, Homo sapiens
ggttgaatggcccaa

SEQ ID NO: 523878 - DNA, 15 bp, Homo sapiens
gggttgaatggccca

SEQ ID NO: 523879 - DNA, 15 bp, Homo sapiens
ggggttgaatggccc

SEQ ID NO: 523880 - DNA, 15 bp, Homo sapiens
tggggttgaatggcc

SEQ ID NO: 523881 - DNA, 15 bp, Homo sapiens
gtggggttgaatggc

SEQ ID NO: 523882 - DNA, 15 bp, Homo sapiens
agtggggttgaatgg

SEQ ID NO: 523883 - DNA, 15 bp, Homo sapiens
cagtggggttgaatg

SEQ ID NO: 523884 - DNA, 15 bp, Homo sapiens
ccagtggggttgaat

SEQ ID NO: 523885 - DNA, 15 bp, Homo sapiens
tccagtggggttgaa

SEQ ID NO: 523886 - DNA, 15 bp, Homo sapiens
gtccagtggggttga

SEQ ID NO: 523887 - DNA, 15 bp, Homo sapiens
agtccagtggggttg

SEQ ID NO: 523888 - DNA, 15 bp, Homo sapiens
cagtccagtggggtt

SEQ ID NO: 523889 - DNA, 15 bp, Homo sapiens
tcagtccagtggggt

SEQ ID NO: 523890 - DNA, 15 bp, Homo sapiens
ttcagtccagtgggg

SEQ ID NO: 523891 - DNA, 15 bp, Homo sapiens
gttcagtccagtggg

SEQ ID NO: 523892 - DNA, 15 bp, Homo sapiens
agttcagtccagtgg

SEQ ID NO: 523893 - DNA, 15 bp, Homo sapiens
gagttcagtccagtg

SEQ ID NO: 523894 - DNA, 15 bp, Homo sapiens
ggagttcagtccagt

SEQ ID NO: 523895 - DNA, 15 bp, Homo sapiens
tggagttcagtccag

SEQ ID NO: 523896 - DNA, 15 bp, Homo sapiens
atggagttcagtcca

SEQ ID NO: 523897 - DNA, 15 bp, Homo sapiens
catggagttcagtcc

SEQ ID NO: 523898 - DNA, 15 bp, Homo sapiens
tcatggagttcagtc

SEQ ID NO: 523899 - DNA, 15 bp, Homo sapiens
ctcatggagttcagt

SEQ ID NO: 523900 - DNA, 15 bp, Homo sapiens
cctcatggagttcag

SEQ ID NO: 523901 - DNA, 15 bp, Homo sapiens
ccctcatggagttca

SEQ ID NO: 523902 - DNA, 15 bp, Homo sapiens
gccctcatggagttc

SEQ ID NO: 523903 - DNA, 15 bp, Homo sapiens
tgccctcatggagtt

SEQ ID NO: 523904 - DNA, 15 bp, Homo sapiens
ctgccctcatggagt

SEQ ID NO: 523905 - DNA, 15 bp, Homo sapiens
tctgccctcatggag

SEQ ID NO: 523906 - DNA, 15 bp, Homo sapiens
ctctgccctcatgga

SEQ ID NO: 523907 - DNA, 15 bp, Homo sapiens
gctctgccctcatgg

SEQ ID NO: 523908 - DNA, 15 bp, Homo sapiens
ggctctgccctcatg

SEQ ID NO: 523909 - DNA, 15 bp, Homo sapiens
gggctctgccctcat

SEQ ID NO: 523910 - DNA, 15 bp, Homo sapiens
tgggctctgccctca

SEQ ID NO: 523911 - DNA, 15 bp, Homo sapiens
atgggctctgccctc

SEQ ID NO: 523912 - DNA, 15 bp, Homo sapiens
catgggctctgccct

SEQ ID NO: 523913 - DNA, 15 bp, Homo sapiens
tcatgggctctgccc

SEQ ID NO: 523914 - DNA, 15 bp, Homo sapiens
gtcatgggctctgcc

SEQ ID NO: 523915 - DNA, 15 bp, Homo sapiens
ggtcatgggctctgc

SEQ ID NO: 523916 - DNA, 15 bp, Homo sapiens
tggtcatgggctctg

SEQ ID NO: 523917 - DNA, 15 bp, Homo sapiens
atggtcatgggctct

SEQ ID NO: 523918 - DNA, 15 bp, Homo sapiens
gatggtcatgggctc

SEQ ID NO: 523919 - DNA, 15 bp, Homo sapiens
tgatggtcatgggct

SEQ ID NO: 523920 - DNA, 15 bp, Homo sapiens
atgatggtcatgggc

SEQ ID NO: 523921 - DNA, 15 bp, Homo sapiens
gatgatggtcatggg

SEQ ID NO: 523922 - DNA, 15 bp, Homo sapiens
ggatgatggtcatgg

SEQ ID NO: 523923 - DNA, 15 bp, Homo sapiens
aggatgatggtcatg

SEQ ID NO: 523924 - DNA, 15 bp, Homo sapiens
gaggatgatggtcat

SEQ ID NO: 523925 - DNA, 15 bp, Homo sapiens
ggaggatgatggtca

SEQ ID NO: 523926 - DNA, 15 bp, Homo sapiens
tggaggatgatggtc

SEQ ID NO: 523927 - DNA, 15 bp, Homo sapiens
gtggaggatgatggt

SEQ ID NO: 523928 - DNA, 15 bp, Homo sapiens
ggtggaggatgatgg

SEQ ID NO: 523929 - DNA, 15 bp, Homo sapiens
tggtggaggatgatg

SEQ ID NO: 523930 - DNA, 15 bp, Homo sapiens
atggtggaggatgat

SEQ ID NO: 523931 - DNA, 15 bp, Homo sapiens
catggtggaggatga

SEQ ID NO: 523932 - DNA, 15 bp, Homo sapiens
tcatggtggaggatg

SEQ ID NO: 523933 - DNA, 15 bp, Homo sapiens
gtcatggtggaggat

SEQ ID NO: 523934 - DNA, 15 bp, Homo sapiens
agtcatggtggagga

SEQ ID NO: 523935 - DNA, 15 bp, Homo sapiens
cagtcatggtggagg

SEQ ID NO: 523936 - DNA, 15 bp, Homo sapiens
tcagtcatggtggag

SEQ ID NO: 523937 - DNA, 15 bp, Homo sapiens
ctcagtcatggtgga

SEQ ID NO: 523938 - DNA, 15 bp, Homo sapiens
gctcagtcatggtgg

SEQ ID NO: 523939 - DNA, 15 bp, Homo sapiens
agctcagtcatggtg

SEQ ID NO: 523940 - DNA, 15 bp, Homo sapiens
cagctcagtcatggt

SEQ ID NO: 523941 - DNA, 15 bp, Homo sapiens
acagctcagtcatgg

SEQ ID NO: 523942 - DNA, 15 bp, Homo sapiens
cacagctcagtcatg

SEQ ID NO: 523943 - DNA, 15 bp, Homo sapiens
acacagctcagtcat

SEQ ID NO: 523944 - DNA, 15 bp, Homo sapiens
aacacagctcagtca

SEQ ID NO: 523945 - DNA, 15 bp, Homo sapiens
caacacagctcagtc

SEQ ID NO: 523946 - DNA, 15 bp, Homo sapiens
gcaacacagctcagt

SEQ ID NO: 523947 - DNA, 15 bp, Homo sapiens
agcaacacagctcag

SEQ ID NO: 523948 - DNA, 15 bp, Homo sapiens
gagcaacacagctca

SEQ ID NO: 523949 - DNA, 15 bp, Homo sapiens
agagcaacacagctc

SEQ ID NO: 523950 - DNA, 15 bp, Homo sapiens
aagagcaacacagct

SEQ ID NO: 523951 - DNA, 15 bp, Homo sapiens
gaagagcaacacagc

SEQ ID NO: 523952 - DNA, 15 bp, Homo sapiens
tgaagagcaacacag

SEQ ID NO: 523953 - DNA, 15 bp, Homo sapiens
gtgaagagcaacaca

SEQ ID NO: 523954 - DNA, 15 bp, Homo sapiens
agtgaagagcaacac

SEQ ID NO: 523955 - DNA, 15 bp, Homo sapiens
gagtgaagagcaaca

SEQ ID NO: 523956 - DNA, 15 bp, Homo sapiens
tgagtgaagagcaac

SEQ ID NO: 523957 - DNA, 15 bp, Homo sapiens
atgagtgaagagcaa

SEQ ID NO: 523958 - DNA, 15 bp, Homo sapiens
aatgagtgaagagca

SEQ ID NO: 523959 - DNA, 15 bp, Homo sapiens
taatgagtgaagagc

SEQ ID NO: 523960 - DNA, 15 bp, Homo sapiens
ctaatgagtgaagag

SEQ ID NO: 523961 - DNA, 15 bp, Homo sapiens
cctaatgagtgaaga

SEQ ID NO: 523962 - DNA, 15 bp, Homo sapiens
tcctaatgagtgaag

SEQ ID NO: 523963 - DNA, 15 bp, Homo sapiens
atcctaatgagtgaa

SEQ ID NO: 523964 - DNA, 15 bp, Homo sapiens
tatcctaatgagtga

SEQ ID NO: 523965 - DNA, 15 bp, Homo sapiens
atatcctaatgagtg

SEQ ID NO: 523966 - DNA, 15 bp, Homo sapiens
gatatcctaatgagt

SEQ ID NO: 523967 - DNA, 15 bp, Homo sapiens
cgatatcctaatgag

SEQ ID NO: 523968 - DNA, 15 bp, Homo sapiens
acgatatcctaatga

SEQ ID NO: 523969 - DNA, 15 bp, Homo sapiens
tacgatatcctaatg

SEQ ID NO: 523970 - DNA, 15 bp, Homo sapiens
ttacgatatcctaat

SEQ ID NO: 523971 - DNA, 15 bp, Homo sapiens
cttacgatatcctaa

SEQ ID NO: 523972 - DNA, 15 bp, Homo sapiens
gcttacgatatccta

SEQ ID NO: 523973 - DNA, 15 bp, Homo sapiens
tgcttacgatatcct

SEQ ID NO: 523974 - DNA, 15 bp, Homo sapiens
gtgcttacgatatcc

SEQ ID NO: 523975 - DNA, 15 bp, Homo sapiens
agtgcttacgatatc

SEQ ID NO: 523976 - DNA, 15 bp, Homo sapiens
gagtgcttacgatat

SEQ ID NO: 523977 - DNA, 15 bp, Homo sapiens
ggagtgcttacgata

SEQ ID NO: 523978 - DNA, 15 bp, Homo sapiens
aggagtgcttacgat

SEQ ID NO: 523979 - DNA, 15 bp, Homo sapiens
aaggagtgcttacga

SEQ ID NO: 523980 - DNA, 15 bp, Homo sapiens
caaggagtgcttacg

SEQ ID NO: 523981 - DNA, 15 bp, Homo sapiens
acaaggagtgcttac

SEQ ID NO: 523982 - DNA, 15 bp, Homo sapiens
aacaaggagtgctta

SEQ ID NO: 523983 - DNA, 15 bp, Homo sapiens
caacaaggagtgctt

SEQ ID NO: 523984 - DNA, 15 bp, Homo sapiens
ccaacaaggagtgct

SEQ ID NO: 523985 - DNA, 15 bp, Homo sapiens
tccaacaaggagtgc

SEQ ID NO: 523986 - DNA, 15 bp, Homo sapiens
gtccaacaaggagtg

SEQ ID NO: 523987 - DNA, 15 bp, Homo sapiens
cgtccaacaaggagt

SEQ ID NO: 523988 - DNA, 15 bp, Homo sapiens
tcgtccaacaaggag

SEQ ID NO: 523989 - DNA, 15 bp, Homo sapiens
ctcgtccaacaagga

SEQ ID NO: 523990 - DNA, 15 bp, Homo sapiens
cctcgtccaacaagg

SEQ ID NO: 523991 - DNA, 15 bp, Homo sapiens
tcctcgtccaacaag

SEQ ID NO: 523992 - DNA, 15 bp, Homo sapiens
ttcctcgtccaacaa

SEQ ID NO: 523993 - DNA, 15 bp, Homo sapiens
cttcctcgtccaaca

SEQ ID NO: 523994 - DNA, 15 bp, Homo sapiens
tcttcctcgtccaac

SEQ ID NO: 523995 - DNA, 15 bp, Homo sapiens
ttcttcctcgtccaa

SEQ ID NO: 523996 - DNA, 15 bp, Homo sapiens
tttcttcctcgtcca

SEQ ID NO: 523997 - DNA, 15 bp, Homo sapiens
atttcttcctcgtcc

SEQ ID NO: 523998 - DNA, 15 bp, Homo sapiens
catttcttcctcgtc

SEQ ID NO: 523999 - DNA, 15 bp, Homo sapiens
tcatttcttcctcgt

SEQ ID NO: 524000 - DNA, 15 bp, Homo sapiens
gtcatttcttcctcg

SEQ ID NO: 524001 - DNA, 15 bp, Homo sapiens
ggtcatttcttcctc

SEQ ID NO: 524002 - DNA, 15 bp, Homo sapiens
gggtcatttcttcct

SEQ ID NO: 524003 - DNA, 15 bp, Homo sapiens
agggtcatttcttcc

SEQ ID NO: 524004 - DNA, 15 bp, Homo sapiens
cagggtcatttcttc

SEQ ID NO: 524005 - DNA, 15 bp, Homo sapiens
acagggtcatttctt

SEQ ID NO: 524006 - DNA, 15 bp, Homo sapiens
cacagggtcatttct

SEQ ID NO: 524007 - DNA, 15 bp, Homo sapiens
gcacagggtcatttc

SEQ ID NO: 524008 - DNA, 15 bp, Homo sapiens
agcacagggtcattt

SEQ ID NO: 524009 - DNA, 15 bp, Homo sapiens
aagcacagggtcatt

SEQ ID NO: 524010 - DNA, 15 bp, Homo sapiens
aaagcacagggtcat

SEQ ID NO: 524011 - DNA, 15 bp, Homo sapiens
aaaagcacagggtca

SEQ ID NO: 524012 - DNA, 15 bp, Homo sapiens
caaaagcacagggtc

SEQ ID NO: 524013 - DNA, 15 bp, Homo sapiens
acaaaagcacagggt

SEQ ID NO: 524014 - DNA, 15 bp, Homo sapiens
gacaaaagcacaggg

SEQ ID NO: 524015 - DNA, 15 bp, Homo sapiens
ggacaaaagcacagg

SEQ ID NO: 524016 - DNA, 15 bp, Homo sapiens
gggacaaaagcacag

SEQ ID NO: 524017 - DNA, 15 bp, Homo sapiens
ggggacaaaagcaca

SEQ ID NO: 524018 - DNA, 15 bp, Homo sapiens
tggggacaaaagcac

SEQ ID NO: 524019 - DNA, 15 bp, Homo sapiens
ctggggacaaaagca

SEQ ID NO: 524020 - DNA, 15 bp, Homo sapiens
cctggggacaaaagc

SEQ ID NO: 524021 - DNA, 15 bp, Homo sapiens
ccctggggacaaaag

SEQ ID NO: 524022 - DNA, 15 bp, Homo sapiens
tccctggggacaaaa

SEQ ID NO: 524023 - DNA, 15 bp, Homo sapiens
ttccctggggacaaa

SEQ ID NO: 524024 - DNA, 15 bp, Homo sapiens
tttccctggggacaa

SEQ ID NO: 524025 - DNA, 15 bp, Homo sapiens
gtttccctggggaca

SEQ ID NO: 524026 - DNA, 15 bp, Homo sapiens
ggtttccctggggac

SEQ ID NO: 524027 - DNA, 15 bp, Homo sapiens
tggtttccctgggga

SEQ ID NO: 524028 - DNA, 15 bp, Homo sapiens
atggtttccctgggg

SEQ ID NO: 524029 - DNA, 15 bp, Homo sapiens
gatggtttccctggg

SEQ ID NO: 524030 - DNA, 15 bp, Homo sapiens
agatggtttccctgg

SEQ ID NO: 524031 - DNA, 15 bp, Homo sapiens
cagatggtttccctg

SEQ ID NO: 524032 - DNA, 15 bp, Homo sapiens
gcagatggtttccct

SEQ ID NO: 524033 - DNA, 15 bp, Homo sapiens
ggcagatggtttccc

SEQ ID NO: 524034 - DNA, 15 bp, Homo sapiens
cggcagatggtttcc

SEQ ID NO: 524035 - DNA, 15 bp, Homo sapiens
acggcagatggtttc

SEQ ID NO: 524036 - DNA, 15 bp, Homo sapiens
cacggcagatggttt

SEQ ID NO: 524037 - DNA, 15 bp, Homo sapiens
acacggcagatggtt

SEQ ID NO: 524038 - DNA, 15 bp, Homo sapiens
cacacggcagatggt

SEQ ID NO: 524039 - DNA, 15 bp, Homo sapiens
tcacacggcagatgg

SEQ ID NO: 524040 - DNA, 15 bp, Homo sapiens
gtcacacggcagatg

SEQ ID NO: 524041 - DNA, 15 bp, Homo sapiens
agtcacacggcagat

SEQ ID NO: 524042 - DNA, 15 bp, Homo sapiens
cagtcacacggcaga

SEQ ID NO: 524043 - DNA, 15 bp, Homo sapiens
ccagtcacacggcag

SEQ ID NO: 524044 - DNA, 15 bp, Homo sapiens
accagtcacacggca

SEQ ID NO: 524045 - DNA, 15 bp, Homo sapiens
caccagtcacacggc

SEQ ID NO: 524046 - DNA, 15 bp, Homo sapiens
ccaccagtcacacgg

SEQ ID NO: 524047 - DNA, 15 bp, Homo sapiens
cccaccagtcacacg

SEQ ID NO: 524048 - DNA, 15 bp, Homo sapiens
tcccaccagtcacac

SEQ ID NO: 524049 - DNA, 15 bp, Homo sapiens
atcccaccagtcaca

SEQ ID NO: 524050 - DNA, 15 bp, Homo sapiens
catcccaccagtcac

SEQ ID NO: 524051 - DNA, 15 bp, Homo sapiens
tcatcccaccagtca

SEQ ID NO: 524052 - DNA, 15 bp, Homo sapiens
ttcatcccaccagtc

SEQ ID NO: 524053 - DNA, 15 bp, Homo sapiens
cttcatcccaccagt

SEQ ID NO: 524054 - DNA, 15 bp, Homo sapiens
ccttcatcccaccag

SEQ ID NO: 524055 - DNA, 15 bp, Homo sapiens
accttcatcccacca

SEQ ID NO: 524056 - DNA, 15 bp, Homo sapiens
taccttcatcccacc

SEQ ID NO: 524057 - DNA, 15 bp, Homo sapiens
ttaccttcatcccac

SEQ ID NO: 524058 - DNA, 15 bp, Homo sapiens
tttaccttcatccca

SEQ ID NO: 524059 - DNA, 15 bp, Homo sapiens
ctttaccttcatccc

SEQ ID NO: 524060 - DNA, 15 bp, Homo sapiens
cctttaccttcatcc

SEQ ID NO: 524061 - DNA, 15 bp, Homo sapiens
gcctttaccttcatc

SEQ ID NO: 524062 - DNA, 15 bp, Homo sapiens
tgcctttaccttcat

SEQ ID NO: 524063 - DNA, 15 bp, Homo sapiens
ctgcctttaccttca

SEQ ID NO: 524064 - DNA, 15 bp, Homo sapiens
tctgcctttaccttc

SEQ ID NO: 524065 - DNA, 15 bp, Homo sapiens
gtctgcctttacctt

SEQ ID NO: 524066 - DNA, 15 bp, Homo sapiens
ggtctgcctttacct

SEQ ID NO: 524067 - DNA, 15 bp, Homo sapiens
cggtctgcctttacc

SEQ ID NO: 524068 - DNA, 15 bp, Homo sapiens
tcggtctgcctttac

SEQ ID NO: 524069 - DNA, 15 bp, Homo sapiens
ctcggtctgccttta

SEQ ID NO: 524070 - DNA, 15 bp, Homo sapiens
tctcggtctgccttt

SEQ ID NO: 524071 - DNA, 15 bp, Homo sapiens
atctcggtctgcctt

SEQ ID NO: 524072 - DNA, 15 bp, Homo sapiens
catctcggtctgcct

SEQ ID NO: 524073 - DNA, 15 bp, Homo sapiens
tcatctcggtctgcc

SEQ ID NO: 524074 - DNA, 15 bp, Homo sapiens
ttcatctcggtctgc

SEQ ID NO: 524075 - DNA, 15 bp, Homo sapiens
attcatctcggtctg

SEQ ID NO: 524076 - DNA, 15 bp, Homo sapiens
gattcatctcggtct

SEQ ID NO: 524077 - DNA, 15 bp, Homo sapiens
ggattcatctcggtc

SEQ ID NO: 524078 - DNA, 15 bp, Homo sapiens
aggattcatctcggt

SEQ ID NO: 524079 - DNA, 15 bp, Homo sapiens
gaggattcatctcgg

SEQ ID NO: 524080 - DNA, 15 bp, Homo sapiens
tgaggattcatctcg

SEQ ID NO: 524081 - DNA, 15 bp, Homo sapiens
gtgaggattcatctc

SEQ ID NO: 524082 - DNA, 15 bp, Homo sapiens
ggtgaggattcatct

SEQ ID NO: 524083 - DNA, 15 bp, Homo sapiens
tggtgaggattcatc

SEQ ID NO: 524084 - DNA, 15 bp, Homo sapiens
atggtgaggattcat

SEQ ID NO: 524085 - DNA, 15 bp, Homo sapiens
tatggtgaggattca

SEQ ID NO: 524086 - DNA, 15 bp, Homo sapiens
atatggtgaggattc

SEQ ID NO: 524087 - DNA, 15 bp, Homo sapiens
catatggtgaggatt

SEQ ID NO: 524088 - DNA, 15 bp, Homo sapiens
gcatatggtgaggat

SEQ ID NO: 524089 - DNA, 15 bp, Homo sapiens
agcatatggtgagga

SEQ ID NO: 524090 - DNA, 15 bp, Homo sapiens
cagcatatggtgagg

SEQ ID NO: 524091 - DNA, 15 bp, Homo sapiens
gcagcatatggtgag

SEQ ID NO: 524092 - DNA, 15 bp, Homo sapiens
agcagcatatggtga

SEQ ID NO: 524093 - DNA, 15 bp, Homo sapiens
tagcagcatatggtg

SEQ ID NO: 524094 - DNA, 15 bp, Homo sapiens
atagcagcatatggt

SEQ ID NO: 524095 - DNA, 15 bp, Homo sapiens
catagcagcatatgg

SEQ ID NO: 524096 - DNA, 15 bp, Homo sapiens
acatagcagcatatg

SEQ ID NO: 524097 - DNA, 15 bp, Homo sapiens
aacatagcagcatat

SEQ ID NO: 524098 - DNA, 15 bp, Homo sapiens
caacatagcagcata

SEQ ID NO: 524099 - DNA, 15 bp, Homo sapiens
ccaacatagcagcat

SEQ ID NO: 524100 - DNA, 15 bp, Homo sapiens
gccaacatagcagca

SEQ ID NO: 524101 - DNA, 15 bp, Homo sapiens
agccaacatagcagc

SEQ ID NO: 524102 - DNA, 15 bp, Homo sapiens
cagccaacatagcag

SEQ ID NO: 524103 - DNA, 15 bp, Homo sapiens
gcagccaacatagca

SEQ ID NO: 524104 - DNA, 15 bp, Homo sapiens
ggcagccaacatagc

SEQ ID NO: 524105 - DNA, 15 bp, Homo sapiens
gggcagccaacatag

SEQ ID NO: 524106 - DNA, 15 bp, Homo sapiens
tgggcagccaacata

SEQ ID NO: 524107 - DNA, 15 bp, Homo sapiens
ctgggcagccaacat

SEQ ID NO: 524108 - DNA, 15 bp, Homo sapiens
cctgggcagccaaca

SEQ ID NO: 524109 - DNA, 15 bp, Homo sapiens
tcctgggcagccaac

SEQ ID NO: 524110 - DNA, 15 bp, Homo sapiens
atcctgggcagccaa

SEQ ID NO: 524111 - DNA, 15 bp, Homo sapiens
catcctgggcagcca

SEQ ID NO: 524112 - DNA, 15 bp, Homo sapiens
acatcctgggcagcc

SEQ ID NO: 524113 - DNA, 15 bp, Homo sapiens
cacatcctgggcagc

SEQ ID NO: 524114 - DNA, 15 bp, Homo sapiens
ccacatcctgggcag

SEQ ID NO: 524115 - DNA, 15 bp, Homo sapiens
gccacatcctgggca

SEQ ID NO: 524116 - DNA, 15 bp, Homo sapiens
ggccacatcctgggc

SEQ ID NO: 524117 - DNA, 15 bp, Homo sapiens
gggccacatcctggg

SEQ ID NO: 524118 - DNA, 15 bp, Homo sapiens
tgggccacatcctgg

SEQ ID NO: 524119 - DNA, 15 bp, Homo sapiens
ctgggccacatcctg

SEQ ID NO: 524120 - DNA, 15 bp, Homo sapiens
tctgggccacatcct

SEQ ID NO: 524121 - DNA, 15 bp, Homo sapiens
gtatatgcctaaaat

SEQ ID NO: 524122 - DNA, 15 bp, Homo sapiens
tgtatatgcctaaaa

SEQ ID NO: 524123 - DNA, 15 bp, Homo sapiens
atgtatatgcctaaa

SEQ ID NO: 524124 - DNA, 15 bp, Homo sapiens
tatgtatatgcctaa

SEQ ID NO: 524125 - DNA, 15 bp, Homo sapiens
gtatgtatatgccta

SEQ ID NO: 524126 - DNA, 15 bp, Homo sapiens
agtatgtatatgcct

SEQ ID NO: 524127 - DNA, 15 bp, Homo sapiens
aagtatgtatatgcc

SEQ ID NO: 524128 - DNA, 15 bp, Homo sapiens
taagtatgtatatgc

SEQ ID NO: 524129 - DNA, 15 bp, Homo sapiens
ttaagtatgtatatg

SEQ ID NO: 524130 - DNA, 15 bp, Homo sapiens
attaagtatgtatat

SEQ ID NO: 524131 - DNA, 15 bp, Homo sapiens
tattaagtatgtata

SEQ ID NO: 524132 - DNA, 15 bp, Homo sapiens
ttattaagtatgtat

SEQ ID NO: 524133 - DNA, 15 bp, Homo sapiens
attattaagtatgta

SEQ ID NO: 524134 - DNA, 15 bp, Homo sapiens
aattattaagtatgt

SEQ ID NO: 524135 - DNA, 15 bp, Homo sapiens
caattattaagtatg

SEQ ID NO: 524136 - DNA, 15 bp, Homo sapiens
ccaattattaagtat

SEQ ID NO: 524137 - DNA, 15 bp, Homo sapiens
gccaattattaagta

SEQ ID NO: 524138 - DNA, 15 bp, Homo sapiens
agccaattattaagt

SEQ ID NO: 524139 - DNA, 15 bp, Homo sapiens
gagccaattattaag

SEQ ID NO: 524140 - DNA, 15 bp, Homo sapiens
ggagccaattattaa

SEQ ID NO: 524141 - DNA, 15 bp, Homo sapiens
aggagccaattatta

SEQ ID NO: 524142 - DNA, 15 bp, Homo sapiens
caggagccaattatt

SEQ ID NO: 524143 - DNA, 15 bp, Homo sapiens
acaggagccaattat

SEQ ID NO: 524144 - DNA, 15 bp, Homo sapiens
cacaggagccaatta

SEQ ID NO: 524145 - DNA, 15 bp, Homo sapiens
acacaggagccaatt

SEQ ID NO: 524146 - DNA, 15 bp, Homo sapiens
tacacaggagccaat

SEQ ID NO: 524147 - DNA, 15 bp, Homo sapiens
gtacacaggagccaa

SEQ ID NO: 524148 - DNA, 15 bp, Homo sapiens
tgtacacaggagcca

SEQ ID NO: 524149 - DNA, 15 bp, Homo sapiens
gtgtacacaggagcc

SEQ ID NO: 524150 - DNA, 15 bp, Homo sapiens
ggtgtacacaggagc

SEQ ID NO: 524151 - DNA, 15 bp, Homo sapiens
gggtgtacacaggag

SEQ ID NO: 524152 - DNA, 15 bp, Homo sapiens
ggggtgtacacagga

SEQ ID NO: 524153 - DNA, 15 bp, Homo sapiens
gggggtgtacacagg

SEQ ID NO: 524154 - DNA, 15 bp, Homo sapiens
ggggggtgtacacag

SEQ ID NO: 524155 - DNA, 15 bp, Homo sapiens
tggggggtgtacaca

SEQ ID NO: 524156 - DNA, 15 bp, Homo sapiens
ctggggggtgtacac

SEQ ID NO: 524157 - DNA, 15 bp, Homo sapiens
gctggggggtgtaca

SEQ ID NO: 524158 - DNA, 15 bp, Homo sapiens
tgctggggggtgtac

SEQ ID NO: 524159 - DNA, 15 bp, Homo sapiens
ctgctggggggtgta

SEQ ID NO: 524160 - DNA, 15 bp, Homo sapiens
gctgctggggggtgt

SEQ ID NO: 524161 - DNA, 15 bp, Homo sapiens
agctgctggggggtg

SEQ ID NO: 524162 - DNA, 15 bp, Homo sapiens
gagctgctggggggt

SEQ ID NO: 524163 - DNA, 15 bp, Homo sapiens
tgagctgctgggggg

SEQ ID NO: 524164 - DNA, 15 bp, Homo sapiens
ctgagctgctggggg

SEQ ID NO: 524165 - DNA, 15 bp, Homo sapiens
actgagctgctgggg

SEQ ID NO: 524166 - DNA, 15 bp, Homo sapiens
cactgagctgctggg

SEQ ID NO: 524167 - DNA, 15 bp, Homo sapiens
acactgagctgctgg

SEQ ID NO: 524168 - DNA, 15 bp, Homo sapiens
aacactgagctgctg

SEQ ID NO: 524169 - DNA, 15 bp, Homo sapiens
caacactgagctgct

SEQ ID NO: 524170 - DNA, 15 bp, Homo sapiens
tcaacactgagctgc

SEQ ID NO: 524171 - DNA, 15 bp, Homo sapiens
ctcaacactgagctg

SEQ ID NO: 524172 - DNA, 15 bp, Homo sapiens
gctcaacactgagct

SEQ ID NO: 524173 - DNA, 15 bp, Homo sapiens
tgctcaacactgagc

SEQ ID NO: 524174 - DNA, 15 bp, Homo sapiens
gtgctcaacactgag

SEQ ID NO: 524175 - DNA, 15 bp, Homo sapiens
ggtgctcaacactga

SEQ ID NO: 524176 - DNA, 15 bp, Homo sapiens
gggtgctcaacactg

SEQ ID NO: 524177 - DNA, 15 bp, Homo sapiens
tgggtgctcaacact

SEQ ID NO: 524178 - DNA, 15 bp, Homo sapiens
gtgggtgctcaacac

SEQ ID NO: 524179 - DNA, 15 bp, Homo sapiens
agtgggtgctcaaca

SEQ ID NO: 524180 - DNA, 15 bp, Homo sapiens
cagtgggtgctcaac

SEQ ID NO: 524181 - DNA, 15 bp, Homo sapiens
acagtgggtgctcaa

SEQ ID NO: 524182 - DNA, 15 bp, Homo sapiens
tacagtgggtgctca

SEQ ID NO: 524183 - DNA, 15 bp, Homo sapiens
atacagtgggtgctc

SEQ ID NO: 524184 - DNA, 15 bp, Homo sapiens
tatacagtgggtgct

SEQ ID NO: 524185 - DNA, 15 bp, Homo sapiens
gtatacagtgggtgc

SEQ ID NO: 524186 - DNA, 15 bp, Homo sapiens
agtatacagtgggtg

SEQ ID NO: 524187 - DNA, 15 bp, Homo sapiens
tagtatacagtgggt

SEQ ID NO: 524188 - DNA, 15 bp, Homo sapiens
ctagtatacagtggg

SEQ ID NO: 524189 - DNA, 15 bp, Homo sapiens
cctagtatacagtgg

SEQ ID NO: 524190 - DNA, 15 bp, Homo sapiens
tcctagtatacagtg

SEQ ID NO: 524191 - DNA, 15 bp, Homo sapiens
ctcctagtatacagt

SEQ ID NO: 524192 - DNA, 15 bp, Homo sapiens
gctcctagtatacag

SEQ ID NO: 524193 - DNA, 15 bp, Homo sapiens
agctcctagtataca

SEQ ID NO: 524194 - DNA, 15 bp, Homo sapiens
cagctcctagtatac

SEQ ID NO: 524195 - DNA, 15 bp, Homo sapiens
acagctcctagtata

SEQ ID NO: 524196 - DNA, 15 bp, Homo sapiens
cacagctcctagtat

SEQ ID NO: 524197 - DNA, 15 bp, Homo sapiens
acacagctcctagta

SEQ ID NO: 524198 - DNA, 15 bp, Homo sapiens
aacacagctcctagt

SEQ ID NO: 524199 - DNA, 15 bp, Homo sapiens
aaacacagctcctag

SEQ ID NO: 524200 - DNA, 15 bp, Homo sapiens
gaaacacagctccta

SEQ ID NO: 524201 - DNA, 15 bp, Homo sapiens
tgaaacacagctcct

SEQ ID NO: 524202 - DNA, 15 bp, Homo sapiens
ctgaaacacagctcc

SEQ ID NO: 524203 - DNA, 15 bp, Homo sapiens
cctgaaacacagctc

SEQ ID NO: 524204 - DNA, 15 bp, Homo sapiens
acctgaaacacagct

SEQ ID NO: 524205 - DNA, 15 bp, Homo sapiens
tacctgaaacacagc

SEQ ID NO: 524206 - DNA, 15 bp, Homo sapiens
gtacctgaaacacag

SEQ ID NO: 524207 - DNA, 15 bp, Homo sapiens
agtacctgaaacaca

SEQ ID NO: 524208 - DNA, 15 bp, Homo sapiens
tagtacctgaaacac

SEQ ID NO: 524209 - DNA, 15 bp, Homo sapiens
ctagtacctgaaaca

SEQ ID NO: 524210 - DNA, 15 bp, Homo sapiens
tctagtacctgaaac

SEQ ID NO: 524211 - DNA, 15 bp, Homo sapiens
ttctagtacctgaaa

SEQ ID NO: 524212 - DNA, 15 bp, Homo sapiens
cttctagtacctgaa

SEQ ID NO: 524213 - DNA, 15 bp, Homo sapiens
tcttctagtacctga

SEQ ID NO: 524214 - DNA, 15 bp, Homo sapiens
ctcttctagtacctg

SEQ ID NO: 524215 - DNA, 15 bp, Homo sapiens
tctcttctagtacct

SEQ ID NO: 524216 - DNA, 15 bp, Homo sapiens
ctctcttctagtacc

SEQ ID NO: 524217 - DNA, 15 bp, Homo sapiens
actctcttctagtac

SEQ ID NO: 524218 - DNA, 15 bp, Homo sapiens
cactctcttctagta

SEQ ID NO: 524219 - DNA, 15 bp, Homo sapiens
tcactctcttctagt

SEQ ID NO: 524220 - DNA, 15 bp, Homo sapiens
atcactctcttctag

SEQ ID NO: 524221 - DNA, 15 bp, Homo sapiens
catcactctcttcta

SEQ ID NO: 524222 - DNA, 15 bp, Homo sapiens
ccatcactctcttct

SEQ ID NO: 524223 - DNA, 15 bp, Homo sapiens
cccatcactctcttc

SEQ ID NO: 524224 - DNA, 15 bp, Homo sapiens
ccccatcactctctt

SEQ ID NO: 524225 - DNA, 15 bp, Homo sapiens
tccccatcactctct

SEQ ID NO: 524226 - DNA, 15 bp, Homo sapiens
ttccccatcactctc

SEQ ID NO: 524227 - DNA, 15 bp, Homo sapiens
tttccccatcactct

SEQ ID NO: 524228 - DNA, 15 bp, Homo sapiens
gtttccccatcactc

SEQ ID NO: 524229 - DNA, 15 bp, Homo sapiens
tgtttccccatcact

SEQ ID NO: 524230 - DNA, 15 bp, Homo sapiens
ctgtttccccatcac

SEQ ID NO: 524231 - DNA, 15 bp, Homo sapiens
tctgtttccccatca

SEQ ID NO: 524232 - DNA, 15 bp, Homo sapiens
gtctgtttccccatc

SEQ ID NO: 524233 - DNA, 15 bp, Homo sapiens
tgtctgtttccccat

SEQ ID NO: 524234 - DNA, 15 bp, Homo sapiens
atgtctgtttcccca

SEQ ID NO: 524235 - DNA, 15 bp, Homo sapiens
catgtctgtttcccc

SEQ ID NO: 524236 - DNA, 15 bp, Homo sapiens
ccatgtctgtttccc

SEQ ID NO: 524237 - DNA, 15 bp, Homo sapiens
accatgtctgtttcc

SEQ ID NO: 524238 - DNA, 15 bp, Homo sapiens
gaccatgtctgtttc

SEQ ID NO: 524239 - DNA, 15 bp, Homo sapiens
agaccatgtctgttt

SEQ ID NO: 524240 - DNA, 15 bp, Homo sapiens
gagaccatgtctgtt

SEQ ID NO: 524241 - DNA, 15 bp, Homo sapiens
agagaccatgtctgt

SEQ ID NO: 524242 - DNA, 15 bp, Homo sapiens
tagagaccatgtctg

SEQ ID NO: 524243 - DNA, 15 bp, Homo sapiens
gtagagaccatgtct

SEQ ID NO: 524244 - DNA, 15 bp, Homo sapiens
ggtagagaccatgtc

SEQ ID NO: 524245 - DNA, 15 bp, Homo sapiens
gggtagagaccatgt

SEQ ID NO: 524246 - DNA, 15 bp, Homo sapiens
agggtagagaccatg

SEQ ID NO: 524247 - DNA, 15 bp, Homo sapiens
gagggtagagaccat

SEQ ID NO: 524248 - DNA, 15 bp, Homo sapiens
ggagggtagagacca

SEQ ID NO: 524249 - DNA, 15 bp, Homo sapiens
aggagggtagagacc

SEQ ID NO: 524250 - DNA, 15 bp, Homo sapiens
aaggagggtagagac

SEQ ID NO: 524251 - DNA, 15 bp, Homo sapiens
caaggagggtagaga

SEQ ID NO: 524252 - DNA, 15 bp, Homo sapiens
acaaggagggtagag

SEQ ID NO: 524253 - DNA, 15 bp, Homo sapiens
cacaaggagggtaga

SEQ ID NO: 524254 - DNA, 15 bp, Homo sapiens
acacaaggagggtag

SEQ ID NO: 524255 - DNA, 15 bp, Homo sapiens
cacacaaggagggta

SEQ ID NO: 524256 - DNA, 15 bp, Homo sapiens
ccacacaaggagggt

SEQ ID NO: 524257 - DNA, 15 bp, Homo sapiens
cccacacaaggaggg

SEQ ID NO: 524258 - DNA, 15 bp, Homo sapiens
tcccacacaaggagg

SEQ ID NO: 524259 - DNA, 15 bp, Homo sapiens
gtcccacacaaggag

SEQ ID NO: 524260 - DNA, 15 bp, Homo sapiens
ggtcccacacaagga

SEQ ID NO: 524261 - DNA, 15 bp, Homo sapiens
cggtcccacacaagg

SEQ ID NO: 524262 - DNA, 15 bp, Homo sapiens
tcggtcccacacaag

SEQ ID NO: 524263 - DNA, 15 bp, Homo sapiens
ctcggtcccacacaa

SEQ ID NO: 524264 - DNA, 15 bp, Homo sapiens
cctcggtcccacaca

SEQ ID NO: 524265 - DNA, 15 bp, Homo sapiens
gcctcggtcccacac

SEQ ID NO: 524266 - DNA, 15 bp, Homo sapiens
agcctcggtcccaca

SEQ ID NO: 524267 - DNA, 15 bp, Homo sapiens
cagcctcggtcccac

SEQ ID NO: 524268 - DNA, 15 bp, Homo sapiens
ccagcctcggtccca

SEQ ID NO: 524269 - DNA, 15 bp, Homo sapiens
accagcctcggtccc

SEQ ID NO: 524270 - DNA, 15 bp, Homo sapiens
caccagcctcggtcc

SEQ ID NO: 524271 - DNA, 15 bp, Homo sapiens
ccaccagcctcggtc

SEQ ID NO: 524272 - DNA, 15 bp, Homo sapiens
cccaccagcctcggt

SEQ ID NO: 524273 - DNA, 15 bp, Homo sapiens
tcccaccagcctcgg

SEQ ID NO: 524274 - DNA, 15 bp, Homo sapiens
ctcccaccagcctcg

SEQ ID NO: 524275 - DNA, 15 bp, Homo sapiens
tctcccaccagcctc

SEQ ID NO: 524276 - DNA, 15 bp, Homo sapiens
ctctcccaccagcct

SEQ ID NO: 524277 - DNA, 15 bp, Homo sapiens
actctcccaccagcc

SEQ ID NO: 524278 - DNA, 15 bp, Homo sapiens
gactctcccaccagc

SEQ ID NO: 524279 - DNA, 15 bp, Homo sapiens
tgactctcccaccag

SEQ ID NO: 524280 - DNA, 15 bp, Homo sapiens
ctgactctcccacca

SEQ ID NO: 524281 - DNA, 15 bp, Homo sapiens
tctgactctcccacc

SEQ ID NO: 524282 - DNA, 15 bp, Homo sapiens
gtctgactctcccac

SEQ ID NO: 524283 - DNA, 15 bp, Homo sapiens
agtctgactctccca

SEQ ID NO: 524284 - DNA, 15 bp, Homo sapiens
aagtctgactctccc

SEQ ID NO: 524285 - DNA, 15 bp, Homo sapiens
aaagtctgactctcc

SEQ ID NO: 524286 - DNA, 15 bp, Homo sapiens
taaagtctgactctc

SEQ ID NO: 524287 - DNA, 15 bp, Homo sapiens
ttaaagtctgactct

SEQ ID NO: 524288 - DNA, 15 bp, Homo sapiens
tttaaagtctgactc

SEQ ID NO: 524289 - DNA, 15 bp, Homo sapiens
gtttaaagtctgact

SEQ ID NO: 524290 - DNA, 15 bp, Homo sapiens
tgtttaaagtctgac

SEQ ID NO: 524291 - DNA, 15 bp, Homo sapiens
ttgtttaaagtctga

SEQ ID NO: 524292 - DNA, 15 bp, Homo sapiens
gttgtttaaagtctg

SEQ ID NO: 524293 - DNA, 15 bp, Homo sapiens
tgttgtttaaagtct

SEQ ID NO: 524294 - DNA, 15 bp, Homo sapiens
ctgttgtttaaagtc

SEQ ID NO: 524295 - DNA, 15 bp, Homo sapiens
tctgttgtttaaagt

SEQ ID NO: 524296 - DNA, 15 bp, Homo sapiens
ctctgttgtttaaag

SEQ ID NO: 524297 - DNA, 15 bp, Homo sapiens
gctctgttgtttaaa

SEQ ID NO: 524298 - DNA, 15 bp, Homo sapiens
tgctctgttgtttaa

SEQ ID NO: 524299 - DNA, 15 bp, Homo sapiens
gtgctctgttgttta

SEQ ID NO: 524300 - DNA, 15 bp, Homo sapiens
ggtgctctgttgttt

SEQ ID NO: 524301 - DNA, 15 bp, Homo sapiens
tggtgctctgttgtt

SEQ ID NO: 524302 - DNA, 15 bp, Homo sapiens
ctggtgctctgttgt

SEQ ID NO: 524303 - DNA, 15 bp, Homo sapiens
cctggtgctctgttg

SEQ ID NO: 524304 - DNA, 15 bp, Homo sapiens
ccctggtgctctgtt

SEQ ID NO: 524305 - DNA, 15 bp, Homo sapiens
tccctggtgctctgt

SEQ ID NO: 524306 - DNA, 15 bp, Homo sapiens
ctccctggtgctctg

SEQ ID NO: 524307 - DNA, 15 bp, Homo sapiens
actccctggtgctct

SEQ ID NO: 524308 - DNA, 15 bp, Homo sapiens
tactccctggtgctc

SEQ ID NO: 524309 - DNA, 15 bp, Homo sapiens
atactccctggtgct

SEQ ID NO: 524310 - DNA, 15 bp, Homo sapiens
catactccctggtgc

SEQ ID NO: 524311 - DNA, 15 bp, Homo sapiens
acatactccctggtg

SEQ ID NO: 524312 - DNA, 15 bp, Homo sapiens
cacatactccctggt

SEQ ID NO: 524313 - DNA, 15 bp, Homo sapiens
ccacatactccctgg

SEQ ID NO: 524314 - DNA, 15 bp, Homo sapiens
accacatactccctg

SEQ ID NO: 524315 - DNA, 15 bp, Homo sapiens
aaccacatactccct

SEQ ID NO: 524316 - DNA, 15 bp, Homo sapiens
aaaccacatactccc

SEQ ID NO: 524317 - DNA, 15 bp, Homo sapiens
aaaaccacatactcc

SEQ ID NO: 524318 - DNA, 15 bp, Homo sapiens
gaaaaccacatactc

SEQ ID NO: 524319 - DNA, 15 bp, Homo sapiens
tgaaaaccacatact

SEQ ID NO: 524320 - DNA, 15 bp, Homo sapiens
atgaaaaccacatac

SEQ ID NO: 524321 - DNA, 15 bp, Homo sapiens
aatgaaaaccacata

SEQ ID NO: 524322 - DNA, 15 bp, Homo sapiens
aaatgaaaaccacat

SEQ ID NO: 524323 - DNA, 15 bp, Homo sapiens
caaatgaaaaccaca

SEQ ID NO: 524324 - DNA, 15 bp, Homo sapiens
acaaatgaaaaccac

SEQ ID NO: 524325 - DNA, 15 bp, Homo sapiens
cacaaatgaaaacca

SEQ ID NO: 524326 - DNA, 15 bp, Homo sapiens
tcacaaatgaaaacc

SEQ ID NO: 524327 - DNA, 15 bp, Homo sapiens
gtcacaaatgaaaac

SEQ ID NO: 524328 - DNA, 15 bp, Homo sapiens
tgtcacaaatgaaaa

SEQ ID NO: 524329 - DNA, 15 bp, Homo sapiens
ttgtcacaaatgaaa

SEQ ID NO: 524330 - DNA, 15 bp, Homo sapiens
tttgtcacaaatgaa

SEQ ID NO: 524331 - DNA, 15 bp, Homo sapiens
atttgtcacaaatga

SEQ ID NO: 524332 - DNA, 15 bp, Homo sapiens
catttgtcacaaatg

SEQ ID NO: 524333 - DNA, 15 bp, Homo sapiens
gcatttgtcacaaat

SEQ ID NO: 524334 - DNA, 15 bp, Homo sapiens
ggcatttgtcacaaa

SEQ ID NO: 524335 - DNA, 15 bp, Homo sapiens
tggcatttgtcacaa

SEQ ID NO: 524336 - DNA, 15 bp, Homo sapiens
ctggcatttgtcaca

SEQ ID NO: 524337 - DNA, 15 bp, Homo sapiens
cctggcatttgtcac

SEQ ID NO: 524338 - DNA, 15 bp, Homo sapiens
tcctggcatttgtca

SEQ ID NO: 524339 - DNA, 15 bp, Homo sapiens
ttcctggcatttgtc

SEQ ID NO: 524340 - DNA, 15 bp, Homo sapiens
cttcctggcatttgt

SEQ ID NO: 524341 - DNA, 15 bp, Homo sapiens
gcttcctggcatttg

SEQ ID NO: 524342 - DNA, 15 bp, Homo sapiens
tgcttcctggcattt

SEQ ID NO: 524343 - DNA, 15 bp, Homo sapiens
gtgcttcctggcatt

SEQ ID NO: 524344 - DNA, 15 bp, Homo sapiens
tgtgcttcctggcat

SEQ ID NO: 524345 - DNA, 15 bp, Homo sapiens
ttgtgcttcctggca

SEQ ID NO: 524346 - DNA, 15 bp, Homo sapiens
cttgtgcttcctggc

SEQ ID NO: 524347 - DNA, 15 bp, Homo sapiens
acttgtgcttcctgg

SEQ ID NO: 524348 - DNA, 15 bp, Homo sapiens
tacttgtgcttcctg

SEQ ID NO: 524349 - DNA, 15 bp, Homo sapiens
ttacttgtgcttcct

SEQ ID NO: 524350 - DNA, 15 bp, Homo sapiens
cttacttgtgcttcc

SEQ ID NO: 524351 - DNA, 15 bp, Homo sapiens
ccttacttgtgcttc

SEQ ID NO: 524352 - DNA, 15 bp, Homo sapiens
tccttacttgtgctt

SEQ ID NO: 524353 - DNA, 15 bp, Homo sapiens
ctccttacttgtgct

SEQ ID NO: 524354 - DNA, 15 bp, Homo sapiens
actccttacttgtgc

SEQ ID NO: 524355 - DNA, 15 bp, Homo sapiens
aactccttacttgtg

SEQ ID NO: 524356 - DNA, 15 bp, Homo sapiens
caactccttacttgt

SEQ ID NO: 524357 - DNA, 15 bp, Homo sapiens
ccaactccttacttg

SEQ ID NO: 524358 - DNA, 15 bp, Homo sapiens
accaactccttactt

SEQ ID NO: 524359 - DNA, 15 bp, Homo sapiens
caccaactccttact

SEQ ID NO: 524360 - DNA, 15 bp, Homo sapiens
tcaccaactccttac

SEQ ID NO: 524361 - DNA, 15 bp, Homo sapiens
atcaccaactcctta

SEQ ID NO: 524362 - DNA, 15 bp, Homo sapiens
tatcaccaactcctt

SEQ ID NO: 524363 - DNA, 15 bp, Homo sapiens
ttatcaccaactcct

SEQ ID NO: 524364 - DNA, 15 bp, Homo sapiens
tttatcaccaactcc

SEQ ID NO: 524365 - DNA, 15 bp, Homo sapiens
ctttatcaccaactc

SEQ ID NO: 524366 - DNA, 15 bp, Homo sapiens
actttatcaccaact

SEQ ID NO: 524367 - DNA, 15 bp, Homo sapiens
cactttatcaccaac

SEQ ID NO: 524368 - DNA, 15 bp, Homo sapiens
acactttatcaccaa

SEQ ID NO: 524369 - DNA, 15 bp, Homo sapiens
tacactttatcacca

SEQ ID NO: 524370 - DNA, 15 bp, Homo sapiens
ttacactttatcacc

SEQ ID NO: 524371 - DNA, 15 bp, Homo sapiens
attacactttatcac

SEQ ID NO: 524372 - DNA, 15 bp, Homo sapiens
aattacactttatca

SEQ ID NO: 524373 - DNA, 15 bp, Homo sapiens
aaattacactttatc

SEQ ID NO: 524374 - DNA, 15 bp, Homo sapiens
taaattacactttat

SEQ ID NO: 524375 - DNA, 15 bp, Homo sapiens
ttaaattacacttta

SEQ ID NO: 524376 - DNA, 15 bp, Homo sapiens
tttaaattacacttt

SEQ ID NO: 524377 - DNA, 15 bp, Homo sapiens
gtttaaattacactt

SEQ ID NO: 524378 - DNA, 15 bp, Homo sapiens
agtttaaattacact

SEQ ID NO: 524379 - DNA, 15 bp, Homo sapiens
tagtttaaattacac

SEQ ID NO: 524380 - DNA, 15 bp, Homo sapiens
ctagtttaaattaca

SEQ ID NO: 524381 - DNA, 15 bp, Homo sapiens
cctagtttaaattac

SEQ ID NO: 524382 - DNA, 15 bp, Homo sapiens
ccctagtttaaatta

SEQ ID NO: 524383 - DNA, 15 bp, Homo sapiens
accctagtttaaatt

SEQ ID NO: 524384 - DNA, 15 bp, Homo sapiens
gaccctagtttaaat

SEQ ID NO: 524385 - DNA, 15 bp, Homo sapiens
agaccctagtttaaa

SEQ ID NO: 524386 - DNA, 15 bp, Homo sapiens
tagaccctagtttaa

SEQ ID NO: 524387 - DNA, 15 bp, Homo sapiens
ttagaccctagttta

SEQ ID NO: 524388 - DNA, 15 bp, Homo sapiens
tttagaccctagttt

SEQ ID NO: 524389 - DNA, 15 bp, Homo sapiens
atttagaccctagtt

SEQ ID NO: 524390 - DNA, 15 bp, Homo sapiens
catttagaccctagt

SEQ ID NO: 524391 - DNA, 15 bp, Homo sapiens
tcatttagaccctag

SEQ ID NO: 524392 - DNA, 15 bp, Homo sapiens
atcatttagacccta

SEQ ID NO: 524393 - DNA, 15 bp, Homo sapiens
tatcatttagaccct

SEQ ID NO: 524394 - DNA, 15 bp, Homo sapiens
ttatcatttagaccc

SEQ ID NO: 524395 - DNA, 15 bp, Homo sapiens
cttatcatttagacc

SEQ ID NO: 524396 - DNA, 15 bp, Homo sapiens
acttatcatttagac

SEQ ID NO: 524397 - DNA, 15 bp, Homo sapiens
gacttatcatttaga

SEQ ID NO: 524398 - DNA, 15 bp, Homo sapiens
ggacttatcatttag

SEQ ID NO: 524399 - DNA, 15 bp, Homo sapiens
cggacttatcattta

SEQ ID NO: 524400 - DNA, 15 bp, Homo sapiens
ccggacttatcattt

SEQ ID NO: 524401 - DNA, 15 bp, Homo sapiens
tccggacttatcatt

SEQ ID NO: 524402 - DNA, 15 bp, Homo sapiens
ctccggacttatcat

SEQ ID NO: 524403 - DNA, 15 bp, Homo sapiens
actccggacttatca

SEQ ID NO: 524404 - DNA, 15 bp, Homo sapiens
gactccggacttatc

SEQ ID NO: 524405 - DNA, 15 bp, Homo sapiens
ggactccggacttat

SEQ ID NO: 524406 - DNA, 15 bp, Homo sapiens
aggactccggactta

SEQ ID NO: 524407 - DNA, 15 bp, Homo sapiens
aaggactccggactt

SEQ ID NO: 524408 - DNA, 15 bp, Homo sapiens
gaaggactccggact

SEQ ID NO: 524409 - DNA, 15 bp, Homo sapiens
ggaaggactccggac

SEQ ID NO: 524410 - DNA, 15 bp, Homo sapiens
tggaaggactccgga

SEQ ID NO: 524411 - DNA, 15 bp, Homo sapiens
ctggaaggactccgg

SEQ ID NO: 524412 - DNA, 15 bp, Homo sapiens
actggaaggactccg

SEQ ID NO: 524413 - DNA, 15 bp, Homo sapiens
cactggaaggactcc

SEQ ID NO: 524414 - DNA, 15 bp, Homo sapiens
tcactggaaggactc

SEQ ID NO: 524415 - DNA, 15 bp, Homo sapiens
ttcactggaaggact

SEQ ID NO: 524416 - DNA, 15 bp, Homo sapiens
tttcactggaaggac

SEQ ID NO: 524417 - DNA, 15 bp, Homo sapiens
atttcactggaagga

SEQ ID NO: 524418 - DNA, 15 bp, Homo sapiens
tatttcactggaagg

SEQ ID NO: 524419 - DNA, 15 bp, Homo sapiens
ttatttcactggaag

SEQ ID NO: 524420 - DNA, 15 bp, Homo sapiens
cttatttcactggaa

SEQ ID NO: 524421 - DNA, 15 bp, Homo sapiens
ccttatttcactgga

SEQ ID NO: 524422 - DNA, 15 bp, Homo sapiens
tccttatttcactgg

SEQ ID NO: 524423 - DNA, 15 bp, Homo sapiens
gtccttatttcactg

SEQ ID NO: 524424 - DNA, 15 bp, Homo sapiens
tgtccttatttcact

SEQ ID NO: 524425 - DNA, 15 bp, Homo sapiens
ctgtccttatttcac

SEQ ID NO: 524426 - DNA, 15 bp, Homo sapiens
cctgtccttatttca

SEQ ID NO: 524427 - DNA, 15 bp, Homo sapiens
tcctgtccttatttc

SEQ ID NO: 524428 - DNA, 15 bp, Homo sapiens
ctcctgtccttattt

SEQ ID NO: 524429 - DNA, 15 bp, Homo sapiens
cctcctgtccttatt

SEQ ID NO: 524430 - DNA, 15 bp, Homo sapiens
tcctcctgtccttat

SEQ ID NO: 524431 - DNA, 15 bp, Homo sapiens
ctcctcctgtcctta

SEQ ID NO: 524432 - DNA, 15 bp, Homo sapiens
cctcctcctgtcctt

SEQ ID NO: 524433 - DNA, 15 bp, Homo sapiens
ccctcctcctgtcct

SEQ ID NO: 524434 - DNA, 15 bp, Homo sapiens
accctcctcctgtcc

SEQ ID NO: 524435 - DNA, 15 bp, Homo sapiens
taccctcctcctgtc

SEQ ID NO: 524436 - DNA, 15 bp, Homo sapiens
ataccctcctcctgt

SEQ ID NO: 524437 - DNA, 15 bp, Homo sapiens
aataccctcctcctg

SEQ ID NO: 524438 - DNA, 15 bp, Homo sapiens
gaataccctcctcct

SEQ ID NO: 524439 - DNA, 15 bp, Homo sapiens
ggaataccctcctcc

SEQ ID NO: 524440 - DNA, 15 bp, Homo sapiens
tggaataccctcctc

SEQ ID NO: 524441 - DNA, 15 bp, Homo sapiens
ctggaataccctcct

SEQ ID NO: 524442 - DNA, 15 bp, Homo sapiens
gctggaataccctcc

SEQ ID NO: 524443 - DNA, 15 bp, Homo sapiens
agctggaataccctc

SEQ ID NO: 524444 - DNA, 15 bp, Homo sapiens
tagctggaataccct

SEQ ID NO: 524445 - DNA, 15 bp, Homo sapiens
ctagctggaataccc

SEQ ID NO: 524446 - DNA, 15 bp, Homo sapiens
tctagctggaatacc

SEQ ID NO: 524447 - DNA, 15 bp, Homo sapiens
ctctagctggaatac

SEQ ID NO: 524448 - DNA, 15 bp, Homo sapiens
tctctagctggaata

SEQ ID NO: 524449 - DNA, 15 bp, Homo sapiens
gtctctagctggaat

SEQ ID NO: 524450 - DNA, 15 bp, Homo sapiens
tgtctctagctggaa

SEQ ID NO: 524451 - DNA, 15 bp, Homo sapiens
ttgtctctagctgga

SEQ ID NO: 524452 - DNA, 15 bp, Homo sapiens
gttgtctctagctgg

SEQ ID NO: 524453 - DNA, 15 bp, Homo sapiens
agttgtctctagctg

SEQ ID NO: 524454 - DNA, 15 bp, Homo sapiens
cagttgtctctagct

SEQ ID NO: 524455 - DNA, 15 bp, Homo sapiens
gcagttgtctctagc

SEQ ID NO: 524456 - DNA, 15 bp, Homo sapiens
tgcagttgtctctag

SEQ ID NO: 524457 - DNA, 15 bp, Homo sapiens
ctgcagttgtctcta

SEQ ID NO: 524458 - DNA, 15 bp, Homo sapiens
cctgcagttgtctct

SEQ ID NO: 524459 - DNA, 15 bp, Homo sapiens
ccctgcagttgtctc

SEQ ID NO: 524460 - DNA, 15 bp, Homo sapiens
tccctgcagttgtct

SEQ ID NO: 524461 - DNA, 15 bp, Homo sapiens
ttccctgcagttgtc

SEQ ID NO: 524462 - DNA, 15 bp, Homo sapiens
tttccctgcagttgt

SEQ ID NO: 524463 - DNA, 15 bp, Homo sapiens
ctttccctgcagttg

SEQ ID NO: 524464 - DNA, 15 bp, Homo sapiens
cctttccctgcagtt

SEQ ID NO: 524465 - DNA, 15 bp, Homo sapiens
acctttccctgcagt

SEQ ID NO: 524466 - DNA, 15 bp, Homo sapiens
gacctttccctgcag

SEQ ID NO: 524467 - DNA, 15 bp, Homo sapiens
agacctttccctgca

SEQ ID NO: 524468 - DNA, 15 bp, Homo sapiens
aagacctttccctgc

SEQ ID NO: 524469 - DNA, 15 bp, Homo sapiens
caagacctttccctg

SEQ ID NO: 524470 - DNA, 15 bp, Homo sapiens
tcaagacctttccct

SEQ ID NO: 524471 - DNA, 15 bp, Homo sapiens
ctcaagacctttccc

SEQ ID NO: 524472 - DNA, 15 bp, Homo sapiens
cctcaagacctttcc

SEQ ID NO: 524473 - DNA, 15 bp, Homo sapiens
acctcaagacctttc

SEQ ID NO: 524474 - DNA, 15 bp, Homo sapiens
cacctcaagaccttt

SEQ ID NO: 524475 - DNA, 15 bp, Homo sapiens
ccacctcaagacctt

SEQ ID NO: 524476 - DNA, 15 bp, Homo sapiens
cccacctcaagacct

SEQ ID NO: 524477 - DNA, 15 bp, Homo sapiens
ccccacctcaagacc

SEQ ID NO: 524478 - DNA, 15 bp, Homo sapiens
cccccacctcaagac

SEQ ID NO: 524479 - DNA, 15 bp, Homo sapiens
acccccacctcaaga

SEQ ID NO: 524480 - DNA, 15 bp, Homo sapiens
cacccccacctcaag

SEQ ID NO: 524481 - DNA, 15 bp, Homo sapiens
tcacccccacctcaa

SEQ ID NO: 524482 - DNA, 15 bp, Homo sapiens
ttcacccccacctca

SEQ ID NO: 524483 - DNA, 15 bp, Homo sapiens
gttcacccccacctc

SEQ ID NO: 524484 - DNA, 15 bp, Homo sapiens
ggttcacccccacct

SEQ ID NO: 524485 - DNA, 15 bp, Homo sapiens
aggttcacccccacc

SEQ ID NO: 524486 - DNA, 15 bp, Homo sapiens
caggttcacccccac

SEQ ID NO: 524487 - DNA, 15 bp, Homo sapiens
ccaggttcaccccca

SEQ ID NO: 524488 - DNA, 15 bp, Homo sapiens
cccaggttcaccccc

SEQ ID NO: 524489 - DNA, 15 bp, Homo sapiens
gcccaggttcacccc

SEQ ID NO: 524490 - DNA, 15 bp, Homo sapiens
tgcccaggttcaccc

SEQ ID NO: 524491 - DNA, 15 bp, Homo sapiens
gtgcccaggttcacc

SEQ ID NO: 524492 - DNA, 15 bp, Homo sapiens
ggtgcccaggttcac

SEQ ID NO: 524493 - DNA, 15 bp, Homo sapiens
aggtgcccaggttca

SEQ ID NO: 524494 - DNA, 15 bp, Homo sapiens
caggtgcccaggttc

SEQ ID NO: 524495 - DNA, 15 bp, Homo sapiens
acaggtgcccaggtt

SEQ ID NO: 524496 - DNA, 15 bp, Homo sapiens
cacaggtgcccaggt

SEQ ID NO: 524497 - DNA, 15 bp, Homo sapiens
tcacaggtgcccagg

SEQ ID NO: 524498 - DNA, 15 bp, Homo sapiens
ttcacaggtgcccag

SEQ ID NO: 524499 - DNA, 15 bp, Homo sapiens
cttcacaggtgccca

SEQ ID NO: 524500 - DNA, 15 bp, Homo sapiens
ccttcacaggtgccc

SEQ ID NO: 524501 - DNA, 15 bp, Homo sapiens
tccttcacaggtgcc

SEQ ID NO: 524502 - DNA, 15 bp, Homo sapiens
ttccttcacaggtgc

SEQ ID NO: 524503 - DNA, 15 bp, Homo sapiens
tttccttcacaggtg

SEQ ID NO: 524504 - DNA, 15 bp, Homo sapiens
ctttccttcacaggt

SEQ ID NO: 524505 - DNA, 15 bp, Homo sapiens
tctttccttcacagg

SEQ ID NO: 524506 - DNA, 15 bp, Homo sapiens
ctctttccttcacag

SEQ ID NO: 524507 - DNA, 15 bp, Homo sapiens
actctttccttcaca

SEQ ID NO: 524508 - DNA, 15 bp, Homo sapiens
cactctttccttcac

SEQ ID NO: 524509 - DNA, 15 bp, Homo sapiens
ccactctttccttca

SEQ ID NO: 524510 - DNA, 15 bp, Homo sapiens
gccactctttccttc

SEQ ID NO: 524511 - DNA, 15 bp, Homo sapiens
tgccactctttcctt

SEQ ID NO: 524512 - DNA, 15 bp, Homo sapiens
atgccactctttcct

SEQ ID NO: 524513 - DNA, 15 bp, Homo sapiens
catgccactctttcc

SEQ ID NO: 524514 - DNA, 15 bp, Homo sapiens
tcatgccactctttc

SEQ ID NO: 524515 - DNA, 15 bp, Homo sapiens
ctcatgccactcttt

SEQ ID NO: 524516 - DNA, 15 bp, Homo sapiens
cctcatgccactctt

SEQ ID NO: 524517 - DNA, 15 bp, Homo sapiens
acctcatgccactct

SEQ ID NO: 524518 - DNA, 15 bp, Homo sapiens
cacctcatgccactc

SEQ ID NO: 524519 - DNA, 15 bp, Homo sapiens
gcacctcatgccact

SEQ ID NO: 524520 - DNA, 15 bp, Homo sapiens
tgcacctcatgccac

SEQ ID NO: 524521 - DNA, 15 bp, Homo sapiens
ctgcacctcatgcca

SEQ ID NO: 524522 - DNA, 15 bp, Homo sapiens
actgcacctcatgcc

SEQ ID NO: 524523 - DNA, 15 bp, Homo sapiens
gactgcacctcatgc

SEQ ID NO: 524524 - DNA, 15 bp, Homo sapiens
tgactgcacctcatg

SEQ ID NO: 524525 - DNA, 15 bp, Homo sapiens
ctgactgcacctcat

SEQ ID NO: 524526 - DNA, 15 bp, Homo sapiens
tctgactgcacctca

SEQ ID NO: 524527 - DNA, 15 bp, Homo sapiens
ctctgactgcacctc

SEQ ID NO: 524528 - DNA, 15 bp, Homo sapiens
cctctgactgcacct

SEQ ID NO: 524529 - DNA, 15 bp, Homo sapiens
ccctctgactgcacc

SEQ ID NO: 524530 - DNA, 15 bp, Homo sapiens
cccctctgactgcac

SEQ ID NO: 524531 - DNA, 15 bp, Homo sapiens
tcccctctgactgca

SEQ ID NO: 524532 - DNA, 15 bp, Homo sapiens
ttcccctctgactgc

SEQ ID NO: 524533 - DNA, 15 bp, Homo sapiens
cttcccctctgactg

SEQ ID NO: 524534 - DNA, 15 bp, Homo sapiens
tcttcccctctgact

SEQ ID NO: 524535 - DNA, 15 bp, Homo sapiens
ctcttcccctctgac

SEQ ID NO: 524536 - DNA, 15 bp, Homo sapiens
cctcttcccctctga

SEQ ID NO: 524537 - DNA, 15 bp, Homo sapiens
acctcttcccctctg

SEQ ID NO: 524538 - DNA, 15 bp, Homo sapiens
cacctcttcccctct

SEQ ID NO: 524539 - DNA, 15 bp, Homo sapiens
ccacctcttcccctc

SEQ ID NO: 524540 - DNA, 15 bp, Homo sapiens
tccacctcttcccct

SEQ ID NO: 524541 - DNA, 15 bp, Homo sapiens
ctccacctcttcccc

SEQ ID NO: 524542 - DNA, 15 bp, Homo sapiens
actccacctcttccc

SEQ ID NO: 524543 - DNA, 15 bp, Homo sapiens
gactccacctcttcc

SEQ ID NO: 524544 - DNA, 15 bp, Homo sapiens
ggactccacctcttc

SEQ ID NO: 524545 - DNA, 15 bp, Homo sapiens
aggactccacctctt

SEQ ID NO: 524546 - DNA, 15 bp, Homo sapiens
caggactccacctct

SEQ ID NO: 524547 - DNA, 15 bp, Homo sapiens
acaggactccacctc

SEQ ID NO: 524548 - DNA, 15 bp, Homo sapiens
tacaggactccacct

SEQ ID NO: 524549 - DNA, 15 bp, Homo sapiens
ctacaggactccacc

SEQ ID NO: 524550 - DNA, 15 bp, Homo sapiens
cctacaggactccac

SEQ ID NO: 524551 - DNA, 15 bp, Homo sapiens
tcctacaggactcca

SEQ ID NO: 524552 - DNA, 15 bp, Homo sapiens
ctcctacaggactcc

SEQ ID NO: 524553 - DNA, 15 bp, Homo sapiens
tctcctacaggactc

SEQ ID NO: 524554 - DNA, 15 bp, Homo sapiens
ctctcctacaggact

SEQ ID NO: 524555 - DNA, 15 bp, Homo sapiens
cctctcctacaggac

SEQ ID NO: 524556 - DNA, 15 bp, Homo sapiens
ccctctcctacagga

SEQ ID NO: 524557 - DNA, 15 bp, Homo sapiens
cccctctcctacagg

SEQ ID NO: 524558 - DNA, 15 bp, Homo sapiens
tcccctctcctacag

SEQ ID NO: 524559 - DNA, 15 bp, Homo sapiens
ttcccctctcctaca

SEQ ID NO: 524560 - DNA, 15 bp, Homo sapiens
cttcccctctcctac

SEQ ID NO: 524561 - DNA, 15 bp, Homo sapiens
ccttcccctctccta

SEQ ID NO: 524562 - DNA, 15 bp, Homo sapiens
tccttcccctctcct

SEQ ID NO: 524563 - DNA, 15 bp, Homo sapiens
gtccttcccctctcc

SEQ ID NO: 524564 - DNA, 15 bp, Homo sapiens
ggtccttcccctctc

SEQ ID NO: 524565 - DNA, 15 bp, Homo sapiens
aggtccttcccctct

SEQ ID NO: 524566 - DNA, 15 bp, Homo sapiens
caggtccttcccctc

SEQ ID NO: 524567 - DNA, 15 bp, Homo sapiens
ccaggtccttcccct

SEQ ID NO: 524568 - DNA, 15 bp, Homo sapiens
tccaggtccttcccc

SEQ ID NO: 524569 - DNA, 15 bp, Homo sapiens
atccaggtccttccc

SEQ ID NO: 524570 - DNA, 15 bp, Homo sapiens
aatccaggtccttcc

SEQ ID NO: 524571 - DNA, 15 bp, Homo sapiens
aaatccaggtccttc

SEQ ID NO: 524572 - DNA, 15 bp, Homo sapiens
caaatccaggtcctt

SEQ ID NO: 524573 - DNA, 15 bp, Homo sapiens
tcaaatccaggtcct

SEQ ID NO: 524574 - DNA, 15 bp, Homo sapiens
ctcaaatccaggtcc

SEQ ID NO: 524575 - DNA, 15 bp, Homo sapiens
actcaaatccaggtc

SEQ ID NO: 524576 - DNA, 15 bp, Homo sapiens
cactcaaatccaggt

SEQ ID NO: 524577 - DNA, 15 bp, Homo sapiens
tcactcaaatccagg

SEQ ID NO: 524578 - DNA, 15 bp, Homo sapiens
atcactcaaatccag

SEQ ID NO: 524579 - DNA, 15 bp, Homo sapiens
catcactcaaatcca

SEQ ID NO: 524580 - DNA, 15 bp, Homo sapiens
ccatcactcaaatcc

SEQ ID NO: 524581 - DNA, 15 bp, Homo sapiens
cccatcactcaaatc

SEQ ID NO: 524582 - DNA, 15 bp, Homo sapiens
ccccatcactcaaat

SEQ ID NO: 524583 - DNA, 15 bp, Homo sapiens
cccccatcactcaaa

SEQ ID NO: 524584 - DNA, 15 bp, Homo sapiens
gcccccatcactcaa

SEQ ID NO: 524585 - DNA, 15 bp, Homo sapiens
tgcccccatcactca

SEQ ID NO: 524586 - DNA, 15 bp, Homo sapiens
atgcccccatcactc

SEQ ID NO: 524587 - DNA, 15 bp, Homo sapiens
catgcccccatcact

SEQ ID NO: 524588 - DNA, 15 bp, Homo sapiens
tcatgcccccatcac

SEQ ID NO: 524589 - DNA, 15 bp, Homo sapiens
ttcatgcccccatca

SEQ ID NO: 524590 - DNA, 15 bp, Homo sapiens
tttcatgcccccatc

SEQ ID NO: 524591 - DNA, 15 bp, Homo sapiens
ctttcatgcccccat

SEQ ID NO: 524592 - DNA, 15 bp, Homo sapiens
gctttcatgccccca

SEQ ID NO: 524593 - DNA, 15 bp, Homo sapiens
agctttcatgccccc

SEQ ID NO: 524594 - DNA, 15 bp, Homo sapiens
cagctttcatgcccc

SEQ ID NO: 524595 - DNA, 15 bp, Homo sapiens
tcagctttcatgccc

SEQ ID NO: 524596 - DNA, 15 bp, Homo sapiens
ttcagctttcatgcc

SEQ ID NO: 524597 - DNA, 15 bp, Homo sapiens
tttcagctttcatgc

SEQ ID NO: 524598 - DNA, 15 bp, Homo sapiens
atttcagctttcatg

SEQ ID NO: 524599 - DNA, 15 bp, Homo sapiens
tatttcagctttcat

SEQ ID NO: 524600 - DNA, 15 bp, Homo sapiens
ctatttcagctttca

SEQ ID NO: 524601 - DNA, 15 bp, Homo sapiens
tctatttcagctttc

SEQ ID NO: 524602 - DNA, 15 bp, Homo sapiens
atctatttcagcttt

SEQ ID NO: 524603 - DNA, 15 bp, Homo sapiens
catctatttcagctt

SEQ ID NO: 524604 - DNA, 15 bp, Homo sapiens
tcatctatttcagct

SEQ ID NO: 524605 - DNA, 15 bp, Homo sapiens
gtcatctatttcagc

SEQ ID NO: 524606 - DNA, 15 bp, Homo sapiens
agtcatctatttcag

SEQ ID NO: 524607 - DNA, 15 bp, Homo sapiens
cagtcatctatttca

SEQ ID NO: 524608 - DNA, 15 bp, Homo sapiens
acagtcatctatttc

SEQ ID NO: 524609 - DNA, 15 bp, Homo sapiens
aacagtcatctattt

SEQ ID NO: 524610 - DNA, 15 bp, Homo sapiens
caacagtcatctatt

SEQ ID NO: 524611 - DNA, 15 bp, Homo sapiens
gcaacagtcatctat

SEQ ID NO: 524612 - DNA, 15 bp, Homo sapiens
cgcaacagtcatcta

SEQ ID NO: 524613 - DNA, 15 bp, Homo sapiens
acgcaacagtcatct

SEQ ID NO: 524614 - DNA, 15 bp, Homo sapiens
cacgcaacagtcatc

SEQ ID NO: 524615 - DNA, 15 bp, Homo sapiens
tcacgcaacagtcat

SEQ ID NO: 524616 - DNA, 15 bp, Homo sapiens
ttcacgcaacagtca

SEQ ID NO: 524617 - DNA, 15 bp, Homo sapiens
gttcacgcaacagtc

SEQ ID NO: 524618 - DNA, 15 bp, Homo sapiens
tgttcacgcaacagt

SEQ ID NO: 524619 - DNA, 15 bp, Homo sapiens
ttgttcacgcaacag

SEQ ID NO: 524620 - DNA, 15 bp, Homo sapiens
cttgttcacgcaaca

SEQ ID NO: 524621 - DNA, 15 bp, Homo sapiens
gcttgttcacgcaac

SEQ ID NO: 524622 - DNA, 15 bp, Homo sapiens
ggcttgttcacgcaa

SEQ ID NO: 524623 - DNA, 15 bp, Homo sapiens
tggcttgttcacgca

SEQ ID NO: 524624 - DNA, 15 bp, Homo sapiens
ctggcttgttcacgc

SEQ ID NO: 524625 - DNA, 15 bp, Homo sapiens
tctggcttgttcacg

SEQ ID NO: 524626 - DNA, 15 bp, Homo sapiens
gtctggcttgttcac

SEQ ID NO: 524627 - DNA, 15 bp, Homo sapiens
tgtctggcttgttca

SEQ ID NO: 524628 - DNA, 15 bp, Homo sapiens
ctgtctggcttgttc

SEQ ID NO: 524629 - DNA, 15 bp, Homo sapiens
actgtctggcttgtt

SEQ ID NO: 524630 - DNA, 15 bp, Homo sapiens
cactgtctggcttgt

SEQ ID NO: 524631 - DNA, 15 bp, Homo sapiens
ccactgtctggcttg

SEQ ID NO: 524632 - DNA, 15 bp, Homo sapiens
accactgtctggctt

SEQ ID NO: 524633 - DNA, 15 bp, Homo sapiens
gaccactgtctggct

SEQ ID NO: 524634 - DNA, 15 bp, Homo sapiens
tgaccactgtctggc

SEQ ID NO: 524635 - DNA, 15 bp, Homo sapiens
ctgaccactgtctgg

SEQ ID NO: 524636 - DNA, 15 bp, Homo sapiens
tctgaccactgtctg

SEQ ID NO: 524637 - DNA, 15 bp, Homo sapiens
ttctgaccactgtct

SEQ ID NO: 524638 - DNA, 15 bp, Homo sapiens
gttctgaccactgtc

SEQ ID NO: 524639 - DNA, 15 bp, Homo sapiens
tgttctgaccactgt

SEQ ID NO: 524640 - DNA, 15 bp, Homo sapiens
atgttctgaccactg

SEQ ID NO: 524641 - DNA, 15 bp, Homo sapiens
tatgttctgaccact

SEQ ID NO: 524642 - DNA, 15 bp, Homo sapiens
ttatgttctgaccac

SEQ ID NO: 524643 - DNA, 15 bp, Homo sapiens
gttatgttctgacca

SEQ ID NO: 524644 - DNA, 15 bp, Homo sapiens
tgttatgttctgacc

SEQ ID NO: 524645 - DNA, 15 bp, Homo sapiens
ttgttatgttctgac

SEQ ID NO: 524646 - DNA, 15 bp, Homo sapiens
gttgttatgttctga

SEQ ID NO: 524647 - DNA, 15 bp, Homo sapiens
tgttgttatgttctg

SEQ ID NO: 524648 - DNA, 15 bp, Homo sapiens
ttgttgttatgttct

SEQ ID NO: 524649 - DNA, 15 bp, Homo sapiens
tttgttgttatgttc

SEQ ID NO: 524650 - DNA, 15 bp, Homo sapiens
gtttgttgttatgtt

SEQ ID NO: 524651 - DNA, 15 bp, Homo sapiens
ggtttgttgttatgt

SEQ ID NO: 524652 - DNA, 15 bp, Homo sapiens
tggtttgttgttatg

SEQ ID NO: 524653 - DNA, 15 bp, Homo sapiens
atggtttgttgttat

SEQ ID NO: 524654 - DNA, 15 bp, Homo sapiens
tatggtttgttgtta

SEQ ID NO: 524655 - DNA, 15 bp, Homo sapiens
ctatggtttgttgtt

SEQ ID NO: 524656 - DNA, 15 bp, Homo sapiens
actatggtttgttgt

SEQ ID NO: 524657 - DNA, 15 bp, Homo sapiens
cactatggtttgttg

SEQ ID NO: 524658 - DNA, 15 bp, Homo sapiens
ccactatggtttgtt

SEQ ID NO: 524659 - DNA, 15 bp, Homo sapiens
gccactatggtttgt

SEQ ID NO: 524660 - DNA, 15 bp, Homo sapiens
ggccactatggtttg

SEQ ID NO: 524661 - DNA, 15 bp, Homo sapiens
gggccactatggttt

SEQ ID NO: 524662 - DNA, 15 bp, Homo sapiens
ggggccactatggtt

SEQ ID NO: 524663 - DNA, 15 bp, Homo sapiens
gggggccactatggt

SEQ ID NO: 524664 - DNA, 15 bp, Homo sapiens
agggggccactatgg

SEQ ID NO: 524665 - DNA, 15 bp, Homo sapiens
gagggggccactatg

SEQ ID NO: 524666 - DNA, 15 bp, Homo sapiens
tgagggggccactat

SEQ ID NO: 524667 - DNA, 15 bp, Homo sapiens
ctgagggggccacta

SEQ ID NO: 524668 - DNA, 15 bp, Homo sapiens
gctgagggggccact

SEQ ID NO: 524669 - DNA, 15 bp, Homo sapiens
ggctgagggggccac

SEQ ID NO: 524670 - DNA, 15 bp, Homo sapiens
aggctgagggggcca

SEQ ID NO: 524671 - DNA, 15 bp, Homo sapiens
taggctgagggggcc

SEQ ID NO: 524672 - DNA, 15 bp, Homo sapiens
ttaggctgagggggc

SEQ ID NO: 524673 - DNA, 15 bp, Homo sapiens
tttaggctgaggggg

SEQ ID NO: 524674 - DNA, 15 bp, Homo sapiens
ttttaggctgagggg

SEQ ID NO: 524675 - DNA, 15 bp, Homo sapiens
attttaggctgaggg

SEQ ID NO: 524676 - DNA, 15 bp, Homo sapiens
tattttaggctgagg

SEQ ID NO: 524677 - DNA, 15 bp, Homo sapiens
atattttaggctgag

SEQ ID NO: 524678 - DNA, 15 bp, Homo sapiens
aatattttaggctga

SEQ ID NO: 524679 - DNA, 15 bp, Homo sapiens
aaatattttaggctg

SEQ ID NO: 524680 - DNA, 15 bp, Homo sapiens
taaatattttaggct

SEQ ID NO: 524681 - DNA, 15 bp, Homo sapiens
gtaaatattttaggc

SEQ ID NO: 524682 - DNA, 15 bp, Homo sapiens
agtaaatattttagg

SEQ ID NO: 524683 - DNA, 15 bp, Homo sapiens
cagtaaatattttag

SEQ ID NO: 524684 - DNA, 15 bp, Homo sapiens
acagtaaatatttta

SEQ ID NO: 524685 - DNA, 15 bp, Homo sapiens
gacagtaaatatttt

SEQ ID NO: 524686 - DNA, 15 bp, Homo sapiens
agacagtaaatattt

SEQ ID NO: 524687 - DNA, 15 bp, Homo sapiens
cagacagtaaatatt

SEQ ID NO: 524688 - DNA, 15 bp, Homo sapiens
ccagacagtaaatat

SEQ ID NO: 524689 - DNA, 15 bp, Homo sapiens
gccagacagtaaata

SEQ ID NO: 524690 - DNA, 15 bp, Homo sapiens
agccagacagtaaat

SEQ ID NO: 524691 - DNA, 15 bp, Homo sapiens
aagccagacagtaaa

SEQ ID NO: 524692 - DNA, 15 bp, Homo sapiens
aaagccagacagtaa

SEQ ID NO: 524693 - DNA, 15 bp, Homo sapiens
aaaagccagacagta

SEQ ID NO: 524694 - DNA, 15 bp, Homo sapiens
aaaaagccagacagt

SEQ ID NO: 524695 - DNA, 15 bp, Homo sapiens
aaaaaagccagacag

SEQ ID NO: 524696 - DNA, 15 bp, Homo sapiens
aaaaaaagccagaca

SEQ ID NO: 524697 - DNA, 15 bp, Homo sapiens
aaaaaaaagccagac

SEQ ID NO: 524698 - DNA, 15 bp, Homo sapiens
aaaaaaaaagccaga

SEQ ID NO: 524699 - DNA, 15 bp, Homo sapiens
aaaaaaaaaagccag

SEQ ID NO: 524700 - DNA, 15 bp, Homo sapiens
aaaaaaaaaaagcca

SEQ ID NO: 524701 - DNA, 15 bp, Homo sapiens
aaaaaaaaaaaagcc

SEQ ID NO: 524702 - DNA, 15 bp, Homo sapiens
gaaaaaaaaaaaagc

SEQ ID NO: 524703 - DNA, 15 bp, Homo sapiens
ggaaaaaaaaaaaag

SEQ ID NO: 524704 - DNA, 15 bp, Homo sapiens
aggaaaaaaaaaaaa

SEQ ID NO: 524705 - DNA, 15 bp, Homo sapiens
gaggaaaaaaaaaaa

SEQ ID NO: 524706 - DNA, 15 bp, Homo sapiens
agaggaaaaaaaaaa

SEQ ID NO: 524707 - DNA, 15 bp, Homo sapiens
aagaggaaaaaaaaa

SEQ ID NO: 524708 - DNA, 15 bp, Homo sapiens
aaagaggaaaaaaaa

SEQ ID NO: 524709 - DNA, 15 bp, Homo sapiens
aaaagaggaaaaaaa

SEQ ID NO: 524710 - DNA, 15 bp, Homo sapiens
aaaaagaggaaaaaa

SEQ ID NO: 524711 - DNA, 15 bp, Homo sapiens
aaaaaagaggaaaaa

SEQ ID NO: 524712 - DNA, 15 bp, Homo sapiens
caaaaaagaggaaaa

SEQ ID NO: 524713 - DNA, 15 bp, Homo sapiens
tcaaaaaagaggaaa

SEQ ID NO: 524714 - DNA, 15 bp, Homo sapiens
ctcaaaaaagaggaa

SEQ ID NO: 524715 - DNA, 15 bp, Homo sapiens
tctcaaaaaagagga

SEQ ID NO: 524716 - DNA, 15 bp, Homo sapiens
gtctcaaaaaagagg

SEQ ID NO: 524717 - DNA, 15 bp, Homo sapiens
tgtctcaaaaaagag

SEQ ID NO: 524718 - DNA, 15 bp, Homo sapiens
ctgtctcaaaaaaga

SEQ ID NO: 524719 - DNA, 15 bp, Homo sapiens
cctgtctcaaaaaag

SEQ ID NO: 524720 - DNA, 15 bp, Homo sapiens
tgagaccctgtctca

SEQ ID NO: 524721 - DNA, 15 bp, Homo sapiens
gtgagaccctgtctc

SEQ ID NO: 524722 - DNA, 15 bp, Homo sapiens
agtgagaccctgtct

SEQ ID NO: 524723 - DNA, 15 bp, Homo sapiens
gagtgagaccctgtc

SEQ ID NO: 524724 - DNA, 15 bp, Homo sapiens
agagtgagaccctgt

SEQ ID NO: 524725 - DNA, 15 bp, Homo sapiens
gagagtgagaccctg

SEQ ID NO: 524726 - DNA, 15 bp, Homo sapiens
tgagagtgagaccct

SEQ ID NO: 524727 - DNA, 15 bp, Homo sapiens
gtgagagtgagaccc

SEQ ID NO: 524728 - DNA, 15 bp, Homo sapiens
ggtgagagtgagacc

SEQ ID NO: 524729 - DNA, 15 bp, Homo sapiens
gggtgagagtgagac

SEQ ID NO: 524730 - DNA, 15 bp, Homo sapiens
tgggtgagagtgaga

SEQ ID NO: 524731 - DNA, 15 bp, Homo sapiens
ctgggtgagagtgag

SEQ ID NO: 524732 - DNA, 15 bp, Homo sapiens
cctgggtgagagtga

SEQ ID NO: 524733 - DNA, 15 bp, Homo sapiens
gcctgggtgagagtg

SEQ ID NO: 524734 - DNA, 15 bp, Homo sapiens
agcctgggtgagagt

SEQ ID NO: 524735 - DNA, 15 bp, Homo sapiens
cagcctgggtgagag

SEQ ID NO: 524736 - DNA, 15 bp, Homo sapiens
ccagcctgggtgaga

SEQ ID NO: 524737 - DNA, 15 bp, Homo sapiens
tccagcctgggtgag

SEQ ID NO: 524738 - DNA, 15 bp, Homo sapiens
cgccactgcactcca

SEQ ID NO: 524739 - DNA, 15 bp, Homo sapiens
gcgccactgcactcc

SEQ ID NO: 524740 - DNA, 15 bp, Homo sapiens
agcgccactgcactc

SEQ ID NO: 524741 - DNA, 15 bp, Homo sapiens
tagcgccactgcact

SEQ ID NO: 524742 - DNA, 15 bp, Homo sapiens
atagcgccactgcac

SEQ ID NO: 524743 - DNA, 15 bp, Homo sapiens
gatagcgccactgca

SEQ ID NO: 524744 - DNA, 15 bp, Homo sapiens
agatagcgccactgc

SEQ ID NO: 524745 - DNA, 15 bp, Homo sapiens
gagatagcgccactg

SEQ ID NO: 524746 - DNA, 15 bp, Homo sapiens
tgagatagcgccact

SEQ ID NO: 524747 - DNA, 15 bp, Homo sapiens
ctgagatagcgccac

SEQ ID NO: 524748 - DNA, 15 bp, Homo sapiens
gctgagatagcgcca

SEQ ID NO: 524749 - DNA, 15 bp, Homo sapiens
agctgagatagcgcc

SEQ ID NO: 524750 - DNA, 15 bp, Homo sapiens
aagctgagatagcgc

SEQ ID NO: 524751 - DNA, 15 bp, Homo sapiens
taagctgagatagcg

SEQ ID NO: 524752 - DNA, 15 bp, Homo sapiens
gtaagctgagatagc

SEQ ID NO: 524753 - DNA, 15 bp, Homo sapiens
agtaagctgagatag

SEQ ID NO: 524754 - DNA, 15 bp, Homo sapiens
cagtaagctgagata

SEQ ID NO: 524755 - DNA, 15 bp, Homo sapiens
gcagtaagctgagat

SEQ ID NO: 524756 - DNA, 15 bp, Homo sapiens
tgcagtaagctgaga

SEQ ID NO: 524757 - DNA, 15 bp, Homo sapiens
ctgcagtaagctgag

SEQ ID NO: 524758 - DNA, 15 bp, Homo sapiens
actgcagtaagctga

SEQ ID NO: 524759 - DNA, 15 bp, Homo sapiens
gactgcagtaagctg

SEQ ID NO: 524760 - DNA, 15 bp, Homo sapiens
agactgcagtaagct

SEQ ID NO: 524761 - DNA, 15 bp, Homo sapiens
gagactgcagtaagc

SEQ ID NO: 524762 - DNA, 15 bp, Homo sapiens
agagactgcagtaag

SEQ ID NO: 524763 - DNA, 15 bp, Homo sapiens
cagagactgcagtaa

SEQ ID NO: 524764 - DNA, 15 bp, Homo sapiens
ccagagactgcagta

SEQ ID NO: 524765 - DNA, 15 bp, Homo sapiens
gccagagactgcagt

SEQ ID NO: 524766 - DNA, 15 bp, Homo sapiens
agccagagactgcag

SEQ ID NO: 524767 - DNA, 15 bp, Homo sapiens
aagccagagactgca

SEQ ID NO: 524768 - DNA, 15 bp, Homo sapiens
aaagccagagactgc

SEQ ID NO: 524769 - DNA, 15 bp, Homo sapiens
gaaagccagagactg

SEQ ID NO: 524770 - DNA, 15 bp, Homo sapiens
tgaaagccagagact

SEQ ID NO: 524771 - DNA, 15 bp, Homo sapiens
ctgaaagccagagac

SEQ ID NO: 524772 - DNA, 15 bp, Homo sapiens
cctgaaagccagaga

SEQ ID NO: 524773 - DNA, 15 bp, Homo sapiens
gcctgaaagccagag

SEQ ID NO: 524774 - DNA, 15 bp, Homo sapiens
agcctgaaagccaga

SEQ ID NO: 524775 - DNA, 15 bp, Homo sapiens
gagcctgaaagccag

SEQ ID NO: 524776 - DNA, 15 bp, Homo sapiens
agagcctgaaagcca

SEQ ID NO: 524777 - DNA, 15 bp, Homo sapiens
tagagcctgaaagcc

SEQ ID NO: 524778 - DNA, 15 bp, Homo sapiens
ctagagcctgaaagc

SEQ ID NO: 524779 - DNA, 15 bp, Homo sapiens
gctagagcctgaaag

SEQ ID NO: 524780 - DNA, 15 bp, Homo sapiens
tgctagagcctgaaa

SEQ ID NO: 524781 - DNA, 15 bp, Homo sapiens
ctgctagagcctgaa

SEQ ID NO: 524782 - DNA, 15 bp, Homo sapiens
actgctagagcctga

SEQ ID NO: 524783 - DNA, 15 bp, Homo sapiens
gactgctagagcctg

SEQ ID NO: 524784 - DNA, 15 bp, Homo sapiens
ggactgctagagcct

SEQ ID NO: 524785 - DNA, 15 bp, Homo sapiens
aggactgctagagcc

SEQ ID NO: 524786 - DNA, 15 bp, Homo sapiens
gaggactgctagagc

SEQ ID NO: 524787 - DNA, 15 bp, Homo sapiens
ggaggactgctagag

SEQ ID NO: 524788 - DNA, 15 bp, Homo sapiens
gggaggactgctaga

SEQ ID NO: 524789 - DNA, 15 bp, Homo sapiens
tgggaggactgctag

SEQ ID NO: 524790 - DNA, 15 bp, Homo sapiens
gtgggaggactgcta

SEQ ID NO: 524791 - DNA, 15 bp, Homo sapiens
ggtgggaggactgct

SEQ ID NO: 524792 - DNA, 15 bp, Homo sapiens
aggtgggaggactgc

SEQ ID NO: 524793 - DNA, 15 bp, Homo sapiens
gaggtgggaggactg

SEQ ID NO: 524794 - DNA, 15 bp, Homo sapiens
tgaggtgggaggact

SEQ ID NO: 524795 - DNA, 15 bp, Homo sapiens
ctgaggtgggaggac

SEQ ID NO: 524796 - DNA, 15 bp, Homo sapiens
gctgaggtgggagga

SEQ ID NO: 524797 - DNA, 15 bp, Homo sapiens
ggctgaggtgggagg

SEQ ID NO: 524798 - DNA, 15 bp, Homo sapiens
aggctgaggtgggag

SEQ ID NO: 524799 - DNA, 15 bp, Homo sapiens
gaggctgaggtggga

SEQ ID NO: 524800 - DNA, 15 bp, Homo sapiens
ggaggctgaggtggg

SEQ ID NO: 524801 - DNA, 15 bp, Homo sapiens
gggaggctgaggtgg

SEQ ID NO: 524802 - DNA, 15 bp, Homo sapiens
cgggaggctgaggtg

SEQ ID NO: 524803 - DNA, 15 bp, Homo sapiens
tcgggaggctgaggt

SEQ ID NO: 524804 - DNA, 15 bp, Homo sapiens
gtcccagctactcgg

SEQ ID NO: 524805 - DNA, 15 bp, Homo sapiens
agtcccagctactcg

SEQ ID NO: 524806 - DNA, 15 bp, Homo sapiens
cagtcccagctactc

SEQ ID NO: 524807 - DNA, 15 bp, Homo sapiens
gcagtcccagctact

SEQ ID NO: 524808 - DNA, 15 bp, Homo sapiens
agcagtcccagctac

SEQ ID NO: 524809 - DNA, 15 bp, Homo sapiens
tagcagtcccagcta

SEQ ID NO: 524810 - DNA, 15 bp, Homo sapiens
ctagcagtcccagct

SEQ ID NO: 524811 - DNA, 15 bp, Homo sapiens
actagcagtcccagc

SEQ ID NO: 524812 - DNA, 15 bp, Homo sapiens
tactagcagtcccag

SEQ ID NO: 524813 - DNA, 15 bp, Homo sapiens
ctactagcagtccca

SEQ ID NO: 524814 - DNA, 15 bp, Homo sapiens
actactagcagtccc

SEQ ID NO: 524815 - DNA, 15 bp, Homo sapiens
tactactagcagtcc

SEQ ID NO: 524816 - DNA, 15 bp, Homo sapiens
ctactactagcagtc

SEQ ID NO: 524817 - DNA, 15 bp, Homo sapiens
actactactagcagt

SEQ ID NO: 524818 - DNA, 15 bp, Homo sapiens
cactactactagcag

SEQ ID NO: 524819 - DNA, 15 bp, Homo sapiens
gcactactactagca

SEQ ID NO: 524820 - DNA, 15 bp, Homo sapiens
ggcactactactagc

SEQ ID NO: 524821 - DNA, 15 bp, Homo sapiens
tggcactactactag

SEQ ID NO: 524822 - DNA, 15 bp, Homo sapiens
gtggcactactacta

SEQ ID NO: 524823 - DNA, 15 bp, Homo sapiens
ggtggcactactact

SEQ ID NO: 524824 - DNA, 15 bp, Homo sapiens
tggtggcactactac

SEQ ID NO: 524825 - DNA, 15 bp, Homo sapiens
gtggtggcactacta

SEQ ID NO: 524826 - DNA, 15 bp, Homo sapiens
cgtggtggcactact

SEQ ID NO: 524827 - DNA, 15 bp, Homo sapiens
gcgtggtggcactac

SEQ ID NO: 524828 - DNA, 15 bp, Homo sapiens
ggcgtggtggcacta

SEQ ID NO: 524829 - DNA, 15 bp, Homo sapiens
aggcgtggtggcact

SEQ ID NO: 524830 - DNA, 15 bp, Homo sapiens
caggcgtggtggcac

SEQ ID NO: 524831 - DNA, 15 bp, Homo sapiens
ccaggcgtggtggca

SEQ ID NO: 524832 - DNA, 15 bp, Homo sapiens
tttagccaggcgtgg

SEQ ID NO: 524833 - DNA, 15 bp, Homo sapiens
atttagccaggcgtg

SEQ ID NO: 524834 - DNA, 15 bp, Homo sapiens
aatttagccaggcgt

SEQ ID NO: 524835 - DNA, 15 bp, Homo sapiens
caatttagccaggcg

SEQ ID NO: 524836 - DNA, 15 bp, Homo sapiens
acaatttagccaggc

SEQ ID NO: 524837 - DNA, 15 bp, Homo sapiens
cacaatttagccagg

SEQ ID NO: 524838 - DNA, 15 bp, Homo sapiens
acacaatttagccag

SEQ ID NO: 524839 - DNA, 15 bp, Homo sapiens
tacacaatttagcca

SEQ ID NO: 524840 - DNA, 15 bp, Homo sapiens
atacacaatttagcc

SEQ ID NO: 524841 - DNA, 15 bp, Homo sapiens
aatacacaatttagc

SEQ ID NO: 524842 - DNA, 15 bp, Homo sapiens
aaatacacaatttag

SEQ ID NO: 524843 - DNA, 15 bp, Homo sapiens
aaaatacacaattta

SEQ ID NO: 524844 - DNA, 15 bp, Homo sapiens
aaaaatacacaattt

SEQ ID NO: 524845 - DNA, 15 bp, Homo sapiens
caaaaatacacaatt

SEQ ID NO: 524846 - DNA, 15 bp, Homo sapiens
acaaaaatacacaat

SEQ ID NO: 524847 - DNA, 15 bp, Homo sapiens
tacaaaaatacacaa

SEQ ID NO: 524848 - DNA, 15 bp, Homo sapiens
ctacaaaaatacaca

SEQ ID NO: 524849 - DNA, 15 bp, Homo sapiens
tctacaaaaatacac

SEQ ID NO: 524850 - DNA, 15 bp, Homo sapiens
ctctacaaaaataca

SEQ ID NO: 524851 - DNA, 15 bp, Homo sapiens
tctctacaaaaatac

SEQ ID NO: 524852 - DNA, 15 bp, Homo sapiens
atctctacaaaaata

SEQ ID NO: 524853 - DNA, 15 bp, Homo sapiens
catctctacaaaaat

SEQ ID NO: 524854 - DNA, 15 bp, Homo sapiens
gaaaccccatctcta

SEQ ID NO: 524855 - DNA, 15 bp, Homo sapiens
tgaaaccccatctct

SEQ ID NO: 524856 - DNA, 15 bp, Homo sapiens
gtgaaaccccatctc

SEQ ID NO: 524857 - DNA, 15 bp, Homo sapiens
ggtgaaaccccatct

SEQ ID NO: 524858 - DNA, 15 bp, Homo sapiens
tggtgaaaccccatc

SEQ ID NO: 524859 - DNA, 15 bp, Homo sapiens
atggtgaaaccccat

SEQ ID NO: 524860 - DNA, 15 bp, Homo sapiens
catggtgaaacccca

SEQ ID NO: 524861 - DNA, 15 bp, Homo sapiens
agcaacatggtgaaa

SEQ ID NO: 524862 - DNA, 15 bp, Homo sapiens
gagcaacatggtgaa

SEQ ID NO: 524863 - DNA, 15 bp, Homo sapiens
tgagcaacatggtga

SEQ ID NO: 524864 - DNA, 15 bp, Homo sapiens
ctgagcaacatggtg

SEQ ID NO: 524865 - DNA, 15 bp, Homo sapiens
cctgagcaacatggt

SEQ ID NO: 524866 - DNA, 15 bp, Homo sapiens
gcctgagcaacatgg

SEQ ID NO: 524867 - DNA, 15 bp, Homo sapiens
agcctgagcaacatg

SEQ ID NO: 524868 - DNA, 15 bp, Homo sapiens
cagcctgagcaacat

SEQ ID NO: 524869 - DNA, 15 bp, Homo sapiens
ccagcctgagcaaca

SEQ ID NO: 524870 - DNA, 15 bp, Homo sapiens
accagcctgagcaac

SEQ ID NO: 524871 - DNA, 15 bp, Homo sapiens
gaccagcctgagcaa

SEQ ID NO: 524872 - DNA, 15 bp, Homo sapiens
agaccagcctgagca

SEQ ID NO: 524873 - DNA, 15 bp, Homo sapiens
aagaccagcctgagc

SEQ ID NO: 524874 - DNA, 15 bp, Homo sapiens
caagaccagcctgag

SEQ ID NO: 524875 - DNA, 15 bp, Homo sapiens
tcaagaccagcctga

SEQ ID NO: 524876 - DNA, 15 bp, Homo sapiens
ttcaagaccagcctg

SEQ ID NO: 524877 - DNA, 15 bp, Homo sapiens
gttcaagaccagcct

SEQ ID NO: 524878 - DNA, 15 bp, Homo sapiens
agttcaagaccagcc

SEQ ID NO: 524879 - DNA, 15 bp, Homo sapiens
gagttcaagaccagc

SEQ ID NO: 524880 - DNA, 15 bp, Homo sapiens
ggagttcaagaccag

SEQ ID NO: 524881 - DNA, 15 bp, Homo sapiens
aggagttcaagacca

SEQ ID NO: 524882 - DNA, 15 bp, Homo sapiens
caggagttcaagacc

SEQ ID NO: 524883 - DNA, 15 bp, Homo sapiens
tcaggagttcaagac

SEQ ID NO: 524884 - DNA, 15 bp, Homo sapiens
ctcaggagttcaaga

SEQ ID NO: 524885 - DNA, 15 bp, Homo sapiens
gctcaggagttcaag

SEQ ID NO: 524886 - DNA, 15 bp, Homo sapiens
agctcaggagttcaa

SEQ ID NO: 524887 - DNA, 15 bp, Homo sapiens
cagctcaggagttca

SEQ ID NO: 524888 - DNA, 15 bp, Homo sapiens
tcagctcaggagttc

SEQ ID NO: 524889 - DNA, 15 bp, Homo sapiens
ttcagctcaggagtt

SEQ ID NO: 524890 - DNA, 15 bp, Homo sapiens
cttcagctcaggagt

SEQ ID NO: 524891 - DNA, 15 bp, Homo sapiens
gcttcagctcaggag

SEQ ID NO: 524892 - DNA, 15 bp, Homo sapiens
tgcttcagctcagga

SEQ ID NO: 524893 - DNA, 15 bp, Homo sapiens
ctgcttcagctcagg

SEQ ID NO: 524894 - DNA, 15 bp, Homo sapiens
actgcttcagctcag

SEQ ID NO: 524895 - DNA, 15 bp, Homo sapiens
gactgcttcagctca

SEQ ID NO: 524896 - DNA, 15 bp, Homo sapiens
ggactgcttcagctc

SEQ ID NO: 524897 - DNA, 15 bp, Homo sapiens
cggactgcttcagct

SEQ ID NO: 524898 - DNA, 15 bp, Homo sapiens
gcggactgcttcagc

SEQ ID NO: 524899 - DNA, 15 bp, Homo sapiens
ggcggactgcttcag

SEQ ID NO: 524900 - DNA, 15 bp, Homo sapiens
gggcggactgcttca

SEQ ID NO: 524901 - DNA, 15 bp, Homo sapiens
agggcggactgcttc

SEQ ID NO: 524902 - DNA, 15 bp, Homo sapiens
cagggcggactgctt

SEQ ID NO: 524903 - DNA, 15 bp, Homo sapiens
gcagggcggactgct

SEQ ID NO: 524904 - DNA, 15 bp, Homo sapiens
ggcagggcggactgc

SEQ ID NO: 524905 - DNA, 15 bp, Homo sapiens
aggcagggcggactg

SEQ ID NO: 524906 - DNA, 15 bp, Homo sapiens
aaggcagggcggact

SEQ ID NO: 524907 - DNA, 15 bp, Homo sapiens
taaggcagggcggac

SEQ ID NO: 524908 - DNA, 15 bp, Homo sapiens
ctaaggcagggcgga

SEQ ID NO: 524909 - DNA, 15 bp, Homo sapiens
gctaaggcagggcgg

SEQ ID NO: 524910 - DNA, 15 bp, Homo sapiens
ggctaaggcagggcg

SEQ ID NO: 524911 - DNA, 15 bp, Homo sapiens
aggctaaggcagggc

SEQ ID NO: 524912 - DNA, 15 bp, Homo sapiens
gaggctaaggcaggg

SEQ ID NO: 524913 - DNA, 15 bp, Homo sapiens
ggaggctaaggcagg

SEQ ID NO: 524914 - DNA, 15 bp, Homo sapiens
gggaggctaaggcag

SEQ ID NO: 524915 - DNA, 15 bp, Homo sapiens
tgggaggctaaggca

SEQ ID NO: 524916 - DNA, 15 bp, Homo sapiens
ttgggaggctaaggc

SEQ ID NO: 524917 - DNA, 15 bp, Homo sapiens
cttgggaggctaagg

SEQ ID NO: 524918 - DNA, 15 bp, Homo sapiens
ccttgggaggctaag

SEQ ID NO: 524919 - DNA, 15 bp, Homo sapiens
accttgggaggctaa

SEQ ID NO: 524920 - DNA, 15 bp, Homo sapiens
caccttgggaggcta

SEQ ID NO: 524921 - DNA, 15 bp, Homo sapiens
gcaccttgggaggct

SEQ ID NO: 524922 - DNA, 15 bp, Homo sapiens
agcaccttgggaggc

SEQ ID NO: 524923 - DNA, 15 bp, Homo sapiens
cagcaccttgggagg

SEQ ID NO: 524924 - DNA, 15 bp, Homo sapiens
tcagcaccttgggag

SEQ ID NO: 524925 - DNA, 15 bp, Homo sapiens
ctcagcaccttggga

SEQ ID NO: 524926 - DNA, 15 bp, Homo sapiens
tctcagcaccttggg

SEQ ID NO: 524927 - DNA, 15 bp, Homo sapiens
atctcagcaccttgg

SEQ ID NO: 524928 - DNA, 15 bp, Homo sapiens
aatctcagcaccttg

SEQ ID NO: 524929 - DNA, 15 bp, Homo sapiens
taatctcagcacctt

SEQ ID NO: 524930 - DNA, 15 bp, Homo sapiens
ataatctcagcacct

SEQ ID NO: 524931 - DNA, 15 bp, Homo sapiens
cataatctcagcacc

SEQ ID NO: 524932 - DNA, 15 bp, Homo sapiens
ccataatctcagcac

SEQ ID NO: 524933 - DNA, 15 bp, Homo sapiens
cccataatctcagca

SEQ ID NO: 524934 - DNA, 15 bp, Homo sapiens
acccataatctcagc

SEQ ID NO: 524935 - DNA, 15 bp, Homo sapiens
cacccataatctcag

SEQ ID NO: 524936 - DNA, 15 bp, Homo sapiens
acacccataatctca

SEQ ID NO: 524937 - DNA, 15 bp, Homo sapiens
cacacccataatctc

SEQ ID NO: 524938 - DNA, 15 bp, Homo sapiens
tcacacccataatct

SEQ ID NO: 524939 - DNA, 15 bp, Homo sapiens
ttcacacccataatc

SEQ ID NO: 524940 - DNA, 15 bp, Homo sapiens
gttcacacccataat

SEQ ID NO: 524941 - DNA, 15 bp, Homo sapiens
ggttcacacccataa

SEQ ID NO: 524942 - DNA, 15 bp, Homo sapiens
tggttcacacccata

SEQ ID NO: 524943 - DNA, 15 bp, Homo sapiens
gtggttcacacccat

SEQ ID NO: 524944 - DNA, 15 bp, Homo sapiens
agtggttcacaccca

SEQ ID NO: 524945 - DNA, 15 bp, Homo sapiens
cagtggttcacaccc

SEQ ID NO: 524946 - DNA, 15 bp, Homo sapiens
acagtggttcacacc

SEQ ID NO: 524947 - DNA, 15 bp, Homo sapiens
cacagtggttcacac

SEQ ID NO: 524948 - DNA, 15 bp, Homo sapiens
acacagtggttcaca

SEQ ID NO: 524949 - DNA, 15 bp, Homo sapiens
tacacagtggttcac

SEQ ID NO: 524950 - DNA, 15 bp, Homo sapiens
gtacacagtggttca

SEQ ID NO: 524951 - DNA, 15 bp, Homo sapiens
tgtacacagtggttc

SEQ ID NO: 524952 - DNA, 15 bp, Homo sapiens
ctgtacacagtggtt

SEQ ID NO: 524953 - DNA, 15 bp, Homo sapiens
gctgtacacagtggt

SEQ ID NO: 524954 - DNA, 15 bp, Homo sapiens
ggctgtacacagtgg

SEQ ID NO: 524955 - DNA, 15 bp, Homo sapiens
gggctgtacacagtg

SEQ ID NO: 524956 - DNA, 15 bp, Homo sapiens
agggctgtacacagt

SEQ ID NO: 524957 - DNA, 15 bp, Homo sapiens
cagggctgtacacag

SEQ ID NO: 524958 - DNA, 15 bp, Homo sapiens
acagggctgtacaca

SEQ ID NO: 524959 - DNA, 15 bp, Homo sapiens
gacagggctgtacac

SEQ ID NO: 524960 - DNA, 15 bp, Homo sapiens
agacagggctgtaca

SEQ ID NO: 524961 - DNA, 15 bp, Homo sapiens
cagacagggctgtac

SEQ ID NO: 524962 - DNA, 15 bp, Homo sapiens
ccagacagggctgta

SEQ ID NO: 524963 - DNA, 15 bp, Homo sapiens
gccagacagggctgt

SEQ ID NO: 524964 - DNA, 15 bp, Homo sapiens
agccagacagggctg

SEQ ID NO: 524965 - DNA, 15 bp, Homo sapiens
gagccagacagggct

SEQ ID NO: 524966 - DNA, 15 bp, Homo sapiens
agagccagacagggc

SEQ ID NO: 524967 - DNA, 15 bp, Homo sapiens
aagagccagacaggg

SEQ ID NO: 524968 - DNA, 15 bp, Homo sapiens
aaagagccagacagg

SEQ ID NO: 524969 - DNA, 15 bp, Homo sapiens
taaagagccagacag

SEQ ID NO: 524970 - DNA, 15 bp, Homo sapiens
gtaaagagccagaca

SEQ ID NO: 524971 - DNA, 15 bp, Homo sapiens
tgtaaagagccagac

SEQ ID NO: 524972 - DNA, 15 bp, Homo sapiens
ctgtaaagagccaga

SEQ ID NO: 524973 - DNA, 15 bp, Homo sapiens
tctgtaaagagccag

SEQ ID NO: 524974 - DNA, 15 bp, Homo sapiens
ttctgtaaagagcca

SEQ ID NO: 524975 - DNA, 15 bp, Homo sapiens
tttctgtaaagagcc

SEQ ID NO: 524976 - DNA, 15 bp, Homo sapiens
ctttctgtaaagagc

SEQ ID NO: 524977 - DNA, 15 bp, Homo sapiens
actttctgtaaagag

SEQ ID NO: 524978 - DNA, 15 bp, Homo sapiens
aactttctgtaaaga

SEQ ID NO: 524979 - DNA, 15 bp, Homo sapiens
aaactttctgtaaag

SEQ ID NO: 524980 - DNA, 15 bp, Homo sapiens
caaactttctgtaaa

SEQ ID NO: 524981 - DNA, 15 bp, Homo sapiens
gcaaactttctgtaa

SEQ ID NO: 524982 - DNA, 15 bp, Homo sapiens
tgcaaactttctgta

SEQ ID NO: 524983 - DNA, 15 bp, Homo sapiens
ctgcaaactttctgt

SEQ ID NO: 524984 - DNA, 15 bp, Homo sapiens
tctgcaaactttctg

SEQ ID NO: 524985 - DNA, 15 bp, Homo sapiens
gtctgcaaactttct

SEQ ID NO: 524986 - DNA, 15 bp, Homo sapiens
ggtctgcaaactttc

SEQ ID NO: 524987 - DNA, 15 bp, Homo sapiens
aggtctgcaaacttt

SEQ ID NO: 524988 - DNA, 15 bp, Homo sapiens
gaggtctgcaaactt

SEQ ID NO: 524989 - DNA, 15 bp, Homo sapiens
agaggtctgcaaact

SEQ ID NO: 524990 - DNA, 15 bp, Homo sapiens
cagaggtctgcaaac

SEQ ID NO: 524991 - DNA, 15 bp, Homo sapiens
tcagaggtctgcaaa

SEQ ID NO: 524992 - DNA, 15 bp, Homo sapiens
ttcagaggtctgcaa

SEQ ID NO: 524993 - DNA, 15 bp, Homo sapiens
gttcagaggtctgca

SEQ ID NO: 524994 - DNA, 15 bp, Homo sapiens
agttcagaggtctgc

SEQ ID NO: 524995 - DNA, 15 bp, Homo sapiens
tagttcagaggtctg

SEQ ID NO: 524996 - DNA, 15 bp, Homo sapiens
ctagttcagaggtct

SEQ ID NO: 524997 - DNA, 15 bp, Homo sapiens
gctagttcagaggtc

SEQ ID NO: 524998 - DNA, 15 bp, Homo sapiens
cgctagttcagaggt

SEQ ID NO: 524999 - DNA, 15 bp, Homo sapiens
ccgctagttcagagg

SEQ ID NO: 525000 - DNA, 15 bp, Homo sapiens
cccgctagttcagag

SEQ ID NO: 525001 - DNA, 15 bp, Homo sapiens
ccccgctagttcaga

SEQ ID NO: 525002 - DNA, 15 bp, Homo sapiens
accccgctagttcag

SEQ ID NO: 525003 - DNA, 15 bp, Homo sapiens
caccccgctagttca

SEQ ID NO: 525004 - DNA, 15 bp, Homo sapiens
acaccccgctagttc

SEQ ID NO: 525005 - DNA, 15 bp, Homo sapiens
aacaccccgctagtt

SEQ ID NO: 525006 - DNA, 15 bp, Homo sapiens
caacaccccgctagt

SEQ ID NO: 525007 - DNA, 15 bp, Homo sapiens
ccaacaccccgctag

SEQ ID NO: 525008 - DNA, 15 bp, Homo sapiens
cccaacaccccgcta

SEQ ID NO: 525009 - DNA, 15 bp, Homo sapiens
tcccaacaccccgct

SEQ ID NO: 525010 - DNA, 15 bp, Homo sapiens
atcccaacaccccgc

SEQ ID NO: 525011 - DNA, 15 bp, Homo sapiens
gatcccaacaccccg

SEQ ID NO: 525012 - DNA, 15 bp, Homo sapiens
agatcccaacacccc

SEQ ID NO: 525013 - DNA, 15 bp, Homo sapiens
aagatcccaacaccc

SEQ ID NO: 525014 - DNA, 15 bp, Homo sapiens
taagatcccaacacc

SEQ ID NO: 525015 - DNA, 15 bp, Homo sapiens
ctaagatcccaacac

SEQ ID NO: 525016 - DNA, 15 bp, Homo sapiens
tctaagatcccaaca

SEQ ID NO: 525017 - DNA, 15 bp, Homo sapiens
ttctaagatcccaac

SEQ ID NO: 525018 - DNA, 15 bp, Homo sapiens
tttctaagatcccaa

SEQ ID NO: 525019 - DNA, 15 bp, Homo sapiens
ctttctaagatccca

SEQ ID NO: 525020 - DNA, 15 bp, Homo sapiens
cctttctaagatccc

SEQ ID NO: 525021 - DNA, 15 bp, Homo sapiens
tcctttctaagatcc

SEQ ID NO: 525022 - DNA, 15 bp, Homo sapiens
ctcctttctaagatc

SEQ ID NO: 525023 - DNA, 15 bp, Homo sapiens
tctcctttctaagat

SEQ ID NO: 525024 - DNA, 15 bp, Homo sapiens
atctcctttctaaga

SEQ ID NO: 525025 - DNA, 15 bp, Homo sapiens
gatctcctttctaag

SEQ ID NO: 525026 - DNA, 15 bp, Homo sapiens
agatctcctttctaa

SEQ ID NO: 525027 - DNA, 15 bp, Homo sapiens
aagatctcctttcta

SEQ ID NO: 525028 - DNA, 15 bp, Homo sapiens
gaagatctcctttct

SEQ ID NO: 525029 - DNA, 15 bp, Homo sapiens
ggaagatctcctttc

SEQ ID NO: 525030 - DNA, 15 bp, Homo sapiens
tggaagatctccttt

SEQ ID NO: 525031 - DNA, 15 bp, Homo sapiens
atggaagatctcctt

SEQ ID NO: 525032 - DNA, 15 bp, Homo sapiens
aatggaagatctcct

SEQ ID NO: 525033 - DNA, 15 bp, Homo sapiens
caatggaagatctcc

SEQ ID NO: 525034 - DNA, 15 bp, Homo sapiens
tcaatggaagatctc

SEQ ID NO: 525035 - DNA, 15 bp, Homo sapiens
gtcaatggaagatct

SEQ ID NO: 525036 - DNA, 15 bp, Homo sapiens
agtcaatggaagatc

SEQ ID NO: 525037 - DNA, 15 bp, Homo sapiens
aagtcaatggaagat

SEQ ID NO: 525038 - DNA, 15 bp, Homo sapiens
caagtcaatggaaga

SEQ ID NO: 525039 - DNA, 15 bp, Homo sapiens
ccaagtcaatggaag

SEQ ID NO: 525040 - DNA, 15 bp, Homo sapiens
gccaagtcaatggaa

SEQ ID NO: 525041 - DNA, 15 bp, Homo sapiens
ggccaagtcaatgga

SEQ ID NO: 525042 - DNA, 15 bp, Homo sapiens
tggccaagtcaatgg

SEQ ID NO: 525043 - DNA, 15 bp, Homo sapiens
ttggccaagtcaatg

SEQ ID NO: 525044 - DNA, 15 bp, Homo sapiens
tttggccaagtcaat

SEQ ID NO: 525045 - DNA, 15 bp, Homo sapiens
ctttggccaagtcaa

SEQ ID NO: 525046 - DNA, 15 bp, Homo sapiens
cctttggccaagtca

SEQ ID NO: 525047 - DNA, 15 bp, Homo sapiens
gcctttggccaagtc

SEQ ID NO: 525048 - DNA, 15 bp, Homo sapiens
agcctttggccaagt

SEQ ID NO: 525049 - DNA, 15 bp, Homo sapiens
gagcctttggccaag

SEQ ID NO: 525050 - DNA, 15 bp, Homo sapiens
agagcctttggccaa

SEQ ID NO: 525051 - DNA, 15 bp, Homo sapiens
aagagcctttggcca

SEQ ID NO: 525052 - DNA, 15 bp, Homo sapiens
gaagagcctttggcc

SEQ ID NO: 525053 - DNA, 15 bp, Homo sapiens
agaagagcctttggc

SEQ ID NO: 525054 - DNA, 15 bp, Homo sapiens
aagaagagcctttgg

SEQ ID NO: 525055 - DNA, 15 bp, Homo sapiens
taagaagagcctttg

SEQ ID NO: 525056 - DNA, 15 bp, Homo sapiens
ttaagaagagccttt

SEQ ID NO: 525057 - DNA, 15 bp, Homo sapiens
gttaagaagagcctt

SEQ ID NO: 525058 - DNA, 15 bp, Homo sapiens
agttaagaagagcct

SEQ ID NO: 525059 - DNA, 15 bp, Homo sapiens
aagttaagaagagcc

SEQ ID NO: 525060 - DNA, 15 bp, Homo sapiens
taagttaagaagagc

SEQ ID NO: 525061 - DNA, 15 bp, Homo sapiens
ttaagttaagaagag

SEQ ID NO: 525062 - DNA, 15 bp, Homo sapiens
tttaagttaagaaga

SEQ ID NO: 525063 - DNA, 15 bp, Homo sapiens
gtttaagttaagaag

SEQ ID NO: 525064 - DNA, 15 bp, Homo sapiens
ggtttaagttaagaa

SEQ ID NO: 525065 - DNA, 15 bp, Homo sapiens
aggtttaagttaaga

SEQ ID NO: 525066 - DNA, 15 bp, Homo sapiens
aaggtttaagttaag

SEQ ID NO: 525067 - DNA, 15 bp, Homo sapiens
gaaggtttaagttaa

SEQ ID NO: 525068 - DNA, 15 bp, Homo sapiens
tgaaggtttaagtta

SEQ ID NO: 525069 - DNA, 15 bp, Homo sapiens
atgaaggtttaagtt

SEQ ID NO: 525070 - DNA, 15 bp, Homo sapiens
aatgaaggtttaagt

SEQ ID NO: 525071 - DNA, 15 bp, Homo sapiens
aaatgaaggtttaag

SEQ ID NO: 525072 - DNA, 15 bp, Homo sapiens
aaaatgaaggtttaa

SEQ ID NO: 525073 - DNA, 15 bp, Homo sapiens
gaaaatgaaggttta

SEQ ID NO: 525074 - DNA, 15 bp, Homo sapiens
agaaaatgaaggttt

SEQ ID NO: 525075 - DNA, 15 bp, Homo sapiens
tagaaaatgaaggtt

SEQ ID NO: 525076 - DNA, 15 bp, Homo sapiens
ctagaaaatgaaggt

SEQ ID NO: 525077 - DNA, 15 bp, Homo sapiens
cctagaaaatgaagg

SEQ ID NO: 525078 - DNA, 15 bp, Homo sapiens
tcctagaaaatgaag

SEQ ID NO: 525079 - DNA, 15 bp, Homo sapiens
gtcctagaaaatgaa

SEQ ID NO: 525080 - DNA, 15 bp, Homo sapiens
ggtcctagaaaatga

SEQ ID NO: 525081 - DNA, 15 bp, Homo sapiens
tggtcctagaaaatg

SEQ ID NO: 525082 - DNA, 15 bp, Homo sapiens
ttggtcctagaaaat

SEQ ID NO: 525083 - DNA, 15 bp, Homo sapiens
cttggtcctagaaaa

SEQ ID NO: 525084 - DNA, 15 bp, Homo sapiens
tcttggtcctagaaa

SEQ ID NO: 525085 - DNA, 15 bp, Homo sapiens
gtcttggtcctagaa

SEQ ID NO: 525086 - DNA, 15 bp, Homo sapiens
ggtcttggtcctaga

SEQ ID NO: 525087 - DNA, 15 bp, Homo sapiens
gggtcttggtcctag

SEQ ID NO: 525088 - DNA, 15 bp, Homo sapiens
ggggtcttggtccta

SEQ ID NO: 525089 - DNA, 15 bp, Homo sapiens
aggggtcttggtcct

SEQ ID NO: 525090 - DNA, 15 bp, Homo sapiens
caggggtcttggtcc

SEQ ID NO: 525091 - DNA, 15 bp, Homo sapiens
ccaggggtcttggtc

SEQ ID NO: 525092 - DNA, 15 bp, Homo sapiens
tccaggggtcttggt

SEQ ID NO: 525093 - DNA, 15 bp, Homo sapiens
gtccaggggtcttgg

SEQ ID NO: 525094 - DNA, 15 bp, Homo sapiens
ggtccaggggtcttg

SEQ ID NO: 525095 - DNA, 15 bp, Homo sapiens
aggtccaggggtctt

SEQ ID NO: 525096 - DNA, 15 bp, Homo sapiens
caggtccaggggtct

SEQ ID NO: 525097 - DNA, 15 bp, Homo sapiens
ccaggtccaggggtc

SEQ ID NO: 525098 - DNA, 15 bp, Homo sapiens
cccaggtccaggggt

SEQ ID NO: 525099 - DNA, 15 bp, Homo sapiens
ccccaggtccagggg

SEQ ID NO: 525100 - DNA, 15 bp, Homo sapiens
gccccaggtccaggg

SEQ ID NO: 525101 - DNA, 15 bp, Homo sapiens
ggccccaggtccagg

SEQ ID NO: 525102 - DNA, 15 bp, Homo sapiens
gggccccaggtccag

SEQ ID NO: 525103 - DNA, 15 bp, Homo sapiens
tgggccccaggtcca

SEQ ID NO: 525104 - DNA, 15 bp, Homo sapiens
ctgggccccaggtcc

SEQ ID NO: 525105 - DNA, 15 bp, Homo sapiens
actgggccccaggtc

SEQ ID NO: 525106 - DNA, 15 bp, Homo sapiens
gactgggccccaggt

SEQ ID NO: 525107 - DNA, 15 bp, Homo sapiens
cgactgggccccagg

SEQ ID NO: 525108 - DNA, 15 bp, Homo sapiens
ccgactgggccccag

SEQ ID NO: 525109 - DNA, 15 bp, Homo sapiens
gccgactgggcccca

SEQ ID NO: 525110 - DNA, 15 bp, Homo sapiens
ggccgactgggcccc

SEQ ID NO: 525111 - DNA, 15 bp, Homo sapiens
gggccgactgggccc

SEQ ID NO: 525112 - DNA, 15 bp, Homo sapiens
agggccgactgggcc

SEQ ID NO: 525113 - DNA, 15 bp, Homo sapiens
gagggccgactgggc

SEQ ID NO: 525114 - DNA, 15 bp, Homo sapiens
tgagggccgactggg

SEQ ID NO: 525115 - DNA, 15 bp, Homo sapiens
ctgagggccgactgg

SEQ ID NO: 525116 - DNA, 15 bp, Homo sapiens
tctgagggccgactg

SEQ ID NO: 525117 - DNA, 15 bp, Homo sapiens
ctctgagggccgact

SEQ ID NO: 525118 - DNA, 15 bp, Homo sapiens
gctctgagggccgac

SEQ ID NO: 525119 - DNA, 15 bp, Homo sapiens
ggctctgagggccga

SEQ ID NO: 525120 - DNA, 15 bp, Homo sapiens
gggctctgagggccg

SEQ ID NO: 525121 - DNA, 15 bp, Homo sapiens
agggctctgagggcc

SEQ ID NO: 525122 - DNA, 15 bp, Homo sapiens
aagggctctgagggc

SEQ ID NO: 525123 - DNA, 15 bp, Homo sapiens
caagggctctgaggg

SEQ ID NO: 525124 - DNA, 15 bp, Homo sapiens
gcaagggctctgagg

SEQ ID NO: 525125 - DNA, 15 bp, Homo sapiens
ggcaagggctctgag

SEQ ID NO: 525126 - DNA, 15 bp, Homo sapiens
gggcaagggctctga

SEQ ID NO: 525127 - DNA, 15 bp, Homo sapiens
cgggcaagggctctg

SEQ ID NO: 525128 - DNA, 15 bp, Homo sapiens
gcgggcaagggctct

SEQ ID NO: 525129 - DNA, 15 bp, Homo sapiens
agcgggcaagggctc

SEQ ID NO: 525130 - DNA, 15 bp, Homo sapiens
gagcgggcaagggct

SEQ ID NO: 525131 - DNA, 15 bp, Homo sapiens
cgagcgggcaagggc

SEQ ID NO: 525132 - DNA, 15 bp, Homo sapiens
ccgagcgggcaaggg

SEQ ID NO: 525133 - DNA, 15 bp, Homo sapiens
cccgagcgggcaagg

SEQ ID NO: 525134 - DNA, 15 bp, Homo sapiens
acccgagcgggcaag

SEQ ID NO: 525135 - DNA, 15 bp, Homo sapiens
tacccgagcgggcaa

SEQ ID NO: 525136 - DNA, 15 bp, Homo sapiens
atacccgagcgggca

SEQ ID NO: 525137 - DNA, 15 bp, Homo sapiens
catacccgagcgggc

SEQ ID NO: 525138 - DNA, 15 bp, Homo sapiens
tcatacccgagcggg

SEQ ID NO: 525139 - DNA, 15 bp, Homo sapiens
ttcatacccgagcgg

SEQ ID NO: 525140 - DNA, 15 bp, Homo sapiens
cttcatacccgagcg

SEQ ID NO: 525141 - DNA, 15 bp, Homo sapiens
tcttcatacccgagc

SEQ ID NO: 525142 - DNA, 15 bp, Homo sapiens
atcttcatacccgag

SEQ ID NO: 525143 - DNA, 15 bp, Homo sapiens
gatcttcatacccga

SEQ ID NO: 525144 - DNA, 15 bp, Homo sapiens
cgatcttcatacccg

SEQ ID NO: 525145 - DNA, 15 bp, Homo sapiens
ccgatcttcataccc

SEQ ID NO: 525146 - DNA, 15 bp, Homo sapiens
cccgatcttcatacc

SEQ ID NO: 525147 - DNA, 15 bp, Homo sapiens
gcccgatcttcatac

SEQ ID NO: 525148 - DNA, 15 bp, Homo sapiens
cgcccgatcttcata

SEQ ID NO: 525149 - DNA, 15 bp, Homo sapiens
ccgcccgatcttcat

SEQ ID NO: 525150 - DNA, 15 bp, Homo sapiens
tccgcccgatcttca

SEQ ID NO: 525151 - DNA, 15 bp, Homo sapiens
atccgcccgatcttc

SEQ ID NO: 525152 - DNA, 15 bp, Homo sapiens
aatccgcccgatctt

SEQ ID NO: 525153 - DNA, 15 bp, Homo sapiens
caatccgcccgatct

SEQ ID NO: 525154 - DNA, 15 bp, Homo sapiens
ccaatccgcccgatc

SEQ ID NO: 525155 - DNA, 15 bp, Homo sapiens
accaatccgcccgat

SEQ ID NO: 525156 - DNA, 15 bp, Homo sapiens
taccaatccgcccga

SEQ ID NO: 525157 - DNA, 15 bp, Homo sapiens
ttaccaatccgcccg

SEQ ID NO: 525158 - DNA, 15 bp, Homo sapiens
cttaccaatccgccc

SEQ ID NO: 525159 - DNA, 15 bp, Homo sapiens
acttaccaatccgcc

SEQ ID NO: 525160 - DNA, 15 bp, Homo sapiens
cacttaccaatccgc

SEQ ID NO: 525161 - DNA, 15 bp, Homo sapiens
gcacttaccaatccg

SEQ ID NO: 525162 - DNA, 15 bp, Homo sapiens
ggcacttaccaatcc

SEQ ID NO: 525163 - DNA, 15 bp, Homo sapiens
gggcacttaccaatc

SEQ ID NO: 525164 - DNA, 15 bp, Homo sapiens
ggggcacttaccaat

SEQ ID NO: 525165 - DNA, 15 bp, Homo sapiens
gggggcacttaccaa

SEQ ID NO: 525166 - DNA, 15 bp, Homo sapiens
ggggggcacttacca

SEQ ID NO: 525167 - DNA, 15 bp, Homo sapiens
aggggggcacttacc

SEQ ID NO: 525168 - DNA, 15 bp, Homo sapiens
gaggggggcacttac

SEQ ID NO: 525169 - DNA, 15 bp, Homo sapiens
agaggggggcactta

SEQ ID NO: 525170 - DNA, 15 bp, Homo sapiens
tagaggggggcactt

SEQ ID NO: 525171 - DNA, 15 bp, Homo sapiens
ctagaggggggcact

SEQ ID NO: 525172 - DNA, 15 bp, Homo sapiens
gctagaggggggcac

SEQ ID NO: 525173 - DNA, 15 bp, Homo sapiens
agctagaggggggca

SEQ ID NO: 525174 - DNA, 15 bp, Homo sapiens
tagctagaggggggc

SEQ ID NO: 525175 - DNA, 15 bp, Homo sapiens
ttagctagagggggg

SEQ ID NO: 525176 - DNA, 15 bp, Homo sapiens
attagctagaggggg

SEQ ID NO: 525177 - DNA, 15 bp, Homo sapiens
cattagctagagggg

SEQ ID NO: 525178 - DNA, 15 bp, Homo sapiens
gcattagctagaggg

SEQ ID NO: 525179 - DNA, 15 bp, Homo sapiens
agcattagctagagg

SEQ ID NO: 525180 - DNA, 15 bp, Homo sapiens
aagcattagctagag

SEQ ID NO: 525181 - DNA, 15 bp, Homo sapiens
caagcattagctaga

SEQ ID NO: 525182 - DNA, 15 bp, Homo sapiens
ccaagcattagctag

SEQ ID NO: 525183 - DNA, 15 bp, Homo sapiens
cccaagcattagcta

SEQ ID NO: 525184 - DNA, 15 bp, Homo sapiens
acccaagcattagct

SEQ ID NO: 525185 - DNA, 15 bp, Homo sapiens
aacccaagcattagc

SEQ ID NO: 525186 - DNA, 15 bp, Homo sapiens
aaacccaagcattag

SEQ ID NO: 525187 - DNA, 15 bp, Homo sapiens
taaacccaagcatta

SEQ ID NO: 525188 - DNA, 15 bp, Homo sapiens
ataaacccaagcatt

SEQ ID NO: 525189 - DNA, 15 bp, Homo sapiens
aataaacccaagcat

SEQ ID NO: 525190 - DNA, 15 bp, Homo sapiens
aaataaacccaagca

SEQ ID NO: 525191 - DNA, 15 bp, Homo sapiens
aaaataaacccaagc

SEQ ID NO: 525192 - DNA, 15 bp, Homo sapiens
caaaataaacccaag

SEQ ID NO: 525193 - DNA, 15 bp, Homo sapiens
tcaaaataaacccaa

SEQ ID NO: 525194 - DNA, 15 bp, Homo sapiens
ttcaaaataaaccca

SEQ ID NO: 525195 - DNA, 15 bp, Homo sapiens
cttcaaaataaaccc

SEQ ID NO: 525196 - DNA, 15 bp, Homo sapiens
gcttcaaaataaacc

SEQ ID NO: 525197 - DNA, 15 bp, Homo sapiens
tgcttcaaaataaac

SEQ ID NO: 525198 - DNA, 15 bp, Homo sapiens
atgcttcaaaataaa

SEQ ID NO: 525199 - DNA, 15 bp, Homo sapiens
aatgcttcaaaataa

SEQ ID NO: 525200 - DNA, 15 bp, Homo sapiens
caatgcttcaaaata

SEQ ID NO: 525201 - DNA, 15 bp, Homo sapiens
ccaatgcttcaaaat

SEQ ID NO: 525202 - DNA, 15 bp, Homo sapiens
gccaatgcttcaaaa

SEQ ID NO: 525203 - DNA, 15 bp, Homo sapiens
ggccaatgcttcaaa

SEQ ID NO: 525204 - DNA, 15 bp, Homo sapiens
gggccaatgcttcaa

SEQ ID NO: 525205 - DNA, 15 bp, Homo sapiens
ggggccaatgcttca

SEQ ID NO: 525206 - DNA, 15 bp, Homo sapiens
tggggccaatgcttc

SEQ ID NO: 525207 - DNA, 15 bp, Homo sapiens
ttggggccaatgctt

SEQ ID NO: 525208 - DNA, 15 bp, Homo sapiens
tttggggccaatgct

SEQ ID NO: 525209 - DNA, 15 bp, Homo sapiens
ttttggggccaatgc

SEQ ID NO: 525210 - DNA, 15 bp, Homo sapiens
tttttggggccaatg

SEQ ID NO: 525211 - DNA, 15 bp, Homo sapiens
ctttttggggccaat

SEQ ID NO: 525212 - DNA, 15 bp, Homo sapiens
gctttttggggccaa

SEQ ID NO: 525213 - DNA, 15 bp, Homo sapiens
tgctttttggggcca

SEQ ID NO: 525214 - DNA, 15 bp, Homo sapiens
gtgctttttggggcc

SEQ ID NO: 525215 - DNA, 15 bp, Homo sapiens
cgtgctttttggggc

SEQ ID NO: 525216 - DNA, 15 bp, Homo sapiens
acgtgctttttgggg

SEQ ID NO: 525217 - DNA, 15 bp, Homo sapiens
cacgtgctttttggg

SEQ ID NO: 525218 - DNA, 15 bp, Homo sapiens
gcacgtgctttttgg

SEQ ID NO: 525219 - DNA, 15 bp, Homo sapiens
agcacgtgctttttg

SEQ ID NO: 525220 - DNA, 15 bp, Homo sapiens
cagcacgtgcttttt

SEQ ID NO: 525221 - DNA, 15 bp, Homo sapiens
acagcacgtgctttt

SEQ ID NO: 525222 - DNA, 15 bp, Homo sapiens
cacagcacgtgcttt

SEQ ID NO: 525223 - DNA, 15 bp, Homo sapiens
gcacagcacgtgctt

SEQ ID NO: 525224 - DNA, 15 bp, Homo sapiens
ggcacagcacgtgct

SEQ ID NO: 525225 - DNA, 15 bp, Homo sapiens
gggcacagcacgtgc

SEQ ID NO: 525226 - DNA, 15 bp, Homo sapiens
tgggcacagcacgtg

SEQ ID NO: 525227 - DNA, 15 bp, Homo sapiens
ctgggcacagcacgt

SEQ ID NO: 525228 - DNA, 15 bp, Homo sapiens
actgggcacagcacg

SEQ ID NO: 525229 - DNA, 15 bp, Homo sapiens
cactgggcacagcac

SEQ ID NO: 525230 - DNA, 15 bp, Homo sapiens
ccactgggcacagca

SEQ ID NO: 525231 - DNA, 15 bp, Homo sapiens
tccactgggcacagc

SEQ ID NO: 525232 - DNA, 15 bp, Homo sapiens
atccactgggcacag

SEQ ID NO: 525233 - DNA, 15 bp, Homo sapiens
catccactgggcaca

SEQ ID NO: 525234 - DNA, 15 bp, Homo sapiens
acatccactgggcac

SEQ ID NO: 525235 - DNA, 15 bp, Homo sapiens
cacatccactgggca

SEQ ID NO: 525236 - DNA, 15 bp, Homo sapiens
gcacatccactgggc

SEQ ID NO: 525237 - DNA, 15 bp, Homo sapiens
tgcacatccactggg

SEQ ID NO: 525238 - DNA, 15 bp, Homo sapiens
ctgcacatccactgg

SEQ ID NO: 525239 - DNA, 15 bp, Homo sapiens
gctgcacatccactg

SEQ ID NO: 525240 - DNA, 15 bp, Homo sapiens
cgctgcacatccact

SEQ ID NO: 525241 - DNA, 15 bp, Homo sapiens
ccgctgcacatccac

SEQ ID NO: 525242 - DNA, 15 bp, Homo sapiens
gccgctgcacatcca

SEQ ID NO: 525243 - DNA, 15 bp, Homo sapiens
agccgctgcacatcc

SEQ ID NO: 525244 - DNA, 15 bp, Homo sapiens
cagccgctgcacatc

SEQ ID NO: 525245 - DNA, 15 bp, Homo sapiens
ccagccgctgcacat

SEQ ID NO: 525246 - DNA, 15 bp, Homo sapiens
accagccgctgcaca

SEQ ID NO: 525247 - DNA, 15 bp, Homo sapiens
gaccagccgctgcac

SEQ ID NO: 525248 - DNA, 15 bp, Homo sapiens
agaccagccgctgca

SEQ ID NO: 525249 - DNA, 15 bp, Homo sapiens
cagaccagccgctgc

SEQ ID NO: 525250 - DNA, 15 bp, Homo sapiens
ccagaccagccgctg

SEQ ID NO: 525251 - DNA, 15 bp, Homo sapiens
accagaccagccgct

SEQ ID NO: 525252 - DNA, 15 bp, Homo sapiens
gaccagaccagccgc

SEQ ID NO: 525253 - DNA, 15 bp, Homo sapiens
tgaccagaccagccg

SEQ ID NO: 525254 - DNA, 15 bp, Homo sapiens
gtgaccagaccagcc

SEQ ID NO: 525255 - DNA, 15 bp, Homo sapiens
agtgaccagaccagc

SEQ ID NO: 525256 - DNA, 15 bp, Homo sapiens
aagtgaccagaccag

SEQ ID NO: 525257 - DNA, 15 bp, Homo sapiens
aaagtgaccagacca

SEQ ID NO: 525258 - DNA, 15 bp, Homo sapiens
aaaagtgaccagacc

SEQ ID NO: 525259 - DNA, 15 bp, Homo sapiens
caaaagtgaccagac

SEQ ID NO: 525260 - DNA, 15 bp, Homo sapiens
ccaaaagtgaccaga

SEQ ID NO: 525261 - DNA, 15 bp, Homo sapiens
gccaaaagtgaccag

SEQ ID NO: 525262 - DNA, 15 bp, Homo sapiens
tgccaaaagtgacca

SEQ ID NO: 525263 - DNA, 15 bp, Homo sapiens
ctgccaaaagtgacc

SEQ ID NO: 525264 - DNA, 15 bp, Homo sapiens
actgccaaaagtgac

SEQ ID NO: 525265 - DNA, 15 bp, Homo sapiens
aactgccaaaagtga

SEQ ID NO: 525266 - DNA, 15 bp, Homo sapiens
taactgccaaaagtg

SEQ ID NO: 525267 - DNA, 15 bp, Homo sapiens
ttaactgccaaaagt

SEQ ID NO: 525268 - DNA, 15 bp, Homo sapiens
cttaactgccaaaag

SEQ ID NO: 525269 - DNA, 15 bp, Homo sapiens
acttaactgccaaaa

SEQ ID NO: 525270 - DNA, 15 bp, Homo sapiens
aacttaactgccaaa

SEQ ID NO: 525271 - DNA, 15 bp, Homo sapiens
aaacttaactgccaa

SEQ ID NO: 525272 - DNA, 15 bp, Homo sapiens
caaacttaactgcca

SEQ ID NO: 525273 - DNA, 15 bp, Homo sapiens
acaaacttaactgcc

SEQ ID NO: 525274 - DNA, 15 bp, Homo sapiens
aacaaacttaactgc

SEQ ID NO: 525275 - DNA, 15 bp, Homo sapiens
taacaaacttaactg

SEQ ID NO: 525276 - DNA, 15 bp, Homo sapiens
ttaacaaacttaact

SEQ ID NO: 525277 - DNA, 15 bp, Homo sapiens
cttaacaaacttaac

SEQ ID NO: 525278 - DNA, 15 bp, Homo sapiens
ccttaacaaacttaa

SEQ ID NO: 525279 - DNA, 15 bp, Homo sapiens
cccttaacaaactta

SEQ ID NO: 525280 - DNA, 15 bp, Homo sapiens
tcccttaacaaactt

SEQ ID NO: 525281 - DNA, 15 bp, Homo sapiens
ctcccttaacaaact

SEQ ID NO: 525282 - DNA, 15 bp, Homo sapiens
cctcccttaacaaac

SEQ ID NO: 525283 - DNA, 15 bp, Homo sapiens
gcctcccttaacaaa

SEQ ID NO: 525284 - DNA, 15 bp, Homo sapiens
agcctcccttaacaa

SEQ ID NO: 525285 - DNA, 15 bp, Homo sapiens
cagcctcccttaaca

SEQ ID NO: 525286 - DNA, 15 bp, Homo sapiens
gcagcctcccttaac

SEQ ID NO: 525287 - DNA, 15 bp, Homo sapiens
tgcagcctcccttaa

SEQ ID NO: 525288 - DNA, 15 bp, Homo sapiens
ttgcagcctccctta

SEQ ID NO: 525289 - DNA, 15 bp, Homo sapiens
cttgcagcctccctt

SEQ ID NO: 525290 - DNA, 15 bp, Homo sapiens
tcttgcagcctccct

SEQ ID NO: 525291 - DNA, 15 bp, Homo sapiens
ctcttgcagcctccc

SEQ ID NO: 525292 - DNA, 15 bp, Homo sapiens
cctcttgcagcctcc

SEQ ID NO: 525293 - DNA, 15 bp, Homo sapiens
gcctcttgcagcctc

SEQ ID NO: 525294 - DNA, 15 bp, Homo sapiens
tgcctcttgcagcct

SEQ ID NO: 525295 - DNA, 15 bp, Homo sapiens
gtgcctcttgcagcc

SEQ ID NO: 525296 - DNA, 15 bp, Homo sapiens
ggtgcctcttgcagc

SEQ ID NO: 525297 - DNA, 15 bp, Homo sapiens
aggtgcctcttgcag

SEQ ID NO: 525298 - DNA, 15 bp, Homo sapiens
aaggtgcctcttgca

SEQ ID NO: 525299 - DNA, 15 bp, Homo sapiens
caaggtgcctcttgc

SEQ ID NO: 525300 - DNA, 15 bp, Homo sapiens
acaaggtgcctcttg

SEQ ID NO: 525301 - DNA, 15 bp, Homo sapiens
cacaaggtgcctctt

SEQ ID NO: 525302 - DNA, 15 bp, Homo sapiens
tcacaaggtgcctct

SEQ ID NO: 525303 - DNA, 15 bp, Homo sapiens
gtcacaaggtgcctc

SEQ ID NO: 525304 - DNA, 15 bp, Homo sapiens
agtcacaaggtgcct

SEQ ID NO: 525305 - DNA, 15 bp, Homo sapiens
aagtcacaaggtgcc

SEQ ID NO: 525306 - DNA, 15 bp, Homo sapiens
taagtcacaaggtgc

SEQ ID NO: 525307 - DNA, 15 bp, Homo sapiens
ttaagtcacaaggtg

SEQ ID NO: 525308 - DNA, 15 bp, Homo sapiens
tttaagtcacaaggt

SEQ ID NO: 525309 - DNA, 15 bp, Homo sapiens
ttttaagtcacaagg

SEQ ID NO: 525310 - DNA, 15 bp, Homo sapiens
tttttaagtcacaag

SEQ ID NO: 525311 - DNA, 15 bp, Homo sapiens
atttttaagtcacaa

SEQ ID NO: 525312 - DNA, 15 bp, Homo sapiens
gatttttaagtcaca

SEQ ID NO: 525313 - DNA, 15 bp, Homo sapiens
agatttttaagtcac

SEQ ID NO: 525314 - DNA, 15 bp, Homo sapiens
gagatttttaagtca

SEQ ID NO: 525315 - DNA, 15 bp, Homo sapiens
agagatttttaagtc

SEQ ID NO: 525316 - DNA, 15 bp, Homo sapiens
gagagatttttaagt

SEQ ID NO: 525317 - DNA, 15 bp, Homo sapiens
ggagagatttttaag

SEQ ID NO: 525318 - DNA, 15 bp, Homo sapiens
gggagagatttttaa

SEQ ID NO: 525319 - DNA, 15 bp, Homo sapiens
agggagagattttta

SEQ ID NO: 525320 - DNA, 15 bp, Homo sapiens
cagggagagattttt

SEQ ID NO: 525321 - DNA, 15 bp, Homo sapiens
tcagggagagatttt

SEQ ID NO: 525322 - DNA, 15 bp, Homo sapiens
ttcagggagagattt

SEQ ID NO: 525323 - DNA, 15 bp, Homo sapiens
attcagggagagatt

SEQ ID NO: 525324 - DNA, 15 bp, Homo sapiens
tattcagggagagat

SEQ ID NO: 525325 - DNA, 15 bp, Homo sapiens
atattcagggagaga

SEQ ID NO: 525326 - DNA, 15 bp, Homo sapiens
gatattcagggagag

SEQ ID NO: 525327 - DNA, 15 bp, Homo sapiens
agatattcagggaga

SEQ ID NO: 525328 - DNA, 15 bp, Homo sapiens
gagatattcagggag

SEQ ID NO: 525329 - DNA, 15 bp, Homo sapiens
agagatattcaggga

SEQ ID NO: 525330 - DNA, 15 bp, Homo sapiens
cagagatattcaggg

SEQ ID NO: 525331 - DNA, 15 bp, Homo sapiens
acagagatattcagg

SEQ ID NO: 525332 - DNA, 15 bp, Homo sapiens
gacagagatattcag

SEQ ID NO: 525333 - DNA, 15 bp, Homo sapiens
tgacagagatattca

SEQ ID NO: 525334 - DNA, 15 bp, Homo sapiens
gtgacagagatattc

SEQ ID NO: 525335 - DNA, 15 bp, Homo sapiens
ggtgacagagatatt

SEQ ID NO: 525336 - DNA, 15 bp, Homo sapiens
aggtgacagagatat

SEQ ID NO: 525337 - DNA, 15 bp, Homo sapiens
aaggtgacagagata

SEQ ID NO: 525338 - DNA, 15 bp, Homo sapiens
caaggtgacagagat

SEQ ID NO: 525339 - DNA, 15 bp, Homo sapiens
tcaaggtgacagaga

SEQ ID NO: 525340 - DNA, 15 bp, Homo sapiens
atcaaggtgacagag

SEQ ID NO: 525341 - DNA, 15 bp, Homo sapiens
tatcaaggtgacaga

SEQ ID NO: 525342 - DNA, 15 bp, Homo sapiens
atatcaaggtgacag

SEQ ID NO: 525343 - DNA, 15 bp, Homo sapiens
catatcaaggtgaca

SEQ ID NO: 525344 - DNA, 15 bp, Homo sapiens
tcatatcaaggtgac

SEQ ID NO: 525345 - DNA, 15 bp, Homo sapiens
ttcatatcaaggtga

SEQ ID NO: 525346 - DNA, 15 bp, Homo sapiens
attcatatcaaggtg

SEQ ID NO: 525347 - DNA, 15 bp, Homo sapiens
cattcatatcaaggt

SEQ ID NO: 525348 - DNA, 15 bp, Homo sapiens
acattcatatcaagg

SEQ ID NO: 525349 - DNA, 15 bp, Homo sapiens
gacattcatatcaag

SEQ ID NO: 525350 - DNA, 15 bp, Homo sapiens
ggacattcatatcaa

SEQ ID NO: 525351 - DNA, 15 bp, Homo sapiens
aggacattcatatca

SEQ ID NO: 525352 - DNA, 15 bp, Homo sapiens
caggacattcatatc

SEQ ID NO: 525353 - DNA, 15 bp, Homo sapiens
acaggacattcatat

SEQ ID NO: 525354 - DNA, 15 bp, Homo sapiens
aacaggacattcata

SEQ ID NO: 525355 - DNA, 15 bp, Homo sapiens
aaacaggacattcat

SEQ ID NO: 525356 - DNA, 15 bp, Homo sapiens
gaaacaggacattca

SEQ ID NO: 525357 - DNA, 15 bp, Homo sapiens
tgaaacaggacattc

SEQ ID NO: 525358 - DNA, 15 bp, Homo sapiens
atgaaacaggacatt

SEQ ID NO: 525359 - DNA, 15 bp, Homo sapiens
aatgaaacaggacat

SEQ ID NO: 525360 - DNA, 15 bp, Homo sapiens
aaatgaaacaggaca

SEQ ID NO: 525361 - DNA, 15 bp, Homo sapiens
caaatgaaacaggac

SEQ ID NO: 525362 - DNA, 15 bp, Homo sapiens
acaaatgaaacagga

SEQ ID NO: 525363 - DNA, 15 bp, Homo sapiens
cacaaatgaaacagg

SEQ ID NO: 525364 - DNA, 15 bp, Homo sapiens
tcacaaatgaaacag

SEQ ID NO: 525365 - DNA, 15 bp, Homo sapiens
ttcacaaatgaaaca

SEQ ID NO: 525366 - DNA, 15 bp, Homo sapiens
attcacaaatgaaac

SEQ ID NO: 525367 - DNA, 15 bp, Homo sapiens
gattcacaaatgaaa

SEQ ID NO: 525368 - DNA, 15 bp, Homo sapiens
agattcacaaatgaa

SEQ ID NO: 525369 - DNA, 15 bp, Homo sapiens
gagattcacaaatga

SEQ ID NO: 525370 - DNA, 15 bp, Homo sapiens
agagattcacaaatg

SEQ ID NO: 525371 - DNA, 15 bp, Homo sapiens
cagagattcacaaat

SEQ ID NO: 525372 - DNA, 15 bp, Homo sapiens
acagagattcacaaa

SEQ ID NO: 525373 - DNA, 15 bp, Homo sapiens
gacagagattcacaa

SEQ ID NO: 525374 - DNA, 15 bp, Homo sapiens
ggacagagattcaca

SEQ ID NO: 525375 - DNA, 15 bp, Homo sapiens
aggacagagattcac

SEQ ID NO: 525376 - DNA, 15 bp, Homo sapiens
taggacagagattca

SEQ ID NO: 525377 - DNA, 15 bp, Homo sapiens
gtaggacagagattc

SEQ ID NO: 525378 - DNA, 15 bp, Homo sapiens
tgtaggacagagatt

SEQ ID NO: 525379 - DNA, 15 bp, Homo sapiens
gtgtaggacagagat

SEQ ID NO: 525380 - DNA, 15 bp, Homo sapiens
agtgtaggacagaga

SEQ ID NO: 525381 - DNA, 15 bp, Homo sapiens
cagtgtaggacagag

SEQ ID NO: 525382 - DNA, 15 bp, Homo sapiens
gcagtgtaggacaga

SEQ ID NO: 525383 - DNA, 15 bp, Homo sapiens
ggcagtgtaggacag

SEQ ID NO: 525384 - DNA, 15 bp, Homo sapiens
aggcagtgtaggaca

SEQ ID NO: 525385 - DNA, 15 bp, Homo sapiens
caggcagtgtaggac

SEQ ID NO: 525386 - DNA, 15 bp, Homo sapiens
ccaggcagtgtagga

SEQ ID NO: 525387 - DNA, 15 bp, Homo sapiens
accaggcagtgtagg

SEQ ID NO: 525388 - DNA, 15 bp, Homo sapiens
caccaggcagtgtag

SEQ ID NO: 525389 - DNA, 15 bp, Homo sapiens
gcaccaggcagtgta

SEQ ID NO: 525390 - DNA, 15 bp, Homo sapiens
tgcaccaggcagtgt

SEQ ID NO: 525391 - DNA, 15 bp, Homo sapiens
ctgcaccaggcagtg

SEQ ID NO: 525392 - DNA, 15 bp, Homo sapiens
cctgcaccaggcagt

SEQ ID NO: 525393 - DNA, 15 bp, Homo sapiens
acctgcaccaggcag

SEQ ID NO: 525394 - DNA, 15 bp, Homo sapiens
tacctgcaccaggca

SEQ ID NO: 525395 - DNA, 15 bp, Homo sapiens
ttacctgcaccaggc

SEQ ID NO: 525396 - DNA, 15 bp, Homo sapiens
tttacctgcaccagg

SEQ ID NO: 525397 - DNA, 15 bp, Homo sapiens
ttttacctgcaccag

SEQ ID NO: 525398 - DNA, 15 bp, Homo sapiens
gttttacctgcacca

SEQ ID NO: 525399 - DNA, 15 bp, Homo sapiens
agttttacctgcacc

SEQ ID NO: 525400 - DNA, 15 bp, Homo sapiens
cagttttacctgcac

SEQ ID NO: 525401 - DNA, 15 bp, Homo sapiens
tcagttttacctgca

SEQ ID NO: 525402 - DNA, 15 bp, Homo sapiens
gtcagttttacctgc

SEQ ID NO: 525403 - DNA, 15 bp, Homo sapiens
tgtcagttttacctg

SEQ ID NO: 525404 - DNA, 15 bp, Homo sapiens
ttgtcagttttacct

SEQ ID NO: 525405 - DNA, 15 bp, Homo sapiens
cttgtcagttttacc

SEQ ID NO: 525406 - DNA, 15 bp, Homo sapiens
tcttgtcagttttac

SEQ ID NO: 525407 - DNA, 15 bp, Homo sapiens
ctcttgtcagtttta

SEQ ID NO: 525408 - DNA, 15 bp, Homo sapiens
tctcttgtcagtttt

SEQ ID NO: 525409 - DNA, 15 bp, Homo sapiens
atctcttgtcagttt

SEQ ID NO: 525410 - DNA, 15 bp, Homo sapiens
catctcttgtcagtt

SEQ ID NO: 525411 - DNA, 15 bp, Homo sapiens
tcatctcttgtcagt

SEQ ID NO: 525412 - DNA, 15 bp, Homo sapiens
ttcatctcttgtcag

SEQ ID NO: 525413 - DNA, 15 bp, Homo sapiens
attcatctcttgtca

SEQ ID NO: 525414 - DNA, 15 bp, Homo sapiens
aattcatctcttgtc

SEQ ID NO: 525415 - DNA, 15 bp, Homo sapiens
caattcatctcttgt

SEQ ID NO: 525416 - DNA, 15 bp, Homo sapiens
acaattcatctcttg

SEQ ID NO: 525417 - DNA, 15 bp, Homo sapiens
gacaattcatctctt

SEQ ID NO: 525418 - DNA, 15 bp, Homo sapiens
ggacaattcatctct

SEQ ID NO: 525419 - DNA, 15 bp, Homo sapiens
aggacaattcatctc

SEQ ID NO: 525420 - DNA, 15 bp, Homo sapiens
aaggacaattcatct

SEQ ID NO: 525421 - DNA, 15 bp, Homo sapiens
aaaggacaattcatc

SEQ ID NO: 525422 - DNA, 15 bp, Homo sapiens
gaaaggacaattcat

SEQ ID NO: 525423 - DNA, 15 bp, Homo sapiens
ggaaaggacaattca

SEQ ID NO: 525424 - DNA, 15 bp, Homo sapiens
aggaaaggacaattc

SEQ ID NO: 525425 - DNA, 15 bp, Homo sapiens
gaggaaaggacaatt

SEQ ID NO: 525426 - DNA, 15 bp, Homo sapiens
ggaggaaaggacaat

SEQ ID NO: 525427 - DNA, 15 bp, Homo sapiens
tggaggaaaggacaa

SEQ ID NO: 525428 - DNA, 15 bp, Homo sapiens
atggaggaaaggaca

SEQ ID NO: 525429 - DNA, 15 bp, Homo sapiens
aatggaggaaaggac

SEQ ID NO: 525430 - DNA, 15 bp, Homo sapiens
gaatggaggaaagga

SEQ ID NO: 525431 - DNA, 15 bp, Homo sapiens
agaatggaggaaagg

SEQ ID NO: 525432 - DNA, 15 bp, Homo sapiens
aagaatggaggaaag

SEQ ID NO: 525433 - DNA, 15 bp, Homo sapiens
caagaatggaggaaa

SEQ ID NO: 525434 - DNA, 15 bp, Homo sapiens
tcaagaatggaggaa

SEQ ID NO: 525435 - DNA, 15 bp, Homo sapiens
ctcaagaatggagga

SEQ ID NO: 525436 - DNA, 15 bp, Homo sapiens
cctcaagaatggagg

SEQ ID NO: 525437 - DNA, 15 bp, Homo sapiens
acctcaagaatggag

SEQ ID NO: 525438 - DNA, 15 bp, Homo sapiens
gacctcaagaatgga

SEQ ID NO: 525439 - DNA, 15 bp, Homo sapiens
tgacctcaagaatgg

SEQ ID NO: 525440 - DNA, 15 bp, Homo sapiens
atgacctcaagaatg

SEQ ID NO: 525441 - DNA, 15 bp, Homo sapiens
aatgacctcaagaat

SEQ ID NO: 525442 - DNA, 15 bp, Homo sapiens
caatgacctcaagaa

SEQ ID NO: 525443 - DNA, 15 bp, Homo sapiens
gcaatgacctcaaga

SEQ ID NO: 525444 - DNA, 15 bp, Homo sapiens
agcaatgacctcaag

SEQ ID NO: 525445 - DNA, 15 bp, Homo sapiens
tagcaatgacctcaa

SEQ ID NO: 525446 - DNA, 15 bp, Homo sapiens
atagcaatgacctca

SEQ ID NO: 525447 - DNA, 15 bp, Homo sapiens
aatagcaatgacctc

SEQ ID NO: 525448 - DNA, 15 bp, Homo sapiens
taatagcaatgacct

SEQ ID NO: 525449 - DNA, 15 bp, Homo sapiens
ctaatagcaatgacc

SEQ ID NO: 525450 - DNA, 15 bp, Homo sapiens
gctaatagcaatgac

SEQ ID NO: 525451 - DNA, 15 bp, Homo sapiens
tgctaatagcaatga

SEQ ID NO: 525452 - DNA, 15 bp, Homo sapiens
atgctaatagcaatg

SEQ ID NO: 525453 - DNA, 15 bp, Homo sapiens
aatgctaatagcaat

SEQ ID NO: 525454 - DNA, 15 bp, Homo sapiens
aaatgctaatagcaa

SEQ ID NO: 525455 - DNA, 15 bp, Homo sapiens
aaaatgctaatagca

SEQ ID NO: 525456 - DNA, 15 bp, Homo sapiens
caaaatgctaatagc

SEQ ID NO: 525457 - DNA, 15 bp, Homo sapiens
acaaaatgctaatag

SEQ ID NO: 525458 - DNA, 15 bp, Homo sapiens
cacaaaatgctaata

SEQ ID NO: 525459 - DNA, 15 bp, Homo sapiens
acacaaaatgctaat

SEQ ID NO: 525460 - DNA, 15 bp, Homo sapiens
cacacaaaatgctaa

SEQ ID NO: 525461 - DNA, 15 bp, Homo sapiens
acacacaaaatgcta

SEQ ID NO: 525462 - DNA, 15 bp, Homo sapiens
tacacacaaaatgct

SEQ ID NO: 525463 - DNA, 15 bp, Homo sapiens
gtacacacaaaatgc

SEQ ID NO: 525464 - DNA, 15 bp, Homo sapiens
ggtacacacaaaatg

SEQ ID NO: 525465 - DNA, 15 bp, Homo sapiens
tggtacacacaaaat

SEQ ID NO: 525466 - DNA, 15 bp, Homo sapiens
atggtacacacaaaa

SEQ ID NO: 525467 - DNA, 15 bp, Homo sapiens
gatggtacacacaaa

SEQ ID NO: 525468 - DNA, 15 bp, Homo sapiens
agatggtacacacaa

SEQ ID NO: 525469 - DNA, 15 bp, Homo sapiens
gagatggtacacaca

SEQ ID NO: 525470 - DNA, 15 bp, Homo sapiens
ggagatggtacacac

SEQ ID NO: 525471 - DNA, 15 bp, Homo sapiens
aggagatggtacaca

SEQ ID NO: 525472 - DNA, 15 bp, Homo sapiens
caggagatggtacac

SEQ ID NO: 525473 - DNA, 15 bp, Homo sapiens
gcaggagatggtaca

SEQ ID NO: 525474 - DNA, 15 bp, Homo sapiens
tgcaggagatggtac

SEQ ID NO: 525475 - DNA, 15 bp, Homo sapiens
atgcaggagatggta

SEQ ID NO: 525476 - DNA, 15 bp, Homo sapiens
aatgcaggagatggt

SEQ ID NO: 525477 - DNA, 15 bp, Homo sapiens
caatgcaggagatgg

SEQ ID NO: 525478 - DNA, 15 bp, Homo sapiens
acaatgcaggagatg

SEQ ID NO: 525479 - DNA, 15 bp, Homo sapiens
tacaatgcaggagat

SEQ ID NO: 525480 - DNA, 15 bp, Homo sapiens
ctacaatgcaggaga

SEQ ID NO: 525481 - DNA, 15 bp, Homo sapiens
cctacaatgcaggag

SEQ ID NO: 525482 - DNA, 15 bp, Homo sapiens
tcctacaatgcagga

SEQ ID NO: 525483 - DNA, 15 bp, Homo sapiens
atcctacaatgcagg

SEQ ID NO: 525484 - DNA, 15 bp, Homo sapiens
catcctacaatgcag

SEQ ID NO: 525485 - DNA, 15 bp, Homo sapiens
acatcctacaatgca

SEQ ID NO: 525486 - DNA, 15 bp, Homo sapiens
aacatcctacaatgc

SEQ ID NO: 525487 - DNA, 15 bp, Homo sapiens
gaacatcctacaatg

SEQ ID NO: 525488 - DNA, 15 bp, Homo sapiens
tgaacatcctacaat

SEQ ID NO: 525489 - DNA, 15 bp, Homo sapiens
ctgaacatcctacaa

SEQ ID NO: 525490 - DNA, 15 bp, Homo sapiens
gctgaacatcctaca

SEQ ID NO: 525491 - DNA, 15 bp, Homo sapiens
tgctgaacatcctac

SEQ ID NO: 525492 - DNA, 15 bp, Homo sapiens
atgctgaacatccta

SEQ ID NO: 525493 - DNA, 15 bp, Homo sapiens
aatgctgaacatcct

SEQ ID NO: 525494 - DNA, 15 bp, Homo sapiens
aaatgctgaacatcc

SEQ ID NO: 525495 - DNA, 15 bp, Homo sapiens
aaaatgctgaacatc

SEQ ID NO: 525496 - DNA, 15 bp, Homo sapiens
aaaaatgctgaacat

SEQ ID NO: 525497 - DNA, 15 bp, Homo sapiens
caaaaatgctgaaca

SEQ ID NO: 525498 - DNA, 15 bp, Homo sapiens
ccaaaaatgctgaac

SEQ ID NO: 525499 - DNA, 15 bp, Homo sapiens
accaaaaatgctgaa

SEQ ID NO: 525500 - DNA, 15 bp, Homo sapiens
aaccaaaaatgctga

SEQ ID NO: 525501 - DNA, 15 bp, Homo sapiens
aaaccaaaaatgctg

SEQ ID NO: 525502 - DNA, 15 bp, Homo sapiens
gaaaccaaaaatgct

SEQ ID NO: 525503 - DNA, 15 bp, Homo sapiens
ggaaaccaaaaatgc

SEQ ID NO: 525504 - DNA, 15 bp, Homo sapiens
cggaaaccaaaaatg

SEQ ID NO: 525505 - DNA, 15 bp, Homo sapiens
gcggaaaccaaaaat

SEQ ID NO: 525506 - DNA, 15 bp, Homo sapiens
ggcggaaaccaaaaa

SEQ ID NO: 525507 - DNA, 15 bp, Homo sapiens
aggcggaaaccaaaa

SEQ ID NO: 525508 - DNA, 15 bp, Homo sapiens
taggcggaaaccaaa

SEQ ID NO: 525509 - DNA, 15 bp, Homo sapiens
gtaggcggaaaccaa

SEQ ID NO: 525510 - DNA, 15 bp, Homo sapiens
agtaggcggaaacca

SEQ ID NO: 525511 - DNA, 15 bp, Homo sapiens
tagtaggcggaaacc

SEQ ID NO: 525512 - DNA, 15 bp, Homo sapiens
ttagtaggcggaaac

SEQ ID NO: 525513 - DNA, 15 bp, Homo sapiens
tttagtaggcggaaa

SEQ ID NO: 525514 - DNA, 15 bp, Homo sapiens
atttagtaggcggaa

SEQ ID NO: 525515 - DNA, 15 bp, Homo sapiens
tatttagtaggcgga

SEQ ID NO: 525516 - DNA, 15 bp, Homo sapiens
atatttagtaggcgg

SEQ ID NO: 525517 - DNA, 15 bp, Homo sapiens
gatatttagtaggcg

SEQ ID NO: 525518 - DNA, 15 bp, Homo sapiens
tgatatttagtaggc

SEQ ID NO: 525519 - DNA, 15 bp, Homo sapiens
ctgatatttagtagg

SEQ ID NO: 525520 - DNA, 15 bp, Homo sapiens
actgatatttagtag

SEQ ID NO: 525521 - DNA, 15 bp, Homo sapiens
aactgatatttagta

SEQ ID NO: 525522 - DNA, 15 bp, Homo sapiens
caactgatatttagt

SEQ ID NO: 525523 - DNA, 15 bp, Homo sapiens
ccaactgatatttag

SEQ ID NO: 525524 - DNA, 15 bp, Homo sapiens
cccaactgatattta

SEQ ID NO: 525525 - DNA, 15 bp, Homo sapiens
gcccaactgatattt

SEQ ID NO: 525526 - DNA, 15 bp, Homo sapiens
tgcccaactgatatt

SEQ ID NO: 525527 - DNA, 15 bp, Homo sapiens
atgcccaactgatat

SEQ ID NO: 525528 - DNA, 15 bp, Homo sapiens
catgcccaactgata

SEQ ID NO: 525529 - DNA, 15 bp, Homo sapiens
gcatgcccaactgat

SEQ ID NO: 525530 - DNA, 15 bp, Homo sapiens
ggcatgcccaactga

SEQ ID NO: 525531 - DNA, 15 bp, Homo sapiens
tggcatgcccaactg

SEQ ID NO: 525532 - DNA, 15 bp, Homo sapiens
ctggcatgcccaact

SEQ ID NO: 525533 - DNA, 15 bp, Homo sapiens
actggcatgcccaac

SEQ ID NO: 525534 - DNA, 15 bp, Homo sapiens
gactggcatgcccaa

SEQ ID NO: 525535 - DNA, 15 bp, Homo sapiens
cgactggcatgccca

SEQ ID NO: 525536 - DNA, 15 bp, Homo sapiens
acgactggcatgccc

SEQ ID NO: 525537 - DNA, 15 bp, Homo sapiens
cacgactggcatgcc

SEQ ID NO: 525538 - DNA, 15 bp, Homo sapiens
acacgactggcatgc

SEQ ID NO: 525539 - DNA, 15 bp, Homo sapiens
cacacgactggcatg

SEQ ID NO: 525540 - DNA, 15 bp, Homo sapiens
tcacacgactggcat

SEQ ID NO: 525541 - DNA, 15 bp, Homo sapiens
gtcacacgactggca

SEQ ID NO: 525542 - DNA, 15 bp, Homo sapiens
tgtcacacgactggc

SEQ ID NO: 525543 - DNA, 15 bp, Homo sapiens
ctgtcacacgactgg

SEQ ID NO: 525544 - DNA, 15 bp, Homo sapiens
gctgtcacacgactg

SEQ ID NO: 525545 - DNA, 15 bp, Homo sapiens
ggctgtcacacgact

SEQ ID NO: 525546 - DNA, 15 bp, Homo sapiens
tggctgtcacacgac

SEQ ID NO: 525547 - DNA, 15 bp, Homo sapiens
ttggctgtcacacga

SEQ ID NO: 525548 - DNA, 15 bp, Homo sapiens
tttggctgtcacacg

SEQ ID NO: 525549 - DNA, 15 bp, Homo sapiens
ttttggctgtcacac

SEQ ID NO: 525550 - DNA, 15 bp, Homo sapiens
tttttggctgtcaca

SEQ ID NO: 525551 - DNA, 15 bp, Homo sapiens
atttttggctgtcac

SEQ ID NO: 525552 - DNA, 15 bp, Homo sapiens
catttttggctgtca

SEQ ID NO: 525553 - DNA, 15 bp, Homo sapiens
tcatttttggctgtc

SEQ ID NO: 525554 - DNA, 15 bp, Homo sapiens
ttcatttttggctgt

SEQ ID NO: 525555 - DNA, 15 bp, Homo sapiens
cttcatttttggctg

SEQ ID NO: 525556 - DNA, 15 bp, Homo sapiens
acttcatttttggct

SEQ ID NO: 525557 - DNA, 15 bp, Homo sapiens
cacttcatttttggc

SEQ ID NO: 525558 - DNA, 15 bp, Homo sapiens
ccacttcatttttgg

SEQ ID NO: 525559 - DNA, 15 bp, Homo sapiens
cccacttcatttttg

SEQ ID NO: 525560 - DNA, 15 bp, Homo sapiens
ccccacttcattttt

SEQ ID NO: 525561 - DNA, 15 bp, Homo sapiens
cccccacttcatttt

SEQ ID NO: 525562 - DNA, 15 bp, Homo sapiens
ccccccacttcattt

SEQ ID NO: 525563 - DNA, 15 bp, Homo sapiens
accccccacttcatt

SEQ ID NO: 525564 - DNA, 15 bp, Homo sapiens
taccccccacttcat

SEQ ID NO: 525565 - DNA, 15 bp, Homo sapiens
gtaccccccacttca

SEQ ID NO: 525566 - DNA, 15 bp, Homo sapiens
ggtaccccccacttc

SEQ ID NO: 525567 - DNA, 15 bp, Homo sapiens
tggtaccccccactt

SEQ ID NO: 525568 - DNA, 15 bp, Homo sapiens
ctggtaccccccact

SEQ ID NO: 525569 - DNA, 15 bp, Homo sapiens
gctggtaccccccac

SEQ ID NO: 525570 - DNA, 15 bp, Homo sapiens
agctggtacccccca

SEQ ID NO: 525571 - DNA, 15 bp, Homo sapiens
aagctggtacccccc

SEQ ID NO: 525572 - DNA, 15 bp, Homo sapiens
gaagctggtaccccc

SEQ ID NO: 525573 - DNA, 15 bp, Homo sapiens
agaagctggtacccc

SEQ ID NO: 525574 - DNA, 15 bp, Homo sapiens
cagaagctggtaccc

SEQ ID NO: 525575 - DNA, 15 bp, Homo sapiens
acagaagctggtacc

SEQ ID NO: 525576 - DNA, 15 bp, Homo sapiens
aacagaagctggtac

SEQ ID NO: 525577 - DNA, 15 bp, Homo sapiens
taacagaagctggta

SEQ ID NO: 525578 - DNA, 15 bp, Homo sapiens
ataacagaagctggt

SEQ ID NO: 525579 - DNA, 15 bp, Homo sapiens
aataacagaagctgg

SEQ ID NO: 525580 - DNA, 15 bp, Homo sapiens
taataacagaagctg

SEQ ID NO: 525581 - DNA, 15 bp, Homo sapiens
ttaataacagaagct

SEQ ID NO: 525582 - DNA, 15 bp, Homo sapiens
attaataacagaagc

SEQ ID NO: 525583 - DNA, 15 bp, Homo sapiens
tattaataacagaag

SEQ ID NO: 525584 - DNA, 15 bp, Homo sapiens
gtattaataacagaa

SEQ ID NO: 525585 - DNA, 15 bp, Homo sapiens
ggtattaataacaga

SEQ ID NO: 525586 - DNA, 15 bp, Homo sapiens
gggtattaataacag

SEQ ID NO: 525587 - DNA, 15 bp, Homo sapiens
agggtattaataaca

SEQ ID NO: 525588 - DNA, 15 bp, Homo sapiens
gagggtattaataac

SEQ ID NO: 525589 - DNA, 15 bp, Homo sapiens
tgagggtattaataa

SEQ ID NO: 525590 - DNA, 15 bp, Homo sapiens
ctgagggtattaata

SEQ ID NO: 525591 - DNA, 15 bp, Homo sapiens
cctgagggtattaat

SEQ ID NO: 525592 - DNA, 15 bp, Homo sapiens
gcctgagggtattaa

SEQ ID NO: 525593 - DNA, 15 bp, Homo sapiens
ggcctgagggtatta

SEQ ID NO: 525594 - DNA, 15 bp, Homo sapiens
aggcctgagggtatt

SEQ ID NO: 525595 - DNA, 15 bp, Homo sapiens
caggcctgagggtat

SEQ ID NO: 525596 - DNA, 15 bp, Homo sapiens
acaggcctgagggta

SEQ ID NO: 525597 - DNA, 15 bp, Homo sapiens
cacaggcctgagggt

SEQ ID NO: 525598 - DNA, 15 bp, Homo sapiens
tcacaggcctgaggg

SEQ ID NO: 525599 - DNA, 15 bp, Homo sapiens
atcacaggcctgagg

SEQ ID NO: 525600 - DNA, 15 bp, Homo sapiens
gatcacaggcctgag

SEQ ID NO: 525601 - DNA, 15 bp, Homo sapiens
agatcacaggcctga

SEQ ID NO: 525602 - DNA, 15 bp, Homo sapiens
gagatcacaggcctg

SEQ ID NO: 525603 - DNA, 15 bp, Homo sapiens
ggagatcacaggcct

SEQ ID NO: 525604 - DNA, 15 bp, Homo sapiens
aggagatcacaggcc

SEQ ID NO: 525605 - DNA, 15 bp, Homo sapiens
caggagatcacaggc

SEQ ID NO: 525606 - DNA, 15 bp, Homo sapiens
ccaggagatcacagg

SEQ ID NO: 525607 - DNA, 15 bp, Homo sapiens
gccaggagatcacag

SEQ ID NO: 525608 - DNA, 15 bp, Homo sapiens
agccaggagatcaca

SEQ ID NO: 525609 - DNA, 15 bp, Homo sapiens
gagccaggagatcac

SEQ ID NO: 525610 - DNA, 15 bp, Homo sapiens
ggagccaggagatca

SEQ ID NO: 525611 - DNA, 15 bp, Homo sapiens
aggagccaggagatc

SEQ ID NO: 525612 - DNA, 15 bp, Homo sapiens
aaggagccaggagat

SEQ ID NO: 525613 - DNA, 15 bp, Homo sapiens
taaggagccaggaga

SEQ ID NO: 525614 - DNA, 15 bp, Homo sapiens
gtaaggagccaggag

SEQ ID NO: 525615 - DNA, 15 bp, Homo sapiens
tgtaaggagccagga

SEQ ID NO: 525616 - DNA, 15 bp, Homo sapiens
ctgtaaggagccagg

SEQ ID NO: 525617 - DNA, 15 bp, Homo sapiens
gctgtaaggagccag

SEQ ID NO: 525618 - DNA, 15 bp, Homo sapiens
agctgtaaggagcca

SEQ ID NO: 525619 - DNA, 15 bp, Homo sapiens
gagctgtaaggagcc

SEQ ID NO: 525620 - DNA, 15 bp, Homo sapiens
agagctgtaaggagc

SEQ ID NO: 525621 - DNA, 15 bp, Homo sapiens
aagagctgtaaggag

SEQ ID NO: 525622 - DNA, 15 bp, Homo sapiens
taagagctgtaagga

SEQ ID NO: 525623 - DNA, 15 bp, Homo sapiens
ctaagagctgtaagg

SEQ ID NO: 525624 - DNA, 15 bp, Homo sapiens
cctaagagctgtaag

SEQ ID NO: 525625 - DNA, 15 bp, Homo sapiens
tcctaagagctgtaa

SEQ ID NO: 525626 - DNA, 15 bp, Homo sapiens
ttcctaagagctgta

SEQ ID NO: 525627 - DNA, 15 bp, Homo sapiens
cttcctaagagctgt

SEQ ID NO: 525628 - DNA, 15 bp, Homo sapiens
ccttcctaagagctg

SEQ ID NO: 525629 - DNA, 15 bp, Homo sapiens
cccttcctaagagct

SEQ ID NO: 525630 - DNA, 15 bp, Homo sapiens
tcccttcctaagagc

SEQ ID NO: 525631 - DNA, 15 bp, Homo sapiens
ttcccttcctaagag

SEQ ID NO: 525632 - DNA, 15 bp, Homo sapiens
gttcccttcctaaga

SEQ ID NO: 525633 - DNA, 15 bp, Homo sapiens
tgttcccttcctaag

SEQ ID NO: 525634 - DNA, 15 bp, Homo sapiens
ctgttcccttcctaa

SEQ ID NO: 525635 - DNA, 15 bp, Homo sapiens
actgttcccttccta

SEQ ID NO: 525636 - DNA, 15 bp, Homo sapiens
tactgttcccttcct

SEQ ID NO: 525637 - DNA, 15 bp, Homo sapiens
ctactgttcccttcc

SEQ ID NO: 525638 - DNA, 15 bp, Homo sapiens
actactgttcccttc

SEQ ID NO: 525639 - DNA, 15 bp, Homo sapiens
gactactgttccctt

SEQ ID NO: 525640 - DNA, 15 bp, Homo sapiens
agactactgttccct

SEQ ID NO: 525641 - DNA, 15 bp, Homo sapiens
aagactactgttccc

SEQ ID NO: 525642 - DNA, 15 bp, Homo sapiens
aaagactactgttcc

SEQ ID NO: 525643 - DNA, 15 bp, Homo sapiens
gaaagactactgttc

SEQ ID NO: 525644 - DNA, 15 bp, Homo sapiens
ggaaagactactgtt

SEQ ID NO: 525645 - DNA, 15 bp, Homo sapiens
gggaaagactactgt

SEQ ID NO: 525646 - DNA, 15 bp, Homo sapiens
agggaaagactactg

SEQ ID NO: 525647 - DNA, 15 bp, Homo sapiens
cagggaaagactact

SEQ ID NO: 525648 - DNA, 15 bp, Homo sapiens
gcagggaaagactac

SEQ ID NO: 525649 - DNA, 15 bp, Homo sapiens
tgcagggaaagacta

SEQ ID NO: 525650 - DNA, 15 bp, Homo sapiens
gtgcagggaaagact

SEQ ID NO: 525651 - DNA, 15 bp, Homo sapiens
tgtgcagggaaagac

SEQ ID NO: 525652 - DNA, 15 bp, Homo sapiens
atgtgcagggaaaga

SEQ ID NO: 525653 - DNA, 15 bp, Homo sapiens
aatgtgcagggaaag

SEQ ID NO: 525654 - DNA, 15 bp, Homo sapiens
caatgtgcagggaaa

SEQ ID NO: 525655 - DNA, 15 bp, Homo sapiens
acaatgtgcagggaa

SEQ ID NO: 525656 - DNA, 15 bp, Homo sapiens
aacaatgtgcaggga

SEQ ID NO: 525657 - DNA, 15 bp, Homo sapiens
gaacaatgtgcaggg

SEQ ID NO: 525658 - DNA, 15 bp, Homo sapiens
agaacaatgtgcagg

SEQ ID NO: 525659 - DNA, 15 bp, Homo sapiens
cagaacaatgtgcag

SEQ ID NO: 525660 - DNA, 15 bp, Homo sapiens
acagaacaatgtgca

SEQ ID NO: 525661 - DNA, 15 bp, Homo sapiens
cacagaacaatgtgc

SEQ ID NO: 525662 - DNA, 15 bp, Homo sapiens
gcacagaacaatgtg

SEQ ID NO: 525663 - DNA, 15 bp, Homo sapiens
tgcacagaacaatgt

SEQ ID NO: 525664 - DNA, 15 bp, Homo sapiens
ctgcacagaacaatg

SEQ ID NO: 525665 - DNA, 15 bp, Homo sapiens
actgcacagaacaat

SEQ ID NO: 525666 - DNA, 15 bp, Homo sapiens
aactgcacagaacaa

SEQ ID NO: 525667 - DNA, 15 bp, Homo sapiens
taactgcacagaaca

SEQ ID NO: 525668 - DNA, 15 bp, Homo sapiens
ctaactgcacagaac

SEQ ID NO: 525669 - DNA, 15 bp, Homo sapiens
actaactgcacagaa

SEQ ID NO: 525670 - DNA, 15 bp, Homo sapiens
tactaactgcacaga

SEQ ID NO: 525671 - DNA, 15 bp, Homo sapiens
ctactaactgcacag

SEQ ID NO: 525672 - DNA, 15 bp, Homo sapiens
gctactaactgcaca

SEQ ID NO: 525673 - DNA, 15 bp, Homo sapiens
cgctactaactgcac

SEQ ID NO: 525674 - DNA, 15 bp, Homo sapiens
tcgctactaactgca

SEQ ID NO: 525675 - DNA, 15 bp, Homo sapiens
gtcgctactaactgc

SEQ ID NO: 525676 - DNA, 15 bp, Homo sapiens
tgtcgctactaactg

SEQ ID NO: 525677 - DNA, 15 bp, Homo sapiens
atgtcgctactaact

SEQ ID NO: 525678 - DNA, 15 bp, Homo sapiens
tatgtcgctactaac

SEQ ID NO: 525679 - DNA, 15 bp, Homo sapiens
gtatgtcgctactaa

SEQ ID NO: 525680 - DNA, 15 bp, Homo sapiens
tgtatgtcgctacta

SEQ ID NO: 525681 - DNA, 15 bp, Homo sapiens
gtgtatgtcgctact

SEQ ID NO: 525682 - DNA, 15 bp, Homo sapiens
agtgtatgtcgctac

SEQ ID NO: 525683 - DNA, 15 bp, Homo sapiens
cagtgtatgtcgcta

SEQ ID NO: 525684 - DNA, 15 bp, Homo sapiens
tcagtgtatgtcgct

SEQ ID NO: 525685 - DNA, 15 bp, Homo sapiens
gtcagtgtatgtcgc

SEQ ID NO: 525686 - DNA, 15 bp, Homo sapiens
cgtcagtgtatgtcg

SEQ ID NO: 525687 - DNA, 15 bp, Homo sapiens
gcgtcagtgtatgtc

SEQ ID NO: 525688 - DNA, 15 bp, Homo sapiens
ggcgtcagtgtatgt

SEQ ID NO: 525689 - DNA, 15 bp, Homo sapiens
gggcgtcagtgtatg

SEQ ID NO: 525690 - DNA, 15 bp, Homo sapiens
ggggcgtcagtgtat

SEQ ID NO: 525691 - DNA, 15 bp, Homo sapiens
tggggcgtcagtgta

SEQ ID NO: 525692 - DNA, 15 bp, Homo sapiens
ctggggcgtcagtgt

SEQ ID NO: 525693 - DNA, 15 bp, Homo sapiens
cctggggcgtcagtg

SEQ ID NO: 525694 - DNA, 15 bp, Homo sapiens
gcctggggcgtcagt

SEQ ID NO: 525695 - DNA, 15 bp, Homo sapiens
ggcctggggcgtcag

SEQ ID NO: 525696 - DNA, 15 bp, Homo sapiens
tggcctggggcgtca

SEQ ID NO: 525697 - DNA, 15 bp, Homo sapiens
ttggcctggggcgtc

SEQ ID NO: 525698 - DNA, 15 bp, Homo sapiens
tttggcctggggcgt

SEQ ID NO: 525699 - DNA, 15 bp, Homo sapiens
ctttggcctggggcg

SEQ ID NO: 525700 - DNA, 15 bp, Homo sapiens
actttggcctggggc

SEQ ID NO: 525701 - DNA, 15 bp, Homo sapiens
aactttggcctgggg

SEQ ID NO: 525702 - DNA, 15 bp, Homo sapiens
gaactttggcctggg

SEQ ID NO: 525703 - DNA, 15 bp, Homo sapiens
ggaactttggcctgg

SEQ ID NO: 525704 - DNA, 15 bp, Homo sapiens
aggaactttggcctg

SEQ ID NO: 525705 - DNA, 15 bp, Homo sapiens
taggaactttggcct

SEQ ID NO: 525706 - DNA, 15 bp, Homo sapiens
gtaggaactttggcc

SEQ ID NO: 525707 - DNA, 15 bp, Homo sapiens
agtaggaactttggc

SEQ ID NO: 525708 - DNA, 15 bp, Homo sapiens
cagtaggaactttgg

SEQ ID NO: 525709 - DNA, 15 bp, Homo sapiens
acagtaggaactttg

SEQ ID NO: 525710 - DNA, 15 bp, Homo sapiens
cacagtaggaacttt

SEQ ID NO: 525711 - DNA, 15 bp, Homo sapiens
acacagtaggaactt

SEQ ID NO: 525712 - DNA, 15 bp, Homo sapiens
gacacagtaggaact

SEQ ID NO: 525713 - DNA, 15 bp, Homo sapiens
ggacacagtaggaac

SEQ ID NO: 525714 - DNA, 15 bp, Homo sapiens
aggacacagtaggaa

SEQ ID NO: 525715 - DNA, 15 bp, Homo sapiens
taggacacagtagga

SEQ ID NO: 525716 - DNA, 15 bp, Homo sapiens
gtaggacacagtagg

SEQ ID NO: 525717 - DNA, 15 bp, Homo sapiens
agtaggacacagtag

SEQ ID NO: 525718 - DNA, 15 bp, Homo sapiens
aagtaggacacagta

SEQ ID NO: 525719 - DNA, 15 bp, Homo sapiens
caagtaggacacagt

SEQ ID NO: 525720 - DNA, 15 bp, Homo sapiens
tcaagtaggacacag

SEQ ID NO: 525721 - DNA, 15 bp, Homo sapiens
ttcaagtaggacaca

SEQ ID NO: 525722 - DNA, 15 bp, Homo sapiens
cttcaagtaggacac

SEQ ID NO: 525723 - DNA, 15 bp, Homo sapiens
ccttcaagtaggaca

SEQ ID NO: 525724 - DNA, 15 bp, Homo sapiens
tccttcaagtaggac

SEQ ID NO: 525725 - DNA, 15 bp, Homo sapiens
atccttcaagtagga

SEQ ID NO: 525726 - DNA, 15 bp, Homo sapiens
catccttcaagtagg

SEQ ID NO: 525727 - DNA, 15 bp, Homo sapiens
tcatccttcaagtag

SEQ ID NO: 525728 - DNA, 15 bp, Homo sapiens
atcatccttcaagta

SEQ ID NO: 525729 - DNA, 15 bp, Homo sapiens
aatcatccttcaagt

SEQ ID NO: 525730 - DNA, 15 bp, Homo sapiens
aaatcatccttcaag

SEQ ID NO: 525731 - DNA, 15 bp, Homo sapiens
aaaatcatccttcaa

SEQ ID NO: 525732 - DNA, 15 bp, Homo sapiens
caaaatcatccttca

SEQ ID NO: 525733 - DNA, 15 bp, Homo sapiens
acaaaatcatccttc

SEQ ID NO: 525734 - DNA, 15 bp, Homo sapiens
aacaaaatcatcctt

SEQ ID NO: 525735 - DNA, 15 bp, Homo sapiens
aaacaaaatcatcct

SEQ ID NO: 525736 - DNA, 15 bp, Homo sapiens
aaaacaaaatcatcc

SEQ ID NO: 525737 - DNA, 15 bp, Homo sapiens
gaaaacaaaatcatc

SEQ ID NO: 525738 - DNA, 15 bp, Homo sapiens
agaaaacaaaatcat

SEQ ID NO: 525739 - DNA, 15 bp, Homo sapiens
aagaaaacaaaatca

SEQ ID NO: 525740 - DNA, 15 bp, Homo sapiens
caagaaaacaaaatc

SEQ ID NO: 525741 - DNA, 15 bp, Homo sapiens
tcaagaaaacaaaat

SEQ ID NO: 525742 - DNA, 15 bp, Homo sapiens
ctcaagaaaacaaaa

SEQ ID NO: 525743 - DNA, 15 bp, Homo sapiens
tctcaagaaaacaaa

SEQ ID NO: 525744 - DNA, 15 bp, Homo sapiens
gtctcaagaaaacaa

SEQ ID NO: 525745 - DNA, 15 bp, Homo sapiens
tgtctcaagaaaaca

SEQ ID NO: 525746 - DNA, 15 bp, Homo sapiens
ctgtctcaagaaaac

SEQ ID NO: 525747 - DNA, 15 bp, Homo sapiens
cctgtctcaagaaaa

SEQ ID NO: 525748 - DNA, 15 bp, Homo sapiens
ccctgtctcaagaaa

SEQ ID NO: 525749 - DNA, 15 bp, Homo sapiens
accctgtctcaagaa

SEQ ID NO: 525750 - DNA, 15 bp, Homo sapiens
gaccctgtctcaaga

SEQ ID NO: 525751 - DNA, 15 bp, Homo sapiens
agaccctgtctcaag

SEQ ID NO: 525752 - DNA, 15 bp, Homo sapiens
cagaccctgtctcaa

SEQ ID NO: 525753 - DNA, 15 bp, Homo sapiens
ccagaccctgtctca

SEQ ID NO: 525754 - DNA, 15 bp, Homo sapiens
gccagaccctgtctc

SEQ ID NO: 525755 - DNA, 15 bp, Homo sapiens
agccagaccctgtct

SEQ ID NO: 525756 - DNA, 15 bp, Homo sapiens
gagccagaccctgtc

SEQ ID NO: 525757 - DNA, 15 bp, Homo sapiens
agagccagaccctgt

SEQ ID NO: 525758 - DNA, 15 bp, Homo sapiens
cagagccagaccctg

SEQ ID NO: 525759 - DNA, 15 bp, Homo sapiens
acagagccagaccct

SEQ ID NO: 525760 - DNA, 15 bp, Homo sapiens
aacagagccagaccc

SEQ ID NO: 525761 - DNA, 15 bp, Homo sapiens
caacagagccagacc

SEQ ID NO: 525762 - DNA, 15 bp, Homo sapiens
gcaacagagccagac

SEQ ID NO: 525763 - DNA, 15 bp, Homo sapiens
cgcaacagagccaga

SEQ ID NO: 525764 - DNA, 15 bp, Homo sapiens
acgcaacagagccag

SEQ ID NO: 525765 - DNA, 15 bp, Homo sapiens
cacgcaacagagcca

SEQ ID NO: 525766 - DNA, 15 bp, Homo sapiens
ccacgcaacagagcc

SEQ ID NO: 525767 - DNA, 15 bp, Homo sapiens
cccacgcaacagagc

SEQ ID NO: 525768 - DNA, 15 bp, Homo sapiens
gcccacgcaacagag

SEQ ID NO: 525769 - DNA, 15 bp, Homo sapiens
agcccacgcaacaga

SEQ ID NO: 525770 - DNA, 15 bp, Homo sapiens
cagcccacgcaacag

SEQ ID NO: 525771 - DNA, 15 bp, Homo sapiens
ccagcccacgcaaca

SEQ ID NO: 525772 - DNA, 15 bp, Homo sapiens
tccagcccacgcaac

SEQ ID NO: 525773 - DNA, 15 bp, Homo sapiens
ttccagcccacgcaa

SEQ ID NO: 525774 - DNA, 15 bp, Homo sapiens
attccagcccacgca

SEQ ID NO: 525775 - DNA, 15 bp, Homo sapiens
aattccagcccacgc

SEQ ID NO: 525776 - DNA, 15 bp, Homo sapiens
gaattccagcccacg

SEQ ID NO: 525777 - DNA, 15 bp, Homo sapiens
tgaattccagcccac

SEQ ID NO: 525778 - DNA, 15 bp, Homo sapiens
ctgaattccagccca

SEQ ID NO: 525779 - DNA, 15 bp, Homo sapiens
actgaattccagccc

SEQ ID NO: 525780 - DNA, 15 bp, Homo sapiens
cactgaattccagcc

SEQ ID NO: 525781 - DNA, 15 bp, Homo sapiens
ccactgaattccagc

SEQ ID NO: 525782 - DNA, 15 bp, Homo sapiens
gccactgaattccag

SEQ ID NO: 525783 - DNA, 15 bp, Homo sapiens
tgccactgaattcca

SEQ ID NO: 525784 - DNA, 15 bp, Homo sapiens
gtgccactgaattcc

SEQ ID NO: 525785 - DNA, 15 bp, Homo sapiens
tgtgccactgaattc

SEQ ID NO: 525786 - DNA, 15 bp, Homo sapiens
ttgtgccactgaatt

SEQ ID NO: 525787 - DNA, 15 bp, Homo sapiens
attgtgccactgaat

SEQ ID NO: 525788 - DNA, 15 bp, Homo sapiens
gattgtgccactgaa

SEQ ID NO: 525789 - DNA, 15 bp, Homo sapiens
agattgtgccactga

SEQ ID NO: 525790 - DNA, 15 bp, Homo sapiens
gagattgtgccactg

SEQ ID NO: 525791 - DNA, 15 bp, Homo sapiens
tgagattgtgccact

SEQ ID NO: 525792 - DNA, 15 bp, Homo sapiens
ctgagattgtgccac

SEQ ID NO: 525793 - DNA, 15 bp, Homo sapiens
gctgagattgtgcca

SEQ ID NO: 525794 - DNA, 15 bp, Homo sapiens
agctgagattgtgcc

SEQ ID NO: 525795 - DNA, 15 bp, Homo sapiens
gagctgagattgtgc

SEQ ID NO: 525796 - DNA, 15 bp, Homo sapiens
tgagctgagattgtg

SEQ ID NO: 525797 - DNA, 15 bp, Homo sapiens
gtgagctgagattgt

SEQ ID NO: 525798 - DNA, 15 bp, Homo sapiens
agtgagctgagattg

SEQ ID NO: 525799 - DNA, 15 bp, Homo sapiens
cagtgagctgagatt

SEQ ID NO: 525800 - DNA, 15 bp, Homo sapiens
acagtgagctgagat

SEQ ID NO: 525801 - DNA, 15 bp, Homo sapiens
tacagtgagctgaga

SEQ ID NO: 525802 - DNA, 15 bp, Homo sapiens
ttacagtgagctgag

SEQ ID NO: 525803 - DNA, 15 bp, Homo sapiens
tttacagtgagctga

SEQ ID NO: 525804 - DNA, 15 bp, Homo sapiens
atttacagtgagctg

SEQ ID NO: 525805 - DNA, 15 bp, Homo sapiens
aatttacagtgagct

SEQ ID NO: 525806 - DNA, 15 bp, Homo sapiens
aaatttacagtgagc

SEQ ID NO: 525807 - DNA, 15 bp, Homo sapiens
gaaatttacagtgag

SEQ ID NO: 525808 - DNA, 15 bp, Homo sapiens
cgaaatttacagtga

SEQ ID NO: 525809 - DNA, 15 bp, Homo sapiens
gcgaaatttacagtg

SEQ ID NO: 525810 - DNA, 15 bp, Homo sapiens
ggcgaaatttacagt

SEQ ID NO: 525811 - DNA, 15 bp, Homo sapiens
aggcgaaatttacag

SEQ ID NO: 525812 - DNA, 15 bp, Homo sapiens
gaggcgaaatttaca

SEQ ID NO: 525813 - DNA, 15 bp, Homo sapiens
cgaggcgaaatttac

SEQ ID NO: 525814 - DNA, 15 bp, Homo sapiens
acgaggcgaaattta

SEQ ID NO: 525815 - DNA, 15 bp, Homo sapiens
cacgaggcgaaattt

SEQ ID NO: 525816 - DNA, 15 bp, Homo sapiens
ccacgaggcgaaatt

SEQ ID NO: 525817 - DNA, 15 bp, Homo sapiens
cccacgaggcgaaat

SEQ ID NO: 525818 - DNA, 15 bp, Homo sapiens
gcccacgaggcgaaa

SEQ ID NO: 525819 - DNA, 15 bp, Homo sapiens
cgcccacgaggcgaa

SEQ ID NO: 525820 - DNA, 15 bp, Homo sapiens
ccgcccacgaggcga

SEQ ID NO: 525821 - DNA, 15 bp, Homo sapiens
tccgcccacgaggcg

SEQ ID NO: 525822 - DNA, 15 bp, Homo sapiens
atccgcccacgaggc

SEQ ID NO: 525823 - DNA, 15 bp, Homo sapiens
gatccgcccacgagg

SEQ ID NO: 525824 - DNA, 15 bp, Homo sapiens
agatccgcccacgag

SEQ ID NO: 525825 - DNA, 15 bp, Homo sapiens
cagatccgcccacga

SEQ ID NO: 525826 - DNA, 15 bp, Homo sapiens
acagatccgcccacg

SEQ ID NO: 525827 - DNA, 15 bp, Homo sapiens
gacagatccgcccac

SEQ ID NO: 525828 - DNA, 15 bp, Homo sapiens
ggacagatccgccca

SEQ ID NO: 525829 - DNA, 15 bp, Homo sapiens
tggacagatccgccc

SEQ ID NO: 525830 - DNA, 15 bp, Homo sapiens
ttggacagatccgcc

SEQ ID NO: 525831 - DNA, 15 bp, Homo sapiens
tttggacagatccgc

SEQ ID NO: 525832 - DNA, 15 bp, Homo sapiens
ctttggacagatccg

SEQ ID NO: 525833 - DNA, 15 bp, Homo sapiens
cctttggacagatcc

SEQ ID NO: 525834 - DNA, 15 bp, Homo sapiens
tcctttggacagatc

SEQ ID NO: 525835 - DNA, 15 bp, Homo sapiens
atcctttggacagat

SEQ ID NO: 525836 - DNA, 15 bp, Homo sapiens
gatcctttggacaga

SEQ ID NO: 525837 - DNA, 15 bp, Homo sapiens
ggatcctttggacag

SEQ ID NO: 525838 - DNA, 15 bp, Homo sapiens
aggatcctttggaca

SEQ ID NO: 525839 - DNA, 15 bp, Homo sapiens
gaggatcctttggac

SEQ ID NO: 525840 - DNA, 15 bp, Homo sapiens
ggaggatcctttgga

SEQ ID NO: 525841 - DNA, 15 bp, Homo sapiens
gggaggatcctttgg

SEQ ID NO: 525842 - DNA, 15 bp, Homo sapiens
tgggaggatcctttg

SEQ ID NO: 525843 - DNA, 15 bp, Homo sapiens
gtgggaggatccttt

SEQ ID NO: 525844 - DNA, 15 bp, Homo sapiens
ggtgggaggatcctt

SEQ ID NO: 525845 - DNA, 15 bp, Homo sapiens
aggtgggaggatcct

SEQ ID NO: 525846 - DNA, 15 bp, Homo sapiens
caggtgggaggatcc

SEQ ID NO: 525847 - DNA, 15 bp, Homo sapiens
gcaggtgggaggatc

SEQ ID NO: 525848 - DNA, 15 bp, Homo sapiens
tgcaggtgggaggat

SEQ ID NO: 525849 - DNA, 15 bp, Homo sapiens
atgcaggtgggagga

SEQ ID NO: 525850 - DNA, 15 bp, Homo sapiens
gatgcaggtgggagg

SEQ ID NO: 525851 - DNA, 15 bp, Homo sapiens
agatgcaggtgggag

SEQ ID NO: 525852 - DNA, 15 bp, Homo sapiens
tagatgcaggtggga

SEQ ID NO: 525853 - DNA, 15 bp, Homo sapiens
gtagatgcaggtggg

SEQ ID NO: 525854 - DNA, 15 bp, Homo sapiens
agtagatgcaggtgg

SEQ ID NO: 525855 - DNA, 15 bp, Homo sapiens
cagtagatgcaggtg

SEQ ID NO: 525856 - DNA, 15 bp, Homo sapiens
tcagtagatgcaggt

SEQ ID NO: 525857 - DNA, 15 bp, Homo sapiens
ctcagtagatgcagg

SEQ ID NO: 525858 - DNA, 15 bp, Homo sapiens
actcagtagatgcag

SEQ ID NO: 525859 - DNA, 15 bp, Homo sapiens
tactcagtagatgca

SEQ ID NO: 525860 - DNA, 15 bp, Homo sapiens
ctactcagtagatgc

SEQ ID NO: 525861 - DNA, 15 bp, Homo sapiens
gctactcagtagatg

SEQ ID NO: 525862 - DNA, 15 bp, Homo sapiens
agctactcagtagat

SEQ ID NO: 525863 - DNA, 15 bp, Homo sapiens
cagctactcagtaga

SEQ ID NO: 525864 - DNA, 15 bp, Homo sapiens
ccagctactcagtag

SEQ ID NO: 525865 - DNA, 15 bp, Homo sapiens
cccagctactcagta

SEQ ID NO: 525866 - DNA, 15 bp, Homo sapiens
tcccagctactcagt

SEQ ID NO: 525867 - DNA, 15 bp, Homo sapiens
tgtcccagctactca

SEQ ID NO: 525868 - DNA, 15 bp, Homo sapiens
ttgtcccagctactc

SEQ ID NO: 525869 - DNA, 15 bp, Homo sapiens
gttgtcccagctact

SEQ ID NO: 525870 - DNA, 15 bp, Homo sapiens
tgttgtcccagctac

SEQ ID NO: 525871 - DNA, 15 bp, Homo sapiens
ctgttgtcccagcta

SEQ ID NO: 525872 - DNA, 15 bp, Homo sapiens
actgttgtcccagct

SEQ ID NO: 525873 - DNA, 15 bp, Homo sapiens
cactgttgtcccagc

SEQ ID NO: 525874 - DNA, 15 bp, Homo sapiens
acactgttgtcccag

SEQ ID NO: 525875 - DNA, 15 bp, Homo sapiens
cacactgttgtccca

SEQ ID NO: 525876 - DNA, 15 bp, Homo sapiens
acacactgttgtccc

SEQ ID NO: 525877 - DNA, 15 bp, Homo sapiens
cacacactgttgtcc

SEQ ID NO: 525878 - DNA, 15 bp, Homo sapiens
gcacacactgttgtc

SEQ ID NO: 525879 - DNA, 15 bp, Homo sapiens
ggcacacactgttgt

SEQ ID NO: 525880 - DNA, 15 bp, Homo sapiens
tggcacacactgttg

SEQ ID NO: 525881 - DNA, 15 bp, Homo sapiens
gtggcacacactgtt

SEQ ID NO: 525882 - DNA, 15 bp, Homo sapiens
tgtggcacacactgt

SEQ ID NO: 525883 - DNA, 15 bp, Homo sapiens
gtgtggcacacactg

SEQ ID NO: 525884 - DNA, 15 bp, Homo sapiens
ggtgtggcacacact

SEQ ID NO: 525885 - DNA, 15 bp, Homo sapiens
cggtgtggcacacac

SEQ ID NO: 525886 - DNA, 15 bp, Homo sapiens
ccggtgtggcacaca

SEQ ID NO: 525887 - DNA, 15 bp, Homo sapiens
cccggtgtggcacac

SEQ ID NO: 525888 - DNA, 15 bp, Homo sapiens
gcccggtgtggcaca

SEQ ID NO: 525889 - DNA, 15 bp, Homo sapiens
agcccggtgtggcac

SEQ ID NO: 525890 - DNA, 15 bp, Homo sapiens
aagcccggtgtggca

SEQ ID NO: 525891 - DNA, 15 bp, Homo sapiens
aaagcccggtgtggc

SEQ ID NO: 525892 - DNA, 15 bp, Homo sapiens
aaaagcccggtgtgg

SEQ ID NO: 525893 - DNA, 15 bp, Homo sapiens
aaaaagcccggtgtg

SEQ ID NO: 525894 - DNA, 15 bp, Homo sapiens
aaaaaagcccggtgt

SEQ ID NO: 525895 - DNA, 15 bp, Homo sapiens
aaaaaaagcccggtg

SEQ ID NO: 525896 - DNA, 15 bp, Homo sapiens
aaaaaaaagcccggt

SEQ ID NO: 525897 - DNA, 15 bp, Homo sapiens
aaaaaaaaagcccgg

SEQ ID NO: 525898 - DNA, 15 bp, Homo sapiens
aaaaaaaaaagcccg

SEQ ID NO: 525899 - DNA, 15 bp, Homo sapiens
aaaaaaaaaaagccc

SEQ ID NO: 525900 - DNA, 15 bp, Homo sapiens
caaaaaaaaaaagcc

SEQ ID NO: 525901 - DNA, 15 bp, Homo sapiens
acaaaaaaaaaaagc

SEQ ID NO: 525902 - DNA, 15 bp, Homo sapiens
tacaaaaaaaaaaag

SEQ ID NO: 525903 - DNA, 15 bp, Homo sapiens
ctacaaaaaaaaaaa

SEQ ID NO: 525904 - DNA, 15 bp, Homo sapiens
gctacaaaaaaaaaa

SEQ ID NO: 525905 - DNA, 15 bp, Homo sapiens
cgctacaaaaaaaaa

SEQ ID NO: 525906 - DNA, 15 bp, Homo sapiens
ccgctacaaaaaaaa

SEQ ID NO: 525907 - DNA, 15 bp, Homo sapiens
cccgctacaaaaaaa

SEQ ID NO: 525908 - DNA, 15 bp, Homo sapiens
ccccgctacaaaaaa

SEQ ID NO: 525909 - DNA, 15 bp, Homo sapiens
tccccgctacaaaaa

SEQ ID NO: 525910 - DNA, 15 bp, Homo sapiens
ctccccgctacaaaa

SEQ ID NO: 525911 - DNA, 15 bp, Homo sapiens
actccccgctacaaa

SEQ ID NO: 525912 - DNA, 15 bp, Homo sapiens
aactccccgctacaa

SEQ ID NO: 525913 - DNA, 15 bp, Homo sapiens
aaactccccgctaca

SEQ ID NO: 525914 - DNA, 15 bp, Homo sapiens
gaaactccccgctac

SEQ ID NO: 525915 - DNA, 15 bp, Homo sapiens
tgaaactccccgcta

SEQ ID NO: 525916 - DNA, 15 bp, Homo sapiens
gtgaaactccccgct

SEQ ID NO: 525917 - DNA, 15 bp, Homo sapiens
ggtgaaactccccgc

SEQ ID NO: 525918 - DNA, 15 bp, Homo sapiens
tggtgaaactccccg

SEQ ID NO: 525919 - DNA, 15 bp, Homo sapiens
atggtgaaactcccc

SEQ ID NO: 525920 - DNA, 15 bp, Homo sapiens
catggtgaaactccc

SEQ ID NO: 525921 - DNA, 15 bp, Homo sapiens
acatggtgaaactcc

SEQ ID NO: 525922 - DNA, 15 bp, Homo sapiens
aacatggtgaaactc

SEQ ID NO: 525923 - DNA, 15 bp, Homo sapiens
caacatggtgaaact

SEQ ID NO: 525924 - DNA, 15 bp, Homo sapiens
cctgggcaacatggt

SEQ ID NO: 525925 - DNA, 15 bp, Homo sapiens
acctgggcaacatgg

SEQ ID NO: 525926 - DNA, 15 bp, Homo sapiens
aacctgggcaacatg

SEQ ID NO: 525927 - DNA, 15 bp, Homo sapiens
caacctgggcaacat

SEQ ID NO: 525928 - DNA, 15 bp, Homo sapiens
ccaacctgggcaaca

SEQ ID NO: 525929 - DNA, 15 bp, Homo sapiens
accaacctgggcaac

SEQ ID NO: 525930 - DNA, 15 bp, Homo sapiens
gaccaacctgggcaa

SEQ ID NO: 525931 - DNA, 15 bp, Homo sapiens
ggaccaacctgggca

SEQ ID NO: 525932 - DNA, 15 bp, Homo sapiens
gggaccaacctgggc

SEQ ID NO: 525933 - DNA, 15 bp, Homo sapiens
tgggaccaacctggg

SEQ ID NO: 525934 - DNA, 15 bp, Homo sapiens
ttgggaccaacctgg

SEQ ID NO: 525935 - DNA, 15 bp, Homo sapiens
tttgggaccaacctg

SEQ ID NO: 525936 - DNA, 15 bp, Homo sapiens
gtttgggaccaacct

SEQ ID NO: 525937 - DNA, 15 bp, Homo sapiens
agtttgggaccaacc

SEQ ID NO: 525938 - DNA, 15 bp, Homo sapiens
gagtttgggaccaac

SEQ ID NO: 525939 - DNA, 15 bp, Homo sapiens
ggagtttgggaccaa

SEQ ID NO: 525940 - DNA, 15 bp, Homo sapiens
aggagtttgggacca

SEQ ID NO: 525941 - DNA, 15 bp, Homo sapiens
caggagtttgggacc

SEQ ID NO: 525942 - DNA, 15 bp, Homo sapiens
ccaggagtttgggac

SEQ ID NO: 525943 - DNA, 15 bp, Homo sapiens
gccaggagtttggga

SEQ ID NO: 525944 - DNA, 15 bp, Homo sapiens
ggccaggagtttggg

SEQ ID NO: 525945 - DNA, 15 bp, Homo sapiens
aggccaggagtttgg

SEQ ID NO: 525946 - DNA, 15 bp, Homo sapiens
gaggccaggagtttg

SEQ ID NO: 525947 - DNA, 15 bp, Homo sapiens
tgaggccaggagttt

SEQ ID NO: 525948 - DNA, 15 bp, Homo sapiens
ctgaggccaggagtt

SEQ ID NO: 525949 - DNA, 15 bp, Homo sapiens
cctgaggccaggagt

SEQ ID NO: 525950 - DNA, 15 bp, Homo sapiens
gcctgaggccaggag

SEQ ID NO: 525951 - DNA, 15 bp, Homo sapiens
cgcctgaggccagga

SEQ ID NO: 525952 - DNA, 15 bp, Homo sapiens
acgcctgaggccagg

SEQ ID NO: 525953 - DNA, 15 bp, Homo sapiens
aacgcctgaggccag

SEQ ID NO: 525954 - DNA, 15 bp, Homo sapiens
gaacgcctgaggcca

SEQ ID NO: 525955 - DNA, 15 bp, Homo sapiens
ggaacgcctgaggcc

SEQ ID NO: 525956 - DNA, 15 bp, Homo sapiens
tggaacgcctgaggc

SEQ ID NO: 525957 - DNA, 15 bp, Homo sapiens
gtggaacgcctgagg

SEQ ID NO: 525958 - DNA, 15 bp, Homo sapiens
ggtggaacgcctgag

SEQ ID NO: 525959 - DNA, 15 bp, Homo sapiens
tggtggaacgcctga

SEQ ID NO: 525960 - DNA, 15 bp, Homo sapiens
ctggtggaacgcctg

SEQ ID NO: 525961 - DNA, 15 bp, Homo sapiens
gctggtggaacgcct

SEQ ID NO: 525962 - DNA, 15 bp, Homo sapiens
ggctggtggaacgcc

SEQ ID NO: 525963 - DNA, 15 bp, Homo sapiens
aggctggtggaacgc

SEQ ID NO: 525964 - DNA, 15 bp, Homo sapiens
gaggctggtggaacg

SEQ ID NO: 525965 - DNA, 15 bp, Homo sapiens
tgaggctggtggaac

SEQ ID NO: 525966 - DNA, 15 bp, Homo sapiens
ctgaggctggtggaa

SEQ ID NO: 525967 - DNA, 15 bp, Homo sapiens
actgaggctggtgga

SEQ ID NO: 525968 - DNA, 15 bp, Homo sapiens
gactgaggctggtgg

SEQ ID NO: 525969 - DNA, 15 bp, Homo sapiens
agactgaggctggtg

SEQ ID NO: 525970 - DNA, 15 bp, Homo sapiens
gagactgaggctggt

SEQ ID NO: 525971 - DNA, 15 bp, Homo sapiens
ggagactgaggctgg

SEQ ID NO: 525972 - DNA, 15 bp, Homo sapiens
gggagactgaggctg

SEQ ID NO: 525973 - DNA, 15 bp, Homo sapiens
tgggagactgaggct

SEQ ID NO: 525974 - DNA, 15 bp, Homo sapiens
ttgggagactgaggc

SEQ ID NO: 525975 - DNA, 15 bp, Homo sapiens
tttgggagactgagg

SEQ ID NO: 525976 - DNA, 15 bp, Homo sapiens
ctttgggagactgag

SEQ ID NO: 525977 - DNA, 15 bp, Homo sapiens
gctttgggagactga

SEQ ID NO: 525978 - DNA, 15 bp, Homo sapiens
ggctttgggagactg

SEQ ID NO: 525979 - DNA, 15 bp, Homo sapiens
gggctttgggagact

SEQ ID NO: 525980 - DNA, 15 bp, Homo sapiens
tgggctttgggagac

SEQ ID NO: 525981 - DNA, 15 bp, Homo sapiens
ttgggctttgggaga

SEQ ID NO: 525982 - DNA, 15 bp, Homo sapiens
tttgggctttgggag

SEQ ID NO: 525983 - DNA, 15 bp, Homo sapiens
ctttgggctttggga

SEQ ID NO: 525984 - DNA, 15 bp, Homo sapiens
actttgggctttggg

SEQ ID NO: 525985 - DNA, 15 bp, Homo sapiens
cactttgggctttgg

SEQ ID NO: 525986 - DNA, 15 bp, Homo sapiens
gcactttgggctttg

SEQ ID NO: 525987 - DNA, 15 bp, Homo sapiens
agcactttgggcttt

SEQ ID NO: 525988 - DNA, 15 bp, Homo sapiens
tagcactttgggctt

SEQ ID NO: 525989 - DNA, 15 bp, Homo sapiens
ctagcactttgggct

SEQ ID NO: 525990 - DNA, 15 bp, Homo sapiens
cctagcactttgggc

SEQ ID NO: 525991 - DNA, 15 bp, Homo sapiens
tcctagcactttggg

SEQ ID NO: 525992 - DNA, 15 bp, Homo sapiens
atcctagcactttgg

SEQ ID NO: 525993 - DNA, 15 bp, Homo sapiens
aatcctagcactttg

SEQ ID NO: 525994 - DNA, 15 bp, Homo sapiens
taatcctagcacttt

SEQ ID NO: 525995 - DNA, 15 bp, Homo sapiens
gtaatcctagcactt

SEQ ID NO: 525996 - DNA, 15 bp, Homo sapiens
tgtaatcctagcact

SEQ ID NO: 525997 - DNA, 15 bp, Homo sapiens
ctgtaatcctagcac

SEQ ID NO: 525998 - DNA, 15 bp, Homo sapiens
cctgtaatcctagca

SEQ ID NO: 525999 - DNA, 15 bp, Homo sapiens
gcctgtaatcctagc

SEQ ID NO: 526000 - DNA, 15 bp, Homo sapiens
tgcctgtaatcctag

SEQ ID NO: 526001 - DNA, 15 bp, Homo sapiens
atgcctgtaatccta

SEQ ID NO: 526002 - DNA, 15 bp, Homo sapiens
catgcctgtaatcct

SEQ ID NO: 526003 - DNA, 15 bp, Homo sapiens
tcatgcctgtaatcc

SEQ ID NO: 526004 - DNA, 15 bp, Homo sapiens
ctcatgcctgtaatc

SEQ ID NO: 526005 - DNA, 15 bp, Homo sapiens
gctcatgcctgtaat

SEQ ID NO: 526006 - DNA, 15 bp, Homo sapiens
ggctcatgcctgtaa

SEQ ID NO: 526007 - DNA, 15 bp, Homo sapiens
tggctcatgcctgta

SEQ ID NO: 526008 - DNA, 15 bp, Homo sapiens
gtggctcatgcctgt

SEQ ID NO: 526009 - DNA, 15 bp, Homo sapiens
ggtggctcatgcctg

SEQ ID NO: 526010 - DNA, 15 bp, Homo sapiens
cggtggctcatgcct

SEQ ID NO: 526011 - DNA, 15 bp, Homo sapiens
gcggtggctcatgcc

SEQ ID NO: 526012 - DNA, 15 bp, Homo sapiens
cgcggtggctcatgc

SEQ ID NO: 526013 - DNA, 15 bp, Homo sapiens
gcgcggtggctcatg

SEQ ID NO: 526014 - DNA, 15 bp, Homo sapiens
ggcgcggtggctcat

SEQ ID NO: 526015 - DNA, 15 bp, Homo sapiens
tgggcgcggtggctc

SEQ ID NO: 526016 - DNA, 15 bp, Homo sapiens
ctgggcgcggtggct

SEQ ID NO: 526017 - DNA, 15 bp, Homo sapiens
gctgggcgcggtggc

SEQ ID NO: 526018 - DNA, 15 bp, Homo sapiens
ggctgggcgcggtgg

SEQ ID NO: 526019 - DNA, 15 bp, Homo sapiens
aggctgggcgcggtg

SEQ ID NO: 526020 - DNA, 15 bp, Homo sapiens
aaggctgggcgcggt

SEQ ID NO: 526021 - DNA, 15 bp, Homo sapiens
taaggctgggcgcgg

SEQ ID NO: 526022 - DNA, 15 bp, Homo sapiens
ttaaggctgggcgcg

SEQ ID NO: 526023 - DNA, 15 bp, Homo sapiens
tttaaggctgggcgc

SEQ ID NO: 526024 - DNA, 15 bp, Homo sapiens
ttttaaggctgggcg

SEQ ID NO: 526025 - DNA, 15 bp, Homo sapiens
cttttaaggctgggc

SEQ ID NO: 526026 - DNA, 15 bp, Homo sapiens
tcttttaaggctggg

SEQ ID NO: 526027 - DNA, 15 bp, Homo sapiens
atcttttaaggctgg

SEQ ID NO: 526028 - DNA, 15 bp, Homo sapiens
aatcttttaaggctg

SEQ ID NO: 526029 - DNA, 15 bp, Homo sapiens
aaatcttttaaggct

SEQ ID NO: 526030 - DNA, 15 bp, Homo sapiens
aaaatcttttaaggc

SEQ ID NO: 526031 - DNA, 15 bp, Homo sapiens
aaaaatcttttaagg

SEQ ID NO: 526032 - DNA, 15 bp, Homo sapiens
aaaaaatcttttaag

SEQ ID NO: 526033 - DNA, 15 bp, Homo sapiens
gaaaaaatcttttaa

SEQ ID NO: 526034 - DNA, 15 bp, Homo sapiens
tgaaaaaatctttta

SEQ ID NO: 526035 - DNA, 15 bp, Homo sapiens
ctgaaaaaatctttt

SEQ ID NO: 526036 - DNA, 15 bp, Homo sapiens
tctgaaaaaatcttt

SEQ ID NO: 526037 - DNA, 15 bp, Homo sapiens
gtctgaaaaaatctt

SEQ ID NO: 526038 - DNA, 15 bp, Homo sapiens
agtctgaaaaaatct

SEQ ID NO: 526039 - DNA, 15 bp, Homo sapiens
aagtctgaaaaaatc

SEQ ID NO: 526040 - DNA, 15 bp, Homo sapiens
aaagtctgaaaaaat

SEQ ID NO: 526041 - DNA, 15 bp, Homo sapiens
aaaagtctgaaaaaa

SEQ ID NO: 526042 - DNA, 15 bp, Homo sapiens
aaaaagtctgaaaaa

SEQ ID NO: 526043 - DNA, 15 bp, Homo sapiens
aaaaaagtctgaaaa

SEQ ID NO: 526044 - DNA, 15 bp, Homo sapiens
aaaaaaagtctgaaa

SEQ ID NO: 526045 - DNA, 15 bp, Homo sapiens
gaaaaaaagtctgaa

SEQ ID NO: 526046 - DNA, 15 bp, Homo sapiens
tgaaaaaaagtctga

SEQ ID NO: 526047 - DNA, 15 bp, Homo sapiens
ctgaaaaaaagtctg

SEQ ID NO: 526048 - DNA, 15 bp, Homo sapiens
actgaaaaaaagtct

SEQ ID NO: 526049 - DNA, 15 bp, Homo sapiens
cactgaaaaaaagtc

SEQ ID NO: 526050 - DNA, 15 bp, Homo sapiens
acactgaaaaaaagt

SEQ ID NO: 526051 - DNA, 15 bp, Homo sapiens
gacactgaaaaaaag

SEQ ID NO: 526052 - DNA, 15 bp, Homo sapiens
agacactgaaaaaaa

SEQ ID NO: 526053 - DNA, 15 bp, Homo sapiens
aagacactgaaaaaa

SEQ ID NO: 526054 - DNA, 15 bp, Homo sapiens
aaagacactgaaaaa

SEQ ID NO: 526055 - DNA, 15 bp, Homo sapiens
aaaagacactgaaaa

SEQ ID NO: 526056 - DNA, 15 bp, Homo sapiens
aaaaagacactgaaa

SEQ ID NO: 526057 - DNA, 15 bp, Homo sapiens
taaaaagacactgaa

SEQ ID NO: 526058 - DNA, 15 bp, Homo sapiens
gtaaaaagacactga

SEQ ID NO: 526059 - DNA, 15 bp, Homo sapiens
agtaaaaagacactg

SEQ ID NO: 526060 - DNA, 15 bp, Homo sapiens
aagtaaaaagacact

SEQ ID NO: 526061 - DNA, 15 bp, Homo sapiens
taagtaaaaagacac

SEQ ID NO: 526062 - DNA, 15 bp, Homo sapiens
ttaagtaaaaagaca

SEQ ID NO: 526063 - DNA, 15 bp, Homo sapiens
attaagtaaaaagac

SEQ ID NO: 526064 - DNA, 15 bp, Homo sapiens
cattaagtaaaaaga

SEQ ID NO: 526065 - DNA, 15 bp, Homo sapiens
tcattaagtaaaaag

SEQ ID NO: 526066 - DNA, 15 bp, Homo sapiens
ttcattaagtaaaaa

SEQ ID NO: 526067 - DNA, 15 bp, Homo sapiens
tttcattaagtaaaa

SEQ ID NO: 526068 - DNA, 15 bp, Homo sapiens
ttttcattaagtaaa

SEQ ID NO: 526069 - DNA, 15 bp, Homo sapiens
gttttcattaagtaa

SEQ ID NO: 526070 - DNA, 15 bp, Homo sapiens
cgttttcattaagta

SEQ ID NO: 526071 - DNA, 15 bp, Homo sapiens
tcgttttcattaagt

SEQ ID NO: 526072 - DNA, 15 bp, Homo sapiens
ctcgttttcattaag

SEQ ID NO: 526073 - DNA, 15 bp, Homo sapiens
tctcgttttcattaa

SEQ ID NO: 526074 - DNA, 15 bp, Homo sapiens
gtctcgttttcatta

SEQ ID NO: 526075 - DNA, 15 bp, Homo sapiens
tgtctcgttttcatt

SEQ ID NO: 526076 - DNA, 15 bp, Homo sapiens
ctgtctcgttttcat

SEQ ID NO: 526077 - DNA, 15 bp, Homo sapiens
actgtctcgttttca

SEQ ID NO: 526078 - DNA, 15 bp, Homo sapiens
aactgtctcgttttc

SEQ ID NO: 526079 - DNA, 15 bp, Homo sapiens
caactgtctcgtttt

SEQ ID NO: 526080 - DNA, 15 bp, Homo sapiens
gcaactgtctcgttt

SEQ ID NO: 526081 - DNA, 15 bp, Homo sapiens
tgcaactgtctcgtt

SEQ ID NO: 526082 - DNA, 15 bp, Homo sapiens
ctgcaactgtctcgt

SEQ ID NO: 526083 - DNA, 15 bp, Homo sapiens
actgcaactgtctcg

SEQ ID NO: 526084 - DNA, 15 bp, Homo sapiens
aactgcaactgtctc

SEQ ID NO: 526085 - DNA, 15 bp, Homo sapiens
taactgcaactgtct

SEQ ID NO: 526086 - DNA, 15 bp, Homo sapiens
gtaactgcaactgtc

SEQ ID NO: 526087 - DNA, 15 bp, Homo sapiens
ggtaactgcaactgt

SEQ ID NO: 526088 - DNA, 15 bp, Homo sapiens
gggtaactgcaactg

SEQ ID NO: 526089 - DNA, 15 bp, Homo sapiens
agggtaactgcaact

SEQ ID NO: 526090 - DNA, 15 bp, Homo sapiens
cagggtaactgcaac

SEQ ID NO: 526091 - DNA, 15 bp, Homo sapiens
acagggtaactgcaa

SEQ ID NO: 526092 - DNA, 15 bp, Homo sapiens
gacagggtaactgca

SEQ ID NO: 526093 - DNA, 15 bp, Homo sapiens
agacagggtaactgc

SEQ ID NO: 526094 - DNA, 15 bp, Homo sapiens
tagacagggtaactg

SEQ ID NO: 526095 - DNA, 15 bp, Homo sapiens
ttagacagggtaact

SEQ ID NO: 526096 - DNA, 15 bp, Homo sapiens
tttagacagggtaac

SEQ ID NO: 526097 - DNA, 15 bp, Homo sapiens
ttttagacagggtaa

SEQ ID NO: 526098 - DNA, 15 bp, Homo sapiens
cttttagacagggta

SEQ ID NO: 526099 - DNA, 15 bp, Homo sapiens
ccttttagacagggt

SEQ ID NO: 526100 - DNA, 15 bp, Homo sapiens
cccttttagacaggg

SEQ ID NO: 526101 - DNA, 15 bp, Homo sapiens
acccttttagacagg

SEQ ID NO: 526102 - DNA, 15 bp, Homo sapiens
aacccttttagacag

SEQ ID NO: 526103 - DNA, 15 bp, Homo sapiens
aaacccttttagaca

SEQ ID NO: 526104 - DNA, 15 bp, Homo sapiens
aaaacccttttagac

SEQ ID NO: 526105 - DNA, 15 bp, Homo sapiens
aaaaacccttttaga

SEQ ID NO: 526106 - DNA, 15 bp, Homo sapiens
aaaaaacccttttag

SEQ ID NO: 526107 - DNA, 15 bp, Homo sapiens
gaaaaaaccctttta

SEQ ID NO: 526108 - DNA, 15 bp, Homo sapiens
ggaaaaaaccctttt

SEQ ID NO: 526109 - DNA, 15 bp, Homo sapiens
aggaaaaaacccttt

SEQ ID NO: 526110 - DNA, 15 bp, Homo sapiens
gaggaaaaaaccctt

SEQ ID NO: 526111 - DNA, 15 bp, Homo sapiens
agaggaaaaaaccct

SEQ ID NO: 526112 - DNA, 15 bp, Homo sapiens
tagaggaaaaaaccc

SEQ ID NO: 526113 - DNA, 15 bp, Homo sapiens
ctagaggaaaaaacc

SEQ ID NO: 526114 - DNA, 15 bp, Homo sapiens
tctagaggaaaaaac

SEQ ID NO: 526115 - DNA, 15 bp, Homo sapiens
ctctagaggaaaaaa

SEQ ID NO: 526116 - DNA, 15 bp, Homo sapiens
tctctagaggaaaaa

SEQ ID NO: 526117 - DNA, 15 bp, Homo sapiens
ttctctagaggaaaa

SEQ ID NO: 526118 - DNA, 15 bp, Homo sapiens
cttctctagaggaaa

SEQ ID NO: 526119 - DNA, 15 bp, Homo sapiens
tcttctctagaggaa

SEQ ID NO: 526120 - DNA, 15 bp, Homo sapiens
gtcttctctagagga

SEQ ID NO: 526121 - DNA, 15 bp, Homo sapiens
cgtcttctctagagg

SEQ ID NO: 526122 - DNA, 15 bp, Homo sapiens
ccgtcttctctagag

SEQ ID NO: 526123 - DNA, 15 bp, Homo sapiens
accgtcttctctaga

SEQ ID NO: 526124 - DNA, 15 bp, Homo sapiens
caccgtcttctctag

SEQ ID NO: 526125 - DNA, 15 bp, Homo sapiens
ccaccgtcttctcta

SEQ ID NO: 526126 - DNA, 15 bp, Homo sapiens
cccaccgtcttctct

SEQ ID NO: 526127 - DNA, 15 bp, Homo sapiens
gcccaccgtcttctc

SEQ ID NO: 526128 - DNA, 15 bp, Homo sapiens
agcccaccgtcttct

SEQ ID NO: 526129 - DNA, 15 bp, Homo sapiens
tagcccaccgtcttc

SEQ ID NO: 526130 - DNA, 15 bp, Homo sapiens
ctagcccaccgtctt

SEQ ID NO: 526131 - DNA, 15 bp, Homo sapiens
tctagcccaccgtct

SEQ ID NO: 526132 - DNA, 15 bp, Homo sapiens
atctagcccaccgtc

SEQ ID NO: 526133 - DNA, 15 bp, Homo sapiens
catctagcccaccgt

SEQ ID NO: 526134 - DNA, 15 bp, Homo sapiens
acatctagcccaccg

SEQ ID NO: 526135 - DNA, 15 bp, Homo sapiens
gacatctagcccacc

SEQ ID NO: 526136 - DNA, 15 bp, Homo sapiens
tgacatctagcccac

SEQ ID NO: 526137 - DNA, 15 bp, Homo sapiens
ctgacatctagccca

SEQ ID NO: 526138 - DNA, 15 bp, Homo sapiens
tctgacatctagccc

SEQ ID NO: 526139 - DNA, 15 bp, Homo sapiens
ttctgacatctagcc

SEQ ID NO: 526140 - DNA, 15 bp, Homo sapiens
gttctgacatctagc

SEQ ID NO: 526141 - DNA, 15 bp, Homo sapiens
ggttctgacatctag

SEQ ID NO: 526142 - DNA, 15 bp, Homo sapiens
aggttctgacatcta

SEQ ID NO: 526143 - DNA, 15 bp, Homo sapiens
caggttctgacatct

SEQ ID NO: 526144 - DNA, 15 bp, Homo sapiens
ccaggttctgacatc

SEQ ID NO: 526145 - DNA, 15 bp, Homo sapiens
tccaggttctgacat

SEQ ID NO: 526146 - DNA, 15 bp, Homo sapiens
atccaggttctgaca

SEQ ID NO: 526147 - DNA, 15 bp, Homo sapiens
aatccaggttctgac

SEQ ID NO: 526148 - DNA, 15 bp, Homo sapiens
aaatccaggttctga

SEQ ID NO: 526149 - DNA, 15 bp, Homo sapiens
caaatccaggttctg

SEQ ID NO: 526150 - DNA, 15 bp, Homo sapiens
acaaatccaggttct

SEQ ID NO: 526151 - DNA, 15 bp, Homo sapiens
gacaaatccaggttc

SEQ ID NO: 526152 - DNA, 15 bp, Homo sapiens
ggacaaatccaggtt

SEQ ID NO: 526153 - DNA, 15 bp, Homo sapiens
aggacaaatccaggt

SEQ ID NO: 526154 - DNA, 15 bp, Homo sapiens
caggacaaatccagg

SEQ ID NO: 526155 - DNA, 15 bp, Homo sapiens
acaggacaaatccag

SEQ ID NO: 526156 - DNA, 15 bp, Homo sapiens
cacaggacaaatcca

SEQ ID NO: 526157 - DNA, 15 bp, Homo sapiens
gcacaggacaaatcc

SEQ ID NO: 526158 - DNA, 15 bp, Homo sapiens
ggcacaggacaaatc

SEQ ID NO: 526159 - DNA, 15 bp, Homo sapiens
aggcacaggacaaat

SEQ ID NO: 526160 - DNA, 15 bp, Homo sapiens
gaggcacaggacaaa

SEQ ID NO: 526161 - DNA, 15 bp, Homo sapiens
agaggcacaggacaa

SEQ ID NO: 526162 - DNA, 15 bp, Homo sapiens
cagaggcacaggaca

SEQ ID NO: 526163 - DNA, 15 bp, Homo sapiens
tcagaggcacaggac

SEQ ID NO: 526164 - DNA, 15 bp, Homo sapiens
gtcagaggcacagga

SEQ ID NO: 526165 - DNA, 15 bp, Homo sapiens
tgtcagaggcacagg

SEQ ID NO: 526166 - DNA, 15 bp, Homo sapiens
atgtcagaggcacag

SEQ ID NO: 526167 - DNA, 15 bp, Homo sapiens
gatgtcagaggcaca

SEQ ID NO: 526168 - DNA, 15 bp, Homo sapiens
agatgtcagaggcac

SEQ ID NO: 526169 - DNA, 15 bp, Homo sapiens
aagatgtcagaggca

SEQ ID NO: 526170 - DNA, 15 bp, Homo sapiens
caagatgtcagaggc

SEQ ID NO: 526171 - DNA, 15 bp, Homo sapiens
gcaagatgtcagagg

SEQ ID NO: 526172 - DNA, 15 bp, Homo sapiens
cgcaagatgtcagag

SEQ ID NO: 526173 - DNA, 15 bp, Homo sapiens
gcgcaagatgtcaga

SEQ ID NO: 526174 - DNA, 15 bp, Homo sapiens
tgcgcaagatgtcag

SEQ ID NO: 526175 - DNA, 15 bp, Homo sapiens
gtgcgcaagatgtca

SEQ ID NO: 526176 - DNA, 15 bp, Homo sapiens
tgtgcgcaagatgtc

SEQ ID NO: 526177 - DNA, 15 bp, Homo sapiens
ctgtgcgcaagatgt

SEQ ID NO: 526178 - DNA, 15 bp, Homo sapiens
gctgtgcgcaagatg

SEQ ID NO: 526179 - DNA, 15 bp, Homo sapiens
agctgtgcgcaagat

SEQ ID NO: 526180 - DNA, 15 bp, Homo sapiens
gagctgtgcgcaaga

SEQ ID NO: 526181 - DNA, 15 bp, Homo sapiens
tgagctgtgcgcaag

SEQ ID NO: 526182 - DNA, 15 bp, Homo sapiens
ctgagctgtgcgcaa

SEQ ID NO: 526183 - DNA, 15 bp, Homo sapiens
gctgagctgtgcgca

SEQ ID NO: 526184 - DNA, 15 bp, Homo sapiens
ggctgagctgtgcgc

SEQ ID NO: 526185 - DNA, 15 bp, Homo sapiens
aggctgagctgtgcg

SEQ ID NO: 526186 - DNA, 15 bp, Homo sapiens
caggctgagctgtgc

SEQ ID NO: 526187 - DNA, 15 bp, Homo sapiens
acaggctgagctgtg

SEQ ID NO: 526188 - DNA, 15 bp, Homo sapiens
aacaggctgagctgt

SEQ ID NO: 526189 - DNA, 15 bp, Homo sapiens
aaacaggctgagctg

SEQ ID NO: 526190 - DNA, 15 bp, Homo sapiens
gaaacaggctgagct

SEQ ID NO: 526191 - DNA, 15 bp, Homo sapiens
ggaaacaggctgagc

SEQ ID NO: 526192 - DNA, 15 bp, Homo sapiens
gggaaacaggctgag

SEQ ID NO: 526193 - DNA, 15 bp, Homo sapiens
agggaaacaggctga

SEQ ID NO: 526194 - DNA, 15 bp, Homo sapiens
aagggaaacaggctg

SEQ ID NO: 526195 - DNA, 15 bp, Homo sapiens
aaagggaaacaggct

SEQ ID NO: 526196 - DNA, 15 bp, Homo sapiens
gaaagggaaacaggc

SEQ ID NO: 526197 - DNA, 15 bp, Homo sapiens
agaaagggaaacagg

SEQ ID NO: 526198 - DNA, 15 bp, Homo sapiens
cagaaagggaaacag

SEQ ID NO: 526199 - DNA, 15 bp, Homo sapiens
ccagaaagggaaaca

SEQ ID NO: 526200 - DNA, 15 bp, Homo sapiens
tccagaaagggaaac

SEQ ID NO: 526201 - DNA, 15 bp, Homo sapiens
ttccagaaagggaaa

SEQ ID NO: 526202 - DNA, 15 bp, Homo sapiens
tttccagaaagggaa

SEQ ID NO: 526203 - DNA, 15 bp, Homo sapiens
ctttccagaaaggga

SEQ ID NO: 526204 - DNA, 15 bp, Homo sapiens
actttccagaaaggg

SEQ ID NO: 526205 - DNA, 15 bp, Homo sapiens
cactttccagaaagg

SEQ ID NO: 526206 - DNA, 15 bp, Homo sapiens
tcactttccagaaag

SEQ ID NO: 526207 - DNA, 15 bp, Homo sapiens
ctcactttccagaaa

SEQ ID NO: 526208 - DNA, 15 bp, Homo sapiens
actcactttccagaa

SEQ ID NO: 526209 - DNA, 15 bp, Homo sapiens
aactcactttccaga

SEQ ID NO: 526210 - DNA, 15 bp, Homo sapiens
taactcactttccag

SEQ ID NO: 526211 - DNA, 15 bp, Homo sapiens
ttaactcactttcca

SEQ ID NO: 526212 - DNA, 15 bp, Homo sapiens
cttaactcactttcc

SEQ ID NO: 526213 - DNA, 15 bp, Homo sapiens
tcttaactcactttc

SEQ ID NO: 526214 - DNA, 15 bp, Homo sapiens
gtcttaactcacttt

SEQ ID NO: 526215 - DNA, 15 bp, Homo sapiens
ggtcttaactcactt

SEQ ID NO: 526216 - DNA, 15 bp, Homo sapiens
tggtcttaactcact

SEQ ID NO: 526217 - DNA, 15 bp, Homo sapiens
gtggtcttaactcac

SEQ ID NO: 526218 - DNA, 15 bp, Homo sapiens
cgtggtcttaactca

SEQ ID NO: 526219 - DNA, 15 bp, Homo sapiens
acgtggtcttaactc

SEQ ID NO: 526220 - DNA, 15 bp, Homo sapiens
gacgtggtcttaact

SEQ ID NO: 526221 - DNA, 15 bp, Homo sapiens
tgacgtggtcttaac

SEQ ID NO: 526222 - DNA, 15 bp, Homo sapiens
ctgacgtggtcttaa

SEQ ID NO: 526223 - DNA, 15 bp, Homo sapiens
cctgacgtggtctta

SEQ ID NO: 526224 - DNA, 15 bp, Homo sapiens
tcctgacgtggtctt

SEQ ID NO: 526225 - DNA, 15 bp, Homo sapiens
ttcctgacgtggtct

SEQ ID NO: 526226 - DNA, 15 bp, Homo sapiens
tttcctgacgtggtc

SEQ ID NO: 526227 - DNA, 15 bp, Homo sapiens
atttcctgacgtggt

SEQ ID NO: 526228 - DNA, 15 bp, Homo sapiens
aatttcctgacgtgg

SEQ ID NO: 526229 - DNA, 15 bp, Homo sapiens
gaatttcctgacgtg

SEQ ID NO: 526230 - DNA, 15 bp, Homo sapiens
cgaatttcctgacgt

SEQ ID NO: 526231 - DNA, 15 bp, Homo sapiens
tcgaatttcctgacg

SEQ ID NO: 526232 - DNA, 15 bp, Homo sapiens
ctcgaatttcctgac

SEQ ID NO: 526233 - DNA, 15 bp, Homo sapiens
cctcgaatttcctga

SEQ ID NO: 526234 - DNA, 15 bp, Homo sapiens
tcctcgaatttcctg

SEQ ID NO: 526235 - DNA, 15 bp, Homo sapiens
ttcctcgaatttcct

SEQ ID NO: 526236 - DNA, 15 bp, Homo sapiens
gttcctcgaatttcc

SEQ ID NO: 526237 - DNA, 15 bp, Homo sapiens
agttcctcgaatttc

SEQ ID NO: 526238 - DNA, 15 bp, Homo sapiens
cagttcctcgaattt

SEQ ID NO: 526239 - DNA, 15 bp, Homo sapiens
ccagttcctcgaatt

SEQ ID NO: 526240 - DNA, 15 bp, Homo sapiens
gccagttcctcgaat

SEQ ID NO: 526241 - DNA, 15 bp, Homo sapiens
tgccagttcctcgaa

SEQ ID NO: 526242 - DNA, 15 bp, Homo sapiens
ctgccagttcctcga

SEQ ID NO: 526243 - DNA, 15 bp, Homo sapiens
tctgccagttcctcg

SEQ ID NO: 526244 - DNA, 15 bp, Homo sapiens
atctgccagttcctc

SEQ ID NO: 526245 - DNA, 15 bp, Homo sapiens
catctgccagttcct

SEQ ID NO: 526246 - DNA, 15 bp, Homo sapiens
ccatctgccagttcc

SEQ ID NO: 526247 - DNA, 15 bp, Homo sapiens
cccatctgccagttc

SEQ ID NO: 526248 - DNA, 15 bp, Homo sapiens
ccccatctgccagtt

SEQ ID NO: 526249 - DNA, 15 bp, Homo sapiens
gccccatctgccagt

SEQ ID NO: 526250 - DNA, 15 bp, Homo sapiens
ggccccatctgccag

SEQ ID NO: 526251 - DNA, 15 bp, Homo sapiens
tggccccatctgcca

SEQ ID NO: 526252 - DNA, 15 bp, Homo sapiens
gtggccccatctgcc

SEQ ID NO: 526253 - DNA, 15 bp, Homo sapiens
agtggccccatctgc

SEQ ID NO: 526254 - DNA, 15 bp, Homo sapiens
aagtggccccatctg

SEQ ID NO: 526255 - DNA, 15 bp, Homo sapiens
gaagtggccccatct

SEQ ID NO: 526256 - DNA, 15 bp, Homo sapiens
tgaagtggccccatc

SEQ ID NO: 526257 - DNA, 15 bp, Homo sapiens
atgaagtggccccat

SEQ ID NO: 526258 - DNA, 15 bp, Homo sapiens
catgaagtggcccca

SEQ ID NO: 526259 - DNA, 15 bp, Homo sapiens
acatgaagtggcccc

SEQ ID NO: 526260 - DNA, 15 bp, Homo sapiens
aacatgaagtggccc

SEQ ID NO: 526261 - DNA, 15 bp, Homo sapiens
gaacatgaagtggcc

SEQ ID NO: 526262 - DNA, 15 bp, Homo sapiens
tgaacatgaagtggc

SEQ ID NO: 526263 - DNA, 15 bp, Homo sapiens
gtgaacatgaagtgg

SEQ ID NO: 526264 - DNA, 15 bp, Homo sapiens
tgtgaacatgaagtg

SEQ ID NO: 526265 - DNA, 15 bp, Homo sapiens
atgtgaacatgaagt

SEQ ID NO: 526266 - DNA, 15 bp, Homo sapiens
gatgtgaacatgaag

SEQ ID NO: 526267 - DNA, 15 bp, Homo sapiens
ggatgtgaacatgaa

SEQ ID NO: 526268 - DNA, 15 bp, Homo sapiens
tggatgtgaacatga

SEQ ID NO: 526269 - DNA, 15 bp, Homo sapiens
atggatgtgaacatg

SEQ ID NO: 526270 - DNA, 15 bp, Homo sapiens
gatggatgtgaacat

SEQ ID NO: 526271 - DNA, 15 bp, Homo sapiens
agatggatgtgaaca

SEQ ID NO: 526272 - DNA, 15 bp, Homo sapiens
cagatggatgtgaac

SEQ ID NO: 526273 - DNA, 15 bp, Homo sapiens
acagatggatgtgaa

SEQ ID NO: 526274 - DNA, 15 bp, Homo sapiens
aacagatggatgtga

SEQ ID NO: 526275 - DNA, 15 bp, Homo sapiens
taacagatggatgtg

SEQ ID NO: 526276 - DNA, 15 bp, Homo sapiens
ctaacagatggatgt

SEQ ID NO: 526277 - DNA, 15 bp, Homo sapiens
cctaacagatggatg

SEQ ID NO: 526278 - DNA, 15 bp, Homo sapiens
acctaacagatggat

SEQ ID NO: 526279 - DNA, 15 bp, Homo sapiens
tacctaacagatgga

SEQ ID NO: 526280 - DNA, 15 bp, Homo sapiens
gtacctaacagatgg

SEQ ID NO: 526281 - DNA, 15 bp, Homo sapiens
agtacctaacagatg

SEQ ID NO: 526282 - DNA, 15 bp, Homo sapiens
cagtacctaacagat

SEQ ID NO: 526283 - DNA, 15 bp, Homo sapiens
ccagtacctaacaga

SEQ ID NO: 526284 - DNA, 15 bp, Homo sapiens
cccagtacctaacag

SEQ ID NO: 526285 - DNA, 15 bp, Homo sapiens
ccccagtacctaaca

SEQ ID NO: 526286 - DNA, 15 bp, Homo sapiens
tccccagtacctaac

SEQ ID NO: 526287 - DNA, 15 bp, Homo sapiens
ctccccagtacctaa

SEQ ID NO: 526288 - DNA, 15 bp, Homo sapiens
actccccagtaccta

SEQ ID NO: 526289 - DNA, 15 bp, Homo sapiens
gactccccagtacct

SEQ ID NO: 526290 - DNA, 15 bp, Homo sapiens
tgactccccagtacc

SEQ ID NO: 526291 - DNA, 15 bp, Homo sapiens
atgactccccagtac

SEQ ID NO: 526292 - DNA, 15 bp, Homo sapiens
aatgactccccagta

SEQ ID NO: 526293 - DNA, 15 bp, Homo sapiens
aaatgactccccagt

SEQ ID NO: 526294 - DNA, 15 bp, Homo sapiens
caaatgactccccag

SEQ ID NO: 526295 - DNA, 15 bp, Homo sapiens
ccaaatgactcccca

SEQ ID NO: 526296 - DNA, 15 bp, Homo sapiens
cccaaatgactcccc

SEQ ID NO: 526297 - DNA, 15 bp, Homo sapiens
ccccaaatgactccc

SEQ ID NO: 526298 - DNA, 15 bp, Homo sapiens
tccccaaatgactcc

SEQ ID NO: 526299 - DNA, 15 bp, Homo sapiens
ctccccaaatgactc

SEQ ID NO: 526300 - DNA, 15 bp, Homo sapiens
gctccccaaatgact

SEQ ID NO: 526301 - DNA, 15 bp, Homo sapiens
tgctccccaaatgac

SEQ ID NO: 526302 - DNA, 15 bp, Homo sapiens
ctgctccccaaatga

SEQ ID NO: 526303 - DNA, 15 bp, Homo sapiens
gctgctccccaaatg

SEQ ID NO: 526304 - DNA, 15 bp, Homo sapiens
tgctgctccccaaat

SEQ ID NO: 526305 - DNA, 15 bp, Homo sapiens
ctgctgctccccaaa

SEQ ID NO: 526306 - DNA, 15 bp, Homo sapiens
cctgctgctccccaa

SEQ ID NO: 526307 - DNA, 15 bp, Homo sapiens
tcctgctgctcccca

SEQ ID NO: 526308 - DNA, 15 bp, Homo sapiens
atcctgctgctcccc

SEQ ID NO: 526309 - DNA, 15 bp, Homo sapiens
gatcctgctgctccc

SEQ ID NO: 526310 - DNA, 15 bp, Homo sapiens
agatcctgctgctcc

SEQ ID NO: 526311 - DNA, 15 bp, Homo sapiens
cagatcctgctgctc

SEQ ID NO: 526312 - DNA, 15 bp, Homo sapiens
acagatcctgctgct

SEQ ID NO: 526313 - DNA, 15 bp, Homo sapiens
aacagatcctgctgc

SEQ ID NO: 526314 - DNA, 15 bp, Homo sapiens
caacagatcctgctg

SEQ ID NO: 526315 - DNA, 15 bp, Homo sapiens
gcaacagatcctgct

SEQ ID NO: 526316 - DNA, 15 bp, Homo sapiens
agcaacagatcctgc

SEQ ID NO: 526317 - DNA, 15 bp, Homo sapiens
cagcaacagatcctg

SEQ ID NO: 526318 - DNA, 15 bp, Homo sapiens
tcagcaacagatcct

SEQ ID NO: 526319 - DNA, 15 bp, Homo sapiens
atcagcaacagatcc

SEQ ID NO: 526320 - DNA, 15 bp, Homo sapiens
aatcagcaacagatc

SEQ ID NO: 526321 - DNA, 15 bp, Homo sapiens
caatcagcaacagat

SEQ ID NO: 526322 - DNA, 15 bp, Homo sapiens
ccaatcagcaacaga

SEQ ID NO: 526323 - DNA, 15 bp, Homo sapiens
accaatcagcaacag

SEQ ID NO: 526324 - DNA, 15 bp, Homo sapiens
aaccaatcagcaaca

SEQ ID NO: 526325 - DNA, 15 bp, Homo sapiens
taaccaatcagcaac

SEQ ID NO: 526326 - DNA, 15 bp, Homo sapiens
ctaaccaatcagcaa

SEQ ID NO: 526327 - DNA, 15 bp, Homo sapiens
cctaaccaatcagca

SEQ ID NO: 526328 - DNA, 15 bp, Homo sapiens
gcctaaccaatcagc

SEQ ID NO: 526329 - DNA, 15 bp, Homo sapiens
ggcctaaccaatcag

SEQ ID NO: 526330 - DNA, 15 bp, Homo sapiens
tggcctaaccaatca

SEQ ID NO: 526331 - DNA, 15 bp, Homo sapiens
atggcctaaccaatc

SEQ ID NO: 526332 - DNA, 15 bp, Homo sapiens
aatggcctaaccaat

SEQ ID NO: 526333 - DNA, 15 bp, Homo sapiens
caatggcctaaccaa

SEQ ID NO: 526334 - DNA, 15 bp, Homo sapiens
ccaatggcctaacca

SEQ ID NO: 526335 - DNA, 15 bp, Homo sapiens
accaatggcctaacc

SEQ ID NO: 526336 - DNA, 15 bp, Homo sapiens
gaccaatggcctaac

SEQ ID NO: 526337 - DNA, 15 bp, Homo sapiens
agaccaatggcctaa

SEQ ID NO: 526338 - DNA, 15 bp, Homo sapiens
tagaccaatggccta

SEQ ID NO: 526339 - DNA, 15 bp, Homo sapiens
ctagaccaatggcct

SEQ ID NO: 526340 - DNA, 15 bp, Homo sapiens
cctagaccaatggcc

SEQ ID NO: 526341 - DNA, 15 bp, Homo sapiens
ccctagaccaatggc

SEQ ID NO: 526342 - DNA, 15 bp, Homo sapiens
tccctagaccaatgg

SEQ ID NO: 526343 - DNA, 15 bp, Homo sapiens
ctccctagaccaatg

SEQ ID NO: 526344 - DNA, 15 bp, Homo sapiens
actccctagaccaat

SEQ ID NO: 526345 - DNA, 15 bp, Homo sapiens
gactccctagaccaa

SEQ ID NO: 526346 - DNA, 15 bp, Homo sapiens
ggactccctagacca

SEQ ID NO: 526347 - DNA, 15 bp, Homo sapiens
aggactccctagacc

SEQ ID NO: 526348 - DNA, 15 bp, Homo sapiens
caggactccctagac

SEQ ID NO: 526349 - DNA, 15 bp, Homo sapiens
ccaggactccctaga

SEQ ID NO: 526350 - DNA, 15 bp, Homo sapiens
cccaggactccctag

SEQ ID NO: 526351 - DNA, 15 bp, Homo sapiens
ccccaggactcccta

SEQ ID NO: 526352 - DNA, 15 bp, Homo sapiens
cccccaggactccct

SEQ ID NO: 526353 - DNA, 15 bp, Homo sapiens
gcccccaggactccc

SEQ ID NO: 526354 - DNA, 15 bp, Homo sapiens
ggcccccaggactcc

SEQ ID NO: 526355 - DNA, 15 bp, Homo sapiens
gggcccccaggactc

SEQ ID NO: 526356 - DNA, 15 bp, Homo sapiens
agggcccccaggact

SEQ ID NO: 526357 - DNA, 15 bp, Homo sapiens
aagggcccccaggac

SEQ ID NO: 526358 - DNA, 15 bp, Homo sapiens
gaagggcccccagga

SEQ ID NO: 526359 - DNA, 15 bp, Homo sapiens
ggaagggcccccagg

SEQ ID NO: 526360 - DNA, 15 bp, Homo sapiens
gggaagggcccccag

SEQ ID NO: 526361 - DNA, 15 bp, Homo sapiens
tgggaagggccccca

SEQ ID NO: 526362 - DNA, 15 bp, Homo sapiens
atgggaagggccccc

SEQ ID NO: 526363 - DNA, 15 bp, Homo sapiens
gatgggaagggcccc

SEQ ID NO: 526364 - DNA, 15 bp, Homo sapiens
ggatgggaagggccc

SEQ ID NO: 526365 - DNA, 15 bp, Homo sapiens
tggatgggaagggcc

SEQ ID NO: 526366 - DNA, 15 bp, Homo sapiens
ctggatgggaagggc

SEQ ID NO: 526367 - DNA, 15 bp, Homo sapiens
gctggatgggaaggg

SEQ ID NO: 526368 - DNA, 15 bp, Homo sapiens
agctggatgggaagg

SEQ ID NO: 526369 - DNA, 15 bp, Homo sapiens
gagctggatgggaag

SEQ ID NO: 526370 - DNA, 15 bp, Homo sapiens
ggagctggatgggaa

SEQ ID NO: 526371 - DNA, 15 bp, Homo sapiens
tggagctggatggga

SEQ ID NO: 526372 - DNA, 15 bp, Homo sapiens
ctggagctggatggg

SEQ ID NO: 526373 - DNA, 15 bp, Homo sapiens
cctggagctggatgg

SEQ ID NO: 526374 - DNA, 15 bp, Homo sapiens
gcctggagctggatg

SEQ ID NO: 526375 - DNA, 15 bp, Homo sapiens
tgcctggagctggat

SEQ ID NO: 526376 - DNA, 15 bp, Homo sapiens
ttgcctggagctgga

SEQ ID NO: 526377 - DNA, 15 bp, Homo sapiens
attgcctggagctgg

SEQ ID NO: 526378 - DNA, 15 bp, Homo sapiens
cattgcctggagctg

SEQ ID NO: 526379 - DNA, 15 bp, Homo sapiens
tcattgcctggagct

SEQ ID NO: 526380 - DNA, 15 bp, Homo sapiens
gtcattgcctggagc

SEQ ID NO: 526381 - DNA, 15 bp, Homo sapiens
cgtcattgcctggag

SEQ ID NO: 526382 - DNA, 15 bp, Homo sapiens
gcgtcattgcctgga

SEQ ID NO: 526383 - DNA, 15 bp, Homo sapiens
agcgtcattgcctgg

SEQ ID NO: 526384 - DNA, 15 bp, Homo sapiens
aagcgtcattgcctg

SEQ ID NO: 526385 - DNA, 15 bp, Homo sapiens
aaagcgtcattgcct

SEQ ID NO: 526386 - DNA, 15 bp, Homo sapiens
gaaagcgtcattgcc

SEQ ID NO: 526387 - DNA, 15 bp, Homo sapiens
agaaagcgtcattgc

SEQ ID NO: 526388 - DNA, 15 bp, Homo sapiens
gagaaagcgtcattg

SEQ ID NO: 526389 - DNA, 15 bp, Homo sapiens
agagaaagcgtcatt

SEQ ID NO: 526390 - DNA, 15 bp, Homo sapiens
aagagaaagcgtcat

SEQ ID NO: 526391 - DNA, 15 bp, Homo sapiens
gaagagaaagcgtca

SEQ ID NO: 526392 - DNA, 15 bp, Homo sapiens
ggaagagaaagcgtc

SEQ ID NO: 526393 - DNA, 15 bp, Homo sapiens
aggaagagaaagcgt

SEQ ID NO: 526394 - DNA, 15 bp, Homo sapiens
gaggaagagaaagcg

SEQ ID NO: 526395 - DNA, 15 bp, Homo sapiens
ggaggaagagaaagc

SEQ ID NO: 526396 - DNA, 15 bp, Homo sapiens
gggaggaagagaaag

SEQ ID NO: 526397 - DNA, 15 bp, Homo sapiens
ggggaggaagagaaa

SEQ ID NO: 526398 - DNA, 15 bp, Homo sapiens
tggggaggaagagaa

SEQ ID NO: 526399 - DNA, 15 bp, Homo sapiens
gtggggaggaagaga

SEQ ID NO: 526400 - DNA, 15 bp, Homo sapiens
tgtggggaggaagag

SEQ ID NO: 526401 - DNA, 15 bp, Homo sapiens
ctgtggggaggaaga

SEQ ID NO: 526402 - DNA, 15 bp, Homo sapiens
tctgtggggaggaag

SEQ ID NO: 526403 - DNA, 15 bp, Homo sapiens
ctctgtggggaggaa

SEQ ID NO: 526404 - DNA, 15 bp, Homo sapiens
cctctgtggggagga

SEQ ID NO: 526405 - DNA, 15 bp, Homo sapiens
tcctctgtggggagg

SEQ ID NO: 526406 - DNA, 15 bp, Homo sapiens
atcctctgtggggag

SEQ ID NO: 526407 - DNA, 15 bp, Homo sapiens
catcctctgtgggga

SEQ ID NO: 526408 - DNA, 15 bp, Homo sapiens
acatcctctgtgggg

SEQ ID NO: 526409 - DNA, 15 bp, Homo sapiens
gacatcctctgtggg

SEQ ID NO: 526410 - DNA, 15 bp, Homo sapiens
tgacatcctctgtgg

SEQ ID NO: 526411 - DNA, 15 bp, Homo sapiens
gtgacatcctctgtg

SEQ ID NO: 526412 - DNA, 15 bp, Homo sapiens
ggtgacatcctctgt

SEQ ID NO: 526413 - DNA, 15 bp, Homo sapiens
gggtgacatcctctg

SEQ ID NO: 526414 - DNA, 15 bp, Homo sapiens
ggggtgacatcctct

SEQ ID NO: 526415 - DNA, 15 bp, Homo sapiens
gggggtgacatcctc

SEQ ID NO: 526416 - DNA, 15 bp, Homo sapiens
tgggggtgacatcct

SEQ ID NO: 526417 - DNA, 15 bp, Homo sapiens
atgggggtgacatcc

SEQ ID NO: 526418 - DNA, 15 bp, Homo sapiens
gatgggggtgacatc

SEQ ID NO: 526419 - DNA, 15 bp, Homo sapiens
ggatgggggtgacat

SEQ ID NO: 526420 - DNA, 15 bp, Homo sapiens
gggatgggggtgaca

SEQ ID NO: 526421 - DNA, 15 bp, Homo sapiens
ggggatgggggtgac

SEQ ID NO: 526422 - DNA, 15 bp, Homo sapiens
aggggatgggggtga

SEQ ID NO: 526423 - DNA, 15 bp, Homo sapiens
gaggggatgggggtg

SEQ ID NO: 526424 - DNA, 15 bp, Homo sapiens
agaggggatgggggt

SEQ ID NO: 526425 - DNA, 15 bp, Homo sapiens
cagaggggatggggg

SEQ ID NO: 526426 - DNA, 15 bp, Homo sapiens
tcagaggggatgggg

SEQ ID NO: 526427 - DNA, 15 bp, Homo sapiens
gtcagaggggatggg

SEQ ID NO: 526428 - DNA, 15 bp, Homo sapiens
tgtcagaggggatgg

SEQ ID NO: 526429 - DNA, 15 bp, Homo sapiens
ctgtcagaggggatg

SEQ ID NO: 526430 - DNA, 15 bp, Homo sapiens
gctgtcagaggggat

SEQ ID NO: 526431 - DNA, 15 bp, Homo sapiens
tgctgtcagagggga

SEQ ID NO: 526432 - DNA, 15 bp, Homo sapiens
gtgctgtcagagggg

SEQ ID NO: 526433 - DNA, 15 bp, Homo sapiens
agtgctgtcagaggg

SEQ ID NO: 526434 - DNA, 15 bp, Homo sapiens
gagtgctgtcagagg

SEQ ID NO: 526435 - DNA, 15 bp, Homo sapiens
cgagtgctgtcagag

SEQ ID NO: 526436 - DNA, 15 bp, Homo sapiens
gcgagtgctgtcaga

SEQ ID NO: 526437 - DNA, 15 bp, Homo sapiens
tgcgagtgctgtcag

SEQ ID NO: 526438 - DNA, 15 bp, Homo sapiens
ctgcgagtgctgtca

SEQ ID NO: 526439 - DNA, 15 bp, Homo sapiens
cctgcgagtgctgtc

SEQ ID NO: 526440 - DNA, 15 bp, Homo sapiens
tcctgcgagtgctgt

SEQ ID NO: 526441 - DNA, 15 bp, Homo sapiens
ttcctgcgagtgctg

SEQ ID NO: 526442 - DNA, 15 bp, Homo sapiens
cttcctgcgagtgct

SEQ ID NO: 526443 - DNA, 15 bp, Homo sapiens
ccttcctgcgagtgc

SEQ ID NO: 526444 - DNA, 15 bp, Homo sapiens
cccttcctgcgagtg

SEQ ID NO: 526445 - DNA, 15 bp, Homo sapiens
ccccttcctgcgagt

SEQ ID NO: 526446 - DNA, 15 bp, Homo sapiens
cccccttcctgcgag

SEQ ID NO: 526447 - DNA, 15 bp, Homo sapiens
ccccccttcctgcga

SEQ ID NO: 526448 - DNA, 15 bp, Homo sapiens
accccccttcctgcg

SEQ ID NO: 526449 - DNA, 15 bp, Homo sapiens
gaccccccttcctgc

SEQ ID NO: 526450 - DNA, 15 bp, Homo sapiens
cgaccccccttcctg

SEQ ID NO: 526451 - DNA, 15 bp, Homo sapiens
gcgaccccccttcct

SEQ ID NO: 526452 - DNA, 15 bp, Homo sapiens
ggcgaccccccttcc

SEQ ID NO: 526453 - DNA, 15 bp, Homo sapiens
cggcgaccccccttc

SEQ ID NO: 526454 - DNA, 15 bp, Homo sapiens
acggcgacccccctt

SEQ ID NO: 526455 - DNA, 15 bp, Homo sapiens
cacggcgacccccct

SEQ ID NO: 526456 - DNA, 15 bp, Homo sapiens
ccacggcgacccccc

SEQ ID NO: 526457 - DNA, 15 bp, Homo sapiens
accacggcgaccccc

SEQ ID NO: 526458 - DNA, 15 bp, Homo sapiens
gaccacggcgacccc

SEQ ID NO: 526459 - DNA, 15 bp, Homo sapiens
cgaccacggcgaccc

SEQ ID NO: 526460 - DNA, 15 bp, Homo sapiens
gcgaccacggcgacc

SEQ ID NO: 526461 - DNA, 15 bp, Homo sapiens
ggcgaccacggcgac

SEQ ID NO: 526462 - DNA, 15 bp, Homo sapiens
cggcgaccacggcga

SEQ ID NO: 526463 - DNA, 15 bp, Homo sapiens
acggcgaccacggcg

SEQ ID NO: 526464 - DNA, 15 bp, Homo sapiens
gacggcgaccacggc

SEQ ID NO: 526465 - DNA, 15 bp, Homo sapiens
agacggcgaccacgg

SEQ ID NO: 526466 - DNA, 15 bp, Homo sapiens
cagacggcgaccacg

SEQ ID NO: 526467 - DNA, 15 bp, Homo sapiens
acagacggcgaccac

SEQ ID NO: 526468 - DNA, 15 bp, Homo sapiens
cacagacggcgacca

SEQ ID NO: 526469 - DNA, 15 bp, Homo sapiens
tcacagacggcgacc

SEQ ID NO: 526470 - DNA, 15 bp, Homo sapiens
ttcacagacggcgac

SEQ ID NO: 526471 - DNA, 15 bp, Homo sapiens
gttcacagacggcga

SEQ ID NO: 526472 - DNA, 15 bp, Homo sapiens
tgttcacagacggcg

SEQ ID NO: 526473 - DNA, 15 bp, Homo sapiens
ttgttcacagacggc

SEQ ID NO: 526474 - DNA, 15 bp, Homo sapiens
cttgttcacagacgg

SEQ ID NO: 526475 - DNA, 15 bp, Homo sapiens
tcttgttcacagacg

SEQ ID NO: 526476 - DNA, 15 bp, Homo sapiens
atcttgttcacagac

SEQ ID NO: 526477 - DNA, 15 bp, Homo sapiens
aatcttgttcacaga

SEQ ID NO: 526478 - DNA, 15 bp, Homo sapiens
gaatcttgttcacag

SEQ ID NO: 526479 - DNA, 15 bp, Homo sapiens
ggaatcttgttcaca

SEQ ID NO: 526480 - DNA, 15 bp, Homo sapiens
aggaatcttgttcac

SEQ ID NO: 526481 - DNA, 15 bp, Homo sapiens
gaggaatcttgttca

SEQ ID NO: 526482 - DNA, 15 bp, Homo sapiens
tgaggaatcttgttc

SEQ ID NO: 526483 - DNA, 15 bp, Homo sapiens
ttgaggaatcttgtt

SEQ ID NO: 526484 - DNA, 15 bp, Homo sapiens
tttgaggaatcttgt

SEQ ID NO: 526485 - DNA, 15 bp, Homo sapiens
ttttgaggaatcttg

SEQ ID NO: 526486 - DNA, 15 bp, Homo sapiens
attttgaggaatctt

SEQ ID NO: 526487 - DNA, 15 bp, Homo sapiens
tattttgaggaatct

SEQ ID NO: 526488 - DNA, 15 bp, Homo sapiens
atattttgaggaatc

SEQ ID NO: 526489 - DNA, 15 bp, Homo sapiens
aatattttgaggaat

SEQ ID NO: 526490 - DNA, 15 bp, Homo sapiens
aaatattttgaggaa

SEQ ID NO: 526491 - DNA, 15 bp, Homo sapiens
aaaatattttgagga

SEQ ID NO: 526492 - DNA, 15 bp, Homo sapiens
gaaaatattttgagg

SEQ ID NO: 526493 - DNA, 15 bp, Homo sapiens
agaaaatattttgag

SEQ ID NO: 526494 - DNA, 15 bp, Homo sapiens
cagaaaatattttga

SEQ ID NO: 526495 - DNA, 15 bp, Homo sapiens
acagaaaatattttg

SEQ ID NO: 526496 - DNA, 15 bp, Homo sapiens
aacagaaaatatttt

SEQ ID NO: 526497 - DNA, 15 bp, Homo sapiens
taacagaaaatattt

SEQ ID NO: 526498 - DNA, 15 bp, Homo sapiens
ttaacagaaaatatt

SEQ ID NO: 526499 - DNA, 15 bp, Homo sapiens
attaacagaaaatat

SEQ ID NO: 526500 - DNA, 15 bp, Homo sapiens
tattaacagaaaata

SEQ ID NO: 526501 - DNA, 15 bp, Homo sapiens
ttattaacagaaaat

SEQ ID NO: 526502 - DNA, 15 bp, Homo sapiens
tttattaacagaaaa

SEQ ID NO: 526503 - DNA, 15 bp, Homo sapiens
atttattaacagaaa

SEQ ID NO: 526504 - DNA, 15 bp, Homo sapiens
aatttattaacagaa

SEQ ID NO: 526505 - DNA, 15 bp, Homo sapiens
caatttattaacaga

SEQ ID NO: 526506 - DNA, 15 bp, Homo sapiens
gcaatttattaacag

SEQ ID NO: 526507 - DNA, 15 bp, Homo sapiens
ggcaatttattaaca

SEQ ID NO: 526508 - DNA, 15 bp, Homo sapiens
aggcaatttattaac

SEQ ID NO: 526509 - DNA, 15 bp, Homo sapiens
aaggcaatttattaa

SEQ ID NO: 526510 - DNA, 15 bp, Homo sapiens
gaaggcaatttatta

SEQ ID NO: 526511 - DNA, 15 bp, Homo sapiens
tgaaggcaatttatt

SEQ ID NO: 526512 - DNA, 15 bp, Homo sapiens
atgaaggcaatttat

SEQ ID NO: 526513 - DNA, 15 bp, Homo sapiens
catgaaggcaattta

SEQ ID NO: 526514 - DNA, 15 bp, Homo sapiens
acatgaaggcaattt

SEQ ID NO: 526515 - DNA, 15 bp, Homo sapiens
tacatgaaggcaatt

SEQ ID NO: 526516 - DNA, 15 bp, Homo sapiens
ttacatgaaggcaat

SEQ ID NO: 526517 - DNA, 15 bp, Homo sapiens
tttacatgaaggcaa

SEQ ID NO: 526518 - DNA, 15 bp, Homo sapiens
gtttacatgaaggca

SEQ ID NO: 526519 - DNA, 15 bp, Homo sapiens
agtttacatgaaggc

SEQ ID NO: 526520 - DNA, 15 bp, Homo sapiens
cagtttacatgaagg

SEQ ID NO: 526521 - DNA, 15 bp, Homo sapiens
acagtttacatgaag

SEQ ID NO: 526522 - DNA, 15 bp, Homo sapiens
aacagtttacatgaa

SEQ ID NO: 526523 - DNA, 15 bp, Homo sapiens
aaacagtttacatga

SEQ ID NO: 526524 - DNA, 15 bp, Homo sapiens
gaaacagtttacatg

SEQ ID NO: 526525 - DNA, 15 bp, Homo sapiens
tgaaacagtttacat

SEQ ID NO: 526526 - DNA, 15 bp, Homo sapiens
ttgaaacagtttaca

SEQ ID NO: 526527 - DNA, 15 bp, Homo sapiens
gttgaaacagtttac

SEQ ID NO: 526528 - DNA, 15 bp, Homo sapiens
agttgaaacagttta

SEQ ID NO: 526529 - DNA, 15 bp, Homo sapiens
gagttgaaacagttt

SEQ ID NO: 526530 - DNA, 15 bp, Homo sapiens
ggagttgaaacagtt

SEQ ID NO: 526531 - DNA, 15 bp, Homo sapiens
tggagttgaaacagt

SEQ ID NO: 526532 - DNA, 15 bp, Homo sapiens
ctggagttgaaacag

SEQ ID NO: 526533 - DNA, 15 bp, Homo sapiens
gctggagttgaaaca

SEQ ID NO: 526534 - DNA, 15 bp, Homo sapiens
ggctggagttgaaac

SEQ ID NO: 526535 - DNA, 15 bp, Homo sapiens
aggctggagttgaaa

SEQ ID NO: 526536 - DNA, 15 bp, Homo sapiens
aaggctggagttgaa

SEQ ID NO: 526537 - DNA, 15 bp, Homo sapiens
gaaggctggagttga

SEQ ID NO: 526538 - DNA, 15 bp, Homo sapiens
agaaggctggagttg

SEQ ID NO: 526539 - DNA, 15 bp, Homo sapiens
gagaaggctggagtt

SEQ ID NO: 526540 - DNA, 15 bp, Homo sapiens
agagaaggctggagt

SEQ ID NO: 526541 - DNA, 15 bp, Homo sapiens
gagagaaggctggag

SEQ ID NO: 526542 - DNA, 15 bp, Homo sapiens
ggagagaaggctgga

SEQ ID NO: 526543 - DNA, 15 bp, Homo sapiens
aggagagaaggctgg

SEQ ID NO: 526544 - DNA, 15 bp, Homo sapiens
aaggagagaaggctg

SEQ ID NO: 526545 - DNA, 15 bp, Homo sapiens
gaaggagagaaggct

SEQ ID NO: 526546 - DNA, 15 bp, Homo sapiens
tgaaggagagaaggc

SEQ ID NO: 526547 - DNA, 15 bp, Homo sapiens
atgaaggagagaagg

SEQ ID NO: 526548 - DNA, 15 bp, Homo sapiens
gatgaaggagagaag

SEQ ID NO: 526549 - DNA, 15 bp, Homo sapiens
tgatgaaggagagaa

SEQ ID NO: 526550 - DNA, 15 bp, Homo sapiens
ctgatgaaggagaga

SEQ ID NO: 526551 - DNA, 15 bp, Homo sapiens
cctgatgaaggagag

SEQ ID NO: 526552 - DNA, 15 bp, Homo sapiens
ccctgatgaaggaga

SEQ ID NO: 526553 - DNA, 15 bp, Homo sapiens
cccctgatgaaggag

SEQ ID NO: 526554 - DNA, 15 bp, Homo sapiens
gcccctgatgaagga

SEQ ID NO: 526555 - DNA, 15 bp, Homo sapiens
agcccctgatgaagg

SEQ ID NO: 526556 - DNA, 15 bp, Homo sapiens
tagcccctgatgaag

SEQ ID NO: 526557 - DNA, 15 bp, Homo sapiens
gtagcccctgatgaa

SEQ ID NO: 526558 - DNA, 15 bp, Homo sapiens
agtagcccctgatga

SEQ ID NO: 526559 - DNA, 15 bp, Homo sapiens
gagtagcccctgatg

SEQ ID NO: 526560 - DNA, 15 bp, Homo sapiens
tgagtagcccctgat

SEQ ID NO: 526561 - DNA, 15 bp, Homo sapiens
ctgagtagcccctga

SEQ ID NO: 526562 - DNA, 15 bp, Homo sapiens
cctgagtagcccctg

SEQ ID NO: 526563 - DNA, 15 bp, Homo sapiens
gcctgagtagcccct

SEQ ID NO: 526564 - DNA, 15 bp, Homo sapiens
tgcctgagtagcccc

SEQ ID NO: 526565 - DNA, 15 bp, Homo sapiens
atgcctgagtagccc

SEQ ID NO: 526566 - DNA, 15 bp, Homo sapiens
aatgcctgagtagcc

SEQ ID NO: 526567 - DNA, 15 bp, Homo sapiens
aaatgcctgagtagc

SEQ ID NO: 526568 - DNA, 15 bp, Homo sapiens
caaatgcctgagtag

SEQ ID NO: 526569 - DNA, 15 bp, Homo sapiens
tcaaatgcctgagta

SEQ ID NO: 526570 - DNA, 15 bp, Homo sapiens
atcaaatgcctgagt

SEQ ID NO: 526571 - DNA, 15 bp, Homo sapiens
aatcaaatgcctgag

SEQ ID NO: 526572 - DNA, 15 bp, Homo sapiens
aaatcaaatgcctga

SEQ ID NO: 526573 - DNA, 15 bp, Homo sapiens
gaaatcaaatgcctg

SEQ ID NO: 526574 - DNA, 15 bp, Homo sapiens
agaaatcaaatgcct

SEQ ID NO: 526575 - DNA, 15 bp, Homo sapiens
aagaaatcaaatgcc

SEQ ID NO: 526576 - DNA, 15 bp, Homo sapiens
gaagaaatcaaatgc

SEQ ID NO: 526577 - DNA, 15 bp, Homo sapiens
ggaagaaatcaaatg

SEQ ID NO: 526578 - DNA, 15 bp, Homo sapiens
aggaagaaatcaaat

SEQ ID NO: 526579 - DNA, 15 bp, Homo sapiens
gaggaagaaatcaaa

SEQ ID NO: 526580 - DNA, 15 bp, Homo sapiens
ggaggaagaaatcaa

SEQ ID NO: 526581 - DNA, 15 bp, Homo sapiens
aggaggaagaaatca

SEQ ID NO: 526582 - DNA, 15 bp, Homo sapiens
taggaggaagaaatc

SEQ ID NO: 526583 - DNA, 15 bp, Homo sapiens
ataggaggaagaaat

SEQ ID NO: 526584 - DNA, 15 bp, Homo sapiens
aataggaggaagaaa

SEQ ID NO: 526585 - DNA, 15 bp, Homo sapiens
aaataggaggaagaa

SEQ ID NO: 526586 - DNA, 15 bp, Homo sapiens
caaataggaggaaga

SEQ ID NO: 526587 - DNA, 15 bp, Homo sapiens
ccaaataggaggaag

SEQ ID NO: 526588 - DNA, 15 bp, Homo sapiens
gccaaataggaggaa

SEQ ID NO: 526589 - DNA, 15 bp, Homo sapiens
agccaaataggagga

SEQ ID NO: 526590 - DNA, 15 bp, Homo sapiens
aagccaaataggagg

SEQ ID NO: 526591 - DNA, 15 bp, Homo sapiens
gaagccaaataggag

SEQ ID NO: 526592 - DNA, 15 bp, Homo sapiens
agaagccaaatagga

SEQ ID NO: 526593 - DNA, 15 bp, Homo sapiens
aagaagccaaatagg

SEQ ID NO: 526594 - DNA, 15 bp, Homo sapiens
caagaagccaaatag

SEQ ID NO: 526595 - DNA, 15 bp, Homo sapiens
ccaagaagccaaata

SEQ ID NO: 526596 - DNA, 15 bp, Homo sapiens
cccaagaagccaaat

SEQ ID NO: 526597 - DNA, 15 bp, Homo sapiens
tcccaagaagccaaa

SEQ ID NO: 526598 - DNA, 15 bp, Homo sapiens
ctcccaagaagccaa

SEQ ID NO: 526599 - DNA, 15 bp, Homo sapiens
tctcccaagaagcca

SEQ ID NO: 526600 - DNA, 15 bp, Homo sapiens
ttctcccaagaagcc

SEQ ID NO: 526601 - DNA, 15 bp, Homo sapiens
tttctcccaagaagc

SEQ ID NO: 526602 - DNA, 15 bp, Homo sapiens
ctttctcccaagaag

SEQ ID NO: 526603 - DNA, 15 bp, Homo sapiens
cctttctcccaagaa

SEQ ID NO: 526604 - DNA, 15 bp, Homo sapiens
tcctttctcccaaga

SEQ ID NO: 526605 - DNA, 15 bp, Homo sapiens
ctcctttctcccaag

SEQ ID NO: 526606 - DNA, 15 bp, Homo sapiens
gctcctttctcccaa

SEQ ID NO: 526607 - DNA, 15 bp, Homo sapiens
ggctcctttctccca

SEQ ID NO: 526608 - DNA, 15 bp, Homo sapiens
aggctcctttctccc

SEQ ID NO: 526609 - DNA, 15 bp, Homo sapiens
caggctcctttctcc

SEQ ID NO: 526610 - DNA, 15 bp, Homo sapiens
tcaggctcctttctc

SEQ ID NO: 526611 - DNA, 15 bp, Homo sapiens
ctcaggctcctttct

SEQ ID NO: 526612 - DNA, 15 bp, Homo sapiens
cctcaggctcctttc

SEQ ID NO: 526613 - DNA, 15 bp, Homo sapiens
tcctcaggctccttt

SEQ ID NO: 526614 - DNA, 15 bp, Homo sapiens
ctcctcaggctcctt

SEQ ID NO: 526615 - DNA, 15 bp, Homo sapiens
tctcctcaggctcct

SEQ ID NO: 526616 - DNA, 15 bp, Homo sapiens
ctctcctcaggctcc

SEQ ID NO: 526617 - DNA, 15 bp, Homo sapiens
gctctcctcaggctc

SEQ ID NO: 526618 - DNA, 15 bp, Homo sapiens
agctctcctcaggct

SEQ ID NO: 526619 - DNA, 15 bp, Homo sapiens
cagctctcctcaggc

SEQ ID NO: 526620 - DNA, 15 bp, Homo sapiens
tcagctctcctcagg

SEQ ID NO: 526621 - DNA, 15 bp, Homo sapiens
ctcagctctcctcag

SEQ ID NO: 526622 - DNA, 15 bp, Homo sapiens
tctcagctctcctca

SEQ ID NO: 526623 - DNA, 15 bp, Homo sapiens
atctcagctctcctc

SEQ ID NO: 526624 - DNA, 15 bp, Homo sapiens
gatctcagctctcct

SEQ ID NO: 526625 - DNA, 15 bp, Homo sapiens
ggatctcagctctcc

SEQ ID NO: 526626 - DNA, 15 bp, Homo sapiens
aggatctcagctctc

SEQ ID NO: 526627 - DNA, 15 bp, Homo sapiens
caggatctcagctct

SEQ ID NO: 526628 - DNA, 15 bp, Homo sapiens
ccaggatctcagctc

SEQ ID NO: 526629 - DNA, 15 bp, Homo sapiens
accaggatctcagct

SEQ ID NO: 526630 - DNA, 15 bp, Homo sapiens
caccaggatctcagc

SEQ ID NO: 526631 - DNA, 15 bp, Homo sapiens
gcaccaggatctcag

SEQ ID NO: 526632 - DNA, 15 bp, Homo sapiens
agcaccaggatctca

SEQ ID NO: 526633 - DNA, 15 bp, Homo sapiens
cagcaccaggatctc

SEQ ID NO: 526634 - DNA, 15 bp, Homo sapiens
gcagcaccaggatct

SEQ ID NO: 526635 - DNA, 15 bp, Homo sapiens
tgcagcaccaggatc

SEQ ID NO: 526636 - DNA, 15 bp, Homo sapiens
atgcagcaccaggat

SEQ ID NO: 526637 - DNA, 15 bp, Homo sapiens
aatgcagcaccagga

SEQ ID NO: 526638 - DNA, 15 bp, Homo sapiens
aaatgcagcaccagg

SEQ ID NO: 526639 - DNA, 15 bp, Homo sapiens
caaatgcagcaccag

SEQ ID NO: 526640 - DNA, 15 bp, Homo sapiens
ccaaatgcagcacca

SEQ ID NO: 526641 - DNA, 15 bp, Homo sapiens
cccaaatgcagcacc

SEQ ID NO: 526642 - DNA, 15 bp, Homo sapiens
ccccaaatgcagcac

SEQ ID NO: 526643 - DNA, 15 bp, Homo sapiens
accccaaatgcagca

SEQ ID NO: 526644 - DNA, 15 bp, Homo sapiens
gaccccaaatgcagc

SEQ ID NO: 526645 - DNA, 15 bp, Homo sapiens
agaccccaaatgcag

SEQ ID NO: 526646 - DNA, 15 bp, Homo sapiens
aagaccccaaatgca

SEQ ID NO: 526647 - DNA, 15 bp, Homo sapiens
aaagaccccaaatgc

SEQ ID NO: 526648 - DNA, 15 bp, Homo sapiens
aaaagaccccaaatg

SEQ ID NO: 526649 - DNA, 15 bp, Homo sapiens
gaaaagaccccaaat

SEQ ID NO: 526650 - DNA, 15 bp, Homo sapiens
ggaaaagaccccaaa

SEQ ID NO: 526651 - DNA, 15 bp, Homo sapiens
tggaaaagaccccaa

SEQ ID NO: 526652 - DNA, 15 bp, Homo sapiens
atggaaaagacccca

SEQ ID NO: 526653 - DNA, 15 bp, Homo sapiens
catggaaaagacccc

SEQ ID NO: 526654 - DNA, 15 bp, Homo sapiens
gcatggaaaagaccc

SEQ ID NO: 526655 - DNA, 15 bp, Homo sapiens
agcatggaaaagacc

SEQ ID NO: 526656 - DNA, 15 bp, Homo sapiens
tagcatggaaaagac

SEQ ID NO: 526657 - DNA, 15 bp, Homo sapiens
gtagcatggaaaaga

SEQ ID NO: 526658 - DNA, 15 bp, Homo sapiens
agtagcatggaaaag

SEQ ID NO: 526659 - DNA, 15 bp, Homo sapiens
aagtagcatggaaaa

SEQ ID NO: 526660 - DNA, 15 bp, Homo sapiens
caagtagcatggaaa

SEQ ID NO: 526661 - DNA, 15 bp, Homo sapiens
gcaagtagcatggaa

SEQ ID NO: 526662 - DNA, 15 bp, Homo sapiens
cgcaagtagcatgga

SEQ ID NO: 526663 - DNA, 15 bp, Homo sapiens
ccgcaagtagcatgg

SEQ ID NO: 526664 - DNA, 15 bp, Homo sapiens
gccgcaagtagcatg

SEQ ID NO: 526665 - DNA, 15 bp, Homo sapiens
tgccgcaagtagcat

SEQ ID NO: 526666 - DNA, 15 bp, Homo sapiens
atgccgcaagtagca

SEQ ID NO: 526667 - DNA, 15 bp, Homo sapiens
aatgccgcaagtagc

SEQ ID NO: 526668 - DNA, 15 bp, Homo sapiens
taatgccgcaagtag

SEQ ID NO: 526669 - DNA, 15 bp, Homo sapiens
ttaatgccgcaagta

SEQ ID NO: 526670 - DNA, 15 bp, Homo sapiens
cttaatgccgcaagt

SEQ ID NO: 526671 - DNA, 15 bp, Homo sapiens
acttaatgccgcaag

SEQ ID NO: 526672 - DNA, 15 bp, Homo sapiens
aacttaatgccgcaa

SEQ ID NO: 526673 - DNA, 15 bp, Homo sapiens
caacttaatgccgca

SEQ ID NO: 526674 - DNA, 15 bp, Homo sapiens
gcaacttaatgccgc

SEQ ID NO: 526675 - DNA, 15 bp, Homo sapiens
ggcaacttaatgccg

SEQ ID NO: 526676 - DNA, 15 bp, Homo sapiens
aggcaacttaatgcc

SEQ ID NO: 526677 - DNA, 15 bp, Homo sapiens
aaggcaacttaatgc

SEQ ID NO: 526678 - DNA, 15 bp, Homo sapiens
caaggcaacttaatg

SEQ ID NO: 526679 - DNA, 15 bp, Homo sapiens
ccaaggcaacttaat

SEQ ID NO: 526680 - DNA, 15 bp, Homo sapiens
accaaggcaacttaa

SEQ ID NO: 526681 - DNA, 15 bp, Homo sapiens
gaccaaggcaactta

SEQ ID NO: 526682 - DNA, 15 bp, Homo sapiens
tgaccaaggcaactt

SEQ ID NO: 526683 - DNA, 15 bp, Homo sapiens
atgaccaaggcaact

SEQ ID NO: 526684 - DNA, 15 bp, Homo sapiens
gatgaccaaggcaac

SEQ ID NO: 526685 - DNA, 15 bp, Homo sapiens
agatgaccaaggcaa

SEQ ID NO: 526686 - DNA, 15 bp, Homo sapiens
tagatgaccaaggca

SEQ ID NO: 526687 - DNA, 15 bp, Homo sapiens
ttagatgaccaaggc

SEQ ID NO: 526688 - DNA, 15 bp, Homo sapiens
tttagatgaccaagg

SEQ ID NO: 526689 - DNA, 15 bp, Homo sapiens
ctttagatgaccaag

SEQ ID NO: 526690 - DNA, 15 bp, Homo sapiens
gctttagatgaccaa

SEQ ID NO: 526691 - DNA, 15 bp, Homo sapiens
tgctttagatgacca

SEQ ID NO: 526692 - DNA, 15 bp, Homo sapiens
ctgctttagatgacc

SEQ ID NO: 526693 - DNA, 15 bp, Homo sapiens
tctgctttagatgac

SEQ ID NO: 526694 - DNA, 15 bp, Homo sapiens
gtctgctttagatga

SEQ ID NO: 526695 - DNA, 15 bp, Homo sapiens
ggtctgctttagatg

SEQ ID NO: 526696 - DNA, 15 bp, Homo sapiens
tggtctgctttagat

SEQ ID NO: 526697 - DNA, 15 bp, Homo sapiens
ttggtctgctttaga

SEQ ID NO: 526698 - DNA, 15 bp, Homo sapiens
cttggtctgctttag

SEQ ID NO: 526699 - DNA, 15 bp, Homo sapiens
ccttggtctgcttta

SEQ ID NO: 526700 - DNA, 15 bp, Homo sapiens
gccttggtctgcttt

SEQ ID NO: 526701 - DNA, 15 bp, Homo sapiens
cgccttggtctgctt

SEQ ID NO: 526702 - DNA, 15 bp, Homo sapiens
acgccttggtctgct

SEQ ID NO: 526703 - DNA, 15 bp, Homo sapiens
aacgccttggtctgc

SEQ ID NO: 526704 - DNA, 15 bp, Homo sapiens
caacgccttggtctg

SEQ ID NO: 526705 - DNA, 15 bp, Homo sapiens
ccaacgccttggtct

SEQ ID NO: 526706 - DNA, 15 bp, Homo sapiens
tccaacgccttggtc

SEQ ID NO: 526707 - DNA, 15 bp, Homo sapiens
ctccaacgccttggt

SEQ ID NO: 526708 - DNA, 15 bp, Homo sapiens
tctccaacgccttgg

SEQ ID NO: 526709 - DNA, 15 bp, Homo sapiens
gtctccaacgccttg

SEQ ID NO: 526710 - DNA, 15 bp, Homo sapiens
ggtctccaacgcctt

SEQ ID NO: 526711 - DNA, 15 bp, Homo sapiens
aggtctccaacgcct

SEQ ID NO: 526712 - DNA, 15 bp, Homo sapiens
gaggtctccaacgcc

SEQ ID NO: 526713 - DNA, 15 bp, Homo sapiens
cgaggtctccaacgc

SEQ ID NO: 526714 - DNA, 15 bp, Homo sapiens
acgaggtctccaacg

SEQ ID NO: 526715 - DNA, 15 bp, Homo sapiens
aacgaggtctccaac

SEQ ID NO: 526716 - DNA, 15 bp, Homo sapiens
aaacgaggtctccaa

SEQ ID NO: 526717 - DNA, 15 bp, Homo sapiens
aaaacgaggtctcca

SEQ ID NO: 526718 - DNA, 15 bp, Homo sapiens
caaaacgaggtctcc

SEQ ID NO: 526719 - DNA, 15 bp, Homo sapiens
tcaaaacgaggtctc

SEQ ID NO: 526720 - DNA, 15 bp, Homo sapiens
ctcaaaacgaggtct

SEQ ID NO: 526721 - DNA, 15 bp, Homo sapiens
actcaaaacgaggtc

SEQ ID NO: 526722 - DNA, 15 bp, Homo sapiens
cactcaaaacgaggt

SEQ ID NO: 526723 - DNA, 15 bp, Homo sapiens
ccactcaaaacgagg

SEQ ID NO: 526724 - DNA, 15 bp, Homo sapiens
tccactcaaaacgag

SEQ ID NO: 526725 - DNA, 15 bp, Homo sapiens
ctccactcaaaacga

SEQ ID NO: 526726 - DNA, 15 bp, Homo sapiens
tctccactcaaaacg

SEQ ID NO: 526727 - DNA, 15 bp, Homo sapiens
atctccactcaaaac

SEQ ID NO: 526728 - DNA, 15 bp, Homo sapiens
catctccactcaaaa

SEQ ID NO: 526729 - DNA, 15 bp, Homo sapiens
gcatctccactcaaa

SEQ ID NO: 526730 - DNA, 15 bp, Homo sapiens
agcatctccactcaa

SEQ ID NO: 526731 - DNA, 15 bp, Homo sapiens
cagcatctccactca

SEQ ID NO: 526732 - DNA, 15 bp, Homo sapiens
ccagcatctccactc

SEQ ID NO: 526733 - DNA, 15 bp, Homo sapiens
accagcatctccact

SEQ ID NO: 526734 - DNA, 15 bp, Homo sapiens
aaccagcatctccac

SEQ ID NO: 526735 - DNA, 15 bp, Homo sapiens
gaaccagcatctcca

SEQ ID NO: 526736 - DNA, 15 bp, Homo sapiens
agaaccagcatctcc

SEQ ID NO: 526737 - DNA, 15 bp, Homo sapiens
tagaaccagcatctc

SEQ ID NO: 526738 - DNA, 15 bp, Homo sapiens
ttagaaccagcatct

SEQ ID NO: 526739 - DNA, 15 bp, Homo sapiens
tttagaaccagcatc

SEQ ID NO: 526740 - DNA, 15 bp, Homo sapiens
atttagaaccagcat

SEQ ID NO: 526741 - DNA, 15 bp, Homo sapiens
tatttagaaccagca

SEQ ID NO: 526742 - DNA, 15 bp, Homo sapiens
atatttagaaccagc

SEQ ID NO: 526743 - DNA, 15 bp, Homo sapiens
catatttagaaccag

SEQ ID NO: 526744 - DNA, 15 bp, Homo sapiens
ccatatttagaacca

SEQ ID NO: 526745 - DNA, 15 bp, Homo sapiens
tccatatttagaacc

SEQ ID NO: 526746 - DNA, 15 bp, Homo sapiens
gtccatatttagaac

SEQ ID NO: 526747 - DNA, 15 bp, Homo sapiens
ggtccatatttagaa

SEQ ID NO: 526748 - DNA, 15 bp, Homo sapiens
tggtccatatttaga

SEQ ID NO: 526749 - DNA, 15 bp, Homo sapiens
ttggtccatatttag

SEQ ID NO: 526750 - DNA, 15 bp, Homo sapiens
attggtccatattta

SEQ ID NO: 526751 - DNA, 15 bp, Homo sapiens
aattggtccatattt

SEQ ID NO: 526752 - DNA, 15 bp, Homo sapiens
gaattggtccatatt

SEQ ID NO: 526753 - DNA, 15 bp, Homo sapiens
agaattggtccatat

SEQ ID NO: 526754 - DNA, 15 bp, Homo sapiens
aagaattggtccata

SEQ ID NO: 526755 - DNA, 15 bp, Homo sapiens
taagaattggtccat

SEQ ID NO: 526756 - DNA, 15 bp, Homo sapiens
ttaagaattggtcca

SEQ ID NO: 526757 - DNA, 15 bp, Homo sapiens
tttaagaattggtcc

SEQ ID NO: 526758 - DNA, 15 bp, Homo sapiens
ctttaagaattggtc

SEQ ID NO: 526759 - DNA, 15 bp, Homo sapiens
tctttaagaattggt

SEQ ID NO: 526760 - DNA, 15 bp, Homo sapiens
ctctttaagaattgg

SEQ ID NO: 526761 - DNA, 15 bp, Homo sapiens
gctctttaagaattg

SEQ ID NO: 526762 - DNA, 15 bp, Homo sapiens
ggctctttaagaatt

SEQ ID NO: 526763 - DNA, 15 bp, Homo sapiens
tggctctttaagaat

SEQ ID NO: 526764 - DNA, 15 bp, Homo sapiens
ctggctctttaagaa

SEQ ID NO: 526765 - DNA, 15 bp, Homo sapiens
tctggctctttaaga

SEQ ID NO: 526766 - DNA, 15 bp, Homo sapiens
ctctggctctttaag

SEQ ID NO: 526767 - DNA, 15 bp, Homo sapiens
actctggctctttaa

SEQ ID NO: 526768 - DNA, 15 bp, Homo sapiens
cactctggctcttta

SEQ ID NO: 526769 - DNA, 15 bp, Homo sapiens
ccactctggctcttt

SEQ ID NO: 526770 - DNA, 15 bp, Homo sapiens
cccactctggctctt

SEQ ID NO: 526771 - DNA, 15 bp, Homo sapiens
tcccactctggctct

SEQ ID NO: 526772 - DNA, 15 bp, Homo sapiens
ttcccactctggctc

SEQ ID NO: 526773 - DNA, 15 bp, Homo sapiens
gttcccactctggct

SEQ ID NO: 526774 - DNA, 15 bp, Homo sapiens
agttcccactctggc

SEQ ID NO: 526775 - DNA, 15 bp, Homo sapiens
cagttcccactctgg

SEQ ID NO: 526776 - DNA, 15 bp, Homo sapiens
acagttcccactctg

SEQ ID NO: 526777 - DNA, 15 bp, Homo sapiens
aacagttcccactct

SEQ ID NO: 526778 - DNA, 15 bp, Homo sapiens
caacagttcccactc

SEQ ID NO: 526779 - DNA, 15 bp, Homo sapiens
tcaacagttcccact

SEQ ID NO: 526780 - DNA, 15 bp, Homo sapiens
atcaacagttcccac

SEQ ID NO: 526781 - DNA, 15 bp, Homo sapiens
gatcaacagttccca

SEQ ID NO: 526782 - DNA, 15 bp, Homo sapiens
ggatcaacagttccc

SEQ ID NO: 526783 - DNA, 15 bp, Homo sapiens
tggatcaacagttcc

SEQ ID NO: 526784 - DNA, 15 bp, Homo sapiens
ttggatcaacagttc

SEQ ID NO: 526785 - DNA, 15 bp, Homo sapiens
cttggatcaacagtt

SEQ ID NO: 526786 - DNA, 15 bp, Homo sapiens
acttggatcaacagt

SEQ ID NO: 526787 - DNA, 15 bp, Homo sapiens
cacttggatcaacag

SEQ ID NO: 526788 - DNA, 15 bp, Homo sapiens
acacttggatcaaca

SEQ ID NO: 526789 - DNA, 15 bp, Homo sapiens
tacacttggatcaac

SEQ ID NO: 526790 - DNA, 15 bp, Homo sapiens
ctacacttggatcaa

SEQ ID NO: 526791 - DNA, 15 bp, Homo sapiens
gctacacttggatca

SEQ ID NO: 526792 - DNA, 15 bp, Homo sapiens
ggctacacttggatc

SEQ ID NO: 526793 - DNA, 15 bp, Homo sapiens
aggctacacttggat

SEQ ID NO: 526794 - DNA, 15 bp, Homo sapiens
caggctacacttgga

SEQ ID NO: 526795 - DNA, 15 bp, Homo sapiens
tcaggctacacttgg

SEQ ID NO: 526796 - DNA, 15 bp, Homo sapiens
ttcaggctacacttg

SEQ ID NO: 526797 - DNA, 15 bp, Homo sapiens
cttcaggctacactt

SEQ ID NO: 526798 - DNA, 15 bp, Homo sapiens
gcttcaggctacact

SEQ ID NO: 526799 - DNA, 15 bp, Homo sapiens
cgcttcaggctacac

SEQ ID NO: 526800 - DNA, 15 bp, Homo sapiens
tcgcttcaggctaca

SEQ ID NO: 526801 - DNA, 15 bp, Homo sapiens
ttcgcttcaggctac

SEQ ID NO: 526802 - DNA, 15 bp, Homo sapiens
tttcgcttcaggcta

SEQ ID NO: 526803 - DNA, 15 bp, Homo sapiens
ctttcgcttcaggct

SEQ ID NO: 526804 - DNA, 15 bp, Homo sapiens
tctttcgcttcaggc

SEQ ID NO: 526805 - DNA, 15 bp, Homo sapiens
ctctttcgcttcagg

SEQ ID NO: 526806 - DNA, 15 bp, Homo sapiens
cctctttcgcttcag

SEQ ID NO: 526807 - DNA, 15 bp, Homo sapiens
tcctctttcgcttca

SEQ ID NO: 526808 - DNA, 15 bp, Homo sapiens
ctcctctttcgcttc

SEQ ID NO: 526809 - DNA, 15 bp, Homo sapiens
gctcctctttcgctt

SEQ ID NO: 526810 - DNA, 15 bp, Homo sapiens
ggctcctctttcgct

SEQ ID NO: 526811 - DNA, 15 bp, Homo sapiens
aggctcctctttcgc

SEQ ID NO: 526812 - DNA, 15 bp, Homo sapiens
aaggctcctctttcg

SEQ ID NO: 526813 - DNA, 15 bp, Homo sapiens
gaaggctcctctttc

SEQ ID NO: 526814 - DNA, 15 bp, Homo sapiens
ggaaggctcctcttt

SEQ ID NO: 526815 - DNA, 15 bp, Homo sapiens
tggaaggctcctctt

SEQ ID NO: 526816 - DNA, 15 bp, Homo sapiens
ctggaaggctcctct

SEQ ID NO: 526817 - DNA, 15 bp, Homo sapiens
tctggaaggctcctc

SEQ ID NO: 526818 - DNA, 15 bp, Homo sapiens
gtctggaaggctcct

SEQ ID NO: 526819 - DNA, 15 bp, Homo sapiens
ggtctggaaggctcc

SEQ ID NO: 526820 - DNA, 15 bp, Homo sapiens
gggtctggaaggctc

SEQ ID NO: 526821 - DNA, 15 bp, Homo sapiens
tgggtctggaaggct

SEQ ID NO: 526822 - DNA, 15 bp, Homo sapiens
atgggtctggaaggc

SEQ ID NO: 526823 - DNA, 15 bp, Homo sapiens
catgggtctggaagg

SEQ ID NO: 526824 - DNA, 15 bp, Homo sapiens
gcatgggtctggaag

SEQ ID NO: 526825 - DNA, 15 bp, Homo sapiens
ggcatgggtctggaa

SEQ ID NO: 526826 - DNA, 15 bp, Homo sapiens
tggcatgggtctgga

SEQ ID NO: 526827 - DNA, 15 bp, Homo sapiens
atggcatgggtctgg

SEQ ID NO: 526828 - DNA, 15 bp, Homo sapiens
tatggcatgggtctg

SEQ ID NO: 526829 - DNA, 15 bp, Homo sapiens
atatggcatgggtct

SEQ ID NO: 526830 - DNA, 15 bp, Homo sapiens
tatatggcatgggtc

SEQ ID NO: 526831 - DNA, 15 bp, Homo sapiens
atatatggcatgggt

SEQ ID NO: 526832 - DNA, 15 bp, Homo sapiens
tatatatggcatggg

SEQ ID NO: 526833 - DNA, 15 bp, Homo sapiens
ttatatatggcatgg

SEQ ID NO: 526834 - DNA, 15 bp, Homo sapiens
tttatatatggcatg

SEQ ID NO: 526835 - DNA, 15 bp, Homo sapiens
gtttatatatggcat

SEQ ID NO: 526836 - DNA, 15 bp, Homo sapiens
tgtttatatatggca

SEQ ID NO: 526837 - DNA, 15 bp, Homo sapiens
gtgtttatatatggc

SEQ ID NO: 526838 - DNA, 15 bp, Homo sapiens
tgtgtttatatatgg

SEQ ID NO: 526839 - DNA, 15 bp, Homo sapiens
gtgtgtttatatatg

SEQ ID NO: 526840 - DNA, 15 bp, Homo sapiens
cgtgtgtttatatat

SEQ ID NO: 526841 - DNA, 15 bp, Homo sapiens
acgtgtgtttatata

SEQ ID NO: 526842 - DNA, 15 bp, Homo sapiens
cacgtgtgtttatat

SEQ ID NO: 526843 - DNA, 15 bp, Homo sapiens
ccacgtgtgtttata

SEQ ID NO: 526844 - DNA, 15 bp, Homo sapiens
cccacgtgtgtttat

SEQ ID NO: 526845 - DNA, 15 bp, Homo sapiens
acccacgtgtgttta

SEQ ID NO: 526846 - DNA, 15 bp, Homo sapiens
cacccacgtgtgttt

SEQ ID NO: 526847 - DNA, 15 bp, Homo sapiens
acacccacgtgtgtt

SEQ ID NO: 526848 - DNA, 15 bp, Homo sapiens
cacacccacgtgtgt

SEQ ID NO: 526849 - DNA, 15 bp, Homo sapiens
gcacacccacgtgtg

SEQ ID NO: 526850 - DNA, 15 bp, Homo sapiens
tgcacacccacgtgt

SEQ ID NO: 526851 - DNA, 15 bp, Homo sapiens
atgcacacccacgtg

SEQ ID NO: 526852 - DNA, 15 bp, Homo sapiens
aatgcacacccacgt

SEQ ID NO: 526853 - DNA, 15 bp, Homo sapiens
gaatgcacacccacg

SEQ ID NO: 526854 - DNA, 15 bp, Homo sapiens
agaatgcacacccac

SEQ ID NO: 526855 - DNA, 15 bp, Homo sapiens
gagaatgcacaccca

SEQ ID NO: 526856 - DNA, 15 bp, Homo sapiens
ggagaatgcacaccc

SEQ ID NO: 526857 - DNA, 15 bp, Homo sapiens
gggagaatgcacacc

SEQ ID NO: 526858 - DNA, 15 bp, Homo sapiens
ggggagaatgcacac

SEQ ID NO: 526859 - DNA, 15 bp, Homo sapiens
gggggagaatgcaca

SEQ ID NO: 526860 - DNA, 15 bp, Homo sapiens
ggggggagaatgcac

SEQ ID NO: 526861 - DNA, 15 bp, Homo sapiens
tggggggagaatgca

SEQ ID NO: 526862 - DNA, 15 bp, Homo sapiens
gtggggggagaatgc

SEQ ID NO: 526863 - DNA, 15 bp, Homo sapiens
tgtggggggagaatg

SEQ ID NO: 526864 - DNA, 15 bp, Homo sapiens
gtgtggggggagaat

SEQ ID NO: 526865 - DNA, 15 bp, Homo sapiens
ggtgtggggggagaa

SEQ ID NO: 526866 - DNA, 15 bp, Homo sapiens
aggtgtggggggaga

SEQ ID NO: 526867 - DNA, 15 bp, Homo sapiens
aaggtgtggggggag

SEQ ID NO: 526868 - DNA, 15 bp, Homo sapiens
gaaggtgtgggggga

SEQ ID NO: 526869 - DNA, 15 bp, Homo sapiens
agaaggtgtgggggg

SEQ ID NO: 526870 - DNA, 15 bp, Homo sapiens
cagaaggtgtggggg

SEQ ID NO: 526871 - DNA, 15 bp, Homo sapiens
acagaaggtgtgggg

SEQ ID NO: 526872 - DNA, 15 bp, Homo sapiens
cacagaaggtgtggg

SEQ ID NO: 526873 - DNA, 15 bp, Homo sapiens
gcacagaaggtgtgg

SEQ ID NO: 526874 - DNA, 15 bp, Homo sapiens
tgcacagaaggtgtg

SEQ ID NO: 526875 - DNA, 15 bp, Homo sapiens
ttgcacagaaggtgt

SEQ ID NO: 526876 - DNA, 15 bp, Homo sapiens
tttgcacagaaggtg

SEQ ID NO: 526877 - DNA, 15 bp, Homo sapiens
ctttgcacagaaggt

SEQ ID NO: 526878 - DNA, 15 bp, Homo sapiens
gctttgcacagaagg

SEQ ID NO: 526879 - DNA, 15 bp, Homo sapiens
agctttgcacagaag

SEQ ID NO: 526880 - DNA, 15 bp, Homo sapiens
cagctttgcacagaa

SEQ ID NO: 526881 - DNA, 15 bp, Homo sapiens
ccagctttgcacaga

SEQ ID NO: 526882 - DNA, 15 bp, Homo sapiens
cccagctttgcacag

SEQ ID NO: 526883 - DNA, 15 bp, Homo sapiens
tcccagctttgcaca

SEQ ID NO: 526884 - DNA, 15 bp, Homo sapiens
ctcccagctttgcac

SEQ ID NO: 526885 - DNA, 15 bp, Homo sapiens
gctcccagctttgca

SEQ ID NO: 526886 - DNA, 15 bp, Homo sapiens
agctcccagctttgc

SEQ ID NO: 526887 - DNA, 15 bp, Homo sapiens
gagctcccagctttg

SEQ ID NO: 526888 - DNA, 15 bp, Homo sapiens
tgagctcccagcttt

SEQ ID NO: 526889 - DNA, 15 bp, Homo sapiens
gtgagctcccagctt

SEQ ID NO: 526890 - DNA, 15 bp, Homo sapiens
agtgagctcccagct

SEQ ID NO: 526891 - DNA, 15 bp, Homo sapiens
gagtgagctcccagc

SEQ ID NO: 526892 - DNA, 15 bp, Homo sapiens
ggagtgagctcccag

SEQ ID NO: 526893 - DNA, 15 bp, Homo sapiens
tggagtgagctccca

SEQ ID NO: 526894 - DNA, 15 bp, Homo sapiens
gtggagtgagctccc

SEQ ID NO: 526895 - DNA, 15 bp, Homo sapiens
agtggagtgagctcc

SEQ ID NO: 526896 - DNA, 15 bp, Homo sapiens
cagtggagtgagctc

SEQ ID NO: 526897 - DNA, 15 bp, Homo sapiens
gcagtggagtgagct

SEQ ID NO: 526898 - DNA, 15 bp, Homo sapiens
cgcagtggagtgagc

SEQ ID NO: 526899 - DNA, 15 bp, Homo sapiens
acgcagtggagtgag

SEQ ID NO: 526900 - DNA, 15 bp, Homo sapiens
gacgcagtggagtga

SEQ ID NO: 526901 - DNA, 15 bp, Homo sapiens
agacgcagtggagtg

SEQ ID NO: 526902 - DNA, 15 bp, Homo sapiens
aagacgcagtggagt

SEQ ID NO: 526903 - DNA, 15 bp, Homo sapiens
caagacgcagtggag

SEQ ID NO: 526904 - DNA, 15 bp, Homo sapiens
gcaagacgcagtgga

SEQ ID NO: 526905 - DNA, 15 bp, Homo sapiens
agcaagacgcagtgg

SEQ ID NO: 526906 - DNA, 15 bp, Homo sapiens
aagcaagacgcagtg

SEQ ID NO: 526907 - DNA, 15 bp, Homo sapiens
aaagcaagacgcagt

SEQ ID NO: 526908 - DNA, 15 bp, Homo sapiens
aaaagcaagacgcag

SEQ ID NO: 526909 - DNA, 15 bp, Homo sapiens
aaaaagcaagacgca

SEQ ID NO: 526910 - DNA, 15 bp, Homo sapiens
aaaaaagcaagacgc

SEQ ID NO: 526911 - DNA, 15 bp, Homo sapiens
aaaaaaagcaagacg

SEQ ID NO: 526912 - DNA, 15 bp, Homo sapiens
gaaaaaaagcaagac

SEQ ID NO: 526913 - DNA, 15 bp, Homo sapiens
tgaaaaaaagcaaga

SEQ ID NO: 526914 - DNA, 15 bp, Homo sapiens
gtgaaaaaaagcaag

SEQ ID NO: 526915 - DNA, 15 bp, Homo sapiens
agtgaaaaaaagcaa

SEQ ID NO: 526916 - DNA, 15 bp, Homo sapiens
aagtgaaaaaaagca

SEQ ID NO: 526917 - DNA, 15 bp, Homo sapiens
caagtgaaaaaaagc

SEQ ID NO: 526918 - DNA, 15 bp, Homo sapiens
ccaagtgaaaaaaag

SEQ ID NO: 526919 - DNA, 15 bp, Homo sapiens
gccaagtgaaaaaaa

SEQ ID NO: 526920 - DNA, 15 bp, Homo sapiens
tgccaagtgaaaaaa

SEQ ID NO: 526921 - DNA, 15 bp, Homo sapiens
ctgccaagtgaaaaa

SEQ ID NO: 526922 - DNA, 15 bp, Homo sapiens
tctgccaagtgaaaa

SEQ ID NO: 526923 - DNA, 15 bp, Homo sapiens
atctgccaagtgaaa

SEQ ID NO: 526924 - DNA, 15 bp, Homo sapiens
gatctgccaagtgaa

SEQ ID NO: 526925 - DNA, 15 bp, Homo sapiens
agatctgccaagtga

SEQ ID NO: 526926 - DNA, 15 bp, Homo sapiens
aagatctgccaagtg

SEQ ID NO: 526927 - DNA, 15 bp, Homo sapiens
caagatctgccaagt

SEQ ID NO: 526928 - DNA, 15 bp, Homo sapiens
ccaagatctgccaag

SEQ ID NO: 526929 - DNA, 15 bp, Homo sapiens
tccaagatctgccaa

SEQ ID NO: 526930 - DNA, 15 bp, Homo sapiens
ctccaagatctgcca

SEQ ID NO: 526931 - DNA, 15 bp, Homo sapiens
tctccaagatctgcc

SEQ ID NO: 526932 - DNA, 15 bp, Homo sapiens
atctccaagatctgc

SEQ ID NO: 526933 - DNA, 15 bp, Homo sapiens
aatctccaagatctg

SEQ ID NO: 526934 - DNA, 15 bp, Homo sapiens
caatctccaagatct

SEQ ID NO: 526935 - DNA, 15 bp, Homo sapiens
acaatctccaagatc

SEQ ID NO: 526936 - DNA, 15 bp, Homo sapiens
aacaatctccaagat

SEQ ID NO: 526937 - DNA, 15 bp, Homo sapiens
gaacaatctccaaga

SEQ ID NO: 526938 - DNA, 15 bp, Homo sapiens
ggaacaatctccaag

SEQ ID NO: 526939 - DNA, 15 bp, Homo sapiens
tggaacaatctccaa

SEQ ID NO: 526940 - DNA, 15 bp, Homo sapiens
gtggaacaatctcca

SEQ ID NO: 526941 - DNA, 15 bp, Homo sapiens
tgtggaacaatctcc

SEQ ID NO: 526942 - DNA, 15 bp, Homo sapiens
atgtggaacaatctc

SEQ ID NO: 526943 - DNA, 15 bp, Homo sapiens
gatgtggaacaatct

SEQ ID NO: 526944 - DNA, 15 bp, Homo sapiens
tgatgtggaacaatc

SEQ ID NO: 526945 - DNA, 15 bp, Homo sapiens
ctgatgtggaacaat

SEQ ID NO: 526946 - DNA, 15 bp, Homo sapiens
actgatgtggaacaa

SEQ ID NO: 526947 - DNA, 15 bp, Homo sapiens
tactgatgtggaaca

SEQ ID NO: 526948 - DNA, 15 bp, Homo sapiens
gtactgatgtggaac

SEQ ID NO: 526949 - DNA, 15 bp, Homo sapiens
tgtactgatgtggaa

SEQ ID NO: 526950 - DNA, 15 bp, Homo sapiens
atgtactgatgtgga

SEQ ID NO: 526951 - DNA, 15 bp, Homo sapiens
tatgtactgatgtgg

SEQ ID NO: 526952 - DNA, 15 bp, Homo sapiens
ttatgtactgatgtg

SEQ ID NO: 526953 - DNA, 15 bp, Homo sapiens
tttatgtactgatgt

SEQ ID NO: 526954 - DNA, 15 bp, Homo sapiens
ctttatgtactgatg

SEQ ID NO: 526955 - DNA, 15 bp, Homo sapiens
actttatgtactgat

SEQ ID NO: 526956 - DNA, 15 bp, Homo sapiens
tactttatgtactga

SEQ ID NO: 526957 - DNA, 15 bp, Homo sapiens
gtactttatgtactg

SEQ ID NO: 526958 - DNA, 15 bp, Homo sapiens
tgtactttatgtact

SEQ ID NO: 526959 - DNA, 15 bp, Homo sapiens
atgtactttatgtac

SEQ ID NO: 526960 - DNA, 15 bp, Homo sapiens
tatgtactttatgta

SEQ ID NO: 526961 - DNA, 15 bp, Homo sapiens
ttatgtactttatgt

SEQ ID NO: 526962 - DNA, 15 bp, Homo sapiens
tttatgtactttatg

SEQ ID NO: 526963 - DNA, 15 bp, Homo sapiens
ctttatgtactttat

SEQ ID NO: 526964 - DNA, 15 bp, Homo sapiens
tctttatgtacttta

SEQ ID NO: 526965 - DNA, 15 bp, Homo sapiens
atctttatgtacttt

SEQ ID NO: 526966 - DNA, 15 bp, Homo sapiens
aatctttatgtactt

SEQ ID NO: 526967 - DNA, 15 bp, Homo sapiens
caatctttatgtact

SEQ ID NO: 526968 - DNA, 15 bp, Homo sapiens
acaatctttatgtac

SEQ ID NO: 526969 - DNA, 15 bp, Homo sapiens
gacaatctttatgta

SEQ ID NO: 526970 - DNA, 15 bp, Homo sapiens
tgacaatctttatgt

SEQ ID NO: 526971 - DNA, 15 bp, Homo sapiens
gtgacaatctttatg

SEQ ID NO: 526972 - DNA, 15 bp, Homo sapiens
ggtgacaatctttat

SEQ ID NO: 526973 - DNA, 15 bp, Homo sapiens
gggtgacaatcttta

SEQ ID NO: 526974 - DNA, 15 bp, Homo sapiens
ggggtgacaatcttt

SEQ ID NO: 526975 - DNA, 15 bp, Homo sapiens
tggggtgacaatctt

SEQ ID NO: 526976 - DNA, 15 bp, Homo sapiens
gtggggtgacaatct

SEQ ID NO: 526977 - DNA, 15 bp, Homo sapiens
tgtggggtgacaatc

SEQ ID NO: 526978 - DNA, 15 bp, Homo sapiens
ttgtggggtgacaat

SEQ ID NO: 526979 - DNA, 15 bp, Homo sapiens
tttgtggggtgacaa

SEQ ID NO: 526980 - DNA, 15 bp, Homo sapiens
atttgtggggtgaca

SEQ ID NO: 526981 - DNA, 15 bp, Homo sapiens
tatttgtggggtgac

SEQ ID NO: 526982 - DNA, 15 bp, Homo sapiens
gtatttgtggggtga

SEQ ID NO: 526983 - DNA, 15 bp, Homo sapiens
tgtatttgtggggtg

SEQ ID NO: 526984 - DNA, 15 bp, Homo sapiens
gtgtatttgtggggt

SEQ ID NO: 526985 - DNA, 15 bp, Homo sapiens
tgtgtatttgtgggg

SEQ ID NO: 526986 - DNA, 15 bp, Homo sapiens
gtgtgtatttgtggg

SEQ ID NO: 526987 - DNA, 15 bp, Homo sapiens
ggtgtgtatttgtgg

SEQ ID NO: 526988 - DNA, 15 bp, Homo sapiens
tggtgtgtatttgtg

SEQ ID NO: 526989 - DNA, 15 bp, Homo sapiens
ttggtgtgtatttgt

SEQ ID NO: 526990 - DNA, 15 bp, Homo sapiens
cttggtgtgtatttg

SEQ ID NO: 526991 - DNA, 15 bp, Homo sapiens
acttggtgtgtattt

SEQ ID NO: 526992 - DNA, 15 bp, Homo sapiens
gacttggtgtgtatt

SEQ ID NO: 526993 - DNA, 15 bp, Homo sapiens
ggacttggtgtgtat

SEQ ID NO: 526994 - DNA, 15 bp, Homo sapiens
aggacttggtgtgta

SEQ ID NO: 526995 - DNA, 15 bp, Homo sapiens
taggacttggtgtgt

SEQ ID NO: 526996 - DNA, 15 bp, Homo sapiens
ataggacttggtgtg

SEQ ID NO: 526997 - DNA, 15 bp, Homo sapiens
aataggacttggtgt

SEQ ID NO: 526998 - DNA, 15 bp, Homo sapiens
aaataggacttggtg

SEQ ID NO: 526999 - DNA, 15 bp, Homo sapiens
aaaataggacttggt

SEQ ID NO: 527000 - DNA, 15 bp, Homo sapiens
gaaaataggacttgg

SEQ ID NO: 527001 - DNA, 15 bp, Homo sapiens
tgaaaataggacttg

SEQ ID NO: 527002 - DNA, 15 bp, Homo sapiens
atgaaaataggactt

SEQ ID NO: 527003 - DNA, 15 bp, Homo sapiens
gatgaaaataggact

SEQ ID NO: 527004 - DNA, 15 bp, Homo sapiens
tgatgaaaataggac

SEQ ID NO: 527005 - DNA, 15 bp, Homo sapiens
ctgatgaaaatagga

SEQ ID NO: 527006 - DNA, 15 bp, Homo sapiens
gctgatgaaaatagg

SEQ ID NO: 527007 - DNA, 15 bp, Homo sapiens
cgctgatgaaaatag

SEQ ID NO: 527008 - DNA, 15 bp, Homo sapiens
tcgctgatgaaaata

SEQ ID NO: 527009 - DNA, 15 bp, Homo sapiens
atcgctgatgaaaat

SEQ ID NO: 527010 - DNA, 15 bp, Homo sapiens
tatcgctgatgaaaa

SEQ ID NO: 527011 - DNA, 15 bp, Homo sapiens
ttatcgctgatgaaa

SEQ ID NO: 527012 - DNA, 15 bp, Homo sapiens
tttatcgctgatgaa

SEQ ID NO: 527013 - DNA, 15 bp, Homo sapiens
ttttatcgctgatga

SEQ ID NO: 527014 - DNA, 15 bp, Homo sapiens
tttttatcgctgatg

SEQ ID NO: 527015 - DNA, 15 bp, Homo sapiens
ttttttatcgctgat

SEQ ID NO: 527016 - DNA, 15 bp, Homo sapiens
cttttttatcgctga

SEQ ID NO: 527017 - DNA, 15 bp, Homo sapiens
tcttttttatcgctg

SEQ ID NO: 527018 - DNA, 15 bp, Homo sapiens
ttcttttttatcgct

SEQ ID NO: 527019 - DNA, 15 bp, Homo sapiens
tttcttttttatcgc

SEQ ID NO: 527020 - DNA, 15 bp, Homo sapiens
ttttcttttttatcg

SEQ ID NO: 527021 - DNA, 15 bp, Homo sapiens
cttttcttttttatc

SEQ ID NO: 527022 - DNA, 15 bp, Homo sapiens
acttttcttttttat

SEQ ID NO: 527023 - DNA, 15 bp, Homo sapiens
aacttttctttttta

SEQ ID NO: 527024 - DNA, 15 bp, Homo sapiens
gaacttttctttttt

SEQ ID NO: 527025 - DNA, 15 bp, Homo sapiens
agaacttttcttttt

SEQ ID NO: 527026 - DNA, 15 bp, Homo sapiens
aagaacttttctttt

SEQ ID NO: 527027 - DNA, 15 bp, Homo sapiens
caagaacttttcttt

SEQ ID NO: 527028 - DNA, 15 bp, Homo sapiens
gcaagaacttttctt

SEQ ID NO: 527029 - DNA, 15 bp, Homo sapiens
agcaagaacttttct

SEQ ID NO: 527030 - DNA, 15 bp, Homo sapiens
aagcaagaacttttc

SEQ ID NO: 527031 - DNA, 15 bp, Homo sapiens
aaagcaagaactttt

SEQ ID NO: 527032 - DNA, 15 bp, Homo sapiens
gaaagcaagaacttt

SEQ ID NO: 527033 - DNA, 15 bp, Homo sapiens
ggaaagcaagaactt

SEQ ID NO: 527034 - DNA, 15 bp, Homo sapiens
cggaaagcaagaact

SEQ ID NO: 527035 - DNA, 15 bp, Homo sapiens
ccggaaagcaagaac

SEQ ID NO: 527036 - DNA, 15 bp, Homo sapiens
tccggaaagcaagaa

SEQ ID NO: 527037 - DNA, 15 bp, Homo sapiens
ttccggaaagcaaga

SEQ ID NO: 527038 - DNA, 15 bp, Homo sapiens
cttccggaaagcaag

SEQ ID NO: 527039 - DNA, 15 bp, Homo sapiens
gcttccggaaagcaa

SEQ ID NO: 527040 - DNA, 15 bp, Homo sapiens
agcttccggaaagca

SEQ ID NO: 527041 - DNA, 15 bp, Homo sapiens
aagcttccggaaagc

SEQ ID NO: 527042 - DNA, 15 bp, Homo sapiens
caagcttccggaaag

SEQ ID NO: 527043 - DNA, 15 bp, Homo sapiens
gcaagcttccggaaa

SEQ ID NO: 527044 - DNA, 15 bp, Homo sapiens
tgcaagcttccggaa

SEQ ID NO: 527045 - DNA, 15 bp, Homo sapiens
atgcaagcttccgga

SEQ ID NO: 527046 - DNA, 15 bp, Homo sapiens
catgcaagcttccgg

SEQ ID NO: 527047 - DNA, 15 bp, Homo sapiens
gcatgcaagcttccg

SEQ ID NO: 527048 - DNA, 15 bp, Homo sapiens
cgcatgcaagcttcc

SEQ ID NO: 527049 - DNA, 15 bp, Homo sapiens
ccgcatgcaagcttc

SEQ ID NO: 527050 - DNA, 15 bp, Homo sapiens
gccgcatgcaagctt

SEQ ID NO: 527051 - DNA, 15 bp, Homo sapiens
agccgcatgcaagct

SEQ ID NO: 527052 - DNA, 15 bp, Homo sapiens
gagccgcatgcaagc

SEQ ID NO: 527053 - DNA, 15 bp, Homo sapiens
agagccgcatgcaag

SEQ ID NO: 527054 - DNA, 15 bp, Homo sapiens
cagagccgcatgcaa

SEQ ID NO: 527055 - DNA, 15 bp, Homo sapiens
tcagagccgcatgca

SEQ ID NO: 527056 - DNA, 15 bp, Homo sapiens
ctcagagccgcatgc

SEQ ID NO: 527057 - DNA, 15 bp, Homo sapiens
actcagagccgcatg

SEQ ID NO: 527058 - DNA, 15 bp, Homo sapiens
tactcagagccgcat

SEQ ID NO: 527059 - DNA, 15 bp, Homo sapiens
gtactcagagccgca

SEQ ID NO: 527060 - DNA, 15 bp, Homo sapiens
ggtactcagagccgc

SEQ ID NO: 527061 - DNA, 15 bp, Homo sapiens
gggtactcagagccg

SEQ ID NO: 527062 - DNA, 15 bp, Homo sapiens
tgggtactcagagcc

SEQ ID NO: 527063 - DNA, 15 bp, Homo sapiens
ctgggtactcagagc

SEQ ID NO: 527064 - DNA, 15 bp, Homo sapiens
actgggtactcagag

SEQ ID NO: 527065 - DNA, 15 bp, Homo sapiens
cactgggtactcaga

SEQ ID NO: 527066 - DNA, 15 bp, Homo sapiens
tcactgggtactcag

SEQ ID NO: 527067 - DNA, 15 bp, Homo sapiens
gtcactgggtactca

SEQ ID NO: 527068 - DNA, 15 bp, Homo sapiens
tgtcactgggtactc

SEQ ID NO: 527069 - DNA, 15 bp, Homo sapiens
gtgtcactgggtact

SEQ ID NO: 527070 - DNA, 15 bp, Homo sapiens
ggtgtcactgggtac

SEQ ID NO: 527071 - DNA, 15 bp, Homo sapiens
tggtgtcactgggta

SEQ ID NO: 527072 - DNA, 15 bp, Homo sapiens
ctggtgtcactgggt

SEQ ID NO: 527073 - DNA, 15 bp, Homo sapiens
tctggtgtcactggg

SEQ ID NO: 527074 - DNA, 15 bp, Homo sapiens
atctggtgtcactgg

SEQ ID NO: 527075 - DNA, 15 bp, Homo sapiens
catctggtgtcactg

SEQ ID NO: 527076 - DNA, 15 bp, Homo sapiens
ccatctggtgtcact

SEQ ID NO: 527077 - DNA, 15 bp, Homo sapiens
accatctggtgtcac

SEQ ID NO: 527078 - DNA, 15 bp, Homo sapiens
taccatctggtgtca

SEQ ID NO: 527079 - DNA, 15 bp, Homo sapiens
gtaccatctggtgtc

SEQ ID NO: 527080 - DNA, 15 bp, Homo sapiens
agtaccatctggtgt

SEQ ID NO: 527081 - DNA, 15 bp, Homo sapiens
gagtaccatctggtg

SEQ ID NO: 527082 - DNA, 15 bp, Homo sapiens
tgagtaccatctggt

SEQ ID NO: 527083 - DNA, 15 bp, Homo sapiens
ctgagtaccatctgg

SEQ ID NO: 527084 - DNA, 15 bp, Homo sapiens
gctgagtaccatctg

SEQ ID NO: 527085 - DNA, 15 bp, Homo sapiens
cgctgagtaccatct

SEQ ID NO: 527086 - DNA, 15 bp, Homo sapiens
acgctgagtaccatc

SEQ ID NO: 527087 - DNA, 15 bp, Homo sapiens
aacgctgagtaccat

SEQ ID NO: 527088 - DNA, 15 bp, Homo sapiens
aaacgctgagtacca

SEQ ID NO: 527089 - DNA, 15 bp, Homo sapiens
aaaacgctgagtacc

SEQ ID NO: 527090 - DNA, 15 bp, Homo sapiens
caaaacgctgagtac

SEQ ID NO: 527091 - DNA, 15 bp, Homo sapiens
gcaaaacgctgagta

SEQ ID NO: 527092 - DNA, 15 bp, Homo sapiens
tgcaaaacgctgagt

SEQ ID NO: 527093 - DNA, 15 bp, Homo sapiens
ttgcaaaacgctgag

SEQ ID NO: 527094 - DNA, 15 bp, Homo sapiens
cttgcaaaacgctga

SEQ ID NO: 527095 - DNA, 15 bp, Homo sapiens
ccttgcaaaacgctg

SEQ ID NO: 527096 - DNA, 15 bp, Homo sapiens
cccttgcaaaacgct

SEQ ID NO: 527097 - DNA, 15 bp, Homo sapiens
tcccttgcaaaacgc

SEQ ID NO: 527098 - DNA, 15 bp, Homo sapiens
atcccttgcaaaacg

SEQ ID NO: 527099 - DNA, 15 bp, Homo sapiens
aatcccttgcaaaac

SEQ ID NO: 527100 - DNA, 15 bp, Homo sapiens
taatcccttgcaaaa

SEQ ID NO: 527101 - DNA, 15 bp, Homo sapiens
gtaatcccttgcaaa

SEQ ID NO: 527102 - DNA, 15 bp, Homo sapiens
ggtaatcccttgcaa

SEQ ID NO: 527103 - DNA, 15 bp, Homo sapiens
tggtaatcccttgca

SEQ ID NO: 527104 - DNA, 15 bp, Homo sapiens
gtggtaatcccttgc

SEQ ID NO: 527105 - DNA, 15 bp, Homo sapiens
tgtggtaatcccttg

SEQ ID NO: 527106 - DNA, 15 bp, Homo sapiens
ttgtggtaatccctt

SEQ ID NO: 527107 - DNA, 15 bp, Homo sapiens
cttgtggtaatccct

SEQ ID NO: 527108 - DNA, 15 bp, Homo sapiens
ccttgtggtaatccc

SEQ ID NO: 527109 - DNA, 15 bp, Homo sapiens
gccttgtggtaatcc

SEQ ID NO: 527110 - DNA, 15 bp, Homo sapiens
ggccttgtggtaatc

SEQ ID NO: 527111 - DNA, 15 bp, Homo sapiens
gggccttgtggtaat

SEQ ID NO: 527112 - DNA, 15 bp, Homo sapiens
ggggccttgtggtaa

SEQ ID NO: 527113 - DNA, 15 bp, Homo sapiens
cggggccttgtggta

SEQ ID NO: 527114 - DNA, 15 bp, Homo sapiens
acggggccttgtggt

SEQ ID NO: 527115 - DNA, 15 bp, Homo sapiens
cacggggccttgtgg

SEQ ID NO: 527116 - DNA, 15 bp, Homo sapiens
tcacggggccttgtg

SEQ ID NO: 527117 - DNA, 15 bp, Homo sapiens
atcacggggccttgt

SEQ ID NO: 527118 - DNA, 15 bp, Homo sapiens
catcacggggccttg

SEQ ID NO: 527119 - DNA, 15 bp, Homo sapiens
ccatcacggggcctt

SEQ ID NO: 527120 - DNA, 15 bp, Homo sapiens
accatcacggggcct

SEQ ID NO: 527121 - DNA, 15 bp, Homo sapiens
caccatcacggggcc

SEQ ID NO: 527122 - DNA, 15 bp, Homo sapiens
gcaccatcacggggc

SEQ ID NO: 527123 - DNA, 15 bp, Homo sapiens
ggcaccatcacgggg

SEQ ID NO: 527124 - DNA, 15 bp, Homo sapiens
aggcaccatcacggg

SEQ ID NO: 527125 - DNA, 15 bp, Homo sapiens
caggcaccatcacgg

SEQ ID NO: 527126 - DNA, 15 bp, Homo sapiens
gcaggcaccatcacg

SEQ ID NO: 527127 - DNA, 15 bp, Homo sapiens
ggcaggcaccatcac

SEQ ID NO: 527128 - DNA, 15 bp, Homo sapiens
tggcaggcaccatca

SEQ ID NO: 527129 - DNA, 15 bp, Homo sapiens
atggcaggcaccatc

SEQ ID NO: 527130 - DNA, 15 bp, Homo sapiens
catggcaggcaccat

SEQ ID NO: 527131 - DNA, 15 bp, Homo sapiens
ccatggcaggcacca

SEQ ID NO: 527132 - DNA, 15 bp, Homo sapiens
accatggcaggcacc

SEQ ID NO: 527133 - DNA, 15 bp, Homo sapiens
aaccatggcaggcac

SEQ ID NO: 527134 - DNA, 15 bp, Homo sapiens
taaccatggcaggca

SEQ ID NO: 527135 - DNA, 15 bp, Homo sapiens
ctaaccatggcaggc

SEQ ID NO: 527136 - DNA, 15 bp, Homo sapiens
cctaaccatggcagg

SEQ ID NO: 527137 - DNA, 15 bp, Homo sapiens
tcctaaccatggcag

SEQ ID NO: 527138 - DNA, 15 bp, Homo sapiens
gtcctaaccatggca

SEQ ID NO: 527139 - DNA, 15 bp, Homo sapiens
tgtcctaaccatggc

SEQ ID NO: 527140 - DNA, 15 bp, Homo sapiens
ctgtcctaaccatgg

SEQ ID NO: 527141 - DNA, 15 bp, Homo sapiens
cctgtcctaaccatg

SEQ ID NO: 527142 - DNA, 15 bp, Homo sapiens
gcctgtcctaaccat

SEQ ID NO: 527143 - DNA, 15 bp, Homo sapiens
agcctgtcctaacca

SEQ ID NO: 527144 - DNA, 15 bp, Homo sapiens
cagcctgtcctaacc

SEQ ID NO: 527145 - DNA, 15 bp, Homo sapiens
ccagcctgtcctaac

SEQ ID NO: 527146 - DNA, 15 bp, Homo sapiens
accagcctgtcctaa

SEQ ID NO: 527147 - DNA, 15 bp, Homo sapiens
caccagcctgtccta

SEQ ID NO: 527148 - DNA, 15 bp, Homo sapiens
ccaccagcctgtcct

SEQ ID NO: 527149 - DNA, 15 bp, Homo sapiens
gccaccagcctgtcc

SEQ ID NO: 527150 - DNA, 15 bp, Homo sapiens
agccaccagcctgtc

SEQ ID NO: 527151 - DNA, 15 bp, Homo sapiens
cagccaccagcctgt

SEQ ID NO: 527152 - DNA, 15 bp, Homo sapiens
ccagccaccagcctg

SEQ ID NO: 527153 - DNA, 15 bp, Homo sapiens
cccagccaccagcct

SEQ ID NO: 527154 - DNA, 15 bp, Homo sapiens
acccagccaccagcc

SEQ ID NO: 527155 - DNA, 15 bp, Homo sapiens
tacccagccaccagc

SEQ ID NO: 527156 - DNA, 15 bp, Homo sapiens
ctacccagccaccag

SEQ ID NO: 527157 - DNA, 15 bp, Homo sapiens
cctacccagccacca

SEQ ID NO: 527158 - DNA, 15 bp, Homo sapiens
ccctacccagccacc

SEQ ID NO: 527159 - DNA, 15 bp, Homo sapiens
accctacccagccac

SEQ ID NO: 527160 - DNA, 15 bp, Homo sapiens
aaccctacccagcca

SEQ ID NO: 527161 - DNA, 15 bp, Homo sapiens
taaccctacccagcc

SEQ ID NO: 527162 - DNA, 15 bp, Homo sapiens
ctaaccctacccagc

SEQ ID NO: 527163 - DNA, 15 bp, Homo sapiens
actaaccctacccag

SEQ ID NO: 527164 - DNA, 15 bp, Homo sapiens
cactaaccctaccca

SEQ ID NO: 527165 - DNA, 15 bp, Homo sapiens
tcactaaccctaccc

SEQ ID NO: 527166 - DNA, 15 bp, Homo sapiens
ctcactaaccctacc

SEQ ID NO: 527167 - DNA, 15 bp, Homo sapiens
tctcactaaccctac

SEQ ID NO: 527168 - DNA, 15 bp, Homo sapiens
gtctcactaacccta

SEQ ID NO: 527169 - DNA, 15 bp, Homo sapiens
ggtctcactaaccct

SEQ ID NO: 527170 - DNA, 15 bp, Homo sapiens
gggtctcactaaccc

SEQ ID NO: 527171 - DNA, 15 bp, Homo sapiens
tgggtctcactaacc

SEQ ID NO: 527172 - DNA, 15 bp, Homo sapiens
ctgggtctcactaac

SEQ ID NO: 527173 - DNA, 15 bp, Homo sapiens
actgggtctcactaa

SEQ ID NO: 527174 - DNA, 15 bp, Homo sapiens
cactgggtctcacta

SEQ ID NO: 527175 - DNA, 15 bp, Homo sapiens
ccactgggtctcact

SEQ ID NO: 527176 - DNA, 15 bp, Homo sapiens
tccactgggtctcac

SEQ ID NO: 527177 - DNA, 15 bp, Homo sapiens
ctccactgggtctca

SEQ ID NO: 527178 - DNA, 15 bp, Homo sapiens
tctccactgggtctc

SEQ ID NO: 527179 - DNA, 15 bp, Homo sapiens
ctctccactgggtct

SEQ ID NO: 527180 - DNA, 15 bp, Homo sapiens
cctctccactgggtc

SEQ ID NO: 527181 - DNA, 15 bp, Homo sapiens
tcctctccactgggt

SEQ ID NO: 527182 - DNA, 15 bp, Homo sapiens
atcctctccactggg

SEQ ID NO: 527183 - DNA, 15 bp, Homo sapiens
catcctctccactgg

SEQ ID NO: 527184 - DNA, 15 bp, Homo sapiens
gcatcctctccactg

SEQ ID NO: 527185 - DNA, 15 bp, Homo sapiens
agcatcctctccact

SEQ ID NO: 527186 - DNA, 15 bp, Homo sapiens
cagcatcctctccac

SEQ ID NO: 527187 - DNA, 15 bp, Homo sapiens
acagcatcctctcca

SEQ ID NO: 527188 - DNA, 15 bp, Homo sapiens
cacagcatcctctcc

SEQ ID NO: 527189 - DNA, 15 bp, Homo sapiens
acacagcatcctctc

SEQ ID NO: 527190 - DNA, 15 bp, Homo sapiens
cacacagcatcctct

SEQ ID NO: 527191 - DNA, 15 bp, Homo sapiens
acacacagcatcctc

SEQ ID NO: 527192 - DNA, 15 bp, Homo sapiens
gacacacagcatcct

SEQ ID NO: 527193 - DNA, 15 bp, Homo sapiens
tgacacacagcatcc

SEQ ID NO: 527194 - DNA, 15 bp, Homo sapiens
gtgacacacagcatc

SEQ ID NO: 527195 - DNA, 15 bp, Homo sapiens
tgtgacacacagcat

SEQ ID NO: 527196 - DNA, 15 bp, Homo sapiens
ctgtgacacacagca

SEQ ID NO: 527197 - DNA, 15 bp, Homo sapiens
cctgtgacacacagc

SEQ ID NO: 527198 - DNA, 15 bp, Homo sapiens
gcctgtgacacacag

SEQ ID NO: 527199 - DNA, 15 bp, Homo sapiens
agcctgtgacacaca

SEQ ID NO: 527200 - DNA, 15 bp, Homo sapiens
cagcctgtgacacac

SEQ ID NO: 527201 - DNA, 15 bp, Homo sapiens
ccagcctgtgacaca

SEQ ID NO: 527202 - DNA, 15 bp, Homo sapiens
tccagcctgtgacac

SEQ ID NO: 527203 - DNA, 15 bp, Homo sapiens
ctccagcctgtgaca

SEQ ID NO: 527204 - DNA, 15 bp, Homo sapiens
tctccagcctgtgac

SEQ ID NO: 527205 - DNA, 15 bp, Homo sapiens
ctctccagcctgtga

SEQ ID NO: 527206 - DNA, 15 bp, Homo sapiens
cctctccagcctgtg

SEQ ID NO: 527207 - DNA, 15 bp, Homo sapiens
acctctccagcctgt

SEQ ID NO: 527208 - DNA, 15 bp, Homo sapiens
cacctctccagcctg

SEQ ID NO: 527209 - DNA, 15 bp, Homo sapiens
tcacctctccagcct

SEQ ID NO: 527210 - DNA, 15 bp, Homo sapiens
ctcacctctccagcc

SEQ ID NO: 527211 - DNA, 15 bp, Homo sapiens
tctcacctctccagc

SEQ ID NO: 527212 - DNA, 15 bp, Homo sapiens
gtctcacctctccag

SEQ ID NO: 527213 - DNA, 15 bp, Homo sapiens
ggtctcacctctcca

SEQ ID NO: 527214 - DNA, 15 bp, Homo sapiens
tggtctcacctctcc

SEQ ID NO: 527215 - DNA, 15 bp, Homo sapiens
atggtctcacctctc

SEQ ID NO: 527216 - DNA, 15 bp, Homo sapiens
aatggtctcacctct

SEQ ID NO: 527217 - DNA, 15 bp, Homo sapiens
caatggtctcacctc

SEQ ID NO: 527218 - DNA, 15 bp, Homo sapiens
tcaatggtctcacct

SEQ ID NO: 527219 - DNA, 15 bp, Homo sapiens
ctcaatggtctcacc

SEQ ID NO: 527220 - DNA, 15 bp, Homo sapiens
cctcaatggtctcac

SEQ ID NO: 527221 - DNA, 15 bp, Homo sapiens
acctcaatggtctca

SEQ ID NO: 527222 - DNA, 15 bp, Homo sapiens
tacctcaatggtctc

SEQ ID NO: 527223 - DNA, 15 bp, Homo sapiens
ctacctcaatggtct

SEQ ID NO: 527224 - DNA, 15 bp, Homo sapiens
actacctcaatggtc

SEQ ID NO: 527225 - DNA, 15 bp, Homo sapiens
gactacctcaatggt

SEQ ID NO: 527226 - DNA, 15 bp, Homo sapiens
tgactacctcaatgg

SEQ ID NO: 527227 - DNA, 15 bp, Homo sapiens
ctgactacctcaatg

SEQ ID NO: 527228 - DNA, 15 bp, Homo sapiens
actgactacctcaat

SEQ ID NO: 527229 - DNA, 15 bp, Homo sapiens
aactgactacctcaa

SEQ ID NO: 527230 - DNA, 15 bp, Homo sapiens
caactgactacctca

SEQ ID NO: 527231 - DNA, 15 bp, Homo sapiens
acaactgactacctc

SEQ ID NO: 527232 - DNA, 15 bp, Homo sapiens
tacaactgactacct

SEQ ID NO: 527233 - DNA, 15 bp, Homo sapiens
ctacaactgactacc

SEQ ID NO: 527234 - DNA, 15 bp, Homo sapiens
tctacaactgactac

SEQ ID NO: 527235 - DNA, 15 bp, Homo sapiens
ctctacaactgacta

SEQ ID NO: 527236 - DNA, 15 bp, Homo sapiens
cctctacaactgact

SEQ ID NO: 527237 - DNA, 15 bp, Homo sapiens
tcctctacaactgac

SEQ ID NO: 527238 - DNA, 15 bp, Homo sapiens
ttcctctacaactga

SEQ ID NO: 527239 - DNA, 15 bp, Homo sapiens
tttcctctacaactg

SEQ ID NO: 527240 - DNA, 15 bp, Homo sapiens
ctttcctctacaact

SEQ ID NO: 527241 - DNA, 15 bp, Homo sapiens
tctttcctctacaac

SEQ ID NO: 527242 - DNA, 15 bp, Homo sapiens
ttctttcctctacaa

SEQ ID NO: 527243 - DNA, 15 bp, Homo sapiens
tttctttcctctaca

SEQ ID NO: 527244 - DNA, 15 bp, Homo sapiens
gtttctttcctctac

SEQ ID NO: 527245 - DNA, 15 bp, Homo sapiens
ggtttctttcctcta

SEQ ID NO: 527246 - DNA, 15 bp, Homo sapiens
tggtttctttcctct

SEQ ID NO: 527247 - DNA, 15 bp, Homo sapiens
ctggtttctttcctc

SEQ ID NO: 527248 - DNA, 15 bp, Homo sapiens
gctggtttctttcct

SEQ ID NO: 527249 - DNA, 15 bp, Homo sapiens
tgctggtttctttcc

SEQ ID NO: 527250 - DNA, 15 bp, Homo sapiens
ttgctggtttctttc

SEQ ID NO: 527251 - DNA, 15 bp, Homo sapiens
cttgctggtttcttt

SEQ ID NO: 527252 - DNA, 15 bp, Homo sapiens
tcttgctggtttctt

SEQ ID NO: 527253 - DNA, 15 bp, Homo sapiens
ctcttgctggtttct

SEQ ID NO: 527254 - DNA, 15 bp, Homo sapiens
cctcttgctggtttc

SEQ ID NO: 527255 - DNA, 15 bp, Homo sapiens
ccctcttgctggttt

SEQ ID NO: 527256 - DNA, 15 bp, Homo sapiens
cccctcttgctggtt

SEQ ID NO: 527257 - DNA, 15 bp, Homo sapiens
tcccctcttgctggt

SEQ ID NO: 527258 - DNA, 15 bp, Homo sapiens
ttcccctcttgctgg

SEQ ID NO: 527259 - DNA, 15 bp, Homo sapiens
tttcccctcttgctg

SEQ ID NO: 527260 - DNA, 15 bp, Homo sapiens
ttttcccctcttgct

SEQ ID NO: 527261 - DNA, 15 bp, Homo sapiens
attttcccctcttgc

SEQ ID NO: 527262 - DNA, 15 bp, Homo sapiens
gattttcccctcttg

SEQ ID NO: 527263 - DNA, 15 bp, Homo sapiens
agattttcccctctt

SEQ ID NO: 527264 - DNA, 15 bp, Homo sapiens
cagattttcccctct

SEQ ID NO: 527265 - DNA, 15 bp, Homo sapiens
acagattttcccctc

SEQ ID NO: 527266 - DNA, 15 bp, Homo sapiens
aacagattttcccct

SEQ ID NO: 527267 - DNA, 15 bp, Homo sapiens
caacagattttcccc

SEQ ID NO: 527268 - DNA, 15 bp, Homo sapiens
ccaacagattttccc

SEQ ID NO: 527269 - DNA, 15 bp, Homo sapiens
cccaacagattttcc

SEQ ID NO: 527270 - DNA, 15 bp, Homo sapiens
tcccaacagattttc

SEQ ID NO: 527271 - DNA, 15 bp, Homo sapiens
atcccaacagatttt

SEQ ID NO: 527272 - DNA, 15 bp, Homo sapiens
catcccaacagattt

SEQ ID NO: 527273 - DNA, 15 bp, Homo sapiens
gcatcccaacagatt

SEQ ID NO: 527274 - DNA, 15 bp, Homo sapiens
agcatcccaacagat

SEQ ID NO: 527275 - DNA, 15 bp, Homo sapiens
cagcatcccaacaga

SEQ ID NO: 527276 - DNA, 15 bp, Homo sapiens
gcagcatcccaacag

SEQ ID NO: 527277 - DNA, 15 bp, Homo sapiens
agcagcatcccaaca

SEQ ID NO: 527278 - DNA, 15 bp, Homo sapiens
aagcagcatcccaac

SEQ ID NO: 527279 - DNA, 15 bp, Homo sapiens
aaagcagcatcccaa

SEQ ID NO: 527280 - DNA, 15 bp, Homo sapiens
aaaagcagcatccca

SEQ ID NO: 527281 - DNA, 15 bp, Homo sapiens
taaaagcagcatccc

SEQ ID NO: 527282 - DNA, 15 bp, Homo sapiens
ctaaaagcagcatcc

SEQ ID NO: 527283 - DNA, 15 bp, Homo sapiens
gctaaaagcagcatc

SEQ ID NO: 527284 - DNA, 15 bp, Homo sapiens
ggctaaaagcagcat

SEQ ID NO: 527285 - DNA, 15 bp, Homo sapiens
aggctaaaagcagca

SEQ ID NO: 527286 - DNA, 15 bp, Homo sapiens
aaggctaaaagcagc

SEQ ID NO: 527287 - DNA, 15 bp, Homo sapiens
aaaggctaaaagcag

SEQ ID NO: 527288 - DNA, 15 bp, Homo sapiens
caaaggctaaaagca

SEQ ID NO: 527289 - DNA, 15 bp, Homo sapiens
tcaaaggctaaaagc

SEQ ID NO: 527290 - DNA, 15 bp, Homo sapiens
atcaaaggctaaaag

SEQ ID NO: 527291 - DNA, 15 bp, Homo sapiens
catcaaaggctaaaa

SEQ ID NO: 527292 - DNA, 15 bp, Homo sapiens
ccatcaaaggctaaa

SEQ ID NO: 527293 - DNA, 15 bp, Homo sapiens
gccatcaaaggctaa

SEQ ID NO: 527294 - DNA, 15 bp, Homo sapiens
cgccatcaaaggcta

SEQ ID NO: 527295 - DNA, 15 bp, Homo sapiens
acgccatcaaaggct

SEQ ID NO: 527296 - DNA, 15 bp, Homo sapiens
cacgccatcaaaggc

SEQ ID NO: 527297 - DNA, 15 bp, Homo sapiens
acacgccatcaaagg

SEQ ID NO: 527298 - DNA, 15 bp, Homo sapiens
aacacgccatcaaag

SEQ ID NO: 527299 - DNA, 15 bp, Homo sapiens
gaacacgccatcaaa

SEQ ID NO: 527300 - DNA, 15 bp, Homo sapiens
ggaacacgccatcaa

SEQ ID NO: 527301 - DNA, 15 bp, Homo sapiens
tggaacacgccatca

SEQ ID NO: 527302 - DNA, 15 bp, Homo sapiens
ctggaacacgccatc

SEQ ID NO: 527303 - DNA, 15 bp, Homo sapiens
cctggaacacgccat

SEQ ID NO: 527304 - DNA, 15 bp, Homo sapiens
gcctggaacacgcca

SEQ ID NO: 527305 - DNA, 15 bp, Homo sapiens
tgcctggaacacgcc

SEQ ID NO: 527306 - DNA, 15 bp, Homo sapiens
ctgcctggaacacgc

SEQ ID NO: 527307 - DNA, 15 bp, Homo sapiens
tctgcctggaacacg

SEQ ID NO: 527308 - DNA, 15 bp, Homo sapiens
ctctgcctggaacac

SEQ ID NO: 527309 - DNA, 15 bp, Homo sapiens
cctctgcctggaaca

SEQ ID NO: 527310 - DNA, 15 bp, Homo sapiens
ccctctgcctggaac

SEQ ID NO: 527311 - DNA, 15 bp, Homo sapiens
tccctctgcctggaa

SEQ ID NO: 527312 - DNA, 15 bp, Homo sapiens
ttccctctgcctgga

SEQ ID NO: 527313 - DNA, 15 bp, Homo sapiens
attccctctgcctgg

SEQ ID NO: 527314 - DNA, 15 bp, Homo sapiens
tattccctctgcctg

SEQ ID NO: 527315 - DNA, 15 bp, Homo sapiens
ttattccctctgcct

SEQ ID NO: 527316 - DNA, 15 bp, Homo sapiens
cttattccctctgcc

SEQ ID NO: 527317 - DNA, 15 bp, Homo sapiens
gcttattccctctgc

SEQ ID NO: 527318 - DNA, 15 bp, Homo sapiens
tgcttattccctctg

SEQ ID NO: 527319 - DNA, 15 bp, Homo sapiens
ttgcttattccctct

SEQ ID NO: 527320 - DNA, 15 bp, Homo sapiens
tttgcttattccctc

SEQ ID NO: 527321 - DNA, 15 bp, Homo sapiens
atttgcttattccct

SEQ ID NO: 527322 - DNA, 15 bp, Homo sapiens
tatttgcttattccc

SEQ ID NO: 527323 - DNA, 15 bp, Homo sapiens
ttatttgcttattcc

SEQ ID NO: 527324 - DNA, 15 bp, Homo sapiens
tttatttgcttattc

SEQ ID NO: 527325 - DNA, 15 bp, Homo sapiens
atttatttgcttatt

SEQ ID NO: 527326 - DNA, 15 bp, Homo sapiens
catttatttgcttat

SEQ ID NO: 527327 - DNA, 15 bp, Homo sapiens
ccatttatttgctta

SEQ ID NO: 527328 - DNA, 15 bp, Homo sapiens
cccatttatttgctt

SEQ ID NO: 527329 - DNA, 15 bp, Homo sapiens
acccatttatttgct

SEQ ID NO: 527330 - DNA, 15 bp, Homo sapiens
gacccatttatttgc

SEQ ID NO: 527331 - DNA, 15 bp, Homo sapiens
ggacccatttatttg

SEQ ID NO: 527332 - DNA, 15 bp, Homo sapiens
aggacccatttattt

SEQ ID NO: 527333 - DNA, 15 bp, Homo sapiens
caggacccatttatt

SEQ ID NO: 527334 - DNA, 15 bp, Homo sapiens
tcaggacccatttat

SEQ ID NO: 527335 - DNA, 15 bp, Homo sapiens
ctcaggacccattta

SEQ ID NO: 527336 - DNA, 15 bp, Homo sapiens
tctcaggacccattt

SEQ ID NO: 527337 - DNA, 15 bp, Homo sapiens
gtctcaggacccatt

SEQ ID NO: 527338 - DNA, 15 bp, Homo sapiens
tgtctcaggacccat

SEQ ID NO: 527339 - DNA, 15 bp, Homo sapiens
ttgtctcaggaccca

SEQ ID NO: 527340 - DNA, 15 bp, Homo sapiens
cttgtctcaggaccc

SEQ ID NO: 527341 - DNA, 15 bp, Homo sapiens
ccttgtctcaggacc

SEQ ID NO: 527342 - DNA, 15 bp, Homo sapiens
cccttgtctcaggac

SEQ ID NO: 527343 - DNA, 15 bp, Homo sapiens
ccccttgtctcagga

SEQ ID NO: 527344 - DNA, 15 bp, Homo sapiens
accccttgtctcagg

SEQ ID NO: 527345 - DNA, 15 bp, Homo sapiens
aaccccttgtctcag

SEQ ID NO: 527346 - DNA, 15 bp, Homo sapiens
taaccccttgtctca

SEQ ID NO: 527347 - DNA, 15 bp, Homo sapiens
gtaaccccttgtctc

SEQ ID NO: 527348 - DNA, 15 bp, Homo sapiens
agtaaccccttgtct

SEQ ID NO: 527349 - DNA, 15 bp, Homo sapiens
cagtaaccccttgtc

SEQ ID NO: 527350 - DNA, 15 bp, Homo sapiens
acagtaaccccttgt

SEQ ID NO: 527351 - DNA, 15 bp, Homo sapiens
cacagtaaccccttg

SEQ ID NO: 527352 - DNA, 15 bp, Homo sapiens
tcacagtaacccctt

SEQ ID NO: 527353 - DNA, 15 bp, Homo sapiens
atcacagtaacccct

SEQ ID NO: 527354 - DNA, 15 bp, Homo sapiens
catcacagtaacccc

SEQ ID NO: 527355 - DNA, 15 bp, Homo sapiens
tcatcacagtaaccc

SEQ ID NO: 527356 - DNA, 15 bp, Homo sapiens
ctcatcacagtaacc

SEQ ID NO: 527357 - DNA, 15 bp, Homo sapiens
cctcatcacagtaac

SEQ ID NO: 527358 - DNA, 15 bp, Homo sapiens
gcctcatcacagtaa

SEQ ID NO: 527359 - DNA, 15 bp, Homo sapiens
cgcctcatcacagta

SEQ ID NO: 527360 - DNA, 15 bp, Homo sapiens
ccgcctcatcacagt

SEQ ID NO: 527361 - DNA, 15 bp, Homo sapiens
gccgcctcatcacag

SEQ ID NO: 527362 - DNA, 15 bp, Homo sapiens
cgccgcctcatcaca

SEQ ID NO: 527363 - DNA, 15 bp, Homo sapiens
acgccgcctcatcac

SEQ ID NO: 527364 - DNA, 15 bp, Homo sapiens
aacgccgcctcatca

SEQ ID NO: 527365 - DNA, 15 bp, Homo sapiens
caacgccgcctcatc

SEQ ID NO: 527366 - DNA, 15 bp, Homo sapiens
ccaacgccgcctcat

SEQ ID NO: 527367 - DNA, 15 bp, Homo sapiens
accaacgccgcctca

SEQ ID NO: 527368 - DNA, 15 bp, Homo sapiens
aaccaacgccgcctc

SEQ ID NO: 527369 - DNA, 15 bp, Homo sapiens
taaccaacgccgcct

SEQ ID NO: 527370 - DNA, 15 bp, Homo sapiens
gtaaccaacgccgcc

SEQ ID NO: 527371 - DNA, 15 bp, Homo sapiens
tgtaaccaacgccgc

SEQ ID NO: 527372 - DNA, 15 bp, Homo sapiens
atgtaaccaacgccg

SEQ ID NO: 527373 - DNA, 15 bp, Homo sapiens
catgtaaccaacgcc

SEQ ID NO: 527374 - DNA, 15 bp, Homo sapiens
gcatgtaaccaacgc

SEQ ID NO: 527375 - DNA, 15 bp, Homo sapiens
ggcatgtaaccaacg

SEQ ID NO: 527376 - DNA, 15 bp, Homo sapiens
tggcatgtaaccaac

SEQ ID NO: 527377 - DNA, 15 bp, Homo sapiens
ttggcatgtaaccaa

SEQ ID NO: 527378 - DNA, 15 bp, Homo sapiens
tttggcatgtaacca

SEQ ID NO: 527379 - DNA, 15 bp, Homo sapiens
gtttggcatgtaacc

SEQ ID NO: 527380 - DNA, 15 bp, Homo sapiens
ggtttggcatgtaac

SEQ ID NO: 527381 - DNA, 15 bp, Homo sapiens
aggtttggcatgtaa

SEQ ID NO: 527382 - DNA, 15 bp, Homo sapiens
aaggtttggcatgta

SEQ ID NO: 527383 - DNA, 15 bp, Homo sapiens
caaggtttggcatgt

SEQ ID NO: 527384 - DNA, 15 bp, Homo sapiens
gcaaggtttggcatg

SEQ ID NO: 527385 - DNA, 15 bp, Homo sapiens
agcaaggtttggcat

SEQ ID NO: 527386 - DNA, 15 bp, Homo sapiens
tagcaaggtttggca

SEQ ID NO: 527387 - DNA, 15 bp, Homo sapiens
ctagcaaggtttggc

SEQ ID NO: 527388 - DNA, 15 bp, Homo sapiens
cctagcaaggtttgg

SEQ ID NO: 527389 - DNA, 15 bp, Homo sapiens
ccctagcaaggtttg

SEQ ID NO: 527390 - DNA, 15 bp, Homo sapiens
tccctagcaaggttt

SEQ ID NO: 527391 - DNA, 15 bp, Homo sapiens
atccctagcaaggtt

SEQ ID NO: 527392 - DNA, 15 bp, Homo sapiens
aatccctagcaaggt

SEQ ID NO: 527393 - DNA, 15 bp, Homo sapiens
aaatccctagcaagg

SEQ ID NO: 527394 - DNA, 15 bp, Homo sapiens
aaaatccctagcaag

SEQ ID NO: 527395 - DNA, 15 bp, Homo sapiens
taaaatccctagcaa

SEQ ID NO: 527396 - DNA, 15 bp, Homo sapiens
ttaaaatccctagca

SEQ ID NO: 527397 - DNA, 15 bp, Homo sapiens
attaaaatccctagc

SEQ ID NO: 527398 - DNA, 15 bp, Homo sapiens
tattaaaatccctag

SEQ ID NO: 527399 - DNA, 15 bp, Homo sapiens
ttattaaaatcccta

SEQ ID NO: 527400 - DNA, 15 bp, Homo sapiens
gttattaaaatccct

SEQ ID NO: 527401 - DNA, 15 bp, Homo sapiens
tgttattaaaatccc

SEQ ID NO: 527402 - DNA, 15 bp, Homo sapiens
ttgttattaaaatcc

SEQ ID NO: 527403 - DNA, 15 bp, Homo sapiens
gttgttattaaaatc

SEQ ID NO: 527404 - DNA, 15 bp, Homo sapiens
tgttgttattaaaat

SEQ ID NO: 527405 - DNA, 15 bp, Homo sapiens
atgttgttattaaaa

SEQ ID NO: 527406 - DNA, 15 bp, Homo sapiens
aatgttgttattaaa

SEQ ID NO: 527407 - DNA, 15 bp, Homo sapiens
caatgttgttattaa

SEQ ID NO: 527408 - DNA, 15 bp, Homo sapiens
tcaatgttgttatta

SEQ ID NO: 527409 - DNA, 15 bp, Homo sapiens
ttcaatgttgttatt

SEQ ID NO: 527410 - DNA, 15 bp, Homo sapiens
attcaatgttgttat

SEQ ID NO: 527411 - DNA, 15 bp, Homo sapiens
gattcaatgttgtta

SEQ ID NO: 527412 - DNA, 15 bp, Homo sapiens
agattcaatgttgtt

SEQ ID NO: 527413 - DNA, 15 bp, Homo sapiens
aagattcaatgttgt

SEQ ID NO: 527414 - DNA, 15 bp, Homo sapiens
taagattcaatgttg

SEQ ID NO: 527415 - DNA, 15 bp, Homo sapiens
ttaagattcaatgtt

SEQ ID NO: 527416 - DNA, 15 bp, Homo sapiens
gttaagattcaatgt

SEQ ID NO: 527417 - DNA, 15 bp, Homo sapiens
ggttaagattcaatg

SEQ ID NO: 527418 - DNA, 15 bp, Homo sapiens
aggttaagattcaat

SEQ ID NO: 527419 - DNA, 15 bp, Homo sapiens
caggttaagattcaa

SEQ ID NO: 527420 - DNA, 15 bp, Homo sapiens
tcaggttaagattca

SEQ ID NO: 527421 - DNA, 15 bp, Homo sapiens
atcaggttaagattc

SEQ ID NO: 527422 - DNA, 15 bp, Homo sapiens
catcaggttaagatt

SEQ ID NO: 527423 - DNA, 15 bp, Homo sapiens
tcatcaggttaagat

SEQ ID NO: 527424 - DNA, 15 bp, Homo sapiens
ttcatcaggttaaga

SEQ ID NO: 527425 - DNA, 15 bp, Homo sapiens
tttcatcaggttaag

SEQ ID NO: 527426 - DNA, 15 bp, Homo sapiens
atttcatcaggttaa

SEQ ID NO: 527427 - DNA, 15 bp, Homo sapiens
tatttcatcaggtta

SEQ ID NO: 527428 - DNA, 15 bp, Homo sapiens
ttatttcatcaggtt

SEQ ID NO: 527429 - DNA, 15 bp, Homo sapiens
gttatttcatcaggt

SEQ ID NO: 527430 - DNA, 15 bp, Homo sapiens
tgttatttcatcagg

SEQ ID NO: 527431 - DNA, 15 bp, Homo sapiens
ctgttatttcatcag

SEQ ID NO: 527432 - DNA, 15 bp, Homo sapiens
actgttatttcatca

SEQ ID NO: 527433 - DNA, 15 bp, Homo sapiens
tactgttatttcatc

SEQ ID NO: 527434 - DNA, 15 bp, Homo sapiens
gtactgttatttcat

SEQ ID NO: 527435 - DNA, 15 bp, Homo sapiens
agtactgttatttca

SEQ ID NO: 527436 - DNA, 15 bp, Homo sapiens
gagtactgttatttc

SEQ ID NO: 527437 - DNA, 15 bp, Homo sapiens
ggagtactgttattt

SEQ ID NO: 527438 - DNA, 15 bp, Homo sapiens
aggagtactgttatt

SEQ ID NO: 527439 - DNA, 15 bp, Homo sapiens
caggagtactgttat

SEQ ID NO: 527440 - DNA, 15 bp, Homo sapiens
ccaggagtactgtta

SEQ ID NO: 527441 - DNA, 15 bp, Homo sapiens
cccaggagtactgtt

SEQ ID NO: 527442 - DNA, 15 bp, Homo sapiens
ccccaggagtactgt

SEQ ID NO: 527443 - DNA, 15 bp, Homo sapiens
tccccaggagtactg

SEQ ID NO: 527444 - DNA, 15 bp, Homo sapiens
ctccccaggagtact

SEQ ID NO: 527445 - DNA, 15 bp, Homo sapiens
cctccccaggagtac

SEQ ID NO: 527446 - DNA, 15 bp, Homo sapiens
gcctccccaggagta

SEQ ID NO: 527447 - DNA, 15 bp, Homo sapiens
cgcctccccaggagt

SEQ ID NO: 527448 - DNA, 15 bp, Homo sapiens
ccgcctccccaggag

SEQ ID NO: 527449 - DNA, 15 bp, Homo sapiens
cccgcctccccagga

SEQ ID NO: 527450 - DNA, 15 bp, Homo sapiens
tcccgcctccccagg

SEQ ID NO: 527451 - DNA, 15 bp, Homo sapiens
ctcccgcctccccag

SEQ ID NO: 527452 - DNA, 15 bp, Homo sapiens
cctcccgcctcccca

SEQ ID NO: 527453 - DNA, 15 bp, Homo sapiens
ccctcccgcctcccc

SEQ ID NO: 527454 - DNA, 15 bp, Homo sapiens
tccctcccgcctccc

SEQ ID NO: 527455 - DNA, 15 bp, Homo sapiens
atccctcccgcctcc

SEQ ID NO: 527456 - DNA, 15 bp, Homo sapiens
tatccctcccgcctc

SEQ ID NO: 527457 - DNA, 15 bp, Homo sapiens
ctatccctcccgcct

SEQ ID NO: 527458 - DNA, 15 bp, Homo sapiens
gctatccctcccgcc

SEQ ID NO: 527459 - DNA, 15 bp, Homo sapiens
tgctatccctcccgc

SEQ ID NO: 527460 - DNA, 15 bp, Homo sapiens
atgctatccctcccg

SEQ ID NO: 527461 - DNA, 15 bp, Homo sapiens
aatgctatccctccc

SEQ ID NO: 527462 - DNA, 15 bp, Homo sapiens
taatgctatccctcc

SEQ ID NO: 527463 - DNA, 15 bp, Homo sapiens
ctaatgctatccctc

SEQ ID NO: 527464 - DNA, 15 bp, Homo sapiens
cctaatgctatccct

SEQ ID NO: 527465 - DNA, 15 bp, Homo sapiens
tcctaatgctatccc

SEQ ID NO: 527466 - DNA, 15 bp, Homo sapiens
ctcctaatgctatcc

SEQ ID NO: 527467 - DNA, 15 bp, Homo sapiens
tctcctaatgctatc

SEQ ID NO: 527468 - DNA, 15 bp, Homo sapiens
atctcctaatgctat

SEQ ID NO: 527469 - DNA, 15 bp, Homo sapiens
tatctcctaatgcta

SEQ ID NO: 527470 - DNA, 15 bp, Homo sapiens
atatctcctaatgct

SEQ ID NO: 527471 - DNA, 15 bp, Homo sapiens
tatatctcctaatgc

SEQ ID NO: 527472 - DNA, 15 bp, Homo sapiens
gtatatctcctaatg

SEQ ID NO: 527473 - DNA, 15 bp, Homo sapiens
ggtatatctcctaat

SEQ ID NO: 527474 - DNA, 15 bp, Homo sapiens
aggtatatctcctaa

SEQ ID NO: 527475 - DNA, 15 bp, Homo sapiens
taggtatatctccta

SEQ ID NO: 527476 - DNA, 15 bp, Homo sapiens
ttaggtatatctcct

SEQ ID NO: 527477 - DNA, 15 bp, Homo sapiens
attaggtatatctcc

SEQ ID NO: 527478 - DNA, 15 bp, Homo sapiens
cattaggtatatctc

SEQ ID NO: 527479 - DNA, 15 bp, Homo sapiens
gcattaggtatatct

SEQ ID NO: 527480 - DNA, 15 bp, Homo sapiens
agcattaggtatatc

SEQ ID NO: 527481 - DNA, 15 bp, Homo sapiens
tagcattaggtatat

SEQ ID NO: 527482 - DNA, 15 bp, Homo sapiens
ttagcattaggtata

SEQ ID NO: 527483 - DNA, 15 bp, Homo sapiens
tttagcattaggtat

SEQ ID NO: 527484 - DNA, 15 bp, Homo sapiens
atttagcattaggta

SEQ ID NO: 527485 - DNA, 15 bp, Homo sapiens
catttagcattaggt

SEQ ID NO: 527486 - DNA, 15 bp, Homo sapiens
tcatttagcattagg

SEQ ID NO: 527487 - DNA, 15 bp, Homo sapiens
gtcatttagcattag

SEQ ID NO: 527488 - DNA, 15 bp, Homo sapiens
cgtcatttagcatta

SEQ ID NO: 527489 - DNA, 15 bp, Homo sapiens
tcgtcatttagcatt

SEQ ID NO: 527490 - DNA, 15 bp, Homo sapiens
ctcgtcatttagcat

SEQ ID NO: 527491 - DNA, 15 bp, Homo sapiens
actcgtcatttagca

SEQ ID NO: 527492 - DNA, 15 bp, Homo sapiens
aactcgtcatttagc

SEQ ID NO: 527493 - DNA, 15 bp, Homo sapiens
taactcgtcatttag

SEQ ID NO: 527494 - DNA, 15 bp, Homo sapiens
ttaactcgtcattta

SEQ ID NO: 527495 - DNA, 15 bp, Homo sapiens
attaactcgtcattt

SEQ ID NO: 527496 - DNA, 15 bp, Homo sapiens
cattaactcgtcatt

SEQ ID NO: 527497 - DNA, 15 bp, Homo sapiens
ccattaactcgtcat

SEQ ID NO: 527498 - DNA, 15 bp, Homo sapiens
cccattaactcgtca

SEQ ID NO: 527499 - DNA, 15 bp, Homo sapiens
acccattaactcgtc

SEQ ID NO: 527500 - DNA, 15 bp, Homo sapiens
cacccattaactcgt

SEQ ID NO: 527501 - DNA, 15 bp, Homo sapiens
gcacccattaactcg

SEQ ID NO: 527502 - DNA, 15 bp, Homo sapiens
tgcacccattaactc

SEQ ID NO: 527503 - DNA, 15 bp, Homo sapiens
ctgcacccattaact

SEQ ID NO: 527504 - DNA, 15 bp, Homo sapiens
gctgcacccattaac

SEQ ID NO: 527505 - DNA, 15 bp, Homo sapiens
tgctgcacccattaa

SEQ ID NO: 527506 - DNA, 15 bp, Homo sapiens
gtgctgcacccatta

SEQ ID NO: 527507 - DNA, 15 bp, Homo sapiens
tgtgctgcacccatt

SEQ ID NO: 527508 - DNA, 15 bp, Homo sapiens
gtgtgctgcacccat

SEQ ID NO: 527509 - DNA, 15 bp, Homo sapiens
ggtgtgctgcaccca

SEQ ID NO: 527510 - DNA, 15 bp, Homo sapiens
tggtgtgctgcaccc

SEQ ID NO: 527511 - DNA, 15 bp, Homo sapiens
ttggtgtgctgcacc

SEQ ID NO: 527512 - DNA, 15 bp, Homo sapiens
gttggtgtgctgcac

SEQ ID NO: 527513 - DNA, 15 bp, Homo sapiens
tgttggtgtgctgca

SEQ ID NO: 527514 - DNA, 15 bp, Homo sapiens
atgttggtgtgctgc

SEQ ID NO: 527515 - DNA, 15 bp, Homo sapiens
catgttggtgtgctg

SEQ ID NO: 527516 - DNA, 15 bp, Homo sapiens
ccatgttggtgtgct

SEQ ID NO: 527517 - DNA, 15 bp, Homo sapiens
gccatgttggtgtgc

SEQ ID NO: 527518 - DNA, 15 bp, Homo sapiens
tgccatgttggtgtg

SEQ ID NO: 527519 - DNA, 15 bp, Homo sapiens
gtgccatgttggtgt

SEQ ID NO: 527520 - DNA, 15 bp, Homo sapiens
tgtgccatgttggtg

SEQ ID NO: 527521 - DNA, 15 bp, Homo sapiens
atgtgccatgttggt

SEQ ID NO: 527522 - DNA, 15 bp, Homo sapiens
catgtgccatgttgg

SEQ ID NO: 527523 - DNA, 15 bp, Homo sapiens
acatgtgccatgttg

SEQ ID NO: 527524 - DNA, 15 bp, Homo sapiens
tacatgtgccatgtt

SEQ ID NO: 527525 - DNA, 15 bp, Homo sapiens
atacatgtgccatgt

SEQ ID NO: 527526 - DNA, 15 bp, Homo sapiens
tatacatgtgccatg

SEQ ID NO: 527527 - DNA, 15 bp, Homo sapiens
gtatacatgtgccat

SEQ ID NO: 527528 - DNA, 15 bp, Homo sapiens
tgtatacatgtgcca

SEQ ID NO: 527529 - DNA, 15 bp, Homo sapiens
atgtatacatgtgcc

SEQ ID NO: 527530 - DNA, 15 bp, Homo sapiens
tatgtatacatgtgc

SEQ ID NO: 527531 - DNA, 15 bp, Homo sapiens
atatgtatacatgtg

SEQ ID NO: 527532 - DNA, 15 bp, Homo sapiens
catatgtatacatgt

SEQ ID NO: 527533 - DNA, 15 bp, Homo sapiens
acatatgtatacatg

SEQ ID NO: 527534 - DNA, 15 bp, Homo sapiens
tacatatgtatacat

SEQ ID NO: 527535 - DNA, 15 bp, Homo sapiens
ttacatatgtataca

SEQ ID NO: 527536 - DNA, 15 bp, Homo sapiens
gttacatatgtatac

SEQ ID NO: 527537 - DNA, 15 bp, Homo sapiens
tgttacatatgtata

SEQ ID NO: 527538 - DNA, 15 bp, Homo sapiens
ttgttacatatgtat

SEQ ID NO: 527539 - DNA, 15 bp, Homo sapiens
tttgttacatatgta

SEQ ID NO: 527540 - DNA, 15 bp, Homo sapiens
gtttgttacatatgt

SEQ ID NO: 527541 - DNA, 15 bp, Homo sapiens
ggtttgttacatatg

SEQ ID NO: 527542 - DNA, 15 bp, Homo sapiens
aggtttgttacatat

SEQ ID NO: 527543 - DNA, 15 bp, Homo sapiens
caggtttgttacata

SEQ ID NO: 527544 - DNA, 15 bp, Homo sapiens
gcaggtttgttacat

SEQ ID NO: 527545 - DNA, 15 bp, Homo sapiens
tgcaggtttgttaca

SEQ ID NO: 527546 - DNA, 15 bp, Homo sapiens
gtgcaggtttgttac

SEQ ID NO: 527547 - DNA, 15 bp, Homo sapiens
cgtgcaggtttgtta

SEQ ID NO: 527548 - DNA, 15 bp, Homo sapiens
acgtgcaggtttgtt

SEQ ID NO: 527549 - DNA, 15 bp, Homo sapiens
aacgtgcaggtttgt

SEQ ID NO: 527550 - DNA, 15 bp, Homo sapiens
caacgtgcaggtttg

SEQ ID NO: 527551 - DNA, 15 bp, Homo sapiens
acaacgtgcaggttt

SEQ ID NO: 527552 - DNA, 15 bp, Homo sapiens
cacaacgtgcaggtt

SEQ ID NO: 527553 - DNA, 15 bp, Homo sapiens
gcacaacgtgcaggt

SEQ ID NO: 527554 - DNA, 15 bp, Homo sapiens
tgcacaacgtgcagg

SEQ ID NO: 527555 - DNA, 15 bp, Homo sapiens
gtgcacaacgtgcag

SEQ ID NO: 527556 - DNA, 15 bp, Homo sapiens
tgtgcacaacgtgca

SEQ ID NO: 527557 - DNA, 15 bp, Homo sapiens
atgtgcacaacgtgc

SEQ ID NO: 527558 - DNA, 15 bp, Homo sapiens
catgtgcacaacgtg

SEQ ID NO: 527559 - DNA, 15 bp, Homo sapiens
acatgtgcacaacgt

SEQ ID NO: 527560 - DNA, 15 bp, Homo sapiens
tacatgtgcacaacg

SEQ ID NO: 527561 - DNA, 15 bp, Homo sapiens
gtacatgtgcacaac

SEQ ID NO: 527562 - DNA, 15 bp, Homo sapiens
ggtacatgtgcacaa

SEQ ID NO: 527563 - DNA, 15 bp, Homo sapiens
gggtacatgtgcaca

SEQ ID NO: 527564 - DNA, 15 bp, Homo sapiens
agggtacatgtgcac

SEQ ID NO: 527565 - DNA, 15 bp, Homo sapiens
tagggtacatgtgca

SEQ ID NO: 527566 - DNA, 15 bp, Homo sapiens
ttagggtacatgtgc

SEQ ID NO: 527567 - DNA, 15 bp, Homo sapiens
tttagggtacatgtg

SEQ ID NO: 527568 - DNA, 15 bp, Homo sapiens
ttttagggtacatgt

SEQ ID NO: 527569 - DNA, 15 bp, Homo sapiens
gttttagggtacatg

SEQ ID NO: 527570 - DNA, 15 bp, Homo sapiens
agttttagggtacat

SEQ ID NO: 527571 - DNA, 15 bp, Homo sapiens
aagttttagggtaca

SEQ ID NO: 527572 - DNA, 15 bp, Homo sapiens
taagttttagggtac

SEQ ID NO: 527573 - DNA, 15 bp, Homo sapiens
ttaagttttagggta

SEQ ID NO: 527574 - DNA, 15 bp, Homo sapiens
tttaagttttagggt

SEQ ID NO: 527575 - DNA, 15 bp, Homo sapiens
ctttaagttttaggg

SEQ ID NO: 527576 - DNA, 15 bp, Homo sapiens
actttaagttttagg

SEQ ID NO: 527577 - DNA, 15 bp, Homo sapiens
tactttaagttttag

SEQ ID NO: 527578 - DNA, 15 bp, Homo sapiens
atactttaagtttta

SEQ ID NO: 527579 - DNA, 15 bp, Homo sapiens
tatactttaagtttt

SEQ ID NO: 527580 - DNA, 15 bp, Homo sapiens
ttatactttaagttt

SEQ ID NO: 527581 - DNA, 15 bp, Homo sapiens
attatactttaagtt

SEQ ID NO: 527582 - DNA, 15 bp, Homo sapiens
tattatactttaagt

SEQ ID NO: 527583 - DNA, 15 bp, Homo sapiens
ttattatactttaag

SEQ ID NO: 527584 - DNA, 15 bp, Homo sapiens
tttattatactttaa

SEQ ID NO: 527585 - DNA, 15 bp, Homo sapiens
ttttattatacttta

SEQ ID NO: 527586 - DNA, 15 bp, Homo sapiens
tttttattatacttt

SEQ ID NO: 527587 - DNA, 15 bp, Homo sapiens
ttttttattatactt

SEQ ID NO: 527588 - DNA, 15 bp, Homo sapiens
tttttttattatact

SEQ ID NO: 527589 - DNA, 15 bp, Homo sapiens
ttttttttattatac

SEQ ID NO: 527590 - DNA, 15 bp, Homo sapiens
tttttttttattata

SEQ ID NO: 527591 - DNA, 15 bp, Homo sapiens
ttttttttttattat

SEQ ID NO: 527592 - DNA, 15 bp, Homo sapiens
tttttttttttatta

SEQ ID NO: 527593 - DNA, 15 bp, Homo sapiens
ctttttttttttatt

SEQ ID NO: 527594 - DNA, 15 bp, Homo sapiens
gctttttttttttat

SEQ ID NO: 527595 - DNA, 15 bp, Homo sapiens
agcttttttttttta

SEQ ID NO: 527596 - DNA, 15 bp, Homo sapiens
aagcttttttttttt

SEQ ID NO: 527597 - DNA, 15 bp, Homo sapiens
caagctttttttttt

SEQ ID NO: 527598 - DNA, 15 bp, Homo sapiens
gcaagcttttttttt

SEQ ID NO: 527599 - DNA, 15 bp, Homo sapiens
tgcaagctttttttt

SEQ ID NO: 527600 - DNA, 15 bp, Homo sapiens
ttgcaagcttttttt

SEQ ID NO: 527601 - DNA, 15 bp, Homo sapiens
tttgcaagctttttt

SEQ ID NO: 527602 - DNA, 15 bp, Homo sapiens
ttttgcaagcttttt

SEQ ID NO: 527603 - DNA, 15 bp, Homo sapiens
tttttgcaagctttt

SEQ ID NO: 527604 - DNA, 15 bp, Homo sapiens
ttttttgcaagcttt

SEQ ID NO: 527605 - DNA, 15 bp, Homo sapiens
tttttttgcaagctt

SEQ ID NO: 527606 - DNA, 15 bp, Homo sapiens
ttttttttgcaagct

SEQ ID NO: 527607 - DNA, 15 bp, Homo sapiens
attttttttgcaagc

SEQ ID NO: 527608 - DNA, 15 bp, Homo sapiens
tattttttttgcaag

SEQ ID NO: 527609 - DNA, 15 bp, Homo sapiens
atattttttttgcaa

SEQ ID NO: 527610 - DNA, 15 bp, Homo sapiens
tatattttttttgca

SEQ ID NO: 527611 - DNA, 15 bp, Homo sapiens
ttatattttttttgc

SEQ ID NO: 527612 - DNA, 15 bp, Homo sapiens
gttatattttttttg

SEQ ID NO: 527613 - DNA, 15 bp, Homo sapiens
tgttatatttttttt

SEQ ID NO: 527614 - DNA, 15 bp, Homo sapiens
ctgttatattttttt

SEQ ID NO: 527615 - DNA, 15 bp, Homo sapiens
actgttatatttttt

SEQ ID NO: 527616 - DNA, 15 bp, Homo sapiens
tactgttatattttt

SEQ ID NO: 527617 - DNA, 15 bp, Homo sapiens
gtactgttatatttt

SEQ ID NO: 527618 - DNA, 15 bp, Homo sapiens
agtactgttatattt

SEQ ID NO: 527619 - DNA, 15 bp, Homo sapiens
gagtactgttatatt

SEQ ID NO: 527620 - DNA, 15 bp, Homo sapiens
ggagtactgttatat

SEQ ID NO: 527621 - DNA, 15 bp, Homo sapiens
aggagtactgttata

SEQ ID NO: 527622 - DNA, 15 bp, Homo sapiens
aaggagtactgttat

SEQ ID NO: 527623 - DNA, 15 bp, Homo sapiens
taaggagtactgtta

SEQ ID NO: 527624 - DNA, 15 bp, Homo sapiens
ttaaggagtactgtt

SEQ ID NO: 527625 - DNA, 15 bp, Homo sapiens
tttaaggagtactgt

SEQ ID NO: 527626 - DNA, 15 bp, Homo sapiens
atttaaggagtactg

SEQ ID NO: 527627 - DNA, 15 bp, Homo sapiens
aatttaaggagtact

SEQ ID NO: 527628 - DNA, 15 bp, Homo sapiens
caatttaaggagtac

SEQ ID NO: 527629 - DNA, 15 bp, Homo sapiens
acaatttaaggagta

SEQ ID NO: 527630 - DNA, 15 bp, Homo sapiens
aacaatttaaggagt

SEQ ID NO: 527631 - DNA, 15 bp, Homo sapiens
taacaatttaaggag

SEQ ID NO: 527632 - DNA, 15 bp, Homo sapiens
ttaacaatttaagga

SEQ ID NO: 527633 - DNA, 15 bp, Homo sapiens
tttaacaatttaagg

SEQ ID NO: 527634 - DNA, 15 bp, Homo sapiens
ttttaacaatttaag

SEQ ID NO: 527635 - DNA, 15 bp, Homo sapiens
cttttaacaatttaa

SEQ ID NO: 527636 - DNA, 15 bp, Homo sapiens
acttttaacaattta

SEQ ID NO: 527637 - DNA, 15 bp, Homo sapiens
gacttttaacaattt

SEQ ID NO: 527638 - DNA, 15 bp, Homo sapiens
tgacttttaacaatt

SEQ ID NO: 527639 - DNA, 15 bp, Homo sapiens
atgacttttaacaat

SEQ ID NO: 527640 - DNA, 15 bp, Homo sapiens
catgacttttaacaa

SEQ ID NO: 527641 - DNA, 15 bp, Homo sapiens
tcatgacttttaaca

SEQ ID NO: 527642 - DNA, 15 bp, Homo sapiens
ttcatgacttttaac

SEQ ID NO: 527643 - DNA, 15 bp, Homo sapiens
tttcatgacttttaa

SEQ ID NO: 527644 - DNA, 15 bp, Homo sapiens
ctttcatgactttta

SEQ ID NO: 527645 - DNA, 15 bp, Homo sapiens
actttcatgactttt

SEQ ID NO: 527646 - DNA, 15 bp, Homo sapiens
gactttcatgacttt

SEQ ID NO: 527647 - DNA, 15 bp, Homo sapiens
tgactttcatgactt

SEQ ID NO: 527648 - DNA, 15 bp, Homo sapiens
ttgactttcatgact

SEQ ID NO: 527649 - DNA, 15 bp, Homo sapiens
cttgactttcatgac

SEQ ID NO: 527650 - DNA, 15 bp, Homo sapiens
ccttgactttcatga

SEQ ID NO: 527651 - DNA, 15 bp, Homo sapiens
tccttgactttcatg

SEQ ID NO: 527652 - DNA, 15 bp, Homo sapiens
gtccttgactttcat

SEQ ID NO: 527653 - DNA, 15 bp, Homo sapiens
tgtccttgactttca

SEQ ID NO: 527654 - DNA, 15 bp, Homo sapiens
ctgtccttgactttc

SEQ ID NO: 527655 - DNA, 15 bp, Homo sapiens
cctgtccttgacttt

SEQ ID NO: 527656 - DNA, 15 bp, Homo sapiens
tcctgtccttgactt

SEQ ID NO: 527657 - DNA, 15 bp, Homo sapiens
ctcctgtccttgact

SEQ ID NO: 527658 - DNA, 15 bp, Homo sapiens
tctcctgtccttgac

SEQ ID NO: 527659 - DNA, 15 bp, Homo sapiens
atctcctgtccttga

SEQ ID NO: 527660 - DNA, 15 bp, Homo sapiens
aatctcctgtccttg

SEQ ID NO: 527661 - DNA, 15 bp, Homo sapiens
taatctcctgtcctt

SEQ ID NO: 527662 - DNA, 15 bp, Homo sapiens
ttaatctcctgtcct

SEQ ID NO: 527663 - DNA, 15 bp, Homo sapiens
cttaatctcctgtcc

SEQ ID NO: 527664 - DNA, 15 bp, Homo sapiens
ccttaatctcctgtc

SEQ ID NO: 527665 - DNA, 15 bp, Homo sapiens
tccttaatctcctgt

SEQ ID NO: 527666 - DNA, 15 bp, Homo sapiens
ctccttaatctcctg

SEQ ID NO: 527667 - DNA, 15 bp, Homo sapiens
cctccttaatctcct

SEQ ID NO: 527668 - DNA, 15 bp, Homo sapiens
gcctccttaatctcc

SEQ ID NO: 527669 - DNA, 15 bp, Homo sapiens
cgcctccttaatctc

SEQ ID NO: 527670 - DNA, 15 bp, Homo sapiens
acgcctccttaatct

SEQ ID NO: 527671 - DNA, 15 bp, Homo sapiens
cacgcctccttaatc

SEQ ID NO: 527672 - DNA, 15 bp, Homo sapiens
tcacgcctccttaat

SEQ ID NO: 527673 - DNA, 15 bp, Homo sapiens
ttcacgcctccttaa

SEQ ID NO: 527674 - DNA, 15 bp, Homo sapiens
tttcacgcctcctta

SEQ ID NO: 527675 - DNA, 15 bp, Homo sapiens
ttttcacgcctcctt

SEQ ID NO: 527676 - DNA, 15 bp, Homo sapiens
gttttcacgcctcct

SEQ ID NO: 527677 - DNA, 15 bp, Homo sapiens
agttttcacgcctcc

SEQ ID NO: 527678 - DNA, 15 bp, Homo sapiens
tagttttcacgcctc

SEQ ID NO: 527679 - DNA, 15 bp, Homo sapiens
ttagttttcacgcct

SEQ ID NO: 527680 - DNA, 15 bp, Homo sapiens
tttagttttcacgcc

SEQ ID NO: 527681 - DNA, 15 bp, Homo sapiens
atttagttttcacgc

SEQ ID NO: 527682 - DNA, 15 bp, Homo sapiens
catttagttttcacg

SEQ ID NO: 527683 - DNA, 15 bp, Homo sapiens
gcatttagttttcac

SEQ ID NO: 527684 - DNA, 15 bp, Homo sapiens
ggcatttagttttca

SEQ ID NO: 527685 - DNA, 15 bp, Homo sapiens
gggcatttagttttc

SEQ ID NO: 527686 - DNA, 15 bp, Homo sapiens
tgggcatttagtttt

SEQ ID NO: 527687 - DNA, 15 bp, Homo sapiens
atgggcatttagttt

SEQ ID NO: 527688 - DNA, 15 bp, Homo sapiens
aatgggcatttagtt

SEQ ID NO: 527689 - DNA, 15 bp, Homo sapiens
caatgggcatttagt

SEQ ID NO: 527690 - DNA, 15 bp, Homo sapiens
acaatgggcatttag

SEQ ID NO: 527691 - DNA, 15 bp, Homo sapiens
cacaatgggcattta

SEQ ID NO: 527692 - DNA, 15 bp, Homo sapiens
ccacaatgggcattt

SEQ ID NO: 527693 - DNA, 15 bp, Homo sapiens
accacaatgggcatt

SEQ ID NO: 527694 - DNA, 15 bp, Homo sapiens
taccacaatgggcat

SEQ ID NO: 527695 - DNA, 15 bp, Homo sapiens
ataccacaatgggca

SEQ ID NO: 527696 - DNA, 15 bp, Homo sapiens
gataccacaatgggc

SEQ ID NO: 527697 - DNA, 15 bp, Homo sapiens
ggataccacaatggg

SEQ ID NO: 527698 - DNA, 15 bp, Homo sapiens
aggataccacaatgg

SEQ ID NO: 527699 - DNA, 15 bp, Homo sapiens
caggataccacaatg

SEQ ID NO: 527700 - DNA, 15 bp, Homo sapiens
ccaggataccacaat

SEQ ID NO: 527701 - DNA, 15 bp, Homo sapiens
tccaggataccacaa

SEQ ID NO: 527702 - DNA, 15 bp, Homo sapiens
atccaggataccaca

SEQ ID NO: 527703 - DNA, 15 bp, Homo sapiens
aatccaggataccac

SEQ ID NO: 527704 - DNA, 15 bp, Homo sapiens
caatccaggatacca

SEQ ID NO: 527705 - DNA, 15 bp, Homo sapiens
ccaatccaggatacc

SEQ ID NO: 527706 - DNA, 15 bp, Homo sapiens
tccaatccaggatac

SEQ ID NO: 527707 - DNA, 15 bp, Homo sapiens
atccaatccaggata

SEQ ID NO: 527708 - DNA, 15 bp, Homo sapiens
aatccaatccaggat

SEQ ID NO: 527709 - DNA, 15 bp, Homo sapiens
gaatccaatccagga

SEQ ID NO: 527710 - DNA, 15 bp, Homo sapiens
agaatccaatccagg

SEQ ID NO: 527711 - DNA, 15 bp, Homo sapiens
cagaatccaatccag

SEQ ID NO: 527712 - DNA, 15 bp, Homo sapiens
ccagaatccaatcca

SEQ ID NO: 527713 - DNA, 15 bp, Homo sapiens
tccagaatccaatcc

SEQ ID NO: 527714 - DNA, 15 bp, Homo sapiens
ttccagaatccaatc

SEQ ID NO: 527715 - DNA, 15 bp, Homo sapiens
gttccagaatccaat

SEQ ID NO: 527716 - DNA, 15 bp, Homo sapiens
ggttccagaatccaa

SEQ ID NO: 527717 - DNA, 15 bp, Homo sapiens
tggttccagaatcca

SEQ ID NO: 527718 - DNA, 15 bp, Homo sapiens
ctggttccagaatcc

SEQ ID NO: 527719 - DNA, 15 bp, Homo sapiens
tctggttccagaatc

SEQ ID NO: 527720 - DNA, 15 bp, Homo sapiens
ttctggttccagaat

SEQ ID NO: 527721 - DNA, 15 bp, Homo sapiens
attctggttccagaa

SEQ ID NO: 527722 - DNA, 15 bp, Homo sapiens
tattctggttccaga

SEQ ID NO: 527723 - DNA, 15 bp, Homo sapiens
ctattctggttccag

SEQ ID NO: 527724 - DNA, 15 bp, Homo sapiens
cctattctggttcca

SEQ ID NO: 527725 - DNA, 15 bp, Homo sapiens
ccctattctggttcc

SEQ ID NO: 527726 - DNA, 15 bp, Homo sapiens
accctattctggttc

SEQ ID NO: 527727 - DNA, 15 bp, Homo sapiens
taccctattctggtt

SEQ ID NO: 527728 - DNA, 15 bp, Homo sapiens
ataccctattctggt

SEQ ID NO: 527729 - DNA, 15 bp, Homo sapiens
aataccctattctgg

SEQ ID NO: 527730 - DNA, 15 bp, Homo sapiens
taataccctattctg

SEQ ID NO: 527731 - DNA, 15 bp, Homo sapiens
ctaataccctattct

SEQ ID NO: 527732 - DNA, 15 bp, Homo sapiens
actaataccctattc

SEQ ID NO: 527733 - DNA, 15 bp, Homo sapiens
tactaataccctatt

SEQ ID NO: 527734 - DNA, 15 bp, Homo sapiens
atactaataccctat

SEQ ID NO: 527735 - DNA, 15 bp, Homo sapiens
tatactaatacccta

SEQ ID NO: 527736 - DNA, 15 bp, Homo sapiens
ttatactaataccct

SEQ ID NO: 527737 - DNA, 15 bp, Homo sapiens
tttatactaataccc

SEQ ID NO: 527738 - DNA, 15 bp, Homo sapiens
ttttatactaatacc

SEQ ID NO: 527739 - DNA, 15 bp, Homo sapiens
tttttatactaatac

SEQ ID NO: 527740 - DNA, 15 bp, Homo sapiens
gtttttatactaata

SEQ ID NO: 527741 - DNA, 15 bp, Homo sapiens
agtttttatactaat

SEQ ID NO: 527742 - DNA, 15 bp, Homo sapiens
tagtttttatactaa

SEQ ID NO: 527743 - DNA, 15 bp, Homo sapiens
ctagtttttatacta

SEQ ID NO: 527744 - DNA, 15 bp, Homo sapiens
actagtttttatact

SEQ ID NO: 527745 - DNA, 15 bp, Homo sapiens
cactagtttttatac

SEQ ID NO: 527746 - DNA, 15 bp, Homo sapiens
tcactagtttttata

SEQ ID NO: 527747 - DNA, 15 bp, Homo sapiens
ttcactagtttttat

SEQ ID NO: 527748 - DNA, 15 bp, Homo sapiens
tttcactagttttta

SEQ ID NO: 527749 - DNA, 15 bp, Homo sapiens
atttcactagttttt

SEQ ID NO: 527750 - DNA, 15 bp, Homo sapiens
tatttcactagtttt

SEQ ID NO: 527751 - DNA, 15 bp, Homo sapiens
ctatttcactagttt

SEQ ID NO: 527752 - DNA, 15 bp, Homo sapiens
cctatttcactagtt

SEQ ID NO: 527753 - DNA, 15 bp, Homo sapiens
tcctatttcactagt

SEQ ID NO: 527754 - DNA, 15 bp, Homo sapiens
atcctatttcactag

SEQ ID NO: 527755 - DNA, 15 bp, Homo sapiens
tatcctatttcacta

SEQ ID NO: 527756 - DNA, 15 bp, Homo sapiens
ttatcctatttcact

SEQ ID NO: 527757 - DNA, 15 bp, Homo sapiens
tttatcctatttcac

SEQ ID NO: 527758 - DNA, 15 bp, Homo sapiens
ctttatcctatttca

SEQ ID NO: 527759 - DNA, 15 bp, Homo sapiens
cctttatcctatttc

SEQ ID NO: 527760 - DNA, 15 bp, Homo sapiens
gcctttatcctattt

SEQ ID NO: 527761 - DNA, 15 bp, Homo sapiens
tgcctttatcctatt

SEQ ID NO: 527762 - DNA, 15 bp, Homo sapiens
ctgcctttatcctat

SEQ ID NO: 527763 - DNA, 15 bp, Homo sapiens
cctgcctttatccta

SEQ ID NO: 527764 - DNA, 15 bp, Homo sapiens
ccctgcctttatcct

SEQ ID NO: 527765 - DNA, 15 bp, Homo sapiens
gccctgcctttatcc

SEQ ID NO: 527766 - DNA, 15 bp, Homo sapiens
tgccctgcctttatc

SEQ ID NO: 527767 - DNA, 15 bp, Homo sapiens
gtgccctgcctttat

SEQ ID NO: 527768 - DNA, 15 bp, Homo sapiens
tgtgccctgccttta

SEQ ID NO: 527769 - DNA, 15 bp, Homo sapiens
ctgtgccctgccttt

SEQ ID NO: 527770 - DNA, 15 bp, Homo sapiens
actgtgccctgcctt

SEQ ID NO: 527771 - DNA, 15 bp, Homo sapiens
cactgtgccctgcct

SEQ ID NO: 527772 - DNA, 15 bp, Homo sapiens
ccactgtgccctgcc

SEQ ID NO: 527773 - DNA, 15 bp, Homo sapiens
accactgtgccctgc

SEQ ID NO: 527774 - DNA, 15 bp, Homo sapiens
aaccactgtgccctg

SEQ ID NO: 527775 - DNA, 15 bp, Homo sapiens
gaaccactgtgccct

SEQ ID NO: 527776 - DNA, 15 bp, Homo sapiens
tgaaccactgtgccc

SEQ ID NO: 527777 - DNA, 15 bp, Homo sapiens
gtgaaccactgtgcc

SEQ ID NO: 527778 - DNA, 15 bp, Homo sapiens
cgtgaaccactgtgc

SEQ ID NO: 527779 - DNA, 15 bp, Homo sapiens
gcgtgaaccactgtg

SEQ ID NO: 527780 - DNA, 15 bp, Homo sapiens
ggcgtgaaccactgt

SEQ ID NO: 527781 - DNA, 15 bp, Homo sapiens
aggcgtgaaccactg

SEQ ID NO: 527782 - DNA, 15 bp, Homo sapiens
taggcgtgaaccact

SEQ ID NO: 527783 - DNA, 15 bp, Homo sapiens
ataggcgtgaaccac

SEQ ID NO: 527784 - DNA, 15 bp, Homo sapiens
tataggcgtgaacca

SEQ ID NO: 527785 - DNA, 15 bp, Homo sapiens
ttataggcgtgaacc

SEQ ID NO: 527786 - DNA, 15 bp, Homo sapiens
attataggcgtgaac

SEQ ID NO: 527787 - DNA, 15 bp, Homo sapiens
gattataggcgtgaa

SEQ ID NO: 527788 - DNA, 15 bp, Homo sapiens
ggattataggcgtga

SEQ ID NO: 527789 - DNA, 15 bp, Homo sapiens
gggattataggcgtg

SEQ ID NO: 527790 - DNA, 15 bp, Homo sapiens
tgggattataggcgt

SEQ ID NO: 527791 - DNA, 15 bp, Homo sapiens
ttgggattataggcg

SEQ ID NO: 527792 - DNA, 15 bp, Homo sapiens
gttgggattataggc

SEQ ID NO: 527793 - DNA, 15 bp, Homo sapiens
tgttgggattatagg

SEQ ID NO: 527794 - DNA, 15 bp, Homo sapiens
gtgttgggattatag

SEQ ID NO: 527795 - DNA, 15 bp, Homo sapiens
agtgttgggattata

SEQ ID NO: 527796 - DNA, 15 bp, Homo sapiens
aagtgttgggattat

SEQ ID NO: 527797 - DNA, 15 bp, Homo sapiens
aaagtgttgggatta

SEQ ID NO: 527798 - DNA, 15 bp, Homo sapiens
caaagtgttgggatt

SEQ ID NO: 527799 - DNA, 15 bp, Homo sapiens
ccaaagtgttgggat

SEQ ID NO: 527800 - DNA, 15 bp, Homo sapiens
cccaaagtgttggga

SEQ ID NO: 527801 - DNA, 15 bp, Homo sapiens
tcccaaagtgttggg

SEQ ID NO: 527802 - DNA, 15 bp, Homo sapiens
ttcccaaagtgttgg

SEQ ID NO: 527803 - DNA, 15 bp, Homo sapiens
cttcccaaagtgttg

SEQ ID NO: 527804 - DNA, 15 bp, Homo sapiens
gcttcccaaagtgtt

SEQ ID NO: 527805 - DNA, 15 bp, Homo sapiens
ggcttcccaaagtgt

SEQ ID NO: 527806 - DNA, 15 bp, Homo sapiens
cggcttcccaaagtg

SEQ ID NO: 527807 - DNA, 15 bp, Homo sapiens
tcggcttcccaaagt

SEQ ID NO: 527808 - DNA, 15 bp, Homo sapiens
ctcggcttcccaaag

SEQ ID NO: 527809 - DNA, 15 bp, Homo sapiens
tctcggcttcccaaa

SEQ ID NO: 527810 - DNA, 15 bp, Homo sapiens
gtctcggcttcccaa

SEQ ID NO: 527811 - DNA, 15 bp, Homo sapiens
tgtctcggcttccca

SEQ ID NO: 527812 - DNA, 15 bp, Homo sapiens
ctgtctcggcttccc

SEQ ID NO: 527813 - DNA, 15 bp, Homo sapiens
cctgtctcggcttcc

SEQ ID NO: 527814 - DNA, 15 bp, Homo sapiens
tcctgtctcggcttc

SEQ ID NO: 527815 - DNA, 15 bp, Homo sapiens
ctcctgtctcggctt

SEQ ID NO: 527816 - DNA, 15 bp, Homo sapiens
cctcctgtctcggct

SEQ ID NO: 527817 - DNA, 15 bp, Homo sapiens
tcctcctgtctcggc

SEQ ID NO: 527818 - DNA, 15 bp, Homo sapiens
gtcctcctgtctcgg

SEQ ID NO: 527819 - DNA, 15 bp, Homo sapiens
cgtcctcctgtctcg

SEQ ID NO: 527820 - DNA, 15 bp, Homo sapiens
ccgtcctcctgtctc

SEQ ID NO: 527821 - DNA, 15 bp, Homo sapiens
tccgtcctcctgtct

SEQ ID NO: 527822 - DNA, 15 bp, Homo sapiens
atccgtcctcctgtc

SEQ ID NO: 527823 - DNA, 15 bp, Homo sapiens
aatccgtcctcctgt

SEQ ID NO: 527824 - DNA, 15 bp, Homo sapiens
caatccgtcctcctg

SEQ ID NO: 527825 - DNA, 15 bp, Homo sapiens
tcaatccgtcctcct

SEQ ID NO: 527826 - DNA, 15 bp, Homo sapiens
ctcaatccgtcctcc

SEQ ID NO: 527827 - DNA, 15 bp, Homo sapiens
gctcaatccgtcctc

SEQ ID NO: 527828 - DNA, 15 bp, Homo sapiens
ggctcaatccgtcct

SEQ ID NO: 527829 - DNA, 15 bp, Homo sapiens
gggctcaatccgtcc

SEQ ID NO: 527830 - DNA, 15 bp, Homo sapiens
tgggctcaatccgtc

SEQ ID NO: 527831 - DNA, 15 bp, Homo sapiens
ctgggctcaatccgt

SEQ ID NO: 527832 - DNA, 15 bp, Homo sapiens
cctgggctcaatccg

SEQ ID NO: 527833 - DNA, 15 bp, Homo sapiens
tcctgggctcaatcc

SEQ ID NO: 527834 - DNA, 15 bp, Homo sapiens
ctcctgggctcaatc

SEQ ID NO: 527835 - DNA, 15 bp, Homo sapiens
actcctgggctcaat

SEQ ID NO: 527836 - DNA, 15 bp, Homo sapiens
aactcctgggctcaa

SEQ ID NO: 527837 - DNA, 15 bp, Homo sapiens
aaactcctgggctca

SEQ ID NO: 527838 - DNA, 15 bp, Homo sapiens
caaactcctgggctc

SEQ ID NO: 527839 - DNA, 15 bp, Homo sapiens
tcaaactcctgggct

SEQ ID NO: 527840 - DNA, 15 bp, Homo sapiens
ctcaaactcctgggc

SEQ ID NO: 527841 - DNA, 15 bp, Homo sapiens
tctcaaactcctggg

SEQ ID NO: 527842 - DNA, 15 bp, Homo sapiens
gtctcaaactcctgg

SEQ ID NO: 527843 - DNA, 15 bp, Homo sapiens
cccaggctggtctca

SEQ ID NO: 527844 - DNA, 15 bp, Homo sapiens
gcccaggctggtctc

SEQ ID NO: 527845 - DNA, 15 bp, Homo sapiens
tgcccaggctggtct

SEQ ID NO: 527846 - DNA, 15 bp, Homo sapiens
ttgcccaggctggtc

SEQ ID NO: 527847 - DNA, 15 bp, Homo sapiens
gttgcccaggctggt

SEQ ID NO: 527848 - DNA, 15 bp, Homo sapiens
gtgttgcccaggctg

SEQ ID NO: 527849 - DNA, 15 bp, Homo sapiens
tgtgttgcccaggct

SEQ ID NO: 527850 - DNA, 15 bp, Homo sapiens
ctgtgttgcccaggc

SEQ ID NO: 527851 - DNA, 15 bp, Homo sapiens
cctgtgttgcccagg

SEQ ID NO: 527852 - DNA, 15 bp, Homo sapiens
ccctgtgttgcccag

SEQ ID NO: 527853 - DNA, 15 bp, Homo sapiens
tccctgtgttgccca

SEQ ID NO: 527854 - DNA, 15 bp, Homo sapiens
ctccctgtgttgccc

SEQ ID NO: 527855 - DNA, 15 bp, Homo sapiens
tctccctgtgttgcc

SEQ ID NO: 527856 - DNA, 15 bp, Homo sapiens
gtctccctgtgttgc

SEQ ID NO: 527857 - DNA, 15 bp, Homo sapiens
ggtctccctgtgttg

SEQ ID NO: 527858 - DNA, 15 bp, Homo sapiens
gggtctccctgtgtt

SEQ ID NO: 527859 - DNA, 15 bp, Homo sapiens
ggggtctccctgtgt

SEQ ID NO: 527860 - DNA, 15 bp, Homo sapiens
cggggtctccctgtg

SEQ ID NO: 527861 - DNA, 15 bp, Homo sapiens
acggggtctccctgt

SEQ ID NO: 527862 - DNA, 15 bp, Homo sapiens
gacggggtctccctg

SEQ ID NO: 527863 - DNA, 15 bp, Homo sapiens
agacggggtctccct

SEQ ID NO: 527864 - DNA, 15 bp, Homo sapiens
gagacggggtctccc

SEQ ID NO: 527865 - DNA, 15 bp, Homo sapiens
agagacggggtctcc

SEQ ID NO: 527866 - DNA, 15 bp, Homo sapiens
tagagacggggtctc

SEQ ID NO: 527867 - DNA, 15 bp, Homo sapiens
gtagagacggggtct

SEQ ID NO: 527868 - DNA, 15 bp, Homo sapiens
tgtagagacggggtc

SEQ ID NO: 527869 - DNA, 15 bp, Homo sapiens
ttgtagagacggggt

SEQ ID NO: 527870 - DNA, 15 bp, Homo sapiens
tttgtagagacgggg

SEQ ID NO: 527871 - DNA, 15 bp, Homo sapiens
ttttgtagagacggg

SEQ ID NO: 527872 - DNA, 15 bp, Homo sapiens
tttttgtagagacgg

SEQ ID NO: 527873 - DNA, 15 bp, Homo sapiens
ttttttgtagagacg

SEQ ID NO: 527874 - DNA, 15 bp, Homo sapiens
attttttgtagagac

SEQ ID NO: 527875 - DNA, 15 bp, Homo sapiens
tattttttgtagaga

SEQ ID NO: 527876 - DNA, 15 bp, Homo sapiens
ttattttttgtagag

SEQ ID NO: 527877 - DNA, 15 bp, Homo sapiens
tttattttttgtaga

SEQ ID NO: 527878 - DNA, 15 bp, Homo sapiens
ttttattttttgtag

SEQ ID NO: 527879 - DNA, 15 bp, Homo sapiens
tttttattttttgta

SEQ ID NO: 527880 - DNA, 15 bp, Homo sapiens
ttttttattttttgt

SEQ ID NO: 527881 - DNA, 15 bp, Homo sapiens
attttttattttttg

SEQ ID NO: 527882 - DNA, 15 bp, Homo sapiens
aattttttatttttt

SEQ ID NO: 527883 - DNA, 15 bp, Homo sapiens
taattttttattttt

SEQ ID NO: 527884 - DNA, 15 bp, Homo sapiens
ctaattttttatttt

SEQ ID NO: 527885 - DNA, 15 bp, Homo sapiens
gctaattttttattt

SEQ ID NO: 527886 - DNA, 15 bp, Homo sapiens
agctaattttttatt

SEQ ID NO: 527887 - DNA, 15 bp, Homo sapiens
cagctaattttttat

SEQ ID NO: 527888 - DNA, 15 bp, Homo sapiens
ccagctaatttttta

SEQ ID NO: 527889 - DNA, 15 bp, Homo sapiens
cccagctaatttttt

SEQ ID NO: 527890 - DNA, 15 bp, Homo sapiens
gcccagctaattttt

SEQ ID NO: 527891 - DNA, 15 bp, Homo sapiens
tgcccagctaatttt

SEQ ID NO: 527892 - DNA, 15 bp, Homo sapiens
atgcccagctaattt

SEQ ID NO: 527893 - DNA, 15 bp, Homo sapiens
catgcccagctaatt

SEQ ID NO: 527894 - DNA, 15 bp, Homo sapiens
ccatgcccagctaat

SEQ ID NO: 527895 - DNA, 15 bp, Homo sapiens
accatgcccagctaa

SEQ ID NO: 527896 - DNA, 15 bp, Homo sapiens
caccatgcccagcta

SEQ ID NO: 527897 - DNA, 15 bp, Homo sapiens
ccaccatgcccagct

SEQ ID NO: 527898 - DNA, 15 bp, Homo sapiens
gccaccatgcccagc

SEQ ID NO: 527899 - DNA, 15 bp, Homo sapiens
tgccaccatgcccag

SEQ ID NO: 527900 - DNA, 15 bp, Homo sapiens
gtgccaccatgccca

SEQ ID NO: 527901 - DNA, 15 bp, Homo sapiens
tgtgccaccatgccc

SEQ ID NO: 527902 - DNA, 15 bp, Homo sapiens
gtgtgccaccatgcc

SEQ ID NO: 527903 - DNA, 15 bp, Homo sapiens
cgtgtgccaccatgc

SEQ ID NO: 527904 - DNA, 15 bp, Homo sapiens
acgtgtgccaccatg

SEQ ID NO: 527905 - DNA, 15 bp, Homo sapiens
gacgtgtgccaccat

SEQ ID NO: 527906 - DNA, 15 bp, Homo sapiens
agacgtgtgccacca

SEQ ID NO: 527907 - DNA, 15 bp, Homo sapiens
cagacgtgtgccacc

SEQ ID NO: 527908 - DNA, 15 bp, Homo sapiens
acagacgtgtgccac

SEQ ID NO: 527909 - DNA, 15 bp, Homo sapiens
tacagacgtgtgcca

SEQ ID NO: 527910 - DNA, 15 bp, Homo sapiens
gtacagacgtgtgcc

SEQ ID NO: 527911 - DNA, 15 bp, Homo sapiens
agtacagacgtgtgc

SEQ ID NO: 527912 - DNA, 15 bp, Homo sapiens
cagtacagacgtgtg

SEQ ID NO: 527913 - DNA, 15 bp, Homo sapiens
gcagtacagacgtgt

SEQ ID NO: 527914 - DNA, 15 bp, Homo sapiens
ggcagtacagacgtg

SEQ ID NO: 527915 - DNA, 15 bp, Homo sapiens
tggcagtacagacgt

SEQ ID NO: 527916 - DNA, 15 bp, Homo sapiens
ctggcagtacagacg

SEQ ID NO: 527917 - DNA, 15 bp, Homo sapiens
gctggcagtacagac

SEQ ID NO: 527918 - DNA, 15 bp, Homo sapiens
agctggcagtacaga

SEQ ID NO: 527919 - DNA, 15 bp, Homo sapiens
tagctggcagtacag

SEQ ID NO: 527920 - DNA, 15 bp, Homo sapiens
gtagctggcagtaca

SEQ ID NO: 527921 - DNA, 15 bp, Homo sapiens
agtagctggcagtac

SEQ ID NO: 527922 - DNA, 15 bp, Homo sapiens
aagtagctggcagta

SEQ ID NO: 527923 - DNA, 15 bp, Homo sapiens
caagtagctggcagt

SEQ ID NO: 527924 - DNA, 15 bp, Homo sapiens
ccaagtagctggcag

SEQ ID NO: 527925 - DNA, 15 bp, Homo sapiens
cccaagtagctggca

SEQ ID NO: 527926 - DNA, 15 bp, Homo sapiens
tcccaagtagctggc

SEQ ID NO: 527927 - DNA, 15 bp, Homo sapiens
acctcagcctcccaa

SEQ ID NO: 527928 - DNA, 15 bp, Homo sapiens
cacctcagcctccca

SEQ ID NO: 527929 - DNA, 15 bp, Homo sapiens
ccacctcagcctccc

SEQ ID NO: 527930 - DNA, 15 bp, Homo sapiens
cccacctcagcctcc

SEQ ID NO: 527931 - DNA, 15 bp, Homo sapiens
tcccacctcagcctc

SEQ ID NO: 527932 - DNA, 15 bp, Homo sapiens
ctcccacctcagcct

SEQ ID NO: 527933 - DNA, 15 bp, Homo sapiens
tctcccacctcagcc

SEQ ID NO: 527934 - DNA, 15 bp, Homo sapiens
ttctcccacctcagc

SEQ ID NO: 527935 - DNA, 15 bp, Homo sapiens
attctcccacctcag

SEQ ID NO: 527936 - DNA, 15 bp, Homo sapiens
aattctcccacctca

SEQ ID NO: 527937 - DNA, 15 bp, Homo sapiens
caattctcccacctc

SEQ ID NO: 527938 - DNA, 15 bp, Homo sapiens
gcaattctcccacct

SEQ ID NO: 527939 - DNA, 15 bp, Homo sapiens
ggcaattctcccacc

SEQ ID NO: 527940 - DNA, 15 bp, Homo sapiens
aggcaattctcccac

SEQ ID NO: 527941 - DNA, 15 bp, Homo sapiens
caggcaattctccca

SEQ ID NO: 527942 - DNA, 15 bp, Homo sapiens
tcaggcaattctccc

SEQ ID NO: 527943 - DNA, 15 bp, Homo sapiens
ctcaggcaattctcc

SEQ ID NO: 527944 - DNA, 15 bp, Homo sapiens
gctcaggcaattctc

SEQ ID NO: 527945 - DNA, 15 bp, Homo sapiens
ggctcaggcaattct

SEQ ID NO: 527946 - DNA, 15 bp, Homo sapiens
aggctcaggcaattc

SEQ ID NO: 527947 - DNA, 15 bp, Homo sapiens
caggctcaggcaatt

SEQ ID NO: 527948 - DNA, 15 bp, Homo sapiens
ccaggctcaggcaat

SEQ ID NO: 527949 - DNA, 15 bp, Homo sapiens
cccaggctcaggcaa

SEQ ID NO: 527950 - DNA, 15 bp, Homo sapiens
tcccaggctcaggca

SEQ ID NO: 527951 - DNA, 15 bp, Homo sapiens
ttcccaggctcaggc

SEQ ID NO: 527952 - DNA, 15 bp, Homo sapiens
cttcccaggctcagg

SEQ ID NO: 527953 - DNA, 15 bp, Homo sapiens
acttcccaggctcag

SEQ ID NO: 527954 - DNA, 15 bp, Homo sapiens
cacttcccaggctca

SEQ ID NO: 527955 - DNA, 15 bp, Homo sapiens
ccacttcccaggctc

SEQ ID NO: 527956 - DNA, 15 bp, Homo sapiens
tccacttcccaggct

SEQ ID NO: 527957 - DNA, 15 bp, Homo sapiens
ctccacttcccaggc

SEQ ID NO: 527958 - DNA, 15 bp, Homo sapiens
cctccacttcccagg

SEQ ID NO: 527959 - DNA, 15 bp, Homo sapiens
gcctccacttcccag

SEQ ID NO: 527960 - DNA, 15 bp, Homo sapiens
ggcctccacttccca

SEQ ID NO: 527961 - DNA, 15 bp, Homo sapiens
cggcctccacttccc

SEQ ID NO: 527962 - DNA, 15 bp, Homo sapiens
gcggcctccacttcc

SEQ ID NO: 527963 - DNA, 15 bp, Homo sapiens
tgcggcctccacttc

SEQ ID NO: 527964 - DNA, 15 bp, Homo sapiens
ctgcggcctccactt

SEQ ID NO: 527965 - DNA, 15 bp, Homo sapiens
actgcggcctccact

SEQ ID NO: 527966 - DNA, 15 bp, Homo sapiens
cactgcggcctccac

SEQ ID NO: 527967 - DNA, 15 bp, Homo sapiens
tcactgcggcctcca

SEQ ID NO: 527968 - DNA, 15 bp, Homo sapiens
ctcactgcggcctcc

SEQ ID NO: 527969 - DNA, 15 bp, Homo sapiens
gctcactgcggcctc

SEQ ID NO: 527970 - DNA, 15 bp, Homo sapiens
agctcactgcggcct

SEQ ID NO: 527971 - DNA, 15 bp, Homo sapiens
cagctcactgcggcc

SEQ ID NO: 527972 - DNA, 15 bp, Homo sapiens
acagctcactgcggc

SEQ ID NO: 527973 - DNA, 15 bp, Homo sapiens
cacagctcactgcgg

SEQ ID NO: 527974 - DNA, 15 bp, Homo sapiens
tcacagctcactgcg

SEQ ID NO: 527975 - DNA, 15 bp, Homo sapiens
atcacagctcactgc

SEQ ID NO: 527976 - DNA, 15 bp, Homo sapiens
aatcacagctcactg

SEQ ID NO: 527977 - DNA, 15 bp, Homo sapiens
caatcacagctcact

SEQ ID NO: 527978 - DNA, 15 bp, Homo sapiens
gcaatcacagctcac

SEQ ID NO: 527979 - DNA, 15 bp, Homo sapiens
tgcaatcacagctca

SEQ ID NO: 527980 - DNA, 15 bp, Homo sapiens
atgcaatcacagctc

SEQ ID NO: 527981 - DNA, 15 bp, Homo sapiens
gatgcaatcacagct

SEQ ID NO: 527982 - DNA, 15 bp, Homo sapiens
tgatgcaatcacagc

SEQ ID NO: 527983 - DNA, 15 bp, Homo sapiens
gtgatgcaatcacag

SEQ ID NO: 527984 - DNA, 15 bp, Homo sapiens
agtgatgcaatcaca

SEQ ID NO: 527985 - DNA, 15 bp, Homo sapiens
tagtgatgcaatcac

SEQ ID NO: 527986 - DNA, 15 bp, Homo sapiens
gtagtgatgcaatca

SEQ ID NO: 527987 - DNA, 15 bp, Homo sapiens
tgtagtgatgcaatc

SEQ ID NO: 527988 - DNA, 15 bp, Homo sapiens
atgtagtgatgcaat

SEQ ID NO: 527989 - DNA, 15 bp, Homo sapiens
aatgtagtgatgcaa

SEQ ID NO: 527990 - DNA, 15 bp, Homo sapiens
gaatgtagtgatgca

SEQ ID NO: 527991 - DNA, 15 bp, Homo sapiens
tgaatgtagtgatgc

SEQ ID NO: 527992 - DNA, 15 bp, Homo sapiens
ctgaatgtagtgatg

SEQ ID NO: 527993 - DNA, 15 bp, Homo sapiens
gctgaatgtagtgat

SEQ ID NO: 527994 - DNA, 15 bp, Homo sapiens
ggctgaatgtagtga

SEQ ID NO: 527995 - DNA, 15 bp, Homo sapiens
aggctgaatgtagtg

SEQ ID NO: 527996 - DNA, 15 bp, Homo sapiens
caggctgaatgtagt

SEQ ID NO: 527997 - DNA, 15 bp, Homo sapiens
ccaggctgaatgtag

SEQ ID NO: 527998 - DNA, 15 bp, Homo sapiens
cccaggctgaatgta

SEQ ID NO: 527999 - DNA, 15 bp, Homo sapiens
acccaggctgaatgt

SEQ ID NO: 528000 - DNA, 15 bp, Homo sapiens
gacccaggctgaatg

SEQ ID NO: 528001 - DNA, 15 bp, Homo sapiens
tgacccaggctgaat

SEQ ID NO: 528002 - DNA, 15 bp, Homo sapiens
gtgacccaggctgaa

SEQ ID NO: 528003 - DNA, 15 bp, Homo sapiens
tgtgacccaggctga

SEQ ID NO: 528004 - DNA, 15 bp, Homo sapiens
ctgtgacccaggctg

SEQ ID NO: 528005 - DNA, 15 bp, Homo sapiens
tctgtgacccaggct

SEQ ID NO: 528006 - DNA, 15 bp, Homo sapiens
ctctgtgacccaggc

SEQ ID NO: 528007 - DNA, 15 bp, Homo sapiens
gctctgtgacccagg

SEQ ID NO: 528008 - DNA, 15 bp, Homo sapiens
tgctctgtgacccag

SEQ ID NO: 528009 - DNA, 15 bp, Homo sapiens
ttgctctgtgaccca

SEQ ID NO: 528010 - DNA, 15 bp, Homo sapiens
cttgctctgtgaccc

SEQ ID NO: 528011 - DNA, 15 bp, Homo sapiens
tcttgctctgtgacc

SEQ ID NO: 528012 - DNA, 15 bp, Homo sapiens
atcttgctctgtgac

SEQ ID NO: 528013 - DNA, 15 bp, Homo sapiens
gatcttgctctgtga

SEQ ID NO: 528014 - DNA, 15 bp, Homo sapiens
ggatcttgctctgtg

SEQ ID NO: 528015 - DNA, 15 bp, Homo sapiens
aggatcttgctctgt

SEQ ID NO: 528016 - DNA, 15 bp, Homo sapiens
taggatcttgctctg

SEQ ID NO: 528017 - DNA, 15 bp, Homo sapiens
ataggatcttgctct

SEQ ID NO: 528018 - DNA, 15 bp, Homo sapiens
gataggatcttgctc

SEQ ID NO: 528019 - DNA, 15 bp, Homo sapiens
agataggatcttgct

SEQ ID NO: 528020 - DNA, 15 bp, Homo sapiens
gagataggatcttgc

SEQ ID NO: 528021 - DNA, 15 bp, Homo sapiens
tgagataggatcttg

SEQ ID NO: 528022 - DNA, 15 bp, Homo sapiens
ttgagataggatctt

SEQ ID NO: 528023 - DNA, 15 bp, Homo sapiens
tttgagataggatct

SEQ ID NO: 528024 - DNA, 15 bp, Homo sapiens
ttttgagataggatc

SEQ ID NO: 528025 - DNA, 15 bp, Homo sapiens
tttttgagataggat

SEQ ID NO: 528026 - DNA, 15 bp, Homo sapiens
gtttttgagatagga

SEQ ID NO: 528027 - DNA, 15 bp, Homo sapiens
agtttttgagatagg

SEQ ID NO: 528028 - DNA, 15 bp, Homo sapiens
tagtttttgagatag

SEQ ID NO: 528029 - DNA, 15 bp, Homo sapiens
ttagtttttgagata

SEQ ID NO: 528030 - DNA, 15 bp, Homo sapiens
tttagtttttgagat

SEQ ID NO: 528031 - DNA, 15 bp, Homo sapiens
atttagtttttgaga

SEQ ID NO: 528032 - DNA, 15 bp, Homo sapiens
tatttagtttttgag

SEQ ID NO: 528033 - DNA, 15 bp, Homo sapiens
ttatttagtttttga

SEQ ID NO: 528034 - DNA, 15 bp, Homo sapiens
cttatttagtttttg

SEQ ID NO: 528035 - DNA, 15 bp, Homo sapiens
acttatttagttttt

SEQ ID NO: 528036 - DNA, 15 bp, Homo sapiens
tacttatttagtttt

SEQ ID NO: 528037 - DNA, 15 bp, Homo sapiens
ttacttatttagttt

SEQ ID NO: 528038 - DNA, 15 bp, Homo sapiens
tttacttatttagtt

SEQ ID NO: 528039 - DNA, 15 bp, Homo sapiens
atttacttatttagt

SEQ ID NO: 528040 - DNA, 15 bp, Homo sapiens
tatttacttatttag

SEQ ID NO: 528041 - DNA, 15 bp, Homo sapiens
ttatttacttattta

SEQ ID NO: 528042 - DNA, 15 bp, Homo sapiens
attatttacttattt

SEQ ID NO: 528043 - DNA, 15 bp, Homo sapiens
tattatttacttatt

SEQ ID NO: 528044 - DNA, 15 bp, Homo sapiens
ttattatttacttat

SEQ ID NO: 528045 - DNA, 15 bp, Homo sapiens
tttattatttactta

SEQ ID NO: 528046 - DNA, 15 bp, Homo sapiens
atttattatttactt

SEQ ID NO: 528047 - DNA, 15 bp, Homo sapiens
aatttattatttact

SEQ ID NO: 528048 - DNA, 15 bp, Homo sapiens
taatttattatttac

SEQ ID NO: 528049 - DNA, 15 bp, Homo sapiens
ttaatttattattta

SEQ ID NO: 528050 - DNA, 15 bp, Homo sapiens
tttaatttattattt

SEQ ID NO: 528051 - DNA, 15 bp, Homo sapiens
ttttaatttattatt

SEQ ID NO: 528052 - DNA, 15 bp, Homo sapiens
tttttaatttattat

SEQ ID NO: 528053 - DNA, 15 bp, Homo sapiens
ttttttaatttatta

SEQ ID NO: 528054 - DNA, 15 bp, Homo sapiens
attttttaatttatt

SEQ ID NO: 528055 - DNA, 15 bp, Homo sapiens
tattttttaatttat

SEQ ID NO: 528056 - DNA, 15 bp, Homo sapiens
atattttttaattta

SEQ ID NO: 528057 - DNA, 15 bp, Homo sapiens
catattttttaattt

SEQ ID NO: 528058 - DNA, 15 bp, Homo sapiens
tcatattttttaatt

SEQ ID NO: 528059 - DNA, 15 bp, Homo sapiens
ttcatattttttaat

SEQ ID NO: 528060 - DNA, 15 bp, Homo sapiens
attcatattttttaa

SEQ ID NO: 528061 - DNA, 15 bp, Homo sapiens
tattcatatttttta

SEQ ID NO: 528062 - DNA, 15 bp, Homo sapiens
ttattcatatttttt

SEQ ID NO: 528063 - DNA, 15 bp, Homo sapiens
tttattcatattttt

SEQ ID NO: 528064 - DNA, 15 bp, Homo sapiens
ctttattcatatttt

SEQ ID NO: 528065 - DNA, 15 bp, Homo sapiens
actttattcatattt

SEQ ID NO: 528066 - DNA, 15 bp, Homo sapiens
gactttattcatatt

SEQ ID NO: 528067 - DNA, 15 bp, Homo sapiens
agactttattcatat

SEQ ID NO: 528068 - DNA, 15 bp, Homo sapiens
cagactttattcata

SEQ ID NO: 528069 - DNA, 15 bp, Homo sapiens
ccagactttattcat

SEQ ID NO: 528070 - DNA, 15 bp, Homo sapiens
tccagactttattca

SEQ ID NO: 528071 - DNA, 15 bp, Homo sapiens
ctccagactttattc

SEQ ID NO: 528072 - DNA, 15 bp, Homo sapiens
actccagactttatt

SEQ ID NO: 528073 - DNA, 15 bp, Homo sapiens
aactccagactttat

SEQ ID NO: 528074 - DNA, 15 bp, Homo sapiens
taactccagacttta

SEQ ID NO: 528075 - DNA, 15 bp, Homo sapiens
ttaactccagacttt

SEQ ID NO: 528076 - DNA, 15 bp, Homo sapiens
tttaactccagactt

SEQ ID NO: 528077 - DNA, 15 bp, Homo sapiens
ctttaactccagact

SEQ ID NO: 528078 - DNA, 15 bp, Homo sapiens
actttaactccagac

SEQ ID NO: 528079 - DNA, 15 bp, Homo sapiens
gactttaactccaga

SEQ ID NO: 528080 - DNA, 15 bp, Homo sapiens
agactttaactccag

SEQ ID NO: 528081 - DNA, 15 bp, Homo sapiens
cagactttaactcca

SEQ ID NO: 528082 - DNA, 15 bp, Homo sapiens
ccagactttaactcc

SEQ ID NO: 528083 - DNA, 15 bp, Homo sapiens
tccagactttaactc

SEQ ID NO: 528084 - DNA, 15 bp, Homo sapiens
ttccagactttaact

SEQ ID NO: 528085 - DNA, 15 bp, Homo sapiens
attccagactttaac

SEQ ID NO: 528086 - DNA, 15 bp, Homo sapiens
tattccagactttaa

SEQ ID NO: 528087 - DNA, 15 bp, Homo sapiens
ttattccagacttta

SEQ ID NO: 528088 - DNA, 15 bp, Homo sapiens
tttattccagacttt

SEQ ID NO: 528089 - DNA, 15 bp, Homo sapiens
ctttattccagactt

SEQ ID NO: 528090 - DNA, 15 bp, Homo sapiens
gctttattccagact

SEQ ID NO: 528091 - DNA, 15 bp, Homo sapiens
agctttattccagac

SEQ ID NO: 528092 - DNA, 15 bp, Homo sapiens
tagctttattccaga

SEQ ID NO: 528093 - DNA, 15 bp, Homo sapiens
ctagctttattccag

SEQ ID NO: 528094 - DNA, 15 bp, Homo sapiens
actagctttattcca

SEQ ID NO: 528095 - DNA, 15 bp, Homo sapiens
tactagctttattcc

SEQ ID NO: 528096 - DNA, 15 bp, Homo sapiens
ctactagctttattc

SEQ ID NO: 528097 - DNA, 15 bp, Homo sapiens
actactagctttatt

SEQ ID NO: 528098 - DNA, 15 bp, Homo sapiens
tactactagctttat

SEQ ID NO: 528099 - DNA, 15 bp, Homo sapiens
ttactactagcttta

SEQ ID NO: 528100 - DNA, 15 bp, Homo sapiens
attactactagcttt

SEQ ID NO: 528101 - DNA, 15 bp, Homo sapiens
cattactactagctt

SEQ ID NO: 528102 - DNA, 15 bp, Homo sapiens
acattactactagct

SEQ ID NO: 528103 - DNA, 15 bp, Homo sapiens
tacattactactagc

SEQ ID NO: 528104 - DNA, 15 bp, Homo sapiens
gtacattactactag

SEQ ID NO: 528105 - DNA, 15 bp, Homo sapiens
ggtacattactacta

SEQ ID NO: 528106 - DNA, 15 bp, Homo sapiens
tggtacattactact

SEQ ID NO: 528107 - DNA, 15 bp, Homo sapiens
ctggtacattactac

SEQ ID NO: 528108 - DNA, 15 bp, Homo sapiens
actggtacattacta

SEQ ID NO: 528109 - DNA, 15 bp, Homo sapiens
cactggtacattact

SEQ ID NO: 528110 - DNA, 15 bp, Homo sapiens
ccactggtacattac

SEQ ID NO: 528111 - DNA, 15 bp, Homo sapiens
accactggtacatta

SEQ ID NO: 528112 - DNA, 15 bp, Homo sapiens
aaccactggtacatt

SEQ ID NO: 528113 - DNA, 15 bp, Homo sapiens
aaaccactggtacat

SEQ ID NO: 528114 - DNA, 15 bp, Homo sapiens
gaaaccactggtaca

SEQ ID NO: 528115 - DNA, 15 bp, Homo sapiens
ggaaaccactggtac

SEQ ID NO: 528116 - DNA, 15 bp, Homo sapiens
aggaaaccactggta

SEQ ID NO: 528117 - DNA, 15 bp, Homo sapiens
taggaaaccactggt

SEQ ID NO: 528118 - DNA, 15 bp, Homo sapiens
gtaggaaaccactgg

SEQ ID NO: 528119 - DNA, 15 bp, Homo sapiens
agtaggaaaccactg

SEQ ID NO: 528120 - DNA, 15 bp, Homo sapiens
aagtaggaaaccact

SEQ ID NO: 528121 - DNA, 15 bp, Homo sapiens
aaagtaggaaaccac

SEQ ID NO: 528122 - DNA, 15 bp, Homo sapiens
aaaagtaggaaacca

SEQ ID NO: 528123 - DNA, 15 bp, Homo sapiens
caaaagtaggaaacc

SEQ ID NO: 528124 - DNA, 15 bp, Homo sapiens
ccaaaagtaggaaac

SEQ ID NO: 528125 - DNA, 15 bp, Homo sapiens
gccaaaagtaggaaa

SEQ ID NO: 528126 - DNA, 15 bp, Homo sapiens
tgccaaaagtaggaa

SEQ ID NO: 528127 - DNA, 15 bp, Homo sapiens
ttgccaaaagtagga

SEQ ID NO: 528128 - DNA, 15 bp, Homo sapiens
tttgccaaaagtagg

SEQ ID NO: 528129 - DNA, 15 bp, Homo sapiens
atttgccaaaagtag

SEQ ID NO: 528130 - DNA, 15 bp, Homo sapiens
catttgccaaaagta

SEQ ID NO: 528131 - DNA, 15 bp, Homo sapiens
acatttgccaaaagt

SEQ ID NO: 528132 - DNA, 15 bp, Homo sapiens
tacatttgccaaaag

SEQ ID NO: 528133 - DNA, 15 bp, Homo sapiens
atacatttgccaaaa

SEQ ID NO: 528134 - DNA, 15 bp, Homo sapiens
gatacatttgccaaa

SEQ ID NO: 528135 - DNA, 15 bp, Homo sapiens
tgatacatttgccaa

SEQ ID NO: 528136 - DNA, 15 bp, Homo sapiens
atgatacatttgcca

SEQ ID NO: 528137 - DNA, 15 bp, Homo sapiens
catgatacatttgcc

SEQ ID NO: 528138 - DNA, 15 bp, Homo sapiens
ccatgatacatttgc

SEQ ID NO: 528139 - DNA, 15 bp, Homo sapiens
gccatgatacatttg

SEQ ID NO: 528140 - DNA, 15 bp, Homo sapiens
cgccatgatacattt

SEQ ID NO: 528141 - DNA, 15 bp, Homo sapiens
tcgccatgatacatt

SEQ ID NO: 528142 - DNA, 15 bp, Homo sapiens
atcgccatgatacat

SEQ ID NO: 528143 - DNA, 15 bp, Homo sapiens
catcgccatgataca

SEQ ID NO: 528144 - DNA, 15 bp, Homo sapiens
acatcgccatgatac

SEQ ID NO: 528145 - DNA, 15 bp, Homo sapiens
tacatcgccatgata

SEQ ID NO: 528146 - DNA, 15 bp, Homo sapiens
ttacatcgccatgat

SEQ ID NO: 528147 - DNA, 15 bp, Homo sapiens
cttacatcgccatga

SEQ ID NO: 528148 - DNA, 15 bp, Homo sapiens
tcttacatcgccatg

SEQ ID NO: 528149 - DNA, 15 bp, Homo sapiens
atcttacatcgccat

SEQ ID NO: 528150 - DNA, 15 bp, Homo sapiens
catcttacatcgcca

SEQ ID NO: 528151 - DNA, 15 bp, Homo sapiens
ccatcttacatcgcc

SEQ ID NO: 528152 - DNA, 15 bp, Homo sapiens
accatcttacatcgc

SEQ ID NO: 528153 - DNA, 15 bp, Homo sapiens
taccatcttacatcg

SEQ ID NO: 528154 - DNA, 15 bp, Homo sapiens
ttaccatcttacatc

SEQ ID NO: 528155 - DNA, 15 bp, Homo sapiens
gttaccatcttacat

SEQ ID NO: 528156 - DNA, 15 bp, Homo sapiens
tgttaccatcttaca

SEQ ID NO: 528157 - DNA, 15 bp, Homo sapiens
ctgttaccatcttac

SEQ ID NO: 528158 - DNA, 15 bp, Homo sapiens
cctgttaccatctta

SEQ ID NO: 528159 - DNA, 15 bp, Homo sapiens
acctgttaccatctt

SEQ ID NO: 528160 - DNA, 15 bp, Homo sapiens
cacctgttaccatct

SEQ ID NO: 528161 - DNA, 15 bp, Homo sapiens
tcacctgttaccatc

SEQ ID NO: 528162 - DNA, 15 bp, Homo sapiens
ttcacctgttaccat

SEQ ID NO: 528163 - DNA, 15 bp, Homo sapiens
tttcacctgttacca

SEQ ID NO: 528164 - DNA, 15 bp, Homo sapiens
gtttcacctgttacc

SEQ ID NO: 528165 - DNA, 15 bp, Homo sapiens
ggtttcacctgttac

SEQ ID NO: 528166 - DNA, 15 bp, Homo sapiens
cggtttcacctgtta

SEQ ID NO: 528167 - DNA, 15 bp, Homo sapiens
ccggtttcacctgtt

SEQ ID NO: 528168 - DNA, 15 bp, Homo sapiens
cccggtttcacctgt

SEQ ID NO: 528169 - DNA, 15 bp, Homo sapiens
acccggtttcacctg

SEQ ID NO: 528170 - DNA, 15 bp, Homo sapiens
cacccggtttcacct

SEQ ID NO: 528171 - DNA, 15 bp, Homo sapiens
tcacccggtttcacc

SEQ ID NO: 528172 - DNA, 15 bp, Homo sapiens
ctcacccggtttcac

SEQ ID NO: 528173 - DNA, 15 bp, Homo sapiens
actcacccggtttca

SEQ ID NO: 528174 - DNA, 15 bp, Homo sapiens
cactcacccggtttc

SEQ ID NO: 528175 - DNA, 15 bp, Homo sapiens
ccactcacccggttt

SEQ ID NO: 528176 - DNA, 15 bp, Homo sapiens
gccactcacccggtt

SEQ ID NO: 528177 - DNA, 15 bp, Homo sapiens
tgccactcacccggt

SEQ ID NO: 528178 - DNA, 15 bp, Homo sapiens
gtgccactcacccgg

SEQ ID NO: 528179 - DNA, 15 bp, Homo sapiens
tgtgccactcacccg

SEQ ID NO: 528180 - DNA, 15 bp, Homo sapiens
gtgtgccactcaccc

SEQ ID NO: 528181 - DNA, 15 bp, Homo sapiens
tgtgtgccactcacc

SEQ ID NO: 528182 - DNA, 15 bp, Homo sapiens
ctgtgtgccactcac

SEQ ID NO: 528183 - DNA, 15 bp, Homo sapiens
tctgtgtgccactca

SEQ ID NO: 528184 - DNA, 15 bp, Homo sapiens
ttctgtgtgccactc

SEQ ID NO: 528185 - DNA, 15 bp, Homo sapiens
tttctgtgtgccact

SEQ ID NO: 528186 - DNA, 15 bp, Homo sapiens
gtttctgtgtgccac

SEQ ID NO: 528187 - DNA, 15 bp, Homo sapiens
agtttctgtgtgcca

SEQ ID NO: 528188 - DNA, 15 bp, Homo sapiens
cagtttctgtgtgcc

SEQ ID NO: 528189 - DNA, 15 bp, Homo sapiens
acagtttctgtgtgc

SEQ ID NO: 528190 - DNA, 15 bp, Homo sapiens
tacagtttctgtgtg

SEQ ID NO: 528191 - DNA, 15 bp, Homo sapiens
atacagtttctgtgt

SEQ ID NO: 528192 - DNA, 15 bp, Homo sapiens
gatacagtttctgtg

SEQ ID NO: 528193 - DNA, 15 bp, Homo sapiens
agatacagtttctgt

SEQ ID NO: 528194 - DNA, 15 bp, Homo sapiens
aagatacagtttctg

SEQ ID NO: 528195 - DNA, 15 bp, Homo sapiens
aaagatacagtttct

SEQ ID NO: 528196 - DNA, 15 bp, Homo sapiens
caaagatacagtttc

SEQ ID NO: 528197 - DNA, 15 bp, Homo sapiens
gcaaagatacagttt

SEQ ID NO: 528198 - DNA, 15 bp, Homo sapiens
tgcaaagatacagtt

SEQ ID NO: 528199 - DNA, 15 bp, Homo sapiens
ttgcaaagatacagt

SEQ ID NO: 528200 - DNA, 15 bp, Homo sapiens
gttgcaaagatacag

SEQ ID NO: 528201 - DNA, 15 bp, Homo sapiens
agttgcaaagataca

SEQ ID NO: 528202 - DNA, 15 bp, Homo sapiens
aagttgcaaagatac

SEQ ID NO: 528203 - DNA, 15 bp, Homo sapiens
aaagttgcaaagata

SEQ ID NO: 528204 - DNA, 15 bp, Homo sapiens
aaaagttgcaaagat

SEQ ID NO: 528205 - DNA, 15 bp, Homo sapiens
aaaaagttgcaaaga

SEQ ID NO: 528206 - DNA, 15 bp, Homo sapiens
caaaaagttgcaaag

SEQ ID NO: 528207 - DNA, 15 bp, Homo sapiens
ccaaaaagttgcaaa

SEQ ID NO: 528208 - DNA, 15 bp, Homo sapiens
accaaaaagttgcaa

SEQ ID NO: 528209 - DNA, 15 bp, Homo sapiens
taccaaaaagttgca

SEQ ID NO: 528210 - DNA, 15 bp, Homo sapiens
ttaccaaaaagttgc

SEQ ID NO: 528211 - DNA, 15 bp, Homo sapiens
tttaccaaaaagttg

SEQ ID NO: 528212 - DNA, 15 bp, Homo sapiens
gtttaccaaaaagtt

SEQ ID NO: 528213 - DNA, 15 bp, Homo sapiens
agtttaccaaaaagt

SEQ ID NO: 528214 - DNA, 15 bp, Homo sapiens
aagtttaccaaaaag

SEQ ID NO: 528215 - DNA, 15 bp, Homo sapiens
taagtttaccaaaaa

SEQ ID NO: 528216 - DNA, 15 bp, Homo sapiens
ttaagtttaccaaaa

SEQ ID NO: 528217 - DNA, 15 bp, Homo sapiens
tttaagtttaccaaa

SEQ ID NO: 528218 - DNA, 15 bp, Homo sapiens
ttttaagtttaccaa

SEQ ID NO: 528219 - DNA, 15 bp, Homo sapiens
attttaagtttacca

SEQ ID NO: 528220 - DNA, 15 bp, Homo sapiens
aattttaagtttacc

SEQ ID NO: 528221 - DNA, 15 bp, Homo sapiens
taattttaagtttac

SEQ ID NO: 528222 - DNA, 15 bp, Homo sapiens
ataattttaagttta

SEQ ID NO: 528223 - DNA, 15 bp, Homo sapiens
aataattttaagttt

SEQ ID NO: 528224 - DNA, 15 bp, Homo sapiens
gaataattttaagtt

SEQ ID NO: 528225 - DNA, 15 bp, Homo sapiens
ggaataattttaagt

SEQ ID NO: 528226 - DNA, 15 bp, Homo sapiens
tggaataattttaag

SEQ ID NO: 528227 - DNA, 15 bp, Homo sapiens
ttggaataattttaa

SEQ ID NO: 528228 - DNA, 15 bp, Homo sapiens
tttggaataatttta

SEQ ID NO: 528229 - DNA, 15 bp, Homo sapiens
ctttggaataatttt

SEQ ID NO: 528230 - DNA, 15 bp, Homo sapiens
actttggaataattt

SEQ ID NO: 528231 - DNA, 15 bp, Homo sapiens
gactttggaataatt

SEQ ID NO: 528232 - DNA, 15 bp, Homo sapiens
tgactttggaataat

SEQ ID NO: 528233 - DNA, 15 bp, Homo sapiens
ttgactttggaataa

SEQ ID NO: 528234 - DNA, 15 bp, Homo sapiens
tttgactttggaata

SEQ ID NO: 528235 - DNA, 15 bp, Homo sapiens
atttgactttggaat

SEQ ID NO: 528236 - DNA, 15 bp, Homo sapiens
aatttgactttggaa

SEQ ID NO: 528237 - DNA, 15 bp, Homo sapiens
taatttgactttgga

SEQ ID NO: 528238 - DNA, 15 bp, Homo sapiens
ataatttgactttgg

SEQ ID NO: 528239 - DNA, 15 bp, Homo sapiens
aataatttgactttg

SEQ ID NO: 528240 - DNA, 15 bp, Homo sapiens
taataatttgacttt

SEQ ID NO: 528241 - DNA, 15 bp, Homo sapiens
ctaataatttgactt

SEQ ID NO: 528242 - DNA, 15 bp, Homo sapiens
cctaataatttgact

SEQ ID NO: 528243 - DNA, 15 bp, Homo sapiens
ccctaataatttgac

SEQ ID NO: 528244 - DNA, 15 bp, Homo sapiens
tccctaataatttga

SEQ ID NO: 528245 - DNA, 15 bp, Homo sapiens
ttccctaataatttg

SEQ ID NO: 528246 - DNA, 15 bp, Homo sapiens
tttccctaataattt

SEQ ID NO: 528247 - DNA, 15 bp, Homo sapiens
ttttccctaataatt

SEQ ID NO: 528248 - DNA, 15 bp, Homo sapiens
tttttccctaataat

SEQ ID NO: 528249 - DNA, 15 bp, Homo sapiens
ttttttccctaataa

SEQ ID NO: 528250 - DNA, 15 bp, Homo sapiens
tttttttccctaata

SEQ ID NO: 528251 - DNA, 15 bp, Homo sapiens
ttttttttccctaat

SEQ ID NO: 528252 - DNA, 15 bp, Homo sapiens
attttttttccctaa

SEQ ID NO: 528253 - DNA, 15 bp, Homo sapiens
cattttttttcccta

SEQ ID NO: 528254 - DNA, 15 bp, Homo sapiens
tcattttttttccct

SEQ ID NO: 528255 - DNA, 15 bp, Homo sapiens
ctcattttttttccc

SEQ ID NO: 528256 - DNA, 15 bp, Homo sapiens
cctcattttttttcc

SEQ ID NO: 528257 - DNA, 15 bp, Homo sapiens
ccctcattttttttc

SEQ ID NO: 528258 - DNA, 15 bp, Homo sapiens
cccctcatttttttt

SEQ ID NO: 528259 - DNA, 15 bp, Homo sapiens
acccctcattttttt

SEQ ID NO: 528260 - DNA, 15 bp, Homo sapiens
cacccctcatttttt

SEQ ID NO: 528261 - DNA, 15 bp, Homo sapiens
gcacccctcattttt

SEQ ID NO: 528262 - DNA, 15 bp, Homo sapiens
agcacccctcatttt

SEQ ID NO: 528263 - DNA, 15 bp, Homo sapiens
aagcacccctcattt

SEQ ID NO: 528264 - DNA, 15 bp, Homo sapiens
aaagcacccctcatt

SEQ ID NO: 528265 - DNA, 15 bp, Homo sapiens
aaaagcacccctcat

SEQ ID NO: 528266 - DNA, 15 bp, Homo sapiens
taaaagcacccctca

SEQ ID NO: 528267 - DNA, 15 bp, Homo sapiens
ataaaagcacccctc

SEQ ID NO: 528268 - DNA, 15 bp, Homo sapiens
tataaaagcacccct

SEQ ID NO: 528269 - DNA, 15 bp, Homo sapiens
gtataaaagcacccc

SEQ ID NO: 528270 - DNA, 15 bp, Homo sapiens
agtataaaagcaccc

SEQ ID NO: 528271 - DNA, 15 bp, Homo sapiens
cagtataaaagcacc

SEQ ID NO: 528272 - DNA, 15 bp, Homo sapiens
acagtataaaagcac

SEQ ID NO: 528273 - DNA, 15 bp, Homo sapiens
gacagtataaaagca

SEQ ID NO: 528274 - DNA, 15 bp, Homo sapiens
tgacagtataaaagc

SEQ ID NO: 528275 - DNA, 15 bp, Homo sapiens
ctgacagtataaaag

SEQ ID NO: 528276 - DNA, 15 bp, Homo sapiens
actgacagtataaaa

SEQ ID NO: 528277 - DNA, 15 bp, Homo sapiens
gactgacagtataaa

SEQ ID NO: 528278 - DNA, 15 bp, Homo sapiens
agactgacagtataa

SEQ ID NO: 528279 - DNA, 15 bp, Homo sapiens
cagactgacagtata

SEQ ID NO: 528280 - DNA, 15 bp, Homo sapiens
ccagactgacagtat

SEQ ID NO: 528281 - DNA, 15 bp, Homo sapiens
gccagactgacagta

SEQ ID NO: 528282 - DNA, 15 bp, Homo sapiens
tgccagactgacagt

SEQ ID NO: 528283 - DNA, 15 bp, Homo sapiens
ctgccagactgacag

SEQ ID NO: 528284 - DNA, 15 bp, Homo sapiens
actgccagactgaca

SEQ ID NO: 528285 - DNA, 15 bp, Homo sapiens
gactgccagactgac

SEQ ID NO: 528286 - DNA, 15 bp, Homo sapiens
agactgccagactga

SEQ ID NO: 528287 - DNA, 15 bp, Homo sapiens
tagactgccagactg

SEQ ID NO: 528288 - DNA, 15 bp, Homo sapiens
ttagactgccagact

SEQ ID NO: 528289 - DNA, 15 bp, Homo sapiens
cttagactgccagac

SEQ ID NO: 528290 - DNA, 15 bp, Homo sapiens
ccttagactgccaga

SEQ ID NO: 528291 - DNA, 15 bp, Homo sapiens
gccttagactgccag

SEQ ID NO: 528292 - DNA, 15 bp, Homo sapiens
tgccttagactgcca

SEQ ID NO: 528293 - DNA, 15 bp, Homo sapiens
ctgccttagactgcc

SEQ ID NO: 528294 - DNA, 15 bp, Homo sapiens
cctgccttagactgc

SEQ ID NO: 528295 - DNA, 15 bp, Homo sapiens
tcctgccttagactg

SEQ ID NO: 528296 - DNA, 15 bp, Homo sapiens
atcctgccttagact

SEQ ID NO: 528297 - DNA, 15 bp, Homo sapiens
catcctgccttagac

SEQ ID NO: 528298 - DNA, 15 bp, Homo sapiens
acatcctgccttaga

SEQ ID NO: 528299 - DNA, 15 bp, Homo sapiens
cacatcctgccttag

SEQ ID NO: 528300 - DNA, 15 bp, Homo sapiens
ccacatcctgcctta

SEQ ID NO: 528301 - DNA, 15 bp, Homo sapiens
accacatcctgcctt

SEQ ID NO: 528302 - DNA, 15 bp, Homo sapiens
caccacatcctgcct

SEQ ID NO: 528303 - DNA, 15 bp, Homo sapiens
gcaccacatcctgcc

SEQ ID NO: 528304 - DNA, 15 bp, Homo sapiens
tgcaccacatcctgc

SEQ ID NO: 528305 - DNA, 15 bp, Homo sapiens
gtgcaccacatcctg

SEQ ID NO: 528306 - DNA, 15 bp, Homo sapiens
tgtgcaccacatcct

SEQ ID NO: 528307 - DNA, 15 bp, Homo sapiens
ctgtgcaccacatcc

SEQ ID NO: 528308 - DNA, 15 bp, Homo sapiens
tctgtgcaccacatc

SEQ ID NO: 528309 - DNA, 15 bp, Homo sapiens
gtctgtgcaccacat

SEQ ID NO: 528310 - DNA, 15 bp, Homo sapiens
ggtctgtgcaccaca

SEQ ID NO: 528311 - DNA, 15 bp, Homo sapiens
gggtctgtgcaccac

SEQ ID NO: 528312 - DNA, 15 bp, Homo sapiens
agggtctgtgcacca

SEQ ID NO: 528313 - DNA, 15 bp, Homo sapiens
gagggtctgtgcacc

SEQ ID NO: 528314 - DNA, 15 bp, Homo sapiens
tgagggtctgtgcac

SEQ ID NO: 528315 - DNA, 15 bp, Homo sapiens
ctgagggtctgtgca

SEQ ID NO: 528316 - DNA, 15 bp, Homo sapiens
cctgagggtctgtgc

SEQ ID NO: 528317 - DNA, 15 bp, Homo sapiens
tcctgagggtctgtg

SEQ ID NO: 528318 - DNA, 15 bp, Homo sapiens
ctcctgagggtctgt

SEQ ID NO: 528319 - DNA, 15 bp, Homo sapiens
cctcctgagggtctg

SEQ ID NO: 528320 - DNA, 15 bp, Homo sapiens
gcctcctgagggtct

SEQ ID NO: 528321 - DNA, 15 bp, Homo sapiens
tgcctcctgagggtc

SEQ ID NO: 528322 - DNA, 15 bp, Homo sapiens
ctgcctcctgagggt

SEQ ID NO: 528323 - DNA, 15 bp, Homo sapiens
tctgcctcctgaggg

SEQ ID NO: 528324 - DNA, 15 bp, Homo sapiens
gtctgcctcctgagg

SEQ ID NO: 528325 - DNA, 15 bp, Homo sapiens
tgtctgcctcctgag

SEQ ID NO: 528326 - DNA, 15 bp, Homo sapiens
gtgtctgcctcctga

SEQ ID NO: 528327 - DNA, 15 bp, Homo sapiens
tgtgtctgcctcctg

SEQ ID NO: 528328 - DNA, 15 bp, Homo sapiens
gtgtgtctgcctcct

SEQ ID NO: 528329 - DNA, 15 bp, Homo sapiens
ggtgtgtctgcctcc

SEQ ID NO: 528330 - DNA, 15 bp, Homo sapiens
aggtgtgtctgcctc

SEQ ID NO: 528331 - DNA, 15 bp, Homo sapiens
caggtgtgtctgcct

SEQ ID NO: 528332 - DNA, 15 bp, Homo sapiens
ccaggtgtgtctgcc

SEQ ID NO: 528333 - DNA, 15 bp, Homo sapiens
tccaggtgtgtctgc

SEQ ID NO: 528334 - DNA, 15 bp, Homo sapiens
ctccaggtgtgtctg

SEQ ID NO: 528335 - DNA, 15 bp, Homo sapiens
cctccaggtgtgtct

SEQ ID NO: 528336 - DNA, 15 bp, Homo sapiens
tcctccaggtgtgtc

SEQ ID NO: 528337 - DNA, 15 bp, Homo sapiens
ttcctccaggtgtgt

SEQ ID NO: 528338 - DNA, 15 bp, Homo sapiens
tttcctccaggtgtg

SEQ ID NO: 528339 - DNA, 15 bp, Homo sapiens
ttttcctccaggtgt

SEQ ID NO: 528340 - DNA, 15 bp, Homo sapiens
attttcctccaggtg

SEQ ID NO: 528341 - DNA, 15 bp, Homo sapiens
gattttcctccaggt

SEQ ID NO: 528342 - DNA, 15 bp, Homo sapiens
ggattttcctccagg

SEQ ID NO: 528343 - DNA, 15 bp, Homo sapiens
aggattttcctccag

SEQ ID NO: 528344 - DNA, 15 bp, Homo sapiens
taggattttcctcca

SEQ ID NO: 528345 - DNA, 15 bp, Homo sapiens
ataggattttcctcc

SEQ ID NO: 528346 - DNA, 15 bp, Homo sapiens
aataggattttcctc

SEQ ID NO: 528347 - DNA, 15 bp, Homo sapiens
gaataggattttcct

SEQ ID NO: 528348 - DNA, 15 bp, Homo sapiens
ggaataggattttcc

SEQ ID NO: 528349 - DNA, 15 bp, Homo sapiens
tggaataggattttc

SEQ ID NO: 528350 - DNA, 15 bp, Homo sapiens
gtggaataggatttt

SEQ ID NO: 528351 - DNA, 15 bp, Homo sapiens
tgtggaataggattt

SEQ ID NO: 528352 - DNA, 15 bp, Homo sapiens
ctgtggaataggatt

SEQ ID NO: 528353 - DNA, 15 bp, Homo sapiens
gctgtggaataggat

SEQ ID NO: 528354 - DNA, 15 bp, Homo sapiens
agctgtggaatagga

SEQ ID NO: 528355 - DNA, 15 bp, Homo sapiens
aagctgtggaatagg

SEQ ID NO: 528356 - DNA, 15 bp, Homo sapiens
gaagctgtggaatag

SEQ ID NO: 528357 - DNA, 15 bp, Homo sapiens
tgaagctgtggaata

SEQ ID NO: 528358 - DNA, 15 bp, Homo sapiens
ctgaagctgtggaat

SEQ ID NO: 528359 - DNA, 15 bp, Homo sapiens
tctgaagctgtggaa

SEQ ID NO: 528360 - DNA, 15 bp, Homo sapiens
gtctgaagctgtgga

SEQ ID NO: 528361 - DNA, 15 bp, Homo sapiens
ggtctgaagctgtgg

SEQ ID NO: 528362 - DNA, 15 bp, Homo sapiens
cggtctgaagctgtg

SEQ ID NO: 528363 - DNA, 15 bp, Homo sapiens
acggtctgaagctgt

SEQ ID NO: 528364 - DNA, 15 bp, Homo sapiens
aacggtctgaagctg

SEQ ID NO: 528365 - DNA, 15 bp, Homo sapiens
gaacggtctgaagct

SEQ ID NO: 528366 - DNA, 15 bp, Homo sapiens
tgaacggtctgaagc

SEQ ID NO: 528367 - DNA, 15 bp, Homo sapiens
ttgaacggtctgaag

SEQ ID NO: 528368 - DNA, 15 bp, Homo sapiens
gttgaacggtctgaa

SEQ ID NO: 528369 - DNA, 15 bp, Homo sapiens
ggttgaacggtctga

SEQ ID NO: 528370 - DNA, 15 bp, Homo sapiens
aggttgaacggtctg

SEQ ID NO: 528371 - DNA, 15 bp, Homo sapiens
aaggttgaacggtct

SEQ ID NO: 528372 - DNA, 15 bp, Homo sapiens
taaggttgaacggtc

SEQ ID NO: 528373 - DNA, 15 bp, Homo sapiens
ctaaggttgaacggt

SEQ ID NO: 528374 - DNA, 15 bp, Homo sapiens
cctaaggttgaacgg

SEQ ID NO: 528375 - DNA, 15 bp, Homo sapiens
gcctaaggttgaacg

SEQ ID NO: 528376 - DNA, 15 bp, Homo sapiens
tgcctaaggttgaac

SEQ ID NO: 528377 - DNA, 15 bp, Homo sapiens
ttgcctaaggttgaa

SEQ ID NO: 528378 - DNA, 15 bp, Homo sapiens
tttgcctaaggttga

SEQ ID NO: 528379 - DNA, 15 bp, Homo sapiens
ctttgcctaaggttg

SEQ ID NO: 528380 - DNA, 15 bp, Homo sapiens
actttgcctaaggtt

SEQ ID NO: 528381 - DNA, 15 bp, Homo sapiens
tactttgcctaaggt

SEQ ID NO: 528382 - DNA, 15 bp, Homo sapiens
gtactttgcctaagg

SEQ ID NO: 528383 - DNA, 15 bp, Homo sapiens
agtactttgcctaag

SEQ ID NO: 528384 - DNA, 15 bp, Homo sapiens
aagtactttgcctaa

SEQ ID NO: 528385 - DNA, 15 bp, Homo sapiens
taagtactttgccta

SEQ ID NO: 528386 - DNA, 15 bp, Homo sapiens
ttaagtactttgcct

SEQ ID NO: 528387 - DNA, 15 bp, Homo sapiens
gttaagtactttgcc

SEQ ID NO: 528388 - DNA, 15 bp, Homo sapiens
ggttaagtactttgc

SEQ ID NO: 528389 - DNA, 15 bp, Homo sapiens
aggttaagtactttg

SEQ ID NO: 528390 - DNA, 15 bp, Homo sapiens
gaggttaagtacttt

SEQ ID NO: 528391 - DNA, 15 bp, Homo sapiens
agaggttaagtactt

SEQ ID NO: 528392 - DNA, 15 bp, Homo sapiens
gagaggttaagtact

SEQ ID NO: 528393 - DNA, 15 bp, Homo sapiens
tgagaggttaagtac

SEQ ID NO: 528394 - DNA, 15 bp, Homo sapiens
ctgagaggttaagta

SEQ ID NO: 528395 - DNA, 15 bp, Homo sapiens
gctgagaggttaagt

SEQ ID NO: 528396 - DNA, 15 bp, Homo sapiens
ggctgagaggttaag

SEQ ID NO: 528397 - DNA, 15 bp, Homo sapiens
cggctgagaggttaa

SEQ ID NO: 528398 - DNA, 15 bp, Homo sapiens
acggctgagaggtta

SEQ ID NO: 528399 - DNA, 15 bp, Homo sapiens
aacggctgagaggtt

SEQ ID NO: 528400 - DNA, 15 bp, Homo sapiens
aaacggctgagaggt

SEQ ID NO: 528401 - DNA, 15 bp, Homo sapiens
taaacggctgagagg

SEQ ID NO: 528402 - DNA, 15 bp, Homo sapiens
ctaaacggctgagag

SEQ ID NO: 528403 - DNA, 15 bp, Homo sapiens
actaaacggctgaga

SEQ ID NO: 528404 - DNA, 15 bp, Homo sapiens
cactaaacggctgag

SEQ ID NO: 528405 - DNA, 15 bp, Homo sapiens
ccactaaacggctga

SEQ ID NO: 528406 - DNA, 15 bp, Homo sapiens
tccactaaacggctg

SEQ ID NO: 528407 - DNA, 15 bp, Homo sapiens
ttccactaaacggct

SEQ ID NO: 528408 - DNA, 15 bp, Homo sapiens
tttccactaaacggc

SEQ ID NO: 528409 - DNA, 15 bp, Homo sapiens
gtttccactaaacgg

SEQ ID NO: 528410 - DNA, 15 bp, Homo sapiens
agtttccactaaacg

SEQ ID NO: 528411 - DNA, 15 bp, Homo sapiens
gagtttccactaaac

SEQ ID NO: 528412 - DNA, 15 bp, Homo sapiens
ggagtttccactaaa

SEQ ID NO: 528413 - DNA, 15 bp, Homo sapiens
aggagtttccactaa

SEQ ID NO: 528414 - DNA, 15 bp, Homo sapiens
caggagtttccacta

SEQ ID NO: 528415 - DNA, 15 bp, Homo sapiens
acaggagtttccact

SEQ ID NO: 528416 - DNA, 15 bp, Homo sapiens
cacaggagtttccac

SEQ ID NO: 528417 - DNA, 15 bp, Homo sapiens
tcacaggagtttcca

SEQ ID NO: 528418 - DNA, 15 bp, Homo sapiens
atcacaggagtttcc

SEQ ID NO: 528419 - DNA, 15 bp, Homo sapiens
catcacaggagtttc

SEQ ID NO: 528420 - DNA, 15 bp, Homo sapiens
tcatcacaggagttt

SEQ ID NO: 528421 - DNA, 15 bp, Homo sapiens
atcatcacaggagtt

SEQ ID NO: 528422 - DNA, 15 bp, Homo sapiens
catcatcacaggagt

SEQ ID NO: 528423 - DNA, 15 bp, Homo sapiens
ccatcatcacaggag

SEQ ID NO: 528424 - DNA, 15 bp, Homo sapiens
gccatcatcacagga

SEQ ID NO: 528425 - DNA, 15 bp, Homo sapiens
agccatcatcacagg

SEQ ID NO: 528426 - DNA, 15 bp, Homo sapiens
cagccatcatcacag

SEQ ID NO: 528427 - DNA, 15 bp, Homo sapiens
gcagccatcatcaca

SEQ ID NO: 528428 - DNA, 15 bp, Homo sapiens
ggcagccatcatcac

SEQ ID NO: 528429 - DNA, 15 bp, Homo sapiens
aggcagccatcatca

SEQ ID NO: 528430 - DNA, 15 bp, Homo sapiens
gaggcagccatcatc

SEQ ID NO: 528431 - DNA, 15 bp, Homo sapiens
tgaggcagccatcat

SEQ ID NO: 528432 - DNA, 15 bp, Homo sapiens
ttgaggcagccatca

SEQ ID NO: 528433 - DNA, 15 bp, Homo sapiens
tttgaggcagccatc

SEQ ID NO: 528434 - DNA, 15 bp, Homo sapiens
atttgaggcagccat

SEQ ID NO: 528435 - DNA, 15 bp, Homo sapiens
catttgaggcagcca

SEQ ID NO: 528436 - DNA, 15 bp, Homo sapiens
ccatttgaggcagcc

SEQ ID NO: 528437 - DNA, 15 bp, Homo sapiens
tccatttgaggcagc

SEQ ID NO: 528438 - DNA, 15 bp, Homo sapiens
ttccatttgaggcag

SEQ ID NO: 528439 - DNA, 15 bp, Homo sapiens
attccatttgaggca

SEQ ID NO: 528440 - DNA, 15 bp, Homo sapiens
gattccatttgaggc

SEQ ID NO: 528441 - DNA, 15 bp, Homo sapiens
tgattccatttgagg

SEQ ID NO: 528442 - DNA, 15 bp, Homo sapiens
gtgattccatttgag

SEQ ID NO: 528443 - DNA, 15 bp, Homo sapiens
tgtgattccatttga

SEQ ID NO: 528444 - DNA, 15 bp, Homo sapiens
gtgtgattccatttg

SEQ ID NO: 528445 - DNA, 15 bp, Homo sapiens
tgtgtgattccattt

SEQ ID NO: 528446 - DNA, 15 bp, Homo sapiens
ttgtgtgattccatt

SEQ ID NO: 528447 - DNA, 15 bp, Homo sapiens
cttgtgtgattccat

SEQ ID NO: 528448 - DNA, 15 bp, Homo sapiens
tcttgtgtgattcca

SEQ ID NO: 528449 - DNA, 15 bp, Homo sapiens
atcttgtgtgattcc

SEQ ID NO: 528450 - DNA, 15 bp, Homo sapiens
gatcttgtgtgattc

SEQ ID NO: 528451 - DNA, 15 bp, Homo sapiens
tgatcttgtgtgatt

SEQ ID NO: 528452 - DNA, 15 bp, Homo sapiens
ttgatcttgtgtgat

SEQ ID NO: 528453 - DNA, 15 bp, Homo sapiens
tttgatcttgtgtga

SEQ ID NO: 528454 - DNA, 15 bp, Homo sapiens
ctttgatcttgtgtg

SEQ ID NO: 528455 - DNA, 15 bp, Homo sapiens
actttgatcttgtgt

SEQ ID NO: 528456 - DNA, 15 bp, Homo sapiens
cactttgatcttgtg

SEQ ID NO: 528457 - DNA, 15 bp, Homo sapiens
acactttgatcttgt

SEQ ID NO: 528458 - DNA, 15 bp, Homo sapiens
aacactttgatcttg

SEQ ID NO: 528459 - DNA, 15 bp, Homo sapiens
aaacactttgatctt

SEQ ID NO: 528460 - DNA, 15 bp, Homo sapiens
taaacactttgatct

SEQ ID NO: 528461 - DNA, 15 bp, Homo sapiens
ctaaacactttgatc

SEQ ID NO: 528462 - DNA, 15 bp, Homo sapiens
gctaaacactttgat

SEQ ID NO: 528463 - DNA, 15 bp, Homo sapiens
cgctaaacactttga

SEQ ID NO: 528464 - DNA, 15 bp, Homo sapiens
gcgctaaacactttg

SEQ ID NO: 528465 - DNA, 15 bp, Homo sapiens
tgcgctaaacacttt

SEQ ID NO: 528466 - DNA, 15 bp, Homo sapiens
ctgcgctaaacactt

SEQ ID NO: 528467 - DNA, 15 bp, Homo sapiens
actgcgctaaacact

SEQ ID NO: 528468 - DNA, 15 bp, Homo sapiens
cactgcgctaaacac

SEQ ID NO: 528469 - DNA, 15 bp, Homo sapiens
gcactgcgctaaaca

SEQ ID NO: 528470 - DNA, 15 bp, Homo sapiens
ggcactgcgctaaac

SEQ ID NO: 528471 - DNA, 15 bp, Homo sapiens
aggcactgcgctaaa

SEQ ID NO: 528472 - DNA, 15 bp, Homo sapiens
caggcactgcgctaa

SEQ ID NO: 528473 - DNA, 15 bp, Homo sapiens
ccaggcactgcgcta

SEQ ID NO: 528474 - DNA, 15 bp, Homo sapiens
gccaggcactgcgct

SEQ ID NO: 528475 - DNA, 15 bp, Homo sapiens
tgccaggcactgcgc

SEQ ID NO: 528476 - DNA, 15 bp, Homo sapiens
gtgccaggcactgcg

SEQ ID NO: 528477 - DNA, 15 bp, Homo sapiens
agtgccaggcactgc

SEQ ID NO: 528478 - DNA, 15 bp, Homo sapiens
cagtgccaggcactg

SEQ ID NO: 528479 - DNA, 15 bp, Homo sapiens
tcagtgccaggcact

SEQ ID NO: 528480 - DNA, 15 bp, Homo sapiens
ttcagtgccaggcac

SEQ ID NO: 528481 - DNA, 15 bp, Homo sapiens
cttcagtgccaggca

SEQ ID NO: 528482 - DNA, 15 bp, Homo sapiens
tcttcagtgccaggc

SEQ ID NO: 528483 - DNA, 15 bp, Homo sapiens
ttcttcagtgccagg

SEQ ID NO: 528484 - DNA, 15 bp, Homo sapiens
cttcttcagtgccag

SEQ ID NO: 528485 - DNA, 15 bp, Homo sapiens
gcttcttcagtgcca

SEQ ID NO: 528486 - DNA, 15 bp, Homo sapiens
agcttcttcagtgcc

SEQ ID NO: 528487 - DNA, 15 bp, Homo sapiens
cagcttcttcagtgc

SEQ ID NO: 528488 - DNA, 15 bp, Homo sapiens
gcagcttcttcagtg

SEQ ID NO: 528489 - DNA, 15 bp, Homo sapiens
agcagcttcttcagt

SEQ ID NO: 528490 - DNA, 15 bp, Homo sapiens
cagcagcttcttcag

SEQ ID NO: 528491 - DNA, 15 bp, Homo sapiens
gcagcagcttcttca

SEQ ID NO: 528492 - DNA, 15 bp, Homo sapiens
agcagcagcttcttc

SEQ ID NO: 528493 - DNA, 15 bp, Homo sapiens
tagcagcagcttctt

SEQ ID NO: 528494 - DNA, 15 bp, Homo sapiens
atagcagcagcttct

SEQ ID NO: 528495 - DNA, 15 bp, Homo sapiens
aatagcagcagcttc

SEQ ID NO: 528496 - DNA, 15 bp, Homo sapiens
gaatagcagcagctt

SEQ ID NO: 528497 - DNA, 15 bp, Homo sapiens
agaatagcagcagct

SEQ ID NO: 528498 - DNA, 15 bp, Homo sapiens
aagaatagcagcagc

SEQ ID NO: 528499 - DNA, 15 bp, Homo sapiens
taagaatagcagcag

SEQ ID NO: 528500 - DNA, 15 bp, Homo sapiens
gtaagaatagcagca

SEQ ID NO: 528501 - DNA, 15 bp, Homo sapiens
tgtaagaatagcagc

SEQ ID NO: 528502 - DNA, 15 bp, Homo sapiens
gtgtaagaatagcag

SEQ ID NO: 528503 - DNA, 15 bp, Homo sapiens
agtgtaagaatagca

SEQ ID NO: 528504 - DNA, 15 bp, Homo sapiens
cagtgtaagaatagc

SEQ ID NO: 528505 - DNA, 15 bp, Homo sapiens
ccagtgtaagaatag

SEQ ID NO: 528506 - DNA, 15 bp, Homo sapiens
accagtgtaagaata

SEQ ID NO: 528507 - DNA, 15 bp, Homo sapiens
caccagtgtaagaat

SEQ ID NO: 528508 - DNA, 15 bp, Homo sapiens
gcaccagtgtaagaa

SEQ ID NO: 528509 - DNA, 15 bp, Homo sapiens
tgcaccagtgtaaga

SEQ ID NO: 528510 - DNA, 15 bp, Homo sapiens
ctgcaccagtgtaag

SEQ ID NO: 528511 - DNA, 15 bp, Homo sapiens
cctgcaccagtgtaa

SEQ ID NO: 528512 - DNA, 15 bp, Homo sapiens
acctgcaccagtgta

SEQ ID NO: 528513 - DNA, 15 bp, Homo sapiens
gacctgcaccagtgt

SEQ ID NO: 528514 - DNA, 15 bp, Homo sapiens
agacctgcaccagtg

SEQ ID NO: 528515 - DNA, 15 bp, Homo sapiens
aagacctgcaccagt

SEQ ID NO: 528516 - DNA, 15 bp, Homo sapiens
caagacctgcaccag

SEQ ID NO: 528517 - DNA, 15 bp, Homo sapiens
acaagacctgcacca

SEQ ID NO: 528518 - DNA, 15 bp, Homo sapiens
cacaagacctgcacc

SEQ ID NO: 528519 - DNA, 15 bp, Homo sapiens
gcacaagacctgcac

SEQ ID NO: 528520 - DNA, 15 bp, Homo sapiens
ggcacaagacctgca

SEQ ID NO: 528521 - DNA, 15 bp, Homo sapiens
tggcacaagacctgc

SEQ ID NO: 528522 - DNA, 15 bp, Homo sapiens
ttggcacaagacctg

SEQ ID NO: 528523 - DNA, 15 bp, Homo sapiens
cttggcacaagacct

SEQ ID NO: 528524 - DNA, 15 bp, Homo sapiens
gcttggcacaagacc

SEQ ID NO: 528525 - DNA, 15 bp, Homo sapiens
tgcttggcacaagac

SEQ ID NO: 528526 - DNA, 15 bp, Homo sapiens
ctgcttggcacaaga

SEQ ID NO: 528527 - DNA, 15 bp, Homo sapiens
gctgcttggcacaag

SEQ ID NO: 528528 - DNA, 15 bp, Homo sapiens
tgctgcttggcacaa

SEQ ID NO: 528529 - DNA, 15 bp, Homo sapiens
atgctgcttggcaca

SEQ ID NO: 528530 - DNA, 15 bp, Homo sapiens
tatgctgcttggcac

SEQ ID NO: 528531 - DNA, 15 bp, Homo sapiens
ttatgctgcttggca

SEQ ID NO: 528532 - DNA, 15 bp, Homo sapiens
tttatgctgcttggc

SEQ ID NO: 528533 - DNA, 15 bp, Homo sapiens
ctttatgctgcttgg

SEQ ID NO: 528534 - DNA, 15 bp, Homo sapiens
cctttatgctgcttg

SEQ ID NO: 528535 - DNA, 15 bp, Homo sapiens
tcctttatgctgctt

SEQ ID NO: 528536 - DNA, 15 bp, Homo sapiens
gtcctttatgctgct

SEQ ID NO: 528537 - DNA, 15 bp, Homo sapiens
tgtcctttatgctgc

SEQ ID NO: 528538 - DNA, 15 bp, Homo sapiens
ctgtcctttatgctg

SEQ ID NO: 528539 - DNA, 15 bp, Homo sapiens
gctgtcctttatgct

SEQ ID NO: 528540 - DNA, 15 bp, Homo sapiens
agctgtcctttatgc

SEQ ID NO: 528541 - DNA, 15 bp, Homo sapiens
cagctgtcctttatg

SEQ ID NO: 528542 - DNA, 15 bp, Homo sapiens
ccagctgtcctttat

SEQ ID NO: 528543 - DNA, 15 bp, Homo sapiens
gccagctgtccttta

SEQ ID NO: 528544 - DNA, 15 bp, Homo sapiens
agccagctgtccttt

SEQ ID NO: 528545 - DNA, 15 bp, Homo sapiens
cagccagctgtcctt

SEQ ID NO: 528546 - DNA, 15 bp, Homo sapiens
ccagccagctgtcct

SEQ ID NO: 528547 - DNA, 15 bp, Homo sapiens
tccagccagctgtcc

SEQ ID NO: 528548 - DNA, 15 bp, Homo sapiens
ttccagccagctgtc

SEQ ID NO: 528549 - DNA, 15 bp, Homo sapiens
attccagccagctgt

SEQ ID NO: 528550 - DNA, 15 bp, Homo sapiens
gattccagccagctg

SEQ ID NO: 528551 - DNA, 15 bp, Homo sapiens
cgattccagccagct

SEQ ID NO: 528552 - DNA, 15 bp, Homo sapiens
acgattccagccagc

SEQ ID NO: 528553 - DNA, 15 bp, Homo sapiens
cacgattccagccag

SEQ ID NO: 528554 - DNA, 15 bp, Homo sapiens
ccacgattccagcca

SEQ ID NO: 528555 - DNA, 15 bp, Homo sapiens
accacgattccagcc

SEQ ID NO: 528556 - DNA, 15 bp, Homo sapiens
taccacgattccagc

SEQ ID NO: 528557 - DNA, 15 bp, Homo sapiens
ctaccacgattccag

SEQ ID NO: 528558 - DNA, 15 bp, Homo sapiens
tctaccacgattcca

SEQ ID NO: 528559 - DNA, 15 bp, Homo sapiens
ttctaccacgattcc

SEQ ID NO: 528560 - DNA, 15 bp, Homo sapiens
tttctaccacgattc

SEQ ID NO: 528561 - DNA, 15 bp, Homo sapiens
ttttctaccacgatt

SEQ ID NO: 528562 - DNA, 15 bp, Homo sapiens
tttttctaccacgat

SEQ ID NO: 528563 - DNA, 15 bp, Homo sapiens
atttttctaccacga

SEQ ID NO: 528564 - DNA, 15 bp, Homo sapiens
catttttctaccacg

SEQ ID NO: 528565 - DNA, 15 bp, Homo sapiens
gcatttttctaccac

SEQ ID NO: 528566 - DNA, 15 bp, Homo sapiens
agcatttttctacca

SEQ ID NO: 528567 - DNA, 15 bp, Homo sapiens
cagcatttttctacc

SEQ ID NO: 528568 - DNA, 15 bp, Homo sapiens
gcagcatttttctac

SEQ ID NO: 528569 - DNA, 15 bp, Homo sapiens
ggcagcatttttcta

SEQ ID NO: 528570 - DNA, 15 bp, Homo sapiens
tggcagcatttttct

SEQ ID NO: 528571 - DNA, 15 bp, Homo sapiens
ctggcagcatttttc

SEQ ID NO: 528572 - DNA, 15 bp, Homo sapiens
actggcagcattttt

SEQ ID NO: 528573 - DNA, 15 bp, Homo sapiens
gactggcagcatttt

SEQ ID NO: 528574 - DNA, 15 bp, Homo sapiens
cgactggcagcattt

SEQ ID NO: 528575 - DNA, 15 bp, Homo sapiens
gcgactggcagcatt

SEQ ID NO: 528576 - DNA, 15 bp, Homo sapiens
ggcgactggcagcat

SEQ ID NO: 528577 - DNA, 15 bp, Homo sapiens
cggcgactggcagca

SEQ ID NO: 528578 - DNA, 15 bp, Homo sapiens
ccggcgactggcagc

SEQ ID NO: 528579 - DNA, 15 bp, Homo sapiens
tccggcgactggcag

SEQ ID NO: 528580 - DNA, 15 bp, Homo sapiens
ctccggcgactggca

SEQ ID NO: 528581 - DNA, 15 bp, Homo sapiens
gctccggcgactggc

SEQ ID NO: 528582 - DNA, 15 bp, Homo sapiens
tgctccggcgactgg

SEQ ID NO: 528583 - DNA, 15 bp, Homo sapiens
atgctccggcgactg

SEQ ID NO: 528584 - DNA, 15 bp, Homo sapiens
aatgctccggcgact

SEQ ID NO: 528585 - DNA, 15 bp, Homo sapiens
gaatgctccggcgac

SEQ ID NO: 528586 - DNA, 15 bp, Homo sapiens
agaatgctccggcga

SEQ ID NO: 528587 - DNA, 15 bp, Homo sapiens
aagaatgctccggcg

SEQ ID NO: 528588 - DNA, 15 bp, Homo sapiens
aaagaatgctccggc

SEQ ID NO: 528589 - DNA, 15 bp, Homo sapiens
aaaagaatgctccgg

SEQ ID NO: 528590 - DNA, 15 bp, Homo sapiens
aaaaagaatgctccg

SEQ ID NO: 528591 - DNA, 15 bp, Homo sapiens
taaaaagaatgctcc

SEQ ID NO: 528592 - DNA, 15 bp, Homo sapiens
ataaaaagaatgctc

SEQ ID NO: 528593 - DNA, 15 bp, Homo sapiens
aataaaaagaatgct

SEQ ID NO: 528594 - DNA, 15 bp, Homo sapiens
aaataaaaagaatgc

SEQ ID NO: 528595 - DNA, 15 bp, Homo sapiens
gaaataaaaagaatg

SEQ ID NO: 528596 - DNA, 15 bp, Homo sapiens
ggaaataaaaagaat

SEQ ID NO: 528597 - DNA, 15 bp, Homo sapiens
aggaaataaaaagaa

SEQ ID NO: 528598 - DNA, 15 bp, Homo sapiens
caggaaataaaaaga

SEQ ID NO: 528599 - DNA, 15 bp, Homo sapiens
acaggaaataaaaag

SEQ ID NO: 528600 - DNA, 15 bp, Homo sapiens
cacaggaaataaaaa

SEQ ID NO: 528601 - DNA, 15 bp, Homo sapiens
ccacaggaaataaaa

SEQ ID NO: 528602 - DNA, 15 bp, Homo sapiens
accacaggaaataaa

SEQ ID NO: 528603 - DNA, 15 bp, Homo sapiens
caccacaggaaataa

SEQ ID NO: 528604 - DNA, 15 bp, Homo sapiens
tcaccacaggaaata

SEQ ID NO: 528605 - DNA, 15 bp, Homo sapiens
ctcaccacaggaaat

SEQ ID NO: 528606 - DNA, 15 bp, Homo sapiens
tctcaccacaggaaa

SEQ ID NO: 528607 - DNA, 15 bp, Homo sapiens
gtctcaccacaggaa

SEQ ID NO: 528608 - DNA, 15 bp, Homo sapiens
agtctcaccacagga

SEQ ID NO: 528609 - DNA, 15 bp, Homo sapiens
cagtctcaccacagg

SEQ ID NO: 528610 - DNA, 15 bp, Homo sapiens
acagtctcaccacag

SEQ ID NO: 528611 - DNA, 15 bp, Homo sapiens
tacagtctcaccaca

SEQ ID NO: 528612 - DNA, 15 bp, Homo sapiens
ttacagtctcaccac

SEQ ID NO: 528613 - DNA, 15 bp, Homo sapiens
gttacagtctcacca

SEQ ID NO: 528614 - DNA, 15 bp, Homo sapiens
agttacagtctcacc

SEQ ID NO: 528615 - DNA, 15 bp, Homo sapiens
aagttacagtctcac

SEQ ID NO: 528616 - DNA, 15 bp, Homo sapiens
caagttacagtctca

SEQ ID NO: 528617 - DNA, 15 bp, Homo sapiens
acaagttacagtctc

SEQ ID NO: 528618 - DNA, 15 bp, Homo sapiens
gacaagttacagtct

SEQ ID NO: 528619 - DNA, 15 bp, Homo sapiens
ggacaagttacagtc

SEQ ID NO: 528620 - DNA, 15 bp, Homo sapiens
aggacaagttacagt

SEQ ID NO: 528621 - DNA, 15 bp, Homo sapiens
caggacaagttacag

SEQ ID NO: 528622 - DNA, 15 bp, Homo sapiens
gcaggacaagttaca

SEQ ID NO: 528623 - DNA, 15 bp, Homo sapiens
agcaggacaagttac

SEQ ID NO: 528624 - DNA, 15 bp, Homo sapiens
gagcaggacaagtta

SEQ ID NO: 528625 - DNA, 15 bp, Homo sapiens
agagcaggacaagtt

SEQ ID NO: 528626 - DNA, 15 bp, Homo sapiens
aagagcaggacaagt

SEQ ID NO: 528627 - DNA, 15 bp, Homo sapiens
aaagagcaggacaag

SEQ ID NO: 528628 - DNA, 15 bp, Homo sapiens
gaaagagcaggacaa

SEQ ID NO: 528629 - DNA, 15 bp, Homo sapiens
ggaaagagcaggaca

SEQ ID NO: 528630 - DNA, 15 bp, Homo sapiens
aggaaagagcaggac

SEQ ID NO: 528631 - DNA, 15 bp, Homo sapiens
caggaaagagcagga

SEQ ID NO: 528632 - DNA, 15 bp, Homo sapiens
ccaggaaagagcagg

SEQ ID NO: 528633 - DNA, 15 bp, Homo sapiens
accaggaaagagcag

SEQ ID NO: 528634 - DNA, 15 bp, Homo sapiens
taccaggaaagagca

SEQ ID NO: 528635 - DNA, 15 bp, Homo sapiens
ttaccaggaaagagc

SEQ ID NO: 528636 - DNA, 15 bp, Homo sapiens
gttaccaggaaagag

SEQ ID NO: 528637 - DNA, 15 bp, Homo sapiens
ggttaccaggaaaga

SEQ ID NO: 528638 - DNA, 15 bp, Homo sapiens
tggttaccaggaaag

SEQ ID NO: 528639 - DNA, 15 bp, Homo sapiens
ctggttaccaggaaa

SEQ ID NO: 528640 - DNA, 15 bp, Homo sapiens
cctggttaccaggaa

SEQ ID NO: 528641 - DNA, 15 bp, Homo sapiens
ccctggttaccagga

SEQ ID NO: 528642 - DNA, 15 bp, Homo sapiens
tccctggttaccagg

SEQ ID NO: 528643 - DNA, 15 bp, Homo sapiens
atccctggttaccag

SEQ ID NO: 528644 - DNA, 15 bp, Homo sapiens
catccctggttacca

SEQ ID NO: 528645 - DNA, 15 bp, Homo sapiens
gcatccctggttacc

SEQ ID NO: 528646 - DNA, 15 bp, Homo sapiens
tgcatccctggttac

SEQ ID NO: 528647 - DNA, 15 bp, Homo sapiens
ttgcatccctggtta

SEQ ID NO: 528648 - DNA, 15 bp, Homo sapiens
attgcatccctggtt

SEQ ID NO: 528649 - DNA, 15 bp, Homo sapiens
gattgcatccctggt

SEQ ID NO: 528650 - DNA, 15 bp, Homo sapiens
tgattgcatccctgg

SEQ ID NO: 528651 - DNA, 15 bp, Homo sapiens
ctgattgcatccctg

SEQ ID NO: 528652 - DNA, 15 bp, Homo sapiens
gctgattgcatccct

SEQ ID NO: 528653 - DNA, 15 bp, Homo sapiens
ggctgattgcatccc

SEQ ID NO: 528654 - DNA, 15 bp, Homo sapiens
cggctgattgcatcc

SEQ ID NO: 528655 - DNA, 15 bp, Homo sapiens
ccggctgattgcatc

SEQ ID NO: 528656 - DNA, 15 bp, Homo sapiens
cccggctgattgcat

SEQ ID NO: 528657 - DNA, 15 bp, Homo sapiens
acccggctgattgca

SEQ ID NO: 528658 - DNA, 15 bp, Homo sapiens
gacccggctgattgc

SEQ ID NO: 528659 - DNA, 15 bp, Homo sapiens
agacccggctgattg

SEQ ID NO: 528660 - DNA, 15 bp, Homo sapiens
aagacccggctgatt

SEQ ID NO: 528661 - DNA, 15 bp, Homo sapiens
aaagacccggctgat

SEQ ID NO: 528662 - DNA, 15 bp, Homo sapiens
caaagacccggctga

SEQ ID NO: 528663 - DNA, 15 bp, Homo sapiens
tcaaagacccggctg

SEQ ID NO: 528664 - DNA, 15 bp, Homo sapiens
ttcaaagacccggct

SEQ ID NO: 528665 - DNA, 15 bp, Homo sapiens
tttcaaagacccggc

SEQ ID NO: 528666 - DNA, 15 bp, Homo sapiens
ctttcaaagacccgg

SEQ ID NO: 528667 - DNA, 15 bp, Homo sapiens
gctttcaaagacccg

SEQ ID NO: 528668 - DNA, 15 bp, Homo sapiens
tgctttcaaagaccc

SEQ ID NO: 528669 - DNA, 15 bp, Homo sapiens
ctgctttcaaagacc

SEQ ID NO: 528670 - DNA, 15 bp, Homo sapiens
actgctttcaaagac

SEQ ID NO: 528671 - DNA, 15 bp, Homo sapiens
aactgctttcaaaga

SEQ ID NO: 528672 - DNA, 15 bp, Homo sapiens
gaactgctttcaaag

SEQ ID NO: 528673 - DNA, 15 bp, Homo sapiens
ggaactgctttcaaa

SEQ ID NO: 528674 - DNA, 15 bp, Homo sapiens
aggaactgctttcaa

SEQ ID NO: 528675 - DNA, 15 bp, Homo sapiens
aaggaactgctttca

SEQ ID NO: 528676 - DNA, 15 bp, Homo sapiens
aaaggaactgctttc

SEQ ID NO: 528677 - DNA, 15 bp, Homo sapiens
gaaaggaactgcttt

SEQ ID NO: 528678 - DNA, 15 bp, Homo sapiens
cgaaaggaactgctt

SEQ ID NO: 528679 - DNA, 15 bp, Homo sapiens
ccgaaaggaactgct

SEQ ID NO: 528680 - DNA, 15 bp, Homo sapiens
cccgaaaggaactgc

SEQ ID NO: 528681 - DNA, 15 bp, Homo sapiens
ccccgaaaggaactg

SEQ ID NO: 528682 - DNA, 15 bp, Homo sapiens
cccccgaaaggaact

SEQ ID NO: 528683 - DNA, 15 bp, Homo sapiens
acccccgaaaggaac

SEQ ID NO: 528684 - DNA, 15 bp, Homo sapiens
aacccccgaaaggaa

SEQ ID NO: 528685 - DNA, 15 bp, Homo sapiens
aaacccccgaaagga

SEQ ID NO: 528686 - DNA, 15 bp, Homo sapiens
aaaacccccgaaagg

SEQ ID NO: 528687 - DNA, 15 bp, Homo sapiens
caaaacccccgaaag

SEQ ID NO: 528688 - DNA, 15 bp, Homo sapiens
gcaaaacccccgaaa

SEQ ID NO: 528689 - DNA, 15 bp, Homo sapiens
ggcaaaacccccgaa

SEQ ID NO: 528690 - DNA, 15 bp, Homo sapiens
aggcaaaacccccga

SEQ ID NO: 528691 - DNA, 15 bp, Homo sapiens
caggcaaaacccccg

SEQ ID NO: 528692 - DNA, 15 bp, Homo sapiens
tcaggcaaaaccccc

SEQ ID NO: 528693 - DNA, 15 bp, Homo sapiens
ttcaggcaaaacccc

SEQ ID NO: 528694 - DNA, 15 bp, Homo sapiens
tttcaggcaaaaccc

SEQ ID NO: 528695 - DNA, 15 bp, Homo sapiens
ctttcaggcaaaacc

SEQ ID NO: 528696 - DNA, 15 bp, Homo sapiens
cctttcaggcaaaac

SEQ ID NO: 528697 - DNA, 15 bp, Homo sapiens
tcctttcaggcaaaa

SEQ ID NO: 528698 - DNA, 15 bp, Homo sapiens
ctcctttcaggcaaa

SEQ ID NO: 528699 - DNA, 15 bp, Homo sapiens
tctcctttcaggcaa

SEQ ID NO: 528700 - DNA, 15 bp, Homo sapiens
ctctcctttcaggca

SEQ ID NO: 528701 - DNA, 15 bp, Homo sapiens
gctctcctttcaggc

SEQ ID NO: 528702 - DNA, 15 bp, Homo sapiens
ggctctcctttcagg

SEQ ID NO: 528703 - DNA, 15 bp, Homo sapiens
tggctctcctttcag

SEQ ID NO: 528704 - DNA, 15 bp, Homo sapiens
ttggctctcctttca

SEQ ID NO: 528705 - DNA, 15 bp, Homo sapiens
cttggctctcctttc

SEQ ID NO: 528706 - DNA, 15 bp, Homo sapiens
acttggctctccttt

SEQ ID NO: 528707 - DNA, 15 bp, Homo sapiens
aacttggctctcctt

SEQ ID NO: 528708 - DNA, 15 bp, Homo sapiens
caacttggctctcct

SEQ ID NO: 528709 - DNA, 15 bp, Homo sapiens
acaacttggctctcc

SEQ ID NO: 528710 - DNA, 15 bp, Homo sapiens
cacaacttggctctc

SEQ ID NO: 528711 - DNA, 15 bp, Homo sapiens
ccacaacttggctct

SEQ ID NO: 528712 - DNA, 15 bp, Homo sapiens
accacaacttggctc

SEQ ID NO: 528713 - DNA, 15 bp, Homo sapiens
caccacaacttggct

SEQ ID NO: 528714 - DNA, 15 bp, Homo sapiens
acaccacaacttggc

SEQ ID NO: 528715 - DNA, 15 bp, Homo sapiens
cacaccacaacttgg

SEQ ID NO: 528716 - DNA, 15 bp, Homo sapiens
ccacaccacaacttg

SEQ ID NO: 528717 - DNA, 15 bp, Homo sapiens
gccacaccacaactt

SEQ ID NO: 528718 - DNA, 15 bp, Homo sapiens
agccacaccacaact

SEQ ID NO: 528719 - DNA, 15 bp, Homo sapiens
gagccacaccacaac

SEQ ID NO: 528720 - DNA, 15 bp, Homo sapiens
tgagccacaccacaa

SEQ ID NO: 528721 - DNA, 15 bp, Homo sapiens
ctgagccacaccaca

SEQ ID NO: 528722 - DNA, 15 bp, Homo sapiens
cctgagccacaccac

SEQ ID NO: 528723 - DNA, 15 bp, Homo sapiens
acctgagccacacca

SEQ ID NO: 528724 - DNA, 15 bp, Homo sapiens
cacctgagccacacc

SEQ ID NO: 528725 - DNA, 15 bp, Homo sapiens
ccacctgagccacac

SEQ ID NO: 528726 - DNA, 15 bp, Homo sapiens
cccacctgagccaca

SEQ ID NO: 528727 - DNA, 15 bp, Homo sapiens
tcccacctgagccac

SEQ ID NO: 528728 - DNA, 15 bp, Homo sapiens
ttcccacctgagcca

SEQ ID NO: 528729 - DNA, 15 bp, Homo sapiens
gttcccacctgagcc

SEQ ID NO: 528730 - DNA, 15 bp, Homo sapiens
cgttcccacctgagc

SEQ ID NO: 528731 - DNA, 15 bp, Homo sapiens
acgttcccacctgag

SEQ ID NO: 528732 - DNA, 15 bp, Homo sapiens
tacgttcccacctga

SEQ ID NO: 528733 - DNA, 15 bp, Homo sapiens
ctacgttcccacctg

SEQ ID NO: 528734 - DNA, 15 bp, Homo sapiens
gctacgttcccacct

SEQ ID NO: 528735 - DNA, 15 bp, Homo sapiens
tgctacgttcccacc

SEQ ID NO: 528736 - DNA, 15 bp, Homo sapiens
ctgctacgttcccac

SEQ ID NO: 528737 - DNA, 15 bp, Homo sapiens
gctgctacgttccca

SEQ ID NO: 528738 - DNA, 15 bp, Homo sapiens
ggctgctacgttccc

SEQ ID NO: 528739 - DNA, 15 bp, Homo sapiens
aggctgctacgttcc

SEQ ID NO: 528740 - DNA, 15 bp, Homo sapiens
taggctgctacgttc

SEQ ID NO: 528741 - DNA, 15 bp, Homo sapiens
ataggctgctacgtt

SEQ ID NO: 528742 - DNA, 15 bp, Homo sapiens
aataggctgctacgt

SEQ ID NO: 528743 - DNA, 15 bp, Homo sapiens
caataggctgctacg

SEQ ID NO: 528744 - DNA, 15 bp, Homo sapiens
tcaataggctgctac

SEQ ID NO: 528745 - DNA, 15 bp, Homo sapiens
gtcaataggctgcta

SEQ ID NO: 528746 - DNA, 15 bp, Homo sapiens
ggtcaataggctgct

SEQ ID NO: 528747 - DNA, 15 bp, Homo sapiens
cggtcaataggctgc

SEQ ID NO: 528748 - DNA, 15 bp, Homo sapiens
gcggtcaataggctg

SEQ ID NO: 528749 - DNA, 15 bp, Homo sapiens
tgcggtcaataggct

SEQ ID NO: 528750 - DNA, 15 bp, Homo sapiens
ctgcggtcaataggc

SEQ ID NO: 528751 - DNA, 15 bp, Homo sapiens
tctgcggtcaatagg

SEQ ID NO: 528752 - DNA, 15 bp, Homo sapiens
ctctgcggtcaatag

SEQ ID NO: 528753 - DNA, 15 bp, Homo sapiens
cctctgcggtcaata

SEQ ID NO: 528754 - DNA, 15 bp, Homo sapiens
gcctctgcggtcaat

SEQ ID NO: 528755 - DNA, 15 bp, Homo sapiens
cgcctctgcggtcaa

SEQ ID NO: 528756 - DNA, 15 bp, Homo sapiens
ccgcctctgcggtca

SEQ ID NO: 528757 - DNA, 15 bp, Homo sapiens
gccgcctctgcggtc

SEQ ID NO: 528758 - DNA, 15 bp, Homo sapiens
agccgcctctgcggt

SEQ ID NO: 528759 - DNA, 15 bp, Homo sapiens
cagccgcctctgcgg

SEQ ID NO: 528760 - DNA, 15 bp, Homo sapiens
ccagccgcctctgcg

SEQ ID NO: 528761 - DNA, 15 bp, Homo sapiens
cccagccgcctctgc

SEQ ID NO: 528762 - DNA, 15 bp, Homo sapiens
gcccagccgcctctg

SEQ ID NO: 528763 - DNA, 15 bp, Homo sapiens
agcccagccgcctct

SEQ ID NO: 528764 - DNA, 15 bp, Homo sapiens
cagcccagccgcctc

SEQ ID NO: 528765 - DNA, 15 bp, Homo sapiens
gcagcccagccgcct

SEQ ID NO: 528766 - DNA, 15 bp, Homo sapiens
agcagcccagccgcc

SEQ ID NO: 528767 - DNA, 15 bp, Homo sapiens
cagcagcccagccgc

SEQ ID NO: 528768 - DNA, 15 bp, Homo sapiens
gcagcagcccagccg

SEQ ID NO: 528769 - DNA, 15 bp, Homo sapiens
ggcagcagcccagcc

SEQ ID NO: 528770 - DNA, 15 bp, Homo sapiens
gggcagcagcccagc

SEQ ID NO: 528771 - DNA, 15 bp, Homo sapiens
tgggcagcagcccag

SEQ ID NO: 528772 - DNA, 15 bp, Homo sapiens
gtgggcagcagccca

SEQ ID NO: 528773 - DNA, 15 bp, Homo sapiens
ggtgggcagcagccc

SEQ ID NO: 528774 - DNA, 15 bp, Homo sapiens
aggtgggcagcagcc

SEQ ID NO: 528775 - DNA, 15 bp, Homo sapiens
caggtgggcagcagc

SEQ ID NO: 528776 - DNA, 15 bp, Homo sapiens
tcaggtgggcagcag

SEQ ID NO: 528777 - DNA, 15 bp, Homo sapiens
ctcaggtgggcagca

SEQ ID NO: 528778 - DNA, 15 bp, Homo sapiens
tctcaggtgggcagc

SEQ ID NO: 528779 - DNA, 15 bp, Homo sapiens
gtctcaggtgggcag

SEQ ID NO: 528780 - DNA, 15 bp, Homo sapiens
agtctcaggtgggca

SEQ ID NO: 528781 - DNA, 15 bp, Homo sapiens
cagtctcaggtgggc

SEQ ID NO: 528782 - DNA, 15 bp, Homo sapiens
gcagtctcaggtggg

SEQ ID NO: 528783 - DNA, 15 bp, Homo sapiens
tgcagtctcaggtgg

SEQ ID NO: 528784 - DNA, 15 bp, Homo sapiens
ctgcagtctcaggtg

SEQ ID NO: 528785 - DNA, 15 bp, Homo sapiens
gctgcagtctcaggt

SEQ ID NO: 528786 - DNA, 15 bp, Homo sapiens
ggctgcagtctcagg

SEQ ID NO: 528787 - DNA, 15 bp, Homo sapiens
aggctgcagtctcag

SEQ ID NO: 528788 - DNA, 15 bp, Homo sapiens
caggctgcagtctca

SEQ ID NO: 528789 - DNA, 15 bp, Homo sapiens
gcaggctgcagtctc

SEQ ID NO: 528790 - DNA, 15 bp, Homo sapiens
tgcaggctgcagtct

SEQ ID NO: 528791 - DNA, 15 bp, Homo sapiens
ctgcaggctgcagtc

SEQ ID NO: 528792 - DNA, 15 bp, Homo sapiens
gctgcaggctgcagt

SEQ ID NO: 528793 - DNA, 15 bp, Homo sapiens
tgctgcaggctgcag

SEQ ID NO: 528794 - DNA, 15 bp, Homo sapiens
ctgctgcaggctgca

SEQ ID NO: 528795 - DNA, 15 bp, Homo sapiens
tctgctgcaggctgc

SEQ ID NO: 528796 - DNA, 15 bp, Homo sapiens
ctctgctgcaggctg

SEQ ID NO: 528797 - DNA, 15 bp, Homo sapiens
cctctgctgcaggct

SEQ ID NO: 528798 - DNA, 15 bp, Homo sapiens
gcctctgctgcaggc

SEQ ID NO: 528799 - DNA, 15 bp, Homo sapiens
cgcctctgctgcagg

SEQ ID NO: 528800 - DNA, 15 bp, Homo sapiens
gcgcctctgctgcag

SEQ ID NO: 528801 - DNA, 15 bp, Homo sapiens
ggcgcctctgctgca

SEQ ID NO: 528802 - DNA, 15 bp, Homo sapiens
aggcgcctctgctgc

SEQ ID NO: 528803 - DNA, 15 bp, Homo sapiens
caggcgcctctgctg

SEQ ID NO: 528804 - DNA, 15 bp, Homo sapiens
tcaggcgcctctgct

SEQ ID NO: 528805 - DNA, 15 bp, Homo sapiens
ttcaggcgcctctgc

SEQ ID NO: 528806 - DNA, 15 bp, Homo sapiens
cttcaggcgcctctg

SEQ ID NO: 528807 - DNA, 15 bp, Homo sapiens
gcttcaggcgcctct

SEQ ID NO: 528808 - DNA, 15 bp, Homo sapiens
agcttcaggcgcctc

SEQ ID NO: 528809 - DNA, 15 bp, Homo sapiens
cagcttcaggcgcct

SEQ ID NO: 528810 - DNA, 15 bp, Homo sapiens
gcagcttcaggcgcc

SEQ ID NO: 528811 - DNA, 15 bp, Homo sapiens
cgcagcttcaggcgc

SEQ ID NO: 528812 - DNA, 15 bp, Homo sapiens
tcgcagcttcaggcg

SEQ ID NO: 528813 - DNA, 15 bp, Homo sapiens
gtcgcagcttcaggc

SEQ ID NO: 528814 - DNA, 15 bp, Homo sapiens
agtcgcagcttcagg

SEQ ID NO: 528815 - DNA, 15 bp, Homo sapiens
cagtcgcagcttcag

SEQ ID NO: 528816 - DNA, 15 bp, Homo sapiens
gcagtcgcagcttca

SEQ ID NO: 528817 - DNA, 15 bp, Homo sapiens
tgcagtcgcagcttc

SEQ ID NO: 528818 - DNA, 15 bp, Homo sapiens
ctgcagtcgcagctt

SEQ ID NO: 528819 - DNA, 15 bp, Homo sapiens
gctgcagtcgcagct

SEQ ID NO: 528820 - DNA, 15 bp, Homo sapiens
ggctgcagtcgcagc

SEQ ID NO: 528821 - DNA, 15 bp, Homo sapiens
gggctgcagtcgcag

SEQ ID NO: 528822 - DNA, 15 bp, Homo sapiens
ggggctgcagtcgca

SEQ ID NO: 528823 - DNA, 15 bp, Homo sapiens
tggggctgcagtcgc

SEQ ID NO: 528824 - DNA, 15 bp, Homo sapiens
ttggggctgcagtcg

SEQ ID NO: 528825 - DNA, 15 bp, Homo sapiens
gttggggctgcagtc

SEQ ID NO: 528826 - DNA, 15 bp, Homo sapiens
ggttggggctgcagt

SEQ ID NO: 528827 - DNA, 15 bp, Homo sapiens
tggttggggctgcag

SEQ ID NO: 528828 - DNA, 15 bp, Homo sapiens
ctggttggggctgca

SEQ ID NO: 528829 - DNA, 15 bp, Homo sapiens
tctggttggggctgc

SEQ ID NO: 528830 - DNA, 15 bp, Homo sapiens
gtctggttggggctg

SEQ ID NO: 528831 - DNA, 15 bp, Homo sapiens
ggtctggttggggct

SEQ ID NO: 528832 - DNA, 15 bp, Homo sapiens
aggtctggttggggc

SEQ ID NO: 528833 - DNA, 15 bp, Homo sapiens
gaggtctggttgggg

SEQ ID NO: 528834 - DNA, 15 bp, Homo sapiens
agaggtctggttggg

SEQ ID NO: 528835 - DNA, 15 bp, Homo sapiens
tagaggtctggttgg

SEQ ID NO: 528836 - DNA, 15 bp, Homo sapiens
ctagaggtctggttg

SEQ ID NO: 528837 - DNA, 15 bp, Homo sapiens
tctagaggtctggtt

SEQ ID NO: 528838 - DNA, 15 bp, Homo sapiens
ctctagaggtctggt

SEQ ID NO: 528839 - DNA, 15 bp, Homo sapiens
tctctagaggtctgg

SEQ ID NO: 528840 - DNA, 15 bp, Homo sapiens
gtctctagaggtctg

SEQ ID NO: 528841 - DNA, 15 bp, Homo sapiens
tgtctctagaggtct

SEQ ID NO: 528842 - DNA, 15 bp, Homo sapiens
ctgtctctagaggtc

SEQ ID NO: 528843 - DNA, 15 bp, Homo sapiens
actgtctctagaggt

SEQ ID NO: 528844 - DNA, 15 bp, Homo sapiens
gactgtctctagagg

SEQ ID NO: 528845 - DNA, 15 bp, Homo sapiens
cgactgtctctagag

SEQ ID NO: 528846 - DNA, 15 bp, Homo sapiens
gcgactgtctctaga

SEQ ID NO: 528847 - DNA, 15 bp, Homo sapiens
agcgactgtctctag

SEQ ID NO: 528848 - DNA, 15 bp, Homo sapiens
cagcgactgtctcta

SEQ ID NO: 528849 - DNA, 15 bp, Homo sapiens
gcagcgactgtctct

SEQ ID NO: 528850 - DNA, 15 bp, Homo sapiens
ggcagcgactgtctc

SEQ ID NO: 528851 - DNA, 15 bp, Homo sapiens
gggcagcgactgtct

SEQ ID NO: 528852 - DNA, 15 bp, Homo sapiens
ggggcagcgactgtc

SEQ ID NO: 528853 - DNA, 15 bp, Homo sapiens
aggggcagcgactgt

SEQ ID NO: 528854 - DNA, 15 bp, Homo sapiens
gaggggcagcgactg

SEQ ID NO: 528855 - DNA, 15 bp, Homo sapiens
agaggggcagcgact

SEQ ID NO: 528856 - DNA, 15 bp, Homo sapiens
gagaggggcagcgac

SEQ ID NO: 528857 - DNA, 15 bp, Homo sapiens
ggagaggggcagcga

SEQ ID NO: 528858 - DNA, 15 bp, Homo sapiens
gggagaggggcagcg

SEQ ID NO: 528859 - DNA, 15 bp, Homo sapiens
ggggagaggggcagc

SEQ ID NO: 528860 - DNA, 15 bp, Homo sapiens
aggggagaggggcag

SEQ ID NO: 528861 - DNA, 15 bp, Homo sapiens
caggggagaggggca

SEQ ID NO: 528862 - DNA, 15 bp, Homo sapiens
gcaggggagaggggc

SEQ ID NO: 528863 - DNA, 15 bp, Homo sapiens
agcaggggagagggg

SEQ ID NO: 528864 - DNA, 15 bp, Homo sapiens
gagcaggggagaggg

SEQ ID NO: 528865 - DNA, 15 bp, Homo sapiens
ggagcaggggagagg

SEQ ID NO: 528866 - DNA, 15 bp, Homo sapiens
gggagcaggggagag

SEQ ID NO: 528867 - DNA, 15 bp, Homo sapiens
ggggagcaggggaga

SEQ ID NO: 528868 - DNA, 15 bp, Homo sapiens
aggggagcaggggag

SEQ ID NO: 528869 - DNA, 15 bp, Homo sapiens
aaggggagcagggga

SEQ ID NO: 528870 - DNA, 15 bp, Homo sapiens
gaaggggagcagggg

SEQ ID NO: 528871 - DNA, 15 bp, Homo sapiens
agaaggggagcaggg

SEQ ID NO: 528872 - DNA, 15 bp, Homo sapiens
cagaaggggagcagg

SEQ ID NO: 528873 - DNA, 15 bp, Homo sapiens
ccagaaggggagcag

SEQ ID NO: 528874 - DNA, 15 bp, Homo sapiens
gccagaaggggagca

SEQ ID NO: 528875 - DNA, 15 bp, Homo sapiens
ggccagaaggggagc

SEQ ID NO: 528876 - DNA, 15 bp, Homo sapiens
cggccagaaggggag

SEQ ID NO: 528877 - DNA, 15 bp, Homo sapiens
gcggccagaagggga

SEQ ID NO: 528878 - DNA, 15 bp, Homo sapiens
ggcggccagaagggg

SEQ ID NO: 528879 - DNA, 15 bp, Homo sapiens
aggcggccagaaggg

SEQ ID NO: 528880 - DNA, 15 bp, Homo sapiens
aaggcggccagaagg

SEQ ID NO: 528881 - DNA, 15 bp, Homo sapiens
gaaggcggccagaag

SEQ ID NO: 528882 - DNA, 15 bp, Homo sapiens
ggaaggcggccagaa

SEQ ID NO: 528883 - DNA, 15 bp, Homo sapiens
gggaaggcggccaga

SEQ ID NO: 528884 - DNA, 15 bp, Homo sapiens
tgggaaggcggccag

SEQ ID NO: 528885 - DNA, 15 bp, Homo sapiens
atgggaaggcggcca

SEQ ID NO: 528886 - DNA, 15 bp, Homo sapiens
catgggaaggcggcc

SEQ ID NO: 528887 - DNA, 15 bp, Homo sapiens
gcatgggaaggcggc

SEQ ID NO: 528888 - DNA, 15 bp, Homo sapiens
ggcatgggaaggcgg

SEQ ID NO: 528889 - DNA, 15 bp, Homo sapiens
tggcatgggaaggcg

SEQ ID NO: 528890 - DNA, 15 bp, Homo sapiens
ttggcatgggaaggc

SEQ ID NO: 528891 - DNA, 15 bp, Homo sapiens
cttggcatgggaagg

SEQ ID NO: 528892 - DNA, 15 bp, Homo sapiens
ccttggcatgggaag

SEQ ID NO: 528893 - DNA, 15 bp, Homo sapiens
accttggcatgggaa

SEQ ID NO: 528894 - DNA, 15 bp, Homo sapiens
aaccttggcatggga

SEQ ID NO: 528895 - DNA, 15 bp, Homo sapiens
aaaccttggcatggg

SEQ ID NO: 528896 - DNA, 15 bp, Homo sapiens
gaaaccttggcatgg

SEQ ID NO: 528897 - DNA, 15 bp, Homo sapiens
ggaaaccttggcatg

SEQ ID NO: 528898 - DNA, 15 bp, Homo sapiens
aggaaaccttggcat

SEQ ID NO: 528899 - DNA, 15 bp, Homo sapiens
aaggaaaccttggca

SEQ ID NO: 528900 - DNA, 15 bp, Homo sapiens
gaaggaaaccttggc

SEQ ID NO: 528901 - DNA, 15 bp, Homo sapiens
ggaaggaaaccttgg

SEQ ID NO: 528902 - DNA, 15 bp, Homo sapiens
aggaaggaaaccttg

SEQ ID NO: 528903 - DNA, 15 bp, Homo sapiens
taggaaggaaacctt

SEQ ID NO: 528904 - DNA, 15 bp, Homo sapiens
ctaggaaggaaacct

SEQ ID NO: 528905 - DNA, 15 bp, Homo sapiens
gctaggaaggaaacc

SEQ ID NO: 528906 - DNA, 15 bp, Homo sapiens
cgctaggaaggaaac

SEQ ID NO: 528907 - DNA, 15 bp, Homo sapiens
acgctaggaaggaaa

SEQ ID NO: 528908 - DNA, 15 bp, Homo sapiens
aacgctaggaaggaa

SEQ ID NO: 528909 - DNA, 15 bp, Homo sapiens
aaacgctaggaagga

SEQ ID NO: 528910 - DNA, 15 bp, Homo sapiens
gaaacgctaggaagg

SEQ ID NO: 528911 - DNA, 15 bp, Homo sapiens
ggaaacgctaggaag

SEQ ID NO: 528912 - DNA, 15 bp, Homo sapiens
gggaaacgctaggaa

SEQ ID NO: 528913 - DNA, 15 bp, Homo sapiens
tgggaaacgctagga

SEQ ID NO: 528914 - DNA, 15 bp, Homo sapiens
ctgggaaacgctagg

SEQ ID NO: 528915 - DNA, 15 bp, Homo sapiens
actgggaaacgctag

SEQ ID NO: 528916 - DNA, 15 bp, Homo sapiens
gactgggaaacgcta

SEQ ID NO: 528917 - DNA, 15 bp, Homo sapiens
agactgggaaacgct

SEQ ID NO: 528918 - DNA, 15 bp, Homo sapiens
aagactgggaaacgc

SEQ ID NO: 528919 - DNA, 15 bp, Homo sapiens
gaagactgggaaacg

SEQ ID NO: 528920 - DNA, 15 bp, Homo sapiens
ggaagactgggaaac

SEQ ID NO: 528921 - DNA, 15 bp, Homo sapiens
gggaagactgggaaa

SEQ ID NO: 528922 - DNA, 15 bp, Homo sapiens
agggaagactgggaa

SEQ ID NO: 528923 - DNA, 15 bp, Homo sapiens
gagggaagactggga

SEQ ID NO: 528924 - DNA, 15 bp, Homo sapiens
agagggaagactggg

SEQ ID NO: 528925 - DNA, 15 bp, Homo sapiens
cagagggaagactgg

SEQ ID NO: 528926 - DNA, 15 bp, Homo sapiens
ccagagggaagactg

SEQ ID NO: 528927 - DNA, 15 bp, Homo sapiens
gccagagggaagact

SEQ ID NO: 528928 - DNA, 15 bp, Homo sapiens
ggccagagggaagac

SEQ ID NO: 528929 - DNA, 15 bp, Homo sapiens
aggccagagggaaga

SEQ ID NO: 528930 - DNA, 15 bp, Homo sapiens
gaggccagagggaag

SEQ ID NO: 528931 - DNA, 15 bp, Homo sapiens
agaggccagagggaa

SEQ ID NO: 528932 - DNA, 15 bp, Homo sapiens
cagaggccagaggga

SEQ ID NO: 528933 - DNA, 15 bp, Homo sapiens
gcagaggccagaggg

SEQ ID NO: 528934 - DNA, 15 bp, Homo sapiens
ggcagaggccagagg

SEQ ID NO: 528935 - DNA, 15 bp, Homo sapiens
aggcagaggccagag

SEQ ID NO: 528936 - DNA, 15 bp, Homo sapiens
taggcagaggccaga

SEQ ID NO: 528937 - DNA, 15 bp, Homo sapiens
ataggcagaggccag

SEQ ID NO: 528938 - DNA, 15 bp, Homo sapiens
gataggcagaggcca

SEQ ID NO: 528939 - DNA, 15 bp, Homo sapiens
agataggcagaggcc

SEQ ID NO: 528940 - DNA, 15 bp, Homo sapiens
gagataggcagaggc

SEQ ID NO: 528941 - DNA, 15 bp, Homo sapiens
agagataggcagagg

SEQ ID NO: 528942 - DNA, 15 bp, Homo sapiens
tagagataggcagag

SEQ ID NO: 528943 - DNA, 15 bp, Homo sapiens
ctagagataggcaga

SEQ ID NO: 528944 - DNA, 15 bp, Homo sapiens
tctagagataggcag

SEQ ID NO: 528945 - DNA, 15 bp, Homo sapiens
gtctagagataggca

SEQ ID NO: 528946 - DNA, 15 bp, Homo sapiens
ggtctagagataggc

SEQ ID NO: 528947 - DNA, 15 bp, Homo sapiens
tggtctagagatagg

SEQ ID NO: 528948 - DNA, 15 bp, Homo sapiens
gtggtctagagatag

SEQ ID NO: 528949 - DNA, 15 bp, Homo sapiens
tgtggtctagagata

SEQ ID NO: 528950 - DNA, 15 bp, Homo sapiens
atgtggtctagagat

SEQ ID NO: 528951 - DNA, 15 bp, Homo sapiens
aatgtggtctagaga

SEQ ID NO: 528952 - DNA, 15 bp, Homo sapiens
caatgtggtctagag

SEQ ID NO: 528953 - DNA, 15 bp, Homo sapiens
gcaatgtggtctaga

SEQ ID NO: 528954 - DNA, 15 bp, Homo sapiens
tgcaatgtggtctag

SEQ ID NO: 528955 - DNA, 15 bp, Homo sapiens
ttgcaatgtggtcta

SEQ ID NO: 528956 - DNA, 15 bp, Homo sapiens
gttgcaatgtggtct

SEQ ID NO: 528957 - DNA, 15 bp, Homo sapiens
tgttgcaatgtggtc

SEQ ID NO: 528958 - DNA, 15 bp, Homo sapiens
atgttgcaatgtggt

SEQ ID NO: 528959 - DNA, 15 bp, Homo sapiens
catgttgcaatgtgg

SEQ ID NO: 528960 - DNA, 15 bp, Homo sapiens
gcatgttgcaatgtg

SEQ ID NO: 528961 - DNA, 15 bp, Homo sapiens
ggcatgttgcaatgt

SEQ ID NO: 528962 - DNA, 15 bp, Homo sapiens
tggcatgttgcaatg

SEQ ID NO: 528963 - DNA, 15 bp, Homo sapiens
atggcatgttgcaat

SEQ ID NO: 528964 - DNA, 15 bp, Homo sapiens
gatggcatgttgcaa

SEQ ID NO: 528965 - DNA, 15 bp, Homo sapiens
agatggcatgttgca

SEQ ID NO: 528966 - DNA, 15 bp, Homo sapiens
tagatggcatgttgc

SEQ ID NO: 528967 - DNA, 15 bp, Homo sapiens
ttagatggcatgttg

SEQ ID NO: 528968 - DNA, 15 bp, Homo sapiens
tttagatggcatgtt

SEQ ID NO: 528969 - DNA, 15 bp, Homo sapiens
ttttagatggcatgt

SEQ ID NO: 528970 - DNA, 15 bp, Homo sapiens
gttttagatggcatg

SEQ ID NO: 528971 - DNA, 15 bp, Homo sapiens
agttttagatggcat

SEQ ID NO: 528972 - DNA, 15 bp, Homo sapiens
tagttttagatggca

SEQ ID NO: 528973 - DNA, 15 bp, Homo sapiens
ttagttttagatggc

SEQ ID NO: 528974 - DNA, 15 bp, Homo sapiens
gttagttttagatgg

SEQ ID NO: 528975 - DNA, 15 bp, Homo sapiens
agttagttttagatg

SEQ ID NO: 528976 - DNA, 15 bp, Homo sapiens
cagttagttttagat

SEQ ID NO: 528977 - DNA, 15 bp, Homo sapiens
ccagttagttttaga

SEQ ID NO: 528978 - DNA, 15 bp, Homo sapiens
tccagttagttttag

SEQ ID NO: 528979 - DNA, 15 bp, Homo sapiens
atccagttagtttta

SEQ ID NO: 528980 - DNA, 15 bp, Homo sapiens
aatccagttagtttt

SEQ ID NO: 528981 - DNA, 15 bp, Homo sapiens
gaatccagttagttt

SEQ ID NO: 528982 - DNA, 15 bp, Homo sapiens
agaatccagttagtt

SEQ ID NO: 528983 - DNA, 15 bp, Homo sapiens
cagaatccagttagt

SEQ ID NO: 528984 - DNA, 15 bp, Homo sapiens
acagaatccagttag

SEQ ID NO: 528985 - DNA, 15 bp, Homo sapiens
gacagaatccagtta

SEQ ID NO: 528986 - DNA, 15 bp, Homo sapiens
tgacagaatccagtt

SEQ ID NO: 528987 - DNA, 15 bp, Homo sapiens
gtgacagaatccagt

SEQ ID NO: 528988 - DNA, 15 bp, Homo sapiens
agtgacagaatccag

SEQ ID NO: 528989 - DNA, 15 bp, Homo sapiens
gagtgacagaatcca

SEQ ID NO: 528990 - DNA, 15 bp, Homo sapiens
ggagtgacagaatcc

SEQ ID NO: 528991 - DNA, 15 bp, Homo sapiens
gggagtgacagaatc

SEQ ID NO: 528992 - DNA, 15 bp, Homo sapiens
agggagtgacagaat

SEQ ID NO: 528993 - DNA, 15 bp, Homo sapiens
cagggagtgacagaa

SEQ ID NO: 528994 - DNA, 15 bp, Homo sapiens
gcagggagtgacaga

SEQ ID NO: 528995 - DNA, 15 bp, Homo sapiens
agcagggagtgacag

SEQ ID NO: 528996 - DNA, 15 bp, Homo sapiens
cagcagggagtgaca

SEQ ID NO: 528997 - DNA, 15 bp, Homo sapiens
acagcagggagtgac

SEQ ID NO: 528998 - DNA, 15 bp, Homo sapiens
aacagcagggagtga

SEQ ID NO: 528999 - DNA, 15 bp, Homo sapiens
aaacagcagggagtg

SEQ ID NO: 529000 - DNA, 15 bp, Homo sapiens
aaaacagcagggagt

SEQ ID NO: 529001 - DNA, 15 bp, Homo sapiens
gaaaacagcagggag

SEQ ID NO: 529002 - DNA, 15 bp, Homo sapiens
agaaaacagcaggga

SEQ ID NO: 529003 - DNA, 15 bp, Homo sapiens
aagaaaacagcaggg

SEQ ID NO: 529004 - DNA, 15 bp, Homo sapiens
aaagaaaacagcagg

SEQ ID NO: 529005 - DNA, 15 bp, Homo sapiens
caaagaaaacagcag

SEQ ID NO: 529006 - DNA, 15 bp, Homo sapiens
tcaaagaaaacagca

SEQ ID NO: 529007 - DNA, 15 bp, Homo sapiens
ctcaaagaaaacagc

SEQ ID NO: 529008 - DNA, 15 bp, Homo sapiens
tctcaaagaaaacag

SEQ ID NO: 529009 - DNA, 15 bp, Homo sapiens
gtctcaaagaaaaca

SEQ ID NO: 529010 - DNA, 15 bp, Homo sapiens
cgtctcaaagaaaac

SEQ ID NO: 529011 - DNA, 15 bp, Homo sapiens
ccgtctcaaagaaaa

SEQ ID NO: 529012 - DNA, 15 bp, Homo sapiens
tccgtctcaaagaaa

SEQ ID NO: 529013 - DNA, 15 bp, Homo sapiens
ctccgtctcaaagaa

SEQ ID NO: 529014 - DNA, 15 bp, Homo sapiens
actccgtctcaaaga

SEQ ID NO: 529015 - DNA, 15 bp, Homo sapiens
aactccgtctcaaag

SEQ ID NO: 529016 - DNA, 15 bp, Homo sapiens
aaactccgtctcaaa

SEQ ID NO: 529017 - DNA, 15 bp, Homo sapiens
gaaactccgtctcaa

SEQ ID NO: 529018 - DNA, 15 bp, Homo sapiens
cgaaactccgtctca

SEQ ID NO: 529019 - DNA, 15 bp, Homo sapiens
gcgaaactccgtctc

SEQ ID NO: 529020 - DNA, 15 bp, Homo sapiens
agcgaaactccgtct

SEQ ID NO: 529021 - DNA, 15 bp, Homo sapiens
gagcgaaactccgtc

SEQ ID NO: 529022 - DNA, 15 bp, Homo sapiens
agagcgaaactccgt

SEQ ID NO: 529023 - DNA, 15 bp, Homo sapiens
cagagcgaaactccg

SEQ ID NO: 529024 - DNA, 15 bp, Homo sapiens
acagagcgaaactcc

SEQ ID NO: 529025 - DNA, 15 bp, Homo sapiens
gacagagcgaaactc

SEQ ID NO: 529026 - DNA, 15 bp, Homo sapiens
tgacagagcgaaact

SEQ ID NO: 529027 - DNA, 15 bp, Homo sapiens
gtgacagagcgaaac

SEQ ID NO: 529028 - DNA, 15 bp, Homo sapiens
ggtgacagagcgaaa

SEQ ID NO: 529029 - DNA, 15 bp, Homo sapiens
gggtgacagagcgaa

SEQ ID NO: 529030 - DNA, 15 bp, Homo sapiens
tgggtgacagagcga

SEQ ID NO: 529031 - DNA, 15 bp, Homo sapiens
ctgggtgacagagcg

SEQ ID NO: 529032 - DNA, 15 bp, Homo sapiens
cctgggtgacagagc

SEQ ID NO: 529033 - DNA, 15 bp, Homo sapiens
ccctgggtgacagag

SEQ ID NO: 529034 - DNA, 15 bp, Homo sapiens
accctgggtgacaga

SEQ ID NO: 529035 - DNA, 15 bp, Homo sapiens
caccctgggtgacag

SEQ ID NO: 529036 - DNA, 15 bp, Homo sapiens
ccaccctgggtgaca

SEQ ID NO: 529037 - DNA, 15 bp, Homo sapiens
tccaccctgggtgac

SEQ ID NO: 529038 - DNA, 15 bp, Homo sapiens
ctccaccctgggtga

SEQ ID NO: 529039 - DNA, 15 bp, Homo sapiens
actccaccctgggtg

SEQ ID NO: 529040 - DNA, 15 bp, Homo sapiens
cactccaccctgggt

SEQ ID NO: 529041 - DNA, 15 bp, Homo sapiens
gcactccaccctggg

SEQ ID NO: 529042 - DNA, 15 bp, Homo sapiens
tgcactccaccctgg

SEQ ID NO: 529043 - DNA, 15 bp, Homo sapiens
ttgcactccaccctg

SEQ ID NO: 529044 - DNA, 15 bp, Homo sapiens
attgcactccaccct

SEQ ID NO: 529045 - DNA, 15 bp, Homo sapiens
cattgcactccaccc

SEQ ID NO: 529046 - DNA, 15 bp, Homo sapiens
ccattgcactccacc

SEQ ID NO: 529047 - DNA, 15 bp, Homo sapiens
gccattgcactccac

SEQ ID NO: 529048 - DNA, 15 bp, Homo sapiens
tgccattgcactcca

SEQ ID NO: 529049 - DNA, 15 bp, Homo sapiens
atgccattgcactcc

SEQ ID NO: 529050 - DNA, 15 bp, Homo sapiens
catgccattgcactc

SEQ ID NO: 529051 - DNA, 15 bp, Homo sapiens
tcatgccattgcact

SEQ ID NO: 529052 - DNA, 15 bp, Homo sapiens
atcatgccattgcac

SEQ ID NO: 529053 - DNA, 15 bp, Homo sapiens
gatcatgccattgca

SEQ ID NO: 529054 - DNA, 15 bp, Homo sapiens
agatcatgccattgc

SEQ ID NO: 529055 - DNA, 15 bp, Homo sapiens
gagatcatgccattg

SEQ ID NO: 529056 - DNA, 15 bp, Homo sapiens
tgagatcatgccatt

SEQ ID NO: 529057 - DNA, 15 bp, Homo sapiens
ctgagatcatgccat

SEQ ID NO: 529058 - DNA, 15 bp, Homo sapiens
cctgagatcatgcca

SEQ ID NO: 529059 - DNA, 15 bp, Homo sapiens
gcctgagatcatgcc

SEQ ID NO: 529060 - DNA, 15 bp, Homo sapiens
agcctgagatcatgc

SEQ ID NO: 529061 - DNA, 15 bp, Homo sapiens
gagcctgagatcatg

SEQ ID NO: 529062 - DNA, 15 bp, Homo sapiens
tgagcctgagatcat

SEQ ID NO: 529063 - DNA, 15 bp, Homo sapiens
gtgagcctgagatca

SEQ ID NO: 529064 - DNA, 15 bp, Homo sapiens
agtgagcctgagatc

SEQ ID NO: 529065 - DNA, 15 bp, Homo sapiens
cagtgagcctgagat

SEQ ID NO: 529066 - DNA, 15 bp, Homo sapiens
gcagtgagcctgaga

SEQ ID NO: 529067 - DNA, 15 bp, Homo sapiens
tgcagtgagcctgag

SEQ ID NO: 529068 - DNA, 15 bp, Homo sapiens
ttgcagtgagcctga

SEQ ID NO: 529069 - DNA, 15 bp, Homo sapiens
attgcagtgagcctg

SEQ ID NO: 529070 - DNA, 15 bp, Homo sapiens
gattgcagtgagcct

SEQ ID NO: 529071 - DNA, 15 bp, Homo sapiens
agattgcagtgagcc

SEQ ID NO: 529072 - DNA, 15 bp, Homo sapiens
gagattgcagtgagc

SEQ ID NO: 529073 - DNA, 15 bp, Homo sapiens
agagattgcagtgag

SEQ ID NO: 529074 - DNA, 15 bp, Homo sapiens
cagagattgcagtga

SEQ ID NO: 529075 - DNA, 15 bp, Homo sapiens
gcagagattgcagtg

SEQ ID NO: 529076 - DNA, 15 bp, Homo sapiens
ggcagagattgcagt

SEQ ID NO: 529077 - DNA, 15 bp, Homo sapiens
aggcagagattgcag

SEQ ID NO: 529078 - DNA, 15 bp, Homo sapiens
gaggcagagattgca

SEQ ID NO: 529079 - DNA, 15 bp, Homo sapiens
ggaggcagagattgc

SEQ ID NO: 529080 - DNA, 15 bp, Homo sapiens
caacccaggaggcag

SEQ ID NO: 529081 - DNA, 15 bp, Homo sapiens
ccaacccaggaggca

SEQ ID NO: 529082 - DNA, 15 bp, Homo sapiens
tccaacccaggaggc

SEQ ID NO: 529083 - DNA, 15 bp, Homo sapiens
ctccaacccaggagg

SEQ ID NO: 529084 - DNA, 15 bp, Homo sapiens
tctccaacccaggag

SEQ ID NO: 529085 - DNA, 15 bp, Homo sapiens
ctctccaacccagga

SEQ ID NO: 529086 - DNA, 15 bp, Homo sapiens
tctctccaacccagg

SEQ ID NO: 529087 - DNA, 15 bp, Homo sapiens
atctctccaacccag

SEQ ID NO: 529088 - DNA, 15 bp, Homo sapiens
aatctctccaaccca

SEQ ID NO: 529089 - DNA, 15 bp, Homo sapiens
gaatctctccaaccc

SEQ ID NO: 529090 - DNA, 15 bp, Homo sapiens
agaatctctccaacc

SEQ ID NO: 529091 - DNA, 15 bp, Homo sapiens
gagaatctctccaac

SEQ ID NO: 529092 - DNA, 15 bp, Homo sapiens
ggagaatctctccaa

SEQ ID NO: 529093 - DNA, 15 bp, Homo sapiens
aggagaatctctcca

SEQ ID NO: 529094 - DNA, 15 bp, Homo sapiens
caggagaatctctcc

SEQ ID NO: 529095 - DNA, 15 bp, Homo sapiens
gcaggagaatctctc

SEQ ID NO: 529096 - DNA, 15 bp, Homo sapiens
ggcaggagaatctct

SEQ ID NO: 529097 - DNA, 15 bp, Homo sapiens
aggcaggagaatctc

SEQ ID NO: 529098 - DNA, 15 bp, Homo sapiens
gaggcaggagaatct

SEQ ID NO: 529099 - DNA, 15 bp, Homo sapiens
tgaggcaggagaatc

SEQ ID NO: 529100 - DNA, 15 bp, Homo sapiens
ctgaggcaggagaat

SEQ ID NO: 529101 - DNA, 15 bp, Homo sapiens
gggaggctgaggcag

SEQ ID NO: 529102 - DNA, 15 bp, Homo sapiens
tgggaggctgaggca

SEQ ID NO: 529103 - DNA, 15 bp, Homo sapiens
ttgggaggctgaggc

SEQ ID NO: 529104 - DNA, 15 bp, Homo sapiens
cttgggaggctgagg

SEQ ID NO: 529105 - DNA, 15 bp, Homo sapiens
acttgggaggctgag

SEQ ID NO: 529106 - DNA, 15 bp, Homo sapiens
cacttgggaggctga

SEQ ID NO: 529107 - DNA, 15 bp, Homo sapiens
ccacttgggaggctg

SEQ ID NO: 529108 - DNA, 15 bp, Homo sapiens
gccacttgggaggct

SEQ ID NO: 529109 - DNA, 15 bp, Homo sapiens
agccacttgggaggc

SEQ ID NO: 529110 - DNA, 15 bp, Homo sapiens
cagccacttgggagg

SEQ ID NO: 529111 - DNA, 15 bp, Homo sapiens
ccagccacttgggag

SEQ ID NO: 529112 - DNA, 15 bp, Homo sapiens
cccagccacttggga

SEQ ID NO: 529113 - DNA, 15 bp, Homo sapiens
tcccagccacttggg

SEQ ID NO: 529114 - DNA, 15 bp, Homo sapiens
atcccagccacttgg

SEQ ID NO: 529115 - DNA, 15 bp, Homo sapiens
aatcccagccacttg

SEQ ID NO: 529116 - DNA, 15 bp, Homo sapiens
taatcccagccactt

SEQ ID NO: 529117 - DNA, 15 bp, Homo sapiens
gtaatcccagccact

SEQ ID NO: 529118 - DNA, 15 bp, Homo sapiens
tgtaatcccagccac

SEQ ID NO: 529119 - DNA, 15 bp, Homo sapiens
ctgtaatcccagcca

SEQ ID NO: 529120 - DNA, 15 bp, Homo sapiens
cctgtaatcccagcc

SEQ ID NO: 529121 - DNA, 15 bp, Homo sapiens
ggcacctgtaatccc

SEQ ID NO: 529122 - DNA, 15 bp, Homo sapiens
gggcacctgtaatcc

SEQ ID NO: 529123 - DNA, 15 bp, Homo sapiens
cgggcacctgtaatc

SEQ ID NO: 529124 - DNA, 15 bp, Homo sapiens
gcgggcacctgtaat

SEQ ID NO: 529125 - DNA, 15 bp, Homo sapiens
ggcgggcacctgtaa

SEQ ID NO: 529126 - DNA, 15 bp, Homo sapiens
tggcgggcacctgta

SEQ ID NO: 529127 - DNA, 15 bp, Homo sapiens
gtggcgggcacctgt

SEQ ID NO: 529128 - DNA, 15 bp, Homo sapiens
ggtggcgggcacctg

SEQ ID NO: 529129 - DNA, 15 bp, Homo sapiens
tggtggcgggcacct

SEQ ID NO: 529130 - DNA, 15 bp, Homo sapiens
atggtggcgggcacc

SEQ ID NO: 529131 - DNA, 15 bp, Homo sapiens
catggtggcgggcac

SEQ ID NO: 529132 - DNA, 15 bp, Homo sapiens
gcatggtggcgggca

SEQ ID NO: 529133 - DNA, 15 bp, Homo sapiens
ggcatggtggcgggc

SEQ ID NO: 529134 - DNA, 15 bp, Homo sapiens
aggcatggtggcggg

SEQ ID NO: 529135 - DNA, 15 bp, Homo sapiens
caggcatggtggcgg

SEQ ID NO: 529136 - DNA, 15 bp, Homo sapiens
ccaggcatggtggcg

SEQ ID NO: 529137 - DNA, 15 bp, Homo sapiens
gccaggcatggtggc

SEQ ID NO: 529138 - DNA, 15 bp, Homo sapiens
agccaggcatggtgg

SEQ ID NO: 529139 - DNA, 15 bp, Homo sapiens
gagccaggcatggtg

SEQ ID NO: 529140 - DNA, 15 bp, Homo sapiens
tgagccaggcatggt

SEQ ID NO: 529141 - DNA, 15 bp, Homo sapiens
atgagccaggcatgg

SEQ ID NO: 529142 - DNA, 15 bp, Homo sapiens
aatgagccaggcatg

SEQ ID NO: 529143 - DNA, 15 bp, Homo sapiens
aaatgagccaggcat

SEQ ID NO: 529144 - DNA, 15 bp, Homo sapiens
aaaatgagccaggca

SEQ ID NO: 529145 - DNA, 15 bp, Homo sapiens
aaaaatgagccaggc

SEQ ID NO: 529146 - DNA, 15 bp, Homo sapiens
caaaaatgagccagg

SEQ ID NO: 529147 - DNA, 15 bp, Homo sapiens
acaaaaatgagccag

SEQ ID NO: 529148 - DNA, 15 bp, Homo sapiens
tacaaaaatgagcca

SEQ ID NO: 529149 - DNA, 15 bp, Homo sapiens
ctacaaaaatgagcc

SEQ ID NO: 529150 - DNA, 15 bp, Homo sapiens
tctacaaaaatgagc

SEQ ID NO: 529151 - DNA, 15 bp, Homo sapiens
ctctacaaaaatgag

SEQ ID NO: 529152 - DNA, 15 bp, Homo sapiens
actctacaaaaatga

SEQ ID NO: 529153 - DNA, 15 bp, Homo sapiens
aactctacaaaaatg

SEQ ID NO: 529154 - DNA, 15 bp, Homo sapiens
aaactctacaaaaat

SEQ ID NO: 529155 - DNA, 15 bp, Homo sapiens
gaaactctacaaaaa

SEQ ID NO: 529156 - DNA, 15 bp, Homo sapiens
tgaaactctacaaaa

SEQ ID NO: 529157 - DNA, 15 bp, Homo sapiens
gtgaaactctacaaa

SEQ ID NO: 529158 - DNA, 15 bp, Homo sapiens
ggtgaaactctacaa

SEQ ID NO: 529159 - DNA, 15 bp, Homo sapiens
tggtgaaactctaca

SEQ ID NO: 529160 - DNA, 15 bp, Homo sapiens
atggtgaaactctac

SEQ ID NO: 529161 - DNA, 15 bp, Homo sapiens
tatggtgaaactcta

SEQ ID NO: 529162 - DNA, 15 bp, Homo sapiens
atatggtgaaactct

SEQ ID NO: 529163 - DNA, 15 bp, Homo sapiens
aatatggtgaaactc

SEQ ID NO: 529164 - DNA, 15 bp, Homo sapiens
caatatggtgaaact

SEQ ID NO: 529165 - DNA, 15 bp, Homo sapiens
ccaatatggtgaaac

SEQ ID NO: 529166 - DNA, 15 bp, Homo sapiens
gccaatatggtgaaa

SEQ ID NO: 529167 - DNA, 15 bp, Homo sapiens
ggccaatatggtgaa

SEQ ID NO: 529168 - DNA, 15 bp, Homo sapiens
tggccaatatggtga

SEQ ID NO: 529169 - DNA, 15 bp, Homo sapiens
ctggccaatatggtg

SEQ ID NO: 529170 - DNA, 15 bp, Homo sapiens
cctggccaatatggt

SEQ ID NO: 529171 - DNA, 15 bp, Homo sapiens
gcctggccaatatgg

SEQ ID NO: 529172 - DNA, 15 bp, Homo sapiens
tgcctggccaatatg

SEQ ID NO: 529173 - DNA, 15 bp, Homo sapiens
ctgcctggccaatat

SEQ ID NO: 529174 - DNA, 15 bp, Homo sapiens
cctgcctggccaata

SEQ ID NO: 529175 - DNA, 15 bp, Homo sapiens
acctgcctggccaat

SEQ ID NO: 529176 - DNA, 15 bp, Homo sapiens
gacctgcctggccaa

SEQ ID NO: 529177 - DNA, 15 bp, Homo sapiens
agacctgcctggcca

SEQ ID NO: 529178 - DNA, 15 bp, Homo sapiens
gagacctgcctggcc

SEQ ID NO: 529179 - DNA, 15 bp, Homo sapiens
tgagacctgcctggc

SEQ ID NO: 529180 - DNA, 15 bp, Homo sapiens
ttgagacctgcctgg

SEQ ID NO: 529181 - DNA, 15 bp, Homo sapiens
tttgagacctgcctg

SEQ ID NO: 529182 - DNA, 15 bp, Homo sapiens
gtttgagacctgcct

SEQ ID NO: 529183 - DNA, 15 bp, Homo sapiens
agtttgagacctgcc

SEQ ID NO: 529184 - DNA, 15 bp, Homo sapiens
gagtttgagacctgc

SEQ ID NO: 529185 - DNA, 15 bp, Homo sapiens
ggagtttgagacctg

SEQ ID NO: 529186 - DNA, 15 bp, Homo sapiens
aggagtttgagacct

SEQ ID NO: 529187 - DNA, 15 bp, Homo sapiens
taggagtttgagacc

SEQ ID NO: 529188 - DNA, 15 bp, Homo sapiens
ttaggagtttgagac

SEQ ID NO: 529189 - DNA, 15 bp, Homo sapiens
gttaggagtttgaga

SEQ ID NO: 529190 - DNA, 15 bp, Homo sapiens
ggttaggagtttgag

SEQ ID NO: 529191 - DNA, 15 bp, Homo sapiens
aggttaggagtttga

SEQ ID NO: 529192 - DNA, 15 bp, Homo sapiens
gaggttaggagtttg

SEQ ID NO: 529193 - DNA, 15 bp, Homo sapiens
tgaggttaggagttt

SEQ ID NO: 529194 - DNA, 15 bp, Homo sapiens
ctgaggttaggagtt

SEQ ID NO: 529195 - DNA, 15 bp, Homo sapiens
cctgaggttaggagt

SEQ ID NO: 529196 - DNA, 15 bp, Homo sapiens
acctgaggttaggag

SEQ ID NO: 529197 - DNA, 15 bp, Homo sapiens
cacctgaggttagga

SEQ ID NO: 529198 - DNA, 15 bp, Homo sapiens
tcacctgaggttagg

SEQ ID NO: 529199 - DNA, 15 bp, Homo sapiens
atcacctgaggttag

SEQ ID NO: 529200 - DNA, 15 bp, Homo sapiens
gatcacctgaggtta

SEQ ID NO: 529201 - DNA, 15 bp, Homo sapiens
ggatcacctgaggtt

SEQ ID NO: 529202 - DNA, 15 bp, Homo sapiens
cggatcacctgaggt

SEQ ID NO: 529203 - DNA, 15 bp, Homo sapiens
gcggatcacctgagg

SEQ ID NO: 529204 - DNA, 15 bp, Homo sapiens
ggcggatcacctgag

SEQ ID NO: 529205 - DNA, 15 bp, Homo sapiens
aggcggatcacctga

SEQ ID NO: 529206 - DNA, 15 bp, Homo sapiens
caggcggatcacctg

SEQ ID NO: 529207 - DNA, 15 bp, Homo sapiens
gcaggcggatcacct

SEQ ID NO: 529208 - DNA, 15 bp, Homo sapiens
ggcaggcggatcacc

SEQ ID NO: 529209 - DNA, 15 bp, Homo sapiens
aggcaggcggatcac

SEQ ID NO: 529210 - DNA, 15 bp, Homo sapiens
gaggcaggcggatca

SEQ ID NO: 529211 - DNA, 15 bp, Homo sapiens
cgaggcaggcggatc

SEQ ID NO: 529212 - DNA, 15 bp, Homo sapiens
ccgaggcaggcggat

SEQ ID NO: 529213 - DNA, 15 bp, Homo sapiens
gccgaggcaggcgga

SEQ ID NO: 529214 - DNA, 15 bp, Homo sapiens
agccgaggcaggcgg

SEQ ID NO: 529215 - DNA, 15 bp, Homo sapiens
aagccgaggcaggcg

SEQ ID NO: 529216 - DNA, 15 bp, Homo sapiens
gaagccgaggcaggc

SEQ ID NO: 529217 - DNA, 15 bp, Homo sapiens
ggaagccgaggcagg

SEQ ID NO: 529218 - DNA, 15 bp, Homo sapiens
gggaagccgaggcag

SEQ ID NO: 529219 - DNA, 15 bp, Homo sapiens
tgggaagccgaggca

SEQ ID NO: 529220 - DNA, 15 bp, Homo sapiens
ttgggaagccgaggc

SEQ ID NO: 529221 - DNA, 15 bp, Homo sapiens
tttgggaagccgagg

SEQ ID NO: 529222 - DNA, 15 bp, Homo sapiens
ctttgggaagccgag

SEQ ID NO: 529223 - DNA, 15 bp, Homo sapiens
actttgggaagccga

SEQ ID NO: 529224 - DNA, 15 bp, Homo sapiens
cactttgggaagccg

SEQ ID NO: 529225 - DNA, 15 bp, Homo sapiens
gcactttgggaagcc

SEQ ID NO: 529226 - DNA, 15 bp, Homo sapiens
agcactttgggaagc

SEQ ID NO: 529227 - DNA, 15 bp, Homo sapiens
cagcactttgggaag

SEQ ID NO: 529228 - DNA, 15 bp, Homo sapiens
ccagcactttgggaa

SEQ ID NO: 529229 - DNA, 15 bp, Homo sapiens
ccccagcactttggg

SEQ ID NO: 529230 - DNA, 15 bp, Homo sapiens
accccagcactttgg

SEQ ID NO: 529231 - DNA, 15 bp, Homo sapiens
aaccccagcactttg

SEQ ID NO: 529232 - DNA, 15 bp, Homo sapiens
taaccccagcacttt

SEQ ID NO: 529233 - DNA, 15 bp, Homo sapiens
gtaaccccagcactt

SEQ ID NO: 529234 - DNA, 15 bp, Homo sapiens
tgtaaccccagcact

SEQ ID NO: 529235 - DNA, 15 bp, Homo sapiens
ctgtaaccccagcac

SEQ ID NO: 529236 - DNA, 15 bp, Homo sapiens
cctgtaaccccagca

SEQ ID NO: 529237 - DNA, 15 bp, Homo sapiens
gcctgtaaccccagc

SEQ ID NO: 529238 - DNA, 15 bp, Homo sapiens
tgcctgtaaccccag

SEQ ID NO: 529239 - DNA, 15 bp, Homo sapiens
atgcctgtaacccca

SEQ ID NO: 529240 - DNA, 15 bp, Homo sapiens
catgcctgtaacccc

SEQ ID NO: 529241 - DNA, 15 bp, Homo sapiens
tcatgcctgtaaccc

SEQ ID NO: 529242 - DNA, 15 bp, Homo sapiens
ctcatgcctgtaacc

SEQ ID NO: 529243 - DNA, 15 bp, Homo sapiens
gctcatgcctgtaac

SEQ ID NO: 529244 - DNA, 15 bp, Homo sapiens
cggctcatgcctgta

SEQ ID NO: 529245 - DNA, 15 bp, Homo sapiens
gcggctcatgcctgt

SEQ ID NO: 529246 - DNA, 15 bp, Homo sapiens
ggcggctcatgcctg

SEQ ID NO: 529247 - DNA, 15 bp, Homo sapiens
tggcggctcatgcct

SEQ ID NO: 529248 - DNA, 15 bp, Homo sapiens
gtggcggctcatgcc

SEQ ID NO: 529249 - DNA, 15 bp, Homo sapiens
cgtggcggctcatgc

SEQ ID NO: 529250 - DNA, 15 bp, Homo sapiens
gcgtggcggctcatg

SEQ ID NO: 529251 - DNA, 15 bp, Homo sapiens
ggcgtggcggctcat

SEQ ID NO: 529252 - DNA, 15 bp, Homo sapiens
aggcgtggcggctca

SEQ ID NO: 529253 - DNA, 15 bp, Homo sapiens
caggcgtggcggctc

SEQ ID NO: 529254 - DNA, 15 bp, Homo sapiens
ccaggcgtggcggct

SEQ ID NO: 529255 - DNA, 15 bp, Homo sapiens
gccaggcgtggcggc

SEQ ID NO: 529256 - DNA, 15 bp, Homo sapiens
ggccaggcgtggcgg

SEQ ID NO: 529257 - DNA, 15 bp, Homo sapiens
gggccaggcgtggcg

SEQ ID NO: 529258 - DNA, 15 bp, Homo sapiens
agggccaggcgtggc

SEQ ID NO: 529259 - DNA, 15 bp, Homo sapiens
gagggccaggcgtgg

SEQ ID NO: 529260 - DNA, 15 bp, Homo sapiens
ggagggccaggcgtg

SEQ ID NO: 529261 - DNA, 15 bp, Homo sapiens
gggagggccaggcgt

SEQ ID NO: 529262 - DNA, 15 bp, Homo sapiens
ggggagggccaggcg

SEQ ID NO: 529263 - DNA, 15 bp, Homo sapiens
aggggagggccaggc

SEQ ID NO: 529264 - DNA, 15 bp, Homo sapiens
caggggagggccagg

SEQ ID NO: 529265 - DNA, 15 bp, Homo sapiens
gcaggggagggccag

SEQ ID NO: 529266 - DNA, 15 bp, Homo sapiens
agcaggggagggcca

SEQ ID NO: 529267 - DNA, 15 bp, Homo sapiens
cagcaggggagggcc

SEQ ID NO: 529268 - DNA, 15 bp, Homo sapiens
acagcaggggagggc

SEQ ID NO: 529269 - DNA, 15 bp, Homo sapiens
aacagcaggggaggg

SEQ ID NO: 529270 - DNA, 15 bp, Homo sapiens
aaacagcaggggagg

SEQ ID NO: 529271 - DNA, 15 bp, Homo sapiens
aaaacagcaggggag

SEQ ID NO: 529272 - DNA, 15 bp, Homo sapiens
taaaacagcagggga

SEQ ID NO: 529273 - DNA, 15 bp, Homo sapiens
ataaaacagcagggg

SEQ ID NO: 529274 - DNA, 15 bp, Homo sapiens
gataaaacagcaggg

SEQ ID NO: 529275 - DNA, 15 bp, Homo sapiens
tgataaaacagcagg

SEQ ID NO: 529276 - DNA, 15 bp, Homo sapiens
gtgataaaacagcag

SEQ ID NO: 529277 - DNA, 15 bp, Homo sapiens
agtgataaaacagca

SEQ ID NO: 529278 - DNA, 15 bp, Homo sapiens
cagtgataaaacagc

SEQ ID NO: 529279 - DNA, 15 bp, Homo sapiens
gcagtgataaaacag

SEQ ID NO: 529280 - DNA, 15 bp, Homo sapiens
ggcagtgataaaaca

SEQ ID NO: 529281 - DNA, 15 bp, Homo sapiens
gggcagtgataaaac

SEQ ID NO: 529282 - DNA, 15 bp, Homo sapiens
agggcagtgataaaa

SEQ ID NO: 529283 - DNA, 15 bp, Homo sapiens
gagggcagtgataaa

SEQ ID NO: 529284 - DNA, 15 bp, Homo sapiens
ggagggcagtgataa

SEQ ID NO: 529285 - DNA, 15 bp, Homo sapiens
gggagggcagtgata

SEQ ID NO: 529286 - DNA, 15 bp, Homo sapiens
agggagggcagtgat

SEQ ID NO: 529287 - DNA, 15 bp, Homo sapiens
cagggagggcagtga

SEQ ID NO: 529288 - DNA, 15 bp, Homo sapiens
acagggagggcagtg

SEQ ID NO: 529289 - DNA, 15 bp, Homo sapiens
aacagggagggcagt

SEQ ID NO: 529290 - DNA, 15 bp, Homo sapiens
caacagggagggcag

SEQ ID NO: 529291 - DNA, 15 bp, Homo sapiens
acaacagggagggca

SEQ ID NO: 529292 - DNA, 15 bp, Homo sapiens
gacaacagggagggc

SEQ ID NO: 529293 - DNA, 15 bp, Homo sapiens
agacaacagggaggg

SEQ ID NO: 529294 - DNA, 15 bp, Homo sapiens
aagacaacagggagg

SEQ ID NO: 529295 - DNA, 15 bp, Homo sapiens
aaagacaacagggag

SEQ ID NO: 529296 - DNA, 15 bp, Homo sapiens
taaagacaacaggga

SEQ ID NO: 529297 - DNA, 15 bp, Homo sapiens
ctaaagacaacaggg

SEQ ID NO: 529298 - DNA, 15 bp, Homo sapiens
tctaaagacaacagg

SEQ ID NO: 529299 - DNA, 15 bp, Homo sapiens
ttctaaagacaacag

SEQ ID NO: 529300 - DNA, 15 bp, Homo sapiens
attctaaagacaaca

SEQ ID NO: 529301 - DNA, 15 bp, Homo sapiens
tattctaaagacaac

SEQ ID NO: 529302 - DNA, 15 bp, Homo sapiens
ctattctaaagacaa

SEQ ID NO: 529303 - DNA, 15 bp, Homo sapiens
cctattctaaagaca

SEQ ID NO: 529304 - DNA, 15 bp, Homo sapiens
tcctattctaaagac

SEQ ID NO: 529305 - DNA, 15 bp, Homo sapiens
atcctattctaaaga

SEQ ID NO: 529306 - DNA, 15 bp, Homo sapiens
gatcctattctaaag

SEQ ID NO: 529307 - DNA, 15 bp, Homo sapiens
ggatcctattctaaa

SEQ ID NO: 529308 - DNA, 15 bp, Homo sapiens
tggatcctattctaa

SEQ ID NO: 529309 - DNA, 15 bp, Homo sapiens
ttggatcctattcta

SEQ ID NO: 529310 - DNA, 15 bp, Homo sapiens
attggatcctattct

SEQ ID NO: 529311 - DNA, 15 bp, Homo sapiens
gattggatcctattc

SEQ ID NO: 529312 - DNA, 15 bp, Homo sapiens
agattggatcctatt

SEQ ID NO: 529313 - DNA, 15 bp, Homo sapiens
gagattggatcctat

SEQ ID NO: 529314 - DNA, 15 bp, Homo sapiens
ggagattggatccta

SEQ ID NO: 529315 - DNA, 15 bp, Homo sapiens
aggagattggatcct

SEQ ID NO: 529316 - DNA, 15 bp, Homo sapiens
gaggagattggatcc

SEQ ID NO: 529317 - DNA, 15 bp, Homo sapiens
tgaggagattggatc

SEQ ID NO: 529318 - DNA, 15 bp, Homo sapiens
ctgaggagattggat

SEQ ID NO: 529319 - DNA, 15 bp, Homo sapiens
actgaggagattgga

SEQ ID NO: 529320 - DNA, 15 bp, Homo sapiens
cactgaggagattgg

SEQ ID NO: 529321 - DNA, 15 bp, Homo sapiens
tcactgaggagattg

SEQ ID NO: 529322 - DNA, 15 bp, Homo sapiens
ttcactgaggagatt

SEQ ID NO: 529323 - DNA, 15 bp, Homo sapiens
attcactgaggagat

SEQ ID NO: 529324 - DNA, 15 bp, Homo sapiens
gattcactgaggaga

SEQ ID NO: 529325 - DNA, 15 bp, Homo sapiens
agattcactgaggag

SEQ ID NO: 529326 - DNA, 15 bp, Homo sapiens
gagattcactgagga

SEQ ID NO: 529327 - DNA, 15 bp, Homo sapiens
ggagattcactgagg

SEQ ID NO: 529328 - DNA, 15 bp, Homo sapiens
aggagattcactgag

SEQ ID NO: 529329 - DNA, 15 bp, Homo sapiens
caggagattcactga

SEQ ID NO: 529330 - DNA, 15 bp, Homo sapiens
acaggagattcactg

SEQ ID NO: 529331 - DNA, 15 bp, Homo sapiens
cacaggagattcact

SEQ ID NO: 529332 - DNA, 15 bp, Homo sapiens
acacaggagattcac

SEQ ID NO: 529333 - DNA, 15 bp, Homo sapiens
aacacaggagattca

SEQ ID NO: 529334 - DNA, 15 bp, Homo sapiens
aaacacaggagattc

SEQ ID NO: 529335 - DNA, 15 bp, Homo sapiens
aaaacacaggagatt

SEQ ID NO: 529336 - DNA, 15 bp, Homo sapiens
taaaacacaggagat

SEQ ID NO: 529337 - DNA, 15 bp, Homo sapiens
ctaaaacacaggaga

SEQ ID NO: 529338 - DNA, 15 bp, Homo sapiens
gctaaaacacaggag

SEQ ID NO: 529339 - DNA, 15 bp, Homo sapiens
agctaaaacacagga

SEQ ID NO: 529340 - DNA, 15 bp, Homo sapiens
cagctaaaacacagg

SEQ ID NO: 529341 - DNA, 15 bp, Homo sapiens
ccagctaaaacacag

SEQ ID NO: 529342 - DNA, 15 bp, Homo sapiens
gccagctaaaacaca

SEQ ID NO: 529343 - DNA, 15 bp, Homo sapiens
ggccagctaaaacac

SEQ ID NO: 529344 - DNA, 15 bp, Homo sapiens
gggccagctaaaaca

SEQ ID NO: 529345 - DNA, 15 bp, Homo sapiens
ggggccagctaaaac

SEQ ID NO: 529346 - DNA, 15 bp, Homo sapiens
tggggccagctaaaa

SEQ ID NO: 529347 - DNA, 15 bp, Homo sapiens
gtggggccagctaaa

SEQ ID NO: 529348 - DNA, 15 bp, Homo sapiens
ggtggggccagctaa

SEQ ID NO: 529349 - DNA, 15 bp, Homo sapiens
gggtggggccagcta

SEQ ID NO: 529350 - DNA, 15 bp, Homo sapiens
ggggtggggccagct

SEQ ID NO: 529351 - DNA, 15 bp, Homo sapiens
tggggtggggccagc

SEQ ID NO: 529352 - DNA, 15 bp, Homo sapiens
atggggtggggccag

SEQ ID NO: 529353 - DNA, 15 bp, Homo sapiens
gatggggtggggcca

SEQ ID NO: 529354 - DNA, 15 bp, Homo sapiens
ggatggggtggggcc

SEQ ID NO: 529355 - DNA, 15 bp, Homo sapiens
aggatggggtggggc

SEQ ID NO: 529356 - DNA, 15 bp, Homo sapiens
gaggatggggtgggg

SEQ ID NO: 529357 - DNA, 15 bp, Homo sapiens
ggaggatggggtggg

SEQ ID NO: 529358 - DNA, 15 bp, Homo sapiens
cggaggatggggtgg

SEQ ID NO: 529359 - DNA, 15 bp, Homo sapiens
gcggaggatggggtg

SEQ ID NO: 529360 - DNA, 15 bp, Homo sapiens
ggcggaggatggggt

SEQ ID NO: 529361 - DNA, 15 bp, Homo sapiens
gggcggaggatgggg

SEQ ID NO: 529362 - DNA, 15 bp, Homo sapiens
agggcggaggatggg

SEQ ID NO: 529363 - DNA, 15 bp, Homo sapiens
gagggcggaggatgg

SEQ ID NO: 529364 - DNA, 15 bp, Homo sapiens
ggagggcggaggatg

SEQ ID NO: 529365 - DNA, 15 bp, Homo sapiens
aggagggcggaggat

SEQ ID NO: 529366 - DNA, 15 bp, Homo sapiens
gaggagggcggagga

SEQ ID NO: 529367 - DNA, 15 bp, Homo sapiens
agaggagggcggagg

SEQ ID NO: 529368 - DNA, 15 bp, Homo sapiens
gagaggagggcggag

SEQ ID NO: 529369 - DNA, 15 bp, Homo sapiens
tgagaggagggcgga

SEQ ID NO: 529370 - DNA, 15 bp, Homo sapiens
gtgagaggagggcgg

SEQ ID NO: 529371 - DNA, 15 bp, Homo sapiens
agtgagaggagggcg

SEQ ID NO: 529372 - DNA, 15 bp, Homo sapiens
gagtgagaggagggc

SEQ ID NO: 529373 - DNA, 15 bp, Homo sapiens
agagtgagaggaggg

SEQ ID NO: 529374 - DNA, 15 bp, Homo sapiens
cagagtgagaggagg

SEQ ID NO: 529375 - DNA, 15 bp, Homo sapiens
gcagagtgagaggag

SEQ ID NO: 529376 - DNA, 15 bp, Homo sapiens
ggcagagtgagagga

SEQ ID NO: 529377 - DNA, 15 bp, Homo sapiens
gggcagagtgagagg

SEQ ID NO: 529378 - DNA, 15 bp, Homo sapiens
tgggcagagtgagag

SEQ ID NO: 529379 - DNA, 15 bp, Homo sapiens
ttgggcagagtgaga

SEQ ID NO: 529380 - DNA, 15 bp, Homo sapiens
cttgggcagagtgag

SEQ ID NO: 529381 - DNA, 15 bp, Homo sapiens
gcttgggcagagtga

SEQ ID NO: 529382 - DNA, 15 bp, Homo sapiens
ggcttgggcagagtg

SEQ ID NO: 529383 - DNA, 15 bp, Homo sapiens
tggcttgggcagagt

SEQ ID NO: 529384 - DNA, 15 bp, Homo sapiens
ttggcttgggcagag

SEQ ID NO: 529385 - DNA, 15 bp, Homo sapiens
cttggcttgggcaga

SEQ ID NO: 529386 - DNA, 15 bp, Homo sapiens
gcttggcttgggcag

SEQ ID NO: 529387 - DNA, 15 bp, Homo sapiens
ggcttggcttgggca

SEQ ID NO: 529388 - DNA, 15 bp, Homo sapiens
aggcttggcttgggc

SEQ ID NO: 529389 - DNA, 15 bp, Homo sapiens
caggcttggcttggg

SEQ ID NO: 529390 - DNA, 15 bp, Homo sapiens
acaggcttggcttgg

SEQ ID NO: 529391 - DNA, 15 bp, Homo sapiens
aacaggcttggcttg

SEQ ID NO: 529392 - DNA, 15 bp, Homo sapiens
aaacaggcttggctt

SEQ ID NO: 529393 - DNA, 15 bp, Homo sapiens
gaaacaggcttggct

SEQ ID NO: 529394 - DNA, 15 bp, Homo sapiens
ggaaacaggcttggc

SEQ ID NO: 529395 - DNA, 15 bp, Homo sapiens
gggaaacaggcttgg

SEQ ID NO: 529396 - DNA, 15 bp, Homo sapiens
agggaaacaggcttg

SEQ ID NO: 529397 - DNA, 15 bp, Homo sapiens
gagggaaacaggctt

SEQ ID NO: 529398 - DNA, 15 bp, Homo sapiens
tgagggaaacaggct

SEQ ID NO: 529399 - DNA, 15 bp, Homo sapiens
ctgagggaaacaggc

SEQ ID NO: 529400 - DNA, 15 bp, Homo sapiens
actgagggaaacagg

SEQ ID NO: 529401 - DNA, 15 bp, Homo sapiens
aactgagggaaacag

SEQ ID NO: 529402 - DNA, 15 bp, Homo sapiens
gaactgagggaaaca

SEQ ID NO: 529403 - DNA, 15 bp, Homo sapiens
agaactgagggaaac

SEQ ID NO: 529404 - DNA, 15 bp, Homo sapiens
gagaactgagggaaa

SEQ ID NO: 529405 - DNA, 15 bp, Homo sapiens
ggagaactgagggaa

SEQ ID NO: 529406 - DNA, 15 bp, Homo sapiens
gggagaactgaggga

SEQ ID NO: 529407 - DNA, 15 bp, Homo sapiens
ggggagaactgaggg

SEQ ID NO: 529408 - DNA, 15 bp, Homo sapiens
aggggagaactgagg

SEQ ID NO: 529409 - DNA, 15 bp, Homo sapiens
gaggggagaactgag

SEQ ID NO: 529410 - DNA, 15 bp, Homo sapiens
ggaggggagaactga

SEQ ID NO: 529411 - DNA, 15 bp, Homo sapiens
aggaggggagaactg

SEQ ID NO: 529412 - DNA, 15 bp, Homo sapiens
gaggaggggagaact

SEQ ID NO: 529413 - DNA, 15 bp, Homo sapiens
ggaggaggggagaac

SEQ ID NO: 529414 - DNA, 15 bp, Homo sapiens
tggaggaggggagaa

SEQ ID NO: 529415 - DNA, 15 bp, Homo sapiens
atggaggaggggaga

SEQ ID NO: 529416 - DNA, 15 bp, Homo sapiens
catggaggaggggag

SEQ ID NO: 529417 - DNA, 15 bp, Homo sapiens
gcatggaggagggga

SEQ ID NO: 529418 - DNA, 15 bp, Homo sapiens
ggcatggaggagggg

SEQ ID NO: 529419 - DNA, 15 bp, Homo sapiens
aggcatggaggaggg

SEQ ID NO: 529420 - DNA, 15 bp, Homo sapiens
aaggcatggaggagg

SEQ ID NO: 529421 - DNA, 15 bp, Homo sapiens
gaaggcatggaggag

SEQ ID NO: 529422 - DNA, 15 bp, Homo sapiens
agaaggcatggagga

SEQ ID NO: 529423 - DNA, 15 bp, Homo sapiens
gagaaggcatggagg

SEQ ID NO: 529424 - DNA, 15 bp, Homo sapiens
tgagaaggcatggag

SEQ ID NO: 529425 - DNA, 15 bp, Homo sapiens
atgagaaggcatgga

SEQ ID NO: 529426 - DNA, 15 bp, Homo sapiens
catgagaaggcatgg

SEQ ID NO: 529427 - DNA, 15 bp, Homo sapiens
gcatgagaaggcatg

SEQ ID NO: 529428 - DNA, 15 bp, Homo sapiens
agcatgagaaggcat

SEQ ID NO: 529429 - DNA, 15 bp, Homo sapiens
aagcatgagaaggca

SEQ ID NO: 529430 - DNA, 15 bp, Homo sapiens
aaagcatgagaaggc

SEQ ID NO: 529431 - DNA, 15 bp, Homo sapiens
gaaagcatgagaagg

SEQ ID NO: 529432 - DNA, 15 bp, Homo sapiens
tgaaagcatgagaag

SEQ ID NO: 529433 - DNA, 15 bp, Homo sapiens
ctgaaagcatgagaa

SEQ ID NO: 529434 - DNA, 15 bp, Homo sapiens
gctgaaagcatgaga

SEQ ID NO: 529435 - DNA, 15 bp, Homo sapiens
ggctgaaagcatgag

SEQ ID NO: 529436 - DNA, 15 bp, Homo sapiens
aggctgaaagcatga

SEQ ID NO: 529437 - DNA, 15 bp, Homo sapiens
gaggctgaaagcatg

SEQ ID NO: 529438 - DNA, 15 bp, Homo sapiens
agaggctgaaagcat

SEQ ID NO: 529439 - DNA, 15 bp, Homo sapiens
gagaggctgaaagca

SEQ ID NO: 529440 - DNA, 15 bp, Homo sapiens
ggagaggctgaaagc

SEQ ID NO: 529441 - DNA, 15 bp, Homo sapiens
aggagaggctgaaag

SEQ ID NO: 529442 - DNA, 15 bp, Homo sapiens
gaggagaggctgaaa

SEQ ID NO: 529443 - DNA, 15 bp, Homo sapiens
agaggagaggctgaa

SEQ ID NO: 529444 - DNA, 15 bp, Homo sapiens
cagaggagaggctga

SEQ ID NO: 529445 - DNA, 15 bp, Homo sapiens
acagaggagaggctg

SEQ ID NO: 529446 - DNA, 15 bp, Homo sapiens
cacagaggagaggct

SEQ ID NO: 529447 - DNA, 15 bp, Homo sapiens
acacagaggagaggc

SEQ ID NO: 529448 - DNA, 15 bp, Homo sapiens
gacacagaggagagg

SEQ ID NO: 529449 - DNA, 15 bp, Homo sapiens
agacacagaggagag

SEQ ID NO: 529450 - DNA, 15 bp, Homo sapiens
aagacacagaggaga

SEQ ID NO: 529451 - DNA, 15 bp, Homo sapiens
gaagacacagaggag

SEQ ID NO: 529452 - DNA, 15 bp, Homo sapiens
ggaagacacagagga

SEQ ID NO: 529453 - DNA, 15 bp, Homo sapiens
aggaagacacagagg

SEQ ID NO: 529454 - DNA, 15 bp, Homo sapiens
aaggaagacacagag

SEQ ID NO: 529455 - DNA, 15 bp, Homo sapiens
gaaggaagacacaga

SEQ ID NO: 529456 - DNA, 15 bp, Homo sapiens
ggaaggaagacacag

SEQ ID NO: 529457 - DNA, 15 bp, Homo sapiens
gggaaggaagacaca

SEQ ID NO: 529458 - DNA, 15 bp, Homo sapiens
tgggaaggaagacac

SEQ ID NO: 529459 - DNA, 15 bp, Homo sapiens
ctgggaaggaagaca

SEQ ID NO: 529460 - DNA, 15 bp, Homo sapiens
gctgggaaggaagac

SEQ ID NO: 529461 - DNA, 15 bp, Homo sapiens
agctgggaaggaaga

SEQ ID NO: 529462 - DNA, 15 bp, Homo sapiens
aagctgggaaggaag

SEQ ID NO: 529463 - DNA, 15 bp, Homo sapiens
caagctgggaaggaa

SEQ ID NO: 529464 - DNA, 15 bp, Homo sapiens
ccaagctgggaagga

SEQ ID NO: 529465 - DNA, 15 bp, Homo sapiens
gccaagctgggaagg

SEQ ID NO: 529466 - DNA, 15 bp, Homo sapiens
agccaagctgggaag

SEQ ID NO: 529467 - DNA, 15 bp, Homo sapiens
gagccaagctgggaa

SEQ ID NO: 529468 - DNA, 15 bp, Homo sapiens
tgagccaagctggga

SEQ ID NO: 529469 - DNA, 15 bp, Homo sapiens
atgagccaagctggg

SEQ ID NO: 529470 - DNA, 15 bp, Homo sapiens
catgagccaagctgg

SEQ ID NO: 529471 - DNA, 15 bp, Homo sapiens
ccatgagccaagctg

SEQ ID NO: 529472 - DNA, 15 bp, Homo sapiens
tccatgagccaagct

SEQ ID NO: 529473 - DNA, 15 bp, Homo sapiens
ctccatgagccaagc

SEQ ID NO: 529474 - DNA, 15 bp, Homo sapiens
gctccatgagccaag

SEQ ID NO: 529475 - DNA, 15 bp, Homo sapiens
tgctccatgagccaa

SEQ ID NO: 529476 - DNA, 15 bp, Homo sapiens
atgctccatgagcca

SEQ ID NO: 529477 - DNA, 15 bp, Homo sapiens
gatgctccatgagcc

SEQ ID NO: 529478 - DNA, 15 bp, Homo sapiens
agatgctccatgagc

SEQ ID NO: 529479 - DNA, 15 bp, Homo sapiens
tagatgctccatgag

SEQ ID NO: 529480 - DNA, 15 bp, Homo sapiens
gtagatgctccatga

SEQ ID NO: 529481 - DNA, 15 bp, Homo sapiens
agtagatgctccatg

SEQ ID NO: 529482 - DNA, 15 bp, Homo sapiens
gagtagatgctccat

SEQ ID NO: 529483 - DNA, 15 bp, Homo sapiens
agagtagatgctcca

SEQ ID NO: 529484 - DNA, 15 bp, Homo sapiens
gagagtagatgctcc

SEQ ID NO: 529485 - DNA, 15 bp, Homo sapiens
ggagagtagatgctc

SEQ ID NO: 529486 - DNA, 15 bp, Homo sapiens
gggagagtagatgct

SEQ ID NO: 529487 - DNA, 15 bp, Homo sapiens
ggggagagtagatgc

SEQ ID NO: 529488 - DNA, 15 bp, Homo sapiens
tggggagagtagatg

SEQ ID NO: 529489 - DNA, 15 bp, Homo sapiens
ttggggagagtagat

SEQ ID NO: 529490 - DNA, 15 bp, Homo sapiens
gttggggagagtaga

SEQ ID NO: 529491 - DNA, 15 bp, Homo sapiens
agttggggagagtag

SEQ ID NO: 529492 - DNA, 15 bp, Homo sapiens
aagttggggagagta

SEQ ID NO: 529493 - DNA, 15 bp, Homo sapiens
caagttggggagagt

SEQ ID NO: 529494 - DNA, 15 bp, Homo sapiens
ccaagttggggagag

SEQ ID NO: 529495 - DNA, 15 bp, Homo sapiens
gccaagttggggaga

SEQ ID NO: 529496 - DNA, 15 bp, Homo sapiens
ggccaagttggggag

SEQ ID NO: 529497 - DNA, 15 bp, Homo sapiens
aggccaagttgggga

SEQ ID NO: 529498 - DNA, 15 bp, Homo sapiens
gaggccaagttgggg

SEQ ID NO: 529499 - DNA, 15 bp, Homo sapiens
tgaggccaagttggg

SEQ ID NO: 529500 - DNA, 15 bp, Homo sapiens
gtgaggccaagttgg

SEQ ID NO: 529501 - DNA, 15 bp, Homo sapiens
agtgaggccaagttg

SEQ ID NO: 529502 - DNA, 15 bp, Homo sapiens
tagtgaggccaagtt

SEQ ID NO: 529503 - DNA, 15 bp, Homo sapiens
atagtgaggccaagt

SEQ ID NO: 529504 - DNA, 15 bp, Homo sapiens
gatagtgaggccaag

SEQ ID NO: 529505 - DNA, 15 bp, Homo sapiens
tgatagtgaggccaa

SEQ ID NO: 529506 - DNA, 15 bp, Homo sapiens
atgatagtgaggcca

SEQ ID NO: 529507 - DNA, 15 bp, Homo sapiens
gatgatagtgaggcc

SEQ ID NO: 529508 - DNA, 15 bp, Homo sapiens
agatgatagtgaggc

SEQ ID NO: 529509 - DNA, 15 bp, Homo sapiens
cagatgatagtgagg

SEQ ID NO: 529510 - DNA, 15 bp, Homo sapiens
gcagatgatagtgag

SEQ ID NO: 529511 - DNA, 15 bp, Homo sapiens
agcagatgatagtga

SEQ ID NO: 529512 - DNA, 15 bp, Homo sapiens
aagcagatgatagtg

SEQ ID NO: 529513 - DNA, 15 bp, Homo sapiens
taagcagatgatagt

SEQ ID NO: 529514 - DNA, 15 bp, Homo sapiens
gtaagcagatgatag

SEQ ID NO: 529515 - DNA, 15 bp, Homo sapiens
ggtaagcagatgata

SEQ ID NO: 529516 - DNA, 15 bp, Homo sapiens
aggtaagcagatgat

SEQ ID NO: 529517 - DNA, 15 bp, Homo sapiens
caggtaagcagatga

SEQ ID NO: 529518 - DNA, 15 bp, Homo sapiens
acaggtaagcagatg

SEQ ID NO: 529519 - DNA, 15 bp, Homo sapiens
aacaggtaagcagat

SEQ ID NO: 529520 - DNA, 15 bp, Homo sapiens
taacaggtaagcaga

SEQ ID NO: 529521 - DNA, 15 bp, Homo sapiens
ctaacaggtaagcag

SEQ ID NO: 529522 - DNA, 15 bp, Homo sapiens
tctaacaggtaagca

SEQ ID NO: 529523 - DNA, 15 bp, Homo sapiens
ttctaacaggtaagc

SEQ ID NO: 529524 - DNA, 15 bp, Homo sapiens
attctaacaggtaag

SEQ ID NO: 529525 - DNA, 15 bp, Homo sapiens
gattctaacaggtaa

SEQ ID NO: 529526 - DNA, 15 bp, Homo sapiens
agattctaacaggta

SEQ ID NO: 529527 - DNA, 15 bp, Homo sapiens
cagattctaacaggt

SEQ ID NO: 529528 - DNA, 15 bp, Homo sapiens
acagattctaacagg

SEQ ID NO: 529529 - DNA, 15 bp, Homo sapiens
aacagattctaacag

SEQ ID NO: 529530 - DNA, 15 bp, Homo sapiens
aaacagattctaaca

SEQ ID NO: 529531 - DNA, 15 bp, Homo sapiens
aaaacagattctaac

SEQ ID NO: 529532 - DNA, 15 bp, Homo sapiens
caaaacagattctaa

SEQ ID NO: 529533 - DNA, 15 bp, Homo sapiens
acaaaacagattcta

SEQ ID NO: 529534 - DNA, 15 bp, Homo sapiens
aacaaaacagattct

SEQ ID NO: 529535 - DNA, 15 bp, Homo sapiens
aaacaaaacagattc

SEQ ID NO: 529536 - DNA, 15 bp, Homo sapiens
aaaacaaaacagatt

SEQ ID NO: 529537 - DNA, 15 bp, Homo sapiens
aaaaacaaaacagat

SEQ ID NO: 529538 - DNA, 15 bp, Homo sapiens
aaaaaacaaaacaga

SEQ ID NO: 529539 - DNA, 15 bp, Homo sapiens
aaaaaaacaaaacag

SEQ ID NO: 529540 - DNA, 15 bp, Homo sapiens
aaaaaaaacaaaaca

SEQ ID NO: 529541 - DNA, 15 bp, Homo sapiens
aaaaaaaaacaaaac

SEQ ID NO: 529542 - DNA, 15 bp, Homo sapiens
caaaaaaaaacaaaa

SEQ ID NO: 529543 - DNA, 15 bp, Homo sapiens
acaaaaaaaaacaaa

SEQ ID NO: 529544 - DNA, 15 bp, Homo sapiens
aacaaaaaaaaacaa

SEQ ID NO: 529545 - DNA, 15 bp, Homo sapiens
caacaaaaaaaaaca

SEQ ID NO: 529546 - DNA, 15 bp, Homo sapiens
acaacaaaaaaaaac

SEQ ID NO: 529547 - DNA, 15 bp, Homo sapiens
aacaacaaaaaaaaa

SEQ ID NO: 529548 - DNA, 15 bp, Homo sapiens
caacaacaaaaaaaa

SEQ ID NO: 529549 - DNA, 15 bp, Homo sapiens
acaacaacaaaaaaa

SEQ ID NO: 529550 - DNA, 15 bp, Homo sapiens
aacaacaacaaaaaa

SEQ ID NO: 529551 - DNA, 15 bp, Homo sapiens
aaacaacaacaaaaa

SEQ ID NO: 529552 - DNA, 15 bp, Homo sapiens
aaaacaacaacaaaa

SEQ ID NO: 529553 - DNA, 15 bp, Homo sapiens
aaaaacaacaacaaa

SEQ ID NO: 529554 - DNA, 15 bp, Homo sapiens
caaaaacaacaacaa

SEQ ID NO: 529555 - DNA, 15 bp, Homo sapiens
tcaaaaacaacaaca

SEQ ID NO: 529556 - DNA, 15 bp, Homo sapiens
ctcaaaaacaacaac

SEQ ID NO: 529557 - DNA, 15 bp, Homo sapiens
tctcaaaaacaacaa

SEQ ID NO: 529558 - DNA, 15 bp, Homo sapiens
gtctcaaaaacaaca

SEQ ID NO: 529559 - DNA, 15 bp, Homo sapiens
agtctcaaaaacaac

SEQ ID NO: 529560 - DNA, 15 bp, Homo sapiens
cagtctcaaaaacaa

SEQ ID NO: 529561 - DNA, 15 bp, Homo sapiens
ccagtctcaaaaaca

SEQ ID NO: 529562 - DNA, 15 bp, Homo sapiens
cccagtctcaaaaac

SEQ ID NO: 529563 - DNA, 15 bp, Homo sapiens
acccagtctcaaaaa

SEQ ID NO: 529564 - DNA, 15 bp, Homo sapiens
gacccagtctcaaaa

SEQ ID NO: 529565 - DNA, 15 bp, Homo sapiens
agacccagtctcaaa

SEQ ID NO: 529566 - DNA, 15 bp, Homo sapiens
gagacccagtctcaa

SEQ ID NO: 529567 - DNA, 15 bp, Homo sapiens
tgagacccagtctca

SEQ ID NO: 529568 - DNA, 15 bp, Homo sapiens
gtgagacccagtctc

SEQ ID NO: 529569 - DNA, 15 bp, Homo sapiens
agtgagacccagtct

SEQ ID NO: 529570 - DNA, 15 bp, Homo sapiens
gagtgagacccagtc

SEQ ID NO: 529571 - DNA, 15 bp, Homo sapiens
agagtgagacccagt

SEQ ID NO: 529572 - DNA, 15 bp, Homo sapiens
cagagtgagacccag

SEQ ID NO: 529573 - DNA, 15 bp, Homo sapiens
acagagtgagaccca

SEQ ID NO: 529574 - DNA, 15 bp, Homo sapiens
aacagagtgagaccc

SEQ ID NO: 529575 - DNA, 15 bp, Homo sapiens
caacagagtgagacc

SEQ ID NO: 529576 - DNA, 15 bp, Homo sapiens
gcaacagagtgagac

SEQ ID NO: 529577 - DNA, 15 bp, Homo sapiens
ggcaacagagtgaga

SEQ ID NO: 529578 - DNA, 15 bp, Homo sapiens
gggcaacagagtgag

SEQ ID NO: 529579 - DNA, 15 bp, Homo sapiens
tgggcaacagagtga

SEQ ID NO: 529580 - DNA, 15 bp, Homo sapiens
ctgggcaacagagtg

SEQ ID NO: 529581 - DNA, 15 bp, Homo sapiens
cctgggcaacagagt

SEQ ID NO: 529582 - DNA, 15 bp, Homo sapiens
gcctgggcaacagag

SEQ ID NO: 529583 - DNA, 15 bp, Homo sapiens
agcctgggcaacaga

SEQ ID NO: 529584 - DNA, 15 bp, Homo sapiens
cagcctgggcaacag

SEQ ID NO: 529585 - DNA, 15 bp, Homo sapiens
ccagcctgggcaaca

SEQ ID NO: 529586 - DNA, 15 bp, Homo sapiens
tccagcctgggcaac

SEQ ID NO: 529587 - DNA, 15 bp, Homo sapiens
ctccagcctgggcaa

SEQ ID NO: 529588 - DNA, 15 bp, Homo sapiens
actccagcctgggca

SEQ ID NO: 529589 - DNA, 15 bp, Homo sapiens
tgtgccactgcactc

SEQ ID NO: 529590 - DNA, 15 bp, Homo sapiens
ttgtgccactgcact

SEQ ID NO: 529591 - DNA, 15 bp, Homo sapiens
attgtgccactgcac

SEQ ID NO: 529592 - DNA, 15 bp, Homo sapiens
gattgtgccactgca

SEQ ID NO: 529593 - DNA, 15 bp, Homo sapiens
tgattgtgccactgc

SEQ ID NO: 529594 - DNA, 15 bp, Homo sapiens
gtgattgtgccactg

SEQ ID NO: 529595 - DNA, 15 bp, Homo sapiens
cgtgattgtgccact

SEQ ID NO: 529596 - DNA, 15 bp, Homo sapiens
ccgtgattgtgccac

SEQ ID NO: 529597 - DNA, 15 bp, Homo sapiens
gccgtgattgtgcca

SEQ ID NO: 529598 - DNA, 15 bp, Homo sapiens
agccgtgattgtgcc

SEQ ID NO: 529599 - DNA, 15 bp, Homo sapiens
gagccgtgattgtgc

SEQ ID NO: 529600 - DNA, 15 bp, Homo sapiens
tgagccgtgattgtg

SEQ ID NO: 529601 - DNA, 15 bp, Homo sapiens
gtgagccgtgattgt

SEQ ID NO: 529602 - DNA, 15 bp, Homo sapiens
agtgagccgtgattg

SEQ ID NO: 529603 - DNA, 15 bp, Homo sapiens
cagtgagccgtgatt

SEQ ID NO: 529604 - DNA, 15 bp, Homo sapiens
gcagtgagccgtgat

SEQ ID NO: 529605 - DNA, 15 bp, Homo sapiens
tgcagtgagccgtga

SEQ ID NO: 529606 - DNA, 15 bp, Homo sapiens
ctgcagtgagccgtg

SEQ ID NO: 529607 - DNA, 15 bp, Homo sapiens
gctgcagtgagccgt

SEQ ID NO: 529608 - DNA, 15 bp, Homo sapiens
ggctgcagtgagccg

SEQ ID NO: 529609 - DNA, 15 bp, Homo sapiens
aggctgcagtgagcc

SEQ ID NO: 529610 - DNA, 15 bp, Homo sapiens
caaggctgcagtgag

SEQ ID NO: 529611 - DNA, 15 bp, Homo sapiens
tcaaggctgcagtga

SEQ ID NO: 529612 - DNA, 15 bp, Homo sapiens
gtcaaggctgcagtg

SEQ ID NO: 529613 - DNA, 15 bp, Homo sapiens
ggtcaaggctgcagt

SEQ ID NO: 529614 - DNA, 15 bp, Homo sapiens
aggtcaaggctgcag

SEQ ID NO: 529615 - DNA, 15 bp, Homo sapiens
gaggtcaaggctgca

SEQ ID NO: 529616 - DNA, 15 bp, Homo sapiens
ggaggtcaaggctgc

SEQ ID NO: 529617 - DNA, 15 bp, Homo sapiens
aggaggtcaaggctg

SEQ ID NO: 529618 - DNA, 15 bp, Homo sapiens
caggaggtcaaggct

SEQ ID NO: 529619 - DNA, 15 bp, Homo sapiens
ccaggaggtcaaggc

SEQ ID NO: 529620 - DNA, 15 bp, Homo sapiens
cccaggaggtcaagg

SEQ ID NO: 529621 - DNA, 15 bp, Homo sapiens
acccaggaggtcaag

SEQ ID NO: 529622 - DNA, 15 bp, Homo sapiens
aacccaggaggtcaa

SEQ ID NO: 529623 - DNA, 15 bp, Homo sapiens
gaacccaggaggtca

SEQ ID NO: 529624 - DNA, 15 bp, Homo sapiens
tgaacccaggaggtc

SEQ ID NO: 529625 - DNA, 15 bp, Homo sapiens
ttgaacccaggaggt

SEQ ID NO: 529626 - DNA, 15 bp, Homo sapiens
cttgaacccaggagg

SEQ ID NO: 529627 - DNA, 15 bp, Homo sapiens
acttgaacccaggag

SEQ ID NO: 529628 - DNA, 15 bp, Homo sapiens
cacttgaacccagga

SEQ ID NO: 529629 - DNA, 15 bp, Homo sapiens
tcacttgaacccagg

SEQ ID NO: 529630 - DNA, 15 bp, Homo sapiens
atcacttgaacccag

SEQ ID NO: 529631 - DNA, 15 bp, Homo sapiens
gatcacttgaaccca

SEQ ID NO: 529632 - DNA, 15 bp, Homo sapiens
ggatcacttgaaccc

SEQ ID NO: 529633 - DNA, 15 bp, Homo sapiens
aggatcacttgaacc

SEQ ID NO: 529634 - DNA, 15 bp, Homo sapiens
gaggatcacttgaac

SEQ ID NO: 529635 - DNA, 15 bp, Homo sapiens
ggaggatcacttgaa

SEQ ID NO: 529636 - DNA, 15 bp, Homo sapiens
gaggaggatcacttg

SEQ ID NO: 529637 - DNA, 15 bp, Homo sapiens
ggaggaggatcactt

SEQ ID NO: 529638 - DNA, 15 bp, Homo sapiens
cggaggaggatcact

SEQ ID NO: 529639 - DNA, 15 bp, Homo sapiens
gcggaggaggatcac

SEQ ID NO: 529640 - DNA, 15 bp, Homo sapiens
ggcggaggaggatca

SEQ ID NO: 529641 - DNA, 15 bp, Homo sapiens
aggcggaggaggatc

SEQ ID NO: 529642 - DNA, 15 bp, Homo sapiens
gaggcggaggaggat

SEQ ID NO: 529643 - DNA, 15 bp, Homo sapiens
tgaggcggaggagga

SEQ ID NO: 529644 - DNA, 15 bp, Homo sapiens
ctgaggcggaggagg

SEQ ID NO: 529645 - DNA, 15 bp, Homo sapiens
gctgaggcggaggag

SEQ ID NO: 529646 - DNA, 15 bp, Homo sapiens
ggctgaggcggagga

SEQ ID NO: 529647 - DNA, 15 bp, Homo sapiens
aggctgaggcggagg

SEQ ID NO: 529648 - DNA, 15 bp, Homo sapiens
gaggctgaggcggag

SEQ ID NO: 529649 - DNA, 15 bp, Homo sapiens
ggaggctgaggcgga

SEQ ID NO: 529650 - DNA, 15 bp, Homo sapiens
aggaggctgaggcgg

SEQ ID NO: 529651 - DNA, 15 bp, Homo sapiens
caggaggctgaggcg

SEQ ID NO: 529652 - DNA, 15 bp, Homo sapiens
ttgtagtcccagcta

SEQ ID NO: 529653 - DNA, 15 bp, Homo sapiens
cttgtagtcccagct

SEQ ID NO: 529654 - DNA, 15 bp, Homo sapiens
acttgtagtcccagc

SEQ ID NO: 529655 - DNA, 15 bp, Homo sapiens
cacttgtagtcccag

SEQ ID NO: 529656 - DNA, 15 bp, Homo sapiens
acacttgtagtccca

SEQ ID NO: 529657 - DNA, 15 bp, Homo sapiens
cacacttgtagtccc

SEQ ID NO: 529658 - DNA, 15 bp, Homo sapiens
gcacacttgtagtcc

SEQ ID NO: 529659 - DNA, 15 bp, Homo sapiens
tgcacacttgtagtc

SEQ ID NO: 529660 - DNA, 15 bp, Homo sapiens
atgcacacttgtagt

SEQ ID NO: 529661 - DNA, 15 bp, Homo sapiens
gatgcacacttgtag

SEQ ID NO: 529662 - DNA, 15 bp, Homo sapiens
tgatgcacacttgta

SEQ ID NO: 529663 - DNA, 15 bp, Homo sapiens
gtgatgcacacttgt

SEQ ID NO: 529664 - DNA, 15 bp, Homo sapiens
ggtgatgcacacttg

SEQ ID NO: 529665 - DNA, 15 bp, Homo sapiens
tggtgatgcacactt

SEQ ID NO: 529666 - DNA, 15 bp, Homo sapiens
gtggtgatgcacact

SEQ ID NO: 529667 - DNA, 15 bp, Homo sapiens
tgtggtgatgcacac

SEQ ID NO: 529668 - DNA, 15 bp, Homo sapiens
gtgtggtgatgcaca

SEQ ID NO: 529669 - DNA, 15 bp, Homo sapiens
ggtgtggtgatgcac

SEQ ID NO: 529670 - DNA, 15 bp, Homo sapiens
gggtgtggtgatgca

SEQ ID NO: 529671 - DNA, 15 bp, Homo sapiens
tgggtgtggtgatgc

SEQ ID NO: 529672 - DNA, 15 bp, Homo sapiens
gtgggtgtggtgatg

SEQ ID NO: 529673 - DNA, 15 bp, Homo sapiens
ggtgggtgtggtgat

SEQ ID NO: 529674 - DNA, 15 bp, Homo sapiens
aggtgggtgtggtga

SEQ ID NO: 529675 - DNA, 15 bp, Homo sapiens
taggtgggtgtggtg

SEQ ID NO: 529676 - DNA, 15 bp, Homo sapiens
ataggtgggtgtggt

SEQ ID NO: 529677 - DNA, 15 bp, Homo sapiens
aataggtgggtgtgg

SEQ ID NO: 529678 - DNA, 15 bp, Homo sapiens
aaataggtgggtgtg

SEQ ID NO: 529679 - DNA, 15 bp, Homo sapiens
aaaataggtgggtgt

SEQ ID NO: 529680 - DNA, 15 bp, Homo sapiens
aaaaataggtgggtg

SEQ ID NO: 529681 - DNA, 15 bp, Homo sapiens
taaaaataggtgggt

SEQ ID NO: 529682 - DNA, 15 bp, Homo sapiens
ttaaaaataggtggg

SEQ ID NO: 529683 - DNA, 15 bp, Homo sapiens
tttaaaaataggtgg

SEQ ID NO: 529684 - DNA, 15 bp, Homo sapiens
atttaaaaataggtg

SEQ ID NO: 529685 - DNA, 15 bp, Homo sapiens
aatttaaaaataggt

SEQ ID NO: 529686 - DNA, 15 bp, Homo sapiens
aaatttaaaaatagg

SEQ ID NO: 529687 - DNA, 15 bp, Homo sapiens
aaaatttaaaaatag

SEQ ID NO: 529688 - DNA, 15 bp, Homo sapiens
aaaaatttaaaaata

SEQ ID NO: 529689 - DNA, 15 bp, Homo sapiens
aaaaaatttaaaaat

SEQ ID NO: 529690 - DNA, 15 bp, Homo sapiens
caaaaaatttaaaaa

SEQ ID NO: 529691 - DNA, 15 bp, Homo sapiens
acaaaaaatttaaaa

SEQ ID NO: 529692 - DNA, 15 bp, Homo sapiens
tacaaaaaatttaaa

SEQ ID NO: 529693 - DNA, 15 bp, Homo sapiens
ctacaaaaaatttaa

SEQ ID NO: 529694 - DNA, 15 bp, Homo sapiens
tctacaaaaaattta

SEQ ID NO: 529695 - DNA, 15 bp, Homo sapiens
ctctacaaaaaattt

SEQ ID NO: 529696 - DNA, 15 bp, Homo sapiens
tctctacaaaaaatt

SEQ ID NO: 529697 - DNA, 15 bp, Homo sapiens
gtctctacaaaaaat

SEQ ID NO: 529698 - DNA, 15 bp, Homo sapiens
agtctctacaaaaaa

SEQ ID NO: 529699 - DNA, 15 bp, Homo sapiens
cagtctctacaaaaa

SEQ ID NO: 529700 - DNA, 15 bp, Homo sapiens
ccagtctctacaaaa

SEQ ID NO: 529701 - DNA, 15 bp, Homo sapiens
cccagtctctacaaa

SEQ ID NO: 529702 - DNA, 15 bp, Homo sapiens
acccagtctctacaa

SEQ ID NO: 529703 - DNA, 15 bp, Homo sapiens
gacccagtctctaca

SEQ ID NO: 529704 - DNA, 15 bp, Homo sapiens
agacccagtctctac

SEQ ID NO: 529705 - DNA, 15 bp, Homo sapiens
gagacccagtctcta

SEQ ID NO: 529706 - DNA, 15 bp, Homo sapiens
ggagacccagtctct

SEQ ID NO: 529707 - DNA, 15 bp, Homo sapiens
gggagacccagtctc

SEQ ID NO: 529708 - DNA, 15 bp, Homo sapiens
agggagacccagtct

SEQ ID NO: 529709 - DNA, 15 bp, Homo sapiens
cagggagacccagtc

SEQ ID NO: 529710 - DNA, 15 bp, Homo sapiens
acagggagacccagt

SEQ ID NO: 529711 - DNA, 15 bp, Homo sapiens
cacagggagacccag

SEQ ID NO: 529712 - DNA, 15 bp, Homo sapiens
gcacagggagaccca

SEQ ID NO: 529713 - DNA, 15 bp, Homo sapiens
ggcacagggagaccc

SEQ ID NO: 529714 - DNA, 15 bp, Homo sapiens
cggcacagggagacc

SEQ ID NO: 529715 - DNA, 15 bp, Homo sapiens
gcggcacagggagac

SEQ ID NO: 529716 - DNA, 15 bp, Homo sapiens
ggcggcacagggaga

SEQ ID NO: 529717 - DNA, 15 bp, Homo sapiens
gggcggcacagggag

SEQ ID NO: 529718 - DNA, 15 bp, Homo sapiens
tgggcggcacaggga

SEQ ID NO: 529719 - DNA, 15 bp, Homo sapiens
ctgggcggcacaggg

SEQ ID NO: 529720 - DNA, 15 bp, Homo sapiens
cctgggcggcacagg

SEQ ID NO: 529721 - DNA, 15 bp, Homo sapiens
gcctgggcggcacag

SEQ ID NO: 529722 - DNA, 15 bp, Homo sapiens
agcctgggcggcaca

SEQ ID NO: 529723 - DNA, 15 bp, Homo sapiens
cagcctgggcggcac

SEQ ID NO: 529724 - DNA, 15 bp, Homo sapiens
ccagcctgggcggca

SEQ ID NO: 529725 - DNA, 15 bp, Homo sapiens
accagcctgggcggc

SEQ ID NO: 529726 - DNA, 15 bp, Homo sapiens
gaccagcctgggcgg

SEQ ID NO: 529727 - DNA, 15 bp, Homo sapiens
agaccagcctgggcg

SEQ ID NO: 529728 - DNA, 15 bp, Homo sapiens
gagaccagcctgggc

SEQ ID NO: 529729 - DNA, 15 bp, Homo sapiens
cgagaccagcctggg

SEQ ID NO: 529730 - DNA, 15 bp, Homo sapiens
tcgagaccagcctgg

SEQ ID NO: 529731 - DNA, 15 bp, Homo sapiens
ttcgagaccagcctg

SEQ ID NO: 529732 - DNA, 15 bp, Homo sapiens
gttcgagaccagcct

SEQ ID NO: 529733 - DNA, 15 bp, Homo sapiens
agttcgagaccagcc

SEQ ID NO: 529734 - DNA, 15 bp, Homo sapiens
gagttcgagaccagc

SEQ ID NO: 529735 - DNA, 15 bp, Homo sapiens
ggagttcgagaccag

SEQ ID NO: 529736 - DNA, 15 bp, Homo sapiens
aggagttcgagacca

SEQ ID NO: 529737 - DNA, 15 bp, Homo sapiens
caggagttcgagacc

SEQ ID NO: 529738 - DNA, 15 bp, Homo sapiens
ccaggagttcgagac

SEQ ID NO: 529739 - DNA, 15 bp, Homo sapiens
tccaggagttcgaga

SEQ ID NO: 529740 - DNA, 15 bp, Homo sapiens
gtccaggagttcgag

SEQ ID NO: 529741 - DNA, 15 bp, Homo sapiens
agtccaggagttcga

SEQ ID NO: 529742 - DNA, 15 bp, Homo sapiens
gagtccaggagttcg

SEQ ID NO: 529743 - DNA, 15 bp, Homo sapiens
tgagtccaggagttc

SEQ ID NO: 529744 - DNA, 15 bp, Homo sapiens
ttgagtccaggagtt

SEQ ID NO: 529745 - DNA, 15 bp, Homo sapiens
cttgagtccaggagt

SEQ ID NO: 529746 - DNA, 15 bp, Homo sapiens
acttgagtccaggag

SEQ ID NO: 529747 - DNA, 15 bp, Homo sapiens
cacttgagtccagga

SEQ ID NO: 529748 - DNA, 15 bp, Homo sapiens
tcacttgagtccagg

SEQ ID NO: 529749 - DNA, 15 bp, Homo sapiens
gtcacttgagtccag

SEQ ID NO: 529750 - DNA, 15 bp, Homo sapiens
ggtcacttgagtcca

SEQ ID NO: 529751 - DNA, 15 bp, Homo sapiens
gggtcacttgagtcc

SEQ ID NO: 529752 - DNA, 15 bp, Homo sapiens
agggtcacttgagtc

SEQ ID NO: 529753 - DNA, 15 bp, Homo sapiens
gagggtcacttgagt

SEQ ID NO: 529754 - DNA, 15 bp, Homo sapiens
ggagggtcacttgag

SEQ ID NO: 529755 - DNA, 15 bp, Homo sapiens
aggagggtcacttga

SEQ ID NO: 529756 - DNA, 15 bp, Homo sapiens
caggagggtcacttg

SEQ ID NO: 529757 - DNA, 15 bp, Homo sapiens
gcaggagggtcactt

SEQ ID NO: 529758 - DNA, 15 bp, Homo sapiens
ggcaggagggtcact

SEQ ID NO: 529759 - DNA, 15 bp, Homo sapiens
aggcaggagggtcac

SEQ ID NO: 529760 - DNA, 15 bp, Homo sapiens
aaggcaggagggtca

SEQ ID NO: 529761 - DNA, 15 bp, Homo sapiens
caaggcaggagggtc

SEQ ID NO: 529762 - DNA, 15 bp, Homo sapiens
ccaaggcaggagggt

SEQ ID NO: 529763 - DNA, 15 bp, Homo sapiens
gccaaggcaggaggg

SEQ ID NO: 529764 - DNA, 15 bp, Homo sapiens
ggccaaggcaggagg

SEQ ID NO: 529765 - DNA, 15 bp, Homo sapiens
aggccaaggcaggag

SEQ ID NO: 529766 - DNA, 15 bp, Homo sapiens
gaggccaaggcagga

SEQ ID NO: 529767 - DNA, 15 bp, Homo sapiens
ggaggccaaggcagg

SEQ ID NO: 529768 - DNA, 15 bp, Homo sapiens
gggaggccaaggcag

SEQ ID NO: 529769 - DNA, 15 bp, Homo sapiens
tgggaggccaaggca

SEQ ID NO: 529770 - DNA, 15 bp, Homo sapiens
aaatcccagcacttt

SEQ ID NO: 529771 - DNA, 15 bp, Homo sapiens
taaatcccagcactt

SEQ ID NO: 529772 - DNA, 15 bp, Homo sapiens
gtaaatcccagcact

SEQ ID NO: 529773 - DNA, 15 bp, Homo sapiens
tgtaaatcccagcac

SEQ ID NO: 529774 - DNA, 15 bp, Homo sapiens
ctgtaaatcccagca

SEQ ID NO: 529775 - DNA, 15 bp, Homo sapiens
cctgtaaatcccagc

SEQ ID NO: 529776 - DNA, 15 bp, Homo sapiens
gcctgtaaatcccag

SEQ ID NO: 529777 - DNA, 15 bp, Homo sapiens
tgcctgtaaatccca

SEQ ID NO: 529778 - DNA, 15 bp, Homo sapiens
atgcctgtaaatccc

SEQ ID NO: 529779 - DNA, 15 bp, Homo sapiens
catgcctgtaaatcc

SEQ ID NO: 529780 - DNA, 15 bp, Homo sapiens
tcatgcctgtaaatc

SEQ ID NO: 529781 - DNA, 15 bp, Homo sapiens
ctcatgcctgtaaat

SEQ ID NO: 529782 - DNA, 15 bp, Homo sapiens
gctcatgcctgtaaa

SEQ ID NO: 529783 - DNA, 15 bp, Homo sapiens
acggtggctcatgcc

SEQ ID NO: 529784 - DNA, 15 bp, Homo sapiens
cacggtggctcatgc

SEQ ID NO: 529785 - DNA, 15 bp, Homo sapiens
gcacggtggctcatg

SEQ ID NO: 529786 - DNA, 15 bp, Homo sapiens
ggcacggtggctcat

SEQ ID NO: 529787 - DNA, 15 bp, Homo sapiens
aggcacggtggctca

SEQ ID NO: 529788 - DNA, 15 bp, Homo sapiens
caggcacggtggctc

SEQ ID NO: 529789 - DNA, 15 bp, Homo sapiens
ccaggcacggtggct

SEQ ID NO: 529790 - DNA, 15 bp, Homo sapiens
gccaggcacggtggc

SEQ ID NO: 529791 - DNA, 15 bp, Homo sapiens
ggccaggcacggtgg

SEQ ID NO: 529792 - DNA, 15 bp, Homo sapiens
aggccaggcacggtg

SEQ ID NO: 529793 - DNA, 15 bp, Homo sapiens
caggccaggcacggt

SEQ ID NO: 529794 - DNA, 15 bp, Homo sapiens
ccaggccaggcacgg

SEQ ID NO: 529795 - DNA, 15 bp, Homo sapiens
tccaggccaggcacg

SEQ ID NO: 529796 - DNA, 15 bp, Homo sapiens
ttccaggccaggcac

SEQ ID NO: 529797 - DNA, 15 bp, Homo sapiens
attccaggccaggca

SEQ ID NO: 529798 - DNA, 15 bp, Homo sapiens
gattccaggccaggc

SEQ ID NO: 529799 - DNA, 15 bp, Homo sapiens
tgattccaggccagg

SEQ ID NO: 529800 - DNA, 15 bp, Homo sapiens
ttgattccaggccag

SEQ ID NO: 529801 - DNA, 15 bp, Homo sapiens
attgattccaggcca

SEQ ID NO: 529802 - DNA, 15 bp, Homo sapiens
aattgattccaggcc

SEQ ID NO: 529803 - DNA, 15 bp, Homo sapiens
aaattgattccaggc

SEQ ID NO: 529804 - DNA, 15 bp, Homo sapiens
aaaattgattccagg

SEQ ID NO: 529805 - DNA, 15 bp, Homo sapiens
aaaaattgattccag

SEQ ID NO: 529806 - DNA, 15 bp, Homo sapiens
gaaaaattgattcca

SEQ ID NO: 529807 - DNA, 15 bp, Homo sapiens
tgaaaaattgattcc

SEQ ID NO: 529808 - DNA, 15 bp, Homo sapiens
atgaaaaattgattc

SEQ ID NO: 529809 - DNA, 15 bp, Homo sapiens
gatgaaaaattgatt

SEQ ID NO: 529810 - DNA, 15 bp, Homo sapiens
tgatgaaaaattgat

SEQ ID NO: 529811 - DNA, 15 bp, Homo sapiens
gtgatgaaaaattga

SEQ ID NO: 529812 - DNA, 15 bp, Homo sapiens
agtgatgaaaaattg

SEQ ID NO: 529813 - DNA, 15 bp, Homo sapiens
cagtgatgaaaaatt

SEQ ID NO: 529814 - DNA, 15 bp, Homo sapiens
acagtgatgaaaaat

SEQ ID NO: 529815 - DNA, 15 bp, Homo sapiens
gacagtgatgaaaaa

SEQ ID NO: 529816 - DNA, 15 bp, Homo sapiens
agacagtgatgaaaa

SEQ ID NO: 529817 - DNA, 15 bp, Homo sapiens
gagacagtgatgaaa

SEQ ID NO: 529818 - DNA, 15 bp, Homo sapiens
tgagacagtgatgaa

SEQ ID NO: 529819 - DNA, 15 bp, Homo sapiens
ttgagacagtgatga

SEQ ID NO: 529820 - DNA, 15 bp, Homo sapiens
tttgagacagtgatg

SEQ ID NO: 529821 - DNA, 15 bp, Homo sapiens
ttttgagacagtgat

SEQ ID NO: 529822 - DNA, 15 bp, Homo sapiens
cttttgagacagtga

SEQ ID NO: 529823 - DNA, 15 bp, Homo sapiens
acttttgagacagtg

SEQ ID NO: 529824 - DNA, 15 bp, Homo sapiens
tacttttgagacagt

SEQ ID NO: 529825 - DNA, 15 bp, Homo sapiens
atacttttgagacag

SEQ ID NO: 529826 - DNA, 15 bp, Homo sapiens
gatacttttgagaca

SEQ ID NO: 529827 - DNA, 15 bp, Homo sapiens
agatacttttgagac

SEQ ID NO: 529828 - DNA, 15 bp, Homo sapiens
aagatacttttgaga

SEQ ID NO: 529829 - DNA, 15 bp, Homo sapiens
gaagatacttttgag

SEQ ID NO: 529830 - DNA, 15 bp, Homo sapiens
ggaagatacttttga

SEQ ID NO: 529831 - DNA, 15 bp, Homo sapiens
aggaagatacttttg

SEQ ID NO: 529832 - DNA, 15 bp, Homo sapiens
caggaagatactttt

SEQ ID NO: 529833 - DNA, 15 bp, Homo sapiens
ccaggaagatacttt

SEQ ID NO: 529834 - DNA, 15 bp, Homo sapiens
tccaggaagatactt

SEQ ID NO: 529835 - DNA, 15 bp, Homo sapiens
ctccaggaagatact

SEQ ID NO: 529836 - DNA, 15 bp, Homo sapiens
cctccaggaagatac

SEQ ID NO: 529837 - DNA, 15 bp, Homo sapiens
gcctccaggaagata

SEQ ID NO: 529838 - DNA, 15 bp, Homo sapiens
agcctccaggaagat

SEQ ID NO: 529839 - DNA, 15 bp, Homo sapiens
tagcctccaggaaga

SEQ ID NO: 529840 - DNA, 15 bp, Homo sapiens
ctagcctccaggaag

SEQ ID NO: 529841 - DNA, 15 bp, Homo sapiens
cctagcctccaggaa

SEQ ID NO: 529842 - DNA, 15 bp, Homo sapiens
gcctagcctccagga

SEQ ID NO: 529843 - DNA, 15 bp, Homo sapiens
cgcctagcctccagg

SEQ ID NO: 529844 - DNA, 15 bp, Homo sapiens
gcgcctagcctccag

SEQ ID NO: 529845 - DNA, 15 bp, Homo sapiens
tgcgcctagcctcca

SEQ ID NO: 529846 - DNA, 15 bp, Homo sapiens
ctgcgcctagcctcc

SEQ ID NO: 529847 - DNA, 15 bp, Homo sapiens
actgcgcctagcctc

SEQ ID NO: 529848 - DNA, 15 bp, Homo sapiens
cactgcgcctagcct

SEQ ID NO: 529849 - DNA, 15 bp, Homo sapiens
ccactgcgcctagcc

SEQ ID NO: 529850 - DNA, 15 bp, Homo sapiens
gccactgcgcctagc

SEQ ID NO: 529851 - DNA, 15 bp, Homo sapiens
agccactgcgcctag

SEQ ID NO: 529852 - DNA, 15 bp, Homo sapiens
cagccactgcgccta

SEQ ID NO: 529853 - DNA, 15 bp, Homo sapiens
tcagccactgcgcct

SEQ ID NO: 529854 - DNA, 15 bp, Homo sapiens
gtcagccactgcgcc

SEQ ID NO: 529855 - DNA, 15 bp, Homo sapiens
tgtcagccactgcgc

SEQ ID NO: 529856 - DNA, 15 bp, Homo sapiens
gtgtcagccactgcg

SEQ ID NO: 529857 - DNA, 15 bp, Homo sapiens
ggtgtcagccactgc

SEQ ID NO: 529858 - DNA, 15 bp, Homo sapiens
aggtgtcagccactg

SEQ ID NO: 529859 - DNA, 15 bp, Homo sapiens
caggtgtcagccact

SEQ ID NO: 529860 - DNA, 15 bp, Homo sapiens
acaggtgtcagccac

SEQ ID NO: 529861 - DNA, 15 bp, Homo sapiens
tacaggtgtcagcca

SEQ ID NO: 529862 - DNA, 15 bp, Homo sapiens
ttacaggtgtcagcc

SEQ ID NO: 529863 - DNA, 15 bp, Homo sapiens
attacaggtgtcagc

SEQ ID NO: 529864 - DNA, 15 bp, Homo sapiens
aattacaggtgtcag

SEQ ID NO: 529865 - DNA, 15 bp, Homo sapiens
gaattacaggtgtca

SEQ ID NO: 529866 - DNA, 15 bp, Homo sapiens
ggaattacaggtgtc

SEQ ID NO: 529867 - DNA, 15 bp, Homo sapiens
tggaattacaggtgt

SEQ ID NO: 529868 - DNA, 15 bp, Homo sapiens
ctggaattacaggtg

SEQ ID NO: 529869 - DNA, 15 bp, Homo sapiens
gctggaattacaggt

SEQ ID NO: 529870 - DNA, 15 bp, Homo sapiens
tgctggaattacagg

SEQ ID NO: 529871 - DNA, 15 bp, Homo sapiens
gtgctggaattacag

SEQ ID NO: 529872 - DNA, 15 bp, Homo sapiens
agtgctggaattaca

SEQ ID NO: 529873 - DNA, 15 bp, Homo sapiens
aagtgctggaattac

SEQ ID NO: 529874 - DNA, 15 bp, Homo sapiens
aaagtgctggaatta

SEQ ID NO: 529875 - DNA, 15 bp, Homo sapiens
caaagtgctggaatt

SEQ ID NO: 529876 - DNA, 15 bp, Homo sapiens
ccaaagtgctggaat

SEQ ID NO: 529877 - DNA, 15 bp, Homo sapiens
cccaaagtgctggaa

SEQ ID NO: 529878 - DNA, 15 bp, Homo sapiens
tcccaaagtgctgga

SEQ ID NO: 529879 - DNA, 15 bp, Homo sapiens
acccgcctcggcctc

SEQ ID NO: 529880 - DNA, 15 bp, Homo sapiens
cacccgcctcggcct

SEQ ID NO: 529881 - DNA, 15 bp, Homo sapiens
ccacccgcctcggcc

SEQ ID NO: 529882 - DNA, 15 bp, Homo sapiens
tccacccgcctcggc

SEQ ID NO: 529883 - DNA, 15 bp, Homo sapiens
gtcaggtgatccacc

SEQ ID NO: 529884 - DNA, 15 bp, Homo sapiens
cgtcaggtgatccac

SEQ ID NO: 529885 - DNA, 15 bp, Homo sapiens
acgtcaggtgatcca

SEQ ID NO: 529886 - DNA, 15 bp, Homo sapiens
gacgtcaggtgatcc

SEQ ID NO: 529887 - DNA, 15 bp, Homo sapiens
tgacgtcaggtgatc

SEQ ID NO: 529888 - DNA, 15 bp, Homo sapiens
ctgacgtcaggtgat

SEQ ID NO: 529889 - DNA, 15 bp, Homo sapiens
tctgacgtcaggtga

SEQ ID NO: 529890 - DNA, 15 bp, Homo sapiens
ttctgacgtcaggtg

SEQ ID NO: 529891 - DNA, 15 bp, Homo sapiens
cttctgacgtcaggt

SEQ ID NO: 529892 - DNA, 15 bp, Homo sapiens
acttctgacgtcagg

SEQ ID NO: 529893 - DNA, 15 bp, Homo sapiens
aacttctgacgtcag

SEQ ID NO: 529894 - DNA, 15 bp, Homo sapiens
aaacttctgacgtca

SEQ ID NO: 529895 - DNA, 15 bp, Homo sapiens
caaacttctgacgtc

SEQ ID NO: 529896 - DNA, 15 bp, Homo sapiens
tcaaacttctgacgt

SEQ ID NO: 529897 - DNA, 15 bp, Homo sapiens
ctcaaacttctgacg

SEQ ID NO: 529898 - DNA, 15 bp, Homo sapiens
tctcaaacttctgac

SEQ ID NO: 529899 - DNA, 15 bp, Homo sapiens
atctcaaacttctga

SEQ ID NO: 529900 - DNA, 15 bp, Homo sapiens
gatctcaaacttctg

SEQ ID NO: 529901 - DNA, 15 bp, Homo sapiens
tgatctcaaacttct

SEQ ID NO: 529902 - DNA, 15 bp, Homo sapiens
ttgatctcaaacttc

SEQ ID NO: 529903 - DNA, 15 bp, Homo sapiens
tttgatctcaaactt

SEQ ID NO: 529904 - DNA, 15 bp, Homo sapiens
ttttgatctcaaact

SEQ ID NO: 529905 - DNA, 15 bp, Homo sapiens
cttttgatctcaaac

SEQ ID NO: 529906 - DNA, 15 bp, Homo sapiens
ccttttgatctcaaa

SEQ ID NO: 529907 - DNA, 15 bp, Homo sapiens
accttttgatctcaa

SEQ ID NO: 529908 - DNA, 15 bp, Homo sapiens
taccttttgatctca

SEQ ID NO: 529909 - DNA, 15 bp, Homo sapiens
ataccttttgatctc

SEQ ID NO: 529910 - DNA, 15 bp, Homo sapiens
gataccttttgatct

SEQ ID NO: 529911 - DNA, 15 bp, Homo sapiens
agataccttttgatc

SEQ ID NO: 529912 - DNA, 15 bp, Homo sapiens
aagataccttttgat

SEQ ID NO: 529913 - DNA, 15 bp, Homo sapiens
gaagataccttttga

SEQ ID NO: 529914 - DNA, 15 bp, Homo sapiens
ggaagataccttttg

SEQ ID NO: 529915 - DNA, 15 bp, Homo sapiens
aggaagatacctttt

SEQ ID NO: 529916 - DNA, 15 bp, Homo sapiens
caggaagataccttt

SEQ ID NO: 529917 - DNA, 15 bp, Homo sapiens
ccaggaagatacctt

SEQ ID NO: 529918 - DNA, 15 bp, Homo sapiens
tccaggaagatacct

SEQ ID NO: 529919 - DNA, 15 bp, Homo sapiens
atccaggaagatacc

SEQ ID NO: 529920 - DNA, 15 bp, Homo sapiens
catccaggaagatac

SEQ ID NO: 529921 - DNA, 15 bp, Homo sapiens
gcatccaggaagata

SEQ ID NO: 529922 - DNA, 15 bp, Homo sapiens
ggcatccaggaagat

SEQ ID NO: 529923 - DNA, 15 bp, Homo sapiens
aggcatccaggaaga

SEQ ID NO: 529924 - DNA, 15 bp, Homo sapiens
aaggcatccaggaag

SEQ ID NO: 529925 - DNA, 15 bp, Homo sapiens
gaaggcatccaggaa

SEQ ID NO: 529926 - DNA, 15 bp, Homo sapiens
tgaaggcatccagga

SEQ ID NO: 529927 - DNA, 15 bp, Homo sapiens
ttgaaggcatccagg

SEQ ID NO: 529928 - DNA, 15 bp, Homo sapiens
cttgaaggcatccag

SEQ ID NO: 529929 - DNA, 15 bp, Homo sapiens
ccttgaaggcatcca

SEQ ID NO: 529930 - DNA, 15 bp, Homo sapiens
accttgaaggcatcc

SEQ ID NO: 529931 - DNA, 15 bp, Homo sapiens
taccttgaaggcatc

SEQ ID NO: 529932 - DNA, 15 bp, Homo sapiens
gtaccttgaaggcat

SEQ ID NO: 529933 - DNA, 15 bp, Homo sapiens
ggtaccttgaaggca

SEQ ID NO: 529934 - DNA, 15 bp, Homo sapiens
aggtaccttgaaggc

SEQ ID NO: 529935 - DNA, 15 bp, Homo sapiens
gaggtaccttgaagg

SEQ ID NO: 529936 - DNA, 15 bp, Homo sapiens
agaggtaccttgaag

SEQ ID NO: 529937 - DNA, 15 bp, Homo sapiens
gagaggtaccttgaa

SEQ ID NO: 529938 - DNA, 15 bp, Homo sapiens
ggagaggtaccttga

SEQ ID NO: 529939 - DNA, 15 bp, Homo sapiens
tggagaggtaccttg

SEQ ID NO: 529940 - DNA, 15 bp, Homo sapiens
gtggagaggtacctt

SEQ ID NO: 529941 - DNA, 15 bp, Homo sapiens
agtggagaggtacct

SEQ ID NO: 529942 - DNA, 15 bp, Homo sapiens
cagtggagaggtacc

SEQ ID NO: 529943 - DNA, 15 bp, Homo sapiens
tcagtggagaggtac

SEQ ID NO: 529944 - DNA, 15 bp, Homo sapiens
ttcagtggagaggta

SEQ ID NO: 529945 - DNA, 15 bp, Homo sapiens
attcagtggagaggt

SEQ ID NO: 529946 - DNA, 15 bp, Homo sapiens
aattcagtggagagg

SEQ ID NO: 529947 - DNA, 15 bp, Homo sapiens
gaattcagtggagag

SEQ ID NO: 529948 - DNA, 15 bp, Homo sapiens
agaattcagtggaga

SEQ ID NO: 529949 - DNA, 15 bp, Homo sapiens
gagaattcagtggag

SEQ ID NO: 529950 - DNA, 15 bp, Homo sapiens
tgagaattcagtgga

SEQ ID NO: 529951 - DNA, 15 bp, Homo sapiens
atgagaattcagtgg

SEQ ID NO: 529952 - DNA, 15 bp, Homo sapiens
tatgagaattcagtg

SEQ ID NO: 529953 - DNA, 15 bp, Homo sapiens
ttatgagaattcagt

SEQ ID NO: 529954 - DNA, 15 bp, Homo sapiens
gttatgagaattcag

SEQ ID NO: 529955 - DNA, 15 bp, Homo sapiens
tgttatgagaattca

SEQ ID NO: 529956 - DNA, 15 bp, Homo sapiens
gtgttatgagaattc

SEQ ID NO: 529957 - DNA, 15 bp, Homo sapiens
ggtgttatgagaatt

SEQ ID NO: 529958 - DNA, 15 bp, Homo sapiens
aggtgttatgagaat

SEQ ID NO: 529959 - DNA, 15 bp, Homo sapiens
gaggtgttatgagaa

SEQ ID NO: 529960 - DNA, 15 bp, Homo sapiens
agaggtgttatgaga

SEQ ID NO: 529961 - DNA, 15 bp, Homo sapiens
tagaggtgttatgag

SEQ ID NO: 529962 - DNA, 15 bp, Homo sapiens
atagaggtgttatga

SEQ ID NO: 529963 - DNA, 15 bp, Homo sapiens
aatagaggtgttatg

SEQ ID NO: 529964 - DNA, 15 bp, Homo sapiens
gaatagaggtgttat

SEQ ID NO: 529965 - DNA, 15 bp, Homo sapiens
ggaatagaggtgtta

SEQ ID NO: 529966 - DNA, 15 bp, Homo sapiens
gggaatagaggtgtt

SEQ ID NO: 529967 - DNA, 15 bp, Homo sapiens
ggggaatagaggtgt

SEQ ID NO: 529968 - DNA, 15 bp, Homo sapiens
gggggaatagaggtg

SEQ ID NO: 529969 - DNA, 15 bp, Homo sapiens
tgggggaatagaggt

SEQ ID NO: 529970 - DNA, 15 bp, Homo sapiens
atgggggaatagagg

SEQ ID NO: 529971 - DNA, 15 bp, Homo sapiens
catgggggaatagag

SEQ ID NO: 529972 - DNA, 15 bp, Homo sapiens
ccatgggggaataga

SEQ ID NO: 529973 - DNA, 15 bp, Homo sapiens
accatgggggaatag

SEQ ID NO: 529974 - DNA, 15 bp, Homo sapiens
taccatgggggaata

SEQ ID NO: 529975 - DNA, 15 bp, Homo sapiens
gtaccatgggggaat

SEQ ID NO: 529976 - DNA, 15 bp, Homo sapiens
ggtaccatgggggaa

SEQ ID NO: 529977 - DNA, 15 bp, Homo sapiens
tggtaccatggggga

SEQ ID NO: 529978 - DNA, 15 bp, Homo sapiens
gtggtaccatggggg

SEQ ID NO: 529979 - DNA, 15 bp, Homo sapiens
agtggtaccatgggg

SEQ ID NO: 529980 - DNA, 15 bp, Homo sapiens
cagtggtaccatggg

SEQ ID NO: 529981 - DNA, 15 bp, Homo sapiens
ccagtggtaccatgg

SEQ ID NO: 529982 - DNA, 15 bp, Homo sapiens
accagtggtaccatg

SEQ ID NO: 529983 - DNA, 15 bp, Homo sapiens
gaccagtggtaccat

SEQ ID NO: 529984 - DNA, 15 bp, Homo sapiens
tgaccagtggtacca

SEQ ID NO: 529985 - DNA, 15 bp, Homo sapiens
gtgaccagtggtacc

SEQ ID NO: 529986 - DNA, 15 bp, Homo sapiens
ggtgaccagtggtac

SEQ ID NO: 529987 - DNA, 15 bp, Homo sapiens
gggtgaccagtggta

SEQ ID NO: 529988 - DNA, 15 bp, Homo sapiens
agggtgaccagtggt

SEQ ID NO: 529989 - DNA, 15 bp, Homo sapiens
gagggtgaccagtgg

SEQ ID NO: 529990 - DNA, 15 bp, Homo sapiens
agagggtgaccagtg

SEQ ID NO: 529991 - DNA, 15 bp, Homo sapiens
tagagggtgaccagt

SEQ ID NO: 529992 - DNA, 15 bp, Homo sapiens
atagagggtgaccag

SEQ ID NO: 529993 - DNA, 15 bp, Homo sapiens
gatagagggtgacca

SEQ ID NO: 529994 - DNA, 15 bp, Homo sapiens
tgatagagggtgacc

SEQ ID NO: 529995 - DNA, 15 bp, Homo sapiens
gtgatagagggtgac

SEQ ID NO: 529996 - DNA, 15 bp, Homo sapiens
tgtgatagagggtga

SEQ ID NO: 529997 - DNA, 15 bp, Homo sapiens
ttgtgatagagggtg

SEQ ID NO: 529998 - DNA, 15 bp, Homo sapiens
gttgtgatagagggt

SEQ ID NO: 529999 - DNA, 15 bp, Homo sapiens
tgttgtgatagaggg

SEQ ID NO: 530000 - DNA, 15 bp, Homo sapiens
ctgttgtgatagagg

SEQ ID NO: 530001 - DNA, 15 bp, Homo sapiens
gctgttgtgatagag

SEQ ID NO: 530002 - DNA, 15 bp, Homo sapiens
ggctgttgtgataga

SEQ ID NO: 530003 - DNA, 15 bp, Homo sapiens
aggctgttgtgatag

SEQ ID NO: 530004 - DNA, 15 bp, Homo sapiens
taggctgttgtgata

SEQ ID NO: 530005 - DNA, 15 bp, Homo sapiens
gtaggctgttgtgat

SEQ ID NO: 530006 - DNA, 15 bp, Homo sapiens
agtaggctgttgtga

SEQ ID NO: 530007 - DNA, 15 bp, Homo sapiens
gagtaggctgttgtg

SEQ ID NO: 530008 - DNA, 15 bp, Homo sapiens
tgagtaggctgttgt

SEQ ID NO: 530009 - DNA, 15 bp, Homo sapiens
gtgagtaggctgttg

SEQ ID NO: 530010 - DNA, 15 bp, Homo sapiens
ggtgagtaggctgtt

SEQ ID NO: 530011 - DNA, 15 bp, Homo sapiens
gggtgagtaggctgt

SEQ ID NO: 530012 - DNA, 15 bp, Homo sapiens
ggggtgagtaggctg

SEQ ID NO: 530013 - DNA, 15 bp, Homo sapiens
gggggtgagtaggct

SEQ ID NO: 530014 - DNA, 15 bp, Homo sapiens
cgggggtgagtaggc

SEQ ID NO: 530015 - DNA, 15 bp, Homo sapiens
gcgggggtgagtagg

SEQ ID NO: 530016 - DNA, 15 bp, Homo sapiens
tgcgggggtgagtag

SEQ ID NO: 530017 - DNA, 15 bp, Homo sapiens
gtgcgggggtgagta

SEQ ID NO: 530018 - DNA, 15 bp, Homo sapiens
ggtgcgggggtgagt

SEQ ID NO: 530019 - DNA, 15 bp, Homo sapiens
cggtgcgggggtgag

SEQ ID NO: 530020 - DNA, 15 bp, Homo sapiens
gcggtgcgggggtga

SEQ ID NO: 530021 - DNA, 15 bp, Homo sapiens
ggcggtgcgggggtg

SEQ ID NO: 530022 - DNA, 15 bp, Homo sapiens
tggcggtgcgggggt

SEQ ID NO: 530023 - DNA, 15 bp, Homo sapiens
ttggcggtgcggggg

SEQ ID NO: 530024 - DNA, 15 bp, Homo sapiens
tttggcggtgcgggg

SEQ ID NO: 530025 - DNA, 15 bp, Homo sapiens
ctttggcggtgcggg

SEQ ID NO: 530026 - DNA, 15 bp, Homo sapiens
actttggcggtgcgg

SEQ ID NO: 530027 - DNA, 15 bp, Homo sapiens
gactttggcggtgcg

SEQ ID NO: 530028 - DNA, 15 bp, Homo sapiens
agactttggcggtgc

SEQ ID NO: 530029 - DNA, 15 bp, Homo sapiens
tagactttggcggtg

SEQ ID NO: 530030 - DNA, 15 bp, Homo sapiens
atagactttggcggt

SEQ ID NO: 530031 - DNA, 15 bp, Homo sapiens
catagactttggcgg

SEQ ID NO: 530032 - DNA, 15 bp, Homo sapiens
tcatagactttggcg

SEQ ID NO: 530033 - DNA, 15 bp, Homo sapiens
ctcatagactttggc

SEQ ID NO: 530034 - DNA, 15 bp, Homo sapiens
gctcatagactttgg

SEQ ID NO: 530035 - DNA, 15 bp, Homo sapiens
ggctcatagactttg

SEQ ID NO: 530036 - DNA, 15 bp, Homo sapiens
gggctcatagacttt

SEQ ID NO: 530037 - DNA, 15 bp, Homo sapiens
agggctcatagactt

SEQ ID NO: 530038 - DNA, 15 bp, Homo sapiens
cagggctcatagact

SEQ ID NO: 530039 - DNA, 15 bp, Homo sapiens
tcagggctcatagac

SEQ ID NO: 530040 - DNA, 15 bp, Homo sapiens
ctcagggctcataga

SEQ ID NO: 530041 - DNA, 15 bp, Homo sapiens
tctcagggctcatag

SEQ ID NO: 530042 - DNA, 15 bp, Homo sapiens
ctctcagggctcata

SEQ ID NO: 530043 - DNA, 15 bp, Homo sapiens
cctctcagggctcat

SEQ ID NO: 530044 - DNA, 15 bp, Homo sapiens
ccctctcagggctca

SEQ ID NO: 530045 - DNA, 15 bp, Homo sapiens
tccctctcagggctc

SEQ ID NO: 530046 - DNA, 15 bp, Homo sapiens
ttccctctcagggct

SEQ ID NO: 530047 - DNA, 15 bp, Homo sapiens
cttccctctcagggc

SEQ ID NO: 530048 - DNA, 15 bp, Homo sapiens
ccttccctctcaggg

SEQ ID NO: 530049 - DNA, 15 bp, Homo sapiens
cccttccctctcagg

SEQ ID NO: 530050 - DNA, 15 bp, Homo sapiens
tcccttccctctcag

SEQ ID NO: 530051 - DNA, 15 bp, Homo sapiens
ctcccttccctctca

SEQ ID NO: 530052 - DNA, 15 bp, Homo sapiens
actcccttccctctc

SEQ ID NO: 530053 - DNA, 15 bp, Homo sapiens
tactcccttccctct

SEQ ID NO: 530054 - DNA, 15 bp, Homo sapiens
atactcccttccctc

SEQ ID NO: 530055 - DNA, 15 bp, Homo sapiens
catactcccttccct

SEQ ID NO: 530056 - DNA, 15 bp, Homo sapiens
acatactcccttccc

SEQ ID NO: 530057 - DNA, 15 bp, Homo sapiens
gacatactcccttcc

SEQ ID NO: 530058 - DNA, 15 bp, Homo sapiens
agacatactcccttc

SEQ ID NO: 530059 - DNA, 15 bp, Homo sapiens
aagacatactccctt

SEQ ID NO: 530060 - DNA, 15 bp, Homo sapiens
caagacatactccct

SEQ ID NO: 530061 - DNA, 15 bp, Homo sapiens
acaagacatactccc

SEQ ID NO: 530062 - DNA, 15 bp, Homo sapiens
aacaagacatactcc

SEQ ID NO: 530063 - DNA, 15 bp, Homo sapiens
gaacaagacatactc

SEQ ID NO: 530064 - DNA, 15 bp, Homo sapiens
tgaacaagacatact

SEQ ID NO: 530065 - DNA, 15 bp, Homo sapiens
ttgaacaagacatac

SEQ ID NO: 530066 - DNA, 15 bp, Homo sapiens
attgaacaagacata

SEQ ID NO: 530067 - DNA, 15 bp, Homo sapiens
cattgaacaagacat

SEQ ID NO: 530068 - DNA, 15 bp, Homo sapiens
acattgaacaagaca

SEQ ID NO: 530069 - DNA, 15 bp, Homo sapiens
gacattgaacaagac

SEQ ID NO: 530070 - DNA, 15 bp, Homo sapiens
agacattgaacaaga

SEQ ID NO: 530071 - DNA, 15 bp, Homo sapiens
cagacattgaacaag

SEQ ID NO: 530072 - DNA, 15 bp, Homo sapiens
gcagacattgaacaa

SEQ ID NO: 530073 - DNA, 15 bp, Homo sapiens
ggcagacattgaaca

SEQ ID NO: 530074 - DNA, 15 bp, Homo sapiens
tggcagacattgaac

SEQ ID NO: 530075 - DNA, 15 bp, Homo sapiens
gtggcagacattgaa

SEQ ID NO: 530076 - DNA, 15 bp, Homo sapiens
tgtggcagacattga

SEQ ID NO: 530077 - DNA, 15 bp, Homo sapiens
atgtggcagacattg

SEQ ID NO: 530078 - DNA, 15 bp, Homo sapiens
gatgtggcagacatt

SEQ ID NO: 530079 - DNA, 15 bp, Homo sapiens
tgatgtggcagacat

SEQ ID NO: 530080 - DNA, 15 bp, Homo sapiens
gaatctttcagcccc

SEQ ID NO: 530081 - DNA, 15 bp, Homo sapiens
tgaatctttcagccc

SEQ ID NO: 530082 - DNA, 15 bp, Homo sapiens
atgaatctttcagcc

SEQ ID NO: 530083 - DNA, 15 bp, Homo sapiens
gatgaatctttcagc

SEQ ID NO: 530084 - DNA, 15 bp, Homo sapiens
ggatgaatctttcag

SEQ ID NO: 530085 - DNA, 15 bp, Homo sapiens
gggatgaatctttca

SEQ ID NO: 530086 - DNA, 15 bp, Homo sapiens
tgggatgaatctttc

SEQ ID NO: 530087 - DNA, 15 bp, Homo sapiens
ctgggatgaatcttt

SEQ ID NO: 530088 - DNA, 15 bp, Homo sapiens
cctgggatgaatctt

SEQ ID NO: 530089 - DNA, 15 bp, Homo sapiens
gcctgggatgaatct

SEQ ID NO: 530090 - DNA, 15 bp, Homo sapiens
agcctgggatgaatc

SEQ ID NO: 530091 - DNA, 15 bp, Homo sapiens
gagcctgggatgaat

SEQ ID NO: 530092 - DNA, 15 bp, Homo sapiens
ggagcctgggatgaa

SEQ ID NO: 530093 - DNA, 15 bp, Homo sapiens
aggagcctgggatga

SEQ ID NO: 530094 - DNA, 15 bp, Homo sapiens
gaggagcctgggatg

SEQ ID NO: 530095 - DNA, 15 bp, Homo sapiens
cgaggagcctgggat

SEQ ID NO: 530096 - DNA, 15 bp, Homo sapiens
acgaggagcctggga

SEQ ID NO: 530097 - DNA, 15 bp, Homo sapiens
cacgaggagcctggg

SEQ ID NO: 530098 - DNA, 15 bp, Homo sapiens
acacgaggagcctgg

SEQ ID NO: 530099 - DNA, 15 bp, Homo sapiens
cacacgaggagcctg

SEQ ID NO: 530100 - DNA, 15 bp, Homo sapiens
tcacacgaggagcct

SEQ ID NO: 530101 - DNA, 15 bp, Homo sapiens
gtcacacgaggagcc

SEQ ID NO: 530102 - DNA, 15 bp, Homo sapiens
ggtcacacgaggagc

SEQ ID NO: 530103 - DNA, 15 bp, Homo sapiens
gggtcacacgaggag

SEQ ID NO: 530104 - DNA, 15 bp, Homo sapiens
ggggtcacacgagga

SEQ ID NO: 530105 - DNA, 15 bp, Homo sapiens
aggggtcacacgagg

SEQ ID NO: 530106 - DNA, 15 bp, Homo sapiens
aaggggtcacacgag

SEQ ID NO: 530107 - DNA, 15 bp, Homo sapiens
gaaggggtcacacga

SEQ ID NO: 530108 - DNA, 15 bp, Homo sapiens
agaaggggtcacacg

SEQ ID NO: 530109 - DNA, 15 bp, Homo sapiens
cagaaggggtcacac

SEQ ID NO: 530110 - DNA, 15 bp, Homo sapiens
acagaaggggtcaca

SEQ ID NO: 530111 - DNA, 15 bp, Homo sapiens
cacagaaggggtcac

SEQ ID NO: 530112 - DNA, 15 bp, Homo sapiens
gcacagaaggggtca

SEQ ID NO: 530113 - DNA, 15 bp, Homo sapiens
ggcacagaaggggtc

SEQ ID NO: 530114 - DNA, 15 bp, Homo sapiens
gggcacagaaggggt

SEQ ID NO: 530115 - DNA, 15 bp, Homo sapiens
ggggcacagaagggg

SEQ ID NO: 530116 - DNA, 15 bp, Homo sapiens
gggggcacagaaggg

SEQ ID NO: 530117 - DNA, 15 bp, Homo sapiens
ggggggcacagaagg

SEQ ID NO: 530118 - DNA, 15 bp, Homo sapiens
tggggggcacagaag

SEQ ID NO: 530119 - DNA, 15 bp, Homo sapiens
ttggggggcacagaa

SEQ ID NO: 530120 - DNA, 15 bp, Homo sapiens
gttggggggcacaga

SEQ ID NO: 530121 - DNA, 15 bp, Homo sapiens
ggttggggggcacag

SEQ ID NO: 530122 - DNA, 15 bp, Homo sapiens
gggttggggggcaca

SEQ ID NO: 530123 - DNA, 15 bp, Homo sapiens
agggttggggggcac

SEQ ID NO: 530124 - DNA, 15 bp, Homo sapiens
cagggttggggggca

SEQ ID NO: 530125 - DNA, 15 bp, Homo sapiens
gcagggttggggggc

SEQ ID NO: 530126 - DNA, 15 bp, Homo sapiens
ggcagggttgggggg

SEQ ID NO: 530127 - DNA, 15 bp, Homo sapiens
aggcagggttggggg

SEQ ID NO: 530128 - DNA, 15 bp, Homo sapiens
caggcagggttgggg

SEQ ID NO: 530129 - DNA, 15 bp, Homo sapiens
ccaggcagggttggg

SEQ ID NO: 530130 - DNA, 15 bp, Homo sapiens
tccaggcagggttgg

SEQ ID NO: 530131 - DNA, 15 bp, Homo sapiens
atccaggcagggttg

SEQ ID NO: 530132 - DNA, 15 bp, Homo sapiens
gatccaggcagggtt

SEQ ID NO: 530133 - DNA, 15 bp, Homo sapiens
agatccaggcagggt

SEQ ID NO: 530134 - DNA, 15 bp, Homo sapiens
gagatccaggcaggg

SEQ ID NO: 530135 - DNA, 15 bp, Homo sapiens
ggagatccaggcagg

SEQ ID NO: 530136 - DNA, 15 bp, Homo sapiens
gggagatccaggcag

SEQ ID NO: 530137 - DNA, 15 bp, Homo sapiens
agggagatccaggca

SEQ ID NO: 530138 - DNA, 15 bp, Homo sapiens
cagggagatccaggc

SEQ ID NO: 530139 - DNA, 15 bp, Homo sapiens
gcagggagatccagg

SEQ ID NO: 530140 - DNA, 15 bp, Homo sapiens
agcagggagatccag

SEQ ID NO: 530141 - DNA, 15 bp, Homo sapiens
aagcagggagatcca

SEQ ID NO: 530142 - DNA, 15 bp, Homo sapiens
gaagcagggagatcc

SEQ ID NO: 530143 - DNA, 15 bp, Homo sapiens
tgaagcagggagatc

SEQ ID NO: 530144 - DNA, 15 bp, Homo sapiens
gtgaagcagggagat

SEQ ID NO: 530145 - DNA, 15 bp, Homo sapiens
ggtgaagcagggaga

SEQ ID NO: 530146 - DNA, 15 bp, Homo sapiens
gggtgaagcagggag

SEQ ID NO: 530147 - DNA, 15 bp, Homo sapiens
ggggtgaagcaggga

SEQ ID NO: 530148 - DNA, 15 bp, Homo sapiens
aggggtgaagcaggg

SEQ ID NO: 530149 - DNA, 15 bp, Homo sapiens
caggggtgaagcagg

SEQ ID NO: 530150 - DNA, 15 bp, Homo sapiens
acaggggtgaagcag

SEQ ID NO: 530151 - DNA, 15 bp, Homo sapiens
cacaggggtgaagca

SEQ ID NO: 530152 - DNA, 15 bp, Homo sapiens
ccacaggggtgaagc

SEQ ID NO: 530153 - DNA, 15 bp, Homo sapiens
gccacaggggtgaag

SEQ ID NO: 530154 - DNA, 15 bp, Homo sapiens
ggccacaggggtgaa

SEQ ID NO: 530155 - DNA, 15 bp, Homo sapiens
gggccacaggggtga

SEQ ID NO: 530156 - DNA, 15 bp, Homo sapiens
tgggccacaggggtg

SEQ ID NO: 530157 - DNA, 15 bp, Homo sapiens
gtgggccacaggggt

SEQ ID NO: 530158 - DNA, 15 bp, Homo sapiens
ggtgggccacagggg

SEQ ID NO: 530159 - DNA, 15 bp, Homo sapiens
tggtgggccacaggg

SEQ ID NO: 530160 - DNA, 15 bp, Homo sapiens
ctggtgggccacagg

SEQ ID NO: 530161 - DNA, 15 bp, Homo sapiens
cctggtgggccacag

SEQ ID NO: 530162 - DNA, 15 bp, Homo sapiens
acctggtgggccaca

SEQ ID NO: 530163 - DNA, 15 bp, Homo sapiens
cacctggtgggccac

SEQ ID NO: 530164 - DNA, 15 bp, Homo sapiens
ccacctggtgggcca

SEQ ID NO: 530165 - DNA, 15 bp, Homo sapiens
cccacctggtgggcc

SEQ ID NO: 530166 - DNA, 15 bp, Homo sapiens
gcccacctggtgggc

SEQ ID NO: 530167 - DNA, 15 bp, Homo sapiens
ggcccacctggtggg

SEQ ID NO: 530168 - DNA, 15 bp, Homo sapiens
tggcccacctggtgg

SEQ ID NO: 530169 - DNA, 15 bp, Homo sapiens
atggcccacctggtg

SEQ ID NO: 530170 - DNA, 15 bp, Homo sapiens
catggcccacctggt

SEQ ID NO: 530171 - DNA, 15 bp, Homo sapiens
tcatggcccacctgg

SEQ ID NO: 530172 - DNA, 15 bp, Homo sapiens
ttcatggcccacctg

SEQ ID NO: 530173 - DNA, 15 bp, Homo sapiens
tttcatggcccacct

SEQ ID NO: 530174 - DNA, 15 bp, Homo sapiens
ctttcatggcccacc

SEQ ID NO: 530175 - DNA, 15 bp, Homo sapiens
cctttcatggcccac

SEQ ID NO: 530176 - DNA, 15 bp, Homo sapiens
tcctttcatggccca

SEQ ID NO: 530177 - DNA, 15 bp, Homo sapiens
ctcctttcatggccc

SEQ ID NO: 530178 - DNA, 15 bp, Homo sapiens
tctcctttcatggcc

SEQ ID NO: 530179 - DNA, 15 bp, Homo sapiens
ctctcctttcatggc

SEQ ID NO: 530180 - DNA, 15 bp, Homo sapiens
cctctcctttcatgg

SEQ ID NO: 530181 - DNA, 15 bp, Homo sapiens
tcctctcctttcatg

SEQ ID NO: 530182 - DNA, 15 bp, Homo sapiens
atcctctcctttcat

SEQ ID NO: 530183 - DNA, 15 bp, Homo sapiens
catcctctcctttca

SEQ ID NO: 530184 - DNA, 15 bp, Homo sapiens
ccatcctctcctttc

SEQ ID NO: 530185 - DNA, 15 bp, Homo sapiens
tccatcctctccttt

SEQ ID NO: 530186 - DNA, 15 bp, Homo sapiens
atccatcctctcctt

SEQ ID NO: 530187 - DNA, 15 bp, Homo sapiens
tatccatcctctcct

SEQ ID NO: 530188 - DNA, 15 bp, Homo sapiens
ctatccatcctctcc

SEQ ID NO: 530189 - DNA, 15 bp, Homo sapiens
cctatccatcctctc

SEQ ID NO: 530190 - DNA, 15 bp, Homo sapiens
ccctatccatcctct

SEQ ID NO: 530191 - DNA, 15 bp, Homo sapiens
tccctatccatcctc

SEQ ID NO: 530192 - DNA, 15 bp, Homo sapiens
atccctatccatcct

SEQ ID NO: 530193 - DNA, 15 bp, Homo sapiens
catccctatccatcc

SEQ ID NO: 530194 - DNA, 15 bp, Homo sapiens
ccatccctatccatc

SEQ ID NO: 530195 - DNA, 15 bp, Homo sapiens
gccatccctatccat

SEQ ID NO: 530196 - DNA, 15 bp, Homo sapiens
agccatccctatcca

SEQ ID NO: 530197 - DNA, 15 bp, Homo sapiens
cagccatccctatcc

SEQ ID NO: 530198 - DNA, 15 bp, Homo sapiens
ccagccatccctatc

SEQ ID NO: 530199 - DNA, 15 bp, Homo sapiens
cccagccatccctat

SEQ ID NO: 530200 - DNA, 15 bp, Homo sapiens
tcccagccatcccta

SEQ ID NO: 530201 - DNA, 15 bp, Homo sapiens
ttcccagccatccct

SEQ ID NO: 530202 - DNA, 15 bp, Homo sapiens
tttcccagccatccc

SEQ ID NO: 530203 - DNA, 15 bp, Homo sapiens
atttcccagccatcc

SEQ ID NO: 530204 - DNA, 15 bp, Homo sapiens
catttcccagccatc

SEQ ID NO: 530205 - DNA, 15 bp, Homo sapiens
ccatttcccagccat

SEQ ID NO: 530206 - DNA, 15 bp, Homo sapiens
tccatttcccagcca

SEQ ID NO: 530207 - DNA, 15 bp, Homo sapiens
ctccatttcccagcc

SEQ ID NO: 530208 - DNA, 15 bp, Homo sapiens
tctccatttcccagc

SEQ ID NO: 530209 - DNA, 15 bp, Homo sapiens
atctccatttcccag

SEQ ID NO: 530210 - DNA, 15 bp, Homo sapiens
gatctccatttccca

SEQ ID NO: 530211 - DNA, 15 bp, Homo sapiens
tgatctccatttccc

SEQ ID NO: 530212 - DNA, 15 bp, Homo sapiens
gtgatctccatttcc

SEQ ID NO: 530213 - DNA, 15 bp, Homo sapiens
agtgatctccatttc

SEQ ID NO: 530214 - DNA, 15 bp, Homo sapiens
cagtgatctccattt

SEQ ID NO: 530215 - DNA, 15 bp, Homo sapiens
tcagtgatctccatt

SEQ ID NO: 530216 - DNA, 15 bp, Homo sapiens
ttcagtgatctccat

SEQ ID NO: 530217 - DNA, 15 bp, Homo sapiens
cttcagtgatctcca

SEQ ID NO: 530218 - DNA, 15 bp, Homo sapiens
acttcagtgatctcc

SEQ ID NO: 530219 - DNA, 15 bp, Homo sapiens
tacttcagtgatctc

SEQ ID NO: 530220 - DNA, 15 bp, Homo sapiens
gtacttcagtgatct

SEQ ID NO: 530221 - DNA, 15 bp, Homo sapiens
tgtacttcagtgatc

SEQ ID NO: 530222 - DNA, 15 bp, Homo sapiens
gtgtacttcagtgat

SEQ ID NO: 530223 - DNA, 15 bp, Homo sapiens
tgtgtacttcagtga

SEQ ID NO: 530224 - DNA, 15 bp, Homo sapiens
ctgtgtacttcagtg

SEQ ID NO: 530225 - DNA, 15 bp, Homo sapiens
cctgtgtacttcagt

SEQ ID NO: 530226 - DNA, 15 bp, Homo sapiens
ccctgtgtacttcag

SEQ ID NO: 530227 - DNA, 15 bp, Homo sapiens
tccctgtgtacttca

SEQ ID NO: 530228 - DNA, 15 bp, Homo sapiens
gtccctgtgtacttc

SEQ ID NO: 530229 - DNA, 15 bp, Homo sapiens
agtccctgtgtactt

SEQ ID NO: 530230 - DNA, 15 bp, Homo sapiens
tagtccctgtgtact

SEQ ID NO: 530231 - DNA, 15 bp, Homo sapiens
ttagtccctgtgtac

SEQ ID NO: 530232 - DNA, 15 bp, Homo sapiens
gttagtccctgtgta

SEQ ID NO: 530233 - DNA, 15 bp, Homo sapiens
ggttagtccctgtgt

SEQ ID NO: 530234 - DNA, 15 bp, Homo sapiens
tggttagtccctgtg

SEQ ID NO: 530235 - DNA, 15 bp, Homo sapiens
ttggttagtccctgt

SEQ ID NO: 530236 - DNA, 15 bp, Homo sapiens
cttggttagtccctg

SEQ ID NO: 530237 - DNA, 15 bp, Homo sapiens
ccttggttagtccct

SEQ ID NO: 530238 - DNA, 15 bp, Homo sapiens
tccttggttagtccc

SEQ ID NO: 530239 - DNA, 15 bp, Homo sapiens
ctccttggttagtcc

SEQ ID NO: 530240 - DNA, 15 bp, Homo sapiens
tctccttggttagtc

SEQ ID NO: 530241 - DNA, 15 bp, Homo sapiens
atctccttggttagt

SEQ ID NO: 530242 - DNA, 15 bp, Homo sapiens
catctccttggttag

SEQ ID NO: 530243 - DNA, 15 bp, Homo sapiens
tcatctccttggtta

SEQ ID NO: 530244 - DNA, 15 bp, Homo sapiens
ctcatctccttggtt

SEQ ID NO: 530245 - DNA, 15 bp, Homo sapiens
cctcatctccttggt

SEQ ID NO: 530246 - DNA, 15 bp, Homo sapiens
ccctcatctccttgg

SEQ ID NO: 530247 - DNA, 15 bp, Homo sapiens
cccctcatctccttg

SEQ ID NO: 530248 - DNA, 15 bp, Homo sapiens
ccccctcatctcctt

SEQ ID NO: 530249 - DNA, 15 bp, Homo sapiens
accccctcatctcct

SEQ ID NO: 530250 - DNA, 15 bp, Homo sapiens
gaccccctcatctcc

SEQ ID NO: 530251 - DNA, 15 bp, Homo sapiens
cgaccccctcatctc

SEQ ID NO: 530252 - DNA, 15 bp, Homo sapiens
tcgaccccctcatct

SEQ ID NO: 530253 - DNA, 15 bp, Homo sapiens
gtcgaccccctcatc

SEQ ID NO: 530254 - DNA, 15 bp, Homo sapiens
tgtcgaccccctcat

SEQ ID NO: 530255 - DNA, 15 bp, Homo sapiens
ctgtcgaccccctca

SEQ ID NO: 530256 - DNA, 15 bp, Homo sapiens
cctgtcgaccccctc

SEQ ID NO: 530257 - DNA, 15 bp, Homo sapiens
acctgtcgaccccct

SEQ ID NO: 530258 - DNA, 15 bp, Homo sapiens
aacctgtcgaccccc

SEQ ID NO: 530259 - DNA, 15 bp, Homo sapiens
caacctgtcgacccc

SEQ ID NO: 530260 - DNA, 15 bp, Homo sapiens
tcaacctgtcgaccc

SEQ ID NO: 530261 - DNA, 15 bp, Homo sapiens
ttcaacctgtcgacc

SEQ ID NO: 530262 - DNA, 15 bp, Homo sapiens
gttcaacctgtcgac

SEQ ID NO: 530263 - DNA, 15 bp, Homo sapiens
cgttcaacctgtcga

SEQ ID NO: 530264 - DNA, 15 bp, Homo sapiens
acgttcaacctgtcg

SEQ ID NO: 530265 - DNA, 15 bp, Homo sapiens
gacgttcaacctgtc

SEQ ID NO: 530266 - DNA, 15 bp, Homo sapiens
agacgttcaacctgt

SEQ ID NO: 530267 - DNA, 15 bp, Homo sapiens
aagacgttcaacctg

SEQ ID NO: 530268 - DNA, 15 bp, Homo sapiens
gaagacgttcaacct

SEQ ID NO: 530269 - DNA, 15 bp, Homo sapiens
tgaagacgttcaacc

SEQ ID NO: 530270 - DNA, 15 bp, Homo sapiens
ctgaagacgttcaac

SEQ ID NO: 530271 - DNA, 15 bp, Homo sapiens
cctgaagacgttcaa

SEQ ID NO: 530272 - DNA, 15 bp, Homo sapiens
gcctgaagacgttca

SEQ ID NO: 530273 - DNA, 15 bp, Homo sapiens
ggcctgaagacgttc

SEQ ID NO: 530274 - DNA, 15 bp, Homo sapiens
gggcctgaagacgtt

SEQ ID NO: 530275 - DNA, 15 bp, Homo sapiens
tgggcctgaagacgt

SEQ ID NO: 530276 - DNA, 15 bp, Homo sapiens
ctgggcctgaagacg

SEQ ID NO: 530277 - DNA, 15 bp, Homo sapiens
cctgggcctgaagac

SEQ ID NO: 530278 - DNA, 15 bp, Homo sapiens
tcctgggcctgaaga

SEQ ID NO: 530279 - DNA, 15 bp, Homo sapiens
gtcctgggcctgaag

SEQ ID NO: 530280 - DNA, 15 bp, Homo sapiens
ggtcctgggcctgaa

SEQ ID NO: 530281 - DNA, 15 bp, Homo sapiens
gggtcctgggcctga

SEQ ID NO: 530282 - DNA, 15 bp, Homo sapiens
ggggtcctgggcctg

SEQ ID NO: 530283 - DNA, 15 bp, Homo sapiens
tggggtcctgggcct

SEQ ID NO: 530284 - DNA, 15 bp, Homo sapiens
ttggggtcctgggcc

SEQ ID NO: 530285 - DNA, 15 bp, Homo sapiens
cttggggtcctgggc

SEQ ID NO: 530286 - DNA, 15 bp, Homo sapiens
gcttggggtcctggg

SEQ ID NO: 530287 - DNA, 15 bp, Homo sapiens
agcttggggtcctgg

SEQ ID NO: 530288 - DNA, 15 bp, Homo sapiens
gagcttggggtcctg

SEQ ID NO: 530289 - DNA, 15 bp, Homo sapiens
ggagcttggggtcct

SEQ ID NO: 530290 - DNA, 15 bp, Homo sapiens
aggagcttggggtcc

SEQ ID NO: 530291 - DNA, 15 bp, Homo sapiens
gaggagcttggggtc

SEQ ID NO: 530292 - DNA, 15 bp, Homo sapiens
tgaggagcttggggt

SEQ ID NO: 530293 - DNA, 15 bp, Homo sapiens
ctgaggagcttgggg

SEQ ID NO: 530294 - DNA, 15 bp, Homo sapiens
gctgaggagcttggg

SEQ ID NO: 530295 - DNA, 15 bp, Homo sapiens
ggctgaggagcttgg

SEQ ID NO: 530296 - DNA, 15 bp, Homo sapiens
aggctgaggagcttg

SEQ ID NO: 530297 - DNA, 15 bp, Homo sapiens
caggctgaggagctt

SEQ ID NO: 530298 - DNA, 15 bp, Homo sapiens
ccaggctgaggagct

SEQ ID NO: 530299 - DNA, 15 bp, Homo sapiens
gccaggctgaggagc

SEQ ID NO: 530300 - DNA, 15 bp, Homo sapiens
ggccaggctgaggag

SEQ ID NO: 530301 - DNA, 15 bp, Homo sapiens
gggccaggctgagga

SEQ ID NO: 530302 - DNA, 15 bp, Homo sapiens
ggggccaggctgagg

SEQ ID NO: 530303 - DNA, 15 bp, Homo sapiens
aggggccaggctgag

SEQ ID NO: 530304 - DNA, 15 bp, Homo sapiens
caggggccaggctga

SEQ ID NO: 530305 - DNA, 15 bp, Homo sapiens
ccaggggccaggctg

SEQ ID NO: 530306 - DNA, 15 bp, Homo sapiens
cccaggggccaggct

SEQ ID NO: 530307 - DNA, 15 bp, Homo sapiens
tcccaggggccaggc

SEQ ID NO: 530308 - DNA, 15 bp, Homo sapiens
atcccaggggccagg

SEQ ID NO: 530309 - DNA, 15 bp, Homo sapiens
aatcccaggggccag

SEQ ID NO: 530310 - DNA, 15 bp, Homo sapiens
caatcccaggggcca

SEQ ID NO: 530311 - DNA, 15 bp, Homo sapiens
gcaatcccaggggcc

SEQ ID NO: 530312 - DNA, 15 bp, Homo sapiens
tgcaatcccaggggc

SEQ ID NO: 530313 - DNA, 15 bp, Homo sapiens
ctgcaatcccagggg

SEQ ID NO: 530314 - DNA, 15 bp, Homo sapiens
actgcaatcccaggg

SEQ ID NO: 530315 - DNA, 15 bp, Homo sapiens
aactgcaatcccagg

SEQ ID NO: 530316 - DNA, 15 bp, Homo sapiens
caactgcaatcccag

SEQ ID NO: 530317 - DNA, 15 bp, Homo sapiens
tcaactgcaatccca

SEQ ID NO: 530318 - DNA, 15 bp, Homo sapiens
ctcaactgcaatccc

SEQ ID NO: 530319 - DNA, 15 bp, Homo sapiens
tctcaactgcaatcc

SEQ ID NO: 530320 - DNA, 15 bp, Homo sapiens
ctctcaactgcaatc

SEQ ID NO: 530321 - DNA, 15 bp, Homo sapiens
actctcaactgcaat

SEQ ID NO: 530322 - DNA, 15 bp, Homo sapiens
aactctcaactgcaa

SEQ ID NO: 530323 - DNA, 15 bp, Homo sapiens
taactctcaactgca

SEQ ID NO: 530324 - DNA, 15 bp, Homo sapiens
ataactctcaactgc

SEQ ID NO: 530325 - DNA, 15 bp, Homo sapiens
aataactctcaactg

SEQ ID NO: 530326 - DNA, 15 bp, Homo sapiens
gaataactctcaact

SEQ ID NO: 530327 - DNA, 15 bp, Homo sapiens
tgaataactctcaac

SEQ ID NO: 530328 - DNA, 15 bp, Homo sapiens
ctgaataactctcaa

SEQ ID NO: 530329 - DNA, 15 bp, Homo sapiens
actgaataactctca

SEQ ID NO: 530330 - DNA, 15 bp, Homo sapiens
cactgaataactctc

SEQ ID NO: 530331 - DNA, 15 bp, Homo sapiens
tcactgaataactct

SEQ ID NO: 530332 - DNA, 15 bp, Homo sapiens
ttcactgaataactc

SEQ ID NO: 530333 - DNA, 15 bp, Homo sapiens
attcactgaataact

SEQ ID NO: 530334 - DNA, 15 bp, Homo sapiens
gattcactgaataac

SEQ ID NO: 530335 - DNA, 15 bp, Homo sapiens
ggattcactgaataa

SEQ ID NO: 530336 - DNA, 15 bp, Homo sapiens
tggattcactgaata

SEQ ID NO: 530337 - DNA, 15 bp, Homo sapiens
atggattcactgaat

SEQ ID NO: 530338 - DNA, 15 bp, Homo sapiens
aatggattcactgaa

SEQ ID NO: 530339 - DNA, 15 bp, Homo sapiens
aaatggattcactga

SEQ ID NO: 530340 - DNA, 15 bp, Homo sapiens
aaaatggattcactg

SEQ ID NO: 530341 - DNA, 15 bp, Homo sapiens
taaaatggattcact

SEQ ID NO: 530342 - DNA, 15 bp, Homo sapiens
ataaaatggattcac

SEQ ID NO: 530343 - DNA, 15 bp, Homo sapiens
gataaaatggattca

SEQ ID NO: 530344 - DNA, 15 bp, Homo sapiens
tgataaaatggattc

SEQ ID NO: 530345 - DNA, 15 bp, Homo sapiens
ctgataaaatggatt

SEQ ID NO: 530346 - DNA, 15 bp, Homo sapiens
actgataaaatggat

SEQ ID NO: 530347 - DNA, 15 bp, Homo sapiens
aactgataaaatgga

SEQ ID NO: 530348 - DNA, 15 bp, Homo sapiens
aaactgataaaatgg

SEQ ID NO: 530349 - DNA, 15 bp, Homo sapiens
caaactgataaaatg

SEQ ID NO: 530350 - DNA, 15 bp, Homo sapiens
ccaaactgataaaat

SEQ ID NO: 530351 - DNA, 15 bp, Homo sapiens
gccaaactgataaaa

SEQ ID NO: 530352 - DNA, 15 bp, Homo sapiens
tgccaaactgataaa

SEQ ID NO: 530353 - DNA, 15 bp, Homo sapiens
gtgccaaactgataa

SEQ ID NO: 530354 - DNA, 15 bp, Homo sapiens
agtgccaaactgata

SEQ ID NO: 530355 - DNA, 15 bp, Homo sapiens
gagtgccaaactgat

SEQ ID NO: 530356 - DNA, 15 bp, Homo sapiens
cgagtgccaaactga

SEQ ID NO: 530357 - DNA, 15 bp, Homo sapiens
tcgagtgccaaactg

SEQ ID NO: 530358 - DNA, 15 bp, Homo sapiens
gtcgagtgccaaact

SEQ ID NO: 530359 - DNA, 15 bp, Homo sapiens
tgtcgagtgccaaac

SEQ ID NO: 530360 - DNA, 15 bp, Homo sapiens
ctgtcgagtgccaaa

SEQ ID NO: 530361 - DNA, 15 bp, Homo sapiens
gctgtcgagtgccaa

SEQ ID NO: 530362 - DNA, 15 bp, Homo sapiens
tgctgtcgagtgcca

SEQ ID NO: 530363 - DNA, 15 bp, Homo sapiens
ttgctgtcgagtgcc

SEQ ID NO: 530364 - DNA, 15 bp, Homo sapiens
tttgctgtcgagtgc

SEQ ID NO: 530365 - DNA, 15 bp, Homo sapiens
atttgctgtcgagtg

SEQ ID NO: 530366 - DNA, 15 bp, Homo sapiens
aatttgctgtcgagt

SEQ ID NO: 530367 - DNA, 15 bp, Homo sapiens
aaatttgctgtcgag

SEQ ID NO: 530368 - DNA, 15 bp, Homo sapiens
gaaatttgctgtcga

SEQ ID NO: 530369 - DNA, 15 bp, Homo sapiens
agaaatttgctgtcg

SEQ ID NO: 530370 - DNA, 15 bp, Homo sapiens
aagaaatttgctgtc

SEQ ID NO: 530371 - DNA, 15 bp, Homo sapiens
caagaaatttgctgt

SEQ ID NO: 530372 - DNA, 15 bp, Homo sapiens
tcaagaaatttgctg

SEQ ID NO: 530373 - DNA, 15 bp, Homo sapiens
atcaagaaatttgct

SEQ ID NO: 530374 - DNA, 15 bp, Homo sapiens
tatcaagaaatttgc

SEQ ID NO: 530375 - DNA, 15 bp, Homo sapiens
atatcaagaaatttg

SEQ ID NO: 530376 - DNA, 15 bp, Homo sapiens
gatatcaagaaattt

SEQ ID NO: 530377 - DNA, 15 bp, Homo sapiens
tgatatcaagaaatt

SEQ ID NO: 530378 - DNA, 15 bp, Homo sapiens
ttgatatcaagaaat

SEQ ID NO: 530379 - DNA, 15 bp, Homo sapiens
cttgatatcaagaaa

SEQ ID NO: 530380 - DNA, 15 bp, Homo sapiens
ccttgatatcaagaa

SEQ ID NO: 530381 - DNA, 15 bp, Homo sapiens
tccttgatatcaaga

SEQ ID NO: 530382 - DNA, 15 bp, Homo sapiens
ttccttgatatcaag

SEQ ID NO: 530383 - DNA, 15 bp, Homo sapiens
tttccttgatatcaa

SEQ ID NO: 530384 - DNA, 15 bp, Homo sapiens
ctttccttgatatca

SEQ ID NO: 530385 - DNA, 15 bp, Homo sapiens
actttccttgatatc

SEQ ID NO: 530386 - DNA, 15 bp, Homo sapiens
cactttccttgatat

SEQ ID NO: 530387 - DNA, 15 bp, Homo sapiens
ccactttccttgata

SEQ ID NO: 530388 - DNA, 15 bp, Homo sapiens
cccactttccttgat

SEQ ID NO: 530389 - DNA, 15 bp, Homo sapiens
ccccactttccttga

SEQ ID NO: 530390 - DNA, 15 bp, Homo sapiens
gccccactttccttg

SEQ ID NO: 530391 - DNA, 15 bp, Homo sapiens
tgccccactttcctt

SEQ ID NO: 530392 - DNA, 15 bp, Homo sapiens
gtgccccactttcct

SEQ ID NO: 530393 - DNA, 15 bp, Homo sapiens
agtgccccactttcc

SEQ ID NO: 530394 - DNA, 15 bp, Homo sapiens
cagtgccccactttc

SEQ ID NO: 530395 - DNA, 15 bp, Homo sapiens
tcagtgccccacttt

SEQ ID NO: 530396 - DNA, 15 bp, Homo sapiens
ctcagtgccccactt

SEQ ID NO: 530397 - DNA, 15 bp, Homo sapiens
tctcagtgccccact

SEQ ID NO: 530398 - DNA, 15 bp, Homo sapiens
ttctcagtgccccac

SEQ ID NO: 530399 - DNA, 15 bp, Homo sapiens
tttctcagtgcccca

SEQ ID NO: 530400 - DNA, 15 bp, Homo sapiens
ctttctcagtgcccc

SEQ ID NO: 530401 - DNA, 15 bp, Homo sapiens
cctttctcagtgccc

SEQ ID NO: 530402 - DNA, 15 bp, Homo sapiens
gcctttctcagtgcc

SEQ ID NO: 530403 - DNA, 15 bp, Homo sapiens
tgcctttctcagtgc

SEQ ID NO: 530404 - DNA, 15 bp, Homo sapiens
ctgcctttctcagtg

SEQ ID NO: 530405 - DNA, 15 bp, Homo sapiens
cctgcctttctcagt

SEQ ID NO: 530406 - DNA, 15 bp, Homo sapiens
ccctgcctttctcag

SEQ ID NO: 530407 - DNA, 15 bp, Homo sapiens
tccctgcctttctca

SEQ ID NO: 530408 - DNA, 15 bp, Homo sapiens
gtccctgcctttctc

SEQ ID NO: 530409 - DNA, 15 bp, Homo sapiens
agtccctgcctttct

SEQ ID NO: 530410 - DNA, 15 bp, Homo sapiens
aagtccctgcctttc

SEQ ID NO: 530411 - DNA, 15 bp, Homo sapiens
caagtccctgccttt

SEQ ID NO: 530412 - DNA, 15 bp, Homo sapiens
gcaagtccctgcctt

SEQ ID NO: 530413 - DNA, 15 bp, Homo sapiens
ggcaagtccctgcct

SEQ ID NO: 530414 - DNA, 15 bp, Homo sapiens
gggcaagtccctgcc

SEQ ID NO: 530415 - DNA, 15 bp, Homo sapiens
tgggcaagtccctgc

SEQ ID NO: 530416 - DNA, 15 bp, Homo sapiens
ttgggcaagtccctg

SEQ ID NO: 530417 - DNA, 15 bp, Homo sapiens
cttgggcaagtccct

SEQ ID NO: 530418 - DNA, 15 bp, Homo sapiens
ccttgggcaagtccc

SEQ ID NO: 530419 - DNA, 15 bp, Homo sapiens
cccttgggcaagtcc

SEQ ID NO: 530420 - DNA, 15 bp, Homo sapiens
gcccttgggcaagtc

SEQ ID NO: 530421 - DNA, 15 bp, Homo sapiens
tgcccttgggcaagt

SEQ ID NO: 530422 - DNA, 15 bp, Homo sapiens
atgcccttgggcaag

SEQ ID NO: 530423 - DNA, 15 bp, Homo sapiens
tatgcccttgggcaa

SEQ ID NO: 530424 - DNA, 15 bp, Homo sapiens
atatgcccttgggca

SEQ ID NO: 530425 - DNA, 15 bp, Homo sapiens
tatatgcccttgggc

SEQ ID NO: 530426 - DNA, 15 bp, Homo sapiens
ctatatgcccttggg

SEQ ID NO: 530427 - DNA, 15 bp, Homo sapiens
actatatgcccttgg

SEQ ID NO: 530428 - DNA, 15 bp, Homo sapiens
cactatatgcccttg

SEQ ID NO: 530429 - DNA, 15 bp, Homo sapiens
tcactatatgccctt

SEQ ID NO: 530430 - DNA, 15 bp, Homo sapiens
ctcactatatgccct

SEQ ID NO: 530431 - DNA, 15 bp, Homo sapiens
tctcactatatgccc

SEQ ID NO: 530432 - DNA, 15 bp, Homo sapiens
gtctcactatatgcc

SEQ ID NO: 530433 - DNA, 15 bp, Homo sapiens
tgtctcactatatgc

SEQ ID NO: 530434 - DNA, 15 bp, Homo sapiens
ctgtctcactatatg

SEQ ID NO: 530435 - DNA, 15 bp, Homo sapiens
actgtctcactatat

SEQ ID NO: 530436 - DNA, 15 bp, Homo sapiens
cactgtctcactata

SEQ ID NO: 530437 - DNA, 15 bp, Homo sapiens
ccactgtctcactat

SEQ ID NO: 530438 - DNA, 15 bp, Homo sapiens
gccactgtctcacta

SEQ ID NO: 530439 - DNA, 15 bp, Homo sapiens
tgccactgtctcact

SEQ ID NO: 530440 - DNA, 15 bp, Homo sapiens
ctgccactgtctcac

SEQ ID NO: 530441 - DNA, 15 bp, Homo sapiens
cctgccactgtctca

SEQ ID NO: 530442 - DNA, 15 bp, Homo sapiens
ccctgccactgtctc

SEQ ID NO: 530443 - DNA, 15 bp, Homo sapiens
tccctgccactgtct

SEQ ID NO: 530444 - DNA, 15 bp, Homo sapiens
ttccctgccactgtc

SEQ ID NO: 530445 - DNA, 15 bp, Homo sapiens
gttccctgccactgt

SEQ ID NO: 530446 - DNA, 15 bp, Homo sapiens
ggttccctgccactg

SEQ ID NO: 530447 - DNA, 15 bp, Homo sapiens
gggttccctgccact

SEQ ID NO: 530448 - DNA, 15 bp, Homo sapiens
tgggttccctgccac

SEQ ID NO: 530449 - DNA, 15 bp, Homo sapiens
ttgggttccctgcca

SEQ ID NO: 530450 - DNA, 15 bp, Homo sapiens
attgggttccctgcc

SEQ ID NO: 530451 - DNA, 15 bp, Homo sapiens
cattgggttccctgc

SEQ ID NO: 530452 - DNA, 15 bp, Homo sapiens
gcattgggttccctg

SEQ ID NO: 530453 - DNA, 15 bp, Homo sapiens
agcattgggttccct

SEQ ID NO: 530454 - DNA, 15 bp, Homo sapiens
gagcattgggttccc

SEQ ID NO: 530455 - DNA, 15 bp, Homo sapiens
agagcattgggttcc

SEQ ID NO: 530456 - DNA, 15 bp, Homo sapiens
cagagcattgggttc

SEQ ID NO: 530457 - DNA, 15 bp, Homo sapiens
acagagcattgggtt

SEQ ID NO: 530458 - DNA, 15 bp, Homo sapiens
gacagagcattgggt

SEQ ID NO: 530459 - DNA, 15 bp, Homo sapiens
agacagagcattggg

SEQ ID NO: 530460 - DNA, 15 bp, Homo sapiens
gagacagagcattgg

SEQ ID NO: 530461 - DNA, 15 bp, Homo sapiens
agagacagagcattg

SEQ ID NO: 530462 - DNA, 15 bp, Homo sapiens
cagagacagagcatt

SEQ ID NO: 530463 - DNA, 15 bp, Homo sapiens
ccagagacagagcat

SEQ ID NO: 530464 - DNA, 15 bp, Homo sapiens
tccagagacagagca

SEQ ID NO: 530465 - DNA, 15 bp, Homo sapiens
gtccagagacagagc

SEQ ID NO: 530466 - DNA, 15 bp, Homo sapiens
ggtccagagacagag

SEQ ID NO: 530467 - DNA, 15 bp, Homo sapiens
gggtccagagacaga

SEQ ID NO: 530468 - DNA, 15 bp, Homo sapiens
tgggtccagagacag

SEQ ID NO: 530469 - DNA, 15 bp, Homo sapiens
ctgggtccagagaca

SEQ ID NO: 530470 - DNA, 15 bp, Homo sapiens
cctgggtccagagac

SEQ ID NO: 530471 - DNA, 15 bp, Homo sapiens
gcctgggtccagaga

SEQ ID NO: 530472 - DNA, 15 bp, Homo sapiens
agcctgggtccagag

SEQ ID NO: 530473 - DNA, 15 bp, Homo sapiens
cagcctgggtccaga

SEQ ID NO: 530474 - DNA, 15 bp, Homo sapiens
gcagcctgggtccag

SEQ ID NO: 530475 - DNA, 15 bp, Homo sapiens
ggcagcctgggtcca

SEQ ID NO: 530476 - DNA, 15 bp, Homo sapiens
aggcagcctgggtcc

SEQ ID NO: 530477 - DNA, 15 bp, Homo sapiens
caggcagcctgggtc

SEQ ID NO: 530478 - DNA, 15 bp, Homo sapiens
gcaggcagcctgggt

SEQ ID NO: 530479 - DNA, 15 bp, Homo sapiens
agcaggcagcctggg

SEQ ID NO: 530480 - DNA, 15 bp, Homo sapiens
cagcaggcagcctgg

SEQ ID NO: 530481 - DNA, 15 bp, Homo sapiens
tcagcaggcagcctg

SEQ ID NO: 530482 - DNA, 15 bp, Homo sapiens
ttcagcaggcagcct

SEQ ID NO: 530483 - DNA, 15 bp, Homo sapiens
cttcagcaggcagcc

SEQ ID NO: 530484 - DNA, 15 bp, Homo sapiens
acttcagcaggcagc

SEQ ID NO: 530485 - DNA, 15 bp, Homo sapiens
gacttcagcaggcag

SEQ ID NO: 530486 - DNA, 15 bp, Homo sapiens
agacttcagcaggca

SEQ ID NO: 530487 - DNA, 15 bp, Homo sapiens
cagacttcagcaggc

SEQ ID NO: 530488 - DNA, 15 bp, Homo sapiens
tcagacttcagcagg

SEQ ID NO: 530489 - DNA, 15 bp, Homo sapiens
ttcagacttcagcag

SEQ ID NO: 530490 - DNA, 15 bp, Homo sapiens
cttcagacttcagca

SEQ ID NO: 530491 - DNA, 15 bp, Homo sapiens
acttcagacttcagc

SEQ ID NO: 530492 - DNA, 15 bp, Homo sapiens
cacttcagacttcag

SEQ ID NO: 530493 - DNA, 15 bp, Homo sapiens
ccacttcagacttca

SEQ ID NO: 530494 - DNA, 15 bp, Homo sapiens
cccacttcagacttc

SEQ ID NO: 530495 - DNA, 15 bp, Homo sapiens
ccccacttcagactt

SEQ ID NO: 530496 - DNA, 15 bp, Homo sapiens
accccacttcagact

SEQ ID NO: 530497 - DNA, 15 bp, Homo sapiens
gaccccacttcagac

SEQ ID NO: 530498 - DNA, 15 bp, Homo sapiens
agaccccacttcaga

SEQ ID NO: 530499 - DNA, 15 bp, Homo sapiens
cagaccccacttcag

SEQ ID NO: 530500 - DNA, 15 bp, Homo sapiens
ccagaccccacttca

SEQ ID NO: 530501 - DNA, 15 bp, Homo sapiens
gccagaccccacttc

SEQ ID NO: 530502 - DNA, 15 bp, Homo sapiens
ggccagaccccactt

SEQ ID NO: 530503 - DNA, 15 bp, Homo sapiens
aggccagaccccact

SEQ ID NO: 530504 - DNA, 15 bp, Homo sapiens
caggccagaccccac

SEQ ID NO: 530505 - DNA, 15 bp, Homo sapiens
ccaggccagacccca

SEQ ID NO: 530506 - DNA, 15 bp, Homo sapiens
cccaggccagacccc

SEQ ID NO: 530507 - DNA, 15 bp, Homo sapiens
tcccaggccagaccc

SEQ ID NO: 530508 - DNA, 15 bp, Homo sapiens
ctcccaggccagacc

SEQ ID NO: 530509 - DNA, 15 bp, Homo sapiens
cctcccaggccagac

SEQ ID NO: 530510 - DNA, 15 bp, Homo sapiens
tcctcccaggccaga

SEQ ID NO: 530511 - DNA, 15 bp, Homo sapiens
ctcctcccaggccag

SEQ ID NO: 530512 - DNA, 15 bp, Homo sapiens
cctcctcccaggcca

SEQ ID NO: 530513 - DNA, 15 bp, Homo sapiens
acctcctcccaggcc

SEQ ID NO: 530514 - DNA, 15 bp, Homo sapiens
gacctcctcccaggc

SEQ ID NO: 530515 - DNA, 15 bp, Homo sapiens
agacctcctcccagg

SEQ ID NO: 530516 - DNA, 15 bp, Homo sapiens
cagacctcctcccag

SEQ ID NO: 530517 - DNA, 15 bp, Homo sapiens
tcagacctcctccca

SEQ ID NO: 530518 - DNA, 15 bp, Homo sapiens
atcagacctcctccc

SEQ ID NO: 530519 - DNA, 15 bp, Homo sapiens
tatcagacctcctcc

SEQ ID NO: 530520 - DNA, 15 bp, Homo sapiens
ttatcagacctcctc

SEQ ID NO: 530521 - DNA, 15 bp, Homo sapiens
cttatcagacctcct

SEQ ID NO: 530522 - DNA, 15 bp, Homo sapiens
acttatcagacctcc

SEQ ID NO: 530523 - DNA, 15 bp, Homo sapiens
cacttatcagacctc

SEQ ID NO: 530524 - DNA, 15 bp, Homo sapiens
gcacttatcagacct

SEQ ID NO: 530525 - DNA, 15 bp, Homo sapiens
ggcacttatcagacc

SEQ ID NO: 530526 - DNA, 15 bp, Homo sapiens
aggcacttatcagac

SEQ ID NO: 530527 - DNA, 15 bp, Homo sapiens
aaggcacttatcaga

SEQ ID NO: 530528 - DNA, 15 bp, Homo sapiens
gaaggcacttatcag

SEQ ID NO: 530529 - DNA, 15 bp, Homo sapiens
tgaaggcacttatca

SEQ ID NO: 530530 - DNA, 15 bp, Homo sapiens
ttgaaggcacttatc

SEQ ID NO: 530531 - DNA, 15 bp, Homo sapiens
cttgaaggcacttat

SEQ ID NO: 530532 - DNA, 15 bp, Homo sapiens
ccttgaaggcactta

SEQ ID NO: 530533 - DNA, 15 bp, Homo sapiens
tccttgaaggcactt

SEQ ID NO: 530534 - DNA, 15 bp, Homo sapiens
ctccttgaaggcact

SEQ ID NO: 530535 - DNA, 15 bp, Homo sapiens
gctccttgaaggcac

SEQ ID NO: 530536 - DNA, 15 bp, Homo sapiens
agctccttgaaggca

SEQ ID NO: 530537 - DNA, 15 bp, Homo sapiens
aagctccttgaaggc

SEQ ID NO: 530538 - DNA, 15 bp, Homo sapiens
taagctccttgaagg

SEQ ID NO: 530539 - DNA, 15 bp, Homo sapiens
gtaagctccttgaag

SEQ ID NO: 530540 - DNA, 15 bp, Homo sapiens
cgtaagctccttgaa

SEQ ID NO: 530541 - DNA, 15 bp, Homo sapiens
acgtaagctccttga

SEQ ID NO: 530542 - DNA, 15 bp, Homo sapiens
aacgtaagctccttg

SEQ ID NO: 530543 - DNA, 15 bp, Homo sapiens
gaacgtaagctcctt

SEQ ID NO: 530544 - DNA, 15 bp, Homo sapiens
agaacgtaagctcct

SEQ ID NO: 530545 - DNA, 15 bp, Homo sapiens
tagaacgtaagctcc

SEQ ID NO: 530546 - DNA, 15 bp, Homo sapiens
ctagaacgtaagctc

SEQ ID NO: 530547 - DNA, 15 bp, Homo sapiens
actagaacgtaagct

SEQ ID NO: 530548 - DNA, 15 bp, Homo sapiens
aactagaacgtaagc

SEQ ID NO: 530549 - DNA, 15 bp, Homo sapiens
taactagaacgtaag

SEQ ID NO: 530550 - DNA, 15 bp, Homo sapiens
ctaactagaacgtaa

SEQ ID NO: 530551 - DNA, 15 bp, Homo sapiens
cctaactagaacgta

SEQ ID NO: 530552 - DNA, 15 bp, Homo sapiens
ccctaactagaacgt

SEQ ID NO: 530553 - DNA, 15 bp, Homo sapiens
tccctaactagaacg

SEQ ID NO: 530554 - DNA, 15 bp, Homo sapiens
ttccctaactagaac

SEQ ID NO: 530555 - DNA, 15 bp, Homo sapiens
tttccctaactagaa

SEQ ID NO: 530556 - DNA, 15 bp, Homo sapiens
atttccctaactaga

SEQ ID NO: 530557 - DNA, 15 bp, Homo sapiens
aatttccctaactag

SEQ ID NO: 530558 - DNA, 15 bp, Homo sapiens
caatttccctaacta

SEQ ID NO: 530559 - DNA, 15 bp, Homo sapiens
ccaatttccctaact

SEQ ID NO: 530560 - DNA, 15 bp, Homo sapiens
tccaatttccctaac

SEQ ID NO: 530561 - DNA, 15 bp, Homo sapiens
atccaatttccctaa

SEQ ID NO: 530562 - DNA, 15 bp, Homo sapiens
catccaatttcccta

SEQ ID NO: 530563 - DNA, 15 bp, Homo sapiens
gcatccaatttccct

SEQ ID NO: 530564 - DNA, 15 bp, Homo sapiens
ggcatccaatttccc

SEQ ID NO: 530565 - DNA, 15 bp, Homo sapiens
aggcatccaatttcc

SEQ ID NO: 530566 - DNA, 15 bp, Homo sapiens
aaggcatccaatttc

SEQ ID NO: 530567 - DNA, 15 bp, Homo sapiens
gaaggcatccaattt

SEQ ID NO: 530568 - DNA, 15 bp, Homo sapiens
tgaaggcatccaatt

SEQ ID NO: 530569 - DNA, 15 bp, Homo sapiens
gtgaaggcatccaat

SEQ ID NO: 530570 - DNA, 15 bp, Homo sapiens
tgtgaaggcatccaa

SEQ ID NO: 530571 - DNA, 15 bp, Homo sapiens
ttgtgaaggcatcca

SEQ ID NO: 530572 - DNA, 15 bp, Homo sapiens
cttgtgaaggcatcc

SEQ ID NO: 530573 - DNA, 15 bp, Homo sapiens
ccttgtgaaggcatc

SEQ ID NO: 530574 - DNA, 15 bp, Homo sapiens
gccttgtgaaggcat

SEQ ID NO: 530575 - DNA, 15 bp, Homo sapiens
agccttgtgaaggca

SEQ ID NO: 530576 - DNA, 15 bp, Homo sapiens
gagccttgtgaaggc

SEQ ID NO: 530577 - DNA, 15 bp, Homo sapiens
tgagccttgtgaagg

SEQ ID NO: 530578 - DNA, 15 bp, Homo sapiens
ctgagccttgtgaag

SEQ ID NO: 530579 - DNA, 15 bp, Homo sapiens
actgagccttgtgaa

SEQ ID NO: 530580 - DNA, 15 bp, Homo sapiens
cactgagccttgtga

SEQ ID NO: 530581 - DNA, 15 bp, Homo sapiens
tcactgagccttgtg

SEQ ID NO: 530582 - DNA, 15 bp, Homo sapiens
gtcactgagccttgt

SEQ ID NO: 530583 - DNA, 15 bp, Homo sapiens
tgtcactgagccttg

SEQ ID NO: 530584 - DNA, 15 bp, Homo sapiens
ttgtcactgagcctt

SEQ ID NO: 530585 - DNA, 15 bp, Homo sapiens
tttgtcactgagcct

SEQ ID NO: 530586 - DNA, 15 bp, Homo sapiens
gtttgtcactgagcc

SEQ ID NO: 530587 - DNA, 15 bp, Homo sapiens
ggtttgtcactgagc

SEQ ID NO: 530588 - DNA, 15 bp, Homo sapiens
aggtttgtcactgag

SEQ ID NO: 530589 - DNA, 15 bp, Homo sapiens
caggtttgtcactga

SEQ ID NO: 530590 - DNA, 15 bp, Homo sapiens
tcaggtttgtcactg

SEQ ID NO: 530591 - DNA, 15 bp, Homo sapiens
ttcaggtttgtcact

SEQ ID NO: 530592 - DNA, 15 bp, Homo sapiens
cttcaggtttgtcac

SEQ ID NO: 530593 - DNA, 15 bp, Homo sapiens
tcttcaggtttgtca

SEQ ID NO: 530594 - DNA, 15 bp, Homo sapiens
ttcttcaggtttgtc

SEQ ID NO: 530595 - DNA, 15 bp, Homo sapiens
cttcttcaggtttgt

SEQ ID NO: 530596 - DNA, 15 bp, Homo sapiens
tcttcttcaggtttg

SEQ ID NO: 530597 - DNA, 15 bp, Homo sapiens
atcttcttcaggttt

SEQ ID NO: 530598 - DNA, 15 bp, Homo sapiens
aatcttcttcaggtt

SEQ ID NO: 530599 - DNA, 15 bp, Homo sapiens
caatcttcttcaggt

SEQ ID NO: 530600 - DNA, 15 bp, Homo sapiens
ccaatcttcttcagg

SEQ ID NO: 530601 - DNA, 15 bp, Homo sapiens
tccaatcttcttcag

SEQ ID NO: 530602 - DNA, 15 bp, Homo sapiens
ctccaatcttcttca

SEQ ID NO: 530603 - DNA, 15 bp, Homo sapiens
cctccaatcttcttc

SEQ ID NO: 530604 - DNA, 15 bp, Homo sapiens
tcctccaatcttctt

SEQ ID NO: 530605 - DNA, 15 bp, Homo sapiens
ttcctccaatcttct

SEQ ID NO: 530606 - DNA, 15 bp, Homo sapiens
gttcctccaatcttc

SEQ ID NO: 530607 - DNA, 15 bp, Homo sapiens
ggttcctccaatctt

SEQ ID NO: 530608 - DNA, 15 bp, Homo sapiens
aggttcctccaatct

SEQ ID NO: 530609 - DNA, 15 bp, Homo sapiens
aaggttcctccaatc

SEQ ID NO: 530610 - DNA, 15 bp, Homo sapiens
caaggttcctccaat

SEQ ID NO: 530611 - DNA, 15 bp, Homo sapiens
tcaaggttcctccaa

SEQ ID NO: 530612 - DNA, 15 bp, Homo sapiens
ttcaaggttcctcca

SEQ ID NO: 530613 - DNA, 15 bp, Homo sapiens
cttcaaggttcctcc

SEQ ID NO: 530614 - DNA, 15 bp, Homo sapiens
tcttcaaggttcctc

SEQ ID NO: 530615 - DNA, 15 bp, Homo sapiens
ctcttcaaggttcct

SEQ ID NO: 530616 - DNA, 15 bp, Homo sapiens
actcttcaaggttcc

SEQ ID NO: 530617 - DNA, 15 bp, Homo sapiens
cactcttcaaggttc

SEQ ID NO: 530618 - DNA, 15 bp, Homo sapiens
tcactcttcaaggtt

SEQ ID NO: 530619 - DNA, 15 bp, Homo sapiens
ctcactcttcaaggt

SEQ ID NO: 530620 - DNA, 15 bp, Homo sapiens
tctcactcttcaagg

SEQ ID NO: 530621 - DNA, 15 bp, Homo sapiens
ttctcactcttcaag

SEQ ID NO: 530622 - DNA, 15 bp, Homo sapiens
tttctcactcttcaa

SEQ ID NO: 530623 - DNA, 15 bp, Homo sapiens
gtttctcactcttca

SEQ ID NO: 530624 - DNA, 15 bp, Homo sapiens
tgtttctcactcttc

SEQ ID NO: 530625 - DNA, 15 bp, Homo sapiens
gtgtttctcactctt

SEQ ID NO: 530626 - DNA, 15 bp, Homo sapiens
ggtgtttctcactct

SEQ ID NO: 530627 - DNA, 15 bp, Homo sapiens
aggtgtttctcactc

SEQ ID NO: 530628 - DNA, 15 bp, Homo sapiens
taggtgtttctcact

SEQ ID NO: 530629 - DNA, 15 bp, Homo sapiens
ctaggtgtttctcac

SEQ ID NO: 530630 - DNA, 15 bp, Homo sapiens
cctaggtgtttctca

SEQ ID NO: 530631 - DNA, 15 bp, Homo sapiens
ccctaggtgtttctc

SEQ ID NO: 530632 - DNA, 15 bp, Homo sapiens
cccctaggtgtttct

SEQ ID NO: 530633 - DNA, 15 bp, Homo sapiens
ccccctaggtgtttc

SEQ ID NO: 530634 - DNA, 15 bp, Homo sapiens
tccccctaggtgttt

SEQ ID NO: 530635 - DNA, 15 bp, Homo sapiens
gtccccctaggtgtt

SEQ ID NO: 530636 - DNA, 15 bp, Homo sapiens
tgtccccctaggtgt

SEQ ID NO: 530637 - DNA, 15 bp, Homo sapiens
ctgtccccctaggtg

SEQ ID NO: 530638 - DNA, 15 bp, Homo sapiens
tctgtccccctaggt

SEQ ID NO: 530639 - DNA, 15 bp, Homo sapiens
gtctgtccccctagg

SEQ ID NO: 530640 - DNA, 15 bp, Homo sapiens
tgtctgtccccctag

SEQ ID NO: 530641 - DNA, 15 bp, Homo sapiens
ctgtctgtcccccta

SEQ ID NO: 530642 - DNA, 15 bp, Homo sapiens
cctgtctgtccccct

SEQ ID NO: 530643 - DNA, 15 bp, Homo sapiens
ccctgtctgtccccc

SEQ ID NO: 530644 - DNA, 15 bp, Homo sapiens
tccctgtctgtcccc

SEQ ID NO: 530645 - DNA, 15 bp, Homo sapiens
ttccctgtctgtccc

SEQ ID NO: 530646 - DNA, 15 bp, Homo sapiens
tttccctgtctgtcc

SEQ ID NO: 530647 - DNA, 15 bp, Homo sapiens
ctttccctgtctgtc

SEQ ID NO: 530648 - DNA, 15 bp, Homo sapiens
gctttccctgtctgt

SEQ ID NO: 530649 - DNA, 15 bp, Homo sapiens
agctttccctgtctg

SEQ ID NO: 530650 - DNA, 15 bp, Homo sapiens
cagctttccctgtct

SEQ ID NO: 530651 - DNA, 15 bp, Homo sapiens
gcagctttccctgtc

SEQ ID NO: 530652 - DNA, 15 bp, Homo sapiens
cgcagctttccctgt

SEQ ID NO: 530653 - DNA, 15 bp, Homo sapiens
tcgcagctttccctg

SEQ ID NO: 530654 - DNA, 15 bp, Homo sapiens
ttcgcagctttccct

SEQ ID NO: 530655 - DNA, 15 bp, Homo sapiens
attcgcagctttccc

SEQ ID NO: 530656 - DNA, 15 bp, Homo sapiens
aattcgcagctttcc

SEQ ID NO: 530657 - DNA, 15 bp, Homo sapiens
gaattcgcagctttc

SEQ ID NO: 530658 - DNA, 15 bp, Homo sapiens
agaattcgcagcttt

SEQ ID NO: 530659 - DNA, 15 bp, Homo sapiens
gagaattcgcagctt

SEQ ID NO: 530660 - DNA, 15 bp, Homo sapiens
agagaattcgcagct

SEQ ID NO: 530661 - DNA, 15 bp, Homo sapiens
aagagaattcgcagc

SEQ ID NO: 530662 - DNA, 15 bp, Homo sapiens
caagagaattcgcag

SEQ ID NO: 530663 - DNA, 15 bp, Homo sapiens
acaagagaattcgca

SEQ ID NO: 530664 - DNA, 15 bp, Homo sapiens
gacaagagaattcgc

SEQ ID NO: 530665 - DNA, 15 bp, Homo sapiens
ggacaagagaattcg

SEQ ID NO: 530666 - DNA, 15 bp, Homo sapiens
tggacaagagaattc

SEQ ID NO: 530667 - DNA, 15 bp, Homo sapiens
ttggacaagagaatt

SEQ ID NO: 530668 - DNA, 15 bp, Homo sapiens
tttggacaagagaat

SEQ ID NO: 530669 - DNA, 15 bp, Homo sapiens
atttggacaagagaa

SEQ ID NO: 530670 - DNA, 15 bp, Homo sapiens
tatttggacaagaga

SEQ ID NO: 530671 - DNA, 15 bp, Homo sapiens
ctatttggacaagag

SEQ ID NO: 530672 - DNA, 15 bp, Homo sapiens
actatttggacaaga

SEQ ID NO: 530673 - DNA, 15 bp, Homo sapiens
cactatttggacaag

SEQ ID NO: 530674 - DNA, 15 bp, Homo sapiens
ccactatttggacaa

SEQ ID NO: 530675 - DNA, 15 bp, Homo sapiens
tccactatttggaca

SEQ ID NO: 530676 - DNA, 15 bp, Homo sapiens
atccactatttggac

SEQ ID NO: 530677 - DNA, 15 bp, Homo sapiens
aatccactatttgga

SEQ ID NO: 530678 - DNA, 15 bp, Homo sapiens
caatccactatttgg

SEQ ID NO: 530679 - DNA, 15 bp, Homo sapiens
ccaatccactatttg

SEQ ID NO: 530680 - DNA, 15 bp, Homo sapiens
cccaatccactattt

SEQ ID NO: 530681 - DNA, 15 bp, Homo sapiens
gcccaatccactatt

SEQ ID NO: 530682 - DNA, 15 bp, Homo sapiens
tgcccaatccactat

SEQ ID NO: 530683 - DNA, 15 bp, Homo sapiens
ctgcccaatccacta

SEQ ID NO: 530684 - DNA, 15 bp, Homo sapiens
tctgcccaatccact

SEQ ID NO: 530685 - DNA, 15 bp, Homo sapiens
gtctgcccaatccac

SEQ ID NO: 530686 - DNA, 15 bp, Homo sapiens
agtctgcccaatcca

SEQ ID NO: 530687 - DNA, 15 bp, Homo sapiens
cagtctgcccaatcc

SEQ ID NO: 530688 - DNA, 15 bp, Homo sapiens
ccagtctgcccaatc

SEQ ID NO: 530689 - DNA, 15 bp, Homo sapiens
gccagtctgcccaat

SEQ ID NO: 530690 - DNA, 15 bp, Homo sapiens
ggccagtctgcccaa

SEQ ID NO: 530691 - DNA, 15 bp, Homo sapiens
aggccagtctgccca

SEQ ID NO: 530692 - DNA, 15 bp, Homo sapiens
caggccagtctgccc

SEQ ID NO: 530693 - DNA, 15 bp, Homo sapiens
ccaggccagtctgcc

SEQ ID NO: 530694 - DNA, 15 bp, Homo sapiens
tccaggccagtctgc

SEQ ID NO: 530695 - DNA, 15 bp, Homo sapiens
ctccaggccagtctg

SEQ ID NO: 530696 - DNA, 15 bp, Homo sapiens
cctccaggccagtct

SEQ ID NO: 530697 - DNA, 15 bp, Homo sapiens
tcctccaggccagtc

SEQ ID NO: 530698 - DNA, 15 bp, Homo sapiens
ttcctccaggccagt

SEQ ID NO: 530699 - DNA, 15 bp, Homo sapiens
tttcctccaggccag

SEQ ID NO: 530700 - DNA, 15 bp, Homo sapiens
atttcctccaggcca

SEQ ID NO: 530701 - DNA, 15 bp, Homo sapiens
catttcctccaggcc

SEQ ID NO: 530702 - DNA, 15 bp, Homo sapiens
gcatttcctccaggc

SEQ ID NO: 530703 - DNA, 15 bp, Homo sapiens
agcatttcctccagg

SEQ ID NO: 530704 - DNA, 15 bp, Homo sapiens
tagcatttcctccag

SEQ ID NO: 530705 - DNA, 15 bp, Homo sapiens
ctagcatttcctcca

SEQ ID NO: 530706 - DNA, 15 bp, Homo sapiens
tctagcatttcctcc

SEQ ID NO: 530707 - DNA, 15 bp, Homo sapiens
ttctagcatttcctc

SEQ ID NO: 530708 - DNA, 15 bp, Homo sapiens
gttctagcatttcct

SEQ ID NO: 530709 - DNA, 15 bp, Homo sapiens
tgttctagcatttcc

SEQ ID NO: 530710 - DNA, 15 bp, Homo sapiens
ctgttctagcatttc

SEQ ID NO: 530711 - DNA, 15 bp, Homo sapiens
tctgttctagcattt

SEQ ID NO: 530712 - DNA, 15 bp, Homo sapiens
ctctgttctagcatt

SEQ ID NO: 530713 - DNA, 15 bp, Homo sapiens
cctctgttctagcat

SEQ ID NO: 530714 - DNA, 15 bp, Homo sapiens
ccctctgttctagca

SEQ ID NO: 530715 - DNA, 15 bp, Homo sapiens
tccctctgttctagc

SEQ ID NO: 530716 - DNA, 15 bp, Homo sapiens
ttccctctgttctag

SEQ ID NO: 530717 - DNA, 15 bp, Homo sapiens
tttccctctgttcta

SEQ ID NO: 530718 - DNA, 15 bp, Homo sapiens
ctttccctctgttct

SEQ ID NO: 530719 - DNA, 15 bp, Homo sapiens
cctttccctctgttc

SEQ ID NO: 530720 - DNA, 15 bp, Homo sapiens
tcctttccctctgtt

SEQ ID NO: 530721 - DNA, 15 bp, Homo sapiens
ctcctttccctctgt

SEQ ID NO: 530722 - DNA, 15 bp, Homo sapiens
cctcctttccctctg

SEQ ID NO: 530723 - DNA, 15 bp, Homo sapiens
gcctcctttccctct

SEQ ID NO: 530724 - DNA, 15 bp, Homo sapiens
agcctcctttccctc

SEQ ID NO: 530725 - DNA, 15 bp, Homo sapiens
cagcctcctttccct

SEQ ID NO: 530726 - DNA, 15 bp, Homo sapiens
ccagcctcctttccc

SEQ ID NO: 530727 - DNA, 15 bp, Homo sapiens
tccagcctcctttcc

SEQ ID NO: 530728 - DNA, 15 bp, Homo sapiens
ctccagcctcctttc

SEQ ID NO: 530729 - DNA, 15 bp, Homo sapiens
tctccagcctccttt

SEQ ID NO: 530730 - DNA, 15 bp, Homo sapiens
ctctccagcctcctt

SEQ ID NO: 530731 - DNA, 15 bp, Homo sapiens
cctctccagcctcct

SEQ ID NO: 530732 - DNA, 15 bp, Homo sapiens
gcctctccagcctcc

SEQ ID NO: 530733 - DNA, 15 bp, Homo sapiens
agcctctccagcctc

SEQ ID NO: 530734 - DNA, 15 bp, Homo sapiens
aagcctctccagcct

SEQ ID NO: 530735 - DNA, 15 bp, Homo sapiens
gaagcctctccagcc

SEQ ID NO: 530736 - DNA, 15 bp, Homo sapiens
agaagcctctccagc

SEQ ID NO: 530737 - DNA, 15 bp, Homo sapiens
cagaagcctctccag

SEQ ID NO: 530738 - DNA, 15 bp, Homo sapiens
tcagaagcctctcca

SEQ ID NO: 530739 - DNA, 15 bp, Homo sapiens
atcagaagcctctcc

SEQ ID NO: 530740 - DNA, 15 bp, Homo sapiens
catcagaagcctctc

SEQ ID NO: 530741 - DNA, 15 bp, Homo sapiens
ccatcagaagcctct

SEQ ID NO: 530742 - DNA, 15 bp, Homo sapiens
accatcagaagcctc

SEQ ID NO: 530743 - DNA, 15 bp, Homo sapiens
caccatcagaagcct

SEQ ID NO: 530744 - DNA, 15 bp, Homo sapiens
ccaccatcagaagcc

SEQ ID NO: 530745 - DNA, 15 bp, Homo sapiens
tccaccatcagaagc

SEQ ID NO: 530746 - DNA, 15 bp, Homo sapiens
ctccaccatcagaag

SEQ ID NO: 530747 - DNA, 15 bp, Homo sapiens
tctccaccatcagaa

SEQ ID NO: 530748 - DNA, 15 bp, Homo sapiens
atctccaccatcaga

SEQ ID NO: 530749 - DNA, 15 bp, Homo sapiens
gatctccaccatcag

SEQ ID NO: 530750 - DNA, 15 bp, Homo sapiens
agatctccaccatca

SEQ ID NO: 530751 - DNA, 15 bp, Homo sapiens
cagatctccaccatc

SEQ ID NO: 530752 - DNA, 15 bp, Homo sapiens
ccagatctccaccat

SEQ ID NO: 530753 - DNA, 15 bp, Homo sapiens
gccagatctccacca

SEQ ID NO: 530754 - DNA, 15 bp, Homo sapiens
tgccagatctccacc

SEQ ID NO: 530755 - DNA, 15 bp, Homo sapiens
atgccagatctccac

SEQ ID NO: 530756 - DNA, 15 bp, Homo sapiens
catgccagatctcca

SEQ ID NO: 530757 - DNA, 15 bp, Homo sapiens
gcatgccagatctcc

SEQ ID NO: 530758 - DNA, 15 bp, Homo sapiens
ggcatgccagatctc

SEQ ID NO: 530759 - DNA, 15 bp, Homo sapiens
tggcatgccagatct

SEQ ID NO: 530760 - DNA, 15 bp, Homo sapiens
ctggcatgccagatc

SEQ ID NO: 530761 - DNA, 15 bp, Homo sapiens
cctggcatgccagat

SEQ ID NO: 530762 - DNA, 15 bp, Homo sapiens
gcctggcatgccaga

SEQ ID NO: 530763 - DNA, 15 bp, Homo sapiens
agcctggcatgccag

SEQ ID NO: 530764 - DNA, 15 bp, Homo sapiens
aagcctggcatgcca

SEQ ID NO: 530765 - DNA, 15 bp, Homo sapiens
taagcctggcatgcc

SEQ ID NO: 530766 - DNA, 15 bp, Homo sapiens
ctaagcctggcatgc

SEQ ID NO: 530767 - DNA, 15 bp, Homo sapiens
cctaagcctggcatg

SEQ ID NO: 530768 - DNA, 15 bp, Homo sapiens
acctaagcctggcat

SEQ ID NO: 530769 - DNA, 15 bp, Homo sapiens
cacctaagcctggca

SEQ ID NO: 530770 - DNA, 15 bp, Homo sapiens
acacctaagcctggc

SEQ ID NO: 530771 - DNA, 15 bp, Homo sapiens
gacacctaagcctgg

SEQ ID NO: 530772 - DNA, 15 bp, Homo sapiens
agacacctaagcctg

SEQ ID NO: 530773 - DNA, 15 bp, Homo sapiens
tagacacctaagcct

SEQ ID NO: 530774 - DNA, 15 bp, Homo sapiens
ctagacacctaagcc

SEQ ID NO: 530775 - DNA, 15 bp, Homo sapiens
tctagacacctaagc

SEQ ID NO: 530776 - DNA, 15 bp, Homo sapiens
ttctagacacctaag

SEQ ID NO: 530777 - DNA, 15 bp, Homo sapiens
gttctagacacctaa

SEQ ID NO: 530778 - DNA, 15 bp, Homo sapiens
tgttctagacaccta

SEQ ID NO: 530779 - DNA, 15 bp, Homo sapiens
ctgttctagacacct

SEQ ID NO: 530780 - DNA, 15 bp, Homo sapiens
gctgttctagacacc

SEQ ID NO: 530781 - DNA, 15 bp, Homo sapiens
tgctgttctagacac

SEQ ID NO: 530782 - DNA, 15 bp, Homo sapiens
ttgctgttctagaca

SEQ ID NO: 530783 - DNA, 15 bp, Homo sapiens
gttgctgttctagac

SEQ ID NO: 530784 - DNA, 15 bp, Homo sapiens
agttgctgttctaga

SEQ ID NO: 530785 - DNA, 15 bp, Homo sapiens
cagttgctgttctag

SEQ ID NO: 530786 - DNA, 15 bp, Homo sapiens
acagttgctgttcta

SEQ ID NO: 530787 - DNA, 15 bp, Homo sapiens
tacagttgctgttct

SEQ ID NO: 530788 - DNA, 15 bp, Homo sapiens
atacagttgctgttc

SEQ ID NO: 530789 - DNA, 15 bp, Homo sapiens
catacagttgctgtt

SEQ ID NO: 530790 - DNA, 15 bp, Homo sapiens
acatacagttgctgt

SEQ ID NO: 530791 - DNA, 15 bp, Homo sapiens
cacatacagttgctg

SEQ ID NO: 530792 - DNA, 15 bp, Homo sapiens
tcacatacagttgct

SEQ ID NO: 530793 - DNA, 15 bp, Homo sapiens
ttcacatacagttgc

SEQ ID NO: 530794 - DNA, 15 bp, Homo sapiens
cttcacatacagttg

SEQ ID NO: 530795 - DNA, 15 bp, Homo sapiens
ccttcacatacagtt

SEQ ID NO: 530796 - DNA, 15 bp, Homo sapiens
cccttcacatacagt

SEQ ID NO: 530797 - DNA, 15 bp, Homo sapiens
ccccttcacatacag

SEQ ID NO: 530798 - DNA, 15 bp, Homo sapiens
tccccttcacataca

SEQ ID NO: 530799 - DNA, 15 bp, Homo sapiens
ctccccttcacatac

SEQ ID NO: 530800 - DNA, 15 bp, Homo sapiens
gctccccttcacata

SEQ ID NO: 530801 - DNA, 15 bp, Homo sapiens
ggctccccttcacat

SEQ ID NO: 530802 - DNA, 15 bp, Homo sapiens
tggctccccttcaca

SEQ ID NO: 530803 - DNA, 15 bp, Homo sapiens
ctggctccccttcac

SEQ ID NO: 530804 - DNA, 15 bp, Homo sapiens
cctggctccccttca

SEQ ID NO: 530805 - DNA, 15 bp, Homo sapiens
ccctggctccccttc

SEQ ID NO: 530806 - DNA, 15 bp, Homo sapiens
tccctggctcccctt

SEQ ID NO: 530807 - DNA, 15 bp, Homo sapiens
ttccctggctcccct

SEQ ID NO: 530808 - DNA, 15 bp, Homo sapiens
gttccctggctcccc

SEQ ID NO: 530809 - DNA, 15 bp, Homo sapiens
cgttccctggctccc

SEQ ID NO: 530810 - DNA, 15 bp, Homo sapiens
acgttccctggctcc

SEQ ID NO: 530811 - DNA, 15 bp, Homo sapiens
aacgttccctggctc

SEQ ID NO: 530812 - DNA, 15 bp, Homo sapiens
aaacgttccctggct

SEQ ID NO: 530813 - DNA, 15 bp, Homo sapiens
gaaacgttccctggc

SEQ ID NO: 530814 - DNA, 15 bp, Homo sapiens
agaaacgttccctgg

SEQ ID NO: 530815 - DNA, 15 bp, Homo sapiens
cagaaacgttccctg

SEQ ID NO: 530816 - DNA, 15 bp, Homo sapiens
tcagaaacgttccct

SEQ ID NO: 530817 - DNA, 15 bp, Homo sapiens
ttcagaaacgttccc

SEQ ID NO: 530818 - DNA, 15 bp, Homo sapiens
gttcagaaacgttcc

SEQ ID NO: 530819 - DNA, 15 bp, Homo sapiens
agttcagaaacgttc

SEQ ID NO: 530820 - DNA, 15 bp, Homo sapiens
tagttcagaaacgtt

SEQ ID NO: 530821 - DNA, 15 bp, Homo sapiens
ttagttcagaaacgt

SEQ ID NO: 530822 - DNA, 15 bp, Homo sapiens
cttagttcagaaacg

SEQ ID NO: 530823 - DNA, 15 bp, Homo sapiens
gcttagttcagaaac

SEQ ID NO: 530824 - DNA, 15 bp, Homo sapiens
tgcttagttcagaaa

SEQ ID NO: 530825 - DNA, 15 bp, Homo sapiens
ttgcttagttcagaa

SEQ ID NO: 530826 - DNA, 15 bp, Homo sapiens
cttgcttagttcaga

SEQ ID NO: 530827 - DNA, 15 bp, Homo sapiens
ccttgcttagttcag

SEQ ID NO: 530828 - DNA, 15 bp, Homo sapiens
tccttgcttagttca

SEQ ID NO: 530829 - DNA, 15 bp, Homo sapiens
gtccttgcttagttc

SEQ ID NO: 530830 - DNA, 15 bp, Homo sapiens
tgtccttgcttagtt

SEQ ID NO: 530831 - DNA, 15 bp, Homo sapiens
ttgtccttgcttagt

SEQ ID NO: 530832 - DNA, 15 bp, Homo sapiens
tttgtccttgcttag

SEQ ID NO: 530833 - DNA, 15 bp, Homo sapiens
atttgtccttgctta

SEQ ID NO: 530834 - DNA, 15 bp, Homo sapiens
aatttgtccttgctt

SEQ ID NO: 530835 - DNA, 15 bp, Homo sapiens
gaatttgtccttgct

SEQ ID NO: 530836 - DNA, 15 bp, Homo sapiens
tgaatttgtccttgc

SEQ ID NO: 530837 - DNA, 15 bp, Homo sapiens
ctgaatttgtccttg

SEQ ID NO: 530838 - DNA, 15 bp, Homo sapiens
tctgaatttgtcctt

SEQ ID NO: 530839 - DNA, 15 bp, Homo sapiens
ctctgaatttgtcct

SEQ ID NO: 530840 - DNA, 15 bp, Homo sapiens
tctctgaatttgtcc

SEQ ID NO: 530841 - DNA, 15 bp, Homo sapiens
gtctctgaatttgtc

SEQ ID NO: 530842 - DNA, 15 bp, Homo sapiens
ggtctctgaatttgt

SEQ ID NO: 530843 - DNA, 15 bp, Homo sapiens
gggtctctgaatttg

SEQ ID NO: 530844 - DNA, 15 bp, Homo sapiens
agggtctctgaattt

SEQ ID NO: 530845 - DNA, 15 bp, Homo sapiens
cagggtctctgaatt

SEQ ID NO: 530846 - DNA, 15 bp, Homo sapiens
tcagggtctctgaat

SEQ ID NO: 530847 - DNA, 15 bp, Homo sapiens
ctcagggtctctgaa

SEQ ID NO: 530848 - DNA, 15 bp, Homo sapiens
gctcagggtctctga

SEQ ID NO: 530849 - DNA, 15 bp, Homo sapiens
agctcagggtctctg

SEQ ID NO: 530850 - DNA, 15 bp, Homo sapiens
aagctcagggtctct

SEQ ID NO: 530851 - DNA, 15 bp, Homo sapiens
aaagctcagggtctc

SEQ ID NO: 530852 - DNA, 15 bp, Homo sapiens
taaagctcagggtct

SEQ ID NO: 530853 - DNA, 15 bp, Homo sapiens
ctaaagctcagggtc

SEQ ID NO: 530854 - DNA, 15 bp, Homo sapiens
tctaaagctcagggt

SEQ ID NO: 530855 - DNA, 15 bp, Homo sapiens
ttctaaagctcaggg

SEQ ID NO: 530856 - DNA, 15 bp, Homo sapiens
tttctaaagctcagg

SEQ ID NO: 530857 - DNA, 15 bp, Homo sapiens
ctttctaaagctcag

SEQ ID NO: 530858 - DNA, 15 bp, Homo sapiens
tctttctaaagctca

SEQ ID NO: 530859 - DNA, 15 bp, Homo sapiens
gtctttctaaagctc

SEQ ID NO: 530860 - DNA, 15 bp, Homo sapiens
tgtctttctaaagct

SEQ ID NO: 530861 - DNA, 15 bp, Homo sapiens
ttgtctttctaaagc

SEQ ID NO: 530862 - DNA, 15 bp, Homo sapiens
cttgtctttctaaag

SEQ ID NO: 530863 - DNA, 15 bp, Homo sapiens
acttgtctttctaaa

SEQ ID NO: 530864 - DNA, 15 bp, Homo sapiens
cacttgtctttctaa

SEQ ID NO: 530865 - DNA, 15 bp, Homo sapiens
ccacttgtctttcta

SEQ ID NO: 530866 - DNA, 15 bp, Homo sapiens
cccacttgtctttct

SEQ ID NO: 530867 - DNA, 15 bp, Homo sapiens
acccacttgtctttc

SEQ ID NO: 530868 - DNA, 15 bp, Homo sapiens
cacccacttgtcttt

SEQ ID NO: 530869 - DNA, 15 bp, Homo sapiens
ccacccacttgtctt

SEQ ID NO: 530870 - DNA, 15 bp, Homo sapiens
gccacccacttgtct

SEQ ID NO: 530871 - DNA, 15 bp, Homo sapiens
agccacccacttgtc

SEQ ID NO: 530872 - DNA, 15 bp, Homo sapiens
aagccacccacttgt

SEQ ID NO: 530873 - DNA, 15 bp, Homo sapiens
aaagccacccacttg

SEQ ID NO: 530874 - DNA, 15 bp, Homo sapiens
caaagccacccactt

SEQ ID NO: 530875 - DNA, 15 bp, Homo sapiens
tcaaagccacccact

SEQ ID NO: 530876 - DNA, 15 bp, Homo sapiens
atcaaagccacccac

SEQ ID NO: 530877 - DNA, 15 bp, Homo sapiens
catcaaagccaccca

SEQ ID NO: 530878 - DNA, 15 bp, Homo sapiens
ccatcaaagccaccc

SEQ ID NO: 530879 - DNA, 15 bp, Homo sapiens
tccatcaaagccacc

SEQ ID NO: 530880 - DNA, 15 bp, Homo sapiens
gtccatcaaagccac

SEQ ID NO: 530881 - DNA, 15 bp, Homo sapiens
cgtccatcaaagcca

SEQ ID NO: 530882 - DNA, 15 bp, Homo sapiens
ccgtccatcaaagcc

SEQ ID NO: 530883 - DNA, 15 bp, Homo sapiens
accgtccatcaaagc

SEQ ID NO: 530884 - DNA, 15 bp, Homo sapiens
aaccgtccatcaaag

SEQ ID NO: 530885 - DNA, 15 bp, Homo sapiens
aaaccgtccatcaaa

SEQ ID NO: 530886 - DNA, 15 bp, Homo sapiens
caaaccgtccatcaa

SEQ ID NO: 530887 - DNA, 15 bp, Homo sapiens
ccaaaccgtccatca

SEQ ID NO: 530888 - DNA, 15 bp, Homo sapiens
tccaaaccgtccatc

SEQ ID NO: 530889 - DNA, 15 bp, Homo sapiens
ctccaaaccgtccat

SEQ ID NO: 530890 - DNA, 15 bp, Homo sapiens
cctccaaaccgtcca

SEQ ID NO: 530891 - DNA, 15 bp, Homo sapiens
tcctccaaaccgtcc

SEQ ID NO: 530892 - DNA, 15 bp, Homo sapiens
ctcctccaaaccgtc

SEQ ID NO: 530893 - DNA, 15 bp, Homo sapiens
cctcctccaaaccgt

SEQ ID NO: 530894 - DNA, 15 bp, Homo sapiens
gcctcctccaaaccg

SEQ ID NO: 530895 - DNA, 15 bp, Homo sapiens
tgcctcctccaaacc

SEQ ID NO: 530896 - DNA, 15 bp, Homo sapiens
ttgcctcctccaaac

SEQ ID NO: 530897 - DNA, 15 bp, Homo sapiens
cttgcctcctccaaa

SEQ ID NO: 530898 - DNA, 15 bp, Homo sapiens
tcttgcctcctccaa

SEQ ID NO: 530899 - DNA, 15 bp, Homo sapiens
gtcttgcctcctcca

SEQ ID NO: 530900 - DNA, 15 bp, Homo sapiens
agtcttgcctcctcc

SEQ ID NO: 530901 - DNA, 15 bp, Homo sapiens
cagtcttgcctcctc

SEQ ID NO: 530902 - DNA, 15 bp, Homo sapiens
ccagtcttgcctcct

SEQ ID NO: 530903 - DNA, 15 bp, Homo sapiens
tccagtcttgcctcc

SEQ ID NO: 530904 - DNA, 15 bp, Homo sapiens
ctccagtcttgcctc

SEQ ID NO: 530905 - DNA, 15 bp, Homo sapiens
cctccagtcttgcct

SEQ ID NO: 530906 - DNA, 15 bp, Homo sapiens
acctccagtcttgcc

SEQ ID NO: 530907 - DNA, 15 bp, Homo sapiens
cacctccagtcttgc

SEQ ID NO: 530908 - DNA, 15 bp, Homo sapiens
ccacctccagtcttg

SEQ ID NO: 530909 - DNA, 15 bp, Homo sapiens
cccacctccagtctt

SEQ ID NO: 530910 - DNA, 15 bp, Homo sapiens
tcccacctccagtct

SEQ ID NO: 530911 - DNA, 15 bp, Homo sapiens
ttcccacctccagtc

SEQ ID NO: 530912 - DNA, 15 bp, Homo sapiens
tttcccacctccagt

SEQ ID NO: 530913 - DNA, 15 bp, Homo sapiens
ttttcccacctccag

SEQ ID NO: 530914 - DNA, 15 bp, Homo sapiens
attttcccacctcca

SEQ ID NO: 530915 - DNA, 15 bp, Homo sapiens
aattttcccacctcc

SEQ ID NO: 530916 - DNA, 15 bp, Homo sapiens
taattttcccacctc

SEQ ID NO: 530917 - DNA, 15 bp, Homo sapiens
ctaattttcccacct

SEQ ID NO: 530918 - DNA, 15 bp, Homo sapiens
gctaattttcccacc

SEQ ID NO: 530919 - DNA, 15 bp, Homo sapiens
tgctaattttcccac

SEQ ID NO: 530920 - DNA, 15 bp, Homo sapiens
ttgctaattttccca

SEQ ID NO: 530921 - DNA, 15 bp, Homo sapiens
cttgctaattttccc

SEQ ID NO: 530922 - DNA, 15 bp, Homo sapiens
ccttgctaattttcc

SEQ ID NO: 530923 - DNA, 15 bp, Homo sapiens
tccttgctaattttc

SEQ ID NO: 530924 - DNA, 15 bp, Homo sapiens
ctccttgctaatttt

SEQ ID NO: 530925 - DNA, 15 bp, Homo sapiens
cctccttgctaattt

SEQ ID NO: 530926 - DNA, 15 bp, Homo sapiens
acctccttgctaatt

SEQ ID NO: 530927 - DNA, 15 bp, Homo sapiens
gacctccttgctaat

SEQ ID NO: 530928 - DNA, 15 bp, Homo sapiens
agacctccttgctaa

SEQ ID NO: 530929 - DNA, 15 bp, Homo sapiens
cagacctccttgcta

SEQ ID NO: 530930 - DNA, 15 bp, Homo sapiens
acagacctccttgct

SEQ ID NO: 530931 - DNA, 15 bp, Homo sapiens
cacagacctccttgc

SEQ ID NO: 530932 - DNA, 15 bp, Homo sapiens
tcacagacctccttg

SEQ ID NO: 530933 - DNA, 15 bp, Homo sapiens
ttcacagacctcctt

SEQ ID NO: 530934 - DNA, 15 bp, Homo sapiens
tttcacagacctcct

SEQ ID NO: 530935 - DNA, 15 bp, Homo sapiens
atttcacagacctcc

SEQ ID NO: 530936 - DNA, 15 bp, Homo sapiens
tatttcacagacctc

SEQ ID NO: 530937 - DNA, 15 bp, Homo sapiens
ttatttcacagacct

SEQ ID NO: 530938 - DNA, 15 bp, Homo sapiens
attatttcacagacc

SEQ ID NO: 530939 - DNA, 15 bp, Homo sapiens
gattatttcacagac

SEQ ID NO: 530940 - DNA, 15 bp, Homo sapiens
ggattatttcacaga

SEQ ID NO: 530941 - DNA, 15 bp, Homo sapiens
tggattatttcacag

SEQ ID NO: 530942 - DNA, 15 bp, Homo sapiens
ctggattatttcaca

SEQ ID NO: 530943 - DNA, 15 bp, Homo sapiens
cctggattatttcac

SEQ ID NO: 530944 - DNA, 15 bp, Homo sapiens
tcctggattatttca

SEQ ID NO: 530945 - DNA, 15 bp, Homo sapiens
ctcctggattatttc

SEQ ID NO: 530946 - DNA, 15 bp, Homo sapiens
tctcctggattattt

SEQ ID NO: 530947 - DNA, 15 bp, Homo sapiens
ttctcctggattatt

SEQ ID NO: 530948 - DNA, 15 bp, Homo sapiens
gttctcctggattat

SEQ ID NO: 530949 - DNA, 15 bp, Homo sapiens
tgttctcctggatta

SEQ ID NO: 530950 - DNA, 15 bp, Homo sapiens
ttgttctcctggatt

SEQ ID NO: 530951 - DNA, 15 bp, Homo sapiens
attgttctcctggat

SEQ ID NO: 530952 - DNA, 15 bp, Homo sapiens
cattgttctcctgga

SEQ ID NO: 530953 - DNA, 15 bp, Homo sapiens
tcattgttctcctgg

SEQ ID NO: 530954 - DNA, 15 bp, Homo sapiens
atcattgttctcctg

SEQ ID NO: 530955 - DNA, 15 bp, Homo sapiens
catcattgttctcct

SEQ ID NO: 530956 - DNA, 15 bp, Homo sapiens
tcatcattgttctcc

SEQ ID NO: 530957 - DNA, 15 bp, Homo sapiens
ctcatcattgttctc

SEQ ID NO: 530958 - DNA, 15 bp, Homo sapiens
cctcatcattgttct

SEQ ID NO: 530959 - DNA, 15 bp, Homo sapiens
gcctcatcattgttc

SEQ ID NO: 530960 - DNA, 15 bp, Homo sapiens
ggcctcatcattgtt

SEQ ID NO: 530961 - DNA, 15 bp, Homo sapiens
aggcctcatcattgt

SEQ ID NO: 530962 - DNA, 15 bp, Homo sapiens
caggcctcatcattg

SEQ ID NO: 530963 - DNA, 15 bp, Homo sapiens
ccaggcctcatcatt

SEQ ID NO: 530964 - DNA, 15 bp, Homo sapiens
tccaggcctcatcat

SEQ ID NO: 530965 - DNA, 15 bp, Homo sapiens
atccaggcctcatca

SEQ ID NO: 530966 - DNA, 15 bp, Homo sapiens
aatccaggcctcatc

SEQ ID NO: 530967 - DNA, 15 bp, Homo sapiens
caatccaggcctcat

SEQ ID NO: 530968 - DNA, 15 bp, Homo sapiens
ccaatccaggcctca

SEQ ID NO: 530969 - DNA, 15 bp, Homo sapiens
tccaatccaggcctc

SEQ ID NO: 530970 - DNA, 15 bp, Homo sapiens
atccaatccaggcct

SEQ ID NO: 530971 - DNA, 15 bp, Homo sapiens
aatccaatccaggcc

SEQ ID NO: 530972 - DNA, 15 bp, Homo sapiens
gaatccaatccaggc

SEQ ID NO: 530973 - DNA, 15 bp, Homo sapiens
cgaatccaatccagg

SEQ ID NO: 530974 - DNA, 15 bp, Homo sapiens
ccgaatccaatccag

SEQ ID NO: 530975 - DNA, 15 bp, Homo sapiens
accgaatccaatcca

SEQ ID NO: 530976 - DNA, 15 bp, Homo sapiens
taccgaatccaatcc

SEQ ID NO: 530977 - DNA, 15 bp, Homo sapiens
ttaccgaatccaatc

SEQ ID NO: 530978 - DNA, 15 bp, Homo sapiens
tttaccgaatccaat

SEQ ID NO: 530979 - DNA, 15 bp, Homo sapiens
ttttaccgaatccaa

SEQ ID NO: 530980 - DNA, 15 bp, Homo sapiens
tttttaccgaatcca

SEQ ID NO: 530981 - DNA, 15 bp, Homo sapiens
ctttttaccgaatcc

SEQ ID NO: 530982 - DNA, 15 bp, Homo sapiens
tctttttaccgaatc

SEQ ID NO: 530983 - DNA, 15 bp, Homo sapiens
ctctttttaccgaat

SEQ ID NO: 530984 - DNA, 15 bp, Homo sapiens
cctctttttaccgaa

SEQ ID NO: 530985 - DNA, 15 bp, Homo sapiens
ccctctttttaccga

SEQ ID NO: 530986 - DNA, 15 bp, Homo sapiens
cccctctttttaccg

SEQ ID NO: 530987 - DNA, 15 bp, Homo sapiens
ccccctctttttacc

SEQ ID NO: 530988 - DNA, 15 bp, Homo sapiens
accccctctttttac

SEQ ID NO: 530989 - DNA, 15 bp, Homo sapiens
aaccccctcttttta

SEQ ID NO: 530990 - DNA, 15 bp, Homo sapiens
caaccccctcttttt

SEQ ID NO: 530991 - DNA, 15 bp, Homo sapiens
gcaaccccctctttt

SEQ ID NO: 530992 - DNA, 15 bp, Homo sapiens
agcaaccccctcttt

SEQ ID NO: 530993 - DNA, 15 bp, Homo sapiens
tagcaaccccctctt

SEQ ID NO: 530994 - DNA, 15 bp, Homo sapiens
ctagcaaccccctct

SEQ ID NO: 530995 - DNA, 15 bp, Homo sapiens
tctagcaaccccctc

SEQ ID NO: 530996 - DNA, 15 bp, Homo sapiens
ttctagcaaccccct

SEQ ID NO: 530997 - DNA, 15 bp, Homo sapiens
cttctagcaaccccc

SEQ ID NO: 530998 - DNA, 15 bp, Homo sapiens
ccttctagcaacccc

SEQ ID NO: 530999 - DNA, 15 bp, Homo sapiens
tccttctagcaaccc

SEQ ID NO: 531000 - DNA, 15 bp, Homo sapiens
ttccttctagcaacc

SEQ ID NO: 531001 - DNA, 15 bp, Homo sapiens
tttccttctagcaac

SEQ ID NO: 531002 - DNA, 15 bp, Homo sapiens
ttttccttctagcaa

SEQ ID NO: 531003 - DNA, 15 bp, Homo sapiens
tttttccttctagca

SEQ ID NO: 531004 - DNA, 15 bp, Homo sapiens
gtttttccttctagc

SEQ ID NO: 531005 - DNA, 15 bp, Homo sapiens
tgtttttccttctag

SEQ ID NO: 531006 - DNA, 15 bp, Homo sapiens
ctgtttttccttcta

SEQ ID NO: 531007 - DNA, 15 bp, Homo sapiens
cctgtttttccttct

SEQ ID NO: 531008 - DNA, 15 bp, Homo sapiens
acctgtttttccttc

SEQ ID NO: 531009 - DNA, 15 bp, Homo sapiens
cacctgtttttcctt

SEQ ID NO: 531010 - DNA, 15 bp, Homo sapiens
acacctgtttttcct

SEQ ID NO: 531011 - DNA, 15 bp, Homo sapiens
cacacctgtttttcc

SEQ ID NO: 531012 - DNA, 15 bp, Homo sapiens
tcacacctgtttttc

SEQ ID NO: 531013 - DNA, 15 bp, Homo sapiens
gtcacacctgttttt

SEQ ID NO: 531014 - DNA, 15 bp, Homo sapiens
ggtcacacctgtttt

SEQ ID NO: 531015 - DNA, 15 bp, Homo sapiens
aggtcacacctgttt

SEQ ID NO: 531016 - DNA, 15 bp, Homo sapiens
caggtcacacctgtt

SEQ ID NO: 531017 - DNA, 15 bp, Homo sapiens
tcaggtcacacctgt

SEQ ID NO: 531018 - DNA, 15 bp, Homo sapiens
atcaggtcacacctg

SEQ ID NO: 531019 - DNA, 15 bp, Homo sapiens
gatcaggtcacacct

SEQ ID NO: 531020 - DNA, 15 bp, Homo sapiens
ggatcaggtcacacc

SEQ ID NO: 531021 - DNA, 15 bp, Homo sapiens
aggatcaggtcacac

SEQ ID NO: 531022 - DNA, 15 bp, Homo sapiens
caggatcaggtcaca

SEQ ID NO: 531023 - DNA, 15 bp, Homo sapiens
gcaggatcaggtcac

SEQ ID NO: 531024 - DNA, 15 bp, Homo sapiens
ggcaggatcaggtca

SEQ ID NO: 531025 - DNA, 15 bp, Homo sapiens
gggcaggatcaggtc

SEQ ID NO: 531026 - DNA, 15 bp, Homo sapiens
ggggcaggatcaggt

SEQ ID NO: 531027 - DNA, 15 bp, Homo sapiens
aggggcaggatcagg

SEQ ID NO: 531028 - DNA, 15 bp, Homo sapiens
aaggggcaggatcag

SEQ ID NO: 531029 - DNA, 15 bp, Homo sapiens
gaaggggcaggatca

SEQ ID NO: 531030 - DNA, 15 bp, Homo sapiens
ggaaggggcaggatc

SEQ ID NO: 531031 - DNA, 15 bp, Homo sapiens
aggaaggggcaggat

SEQ ID NO: 531032 - DNA, 15 bp, Homo sapiens
aaggaaggggcagga

SEQ ID NO: 531033 - DNA, 15 bp, Homo sapiens
gaaggaaggggcagg

SEQ ID NO: 531034 - DNA, 15 bp, Homo sapiens
agaaggaaggggcag

SEQ ID NO: 531035 - DNA, 15 bp, Homo sapiens
aagaaggaaggggca

SEQ ID NO: 531036 - DNA, 15 bp, Homo sapiens
caagaaggaaggggc

SEQ ID NO: 531037 - DNA, 15 bp, Homo sapiens
gcaagaaggaagggg

SEQ ID NO: 531038 - DNA, 15 bp, Homo sapiens
ggcaagaaggaaggg

SEQ ID NO: 531039 - DNA, 15 bp, Homo sapiens
aggcaagaaggaagg

SEQ ID NO: 531040 - DNA, 15 bp, Homo sapiens
caggcaagaaggaag

SEQ ID NO: 531041 - DNA, 15 bp, Homo sapiens
acaggcaagaaggaa

SEQ ID NO: 531042 - DNA, 15 bp, Homo sapiens
tacaggcaagaagga

SEQ ID NO: 531043 - DNA, 15 bp, Homo sapiens
ctacaggcaagaagg

SEQ ID NO: 531044 - DNA, 15 bp, Homo sapiens
gctacaggcaagaag

SEQ ID NO: 531045 - DNA, 15 bp, Homo sapiens
agctacaggcaagaa

SEQ ID NO: 531046 - DNA, 15 bp, Homo sapiens
gagctacaggcaaga

SEQ ID NO: 531047 - DNA, 15 bp, Homo sapiens
ggagctacaggcaag

SEQ ID NO: 531048 - DNA, 15 bp, Homo sapiens
aggagctacaggcaa

SEQ ID NO: 531049 - DNA, 15 bp, Homo sapiens
caggagctacaggca

SEQ ID NO: 531050 - DNA, 15 bp, Homo sapiens
gcaggagctacaggc

SEQ ID NO: 531051 - DNA, 15 bp, Homo sapiens
agcaggagctacagg

SEQ ID NO: 531052 - DNA, 15 bp, Homo sapiens
cagcaggagctacag

SEQ ID NO: 531053 - DNA, 15 bp, Homo sapiens
ccagcaggagctaca

SEQ ID NO: 531054 - DNA, 15 bp, Homo sapiens
tccagcaggagctac

SEQ ID NO: 531055 - DNA, 15 bp, Homo sapiens
ctccagcaggagcta

SEQ ID NO: 531056 - DNA, 15 bp, Homo sapiens
cctccagcaggagct

SEQ ID NO: 531057 - DNA, 15 bp, Homo sapiens
tcctccagcaggagc

SEQ ID NO: 531058 - DNA, 15 bp, Homo sapiens
ttcctccagcaggag

SEQ ID NO: 531059 - DNA, 15 bp, Homo sapiens
cttcctccagcagga

SEQ ID NO: 531060 - DNA, 15 bp, Homo sapiens
tcttcctccagcagg

SEQ ID NO: 531061 - DNA, 15 bp, Homo sapiens
ctcttcctccagcag

SEQ ID NO: 531062 - DNA, 15 bp, Homo sapiens
cctcttcctccagca

SEQ ID NO: 531063 - DNA, 15 bp, Homo sapiens
tcctcttcctccagc

SEQ ID NO: 531064 - DNA, 15 bp, Homo sapiens
atcctcttcctccag

SEQ ID NO: 531065 - DNA, 15 bp, Homo sapiens
aatcctcttcctcca

SEQ ID NO: 531066 - DNA, 15 bp, Homo sapiens
gaatcctcttcctcc

SEQ ID NO: 531067 - DNA, 15 bp, Homo sapiens
ggaatcctcttcctc

SEQ ID NO: 531068 - DNA, 15 bp, Homo sapiens
tggaatcctcttcct

SEQ ID NO: 531069 - DNA, 15 bp, Homo sapiens
ctggaatcctcttcc

SEQ ID NO: 531070 - DNA, 15 bp, Homo sapiens
gctggaatcctcttc

SEQ ID NO: 531071 - DNA, 15 bp, Homo sapiens
ggctggaatcctctt

SEQ ID NO: 531072 - DNA, 15 bp, Homo sapiens
aggctggaatcctct

SEQ ID NO: 531073 - DNA, 15 bp, Homo sapiens
caggctggaatcctc

SEQ ID NO: 531074 - DNA, 15 bp, Homo sapiens
acaggctggaatcct

SEQ ID NO: 531075 - DNA, 15 bp, Homo sapiens
aacaggctggaatcc

SEQ ID NO: 531076 - DNA, 15 bp, Homo sapiens
caacaggctggaatc

SEQ ID NO: 531077 - DNA, 15 bp, Homo sapiens
ccaacaggctggaat

SEQ ID NO: 531078 - DNA, 15 bp, Homo sapiens
gccaacaggctggaa

SEQ ID NO: 531079 - DNA, 15 bp, Homo sapiens
ggccaacaggctgga

SEQ ID NO: 531080 - DNA, 15 bp, Homo sapiens
gggccaacaggctgg

SEQ ID NO: 531081 - DNA, 15 bp, Homo sapiens
ggggccaacaggctg

SEQ ID NO: 531082 - DNA, 15 bp, Homo sapiens
aggggccaacaggct

SEQ ID NO: 531083 - DNA, 15 bp, Homo sapiens
caggggccaacaggc

SEQ ID NO: 531084 - DNA, 15 bp, Homo sapiens
acaggggccaacagg

SEQ ID NO: 531085 - DNA, 15 bp, Homo sapiens
gacaggggccaacag

SEQ ID NO: 531086 - DNA, 15 bp, Homo sapiens
agacaggggccaaca

SEQ ID NO: 531087 - DNA, 15 bp, Homo sapiens
aagacaggggccaac

SEQ ID NO: 531088 - DNA, 15 bp, Homo sapiens
gaagacaggggccaa

SEQ ID NO: 531089 - DNA, 15 bp, Homo sapiens
cgaagacaggggcca

SEQ ID NO: 531090 - DNA, 15 bp, Homo sapiens
tcgaagacaggggcc

SEQ ID NO: 531091 - DNA, 15 bp, Homo sapiens
gtcgaagacaggggc

SEQ ID NO: 531092 - DNA, 15 bp, Homo sapiens
ggtcgaagacagggg

SEQ ID NO: 531093 - DNA, 15 bp, Homo sapiens
gggtcgaagacaggg

SEQ ID NO: 531094 - DNA, 15 bp, Homo sapiens
tgggtcgaagacagg

SEQ ID NO: 531095 - DNA, 15 bp, Homo sapiens
ctgggtcgaagacag

SEQ ID NO: 531096 - DNA, 15 bp, Homo sapiens
gctgggtcgaagaca

SEQ ID NO: 531097 - DNA, 15 bp, Homo sapiens
ggctgggtcgaagac

SEQ ID NO: 531098 - DNA, 15 bp, Homo sapiens
gggctgggtcgaaga

SEQ ID NO: 531099 - DNA, 15 bp, Homo sapiens
tgggctgggtcgaag

SEQ ID NO: 531100 - DNA, 15 bp, Homo sapiens
ctgggctgggtcgaa

SEQ ID NO: 531101 - DNA, 15 bp, Homo sapiens
gctgggctgggtcga

SEQ ID NO: 531102 - DNA, 15 bp, Homo sapiens
ggctgggctgggtcg

SEQ ID NO: 531103 - DNA, 15 bp, Homo sapiens
gggctgggctgggtc

SEQ ID NO: 531104 - DNA, 15 bp, Homo sapiens
ggggctgggctgggt

SEQ ID NO: 531105 - DNA, 15 bp, Homo sapiens
gggggctgggctggg

SEQ ID NO: 531106 - DNA, 15 bp, Homo sapiens
agggggctgggctgg

SEQ ID NO: 531107 - DNA, 15 bp, Homo sapiens
gagggggctgggctg

SEQ ID NO: 531108 - DNA, 15 bp, Homo sapiens
agagggggctgggct

SEQ ID NO: 531109 - DNA, 15 bp, Homo sapiens
cagagggggctgggc

SEQ ID NO: 531110 - DNA, 15 bp, Homo sapiens
acagagggggctggg

SEQ ID NO: 531111 - DNA, 15 bp, Homo sapiens
aacagagggggctgg

SEQ ID NO: 531112 - DNA, 15 bp, Homo sapiens
caacagagggggctg

SEQ ID NO: 531113 - DNA, 15 bp, Homo sapiens
gcaacagagggggct

SEQ ID NO: 531114 - DNA, 15 bp, Homo sapiens
agcaacagagggggc

SEQ ID NO: 531115 - DNA, 15 bp, Homo sapiens
gagcaacagaggggg

SEQ ID NO: 531116 - DNA, 15 bp, Homo sapiens
agagcaacagagggg

SEQ ID NO: 531117 - DNA, 15 bp, Homo sapiens
cagagcaacagaggg

SEQ ID NO: 531118 - DNA, 15 bp, Homo sapiens
gcagagcaacagagg

SEQ ID NO: 531119 - DNA, 15 bp, Homo sapiens
tgcagagcaacagag

SEQ ID NO: 531120 - DNA, 15 bp, Homo sapiens
atgcagagcaacaga

SEQ ID NO: 531121 - DNA, 15 bp, Homo sapiens
tatgcagagcaacag

SEQ ID NO: 531122 - DNA, 15 bp, Homo sapiens
atatgcagagcaaca

SEQ ID NO: 531123 - DNA, 15 bp, Homo sapiens
aatatgcagagcaac

SEQ ID NO: 531124 - DNA, 15 bp, Homo sapiens
caatatgcagagcaa

SEQ ID NO: 531125 - DNA, 15 bp, Homo sapiens
ccaatatgcagagca

SEQ ID NO: 531126 - DNA, 15 bp, Homo sapiens
gccaatatgcagagc

SEQ ID NO: 531127 - DNA, 15 bp, Homo sapiens
ggccaatatgcagag

SEQ ID NO: 531128 - DNA, 15 bp, Homo sapiens
cggccaatatgcaga

SEQ ID NO: 531129 - DNA, 15 bp, Homo sapiens
acggccaatatgcag

SEQ ID NO: 531130 - DNA, 15 bp, Homo sapiens
gacggccaatatgca

SEQ ID NO: 531131 - DNA, 15 bp, Homo sapiens
agacggccaatatgc

SEQ ID NO: 531132 - DNA, 15 bp, Homo sapiens
cagacggccaatatg

SEQ ID NO: 531133 - DNA, 15 bp, Homo sapiens
ccagacggccaatat

SEQ ID NO: 531134 - DNA, 15 bp, Homo sapiens
cccagacggccaata

SEQ ID NO: 531135 - DNA, 15 bp, Homo sapiens
ccccagacggccaat

SEQ ID NO: 531136 - DNA, 15 bp, Homo sapiens
accccagacggccaa

SEQ ID NO: 531137 - DNA, 15 bp, Homo sapiens
gaccccagacggcca

SEQ ID NO: 531138 - DNA, 15 bp, Homo sapiens
ggaccccagacggcc

SEQ ID NO: 531139 - DNA, 15 bp, Homo sapiens
tggaccccagacggc

SEQ ID NO: 531140 - DNA, 15 bp, Homo sapiens
atggaccccagacgg

SEQ ID NO: 531141 - DNA, 15 bp, Homo sapiens
gatggaccccagacg

SEQ ID NO: 531142 - DNA, 15 bp, Homo sapiens
agatggaccccagac

SEQ ID NO: 531143 - DNA, 15 bp, Homo sapiens
gagatggaccccaga

SEQ ID NO: 531144 - DNA, 15 bp, Homo sapiens
ggagatggaccccag

SEQ ID NO: 531145 - DNA, 15 bp, Homo sapiens
gggagatggacccca

SEQ ID NO: 531146 - DNA, 15 bp, Homo sapiens
agggagatggacccc

SEQ ID NO: 531147 - DNA, 15 bp, Homo sapiens
gagggagatggaccc

SEQ ID NO: 531148 - DNA, 15 bp, Homo sapiens
ggagggagatggacc

SEQ ID NO: 531149 - DNA, 15 bp, Homo sapiens
aggagggagatggac

SEQ ID NO: 531150 - DNA, 15 bp, Homo sapiens
caggagggagatgga

SEQ ID NO: 531151 - DNA, 15 bp, Homo sapiens
tcaggagggagatgg

SEQ ID NO: 531152 - DNA, 15 bp, Homo sapiens
ctcaggagggagatg

SEQ ID NO: 531153 - DNA, 15 bp, Homo sapiens
gctcaggagggagat

SEQ ID NO: 531154 - DNA, 15 bp, Homo sapiens
agctcaggagggaga

SEQ ID NO: 531155 - DNA, 15 bp, Homo sapiens
tagctcaggagggag

SEQ ID NO: 531156 - DNA, 15 bp, Homo sapiens
ctagctcaggaggga

SEQ ID NO: 531157 - DNA, 15 bp, Homo sapiens
tctagctcaggaggg

SEQ ID NO: 531158 - DNA, 15 bp, Homo sapiens
ttctagctcaggagg

SEQ ID NO: 531159 - DNA, 15 bp, Homo sapiens
tttctagctcaggag

SEQ ID NO: 531160 - DNA, 15 bp, Homo sapiens
gtttctagctcagga

SEQ ID NO: 531161 - DNA, 15 bp, Homo sapiens
ggtttctagctcagg

SEQ ID NO: 531162 - DNA, 15 bp, Homo sapiens
gggtttctagctcag

SEQ ID NO: 531163 - DNA, 15 bp, Homo sapiens
tgggtttctagctca

SEQ ID NO: 531164 - DNA, 15 bp, Homo sapiens
ctgggtttctagctc

SEQ ID NO: 531165 - DNA, 15 bp, Homo sapiens
tctgggtttctagct

SEQ ID NO: 531166 - DNA, 15 bp, Homo sapiens
ctctgggtttctagc

SEQ ID NO: 531167 - DNA, 15 bp, Homo sapiens
tctctgggtttctag

SEQ ID NO: 531168 - DNA, 15 bp, Homo sapiens
atctctgggtttcta

SEQ ID NO: 531169 - DNA, 15 bp, Homo sapiens
catctctgggtttct

SEQ ID NO: 531170 - DNA, 15 bp, Homo sapiens
ccatctctgggtttc

SEQ ID NO: 531171 - DNA, 15 bp, Homo sapiens
tccatctctgggttt

SEQ ID NO: 531172 - DNA, 15 bp, Homo sapiens
ctccatctctgggtt

SEQ ID NO: 531173 - DNA, 15 bp, Homo sapiens
cctccatctctgggt

SEQ ID NO: 531174 - DNA, 15 bp, Homo sapiens
gcctccatctctggg

SEQ ID NO: 531175 - DNA, 15 bp, Homo sapiens
agcctccatctctgg

SEQ ID NO: 531176 - DNA, 15 bp, Homo sapiens
cagcctccatctctg

SEQ ID NO: 531177 - DNA, 15 bp, Homo sapiens
acagcctccatctct

SEQ ID NO: 531178 - DNA, 15 bp, Homo sapiens
gacagcctccatctc

SEQ ID NO: 531179 - DNA, 15 bp, Homo sapiens
agacagcctccatct

SEQ ID NO: 531180 - DNA, 15 bp, Homo sapiens
aagacagcctccatc

SEQ ID NO: 531181 - DNA, 15 bp, Homo sapiens
caagacagcctccat

SEQ ID NO: 531182 - DNA, 15 bp, Homo sapiens
gcaagacagcctcca

SEQ ID NO: 531183 - DNA, 15 bp, Homo sapiens
agcaagacagcctcc

SEQ ID NO: 531184 - DNA, 15 bp, Homo sapiens
tagcaagacagcctc

SEQ ID NO: 531185 - DNA, 15 bp, Homo sapiens
atagcaagacagcct

SEQ ID NO: 531186 - DNA, 15 bp, Homo sapiens
catagcaagacagcc

SEQ ID NO: 531187 - DNA, 15 bp, Homo sapiens
ccatagcaagacagc

SEQ ID NO: 531188 - DNA, 15 bp, Homo sapiens
gccatagcaagacag

SEQ ID NO: 531189 - DNA, 15 bp, Homo sapiens
tgccatagcaagaca

SEQ ID NO: 531190 - DNA, 15 bp, Homo sapiens
ctgccatagcaagac

SEQ ID NO: 531191 - DNA, 15 bp, Homo sapiens
cctgccatagcaaga

SEQ ID NO: 531192 - DNA, 15 bp, Homo sapiens
ccctgccatagcaag

SEQ ID NO: 531193 - DNA, 15 bp, Homo sapiens
tccctgccatagcaa

SEQ ID NO: 531194 - DNA, 15 bp, Homo sapiens
ctccctgccatagca

SEQ ID NO: 531195 - DNA, 15 bp, Homo sapiens
cctccctgccatagc

SEQ ID NO: 531196 - DNA, 15 bp, Homo sapiens
acctccctgccatag

SEQ ID NO: 531197 - DNA, 15 bp, Homo sapiens
cacctccctgccata

SEQ ID NO: 531198 - DNA, 15 bp, Homo sapiens
tcacctccctgccat

SEQ ID NO: 531199 - DNA, 15 bp, Homo sapiens
gtcacctccctgcca

SEQ ID NO: 531200 - DNA, 15 bp, Homo sapiens
tgtcacctccctgcc

SEQ ID NO: 531201 - DNA, 15 bp, Homo sapiens
ctgtcacctccctgc

SEQ ID NO: 531202 - DNA, 15 bp, Homo sapiens
gctgtcacctccctg

SEQ ID NO: 531203 - DNA, 15 bp, Homo sapiens
ggctgtcacctccct

SEQ ID NO: 531204 - DNA, 15 bp, Homo sapiens
aggctgtcacctccc

SEQ ID NO: 531205 - DNA, 15 bp, Homo sapiens
caggctgtcacctcc

SEQ ID NO: 531206 - DNA, 15 bp, Homo sapiens
gcaggctgtcacctc

SEQ ID NO: 531207 - DNA, 15 bp, Homo sapiens
agcaggctgtcacct

SEQ ID NO: 531208 - DNA, 15 bp, Homo sapiens
cagcaggctgtcacc

SEQ ID NO: 531209 - DNA, 15 bp, Homo sapiens
ccagcaggctgtcac

SEQ ID NO: 531210 - DNA, 15 bp, Homo sapiens
gccagcaggctgtca

SEQ ID NO: 531211 - DNA, 15 bp, Homo sapiens
tgccagcaggctgtc

SEQ ID NO: 531212 - DNA, 15 bp, Homo sapiens
gtgccagcaggctgt

SEQ ID NO: 531213 - DNA, 15 bp, Homo sapiens
agtgccagcaggctg

SEQ ID NO: 531214 - DNA, 15 bp, Homo sapiens
cagtgccagcaggct

SEQ ID NO: 531215 - DNA, 15 bp, Homo sapiens
acagtgccagcaggc

SEQ ID NO: 531216 - DNA, 15 bp, Homo sapiens
tacagtgccagcagg

SEQ ID NO: 531217 - DNA, 15 bp, Homo sapiens
atacagtgccagcag

SEQ ID NO: 531218 - DNA, 15 bp, Homo sapiens
tatacagtgccagca

SEQ ID NO: 531219 - DNA, 15 bp, Homo sapiens
atatacagtgccagc

SEQ ID NO: 531220 - DNA, 15 bp, Homo sapiens
aatatacagtgccag

SEQ ID NO: 531221 - DNA, 15 bp, Homo sapiens
aaatatacagtgcca

SEQ ID NO: 531222 - DNA, 15 bp, Homo sapiens
taaatatacagtgcc

SEQ ID NO: 531223 - DNA, 15 bp, Homo sapiens
ctaaatatacagtgc

SEQ ID NO: 531224 - DNA, 15 bp, Homo sapiens
actaaatatacagtg

SEQ ID NO: 531225 - DNA, 15 bp, Homo sapiens
cactaaatatacagt

SEQ ID NO: 531226 - DNA, 15 bp, Homo sapiens
acactaaatatacag

SEQ ID NO: 531227 - DNA, 15 bp, Homo sapiens
gacactaaatataca

SEQ ID NO: 531228 - DNA, 15 bp, Homo sapiens
agacactaaatatac

SEQ ID NO: 531229 - DNA, 15 bp, Homo sapiens
aagacactaaatata

SEQ ID NO: 531230 - DNA, 15 bp, Homo sapiens
taagacactaaatat

SEQ ID NO: 531231 - DNA, 15 bp, Homo sapiens
gtaagacactaaata

SEQ ID NO: 531232 - DNA, 15 bp, Homo sapiens
agtaagacactaaat

SEQ ID NO: 531233 - DNA, 15 bp, Homo sapiens
aagtaagacactaaa

SEQ ID NO: 531234 - DNA, 15 bp, Homo sapiens
taagtaagacactaa

SEQ ID NO: 531235 - DNA, 15 bp, Homo sapiens
ttaagtaagacacta

SEQ ID NO: 531236 - DNA, 15 bp, Homo sapiens
cttaagtaagacact

SEQ ID NO: 531237 - DNA, 15 bp, Homo sapiens
ccttaagtaagacac

SEQ ID NO: 531238 - DNA, 15 bp, Homo sapiens
tccttaagtaagaca

SEQ ID NO: 531239 - DNA, 15 bp, Homo sapiens
atccttaagtaagac

SEQ ID NO: 531240 - DNA, 15 bp, Homo sapiens
aatccttaagtaaga

SEQ ID NO: 531241 - DNA, 15 bp, Homo sapiens
aaatccttaagtaag

SEQ ID NO: 531242 - DNA, 15 bp, Homo sapiens
taaatccttaagtaa

SEQ ID NO: 531243 - DNA, 15 bp, Homo sapiens
ataaatccttaagta

SEQ ID NO: 531244 - DNA, 15 bp, Homo sapiens
cataaatccttaagt

SEQ ID NO: 531245 - DNA, 15 bp, Homo sapiens
gcataaatccttaag

SEQ ID NO: 531246 - DNA, 15 bp, Homo sapiens
tgcataaatccttaa

SEQ ID NO: 531247 - DNA, 15 bp, Homo sapiens
atgcataaatcctta

SEQ ID NO: 531248 - DNA, 15 bp, Homo sapiens
catgcataaatcctt

SEQ ID NO: 531249 - DNA, 15 bp, Homo sapiens
ccatgcataaatcct

SEQ ID NO: 531250 - DNA, 15 bp, Homo sapiens
tccatgcataaatcc

SEQ ID NO: 531251 - DNA, 15 bp, Homo sapiens
ttccatgcataaatc

SEQ ID NO: 531252 - DNA, 15 bp, Homo sapiens
attccatgcataaat

SEQ ID NO: 531253 - DNA, 15 bp, Homo sapiens
aattccatgcataaa

SEQ ID NO: 531254 - DNA, 15 bp, Homo sapiens
aaattccatgcataa

SEQ ID NO: 531255 - DNA, 15 bp, Homo sapiens
taaattccatgcata

SEQ ID NO: 531256 - DNA, 15 bp, Homo sapiens
ttaaattccatgcat

SEQ ID NO: 531257 - DNA, 15 bp, Homo sapiens
attaaattccatgca

SEQ ID NO: 531258 - DNA, 15 bp, Homo sapiens
cattaaattccatgc

SEQ ID NO: 531259 - DNA, 15 bp, Homo sapiens
acattaaattccatg

SEQ ID NO: 531260 - DNA, 15 bp, Homo sapiens
tacattaaattccat

SEQ ID NO: 531261 - DNA, 15 bp, Homo sapiens
ctacattaaattcca

SEQ ID NO: 531262 - DNA, 15 bp, Homo sapiens
actacattaaattcc

SEQ ID NO: 531263 - DNA, 15 bp, Homo sapiens
tactacattaaattc

SEQ ID NO: 531264 - DNA, 15 bp, Homo sapiens
gtactacattaaatt

SEQ ID NO: 531265 - DNA, 15 bp, Homo sapiens
tgtactacattaaat

SEQ ID NO: 531266 - DNA, 15 bp, Homo sapiens
ttgtactacattaaa

SEQ ID NO: 531267 - DNA, 15 bp, Homo sapiens
cttgtactacattaa

SEQ ID NO: 531268 - DNA, 15 bp, Homo sapiens
gcttgtactacatta

SEQ ID NO: 531269 - DNA, 15 bp, Homo sapiens
agcttgtactacatt

SEQ ID NO: 531270 - DNA, 15 bp, Homo sapiens
aagcttgtactacat

SEQ ID NO: 531271 - DNA, 15 bp, Homo sapiens
gaagcttgtactaca

SEQ ID NO: 531272 - DNA, 15 bp, Homo sapiens
cgaagcttgtactac

SEQ ID NO: 531273 - DNA, 15 bp, Homo sapiens
ccgaagcttgtacta

SEQ ID NO: 531274 - DNA, 15 bp, Homo sapiens
cccgaagcttgtact

SEQ ID NO: 531275 - DNA, 15 bp, Homo sapiens
gcccgaagcttgtac

SEQ ID NO: 531276 - DNA, 15 bp, Homo sapiens
agcccgaagcttgta

SEQ ID NO: 531277 - DNA, 15 bp, Homo sapiens
aagcccgaagcttgt

SEQ ID NO: 531278 - DNA, 15 bp, Homo sapiens
aaagcccgaagcttg

SEQ ID NO: 531279 - DNA, 15 bp, Homo sapiens
aaaagcccgaagctt

SEQ ID NO: 531280 - DNA, 15 bp, Homo sapiens
aaaaagcccgaagct

SEQ ID NO: 531281 - DNA, 15 bp, Homo sapiens
aaaaaagcccgaagc

SEQ ID NO: 531282 - DNA, 15 bp, Homo sapiens
caaaaaagcccgaag

SEQ ID NO: 531283 - DNA, 15 bp, Homo sapiens
acaaaaaagcccgaa

SEQ ID NO: 531284 - DNA, 15 bp, Homo sapiens
aacaaaaaagcccga

SEQ ID NO: 531285 - DNA, 15 bp, Homo sapiens
aaacaaaaaagcccg

SEQ ID NO: 531286 - DNA, 15 bp, Homo sapiens
caaacaaaaaagccc

SEQ ID NO: 531287 - DNA, 15 bp, Homo sapiens
acaaacaaaaaagcc

SEQ ID NO: 531288 - DNA, 15 bp, Homo sapiens
aacaaacaaaaaagc

SEQ ID NO: 531289 - DNA, 15 bp, Homo sapiens
aaacaaacaaaaaag

SEQ ID NO: 531290 - DNA, 15 bp, Homo sapiens
caaacaaacaaaaaa

SEQ ID NO: 531291 - DNA, 15 bp, Homo sapiens
acaaacaaacaaaaa

SEQ ID NO: 531292 - DNA, 15 bp, Homo sapiens
aacaaacaaacaaaa

SEQ ID NO: 531293 - DNA, 15 bp, Homo sapiens
aaacaaacaaacaaa

SEQ ID NO: 531294 - DNA, 15 bp, Homo sapiens
caaacaaacaaacaa

SEQ ID NO: 531295 - DNA, 15 bp, Homo sapiens
acaaacaaacaaaca

SEQ ID NO: 531296 - DNA, 15 bp, Homo sapiens
aacaaacaaacaaac

SEQ ID NO: 531297 - DNA, 15 bp, Homo sapiens
taaacaaacaaacaa

SEQ ID NO: 531298 - DNA, 15 bp, Homo sapiens
ttaaacaaacaaaca

SEQ ID NO: 531299 - DNA, 15 bp, Homo sapiens
cttaaacaaacaaac

SEQ ID NO: 531300 - DNA, 15 bp, Homo sapiens
gcttaaacaaacaaa

SEQ ID NO: 531301 - DNA, 15 bp, Homo sapiens
agcttaaacaaacaa

SEQ ID NO: 531302 - DNA, 15 bp, Homo sapiens
aagcttaaacaaaca

SEQ ID NO: 531303 - DNA, 15 bp, Homo sapiens
aaagcttaaacaaac

SEQ ID NO: 531304 - DNA, 15 bp, Homo sapiens
gaaagcttaaacaaa

SEQ ID NO: 531305 - DNA, 15 bp, Homo sapiens
tgaaagcttaaacaa

SEQ ID NO: 531306 - DNA, 15 bp, Homo sapiens
ctgaaagcttaaaca

SEQ ID NO: 531307 - DNA, 15 bp, Homo sapiens
cctgaaagcttaaac

SEQ ID NO: 531308 - DNA, 15 bp, Homo sapiens
acctgaaagcttaaa

SEQ ID NO: 531309 - DNA, 15 bp, Homo sapiens
cacctgaaagcttaa

SEQ ID NO: 531310 - DNA, 15 bp, Homo sapiens
gcacctgaaagctta

SEQ ID NO: 531311 - DNA, 15 bp, Homo sapiens
agcacctgaaagctt

SEQ ID NO: 531312 - DNA, 15 bp, Homo sapiens
aagcacctgaaagct

SEQ ID NO: 531313 - DNA, 15 bp, Homo sapiens
gaagcacctgaaagc

SEQ ID NO: 531314 - DNA, 15 bp, Homo sapiens
tgaagcacctgaaag

SEQ ID NO: 531315 - DNA, 15 bp, Homo sapiens
atgaagcacctgaaa

SEQ ID NO: 531316 - DNA, 15 bp, Homo sapiens
aatgaagcacctgaa

SEQ ID NO: 531317 - DNA, 15 bp, Homo sapiens
taatgaagcacctga

SEQ ID NO: 531318 - DNA, 15 bp, Homo sapiens
ctaatgaagcacctg

SEQ ID NO: 531319 - DNA, 15 bp, Homo sapiens
gctaatgaagcacct

SEQ ID NO: 531320 - DNA, 15 bp, Homo sapiens
agctaatgaagcacc

SEQ ID NO: 531321 - DNA, 15 bp, Homo sapiens
aagctaatgaagcac

SEQ ID NO: 531322 - DNA, 15 bp, Homo sapiens
aaagctaatgaagca

SEQ ID NO: 531323 - DNA, 15 bp, Homo sapiens
gaaagctaatgaagc

SEQ ID NO: 531324 - DNA, 15 bp, Homo sapiens
tgaaagctaatgaag

SEQ ID NO: 531325 - DNA, 15 bp, Homo sapiens
ctgaaagctaatgaa

SEQ ID NO: 531326 - DNA, 15 bp, Homo sapiens
actgaaagctaatga

SEQ ID NO: 531327 - DNA, 15 bp, Homo sapiens
aactgaaagctaatg

SEQ ID NO: 531328 - DNA, 15 bp, Homo sapiens
gaactgaaagctaat

SEQ ID NO: 531329 - DNA, 15 bp, Homo sapiens
ggaactgaaagctaa

SEQ ID NO: 531330 - DNA, 15 bp, Homo sapiens
aggaactgaaagcta

SEQ ID NO: 531331 - DNA, 15 bp, Homo sapiens
aaggaactgaaagct

SEQ ID NO: 531332 - DNA, 15 bp, Homo sapiens
aaaggaactgaaagc

SEQ ID NO: 531333 - DNA, 15 bp, Homo sapiens
caaaggaactgaaag

SEQ ID NO: 531334 - DNA, 15 bp, Homo sapiens
ccaaaggaactgaaa

SEQ ID NO: 531335 - DNA, 15 bp, Homo sapiens
accaaaggaactgaa

SEQ ID NO: 531336 - DNA, 15 bp, Homo sapiens
taccaaaggaactga

SEQ ID NO: 531337 - DNA, 15 bp, Homo sapiens
ctaccaaaggaactg

SEQ ID NO: 531338 - DNA, 15 bp, Homo sapiens
actaccaaaggaact

SEQ ID NO: 531339 - DNA, 15 bp, Homo sapiens
cactaccaaaggaac

SEQ ID NO: 531340 - DNA, 15 bp, Homo sapiens
acactaccaaaggaa

SEQ ID NO: 531341 - DNA, 15 bp, Homo sapiens
cacactaccaaagga

SEQ ID NO: 531342 - DNA, 15 bp, Homo sapiens
ccacactaccaaagg

SEQ ID NO: 531343 - DNA, 15 bp, Homo sapiens
cccacactaccaaag

SEQ ID NO: 531344 - DNA, 15 bp, Homo sapiens
gcccacactaccaaa

SEQ ID NO: 531345 - DNA, 15 bp, Homo sapiens
tgcccacactaccaa

SEQ ID NO: 531346 - DNA, 15 bp, Homo sapiens
atgcccacactacca

SEQ ID NO: 531347 - DNA, 15 bp, Homo sapiens
aatgcccacactacc

SEQ ID NO: 531348 - DNA, 15 bp, Homo sapiens
aaatgcccacactac

SEQ ID NO: 531349 - DNA, 15 bp, Homo sapiens
gaaatgcccacacta

SEQ ID NO: 531350 - DNA, 15 bp, Homo sapiens
ggaaatgcccacact

SEQ ID NO: 531351 - DNA, 15 bp, Homo sapiens
aggaaatgcccacac

SEQ ID NO: 531352 - DNA, 15 bp, Homo sapiens
aaggaaatgcccaca

SEQ ID NO: 531353 - DNA, 15 bp, Homo sapiens
caaggaaatgcccac

SEQ ID NO: 531354 - DNA, 15 bp, Homo sapiens
ccaaggaaatgccca

SEQ ID NO: 531355 - DNA, 15 bp, Homo sapiens
gccaaggaaatgccc

SEQ ID NO: 531356 - DNA, 15 bp, Homo sapiens
agccaaggaaatgcc

SEQ ID NO: 531357 - DNA, 15 bp, Homo sapiens
cagccaaggaaatgc

SEQ ID NO: 531358 - DNA, 15 bp, Homo sapiens
tcagccaaggaaatg

SEQ ID NO: 531359 - DNA, 15 bp, Homo sapiens
gtcagccaaggaaat

SEQ ID NO: 531360 - DNA, 15 bp, Homo sapiens
tgtcagccaaggaaa

SEQ ID NO: 531361 - DNA, 15 bp, Homo sapiens
ctgtcagccaaggaa

SEQ ID NO: 531362 - DNA, 15 bp, Homo sapiens
actgtcagccaagga

SEQ ID NO: 531363 - DNA, 15 bp, Homo sapiens
cactgtcagccaagg

SEQ ID NO: 531364 - DNA, 15 bp, Homo sapiens
ccactgtcagccaag

SEQ ID NO: 531365 - DNA, 15 bp, Homo sapiens
tccactgtcagccaa

SEQ ID NO: 531366 - DNA, 15 bp, Homo sapiens
atccactgtcagcca

SEQ ID NO: 531367 - DNA, 15 bp, Homo sapiens
tatccactgtcagcc

SEQ ID NO: 531368 - DNA, 15 bp, Homo sapiens
atatccactgtcagc

SEQ ID NO: 531369 - DNA, 15 bp, Homo sapiens
aatatccactgtcag

SEQ ID NO: 531370 - DNA, 15 bp, Homo sapiens
gaatatccactgtca

SEQ ID NO: 531371 - DNA, 15 bp, Homo sapiens
agaatatccactgtc

SEQ ID NO: 531372 - DNA, 15 bp, Homo sapiens
aagaatatccactgt

SEQ ID NO: 531373 - DNA, 15 bp, Homo sapiens
caagaatatccactg

SEQ ID NO: 531374 - DNA, 15 bp, Homo sapiens
acaagaatatccact

SEQ ID NO: 531375 - DNA, 15 bp, Homo sapiens
tacaagaatatccac

SEQ ID NO: 531376 - DNA, 15 bp, Homo sapiens
gtacaagaatatcca

SEQ ID NO: 531377 - DNA, 15 bp, Homo sapiens
ggtacaagaatatcc

SEQ ID NO: 531378 - DNA, 15 bp, Homo sapiens
gggtacaagaatatc

SEQ ID NO: 531379 - DNA, 15 bp, Homo sapiens
agggtacaagaatat

SEQ ID NO: 531380 - DNA, 15 bp, Homo sapiens
aagggtacaagaata

SEQ ID NO: 531381 - DNA, 15 bp, Homo sapiens
gaagggtacaagaat

SEQ ID NO: 531382 - DNA, 15 bp, Homo sapiens
agaagggtacaagaa

SEQ ID NO: 531383 - DNA, 15 bp, Homo sapiens
aagaagggtacaaga

SEQ ID NO: 531384 - DNA, 15 bp, Homo sapiens
caagaagggtacaag

SEQ ID NO: 531385 - DNA, 15 bp, Homo sapiens
ccaagaagggtacaa

SEQ ID NO: 531386 - DNA, 15 bp, Homo sapiens
cccaagaagggtaca

SEQ ID NO: 531387 - DNA, 15 bp, Homo sapiens
acccaagaagggtac

SEQ ID NO: 531388 - DNA, 15 bp, Homo sapiens
gacccaagaagggta

SEQ ID NO: 531389 - DNA, 15 bp, Homo sapiens
ggacccaagaagggt

SEQ ID NO: 531390 - DNA, 15 bp, Homo sapiens
aggacccaagaaggg

SEQ ID NO: 531391 - DNA, 15 bp, Homo sapiens
caggacccaagaagg

SEQ ID NO: 531392 - DNA, 15 bp, Homo sapiens
ccaggacccaagaag

SEQ ID NO: 531393 - DNA, 15 bp, Homo sapiens
cccaggacccaagaa

SEQ ID NO: 531394 - DNA, 15 bp, Homo sapiens
tcccaggacccaaga

SEQ ID NO: 531395 - DNA, 15 bp, Homo sapiens
atcccaggacccaag

SEQ ID NO: 531396 - DNA, 15 bp, Homo sapiens
gatcccaggacccaa

SEQ ID NO: 531397 - DNA, 15 bp, Homo sapiens
agatcccaggaccca

SEQ ID NO: 531398 - DNA, 15 bp, Homo sapiens
gagatcccaggaccc

SEQ ID NO: 531399 - DNA, 15 bp, Homo sapiens
agagatcccaggacc

SEQ ID NO: 531400 - DNA, 15 bp, Homo sapiens
aagagatcccaggac

SEQ ID NO: 531401 - DNA, 15 bp, Homo sapiens
caagagatcccagga

SEQ ID NO: 531402 - DNA, 15 bp, Homo sapiens
tcaagagatcccagg

SEQ ID NO: 531403 - DNA, 15 bp, Homo sapiens
ttcaagagatcccag

SEQ ID NO: 531404 - DNA, 15 bp, Homo sapiens
tttcaagagatccca

SEQ ID NO: 531405 - DNA, 15 bp, Homo sapiens
atttcaagagatccc

SEQ ID NO: 531406 - DNA, 15 bp, Homo sapiens
gatttcaagagatcc

SEQ ID NO: 531407 - DNA, 15 bp, Homo sapiens
ggatttcaagagatc

SEQ ID NO: 531408 - DNA, 15 bp, Homo sapiens
gggatttcaagagat

SEQ ID NO: 531409 - DNA, 15 bp, Homo sapiens
ggggatttcaagaga

SEQ ID NO: 531410 - DNA, 15 bp, Homo sapiens
tggggatttcaagag

SEQ ID NO: 531411 - DNA, 15 bp, Homo sapiens
ttggggatttcaaga

SEQ ID NO: 531412 - DNA, 15 bp, Homo sapiens
attggggatttcaag

SEQ ID NO: 531413 - DNA, 15 bp, Homo sapiens
tattggggatttcaa

SEQ ID NO: 531414 - DNA, 15 bp, Homo sapiens
ttattggggatttca

SEQ ID NO: 531415 - DNA, 15 bp, Homo sapiens
tttattggggatttc

SEQ ID NO: 531416 - DNA, 15 bp, Homo sapiens
ctttattggggattt

SEQ ID NO: 531417 - DNA, 15 bp, Homo sapiens
tctttattggggatt

SEQ ID NO: 531418 - DNA, 15 bp, Homo sapiens
ctctttattggggat

SEQ ID NO: 531419 - DNA, 15 bp, Homo sapiens
tctctttattgggga

SEQ ID NO: 531420 - DNA, 15 bp, Homo sapiens
ctctctttattgggg

SEQ ID NO: 531421 - DNA, 15 bp, Homo sapiens
tctctctttattggg

SEQ ID NO: 531422 - DNA, 15 bp, Homo sapiens
ctctctctttattgg

SEQ ID NO: 531423 - DNA, 15 bp, Homo sapiens
actctctctttattg

SEQ ID NO: 531424 - DNA, 15 bp, Homo sapiens
aactctctctttatt

SEQ ID NO: 531425 - DNA, 15 bp, Homo sapiens
caactctctctttat

SEQ ID NO: 531426 - DNA, 15 bp, Homo sapiens
acaactctctcttta

SEQ ID NO: 531427 - DNA, 15 bp, Homo sapiens
cacaactctctcttt

SEQ ID NO: 531428 - DNA, 15 bp, Homo sapiens
gcacaactctctctt

SEQ ID NO: 531429 - DNA, 15 bp, Homo sapiens
agcacaactctctct

SEQ ID NO: 531430 - DNA, 15 bp, Homo sapiens
tagcacaactctctc

SEQ ID NO: 531431 - DNA, 15 bp, Homo sapiens
atagcacaactctct

SEQ ID NO: 531432 - DNA, 15 bp, Homo sapiens
aatagcacaactctc

SEQ ID NO: 531433 - DNA, 15 bp, Homo sapiens
aaatagcacaactct

SEQ ID NO: 531434 - DNA, 15 bp, Homo sapiens
taaatagcacaactc

SEQ ID NO: 531435 - DNA, 15 bp, Homo sapiens
ttaaatagcacaact

SEQ ID NO: 531436 - DNA, 15 bp, Homo sapiens
cttaaatagcacaac

SEQ ID NO: 531437 - DNA, 15 bp, Homo sapiens
gcttaaatagcacaa

SEQ ID NO: 531438 - DNA, 15 bp, Homo sapiens
agcttaaatagcaca

SEQ ID NO: 531439 - DNA, 15 bp, Homo sapiens
cagcttaaatagcac

SEQ ID NO: 531440 - DNA, 15 bp, Homo sapiens
tcagcttaaatagca

SEQ ID NO: 531441 - DNA, 15 bp, Homo sapiens
gtcagcttaaatagc

SEQ ID NO: 531442 - DNA, 15 bp, Homo sapiens
ggtcagcttaaatag

SEQ ID NO: 531443 - DNA, 15 bp, Homo sapiens
tggtcagcttaaata

SEQ ID NO: 531444 - DNA, 15 bp, Homo sapiens
ctggtcagcttaaat

SEQ ID NO: 531445 - DNA, 15 bp, Homo sapiens
actggtcagcttaaa

SEQ ID NO: 531446 - DNA, 15 bp, Homo sapiens
tactggtcagcttaa

SEQ ID NO: 531447 - DNA, 15 bp, Homo sapiens
atactggtcagctta

SEQ ID NO: 531448 - DNA, 15 bp, Homo sapiens
gatactggtcagctt

SEQ ID NO: 531449 - DNA, 15 bp, Homo sapiens
agatactggtcagct

SEQ ID NO: 531450 - DNA, 15 bp, Homo sapiens
tagatactggtcagc

SEQ ID NO: 531451 - DNA, 15 bp, Homo sapiens
atagatactggtcag

SEQ ID NO: 531452 - DNA, 15 bp, Homo sapiens
tatagatactggtca

SEQ ID NO: 531453 - DNA, 15 bp, Homo sapiens
ttatagatactggtc

SEQ ID NO: 531454 - DNA, 15 bp, Homo sapiens
tttatagatactggt

SEQ ID NO: 531455 - DNA, 15 bp, Homo sapiens
gtttatagatactgg

SEQ ID NO: 531456 - DNA, 15 bp, Homo sapiens
cgtttatagatactg

SEQ ID NO: 531457 - DNA, 15 bp, Homo sapiens
acgtttatagatact

SEQ ID NO: 531458 - DNA, 15 bp, Homo sapiens
cacgtttatagatac

SEQ ID NO: 531459 - DNA, 15 bp, Homo sapiens
acacgtttatagata

SEQ ID NO: 531460 - DNA, 15 bp, Homo sapiens
aacacgtttatagat

SEQ ID NO: 531461 - DNA, 15 bp, Homo sapiens
aaacacgtttataga

SEQ ID NO: 531462 - DNA, 15 bp, Homo sapiens
caaacacgtttatag

SEQ ID NO: 531463 - DNA, 15 bp, Homo sapiens
gcaaacacgtttata

SEQ ID NO: 531464 - DNA, 15 bp, Homo sapiens
tgcaaacacgtttat

SEQ ID NO: 531465 - DNA, 15 bp, Homo sapiens
atgcaaacacgttta

SEQ ID NO: 531466 - DNA, 15 bp, Homo sapiens
catgcaaacacgttt

SEQ ID NO: 531467 - DNA, 15 bp, Homo sapiens
tcatgcaaacacgtt

SEQ ID NO: 531468 - DNA, 15 bp, Homo sapiens
ctcatgcaaacacgt

SEQ ID NO: 531469 - DNA, 15 bp, Homo sapiens
actcatgcaaacacg

SEQ ID NO: 531470 - DNA, 15 bp, Homo sapiens
aactcatgcaaacac

SEQ ID NO: 531471 - DNA, 15 bp, Homo sapiens
aaactcatgcaaaca

SEQ ID NO: 531472 - DNA, 15 bp, Homo sapiens
taaactcatgcaaac

SEQ ID NO: 531473 - DNA, 15 bp, Homo sapiens
gtaaactcatgcaaa

SEQ ID NO: 531474 - DNA, 15 bp, Homo sapiens
tgtaaactcatgcaa

SEQ ID NO: 531475 - DNA, 15 bp, Homo sapiens
atgtaaactcatgca

SEQ ID NO: 531476 - DNA, 15 bp, Homo sapiens
gatgtaaactcatgc

SEQ ID NO: 531477 - DNA, 15 bp, Homo sapiens
ggatgtaaactcatg

SEQ ID NO: 531478 - DNA, 15 bp, Homo sapiens
gggatgtaaactcat

SEQ ID NO: 531479 - DNA, 15 bp, Homo sapiens
tgggatgtaaactca

SEQ ID NO: 531480 - DNA, 15 bp, Homo sapiens
ctgggatgtaaactc

SEQ ID NO: 531481 - DNA, 15 bp, Homo sapiens
cctgggatgtaaact

SEQ ID NO: 531482 - DNA, 15 bp, Homo sapiens
tcctgggatgtaaac

SEQ ID NO: 531483 - DNA, 15 bp, Homo sapiens
atcctgggatgtaaa

SEQ ID NO: 531484 - DNA, 15 bp, Homo sapiens
aatcctgggatgtaa

SEQ ID NO: 531485 - DNA, 15 bp, Homo sapiens
gaatcctgggatgta

SEQ ID NO: 531486 - DNA, 15 bp, Homo sapiens
ggaatcctgggatgt

SEQ ID NO: 531487 - DNA, 15 bp, Homo sapiens
tggaatcctgggatg

SEQ ID NO: 531488 - DNA, 15 bp, Homo sapiens
atggaatcctgggat

SEQ ID NO: 531489 - DNA, 15 bp, Homo sapiens
catggaatcctggga

SEQ ID NO: 531490 - DNA, 15 bp, Homo sapiens
tcatggaatcctggg

SEQ ID NO: 531491 - DNA, 15 bp, Homo sapiens
atcatggaatcctgg

SEQ ID NO: 531492 - DNA, 15 bp, Homo sapiens
aatcatggaatcctg

SEQ ID NO: 531493 - DNA, 15 bp, Homo sapiens
gaatcatggaatcct

SEQ ID NO: 531494 - DNA, 15 bp, Homo sapiens
agaatcatggaatcc

SEQ ID NO: 531495 - DNA, 15 bp, Homo sapiens
cagaatcatggaatc

SEQ ID NO: 531496 - DNA, 15 bp, Homo sapiens
acagaatcatggaat

SEQ ID NO: 531497 - DNA, 15 bp, Homo sapiens
tacagaatcatggaa

SEQ ID NO: 531498 - DNA, 15 bp, Homo sapiens
ttacagaatcatgga

SEQ ID NO: 531499 - DNA, 15 bp, Homo sapiens
tttacagaatcatgg

SEQ ID NO: 531500 - DNA, 15 bp, Homo sapiens
atttacagaatcatg

SEQ ID NO: 531501 - DNA, 15 bp, Homo sapiens
catttacagaatcat

SEQ ID NO: 531502 - DNA, 15 bp, Homo sapiens
gcatttacagaatca

SEQ ID NO: 531503 - DNA, 15 bp, Homo sapiens
ggcatttacagaatc

SEQ ID NO: 531504 - DNA, 15 bp, Homo sapiens
aggcatttacagaat

SEQ ID NO: 531505 - DNA, 15 bp, Homo sapiens
taggcatttacagaa

SEQ ID NO: 531506 - DNA, 15 bp, Homo sapiens
ataggcatttacaga

SEQ ID NO: 531507 - DNA, 15 bp, Homo sapiens
cataggcatttacag

SEQ ID NO: 531508 - DNA, 15 bp, Homo sapiens
gcataggcatttaca

SEQ ID NO: 531509 - DNA, 15 bp, Homo sapiens
tgcataggcatttac

SEQ ID NO: 531510 - DNA, 15 bp, Homo sapiens
atgcataggcattta

SEQ ID NO: 531511 - DNA, 15 bp, Homo sapiens
aatgcataggcattt

SEQ ID NO: 531512 - DNA, 15 bp, Homo sapiens
gaatgcataggcatt

SEQ ID NO: 531513 - DNA, 15 bp, Homo sapiens
tgaatgcataggcat

SEQ ID NO: 531514 - DNA, 15 bp, Homo sapiens
atgaatgcataggca

SEQ ID NO: 531515 - DNA, 15 bp, Homo sapiens
catgaatgcataggc

SEQ ID NO: 531516 - DNA, 15 bp, Homo sapiens
acatgaatgcatagg

SEQ ID NO: 531517 - DNA, 15 bp, Homo sapiens
gacatgaatgcatag

SEQ ID NO: 531518 - DNA, 15 bp, Homo sapiens
agacatgaatgcata

SEQ ID NO: 531519 - DNA, 15 bp, Homo sapiens
cagacatgaatgcat

SEQ ID NO: 531520 - DNA, 15 bp, Homo sapiens
acagacatgaatgca

SEQ ID NO: 531521 - DNA, 15 bp, Homo sapiens
gacagacatgaatgc

SEQ ID NO: 531522 - DNA, 15 bp, Homo sapiens
agacagacatgaatg

SEQ ID NO: 531523 - DNA, 15 bp, Homo sapiens
gagacagacatgaat

SEQ ID NO: 531524 - DNA, 15 bp, Homo sapiens
ggagacagacatgaa

SEQ ID NO: 531525 - DNA, 15 bp, Homo sapiens
tggagacagacatga

SEQ ID NO: 531526 - DNA, 15 bp, Homo sapiens
atggagacagacatg

SEQ ID NO: 531527 - DNA, 15 bp, Homo sapiens
catggagacagacat

SEQ ID NO: 531528 - DNA, 15 bp, Homo sapiens
gcatggagacagaca

SEQ ID NO: 531529 - DNA, 15 bp, Homo sapiens
tgcatggagacagac

SEQ ID NO: 531530 - DNA, 15 bp, Homo sapiens
atgcatggagacaga

SEQ ID NO: 531531 - DNA, 15 bp, Homo sapiens
catgcatggagacag

SEQ ID NO: 531532 - DNA, 15 bp, Homo sapiens
acatgcatggagaca

SEQ ID NO: 531533 - DNA, 15 bp, Homo sapiens
cacatgcatggagac

SEQ ID NO: 531534 - DNA, 15 bp, Homo sapiens
tcacatgcatggaga

SEQ ID NO: 531535 - DNA, 15 bp, Homo sapiens
ttcacatgcatggag

SEQ ID NO: 531536 - DNA, 15 bp, Homo sapiens
tttcacatgcatgga

SEQ ID NO: 531537 - DNA, 15 bp, Homo sapiens
ttttcacatgcatgg

SEQ ID NO: 531538 - DNA, 15 bp, Homo sapiens
gttttcacatgcatg

SEQ ID NO: 531539 - DNA, 15 bp, Homo sapiens
tgttttcacatgcat

SEQ ID NO: 531540 - DNA, 15 bp, Homo sapiens
ctgttttcacatgca

SEQ ID NO: 531541 - DNA, 15 bp, Homo sapiens
cctgttttcacatgc

SEQ ID NO: 531542 - DNA, 15 bp, Homo sapiens
tcctgttttcacatg

SEQ ID NO: 531543 - DNA, 15 bp, Homo sapiens
ctcctgttttcacat

SEQ ID NO: 531544 - DNA, 15 bp, Homo sapiens
tctcctgttttcaca

SEQ ID NO: 531545 - DNA, 15 bp, Homo sapiens
ctctcctgttttcac

SEQ ID NO: 531546 - DNA, 15 bp, Homo sapiens
actctcctgttttca

SEQ ID NO: 531547 - DNA, 15 bp, Homo sapiens
cactctcctgttttc

SEQ ID NO: 531548 - DNA, 15 bp, Homo sapiens
acactctcctgtttt

SEQ ID NO: 531549 - DNA, 15 bp, Homo sapiens
aacactctcctgttt

SEQ ID NO: 531550 - DNA, 15 bp, Homo sapiens
aaacactctcctgtt

SEQ ID NO: 531551 - DNA, 15 bp, Homo sapiens
aaaacactctcctgt

SEQ ID NO: 531552 - DNA, 15 bp, Homo sapiens
gaaaacactctcctg

SEQ ID NO: 531553 - DNA, 15 bp, Homo sapiens
tgaaaacactctcct

SEQ ID NO: 531554 - DNA, 15 bp, Homo sapiens
atgaaaacactctcc

SEQ ID NO: 531555 - DNA, 15 bp, Homo sapiens
aatgaaaacactctc

SEQ ID NO: 531556 - DNA, 15 bp, Homo sapiens
aaatgaaaacactct

SEQ ID NO: 531557 - DNA, 15 bp, Homo sapiens
aaaatgaaaacactc

SEQ ID NO: 531558 - DNA, 15 bp, Homo sapiens
caaaatgaaaacact

SEQ ID NO: 531559 - DNA, 15 bp, Homo sapiens
acaaaatgaaaacac

SEQ ID NO: 531560 - DNA, 15 bp, Homo sapiens
cacaaaatgaaaaca

SEQ ID NO: 531561 - DNA, 15 bp, Homo sapiens
acacaaaatgaaaac

SEQ ID NO: 531562 - DNA, 15 bp, Homo sapiens
gacacaaaatgaaaa

SEQ ID NO: 531563 - DNA, 15 bp, Homo sapiens
agacacaaaatgaaa

SEQ ID NO: 531564 - DNA, 15 bp, Homo sapiens
tagacacaaaatgaa

SEQ ID NO: 531565 - DNA, 15 bp, Homo sapiens
ctagacacaaaatga

SEQ ID NO: 531566 - DNA, 15 bp, Homo sapiens
cctagacacaaaatg

SEQ ID NO: 531567 - DNA, 15 bp, Homo sapiens
acctagacacaaaat

SEQ ID NO: 531568 - DNA, 15 bp, Homo sapiens
aacctagacacaaaa

SEQ ID NO: 531569 - DNA, 15 bp, Homo sapiens
aaacctagacacaaa

SEQ ID NO: 531570 - DNA, 15 bp, Homo sapiens
caaacctagacacaa

SEQ ID NO: 531571 - DNA, 15 bp, Homo sapiens
acaaacctagacaca

SEQ ID NO: 531572 - DNA, 15 bp, Homo sapiens
cacaaacctagacac

SEQ ID NO: 531573 - DNA, 15 bp, Homo sapiens
acacaaacctagaca

SEQ ID NO: 531574 - DNA, 15 bp, Homo sapiens
cacacaaacctagac

SEQ ID NO: 531575 - DNA, 15 bp, Homo sapiens
tcacacaaacctaga

SEQ ID NO: 531576 - DNA, 15 bp, Homo sapiens
ctcacacaaacctag

SEQ ID NO: 531577 - DNA, 15 bp, Homo sapiens
actcacacaaaccta

SEQ ID NO: 531578 - DNA, 15 bp, Homo sapiens
tactcacacaaacct

SEQ ID NO: 531579 - DNA, 15 bp, Homo sapiens
ttactcacacaaacc

SEQ ID NO: 531580 - DNA, 15 bp, Homo sapiens
cttactcacacaaac

SEQ ID NO: 531581 - DNA, 15 bp, Homo sapiens
gcttactcacacaaa

SEQ ID NO: 531582 - DNA, 15 bp, Homo sapiens
tgcttactcacacaa

SEQ ID NO: 531583 - DNA, 15 bp, Homo sapiens
ttgcttactcacaca

SEQ ID NO: 531584 - DNA, 15 bp, Homo sapiens
cttgcttactcacac

SEQ ID NO: 531585 - DNA, 15 bp, Homo sapiens
tcttgcttactcaca

SEQ ID NO: 531586 - DNA, 15 bp, Homo sapiens
ttcttgcttactcac

SEQ ID NO: 531587 - DNA, 15 bp, Homo sapiens
tttcttgcttactca

SEQ ID NO: 531588 - DNA, 15 bp, Homo sapiens
atttcttgcttactc

SEQ ID NO: 531589 - DNA, 15 bp, Homo sapiens
tatttcttgcttact

SEQ ID NO: 531590 - DNA, 15 bp, Homo sapiens
ttatttcttgcttac

SEQ ID NO: 531591 - DNA, 15 bp, Homo sapiens
tttatttcttgctta

SEQ ID NO: 531592 - DNA, 15 bp, Homo sapiens
gtttatttcttgctt

SEQ ID NO: 531593 - DNA, 15 bp, Homo sapiens
ggtttatttcttgct

SEQ ID NO: 531594 - DNA, 15 bp, Homo sapiens
aggtttatttcttgc

SEQ ID NO: 531595 - DNA, 15 bp, Homo sapiens
aaggtttatttcttg

SEQ ID NO: 531596 - DNA, 15 bp, Homo sapiens
aaaggtttatttctt

SEQ ID NO: 531597 - DNA, 15 bp, Homo sapiens
caaaggtttatttct

SEQ ID NO: 531598 - DNA, 15 bp, Homo sapiens
acaaaggtttatttc

SEQ ID NO: 531599 - DNA, 15 bp, Homo sapiens
aacaaaggtttattt

SEQ ID NO: 531600 - DNA, 15 bp, Homo sapiens
caacaaaggtttatt

SEQ ID NO: 531601 - DNA, 15 bp, Homo sapiens
acaacaaaggtttat

SEQ ID NO: 531602 - DNA, 15 bp, Homo sapiens
aacaacaaaggttta

SEQ ID NO: 531603 - DNA, 15 bp, Homo sapiens
caacaacaaaggttt

SEQ ID NO: 531604 - DNA, 15 bp, Homo sapiens
acaacaacaaaggtt

SEQ ID NO: 531605 - DNA, 15 bp, Homo sapiens
tacaacaacaaaggt

SEQ ID NO: 531606 - DNA, 15 bp, Homo sapiens
ttacaacaacaaagg

SEQ ID NO: 531607 - DNA, 15 bp, Homo sapiens
cttacaacaacaaag

SEQ ID NO: 531608 - DNA, 15 bp, Homo sapiens
gcttacaacaacaaa

SEQ ID NO: 531609 - DNA, 15 bp, Homo sapiens
ggcttacaacaacaa

SEQ ID NO: 531610 - DNA, 15 bp, Homo sapiens
tggcttacaacaaca

SEQ ID NO: 531611 - DNA, 15 bp, Homo sapiens
gtggcttacaacaac

SEQ ID NO: 531612 - DNA, 15 bp, Homo sapiens
agtggcttacaacaa

SEQ ID NO: 531613 - DNA, 15 bp, Homo sapiens
cagtggcttacaaca

SEQ ID NO: 531614 - DNA, 15 bp, Homo sapiens
tcagtggcttacaac

SEQ ID NO: 531615 - DNA, 15 bp, Homo sapiens
ctcagtggcttacaa

SEQ ID NO: 531616 - DNA, 15 bp, Homo sapiens
tctcagtggcttaca

SEQ ID NO: 531617 - DNA, 15 bp, Homo sapiens
atctcagtggcttac

SEQ ID NO: 531618 - DNA, 15 bp, Homo sapiens
aatctcagtggctta

SEQ ID NO: 531619 - DNA, 15 bp, Homo sapiens
aaatctcagtggctt

SEQ ID NO: 531620 - DNA, 15 bp, Homo sapiens
caaatctcagtggct

SEQ ID NO: 531621 - DNA, 15 bp, Homo sapiens
ccaaatctcagtggc

SEQ ID NO: 531622 - DNA, 15 bp, Homo sapiens
tccaaatctcagtgg

SEQ ID NO: 531623 - DNA, 15 bp, Homo sapiens
ctccaaatctcagtg

SEQ ID NO: 531624 - DNA, 15 bp, Homo sapiens
tctccaaatctcagt

SEQ ID NO: 531625 - DNA, 15 bp, Homo sapiens
ctctccaaatctcag

SEQ ID NO: 531626 - DNA, 15 bp, Homo sapiens
actctccaaatctca

SEQ ID NO: 531627 - DNA, 15 bp, Homo sapiens
cactctccaaatctc

SEQ ID NO: 531628 - DNA, 15 bp, Homo sapiens
acactctccaaatct

SEQ ID NO: 531629 - DNA, 15 bp, Homo sapiens
aacactctccaaatc

SEQ ID NO: 531630 - DNA, 15 bp, Homo sapiens
taacactctccaaat

SEQ ID NO: 531631 - DNA, 15 bp, Homo sapiens
gtaacactctccaaa

SEQ ID NO: 531632 - DNA, 15 bp, Homo sapiens
ggtaacactctccaa

SEQ ID NO: 531633 - DNA, 15 bp, Homo sapiens
tggtaacactctcca

SEQ ID NO: 531634 - DNA, 15 bp, Homo sapiens
gtggtaacactctcc

SEQ ID NO: 531635 - DNA, 15 bp, Homo sapiens
tgtggtaacactctc

SEQ ID NO: 531636 - DNA, 15 bp, Homo sapiens
ctgtggtaacactct

SEQ ID NO: 531637 - DNA, 15 bp, Homo sapiens
gctgtggtaacactc

SEQ ID NO: 531638 - DNA, 15 bp, Homo sapiens
ggctgtggtaacact

SEQ ID NO: 531639 - DNA, 15 bp, Homo sapiens
aggctgtggtaacac

SEQ ID NO: 531640 - DNA, 15 bp, Homo sapiens
taggctgtggtaaca

SEQ ID NO: 531641 - DNA, 15 bp, Homo sapiens
ttaggctgtggtaac

SEQ ID NO: 531642 - DNA, 15 bp, Homo sapiens
gttaggctgtggtaa

SEQ ID NO: 531643 - DNA, 15 bp, Homo sapiens
ggttaggctgtggta

SEQ ID NO: 531644 - DNA, 15 bp, Homo sapiens
aggttaggctgtggt

SEQ ID NO: 531645 - DNA, 15 bp, Homo sapiens
taggttaggctgtgg

SEQ ID NO: 531646 - DNA, 15 bp, Homo sapiens
ctaggttaggctgtg

SEQ ID NO: 531647 - DNA, 15 bp, Homo sapiens
actaggttaggctgt

SEQ ID NO: 531648 - DNA, 15 bp, Homo sapiens
gactaggttaggctg

SEQ ID NO: 531649 - DNA, 15 bp, Homo sapiens
agactaggttaggct

SEQ ID NO: 531650 - DNA, 15 bp, Homo sapiens
tagactaggttaggc

SEQ ID NO: 531651 - DNA, 15 bp, Homo sapiens
atagactaggttagg

SEQ ID NO: 531652 - DNA, 15 bp, Homo sapiens
gatagactaggttag

SEQ ID NO: 531653 - DNA, 15 bp, Homo sapiens
ggatagactaggtta

SEQ ID NO: 531654 - DNA, 15 bp, Homo sapiens
aggatagactaggtt

SEQ ID NO: 531655 - DNA, 15 bp, Homo sapiens
caggatagactaggt

SEQ ID NO: 531656 - DNA, 15 bp, Homo sapiens
tcaggatagactagg

SEQ ID NO: 531657 - DNA, 15 bp, Homo sapiens
gtcaggatagactag

SEQ ID NO: 531658 - DNA, 15 bp, Homo sapiens
agtcaggatagacta

SEQ ID NO: 531659 - DNA, 15 bp, Homo sapiens
cagtcaggatagact

SEQ ID NO: 531660 - DNA, 15 bp, Homo sapiens
tcagtcaggatagac

SEQ ID NO: 531661 - DNA, 15 bp, Homo sapiens
gtcagtcaggataga

SEQ ID NO: 531662 - DNA, 15 bp, Homo sapiens
tgtcagtcaggatag

SEQ ID NO: 531663 - DNA, 15 bp, Homo sapiens
ctgtcagtcaggata

SEQ ID NO: 531664 - DNA, 15 bp, Homo sapiens
tctgtcagtcaggat

SEQ ID NO: 531665 - DNA, 15 bp, Homo sapiens
ttctgtcagtcagga

SEQ ID NO: 531666 - DNA, 15 bp, Homo sapiens
tttctgtcagtcagg

SEQ ID NO: 531667 - DNA, 15 bp, Homo sapiens
ctttctgtcagtcag

SEQ ID NO: 531668 - DNA, 15 bp, Homo sapiens
cctttctgtcagtca

SEQ ID NO: 531669 - DNA, 15 bp, Homo sapiens
tcctttctgtcagtc

SEQ ID NO: 531670 - DNA, 15 bp, Homo sapiens
gtcctttctgtcagt

SEQ ID NO: 531671 - DNA, 15 bp, Homo sapiens
agtcctttctgtcag

SEQ ID NO: 531672 - DNA, 15 bp, Homo sapiens
aagtcctttctgtca

SEQ ID NO: 531673 - DNA, 15 bp, Homo sapiens
caagtcctttctgtc

SEQ ID NO: 531674 - DNA, 15 bp, Homo sapiens
acaagtcctttctgt

SEQ ID NO: 531675 - DNA, 15 bp, Homo sapiens
aacaagtcctttctg

SEQ ID NO: 531676 - DNA, 15 bp, Homo sapiens
gaacaagtcctttct

SEQ ID NO: 531677 - DNA, 15 bp, Homo sapiens
tgaacaagtcctttc

SEQ ID NO: 531678 - DNA, 15 bp, Homo sapiens
atgaacaagtccttt

SEQ ID NO: 531679 - DNA, 15 bp, Homo sapiens
aatgaacaagtcctt

SEQ ID NO: 531680 - DNA, 15 bp, Homo sapiens
aaatgaacaagtcct

SEQ ID NO: 531681 - DNA, 15 bp, Homo sapiens
gaaatgaacaagtcc

SEQ ID NO: 531682 - DNA, 15 bp, Homo sapiens
cgaaatgaacaagtc

SEQ ID NO: 531683 - DNA, 15 bp, Homo sapiens
gcgaaatgaacaagt

SEQ ID NO: 531684 - DNA, 15 bp, Homo sapiens
agcgaaatgaacaag

SEQ ID NO: 531685 - DNA, 15 bp, Homo sapiens
aagcgaaatgaacaa

SEQ ID NO: 531686 - DNA, 15 bp, Homo sapiens
gaagcgaaatgaaca

SEQ ID NO: 531687 - DNA, 15 bp, Homo sapiens
agaagcgaaatgaac

SEQ ID NO: 531688 - DNA, 15 bp, Homo sapiens
gagaagcgaaatgaa

SEQ ID NO: 531689 - DNA, 15 bp, Homo sapiens
tgagaagcgaaatga

SEQ ID NO: 531690 - DNA, 15 bp, Homo sapiens
ttgagaagcgaaatg

SEQ ID NO: 531691 - DNA, 15 bp, Homo sapiens
tttgagaagcgaaat

SEQ ID NO: 531692 - DNA, 15 bp, Homo sapiens
ctttgagaagcgaaa

SEQ ID NO: 531693 - DNA, 15 bp, Homo sapiens
actttgagaagcgaa

SEQ ID NO: 531694 - DNA, 15 bp, Homo sapiens
cactttgagaagcga

SEQ ID NO: 531695 - DNA, 15 bp, Homo sapiens
tcactttgagaagcg

SEQ ID NO: 531696 - DNA, 15 bp, Homo sapiens
ttcactttgagaagc

SEQ ID NO: 531697 - DNA, 15 bp, Homo sapiens
tttcactttgagaag

SEQ ID NO: 531698 - DNA, 15 bp, Homo sapiens
ttttcactttgagaa

SEQ ID NO: 531699 - DNA, 15 bp, Homo sapiens
tttttcactttgaga

SEQ ID NO: 531700 - DNA, 15 bp, Homo sapiens
atttttcactttgag

SEQ ID NO: 531701 - DNA, 15 bp, Homo sapiens
gatttttcactttga

SEQ ID NO: 531702 - DNA, 15 bp, Homo sapiens
agatttttcactttg

SEQ ID NO: 531703 - DNA, 15 bp, Homo sapiens
cagatttttcacttt

SEQ ID NO: 531704 - DNA, 15 bp, Homo sapiens
acagatttttcactt

SEQ ID NO: 531705 - DNA, 15 bp, Homo sapiens
aacagatttttcact

SEQ ID NO: 531706 - DNA, 15 bp, Homo sapiens
taacagatttttcac

SEQ ID NO: 531707 - DNA, 15 bp, Homo sapiens
ataacagatttttca

SEQ ID NO: 531708 - DNA, 15 bp, Homo sapiens
gataacagatttttc

SEQ ID NO: 531709 - DNA, 15 bp, Homo sapiens
ggataacagattttt

SEQ ID NO: 531710 - DNA, 15 bp, Homo sapiens
tggataacagatttt

SEQ ID NO: 531711 - DNA, 15 bp, Homo sapiens
ttggataacagattt

SEQ ID NO: 531712 - DNA, 15 bp, Homo sapiens
attggataacagatt

SEQ ID NO: 531713 - DNA, 15 bp, Homo sapiens
tattggataacagat

SEQ ID NO: 531714 - DNA, 15 bp, Homo sapiens
ctattggataacaga

SEQ ID NO: 531715 - DNA, 15 bp, Homo sapiens
gctattggataacag

SEQ ID NO: 531716 - DNA, 15 bp, Homo sapiens
agctattggataaca

SEQ ID NO: 531717 - DNA, 15 bp, Homo sapiens
tagctattggataac

SEQ ID NO: 531718 - DNA, 15 bp, Homo sapiens
gtagctattggataa

SEQ ID NO: 531719 - DNA, 15 bp, Homo sapiens
ggtagctattggata

SEQ ID NO: 531720 - DNA, 15 bp, Homo sapiens
tggtagctattggat

SEQ ID NO: 531721 - DNA, 15 bp, Homo sapiens
atggtagctattgga

SEQ ID NO: 531722 - DNA, 15 bp, Homo sapiens
tatggtagctattgg

SEQ ID NO: 531723 - DNA, 15 bp, Homo sapiens
ctatggtagctattg

SEQ ID NO: 531724 - DNA, 15 bp, Homo sapiens
tctatggtagctatt

SEQ ID NO: 531725 - DNA, 15 bp, Homo sapiens
atctatggtagctat

SEQ ID NO: 531726 - DNA, 15 bp, Homo sapiens
catctatggtagcta

SEQ ID NO: 531727 - DNA, 15 bp, Homo sapiens
tcatctatggtagct

SEQ ID NO: 531728 - DNA, 15 bp, Homo sapiens
ttcatctatggtagc

SEQ ID NO: 531729 - DNA, 15 bp, Homo sapiens
tttcatctatggtag

SEQ ID NO: 531730 - DNA, 15 bp, Homo sapiens
ttttcatctatggta

SEQ ID NO: 531731 - DNA, 15 bp, Homo sapiens
gttttcatctatggt

SEQ ID NO: 531732 - DNA, 15 bp, Homo sapiens
tgttttcatctatgg

SEQ ID NO: 531733 - DNA, 15 bp, Homo sapiens
ttgttttcatctatg

SEQ ID NO: 531734 - DNA, 15 bp, Homo sapiens
tttgttttcatctat

SEQ ID NO: 531735 - DNA, 15 bp, Homo sapiens
gtttgttttcatcta

SEQ ID NO: 531736 - DNA, 15 bp, Homo sapiens
agtttgttttcatct

SEQ ID NO: 531737 - DNA, 15 bp, Homo sapiens
aagtttgttttcatc

SEQ ID NO: 531738 - DNA, 15 bp, Homo sapiens
caagtttgttttcat

SEQ ID NO: 531739 - DNA, 15 bp, Homo sapiens
ccaagtttgttttca

SEQ ID NO: 531740 - DNA, 15 bp, Homo sapiens
tccaagtttgttttc

SEQ ID NO: 531741 - DNA, 15 bp, Homo sapiens
atccaagtttgtttt

SEQ ID NO: 531742 - DNA, 15 bp, Homo sapiens
aatccaagtttgttt

SEQ ID NO: 531743 - DNA, 15 bp, Homo sapiens
aaatccaagtttgtt

SEQ ID NO: 531744 - DNA, 15 bp, Homo sapiens
aaaatccaagtttgt

SEQ ID NO: 531745 - DNA, 15 bp, Homo sapiens
aaaaatccaagtttg

SEQ ID NO: 531746 - DNA, 15 bp, Homo sapiens
aaaaaatccaagttt

SEQ ID NO: 531747 - DNA, 15 bp, Homo sapiens
aaaaaaatccaagtt

SEQ ID NO: 531748 - DNA, 15 bp, Homo sapiens
gaaaaaaatccaagt

SEQ ID NO: 531749 - DNA, 15 bp, Homo sapiens
agaaaaaaatccaag

SEQ ID NO: 531750 - DNA, 15 bp, Homo sapiens
aagaaaaaaatccaa

SEQ ID NO: 531751 - DNA, 15 bp, Homo sapiens
aaagaaaaaaatcca

SEQ ID NO: 531752 - DNA, 15 bp, Homo sapiens
caaagaaaaaaatcc

SEQ ID NO: 531753 - DNA, 15 bp, Homo sapiens
acaaagaaaaaaatc

SEQ ID NO: 531754 - DNA, 15 bp, Homo sapiens
gacaaagaaaaaaat

SEQ ID NO: 531755 - DNA, 15 bp, Homo sapiens
ggacaaagaaaaaaa

SEQ ID NO: 531756 - DNA, 15 bp, Homo sapiens
tggacaaagaaaaaa

SEQ ID NO: 531757 - DNA, 15 bp, Homo sapiens
ttggacaaagaaaaa

SEQ ID NO: 531758 - DNA, 15 bp, Homo sapiens
tttggacaaagaaaa

SEQ ID NO: 531759 - DNA, 15 bp, Homo sapiens
atttggacaaagaaa

SEQ ID NO: 531760 - DNA, 15 bp, Homo sapiens
tatttggacaaagaa

SEQ ID NO: 531761 - DNA, 15 bp, Homo sapiens
ttatttggacaaaga

SEQ ID NO: 531762 - DNA, 15 bp, Homo sapiens
tttatttggacaaag

SEQ ID NO: 531763 - DNA, 15 bp, Homo sapiens
ttttatttggacaaa

SEQ ID NO: 531764 - DNA, 15 bp, Homo sapiens
tttttatttggacaa

SEQ ID NO: 531765 - DNA, 15 bp, Homo sapiens
ttttttatttggaca

SEQ ID NO: 531766 - DNA, 15 bp, Homo sapiens
tttttttatttggac

SEQ ID NO: 531767 - DNA, 15 bp, Homo sapiens
ttttttttatttgga

SEQ ID NO: 531768 - DNA, 15 bp, Homo sapiens
tttttttttatttgg

SEQ ID NO: 531769 - DNA, 15 bp, Homo sapiens
atttttttttatttg

SEQ ID NO: 531770 - DNA, 15 bp, Homo sapiens
catttttttttattt

SEQ ID NO: 531771 - DNA, 15 bp, Homo sapiens
tcatttttttttatt

SEQ ID NO: 531772 - DNA, 15 bp, Homo sapiens
atcatttttttttat

SEQ ID NO: 531773 - DNA, 15 bp, Homo sapiens
catcattttttttta

SEQ ID NO: 531774 - DNA, 15 bp, Homo sapiens
acatcattttttttt

SEQ ID NO: 531775 - DNA, 15 bp, Homo sapiens
tacatcatttttttt

SEQ ID NO: 531776 - DNA, 15 bp, Homo sapiens
ttacatcattttttt

SEQ ID NO: 531777 - DNA, 15 bp, Homo sapiens
tttacatcatttttt

SEQ ID NO: 531778 - DNA, 15 bp, Homo sapiens
ctttacatcattttt

SEQ ID NO: 531779 - DNA, 15 bp, Homo sapiens
tctttacatcatttt

SEQ ID NO: 531780 - DNA, 15 bp, Homo sapiens
ttctttacatcattt

SEQ ID NO: 531781 - DNA, 15 bp, Homo sapiens
tttctttacatcatt

SEQ ID NO: 531782 - DNA, 15 bp, Homo sapiens
atttctttacatcat

SEQ ID NO: 531783 - DNA, 15 bp, Homo sapiens
tatttctttacatca

SEQ ID NO: 531784 - DNA, 15 bp, Homo sapiens
ttatttctttacatc

SEQ ID NO: 531785 - DNA, 15 bp, Homo sapiens
attatttctttacat

SEQ ID NO: 531786 - DNA, 15 bp, Homo sapiens
cattatttctttaca

SEQ ID NO: 531787 - DNA, 15 bp, Homo sapiens
ccattatttctttac

SEQ ID NO: 531788 - DNA, 15 bp, Homo sapiens
cccattatttcttta

SEQ ID NO: 531789 - DNA, 15 bp, Homo sapiens
ccccattatttcttt

SEQ ID NO: 531790 - DNA, 15 bp, Homo sapiens
cccccattatttctt

SEQ ID NO: 531791 - DNA, 15 bp, Homo sapiens
tcccccattatttct

SEQ ID NO: 531792 - DNA, 15 bp, Homo sapiens
atcccccattatttc

SEQ ID NO: 531793 - DNA, 15 bp, Homo sapiens
aatcccccattattt

SEQ ID NO: 531794 - DNA, 15 bp, Homo sapiens
gaatcccccattatt

SEQ ID NO: 531795 - DNA, 15 bp, Homo sapiens
tgaatcccccattat

SEQ ID NO: 531796 - DNA, 15 bp, Homo sapiens
gtgaatcccccatta

SEQ ID NO: 531797 - DNA, 15 bp, Homo sapiens
agtgaatcccccatt

SEQ ID NO: 531798 - DNA, 15 bp, Homo sapiens
cagtgaatcccccat

SEQ ID NO: 531799 - DNA, 15 bp, Homo sapiens
tcagtgaatccccca

SEQ ID NO: 531800 - DNA, 15 bp, Homo sapiens
atcagtgaatccccc

SEQ ID NO: 531801 - DNA, 15 bp, Homo sapiens
aatcagtgaatcccc

SEQ ID NO: 531802 - DNA, 15 bp, Homo sapiens
taatcagtgaatccc

SEQ ID NO: 531803 - DNA, 15 bp, Homo sapiens
ttaatcagtgaatcc

SEQ ID NO: 531804 - DNA, 15 bp, Homo sapiens
attaatcagtgaatc

SEQ ID NO: 531805 - DNA, 15 bp, Homo sapiens
aattaatcagtgaat

SEQ ID NO: 531806 - DNA, 15 bp, Homo sapiens
caattaatcagtgaa

SEQ ID NO: 531807 - DNA, 15 bp, Homo sapiens
gcaattaatcagtga

SEQ ID NO: 531808 - DNA, 15 bp, Homo sapiens
ggcaattaatcagtg

SEQ ID NO: 531809 - DNA, 15 bp, Homo sapiens
gggcaattaatcagt

SEQ ID NO: 531810 - DNA, 15 bp, Homo sapiens
cgggcaattaatcag

SEQ ID NO: 531811 - DNA, 15 bp, Homo sapiens
gcgggcaattaatca

SEQ ID NO: 531812 - DNA, 15 bp, Homo sapiens
agcgggcaattaatc

SEQ ID NO: 531813 - DNA, 15 bp, Homo sapiens
gagcgggcaattaat

SEQ ID NO: 531814 - DNA, 15 bp, Homo sapiens
agagcgggcaattaa

SEQ ID NO: 531815 - DNA, 15 bp, Homo sapiens
cagagcgggcaatta

SEQ ID NO: 531816 - DNA, 15 bp, Homo sapiens
acagagcgggcaatt

SEQ ID NO: 531817 - DNA, 15 bp, Homo sapiens
cacagagcgggcaat

SEQ ID NO: 531818 - DNA, 15 bp, Homo sapiens
gcacagagcgggcaa

SEQ ID NO: 531819 - DNA, 15 bp, Homo sapiens
ggcacagagcgggca

SEQ ID NO: 531820 - DNA, 15 bp, Homo sapiens
tggcacagagcgggc

SEQ ID NO: 531821 - DNA, 15 bp, Homo sapiens
ctggcacagagcggg

SEQ ID NO: 531822 - DNA, 15 bp, Homo sapiens
cctggcacagagcgg

SEQ ID NO: 531823 - DNA, 15 bp, Homo sapiens
gcctggcacagagcg

SEQ ID NO: 531824 - DNA, 15 bp, Homo sapiens
tgcctggcacagagc

SEQ ID NO: 531825 - DNA, 15 bp, Homo sapiens
atgcctggcacagag

SEQ ID NO: 531826 - DNA, 15 bp, Homo sapiens
tatgcctggcacaga

SEQ ID NO: 531827 - DNA, 15 bp, Homo sapiens
ctatgcctggcacag

SEQ ID NO: 531828 - DNA, 15 bp, Homo sapiens
tctatgcctggcaca

SEQ ID NO: 531829 - DNA, 15 bp, Homo sapiens
gtctatgcctggcac

SEQ ID NO: 531830 - DNA, 15 bp, Homo sapiens
tgtctatgcctggca

SEQ ID NO: 531831 - DNA, 15 bp, Homo sapiens
ctgtctatgcctggc

SEQ ID NO: 531832 - DNA, 15 bp, Homo sapiens
actgtctatgcctgg

SEQ ID NO: 531833 - DNA, 15 bp, Homo sapiens
aactgtctatgcctg

SEQ ID NO: 531834 - DNA, 15 bp, Homo sapiens
aaactgtctatgcct

SEQ ID NO: 531835 - DNA, 15 bp, Homo sapiens
gaaactgtctatgcc

SEQ ID NO: 531836 - DNA, 15 bp, Homo sapiens
ggaaactgtctatgc

SEQ ID NO: 531837 - DNA, 15 bp, Homo sapiens
tggaaactgtctatg

SEQ ID NO: 531838 - DNA, 15 bp, Homo sapiens
ctggaaactgtctat

SEQ ID NO: 531839 - DNA, 15 bp, Homo sapiens
gctggaaactgtcta

SEQ ID NO: 531840 - DNA, 15 bp, Homo sapiens
agctggaaactgtct

SEQ ID NO: 531841 - DNA, 15 bp, Homo sapiens
cagctggaaactgtc

SEQ ID NO: 531842 - DNA, 15 bp, Homo sapiens
acagctggaaactgt

SEQ ID NO: 531843 - DNA, 15 bp, Homo sapiens
gacagctggaaactg

SEQ ID NO: 531844 - DNA, 15 bp, Homo sapiens
agacagctggaaact

SEQ ID NO: 531845 - DNA, 15 bp, Homo sapiens
tagacagctggaaac

SEQ ID NO: 531846 - DNA, 15 bp, Homo sapiens
ctagacagctggaaa

SEQ ID NO: 531847 - DNA, 15 bp, Homo sapiens
tctagacagctggaa

SEQ ID NO: 531848 - DNA, 15 bp, Homo sapiens
ctctagacagctgga

SEQ ID NO: 531849 - DNA, 15 bp, Homo sapiens
cctctagacagctgg

SEQ ID NO: 531850 - DNA, 15 bp, Homo sapiens
ccctctagacagctg

SEQ ID NO: 531851 - DNA, 15 bp, Homo sapiens
cccctctagacagct

SEQ ID NO: 531852 - DNA, 15 bp, Homo sapiens
gcccctctagacagc

SEQ ID NO: 531853 - DNA, 15 bp, Homo sapiens
agcccctctagacag

SEQ ID NO: 531854 - DNA, 15 bp, Homo sapiens
tagcccctctagaca

SEQ ID NO: 531855 - DNA, 15 bp, Homo sapiens
gtagcccctctagac

SEQ ID NO: 531856 - DNA, 15 bp, Homo sapiens
tgtagcccctctaga

SEQ ID NO: 531857 - DNA, 15 bp, Homo sapiens
ttgtagcccctctag

SEQ ID NO: 531858 - DNA, 15 bp, Homo sapiens
tttgtagcccctcta

SEQ ID NO: 531859 - DNA, 15 bp, Homo sapiens
atttgtagcccctct

SEQ ID NO: 531860 - DNA, 15 bp, Homo sapiens
gatttgtagcccctc

SEQ ID NO: 531861 - DNA, 15 bp, Homo sapiens
cgatttgtagcccct

SEQ ID NO: 531862 - DNA, 15 bp, Homo sapiens
tcgatttgtagcccc

SEQ ID NO: 531863 - DNA, 15 bp, Homo sapiens
ttcgatttgtagccc

SEQ ID NO: 531864 - DNA, 15 bp, Homo sapiens
tttcgatttgtagcc

SEQ ID NO: 531865 - DNA, 15 bp, Homo sapiens
atttcgatttgtagc

SEQ ID NO: 531866 - DNA, 15 bp, Homo sapiens
catttcgatttgtag

SEQ ID NO: 531867 - DNA, 15 bp, Homo sapiens
gcatttcgatttgta

SEQ ID NO: 531868 - DNA, 15 bp, Homo sapiens
ggcatttcgatttgt

SEQ ID NO: 531869 - DNA, 15 bp, Homo sapiens
aggcatttcgatttg

SEQ ID NO: 531870 - DNA, 15 bp, Homo sapiens
taggcatttcgattt

SEQ ID NO: 531871 - DNA, 15 bp, Homo sapiens
gtaggcatttcgatt

SEQ ID NO: 531872 - DNA, 15 bp, Homo sapiens
tgtaggcatttcgat

SEQ ID NO: 531873 - DNA, 15 bp, Homo sapiens
ctgtaggcatttcga

SEQ ID NO: 531874 - DNA, 15 bp, Homo sapiens
cctgtaggcatttcg

SEQ ID NO: 531875 - DNA, 15 bp, Homo sapiens
ccctgtaggcatttc

SEQ ID NO: 531876 - DNA, 15 bp, Homo sapiens
gccctgtaggcattt

SEQ ID NO: 531877 - DNA, 15 bp, Homo sapiens
agccctgtaggcatt

SEQ ID NO: 531878 - DNA, 15 bp, Homo sapiens
cagccctgtaggcat

SEQ ID NO: 531879 - DNA, 15 bp, Homo sapiens
tcagccctgtaggca

SEQ ID NO: 531880 - DNA, 15 bp, Homo sapiens
ctcagccctgtaggc

SEQ ID NO: 531881 - DNA, 15 bp, Homo sapiens
gctcagccctgtagg

SEQ ID NO: 531882 - DNA, 15 bp, Homo sapiens
tgctcagccctgtag

SEQ ID NO: 531883 - DNA, 15 bp, Homo sapiens
ctgctcagccctgta

SEQ ID NO: 531884 - DNA, 15 bp, Homo sapiens
tctgctcagccctgt

SEQ ID NO: 531885 - DNA, 15 bp, Homo sapiens
atctgctcagccctg

SEQ ID NO: 531886 - DNA, 15 bp, Homo sapiens
gatctgctcagccct

SEQ ID NO: 531887 - DNA, 15 bp, Homo sapiens
tgatctgctcagccc

SEQ ID NO: 531888 - DNA, 15 bp, Homo sapiens
ttgatctgctcagcc

SEQ ID NO: 531889 - DNA, 15 bp, Homo sapiens
tttgatctgctcagc

SEQ ID NO: 531890 - DNA, 15 bp, Homo sapiens
atttgatctgctcag

SEQ ID NO: 531891 - DNA, 15 bp, Homo sapiens
tatttgatctgctca

SEQ ID NO: 531892 - DNA, 15 bp, Homo sapiens
ttatttgatctgctc

SEQ ID NO: 531893 - DNA, 15 bp, Homo sapiens
tttatttgatctgct

SEQ ID NO: 531894 - DNA, 15 bp, Homo sapiens
atttatttgatctgc

SEQ ID NO: 531895 - DNA, 15 bp, Homo sapiens
catttatttgatctg

SEQ ID NO: 531896 - DNA, 15 bp, Homo sapiens
tcatttatttgatct

SEQ ID NO: 531897 - DNA, 15 bp, Homo sapiens
ctcatttatttgatc

SEQ ID NO: 531898 - DNA, 15 bp, Homo sapiens
actcatttatttgat

SEQ ID NO: 531899 - DNA, 15 bp, Homo sapiens
tactcatttatttga

SEQ ID NO: 531900 - DNA, 15 bp, Homo sapiens
ttactcatttatttg

SEQ ID NO: 531901 - DNA, 15 bp, Homo sapiens
tttactcatttattt

SEQ ID NO: 531902 - DNA, 15 bp, Homo sapiens
ctttactcatttatt

SEQ ID NO: 531903 - DNA, 15 bp, Homo sapiens
tctttactcatttat

SEQ ID NO: 531904 - DNA, 15 bp, Homo sapiens
ttctttactcattta

SEQ ID NO: 531905 - DNA, 15 bp, Homo sapiens
cttctttactcattt

SEQ ID NO: 531906 - DNA, 15 bp, Homo sapiens
ccttctttactcatt

SEQ ID NO: 531907 - DNA, 15 bp, Homo sapiens
gccttctttactcat

SEQ ID NO: 531908 - DNA, 15 bp, Homo sapiens
ggccttctttactca

SEQ ID NO: 531909 - DNA, 15 bp, Homo sapiens
tggccttctttactc

SEQ ID NO: 531910 - DNA, 15 bp, Homo sapiens
ctggccttctttact

SEQ ID NO: 531911 - DNA, 15 bp, Homo sapiens
tctggccttctttac

SEQ ID NO: 531912 - DNA, 15 bp, Homo sapiens
atctggccttcttta

SEQ ID NO: 531913 - DNA, 15 bp, Homo sapiens
catctggccttcttt

SEQ ID NO: 531914 - DNA, 15 bp, Homo sapiens
ccatctggccttctt

SEQ ID NO: 531915 - DNA, 15 bp, Homo sapiens
tccatctggccttct

SEQ ID NO: 531916 - DNA, 15 bp, Homo sapiens
gtccatctggccttc

SEQ ID NO: 531917 - DNA, 15 bp, Homo sapiens
ggtccatctggcctt

SEQ ID NO: 531918 - DNA, 15 bp, Homo sapiens
gggtccatctggcct

SEQ ID NO: 531919 - DNA, 15 bp, Homo sapiens
agggtccatctggcc

SEQ ID NO: 531920 - DNA, 15 bp, Homo sapiens
cagggtccatctggc

SEQ ID NO: 531921 - DNA, 15 bp, Homo sapiens
ccagggtccatctgg

SEQ ID NO: 531922 - DNA, 15 bp, Homo sapiens
gccagggtccatctg

SEQ ID NO: 531923 - DNA, 15 bp, Homo sapiens
tgccagggtccatct

SEQ ID NO: 531924 - DNA, 15 bp, Homo sapiens
ttgccagggtccatc

SEQ ID NO: 531925 - DNA, 15 bp, Homo sapiens
tttgccagggtccat

SEQ ID NO: 531926 - DNA, 15 bp, Homo sapiens
gtttgccagggtcca

SEQ ID NO: 531927 - DNA, 15 bp, Homo sapiens
agtttgccagggtcc

SEQ ID NO: 531928 - DNA, 15 bp, Homo sapiens
cagtttgccagggtc

SEQ ID NO: 531929 - DNA, 15 bp, Homo sapiens
tcagtttgccagggt

SEQ ID NO: 531930 - DNA, 15 bp, Homo sapiens
ctcagtttgccaggg

SEQ ID NO: 531931 - DNA, 15 bp, Homo sapiens
tctcagtttgccagg

SEQ ID NO: 531932 - DNA, 15 bp, Homo sapiens
ttctcagtttgccag

SEQ ID NO: 531933 - DNA, 15 bp, Homo sapiens
attctcagtttgcca

SEQ ID NO: 531934 - DNA, 15 bp, Homo sapiens
cattctcagtttgcc

SEQ ID NO: 531935 - DNA, 15 bp, Homo sapiens
ccattctcagtttgc

SEQ ID NO: 531936 - DNA, 15 bp, Homo sapiens
tccattctcagtttg

SEQ ID NO: 531937 - DNA, 15 bp, Homo sapiens
atccattctcagttt

SEQ ID NO: 531938 - DNA, 15 bp, Homo sapiens
catccattctcagtt

SEQ ID NO: 531939 - DNA, 15 bp, Homo sapiens
gcatccattctcagt

SEQ ID NO: 531940 - DNA, 15 bp, Homo sapiens
ggcatccattctcag

SEQ ID NO: 531941 - DNA, 15 bp, Homo sapiens
aggcatccattctca

SEQ ID NO: 531942 - DNA, 15 bp, Homo sapiens
aaggcatccattctc

SEQ ID NO: 531943 - DNA, 15 bp, Homo sapiens
caaggcatccattct

SEQ ID NO: 531944 - DNA, 15 bp, Homo sapiens
gcaaggcatccattc

SEQ ID NO: 531945 - DNA, 15 bp, Homo sapiens
ggcaaggcatccatt

SEQ ID NO: 531946 - DNA, 15 bp, Homo sapiens
aggcaaggcatccat

SEQ ID NO: 531947 - DNA, 15 bp, Homo sapiens
taggcaaggcatcca

SEQ ID NO: 531948 - DNA, 15 bp, Homo sapiens
ttaggcaaggcatcc

SEQ ID NO: 531949 - DNA, 15 bp, Homo sapiens
cttaggcaaggcatc

SEQ ID NO: 531950 - DNA, 15 bp, Homo sapiens
ccttaggcaaggcat

SEQ ID NO: 531951 - DNA, 15 bp, Homo sapiens
tccttaggcaaggca

SEQ ID NO: 531952 - DNA, 15 bp, Homo sapiens
ctccttaggcaaggc

SEQ ID NO: 531953 - DNA, 15 bp, Homo sapiens
gctccttaggcaagg

SEQ ID NO: 531954 - DNA, 15 bp, Homo sapiens
tgctccttaggcaag

SEQ ID NO: 531955 - DNA, 15 bp, Homo sapiens
ctgctccttaggcaa

SEQ ID NO: 531956 - DNA, 15 bp, Homo sapiens
gctgctccttaggca

SEQ ID NO: 531957 - DNA, 15 bp, Homo sapiens
ggctgctccttaggc

SEQ ID NO: 531958 - DNA, 15 bp, Homo sapiens
aggctgctccttagg

SEQ ID NO: 531959 - DNA, 15 bp, Homo sapiens
gaggctgctccttag

SEQ ID NO: 531960 - DNA, 15 bp, Homo sapiens
ggaggctgctcctta

SEQ ID NO: 531961 - DNA, 15 bp, Homo sapiens
aggaggctgctcctt

SEQ ID NO: 531962 - DNA, 15 bp, Homo sapiens
aaggaggctgctcct

SEQ ID NO: 531963 - DNA, 15 bp, Homo sapiens
aaaggaggctgctcc

SEQ ID NO: 531964 - DNA, 15 bp, Homo sapiens
aaaaggaggctgctc

SEQ ID NO: 531965 - DNA, 15 bp, Homo sapiens
caaaaggaggctgct

SEQ ID NO: 531966 - DNA, 15 bp, Homo sapiens
ccaaaaggaggctgc

SEQ ID NO: 531967 - DNA, 15 bp, Homo sapiens
gccaaaaggaggctg

SEQ ID NO: 531968 - DNA, 15 bp, Homo sapiens
ggccaaaaggaggct

SEQ ID NO: 531969 - DNA, 15 bp, Homo sapiens
gggccaaaaggaggc

SEQ ID NO: 531970 - DNA, 15 bp, Homo sapiens
agggccaaaaggagg

SEQ ID NO: 531971 - DNA, 15 bp, Homo sapiens
tagggccaaaaggag

SEQ ID NO: 531972 - DNA, 15 bp, Homo sapiens
ctagggccaaaagga

SEQ ID NO: 531973 - DNA, 15 bp, Homo sapiens
gctagggccaaaagg

SEQ ID NO: 531974 - DNA, 15 bp, Homo sapiens
tgctagggccaaaag

SEQ ID NO: 531975 - DNA, 15 bp, Homo sapiens
ctgctagggccaaaa

SEQ ID NO: 531976 - DNA, 15 bp, Homo sapiens
tctgctagggccaaa

SEQ ID NO: 531977 - DNA, 15 bp, Homo sapiens
atctgctagggccaa

SEQ ID NO: 531978 - DNA, 15 bp, Homo sapiens
aatctgctagggcca

SEQ ID NO: 531979 - DNA, 15 bp, Homo sapiens
taatctgctagggcc

SEQ ID NO: 531980 - DNA, 15 bp, Homo sapiens
gtaatctgctagggc

SEQ ID NO: 531981 - DNA, 15 bp, Homo sapiens
agtaatctgctaggg

SEQ ID NO: 531982 - DNA, 15 bp, Homo sapiens
cagtaatctgctagg

SEQ ID NO: 531983 - DNA, 15 bp, Homo sapiens
gcagtaatctgctag

SEQ ID NO: 531984 - DNA, 15 bp, Homo sapiens
ggcagtaatctgcta

SEQ ID NO: 531985 - DNA, 15 bp, Homo sapiens
tggcagtaatctgct

SEQ ID NO: 531986 - DNA, 15 bp, Homo sapiens
ctggcagtaatctgc

SEQ ID NO: 531987 - DNA, 15 bp, Homo sapiens
cctggcagtaatctg

SEQ ID NO: 531988 - DNA, 15 bp, Homo sapiens
gcctggcagtaatct

SEQ ID NO: 531989 - DNA, 15 bp, Homo sapiens
cgcctggcagtaatc

SEQ ID NO: 531990 - DNA, 15 bp, Homo sapiens
ccgcctggcagtaat

SEQ ID NO: 531991 - DNA, 15 bp, Homo sapiens
cccgcctggcagtaa

SEQ ID NO: 531992 - DNA, 15 bp, Homo sapiens
tcccgcctggcagta

SEQ ID NO: 531993 - DNA, 15 bp, Homo sapiens
ttcccgcctggcagt

SEQ ID NO: 531994 - DNA, 15 bp, Homo sapiens
attcccgcctggcag

SEQ ID NO: 531995 - DNA, 15 bp, Homo sapiens
cattcccgcctggca

SEQ ID NO: 531996 - DNA, 15 bp, Homo sapiens
acattcccgcctggc

SEQ ID NO: 531997 - DNA, 15 bp, Homo sapiens
cacattcccgcctgg

SEQ ID NO: 531998 - DNA, 15 bp, Homo sapiens
ccacattcccgcctg

SEQ ID NO: 531999 - DNA, 15 bp, Homo sapiens
tccacattcccgcct

SEQ ID NO: 532000 - DNA, 15 bp, Homo sapiens
gtccacattcccgcc

SEQ ID NO: 532001 - DNA, 15 bp, Homo sapiens
agtccacattcccgc

SEQ ID NO: 532002 - DNA, 15 bp, Homo sapiens
gagtccacattcccg

SEQ ID NO: 532003 - DNA, 15 bp, Homo sapiens
tgagtccacattccc

SEQ ID NO: 532004 - DNA, 15 bp, Homo sapiens
ctgagtccacattcc

SEQ ID NO: 532005 - DNA, 15 bp, Homo sapiens
actgagtccacattc

SEQ ID NO: 532006 - DNA, 15 bp, Homo sapiens
cactgagtccacatt

SEQ ID NO: 532007 - DNA, 15 bp, Homo sapiens
acactgagtccacat

SEQ ID NO: 532008 - DNA, 15 bp, Homo sapiens
aacactgagtccaca

SEQ ID NO: 532009 - DNA, 15 bp, Homo sapiens
caacactgagtccac

SEQ ID NO: 532010 - DNA, 15 bp, Homo sapiens
gcaacactgagtcca

SEQ ID NO: 532011 - DNA, 15 bp, Homo sapiens
agcaacactgagtcc

SEQ ID NO: 532012 - DNA, 15 bp, Homo sapiens
gagcaacactgagtc

SEQ ID NO: 532013 - DNA, 15 bp, Homo sapiens
ggagcaacactgagt

SEQ ID NO: 532014 - DNA, 15 bp, Homo sapiens
tggagcaacactgag

SEQ ID NO: 532015 - DNA, 15 bp, Homo sapiens
atggagcaacactga

SEQ ID NO: 532016 - DNA, 15 bp, Homo sapiens
gatggagcaacactg

SEQ ID NO: 532017 - DNA, 15 bp, Homo sapiens
agatggagcaacact

SEQ ID NO: 532018 - DNA, 15 bp, Homo sapiens
aagatggagcaacac

SEQ ID NO: 532019 - DNA, 15 bp, Homo sapiens
gaagatggagcaaca

SEQ ID NO: 532020 - DNA, 15 bp, Homo sapiens
agaagatggagcaac

SEQ ID NO: 532021 - DNA, 15 bp, Homo sapiens
cagaagatggagcaa

SEQ ID NO: 532022 - DNA, 15 bp, Homo sapiens
tcagaagatggagca

SEQ ID NO: 532023 - DNA, 15 bp, Homo sapiens
atcagaagatggagc

SEQ ID NO: 532024 - DNA, 15 bp, Homo sapiens
aatcagaagatggag

SEQ ID NO: 532025 - DNA, 15 bp, Homo sapiens
aaatcagaagatgga

SEQ ID NO: 532026 - DNA, 15 bp, Homo sapiens
aaaatcagaagatgg

SEQ ID NO: 532027 - DNA, 15 bp, Homo sapiens
aaaaatcagaagatg

SEQ ID NO: 532028 - DNA, 15 bp, Homo sapiens
aaaaaatcagaagat

SEQ ID NO: 532029 - DNA, 15 bp, Homo sapiens
taaaaaatcagaaga

SEQ ID NO: 532030 - DNA, 15 bp, Homo sapiens
ttaaaaaatcagaag

SEQ ID NO: 532031 - DNA, 15 bp, Homo sapiens
cttaaaaaatcagaa

SEQ ID NO: 532032 - DNA, 15 bp, Homo sapiens
tcttaaaaaatcaga

SEQ ID NO: 532033 - DNA, 15 bp, Homo sapiens
ctcttaaaaaatcag

SEQ ID NO: 532034 - DNA, 15 bp, Homo sapiens
tctcttaaaaaatca

SEQ ID NO: 532035 - DNA, 15 bp, Homo sapiens
ttctcttaaaaaatc

SEQ ID NO: 532036 - DNA, 15 bp, Homo sapiens
tttctcttaaaaaat

SEQ ID NO: 532037 - DNA, 15 bp, Homo sapiens
gtttctcttaaaaaa

SEQ ID NO: 532038 - DNA, 15 bp, Homo sapiens
agtttctcttaaaaa

SEQ ID NO: 532039 - DNA, 15 bp, Homo sapiens
cagtttctcttaaaa

SEQ ID NO: 532040 - DNA, 15 bp, Homo sapiens
ccagtttctcttaaa

SEQ ID NO: 532041 - DNA, 15 bp, Homo sapiens
tccagtttctcttaa

SEQ ID NO: 532042 - DNA, 15 bp, Homo sapiens
ttccagtttctctta

SEQ ID NO: 532043 - DNA, 15 bp, Homo sapiens
tttccagtttctctt

SEQ ID NO: 532044 - DNA, 15 bp, Homo sapiens
ttttccagtttctct

SEQ ID NO: 532045 - DNA, 15 bp, Homo sapiens
gttttccagtttctc

SEQ ID NO: 532046 - DNA, 15 bp, Homo sapiens
agttttccagtttct

SEQ ID NO: 532047 - DNA, 15 bp, Homo sapiens
tagttttccagtttc

SEQ ID NO: 532048 - DNA, 15 bp, Homo sapiens
ctagttttccagttt

SEQ ID NO: 532049 - DNA, 15 bp, Homo sapiens
tctagttttccagtt

SEQ ID NO: 532050 - DNA, 15 bp, Homo sapiens
atctagttttccagt

SEQ ID NO: 532051 - DNA, 15 bp, Homo sapiens
aatctagttttccag

SEQ ID NO: 532052 - DNA, 15 bp, Homo sapiens
aaatctagttttcca

SEQ ID NO: 532053 - DNA, 15 bp, Homo sapiens
gaaatctagttttcc

SEQ ID NO: 532054 - DNA, 15 bp, Homo sapiens
ggaaatctagttttc

SEQ ID NO: 532055 - DNA, 15 bp, Homo sapiens
tggaaatctagtttt

SEQ ID NO: 532056 - DNA, 15 bp, Homo sapiens
atggaaatctagttt

SEQ ID NO: 532057 - DNA, 15 bp, Homo sapiens
catggaaatctagtt

SEQ ID NO: 532058 - DNA, 15 bp, Homo sapiens
acatggaaatctagt

SEQ ID NO: 532059 - DNA, 15 bp, Homo sapiens
tacatggaaatctag

SEQ ID NO: 532060 - DNA, 15 bp, Homo sapiens
ttacatggaaatcta

SEQ ID NO: 532061 - DNA, 15 bp, Homo sapiens
tttacatggaaatct

SEQ ID NO: 532062 - DNA, 15 bp, Homo sapiens
ttttacatggaaatc

SEQ ID NO: 532063 - DNA, 15 bp, Homo sapiens
gttttacatggaaat

SEQ ID NO: 532064 - DNA, 15 bp, Homo sapiens
tgttttacatggaaa

SEQ ID NO: 532065 - DNA, 15 bp, Homo sapiens
atgttttacatggaa

SEQ ID NO: 532066 - DNA, 15 bp, Homo sapiens
gatgttttacatgga

SEQ ID NO: 532067 - DNA, 15 bp, Homo sapiens
agatgttttacatgg

SEQ ID NO: 532068 - DNA, 15 bp, Homo sapiens
aagatgttttacatg

SEQ ID NO: 532069 - DNA, 15 bp, Homo sapiens
taagatgttttacat

SEQ ID NO: 532070 - DNA, 15 bp, Homo sapiens
ttaagatgttttaca

SEQ ID NO: 532071 - DNA, 15 bp, Homo sapiens
attaagatgttttac

SEQ ID NO: 532072 - DNA, 15 bp, Homo sapiens
aattaagatgtttta

SEQ ID NO: 532073 - DNA, 15 bp, Homo sapiens
aaattaagatgtttt

SEQ ID NO: 532074 - DNA, 15 bp, Homo sapiens
aaaattaagatgttt

SEQ ID NO: 532075 - DNA, 15 bp, Homo sapiens
gaaaattaagatgtt

SEQ ID NO: 532076 - DNA, 15 bp, Homo sapiens
tgaaaattaagatgt

SEQ ID NO: 532077 - DNA, 15 bp, Homo sapiens
ttgaaaattaagatg

SEQ ID NO: 532078 - DNA, 15 bp, Homo sapiens
tttgaaaattaagat

SEQ ID NO: 532079 - DNA, 15 bp, Homo sapiens
atttgaaaattaaga

SEQ ID NO: 532080 - DNA, 15 bp, Homo sapiens
catttgaaaattaag

SEQ ID NO: 532081 - DNA, 15 bp, Homo sapiens
acatttgaaaattaa

SEQ ID NO: 532082 - DNA, 15 bp, Homo sapiens
aacatttgaaaatta

SEQ ID NO: 532083 - DNA, 15 bp, Homo sapiens
caacatttgaaaatt

SEQ ID NO: 532084 - DNA, 15 bp, Homo sapiens
ccaacatttgaaaat

SEQ ID NO: 532085 - DNA, 15 bp, Homo sapiens
gccaacatttgaaaa

SEQ ID NO: 532086 - DNA, 15 bp, Homo sapiens
agccaacatttgaaa

SEQ ID NO: 532087 - DNA, 15 bp, Homo sapiens
gagccaacatttgaa

SEQ ID NO: 532088 - DNA, 15 bp, Homo sapiens
tgagccaacatttga

SEQ ID NO: 532089 - DNA, 15 bp, Homo sapiens
ctgagccaacatttg

SEQ ID NO: 532090 - DNA, 15 bp, Homo sapiens
actgagccaacattt

SEQ ID NO: 532091 - DNA, 15 bp, Homo sapiens
aactgagccaacatt

SEQ ID NO: 532092 - DNA, 15 bp, Homo sapiens
aaactgagccaacat

SEQ ID NO: 532093 - DNA, 15 bp, Homo sapiens
aaaactgagccaaca

SEQ ID NO: 532094 - DNA, 15 bp, Homo sapiens
gaaaactgagccaac

SEQ ID NO: 532095 - DNA, 15 bp, Homo sapiens
agaaaactgagccaa

SEQ ID NO: 532096 - DNA, 15 bp, Homo sapiens
aagaaaactgagcca

SEQ ID NO: 532097 - DNA, 15 bp, Homo sapiens
gaagaaaactgagcc

SEQ ID NO: 532098 - DNA, 15 bp, Homo sapiens
agaagaaaactgagc

SEQ ID NO: 532099 - DNA, 15 bp, Homo sapiens
aagaagaaaactgag

SEQ ID NO: 532100 - DNA, 15 bp, Homo sapiens
aaagaagaaaactga

SEQ ID NO: 532101 - DNA, 15 bp, Homo sapiens
taaagaagaaaactg

SEQ ID NO: 532102 - DNA, 15 bp, Homo sapiens
ttaaagaagaaaact

SEQ ID NO: 532103 - DNA, 15 bp, Homo sapiens
tttaaagaagaaaac

SEQ ID NO: 532104 - DNA, 15 bp, Homo sapiens
atttaaagaagaaaa

SEQ ID NO: 532105 - DNA, 15 bp, Homo sapiens
aatttaaagaagaaa

SEQ ID NO: 532106 - DNA, 15 bp, Homo sapiens
gaatttaaagaagaa

SEQ ID NO: 532107 - DNA, 15 bp, Homo sapiens
agaatttaaagaaga

SEQ ID NO: 532108 - DNA, 15 bp, Homo sapiens
tagaatttaaagaag

SEQ ID NO: 532109 - DNA, 15 bp, Homo sapiens
atagaatttaaagaa

SEQ ID NO: 532110 - DNA, 15 bp, Homo sapiens
tatagaatttaaaga

SEQ ID NO: 532111 - DNA, 15 bp, Homo sapiens
gtatagaatttaaag

SEQ ID NO: 532112 - DNA, 15 bp, Homo sapiens
cgtatagaatttaaa

SEQ ID NO: 532113 - DNA, 15 bp, Homo sapiens
acgtatagaatttaa

SEQ ID NO: 532114 - DNA, 15 bp, Homo sapiens
cacgtatagaattta

SEQ ID NO: 532115 - DNA, 15 bp, Homo sapiens
gcacgtatagaattt

SEQ ID NO: 532116 - DNA, 15 bp, Homo sapiens
ggcacgtatagaatt

SEQ ID NO: 532117 - DNA, 15 bp, Homo sapiens
tggcacgtatagaat

SEQ ID NO: 532118 - DNA, 15 bp, Homo sapiens
ttggcacgtatagaa

SEQ ID NO: 532119 - DNA, 15 bp, Homo sapiens
tttggcacgtataga

SEQ ID NO: 532120 - DNA, 15 bp, Homo sapiens
atttggcacgtatag

SEQ ID NO: 532121 - DNA, 15 bp, Homo sapiens
tatttggcacgtata

SEQ ID NO: 532122 - DNA, 15 bp, Homo sapiens
ttatttggcacgtat

SEQ ID NO: 532123 - DNA, 15 bp, Homo sapiens
tttatttggcacgta

SEQ ID NO: 532124 - DNA, 15 bp, Homo sapiens
ttttatttggcacgt

SEQ ID NO: 532125 - DNA, 15 bp, Homo sapiens
gttttatttggcacg

SEQ ID NO: 532126 - DNA, 15 bp, Homo sapiens
tgttttatttggcac

SEQ ID NO: 532127 - DNA, 15 bp, Homo sapiens
atgttttatttggca

SEQ ID NO: 532128 - DNA, 15 bp, Homo sapiens
tatgttttatttggc

SEQ ID NO: 532129 - DNA, 15 bp, Homo sapiens
atatgttttatttgg

SEQ ID NO: 532130 - DNA, 15 bp, Homo sapiens
aatatgttttatttg

SEQ ID NO: 532131 - DNA, 15 bp, Homo sapiens
aaatatgttttattt

SEQ ID NO: 532132 - DNA, 15 bp, Homo sapiens
aaaatatgttttatt

SEQ ID NO: 532133 - DNA, 15 bp, Homo sapiens
gaaaatatgttttat

SEQ ID NO: 532134 - DNA, 15 bp, Homo sapiens
tgaaaatatgtttta

SEQ ID NO: 532135 - DNA, 15 bp, Homo sapiens
ctgaaaatatgtttt

SEQ ID NO: 532136 - DNA, 15 bp, Homo sapiens
cctgaaaatatgttt

SEQ ID NO: 532137 - DNA, 15 bp, Homo sapiens
gcctgaaaatatgtt

SEQ ID NO: 532138 - DNA, 15 bp, Homo sapiens
agcctgaaaatatgt

SEQ ID NO: 532139 - DNA, 15 bp, Homo sapiens
tagcctgaaaatatg

SEQ ID NO: 532140 - DNA, 15 bp, Homo sapiens
ctagcctgaaaatat

SEQ ID NO: 532141 - DNA, 15 bp, Homo sapiens
gctagcctgaaaata

SEQ ID NO: 532142 - DNA, 15 bp, Homo sapiens
agctagcctgaaaat

SEQ ID NO: 532143 - DNA, 15 bp, Homo sapiens
aagctagcctgaaaa

SEQ ID NO: 532144 - DNA, 15 bp, Homo sapiens
aaagctagcctgaaa

SEQ ID NO: 532145 - DNA, 15 bp, Homo sapiens
caaagctagcctgaa

SEQ ID NO: 532146 - DNA, 15 bp, Homo sapiens
ccaaagctagcctga

SEQ ID NO: 532147 - DNA, 15 bp, Homo sapiens
gccaaagctagcctg

SEQ ID NO: 532148 - DNA, 15 bp, Homo sapiens
ggccaaagctagcct

SEQ ID NO: 532149 - DNA, 15 bp, Homo sapiens
tggccaaagctagcc

SEQ ID NO: 532150 - DNA, 15 bp, Homo sapiens
ctggccaaagctagc

SEQ ID NO: 532151 - DNA, 15 bp, Homo sapiens
actggccaaagctag

SEQ ID NO: 532152 - DNA, 15 bp, Homo sapiens
cactggccaaagcta

SEQ ID NO: 532153 - DNA, 15 bp, Homo sapiens
ccactggccaaagct

SEQ ID NO: 532154 - DNA, 15 bp, Homo sapiens
tccactggccaaagc

SEQ ID NO: 532155 - DNA, 15 bp, Homo sapiens
ttccactggccaaag

SEQ ID NO: 532156 - DNA, 15 bp, Homo sapiens
attccactggccaaa

SEQ ID NO: 532157 - DNA, 15 bp, Homo sapiens
tattccactggccaa

SEQ ID NO: 532158 - DNA, 15 bp, Homo sapiens
gtattccactggcca

SEQ ID NO: 532159 - DNA, 15 bp, Homo sapiens
ggtattccactggcc

SEQ ID NO: 532160 - DNA, 15 bp, Homo sapiens
tggtattccactggc

SEQ ID NO: 532161 - DNA, 15 bp, Homo sapiens
ttggtattccactgg

SEQ ID NO: 532162 - DNA, 15 bp, Homo sapiens
attggtattccactg

SEQ ID NO: 532163 - DNA, 15 bp, Homo sapiens
aattggtattccact

SEQ ID NO: 532164 - DNA, 15 bp, Homo sapiens
aaattggtattccac

SEQ ID NO: 532165 - DNA, 15 bp, Homo sapiens
caaattggtattcca

SEQ ID NO: 532166 - DNA, 15 bp, Homo sapiens
tcaaattggtattcc

SEQ ID NO: 532167 - DNA, 15 bp, Homo sapiens
ctcctgcgggtctga

SEQ ID NO: 532168 - DNA, 15 bp, Homo sapiens
gctcctgcgggtctg

SEQ ID NO: 532169 - DNA, 15 bp, Homo sapiens
ggctcctgcgggtct

SEQ ID NO: 532170 - DNA, 15 bp, Homo sapiens
cggctcctgcgggtc

SEQ ID NO: 532171 - DNA, 15 bp, Homo sapiens
ccggctcctgcgggt

SEQ ID NO: 532172 - DNA, 15 bp, Homo sapiens
tccggctcctgcggg

SEQ ID NO: 532173 - DNA, 15 bp, Homo sapiens
ctccggctcctgcgg

SEQ ID NO: 532174 - DNA, 15 bp, Homo sapiens
gctccggctcctgcg

SEQ ID NO: 532175 - DNA, 15 bp, Homo sapiens
ggctccggctcctgc

SEQ ID NO: 532176 - DNA, 15 bp, Homo sapiens
gggctccggctcctg

SEQ ID NO: 532177 - DNA, 15 bp, Homo sapiens
cgggctccggctcct

SEQ ID NO: 532178 - DNA, 15 bp, Homo sapiens
ccgggctccggctcc

SEQ ID NO: 532179 - DNA, 15 bp, Homo sapiens
gccgggctccggctc

SEQ ID NO: 532180 - DNA, 15 bp, Homo sapiens
cgccgggctccggct

SEQ ID NO: 532181 - DNA, 15 bp, Homo sapiens
acgccgggctccggc

SEQ ID NO: 532182 - DNA, 15 bp, Homo sapiens
aacgccgggctccgg

SEQ ID NO: 532183 - DNA, 15 bp, Homo sapiens
caacgccgggctccg

SEQ ID NO: 532184 - DNA, 15 bp, Homo sapiens
tcaacgccgggctcc

SEQ ID NO: 532185 - DNA, 15 bp, Homo sapiens
ttcaacgccgggctc

SEQ ID NO: 532186 - DNA, 15 bp, Homo sapiens
cttcaacgccgggct

SEQ ID NO: 532187 - DNA, 15 bp, Homo sapiens
ccttcaacgccgggc

SEQ ID NO: 532188 - DNA, 15 bp, Homo sapiens
cccttcaacgccggg

SEQ ID NO: 532189 - DNA, 15 bp, Homo sapiens
ccccttcaacgccgg

SEQ ID NO: 532190 - DNA, 15 bp, Homo sapiens
gccccttcaacgccg

SEQ ID NO: 532191 - DNA, 15 bp, Homo sapiens
ggccccttcaacgcc

SEQ ID NO: 532192 - DNA, 15 bp, Homo sapiens
cggccccttcaacgc

SEQ ID NO: 532193 - DNA, 15 bp, Homo sapiens
acggccccttcaacg

SEQ ID NO: 532194 - DNA, 15 bp, Homo sapiens
cacggccccttcaac

SEQ ID NO: 532195 - DNA, 15 bp, Homo sapiens
ccacggccccttcaa

SEQ ID NO: 532196 - DNA, 15 bp, Homo sapiens
cccacggccccttca

SEQ ID NO: 532197 - DNA, 15 bp, Homo sapiens
tcccacggccccttc

SEQ ID NO: 532198 - DNA, 15 bp, Homo sapiens
ttcccacggcccctt

SEQ ID NO: 532199 - DNA, 15 bp, Homo sapiens
cttcccacggcccct

SEQ ID NO: 532200 - DNA, 15 bp, Homo sapiens
acttcccacggcccc

SEQ ID NO: 532201 - DNA, 15 bp, Homo sapiens
tacttcccacggccc

SEQ ID NO: 532202 - DNA, 15 bp, Homo sapiens
ttacttcccacggcc

SEQ ID NO: 532203 - DNA, 15 bp, Homo sapiens
gttacttcccacggc

SEQ ID NO: 532204 - DNA, 15 bp, Homo sapiens
cgttacttcccacgg

SEQ ID NO: 532205 - DNA, 15 bp, Homo sapiens
ccgttacttcccacg

SEQ ID NO: 532206 - DNA, 15 bp, Homo sapiens
cccgttacttcccac

SEQ ID NO: 532207 - DNA, 15 bp, Homo sapiens
ccccgttacttccca

SEQ ID NO: 532208 - DNA, 15 bp, Homo sapiens
cccccgttacttccc

SEQ ID NO: 532209 - DNA, 15 bp, Homo sapiens
ccccccgttacttcc

SEQ ID NO: 532210 - DNA, 15 bp, Homo sapiens
accccccgttacttc

SEQ ID NO: 532211 - DNA, 15 bp, Homo sapiens
taccccccgttactt

SEQ ID NO: 532212 - DNA, 15 bp, Homo sapiens
gtaccccccgttact

SEQ ID NO: 532213 - DNA, 15 bp, Homo sapiens
ggtaccccccgttac

SEQ ID NO: 532214 - DNA, 15 bp, Homo sapiens
tggtaccccccgtta

SEQ ID NO: 532215 - DNA, 15 bp, Homo sapiens
gtggtaccccccgtt

SEQ ID NO: 532216 - DNA, 15 bp, Homo sapiens
cgtggtaccccccgt

SEQ ID NO: 532217 - DNA, 15 bp, Homo sapiens
ccgtggtaccccccg

SEQ ID NO: 532218 - DNA, 15 bp, Homo sapiens
accgtggtacccccc

SEQ ID NO: 532219 - DNA, 15 bp, Homo sapiens
aaccgtggtaccccc

SEQ ID NO: 532220 - DNA, 15 bp, Homo sapiens
aaaccgtggtacccc

SEQ ID NO: 532221 - DNA, 15 bp, Homo sapiens
taaaccgtggtaccc

SEQ ID NO: 532222 - DNA, 15 bp, Homo sapiens
ctaaaccgtggtacc

SEQ ID NO: 532223 - DNA, 15 bp, Homo sapiens
cctaaaccgtggtac

SEQ ID NO: 532224 - DNA, 15 bp, Homo sapiens
tcctaaaccgtggta

SEQ ID NO: 532225 - DNA, 15 bp, Homo sapiens
atcctaaaccgtggt

SEQ ID NO: 532226 - DNA, 15 bp, Homo sapiens
catcctaaaccgtgg

SEQ ID NO: 532227 - DNA, 15 bp, Homo sapiens
gcatcctaaaccgtg

SEQ ID NO: 532228 - DNA, 15 bp, Homo sapiens
cgcatcctaaaccgt

SEQ ID NO: 532229 - DNA, 15 bp, Homo sapiens
gcgcatcctaaaccg

SEQ ID NO: 532230 - DNA, 15 bp, Homo sapiens
agcgcatcctaaacc

SEQ ID NO: 532231 - DNA, 15 bp, Homo sapiens
cagcgcatcctaaac

SEQ ID NO: 532232 - DNA, 15 bp, Homo sapiens
ccagcgcatcctaaa

SEQ ID NO: 532233 - DNA, 15 bp, Homo sapiens
tccagcgcatcctaa

SEQ ID NO: 532234 - DNA, 15 bp, Homo sapiens
ctccagcgcatccta

SEQ ID NO: 532235 - DNA, 15 bp, Homo sapiens
gctccagcgcatcct

SEQ ID NO: 532236 - DNA, 15 bp, Homo sapiens
cgctccagcgcatcc

SEQ ID NO: 532237 - DNA, 15 bp, Homo sapiens
tcgctccagcgcatc

SEQ ID NO: 532238 - DNA, 15 bp, Homo sapiens
ttcgctccagcgcat

SEQ ID NO: 532239 - DNA, 15 bp, Homo sapiens
tttcgctccagcgca

SEQ ID NO: 532240 - DNA, 15 bp, Homo sapiens
ctttcgctccagcgc

SEQ ID NO: 532241 - DNA, 15 bp, Homo sapiens
cctttcgctccagcg

SEQ ID NO: 532242 - DNA, 15 bp, Homo sapiens
tcctttcgctccagc

SEQ ID NO: 532243 - DNA, 15 bp, Homo sapiens
atcctttcgctccag

SEQ ID NO: 532244 - DNA, 15 bp, Homo sapiens
aatcctttcgctcca

SEQ ID NO: 532245 - DNA, 15 bp, Homo sapiens
caatcctttcgctcc

SEQ ID NO: 532246 - DNA, 15 bp, Homo sapiens
ccaatcctttcgctc

SEQ ID NO: 532247 - DNA, 15 bp, Homo sapiens
cccaatcctttcgct

SEQ ID NO: 532248 - DNA, 15 bp, Homo sapiens
ccccaatcctttcgc

SEQ ID NO: 532249 - DNA, 15 bp, Homo sapiens
accccaatcctttcg

SEQ ID NO: 532250 - DNA, 15 bp, Homo sapiens
caccccaatcctttc

SEQ ID NO: 532251 - DNA, 15 bp, Homo sapiens
ccaccccaatccttt

SEQ ID NO: 532252 - DNA, 15 bp, Homo sapiens
cccaccccaatcctt

SEQ ID NO: 532253 - DNA, 15 bp, Homo sapiens
ccccaccccaatcct

SEQ ID NO: 532254 - DNA, 15 bp, Homo sapiens
accccaccccaatcc

SEQ ID NO: 532255 - DNA, 15 bp, Homo sapiens
gaccccaccccaatc

SEQ ID NO: 532256 - DNA, 15 bp, Homo sapiens
ggaccccaccccaat

SEQ ID NO: 532257 - DNA, 15 bp, Homo sapiens
cggaccccaccccaa

SEQ ID NO: 532258 - DNA, 15 bp, Homo sapiens
acggaccccacccca

SEQ ID NO: 532259 - DNA, 15 bp, Homo sapiens
cacggaccccacccc

SEQ ID NO: 532260 - DNA, 15 bp, Homo sapiens
gcacggaccccaccc

SEQ ID NO: 532261 - DNA, 15 bp, Homo sapiens
agcacggaccccacc

SEQ ID NO: 532262 - DNA, 15 bp, Homo sapiens
gagcacggaccccac

SEQ ID NO: 532263 - DNA, 15 bp, Homo sapiens
agagcacggacccca

SEQ ID NO: 532264 - DNA, 15 bp, Homo sapiens
aagagcacggacccc

SEQ ID NO: 532265 - DNA, 15 bp, Homo sapiens
caagagcacggaccc

SEQ ID NO: 532266 - DNA, 15 bp, Homo sapiens
ccaagagcacggacc

SEQ ID NO: 532267 - DNA, 15 bp, Homo sapiens
gccaagagcacggac

SEQ ID NO: 532268 - DNA, 15 bp, Homo sapiens
tgccaagagcacgga

SEQ ID NO: 532269 - DNA, 15 bp, Homo sapiens
ctgccaagagcacgg

SEQ ID NO: 532270 - DNA, 15 bp, Homo sapiens
actgccaagagcacg

SEQ ID NO: 532271 - DNA, 15 bp, Homo sapiens
gactgccaagagcac

SEQ ID NO: 532272 - DNA, 15 bp, Homo sapiens
cgactgccaagagca

SEQ ID NO: 532273 - DNA, 15 bp, Homo sapiens
acgactgccaagagc

SEQ ID NO: 532274 - DNA, 15 bp, Homo sapiens
gacgactgccaagag

SEQ ID NO: 532275 - DNA, 15 bp, Homo sapiens
agacgactgccaaga

SEQ ID NO: 532276 - DNA, 15 bp, Homo sapiens
gagacgactgccaag

SEQ ID NO: 532277 - DNA, 15 bp, Homo sapiens
agagacgactgccaa

SEQ ID NO: 532278 - DNA, 15 bp, Homo sapiens
cagagacgactgcca

SEQ ID NO: 532279 - DNA, 15 bp, Homo sapiens
gcagagacgactgcc

SEQ ID NO: 532280 - DNA, 15 bp, Homo sapiens
ggcagagacgactgc

SEQ ID NO: 532281 - DNA, 15 bp, Homo sapiens
tggcagagacgactg

SEQ ID NO: 532282 - DNA, 15 bp, Homo sapiens
ctggcagagacgact

SEQ ID NO: 532283 - DNA, 15 bp, Homo sapiens
cctggcagagacgac

SEQ ID NO: 532284 - DNA, 15 bp, Homo sapiens
gcctggcagagacga

SEQ ID NO: 532285 - DNA, 15 bp, Homo sapiens
ggcctggcagagacg

SEQ ID NO: 532286 - DNA, 15 bp, Homo sapiens
aggcctggcagagac

SEQ ID NO: 532287 - DNA, 15 bp, Homo sapiens
caggcctggcagaga

SEQ ID NO: 532288 - DNA, 15 bp, Homo sapiens
acaggcctggcagag

SEQ ID NO: 532289 - DNA, 15 bp, Homo sapiens
cacaggcctggcaga

SEQ ID NO: 532290 - DNA, 15 bp, Homo sapiens
acacaggcctggcag

SEQ ID NO: 532291 - DNA, 15 bp, Homo sapiens
aacacaggcctggca

SEQ ID NO: 532292 - DNA, 15 bp, Homo sapiens
gaacacaggcctggc

SEQ ID NO: 532293 - DNA, 15 bp, Homo sapiens
tgaacacaggcctgg

SEQ ID NO: 532294 - DNA, 15 bp, Homo sapiens
gtgaacacaggcctg

SEQ ID NO: 532295 - DNA, 15 bp, Homo sapiens
tgtgaacacaggcct

SEQ ID NO: 532296 - DNA, 15 bp, Homo sapiens
atgtgaacacaggcc

SEQ ID NO: 532297 - DNA, 15 bp, Homo sapiens
catgtgaacacaggc

SEQ ID NO: 532298 - DNA, 15 bp, Homo sapiens
gcatgtgaacacagg

SEQ ID NO: 532299 - DNA, 15 bp, Homo sapiens
agcatgtgaacacag

SEQ ID NO: 532300 - DNA, 15 bp, Homo sapiens
aagcatgtgaacaca

SEQ ID NO: 532301 - DNA, 15 bp, Homo sapiens
caagcatgtgaacac

SEQ ID NO: 532302 - DNA, 15 bp, Homo sapiens
tcaagcatgtgaaca

SEQ ID NO: 532303 - DNA, 15 bp, Homo sapiens
gtcaagcatgtgaac

SEQ ID NO: 532304 - DNA, 15 bp, Homo sapiens
agtcaagcatgtgaa

SEQ ID NO: 532305 - DNA, 15 bp, Homo sapiens
aagtcaagcatgtga

SEQ ID NO: 532306 - DNA, 15 bp, Homo sapiens
aaagtcaagcatgtg

SEQ ID NO: 532307 - DNA, 15 bp, Homo sapiens
gaaagtcaagcatgt

SEQ ID NO: 532308 - DNA, 15 bp, Homo sapiens
agaaagtcaagcatg

SEQ ID NO: 532309 - DNA, 15 bp, Homo sapiens
gagaaagtcaagcat

SEQ ID NO: 532310 - DNA, 15 bp, Homo sapiens
ggagaaagtcaagca

SEQ ID NO: 532311 - DNA, 15 bp, Homo sapiens
gggagaaagtcaagc

SEQ ID NO: 532312 - DNA, 15 bp, Homo sapiens
agggagaaagtcaag

SEQ ID NO: 532313 - DNA, 15 bp, Homo sapiens
gagggagaaagtcaa

SEQ ID NO: 532314 - DNA, 15 bp, Homo sapiens
tgagggagaaagtca

SEQ ID NO: 532315 - DNA, 15 bp, Homo sapiens
ctgagggagaaagtc

SEQ ID NO: 532316 - DNA, 15 bp, Homo sapiens
tctgagggagaaagt

SEQ ID NO: 532317 - DNA, 15 bp, Homo sapiens
atctgagggagaaag

SEQ ID NO: 532318 - DNA, 15 bp, Homo sapiens
catctgagggagaaa

SEQ ID NO: 532319 - DNA, 15 bp, Homo sapiens
gcatctgagggagaa

SEQ ID NO: 532320 - DNA, 15 bp, Homo sapiens
ggcatctgagggaga

SEQ ID NO: 532321 - DNA, 15 bp, Homo sapiens
aggcatctgagggag

SEQ ID NO: 532322 - DNA, 15 bp, Homo sapiens
caggcatctgaggga

SEQ ID NO: 532323 - DNA, 15 bp, Homo sapiens
ccaggcatctgaggg

SEQ ID NO: 532324 - DNA, 15 bp, Homo sapiens
tccaggcatctgagg

SEQ ID NO: 532325 - DNA, 15 bp, Homo sapiens
ctccaggcatctgag

SEQ ID NO: 532326 - DNA, 15 bp, Homo sapiens
actccaggcatctga

SEQ ID NO: 532327 - DNA, 15 bp, Homo sapiens
aactccaggcatctg

SEQ ID NO: 532328 - DNA, 15 bp, Homo sapiens
taactccaggcatct

SEQ ID NO: 532329 - DNA, 15 bp, Homo sapiens
gtaactccaggcatc

SEQ ID NO: 532330 - DNA, 15 bp, Homo sapiens
agtaactccaggcat

SEQ ID NO: 532331 - DNA, 15 bp, Homo sapiens
cagtaactccaggca

SEQ ID NO: 532332 - DNA, 15 bp, Homo sapiens
acagtaactccaggc

SEQ ID NO: 532333 - DNA, 15 bp, Homo sapiens
tacagtaactccagg

SEQ ID NO: 532334 - DNA, 15 bp, Homo sapiens
ttacagtaactccag

SEQ ID NO: 532335 - DNA, 15 bp, Homo sapiens
tttacagtaactcca

SEQ ID NO: 532336 - DNA, 15 bp, Homo sapiens
ttttacagtaactcc

SEQ ID NO: 532337 - DNA, 15 bp, Homo sapiens
cttttacagtaactc

SEQ ID NO: 532338 - DNA, 15 bp, Homo sapiens
tcttttacagtaact

SEQ ID NO: 532339 - DNA, 15 bp, Homo sapiens
gtcttttacagtaac

SEQ ID NO: 532340 - DNA, 15 bp, Homo sapiens
cgtcttttacagtaa

SEQ ID NO: 532341 - DNA, 15 bp, Homo sapiens
acgtcttttacagta

SEQ ID NO: 532342 - DNA, 15 bp, Homo sapiens
cacgtcttttacagt

SEQ ID NO: 532343 - DNA, 15 bp, Homo sapiens
tcacgtcttttacag

SEQ ID NO: 532344 - DNA, 15 bp, Homo sapiens
ttcacgtcttttaca

SEQ ID NO: 532345 - DNA, 15 bp, Homo sapiens
gttcacgtcttttac

SEQ ID NO: 532346 - DNA, 15 bp, Homo sapiens
ggttcacgtctttta

SEQ ID NO: 532347 - DNA, 15 bp, Homo sapiens
tggttcacgtctttt

SEQ ID NO: 532348 - DNA, 15 bp, Homo sapiens
ctggttcacgtcttt

SEQ ID NO: 532349 - DNA, 15 bp, Homo sapiens
gctggttcacgtctt

SEQ ID NO: 532350 - DNA, 15 bp, Homo sapiens
tgctggttcacgtct

SEQ ID NO: 532351 - DNA, 15 bp, Homo sapiens
ctgctggttcacgtc

SEQ ID NO: 532352 - DNA, 15 bp, Homo sapiens
cctgctggttcacgt

SEQ ID NO: 532353 - DNA, 15 bp, Homo sapiens
tcctgctggttcacg

SEQ ID NO: 532354 - DNA, 15 bp, Homo sapiens
ctcctgctggttcac

SEQ ID NO: 532355 - DNA, 15 bp, Homo sapiens
actcctgctggttca

SEQ ID NO: 532356 - DNA, 15 bp, Homo sapiens
aactcctgctggttc

SEQ ID NO: 532357 - DNA, 15 bp, Homo sapiens
gaactcctgctggtt

SEQ ID NO: 532358 - DNA, 15 bp, Homo sapiens
cgaactcctgctggt

SEQ ID NO: 532359 - DNA, 15 bp, Homo sapiens
acgaactcctgctgg

SEQ ID NO: 532360 - DNA, 15 bp, Homo sapiens
gacgaactcctgctg

SEQ ID NO: 532361 - DNA, 15 bp, Homo sapiens
tgacgaactcctgct

SEQ ID NO: 532362 - DNA, 15 bp, Homo sapiens
ctgacgaactcctgc

SEQ ID NO: 532363 - DNA, 15 bp, Homo sapiens
tctgacgaactcctg

SEQ ID NO: 532364 - DNA, 15 bp, Homo sapiens
ctctgacgaactcct

SEQ ID NO: 532365 - DNA, 15 bp, Homo sapiens
gctctgacgaactcc

SEQ ID NO: 532366 - DNA, 15 bp, Homo sapiens
agctctgacgaactc

SEQ ID NO: 532367 - DNA, 15 bp, Homo sapiens
gagctctgacgaact

SEQ ID NO: 532368 - DNA, 15 bp, Homo sapiens
agagctctgacgaac

SEQ ID NO: 532369 - DNA, 15 bp, Homo sapiens
cagagctctgacgaa

SEQ ID NO: 532370 - DNA, 15 bp, Homo sapiens
ccagagctctgacga

SEQ ID NO: 532371 - DNA, 15 bp, Homo sapiens
gccagagctctgacg

SEQ ID NO: 532372 - DNA, 15 bp, Homo sapiens
tgccagagctctgac

SEQ ID NO: 532373 - DNA, 15 bp, Homo sapiens
ctgccagagctctga

SEQ ID NO: 532374 - DNA, 15 bp, Homo sapiens
gctgccagagctctg

SEQ ID NO: 532375 - DNA, 15 bp, Homo sapiens
ggctgccagagctct

SEQ ID NO: 532376 - DNA, 15 bp, Homo sapiens
aggctgccagagctc

SEQ ID NO: 532377 - DNA, 15 bp, Homo sapiens
aaggctgccagagct

SEQ ID NO: 532378 - DNA, 15 bp, Homo sapiens
gaaggctgccagagc

SEQ ID NO: 532379 - DNA, 15 bp, Homo sapiens
ggaaggctgccagag

SEQ ID NO: 532380 - DNA, 15 bp, Homo sapiens
aggaaggctgccaga

SEQ ID NO: 532381 - DNA, 15 bp, Homo sapiens
gaggaaggctgccag

SEQ ID NO: 532382 - DNA, 15 bp, Homo sapiens
tgaggaaggctgcca

SEQ ID NO: 532383 - DNA, 15 bp, Homo sapiens
ttgaggaaggctgcc

SEQ ID NO: 532384 - DNA, 15 bp, Homo sapiens
tttgaggaaggctgc

SEQ ID NO: 532385 - DNA, 15 bp, Homo sapiens
ttttgaggaaggctg

SEQ ID NO: 532386 - DNA, 15 bp, Homo sapiens
tttttgaggaaggct

SEQ ID NO: 532387 - DNA, 15 bp, Homo sapiens
ctttttgaggaaggc

SEQ ID NO: 532388 - DNA, 15 bp, Homo sapiens
actttttgaggaagg

SEQ ID NO: 532389 - DNA, 15 bp, Homo sapiens
cactttttgaggaag

SEQ ID NO: 532390 - DNA, 15 bp, Homo sapiens
tcactttttgaggaa

SEQ ID NO: 532391 - DNA, 15 bp, Homo sapiens
ctcactttttgagga

SEQ ID NO: 532392 - DNA, 15 bp, Homo sapiens
actcactttttgagg

SEQ ID NO: 532393 - DNA, 15 bp, Homo sapiens
aactcactttttgag

SEQ ID NO: 532394 - DNA, 15 bp, Homo sapiens
aaactcactttttga

SEQ ID NO: 532395 - DNA, 15 bp, Homo sapiens
caaactcactttttg

SEQ ID NO: 532396 - DNA, 15 bp, Homo sapiens
ccaaactcacttttt

SEQ ID NO: 532397 - DNA, 15 bp, Homo sapiens
cccaaactcactttt

SEQ ID NO: 532398 - DNA, 15 bp, Homo sapiens
ccccaaactcacttt

SEQ ID NO: 532399 - DNA, 15 bp, Homo sapiens
tccccaaactcactt

SEQ ID NO: 532400 - DNA, 15 bp, Homo sapiens
gtccccaaactcact

SEQ ID NO: 532401 - DNA, 15 bp, Homo sapiens
agtccccaaactcac

SEQ ID NO: 532402 - DNA, 15 bp, Homo sapiens
cagtccccaaactca

SEQ ID NO: 532403 - DNA, 15 bp, Homo sapiens
tcagtccccaaactc

SEQ ID NO: 532404 - DNA, 15 bp, Homo sapiens
ctcagtccccaaact

SEQ ID NO: 532405 - DNA, 15 bp, Homo sapiens
cctcagtccccaaac

SEQ ID NO: 532406 - DNA, 15 bp, Homo sapiens
acctcagtccccaaa

SEQ ID NO: 532407 - DNA, 15 bp, Homo sapiens
aacctcagtccccaa

SEQ ID NO: 532408 - DNA, 15 bp, Homo sapiens
gaacctcagtcccca

SEQ ID NO: 532409 - DNA, 15 bp, Homo sapiens
tgaacctcagtcccc

SEQ ID NO: 532410 - DNA, 15 bp, Homo sapiens
ttgaacctcagtccc

SEQ ID NO: 532411 - DNA, 15 bp, Homo sapiens
tttgaacctcagtcc

SEQ ID NO: 532412 - DNA, 15 bp, Homo sapiens
ttttgaacctcagtc

SEQ ID NO: 532413 - DNA, 15 bp, Homo sapiens
gttttgaacctcagt

SEQ ID NO: 532414 - DNA, 15 bp, Homo sapiens
cgttttgaacctcag

SEQ ID NO: 532415 - DNA, 15 bp, Homo sapiens
ccgttttgaacctca

SEQ ID NO: 532416 - DNA, 15 bp, Homo sapiens
cccgttttgaacctc

SEQ ID NO: 532417 - DNA, 15 bp, Homo sapiens
acccgttttgaacct

SEQ ID NO: 532418 - DNA, 15 bp, Homo sapiens
cacccgttttgaacc

SEQ ID NO: 532419 - DNA, 15 bp, Homo sapiens
ccacccgttttgaac

SEQ ID NO: 532420 - DNA, 15 bp, Homo sapiens
tccacccgttttgaa

SEQ ID NO: 532421 - DNA, 15 bp, Homo sapiens
ctccacccgttttga

SEQ ID NO: 532422 - DNA, 15 bp, Homo sapiens
cctccacccgttttg

SEQ ID NO: 532423 - DNA, 15 bp, Homo sapiens
gcctccacccgtttt

SEQ ID NO: 532424 - DNA, 15 bp, Homo sapiens
agcctccacccgttt

SEQ ID NO: 532425 - DNA, 15 bp, Homo sapiens
cagcctccacccgtt

SEQ ID NO: 532426 - DNA, 15 bp, Homo sapiens
acagcctccacccgt

SEQ ID NO: 532427 - DNA, 15 bp, Homo sapiens
gacagcctccacccg

SEQ ID NO: 532428 - DNA, 15 bp, Homo sapiens
cgacagcctccaccc

SEQ ID NO: 532429 - DNA, 15 bp, Homo sapiens
gcgacagcctccacc

SEQ ID NO: 532430 - DNA, 15 bp, Homo sapiens
ggcgacagcctccac

SEQ ID NO: 532431 - DNA, 15 bp, Homo sapiens
aggcgacagcctcca

SEQ ID NO: 532432 - DNA, 15 bp, Homo sapiens
aaggcgacagcctcc

SEQ ID NO: 532433 - DNA, 15 bp, Homo sapiens
caaggcgacagcctc

SEQ ID NO: 532434 - DNA, 15 bp, Homo sapiens
ccaaggcgacagcct

SEQ ID NO: 532435 - DNA, 15 bp, Homo sapiens
gccaaggcgacagcc

SEQ ID NO: 532436 - DNA, 15 bp, Homo sapiens
ggccaaggcgacagc

SEQ ID NO: 532437 - DNA, 15 bp, Homo sapiens
aggccaaggcgacag

SEQ ID NO: 532438 - DNA, 15 bp, Homo sapiens
caggccaaggcgaca

SEQ ID NO: 532439 - DNA, 15 bp, Homo sapiens
gcaggccaaggcgac

SEQ ID NO: 532440 - DNA, 15 bp, Homo sapiens
ggcaggccaaggcga

SEQ ID NO: 532441 - DNA, 15 bp, Homo sapiens
gggcaggccaaggcg

SEQ ID NO: 532442 - DNA, 15 bp, Homo sapiens
tgggcaggccaaggc

SEQ ID NO: 532443 - DNA, 15 bp, Homo sapiens
atgggcaggccaagg

SEQ ID NO: 532444 - DNA, 15 bp, Homo sapiens
gatgggcaggccaag

SEQ ID NO: 532445 - DNA, 15 bp, Homo sapiens
agatgggcaggccaa

SEQ ID NO: 532446 - DNA, 15 bp, Homo sapiens
cagatgggcaggcca

SEQ ID NO: 532447 - DNA, 15 bp, Homo sapiens
tcagatgggcaggcc

SEQ ID NO: 532448 - DNA, 15 bp, Homo sapiens
ctcagatgggcaggc

SEQ ID NO: 532449 - DNA, 15 bp, Homo sapiens
gctcagatgggcagg

SEQ ID NO: 532450 - DNA, 15 bp, Homo sapiens
ggctcagatgggcag

SEQ ID NO: 532451 - DNA, 15 bp, Homo sapiens
gggctcagatgggca

SEQ ID NO: 532452 - DNA, 15 bp, Homo sapiens
ggggctcagatgggc

SEQ ID NO: 532453 - DNA, 15 bp, Homo sapiens
tggggctcagatggg

SEQ ID NO: 532454 - DNA, 15 bp, Homo sapiens
ctggggctcagatgg

SEQ ID NO: 532455 - DNA, 15 bp, Homo sapiens
actggggctcagatg

SEQ ID NO: 532456 - DNA, 15 bp, Homo sapiens
cactggggctcagat

SEQ ID NO: 532457 - DNA, 15 bp, Homo sapiens
acactggggctcaga

SEQ ID NO: 532458 - DNA, 15 bp, Homo sapiens
aacactggggctcag

SEQ ID NO: 532459 - DNA, 15 bp, Homo sapiens
aaacactggggctca

SEQ ID NO: 532460 - DNA, 15 bp, Homo sapiens
caaacactggggctc

SEQ ID NO: 532461 - DNA, 15 bp, Homo sapiens
gcaaacactggggct

SEQ ID NO: 532462 - DNA, 15 bp, Homo sapiens
ggcaaacactggggc

SEQ ID NO: 532463 - DNA, 15 bp, Homo sapiens
cggcaaacactgggg

SEQ ID NO: 532464 - DNA, 15 bp, Homo sapiens
ccggcaaacactggg

SEQ ID NO: 532465 - DNA, 15 bp, Homo sapiens
accggcaaacactgg

SEQ ID NO: 532466 - DNA, 15 bp, Homo sapiens
gaccggcaaacactg

SEQ ID NO: 532467 - DNA, 15 bp, Homo sapiens
ggaccggcaaacact

SEQ ID NO: 532468 - DNA, 15 bp, Homo sapiens
aggaccggcaaacac

SEQ ID NO: 532469 - DNA, 15 bp, Homo sapiens
caggaccggcaaaca

SEQ ID NO: 532470 - DNA, 15 bp, Homo sapiens
ccaggaccggcaaac

SEQ ID NO: 532471 - DNA, 15 bp, Homo sapiens
gccaggaccggcaaa

SEQ ID NO: 532472 - DNA, 15 bp, Homo sapiens
tgccaggaccggcaa

SEQ ID NO: 532473 - DNA, 15 bp, Homo sapiens
ctgccaggaccggca

SEQ ID NO: 532474 - DNA, 15 bp, Homo sapiens
cctgccaggaccggc

SEQ ID NO: 532475 - DNA, 15 bp, Homo sapiens
ccctgccaggaccgg

SEQ ID NO: 532476 - DNA, 15 bp, Homo sapiens
cccctgccaggaccg

SEQ ID NO: 532477 - DNA, 15 bp, Homo sapiens
tcccctgccaggacc

SEQ ID NO: 532478 - DNA, 15 bp, Homo sapiens
ctcccctgccaggac

SEQ ID NO: 532479 - DNA, 15 bp, Homo sapiens
cctcccctgccagga

SEQ ID NO: 532480 - DNA, 15 bp, Homo sapiens
gcctcccctgccagg

SEQ ID NO: 532481 - DNA, 15 bp, Homo sapiens
agcctcccctgccag

SEQ ID NO: 532482 - DNA, 15 bp, Homo sapiens
aagcctcccctgcca

SEQ ID NO: 532483 - DNA, 15 bp, Homo sapiens
caagcctcccctgcc

SEQ ID NO: 532484 - DNA, 15 bp, Homo sapiens
acaagcctcccctgc

SEQ ID NO: 532485 - DNA, 15 bp, Homo sapiens
aacaagcctcccctg

SEQ ID NO: 532486 - DNA, 15 bp, Homo sapiens
aaacaagcctcccct

SEQ ID NO: 532487 - DNA, 15 bp, Homo sapiens
caaacaagcctcccc

SEQ ID NO: 532488 - DNA, 15 bp, Homo sapiens
ccaaacaagcctccc

SEQ ID NO: 532489 - DNA, 15 bp, Homo sapiens
cccaaacaagcctcc

SEQ ID NO: 532490 - DNA, 15 bp, Homo sapiens
ccccaaacaagcctc

SEQ ID NO: 532491 - DNA, 15 bp, Homo sapiens
gccccaaacaagcct

SEQ ID NO: 532492 - DNA, 15 bp, Homo sapiens
ggccccaaacaagcc

SEQ ID NO: 532493 - DNA, 15 bp, Homo sapiens
aggccccaaacaagc

SEQ ID NO: 532494 - DNA, 15 bp, Homo sapiens
gaggccccaaacaag

SEQ ID NO: 532495 - DNA, 15 bp, Homo sapiens
ggaggccccaaacaa

SEQ ID NO: 532496 - DNA, 15 bp, Homo sapiens
cggaggccccaaaca

SEQ ID NO: 532497 - DNA, 15 bp, Homo sapiens
acggaggccccaaac

SEQ ID NO: 532498 - DNA, 15 bp, Homo sapiens
cacggaggccccaaa

SEQ ID NO: 532499 - DNA, 15 bp, Homo sapiens
ccacggaggccccaa

SEQ ID NO: 532500 - DNA, 15 bp, Homo sapiens
gccacggaggcccca

SEQ ID NO: 532501 - DNA, 15 bp, Homo sapiens
agccacggaggcccc

SEQ ID NO: 532502 - DNA, 15 bp, Homo sapiens
gagccacggaggccc

SEQ ID NO: 532503 - DNA, 15 bp, Homo sapiens
ggagccacggaggcc

SEQ ID NO: 532504 - DNA, 15 bp, Homo sapiens
aggagccacggaggc

SEQ ID NO: 532505 - DNA, 15 bp, Homo sapiens
aaggagccacggagg

SEQ ID NO: 532506 - DNA, 15 bp, Homo sapiens
aaaggagccacggag

SEQ ID NO: 532507 - DNA, 15 bp, Homo sapiens
gaaaggagccacgga

SEQ ID NO: 532508 - DNA, 15 bp, Homo sapiens
tgaaaggagccacgg

SEQ ID NO: 532509 - DNA, 15 bp, Homo sapiens
ctgaaaggagccacg

SEQ ID NO: 532510 - DNA, 15 bp, Homo sapiens
gctgaaaggagccac

SEQ ID NO: 532511 - DNA, 15 bp, Homo sapiens
cgctgaaaggagcca

SEQ ID NO: 532512 - DNA, 15 bp, Homo sapiens
acgctgaaaggagcc

SEQ ID NO: 532513 - DNA, 15 bp, Homo sapiens
cacgctgaaaggagc

SEQ ID NO: 532514 - DNA, 15 bp, Homo sapiens
tcacgctgaaaggag

SEQ ID NO: 532515 - DNA, 15 bp, Homo sapiens
ctcacgctgaaagga

SEQ ID NO: 532516 - DNA, 15 bp, Homo sapiens
cctcacgctgaaagg

SEQ ID NO: 532517 - DNA, 15 bp, Homo sapiens
gcctcacgctgaaag

SEQ ID NO: 532518 - DNA, 15 bp, Homo sapiens
ggcctcacgctgaaa

SEQ ID NO: 532519 - DNA, 15 bp, Homo sapiens
aggcctcacgctgaa

SEQ ID NO: 532520 - DNA, 15 bp, Homo sapiens
caggcctcacgctga

SEQ ID NO: 532521 - DNA, 15 bp, Homo sapiens
ccaggcctcacgctg

SEQ ID NO: 532522 - DNA, 15 bp, Homo sapiens
gccaggcctcacgct

SEQ ID NO: 532523 - DNA, 15 bp, Homo sapiens
agccaggcctcacgc

SEQ ID NO: 532524 - DNA, 15 bp, Homo sapiens
aagccaggcctcacg

SEQ ID NO: 532525 - DNA, 15 bp, Homo sapiens
caagccaggcctcac

SEQ ID NO: 532526 - DNA, 15 bp, Homo sapiens
acaagccaggcctca

SEQ ID NO: 532527 - DNA, 15 bp, Homo sapiens
cacaagccaggcctc

SEQ ID NO: 532528 - DNA, 15 bp, Homo sapiens
acacaagccaggcct

SEQ ID NO: 532529 - DNA, 15 bp, Homo sapiens
aacacaagccaggcc

SEQ ID NO: 532530 - DNA, 15 bp, Homo sapiens
gaacacaagccaggc

SEQ ID NO: 532531 - DNA, 15 bp, Homo sapiens
ggaacacaagccagg

SEQ ID NO: 532532 - DNA, 15 bp, Homo sapiens
cggaacacaagccag

SEQ ID NO: 532533 - DNA, 15 bp, Homo sapiens
ccggaacacaagcca

SEQ ID NO: 532534 - DNA, 15 bp, Homo sapiens
accggaacacaagcc

SEQ ID NO: 532535 - DNA, 15 bp, Homo sapiens
aaccggaacacaagc

SEQ ID NO: 532536 - DNA, 15 bp, Homo sapiens
gaaccggaacacaag

SEQ ID NO: 532537 - DNA, 15 bp, Homo sapiens
ggaaccggaacacaa

SEQ ID NO: 532538 - DNA, 15 bp, Homo sapiens
tggaaccggaacaca

SEQ ID NO: 532539 - DNA, 15 bp, Homo sapiens
ctggaaccggaacac

SEQ ID NO: 532540 - DNA, 15 bp, Homo sapiens
gctggaaccggaaca

SEQ ID NO: 532541 - DNA, 15 bp, Homo sapiens
ggctggaaccggaac

SEQ ID NO: 532542 - DNA, 15 bp, Homo sapiens
aggctggaaccggaa

SEQ ID NO: 532543 - DNA, 15 bp, Homo sapiens
gaggctggaaccgga

SEQ ID NO: 532544 - DNA, 15 bp, Homo sapiens
agaggctggaaccgg

SEQ ID NO: 532545 - DNA, 15 bp, Homo sapiens
gagaggctggaaccg

SEQ ID NO: 532546 - DNA, 15 bp, Homo sapiens
agagaggctggaacc

SEQ ID NO: 532547 - DNA, 15 bp, Homo sapiens
aagagaggctggaac

SEQ ID NO: 532548 - DNA, 15 bp, Homo sapiens
aaagagaggctggaa

SEQ ID NO: 532549 - DNA, 15 bp, Homo sapiens
caaagagaggctgga

SEQ ID NO: 532550 - DNA, 15 bp, Homo sapiens
acaaagagaggctgg

SEQ ID NO: 532551 - DNA, 15 bp, Homo sapiens
tacaaagagaggctg

SEQ ID NO: 532552 - DNA, 15 bp, Homo sapiens
gtacaaagagaggct

SEQ ID NO: 532553 - DNA, 15 bp, Homo sapiens
agtacaaagagaggc

SEQ ID NO: 532554 - DNA, 15 bp, Homo sapiens
gagtacaaagagagg

SEQ ID NO: 532555 - DNA, 15 bp, Homo sapiens
agagtacaaagagag

SEQ ID NO: 532556 - DNA, 15 bp, Homo sapiens
cagagtacaaagaga

SEQ ID NO: 532557 - DNA, 15 bp, Homo sapiens
ccagagtacaaagag

SEQ ID NO: 532558 - DNA, 15 bp, Homo sapiens
cccagagtacaaaga

SEQ ID NO: 532559 - DNA, 15 bp, Homo sapiens
gcccagagtacaaag

SEQ ID NO: 532560 - DNA, 15 bp, Homo sapiens
tgcccagagtacaaa

SEQ ID NO: 532561 - DNA, 15 bp, Homo sapiens
gtgcccagagtacaa

SEQ ID NO: 532562 - DNA, 15 bp, Homo sapiens
tgtgcccagagtaca

SEQ ID NO: 532563 - DNA, 15 bp, Homo sapiens
ctgtgcccagagtac

SEQ ID NO: 532564 - DNA, 15 bp, Homo sapiens
gctgtgcccagagta

SEQ ID NO: 532565 - DNA, 15 bp, Homo sapiens
tgctgtgcccagagt

SEQ ID NO: 532566 - DNA, 15 bp, Homo sapiens
atgctgtgcccagag

SEQ ID NO: 532567 - DNA, 15 bp, Homo sapiens
tatgctgtgcccaga

SEQ ID NO: 532568 - DNA, 15 bp, Homo sapiens
ctatgctgtgcccag

SEQ ID NO: 532569 - DNA, 15 bp, Homo sapiens
actatgctgtgccca

SEQ ID NO: 532570 - DNA, 15 bp, Homo sapiens
aactatgctgtgccc

SEQ ID NO: 532571 - DNA, 15 bp, Homo sapiens
caactatgctgtgcc

SEQ ID NO: 532572 - DNA, 15 bp, Homo sapiens
acaactatgctgtgc

SEQ ID NO: 532573 - DNA, 15 bp, Homo sapiens
cacaactatgctgtg

SEQ ID NO: 532574 - DNA, 15 bp, Homo sapiens
acacaactatgctgt

SEQ ID NO: 532575 - DNA, 15 bp, Homo sapiens
aacacaactatgctg

SEQ ID NO: 532576 - DNA, 15 bp, Homo sapiens
caacacaactatgct

SEQ ID NO: 532577 - DNA, 15 bp, Homo sapiens
tcaacacaactatgc

SEQ ID NO: 532578 - DNA, 15 bp, Homo sapiens
ctcaacacaactatg

SEQ ID NO: 532579 - DNA, 15 bp, Homo sapiens
cctcaacacaactat

SEQ ID NO: 532580 - DNA, 15 bp, Homo sapiens
ccctcaacacaacta

SEQ ID NO: 532581 - DNA, 15 bp, Homo sapiens
cccctcaacacaact

SEQ ID NO: 532582 - DNA, 15 bp, Homo sapiens
tcccctcaacacaac

SEQ ID NO: 532583 - DNA, 15 bp, Homo sapiens
ctcccctcaacacaa

SEQ ID NO: 532584 - DNA, 15 bp, Homo sapiens
cctcccctcaacaca

SEQ ID NO: 532585 - DNA, 15 bp, Homo sapiens
ccctcccctcaacac

SEQ ID NO: 532586 - DNA, 15 bp, Homo sapiens
gccctcccctcaaca

SEQ ID NO: 532587 - DNA, 15 bp, Homo sapiens
tgccctcccctcaac

SEQ ID NO: 532588 - DNA, 15 bp, Homo sapiens
atgccctcccctcaa

SEQ ID NO: 532589 - DNA, 15 bp, Homo sapiens
aatgccctcccctca

SEQ ID NO: 532590 - DNA, 15 bp, Homo sapiens
aaatgccctcccctc

SEQ ID NO: 532591 - DNA, 15 bp, Homo sapiens
caaatgccctcccct

SEQ ID NO: 532592 - DNA, 15 bp, Homo sapiens
ccaaatgccctcccc

SEQ ID NO: 532593 - DNA, 15 bp, Homo sapiens
cccaaatgccctccc

SEQ ID NO: 532594 - DNA, 15 bp, Homo sapiens
tcccaaatgccctcc

SEQ ID NO: 532595 - DNA, 15 bp, Homo sapiens
atcccaaatgccctc

SEQ ID NO: 532596 - DNA, 15 bp, Homo sapiens
tatcccaaatgccct

SEQ ID NO: 532597 - DNA, 15 bp, Homo sapiens
atatcccaaatgccc

SEQ ID NO: 532598 - DNA, 15 bp, Homo sapiens
catatcccaaatgcc

SEQ ID NO: 532599 - DNA, 15 bp, Homo sapiens
ccatatcccaaatgc

SEQ ID NO: 532600 - DNA, 15 bp, Homo sapiens
cccatatcccaaatg

SEQ ID NO: 532601 - DNA, 15 bp, Homo sapiens
ccccatatcccaaat

SEQ ID NO: 532602 - DNA, 15 bp, Homo sapiens
accccatatcccaaa

SEQ ID NO: 532603 - DNA, 15 bp, Homo sapiens
taccccatatcccaa

SEQ ID NO: 532604 - DNA, 15 bp, Homo sapiens
ctaccccatatccca

SEQ ID NO: 532605 - DNA, 15 bp, Homo sapiens
actaccccatatccc

SEQ ID NO: 532606 - DNA, 15 bp, Homo sapiens
aactaccccatatcc

SEQ ID NO: 532607 - DNA, 15 bp, Homo sapiens
aaactaccccatatc

SEQ ID NO: 532608 - DNA, 15 bp, Homo sapiens
caaactaccccatat

SEQ ID NO: 532609 - DNA, 15 bp, Homo sapiens
acaaactaccccata

SEQ ID NO: 532610 - DNA, 15 bp, Homo sapiens
cacaaactaccccat

SEQ ID NO: 532611 - DNA, 15 bp, Homo sapiens
ccacaaactacccca

SEQ ID NO: 532612 - DNA, 15 bp, Homo sapiens
tccacaaactacccc

SEQ ID NO: 532613 - DNA, 15 bp, Homo sapiens
ctccacaaactaccc

SEQ ID NO: 532614 - DNA, 15 bp, Homo sapiens
tctccacaaactacc

SEQ ID NO: 532615 - DNA, 15 bp, Homo sapiens
atctccacaaactac

SEQ ID NO: 532616 - DNA, 15 bp, Homo sapiens
catctccacaaacta

SEQ ID NO: 532617 - DNA, 15 bp, Homo sapiens
tcatctccacaaact

SEQ ID NO: 532618 - DNA, 15 bp, Homo sapiens
gtcatctccacaaac

SEQ ID NO: 532619 - DNA, 15 bp, Homo sapiens
agtcatctccacaaa

SEQ ID NO: 532620 - DNA, 15 bp, Homo sapiens
cagtcatctccacaa

SEQ ID NO: 532621 - DNA, 15 bp, Homo sapiens
tcagtcatctccaca

SEQ ID NO: 532622 - DNA, 15 bp, Homo sapiens
ttcagtcatctccac

SEQ ID NO: 532623 - DNA, 15 bp, Homo sapiens
attcagtcatctcca

SEQ ID NO: 532624 - DNA, 15 bp, Homo sapiens
gattcagtcatctcc

SEQ ID NO: 532625 - DNA, 15 bp, Homo sapiens
cgattcagtcatctc

SEQ ID NO: 532626 - DNA, 15 bp, Homo sapiens
acgattcagtcatct

SEQ ID NO: 532627 - DNA, 15 bp, Homo sapiens
cacgattcagtcatc

SEQ ID NO: 532628 - DNA, 15 bp, Homo sapiens
gcacgattcagtcat

SEQ ID NO: 532629 - DNA, 15 bp, Homo sapiens
agcacgattcagtca

SEQ ID NO: 532630 - DNA, 15 bp, Homo sapiens
aagcacgattcagtc

SEQ ID NO: 532631 - DNA, 15 bp, Homo sapiens
aaagcacgattcagt

SEQ ID NO: 532632 - DNA, 15 bp, Homo sapiens
aaaagcacgattcag

SEQ ID NO: 532633 - DNA, 15 bp, Homo sapiens
gaaaagcacgattca

SEQ ID NO: 532634 - DNA, 15 bp, Homo sapiens
ggaaaagcacgattc

SEQ ID NO: 532635 - DNA, 15 bp, Homo sapiens
gggaaaagcacgatt

SEQ ID NO: 532636 - DNA, 15 bp, Homo sapiens
tgggaaaagcacgat

SEQ ID NO: 532637 - DNA, 15 bp, Homo sapiens
gtgggaaaagcacga

SEQ ID NO: 532638 - DNA, 15 bp, Homo sapiens
agtgggaaaagcacg

SEQ ID NO: 532639 - DNA, 15 bp, Homo sapiens
cagtgggaaaagcac

SEQ ID NO: 532640 - DNA, 15 bp, Homo sapiens
acagtgggaaaagca

SEQ ID NO: 532641 - DNA, 15 bp, Homo sapiens
aacagtgggaaaagc

SEQ ID NO: 532642 - DNA, 15 bp, Homo sapiens
aaacagtgggaaaag

SEQ ID NO: 532643 - DNA, 15 bp, Homo sapiens
aaaacagtgggaaaa

SEQ ID NO: 532644 - DNA, 15 bp, Homo sapiens
caaaacagtgggaaa

SEQ ID NO: 532645 - DNA, 15 bp, Homo sapiens
ccaaaacagtgggaa

SEQ ID NO: 532646 - DNA, 15 bp, Homo sapiens
accaaaacagtggga

SEQ ID NO: 532647 - DNA, 15 bp, Homo sapiens
gaccaaaacagtggg

SEQ ID NO: 532648 - DNA, 15 bp, Homo sapiens
agaccaaaacagtgg

SEQ ID NO: 532649 - DNA, 15 bp, Homo sapiens
aagaccaaaacagtg

SEQ ID NO: 532650 - DNA, 15 bp, Homo sapiens
taagaccaaaacagt

SEQ ID NO: 532651 - DNA, 15 bp, Homo sapiens
ctaagaccaaaacag

SEQ ID NO: 532652 - DNA, 15 bp, Homo sapiens
cctaagaccaaaaca

SEQ ID NO: 532653 - DNA, 15 bp, Homo sapiens
acctaagaccaaaac

SEQ ID NO: 532654 - DNA, 15 bp, Homo sapiens
gacctaagaccaaaa

SEQ ID NO: 532655 - DNA, 15 bp, Homo sapiens
ggacctaagaccaaa

SEQ ID NO: 532656 - DNA, 15 bp, Homo sapiens
cggacctaagaccaa

SEQ ID NO: 532657 - DNA, 15 bp, Homo sapiens
ccggacctaagacca

SEQ ID NO: 532658 - DNA, 15 bp, Homo sapiens
cccggacctaagacc

SEQ ID NO: 532659 - DNA, 15 bp, Homo sapiens
tcccggacctaagac

SEQ ID NO: 532660 - DNA, 15 bp, Homo sapiens
ttcccggacctaaga

SEQ ID NO: 532661 - DNA, 15 bp, Homo sapiens
cttcccggacctaag

SEQ ID NO: 532662 - DNA, 15 bp, Homo sapiens
gcttcccggacctaa

SEQ ID NO: 532663 - DNA, 15 bp, Homo sapiens
agcttcccggaccta

SEQ ID NO: 532664 - DNA, 15 bp, Homo sapiens
cagcttcccggacct

SEQ ID NO: 532665 - DNA, 15 bp, Homo sapiens
tcagcttcccggacc

SEQ ID NO: 532666 - DNA, 15 bp, Homo sapiens
ttcagcttcccggac

SEQ ID NO: 532667 - DNA, 15 bp, Homo sapiens
tttcagcttcccgga

SEQ ID NO: 532668 - DNA, 15 bp, Homo sapiens
ctttcagcttcccgg

SEQ ID NO: 532669 - DNA, 15 bp, Homo sapiens
actttcagcttcccg

SEQ ID NO: 532670 - DNA, 15 bp, Homo sapiens
gactttcagcttccc

SEQ ID NO: 532671 - DNA, 15 bp, Homo sapiens
ggactttcagcttcc

SEQ ID NO: 532672 - DNA, 15 bp, Homo sapiens
gggactttcagcttc

SEQ ID NO: 532673 - DNA, 15 bp, Homo sapiens
ggggactttcagctt

SEQ ID NO: 532674 - DNA, 15 bp, Homo sapiens
cggggactttcagct

SEQ ID NO: 532675 - DNA, 15 bp, Homo sapiens
tcggggactttcagc

SEQ ID NO: 532676 - DNA, 15 bp, Homo sapiens
ttcggggactttcag

SEQ ID NO: 532677 - DNA, 15 bp, Homo sapiens
attcggggactttca

SEQ ID NO: 532678 - DNA, 15 bp, Homo sapiens
cattcggggactttc

SEQ ID NO: 532679 - DNA, 15 bp, Homo sapiens
ccattcggggacttt

SEQ ID NO: 532680 - DNA, 15 bp, Homo sapiens
cccattcggggactt

SEQ ID NO: 532681 - DNA, 15 bp, Homo sapiens
acccattcggggact

SEQ ID NO: 532682 - DNA, 15 bp, Homo sapiens
cacccattcggggac

SEQ ID NO: 532683 - DNA, 15 bp, Homo sapiens
ccacccattcgggga

SEQ ID NO: 532684 - DNA, 15 bp, Homo sapiens
tccacccattcgggg

SEQ ID NO: 532685 - DNA, 15 bp, Homo sapiens
atccacccattcggg

SEQ ID NO: 532686 - DNA, 15 bp, Homo sapiens
tatccacccattcgg

SEQ ID NO: 532687 - DNA, 15 bp, Homo sapiens
gtatccacccattcg

SEQ ID NO: 532688 - DNA, 15 bp, Homo sapiens
ggtatccacccattc

SEQ ID NO: 532689 - DNA, 15 bp, Homo sapiens
cggtatccacccatt

SEQ ID NO: 532690 - DNA, 15 bp, Homo sapiens
acggtatccacccat

SEQ ID NO: 532691 - DNA, 15 bp, Homo sapiens
gacggtatccaccca

SEQ ID NO: 532692 - DNA, 15 bp, Homo sapiens
tgacggtatccaccc

SEQ ID NO: 532693 - DNA, 15 bp, Homo sapiens
ttgacggtatccacc

SEQ ID NO: 532694 - DNA, 15 bp, Homo sapiens
cttgacggtatccac

SEQ ID NO: 532695 - DNA, 15 bp, Homo sapiens
gcttgacggtatcca

SEQ ID NO: 532696 - DNA, 15 bp, Homo sapiens
agcttgacggtatcc

SEQ ID NO: 532697 - DNA, 15 bp, Homo sapiens
cagcttgacggtatc

SEQ ID NO: 532698 - DNA, 15 bp, Homo sapiens
ccagcttgacggtat

SEQ ID NO: 532699 - DNA, 15 bp, Homo sapiens
gccagcttgacggta

SEQ ID NO: 532700 - DNA, 15 bp, Homo sapiens
ggccagcttgacggt

SEQ ID NO: 532701 - DNA, 15 bp, Homo sapiens
tggccagcttgacgg

SEQ ID NO: 532702 - DNA, 15 bp, Homo sapiens
ttggccagcttgacg

SEQ ID NO: 532703 - DNA, 15 bp, Homo sapiens
cttggccagcttgac

SEQ ID NO: 532704 - DNA, 15 bp, Homo sapiens
gcttggccagcttga

SEQ ID NO: 532705 - DNA, 15 bp, Homo sapiens
tgcttggccagcttg

SEQ ID NO: 532706 - DNA, 15 bp, Homo sapiens
gtgcttggccagctt

SEQ ID NO: 532707 - DNA, 15 bp, Homo sapiens
tgtgcttggccagct

SEQ ID NO: 532708 - DNA, 15 bp, Homo sapiens
ttgtgcttggccagc

SEQ ID NO: 532709 - DNA, 15 bp, Homo sapiens
tttgtgcttggccag

SEQ ID NO: 532710 - DNA, 15 bp, Homo sapiens
ctttgtgcttggcca

SEQ ID NO: 532711 - DNA, 15 bp, Homo sapiens
tctttgtgcttggcc

SEQ ID NO: 532712 - DNA, 15 bp, Homo sapiens
ctctttgtgcttggc

SEQ ID NO: 532713 - DNA, 15 bp, Homo sapiens
gctctttgtgcttgg

SEQ ID NO: 532714 - DNA, 15 bp, Homo sapiens
agctctttgtgcttg

SEQ ID NO: 532715 - DNA, 15 bp, Homo sapiens
aagctctttgtgctt

SEQ ID NO: 532716 - DNA, 15 bp, Homo sapiens
caagctctttgtgct

SEQ ID NO: 532717 - DNA, 15 bp, Homo sapiens
gcaagctctttgtgc

SEQ ID NO: 532718 - DNA, 15 bp, Homo sapiens
agcaagctctttgtg

SEQ ID NO: 532719 - DNA, 15 bp, Homo sapiens
gagcaagctctttgt

SEQ ID NO: 532720 - DNA, 15 bp, Homo sapiens
ggagcaagctctttg

SEQ ID NO: 532721 - DNA, 15 bp, Homo sapiens
gggagcaagctcttt

SEQ ID NO: 532722 - DNA, 15 bp, Homo sapiens
agggagcaagctctt

SEQ ID NO: 532723 - DNA, 15 bp, Homo sapiens
tagggagcaagctct

SEQ ID NO: 532724 - DNA, 15 bp, Homo sapiens
gtagggagcaagctc

SEQ ID NO: 532725 - DNA, 15 bp, Homo sapiens
cgtagggagcaagct

SEQ ID NO: 532726 - DNA, 15 bp, Homo sapiens
tcgtagggagcaagc

SEQ ID NO: 532727 - DNA, 15 bp, Homo sapiens
atcgtagggagcaag

SEQ ID NO: 532728 - DNA, 15 bp, Homo sapiens
catcgtagggagcaa

SEQ ID NO: 532729 - DNA, 15 bp, Homo sapiens
tcatcgtagggagca

SEQ ID NO: 532730 - DNA, 15 bp, Homo sapiens
ctcatcgtagggagc

SEQ ID NO: 532731 - DNA, 15 bp, Homo sapiens
tctcatcgtagggag

SEQ ID NO: 532732 - DNA, 15 bp, Homo sapiens
ttctcatcgtaggga

SEQ ID NO: 532733 - DNA, 15 bp, Homo sapiens
gttctcatcgtaggg

SEQ ID NO: 532734 - DNA, 15 bp, Homo sapiens
agttctcatcgtagg

SEQ ID NO: 532735 - DNA, 15 bp, Homo sapiens
cagttctcatcgtag

SEQ ID NO: 532736 - DNA, 15 bp, Homo sapiens
ccagttctcatcgta

SEQ ID NO: 532737 - DNA, 15 bp, Homo sapiens
accagttctcatcgt

SEQ ID NO: 532738 - DNA, 15 bp, Homo sapiens
aaccagttctcatcg

SEQ ID NO: 532739 - DNA, 15 bp, Homo sapiens
gaaccagttctcatc

SEQ ID NO: 532740 - DNA, 15 bp, Homo sapiens
agaaccagttctcat

SEQ ID NO: 532741 - DNA, 15 bp, Homo sapiens
tagaaccagttctca

SEQ ID NO: 532742 - DNA, 15 bp, Homo sapiens
gtagaaccagttctc

SEQ ID NO: 532743 - DNA, 15 bp, Homo sapiens
tgtagaaccagttct

SEQ ID NO: 532744 - DNA, 15 bp, Homo sapiens
gtgtagaaccagttc

SEQ ID NO: 532745 - DNA, 15 bp, Homo sapiens
cgtgtagaaccagtt

SEQ ID NO: 532746 - DNA, 15 bp, Homo sapiens
gcgtgtagaaccagt

SEQ ID NO: 532747 - DNA, 15 bp, Homo sapiens
cgcgtgtagaaccag

SEQ ID NO: 532748 - DNA, 15 bp, Homo sapiens
tcgcgtgtagaacca

SEQ ID NO: 532749 - DNA, 15 bp, Homo sapiens
ctcgcgtgtagaacc

SEQ ID NO: 532750 - DNA, 15 bp, Homo sapiens
gctcgcgtgtagaac

SEQ ID NO: 532751 - DNA, 15 bp, Homo sapiens
agctcgcgtgtagaa

SEQ ID NO: 532752 - DNA, 15 bp, Homo sapiens
cagctcgcgtgtaga

SEQ ID NO: 532753 - DNA, 15 bp, Homo sapiens
ccagctcgcgtgtag

SEQ ID NO: 532754 - DNA, 15 bp, Homo sapiens
accagctcgcgtgta

SEQ ID NO: 532755 - DNA, 15 bp, Homo sapiens
caccagctcgcgtgt

SEQ ID NO: 532756 - DNA, 15 bp, Homo sapiens
tcaccagctcgcgtg

SEQ ID NO: 532757 - DNA, 15 bp, Homo sapiens
ctcaccagctcgcgt

SEQ ID NO: 532758 - DNA, 15 bp, Homo sapiens
cctcaccagctcgcg

SEQ ID NO: 532759 - DNA, 15 bp, Homo sapiens
tcctcaccagctcgc

SEQ ID NO: 532760 - DNA, 15 bp, Homo sapiens
ttcctcaccagctcg

SEQ ID NO: 532761 - DNA, 15 bp, Homo sapiens
gttcctcaccagctc

SEQ ID NO: 532762 - DNA, 15 bp, Homo sapiens
agttcctcaccagct

SEQ ID NO: 532763 - DNA, 15 bp, Homo sapiens
aagttcctcaccagc

SEQ ID NO: 532764 - DNA, 15 bp, Homo sapiens
taagttcctcaccag

SEQ ID NO: 532765 - DNA, 15 bp, Homo sapiens
ctaagttcctcacca

SEQ ID NO: 532766 - DNA, 15 bp, Homo sapiens
cctaagttcctcacc

SEQ ID NO: 532767 - DNA, 15 bp, Homo sapiens
acctaagttcctcac

SEQ ID NO: 532768 - DNA, 15 bp, Homo sapiens
gacctaagttcctca

SEQ ID NO: 532769 - DNA, 15 bp, Homo sapiens
agacctaagttcctc

SEQ ID NO: 532770 - DNA, 15 bp, Homo sapiens
aagacctaagttcct

SEQ ID NO: 532771 - DNA, 15 bp, Homo sapiens
aaagacctaagttcc

SEQ ID NO: 532772 - DNA, 15 bp, Homo sapiens
caaagacctaagttc

SEQ ID NO: 532773 - DNA, 15 bp, Homo sapiens
ccaaagacctaagtt

SEQ ID NO: 532774 - DNA, 15 bp, Homo sapiens
gccaaagacctaagt

SEQ ID NO: 532775 - DNA, 15 bp, Homo sapiens
agccaaagacctaag

SEQ ID NO: 532776 - DNA, 15 bp, Homo sapiens
cagccaaagacctaa

SEQ ID NO: 532777 - DNA, 15 bp, Homo sapiens
ccagccaaagaccta

SEQ ID NO: 532778 - DNA, 15 bp, Homo sapiens
tccagccaaagacct

SEQ ID NO: 532779 - DNA, 15 bp, Homo sapiens
ctccagccaaagacc

SEQ ID NO: 532780 - DNA, 15 bp, Homo sapiens
tctccagccaaagac

SEQ ID NO: 532781 - DNA, 15 bp, Homo sapiens
ctctccagccaaaga

SEQ ID NO: 532782 - DNA, 15 bp, Homo sapiens
actctccagccaaag

SEQ ID NO: 532783 - DNA, 15 bp, Homo sapiens
cactctccagccaaa

SEQ ID NO: 532784 - DNA, 15 bp, Homo sapiens
ccactctccagccaa

SEQ ID NO: 532785 - DNA, 15 bp, Homo sapiens
cccactctccagcca

SEQ ID NO: 532786 - DNA, 15 bp, Homo sapiens
ccccactctccagcc

SEQ ID NO: 532787 - DNA, 15 bp, Homo sapiens
tccccactctccagc

SEQ ID NO: 532788 - DNA, 15 bp, Homo sapiens
ctccccactctccag

SEQ ID NO: 532789 - DNA, 15 bp, Homo sapiens
gctccccactctcca

SEQ ID NO: 532790 - DNA, 15 bp, Homo sapiens
agctccccactctcc

SEQ ID NO: 532791 - DNA, 15 bp, Homo sapiens
cagctccccactctc

SEQ ID NO: 532792 - DNA, 15 bp, Homo sapiens
ccagctccccactct

SEQ ID NO: 532793 - DNA, 15 bp, Homo sapiens
cccagctccccactc

SEQ ID NO: 532794 - DNA, 15 bp, Homo sapiens
acccagctccccact

SEQ ID NO: 532795 - DNA, 15 bp, Homo sapiens
cacccagctccccac

SEQ ID NO: 532796 - DNA, 15 bp, Homo sapiens
tcacccagctcccca

SEQ ID NO: 532797 - DNA, 15 bp, Homo sapiens
gtcacccagctcccc

SEQ ID NO: 532798 - DNA, 15 bp, Homo sapiens
ggtcacccagctccc

SEQ ID NO: 532799 - DNA, 15 bp, Homo sapiens
gggtcacccagctcc

SEQ ID NO: 532800 - DNA, 15 bp, Homo sapiens
ggggtcacccagctc

SEQ ID NO: 532801 - DNA, 15 bp, Homo sapiens
aggggtcacccagct

SEQ ID NO: 532802 - DNA, 15 bp, Homo sapiens
caggggtcacccagc

SEQ ID NO: 532803 - DNA, 15 bp, Homo sapiens
ccaggggtcacccag

SEQ ID NO: 532804 - DNA, 15 bp, Homo sapiens
gccaggggtcaccca

SEQ ID NO: 532805 - DNA, 15 bp, Homo sapiens
tgccaggggtcaccc

SEQ ID NO: 532806 - DNA, 15 bp, Homo sapiens
gtgccaggggtcacc

SEQ ID NO: 532807 - DNA, 15 bp, Homo sapiens
tgtgccaggggtcac

SEQ ID NO: 532808 - DNA, 15 bp, Homo sapiens
ttgtgccaggggtca

SEQ ID NO: 532809 - DNA, 15 bp, Homo sapiens
tttgtgccaggggtc

SEQ ID NO: 532810 - DNA, 15 bp, Homo sapiens
gtttgtgccaggggt

SEQ ID NO: 532811 - DNA, 15 bp, Homo sapiens
ggtttgtgccagggg

SEQ ID NO: 532812 - DNA, 15 bp, Homo sapiens
tggtttgtgccaggg

SEQ ID NO: 532813 - DNA, 15 bp, Homo sapiens
atggtttgtgccagg

SEQ ID NO: 532814 - DNA, 15 bp, Homo sapiens
tatggtttgtgccag

SEQ ID NO: 532815 - DNA, 15 bp, Homo sapiens
gtatggtttgtgcca

SEQ ID NO: 532816 - DNA, 15 bp, Homo sapiens
agtatggtttgtgcc

SEQ ID NO: 532817 - DNA, 15 bp, Homo sapiens
aagtatggtttgtgc

SEQ ID NO: 532818 - DNA, 15 bp, Homo sapiens
gaagtatggtttgtg

SEQ ID NO: 532819 - DNA, 15 bp, Homo sapiens
ggaagtatggtttgt

SEQ ID NO: 532820 - DNA, 15 bp, Homo sapiens
gggaagtatggtttg

SEQ ID NO: 532821 - DNA, 15 bp, Homo sapiens
agggaagtatggttt

SEQ ID NO: 532822 - DNA, 15 bp, Homo sapiens
cagggaagtatggtt

SEQ ID NO: 532823 - DNA, 15 bp, Homo sapiens
acagggaagtatggt

SEQ ID NO: 532824 - DNA, 15 bp, Homo sapiens
gacagggaagtatgg

SEQ ID NO: 532825 - DNA, 15 bp, Homo sapiens
agacagggaagtatg

SEQ ID NO: 532826 - DNA, 15 bp, Homo sapiens
gagacagggaagtat

SEQ ID NO: 532827 - DNA, 15 bp, Homo sapiens
ggagacagggaagta

SEQ ID NO: 532828 - DNA, 15 bp, Homo sapiens
aggagacagggaagt

SEQ ID NO: 532829 - DNA, 15 bp, Homo sapiens
gaggagacagggaag

SEQ ID NO: 532830 - DNA, 15 bp, Homo sapiens
agaggagacagggaa

SEQ ID NO: 532831 - DNA, 15 bp, Homo sapiens
cagaggagacaggga

SEQ ID NO: 532832 - DNA, 15 bp, Homo sapiens
tcagaggagacaggg

SEQ ID NO: 532833 - DNA, 15 bp, Homo sapiens
ctcagaggagacagg

SEQ ID NO: 532834 - DNA, 15 bp, Homo sapiens
gctcagaggagacag

SEQ ID NO: 532835 - DNA, 15 bp, Homo sapiens
agctcagaggagaca

SEQ ID NO: 532836 - DNA, 15 bp, Homo sapiens
gagctcagaggagac

SEQ ID NO: 532837 - DNA, 15 bp, Homo sapiens
agagctcagaggaga

SEQ ID NO: 532838 - DNA, 15 bp, Homo sapiens
aagagctcagaggag

SEQ ID NO: 532839 - DNA, 15 bp, Homo sapiens
aaagagctcagagga

SEQ ID NO: 532840 - DNA, 15 bp, Homo sapiens
gaaagagctcagagg

SEQ ID NO: 532841 - DNA, 15 bp, Homo sapiens
ggaaagagctcagag

SEQ ID NO: 532842 - DNA, 15 bp, Homo sapiens
gggaaagagctcaga

SEQ ID NO: 532843 - DNA, 15 bp, Homo sapiens
cgggaaagagctcag

SEQ ID NO: 532844 - DNA, 15 bp, Homo sapiens
gcgggaaagagctca

SEQ ID NO: 532845 - DNA, 15 bp, Homo sapiens
ggcgggaaagagctc

SEQ ID NO: 532846 - DNA, 15 bp, Homo sapiens
gggcgggaaagagct

SEQ ID NO: 532847 - DNA, 15 bp, Homo sapiens
ggggcgggaaagagc

SEQ ID NO: 532848 - DNA, 15 bp, Homo sapiens
tggggcgggaaagag

SEQ ID NO: 532849 - DNA, 15 bp, Homo sapiens
ttggggcgggaaaga

SEQ ID NO: 532850 - DNA, 15 bp, Homo sapiens
aagtgaaccacccat

SEQ ID NO: 532851 - DNA, 15 bp, Homo sapiens
gaagtgaaccaccca

SEQ ID NO: 532852 - DNA, 15 bp, Homo sapiens
tgaagtgaaccaccc

SEQ ID NO: 532853 - DNA, 15 bp, Homo sapiens
gtgaagtgaaccacc

SEQ ID NO: 532854 - DNA, 15 bp, Homo sapiens
agtgaagtgaaccac

SEQ ID NO: 532855 - DNA, 15 bp, Homo sapiens
gagtgaagtgaacca

SEQ ID NO: 532856 - DNA, 15 bp, Homo sapiens
ggagtgaagtgaacc

SEQ ID NO: 532857 - DNA, 15 bp, Homo sapiens
tggagtgaagtgaac

SEQ ID NO: 532858 - DNA, 15 bp, Homo sapiens
ctggagtgaagtgaa

SEQ ID NO: 532859 - DNA, 15 bp, Homo sapiens
cctggagtgaagtga

SEQ ID NO: 532860 - DNA, 15 bp, Homo sapiens
tcctggagtgaagtg

SEQ ID NO: 532861 - DNA, 15 bp, Homo sapiens
ctcctggagtgaagt

SEQ ID NO: 532862 - DNA, 15 bp, Homo sapiens
actcctggagtgaag

SEQ ID NO: 532863 - DNA, 15 bp, Homo sapiens
aactcctggagtgaa

SEQ ID NO: 532864 - DNA, 15 bp, Homo sapiens
gaactcctggagtga

SEQ ID NO: 532865 - DNA, 15 bp, Homo sapiens
tgaactcctggagtg

SEQ ID NO: 532866 - DNA, 15 bp, Homo sapiens
ctgaactcctggagt

SEQ ID NO: 532867 - DNA, 15 bp, Homo sapiens
gctgaactcctggag

SEQ ID NO: 532868 - DNA, 15 bp, Homo sapiens
ggctgaactcctgga

SEQ ID NO: 532869 - DNA, 15 bp, Homo sapiens
tggctgaactcctgg

SEQ ID NO: 532870 - DNA, 15 bp, Homo sapiens
ctggctgaactcctg

SEQ ID NO: 532871 - DNA, 15 bp, Homo sapiens
tctggctgaactcct

SEQ ID NO: 532872 - DNA, 15 bp, Homo sapiens
ctctggctgaactcc

SEQ ID NO: 532873 - DNA, 15 bp, Homo sapiens
gctctggctgaactc

SEQ ID NO: 532874 - DNA, 15 bp, Homo sapiens
tgctctggctgaact

SEQ ID NO: 532875 - DNA, 15 bp, Homo sapiens
ttgctctggctgaac

SEQ ID NO: 532876 - DNA, 15 bp, Homo sapiens
gttgctctggctgaa

SEQ ID NO: 532877 - DNA, 15 bp, Homo sapiens
tgttgctctggctga

SEQ ID NO: 532878 - DNA, 15 bp, Homo sapiens
atgttgctctggctg

SEQ ID NO: 532879 - DNA, 15 bp, Homo sapiens
catgttgctctggct

SEQ ID NO: 532880 - DNA, 15 bp, Homo sapiens
ccatgttgctctggc

SEQ ID NO: 532881 - DNA, 15 bp, Homo sapiens
gccatgttgctctgg

SEQ ID NO: 532882 - DNA, 15 bp, Homo sapiens
tgccatgttgctctg

SEQ ID NO: 532883 - DNA, 15 bp, Homo sapiens
ttgccatgttgctct

SEQ ID NO: 532884 - DNA, 15 bp, Homo sapiens
tttgccatgttgctc

SEQ ID NO: 532885 - DNA, 15 bp, Homo sapiens
ttttgccatgttgct

SEQ ID NO: 532886 - DNA, 15 bp, Homo sapiens
cggttttgccatgtt

SEQ ID NO: 532887 - DNA, 15 bp, Homo sapiens
ccggttttgccatgt

SEQ ID NO: 532888 - DNA, 15 bp, Homo sapiens
cccggttttgccatg

SEQ ID NO: 532889 - DNA, 15 bp, Homo sapiens
acccggttttgccat

SEQ ID NO: 532890 - DNA, 15 bp, Homo sapiens
gacccggttttgcca

SEQ ID NO: 532891 - DNA, 15 bp, Homo sapiens
agacccggttttgcc

SEQ ID NO: 532892 - DNA, 15 bp, Homo sapiens
gagacccggttttgc

SEQ ID NO: 532893 - DNA, 15 bp, Homo sapiens
agagacccggttttg

SEQ ID NO: 532894 - DNA, 15 bp, Homo sapiens
aagagacccggtttt

SEQ ID NO: 532895 - DNA, 15 bp, Homo sapiens
gaagagacccggttt

SEQ ID NO: 532896 - DNA, 15 bp, Homo sapiens
tgaagagacccggtt

SEQ ID NO: 532897 - DNA, 15 bp, Homo sapiens
ctgaagagacccggt

SEQ ID NO: 532898 - DNA, 15 bp, Homo sapiens
tctgaagagacccgg

SEQ ID NO: 532899 - DNA, 15 bp, Homo sapiens
ttctgaagagacccg

SEQ ID NO: 532900 - DNA, 15 bp, Homo sapiens
tttctgaagagaccc

SEQ ID NO: 532901 - DNA, 15 bp, Homo sapiens
atttctgaagagacc

SEQ ID NO: 532902 - DNA, 15 bp, Homo sapiens
aatttctgaagagac

SEQ ID NO: 532903 - DNA, 15 bp, Homo sapiens
taatttctgaagaga

SEQ ID NO: 532904 - DNA, 15 bp, Homo sapiens
ataatttctgaagag

SEQ ID NO: 532905 - DNA, 15 bp, Homo sapiens
gataatttctgaaga

SEQ ID NO: 532906 - DNA, 15 bp, Homo sapiens
agataatttctgaag

SEQ ID NO: 532907 - DNA, 15 bp, Homo sapiens
cagataatttctgaa

SEQ ID NO: 532908 - DNA, 15 bp, Homo sapiens
ccagataatttctga

SEQ ID NO: 532909 - DNA, 15 bp, Homo sapiens
cccagataatttctg

SEQ ID NO: 532910 - DNA, 15 bp, Homo sapiens
gcccagataatttct

SEQ ID NO: 532911 - DNA, 15 bp, Homo sapiens
cgcccagataatttc

SEQ ID NO: 532912 - DNA, 15 bp, Homo sapiens
acgcccagataattt

SEQ ID NO: 532913 - DNA, 15 bp, Homo sapiens
cacgcccagataatt

SEQ ID NO: 532914 - DNA, 15 bp, Homo sapiens
ccacgcccagataat

SEQ ID NO: 532915 - DNA, 15 bp, Homo sapiens
accacgcccagataa

SEQ ID NO: 532916 - DNA, 15 bp, Homo sapiens
caccacgcccagata

SEQ ID NO: 532917 - DNA, 15 bp, Homo sapiens
ccaccacgcccagat

SEQ ID NO: 532918 - DNA, 15 bp, Homo sapiens
gccaccacgcccaga

SEQ ID NO: 532919 - DNA, 15 bp, Homo sapiens
agccaccacgcccag

SEQ ID NO: 532920 - DNA, 15 bp, Homo sapiens
aagccaccacgccca

SEQ ID NO: 532921 - DNA, 15 bp, Homo sapiens
caagccaccacgccc

SEQ ID NO: 532922 - DNA, 15 bp, Homo sapiens
gcaagccaccacgcc

SEQ ID NO: 532923 - DNA, 15 bp, Homo sapiens
tgcaagccaccacgc

SEQ ID NO: 532924 - DNA, 15 bp, Homo sapiens
gtgcaagccaccacg

SEQ ID NO: 532925 - DNA, 15 bp, Homo sapiens
ggtgcaagccaccac

SEQ ID NO: 532926 - DNA, 15 bp, Homo sapiens
aggtgcaagccacca

SEQ ID NO: 532927 - DNA, 15 bp, Homo sapiens
caggtgcaagccacc

SEQ ID NO: 532928 - DNA, 15 bp, Homo sapiens
acaggtgcaagccac

SEQ ID NO: 532929 - DNA, 15 bp, Homo sapiens
tacaggtgcaagcca

SEQ ID NO: 532930 - DNA, 15 bp, Homo sapiens
ctacaggtgcaagcc

SEQ ID NO: 532931 - DNA, 15 bp, Homo sapiens
actacaggtgcaagc

SEQ ID NO: 532932 - DNA, 15 bp, Homo sapiens
gactacaggtgcaag

SEQ ID NO: 532933 - DNA, 15 bp, Homo sapiens
ggactacaggtgcaa

SEQ ID NO: 532934 - DNA, 15 bp, Homo sapiens
ttgggactacaggtg

SEQ ID NO: 532935 - DNA, 15 bp, Homo sapiens
gttgggactacaggt

SEQ ID NO: 532936 - DNA, 15 bp, Homo sapiens
agttgggactacagg

SEQ ID NO: 532937 - DNA, 15 bp, Homo sapiens
tagttgggactacag

SEQ ID NO: 532938 - DNA, 15 bp, Homo sapiens
atagttgggactaca

SEQ ID NO: 532939 - DNA, 15 bp, Homo sapiens
aatagttgggactac

SEQ ID NO: 532940 - DNA, 15 bp, Homo sapiens
gaatagttgggacta

SEQ ID NO: 532941 - DNA, 15 bp, Homo sapiens
tgaatagttgggact

SEQ ID NO: 532942 - DNA, 15 bp, Homo sapiens
ctgaatagttgggac

SEQ ID NO: 532943 - DNA, 15 bp, Homo sapiens
cctgaatagttggga

SEQ ID NO: 532944 - DNA, 15 bp, Homo sapiens
tcctgaatagttggg

SEQ ID NO: 532945 - DNA, 15 bp, Homo sapiens
ctcctgaatagttgg

SEQ ID NO: 532946 - DNA, 15 bp, Homo sapiens
cctcctgaatagttg

SEQ ID NO: 532947 - DNA, 15 bp, Homo sapiens
acctcctgaatagtt

SEQ ID NO: 532948 - DNA, 15 bp, Homo sapiens
gacctcctgaatagt

SEQ ID NO: 532949 - DNA, 15 bp, Homo sapiens
tgacctcctgaatag

SEQ ID NO: 532950 - DNA, 15 bp, Homo sapiens
ttgacctcctgaata

SEQ ID NO: 532951 - DNA, 15 bp, Homo sapiens
tttgacctcctgaat

SEQ ID NO: 532952 - DNA, 15 bp, Homo sapiens
ctttgacctcctgaa

SEQ ID NO: 532953 - DNA, 15 bp, Homo sapiens
gctttgacctcctga

SEQ ID NO: 532954 - DNA, 15 bp, Homo sapiens
agctttgacctcctg

SEQ ID NO: 532955 - DNA, 15 bp, Homo sapiens
cagctttgacctcct

SEQ ID NO: 532956 - DNA, 15 bp, Homo sapiens
gcagctttgacctcc

SEQ ID NO: 532957 - DNA, 15 bp, Homo sapiens
tgcagctttgacctc

SEQ ID NO: 532958 - DNA, 15 bp, Homo sapiens
ctgcagctttgacct

SEQ ID NO: 532959 - DNA, 15 bp, Homo sapiens
actgcagctttgacc

SEQ ID NO: 532960 - DNA, 15 bp, Homo sapiens
cactgcagctttgac

SEQ ID NO: 532961 - DNA, 15 bp, Homo sapiens
tcactgcagctttga

SEQ ID NO: 532962 - DNA, 15 bp, Homo sapiens
ctcactgcagctttg

SEQ ID NO: 532963 - DNA, 15 bp, Homo sapiens
gctcactgcagcttt

SEQ ID NO: 532964 - DNA, 15 bp, Homo sapiens
agctcactgcagctt

SEQ ID NO: 532965 - DNA, 15 bp, Homo sapiens
cagctcactgcagct

SEQ ID NO: 532966 - DNA, 15 bp, Homo sapiens
acagctcactgcagc

SEQ ID NO: 532967 - DNA, 15 bp, Homo sapiens
aacagctcactgcag

SEQ ID NO: 532968 - DNA, 15 bp, Homo sapiens
taacagctcactgca

SEQ ID NO: 532969 - DNA, 15 bp, Homo sapiens
gtaacagctcactgc

SEQ ID NO: 532970 - DNA, 15 bp, Homo sapiens
ggtaacagctcactg

SEQ ID NO: 532971 - DNA, 15 bp, Homo sapiens
tggtaacagctcact

SEQ ID NO: 532972 - DNA, 15 bp, Homo sapiens
gtggtaacagctcac

SEQ ID NO: 532973 - DNA, 15 bp, Homo sapiens
agtggtaacagctca

SEQ ID NO: 532974 - DNA, 15 bp, Homo sapiens
cagtggtaacagctc

SEQ ID NO: 532975 - DNA, 15 bp, Homo sapiens
gcagtggtaacagct

SEQ ID NO: 532976 - DNA, 15 bp, Homo sapiens
tgcagtggtaacagc

SEQ ID NO: 532977 - DNA, 15 bp, Homo sapiens
gtgcagtggtaacag

SEQ ID NO: 532978 - DNA, 15 bp, Homo sapiens
agtgcagtggtaaca

SEQ ID NO: 532979 - DNA, 15 bp, Homo sapiens
gagtgcagtggtaac

SEQ ID NO: 532980 - DNA, 15 bp, Homo sapiens
ggagtgcagtggtaa

SEQ ID NO: 532981 - DNA, 15 bp, Homo sapiens
tggagtgcagtggta

SEQ ID NO: 532982 - DNA, 15 bp, Homo sapiens
ttctgtcacccaggc

SEQ ID NO: 532983 - DNA, 15 bp, Homo sapiens
attctgtcacccagg

SEQ ID NO: 532984 - DNA, 15 bp, Homo sapiens
cattctgtcacccag

SEQ ID NO: 532985 - DNA, 15 bp, Homo sapiens
tcattctgtcaccca

SEQ ID NO: 532986 - DNA, 15 bp, Homo sapiens
atcattctgtcaccc

SEQ ID NO: 532987 - DNA, 15 bp, Homo sapiens
catcattctgtcacc

SEQ ID NO: 532988 - DNA, 15 bp, Homo sapiens
gcatcattctgtcac

SEQ ID NO: 532989 - DNA, 15 bp, Homo sapiens
ggcatcattctgtca

SEQ ID NO: 532990 - DNA, 15 bp, Homo sapiens
gggcatcattctgtc

SEQ ID NO: 532991 - DNA, 15 bp, Homo sapiens
agggcatcattctgt

SEQ ID NO: 532992 - DNA, 15 bp, Homo sapiens
cagggcatcattctg

SEQ ID NO: 532993 - DNA, 15 bp, Homo sapiens
acagggcatcattct

SEQ ID NO: 532994 - DNA, 15 bp, Homo sapiens
gacagggcatcattc

SEQ ID NO: 532995 - DNA, 15 bp, Homo sapiens
agacagggcatcatt

SEQ ID NO: 532996 - DNA, 15 bp, Homo sapiens
gagacagggcatcat

SEQ ID NO: 532997 - DNA, 15 bp, Homo sapiens
ggagacagggcatca

SEQ ID NO: 532998 - DNA, 15 bp, Homo sapiens
tggagacagggcatc

SEQ ID NO: 532999 - DNA, 15 bp, Homo sapiens
ttggagacagggcat

SEQ ID NO: 533000 - DNA, 15 bp, Homo sapiens
tttggagacagggca

SEQ ID NO: 533001 - DNA, 15 bp, Homo sapiens
ttttggagacagggc

SEQ ID NO: 533002 - DNA, 15 bp, Homo sapiens
tttttggagacaggg

SEQ ID NO: 533003 - DNA, 15 bp, Homo sapiens
ttttttggagacagg

SEQ ID NO: 533004 - DNA, 15 bp, Homo sapiens
tttttttggagacag

SEQ ID NO: 533005 - DNA, 15 bp, Homo sapiens
ttttttttggagaca

SEQ ID NO: 533006 - DNA, 15 bp, Homo sapiens
tttttttttggagac

SEQ ID NO: 533007 - DNA, 15 bp, Homo sapiens
ttttttttttggaga

SEQ ID NO: 533008 - DNA, 15 bp, Homo sapiens
tttttttttttggag

SEQ ID NO: 533009 - DNA, 15 bp, Homo sapiens
ttttttttttttgga

SEQ ID NO: 533010 - DNA, 15 bp, Homo sapiens
tttttttttttttgg

SEQ ID NO: 533011 - DNA, 15 bp, Homo sapiens
tactttttttttttt

SEQ ID NO: 533012 - DNA, 15 bp, Homo sapiens
atacttttttttttt

SEQ ID NO: 533013 - DNA, 15 bp, Homo sapiens
tatactttttttttt

SEQ ID NO: 533014 - DNA, 15 bp, Homo sapiens
ttatacttttttttt

SEQ ID NO: 533015 - DNA, 15 bp, Homo sapiens
attatactttttttt

SEQ ID NO: 533016 - DNA, 15 bp, Homo sapiens
tattatacttttttt

SEQ ID NO: 533017 - DNA, 15 bp, Homo sapiens
atattatactttttt

SEQ ID NO: 533018 - DNA, 15 bp, Homo sapiens
aatattatacttttt

SEQ ID NO: 533019 - DNA, 15 bp, Homo sapiens
aaatattatactttt

SEQ ID NO: 533020 - DNA, 15 bp, Homo sapiens
caaatattatacttt

SEQ ID NO: 533021 - DNA, 15 bp, Homo sapiens
gcaaatattatactt

SEQ ID NO: 533022 - DNA, 15 bp, Homo sapiens
tgcaaatattatact

SEQ ID NO: 533023 - DNA, 15 bp, Homo sapiens
atgcaaatattatac

SEQ ID NO: 533024 - DNA, 15 bp, Homo sapiens
tatgcaaatattata

SEQ ID NO: 533025 - DNA, 15 bp, Homo sapiens
atatgcaaatattat

SEQ ID NO: 533026 - DNA, 15 bp, Homo sapiens
tatatgcaaatatta

SEQ ID NO: 533027 - DNA, 15 bp, Homo sapiens
atatatgcaaatatt

SEQ ID NO: 533028 - DNA, 15 bp, Homo sapiens
gatatatgcaaatat

SEQ ID NO: 533029 - DNA, 15 bp, Homo sapiens
ggatatatgcaaata

SEQ ID NO: 533030 - DNA, 15 bp, Homo sapiens
aggatatatgcaaat

SEQ ID NO: 533031 - DNA, 15 bp, Homo sapiens
taggatatatgcaaa

SEQ ID NO: 533032 - DNA, 15 bp, Homo sapiens
ataggatatatgcaa

SEQ ID NO: 533033 - DNA, 15 bp, Homo sapiens
cataggatatatgca

SEQ ID NO: 533034 - DNA, 15 bp, Homo sapiens
acataggatatatgc

SEQ ID NO: 533035 - DNA, 15 bp, Homo sapiens
tacataggatatatg

SEQ ID NO: 533036 - DNA, 15 bp, Homo sapiens
ctacataggatatat

SEQ ID NO: 533037 - DNA, 15 bp, Homo sapiens
tctacataggatata

SEQ ID NO: 533038 - DNA, 15 bp, Homo sapiens
atctacataggatat

SEQ ID NO: 533039 - DNA, 15 bp, Homo sapiens
catctacataggata

SEQ ID NO: 533040 - DNA, 15 bp, Homo sapiens
acatctacataggat

SEQ ID NO: 533041 - DNA, 15 bp, Homo sapiens
aacatctacatagga

SEQ ID NO: 533042 - DNA, 15 bp, Homo sapiens
aaacatctacatagg

SEQ ID NO: 533043 - DNA, 15 bp, Homo sapiens
aaaacatctacatag

SEQ ID NO: 533044 - DNA, 15 bp, Homo sapiens
taaaacatctacata

SEQ ID NO: 533045 - DNA, 15 bp, Homo sapiens
gtaaaacatctacat

SEQ ID NO: 533046 - DNA, 15 bp, Homo sapiens
agtaaaacatctaca

SEQ ID NO: 533047 - DNA, 15 bp, Homo sapiens
aagtaaaacatctac

SEQ ID NO: 533048 - DNA, 15 bp, Homo sapiens
aaagtaaaacatcta

SEQ ID NO: 533049 - DNA, 15 bp, Homo sapiens
aaaagtaaaacatct

SEQ ID NO: 533050 - DNA, 15 bp, Homo sapiens
caaaagtaaaacatc

SEQ ID NO: 533051 - DNA, 15 bp, Homo sapiens
tcaaaagtaaaacat

SEQ ID NO: 533052 - DNA, 15 bp, Homo sapiens
ctcaaaagtaaaaca

SEQ ID NO: 533053 - DNA, 15 bp, Homo sapiens
tctcaaaagtaaaac

SEQ ID NO: 533054 - DNA, 15 bp, Homo sapiens
gtctcaaaagtaaaa

SEQ ID NO: 533055 - DNA, 15 bp, Homo sapiens
tgtctcaaaagtaaa

SEQ ID NO: 533056 - DNA, 15 bp, Homo sapiens
ctgtctcaaaagtaa

SEQ ID NO: 533057 - DNA, 15 bp, Homo sapiens
tctgtctcaaaagta

SEQ ID NO: 533058 - DNA, 15 bp, Homo sapiens
ctctgtctcaaaagt

SEQ ID NO: 533059 - DNA, 15 bp, Homo sapiens
actctgtctcaaaag

SEQ ID NO: 533060 - DNA, 15 bp, Homo sapiens
gactctgtctcaaaa

SEQ ID NO: 533061 - DNA, 15 bp, Homo sapiens
agactctgtctcaaa

SEQ ID NO: 533062 - DNA, 15 bp, Homo sapiens
gagactctgtctcaa

SEQ ID NO: 533063 - DNA, 15 bp, Homo sapiens
tgagactctgtctca

SEQ ID NO: 533064 - DNA, 15 bp, Homo sapiens
gtgagactctgtctc

SEQ ID NO: 533065 - DNA, 15 bp, Homo sapiens
agtgagactctgtct

SEQ ID NO: 533066 - DNA, 15 bp, Homo sapiens
gagtgagactctgtc

SEQ ID NO: 533067 - DNA, 15 bp, Homo sapiens
agagtgagactctgt

SEQ ID NO: 533068 - DNA, 15 bp, Homo sapiens
cagagtgagactctg

SEQ ID NO: 533069 - DNA, 15 bp, Homo sapiens
acagagtgagactct

SEQ ID NO: 533070 - DNA, 15 bp, Homo sapiens
gacagagtgagactc

SEQ ID NO: 533071 - DNA, 15 bp, Homo sapiens
tgacagagtgagact

SEQ ID NO: 533072 - DNA, 15 bp, Homo sapiens
gtgacagagtgagac

SEQ ID NO: 533073 - DNA, 15 bp, Homo sapiens
ggtgacagagtgaga

SEQ ID NO: 533074 - DNA, 15 bp, Homo sapiens
gggtgacagagtgag

SEQ ID NO: 533075 - DNA, 15 bp, Homo sapiens
tgggtgacagagtga

SEQ ID NO: 533076 - DNA, 15 bp, Homo sapiens
ctgggtgacagagtg

SEQ ID NO: 533077 - DNA, 15 bp, Homo sapiens
actgggtgacagagt

SEQ ID NO: 533078 - DNA, 15 bp, Homo sapiens
gactgggtgacagag

SEQ ID NO: 533079 - DNA, 15 bp, Homo sapiens
agactgggtgacaga

SEQ ID NO: 533080 - DNA, 15 bp, Homo sapiens
cagactgggtgacag

SEQ ID NO: 533081 - DNA, 15 bp, Homo sapiens
ccagactgggtgaca

SEQ ID NO: 533082 - DNA, 15 bp, Homo sapiens
tccagactgggtgac

SEQ ID NO: 533083 - DNA, 15 bp, Homo sapiens
ctccagactgggtga

SEQ ID NO: 533084 - DNA, 15 bp, Homo sapiens
actccagactgggtg

SEQ ID NO: 533085 - DNA, 15 bp, Homo sapiens
cactccagactgggt

SEQ ID NO: 533086 - DNA, 15 bp, Homo sapiens
gcactccagactggg

SEQ ID NO: 533087 - DNA, 15 bp, Homo sapiens
tgcactccagactgg

SEQ ID NO: 533088 - DNA, 15 bp, Homo sapiens
ctgcactccagactg

SEQ ID NO: 533089 - DNA, 15 bp, Homo sapiens
actgcactccagact

SEQ ID NO: 533090 - DNA, 15 bp, Homo sapiens
cactgcactccagac

SEQ ID NO: 533091 - DNA, 15 bp, Homo sapiens
ccactgcactccaga

SEQ ID NO: 533092 - DNA, 15 bp, Homo sapiens
gccactgcactccag

SEQ ID NO: 533093 - DNA, 15 bp, Homo sapiens
atgccactgcactcc

SEQ ID NO: 533094 - DNA, 15 bp, Homo sapiens
catgccactgcactc

SEQ ID NO: 533095 - DNA, 15 bp, Homo sapiens
tcatgccactgcact

SEQ ID NO: 533096 - DNA, 15 bp, Homo sapiens
atcatgccactgcac

SEQ ID NO: 533097 - DNA, 15 bp, Homo sapiens
gatcatgccactgca

SEQ ID NO: 533098 - DNA, 15 bp, Homo sapiens
agatcatgccactgc

SEQ ID NO: 533099 - DNA, 15 bp, Homo sapiens
aagatcatgccactg

SEQ ID NO: 533100 - DNA, 15 bp, Homo sapiens
caagatcatgccact

SEQ ID NO: 533101 - DNA, 15 bp, Homo sapiens
ccaagatcatgccac

SEQ ID NO: 533102 - DNA, 15 bp, Homo sapiens
gccaagatcatgcca

SEQ ID NO: 533103 - DNA, 15 bp, Homo sapiens
agccaagatcatgcc

SEQ ID NO: 533104 - DNA, 15 bp, Homo sapiens
tagccaagatcatgc

SEQ ID NO: 533105 - DNA, 15 bp, Homo sapiens
ttagccaagatcatg

SEQ ID NO: 533106 - DNA, 15 bp, Homo sapiens
gttagccaagatcat

SEQ ID NO: 533107 - DNA, 15 bp, Homo sapiens
agttagccaagatca

SEQ ID NO: 533108 - DNA, 15 bp, Homo sapiens
cagttagccaagatc

SEQ ID NO: 533109 - DNA, 15 bp, Homo sapiens
gcagttagccaagat

SEQ ID NO: 533110 - DNA, 15 bp, Homo sapiens
tgcagttagccaaga

SEQ ID NO: 533111 - DNA, 15 bp, Homo sapiens
ttgcagttagccaag

SEQ ID NO: 533112 - DNA, 15 bp, Homo sapiens
gttgcagttagccaa

SEQ ID NO: 533113 - DNA, 15 bp, Homo sapiens
ggttgcagttagcca

SEQ ID NO: 533114 - DNA, 15 bp, Homo sapiens
gaggcagaggttgca

SEQ ID NO: 533115 - DNA, 15 bp, Homo sapiens
ggaggcagaggttgc

SEQ ID NO: 533116 - DNA, 15 bp, Homo sapiens
gggaggcagaggttg

SEQ ID NO: 533117 - DNA, 15 bp, Homo sapiens
tgggaggcagaggtt

SEQ ID NO: 533118 - DNA, 15 bp, Homo sapiens
ctgggaggcagaggt

SEQ ID NO: 533119 - DNA, 15 bp, Homo sapiens
cctgggaggcagagg

SEQ ID NO: 533120 - DNA, 15 bp, Homo sapiens
acctgggaggcagag

SEQ ID NO: 533121 - DNA, 15 bp, Homo sapiens
aacctgggaggcaga

SEQ ID NO: 533122 - DNA, 15 bp, Homo sapiens
gaacctgggaggcag

SEQ ID NO: 533123 - DNA, 15 bp, Homo sapiens
tgaacctgggaggca

SEQ ID NO: 533124 - DNA, 15 bp, Homo sapiens
acttgaacctgggag

SEQ ID NO: 533125 - DNA, 15 bp, Homo sapiens
cacttgaacctggga

SEQ ID NO: 533126 - DNA, 15 bp, Homo sapiens
tcacttgaacctggg

SEQ ID NO: 533127 - DNA, 15 bp, Homo sapiens
atcacttgaacctgg

SEQ ID NO: 533128 - DNA, 15 bp, Homo sapiens
aatcacttgaacctg

SEQ ID NO: 533129 - DNA, 15 bp, Homo sapiens
gaatcacttgaacct

SEQ ID NO: 533130 - DNA, 15 bp, Homo sapiens
agaatcacttgaacc

SEQ ID NO: 533131 - DNA, 15 bp, Homo sapiens
gagaatcacttgaac

SEQ ID NO: 533132 - DNA, 15 bp, Homo sapiens
ggagaatcacttgaa

SEQ ID NO: 533133 - DNA, 15 bp, Homo sapiens
aggagaatcacttga

SEQ ID NO: 533134 - DNA, 15 bp, Homo sapiens
caggagaatcacttg

SEQ ID NO: 533135 - DNA, 15 bp, Homo sapiens
gcaggagaatcactt

SEQ ID NO: 533136 - DNA, 15 bp, Homo sapiens
ggcaggagaatcact

SEQ ID NO: 533137 - DNA, 15 bp, Homo sapiens
gggcaggagaatcac

SEQ ID NO: 533138 - DNA, 15 bp, Homo sapiens
agggcaggagaatca

SEQ ID NO: 533139 - DNA, 15 bp, Homo sapiens
cagggcaggagaatc

SEQ ID NO: 533140 - DNA, 15 bp, Homo sapiens
gcagggcaggagaat

SEQ ID NO: 533141 - DNA, 15 bp, Homo sapiens
ggcagggcaggagaa

SEQ ID NO: 533142 - DNA, 15 bp, Homo sapiens
aggcagggcaggaga

SEQ ID NO: 533143 - DNA, 15 bp, Homo sapiens
gaggcagggcaggag

SEQ ID NO: 533144 - DNA, 15 bp, Homo sapiens
tgaggcagggcagga

SEQ ID NO: 533145 - DNA, 15 bp, Homo sapiens
ctgaggcagggcagg

SEQ ID NO: 533146 - DNA, 15 bp, Homo sapiens
gctgaggcagggcag

SEQ ID NO: 533147 - DNA, 15 bp, Homo sapiens
ggctgaggcagggca

SEQ ID NO: 533148 - DNA, 15 bp, Homo sapiens
aggctgaggcagggc

SEQ ID NO: 533149 - DNA, 15 bp, Homo sapiens
gaggctgaggcaggg

SEQ ID NO: 533150 - DNA, 15 bp, Homo sapiens
tgggaggctgaggca

SEQ ID NO: 533151 - DNA, 15 bp, Homo sapiens
ctgggaggctgaggc

SEQ ID NO: 533152 - DNA, 15 bp, Homo sapiens
cctgggaggctgagg

SEQ ID NO: 533153 - DNA, 15 bp, Homo sapiens
acctgggaggctgag

SEQ ID NO: 533154 - DNA, 15 bp, Homo sapiens
tacctgggaggctga

SEQ ID NO: 533155 - DNA, 15 bp, Homo sapiens
ctacctgggaggctg

SEQ ID NO: 533156 - DNA, 15 bp, Homo sapiens
gctacctgggaggct

SEQ ID NO: 533157 - DNA, 15 bp, Homo sapiens
agctacctgggaggc

SEQ ID NO: 533158 - DNA, 15 bp, Homo sapiens
cagctacctgggagg

SEQ ID NO: 533159 - DNA, 15 bp, Homo sapiens
ccagctacctgggag

SEQ ID NO: 533160 - DNA, 15 bp, Homo sapiens
cccagctacctggga

SEQ ID NO: 533161 - DNA, 15 bp, Homo sapiens
ccccagctacctggg

SEQ ID NO: 533162 - DNA, 15 bp, Homo sapiens
accccagctacctgg

SEQ ID NO: 533163 - DNA, 15 bp, Homo sapiens
aaccccagctacctg

SEQ ID NO: 533164 - DNA, 15 bp, Homo sapiens
taaccccagctacct

SEQ ID NO: 533165 - DNA, 15 bp, Homo sapiens
gtaaccccagctacc

SEQ ID NO: 533166 - DNA, 15 bp, Homo sapiens
tgtaaccccagctac

SEQ ID NO: 533167 - DNA, 15 bp, Homo sapiens
ctgtaaccccagcta

SEQ ID NO: 533168 - DNA, 15 bp, Homo sapiens
cctgtaaccccagct

SEQ ID NO: 533169 - DNA, 15 bp, Homo sapiens
ccctgtaaccccagc

SEQ ID NO: 533170 - DNA, 15 bp, Homo sapiens
cccctgtaaccccag

SEQ ID NO: 533171 - DNA, 15 bp, Homo sapiens
ccccctgtaacccca

SEQ ID NO: 533172 - DNA, 15 bp, Homo sapiens
accccctgtaacccc

SEQ ID NO: 533173 - DNA, 15 bp, Homo sapiens
caccccctgtaaccc

SEQ ID NO: 533174 - DNA, 15 bp, Homo sapiens
acaccccctgtaacc

SEQ ID NO: 533175 - DNA, 15 bp, Homo sapiens
cacaccccctgtaac

SEQ ID NO: 533176 - DNA, 15 bp, Homo sapiens
gcacaccccctgtaa

SEQ ID NO: 533177 - DNA, 15 bp, Homo sapiens
ggcacaccccctgta

SEQ ID NO: 533178 - DNA, 15 bp, Homo sapiens
tggcacaccccctgt

SEQ ID NO: 533179 - DNA, 15 bp, Homo sapiens
gtggcacaccccctg

SEQ ID NO: 533180 - DNA, 15 bp, Homo sapiens
ggtggcacaccccct

SEQ ID NO: 533181 - DNA, 15 bp, Homo sapiens
tggtggcacaccccc

SEQ ID NO: 533182 - DNA, 15 bp, Homo sapiens
gtggtggcacacccc

SEQ ID NO: 533183 - DNA, 15 bp, Homo sapiens
tgtggtggcacaccc

SEQ ID NO: 533184 - DNA, 15 bp, Homo sapiens
gtgtggtggcacacc

SEQ ID NO: 533185 - DNA, 15 bp, Homo sapiens
ggtgtggtggcacac

SEQ ID NO: 533186 - DNA, 15 bp, Homo sapiens
aggtgtggtggcaca

SEQ ID NO: 533187 - DNA, 15 bp, Homo sapiens
caggtgtggtggcac

SEQ ID NO: 533188 - DNA, 15 bp, Homo sapiens
ccaggtgtggtggca

SEQ ID NO: 533189 - DNA, 15 bp, Homo sapiens
gccaggtgtggtggc

SEQ ID NO: 533190 - DNA, 15 bp, Homo sapiens
agccaggtgtggtgg

SEQ ID NO: 533191 - DNA, 15 bp, Homo sapiens
tagccaggtgtggtg

SEQ ID NO: 533192 - DNA, 15 bp, Homo sapiens
ttagccaggtgtggt

SEQ ID NO: 533193 - DNA, 15 bp, Homo sapiens
attagccaggtgtgg

SEQ ID NO: 533194 - DNA, 15 bp, Homo sapiens
aattagccaggtgtg

SEQ ID NO: 533195 - DNA, 15 bp, Homo sapiens
aaattagccaggtgt

SEQ ID NO: 533196 - DNA, 15 bp, Homo sapiens
aaaattagccaggtg

SEQ ID NO: 533197 - DNA, 15 bp, Homo sapiens
gaaaattagccaggt

SEQ ID NO: 533198 - DNA, 15 bp, Homo sapiens
agaaaattagccagg

SEQ ID NO: 533199 - DNA, 15 bp, Homo sapiens
aagaaaattagccag

SEQ ID NO: 533200 - DNA, 15 bp, Homo sapiens
caagaaaattagcca

SEQ ID NO: 533201 - DNA, 15 bp, Homo sapiens
acaagaaaattagcc

SEQ ID NO: 533202 - DNA, 15 bp, Homo sapiens
tacaagaaaattagc

SEQ ID NO: 533203 - DNA, 15 bp, Homo sapiens
ttacaagaaaattag

SEQ ID NO: 533204 - DNA, 15 bp, Homo sapiens
attacaagaaaatta

SEQ ID NO: 533205 - DNA, 15 bp, Homo sapiens
aattacaagaaaatt

SEQ ID NO: 533206 - DNA, 15 bp, Homo sapiens
aaattacaagaaaat

SEQ ID NO: 533207 - DNA, 15 bp, Homo sapiens
gaaattacaagaaaa

SEQ ID NO: 533208 - DNA, 15 bp, Homo sapiens
tgaaattacaagaaa

SEQ ID NO: 533209 - DNA, 15 bp, Homo sapiens
ctgaaattacaagaa

SEQ ID NO: 533210 - DNA, 15 bp, Homo sapiens
actgaaattacaaga

SEQ ID NO: 533211 - DNA, 15 bp, Homo sapiens
tactgaaattacaag

SEQ ID NO: 533212 - DNA, 15 bp, Homo sapiens
ctactgaaattacaa

SEQ ID NO: 533213 - DNA, 15 bp, Homo sapiens
tctactgaaattaca

SEQ ID NO: 533214 - DNA, 15 bp, Homo sapiens
ctctactgaaattac

SEQ ID NO: 533215 - DNA, 15 bp, Homo sapiens
tctctactgaaatta

SEQ ID NO: 533216 - DNA, 15 bp, Homo sapiens
atctctactgaaatt

SEQ ID NO: 533217 - DNA, 15 bp, Homo sapiens
catctctactgaaat

SEQ ID NO: 533218 - DNA, 15 bp, Homo sapiens
ccatctctactgaaa

SEQ ID NO: 533219 - DNA, 15 bp, Homo sapiens
cccatctctactgaa

SEQ ID NO: 533220 - DNA, 15 bp, Homo sapiens
ccccatctctactga

SEQ ID NO: 533221 - DNA, 15 bp, Homo sapiens
accccatctctactg

SEQ ID NO: 533222 - DNA, 15 bp, Homo sapiens
aaccccatctctact

SEQ ID NO: 533223 - DNA, 15 bp, Homo sapiens
aaaccccatctctac

SEQ ID NO: 533224 - DNA, 15 bp, Homo sapiens
gaaaccccatctcta

SEQ ID NO: 533225 - DNA, 15 bp, Homo sapiens
tgaaaccccatctct

SEQ ID NO: 533226 - DNA, 15 bp, Homo sapiens
gtgaaaccccatctc

SEQ ID NO: 533227 - DNA, 15 bp, Homo sapiens
ggtgaaaccccatct

SEQ ID NO: 533228 - DNA, 15 bp, Homo sapiens
tggtgaaaccccatc

SEQ ID NO: 533229 - DNA, 15 bp, Homo sapiens
atggtgaaaccccat

SEQ ID NO: 533230 - DNA, 15 bp, Homo sapiens
catggtgaaacccca

SEQ ID NO: 533231 - DNA, 15 bp, Homo sapiens
caacatggtgaaacc

SEQ ID NO: 533232 - DNA, 15 bp, Homo sapiens
ccaacatggtgaaac

SEQ ID NO: 533233 - DNA, 15 bp, Homo sapiens
ggccaacatggtgaa

SEQ ID NO: 533234 - DNA, 15 bp, Homo sapiens
tggccaacatggtga

SEQ ID NO: 533235 - DNA, 15 bp, Homo sapiens
ctggccaacatggtg

SEQ ID NO: 533236 - DNA, 15 bp, Homo sapiens
cctggccaacatggt

SEQ ID NO: 533237 - DNA, 15 bp, Homo sapiens
gcctggccaacatgg

SEQ ID NO: 533238 - DNA, 15 bp, Homo sapiens
agcctggccaacatg

SEQ ID NO: 533239 - DNA, 15 bp, Homo sapiens
cagcctggccaacat

SEQ ID NO: 533240 - DNA, 15 bp, Homo sapiens
ccagcctggccaaca

SEQ ID NO: 533241 - DNA, 15 bp, Homo sapiens
accagcctggccaac

SEQ ID NO: 533242 - DNA, 15 bp, Homo sapiens
gaccagcctggccaa

SEQ ID NO: 533243 - DNA, 15 bp, Homo sapiens
agaccagcctggcca

SEQ ID NO: 533244 - DNA, 15 bp, Homo sapiens
gagaccagcctggcc

SEQ ID NO: 533245 - DNA, 15 bp, Homo sapiens
tgagaccagcctggc

SEQ ID NO: 533246 - DNA, 15 bp, Homo sapiens
ttgagaccagcctgg

SEQ ID NO: 533247 - DNA, 15 bp, Homo sapiens
tttgagaccagcctg

SEQ ID NO: 533248 - DNA, 15 bp, Homo sapiens
gtttgagaccagcct

SEQ ID NO: 533249 - DNA, 15 bp, Homo sapiens
agtttgagaccagcc

SEQ ID NO: 533250 - DNA, 15 bp, Homo sapiens
gagtttgagaccagc

SEQ ID NO: 533251 - DNA, 15 bp, Homo sapiens
ggagtttgagaccag

SEQ ID NO: 533252 - DNA, 15 bp, Homo sapiens
aggagtttgagacca

SEQ ID NO: 533253 - DNA, 15 bp, Homo sapiens
caggagtttgagacc

SEQ ID NO: 533254 - DNA, 15 bp, Homo sapiens
tcaggagtttgagac

SEQ ID NO: 533255 - DNA, 15 bp, Homo sapiens
gtcaggagtttgaga

SEQ ID NO: 533256 - DNA, 15 bp, Homo sapiens
ggtcaggagtttgag

SEQ ID NO: 533257 - DNA, 15 bp, Homo sapiens
aggtcaggagtttga

SEQ ID NO: 533258 - DNA, 15 bp, Homo sapiens
gaggtcaggagtttg

SEQ ID NO: 533259 - DNA, 15 bp, Homo sapiens
tgaggtcaggagttt

SEQ ID NO: 533260 - DNA, 15 bp, Homo sapiens
ctgaggtcaggagtt

SEQ ID NO: 533261 - DNA, 15 bp, Homo sapiens
cctgaggtcaggagt

SEQ ID NO: 533262 - DNA, 15 bp, Homo sapiens
acctgaggtcaggag

SEQ ID NO: 533263 - DNA, 15 bp, Homo sapiens
cacctgaggtcagga

SEQ ID NO: 533264 - DNA, 15 bp, Homo sapiens
tcacctgaggtcagg

SEQ ID NO: 533265 - DNA, 15 bp, Homo sapiens
atcacctgaggtcag

SEQ ID NO: 533266 - DNA, 15 bp, Homo sapiens
aatcacctgaggtca

SEQ ID NO: 533267 - DNA, 15 bp, Homo sapiens
gaatcacctgaggtc

SEQ ID NO: 533268 - DNA, 15 bp, Homo sapiens
agaatcacctgaggt

SEQ ID NO: 533269 - DNA, 15 bp, Homo sapiens
gagaatcacctgagg

SEQ ID NO: 533270 - DNA, 15 bp, Homo sapiens
ggagaatcacctgag

SEQ ID NO: 533271 - DNA, 15 bp, Homo sapiens
gggagaatcacctga

SEQ ID NO: 533272 - DNA, 15 bp, Homo sapiens
cgggagaatcacctg

SEQ ID NO: 533273 - DNA, 15 bp, Homo sapiens
gcgggagaatcacct

SEQ ID NO: 533274 - DNA, 15 bp, Homo sapiens
ggcgggagaatcacc

SEQ ID NO: 533275 - DNA, 15 bp, Homo sapiens
aggcgggagaatcac

SEQ ID NO: 533276 - DNA, 15 bp, Homo sapiens
gaggcgggagaatca

SEQ ID NO: 533277 - DNA, 15 bp, Homo sapiens
tgaggcgggagaatc

SEQ ID NO: 533278 - DNA, 15 bp, Homo sapiens
ctgaggcgggagaat

SEQ ID NO: 533279 - DNA, 15 bp, Homo sapiens
gctgaggcgggagaa

SEQ ID NO: 533280 - DNA, 15 bp, Homo sapiens
ggctgaggcgggaga

SEQ ID NO: 533281 - DNA, 15 bp, Homo sapiens
gaggctgaggcggga

SEQ ID NO: 533282 - DNA, 15 bp, Homo sapiens
ggaggctgaggcggg

SEQ ID NO: 533283 - DNA, 15 bp, Homo sapiens
gggaggctgaggcgg

SEQ ID NO: 533284 - DNA, 15 bp, Homo sapiens
tgggaggctgaggcg

SEQ ID NO: 533285 - DNA, 15 bp, Homo sapiens
ttgggaggctgaggc

SEQ ID NO: 533286 - DNA, 15 bp, Homo sapiens
tttgggaggctgagg

SEQ ID NO: 533287 - DNA, 15 bp, Homo sapiens
ccactttgggaggct

SEQ ID NO: 533288 - DNA, 15 bp, Homo sapiens
accactttgggaggc

SEQ ID NO: 533289 - DNA, 15 bp, Homo sapiens
caccactttgggagg

SEQ ID NO: 533290 - DNA, 15 bp, Homo sapiens
ccaccactttgggag

SEQ ID NO: 533291 - DNA, 15 bp, Homo sapiens
cccaccactttggga

SEQ ID NO: 533292 - DNA, 15 bp, Homo sapiens
tcccaccactttggg

SEQ ID NO: 533293 - DNA, 15 bp, Homo sapiens
atcccaccactttgg

SEQ ID NO: 533294 - DNA, 15 bp, Homo sapiens
aatcccaccactttg

SEQ ID NO: 533295 - DNA, 15 bp, Homo sapiens
taatcccaccacttt

SEQ ID NO: 533296 - DNA, 15 bp, Homo sapiens
gtaatcccaccactt

SEQ ID NO: 533297 - DNA, 15 bp, Homo sapiens
tgtaatcccaccact

SEQ ID NO: 533298 - DNA, 15 bp, Homo sapiens
ctgtaatcccaccac

SEQ ID NO: 533299 - DNA, 15 bp, Homo sapiens
cctgtaatcccacca

SEQ ID NO: 533300 - DNA, 15 bp, Homo sapiens
gcctgtaatcccacc

SEQ ID NO: 533301 - DNA, 15 bp, Homo sapiens
cgcctgtaatcccac

SEQ ID NO: 533302 - DNA, 15 bp, Homo sapiens
agtggctcacgcctg

SEQ ID NO: 533303 - DNA, 15 bp, Homo sapiens
cagtggctcacgcct

SEQ ID NO: 533304 - DNA, 15 bp, Homo sapiens
gcagtggctcacgcc

SEQ ID NO: 533305 - DNA, 15 bp, Homo sapiens
cgcagtggctcacgc

SEQ ID NO: 533306 - DNA, 15 bp, Homo sapiens
gcgcagtggctcacg

SEQ ID NO: 533307 - DNA, 15 bp, Homo sapiens
ggcgcagtggctcac

SEQ ID NO: 533308 - DNA, 15 bp, Homo sapiens
gggcgcagtggctca

SEQ ID NO: 533309 - DNA, 15 bp, Homo sapiens
cgggcgcagtggctc

SEQ ID NO: 533310 - DNA, 15 bp, Homo sapiens
ccgggcgcagtggct

SEQ ID NO: 533311 - DNA, 15 bp, Homo sapiens
gccgggcgcagtggc

SEQ ID NO: 533312 - DNA, 15 bp, Homo sapiens
ggccgggcgcagtgg

SEQ ID NO: 533313 - DNA, 15 bp, Homo sapiens
aggccgggcgcagtg

SEQ ID NO: 533314 - DNA, 15 bp, Homo sapiens
caggccgggcgcagt

SEQ ID NO: 533315 - DNA, 15 bp, Homo sapiens
tcaggccgggcgcag

SEQ ID NO: 533316 - DNA, 15 bp, Homo sapiens
atcaggccgggcgca

SEQ ID NO: 533317 - DNA, 15 bp, Homo sapiens
gatcaggccgggcgc

SEQ ID NO: 533318 - DNA, 15 bp, Homo sapiens
ggatcaggccgggcg

SEQ ID NO: 533319 - DNA, 15 bp, Homo sapiens
gggatcaggccgggc

SEQ ID NO: 533320 - DNA, 15 bp, Homo sapiens
tgggatcaggccggg

SEQ ID NO: 533321 - DNA, 15 bp, Homo sapiens
atgggatcaggccgg

SEQ ID NO: 533322 - DNA, 15 bp, Homo sapiens
tatgggatcaggccg

SEQ ID NO: 533323 - DNA, 15 bp, Homo sapiens
atatgggatcaggcc

SEQ ID NO: 533324 - DNA, 15 bp, Homo sapiens
tatatgggatcaggc

SEQ ID NO: 533325 - DNA, 15 bp, Homo sapiens
atatatgggatcagg

SEQ ID NO: 533326 - DNA, 15 bp, Homo sapiens
aatatatgggatcag

SEQ ID NO: 533327 - DNA, 15 bp, Homo sapiens
aaatatatgggatca

SEQ ID NO: 533328 - DNA, 15 bp, Homo sapiens
aaaatatatgggatc

SEQ ID NO: 533329 - DNA, 15 bp, Homo sapiens
taaaatatatgggat

SEQ ID NO: 533330 - DNA, 15 bp, Homo sapiens
ttaaaatatatggga

SEQ ID NO: 533331 - DNA, 15 bp, Homo sapiens
tttaaaatatatggg

SEQ ID NO: 533332 - DNA, 15 bp, Homo sapiens
atttaaaatatatgg

SEQ ID NO: 533333 - DNA, 15 bp, Homo sapiens
gatttaaaatatatg

SEQ ID NO: 533334 - DNA, 15 bp, Homo sapiens
tgatttaaaatatat

SEQ ID NO: 533335 - DNA, 15 bp, Homo sapiens
atgatttaaaatata

SEQ ID NO: 533336 - DNA, 15 bp, Homo sapiens
gatgatttaaaatat

SEQ ID NO: 533337 - DNA, 15 bp, Homo sapiens
agatgatttaaaata

SEQ ID NO: 533338 - DNA, 15 bp, Homo sapiens
cagatgatttaaaat

SEQ ID NO: 533339 - DNA, 15 bp, Homo sapiens
acagatgatttaaaa

SEQ ID NO: 533340 - DNA, 15 bp, Homo sapiens
tacagatgatttaaa

SEQ ID NO: 533341 - DNA, 15 bp, Homo sapiens
ctacagatgatttaa

SEQ ID NO: 533342 - DNA, 15 bp, Homo sapiens
tctacagatgattta

SEQ ID NO: 533343 - DNA, 15 bp, Homo sapiens
atctacagatgattt

SEQ ID NO: 533344 - DNA, 15 bp, Homo sapiens
aatctacagatgatt

SEQ ID NO: 533345 - DNA, 15 bp, Homo sapiens
taatctacagatgat

SEQ ID NO: 533346 - DNA, 15 bp, Homo sapiens
gtaatctacagatga

SEQ ID NO: 533347 - DNA, 15 bp, Homo sapiens
agtaatctacagatg

SEQ ID NO: 533348 - DNA, 15 bp, Homo sapiens
aagtaatctacagat

SEQ ID NO: 533349 - DNA, 15 bp, Homo sapiens
taagtaatctacaga

SEQ ID NO: 533350 - DNA, 15 bp, Homo sapiens
ataagtaatctacag

SEQ ID NO: 533351 - DNA, 15 bp, Homo sapiens
tataagtaatctaca

SEQ ID NO: 533352 - DNA, 15 bp, Homo sapiens
ctataagtaatctac

SEQ ID NO: 533353 - DNA, 15 bp, Homo sapiens
tctataagtaatcta

SEQ ID NO: 533354 - DNA, 15 bp, Homo sapiens
atctataagtaatct

SEQ ID NO: 533355 - DNA, 15 bp, Homo sapiens
aatctataagtaatc

SEQ ID NO: 533356 - DNA, 15 bp, Homo sapiens
taatctataagtaat

SEQ ID NO: 533357 - DNA, 15 bp, Homo sapiens
ttaatctataagtaa

SEQ ID NO: 533358 - DNA, 15 bp, Homo sapiens
attaatctataagta

SEQ ID NO: 533359 - DNA, 15 bp, Homo sapiens
tattaatctataagt

SEQ ID NO: 533360 - DNA, 15 bp, Homo sapiens
gtattaatctataag

SEQ ID NO: 533361 - DNA, 15 bp, Homo sapiens
tgtattaatctataa

SEQ ID NO: 533362 - DNA, 15 bp, Homo sapiens
ctgtattaatctata

SEQ ID NO: 533363 - DNA, 15 bp, Homo sapiens
cctgtattaatctat

SEQ ID NO: 533364 - DNA, 15 bp, Homo sapiens
gcctgtattaatcta

SEQ ID NO: 533365 - DNA, 15 bp, Homo sapiens
ggcctgtattaatct

SEQ ID NO: 533366 - DNA, 15 bp, Homo sapiens
tggcctgtattaatc

SEQ ID NO: 533367 - DNA, 15 bp, Homo sapiens
ctggcctgtattaat

SEQ ID NO: 533368 - DNA, 15 bp, Homo sapiens
tctggcctgtattaa

SEQ ID NO: 533369 - DNA, 15 bp, Homo sapiens
gtctggcctgtatta

SEQ ID NO: 533370 - DNA, 15 bp, Homo sapiens
tgtctggcctgtatt

SEQ ID NO: 533371 - DNA, 15 bp, Homo sapiens
atgtctggcctgtat

SEQ ID NO: 533372 - DNA, 15 bp, Homo sapiens
catgtctggcctgta

SEQ ID NO: 533373 - DNA, 15 bp, Homo sapiens
ccatgtctggcctgt

SEQ ID NO: 533374 - DNA, 15 bp, Homo sapiens
gccatgtctggcctg

SEQ ID NO: 533375 - DNA, 15 bp, Homo sapiens
tgccatgtctggcct

SEQ ID NO: 533376 - DNA, 15 bp, Homo sapiens
gtgccatgtctggcc

SEQ ID NO: 533377 - DNA, 15 bp, Homo sapiens
tgtgccatgtctggc

SEQ ID NO: 533378 - DNA, 15 bp, Homo sapiens
atgtgccatgtctgg

SEQ ID NO: 533379 - DNA, 15 bp, Homo sapiens
tatgtgccatgtctg

SEQ ID NO: 533380 - DNA, 15 bp, Homo sapiens
gtatgtgccatgtct

SEQ ID NO: 533381 - DNA, 15 bp, Homo sapiens
agtatgtgccatgtc

SEQ ID NO: 533382 - DNA, 15 bp, Homo sapiens
aagtatgtgccatgt

SEQ ID NO: 533383 - DNA, 15 bp, Homo sapiens
taagtatgtgccatg

SEQ ID NO: 533384 - DNA, 15 bp, Homo sapiens
ataagtatgtgccat

SEQ ID NO: 533385 - DNA, 15 bp, Homo sapiens
tataagtatgtgcca

SEQ ID NO: 533386 - DNA, 15 bp, Homo sapiens
ctataagtatgtgcc

SEQ ID NO: 533387 - DNA, 15 bp, Homo sapiens
actataagtatgtgc

SEQ ID NO: 533388 - DNA, 15 bp, Homo sapiens
gactataagtatgtg

SEQ ID NO: 533389 - DNA, 15 bp, Homo sapiens
ggactataagtatgt

SEQ ID NO: 533390 - DNA, 15 bp, Homo sapiens
gggactataagtatg

SEQ ID NO: 533391 - DNA, 15 bp, Homo sapiens
tgggactataagtat

SEQ ID NO: 533392 - DNA, 15 bp, Homo sapiens
ctgggactataagta

SEQ ID NO: 533393 - DNA, 15 bp, Homo sapiens
gctgggactataagt

SEQ ID NO: 533394 - DNA, 15 bp, Homo sapiens
agctgggactataag

SEQ ID NO: 533395 - DNA, 15 bp, Homo sapiens
tagctgggactataa

SEQ ID NO: 533396 - DNA, 15 bp, Homo sapiens
gtagctgggactata

SEQ ID NO: 533397 - DNA, 15 bp, Homo sapiens
agtagctgggactat

SEQ ID NO: 533398 - DNA, 15 bp, Homo sapiens
aagtagctgggacta

SEQ ID NO: 533399 - DNA, 15 bp, Homo sapiens
taagtagctgggact

SEQ ID NO: 533400 - DNA, 15 bp, Homo sapiens
ctaagtagctgggac

SEQ ID NO: 533401 - DNA, 15 bp, Homo sapiens
cctaagtagctggga

SEQ ID NO: 533402 - DNA, 15 bp, Homo sapiens
tcctaagtagctggg

SEQ ID NO: 533403 - DNA, 15 bp, Homo sapiens
ctcctaagtagctgg

SEQ ID NO: 533404 - DNA, 15 bp, Homo sapiens
cctcctaagtagctg

SEQ ID NO: 533405 - DNA, 15 bp, Homo sapiens
gcctcctaagtagct

SEQ ID NO: 533406 - DNA, 15 bp, Homo sapiens
gcctcagcctcctaa

SEQ ID NO: 533407 - DNA, 15 bp, Homo sapiens
tgcctcagcctccta

SEQ ID NO: 533408 - DNA, 15 bp, Homo sapiens
ttgcctcagcctcct

SEQ ID NO: 533409 - DNA, 15 bp, Homo sapiens
cttgcctcagcctcc

SEQ ID NO: 533410 - DNA, 15 bp, Homo sapiens
tcttgcctcagcctc

SEQ ID NO: 533411 - DNA, 15 bp, Homo sapiens
ctcttgcctcagcct

SEQ ID NO: 533412 - DNA, 15 bp, Homo sapiens
cctcttgcctcagcc

SEQ ID NO: 533413 - DNA, 15 bp, Homo sapiens
tcctcttgcctcagc

SEQ ID NO: 533414 - DNA, 15 bp, Homo sapiens
atcctcttgcctcag

SEQ ID NO: 533415 - DNA, 15 bp, Homo sapiens
aatcctcttgcctca

SEQ ID NO: 533416 - DNA, 15 bp, Homo sapiens
caatcctcttgcctc

SEQ ID NO: 533417 - DNA, 15 bp, Homo sapiens
gcaatcctcttgcct

SEQ ID NO: 533418 - DNA, 15 bp, Homo sapiens
agcaatcctcttgcc

SEQ ID NO: 533419 - DNA, 15 bp, Homo sapiens
aagcaatcctcttgc

SEQ ID NO: 533420 - DNA, 15 bp, Homo sapiens
taagcaatcctcttg

SEQ ID NO: 533421 - DNA, 15 bp, Homo sapiens
ttaagcaatcctctt

SEQ ID NO: 533422 - DNA, 15 bp, Homo sapiens
cttaagcaatcctct

SEQ ID NO: 533423 - DNA, 15 bp, Homo sapiens
gcttaagcaatcctc

SEQ ID NO: 533424 - DNA, 15 bp, Homo sapiens
ggcttaagcaatcct

SEQ ID NO: 533425 - DNA, 15 bp, Homo sapiens
gggcttaagcaatcc

SEQ ID NO: 533426 - DNA, 15 bp, Homo sapiens
tgggcttaagcaatc

SEQ ID NO: 533427 - DNA, 15 bp, Homo sapiens
ctgggcttaagcaat

SEQ ID NO: 533428 - DNA, 15 bp, Homo sapiens
cctgggcttaagcaa

SEQ ID NO: 533429 - DNA, 15 bp, Homo sapiens
tcctgggcttaagca

SEQ ID NO: 533430 - DNA, 15 bp, Homo sapiens
ctcctgggcttaagc

SEQ ID NO: 533431 - DNA, 15 bp, Homo sapiens
actcctgggcttaag

SEQ ID NO: 533432 - DNA, 15 bp, Homo sapiens
aactcctgggcttaa

SEQ ID NO: 533433 - DNA, 15 bp, Homo sapiens
gaactcctgggctta

SEQ ID NO: 533434 - DNA, 15 bp, Homo sapiens
cgaactcctgggctt

SEQ ID NO: 533435 - DNA, 15 bp, Homo sapiens
tcgaactcctgggct

SEQ ID NO: 533436 - DNA, 15 bp, Homo sapiens
ctcgaactcctgggc

SEQ ID NO: 533437 - DNA, 15 bp, Homo sapiens
cctcgaactcctggg

SEQ ID NO: 533438 - DNA, 15 bp, Homo sapiens
gcctcgaactcctgg

SEQ ID NO: 533439 - DNA, 15 bp, Homo sapiens
agcctcgaactcctg

SEQ ID NO: 533440 - DNA, 15 bp, Homo sapiens
cagcctcgaactcct

SEQ ID NO: 533441 - DNA, 15 bp, Homo sapiens
gcagcctcgaactcc

SEQ ID NO: 533442 - DNA, 15 bp, Homo sapiens
tgcagcctcgaactc

SEQ ID NO: 533443 - DNA, 15 bp, Homo sapiens
ctgcagcctcgaact

SEQ ID NO: 533444 - DNA, 15 bp, Homo sapiens
actgcagcctcgaac

SEQ ID NO: 533445 - DNA, 15 bp, Homo sapiens
cactgcagcctcgaa

SEQ ID NO: 533446 - DNA, 15 bp, Homo sapiens
tcactgcagcctcga

SEQ ID NO: 533447 - DNA, 15 bp, Homo sapiens
ctcactgcagcctcg

SEQ ID NO: 533448 - DNA, 15 bp, Homo sapiens
gctcactgcagcctc

SEQ ID NO: 533449 - DNA, 15 bp, Homo sapiens
agctcactgcagcct

SEQ ID NO: 533450 - DNA, 15 bp, Homo sapiens
tagctcactgcagcc

SEQ ID NO: 533451 - DNA, 15 bp, Homo sapiens
atagctcactgcagc

SEQ ID NO: 533452 - DNA, 15 bp, Homo sapiens
catagctcactgcag

SEQ ID NO: 533453 - DNA, 15 bp, Homo sapiens
tcatagctcactgca

SEQ ID NO: 533454 - DNA, 15 bp, Homo sapiens
atcatagctcactgc

SEQ ID NO: 533455 - DNA, 15 bp, Homo sapiens
gatcatagctcactg

SEQ ID NO: 533456 - DNA, 15 bp, Homo sapiens
tgatcatagctcact

SEQ ID NO: 533457 - DNA, 15 bp, Homo sapiens
gtgatcatagctcac

SEQ ID NO: 533458 - DNA, 15 bp, Homo sapiens
tgtgatcatagctca

SEQ ID NO: 533459 - DNA, 15 bp, Homo sapiens
gtgtgatcatagctc

SEQ ID NO: 533460 - DNA, 15 bp, Homo sapiens
ggtgtgatcatagct

SEQ ID NO: 533461 - DNA, 15 bp, Homo sapiens
tggtgtgatcatagc

SEQ ID NO: 533462 - DNA, 15 bp, Homo sapiens
gtggtgtgatcatag

SEQ ID NO: 533463 - DNA, 15 bp, Homo sapiens
tgtggtgtgatcata

SEQ ID NO: 533464 - DNA, 15 bp, Homo sapiens
ctgtggtgtgatcat

SEQ ID NO: 533465 - DNA, 15 bp, Homo sapiens
gctgtggtgtgatca

SEQ ID NO: 533466 - DNA, 15 bp, Homo sapiens
tgctgtggtgtgatc

SEQ ID NO: 533467 - DNA, 15 bp, Homo sapiens
gtgctgtggtgtgat

SEQ ID NO: 533468 - DNA, 15 bp, Homo sapiens
agtgctgtggtgtga

SEQ ID NO: 533469 - DNA, 15 bp, Homo sapiens
gagtgctgtggtgtg

SEQ ID NO: 533470 - DNA, 15 bp, Homo sapiens
ggagtgctgtggtgt

SEQ ID NO: 533471 - DNA, 15 bp, Homo sapiens
tggagtgctgtggtg

SEQ ID NO: 533472 - DNA, 15 bp, Homo sapiens
ctggagtgctgtggt

SEQ ID NO: 533473 - DNA, 15 bp, Homo sapiens
gctggagtgctgtgg

SEQ ID NO: 533474 - DNA, 15 bp, Homo sapiens
ggctggagtgctgtg

SEQ ID NO: 533475 - DNA, 15 bp, Homo sapiens
aggctggagtgctgt

SEQ ID NO: 533476 - DNA, 15 bp, Homo sapiens
caggctggagtgctg

SEQ ID NO: 533477 - DNA, 15 bp, Homo sapiens
ccaggctggagtgct

SEQ ID NO: 533478 - DNA, 15 bp, Homo sapiens
ctcattctgtcaccc

SEQ ID NO: 533479 - DNA, 15 bp, Homo sapiens
cctcattctgtcacc

SEQ ID NO: 533480 - DNA, 15 bp, Homo sapiens
gcctcattctgtcac

SEQ ID NO: 533481 - DNA, 15 bp, Homo sapiens
ggcctcattctgtca

SEQ ID NO: 533482 - DNA, 15 bp, Homo sapiens
gggcctcattctgtc

SEQ ID NO: 533483 - DNA, 15 bp, Homo sapiens
agggcctcattctgt

SEQ ID NO: 533484 - DNA, 15 bp, Homo sapiens
aagggcctcattctg

SEQ ID NO: 533485 - DNA, 15 bp, Homo sapiens
aaagggcctcattct

SEQ ID NO: 533486 - DNA, 15 bp, Homo sapiens
aaaagggcctcattc

SEQ ID NO: 533487 - DNA, 15 bp, Homo sapiens
aaaaagggcctcatt

SEQ ID NO: 533488 - DNA, 15 bp, Homo sapiens
aaaaaagggcctcat

SEQ ID NO: 533489 - DNA, 15 bp, Homo sapiens
aaaaaaagggcctca

SEQ ID NO: 533490 - DNA, 15 bp, Homo sapiens
caaaaaaagggcctc

SEQ ID NO: 533491 - DNA, 15 bp, Homo sapiens
acaaaaaaagggcct

SEQ ID NO: 533492 - DNA, 15 bp, Homo sapiens
cacaaaaaaagggcc

SEQ ID NO: 533493 - DNA, 15 bp, Homo sapiens
acacaaaaaaagggc

SEQ ID NO: 533494 - DNA, 15 bp, Homo sapiens
aacacaaaaaaaggg

SEQ ID NO: 533495 - DNA, 15 bp, Homo sapiens
aaacacaaaaaaagg

SEQ ID NO: 533496 - DNA, 15 bp, Homo sapiens
aaaacacaaaaaaag

SEQ ID NO: 533497 - DNA, 15 bp, Homo sapiens
taaaacacaaaaaaa

SEQ ID NO: 533498 - DNA, 15 bp, Homo sapiens
ttaaaacacaaaaaa

SEQ ID NO: 533499 - DNA, 15 bp, Homo sapiens
cttaaaacacaaaaa

SEQ ID NO: 533500 - DNA, 15 bp, Homo sapiens
tcttaaaacacaaaa

SEQ ID NO: 533501 - DNA, 15 bp, Homo sapiens
ttcttaaaacacaaa

SEQ ID NO: 533502 - DNA, 15 bp, Homo sapiens
tttcttaaaacacaa

SEQ ID NO: 533503 - DNA, 15 bp, Homo sapiens
ttttcttaaaacaca

SEQ ID NO: 533504 - DNA, 15 bp, Homo sapiens
tttttcttaaaacac

SEQ ID NO: 533505 - DNA, 15 bp, Homo sapiens
ttttttcttaaaaca

SEQ ID NO: 533506 - DNA, 15 bp, Homo sapiens
cttttttcttaaaac

SEQ ID NO: 533507 - DNA, 15 bp, Homo sapiens
tcttttttcttaaaa

SEQ ID NO: 533508 - DNA, 15 bp, Homo sapiens
ttcttttttcttaaa

SEQ ID NO: 533509 - DNA, 15 bp, Homo sapiens
tttcttttttcttaa

SEQ ID NO: 533510 - DNA, 15 bp, Homo sapiens
ttttcttttttctta

SEQ ID NO: 533511 - DNA, 15 bp, Homo sapiens
tttttcttttttctt

SEQ ID NO: 533512 - DNA, 15 bp, Homo sapiens
ctttttcttttttct

SEQ ID NO: 533513 - DNA, 15 bp, Homo sapiens
gctttttcttttttc

SEQ ID NO: 533514 - DNA, 15 bp, Homo sapiens
tgctttttctttttt

SEQ ID NO: 533515 - DNA, 15 bp, Homo sapiens
gtgctttttcttttt

SEQ ID NO: 533516 - DNA, 15 bp, Homo sapiens
agtgctttttctttt

SEQ ID NO: 533517 - DNA, 15 bp, Homo sapiens
tagtgctttttcttt

SEQ ID NO: 533518 - DNA, 15 bp, Homo sapiens
ttagtgctttttctt

SEQ ID NO: 533519 - DNA, 15 bp, Homo sapiens
attagtgctttttct

SEQ ID NO: 533520 - DNA, 15 bp, Homo sapiens
tattagtgctttttc

SEQ ID NO: 533521 - DNA, 15 bp, Homo sapiens
gtattagtgcttttt

SEQ ID NO: 533522 - DNA, 15 bp, Homo sapiens
cgtattagtgctttt

SEQ ID NO: 533523 - DNA, 15 bp, Homo sapiens
ccgtattagtgcttt

SEQ ID NO: 533524 - DNA, 15 bp, Homo sapiens
accgtattagtgctt

SEQ ID NO: 533525 - DNA, 15 bp, Homo sapiens
caccgtattagtgct

SEQ ID NO: 533526 - DNA, 15 bp, Homo sapiens
acaccgtattagtgc

SEQ ID NO: 533527 - DNA, 15 bp, Homo sapiens
tacaccgtattagtg

SEQ ID NO: 533528 - DNA, 15 bp, Homo sapiens
ttacaccgtattagt

SEQ ID NO: 533529 - DNA, 15 bp, Homo sapiens
tttacaccgtattag

SEQ ID NO: 533530 - DNA, 15 bp, Homo sapiens
atttacaccgtatta

SEQ ID NO: 533531 - DNA, 15 bp, Homo sapiens
tatttacaccgtatt

SEQ ID NO: 533532 - DNA, 15 bp, Homo sapiens
ttatttacaccgtat

SEQ ID NO: 533533 - DNA, 15 bp, Homo sapiens
attatttacaccgta

SEQ ID NO: 533534 - DNA, 15 bp, Homo sapiens
aattatttacaccgt

SEQ ID NO: 533535 - DNA, 15 bp, Homo sapiens
caattatttacaccg

SEQ ID NO: 533536 - DNA, 15 bp, Homo sapiens
acaattatttacacc

SEQ ID NO: 533537 - DNA, 15 bp, Homo sapiens
aacaattatttacac

SEQ ID NO: 533538 - DNA, 15 bp, Homo sapiens
taacaattatttaca

SEQ ID NO: 533539 - DNA, 15 bp, Homo sapiens
gtaacaattatttac

SEQ ID NO: 533540 - DNA, 15 bp, Homo sapiens
tgtaacaattattta

SEQ ID NO: 533541 - DNA, 15 bp, Homo sapiens
gtgtaacaattattt

SEQ ID NO: 533542 - DNA, 15 bp, Homo sapiens
agtgtaacaattatt

SEQ ID NO: 533543 - DNA, 15 bp, Homo sapiens
cagtgtaacaattat

SEQ ID NO: 533544 - DNA, 15 bp, Homo sapiens
acagtgtaacaatta

SEQ ID NO: 533545 - DNA, 15 bp, Homo sapiens
aacagtgtaacaatt

SEQ ID NO: 533546 - DNA, 15 bp, Homo sapiens
aaacagtgtaacaat

SEQ ID NO: 533547 - DNA, 15 bp, Homo sapiens
aaaacagtgtaacaa

SEQ ID NO: 533548 - DNA, 15 bp, Homo sapiens
caaaacagtgtaaca

SEQ ID NO: 533549 - DNA, 15 bp, Homo sapiens
tcaaaacagtgtaac

SEQ ID NO: 533550 - DNA, 15 bp, Homo sapiens
ttcaaaacagtgtaa

SEQ ID NO: 533551 - DNA, 15 bp, Homo sapiens
attcaaaacagtgta

SEQ ID NO: 533552 - DNA, 15 bp, Homo sapiens
aattcaaaacagtgt

SEQ ID NO: 533553 - DNA, 15 bp, Homo sapiens
caattcaaaacagtg

SEQ ID NO: 533554 - DNA, 15 bp, Homo sapiens
acaattcaaaacagt

SEQ ID NO: 533555 - DNA, 15 bp, Homo sapiens
tacaattcaaaacag

SEQ ID NO: 533556 - DNA, 15 bp, Homo sapiens
ctacaattcaaaaca

SEQ ID NO: 533557 - DNA, 15 bp, Homo sapiens
actacaattcaaaac

SEQ ID NO: 533558 - DNA, 15 bp, Homo sapiens
aactacaattcaaaa

SEQ ID NO: 533559 - DNA, 15 bp, Homo sapiens
aaactacaattcaaa

SEQ ID NO: 533560 - DNA, 15 bp, Homo sapiens
aaaactacaattcaa

SEQ ID NO: 533561 - DNA, 15 bp, Homo sapiens
aaaaactacaattca

SEQ ID NO: 533562 - DNA, 15 bp, Homo sapiens
aaaaaactacaattc

SEQ ID NO: 533563 - DNA, 15 bp, Homo sapiens
aaaaaaactacaatt

SEQ ID NO: 533564 - DNA, 15 bp, Homo sapiens
gaaaaaaactacaat

SEQ ID NO: 533565 - DNA, 15 bp, Homo sapiens
ggaaaaaaactacaa

SEQ ID NO: 533566 - DNA, 15 bp, Homo sapiens
gggaaaaaaactaca

SEQ ID NO: 533567 - DNA, 15 bp, Homo sapiens
ggggaaaaaaactac

SEQ ID NO: 533568 - DNA, 15 bp, Homo sapiens
aggggaaaaaaacta

SEQ ID NO: 533569 - DNA, 15 bp, Homo sapiens
taggggaaaaaaact

SEQ ID NO: 533570 - DNA, 15 bp, Homo sapiens
ttaggggaaaaaaac

SEQ ID NO: 533571 - DNA, 15 bp, Homo sapiens
tttaggggaaaaaaa

SEQ ID NO: 533572 - DNA, 15 bp, Homo sapiens
atttaggggaaaaaa

SEQ ID NO: 533573 - DNA, 15 bp, Homo sapiens
tatttaggggaaaaa

SEQ ID NO: 533574 - DNA, 15 bp, Homo sapiens
atatttaggggaaaa

SEQ ID NO: 533575 - DNA, 15 bp, Homo sapiens
aatatttaggggaaa

SEQ ID NO: 533576 - DNA, 15 bp, Homo sapiens
aaatatttaggggaa

SEQ ID NO: 533577 - DNA, 15 bp, Homo sapiens
aaaatatttagggga

SEQ ID NO: 533578 - DNA, 15 bp, Homo sapiens
aaaaatatttagggg

SEQ ID NO: 533579 - DNA, 15 bp, Homo sapiens
caaaaatatttaggg

SEQ ID NO: 533580 - DNA, 15 bp, Homo sapiens
tcaaaaatatttagg

SEQ ID NO: 533581 - DNA, 15 bp, Homo sapiens
atcaaaaatatttag

SEQ ID NO: 533582 - DNA, 15 bp, Homo sapiens
gatcaaaaatattta

SEQ ID NO: 533583 - DNA, 15 bp, Homo sapiens
ggatcaaaaatattt

SEQ ID NO: 533584 - DNA, 15 bp, Homo sapiens
tggatcaaaaatatt

SEQ ID NO: 533585 - DNA, 15 bp, Homo sapiens
gtggatcaaaaatat

SEQ ID NO: 533586 - DNA, 15 bp, Homo sapiens
ggtggatcaaaaata

SEQ ID NO: 533587 - DNA, 15 bp, Homo sapiens
gggtggatcaaaaat

SEQ ID NO: 533588 - DNA, 15 bp, Homo sapiens
agggtggatcaaaaa

SEQ ID NO: 533589 - DNA, 15 bp, Homo sapiens
aagggtggatcaaaa

SEQ ID NO: 533590 - DNA, 15 bp, Homo sapiens
caagggtggatcaaa

SEQ ID NO: 533591 - DNA, 15 bp, Homo sapiens
ccaagggtggatcaa

SEQ ID NO: 533592 - DNA, 15 bp, Homo sapiens
accaagggtggatca

SEQ ID NO: 533593 - DNA, 15 bp, Homo sapiens
aaccaagggtggatc

SEQ ID NO: 533594 - DNA, 15 bp, Homo sapiens
caaccaagggtggat

SEQ ID NO: 533595 - DNA, 15 bp, Homo sapiens
tcaaccaagggtgga

SEQ ID NO: 533596 - DNA, 15 bp, Homo sapiens
ctcaaccaagggtgg

SEQ ID NO: 533597 - DNA, 15 bp, Homo sapiens
actcaaccaagggtg

SEQ ID NO: 533598 - DNA, 15 bp, Homo sapiens
gactcaaccaagggt

SEQ ID NO: 533599 - DNA, 15 bp, Homo sapiens
agactcaaccaaggg

SEQ ID NO: 533600 - DNA, 15 bp, Homo sapiens
cagactcaaccaagg

SEQ ID NO: 533601 - DNA, 15 bp, Homo sapiens
acagactcaaccaag

SEQ ID NO: 533602 - DNA, 15 bp, Homo sapiens
cacagactcaaccaa

SEQ ID NO: 533603 - DNA, 15 bp, Homo sapiens
ccacagactcaacca

SEQ ID NO: 533604 - DNA, 15 bp, Homo sapiens
tccacagactcaacc

SEQ ID NO: 533605 - DNA, 15 bp, Homo sapiens
atccacagactcaac

SEQ ID NO: 533606 - DNA, 15 bp, Homo sapiens
tatccacagactcaa

SEQ ID NO: 533607 - DNA, 15 bp, Homo sapiens
atatccacagactca

SEQ ID NO: 533608 - DNA, 15 bp, Homo sapiens
catatccacagactc

SEQ ID NO: 533609 - DNA, 15 bp, Homo sapiens
tcatatccacagact

SEQ ID NO: 533610 - DNA, 15 bp, Homo sapiens
ttcatatccacagac

SEQ ID NO: 533611 - DNA, 15 bp, Homo sapiens
cttcatatccacaga

SEQ ID NO: 533612 - DNA, 15 bp, Homo sapiens
ccttcatatccacag

SEQ ID NO: 533613 - DNA, 15 bp, Homo sapiens
cccttcatatccaca

SEQ ID NO: 533614 - DNA, 15 bp, Homo sapiens
gcccttcatatccac

SEQ ID NO: 533615 - DNA, 15 bp, Homo sapiens
agcccttcatatcca

SEQ ID NO: 533616 - DNA, 15 bp, Homo sapiens
cagcccttcatatcc

SEQ ID NO: 533617 - DNA, 15 bp, Homo sapiens
ccagcccttcatatc

SEQ ID NO: 533618 - DNA, 15 bp, Homo sapiens
gccagcccttcatat

SEQ ID NO: 533619 - DNA, 15 bp, Homo sapiens
agccagcccttcata

SEQ ID NO: 533620 - DNA, 15 bp, Homo sapiens
cagccagcccttcat

SEQ ID NO: 533621 - DNA, 15 bp, Homo sapiens
acagccagcccttca

SEQ ID NO: 533622 - DNA, 15 bp, Homo sapiens
tacagccagcccttc

SEQ ID NO: 533623 - DNA, 15 bp, Homo sapiens
atacagccagccctt

SEQ ID NO: 533624 - DNA, 15 bp, Homo sapiens
gatacagccagccct

SEQ ID NO: 533625 - DNA, 15 bp, Homo sapiens
agatacagccagccc

SEQ ID NO: 533626 - DNA, 15 bp, Homo sapiens
cagatacagccagcc

SEQ ID NO: 533627 - DNA, 15 bp, Homo sapiens
ccagatacagccagc

SEQ ID NO: 533628 - DNA, 15 bp, Homo sapiens
tccagatacagccag

SEQ ID NO: 533629 - DNA, 15 bp, Homo sapiens
gtccagatacagcca

SEQ ID NO: 533630 - DNA, 15 bp, Homo sapiens
ggtccagatacagcc

SEQ ID NO: 533631 - DNA, 15 bp, Homo sapiens
aggtccagatacagc

SEQ ID NO: 533632 - DNA, 15 bp, Homo sapiens
caggtccagatacag

SEQ ID NO: 533633 - DNA, 15 bp, Homo sapiens
tcaggtccagataca

SEQ ID NO: 533634 - DNA, 15 bp, Homo sapiens
atcaggtccagatac

SEQ ID NO: 533635 - DNA, 15 bp, Homo sapiens
gatcaggtccagata

SEQ ID NO: 533636 - DNA, 15 bp, Homo sapiens
agatcaggtccagat

SEQ ID NO: 533637 - DNA, 15 bp, Homo sapiens
gagatcaggtccaga

SEQ ID NO: 533638 - DNA, 15 bp, Homo sapiens
tgagatcaggtccag

SEQ ID NO: 533639 - DNA, 15 bp, Homo sapiens
ctgagatcaggtcca

SEQ ID NO: 533640 - DNA, 15 bp, Homo sapiens
cctgagatcaggtcc

SEQ ID NO: 533641 - DNA, 15 bp, Homo sapiens
ccctgagatcaggtc

SEQ ID NO: 533642 - DNA, 15 bp, Homo sapiens
gccctgagatcaggt

SEQ ID NO: 533643 - DNA, 15 bp, Homo sapiens
tgccctgagatcagg

SEQ ID NO: 533644 - DNA, 15 bp, Homo sapiens
ctgccctgagatcag

SEQ ID NO: 533645 - DNA, 15 bp, Homo sapiens
cctgccctgagatca

SEQ ID NO: 533646 - DNA, 15 bp, Homo sapiens
tcctgccctgagatc

SEQ ID NO: 533647 - DNA, 15 bp, Homo sapiens
ctcctgccctgagat

SEQ ID NO: 533648 - DNA, 15 bp, Homo sapiens
actcctgccctgaga

SEQ ID NO: 533649 - DNA, 15 bp, Homo sapiens
cactcctgccctgag

SEQ ID NO: 533650 - DNA, 15 bp, Homo sapiens
ccactcctgccctga

SEQ ID NO: 533651 - DNA, 15 bp, Homo sapiens
cccactcctgccctg

SEQ ID NO: 533652 - DNA, 15 bp, Homo sapiens
gcccactcctgccct

SEQ ID NO: 533653 - DNA, 15 bp, Homo sapiens
agcccactcctgccc

SEQ ID NO: 533654 - DNA, 15 bp, Homo sapiens
cagcccactcctgcc

SEQ ID NO: 533655 - DNA, 15 bp, Homo sapiens
ccagcccactcctgc

SEQ ID NO: 533656 - DNA, 15 bp, Homo sapiens
cccagcccactcctg

SEQ ID NO: 533657 - DNA, 15 bp, Homo sapiens
tcccagcccactcct

SEQ ID NO: 533658 - DNA, 15 bp, Homo sapiens
ttcccagcccactcc

SEQ ID NO: 533659 - DNA, 15 bp, Homo sapiens
gttcccagcccactc

SEQ ID NO: 533660 - DNA, 15 bp, Homo sapiens
tgttcccagcccact

SEQ ID NO: 533661 - DNA, 15 bp, Homo sapiens
ttgttcccagcccac

SEQ ID NO: 533662 - DNA, 15 bp, Homo sapiens
cttgttcccagccca

SEQ ID NO: 533663 - DNA, 15 bp, Homo sapiens
gcttgttcccagccc

SEQ ID NO: 533664 - DNA, 15 bp, Homo sapiens
cgcttgttcccagcc

SEQ ID NO: 533665 - DNA, 15 bp, Homo sapiens
ccgcttgttcccagc

SEQ ID NO: 533666 - DNA, 15 bp, Homo sapiens
accgcttgttcccag

SEQ ID NO: 533667 - DNA, 15 bp, Homo sapiens
caccgcttgttccca

SEQ ID NO: 533668 - DNA, 15 bp, Homo sapiens
acaccgcttgttccc

SEQ ID NO: 533669 - DNA, 15 bp, Homo sapiens
cacaccgcttgttcc

SEQ ID NO: 533670 - DNA, 15 bp, Homo sapiens
acacaccgcttgttc

SEQ ID NO: 533671 - DNA, 15 bp, Homo sapiens
tacacaccgcttgtt

SEQ ID NO: 533672 - DNA, 15 bp, Homo sapiens
ttacacaccgcttgt

SEQ ID NO: 533673 - DNA, 15 bp, Homo sapiens
cttacacaccgcttg

SEQ ID NO: 533674 - DNA, 15 bp, Homo sapiens
tcttacacaccgctt

SEQ ID NO: 533675 - DNA, 15 bp, Homo sapiens
ttcttacacaccgct

SEQ ID NO: 533676 - DNA, 15 bp, Homo sapiens
gttcttacacaccgc

SEQ ID NO: 533677 - DNA, 15 bp, Homo sapiens
agttcttacacaccg

SEQ ID NO: 533678 - DNA, 15 bp, Homo sapiens
cagttcttacacacc

SEQ ID NO: 533679 - DNA, 15 bp, Homo sapiens
acagttcttacacac

SEQ ID NO: 533680 - DNA, 15 bp, Homo sapiens
aacagttcttacaca

SEQ ID NO: 533681 - DNA, 15 bp, Homo sapiens
aaacagttcttacac

SEQ ID NO: 533682 - DNA, 15 bp, Homo sapiens
gaaacagttcttaca

SEQ ID NO: 533683 - DNA, 15 bp, Homo sapiens
agaaacagttcttac

SEQ ID NO: 533684 - DNA, 15 bp, Homo sapiens
cagaaacagttctta

SEQ ID NO: 533685 - DNA, 15 bp, Homo sapiens
ccagaaacagttctt

SEQ ID NO: 533686 - DNA, 15 bp, Homo sapiens
cccagaaacagttct

SEQ ID NO: 533687 - DNA, 15 bp, Homo sapiens
gcccagaaacagttc

SEQ ID NO: 533688 - DNA, 15 bp, Homo sapiens
tgcccagaaacagtt

SEQ ID NO: 533689 - DNA, 15 bp, Homo sapiens
ctgcccagaaacagt

SEQ ID NO: 533690 - DNA, 15 bp, Homo sapiens
tctgcccagaaacag

SEQ ID NO: 533691 - DNA, 15 bp, Homo sapiens
ttctgcccagaaaca

SEQ ID NO: 533692 - DNA, 15 bp, Homo sapiens
cttctgcccagaaac

SEQ ID NO: 533693 - DNA, 15 bp, Homo sapiens
gcttctgcccagaaa

SEQ ID NO: 533694 - DNA, 15 bp, Homo sapiens
tgcttctgcccagaa

SEQ ID NO: 533695 - DNA, 15 bp, Homo sapiens
ctgcttctgcccaga

SEQ ID NO: 533696 - DNA, 15 bp, Homo sapiens
gctgcttctgcccag

SEQ ID NO: 533697 - DNA, 15 bp, Homo sapiens
ggctgcttctgccca

SEQ ID NO: 533698 - DNA, 15 bp, Homo sapiens
gggctgcttctgccc

SEQ ID NO: 533699 - DNA, 15 bp, Homo sapiens
tgggctgcttctgcc

SEQ ID NO: 533700 - DNA, 15 bp, Homo sapiens
gtgggctgcttctgc

SEQ ID NO: 533701 - DNA, 15 bp, Homo sapiens
ggtgggctgcttctg

SEQ ID NO: 533702 - DNA, 15 bp, Homo sapiens
gggtgggctgcttct

SEQ ID NO: 533703 - DNA, 15 bp, Homo sapiens
ggggtgggctgcttc

SEQ ID NO: 533704 - DNA, 15 bp, Homo sapiens
tggggtgggctgctt

SEQ ID NO: 533705 - DNA, 15 bp, Homo sapiens
gtggggtgggctgct

SEQ ID NO: 533706 - DNA, 15 bp, Homo sapiens
tgtggggtgggctgc

SEQ ID NO: 533707 - DNA, 15 bp, Homo sapiens
gtgtggggtgggctg

SEQ ID NO: 533708 - DNA, 15 bp, Homo sapiens
tgtgtggggtgggct

SEQ ID NO: 533709 - DNA, 15 bp, Homo sapiens
ctgtgtggggtgggc

SEQ ID NO: 533710 - DNA, 15 bp, Homo sapiens
tctgtgtggggtggg

SEQ ID NO: 533711 - DNA, 15 bp, Homo sapiens
gtctgtgtggggtgg

SEQ ID NO: 533712 - DNA, 15 bp, Homo sapiens
agtctgtgtggggtg

SEQ ID NO: 533713 - DNA, 15 bp, Homo sapiens
tagtctgtgtggggt

SEQ ID NO: 533714 - DNA, 15 bp, Homo sapiens
gtagtctgtgtgggg

SEQ ID NO: 533715 - DNA, 15 bp, Homo sapiens
agtagtctgtgtggg

SEQ ID NO: 533716 - DNA, 15 bp, Homo sapiens
cagtagtctgtgtgg

SEQ ID NO: 533717 - DNA, 15 bp, Homo sapiens
gcagtagtctgtgtg

SEQ ID NO: 533718 - DNA, 15 bp, Homo sapiens
ggcagtagtctgtgt

SEQ ID NO: 533719 - DNA, 15 bp, Homo sapiens
aggcagtagtctgtg

SEQ ID NO: 533720 - DNA, 15 bp, Homo sapiens
caggcagtagtctgt

SEQ ID NO: 533721 - DNA, 15 bp, Homo sapiens
ccaggcagtagtctg

SEQ ID NO: 533722 - DNA, 15 bp, Homo sapiens
gccaggcagtagtct

SEQ ID NO: 533723 - DNA, 15 bp, Homo sapiens
tgccaggcagtagtc

SEQ ID NO: 533724 - DNA, 15 bp, Homo sapiens
gtgccaggcagtagt

SEQ ID NO: 533725 - DNA, 15 bp, Homo sapiens
agtgccaggcagtag

SEQ ID NO: 533726 - DNA, 15 bp, Homo sapiens
aagtgccaggcagta

SEQ ID NO: 533727 - DNA, 15 bp, Homo sapiens
caagtgccaggcagt

SEQ ID NO: 533728 - DNA, 15 bp, Homo sapiens
ccaagtgccaggcag

SEQ ID NO: 533729 - DNA, 15 bp, Homo sapiens
gccaagtgccaggca

SEQ ID NO: 533730 - DNA, 15 bp, Homo sapiens
tgccaagtgccaggc

SEQ ID NO: 533731 - DNA, 15 bp, Homo sapiens
ctgccaagtgccagg

SEQ ID NO: 533732 - DNA, 15 bp, Homo sapiens
actgccaagtgccag

SEQ ID NO: 533733 - DNA, 15 bp, Homo sapiens
aactgccaagtgcca

SEQ ID NO: 533734 - DNA, 15 bp, Homo sapiens
taactgccaagtgcc

SEQ ID NO: 533735 - DNA, 15 bp, Homo sapiens
ataactgccaagtgc

SEQ ID NO: 533736 - DNA, 15 bp, Homo sapiens
cataactgccaagtg

SEQ ID NO: 533737 - DNA, 15 bp, Homo sapiens
ccataactgccaagt

SEQ ID NO: 533738 - DNA, 15 bp, Homo sapiens
tccataactgccaag

SEQ ID NO: 533739 - DNA, 15 bp, Homo sapiens
ttccataactgccaa

SEQ ID NO: 533740 - DNA, 15 bp, Homo sapiens
cttccataactgcca

SEQ ID NO: 533741 - DNA, 15 bp, Homo sapiens
tcttccataactgcc

SEQ ID NO: 533742 - DNA, 15 bp, Homo sapiens
ttcttccataactgc

SEQ ID NO: 533743 - DNA, 15 bp, Homo sapiens
gttcttccataactg

SEQ ID NO: 533744 - DNA, 15 bp, Homo sapiens
ggttcttccataact

SEQ ID NO: 533745 - DNA, 15 bp, Homo sapiens
gggttcttccataac

SEQ ID NO: 533746 - DNA, 15 bp, Homo sapiens
ggggttcttccataa

SEQ ID NO: 533747 - DNA, 15 bp, Homo sapiens
gggggttcttccata

SEQ ID NO: 533748 - DNA, 15 bp, Homo sapiens
tgggggttcttccat

SEQ ID NO: 533749 - DNA, 15 bp, Homo sapiens
ttgggggttcttcca

SEQ ID NO: 533750 - DNA, 15 bp, Homo sapiens
attgggggttcttcc

SEQ ID NO: 533751 - DNA, 15 bp, Homo sapiens
aattgggggttcttc

SEQ ID NO: 533752 - DNA, 15 bp, Homo sapiens
gaattgggggttctt

SEQ ID NO: 533753 - DNA, 15 bp, Homo sapiens
ggaattgggggttct

SEQ ID NO: 533754 - DNA, 15 bp, Homo sapiens
gggaattgggggttc

SEQ ID NO: 533755 - DNA, 15 bp, Homo sapiens
ggggaattgggggtt

SEQ ID NO: 533756 - DNA, 15 bp, Homo sapiens
gggggaattgggggt

SEQ ID NO: 533757 - DNA, 15 bp, Homo sapiens
tgggggaattggggg

SEQ ID NO: 533758 - DNA, 15 bp, Homo sapiens
gtgggggaattgggg

SEQ ID NO: 533759 - DNA, 15 bp, Homo sapiens
agtgggggaattggg

SEQ ID NO: 533760 - DNA, 15 bp, Homo sapiens
aagtgggggaattgg

SEQ ID NO: 533761 - DNA, 15 bp, Homo sapiens
caagtgggggaattg

SEQ ID NO: 533762 - DNA, 15 bp, Homo sapiens
tcaagtgggggaatt

SEQ ID NO: 533763 - DNA, 15 bp, Homo sapiens
atcaagtgggggaat

SEQ ID NO: 533764 - DNA, 15 bp, Homo sapiens
gatcaagtgggggaa

SEQ ID NO: 533765 - DNA, 15 bp, Homo sapiens
agatcaagtggggga

SEQ ID NO: 533766 - DNA, 15 bp, Homo sapiens
aagatcaagtggggg

SEQ ID NO: 533767 - DNA, 15 bp, Homo sapiens
aaagatcaagtgggg

SEQ ID NO: 533768 - DNA, 15 bp, Homo sapiens
taaagatcaagtggg

SEQ ID NO: 533769 - DNA, 15 bp, Homo sapiens
ctaaagatcaagtgg

SEQ ID NO: 533770 - DNA, 15 bp, Homo sapiens
tctaaagatcaagtg

SEQ ID NO: 533771 - DNA, 15 bp, Homo sapiens
ttctaaagatcaagt

SEQ ID NO: 533772 - DNA, 15 bp, Homo sapiens
gttctaaagatcaag

SEQ ID NO: 533773 - DNA, 15 bp, Homo sapiens
agttctaaagatcaa

SEQ ID NO: 533774 - DNA, 15 bp, Homo sapiens
tagttctaaagatca

SEQ ID NO: 533775 - DNA, 15 bp, Homo sapiens
ctagttctaaagatc

SEQ ID NO: 533776 - DNA, 15 bp, Homo sapiens
tctagttctaaagat

SEQ ID NO: 533777 - DNA, 15 bp, Homo sapiens
ctctagttctaaaga

SEQ ID NO: 533778 - DNA, 15 bp, Homo sapiens
cctctagttctaaag

SEQ ID NO: 533779 - DNA, 15 bp, Homo sapiens
tcctctagttctaaa

SEQ ID NO: 533780 - DNA, 15 bp, Homo sapiens
ttcctctagttctaa

SEQ ID NO: 533781 - DNA, 15 bp, Homo sapiens
tttcctctagttcta

SEQ ID NO: 533782 - DNA, 15 bp, Homo sapiens
ctttcctctagttct

SEQ ID NO: 533783 - DNA, 15 bp, Homo sapiens
tctttcctctagttc

SEQ ID NO: 533784 - DNA, 15 bp, Homo sapiens
ttctttcctctagtt

SEQ ID NO: 533785 - DNA, 15 bp, Homo sapiens
tttctttcctctagt

SEQ ID NO: 533786 - DNA, 15 bp, Homo sapiens
atttctttcctctag

SEQ ID NO: 533787 - DNA, 15 bp, Homo sapiens
gatttctttcctcta

SEQ ID NO: 533788 - DNA, 15 bp, Homo sapiens
tgatttctttcctct

SEQ ID NO: 533789 - DNA, 15 bp, Homo sapiens
gtgatttctttcctc

SEQ ID NO: 533790 - DNA, 15 bp, Homo sapiens
agtgatttctttcct

SEQ ID NO: 533791 - DNA, 15 bp, Homo sapiens
tagtgatttctttcc

SEQ ID NO: 533792 - DNA, 15 bp, Homo sapiens
ctagtgatttctttc

SEQ ID NO: 533793 - DNA, 15 bp, Homo sapiens
tctagtgatttcttt

SEQ ID NO: 533794 - DNA, 15 bp, Homo sapiens
ctctagtgatttctt

SEQ ID NO: 533795 - DNA, 15 bp, Homo sapiens
gctctagtgatttct

SEQ ID NO: 533796 - DNA, 15 bp, Homo sapiens
tgctctagtgatttc

SEQ ID NO: 533797 - DNA, 15 bp, Homo sapiens
ctgctctagtgattt

SEQ ID NO: 533798 - DNA, 15 bp, Homo sapiens
tctgctctagtgatt

SEQ ID NO: 533799 - DNA, 15 bp, Homo sapiens
gtctgctctagtgat

SEQ ID NO: 533800 - DNA, 15 bp, Homo sapiens
agtctgctctagtga

SEQ ID NO: 533801 - DNA, 15 bp, Homo sapiens
gagtctgctctagtg

SEQ ID NO: 533802 - DNA, 15 bp, Homo sapiens
tgagtctgctctagt

SEQ ID NO: 533803 - DNA, 15 bp, Homo sapiens
ctgagtctgctctag

SEQ ID NO: 533804 - DNA, 15 bp, Homo sapiens
tctgagtctgctcta

SEQ ID NO: 533805 - DNA, 15 bp, Homo sapiens
gtctgagtctgctct

SEQ ID NO: 533806 - DNA, 15 bp, Homo sapiens
ggtctgagtctgctc

SEQ ID NO: 533807 - DNA, 15 bp, Homo sapiens
tggtctgagtctgct

SEQ ID NO: 533808 - DNA, 15 bp, Homo sapiens
ttggtctgagtctgc

SEQ ID NO: 533809 - DNA, 15 bp, Homo sapiens
gttggtctgagtctg

SEQ ID NO: 533810 - DNA, 15 bp, Homo sapiens
agttggtctgagtct

SEQ ID NO: 533811 - DNA, 15 bp, Homo sapiens
aagttggtctgagtc

SEQ ID NO: 533812 - DNA, 15 bp, Homo sapiens
caagttggtctgagt

SEQ ID NO: 533813 - DNA, 15 bp, Homo sapiens
gcaagttggtctgag

SEQ ID NO: 533814 - DNA, 15 bp, Homo sapiens
agcaagttggtctga

SEQ ID NO: 533815 - DNA, 15 bp, Homo sapiens
cagcaagttggtctg

SEQ ID NO: 533816 - DNA, 15 bp, Homo sapiens
tcagcaagttggtct

SEQ ID NO: 533817 - DNA, 15 bp, Homo sapiens
atcagcaagttggtc

SEQ ID NO: 533818 - DNA, 15 bp, Homo sapiens
gatcagcaagttggt

SEQ ID NO: 533819 - DNA, 15 bp, Homo sapiens
agatcagcaagttgg

SEQ ID NO: 533820 - DNA, 15 bp, Homo sapiens
gagatcagcaagttg

SEQ ID NO: 533821 - DNA, 15 bp, Homo sapiens
agagatcagcaagtt

SEQ ID NO: 533822 - DNA, 15 bp, Homo sapiens
cagagatcagcaagt

SEQ ID NO: 533823 - DNA, 15 bp, Homo sapiens
ccagagatcagcaag

SEQ ID NO: 533824 - DNA, 15 bp, Homo sapiens
cccagagatcagcaa

SEQ ID NO: 533825 - DNA, 15 bp, Homo sapiens
acccagagatcagca

SEQ ID NO: 533826 - DNA, 15 bp, Homo sapiens
gacccagagatcagc

SEQ ID NO: 533827 - DNA, 15 bp, Homo sapiens
ggacccagagatcag

SEQ ID NO: 533828 - DNA, 15 bp, Homo sapiens
gggacccagagatca

SEQ ID NO: 533829 - DNA, 15 bp, Homo sapiens
tgggacccagagatc

SEQ ID NO: 533830 - DNA, 15 bp, Homo sapiens
ctgggacccagagat

SEQ ID NO: 533831 - DNA, 15 bp, Homo sapiens
cctgggacccagaga

SEQ ID NO: 533832 - DNA, 15 bp, Homo sapiens
tcctgggacccagag

SEQ ID NO: 533833 - DNA, 15 bp, Homo sapiens
ttcctgggacccaga

SEQ ID NO: 533834 - DNA, 15 bp, Homo sapiens
gttcctgggacccag

SEQ ID NO: 533835 - DNA, 15 bp, Homo sapiens
tgttcctgggaccca

SEQ ID NO: 533836 - DNA, 15 bp, Homo sapiens
ttgttcctgggaccc

SEQ ID NO: 533837 - DNA, 15 bp, Homo sapiens
tttgttcctgggacc

SEQ ID NO: 533838 - DNA, 15 bp, Homo sapiens
gtttgttcctgggac

SEQ ID NO: 533839 - DNA, 15 bp, Homo sapiens
ggtttgttcctggga

SEQ ID NO: 533840 - DNA, 15 bp, Homo sapiens
tggtttgttcctggg

SEQ ID NO: 533841 - DNA, 15 bp, Homo sapiens
ctggtttgttcctgg

SEQ ID NO: 533842 - DNA, 15 bp, Homo sapiens
tctggtttgttcctg

SEQ ID NO: 533843 - DNA, 15 bp, Homo sapiens
gtctggtttgttcct

SEQ ID NO: 533844 - DNA, 15 bp, Homo sapiens
agtctggtttgttcc

SEQ ID NO: 533845 - DNA, 15 bp, Homo sapiens
gagtctggtttgttc

SEQ ID NO: 533846 - DNA, 15 bp, Homo sapiens
agagtctggtttgtt

SEQ ID NO: 533847 - DNA, 15 bp, Homo sapiens
cagagtctggtttgt

SEQ ID NO: 533848 - DNA, 15 bp, Homo sapiens
gcagagtctggtttg

SEQ ID NO: 533849 - DNA, 15 bp, Homo sapiens
agcagagtctggttt

SEQ ID NO: 533850 - DNA, 15 bp, Homo sapiens
gagcagagtctggtt

SEQ ID NO: 533851 - DNA, 15 bp, Homo sapiens
agagcagagtctggt

SEQ ID NO: 533852 - DNA, 15 bp, Homo sapiens
cagagcagagtctgg

SEQ ID NO: 533853 - DNA, 15 bp, Homo sapiens
tcagagcagagtctg

SEQ ID NO: 533854 - DNA, 15 bp, Homo sapiens
ctcagagcagagtct

SEQ ID NO: 533855 - DNA, 15 bp, Homo sapiens
gctcagagcagagtc

SEQ ID NO: 533856 - DNA, 15 bp, Homo sapiens
agctcagagcagagt

SEQ ID NO: 533857 - DNA, 15 bp, Homo sapiens
gagctcagagcagag

SEQ ID NO: 533858 - DNA, 15 bp, Homo sapiens
ggagctcagagcaga

SEQ ID NO: 533859 - DNA, 15 bp, Homo sapiens
tggagctcagagcag

SEQ ID NO: 533860 - DNA, 15 bp, Homo sapiens
ctggagctcagagca

SEQ ID NO: 533861 - DNA, 15 bp, Homo sapiens
tctggagctcagagc

SEQ ID NO: 533862 - DNA, 15 bp, Homo sapiens
ctctggagctcagag

SEQ ID NO: 533863 - DNA, 15 bp, Homo sapiens
gctctggagctcaga

SEQ ID NO: 533864 - DNA, 15 bp, Homo sapiens
agctctggagctcag

SEQ ID NO: 533865 - DNA, 15 bp, Homo sapiens
tagctctggagctca

SEQ ID NO: 533866 - DNA, 15 bp, Homo sapiens
ctagctctggagctc

SEQ ID NO: 533867 - DNA, 15 bp, Homo sapiens
cctagctctggagct

SEQ ID NO: 533868 - DNA, 15 bp, Homo sapiens
gcctagctctggagc

SEQ ID NO: 533869 - DNA, 15 bp, Homo sapiens
tgcctagctctggag

SEQ ID NO: 533870 - DNA, 15 bp, Homo sapiens
ctgcctagctctgga

SEQ ID NO: 533871 - DNA, 15 bp, Homo sapiens
cctgcctagctctgg

SEQ ID NO: 533872 - DNA, 15 bp, Homo sapiens
tcctgcctagctctg

SEQ ID NO: 533873 - DNA, 15 bp, Homo sapiens
gtcctgcctagctct

SEQ ID NO: 533874 - DNA, 15 bp, Homo sapiens
ggtcctgcctagctc

SEQ ID NO: 533875 - DNA, 15 bp, Homo sapiens
tggtcctgcctagct

SEQ ID NO: 533876 - DNA, 15 bp, Homo sapiens
atggtcctgcctagc

SEQ ID NO: 533877 - DNA, 15 bp, Homo sapiens
catggtcctgcctag

SEQ ID NO: 533878 - DNA, 15 bp, Homo sapiens
acatggtcctgccta

SEQ ID NO: 533879 - DNA, 15 bp, Homo sapiens
cacatggtcctgcct

SEQ ID NO: 533880 - DNA, 15 bp, Homo sapiens
tcacatggtcctgcc

SEQ ID NO: 533881 - DNA, 15 bp, Homo sapiens
atcacatggtcctgc

SEQ ID NO: 533882 - DNA, 15 bp, Homo sapiens
catcacatggtcctg

SEQ ID NO: 533883 - DNA, 15 bp, Homo sapiens
ccatcacatggtcct

SEQ ID NO: 533884 - DNA, 15 bp, Homo sapiens
gccatcacatggtcc

SEQ ID NO: 533885 - DNA, 15 bp, Homo sapiens
agccatcacatggtc

SEQ ID NO: 533886 - DNA, 15 bp, Homo sapiens
cagccatcacatggt

SEQ ID NO: 533887 - DNA, 15 bp, Homo sapiens
tcagccatcacatgg

SEQ ID NO: 533888 - DNA, 15 bp, Homo sapiens
ttcagccatcacatg

SEQ ID NO: 533889 - DNA, 15 bp, Homo sapiens
tttcagccatcacat

SEQ ID NO: 533890 - DNA, 15 bp, Homo sapiens
atttcagccatcaca

SEQ ID NO: 533891 - DNA, 15 bp, Homo sapiens
gatttcagccatcac

SEQ ID NO: 533892 - DNA, 15 bp, Homo sapiens
agatttcagccatca

SEQ ID NO: 533893 - DNA, 15 bp, Homo sapiens
cagatttcagccatc

SEQ ID NO: 533894 - DNA, 15 bp, Homo sapiens
ccagatttcagccat

SEQ ID NO: 533895 - DNA, 15 bp, Homo sapiens
cccagatttcagcca

SEQ ID NO: 533896 - DNA, 15 bp, Homo sapiens
acccagatttcagcc

SEQ ID NO: 533897 - DNA, 15 bp, Homo sapiens
cacccagatttcagc

SEQ ID NO: 533898 - DNA, 15 bp, Homo sapiens
gcacccagatttcag

SEQ ID NO: 533899 - DNA, 15 bp, Homo sapiens
agcacccagatttca

SEQ ID NO: 533900 - DNA, 15 bp, Homo sapiens
aagcacccagatttc

SEQ ID NO: 533901 - DNA, 15 bp, Homo sapiens
gaagcacccagattt

SEQ ID NO: 533902 - DNA, 15 bp, Homo sapiens
ggaagcacccagatt

SEQ ID NO: 533903 - DNA, 15 bp, Homo sapiens
aggaagcacccagat

SEQ ID NO: 533904 - DNA, 15 bp, Homo sapiens
caggaagcacccaga

SEQ ID NO: 533905 - DNA, 15 bp, Homo sapiens
gcaggaagcacccag

SEQ ID NO: 533906 - DNA, 15 bp, Homo sapiens
tgcaggaagcaccca

SEQ ID NO: 533907 - DNA, 15 bp, Homo sapiens
atgcaggaagcaccc

SEQ ID NO: 533908 - DNA, 15 bp, Homo sapiens
catgcaggaagcacc

SEQ ID NO: 533909 - DNA, 15 bp, Homo sapiens
acatgcaggaagcac

SEQ ID NO: 533910 - DNA, 15 bp, Homo sapiens
cacatgcaggaagca

SEQ ID NO: 533911 - DNA, 15 bp, Homo sapiens
ccacatgcaggaagc

SEQ ID NO: 533912 - DNA, 15 bp, Homo sapiens
cccacatgcaggaag

SEQ ID NO: 533913 - DNA, 15 bp, Homo sapiens
gcccacatgcaggaa

SEQ ID NO: 533914 - DNA, 15 bp, Homo sapiens
ggcccacatgcagga

SEQ ID NO: 533915 - DNA, 15 bp, Homo sapiens
gggcccacatgcagg

SEQ ID NO: 533916 - DNA, 15 bp, Homo sapiens
ggggcccacatgcag

SEQ ID NO: 533917 - DNA, 15 bp, Homo sapiens
cggggcccacatgca

SEQ ID NO: 533918 - DNA, 15 bp, Homo sapiens
ccggggcccacatgc

SEQ ID NO: 533919 - DNA, 15 bp, Homo sapiens
accggggcccacatg

SEQ ID NO: 533920 - DNA, 15 bp, Homo sapiens
caccggggcccacat

SEQ ID NO: 533921 - DNA, 15 bp, Homo sapiens
gcaccggggcccaca

SEQ ID NO: 533922 - DNA, 15 bp, Homo sapiens
ggcaccggggcccac

SEQ ID NO: 533923 - DNA, 15 bp, Homo sapiens
tggcaccggggccca

SEQ ID NO: 533924 - DNA, 15 bp, Homo sapiens
atggcaccggggccc

SEQ ID NO: 533925 - DNA, 15 bp, Homo sapiens
gatggcaccggggcc

SEQ ID NO: 533926 - DNA, 15 bp, Homo sapiens
tgatggcaccggggc

SEQ ID NO: 533927 - DNA, 15 bp, Homo sapiens
gtgatggcaccgggg

SEQ ID NO: 533928 - DNA, 15 bp, Homo sapiens
tgtgatggcaccggg

SEQ ID NO: 533929 - DNA, 15 bp, Homo sapiens
ctgtgatggcaccgg

SEQ ID NO: 533930 - DNA, 15 bp, Homo sapiens
actgtgatggcaccg

SEQ ID NO: 533931 - DNA, 15 bp, Homo sapiens
cactgtgatggcacc

SEQ ID NO: 533932 - DNA, 15 bp, Homo sapiens
ccactgtgatggcac

SEQ ID NO: 533933 - DNA, 15 bp, Homo sapiens
gccactgtgatggca

SEQ ID NO: 533934 - DNA, 15 bp, Homo sapiens
tgccactgtgatggc

SEQ ID NO: 533935 - DNA, 15 bp, Homo sapiens
ctgccactgtgatgg

SEQ ID NO: 533936 - DNA, 15 bp, Homo sapiens
cctgccactgtgatg

SEQ ID NO: 533937 - DNA, 15 bp, Homo sapiens
tcctgccactgtgat

SEQ ID NO: 533938 - DNA, 15 bp, Homo sapiens
gtcctgccactgtga

SEQ ID NO: 533939 - DNA, 15 bp, Homo sapiens
tgtcctgccactgtg

SEQ ID NO: 533940 - DNA, 15 bp, Homo sapiens
ctgtcctgccactgt

SEQ ID NO: 533941 - DNA, 15 bp, Homo sapiens
cctgtcctgccactg

SEQ ID NO: 533942 - DNA, 15 bp, Homo sapiens
ccctgtcctgccact

SEQ ID NO: 533943 - DNA, 15 bp, Homo sapiens
gccctgtcctgccac

SEQ ID NO: 533944 - DNA, 15 bp, Homo sapiens
tgccctgtcctgcca

SEQ ID NO: 533945 - DNA, 15 bp, Homo sapiens
ctgccctgtcctgcc

SEQ ID NO: 533946 - DNA, 15 bp, Homo sapiens
actgccctgtcctgc

SEQ ID NO: 533947 - DNA, 15 bp, Homo sapiens
aactgccctgtcctg

SEQ ID NO: 533948 - DNA, 15 bp, Homo sapiens
gaactgccctgtcct

SEQ ID NO: 533949 - DNA, 15 bp, Homo sapiens
ggaactgccctgtcc

SEQ ID NO: 533950 - DNA, 15 bp, Homo sapiens
aggaactgccctgtc

SEQ ID NO: 533951 - DNA, 15 bp, Homo sapiens
gaggaactgccctgt

SEQ ID NO: 533952 - DNA, 15 bp, Homo sapiens
ggaggaactgccctg

SEQ ID NO: 533953 - DNA, 15 bp, Homo sapiens
tggaggaactgccct

SEQ ID NO: 533954 - DNA, 15 bp, Homo sapiens
ctggaggaactgccc

SEQ ID NO: 533955 - DNA, 15 bp, Homo sapiens
tctggaggaactgcc

SEQ ID NO: 533956 - DNA, 15 bp, Homo sapiens
ctctggaggaactgc

SEQ ID NO: 533957 - DNA, 15 bp, Homo sapiens
gctctggaggaactg

SEQ ID NO: 533958 - DNA, 15 bp, Homo sapiens
agctctggaggaact

SEQ ID NO: 533959 - DNA, 15 bp, Homo sapiens
cagctctggaggaac

SEQ ID NO: 533960 - DNA, 15 bp, Homo sapiens
acagctctggaggaa

SEQ ID NO: 533961 - DNA, 15 bp, Homo sapiens
cacagctctggagga

SEQ ID NO: 533962 - DNA, 15 bp, Homo sapiens
acacagctctggagg

SEQ ID NO: 533963 - DNA, 15 bp, Homo sapiens
cacacagctctggag

SEQ ID NO: 533964 - DNA, 15 bp, Homo sapiens
tcacacagctctgga

SEQ ID NO: 533965 - DNA, 15 bp, Homo sapiens
gtcacacagctctgg

SEQ ID NO: 533966 - DNA, 15 bp, Homo sapiens
tgtcacacagctctg

SEQ ID NO: 533967 - DNA, 15 bp, Homo sapiens
gtgtcacacagctct

SEQ ID NO: 533968 - DNA, 15 bp, Homo sapiens
cgtgtcacacagctc

SEQ ID NO: 533969 - DNA, 15 bp, Homo sapiens
ccgtgtcacacagct

SEQ ID NO: 533970 - DNA, 15 bp, Homo sapiens
tccgtgtcacacagc

SEQ ID NO: 533971 - DNA, 15 bp, Homo sapiens
ctccgtgtcacacag

SEQ ID NO: 533972 - DNA, 15 bp, Homo sapiens
gctccgtgtcacaca

SEQ ID NO: 533973 - DNA, 15 bp, Homo sapiens
ggctccgtgtcacac

SEQ ID NO: 533974 - DNA, 15 bp, Homo sapiens
tggctccgtgtcaca

SEQ ID NO: 533975 - DNA, 15 bp, Homo sapiens
ctggctccgtgtcac

SEQ ID NO: 533976 - DNA, 15 bp, Homo sapiens
actggctccgtgtca

SEQ ID NO: 533977 - DNA, 15 bp, Homo sapiens
cactggctccgtgtc

SEQ ID NO: 533978 - DNA, 15 bp, Homo sapiens
tcactggctccgtgt

SEQ ID NO: 533979 - DNA, 15 bp, Homo sapiens
ctcactggctccgtg

SEQ ID NO: 533980 - DNA, 15 bp, Homo sapiens
actcactggctccgt

SEQ ID NO: 533981 - DNA, 15 bp, Homo sapiens
tactcactggctccg

SEQ ID NO: 533982 - DNA, 15 bp, Homo sapiens
gtactcactggctcc

SEQ ID NO: 533983 - DNA, 15 bp, Homo sapiens
ggtactcactggctc

SEQ ID NO: 533984 - DNA, 15 bp, Homo sapiens
gggtactcactggct

SEQ ID NO: 533985 - DNA, 15 bp, Homo sapiens
agggtactcactggc

SEQ ID NO: 533986 - DNA, 15 bp, Homo sapiens
gagggtactcactgg

SEQ ID NO: 533987 - DNA, 15 bp, Homo sapiens
agagggtactcactg

SEQ ID NO: 533988 - DNA, 15 bp, Homo sapiens
cagagggtactcact

SEQ ID NO: 533989 - DNA, 15 bp, Homo sapiens
ccagagggtactcac

SEQ ID NO: 533990 - DNA, 15 bp, Homo sapiens
gccagagggtactca

SEQ ID NO: 533991 - DNA, 15 bp, Homo sapiens
tgccagagggtactc

SEQ ID NO: 533992 - DNA, 15 bp, Homo sapiens
gtgccagagggtact

SEQ ID NO: 533993 - DNA, 15 bp, Homo sapiens
ggtgccagagggtac

SEQ ID NO: 533994 - DNA, 15 bp, Homo sapiens
aggtgccagagggta

SEQ ID NO: 533995 - DNA, 15 bp, Homo sapiens
gaggtgccagagggt

SEQ ID NO: 533996 - DNA, 15 bp, Homo sapiens
tgaggtgccagaggg

SEQ ID NO: 533997 - DNA, 15 bp, Homo sapiens
ctgaggtgccagagg

SEQ ID NO: 533998 - DNA, 15 bp, Homo sapiens
actgaggtgccagag

SEQ ID NO: 533999 - DNA, 15 bp, Homo sapiens
aactgaggtgccaga

SEQ ID NO: 534000 - DNA, 15 bp, Homo sapiens
aaactgaggtgccag

SEQ ID NO: 534001 - DNA, 15 bp, Homo sapiens
gaaactgaggtgcca

SEQ ID NO: 534002 - DNA, 15 bp, Homo sapiens
tgaaactgaggtgcc

SEQ ID NO: 534003 - DNA, 15 bp, Homo sapiens
gtgaaactgaggtgc

SEQ ID NO: 534004 - DNA, 15 bp, Homo sapiens
agtgaaactgaggtg

SEQ ID NO: 534005 - DNA, 15 bp, Homo sapiens
gagtgaaactgaggt

SEQ ID NO: 534006 - DNA, 15 bp, Homo sapiens
agagtgaaactgagg

SEQ ID NO: 534007 - DNA, 15 bp, Homo sapiens
aagagtgaaactgag

SEQ ID NO: 534008 - DNA, 15 bp, Homo sapiens
aaagagtgaaactga

SEQ ID NO: 534009 - DNA, 15 bp, Homo sapiens
taaagagtgaaactg

SEQ ID NO: 534010 - DNA, 15 bp, Homo sapiens
ttaaagagtgaaact

SEQ ID NO: 534011 - DNA, 15 bp, Homo sapiens
tttaaagagtgaaac

SEQ ID NO: 534012 - DNA, 15 bp, Homo sapiens
ctttaaagagtgaaa

SEQ ID NO: 534013 - DNA, 15 bp, Homo sapiens
cctttaaagagtgaa

SEQ ID NO: 534014 - DNA, 15 bp, Homo sapiens
tcctttaaagagtga

SEQ ID NO: 534015 - DNA, 15 bp, Homo sapiens
ctcctttaaagagtg

SEQ ID NO: 534016 - DNA, 15 bp, Homo sapiens
tctcctttaaagagt

SEQ ID NO: 534017 - DNA, 15 bp, Homo sapiens
ctctcctttaaagag

SEQ ID NO: 534018 - DNA, 15 bp, Homo sapiens
actctcctttaaaga

SEQ ID NO: 534019 - DNA, 15 bp, Homo sapiens
tactctcctttaaag

SEQ ID NO: 534020 - DNA, 15 bp, Homo sapiens
ctactctcctttaaa

SEQ ID NO: 534021 - DNA, 15 bp, Homo sapiens
gctactctcctttaa

SEQ ID NO: 534022 - DNA, 15 bp, Homo sapiens
tgctactctccttta

SEQ ID NO: 534023 - DNA, 15 bp, Homo sapiens
gtgctactctccttt

SEQ ID NO: 534024 - DNA, 15 bp, Homo sapiens
agtgctactctcctt

SEQ ID NO: 534025 - DNA, 15 bp, Homo sapiens
aagtgctactctcct

SEQ ID NO: 534026 - DNA, 15 bp, Homo sapiens
caagtgctactctcc

SEQ ID NO: 534027 - DNA, 15 bp, Homo sapiens
tcaagtgctactctc

SEQ ID NO: 534028 - DNA, 15 bp, Homo sapiens
gtcaagtgctactct

SEQ ID NO: 534029 - DNA, 15 bp, Homo sapiens
tgtcaagtgctactc

SEQ ID NO: 534030 - DNA, 15 bp, Homo sapiens
gtgtcaagtgctact

SEQ ID NO: 534031 - DNA, 15 bp, Homo sapiens
tgtgtcaagtgctac

SEQ ID NO: 534032 - DNA, 15 bp, Homo sapiens
gtgtgtcaagtgcta

SEQ ID NO: 534033 - DNA, 15 bp, Homo sapiens
ggtgtgtcaagtgct

SEQ ID NO: 534034 - DNA, 15 bp, Homo sapiens
aggtgtgtcaagtgc

SEQ ID NO: 534035 - DNA, 15 bp, Homo sapiens
caggtgtgtcaagtg

SEQ ID NO: 534036 - DNA, 15 bp, Homo sapiens
acaggtgtgtcaagt

SEQ ID NO: 534037 - DNA, 15 bp, Homo sapiens
aacaggtgtgtcaag

SEQ ID NO: 534038 - DNA, 15 bp, Homo sapiens
caacaggtgtgtcaa

SEQ ID NO: 534039 - DNA, 15 bp, Homo sapiens
tcaacaggtgtgtca

SEQ ID NO: 534040 - DNA, 15 bp, Homo sapiens
ctcaacaggtgtgtc

SEQ ID NO: 534041 - DNA, 15 bp, Homo sapiens
actcaacaggtgtgt

SEQ ID NO: 534042 - DNA, 15 bp, Homo sapiens
gactcaacaggtgtg

SEQ ID NO: 534043 - DNA, 15 bp, Homo sapiens
ggactcaacaggtgt

SEQ ID NO: 534044 - DNA, 15 bp, Homo sapiens
aggactcaacaggtg

SEQ ID NO: 534045 - DNA, 15 bp, Homo sapiens
gaggactcaacaggt

SEQ ID NO: 534046 - DNA, 15 bp, Homo sapiens
tgaggactcaacagg

SEQ ID NO: 534047 - DNA, 15 bp, Homo sapiens
ctgaggactcaacag

SEQ ID NO: 534048 - DNA, 15 bp, Homo sapiens
tctgaggactcaaca

SEQ ID NO: 534049 - DNA, 15 bp, Homo sapiens
ctctgaggactcaac

SEQ ID NO: 534050 - DNA, 15 bp, Homo sapiens
actctgaggactcaa

SEQ ID NO: 534051 - DNA, 15 bp, Homo sapiens
tactctgaggactca

SEQ ID NO: 534052 - DNA, 15 bp, Homo sapiens
ttactctgaggactc

SEQ ID NO: 534053 - DNA, 15 bp, Homo sapiens
gttactctgaggact

SEQ ID NO: 534054 - DNA, 15 bp, Homo sapiens
ggttactctgaggac

SEQ ID NO: 534055 - DNA, 15 bp, Homo sapiens
gggttactctgagga

SEQ ID NO: 534056 - DNA, 15 bp, Homo sapiens
cgggttactctgagg

SEQ ID NO: 534057 - DNA, 15 bp, Homo sapiens
ccgggttactctgag

SEQ ID NO: 534058 - DNA, 15 bp, Homo sapiens
gccgggttactctga

SEQ ID NO: 534059 - DNA, 15 bp, Homo sapiens
ggccgggttactctg

SEQ ID NO: 534060 - DNA, 15 bp, Homo sapiens
gggccgggttactct

SEQ ID NO: 534061 - DNA, 15 bp, Homo sapiens
agggccgggttactc

SEQ ID NO: 534062 - DNA, 15 bp, Homo sapiens
gagggccgggttact

SEQ ID NO: 534063 - DNA, 15 bp, Homo sapiens
tgagggccgggttac

SEQ ID NO: 534064 - DNA, 15 bp, Homo sapiens
ctgagggccgggtta

SEQ ID NO: 534065 - DNA, 15 bp, Homo sapiens
cctgagggccgggtt

SEQ ID NO: 534066 - DNA, 15 bp, Homo sapiens
acctgagggccgggt

SEQ ID NO: 534067 - DNA, 15 bp, Homo sapiens
cacctgagggccggg

SEQ ID NO: 534068 - DNA, 15 bp, Homo sapiens
tcacctgagggccgg

SEQ ID NO: 534069 - DNA, 15 bp, Homo sapiens
ttcacctgagggccg

SEQ ID NO: 534070 - DNA, 15 bp, Homo sapiens
cttcacctgagggcc

SEQ ID NO: 534071 - DNA, 15 bp, Homo sapiens
gcttcacctgagggc

SEQ ID NO: 534072 - DNA, 15 bp, Homo sapiens
tgcttcacctgaggg

SEQ ID NO: 534073 - DNA, 15 bp, Homo sapiens
ctgcttcacctgagg

SEQ ID NO: 534074 - DNA, 15 bp, Homo sapiens
cctgcttcacctgag

SEQ ID NO: 534075 - DNA, 15 bp, Homo sapiens
ccctgcttcacctga

SEQ ID NO: 534076 - DNA, 15 bp, Homo sapiens
accctgcttcacctg

SEQ ID NO: 534077 - DNA, 15 bp, Homo sapiens
caccctgcttcacct

SEQ ID NO: 534078 - DNA, 15 bp, Homo sapiens
ccaccctgcttcacc

SEQ ID NO: 534079 - DNA, 15 bp, Homo sapiens
tccaccctgcttcac

SEQ ID NO: 534080 - DNA, 15 bp, Homo sapiens
ctccaccctgcttca

SEQ ID NO: 534081 - DNA, 15 bp, Homo sapiens
tctccaccctgcttc

SEQ ID NO: 534082 - DNA, 15 bp, Homo sapiens
ctctccaccctgctt

SEQ ID NO: 534083 - DNA, 15 bp, Homo sapiens
tctctccaccctgct

SEQ ID NO: 534084 - DNA, 15 bp, Homo sapiens
atctctccaccctgc

SEQ ID NO: 534085 - DNA, 15 bp, Homo sapiens
gatctctccaccctg

SEQ ID NO: 534086 - DNA, 15 bp, Homo sapiens
cgatctctccaccct

SEQ ID NO: 534087 - DNA, 15 bp, Homo sapiens
tcgatctctccaccc

SEQ ID NO: 534088 - DNA, 15 bp, Homo sapiens
ttcgatctctccacc

SEQ ID NO: 534089 - DNA, 15 bp, Homo sapiens
tttcgatctctccac

SEQ ID NO: 534090 - DNA, 15 bp, Homo sapiens
ttttcgatctctcca

SEQ ID NO: 534091 - DNA, 15 bp, Homo sapiens
cttttcgatctctcc

SEQ ID NO: 534092 - DNA, 15 bp, Homo sapiens
gcttttcgatctctc

SEQ ID NO: 534093 - DNA, 15 bp, Homo sapiens
tgcttttcgatctct

SEQ ID NO: 534094 - DNA, 15 bp, Homo sapiens
atgcttttcgatctc

SEQ ID NO: 534095 - DNA, 15 bp, Homo sapiens
aatgcttttcgatct

SEQ ID NO: 534096 - DNA, 15 bp, Homo sapiens
aaatgcttttcgatc

SEQ ID NO: 534097 - DNA, 15 bp, Homo sapiens
caaatgcttttcgat

SEQ ID NO: 534098 - DNA, 15 bp, Homo sapiens
ccaaatgcttttcga

SEQ ID NO: 534099 - DNA, 15 bp, Homo sapiens
gccaaatgcttttcg

SEQ ID NO: 534100 - DNA, 15 bp, Homo sapiens
tgccaaatgcttttc

SEQ ID NO: 534101 - DNA, 15 bp, Homo sapiens
gtgccaaatgctttt

SEQ ID NO: 534102 - DNA, 15 bp, Homo sapiens
tgtgccaaatgcttt

SEQ ID NO: 534103 - DNA, 15 bp, Homo sapiens
ctgtgccaaatgctt

SEQ ID NO: 534104 - DNA, 15 bp, Homo sapiens
cctgtgccaaatgct

SEQ ID NO: 534105 - DNA, 15 bp, Homo sapiens
ccctgtgccaaatgc

SEQ ID NO: 534106 - DNA, 15 bp, Homo sapiens
gccctgtgccaaatg

SEQ ID NO: 534107 - DNA, 15 bp, Homo sapiens
ggccctgtgccaaat

SEQ ID NO: 534108 - DNA, 15 bp, Homo sapiens
aggccctgtgccaaa

SEQ ID NO: 534109 - DNA, 15 bp, Homo sapiens
caggccctgtgccaa

SEQ ID NO: 534110 - DNA, 15 bp, Homo sapiens
ccaggccctgtgcca

SEQ ID NO: 534111 - DNA, 15 bp, Homo sapiens
gccaggccctgtgcc

SEQ ID NO: 534112 - DNA, 15 bp, Homo sapiens
tgccaggccctgtgc

SEQ ID NO: 534113 - DNA, 15 bp, Homo sapiens
ctgccaggccctgtg

SEQ ID NO: 534114 - DNA, 15 bp, Homo sapiens
tctgccaggccctgt

SEQ ID NO: 534115 - DNA, 15 bp, Homo sapiens
atctgccaggccctg

SEQ ID NO: 534116 - DNA, 15 bp, Homo sapiens
catctgccaggccct

SEQ ID NO: 534117 - DNA, 15 bp, Homo sapiens
acatctgccaggccc

SEQ ID NO: 534118 - DNA, 15 bp, Homo sapiens
cacatctgccaggcc

SEQ ID NO: 534119 - DNA, 15 bp, Homo sapiens
acacatctgccaggc

SEQ ID NO: 534120 - DNA, 15 bp, Homo sapiens
cacacatctgccagg

SEQ ID NO: 534121 - DNA, 15 bp, Homo sapiens
gcacacatctgccag

SEQ ID NO: 534122 - DNA, 15 bp, Homo sapiens
agcacacatctgcca

SEQ ID NO: 534123 - DNA, 15 bp, Homo sapiens
gagcacacatctgcc

SEQ ID NO: 534124 - DNA, 15 bp, Homo sapiens
ggagcacacatctgc

SEQ ID NO: 534125 - DNA, 15 bp, Homo sapiens
tggagcacacatctg

SEQ ID NO: 534126 - DNA, 15 bp, Homo sapiens
ctggagcacacatct

SEQ ID NO: 534127 - DNA, 15 bp, Homo sapiens
actggagcacacatc

SEQ ID NO: 534128 - DNA, 15 bp, Homo sapiens
aactggagcacacat

SEQ ID NO: 534129 - DNA, 15 bp, Homo sapiens
taactggagcacaca

SEQ ID NO: 534130 - DNA, 15 bp, Homo sapiens
ttaactggagcacac

SEQ ID NO: 534131 - DNA, 15 bp, Homo sapiens
attaactggagcaca

SEQ ID NO: 534132 - DNA, 15 bp, Homo sapiens
tattaactggagcac

SEQ ID NO: 534133 - DNA, 15 bp, Homo sapiens
ctattaactggagca

SEQ ID NO: 534134 - DNA, 15 bp, Homo sapiens
tctattaactggagc

SEQ ID NO: 534135 - DNA, 15 bp, Homo sapiens
ttctattaactggag

SEQ ID NO: 534136 - DNA, 15 bp, Homo sapiens
cttctattaactgga

SEQ ID NO: 534137 - DNA, 15 bp, Homo sapiens
gcttctattaactgg

SEQ ID NO: 534138 - DNA, 15 bp, Homo sapiens
cgcttctattaactg

SEQ ID NO: 534139 - DNA, 15 bp, Homo sapiens
acgcttctattaact

SEQ ID NO: 534140 - DNA, 15 bp, Homo sapiens
cacgcttctattaac

SEQ ID NO: 534141 - DNA, 15 bp, Homo sapiens
gcacgcttctattaa

SEQ ID NO: 534142 - DNA, 15 bp, Homo sapiens
tgcacgcttctatta

SEQ ID NO: 534143 - DNA, 15 bp, Homo sapiens
ttgcacgcttctatt

SEQ ID NO: 534144 - DNA, 15 bp, Homo sapiens
cttgcacgcttctat

SEQ ID NO: 534145 - DNA, 15 bp, Homo sapiens
gcttgcacgcttcta

SEQ ID NO: 534146 - DNA, 15 bp, Homo sapiens
cgcttgcacgcttct

SEQ ID NO: 534147 - DNA, 15 bp, Homo sapiens
acgcttgcacgcttc

SEQ ID NO: 534148 - DNA, 15 bp, Homo sapiens
aacgcttgcacgctt

SEQ ID NO: 534149 - DNA, 15 bp, Homo sapiens
aaacgcttgcacgct

SEQ ID NO: 534150 - DNA, 15 bp, Homo sapiens
gaaacgcttgcacgc

SEQ ID NO: 534151 - DNA, 15 bp, Homo sapiens
agaaacgcttgcacg

SEQ ID NO: 534152 - DNA, 15 bp, Homo sapiens
cagaaacgcttgcac

SEQ ID NO: 534153 - DNA, 15 bp, Homo sapiens
ccagaaacgcttgca

SEQ ID NO: 534154 - DNA, 15 bp, Homo sapiens
cccagaaacgcttgc

SEQ ID NO: 534155 - DNA, 15 bp, Homo sapiens
ccccagaaacgcttg

SEQ ID NO: 534156 - DNA, 15 bp, Homo sapiens
tccccagaaacgctt

SEQ ID NO: 534157 - DNA, 15 bp, Homo sapiens
ctccccagaaacgct

SEQ ID NO: 534158 - DNA, 15 bp, Homo sapiens
cctccccagaaacgc

SEQ ID NO: 534159 - DNA, 15 bp, Homo sapiens
gcctccccagaaacg

SEQ ID NO: 534160 - DNA, 15 bp, Homo sapiens
agcctccccagaaac

SEQ ID NO: 534161 - DNA, 15 bp, Homo sapiens
cagcctccccagaaa

SEQ ID NO: 534162 - DNA, 15 bp, Homo sapiens
ccagcctccccagaa

SEQ ID NO: 534163 - DNA, 15 bp, Homo sapiens
accagcctccccaga

SEQ ID NO: 534164 - DNA, 15 bp, Homo sapiens
caccagcctccccag

SEQ ID NO: 534165 - DNA, 15 bp, Homo sapiens
acaccagcctcccca

SEQ ID NO: 534166 - DNA, 15 bp, Homo sapiens
cacaccagcctcccc

SEQ ID NO: 534167 - DNA, 15 bp, Homo sapiens
acacaccagcctccc

SEQ ID NO: 534168 - DNA, 15 bp, Homo sapiens
gacacaccagcctcc

SEQ ID NO: 534169 - DNA, 15 bp, Homo sapiens
cgacacaccagcctc

SEQ ID NO: 534170 - DNA, 15 bp, Homo sapiens
tcgacacaccagcct

SEQ ID NO: 534171 - DNA, 15 bp, Homo sapiens
gtcgacacaccagcc

SEQ ID NO: 534172 - DNA, 15 bp, Homo sapiens
agtcgacacaccagc

SEQ ID NO: 534173 - DNA, 15 bp, Homo sapiens
cagtcgacacaccag

SEQ ID NO: 534174 - DNA, 15 bp, Homo sapiens
ccagtcgacacacca

SEQ ID NO: 534175 - DNA, 15 bp, Homo sapiens
tccagtcgacacacc

SEQ ID NO: 534176 - DNA, 15 bp, Homo sapiens
atccagtcgacacac

SEQ ID NO: 534177 - DNA, 15 bp, Homo sapiens
aatccagtcgacaca

SEQ ID NO: 534178 - DNA, 15 bp, Homo sapiens
aaatccagtcgacac

SEQ ID NO: 534179 - DNA, 15 bp, Homo sapiens
aaaatccagtcgaca

SEQ ID NO: 534180 - DNA, 15 bp, Homo sapiens
taaaatccagtcgac

SEQ ID NO: 534181 - DNA, 15 bp, Homo sapiens
gtaaaatccagtcga

SEQ ID NO: 534182 - DNA, 15 bp, Homo sapiens
cgtaaaatccagtcg

SEQ ID NO: 534183 - DNA, 15 bp, Homo sapiens
ccgtaaaatccagtc

SEQ ID NO: 534184 - DNA, 15 bp, Homo sapiens
tccgtaaaatccagt

SEQ ID NO: 534185 - DNA, 15 bp, Homo sapiens
ctccgtaaaatccag

SEQ ID NO: 534186 - DNA, 15 bp, Homo sapiens
gctccgtaaaatcca

SEQ ID NO: 534187 - DNA, 15 bp, Homo sapiens
agctccgtaaaatcc

SEQ ID NO: 534188 - DNA, 15 bp, Homo sapiens
aagctccgtaaaatc

SEQ ID NO: 534189 - DNA, 15 bp, Homo sapiens
aaagctccgtaaaat

SEQ ID NO: 534190 - DNA, 15 bp, Homo sapiens
aaaagctccgtaaaa

SEQ ID NO: 534191 - DNA, 15 bp, Homo sapiens
aaaaagctccgtaaa

SEQ ID NO: 534192 - DNA, 15 bp, Homo sapiens
aaaaaagctccgtaa

SEQ ID NO: 534193 - DNA, 15 bp, Homo sapiens
aaaaaaagctccgta

SEQ ID NO: 534194 - DNA, 15 bp, Homo sapiens
caaaaaaagctccgt

SEQ ID NO: 534195 - DNA, 15 bp, Homo sapiens
gcaaaaaaagctccg

SEQ ID NO: 534196 - DNA, 15 bp, Homo sapiens
tgcaaaaaaagctcc

SEQ ID NO: 534197 - DNA, 15 bp, Homo sapiens
ctgcaaaaaaagctc

SEQ ID NO: 534198 - DNA, 15 bp, Homo sapiens
cctgcaaaaaaagct

SEQ ID NO: 534199 - DNA, 15 bp, Homo sapiens
gcctgcaaaaaaagc

SEQ ID NO: 534200 - DNA, 15 bp, Homo sapiens
tgcctgcaaaaaaag

SEQ ID NO: 534201 - DNA, 15 bp, Homo sapiens
ttgcctgcaaaaaaa

SEQ ID NO: 534202 - DNA, 15 bp, Homo sapiens
cttgcctgcaaaaaa

SEQ ID NO: 534203 - DNA, 15 bp, Homo sapiens
ccttgcctgcaaaaa

SEQ ID NO: 534204 - DNA, 15 bp, Homo sapiens
tccttgcctgcaaaa

SEQ ID NO: 534205 - DNA, 15 bp, Homo sapiens
ctccttgcctgcaaa

SEQ ID NO: 534206 - DNA, 15 bp, Homo sapiens
cctccttgcctgcaa

SEQ ID NO: 534207 - DNA, 15 bp, Homo sapiens
gcctccttgcctgca

SEQ ID NO: 534208 - DNA, 15 bp, Homo sapiens
agcctccttgcctgc

SEQ ID NO: 534209 - DNA, 15 bp, Homo sapiens
cagcctccttgcctg

SEQ ID NO: 534210 - DNA, 15 bp, Homo sapiens
ccagcctccttgcct

SEQ ID NO: 534211 - DNA, 15 bp, Homo sapiens
gccagcctccttgcc

SEQ ID NO: 534212 - DNA, 15 bp, Homo sapiens
agccagcctccttgc

SEQ ID NO: 534213 - DNA, 15 bp, Homo sapiens
cagccagcctccttg

SEQ ID NO: 534214 - DNA, 15 bp, Homo sapiens
ccagccagcctcctt

SEQ ID NO: 534215 - DNA, 15 bp, Homo sapiens
cccagccagcctcct

SEQ ID NO: 534216 - DNA, 15 bp, Homo sapiens
ccccagccagcctcc

SEQ ID NO: 534217 - DNA, 15 bp, Homo sapiens
accccagccagcctc

SEQ ID NO: 534218 - DNA, 15 bp, Homo sapiens
caccccagccagcct

SEQ ID NO: 534219 - DNA, 15 bp, Homo sapiens
ccaccccagccagcc

SEQ ID NO: 534220 - DNA, 15 bp, Homo sapiens
tccaccccagccagc

SEQ ID NO: 534221 - DNA, 15 bp, Homo sapiens
gtccaccccagccag

SEQ ID NO: 534222 - DNA, 15 bp, Homo sapiens
ggtccaccccagcca

SEQ ID NO: 534223 - DNA, 15 bp, Homo sapiens
tggtccaccccagcc

SEQ ID NO: 534224 - DNA, 15 bp, Homo sapiens
ctggtccaccccagc

SEQ ID NO: 534225 - DNA, 15 bp, Homo sapiens
cctggtccaccccag

SEQ ID NO: 534226 - DNA, 15 bp, Homo sapiens
ccctggtccacccca

SEQ ID NO: 534227 - DNA, 15 bp, Homo sapiens
tccctggtccacccc

SEQ ID NO: 534228 - DNA, 15 bp, Homo sapiens
gtccctggtccaccc

SEQ ID NO: 534229 - DNA, 15 bp, Homo sapiens
agtccctggtccacc

SEQ ID NO: 534230 - DNA, 15 bp, Homo sapiens
aagtccctggtccac

SEQ ID NO: 534231 - DNA, 15 bp, Homo sapiens
caagtccctggtcca

SEQ ID NO: 534232 - DNA, 15 bp, Homo sapiens
gcaagtccctggtcc

SEQ ID NO: 534233 - DNA, 15 bp, Homo sapiens
ggcaagtccctggtc

SEQ ID NO: 534234 - DNA, 15 bp, Homo sapiens
gggcaagtccctggt

SEQ ID NO: 534235 - DNA, 15 bp, Homo sapiens
tgggcaagtccctgg

SEQ ID NO: 534236 - DNA, 15 bp, Homo sapiens
gcttgggcaagtccc

SEQ ID NO: 534237 - DNA, 15 bp, Homo sapiens
ggcttgggcaagtcc

SEQ ID NO: 534238 - DNA, 15 bp, Homo sapiens
tggcttgggcaagtc

SEQ ID NO: 534239 - DNA, 15 bp, Homo sapiens
ctggcttgggcaagt

SEQ ID NO: 534240 - DNA, 15 bp, Homo sapiens
gctggcttgggcaag

SEQ ID NO: 534241 - DNA, 15 bp, Homo sapiens
ggctggcttgggcaa

SEQ ID NO: 534242 - DNA, 15 bp, Homo sapiens
aggctggcttgggca

SEQ ID NO: 534243 - DNA, 15 bp, Homo sapiens
aaggctggcttgggc

SEQ ID NO: 534244 - DNA, 15 bp, Homo sapiens
gaaggctggcttggg

SEQ ID NO: 534245 - DNA, 15 bp, Homo sapiens
ggaaggctggcttgg

SEQ ID NO: 534246 - DNA, 15 bp, Homo sapiens
gggaaggctggcttg

SEQ ID NO: 534247 - DNA, 15 bp, Homo sapiens
agggaaggctggctt

SEQ ID NO: 534248 - DNA, 15 bp, Homo sapiens
cagggaaggctggct

SEQ ID NO: 534249 - DNA, 15 bp, Homo sapiens
acagggaaggctggc

SEQ ID NO: 534250 - DNA, 15 bp, Homo sapiens
cacagggaaggctgg

SEQ ID NO: 534251 - DNA, 15 bp, Homo sapiens
acacagggaaggctg

SEQ ID NO: 534252 - DNA, 15 bp, Homo sapiens
gacacagggaaggct

SEQ ID NO: 534253 - DNA, 15 bp, Homo sapiens
agacacagggaaggc

SEQ ID NO: 534254 - DNA, 15 bp, Homo sapiens
cagacacagggaagg

SEQ ID NO: 534255 - DNA, 15 bp, Homo sapiens
gcagacacagggaag

SEQ ID NO: 534256 - DNA, 15 bp, Homo sapiens
tgcagacacagggaa

SEQ ID NO: 534257 - DNA, 15 bp, Homo sapiens
ctgcagacacaggga

SEQ ID NO: 534258 - DNA, 15 bp, Homo sapiens
tctgcagacacaggg

SEQ ID NO: 534259 - DNA, 15 bp, Homo sapiens
ctctgcagacacagg

SEQ ID NO: 534260 - DNA, 15 bp, Homo sapiens
cctctgcagacacag

SEQ ID NO: 534261 - DNA, 15 bp, Homo sapiens
ccctctgcagacaca

SEQ ID NO: 534262 - DNA, 15 bp, Homo sapiens
cccctctgcagacac

SEQ ID NO: 534263 - DNA, 15 bp, Homo sapiens
gcccctctgcagaca

SEQ ID NO: 534264 - DNA, 15 bp, Homo sapiens
agcccctctgcagac

SEQ ID NO: 534265 - DNA, 15 bp, Homo sapiens
cagcccctctgcaga

SEQ ID NO: 534266 - DNA, 15 bp, Homo sapiens
ccagcccctctgcag

SEQ ID NO: 534267 - DNA, 15 bp, Homo sapiens
accagcccctctgca

SEQ ID NO: 534268 - DNA, 15 bp, Homo sapiens
taccagcccctctgc

SEQ ID NO: 534269 - DNA, 15 bp, Homo sapiens
gtaccagcccctctg

SEQ ID NO: 534270 - DNA, 15 bp, Homo sapiens
tgtaccagcccctct

SEQ ID NO: 534271 - DNA, 15 bp, Homo sapiens
gtgtaccagcccctc

SEQ ID NO: 534272 - DNA, 15 bp, Homo sapiens
tgtgtaccagcccct

SEQ ID NO: 534273 - DNA, 15 bp, Homo sapiens
atgtgtaccagcccc

SEQ ID NO: 534274 - DNA, 15 bp, Homo sapiens
aatgtgtaccagccc

SEQ ID NO: 534275 - DNA, 15 bp, Homo sapiens
gaatgtgtaccagcc

SEQ ID NO: 534276 - DNA, 15 bp, Homo sapiens
ggaatgtgtaccagc

SEQ ID NO: 534277 - DNA, 15 bp, Homo sapiens
tggaatgtgtaccag

SEQ ID NO: 534278 - DNA, 15 bp, Homo sapiens
ttggaatgtgtacca

SEQ ID NO: 534279 - DNA, 15 bp, Homo sapiens
cttggaatgtgtacc

SEQ ID NO: 534280 - DNA, 15 bp, Homo sapiens
gcttggaatgtgtac

SEQ ID NO: 534281 - DNA, 15 bp, Homo sapiens
tgcttggaatgtgta

SEQ ID NO: 534282 - DNA, 15 bp, Homo sapiens
ctgcttggaatgtgt

SEQ ID NO: 534283 - DNA, 15 bp, Homo sapiens
cctgcttggaatgtg

SEQ ID NO: 534284 - DNA, 15 bp, Homo sapiens
ccctgcttggaatgt

SEQ ID NO: 534285 - DNA, 15 bp, Homo sapiens
cccctgcttggaatg

SEQ ID NO: 534286 - DNA, 15 bp, Homo sapiens
ccccctgcttggaat

SEQ ID NO: 534287 - DNA, 15 bp, Homo sapiens
gccccctgcttggaa

SEQ ID NO: 534288 - DNA, 15 bp, Homo sapiens
tgccccctgcttgga

SEQ ID NO: 534289 - DNA, 15 bp, Homo sapiens
gtgccccctgcttgg

SEQ ID NO: 534290 - DNA, 15 bp, Homo sapiens
ggtgccccctgcttg

SEQ ID NO: 534291 - DNA, 15 bp, Homo sapiens
gggtgccccctgctt

SEQ ID NO: 534292 - DNA, 15 bp, Homo sapiens
tgggtgccccctgct

SEQ ID NO: 534293 - DNA, 15 bp, Homo sapiens
gtgggtgccccctgc

SEQ ID NO: 534294 - DNA, 15 bp, Homo sapiens
agtgggtgccccctg

SEQ ID NO: 534295 - DNA, 15 bp, Homo sapiens
cagtgggtgccccct

SEQ ID NO: 534296 - DNA, 15 bp, Homo sapiens
gcagtgggtgccccc

SEQ ID NO: 534297 - DNA, 15 bp, Homo sapiens
tgcagtgggtgcccc

SEQ ID NO: 534298 - DNA, 15 bp, Homo sapiens
gtgcagtgggtgccc

SEQ ID NO: 534299 - DNA, 15 bp, Homo sapiens
tgtgcagtgggtgcc

SEQ ID NO: 534300 - DNA, 15 bp, Homo sapiens
ctgtgcagtgggtgc

SEQ ID NO: 534301 - DNA, 15 bp, Homo sapiens
tctgtgcagtgggtg

SEQ ID NO: 534302 - DNA, 15 bp, Homo sapiens
ctctgtgcagtgggt

SEQ ID NO: 534303 - DNA, 15 bp, Homo sapiens
actctgtgcagtggg

SEQ ID NO: 534304 - DNA, 15 bp, Homo sapiens
cactctgtgcagtgg

SEQ ID NO: 534305 - DNA, 15 bp, Homo sapiens
acactctgtgcagtg

SEQ ID NO: 534306 - DNA, 15 bp, Homo sapiens
gacactctgtgcagt

SEQ ID NO: 534307 - DNA, 15 bp, Homo sapiens
agacactctgtgcag

SEQ ID NO: 534308 - DNA, 15 bp, Homo sapiens
cagacactctgtgca

SEQ ID NO: 534309 - DNA, 15 bp, Homo sapiens
gcagacactctgtgc

SEQ ID NO: 534310 - DNA, 15 bp, Homo sapiens
ggcagacactctgtg

SEQ ID NO: 534311 - DNA, 15 bp, Homo sapiens
gggcagacactctgt

SEQ ID NO: 534312 - DNA, 15 bp, Homo sapiens
agggcagacactctg

SEQ ID NO: 534313 - DNA, 15 bp, Homo sapiens
cagggcagacactct

SEQ ID NO: 534314 - DNA, 15 bp, Homo sapiens
gcagggcagacactc

SEQ ID NO: 534315 - DNA, 15 bp, Homo sapiens
ggcagggcagacact

SEQ ID NO: 534316 - DNA, 15 bp, Homo sapiens
gggcagggcagacac

SEQ ID NO: 534317 - DNA, 15 bp, Homo sapiens
agggcagggcagaca

SEQ ID NO: 534318 - DNA, 15 bp, Homo sapiens
aagggcagggcagac

SEQ ID NO: 534319 - DNA, 15 bp, Homo sapiens
caagggcagggcaga

SEQ ID NO: 534320 - DNA, 15 bp, Homo sapiens
acaagggcagggcag

SEQ ID NO: 534321 - DNA, 15 bp, Homo sapiens
aacaagggcagggca

SEQ ID NO: 534322 - DNA, 15 bp, Homo sapiens
taacaagggcagggc

SEQ ID NO: 534323 - DNA, 15 bp, Homo sapiens
ataacaagggcaggg

SEQ ID NO: 534324 - DNA, 15 bp, Homo sapiens
gataacaagggcagg

SEQ ID NO: 534325 - DNA, 15 bp, Homo sapiens
ggataacaagggcag

SEQ ID NO: 534326 - DNA, 15 bp, Homo sapiens
aggataacaagggca

SEQ ID NO: 534327 - DNA, 15 bp, Homo sapiens
caggataacaagggc

SEQ ID NO: 534328 - DNA, 15 bp, Homo sapiens
tcaggataacaaggg

SEQ ID NO: 534329 - DNA, 15 bp, Homo sapiens
ctcaggataacaagg

SEQ ID NO: 534330 - DNA, 15 bp, Homo sapiens
gctcaggataacaag

SEQ ID NO: 534331 - DNA, 15 bp, Homo sapiens
agctcaggataacaa

SEQ ID NO: 534332 - DNA, 15 bp, Homo sapiens
gagctcaggataaca

SEQ ID NO: 534333 - DNA, 15 bp, Homo sapiens
agagctcaggataac

SEQ ID NO: 534334 - DNA, 15 bp, Homo sapiens
gagagctcaggataa

SEQ ID NO: 534335 - DNA, 15 bp, Homo sapiens
ggagagctcaggata

SEQ ID NO: 534336 - DNA, 15 bp, Homo sapiens
tggagagctcaggat

SEQ ID NO: 534337 - DNA, 15 bp, Homo sapiens
ctggagagctcagga

SEQ ID NO: 534338 - DNA, 15 bp, Homo sapiens
tctggagagctcagg

SEQ ID NO: 534339 - DNA, 15 bp, Homo sapiens
gtctggagagctcag

SEQ ID NO: 534340 - DNA, 15 bp, Homo sapiens
agtctggagagctca

SEQ ID NO: 534341 - DNA, 15 bp, Homo sapiens
cagtctggagagctc

SEQ ID NO: 534342 - DNA, 15 bp, Homo sapiens
tcagtctggagagct

SEQ ID NO: 534343 - DNA, 15 bp, Homo sapiens
ctcagtctggagagc

SEQ ID NO: 534344 - DNA, 15 bp, Homo sapiens
cctcagtctggagag

SEQ ID NO: 534345 - DNA, 15 bp, Homo sapiens
acctcagtctggaga

SEQ ID NO: 534346 - DNA, 15 bp, Homo sapiens
cacctcagtctggag

SEQ ID NO: 534347 - DNA, 15 bp, Homo sapiens
ccacctcagtctgga

SEQ ID NO: 534348 - DNA, 15 bp, Homo sapiens
gccacctcagtctgg

SEQ ID NO: 534349 - DNA, 15 bp, Homo sapiens
ggccacctcagtctg

SEQ ID NO: 534350 - DNA, 15 bp, Homo sapiens
gggccacctcagtct

SEQ ID NO: 534351 - DNA, 15 bp, Homo sapiens
cgggccacctcagtc

SEQ ID NO: 534352 - DNA, 15 bp, Homo sapiens
ccgggccacctcagt

SEQ ID NO: 534353 - DNA, 15 bp, Homo sapiens
tccgggccacctcag

SEQ ID NO: 534354 - DNA, 15 bp, Homo sapiens
ctccgggccacctca

SEQ ID NO: 534355 - DNA, 15 bp, Homo sapiens
tctccgggccacctc

SEQ ID NO: 534356 - DNA, 15 bp, Homo sapiens
ctctccgggccacct

SEQ ID NO: 534357 - DNA, 15 bp, Homo sapiens
actctccgggccacc

SEQ ID NO: 534358 - DNA, 15 bp, Homo sapiens
cactctccgggccac

SEQ ID NO: 534359 - DNA, 15 bp, Homo sapiens
ccactctccgggcca

SEQ ID NO: 534360 - DNA, 15 bp, Homo sapiens
gccactctccgggcc

SEQ ID NO: 534361 - DNA, 15 bp, Homo sapiens
tgccactctccgggc

SEQ ID NO: 534362 - DNA, 15 bp, Homo sapiens
ttgccactctccggg

SEQ ID NO: 534363 - DNA, 15 bp, Homo sapiens
attgccactctccgg

SEQ ID NO: 534364 - DNA, 15 bp, Homo sapiens
tattgccactctccg

SEQ ID NO: 534365 - DNA, 15 bp, Homo sapiens
ctattgccactctcc

SEQ ID NO: 534366 - DNA, 15 bp, Homo sapiens
cctattgccactctc

SEQ ID NO: 534367 - DNA, 15 bp, Homo sapiens
acctattgccactct

SEQ ID NO: 534368 - DNA, 15 bp, Homo sapiens
gacctattgccactc

SEQ ID NO: 534369 - DNA, 15 bp, Homo sapiens
ggacctattgccact

SEQ ID NO: 534370 - DNA, 15 bp, Homo sapiens
gggacctattgccac

SEQ ID NO: 534371 - DNA, 15 bp, Homo sapiens
agggacctattgcca

SEQ ID NO: 534372 - DNA, 15 bp, Homo sapiens
aagggacctattgcc

SEQ ID NO: 534373 - DNA, 15 bp, Homo sapiens
gaagggacctattgc

SEQ ID NO: 534374 - DNA, 15 bp, Homo sapiens
tgaagggacctattg

SEQ ID NO: 534375 - DNA, 15 bp, Homo sapiens
gtgaagggacctatt

SEQ ID NO: 534376 - DNA, 15 bp, Homo sapiens
agtgaagggacctat

SEQ ID NO: 534377 - DNA, 15 bp, Homo sapiens
gagtgaagggaccta

SEQ ID NO: 534378 - DNA, 15 bp, Homo sapiens
ggagtgaagggacct

SEQ ID NO: 534379 - DNA, 15 bp, Homo sapiens
aggagtgaagggacc

SEQ ID NO: 534380 - DNA, 15 bp, Homo sapiens
caggagtgaagggac

SEQ ID NO: 534381 - DNA, 15 bp, Homo sapiens
gcaggagtgaaggga

SEQ ID NO: 534382 - DNA, 15 bp, Homo sapiens
agcaggagtgaaggg

SEQ ID NO: 534383 - DNA, 15 bp, Homo sapiens
aagcaggagtgaagg

SEQ ID NO: 534384 - DNA, 15 bp, Homo sapiens
gaagcaggagtgaag

SEQ ID NO: 534385 - DNA, 15 bp, Homo sapiens
agaagcaggagtgaa

SEQ ID NO: 534386 - DNA, 15 bp, Homo sapiens
gagaagcaggagtga

SEQ ID NO: 534387 - DNA, 15 bp, Homo sapiens
agagaagcaggagtg

SEQ ID NO: 534388 - DNA, 15 bp, Homo sapiens
cagagaagcaggagt

SEQ ID NO: 534389 - DNA, 15 bp, Homo sapiens
ccagagaagcaggag

SEQ ID NO: 534390 - DNA, 15 bp, Homo sapiens
cccagagaagcagga

SEQ ID NO: 534391 - DNA, 15 bp, Homo sapiens
ccccagagaagcagg

SEQ ID NO: 534392 - DNA, 15 bp, Homo sapiens
gccccagagaagcag

SEQ ID NO: 534393 - DNA, 15 bp, Homo sapiens
ggccccagagaagca

SEQ ID NO: 534394 - DNA, 15 bp, Homo sapiens
gggccccagagaagc

SEQ ID NO: 534395 - DNA, 15 bp, Homo sapiens
tgggccccagagaag

SEQ ID NO: 534396 - DNA, 15 bp, Homo sapiens
atgggccccagagaa

SEQ ID NO: 534397 - DNA, 15 bp, Homo sapiens
catgggccccagaga

SEQ ID NO: 534398 - DNA, 15 bp, Homo sapiens
ccatgggccccagag

SEQ ID NO: 534399 - DNA, 15 bp, Homo sapiens
tccatgggccccaga

SEQ ID NO: 534400 - DNA, 15 bp, Homo sapiens
ctccatgggccccag

SEQ ID NO: 534401 - DNA, 15 bp, Homo sapiens
tctccatgggcccca

SEQ ID NO: 534402 - DNA, 15 bp, Homo sapiens
atctccatgggcccc

SEQ ID NO: 534403 - DNA, 15 bp, Homo sapiens
catctccatgggccc

SEQ ID NO: 534404 - DNA, 15 bp, Homo sapiens
ccatctccatgggcc

SEQ ID NO: 534405 - DNA, 15 bp, Homo sapiens
accatctccatgggc

SEQ ID NO: 534406 - DNA, 15 bp, Homo sapiens
gaccatctccatggg

SEQ ID NO: 534407 - DNA, 15 bp, Homo sapiens
tgaccatctccatgg

SEQ ID NO: 534408 - DNA, 15 bp, Homo sapiens
gtgaccatctccatg

SEQ ID NO: 534409 - DNA, 15 bp, Homo sapiens
tgtgaccatctccat

SEQ ID NO: 534410 - DNA, 15 bp, Homo sapiens
ctgtgaccatctcca

SEQ ID NO: 534411 - DNA, 15 bp, Homo sapiens
gctgtgaccatctcc

SEQ ID NO: 534412 - DNA, 15 bp, Homo sapiens
agctgtgaccatctc

SEQ ID NO: 534413 - DNA, 15 bp, Homo sapiens
tagctgtgaccatct

SEQ ID NO: 534414 - DNA, 15 bp, Homo sapiens
ctagctgtgaccatc

SEQ ID NO: 534415 - DNA, 15 bp, Homo sapiens
cctagctgtgaccat

SEQ ID NO: 534416 - DNA, 15 bp, Homo sapiens
gcctagctgtgacca

SEQ ID NO: 534417 - DNA, 15 bp, Homo sapiens
agcctagctgtgacc

SEQ ID NO: 534418 - DNA, 15 bp, Homo sapiens
gagcctagctgtgac

SEQ ID NO: 534419 - DNA, 15 bp, Homo sapiens
ggagcctagctgtga

SEQ ID NO: 534420 - DNA, 15 bp, Homo sapiens
tggagcctagctgtg

SEQ ID NO: 534421 - DNA, 15 bp, Homo sapiens
gtggagcctagctgt

SEQ ID NO: 534422 - DNA, 15 bp, Homo sapiens
ggtggagcctagctg

SEQ ID NO: 534423 - DNA, 15 bp, Homo sapiens
gggtggagcctagct

SEQ ID NO: 534424 - DNA, 15 bp, Homo sapiens
ggggtggagcctagc

SEQ ID NO: 534425 - DNA, 15 bp, Homo sapiens
aggggtggagcctag

SEQ ID NO: 534426 - DNA, 15 bp, Homo sapiens
taggggtggagccta

SEQ ID NO: 534427 - DNA, 15 bp, Homo sapiens
gtaggggtggagcct

SEQ ID NO: 534428 - DNA, 15 bp, Homo sapiens
tgtaggggtggagcc

SEQ ID NO: 534429 - DNA, 15 bp, Homo sapiens
atgtaggggtggagc

SEQ ID NO: 534430 - DNA, 15 bp, Homo sapiens
tatgtaggggtggag

SEQ ID NO: 534431 - DNA, 15 bp, Homo sapiens
ttatgtaggggtgga

SEQ ID NO: 534432 - DNA, 15 bp, Homo sapiens
gttatgtaggggtgg

SEQ ID NO: 534433 - DNA, 15 bp, Homo sapiens
ggttatgtaggggtg

SEQ ID NO: 534434 - DNA, 15 bp, Homo sapiens
aggttatgtaggggt

SEQ ID NO: 534435 - DNA, 15 bp, Homo sapiens
gaggttatgtagggg

SEQ ID NO: 534436 - DNA, 15 bp, Homo sapiens
tgaggttatgtaggg

SEQ ID NO: 534437 - DNA, 15 bp, Homo sapiens
ctgaggttatgtagg

SEQ ID NO: 534438 - DNA, 15 bp, Homo sapiens
cctgaggttatgtag

SEQ ID NO: 534439 - DNA, 15 bp, Homo sapiens
acctgaggttatgta

SEQ ID NO: 534440 - DNA, 15 bp, Homo sapiens
aacctgaggttatgt

SEQ ID NO: 534441 - DNA, 15 bp, Homo sapiens
gaacctgaggttatg

SEQ ID NO: 534442 - DNA, 15 bp, Homo sapiens
tgaacctgaggttat

SEQ ID NO: 534443 - DNA, 15 bp, Homo sapiens
ttgaacctgaggtta

SEQ ID NO: 534444 - DNA, 15 bp, Homo sapiens
attgaacctgaggtt

SEQ ID NO: 534445 - DNA, 15 bp, Homo sapiens
aattgaacctgaggt

SEQ ID NO: 534446 - DNA, 15 bp, Homo sapiens
gaattgaacctgagg

SEQ ID NO: 534447 - DNA, 15 bp, Homo sapiens
tgaattgaacctgag

SEQ ID NO: 534448 - DNA, 15 bp, Homo sapiens
ttgaattgaacctga

SEQ ID NO: 534449 - DNA, 15 bp, Homo sapiens
gttgaattgaacctg

SEQ ID NO: 534450 - DNA, 15 bp, Homo sapiens
tgttgaattgaacct

SEQ ID NO: 534451 - DNA, 15 bp, Homo sapiens
ctgttgaattgaacc

SEQ ID NO: 534452 - DNA, 15 bp, Homo sapiens
gctgttgaattgaac

SEQ ID NO: 534453 - DNA, 15 bp, Homo sapiens
tgctgttgaattgaa

SEQ ID NO: 534454 - DNA, 15 bp, Homo sapiens
ctgctgttgaattga

SEQ ID NO: 534455 - DNA, 15 bp, Homo sapiens
actgctgttgaattg

SEQ ID NO: 534456 - DNA, 15 bp, Homo sapiens
cactgctgttgaatt

SEQ ID NO: 534457 - DNA, 15 bp, Homo sapiens
gcactgctgttgaat

SEQ ID NO: 534458 - DNA, 15 bp, Homo sapiens
agcactgctgttgaa

SEQ ID NO: 534459 - DNA, 15 bp, Homo sapiens
cagcactgctgttga

SEQ ID NO: 534460 - DNA, 15 bp, Homo sapiens
gcagcactgctgttg

SEQ ID NO: 534461 - DNA, 15 bp, Homo sapiens
agcagcactgctgtt

SEQ ID NO: 534462 - DNA, 15 bp, Homo sapiens
cagcagcactgctgt

SEQ ID NO: 534463 - DNA, 15 bp, Homo sapiens
ccagcagcactgctg

SEQ ID NO: 534464 - DNA, 15 bp, Homo sapiens
cccagcagcactgct

SEQ ID NO: 534465 - DNA, 15 bp, Homo sapiens
tcccagcagcactgc

SEQ ID NO: 534466 - DNA, 15 bp, Homo sapiens
atcccagcagcactg

SEQ ID NO: 534467 - DNA, 15 bp, Homo sapiens
tatcccagcagcact

SEQ ID NO: 534468 - DNA, 15 bp, Homo sapiens
ctatcccagcagcac

SEQ ID NO: 534469 - DNA, 15 bp, Homo sapiens
actatcccagcagca

SEQ ID NO: 534470 - DNA, 15 bp, Homo sapiens
tactatcccagcagc

SEQ ID NO: 534471 - DNA, 15 bp, Homo sapiens
ttactatcccagcag

SEQ ID NO: 534472 - DNA, 15 bp, Homo sapiens
gttactatcccagca

SEQ ID NO: 534473 - DNA, 15 bp, Homo sapiens
ggttactatcccagc

SEQ ID NO: 534474 - DNA, 15 bp, Homo sapiens
tggttactatcccag

SEQ ID NO: 534475 - DNA, 15 bp, Homo sapiens
gtggttactatccca

SEQ ID NO: 534476 - DNA, 15 bp, Homo sapiens
agtggttactatccc

SEQ ID NO: 534477 - DNA, 15 bp, Homo sapiens
tagtggttactatcc

SEQ ID NO: 534478 - DNA, 15 bp, Homo sapiens
ttagtggttactatc

SEQ ID NO: 534479 - DNA, 15 bp, Homo sapiens
tttagtggttactat

SEQ ID NO: 534480 - DNA, 15 bp, Homo sapiens
ctttagtggttacta

SEQ ID NO: 534481 - DNA, 15 bp, Homo sapiens
tctttagtggttact

SEQ ID NO: 534482 - DNA, 15 bp, Homo sapiens
ttctttagtggttac

SEQ ID NO: 534483 - DNA, 15 bp, Homo sapiens
cttctttagtggtta

SEQ ID NO: 534484 - DNA, 15 bp, Homo sapiens
acttctttagtggtt

SEQ ID NO: 534485 - DNA, 15 bp, Homo sapiens
aacttctttagtggt

SEQ ID NO: 534486 - DNA, 15 bp, Homo sapiens
caacttctttagtgg

SEQ ID NO: 534487 - DNA, 15 bp, Homo sapiens
ccaacttctttagtg

SEQ ID NO: 534488 - DNA, 15 bp, Homo sapiens
gccaacttctttagt

SEQ ID NO: 534489 - DNA, 15 bp, Homo sapiens
ggccaacttctttag

SEQ ID NO: 534490 - DNA, 15 bp, Homo sapiens
gggccaacttcttta

SEQ ID NO: 534491 - DNA, 15 bp, Homo sapiens
agggccaacttcttt

SEQ ID NO: 534492 - DNA, 15 bp, Homo sapiens
cagggccaacttctt

SEQ ID NO: 534493 - DNA, 15 bp, Homo sapiens
ccagggccaacttct

SEQ ID NO: 534494 - DNA, 15 bp, Homo sapiens
tccagggccaacttc

SEQ ID NO: 534495 - DNA, 15 bp, Homo sapiens
ctccagggccaactt

SEQ ID NO: 534496 - DNA, 15 bp, Homo sapiens
tctccagggccaact

SEQ ID NO: 534497 - DNA, 15 bp, Homo sapiens
atctccagggccaac

SEQ ID NO: 534498 - DNA, 15 bp, Homo sapiens
catctccagggccaa

SEQ ID NO: 534499 - DNA, 15 bp, Homo sapiens
ccatctccagggcca

SEQ ID NO: 534500 - DNA, 15 bp, Homo sapiens
accatctccagggcc

SEQ ID NO: 534501 - DNA, 15 bp, Homo sapiens
caccatctccagggc

SEQ ID NO: 534502 - DNA, 15 bp, Homo sapiens
ccaccatctccaggg

SEQ ID NO: 534503 - DNA, 15 bp, Homo sapiens
cccaccatctccagg

SEQ ID NO: 534504 - DNA, 15 bp, Homo sapiens
tcccaccatctccag

SEQ ID NO: 534505 - DNA, 15 bp, Homo sapiens
ctcccaccatctcca

SEQ ID NO: 534506 - DNA, 15 bp, Homo sapiens
actcccaccatctcc

SEQ ID NO: 534507 - DNA, 15 bp, Homo sapiens
cactcccaccatctc

SEQ ID NO: 534508 - DNA, 15 bp, Homo sapiens
gcactcccaccatct

SEQ ID NO: 534509 - DNA, 15 bp, Homo sapiens
ggcactcccaccatc

SEQ ID NO: 534510 - DNA, 15 bp, Homo sapiens
gggcactcccaccat

SEQ ID NO: 534511 - DNA, 15 bp, Homo sapiens
tgggcactcccacca

SEQ ID NO: 534512 - DNA, 15 bp, Homo sapiens
gtgggcactcccacc

SEQ ID NO: 534513 - DNA, 15 bp, Homo sapiens
ggtgggcactcccac

SEQ ID NO: 534514 - DNA, 15 bp, Homo sapiens
gggtgggcactccca

SEQ ID NO: 534515 - DNA, 15 bp, Homo sapiens
tgggtgggcactccc

SEQ ID NO: 534516 - DNA, 15 bp, Homo sapiens
ctgggtgggcactcc

SEQ ID NO: 534517 - DNA, 15 bp, Homo sapiens
cctgggtgggcactc

SEQ ID NO: 534518 - DNA, 15 bp, Homo sapiens
ccctgggtgggcact

SEQ ID NO: 534519 - DNA, 15 bp, Homo sapiens
accctgggtgggcac

SEQ ID NO: 534520 - DNA, 15 bp, Homo sapiens
caccctgggtgggca

SEQ ID NO: 534521 - DNA, 15 bp, Homo sapiens
gcaccctgggtgggc

SEQ ID NO: 534522 - DNA, 15 bp, Homo sapiens
tgcaccctgggtggg

SEQ ID NO: 534523 - DNA, 15 bp, Homo sapiens
ctgcaccctgggtgg

SEQ ID NO: 534524 - DNA, 15 bp, Homo sapiens
cctgcaccctgggtg

SEQ ID NO: 534525 - DNA, 15 bp, Homo sapiens
ccctgcaccctgggt

SEQ ID NO: 534526 - DNA, 15 bp, Homo sapiens
gccctgcaccctggg

SEQ ID NO: 534527 - DNA, 15 bp, Homo sapiens
agccctgcaccctgg

SEQ ID NO: 534528 - DNA, 15 bp, Homo sapiens
cagccctgcaccctg

SEQ ID NO: 534529 - DNA, 15 bp, Homo sapiens
acagccctgcaccct

SEQ ID NO: 534530 - DNA, 15 bp, Homo sapiens
aacagccctgcaccc

SEQ ID NO: 534531 - DNA, 15 bp, Homo sapiens
aaacagccctgcacc

SEQ ID NO: 534532 - DNA, 15 bp, Homo sapiens
caaacagccctgcac

SEQ ID NO: 534533 - DNA, 15 bp, Homo sapiens
acaaacagccctgca

SEQ ID NO: 534534 - DNA, 15 bp, Homo sapiens
gacaaacagccctgc

SEQ ID NO: 534535 - DNA, 15 bp, Homo sapiens
tgacaaacagccctg

SEQ ID NO: 534536 - DNA, 15 bp, Homo sapiens
ttgacaaacagccct

SEQ ID NO: 534537 - DNA, 15 bp, Homo sapiens
cttgacaaacagccc

SEQ ID NO: 534538 - DNA, 15 bp, Homo sapiens
ccttgacaaacagcc

SEQ ID NO: 534539 - DNA, 15 bp, Homo sapiens
tccttgacaaacagc

SEQ ID NO: 534540 - DNA, 15 bp, Homo sapiens
ttccttgacaaacag

SEQ ID NO: 534541 - DNA, 15 bp, Homo sapiens
cttccttgacaaaca

SEQ ID NO: 534542 - DNA, 15 bp, Homo sapiens
tcttccttgacaaac

SEQ ID NO: 534543 - DNA, 15 bp, Homo sapiens
ctcttccttgacaaa

SEQ ID NO: 534544 - DNA, 15 bp, Homo sapiens
gctcttccttgacaa

SEQ ID NO: 534545 - DNA, 15 bp, Homo sapiens
agctcttccttgaca

SEQ ID NO: 534546 - DNA, 15 bp, Homo sapiens
tagctcttccttgac

SEQ ID NO: 534547 - DNA, 15 bp, Homo sapiens
ctagctcttccttga

SEQ ID NO: 534548 - DNA, 15 bp, Homo sapiens
gctagctcttccttg

SEQ ID NO: 534549 - DNA, 15 bp, Homo sapiens
ggctagctcttcctt

SEQ ID NO: 534550 - DNA, 15 bp, Homo sapiens
cggctagctcttcct

SEQ ID NO: 534551 - DNA, 15 bp, Homo sapiens
ccggctagctcttcc

SEQ ID NO: 534552 - DNA, 15 bp, Homo sapiens
cccggctagctcttc

SEQ ID NO: 534553 - DNA, 15 bp, Homo sapiens
ccccggctagctctt

SEQ ID NO: 534554 - DNA, 15 bp, Homo sapiens
cccccggctagctct

SEQ ID NO: 534555 - DNA, 15 bp, Homo sapiens
ccccccggctagctc

SEQ ID NO: 534556 - DNA, 15 bp, Homo sapiens
cccccccggctagct

SEQ ID NO: 534557 - DNA, 15 bp, Homo sapiens
acccccccggctagc

SEQ ID NO: 534558 - DNA, 15 bp, Homo sapiens
cacccccccggctag

SEQ ID NO: 534559 - DNA, 15 bp, Homo sapiens
ccacccccccggcta

SEQ ID NO: 534560 - DNA, 15 bp, Homo sapiens
cccacccccccggct

SEQ ID NO: 534561 - DNA, 15 bp, Homo sapiens
acccacccccccggc

SEQ ID NO: 534562 - DNA, 15 bp, Homo sapiens
cacccacccccccgg

SEQ ID NO: 534563 - DNA, 15 bp, Homo sapiens
tcacccacccccccg

SEQ ID NO: 534564 - DNA, 15 bp, Homo sapiens
ctcacccaccccccc

SEQ ID NO: 534565 - DNA, 15 bp, Homo sapiens
cctcacccacccccc

SEQ ID NO: 534566 - DNA, 15 bp, Homo sapiens
tcctcacccaccccc

SEQ ID NO: 534567 - DNA, 15 bp, Homo sapiens
ctcctcacccacccc

SEQ ID NO: 534568 - DNA, 15 bp, Homo sapiens
tctcctcacccaccc

SEQ ID NO: 534569 - DNA, 15 bp, Homo sapiens
ctctcctcacccacc

SEQ ID NO: 534570 - DNA, 15 bp, Homo sapiens
cctctcctcacccac

SEQ ID NO: 534571 - DNA, 15 bp, Homo sapiens
ccctctcctcaccca

SEQ ID NO: 534572 - DNA, 15 bp, Homo sapiens
cccctctcctcaccc

SEQ ID NO: 534573 - DNA, 15 bp, Homo sapiens
ccccctctcctcacc

SEQ ID NO: 534574 - DNA, 15 bp, Homo sapiens
gccccctctcctcac

SEQ ID NO: 534575 - DNA, 15 bp, Homo sapiens
agccccctctcctca

SEQ ID NO: 534576 - DNA, 15 bp, Homo sapiens
cagccccctctcctc

SEQ ID NO: 534577 - DNA, 15 bp, Homo sapiens
acagccccctctcct

SEQ ID NO: 534578 - DNA, 15 bp, Homo sapiens
gacagccccctctcc

SEQ ID NO: 534579 - DNA, 15 bp, Homo sapiens
tgacagccccctctc

SEQ ID NO: 534580 - DNA, 15 bp, Homo sapiens
ctgacagccccctct

SEQ ID NO: 534581 - DNA, 15 bp, Homo sapiens
actgacagccccctc

SEQ ID NO: 534582 - DNA, 15 bp, Homo sapiens
aactgacagccccct

SEQ ID NO: 534583 - DNA, 15 bp, Homo sapiens
aaactgacagccccc

SEQ ID NO: 534584 - DNA, 15 bp, Homo sapiens
gaaactgacagcccc

SEQ ID NO: 534585 - DNA, 15 bp, Homo sapiens
agaaactgacagccc

SEQ ID NO: 534586 - DNA, 15 bp, Homo sapiens
cagaaactgacagcc

SEQ ID NO: 534587 - DNA, 15 bp, Homo sapiens
ccagaaactgacagc

SEQ ID NO: 534588 - DNA, 15 bp, Homo sapiens
cccagaaactgacag

SEQ ID NO: 534589 - DNA, 15 bp, Homo sapiens
acccagaaactgaca

SEQ ID NO: 534590 - DNA, 15 bp, Homo sapiens
cacccagaaactgac

SEQ ID NO: 534591 - DNA, 15 bp, Homo sapiens
acacccagaaactga

SEQ ID NO: 534592 - DNA, 15 bp, Homo sapiens
aacacccagaaactg

SEQ ID NO: 534593 - DNA, 15 bp, Homo sapiens
taacacccagaaact

SEQ ID NO: 534594 - DNA, 15 bp, Homo sapiens
ctaacacccagaaac

SEQ ID NO: 534595 - DNA, 15 bp, Homo sapiens
actaacacccagaaa

SEQ ID NO: 534596 - DNA, 15 bp, Homo sapiens
cactaacacccagaa

SEQ ID NO: 534597 - DNA, 15 bp, Homo sapiens
acactaacacccaga

SEQ ID NO: 534598 - DNA, 15 bp, Homo sapiens
cacactaacacccag

SEQ ID NO: 534599 - DNA, 15 bp, Homo sapiens
acacactaacaccca

SEQ ID NO: 534600 - DNA, 15 bp, Homo sapiens
cacacactaacaccc

SEQ ID NO: 534601 - DNA, 15 bp, Homo sapiens
acacacactaacacc

SEQ ID NO: 534602 - DNA, 15 bp, Homo sapiens
aacacacactaacac

SEQ ID NO: 534603 - DNA, 15 bp, Homo sapiens
aaacacacactaaca

SEQ ID NO: 534604 - DNA, 15 bp, Homo sapiens
aaaacacacactaac

SEQ ID NO: 534605 - DNA, 15 bp, Homo sapiens
gaaaacacacactaa

SEQ ID NO: 534606 - DNA, 15 bp, Homo sapiens
tgaaaacacacacta

SEQ ID NO: 534607 - DNA, 15 bp, Homo sapiens
ctgaaaacacacact

SEQ ID NO: 534608 - DNA, 15 bp, Homo sapiens
actgaaaacacacac

SEQ ID NO: 534609 - DNA, 15 bp, Homo sapiens
aactgaaaacacaca

SEQ ID NO: 534610 - DNA, 15 bp, Homo sapiens
aaactgaaaacacac

SEQ ID NO: 534611 - DNA, 15 bp, Homo sapiens
gaaactgaaaacaca

SEQ ID NO: 534612 - DNA, 15 bp, Homo sapiens
ggaaactgaaaacac

SEQ ID NO: 534613 - DNA, 15 bp, Homo sapiens
gggaaactgaaaaca

SEQ ID NO: 534614 - DNA, 15 bp, Homo sapiens
agggaaactgaaaac

SEQ ID NO: 534615 - DNA, 15 bp, Homo sapiens
aagggaaactgaaaa

SEQ ID NO: 534616 - DNA, 15 bp, Homo sapiens
gaagggaaactgaaa

SEQ ID NO: 534617 - DNA, 15 bp, Homo sapiens
agaagggaaactgaa

SEQ ID NO: 534618 - DNA, 15 bp, Homo sapiens
aagaagggaaactga

SEQ ID NO: 534619 - DNA, 15 bp, Homo sapiens
taagaagggaaactg

SEQ ID NO: 534620 - DNA, 15 bp, Homo sapiens
ataagaagggaaact

SEQ ID NO: 534621 - DNA, 15 bp, Homo sapiens
tataagaagggaaac

SEQ ID NO: 534622 - DNA, 15 bp, Homo sapiens
ttataagaagggaaa

SEQ ID NO: 534623 - DNA, 15 bp, Homo sapiens
tttataagaagggaa

SEQ ID NO: 534624 - DNA, 15 bp, Homo sapiens
ttttataagaaggga

SEQ ID NO: 534625 - DNA, 15 bp, Homo sapiens
gttttataagaaggg

SEQ ID NO: 534626 - DNA, 15 bp, Homo sapiens
tgttttataagaagg

SEQ ID NO: 534627 - DNA, 15 bp, Homo sapiens
ctgttttataagaag

SEQ ID NO: 534628 - DNA, 15 bp, Homo sapiens
actgttttataagaa

SEQ ID NO: 534629 - DNA, 15 bp, Homo sapiens
cactgttttataaga

SEQ ID NO: 534630 - DNA, 15 bp, Homo sapiens
tcactgttttataag

SEQ ID NO: 534631 - DNA, 15 bp, Homo sapiens
ctcactgttttataa

SEQ ID NO: 534632 - DNA, 15 bp, Homo sapiens
tctcactgttttata

SEQ ID NO: 534633 - DNA, 15 bp, Homo sapiens
ttctcactgttttat

SEQ ID NO: 534634 - DNA, 15 bp, Homo sapiens
attctcactgtttta

SEQ ID NO: 534635 - DNA, 15 bp, Homo sapiens
aattctcactgtttt

SEQ ID NO: 534636 - DNA, 15 bp, Homo sapiens
taattctcactgttt

SEQ ID NO: 534637 - DNA, 15 bp, Homo sapiens
ctaattctcactgtt

SEQ ID NO: 534638 - DNA, 15 bp, Homo sapiens
gctaattctcactgt

SEQ ID NO: 534639 - DNA, 15 bp, Homo sapiens
agctaattctcactg

SEQ ID NO: 534640 - DNA, 15 bp, Homo sapiens
cagctaattctcact

SEQ ID NO: 534641 - DNA, 15 bp, Homo sapiens
acagctaattctcac

SEQ ID NO: 534642 - DNA, 15 bp, Homo sapiens
aacagctaattctca

SEQ ID NO: 534643 - DNA, 15 bp, Homo sapiens
aaacagctaattctc

SEQ ID NO: 534644 - DNA, 15 bp, Homo sapiens
taaacagctaattct

SEQ ID NO: 534645 - DNA, 15 bp, Homo sapiens
gtaaacagctaattc

SEQ ID NO: 534646 - DNA, 15 bp, Homo sapiens
tgtaaacagctaatt

SEQ ID NO: 534647 - DNA, 15 bp, Homo sapiens
gtgtaaacagctaat

SEQ ID NO: 534648 - DNA, 15 bp, Homo sapiens
tgtgtaaacagctaa

SEQ ID NO: 534649 - DNA, 15 bp, Homo sapiens
gtgtgtaaacagcta

SEQ ID NO: 534650 - DNA, 15 bp, Homo sapiens
tgtgtgtaaacagct

SEQ ID NO: 534651 - DNA, 15 bp, Homo sapiens
ttgtgtgtaaacagc

SEQ ID NO: 534652 - DNA, 15 bp, Homo sapiens
cttgtgtgtaaacag

SEQ ID NO: 534653 - DNA, 15 bp, Homo sapiens
ccttgtgtgtaaaca

SEQ ID NO: 534654 - DNA, 15 bp, Homo sapiens
tccttgtgtgtaaac

SEQ ID NO: 534655 - DNA, 15 bp, Homo sapiens
ttccttgtgtgtaaa

SEQ ID NO: 534656 - DNA, 15 bp, Homo sapiens
attccttgtgtgtaa

SEQ ID NO: 534657 - DNA, 15 bp, Homo sapiens
aattccttgtgtgta

SEQ ID NO: 534658 - DNA, 15 bp, Homo sapiens
caattccttgtgtgt

SEQ ID NO: 534659 - DNA, 15 bp, Homo sapiens
acaattccttgtgtg

SEQ ID NO: 534660 - DNA, 15 bp, Homo sapiens
aacaattccttgtgt

SEQ ID NO: 534661 - DNA, 15 bp, Homo sapiens
aaacaattccttgtg

SEQ ID NO: 534662 - DNA, 15 bp, Homo sapiens
taaacaattccttgt

SEQ ID NO: 534663 - DNA, 15 bp, Homo sapiens
gtaaacaattccttg

SEQ ID NO: 534664 - DNA, 15 bp, Homo sapiens
ggtaaacaattcctt

SEQ ID NO: 534665 - DNA, 15 bp, Homo sapiens
aggtaaacaattcct

SEQ ID NO: 534666 - DNA, 15 bp, Homo sapiens
caggtaaacaattcc

SEQ ID NO: 534667 - DNA, 15 bp, Homo sapiens
tcaggtaaacaattc

SEQ ID NO: 534668 - DNA, 15 bp, Homo sapiens
ctcaggtaaacaatt

SEQ ID NO: 534669 - DNA, 15 bp, Homo sapiens
tctcaggtaaacaat

SEQ ID NO: 534670 - DNA, 15 bp, Homo sapiens
gtctcaggtaaacaa

SEQ ID NO: 534671 - DNA, 15 bp, Homo sapiens
ggtctcaggtaaaca

SEQ ID NO: 534672 - DNA, 15 bp, Homo sapiens
aggtctcaggtaaac

SEQ ID NO: 534673 - DNA, 15 bp, Homo sapiens
aaggtctcaggtaaa

SEQ ID NO: 534674 - DNA, 15 bp, Homo sapiens
caaggtctcaggtaa

SEQ ID NO: 534675 - DNA, 15 bp, Homo sapiens
tcaaggtctcaggta

SEQ ID NO: 534676 - DNA, 15 bp, Homo sapiens
atcaaggtctcaggt

SEQ ID NO: 534677 - DNA, 15 bp, Homo sapiens
gatcaaggtctcagg

SEQ ID NO: 534678 - DNA, 15 bp, Homo sapiens
tgatcaaggtctcag

SEQ ID NO: 534679 - DNA, 15 bp, Homo sapiens
ttgatcaaggtctca

SEQ ID NO: 534680 - DNA, 15 bp, Homo sapiens
cttgatcaaggtctc

SEQ ID NO: 534681 - DNA, 15 bp, Homo sapiens
tcttgatcaaggtct

SEQ ID NO: 534682 - DNA, 15 bp, Homo sapiens
gtcttgatcaaggtc

SEQ ID NO: 534683 - DNA, 15 bp, Homo sapiens
ggtcttgatcaaggt

SEQ ID NO: 534684 - DNA, 15 bp, Homo sapiens
gggtcttgatcaagg

SEQ ID NO: 534685 - DNA, 15 bp, Homo sapiens
agggtcttgatcaag

SEQ ID NO: 534686 - DNA, 15 bp, Homo sapiens
aagggtcttgatcaa

SEQ ID NO: 534687 - DNA, 15 bp, Homo sapiens
taagggtcttgatca

SEQ ID NO: 534688 - DNA, 15 bp, Homo sapiens
ttaagggtcttgatc

SEQ ID NO: 534689 - DNA, 15 bp, Homo sapiens
tttaagggtcttgat

SEQ ID NO: 534690 - DNA, 15 bp, Homo sapiens
atttaagggtcttga

SEQ ID NO: 534691 - DNA, 15 bp, Homo sapiens
gatttaagggtcttg

SEQ ID NO: 534692 - DNA, 15 bp, Homo sapiens
agatttaagggtctt

SEQ ID NO: 534693 - DNA, 15 bp, Homo sapiens
gagatttaagggtct

SEQ ID NO: 534694 - DNA, 15 bp, Homo sapiens
ggagatttaagggtc

SEQ ID NO: 534695 - DNA, 15 bp, Homo sapiens
gggagatttaagggt

SEQ ID NO: 534696 - DNA, 15 bp, Homo sapiens
agggagatttaaggg

SEQ ID NO: 534697 - DNA, 15 bp, Homo sapiens
gagggagatttaagg

SEQ ID NO: 534698 - DNA, 15 bp, Homo sapiens
agagggagatttaag

SEQ ID NO: 534699 - DNA, 15 bp, Homo sapiens
gagagggagatttaa

SEQ ID NO: 534700 - DNA, 15 bp, Homo sapiens
tgagagggagattta

SEQ ID NO: 534701 - DNA, 15 bp, Homo sapiens
gtgagagggagattt

SEQ ID NO: 534702 - DNA, 15 bp, Homo sapiens
tgtgagagggagatt

SEQ ID NO: 534703 - DNA, 15 bp, Homo sapiens
gtgtgagagggagat

SEQ ID NO: 534704 - DNA, 15 bp, Homo sapiens
agtgtgagagggaga

SEQ ID NO: 534705 - DNA, 15 bp, Homo sapiens
tagtgtgagagggag

SEQ ID NO: 534706 - DNA, 15 bp, Homo sapiens
gtagtgtgagaggga

SEQ ID NO: 534707 - DNA, 15 bp, Homo sapiens
ggtagtgtgagaggg

SEQ ID NO: 534708 - DNA, 15 bp, Homo sapiens
gggtagtgtgagagg

SEQ ID NO: 534709 - DNA, 15 bp, Homo sapiens
ggggtagtgtgagag

SEQ ID NO: 534710 - DNA, 15 bp, Homo sapiens
gggggtagtgtgaga

SEQ ID NO: 534711 - DNA, 15 bp, Homo sapiens
tgggggtagtgtgag

SEQ ID NO: 534712 - DNA, 15 bp, Homo sapiens
ctgggggtagtgtga

SEQ ID NO: 534713 - DNA, 15 bp, Homo sapiens
gctgggggtagtgtg

SEQ ID NO: 534714 - DNA, 15 bp, Homo sapiens
agctgggggtagtgt

SEQ ID NO: 534715 - DNA, 15 bp, Homo sapiens
aagctgggggtagtg

SEQ ID NO: 534716 - DNA, 15 bp, Homo sapiens
gaagctgggggtagt

SEQ ID NO: 534717 - DNA, 15 bp, Homo sapiens
ggaagctgggggtag

SEQ ID NO: 534718 - DNA, 15 bp, Homo sapiens
tggaagctgggggta

SEQ ID NO: 534719 - DNA, 15 bp, Homo sapiens
gtggaagctgggggt

SEQ ID NO: 534720 - DNA, 15 bp, Homo sapiens
tgtggaagctggggg

SEQ ID NO: 534721 - DNA, 15 bp, Homo sapiens
ctgtggaagctgggg

SEQ ID NO: 534722 - DNA, 15 bp, Homo sapiens
gctgtggaagctggg

SEQ ID NO: 534723 - DNA, 15 bp, Homo sapiens
cgctgtggaagctgg

SEQ ID NO: 534724 - DNA, 15 bp, Homo sapiens
gcgctgtggaagctg

SEQ ID NO: 534725 - DNA, 15 bp, Homo sapiens
cgcgctgtggaagct

SEQ ID NO: 534726 - DNA, 15 bp, Homo sapiens
ccgcgctgtggaagc

SEQ ID NO: 534727 - DNA, 15 bp, Homo sapiens
gccgcgctgtggaag

SEQ ID NO: 534728 - DNA, 15 bp, Homo sapiens
tgccgcgctgtggaa

SEQ ID NO: 534729 - DNA, 15 bp, Homo sapiens
gtgccgcgctgtgga

SEQ ID NO: 534730 - DNA, 15 bp, Homo sapiens
ggtgccgcgctgtgg

SEQ ID NO: 534731 - DNA, 15 bp, Homo sapiens
aggtgccgcgctgtg

SEQ ID NO: 534732 - DNA, 15 bp, Homo sapiens
caggtgccgcgctgt

SEQ ID NO: 534733 - DNA, 15 bp, Homo sapiens
acaggtgccgcgctg

SEQ ID NO: 534734 - DNA, 15 bp, Homo sapiens
tacaggtgccgcgct

SEQ ID NO: 534735 - DNA, 15 bp, Homo sapiens
gtacaggtgccgcgc

SEQ ID NO: 534736 - DNA, 15 bp, Homo sapiens
ggtacaggtgccgcg

SEQ ID NO: 534737 - DNA, 15 bp, Homo sapiens
aggtacaggtgccgc

SEQ ID NO: 534738 - DNA, 15 bp, Homo sapiens
gaggtacaggtgccg

SEQ ID NO: 534739 - DNA, 15 bp, Homo sapiens
ggaggtacaggtgcc

SEQ ID NO: 534740 - DNA, 15 bp, Homo sapiens
cggaggtacaggtgc

SEQ ID NO: 534741 - DNA, 15 bp, Homo sapiens
ccggaggtacaggtg

SEQ ID NO: 534742 - DNA, 15 bp, Homo sapiens
cccggaggtacaggt

SEQ ID NO: 534743 - DNA, 15 bp, Homo sapiens
ccccggaggtacagg

SEQ ID NO: 534744 - DNA, 15 bp, Homo sapiens
accccggaggtacag

SEQ ID NO: 534745 - DNA, 15 bp, Homo sapiens
caccccggaggtaca

SEQ ID NO: 534746 - DNA, 15 bp, Homo sapiens
ccaccccggaggtac

SEQ ID NO: 534747 - DNA, 15 bp, Homo sapiens
gccaccccggaggta

SEQ ID NO: 534748 - DNA, 15 bp, Homo sapiens
cgccaccccggaggt

SEQ ID NO: 534749 - DNA, 15 bp, Homo sapiens
gcgccaccccggagg

SEQ ID NO: 534750 - DNA, 15 bp, Homo sapiens
agcgccaccccggag

SEQ ID NO: 534751 - DNA, 15 bp, Homo sapiens
cagcgccaccccgga

SEQ ID NO: 534752 - DNA, 15 bp, Homo sapiens
ccagcgccaccccgg

SEQ ID NO: 534753 - DNA, 15 bp, Homo sapiens
cccagcgccaccccg

SEQ ID NO: 534754 - DNA, 15 bp, Homo sapiens
ccccagcgccacccc

SEQ ID NO: 534755 - DNA, 15 bp, Homo sapiens
accccagcgccaccc

SEQ ID NO: 534756 - DNA, 15 bp, Homo sapiens
aaccccagcgccacc

SEQ ID NO: 534757 - DNA, 15 bp, Homo sapiens
caaccccagcgccac

SEQ ID NO: 534758 - DNA, 15 bp, Homo sapiens
ccaaccccagcgcca

SEQ ID NO: 534759 - DNA, 15 bp, Homo sapiens
gccaaccccagcgcc

SEQ ID NO: 534760 - DNA, 15 bp, Homo sapiens
agccaaccccagcgc

SEQ ID NO: 534761 - DNA, 15 bp, Homo sapiens
gagccaaccccagcg

SEQ ID NO: 534762 - DNA, 15 bp, Homo sapiens
ggagccaaccccagc

SEQ ID NO: 534763 - DNA, 15 bp, Homo sapiens
tggagccaaccccag

SEQ ID NO: 534764 - DNA, 15 bp, Homo sapiens
atggagccaacccca

SEQ ID NO: 534765 - DNA, 15 bp, Homo sapiens
catggagccaacccc

SEQ ID NO: 534766 - DNA, 15 bp, Homo sapiens
tcatggagccaaccc

SEQ ID NO: 534767 - DNA, 15 bp, Homo sapiens
gtcatggagccaacc

SEQ ID NO: 534768 - DNA, 15 bp, Homo sapiens
ggtcatggagccaac

SEQ ID NO: 534769 - DNA, 15 bp, Homo sapiens
tggtcatggagccaa

SEQ ID NO: 534770 - DNA, 15 bp, Homo sapiens
ttggtcatggagcca

SEQ ID NO: 534771 - DNA, 15 bp, Homo sapiens
cttggtcatggagcc

SEQ ID NO: 534772 - DNA, 15 bp, Homo sapiens
tcttggtcatggagc

SEQ ID NO: 534773 - DNA, 15 bp, Homo sapiens
atcttggtcatggag

SEQ ID NO: 534774 - DNA, 15 bp, Homo sapiens
gatcttggtcatgga

SEQ ID NO: 534775 - DNA, 15 bp, Homo sapiens
agatcttggtcatgg

SEQ ID NO: 534776 - DNA, 15 bp, Homo sapiens
tagatcttggtcatg

SEQ ID NO: 534777 - DNA, 15 bp, Homo sapiens
atagatcttggtcat

SEQ ID NO: 534778 - DNA, 15 bp, Homo sapiens
catagatcttggtca

SEQ ID NO: 534779 - DNA, 15 bp, Homo sapiens
ccatagatcttggtc

SEQ ID NO: 534780 - DNA, 15 bp, Homo sapiens
cccatagatcttggt

SEQ ID NO: 534781 - DNA, 15 bp, Homo sapiens
ccccatagatcttgg

SEQ ID NO: 534782 - DNA, 15 bp, Homo sapiens
cccccatagatcttg

SEQ ID NO: 534783 - DNA, 15 bp, Homo sapiens
tcccccatagatctt

SEQ ID NO: 534784 - DNA, 15 bp, Homo sapiens
gtcccccatagatct

SEQ ID NO: 534785 - DNA, 15 bp, Homo sapiens
cgtcccccatagatc

SEQ ID NO: 534786 - DNA, 15 bp, Homo sapiens
acgtcccccatagat

SEQ ID NO: 534787 - DNA, 15 bp, Homo sapiens
gacgtcccccataga

SEQ ID NO: 534788 - DNA, 15 bp, Homo sapiens
tgacgtcccccatag

SEQ ID NO: 534789 - DNA, 15 bp, Homo sapiens
ctgacgtcccccata

SEQ ID NO: 534790 - DNA, 15 bp, Homo sapiens
tctgacgtcccccat

SEQ ID NO: 534791 - DNA, 15 bp, Homo sapiens
ctctgacgtccccca

SEQ ID NO: 534792 - DNA, 15 bp, Homo sapiens
tctctgacgtccccc

SEQ ID NO: 534793 - DNA, 15 bp, Homo sapiens
ttctctgacgtcccc

SEQ ID NO: 534794 - DNA, 15 bp, Homo sapiens
tttctctgacgtccc

SEQ ID NO: 534795 - DNA, 15 bp, Homo sapiens
gtttctctgacgtcc

SEQ ID NO: 534796 - DNA, 15 bp, Homo sapiens
cgtttctctgacgtc

SEQ ID NO: 534797 - DNA, 15 bp, Homo sapiens
ccgtttctctgacgt

SEQ ID NO: 534798 - DNA, 15 bp, Homo sapiens
gccgtttctctgacg

SEQ ID NO: 534799 - DNA, 15 bp, Homo sapiens
cgccgtttctctgac

SEQ ID NO: 534800 - DNA, 15 bp, Homo sapiens
acgccgtttctctga

SEQ ID NO: 534801 - DNA, 15 bp, Homo sapiens
gacgccgtttctctg

SEQ ID NO: 534802 - DNA, 15 bp, Homo sapiens
tgacgccgtttctct

SEQ ID NO: 534803 - DNA, 15 bp, Homo sapiens
atgacgccgtttctc

SEQ ID NO: 534804 - DNA, 15 bp, Homo sapiens
catgacgccgtttct

SEQ ID NO: 534805 - DNA, 15 bp, Homo sapiens
gcatgacgccgtttc

SEQ ID NO: 534806 - DNA, 15 bp, Homo sapiens
ggcatgacgccgttt

SEQ ID NO: 534807 - DNA, 15 bp, Homo sapiens
gggcatgacgccgtt

SEQ ID NO: 534808 - DNA, 15 bp, Homo sapiens
tgggcatgacgccgt

SEQ ID NO: 534809 - DNA, 15 bp, Homo sapiens
ctgggcatgacgccg

SEQ ID NO: 534810 - DNA, 15 bp, Homo sapiens
gctgggcatgacgcc

SEQ ID NO: 534811 - DNA, 15 bp, Homo sapiens
ggctgggcatgacgc

SEQ ID NO: 534812 - DNA, 15 bp, Homo sapiens
tggctgggcatgacg

SEQ ID NO: 534813 - DNA, 15 bp, Homo sapiens
gtggctgggcatgac

SEQ ID NO: 534814 - DNA, 15 bp, Homo sapiens
agtggctgggcatga

SEQ ID NO: 534815 - DNA, 15 bp, Homo sapiens
aagtggctgggcatg

SEQ ID NO: 534816 - DNA, 15 bp, Homo sapiens
gaagtggctgggcat

SEQ ID NO: 534817 - DNA, 15 bp, Homo sapiens
tgaagtggctgggca

SEQ ID NO: 534818 - DNA, 15 bp, Homo sapiens
ctgaagtggctgggc

SEQ ID NO: 534819 - DNA, 15 bp, Homo sapiens
gctgaagtggctggg

SEQ ID NO: 534820 - DNA, 15 bp, Homo sapiens
ggctgaagtggctgg

SEQ ID NO: 534821 - DNA, 15 bp, Homo sapiens
cggctgaagtggctg

SEQ ID NO: 534822 - DNA, 15 bp, Homo sapiens
tcggctgaagtggct

SEQ ID NO: 534823 - DNA, 15 bp, Homo sapiens
ctcggctgaagtggc

SEQ ID NO: 534824 - DNA, 15 bp, Homo sapiens
cctcggctgaagtgg

SEQ ID NO: 534825 - DNA, 15 bp, Homo sapiens
gcctcggctgaagtg

SEQ ID NO: 534826 - DNA, 15 bp, Homo sapiens
agcctcggctgaagt

SEQ ID NO: 534827 - DNA, 15 bp, Homo sapiens
gagcctcggctgaag

SEQ ID NO: 534828 - DNA, 15 bp, Homo sapiens
ggagcctcggctgaa

SEQ ID NO: 534829 - DNA, 15 bp, Homo sapiens
tggagcctcggctga

SEQ ID NO: 534830 - DNA, 15 bp, Homo sapiens
ttggagcctcggctg

SEQ ID NO: 534831 - DNA, 15 bp, Homo sapiens
cttggagcctcggct

SEQ ID NO: 534832 - DNA, 15 bp, Homo sapiens
tcttggagcctcggc

SEQ ID NO: 534833 - DNA, 15 bp, Homo sapiens
ctcttggagcctcgg

SEQ ID NO: 534834 - DNA, 15 bp, Homo sapiens
actcttggagcctcg

SEQ ID NO: 534835 - DNA, 15 bp, Homo sapiens
cactcttggagcctc

SEQ ID NO: 534836 - DNA, 15 bp, Homo sapiens
acactcttggagcct

SEQ ID NO: 534837 - DNA, 15 bp, Homo sapiens
cacactcttggagcc

SEQ ID NO: 534838 - DNA, 15 bp, Homo sapiens
ccacactcttggagc

SEQ ID NO: 534839 - DNA, 15 bp, Homo sapiens
gccacactcttggag

SEQ ID NO: 534840 - DNA, 15 bp, Homo sapiens
ggccacactcttgga

SEQ ID NO: 534841 - DNA, 15 bp, Homo sapiens
gggccacactcttgg

SEQ ID NO: 534842 - DNA, 15 bp, Homo sapiens
cgggccacactcttg

SEQ ID NO: 534843 - DNA, 15 bp, Homo sapiens
gcgggccacactctt

SEQ ID NO: 534844 - DNA, 15 bp, Homo sapiens
ggcgggccacactct

SEQ ID NO: 534845 - DNA, 15 bp, Homo sapiens
cggcgggccacactc

SEQ ID NO: 534846 - DNA, 15 bp, Homo sapiens
ccggcgggccacact

SEQ ID NO: 534847 - DNA, 15 bp, Homo sapiens
cccggcgggccacac

SEQ ID NO: 534848 - DNA, 15 bp, Homo sapiens
acccggcgggccaca

SEQ ID NO: 534849 - DNA, 15 bp, Homo sapiens
gacccggcgggccac

SEQ ID NO: 534850 - DNA, 15 bp, Homo sapiens
ggacccggcgggcca

SEQ ID NO: 534851 - DNA, 15 bp, Homo sapiens
aggacccggcgggcc

SEQ ID NO: 534852 - DNA, 15 bp, Homo sapiens
gaggacccggcgggc

SEQ ID NO: 534853 - DNA, 15 bp, Homo sapiens
ggaggacccggcggg

SEQ ID NO: 534854 - DNA, 15 bp, Homo sapiens
tggaggacccggcgg

SEQ ID NO: 534855 - DNA, 15 bp, Homo sapiens
ttggaggacccggcg

SEQ ID NO: 534856 - DNA, 15 bp, Homo sapiens
cttggaggacccggc

SEQ ID NO: 534857 - DNA, 15 bp, Homo sapiens
gcttggaggacccgg

SEQ ID NO: 534858 - DNA, 15 bp, Homo sapiens
ggcttggaggacccg

SEQ ID NO: 534859 - DNA, 15 bp, Homo sapiens
gggcttggaggaccc

SEQ ID NO: 534860 - DNA, 15 bp, Homo sapiens
agggcttggaggacc

SEQ ID NO: 534861 - DNA, 15 bp, Homo sapiens
cagggcttggaggac

SEQ ID NO: 534862 - DNA, 15 bp, Homo sapiens
ccagggcttggagga

SEQ ID NO: 534863 - DNA, 15 bp, Homo sapiens
tccagggcttggagg

SEQ ID NO: 534864 - DNA, 15 bp, Homo sapiens
ctccagggcttggag

SEQ ID NO: 534865 - DNA, 15 bp, Homo sapiens
cctccagggcttgga

SEQ ID NO: 534866 - DNA, 15 bp, Homo sapiens
ccctccagggcttgg

SEQ ID NO: 534867 - DNA, 15 bp, Homo sapiens
cccctccagggcttg

SEQ ID NO: 534868 - DNA, 15 bp, Homo sapiens
gcccctccagggctt

SEQ ID NO: 534869 - DNA, 15 bp, Homo sapiens
agcccctccagggct

SEQ ID NO: 534870 - DNA, 15 bp, Homo sapiens
cagcccctccagggc

SEQ ID NO: 534871 - DNA, 15 bp, Homo sapiens
tcagcccctccaggg

SEQ ID NO: 534872 - DNA, 15 bp, Homo sapiens
ttcagcccctccagg

SEQ ID NO: 534873 - DNA, 15 bp, Homo sapiens
tttcagcccctccag

SEQ ID NO: 534874 - DNA, 15 bp, Homo sapiens
ttttcagcccctcca

SEQ ID NO: 534875 - DNA, 15 bp, Homo sapiens
attttcagcccctcc

SEQ ID NO: 534876 - DNA, 15 bp, Homo sapiens
cattttcagcccctc

SEQ ID NO: 534877 - DNA, 15 bp, Homo sapiens
ccattttcagcccct

SEQ ID NO: 534878 - DNA, 15 bp, Homo sapiens
accattttcagcccc

SEQ ID NO: 534879 - DNA, 15 bp, Homo sapiens
caccattttcagccc

SEQ ID NO: 534880 - DNA, 15 bp, Homo sapiens
ccaccattttcagcc

SEQ ID NO: 534881 - DNA, 15 bp, Homo sapiens
tccaccattttcagc

SEQ ID NO: 534882 - DNA, 15 bp, Homo sapiens
ttccaccattttcag

SEQ ID NO: 534883 - DNA, 15 bp, Homo sapiens
tttccaccattttca

SEQ ID NO: 534884 - DNA, 15 bp, Homo sapiens
ttttccaccattttc

SEQ ID NO: 534885 - DNA, 15 bp, Homo sapiens
cttttccaccatttt

SEQ ID NO: 534886 - DNA, 15 bp, Homo sapiens
ccttttccaccattt

SEQ ID NO: 534887 - DNA, 15 bp, Homo sapiens
tccttttccaccatt

SEQ ID NO: 534888 - DNA, 15 bp, Homo sapiens
gtccttttccaccat

SEQ ID NO: 534889 - DNA, 15 bp, Homo sapiens
ggtccttttccacca

SEQ ID NO: 534890 - DNA, 15 bp, Homo sapiens
tggtccttttccacc

SEQ ID NO: 534891 - DNA, 15 bp, Homo sapiens
ttggtccttttccac

SEQ ID NO: 534892 - DNA, 15 bp, Homo sapiens
cttggtccttttcca

SEQ ID NO: 534893 - DNA, 15 bp, Homo sapiens
tcttggtccttttcc

SEQ ID NO: 534894 - DNA, 15 bp, Homo sapiens
atcttggtccttttc

SEQ ID NO: 534895 - DNA, 15 bp, Homo sapiens
catcttggtcctttt

SEQ ID NO: 534896 - DNA, 15 bp, Homo sapiens
ccatcttggtccttt

SEQ ID NO: 534897 - DNA, 15 bp, Homo sapiens
cccatcttggtcctt

SEQ ID NO: 534898 - DNA, 15 bp, Homo sapiens
acccatcttggtcct

SEQ ID NO: 534899 - DNA, 15 bp, Homo sapiens
tacccatcttggtcc

SEQ ID NO: 534900 - DNA, 15 bp, Homo sapiens
ttacccatcttggtc

SEQ ID NO: 534901 - DNA, 15 bp, Homo sapiens
cttacccatcttggt

SEQ ID NO: 534902 - DNA, 15 bp, Homo sapiens
gcttacccatcttgg

SEQ ID NO: 534903 - DNA, 15 bp, Homo sapiens
tgcttacccatcttg

SEQ ID NO: 534904 - DNA, 15 bp, Homo sapiens
ctgcttacccatctt

SEQ ID NO: 534905 - DNA, 15 bp, Homo sapiens
cctgcttacccatct

SEQ ID NO: 534906 - DNA, 15 bp, Homo sapiens
ccctgcttacccatc

SEQ ID NO: 534907 - DNA, 15 bp, Homo sapiens
accctgcttacccat

SEQ ID NO: 534908 - DNA, 15 bp, Homo sapiens
taccctgcttaccca

SEQ ID NO: 534909 - DNA, 15 bp, Homo sapiens
ctaccctgcttaccc

SEQ ID NO: 534910 - DNA, 15 bp, Homo sapiens
cctaccctgcttacc

SEQ ID NO: 534911 - DNA, 15 bp, Homo sapiens
ccctaccctgcttac

SEQ ID NO: 534912 - DNA, 15 bp, Homo sapiens
cccctaccctgctta

SEQ ID NO: 534913 - DNA, 15 bp, Homo sapiens
ccccctaccctgctt

SEQ ID NO: 534914 - DNA, 15 bp, Homo sapiens
cccccctaccctgct

SEQ ID NO: 534915 - DNA, 15 bp, Homo sapiens
ccccccctaccctgc

SEQ ID NO: 534916 - DNA, 15 bp, Homo sapiens
gccccccctaccctg

SEQ ID NO: 534917 - DNA, 15 bp, Homo sapiens
agccccccctaccct

SEQ ID NO: 534918 - DNA, 15 bp, Homo sapiens
cagccccccctaccc

SEQ ID NO: 534919 - DNA, 15 bp, Homo sapiens
gcagccccccctacc

SEQ ID NO: 534920 - DNA, 15 bp, Homo sapiens
tgcagccccccctac

SEQ ID NO: 534921 - DNA, 15 bp, Homo sapiens
atgcagcccccccta

SEQ ID NO: 534922 - DNA, 15 bp, Homo sapiens
aatgcagccccccct

SEQ ID NO: 534923 - DNA, 15 bp, Homo sapiens
caatgcagccccccc

SEQ ID NO: 534924 - DNA, 15 bp, Homo sapiens
tcaatgcagcccccc

SEQ ID NO: 534925 - DNA, 15 bp, Homo sapiens
atcaatgcagccccc

SEQ ID NO: 534926 - DNA, 15 bp, Homo sapiens
catcaatgcagcccc

SEQ ID NO: 534927 - DNA, 15 bp, Homo sapiens
ccatcaatgcagccc

SEQ ID NO: 534928 - DNA, 15 bp, Homo sapiens
tccatcaatgcagcc

SEQ ID NO: 534929 - DNA, 15 bp, Homo sapiens
ctccatcaatgcagc

SEQ ID NO: 534930 - DNA, 15 bp, Homo sapiens
actccatcaatgcag

SEQ ID NO: 534931 - DNA, 15 bp, Homo sapiens
tactccatcaatgca

SEQ ID NO: 534932 - DNA, 15 bp, Homo sapiens
ctactccatcaatgc

SEQ ID NO: 534933 - DNA, 15 bp, Homo sapiens
gctactccatcaatg

SEQ ID NO: 534934 - DNA, 15 bp, Homo sapiens
ggctactccatcaat

SEQ ID NO: 534935 - DNA, 15 bp, Homo sapiens
aggctactccatcaa

SEQ ID NO: 534936 - DNA, 15 bp, Homo sapiens
aaggctactccatca

SEQ ID NO: 534937 - DNA, 15 bp, Homo sapiens
caaggctactccatc

SEQ ID NO: 534938 - DNA, 15 bp, Homo sapiens
tcaaggctactccat

SEQ ID NO: 534939 - DNA, 15 bp, Homo sapiens
ctcaaggctactcca

SEQ ID NO: 534940 - DNA, 15 bp, Homo sapiens
cctcaaggctactcc

SEQ ID NO: 534941 - DNA, 15 bp, Homo sapiens
gcctcaaggctactc

SEQ ID NO: 534942 - DNA, 15 bp, Homo sapiens
ggcctcaaggctact

SEQ ID NO: 534943 - DNA, 15 bp, Homo sapiens
gggcctcaaggctac

SEQ ID NO: 534944 - DNA, 15 bp, Homo sapiens
cgggcctcaaggcta

SEQ ID NO: 534945 - DNA, 15 bp, Homo sapiens
ccgggcctcaaggct

SEQ ID NO: 534946 - DNA, 15 bp, Homo sapiens
accgggcctcaaggc

SEQ ID NO: 534947 - DNA, 15 bp, Homo sapiens
gaccgggcctcaagg

SEQ ID NO: 534948 - DNA, 15 bp, Homo sapiens
tgaccgggcctcaag

SEQ ID NO: 534949 - DNA, 15 bp, Homo sapiens
atgaccgggcctcaa

SEQ ID NO: 534950 - DNA, 15 bp, Homo sapiens
gatgaccgggcctca

SEQ ID NO: 534951 - DNA, 15 bp, Homo sapiens
tgatgaccgggcctc

SEQ ID NO: 534952 - DNA, 15 bp, Homo sapiens
ttgatgaccgggcct

SEQ ID NO: 534953 - DNA, 15 bp, Homo sapiens
attgatgaccgggcc

SEQ ID NO: 534954 - DNA, 15 bp, Homo sapiens
aattgatgaccgggc

SEQ ID NO: 534955 - DNA, 15 bp, Homo sapiens
gaattgatgaccggg

SEQ ID NO: 534956 - DNA, 15 bp, Homo sapiens
ggaattgatgaccgg

SEQ ID NO: 534957 - DNA, 15 bp, Homo sapiens
gggaattgatgaccg

SEQ ID NO: 534958 - DNA, 15 bp, Homo sapiens
ggggaattgatgacc

SEQ ID NO: 534959 - DNA, 15 bp, Homo sapiens
tggggaattgatgac

SEQ ID NO: 534960 - DNA, 15 bp, Homo sapiens
ttggggaattgatga

SEQ ID NO: 534961 - DNA, 15 bp, Homo sapiens
gttggggaattgatg

SEQ ID NO: 534962 - DNA, 15 bp, Homo sapiens
cgttggggaattgat

SEQ ID NO: 534963 - DNA, 15 bp, Homo sapiens
tcgttggggaattga

SEQ ID NO: 534964 - DNA, 15 bp, Homo sapiens
ttcgttggggaattg

SEQ ID NO: 534965 - DNA, 15 bp, Homo sapiens
attcgttggggaatt

SEQ ID NO: 534966 - DNA, 15 bp, Homo sapiens
cattcgttggggaat

SEQ ID NO: 534967 - DNA, 15 bp, Homo sapiens
ccattcgttggggaa

SEQ ID NO: 534968 - DNA, 15 bp, Homo sapiens
accattcgttgggga

SEQ ID NO: 534969 - DNA, 15 bp, Homo sapiens
gaccattcgttgggg

SEQ ID NO: 534970 - DNA, 15 bp, Homo sapiens
ggaccattcgttggg

SEQ ID NO: 534971 - DNA, 15 bp, Homo sapiens
aggaccattcgttgg

SEQ ID NO: 534972 - DNA, 15 bp, Homo sapiens
caggaccattcgttg

SEQ ID NO: 534973 - DNA, 15 bp, Homo sapiens
gcaggaccattcgtt

SEQ ID NO: 534974 - DNA, 15 bp, Homo sapiens
tgcaggaccattcgt

SEQ ID NO: 534975 - DNA, 15 bp, Homo sapiens
atgcaggaccattcg

SEQ ID NO: 534976 - DNA, 15 bp, Homo sapiens
tatgcaggaccattc

SEQ ID NO: 534977 - DNA, 15 bp, Homo sapiens
ctatgcaggaccatt

SEQ ID NO: 534978 - DNA, 15 bp, Homo sapiens
actatgcaggaccat

SEQ ID NO: 534979 - DNA, 15 bp, Homo sapiens
gactatgcaggacca

SEQ ID NO: 534980 - DNA, 15 bp, Homo sapiens
agactatgcaggacc

SEQ ID NO: 534981 - DNA, 15 bp, Homo sapiens
cagactatgcaggac

SEQ ID NO: 534982 - DNA, 15 bp, Homo sapiens
gcagactatgcagga

SEQ ID NO: 534983 - DNA, 15 bp, Homo sapiens
ggcagactatgcagg

SEQ ID NO: 534984 - DNA, 15 bp, Homo sapiens
gggcagactatgcag

SEQ ID NO: 534985 - DNA, 15 bp, Homo sapiens
tgggcagactatgca

SEQ ID NO: 534986 - DNA, 15 bp, Homo sapiens
ctgggcagactatgc

SEQ ID NO: 534987 - DNA, 15 bp, Homo sapiens
gctgggcagactatg

SEQ ID NO: 534988 - DNA, 15 bp, Homo sapiens
ggctgggcagactat

SEQ ID NO: 534989 - DNA, 15 bp, Homo sapiens
gggctgggcagacta

SEQ ID NO: 534990 - DNA, 15 bp, Homo sapiens
ggggctgggcagact

SEQ ID NO: 534991 - DNA, 15 bp, Homo sapiens
aggggctgggcagac

SEQ ID NO: 534992 - DNA, 15 bp, Homo sapiens
gaggggctgggcaga

SEQ ID NO: 534993 - DNA, 15 bp, Homo sapiens
tgaggggctgggcag

SEQ ID NO: 534994 - DNA, 15 bp, Homo sapiens
ctgaggggctgggca

SEQ ID NO: 534995 - DNA, 15 bp, Homo sapiens
cctgaggggctgggc

SEQ ID NO: 534996 - DNA, 15 bp, Homo sapiens
gcctgaggggctggg

SEQ ID NO: 534997 - DNA, 15 bp, Homo sapiens
ggcctgaggggctgg

SEQ ID NO: 534998 - DNA, 15 bp, Homo sapiens
gggcctgaggggctg

SEQ ID NO: 534999 - DNA, 15 bp, Homo sapiens
ggggcctgaggggct

SEQ ID NO: 535000 - DNA, 15 bp, Homo sapiens
aggggcctgaggggc

SEQ ID NO: 535001 - DNA, 15 bp, Homo sapiens
gaggggcctgagggg

SEQ ID NO: 535002 - DNA, 15 bp, Homo sapiens
ggaggggcctgaggg

SEQ ID NO: 535003 - DNA, 15 bp, Homo sapiens
aggaggggcctgagg

SEQ ID NO: 535004 - DNA, 15 bp, Homo sapiens
taggaggggcctgag

SEQ ID NO: 535005 - DNA, 15 bp, Homo sapiens
ataggaggggcctga

SEQ ID NO: 535006 - DNA, 15 bp, Homo sapiens
gataggaggggcctg

SEQ ID NO: 535007 - DNA, 15 bp, Homo sapiens
tgataggaggggcct

SEQ ID NO: 535008 - DNA, 15 bp, Homo sapiens
ctgataggaggggcc

SEQ ID NO: 535009 - DNA, 15 bp, Homo sapiens
tctgataggaggggc

SEQ ID NO: 535010 - DNA, 15 bp, Homo sapiens
ctctgataggagggg

SEQ ID NO: 535011 - DNA, 15 bp, Homo sapiens
cctctgataggaggg

SEQ ID NO: 535012 - DNA, 15 bp, Homo sapiens
gcctctgataggagg

SEQ ID NO: 535013 - DNA, 15 bp, Homo sapiens
tgcctctgataggag

SEQ ID NO: 535014 - DNA, 15 bp, Homo sapiens
ctgcctctgatagga

SEQ ID NO: 535015 - DNA, 15 bp, Homo sapiens
cctgcctctgatagg

SEQ ID NO: 535016 - DNA, 15 bp, Homo sapiens
gcctgcctctgatag

SEQ ID NO: 535017 - DNA, 15 bp, Homo sapiens
tgcctgcctctgata

SEQ ID NO: 535018 - DNA, 15 bp, Homo sapiens
ctgcctgcctctgat

SEQ ID NO: 535019 - DNA, 15 bp, Homo sapiens
cctgcctgcctctga

SEQ ID NO: 535020 - DNA, 15 bp, Homo sapiens
tcctgcctgcctctg

SEQ ID NO: 535021 - DNA, 15 bp, Homo sapiens
ctcctgcctgcctct

SEQ ID NO: 535022 - DNA, 15 bp, Homo sapiens
cctcctgcctgcctc

SEQ ID NO: 535023 - DNA, 15 bp, Homo sapiens
ccctcctgcctgcct

SEQ ID NO: 535024 - DNA, 15 bp, Homo sapiens
cccctcctgcctgcc

SEQ ID NO: 535025 - DNA, 15 bp, Homo sapiens
tcccctcctgcctgc

SEQ ID NO: 535026 - DNA, 15 bp, Homo sapiens
atcccctcctgcctg

SEQ ID NO: 535027 - DNA, 15 bp, Homo sapiens
aatcccctcctgcct

SEQ ID NO: 535028 - DNA, 15 bp, Homo sapiens
gaatcccctcctgcc

SEQ ID NO: 535029 - DNA, 15 bp, Homo sapiens
agaatcccctcctgc

SEQ ID NO: 535030 - DNA, 15 bp, Homo sapiens
cagaatcccctcctg

SEQ ID NO: 535031 - DNA, 15 bp, Homo sapiens
gcagaatcccctcct

SEQ ID NO: 535032 - DNA, 15 bp, Homo sapiens
tgcagaatcccctcc

SEQ ID NO: 535033 - DNA, 15 bp, Homo sapiens
ctgcagaatcccctc

SEQ ID NO: 535034 - DNA, 15 bp, Homo sapiens
tctgcagaatcccct

SEQ ID NO: 535035 - DNA, 15 bp, Homo sapiens
ttctgcagaatcccc

SEQ ID NO: 535036 - DNA, 15 bp, Homo sapiens
tttctgcagaatccc

SEQ ID NO: 535037 - DNA, 15 bp, Homo sapiens
ttttctgcagaatcc

SEQ ID NO: 535038 - DNA, 15 bp, Homo sapiens
cttttctgcagaatc

SEQ ID NO: 535039 - DNA, 15 bp, Homo sapiens
gcttttctgcagaat

SEQ ID NO: 535040 - DNA, 15 bp, Homo sapiens
tgcttttctgcagaa

SEQ ID NO: 535041 - DNA, 15 bp, Homo sapiens
ttgcttttctgcaga

SEQ ID NO: 535042 - DNA, 15 bp, Homo sapiens
tttgcttttctgcag

SEQ ID NO: 535043 - DNA, 15 bp, Homo sapiens
gtttgcttttctgca

SEQ ID NO: 535044 - DNA, 15 bp, Homo sapiens
tgtttgcttttctgc

SEQ ID NO: 535045 - DNA, 15 bp, Homo sapiens
ctgtttgcttttctg

SEQ ID NO: 535046 - DNA, 15 bp, Homo sapiens
gctgtttgcttttct

SEQ ID NO: 535047 - DNA, 15 bp, Homo sapiens
tgctgtttgcttttc

SEQ ID NO: 535048 - DNA, 15 bp, Homo sapiens
gtgctgtttgctttt

SEQ ID NO: 535049 - DNA, 15 bp, Homo sapiens
cgtgctgtttgcttt

SEQ ID NO: 535050 - DNA, 15 bp, Homo sapiens
ccgtgctgtttgctt

SEQ ID NO: 535051 - DNA, 15 bp, Homo sapiens
cccgtgctgtttgct

SEQ ID NO: 535052 - DNA, 15 bp, Homo sapiens
ccccgtgctgtttgc

SEQ ID NO: 535053 - DNA, 15 bp, Homo sapiens
gccccgtgctgtttg

SEQ ID NO: 535054 - DNA, 15 bp, Homo sapiens
ggccccgtgctgttt

SEQ ID NO: 535055 - DNA, 15 bp, Homo sapiens
aggccccgtgctgtt

SEQ ID NO: 535056 - DNA, 15 bp, Homo sapiens
gaggccccgtgctgt

SEQ ID NO: 535057 - DNA, 15 bp, Homo sapiens
tgaggccccgtgctg

SEQ ID NO: 535058 - DNA, 15 bp, Homo sapiens
gtgaggccccgtgct

SEQ ID NO: 535059 - DNA, 15 bp, Homo sapiens
ggtgaggccccgtgc

SEQ ID NO: 535060 - DNA, 15 bp, Homo sapiens
gggtgaggccccgtg

SEQ ID NO: 535061 - DNA, 15 bp, Homo sapiens
ggggtgaggccccgt

SEQ ID NO: 535062 - DNA, 15 bp, Homo sapiens
cggggtgaggccccg

SEQ ID NO: 535063 - DNA, 15 bp, Homo sapiens
tcggggtgaggcccc

SEQ ID NO: 535064 - DNA, 15 bp, Homo sapiens
gtcggggtgaggccc

SEQ ID NO: 535065 - DNA, 15 bp, Homo sapiens
ggtcggggtgaggcc

SEQ ID NO: 535066 - DNA, 15 bp, Homo sapiens
aggtcggggtgaggc

SEQ ID NO: 535067 - DNA, 15 bp, Homo sapiens
gaggtcggggtgagg

SEQ ID NO: 535068 - DNA, 15 bp, Homo sapiens
agaggtcggggtgag

SEQ ID NO: 535069 - DNA, 15 bp, Homo sapiens
gagaggtcggggtga

SEQ ID NO: 535070 - DNA, 15 bp, Homo sapiens
agagaggtcggggtg

SEQ ID NO: 535071 - DNA, 15 bp, Homo sapiens
cagagaggtcggggt

SEQ ID NO: 535072 - DNA, 15 bp, Homo sapiens
ccagagaggtcgggg

SEQ ID NO: 535073 - DNA, 15 bp, Homo sapiens
gccagagaggtcggg

SEQ ID NO: 535074 - DNA, 15 bp, Homo sapiens
agccagagaggtcgg

SEQ ID NO: 535075 - DNA, 15 bp, Homo sapiens
cagccagagaggtcg

SEQ ID NO: 535076 - DNA, 15 bp, Homo sapiens
tcagccagagaggtc

SEQ ID NO: 535077 - DNA, 15 bp, Homo sapiens
gtcagccagagaggt

SEQ ID NO: 535078 - DNA, 15 bp, Homo sapiens
agtcagccagagagg

SEQ ID NO: 535079 - DNA, 15 bp, Homo sapiens
tagtcagccagagag

SEQ ID NO: 535080 - DNA, 15 bp, Homo sapiens
ctagtcagccagaga

SEQ ID NO: 535081 - DNA, 15 bp, Homo sapiens
gctagtcagccagag

SEQ ID NO: 535082 - DNA, 15 bp, Homo sapiens
ggctagtcagccaga

SEQ ID NO: 535083 - DNA, 15 bp, Homo sapiens
gggctagtcagccag

SEQ ID NO: 535084 - DNA, 15 bp, Homo sapiens
tgggctagtcagcca

SEQ ID NO: 535085 - DNA, 15 bp, Homo sapiens
ctgggctagtcagcc

SEQ ID NO: 535086 - DNA, 15 bp, Homo sapiens
cctgggctagtcagc

SEQ ID NO: 535087 - DNA, 15 bp, Homo sapiens
gcctgggctagtcag

SEQ ID NO: 535088 - DNA, 15 bp, Homo sapiens
agcctgggctagtca

SEQ ID NO: 535089 - DNA, 15 bp, Homo sapiens
gagcctgggctagtc

SEQ ID NO: 535090 - DNA, 15 bp, Homo sapiens
ggagcctgggctagt

SEQ ID NO: 535091 - DNA, 15 bp, Homo sapiens
tggagcctgggctag

SEQ ID NO: 535092 - DNA, 15 bp, Homo sapiens
ctggagcctgggcta

SEQ ID NO: 535093 - DNA, 15 bp, Homo sapiens
cctggagcctgggct

SEQ ID NO: 535094 - DNA, 15 bp, Homo sapiens
tcctggagcctgggc

SEQ ID NO: 535095 - DNA, 15 bp, Homo sapiens
ctcctggagcctggg

SEQ ID NO: 535096 - DNA, 15 bp, Homo sapiens
cctcctggagcctgg

SEQ ID NO: 535097 - DNA, 15 bp, Homo sapiens
ccctcctggagcctg

SEQ ID NO: 535098 - DNA, 15 bp, Homo sapiens
accctcctggagcct

SEQ ID NO: 535099 - DNA, 15 bp, Homo sapiens
taccctcctggagcc

SEQ ID NO: 535100 - DNA, 15 bp, Homo sapiens
ttaccctcctggagc

SEQ ID NO: 535101 - DNA, 15 bp, Homo sapiens
attaccctcctggag

SEQ ID NO: 535102 - DNA, 15 bp, Homo sapiens
aattaccctcctgga

SEQ ID NO: 535103 - DNA, 15 bp, Homo sapiens
aaattaccctcctgg

SEQ ID NO: 535104 - DNA, 15 bp, Homo sapiens
taaattaccctcctg

SEQ ID NO: 535105 - DNA, 15 bp, Homo sapiens
ctaaattaccctcct

SEQ ID NO: 535106 - DNA, 15 bp, Homo sapiens
gctaaattaccctcc

SEQ ID NO: 535107 - DNA, 15 bp, Homo sapiens
cgctaaattaccctc

SEQ ID NO: 535108 - DNA, 15 bp, Homo sapiens
tcgctaaattaccct

SEQ ID NO: 535109 - DNA, 15 bp, Homo sapiens
gtcgctaaattaccc

SEQ ID NO: 535110 - DNA, 15 bp, Homo sapiens
agtcgctaaattacc

SEQ ID NO: 535111 - DNA, 15 bp, Homo sapiens
tagtcgctaaattac

SEQ ID NO: 535112 - DNA, 15 bp, Homo sapiens
atagtcgctaaatta

SEQ ID NO: 535113 - DNA, 15 bp, Homo sapiens
gatagtcgctaaatt

SEQ ID NO: 535114 - DNA, 15 bp, Homo sapiens
agatagtcgctaaat

SEQ ID NO: 535115 - DNA, 15 bp, Homo sapiens
cagatagtcgctaaa

SEQ ID NO: 535116 - DNA, 15 bp, Homo sapiens
gcagatagtcgctaa

SEQ ID NO: 535117 - DNA, 15 bp, Homo sapiens
agcagatagtcgcta

SEQ ID NO: 535118 - DNA, 15 bp, Homo sapiens
aagcagatagtcgct

SEQ ID NO: 535119 - DNA, 15 bp, Homo sapiens
aaagcagatagtcgc

SEQ ID NO: 535120 - DNA, 15 bp, Homo sapiens
gaaagcagatagtcg

SEQ ID NO: 535121 - DNA, 15 bp, Homo sapiens
tgaaagcagatagtc

SEQ ID NO: 535122 - DNA, 15 bp, Homo sapiens
atgaaagcagatagt

SEQ ID NO: 535123 - DNA, 15 bp, Homo sapiens
aatgaaagcagatag

SEQ ID NO: 535124 - DNA, 15 bp, Homo sapiens
taatgaaagcagata

SEQ ID NO: 535125 - DNA, 15 bp, Homo sapiens
ctaatgaaagcagat

SEQ ID NO: 535126 - DNA, 15 bp, Homo sapiens
gctaatgaaagcaga

SEQ ID NO: 535127 - DNA, 15 bp, Homo sapiens
ggctaatgaaagcag

SEQ ID NO: 535128 - DNA, 15 bp, Homo sapiens
aggctaatgaaagca

SEQ ID NO: 535129 - DNA, 15 bp, Homo sapiens
caggctaatgaaagc

SEQ ID NO: 535130 - DNA, 15 bp, Homo sapiens
gcaggctaatgaaag

SEQ ID NO: 535131 - DNA, 15 bp, Homo sapiens
agcaggctaatgaaa

SEQ ID NO: 535132 - DNA, 15 bp, Homo sapiens
gagcaggctaatgaa

SEQ ID NO: 535133 - DNA, 15 bp, Homo sapiens
cgagcaggctaatga

SEQ ID NO: 535134 - DNA, 15 bp, Homo sapiens
acgagcaggctaatg

SEQ ID NO: 535135 - DNA, 15 bp, Homo sapiens
aacgagcaggctaat

SEQ ID NO: 535136 - DNA, 15 bp, Homo sapiens
taacgagcaggctaa

SEQ ID NO: 535137 - DNA, 15 bp, Homo sapiens
ttaacgagcaggcta

SEQ ID NO: 535138 - DNA, 15 bp, Homo sapiens
gttaacgagcaggct

SEQ ID NO: 535139 - DNA, 15 bp, Homo sapiens
agttaacgagcaggc

SEQ ID NO: 535140 - DNA, 15 bp, Homo sapiens
aagttaacgagcagg

SEQ ID NO: 535141 - DNA, 15 bp, Homo sapiens
aaagttaacgagcag

SEQ ID NO: 535142 - DNA, 15 bp, Homo sapiens
aaaagttaacgagca

SEQ ID NO: 535143 - DNA, 15 bp, Homo sapiens
gaaaagttaacgagc

SEQ ID NO: 535144 - DNA, 15 bp, Homo sapiens
ggaaaagttaacgag

SEQ ID NO: 535145 - DNA, 15 bp, Homo sapiens
gggaaaagttaacga

SEQ ID NO: 535146 - DNA, 15 bp, Homo sapiens
tgggaaaagttaacg

SEQ ID NO: 535147 - DNA, 15 bp, Homo sapiens
ttgggaaaagttaac

SEQ ID NO: 535148 - DNA, 15 bp, Homo sapiens
attgggaaaagttaa

SEQ ID NO: 535149 - DNA, 15 bp, Homo sapiens
aattgggaaaagtta

SEQ ID NO: 535150 - DNA, 15 bp, Homo sapiens
caattgggaaaagtt

SEQ ID NO: 535151 - DNA, 15 bp, Homo sapiens
tcaattgggaaaagt

SEQ ID NO: 535152 - DNA, 15 bp, Homo sapiens
atcaattgggaaaag

SEQ ID NO: 535153 - DNA, 15 bp, Homo sapiens
aatcaattgggaaaa

SEQ ID NO: 535154 - DNA, 15 bp, Homo sapiens
aaatcaattgggaaa

SEQ ID NO: 535155 - DNA, 15 bp, Homo sapiens
aaaatcaattgggaa

SEQ ID NO: 535156 - DNA, 15 bp, Homo sapiens
aaaaatcaattggga

SEQ ID NO: 535157 - DNA, 15 bp, Homo sapiens
gaaaaatcaattggg

SEQ ID NO: 535158 - DNA, 15 bp, Homo sapiens
cgaaaaatcaattgg

SEQ ID NO: 535159 - DNA, 15 bp, Homo sapiens
ccgaaaaatcaattg

SEQ ID NO: 535160 - DNA, 15 bp, Homo sapiens
cccgaaaaatcaatt

SEQ ID NO: 535161 - DNA, 15 bp, Homo sapiens
ccccgaaaaatcaat

SEQ ID NO: 535162 - DNA, 15 bp, Homo sapiens
gccccgaaaaatcaa

SEQ ID NO: 535163 - DNA, 15 bp, Homo sapiens
agccccgaaaaatca

SEQ ID NO: 535164 - DNA, 15 bp, Homo sapiens
aagccccgaaaaatc

SEQ ID NO: 535165 - DNA, 15 bp, Homo sapiens
aaagccccgaaaaat

SEQ ID NO: 535166 - DNA, 15 bp, Homo sapiens
aaaagccccgaaaaa

SEQ ID NO: 535167 - DNA, 15 bp, Homo sapiens
caaaagccccgaaaa

SEQ ID NO: 535168 - DNA, 15 bp, Homo sapiens
tcaaaagccccgaaa

SEQ ID NO: 535169 - DNA, 15 bp, Homo sapiens
atcaaaagccccgaa

SEQ ID NO: 535170 - DNA, 15 bp, Homo sapiens
gatcaaaagccccga

SEQ ID NO: 535171 - DNA, 15 bp, Homo sapiens
agatcaaaagccccg

SEQ ID NO: 535172 - DNA, 15 bp, Homo sapiens
tagatcaaaagcccc

SEQ ID NO: 535173 - DNA, 15 bp, Homo sapiens
ttagatcaaaagccc

SEQ ID NO: 535174 - DNA, 15 bp, Homo sapiens
tttagatcaaaagcc

SEQ ID NO: 535175 - DNA, 15 bp, Homo sapiens
atttagatcaaaagc

SEQ ID NO: 535176 - DNA, 15 bp, Homo sapiens
catttagatcaaaag

SEQ ID NO: 535177 - DNA, 15 bp, Homo sapiens
gcatttagatcaaaa

SEQ ID NO: 535178 - DNA, 15 bp, Homo sapiens
agcatttagatcaaa

SEQ ID NO: 535179 - DNA, 15 bp, Homo sapiens
aagcatttagatcaa

SEQ ID NO: 535180 - DNA, 15 bp, Homo sapiens
caagcatttagatca

SEQ ID NO: 535181 - DNA, 15 bp, Homo sapiens
gcaagcatttagatc

SEQ ID NO: 535182 - DNA, 15 bp, Homo sapiens
tgcaagcatttagat

SEQ ID NO: 535183 - DNA, 15 bp, Homo sapiens
gtgcaagcatttaga

SEQ ID NO: 535184 - DNA, 15 bp, Homo sapiens
tgtgcaagcatttag

SEQ ID NO: 535185 - DNA, 15 bp, Homo sapiens
ttgtgcaagcattta

SEQ ID NO: 535186 - DNA, 15 bp, Homo sapiens
tttgtgcaagcattt

SEQ ID NO: 535187 - DNA, 15 bp, Homo sapiens
gtttgtgcaagcatt

SEQ ID NO: 535188 - DNA, 15 bp, Homo sapiens
tgtttgtgcaagcat

SEQ ID NO: 535189 - DNA, 15 bp, Homo sapiens
ttgtttgtgcaagca

SEQ ID NO: 535190 - DNA, 15 bp, Homo sapiens
gttgtttgtgcaagc

SEQ ID NO: 535191 - DNA, 15 bp, Homo sapiens
tgttgtttgtgcaag

SEQ ID NO: 535192 - DNA, 15 bp, Homo sapiens
gtgttgtttgtgcaa

SEQ ID NO: 535193 - DNA, 15 bp, Homo sapiens
ggtgttgtttgtgca

SEQ ID NO: 535194 - DNA, 15 bp, Homo sapiens
gggtgttgtttgtgc

SEQ ID NO: 535195 - DNA, 15 bp, Homo sapiens
ggggtgttgtttgtg

SEQ ID NO: 535196 - DNA, 15 bp, Homo sapiens
cggggtgttgtttgt

SEQ ID NO: 535197 - DNA, 15 bp, Homo sapiens
acggggtgttgtttg

SEQ ID NO: 535198 - DNA, 15 bp, Homo sapiens
gacggggtgttgttt

SEQ ID NO: 535199 - DNA, 15 bp, Homo sapiens
tgacggggtgttgtt

SEQ ID NO: 535200 - DNA, 15 bp, Homo sapiens
ctgacggggtgttgt

SEQ ID NO: 535201 - DNA, 15 bp, Homo sapiens
gctgacggggtgttg

SEQ ID NO: 535202 - DNA, 15 bp, Homo sapiens
agctgacggggtgtt

SEQ ID NO: 535203 - DNA, 15 bp, Homo sapiens
gagctgacggggtgt

SEQ ID NO: 535204 - DNA, 15 bp, Homo sapiens
ggagctgacggggtg

SEQ ID NO: 535205 - DNA, 15 bp, Homo sapiens
gggagctgacggggt

SEQ ID NO: 535206 - DNA, 15 bp, Homo sapiens
tgggagctgacgggg

SEQ ID NO: 535207 - DNA, 15 bp, Homo sapiens
ctgggagctgacggg

SEQ ID NO: 535208 - DNA, 15 bp, Homo sapiens
cctgggagctgacgg

SEQ ID NO: 535209 - DNA, 15 bp, Homo sapiens
ccctgggagctgacg

SEQ ID NO: 535210 - DNA, 15 bp, Homo sapiens
cccctgggagctgac

SEQ ID NO: 535211 - DNA, 15 bp, Homo sapiens
ccccctgggagctga

SEQ ID NO: 535212 - DNA, 15 bp, Homo sapiens
cccccctgggagctg

SEQ ID NO: 535213 - DNA, 15 bp, Homo sapiens
gcccccctgggagct

SEQ ID NO: 535214 - DNA, 15 bp, Homo sapiens
agcccccctgggagc

SEQ ID NO: 535215 - DNA, 15 bp, Homo sapiens
gagcccccctgggag

SEQ ID NO: 535216 - DNA, 15 bp, Homo sapiens
ggagcccccctggga

SEQ ID NO: 535217 - DNA, 15 bp, Homo sapiens
gggagcccccctggg

SEQ ID NO: 535218 - DNA, 15 bp, Homo sapiens
tgggagcccccctgg

SEQ ID NO: 535219 - DNA, 15 bp, Homo sapiens
gtgggagcccccctg

SEQ ID NO: 535220 - DNA, 15 bp, Homo sapiens
agtgggagcccccct

SEQ ID NO: 535221 - DNA, 15 bp, Homo sapiens
tagtgggagcccccc

SEQ ID NO: 535222 - DNA, 15 bp, Homo sapiens
gtagtgggagccccc

SEQ ID NO: 535223 - DNA, 15 bp, Homo sapiens
agtagtgggagcccc

SEQ ID NO: 535224 - DNA, 15 bp, Homo sapiens
cagtagtgggagccc

SEQ ID NO: 535225 - DNA, 15 bp, Homo sapiens
gcagtagtgggagcc

SEQ ID NO: 535226 - DNA, 15 bp, Homo sapiens
ggcagtagtgggagc

SEQ ID NO: 535227 - DNA, 15 bp, Homo sapiens
gggcagtagtgggag

SEQ ID NO: 535228 - DNA, 15 bp, Homo sapiens
ggggcagtagtggga

SEQ ID NO: 535229 - DNA, 15 bp, Homo sapiens
gggggcagtagtggg

SEQ ID NO: 535230 - DNA, 15 bp, Homo sapiens
tgggggcagtagtgg

SEQ ID NO: 535231 - DNA, 15 bp, Homo sapiens
ctgggggcagtagtg

SEQ ID NO: 535232 - DNA, 15 bp, Homo sapiens
gctgggggcagtagt

SEQ ID NO: 535233 - DNA, 15 bp, Homo sapiens
agctgggggcagtag

SEQ ID NO: 535234 - DNA, 15 bp, Homo sapiens
gagctgggggcagta

SEQ ID NO: 535235 - DNA, 15 bp, Homo sapiens
cgagctgggggcagt

SEQ ID NO: 535236 - DNA, 15 bp, Homo sapiens
acgagctgggggcag

SEQ ID NO: 535237 - DNA, 15 bp, Homo sapiens
aacgagctgggggca

SEQ ID NO: 535238 - DNA, 15 bp, Homo sapiens
taacgagctgggggc

SEQ ID NO: 535239 - DNA, 15 bp, Homo sapiens
ctaacgagctggggg

SEQ ID NO: 535240 - DNA, 15 bp, Homo sapiens
tctaacgagctgggg

SEQ ID NO: 535241 - DNA, 15 bp, Homo sapiens
ttctaacgagctggg

SEQ ID NO: 535242 - DNA, 15 bp, Homo sapiens
attctaacgagctgg

SEQ ID NO: 535243 - DNA, 15 bp, Homo sapiens
cattctaacgagctg

SEQ ID NO: 535244 - DNA, 15 bp, Homo sapiens
gcattctaacgagct

SEQ ID NO: 535245 - DNA, 15 bp, Homo sapiens
tgcattctaacgagc

SEQ ID NO: 535246 - DNA, 15 bp, Homo sapiens
gtgcattctaacgag

SEQ ID NO: 535247 - DNA, 15 bp, Homo sapiens
ggtgcattctaacga

SEQ ID NO: 535248 - DNA, 15 bp, Homo sapiens
aggtgcattctaacg

SEQ ID NO: 535249 - DNA, 15 bp, Homo sapiens
caggtgcattctaac

SEQ ID NO: 535250 - DNA, 15 bp, Homo sapiens
tcaggtgcattctaa

SEQ ID NO: 535251 - DNA, 15 bp, Homo sapiens
gtcaggtgcattcta

SEQ ID NO: 535252 - DNA, 15 bp, Homo sapiens
agtcaggtgcattct

SEQ ID NO: 535253 - DNA, 15 bp, Homo sapiens
tagtcaggtgcattc

SEQ ID NO: 535254 - DNA, 15 bp, Homo sapiens
ctagtcaggtgcatt

SEQ ID NO: 535255 - DNA, 15 bp, Homo sapiens
cctagtcaggtgcat

SEQ ID NO: 535256 - DNA, 15 bp, Homo sapiens
ccctagtcaggtgca

SEQ ID NO: 535257 - DNA, 15 bp, Homo sapiens
gccctagtcaggtgc

SEQ ID NO: 535258 - DNA, 15 bp, Homo sapiens
ggccctagtcaggtg

SEQ ID NO: 535259 - DNA, 15 bp, Homo sapiens
gggccctagtcaggt

SEQ ID NO: 535260 - DNA, 15 bp, Homo sapiens
agggccctagtcagg

SEQ ID NO: 535261 - DNA, 15 bp, Homo sapiens
gagggccctagtcag

SEQ ID NO: 535262 - DNA, 15 bp, Homo sapiens
tgagggccctagtca

SEQ ID NO: 535263 - DNA, 15 bp, Homo sapiens
ctgagggccctagtc

SEQ ID NO: 535264 - DNA, 15 bp, Homo sapiens
actgagggccctagt

SEQ ID NO: 535265 - DNA, 15 bp, Homo sapiens
cactgagggccctag

SEQ ID NO: 535266 - DNA, 15 bp, Homo sapiens
ccactgagggcccta

SEQ ID NO: 535267 - DNA, 15 bp, Homo sapiens
cccactgagggccct

SEQ ID NO: 535268 - DNA, 15 bp, Homo sapiens
tcccactgagggccc

SEQ ID NO: 535269 - DNA, 15 bp, Homo sapiens
gtcccactgagggcc

SEQ ID NO: 535270 - DNA, 15 bp, Homo sapiens
agtcccactgagggc

SEQ ID NO: 535271 - DNA, 15 bp, Homo sapiens
aagtcccactgaggg

SEQ ID NO: 535272 - DNA, 15 bp, Homo sapiens
caagtcccactgagg

SEQ ID NO: 535273 - DNA, 15 bp, Homo sapiens
ccaagtcccactgag

SEQ ID NO: 535274 - DNA, 15 bp, Homo sapiens
gccaagtcccactga

SEQ ID NO: 535275 - DNA, 15 bp, Homo sapiens
agccaagtcccactg

SEQ ID NO: 535276 - DNA, 15 bp, Homo sapiens
cagccaagtcccact

SEQ ID NO: 535277 - DNA, 15 bp, Homo sapiens
ccagccaagtcccac

SEQ ID NO: 535278 - DNA, 15 bp, Homo sapiens
gccagccaagtccca

SEQ ID NO: 535279 - DNA, 15 bp, Homo sapiens
cgccagccaagtccc

SEQ ID NO: 535280 - DNA, 15 bp, Homo sapiens
ccgccagccaagtcc

SEQ ID NO: 535281 - DNA, 15 bp, Homo sapiens
gccgccagccaagtc

SEQ ID NO: 535282 - DNA, 15 bp, Homo sapiens
tgccgccagccaagt

SEQ ID NO: 535283 - DNA, 15 bp, Homo sapiens
ctgccgccagccaag

SEQ ID NO: 535284 - DNA, 15 bp, Homo sapiens
cctgccgccagccaa

SEQ ID NO: 535285 - DNA, 15 bp, Homo sapiens
acctgccgccagcca

SEQ ID NO: 535286 - DNA, 15 bp, Homo sapiens
cacctgccgccagcc

SEQ ID NO: 535287 - DNA, 15 bp, Homo sapiens
ccacctgccgccagc

SEQ ID NO: 535288 - DNA, 15 bp, Homo sapiens
gccacctgccgccag

SEQ ID NO: 535289 - DNA, 15 bp, Homo sapiens
agccacctgccgcca

SEQ ID NO: 535290 - DNA, 15 bp, Homo sapiens
aagccacctgccgcc

SEQ ID NO: 535291 - DNA, 15 bp, Homo sapiens
gaagccacctgccgc

SEQ ID NO: 535292 - DNA, 15 bp, Homo sapiens
agaagccacctgccg

SEQ ID NO: 535293 - DNA, 15 bp, Homo sapiens
aagaagccacctgcc

SEQ ID NO: 535294 - DNA, 15 bp, Homo sapiens
caagaagccacctgc

SEQ ID NO: 535295 - DNA, 15 bp, Homo sapiens
tcaagaagccacctg

SEQ ID NO: 535296 - DNA, 15 bp, Homo sapiens
ctcaagaagccacct

SEQ ID NO: 535297 - DNA, 15 bp, Homo sapiens
tctcaagaagccacc

SEQ ID NO: 535298 - DNA, 15 bp, Homo sapiens
ttctcaagaagccac

SEQ ID NO: 535299 - DNA, 15 bp, Homo sapiens
cttctcaagaagcca

SEQ ID NO: 535300 - DNA, 15 bp, Homo sapiens
gcttctcaagaagcc

SEQ ID NO: 535301 - DNA, 15 bp, Homo sapiens
ggcttctcaagaagc

SEQ ID NO: 535302 - DNA, 15 bp, Homo sapiens
aggcttctcaagaag

SEQ ID NO: 535303 - DNA, 15 bp, Homo sapiens
caggcttctcaagaa

SEQ ID NO: 535304 - DNA, 15 bp, Homo sapiens
ccaggcttctcaaga

SEQ ID NO: 535305 - DNA, 15 bp, Homo sapiens
gccaggcttctcaag

SEQ ID NO: 535306 - DNA, 15 bp, Homo sapiens
agccaggcttctcaa

SEQ ID NO: 535307 - DNA, 15 bp, Homo sapiens
gagccaggcttctca

SEQ ID NO: 535308 - DNA, 15 bp, Homo sapiens
tgagccaggcttctc

SEQ ID NO: 535309 - DNA, 15 bp, Homo sapiens
gtgagccaggcttct

SEQ ID NO: 535310 - DNA, 15 bp, Homo sapiens
tgtgagccaggcttc

SEQ ID NO: 535311 - DNA, 15 bp, Homo sapiens
ctgtgagccaggctt

SEQ ID NO: 535312 - DNA, 15 bp, Homo sapiens
gctgtgagccaggct

SEQ ID NO: 535313 - DNA, 15 bp, Homo sapiens
ggctgtgagccaggc

SEQ ID NO: 535314 - DNA, 15 bp, Homo sapiens
tggctgtgagccagg

SEQ ID NO: 535315 - DNA, 15 bp, Homo sapiens
ctggctgtgagccag

SEQ ID NO: 535316 - DNA, 15 bp, Homo sapiens
cctggctgtgagcca

SEQ ID NO: 535317 - DNA, 15 bp, Homo sapiens
tcctggctgtgagcc

SEQ ID NO: 535318 - DNA, 15 bp, Homo sapiens
ctcctggctgtgagc

SEQ ID NO: 535319 - DNA, 15 bp, Homo sapiens
cctcctggctgtgag

SEQ ID NO: 535320 - DNA, 15 bp, Homo sapiens
ccctcctggctgtga

SEQ ID NO: 535321 - DNA, 15 bp, Homo sapiens
tccctcctggctgtg

SEQ ID NO: 535322 - DNA, 15 bp, Homo sapiens
ttccctcctggctgt

SEQ ID NO: 535323 - DNA, 15 bp, Homo sapiens
cttccctcctggctg

SEQ ID NO: 535324 - DNA, 15 bp, Homo sapiens
ccttccctcctggct

SEQ ID NO: 535325 - DNA, 15 bp, Homo sapiens
cccttccctcctggc

SEQ ID NO: 535326 - DNA, 15 bp, Homo sapiens
ccccttccctcctgg

SEQ ID NO: 535327 - DNA, 15 bp, Homo sapiens
gccccttccctcctg

SEQ ID NO: 535328 - DNA, 15 bp, Homo sapiens
agccccttccctcct

SEQ ID NO: 535329 - DNA, 15 bp, Homo sapiens
cagccccttccctcc

SEQ ID NO: 535330 - DNA, 15 bp, Homo sapiens
tcagccccttccctc

SEQ ID NO: 535331 - DNA, 15 bp, Homo sapiens
ctcagccccttccct

SEQ ID NO: 535332 - DNA, 15 bp, Homo sapiens
tctcagccccttccc

SEQ ID NO: 535333 - DNA, 15 bp, Homo sapiens
ttctcagccccttcc

SEQ ID NO: 535334 - DNA, 15 bp, Homo sapiens
gttctcagccccttc

SEQ ID NO: 535335 - DNA, 15 bp, Homo sapiens
tgttctcagcccctt

SEQ ID NO: 535336 - DNA, 15 bp, Homo sapiens
ctgttctcagcccct

SEQ ID NO: 535337 - DNA, 15 bp, Homo sapiens
cctgttctcagcccc

SEQ ID NO: 535338 - DNA, 15 bp, Homo sapiens
tcctgttctcagccc

SEQ ID NO: 535339 - DNA, 15 bp, Homo sapiens
gtcctgttctcagcc

SEQ ID NO: 535340 - DNA, 15 bp, Homo sapiens
ggtcctgttctcagc

SEQ ID NO: 535341 - DNA, 15 bp, Homo sapiens
aggtcctgttctcag

SEQ ID NO: 535342 - DNA, 15 bp, Homo sapiens
caggtcctgttctca

SEQ ID NO: 535343 - DNA, 15 bp, Homo sapiens
acaggtcctgttctc

SEQ ID NO: 535344 - DNA, 15 bp, Homo sapiens
cacaggtcctgttct

SEQ ID NO: 535345 - DNA, 15 bp, Homo sapiens
gcacaggtcctgttc

SEQ ID NO: 535346 - DNA, 15 bp, Homo sapiens
agcacaggtcctgtt

SEQ ID NO: 535347 - DNA, 15 bp, Homo sapiens
gagcacaggtcctgt

SEQ ID NO: 535348 - DNA, 15 bp, Homo sapiens
tgagcacaggtcctg

SEQ ID NO: 535349 - DNA, 15 bp, Homo sapiens
gtgagcacaggtcct

SEQ ID NO: 535350 - DNA, 15 bp, Homo sapiens
agtgagcacaggtcc

SEQ ID NO: 535351 - DNA, 15 bp, Homo sapiens
cagtgagcacaggtc

SEQ ID NO: 535352 - DNA, 15 bp, Homo sapiens
ccagtgagcacaggt

SEQ ID NO: 535353 - DNA, 15 bp, Homo sapiens
cccagtgagcacagg

SEQ ID NO: 535354 - DNA, 15 bp, Homo sapiens
ccccagtgagcacag

SEQ ID NO: 535355 - DNA, 15 bp, Homo sapiens
gccccagtgagcaca

SEQ ID NO: 535356 - DNA, 15 bp, Homo sapiens
ggccccagtgagcac

SEQ ID NO: 535357 - DNA, 15 bp, Homo sapiens
aggccccagtgagca

SEQ ID NO: 535358 - DNA, 15 bp, Homo sapiens
caggccccagtgagc

SEQ ID NO: 535359 - DNA, 15 bp, Homo sapiens
gcaggccccagtgag

SEQ ID NO: 535360 - DNA, 15 bp, Homo sapiens
tgcaggccccagtga

SEQ ID NO: 535361 - DNA, 15 bp, Homo sapiens
atgcaggccccagtg

SEQ ID NO: 535362 - DNA, 15 bp, Homo sapiens
catgcaggccccagt

SEQ ID NO: 535363 - DNA, 15 bp, Homo sapiens
tcatgcaggccccag

SEQ ID NO: 535364 - DNA, 15 bp, Homo sapiens
gtcatgcaggcccca

SEQ ID NO: 535365 - DNA, 15 bp, Homo sapiens
ggtcatgcaggcccc

SEQ ID NO: 535366 - DNA, 15 bp, Homo sapiens
gggtcatgcaggccc

SEQ ID NO: 535367 - DNA, 15 bp, Homo sapiens
agggtcatgcaggcc

SEQ ID NO: 535368 - DNA, 15 bp, Homo sapiens
aagggtcatgcaggc

SEQ ID NO: 535369 - DNA, 15 bp, Homo sapiens
gaagggtcatgcagg

SEQ ID NO: 535370 - DNA, 15 bp, Homo sapiens
ggaagggtcatgcag

SEQ ID NO: 535371 - DNA, 15 bp, Homo sapiens
gggaagggtcatgca

SEQ ID NO: 535372 - DNA, 15 bp, Homo sapiens
agggaagggtcatgc

SEQ ID NO: 535373 - DNA, 15 bp, Homo sapiens
gagggaagggtcatg

SEQ ID NO: 535374 - DNA, 15 bp, Homo sapiens
ggagggaagggtcat

SEQ ID NO: 535375 - DNA, 15 bp, Homo sapiens
gggagggaagggtca

SEQ ID NO: 535376 - DNA, 15 bp, Homo sapiens
ggggagggaagggtc

SEQ ID NO: 535377 - DNA, 15 bp, Homo sapiens
tggggagggaagggt

SEQ ID NO: 535378 - DNA, 15 bp, Homo sapiens
gtggggagggaaggg

SEQ ID NO: 535379 - DNA, 15 bp, Homo sapiens
tgtggggagggaagg

SEQ ID NO: 535380 - DNA, 15 bp, Homo sapiens
ctgtggggagggaag

SEQ ID NO: 535381 - DNA, 15 bp, Homo sapiens
gctgtggggagggaa

SEQ ID NO: 535382 - DNA, 15 bp, Homo sapiens
cgctgtggggaggga

SEQ ID NO: 535383 - DNA, 15 bp, Homo sapiens
ccgctgtggggaggg

SEQ ID NO: 535384 - DNA, 15 bp, Homo sapiens
gccgctgtggggagg

SEQ ID NO: 535385 - DNA, 15 bp, Homo sapiens
ggccgctgtggggag

SEQ ID NO: 535386 - DNA, 15 bp, Homo sapiens
cggccgctgtgggga

SEQ ID NO: 535387 - DNA, 15 bp, Homo sapiens
gcggccgctgtgggg

SEQ ID NO: 535388 - DNA, 15 bp, Homo sapiens
tgcggccgctgtggg

SEQ ID NO: 535389 - DNA, 15 bp, Homo sapiens
ttgcggccgctgtgg

SEQ ID NO: 535390 - DNA, 15 bp, Homo sapiens
tttgcggccgctgtg

SEQ ID NO: 535391 - DNA, 15 bp, Homo sapiens
gtttgcggccgctgt

SEQ ID NO: 535392 - DNA, 15 bp, Homo sapiens
agtttgcggccgctg

SEQ ID NO: 535393 - DNA, 15 bp, Homo sapiens
cagtttgcggccgct

SEQ ID NO: 535394 - DNA, 15 bp, Homo sapiens
tcagtttgcggccgc

SEQ ID NO: 535395 - DNA, 15 bp, Homo sapiens
gtcagtttgcggccg

SEQ ID NO: 535396 - DNA, 15 bp, Homo sapiens
tgtcagtttgcggcc

SEQ ID NO: 535397 - DNA, 15 bp, Homo sapiens
gtgtcagtttgcggc

SEQ ID NO: 535398 - DNA, 15 bp, Homo sapiens
ggtgtcagtttgcgg

SEQ ID NO: 535399 - DNA, 15 bp, Homo sapiens
aggtgtcagtttgcg

SEQ ID NO: 535400 - DNA, 15 bp, Homo sapiens
gaggtgtcagtttgc

SEQ ID NO: 535401 - DNA, 15 bp, Homo sapiens
tgaggtgtcagtttg

SEQ ID NO: 535402 - DNA, 15 bp, Homo sapiens
ctgaggtgtcagttt

SEQ ID NO: 535403 - DNA, 15 bp, Homo sapiens
cctgaggtgtcagtt

SEQ ID NO: 535404 - DNA, 15 bp, Homo sapiens
ccctgaggtgtcagt

SEQ ID NO: 535405 - DNA, 15 bp, Homo sapiens
tccctgaggtgtcag

SEQ ID NO: 535406 - DNA, 15 bp, Homo sapiens
gtccctgaggtgtca

SEQ ID NO: 535407 - DNA, 15 bp, Homo sapiens
tgtccctgaggtgtc

SEQ ID NO: 535408 - DNA, 15 bp, Homo sapiens
ttgtccctgaggtgt

SEQ ID NO: 535409 - DNA, 15 bp, Homo sapiens
tttgtccctgaggtg

SEQ ID NO: 535410 - DNA, 15 bp, Homo sapiens
ctttgtccctgaggt

SEQ ID NO: 535411 - DNA, 15 bp, Homo sapiens
tctttgtccctgagg

SEQ ID NO: 535412 - DNA, 15 bp, Homo sapiens
ctctttgtccctgag

SEQ ID NO: 535413 - DNA, 15 bp, Homo sapiens
tctctttgtccctga

SEQ ID NO: 535414 - DNA, 15 bp, Homo sapiens
atctctttgtccctg

SEQ ID NO: 535415 - DNA, 15 bp, Homo sapiens
gatctctttgtccct

SEQ ID NO: 535416 - DNA, 15 bp, Homo sapiens
agatctctttgtccc

SEQ ID NO: 535417 - DNA, 15 bp, Homo sapiens
cagatctctttgtcc

SEQ ID NO: 535418 - DNA, 15 bp, Homo sapiens
ccagatctctttgtc

SEQ ID NO: 535419 - DNA, 15 bp, Homo sapiens
tccagatctctttgt

SEQ ID NO: 535420 - DNA, 15 bp, Homo sapiens
gtccagatctctttg

SEQ ID NO: 535421 - DNA, 15 bp, Homo sapiens
tgtccagatctcttt

SEQ ID NO: 535422 - DNA, 15 bp, Homo sapiens
ctgtccagatctctt

SEQ ID NO: 535423 - DNA, 15 bp, Homo sapiens
tctgtccagatctct

SEQ ID NO: 535424 - DNA, 15 bp, Homo sapiens
ttctgtccagatctc

SEQ ID NO: 535425 - DNA, 15 bp, Homo sapiens
attctgtccagatct

SEQ ID NO: 535426 - DNA, 15 bp, Homo sapiens
gattctgtccagatc

SEQ ID NO: 535427 - DNA, 15 bp, Homo sapiens
cgattctgtccagat

SEQ ID NO: 535428 - DNA, 15 bp, Homo sapiens
gcgattctgtccaga

SEQ ID NO: 535429 - DNA, 15 bp, Homo sapiens
ggcgattctgtccag

SEQ ID NO: 535430 - DNA, 15 bp, Homo sapiens
cggcgattctgtcca

SEQ ID NO: 535431 - DNA, 15 bp, Homo sapiens
ccggcgattctgtcc

SEQ ID NO: 535432 - DNA, 15 bp, Homo sapiens
tccggcgattctgtc

SEQ ID NO: 535433 - DNA, 15 bp, Homo sapiens
gtccggcgattctgt

SEQ ID NO: 535434 - DNA, 15 bp, Homo sapiens
tgtccggcgattctg

SEQ ID NO: 535435 - DNA, 15 bp, Homo sapiens
ctgtccggcgattct

SEQ ID NO: 535436 - DNA, 15 bp, Homo sapiens
cctgtccggcgattc

SEQ ID NO: 535437 - DNA, 15 bp, Homo sapiens
acctgtccggcgatt

SEQ ID NO: 535438 - DNA, 15 bp, Homo sapiens
tacctgtccggcgat

SEQ ID NO: 535439 - DNA, 15 bp, Homo sapiens
ttacctgtccggcga

SEQ ID NO: 535440 - DNA, 15 bp, Homo sapiens
cttacctgtccggcg

SEQ ID NO: 535441 - DNA, 15 bp, Homo sapiens
ccttacctgtccggc

SEQ ID NO: 535442 - DNA, 15 bp, Homo sapiens
gccttacctgtccgg

SEQ ID NO: 535443 - DNA, 15 bp, Homo sapiens
ggccttacctgtccg

SEQ ID NO: 535444 - DNA, 15 bp, Homo sapiens
aggccttacctgtcc

SEQ ID NO: 535445 - DNA, 15 bp, Homo sapiens
caggccttacctgtc

SEQ ID NO: 535446 - DNA, 15 bp, Homo sapiens
gcaggccttacctgt

SEQ ID NO: 535447 - DNA, 15 bp, Homo sapiens
cgcaggccttacctg

SEQ ID NO: 535448 - DNA, 15 bp, Homo sapiens
acgcaggccttacct

SEQ ID NO: 535449 - DNA, 15 bp, Homo sapiens
aacgcaggccttacc

SEQ ID NO: 535450 - DNA, 15 bp, Homo sapiens
aaacgcaggccttac

SEQ ID NO: 535451 - DNA, 15 bp, Homo sapiens
caaacgcaggcctta

SEQ ID NO: 535452 - DNA, 15 bp, Homo sapiens
ccaaacgcaggcctt

SEQ ID NO: 535453 - DNA, 15 bp, Homo sapiens
cccaaacgcaggcct

SEQ ID NO: 535454 - DNA, 15 bp, Homo sapiens
ccccaaacgcaggcc

SEQ ID NO: 535455 - DNA, 15 bp, Homo sapiens
accccaaacgcaggc

SEQ ID NO: 535456 - DNA, 15 bp, Homo sapiens
caccccaaacgcagg

SEQ ID NO: 535457 - DNA, 15 bp, Homo sapiens
ccaccccaaacgcag

SEQ ID NO: 535458 - DNA, 15 bp, Homo sapiens
cccaccccaaacgca

SEQ ID NO: 535459 - DNA, 15 bp, Homo sapiens
ccccaccccaaacgc

SEQ ID NO: 535460 - DNA, 15 bp, Homo sapiens
gccccaccccaaacg

SEQ ID NO: 535461 - DNA, 15 bp, Homo sapiens
agccccaccccaaac

SEQ ID NO: 535462 - DNA, 15 bp, Homo sapiens
cagccccaccccaaa

SEQ ID NO: 535463 - DNA, 15 bp, Homo sapiens
ccagccccaccccaa

SEQ ID NO: 535464 - DNA, 15 bp, Homo sapiens
cccagccccacccca

SEQ ID NO: 535465 - DNA, 15 bp, Homo sapiens
acccagccccacccc

SEQ ID NO: 535466 - DNA, 15 bp, Homo sapiens
gacccagccccaccc

SEQ ID NO: 535467 - DNA, 15 bp, Homo sapiens
ggacccagccccacc

SEQ ID NO: 535468 - DNA, 15 bp, Homo sapiens
gggacccagccccac

SEQ ID NO: 535469 - DNA, 15 bp, Homo sapiens
agggacccagcccca

SEQ ID NO: 535470 - DNA, 15 bp, Homo sapiens
aagggacccagcccc

SEQ ID NO: 535471 - DNA, 15 bp, Homo sapiens
taagggacccagccc

SEQ ID NO: 535472 - DNA, 15 bp, Homo sapiens
ctaagggacccagcc

SEQ ID NO: 535473 - DNA, 15 bp, Homo sapiens
actaagggacccagc

SEQ ID NO: 535474 - DNA, 15 bp, Homo sapiens
gactaagggacccag

SEQ ID NO: 535475 - DNA, 15 bp, Homo sapiens
cgactaagggaccca

SEQ ID NO: 535476 - DNA, 15 bp, Homo sapiens
gcgactaagggaccc

SEQ ID NO: 535477 - DNA, 15 bp, Homo sapiens
agcgactaagggacc

SEQ ID NO: 535478 - DNA, 15 bp, Homo sapiens
cagcgactaagggac

SEQ ID NO: 535479 - DNA, 15 bp, Homo sapiens
gcagcgactaaggga

SEQ ID NO: 535480 - DNA, 15 bp, Homo sapiens
ggcagcgactaaggg

SEQ ID NO: 535481 - DNA, 15 bp, Homo sapiens
gggcagcgactaagg

SEQ ID NO: 535482 - DNA, 15 bp, Homo sapiens
tgggcagcgactaag

SEQ ID NO: 535483 - DNA, 15 bp, Homo sapiens
ttgggcagcgactaa

SEQ ID NO: 535484 - DNA, 15 bp, Homo sapiens
cttgggcagcgacta

SEQ ID NO: 535485 - DNA, 15 bp, Homo sapiens
gcttgggcagcgact

SEQ ID NO: 535486 - DNA, 15 bp, Homo sapiens
tgcttgggcagcgac

SEQ ID NO: 535487 - DNA, 15 bp, Homo sapiens
atgcttgggcagcga

SEQ ID NO: 535488 - DNA, 15 bp, Homo sapiens
aatgcttgggcagcg

SEQ ID NO: 535489 - DNA, 15 bp, Homo sapiens
aaatgcttgggcagc

SEQ ID NO: 535490 - DNA, 15 bp, Homo sapiens
gaaatgcttgggcag

SEQ ID NO: 535491 - DNA, 15 bp, Homo sapiens
ggaaatgcttgggca

SEQ ID NO: 535492 - DNA, 15 bp, Homo sapiens
tggaaatgcttgggc

SEQ ID NO: 535493 - DNA, 15 bp, Homo sapiens
ttggaaatgcttggg

SEQ ID NO: 535494 - DNA, 15 bp, Homo sapiens
tttggaaatgcttgg

SEQ ID NO: 535495 - DNA, 15 bp, Homo sapiens
ctttggaaatgcttg

SEQ ID NO: 535496 - DNA, 15 bp, Homo sapiens
gctttggaaatgctt

SEQ ID NO: 535497 - DNA, 15 bp, Homo sapiens
ggctttggaaatgct

SEQ ID NO: 535498 - DNA, 15 bp, Homo sapiens
gggctttggaaatgc

SEQ ID NO: 535499 - DNA, 15 bp, Homo sapiens
tgggctttggaaatg

SEQ ID NO: 535500 - DNA, 15 bp, Homo sapiens
atgggctttggaaat

SEQ ID NO: 535501 - DNA, 15 bp, Homo sapiens
tatgggctttggaaa

SEQ ID NO: 535502 - DNA, 15 bp, Homo sapiens
gtatgggctttggaa

SEQ ID NO: 535503 - DNA, 15 bp, Homo sapiens
agtatgggctttgga

SEQ ID NO: 535504 - DNA, 15 bp, Homo sapiens
aagtatgggctttgg

SEQ ID NO: 535505 - DNA, 15 bp, Homo sapiens
gaagtatgggctttg

SEQ ID NO: 535506 - DNA, 15 bp, Homo sapiens
cgaagtatgggcttt

SEQ ID NO: 535507 - DNA, 15 bp, Homo sapiens
acgaagtatgggctt

SEQ ID NO: 535508 - DNA, 15 bp, Homo sapiens
gacgaagtatgggct

SEQ ID NO: 535509 - DNA, 15 bp, Homo sapiens
tgacgaagtatgggc

SEQ ID NO: 535510 - DNA, 15 bp, Homo sapiens
ctgacgaagtatggg

SEQ ID NO: 535511 - DNA, 15 bp, Homo sapiens
cctgacgaagtatgg

SEQ ID NO: 535512 - DNA, 15 bp, Homo sapiens
acctgacgaagtatg

SEQ ID NO: 535513 - DNA, 15 bp, Homo sapiens
tacctgacgaagtat

SEQ ID NO: 535514 - DNA, 15 bp, Homo sapiens
ctacctgacgaagta

SEQ ID NO: 535515 - DNA, 15 bp, Homo sapiens
tctacctgacgaagt

SEQ ID NO: 535516 - DNA, 15 bp, Homo sapiens
gtctacctgacgaag

SEQ ID NO: 535517 - DNA, 15 bp, Homo sapiens
agtctacctgacgaa

SEQ ID NO: 535518 - DNA, 15 bp, Homo sapiens
aagtctacctgacga

SEQ ID NO: 535519 - DNA, 15 bp, Homo sapiens
taagtctacctgacg

SEQ ID NO: 535520 - DNA, 15 bp, Homo sapiens
ataagtctacctgac

SEQ ID NO: 535521 - DNA, 15 bp, Homo sapiens
aataagtctacctga

SEQ ID NO: 535522 - DNA, 15 bp, Homo sapiens
aaataagtctacctg

SEQ ID NO: 535523 - DNA, 15 bp, Homo sapiens
gaaataagtctacct

SEQ ID NO: 535524 - DNA, 15 bp, Homo sapiens
ggaaataagtctacc

SEQ ID NO: 535525 - DNA, 15 bp, Homo sapiens
aggaaataagtctac

SEQ ID NO: 535526 - DNA, 15 bp, Homo sapiens
aaggaaataagtcta

SEQ ID NO: 535527 - DNA, 15 bp, Homo sapiens
gaaggaaataagtct

SEQ ID NO: 535528 - DNA, 15 bp, Homo sapiens
agaaggaaataagtc

SEQ ID NO: 535529 - DNA, 15 bp, Homo sapiens
gagaaggaaataagt

SEQ ID NO: 535530 - DNA, 15 bp, Homo sapiens
agagaaggaaataag

SEQ ID NO: 535531 - DNA, 15 bp, Homo sapiens
cagagaaggaaataa

SEQ ID NO: 535532 - DNA, 15 bp, Homo sapiens
ccagagaaggaaata

SEQ ID NO: 535533 - DNA, 15 bp, Homo sapiens
tccagagaaggaaat

SEQ ID NO: 535534 - DNA, 15 bp, Homo sapiens
ctccagagaaggaaa

SEQ ID NO: 535535 - DNA, 15 bp, Homo sapiens
cctccagagaaggaa

SEQ ID NO: 535536 - DNA, 15 bp, Homo sapiens
ccctccagagaagga

SEQ ID NO: 535537 - DNA, 15 bp, Homo sapiens
gccctccagagaagg

SEQ ID NO: 535538 - DNA, 15 bp, Homo sapiens
tgccctccagagaag

SEQ ID NO: 535539 - DNA, 15 bp, Homo sapiens
gtgccctccagagaa

SEQ ID NO: 535540 - DNA, 15 bp, Homo sapiens
tgtgccctccagaga

SEQ ID NO: 535541 - DNA, 15 bp, Homo sapiens
ctgtgccctccagag

SEQ ID NO: 535542 - DNA, 15 bp, Homo sapiens
gctgtgccctccaga

SEQ ID NO: 535543 - DNA, 15 bp, Homo sapiens
ggctgtgccctccag

SEQ ID NO: 535544 - DNA, 15 bp, Homo sapiens
gggctgtgccctcca

SEQ ID NO: 535545 - DNA, 15 bp, Homo sapiens
tgggctgtgccctcc

SEQ ID NO: 535546 - DNA, 15 bp, Homo sapiens
ctgggctgtgccctc

SEQ ID NO: 535547 - DNA, 15 bp, Homo sapiens
cctgggctgtgccct

SEQ ID NO: 535548 - DNA, 15 bp, Homo sapiens
ccctgggctgtgccc

SEQ ID NO: 535549 - DNA, 15 bp, Homo sapiens
accctgggctgtgcc

SEQ ID NO: 535550 - DNA, 15 bp, Homo sapiens
caccctgggctgtgc

SEQ ID NO: 535551 - DNA, 15 bp, Homo sapiens
gcaccctgggctgtg

SEQ ID NO: 535552 - DNA, 15 bp, Homo sapiens
agcaccctgggctgt

SEQ ID NO: 535553 - DNA, 15 bp, Homo sapiens
cagcaccctgggctg

SEQ ID NO: 535554 - DNA, 15 bp, Homo sapiens
ccagcaccctgggct

SEQ ID NO: 535555 - DNA, 15 bp, Homo sapiens
accagcaccctgggc

SEQ ID NO: 535556 - DNA, 15 bp, Homo sapiens
caccagcaccctggg

SEQ ID NO: 535557 - DNA, 15 bp, Homo sapiens
ccaccagcaccctgg

SEQ ID NO: 535558 - DNA, 15 bp, Homo sapiens
cccaccagcaccctg

SEQ ID NO: 535559 - DNA, 15 bp, Homo sapiens
ccccaccagcaccct

SEQ ID NO: 535560 - DNA, 15 bp, Homo sapiens
accccaccagcaccc

SEQ ID NO: 535561 - DNA, 15 bp, Homo sapiens
gaccccaccagcacc

SEQ ID NO: 535562 - DNA, 15 bp, Homo sapiens
tgaccccaccagcac

SEQ ID NO: 535563 - DNA, 15 bp, Homo sapiens
ctgaccccaccagca

SEQ ID NO: 535564 - DNA, 15 bp, Homo sapiens
tctgaccccaccagc

SEQ ID NO: 535565 - DNA, 15 bp, Homo sapiens
ctctgaccccaccag

SEQ ID NO: 535566 - DNA, 15 bp, Homo sapiens
cctctgaccccacca

SEQ ID NO: 535567 - DNA, 15 bp, Homo sapiens
tcctctgaccccacc

SEQ ID NO: 535568 - DNA, 15 bp, Homo sapiens
ctcctctgaccccac

SEQ ID NO: 535569 - DNA, 15 bp, Homo sapiens
cctcctctgacccca

SEQ ID NO: 535570 - DNA, 15 bp, Homo sapiens
ccctcctctgacccc

SEQ ID NO: 535571 - DNA, 15 bp, Homo sapiens
gccctcctctgaccc

SEQ ID NO: 535572 - DNA, 15 bp, Homo sapiens
agccctcctctgacc

SEQ ID NO: 535573 - DNA, 15 bp, Homo sapiens
cagccctcctctgac

SEQ ID NO: 535574 - DNA, 15 bp, Homo sapiens
gcagccctcctctga

SEQ ID NO: 535575 - DNA, 15 bp, Homo sapiens
ggcagccctcctctg

SEQ ID NO: 535576 - DNA, 15 bp, Homo sapiens
gggcagccctcctct

SEQ ID NO: 535577 - DNA, 15 bp, Homo sapiens
tgggcagccctcctc

SEQ ID NO: 535578 - DNA, 15 bp, Homo sapiens
ctgggcagccctcct

SEQ ID NO: 535579 - DNA, 15 bp, Homo sapiens
tctgggcagccctcc

SEQ ID NO: 535580 - DNA, 15 bp, Homo sapiens
ctctgggcagccctc

SEQ ID NO: 535581 - DNA, 15 bp, Homo sapiens
tctctgggcagccct

SEQ ID NO: 535582 - DNA, 15 bp, Homo sapiens
gtctctgggcagccc

SEQ ID NO: 535583 - DNA, 15 bp, Homo sapiens
tgtctctgggcagcc

SEQ ID NO: 535584 - DNA, 15 bp, Homo sapiens
ctgtctctgggcagc

SEQ ID NO: 535585 - DNA, 15 bp, Homo sapiens
cctgtctctgggcag

SEQ ID NO: 535586 - DNA, 15 bp, Homo sapiens
tcctgtctctgggca

SEQ ID NO: 535587 - DNA, 15 bp, Homo sapiens
ctcctgtctctgggc

SEQ ID NO: 535588 - DNA, 15 bp, Homo sapiens
tctcctgtctctggg

SEQ ID NO: 535589 - DNA, 15 bp, Homo sapiens
ttctcctgtctctgg

SEQ ID NO: 535590 - DNA, 15 bp, Homo sapiens
tttctcctgtctctg

SEQ ID NO: 535591 - DNA, 15 bp, Homo sapiens
ctttctcctgtctct

SEQ ID NO: 535592 - DNA, 15 bp, Homo sapiens
cctttctcctgtctc

SEQ ID NO: 535593 - DNA, 15 bp, Homo sapiens
tcctttctcctgtct

SEQ ID NO: 535594 - DNA, 15 bp, Homo sapiens
gtcctttctcctgtc

SEQ ID NO: 535595 - DNA, 15 bp, Homo sapiens
tgtcctttctcctgt

SEQ ID NO: 535596 - DNA, 15 bp, Homo sapiens
ctgtcctttctcctg

SEQ ID NO: 535597 - DNA, 15 bp, Homo sapiens
actgtcctttctcct

SEQ ID NO: 535598 - DNA, 15 bp, Homo sapiens
gactgtcctttctcc

SEQ ID NO: 535599 - DNA, 15 bp, Homo sapiens
ggactgtcctttctc

SEQ ID NO: 535600 - DNA, 15 bp, Homo sapiens
aggactgtcctttct

SEQ ID NO: 535601 - DNA, 15 bp, Homo sapiens
caggactgtcctttc

SEQ ID NO: 535602 - DNA, 15 bp, Homo sapiens
acaggactgtccttt

SEQ ID NO: 535603 - DNA, 15 bp, Homo sapiens
gacaggactgtcctt

SEQ ID NO: 535604 - DNA, 15 bp, Homo sapiens
agacaggactgtcct

SEQ ID NO: 535605 - DNA, 15 bp, Homo sapiens
cagacaggactgtcc

SEQ ID NO: 535606 - DNA, 15 bp, Homo sapiens
tcagacaggactgtc

SEQ ID NO: 535607 - DNA, 15 bp, Homo sapiens
gtcagacaggactgt

SEQ ID NO: 535608 - DNA, 15 bp, Homo sapiens
agtcagacaggactg

SEQ ID NO: 535609 - DNA, 15 bp, Homo sapiens
aagtcagacaggact

SEQ ID NO: 535610 - DNA, 15 bp, Homo sapiens
aaagtcagacaggac

SEQ ID NO: 535611 - DNA, 15 bp, Homo sapiens
aaaagtcagacagga

SEQ ID NO: 535612 - DNA, 15 bp, Homo sapiens
gaaaagtcagacagg

SEQ ID NO: 535613 - DNA, 15 bp, Homo sapiens
ggaaaagtcagacag

SEQ ID NO: 535614 - DNA, 15 bp, Homo sapiens
aggaaaagtcagaca

SEQ ID NO: 535615 - DNA, 15 bp, Homo sapiens
caggaaaagtcagac

SEQ ID NO: 535616 - DNA, 15 bp, Homo sapiens
acaggaaaagtcaga

SEQ ID NO: 535617 - DNA, 15 bp, Homo sapiens
aacaggaaaagtcag

SEQ ID NO: 535618 - DNA, 15 bp, Homo sapiens
caacaggaaaagtca

SEQ ID NO: 535619 - DNA, 15 bp, Homo sapiens
ccaacaggaaaagtc

SEQ ID NO: 535620 - DNA, 15 bp, Homo sapiens
accaacaggaaaagt

SEQ ID NO: 535621 - DNA, 15 bp, Homo sapiens
caccaacaggaaaag

SEQ ID NO: 535622 - DNA, 15 bp, Homo sapiens
gcaccaacaggaaaa

SEQ ID NO: 535623 - DNA, 15 bp, Homo sapiens
agcaccaacaggaaa

SEQ ID NO: 535624 - DNA, 15 bp, Homo sapiens
cagcaccaacaggaa

SEQ ID NO: 535625 - DNA, 15 bp, Homo sapiens
gcagcaccaacagga

SEQ ID NO: 535626 - DNA, 15 bp, Homo sapiens
agcagcaccaacagg

SEQ ID NO: 535627 - DNA, 15 bp, Homo sapiens
aagcagcaccaacag

SEQ ID NO: 535628 - DNA, 15 bp, Homo sapiens
taagcagcaccaaca

SEQ ID NO: 535629 - DNA, 15 bp, Homo sapiens
ctaagcagcaccaac

SEQ ID NO: 535630 - DNA, 15 bp, Homo sapiens
tctaagcagcaccaa

SEQ ID NO: 535631 - DNA, 15 bp, Homo sapiens
ttctaagcagcacca

SEQ ID NO: 535632 - DNA, 15 bp, Homo sapiens
tttctaagcagcacc

SEQ ID NO: 535633 - DNA, 15 bp, Homo sapiens
atttctaagcagcac

SEQ ID NO: 535634 - DNA, 15 bp, Homo sapiens
aatttctaagcagca

SEQ ID NO: 535635 - DNA, 15 bp, Homo sapiens
aaatttctaagcagc

SEQ ID NO: 535636 - DNA, 15 bp, Homo sapiens
caaatttctaagcag

SEQ ID NO: 535637 - DNA, 15 bp, Homo sapiens
ccaaatttctaagca

SEQ ID NO: 535638 - DNA, 15 bp, Homo sapiens
tccaaatttctaagc

SEQ ID NO: 535639 - DNA, 15 bp, Homo sapiens
ctccaaatttctaag

SEQ ID NO: 535640 - DNA, 15 bp, Homo sapiens
cctccaaatttctaa

SEQ ID NO: 535641 - DNA, 15 bp, Homo sapiens
gcctccaaatttcta

SEQ ID NO: 535642 - DNA, 15 bp, Homo sapiens
tgcctccaaatttct

SEQ ID NO: 535643 - DNA, 15 bp, Homo sapiens
ctgcctccaaatttc

SEQ ID NO: 535644 - DNA, 15 bp, Homo sapiens
cctgcctccaaattt

SEQ ID NO: 535645 - DNA, 15 bp, Homo sapiens
gcctgcctccaaatt

SEQ ID NO: 535646 - DNA, 15 bp, Homo sapiens
agcctgcctccaaat

SEQ ID NO: 535647 - DNA, 15 bp, Homo sapiens
cagcctgcctccaaa

SEQ ID NO: 535648 - DNA, 15 bp, Homo sapiens
ccagcctgcctccaa

SEQ ID NO: 535649 - DNA, 15 bp, Homo sapiens
gccagcctgcctcca

SEQ ID NO: 535650 - DNA, 15 bp, Homo sapiens
agccagcctgcctcc

SEQ ID NO: 535651 - DNA, 15 bp, Homo sapiens
cagccagcctgcctc

SEQ ID NO: 535652 - DNA, 15 bp, Homo sapiens
acagccagcctgcct

SEQ ID NO: 535653 - DNA, 15 bp, Homo sapiens
cacagccagcctgcc

SEQ ID NO: 535654 - DNA, 15 bp, Homo sapiens
ccacagccagcctgc

SEQ ID NO: 535655 - DNA, 15 bp, Homo sapiens
accacagccagcctg

SEQ ID NO: 535656 - DNA, 15 bp, Homo sapiens
caccacagccagcct

SEQ ID NO: 535657 - DNA, 15 bp, Homo sapiens
acaccacagccagcc

SEQ ID NO: 535658 - DNA, 15 bp, Homo sapiens
gacaccacagccagc

SEQ ID NO: 535659 - DNA, 15 bp, Homo sapiens
agacaccacagccag

SEQ ID NO: 535660 - DNA, 15 bp, Homo sapiens
gagacaccacagcca

SEQ ID NO: 535661 - DNA, 15 bp, Homo sapiens
tgagacaccacagcc

SEQ ID NO: 535662 - DNA, 15 bp, Homo sapiens
gtgagacaccacagc

SEQ ID NO: 535663 - DNA, 15 bp, Homo sapiens
ggtgagacaccacag

SEQ ID NO: 535664 - DNA, 15 bp, Homo sapiens
gggtgagacaccaca

SEQ ID NO: 535665 - DNA, 15 bp, Homo sapiens
ggggtgagacaccac

SEQ ID NO: 535666 - DNA, 15 bp, Homo sapiens
aggggtgagacacca

SEQ ID NO: 535667 - DNA, 15 bp, Homo sapiens
caggggtgagacacc

SEQ ID NO: 535668 - DNA, 15 bp, Homo sapiens
acaggggtgagacac

SEQ ID NO: 535669 - DNA, 15 bp, Homo sapiens
tacaggggtgagaca

SEQ ID NO: 535670 - DNA, 15 bp, Homo sapiens
ttacaggggtgagac

SEQ ID NO: 535671 - DNA, 15 bp, Homo sapiens
attacaggggtgaga

SEQ ID NO: 535672 - DNA, 15 bp, Homo sapiens
gattacaggggtgag

SEQ ID NO: 535673 - DNA, 15 bp, Homo sapiens
ggattacaggggtga

SEQ ID NO: 535674 - DNA, 15 bp, Homo sapiens
gggattacaggggtg

SEQ ID NO: 535675 - DNA, 15 bp, Homo sapiens
tgggattacaggggt

SEQ ID NO: 535676 - DNA, 15 bp, Homo sapiens
ctgggattacagggg

SEQ ID NO: 535677 - DNA, 15 bp, Homo sapiens
atcccaaagtgctgg

SEQ ID NO: 535678 - DNA, 15 bp, Homo sapiens
catcccaaagtgctg

SEQ ID NO: 535679 - DNA, 15 bp, Homo sapiens
gcatcccaaagtgct

SEQ ID NO: 535680 - DNA, 15 bp, Homo sapiens
ggcatcccaaagtgc

SEQ ID NO: 535681 - DNA, 15 bp, Homo sapiens
cggcatcccaaagtg

SEQ ID NO: 535682 - DNA, 15 bp, Homo sapiens
tcggcatcccaaagt

SEQ ID NO: 535683 - DNA, 15 bp, Homo sapiens
ctcggcatcccaaag

SEQ ID NO: 535684 - DNA, 15 bp, Homo sapiens
cctcggcatcccaaa

SEQ ID NO: 535685 - DNA, 15 bp, Homo sapiens
gcctcggcatcccaa

SEQ ID NO: 535686 - DNA, 15 bp, Homo sapiens
tgcctcggcatccca

SEQ ID NO: 535687 - DNA, 15 bp, Homo sapiens
ctgcctcggcatccc

SEQ ID NO: 535688 - DNA, 15 bp, Homo sapiens
cctgcctcggcatcc

SEQ ID NO: 535689 - DNA, 15 bp, Homo sapiens
gcctgcctcggcatc

SEQ ID NO: 535690 - DNA, 15 bp, Homo sapiens
cgcctgcctcggcat

SEQ ID NO: 535691 - DNA, 15 bp, Homo sapiens
tcgcctgcctcggca

SEQ ID NO: 535692 - DNA, 15 bp, Homo sapiens
ttcgcctgcctcggc

SEQ ID NO: 535693 - DNA, 15 bp, Homo sapiens
attcgcctgcctcgg

SEQ ID NO: 535694 - DNA, 15 bp, Homo sapiens
aattcgcctgcctcg

SEQ ID NO: 535695 - DNA, 15 bp, Homo sapiens
taattcgcctgcctc

SEQ ID NO: 535696 - DNA, 15 bp, Homo sapiens
ataattcgcctgcct

SEQ ID NO: 535697 - DNA, 15 bp, Homo sapiens
gataattcgcctgcc

SEQ ID NO: 535698 - DNA, 15 bp, Homo sapiens
agataattcgcctgc

SEQ ID NO: 535699 - DNA, 15 bp, Homo sapiens
cagataattcgcctg

SEQ ID NO: 535700 - DNA, 15 bp, Homo sapiens
tcagataattcgcct

SEQ ID NO: 535701 - DNA, 15 bp, Homo sapiens
ctcagataattcgcc

SEQ ID NO: 535702 - DNA, 15 bp, Homo sapiens
cctcagataattcgc

SEQ ID NO: 535703 - DNA, 15 bp, Homo sapiens
acctcagataattcg

SEQ ID NO: 535704 - DNA, 15 bp, Homo sapiens
gacctcagataattc

SEQ ID NO: 535705 - DNA, 15 bp, Homo sapiens
tgacctcagataatt

SEQ ID NO: 535706 - DNA, 15 bp, Homo sapiens
ctgacctcagataat

SEQ ID NO: 535707 - DNA, 15 bp, Homo sapiens
cctgacctcagataa

SEQ ID NO: 535708 - DNA, 15 bp, Homo sapiens
tcctgacctcagata

SEQ ID NO: 535709 - DNA, 15 bp, Homo sapiens
ctcctgacctcagat

SEQ ID NO: 535710 - DNA, 15 bp, Homo sapiens
actcctgacctcaga

SEQ ID NO: 535711 - DNA, 15 bp, Homo sapiens
tgaactcctgacctc

SEQ ID NO: 535712 - DNA, 15 bp, Homo sapiens
ttgaactcctgacct

SEQ ID NO: 535713 - DNA, 15 bp, Homo sapiens
cttgaactcctgacc

SEQ ID NO: 535714 - DNA, 15 bp, Homo sapiens
tcttgaactcctgac

SEQ ID NO: 535715 - DNA, 15 bp, Homo sapiens
gtcttgaactcctga

SEQ ID NO: 535716 - DNA, 15 bp, Homo sapiens
ggtcttgaactcctg

SEQ ID NO: 535717 - DNA, 15 bp, Homo sapiens
tggtcttgaactcct

SEQ ID NO: 535718 - DNA, 15 bp, Homo sapiens
atggtcttgaactcc

SEQ ID NO: 535719 - DNA, 15 bp, Homo sapiens
aatggtcttgaactc

SEQ ID NO: 535720 - DNA, 15 bp, Homo sapiens
gaatggtcttgaact

SEQ ID NO: 535721 - DNA, 15 bp, Homo sapiens
agaatggtcttgaac

SEQ ID NO: 535722 - DNA, 15 bp, Homo sapiens
cagaatggtcttgaa

SEQ ID NO: 535723 - DNA, 15 bp, Homo sapiens
tcagaatggtcttga

SEQ ID NO: 535724 - DNA, 15 bp, Homo sapiens
gtcagaatggtcttg

SEQ ID NO: 535725 - DNA, 15 bp, Homo sapiens
ggtcagaatggtctt

SEQ ID NO: 535726 - DNA, 15 bp, Homo sapiens
tggtcagaatggtct

SEQ ID NO: 535727 - DNA, 15 bp, Homo sapiens
ttggtcagaatggtc

SEQ ID NO: 535728 - DNA, 15 bp, Homo sapiens
gttggtcagaatggt

SEQ ID NO: 535729 - DNA, 15 bp, Homo sapiens
tgttggtcagaatgg

SEQ ID NO: 535730 - DNA, 15 bp, Homo sapiens
atgttggtcagaatg

SEQ ID NO: 535731 - DNA, 15 bp, Homo sapiens
catgttggtcagaat

SEQ ID NO: 535732 - DNA, 15 bp, Homo sapiens
ccatgttggtcagaa

SEQ ID NO: 535733 - DNA, 15 bp, Homo sapiens
tccatgttggtcaga

SEQ ID NO: 535734 - DNA, 15 bp, Homo sapiens
ctccatgttggtcag

SEQ ID NO: 535735 - DNA, 15 bp, Homo sapiens
tctccatgttggtca

SEQ ID NO: 535736 - DNA, 15 bp, Homo sapiens
ttctccatgttggtc

SEQ ID NO: 535737 - DNA, 15 bp, Homo sapiens
tttctccatgttggt

SEQ ID NO: 535738 - DNA, 15 bp, Homo sapiens
gtttctccatgttgg

SEQ ID NO: 535739 - DNA, 15 bp, Homo sapiens
ggtttctccatgttg

SEQ ID NO: 535740 - DNA, 15 bp, Homo sapiens
gggtttctccatgtt

SEQ ID NO: 535741 - DNA, 15 bp, Homo sapiens
agggtttctccatgt

SEQ ID NO: 535742 - DNA, 15 bp, Homo sapiens
cagggtttctccatg

SEQ ID NO: 535743 - DNA, 15 bp, Homo sapiens
acagggtttctccat

SEQ ID NO: 535744 - DNA, 15 bp, Homo sapiens
gacagggtttctcca

SEQ ID NO: 535745 - DNA, 15 bp, Homo sapiens
agacagggtttctcc

SEQ ID NO: 535746 - DNA, 15 bp, Homo sapiens
gagacagggtttctc

SEQ ID NO: 535747 - DNA, 15 bp, Homo sapiens
agagacagggtttct

SEQ ID NO: 535748 - DNA, 15 bp, Homo sapiens
tagagacagggtttc

SEQ ID NO: 535749 - DNA, 15 bp, Homo sapiens
gtagagacagggttt

SEQ ID NO: 535750 - DNA, 15 bp, Homo sapiens
agtagagacagggtt

SEQ ID NO: 535751 - DNA, 15 bp, Homo sapiens
tagtagagacagggt

SEQ ID NO: 535752 - DNA, 15 bp, Homo sapiens
ttagtagagacaggg

SEQ ID NO: 535753 - DNA, 15 bp, Homo sapiens
tttagtagagacagg

SEQ ID NO: 535754 - DNA, 15 bp, Homo sapiens
ttttagtagagacag

SEQ ID NO: 535755 - DNA, 15 bp, Homo sapiens
tttttagtagagaca

SEQ ID NO: 535756 - DNA, 15 bp, Homo sapiens
attttgtatttttag

SEQ ID NO: 535757 - DNA, 15 bp, Homo sapiens
aattttgtattttta

SEQ ID NO: 535758 - DNA, 15 bp, Homo sapiens
taattttgtattttt

SEQ ID NO: 535759 - DNA, 15 bp, Homo sapiens
ctaattttgtatttt

SEQ ID NO: 535760 - DNA, 15 bp, Homo sapiens
gctaattttgtattt

SEQ ID NO: 535761 - DNA, 15 bp, Homo sapiens
ggctaattttgtatt

SEQ ID NO: 535762 - DNA, 15 bp, Homo sapiens
cggctaattttgtat

SEQ ID NO: 535763 - DNA, 15 bp, Homo sapiens
ccggctaattttgta

SEQ ID NO: 535764 - DNA, 15 bp, Homo sapiens
cccggctaattttgt

SEQ ID NO: 535765 - DNA, 15 bp, Homo sapiens
acccggctaattttg

SEQ ID NO: 535766 - DNA, 15 bp, Homo sapiens
cacccggctaatttt

SEQ ID NO: 535767 - DNA, 15 bp, Homo sapiens
acacccggctaattt

SEQ ID NO: 535768 - DNA, 15 bp, Homo sapiens
cacacccggctaatt

SEQ ID NO: 535769 - DNA, 15 bp, Homo sapiens
ccacacccggctaat

SEQ ID NO: 535770 - DNA, 15 bp, Homo sapiens
accacacccggctaa

SEQ ID NO: 535771 - DNA, 15 bp, Homo sapiens
caccacacccggcta

SEQ ID NO: 535772 - DNA, 15 bp, Homo sapiens
ccaccacacccggct

SEQ ID NO: 535773 - DNA, 15 bp, Homo sapiens
gccaccacacccggc

SEQ ID NO: 535774 - DNA, 15 bp, Homo sapiens
tgccaccacacccgg

SEQ ID NO: 535775 - DNA, 15 bp, Homo sapiens
gtgccaccacacccg

SEQ ID NO: 535776 - DNA, 15 bp, Homo sapiens
tgtgccaccacaccc

SEQ ID NO: 535777 - DNA, 15 bp, Homo sapiens
atgtgccaccacacc

SEQ ID NO: 535778 - DNA, 15 bp, Homo sapiens
aatgtgccaccacac

SEQ ID NO: 535779 - DNA, 15 bp, Homo sapiens
gaatgtgccaccaca

SEQ ID NO: 535780 - DNA, 15 bp, Homo sapiens
ggaatgtgccaccac

SEQ ID NO: 535781 - DNA, 15 bp, Homo sapiens
aggaatgtgccacca

SEQ ID NO: 535782 - DNA, 15 bp, Homo sapiens
caggaatgtgccacc

SEQ ID NO: 535783 - DNA, 15 bp, Homo sapiens
acaggaatgtgccac

SEQ ID NO: 535784 - DNA, 15 bp, Homo sapiens
tacaggaatgtgcca

SEQ ID NO: 535785 - DNA, 15 bp, Homo sapiens
ttacaggaatgtgcc

SEQ ID NO: 535786 - DNA, 15 bp, Homo sapiens
attacaggaatgtgc

SEQ ID NO: 535787 - DNA, 15 bp, Homo sapiens
gattacaggaatgtg

SEQ ID NO: 535788 - DNA, 15 bp, Homo sapiens
agattacaggaatgt

SEQ ID NO: 535789 - DNA, 15 bp, Homo sapiens
gagattacaggaatg

SEQ ID NO: 535790 - DNA, 15 bp, Homo sapiens
tgagattacaggaat

SEQ ID NO: 535791 - DNA, 15 bp, Homo sapiens
ctgagattacaggaa

SEQ ID NO: 535792 - DNA, 15 bp, Homo sapiens
gctgagattacagga

SEQ ID NO: 535793 - DNA, 15 bp, Homo sapiens
agctgagattacagg

SEQ ID NO: 535794 - DNA, 15 bp, Homo sapiens
tagctgagattacag

SEQ ID NO: 535795 - DNA, 15 bp, Homo sapiens
gtagctgagattaca

SEQ ID NO: 535796 - DNA, 15 bp, Homo sapiens
agtagctgagattac

SEQ ID NO: 535797 - DNA, 15 bp, Homo sapiens
cagtagctgagatta

SEQ ID NO: 535798 - DNA, 15 bp, Homo sapiens
ccagtagctgagatt

SEQ ID NO: 535799 - DNA, 15 bp, Homo sapiens
cccagtagctgagat

SEQ ID NO: 535800 - DNA, 15 bp, Homo sapiens
ccccagtagctgaga

SEQ ID NO: 535801 - DNA, 15 bp, Homo sapiens
tccccagtagctgag

SEQ ID NO: 535802 - DNA, 15 bp, Homo sapiens
ctccccagtagctga

SEQ ID NO: 535803 - DNA, 15 bp, Homo sapiens
cctcagcctccccag

SEQ ID NO: 535804 - DNA, 15 bp, Homo sapiens
gcctcagcctcccca

SEQ ID NO: 535805 - DNA, 15 bp, Homo sapiens
tgcctcagcctcccc

SEQ ID NO: 535806 - DNA, 15 bp, Homo sapiens
gtgcctcagcctccc

SEQ ID NO: 535807 - DNA, 15 bp, Homo sapiens
tgtgcctcagcctcc

SEQ ID NO: 535808 - DNA, 15 bp, Homo sapiens
ttgtgcctcagcctc

SEQ ID NO: 535809 - DNA, 15 bp, Homo sapiens
tttgtgcctcagcct

SEQ ID NO: 535810 - DNA, 15 bp, Homo sapiens
ttttgtgcctcagcc

SEQ ID NO: 535811 - DNA, 15 bp, Homo sapiens
tttttgtgcctcagc

SEQ ID NO: 535812 - DNA, 15 bp, Homo sapiens
atttttgtgcctcag

SEQ ID NO: 535813 - DNA, 15 bp, Homo sapiens
gatttttgtgcctca

SEQ ID NO: 535814 - DNA, 15 bp, Homo sapiens
tgatttttgtgcctc

SEQ ID NO: 535815 - DNA, 15 bp, Homo sapiens
gtgatttttgtgcct

SEQ ID NO: 535816 - DNA, 15 bp, Homo sapiens
agtgatttttgtgcc

SEQ ID NO: 535817 - DNA, 15 bp, Homo sapiens
aagtgatttttgtgc

SEQ ID NO: 535818 - DNA, 15 bp, Homo sapiens
caagtgatttttgtg

SEQ ID NO: 535819 - DNA, 15 bp, Homo sapiens
tcaagtgatttttgt

SEQ ID NO: 535820 - DNA, 15 bp, Homo sapiens
ttcaagtgatttttg

SEQ ID NO: 535821 - DNA, 15 bp, Homo sapiens
gttcaagtgattttt

SEQ ID NO: 535822 - DNA, 15 bp, Homo sapiens
ggttcaagtgatttt

SEQ ID NO: 535823 - DNA, 15 bp, Homo sapiens
gggttcaagtgattt

SEQ ID NO: 535824 - DNA, 15 bp, Homo sapiens
cgggttcaagtgatt

SEQ ID NO: 535825 - DNA, 15 bp, Homo sapiens
ccgggttcaagtgat

SEQ ID NO: 535826 - DNA, 15 bp, Homo sapiens
cccgggttcaagtga

SEQ ID NO: 535827 - DNA, 15 bp, Homo sapiens
tcccgggttcaagtg

SEQ ID NO: 535828 - DNA, 15 bp, Homo sapiens
ctcccgggttcaagt

SEQ ID NO: 535829 - DNA, 15 bp, Homo sapiens
gcctccacctcccgg

SEQ ID NO: 535830 - DNA, 15 bp, Homo sapiens
agcctccacctcccg

SEQ ID NO: 535831 - DNA, 15 bp, Homo sapiens
cagcctccacctccc

SEQ ID NO: 535832 - DNA, 15 bp, Homo sapiens
gcagcctccacctcc

SEQ ID NO: 535833 - DNA, 15 bp, Homo sapiens
cgcagcctccacctc

SEQ ID NO: 535834 - DNA, 15 bp, Homo sapiens
ccgcagcctccacct

SEQ ID NO: 535835 - DNA, 15 bp, Homo sapiens
accgcagcctccacc

SEQ ID NO: 535836 - DNA, 15 bp, Homo sapiens
caccgcagcctccac

SEQ ID NO: 535837 - DNA, 15 bp, Homo sapiens
tcaccgcagcctcca

SEQ ID NO: 535838 - DNA, 15 bp, Homo sapiens
ctcaccgcagcctcc

SEQ ID NO: 535839 - DNA, 15 bp, Homo sapiens
gctcaccgcagcctc

SEQ ID NO: 535840 - DNA, 15 bp, Homo sapiens
ggctcaccgcagcct

SEQ ID NO: 535841 - DNA, 15 bp, Homo sapiens
tggctcaccgcagcc

SEQ ID NO: 535842 - DNA, 15 bp, Homo sapiens
ttggctcaccgcagc

SEQ ID NO: 535843 - DNA, 15 bp, Homo sapiens
cttggctcaccgcag

SEQ ID NO: 535844 - DNA, 15 bp, Homo sapiens
tcttggctcaccgca

SEQ ID NO: 535845 - DNA, 15 bp, Homo sapiens
atcttggctcaccgc

SEQ ID NO: 535846 - DNA, 15 bp, Homo sapiens
gatcttggctcaccg

SEQ ID NO: 535847 - DNA, 15 bp, Homo sapiens
tgatcttggctcacc

SEQ ID NO: 535848 - DNA, 15 bp, Homo sapiens
atgatcttggctcac

SEQ ID NO: 535849 - DNA, 15 bp, Homo sapiens
catgatcttggctca

SEQ ID NO: 535850 - DNA, 15 bp, Homo sapiens
gcatgatcttggctc

SEQ ID NO: 535851 - DNA, 15 bp, Homo sapiens
ggcatgatcttggct

SEQ ID NO: 535852 - DNA, 15 bp, Homo sapiens
tggcatgatcttggc

SEQ ID NO: 535853 - DNA, 15 bp, Homo sapiens
atggcatgatcttgg

SEQ ID NO: 535854 - DNA, 15 bp, Homo sapiens
aatggcatgatcttg

SEQ ID NO: 535855 - DNA, 15 bp, Homo sapiens
caatggcatgatctt

SEQ ID NO: 535856 - DNA, 15 bp, Homo sapiens
gcaatggcatgatct

SEQ ID NO: 535857 - DNA, 15 bp, Homo sapiens
tgcaatggcatgatc

SEQ ID NO: 535858 - DNA, 15 bp, Homo sapiens
gtgcaatggcatgat

SEQ ID NO: 535859 - DNA, 15 bp, Homo sapiens
ggtgcaatggcatga

SEQ ID NO: 535860 - DNA, 15 bp, Homo sapiens
gggtgcaatggcatg

SEQ ID NO: 535861 - DNA, 15 bp, Homo sapiens
ggggtgcaatggcat

SEQ ID NO: 535862 - DNA, 15 bp, Homo sapiens
tggggtgcaatggca

SEQ ID NO: 535863 - DNA, 15 bp, Homo sapiens
ctggggtgcaatggc

SEQ ID NO: 535864 - DNA, 15 bp, Homo sapiens
gctggggtgcaatgg

SEQ ID NO: 535865 - DNA, 15 bp, Homo sapiens
ggctggggtgcaatg

SEQ ID NO: 535866 - DNA, 15 bp, Homo sapiens
aggctggggtgcaat

SEQ ID NO: 535867 - DNA, 15 bp, Homo sapiens
caggctggggtgcaa

SEQ ID NO: 535868 - DNA, 15 bp, Homo sapiens
ccaggctggggtgca

SEQ ID NO: 535869 - DNA, 15 bp, Homo sapiens
cccaggctggggtgc

SEQ ID NO: 535870 - DNA, 15 bp, Homo sapiens
gcccaggctggggtg

SEQ ID NO: 535871 - DNA, 15 bp, Homo sapiens
tgcccaggctggggt

SEQ ID NO: 535872 - DNA, 15 bp, Homo sapiens
ttgcccaggctgggg

SEQ ID NO: 535873 - DNA, 15 bp, Homo sapiens
gttgcccaggctggg

SEQ ID NO: 535874 - DNA, 15 bp, Homo sapiens
ttgttgcccaggctg

SEQ ID NO: 535875 - DNA, 15 bp, Homo sapiens
cttgttgcccaggct

SEQ ID NO: 535876 - DNA, 15 bp, Homo sapiens
tcttgttgcccaggc

SEQ ID NO: 535877 - DNA, 15 bp, Homo sapiens
ctcttgttgcccagg

SEQ ID NO: 535878 - DNA, 15 bp, Homo sapiens
actcttgttgcccag

SEQ ID NO: 535879 - DNA, 15 bp, Homo sapiens
cactcttgttgccca

SEQ ID NO: 535880 - DNA, 15 bp, Homo sapiens
tcactcttgttgccc

SEQ ID NO: 535881 - DNA, 15 bp, Homo sapiens
ttcactcttgttgcc

SEQ ID NO: 535882 - DNA, 15 bp, Homo sapiens
tttcactcttgttgc

SEQ ID NO: 535883 - DNA, 15 bp, Homo sapiens
gtttcactcttgttg

SEQ ID NO: 535884 - DNA, 15 bp, Homo sapiens
agtttcactcttgtt

SEQ ID NO: 535885 - DNA, 15 bp, Homo sapiens
gagtttcactcttgt

SEQ ID NO: 535886 - DNA, 15 bp, Homo sapiens
ggagtttcactcttg

SEQ ID NO: 535887 - DNA, 15 bp, Homo sapiens
tggagtttcactctt

SEQ ID NO: 535888 - DNA, 15 bp, Homo sapiens
atggagtttcactct

SEQ ID NO: 535889 - DNA, 15 bp, Homo sapiens
gatggagtttcactc

SEQ ID NO: 535890 - DNA, 15 bp, Homo sapiens
agatggagtttcact

SEQ ID NO: 535891 - DNA, 15 bp, Homo sapiens
gagatggagtttcac

SEQ ID NO: 535892 - DNA, 15 bp, Homo sapiens
tgagatggagtttca

SEQ ID NO: 535893 - DNA, 15 bp, Homo sapiens
ttgagatggagtttc

SEQ ID NO: 535894 - DNA, 15 bp, Homo sapiens
tttgagatggagttt

SEQ ID NO: 535895 - DNA, 15 bp, Homo sapiens
ttttgagatggagtt

SEQ ID NO: 535896 - DNA, 15 bp, Homo sapiens
atttttttttttttg

SEQ ID NO: 535897 - DNA, 15 bp, Homo sapiens
aattttttttttttt

SEQ ID NO: 535898 - DNA, 15 bp, Homo sapiens
caatttttttttttt

SEQ ID NO: 535899 - DNA, 15 bp, Homo sapiens
ccaattttttttttt

SEQ ID NO: 535900 - DNA, 15 bp, Homo sapiens
tccaatttttttttt

SEQ ID NO: 535901 - DNA, 15 bp, Homo sapiens
ctccaattttttttt

SEQ ID NO: 535902 - DNA, 15 bp, Homo sapiens
cctccaatttttttt

SEQ ID NO: 535903 - DNA, 15 bp, Homo sapiens
ccctccaattttttt

SEQ ID NO: 535904 - DNA, 15 bp, Homo sapiens
tccctccaatttttt

SEQ ID NO: 535905 - DNA, 15 bp, Homo sapiens
ttccctccaattttt

SEQ ID NO: 535906 - DNA, 15 bp, Homo sapiens
gttccctccaatttt

SEQ ID NO: 535907 - DNA, 15 bp, Homo sapiens
agttccctccaattt

SEQ ID NO: 535908 - DNA, 15 bp, Homo sapiens
gagttccctccaatt

SEQ ID NO: 535909 - DNA, 15 bp, Homo sapiens
ggagttccctccaat

SEQ ID NO: 535910 - DNA, 15 bp, Homo sapiens
tggagttccctccaa

SEQ ID NO: 535911 - DNA, 15 bp, Homo sapiens
ctggagttccctcca

SEQ ID NO: 535912 - DNA, 15 bp, Homo sapiens
gctggagttccctcc

SEQ ID NO: 535913 - DNA, 15 bp, Homo sapiens
ggctggagttccctc

SEQ ID NO: 535914 - DNA, 15 bp, Homo sapiens
gggctggagttccct

SEQ ID NO: 535915 - DNA, 15 bp, Homo sapiens
tgggctggagttccc

SEQ ID NO: 535916 - DNA, 15 bp, Homo sapiens
ctgggctggagttcc

SEQ ID NO: 535917 - DNA, 15 bp, Homo sapiens
cctgggctggagttc

SEQ ID NO: 535918 - DNA, 15 bp, Homo sapiens
acctgggctggagtt

SEQ ID NO: 535919 - DNA, 15 bp, Homo sapiens
cacctgggctggagt

SEQ ID NO: 535920 - DNA, 15 bp, Homo sapiens
gcacctgggctggag

SEQ ID NO: 535921 - DNA, 15 bp, Homo sapiens
ggcacctgggctgga

SEQ ID NO: 535922 - DNA, 15 bp, Homo sapiens
tggcacctgggctgg

SEQ ID NO: 535923 - DNA, 15 bp, Homo sapiens
gtggcacctgggctg

SEQ ID NO: 535924 - DNA, 15 bp, Homo sapiens
agtggcacctgggct

SEQ ID NO: 535925 - DNA, 15 bp, Homo sapiens
cagtggcacctgggc

SEQ ID NO: 535926 - DNA, 15 bp, Homo sapiens
ccagtggcacctggg

SEQ ID NO: 535927 - DNA, 15 bp, Homo sapiens
cccagtggcacctgg

SEQ ID NO: 535928 - DNA, 15 bp, Homo sapiens
gcccagtggcacctg

SEQ ID NO: 535929 - DNA, 15 bp, Homo sapiens
tgcccagtggcacct

SEQ ID NO: 535930 - DNA, 15 bp, Homo sapiens
atgcccagtggcacc

SEQ ID NO: 535931 - DNA, 15 bp, Homo sapiens
gatgcccagtggcac

SEQ ID NO: 535932 - DNA, 15 bp, Homo sapiens
agatgcccagtggca

SEQ ID NO: 535933 - DNA, 15 bp, Homo sapiens
tagatgcccagtggc

SEQ ID NO: 535934 - DNA, 15 bp, Homo sapiens
atagatgcccagtgg

SEQ ID NO: 535935 - DNA, 15 bp, Homo sapiens
gatagatgcccagtg

SEQ ID NO: 535936 - DNA, 15 bp, Homo sapiens
ggatagatgcccagt

SEQ ID NO: 535937 - DNA, 15 bp, Homo sapiens
tggatagatgcccag

SEQ ID NO: 535938 - DNA, 15 bp, Homo sapiens
gtggatagatgccca

SEQ ID NO: 535939 - DNA, 15 bp, Homo sapiens
tgtggatagatgccc

SEQ ID NO: 535940 - DNA, 15 bp, Homo sapiens
ctgtggatagatgcc

SEQ ID NO: 535941 - DNA, 15 bp, Homo sapiens
tctgtggatagatgc

SEQ ID NO: 535942 - DNA, 15 bp, Homo sapiens
ctctgtggatagatg

SEQ ID NO: 535943 - DNA, 15 bp, Homo sapiens
gctctgtggatagat

SEQ ID NO: 535944 - DNA, 15 bp, Homo sapiens
tgctctgtggataga

SEQ ID NO: 535945 - DNA, 15 bp, Homo sapiens
gtgctctgtggatag

SEQ ID NO: 535946 - DNA, 15 bp, Homo sapiens
tgtgctctgtggata

SEQ ID NO: 535947 - DNA, 15 bp, Homo sapiens
atgtgctctgtggat

SEQ ID NO: 535948 - DNA, 15 bp, Homo sapiens
tatgtgctctgtgga

SEQ ID NO: 535949 - DNA, 15 bp, Homo sapiens
ctatgtgctctgtgg

SEQ ID NO: 535950 - DNA, 15 bp, Homo sapiens
gctatgtgctctgtg

SEQ ID NO: 535951 - DNA, 15 bp, Homo sapiens
agctatgtgctctgt

SEQ ID NO: 535952 - DNA, 15 bp, Homo sapiens
cagctatgtgctctg

SEQ ID NO: 535953 - DNA, 15 bp, Homo sapiens
acagctatgtgctct

SEQ ID NO: 535954 - DNA, 15 bp, Homo sapiens
tacagctatgtgctc

SEQ ID NO: 535955 - DNA, 15 bp, Homo sapiens
gtacagctatgtgct

SEQ ID NO: 535956 - DNA, 15 bp, Homo sapiens
ggtacagctatgtgc

SEQ ID NO: 535957 - DNA, 15 bp, Homo sapiens
gggtacagctatgtg

SEQ ID NO: 535958 - DNA, 15 bp, Homo sapiens
cgggtacagctatgt

SEQ ID NO: 535959 - DNA, 15 bp, Homo sapiens
acgggtacagctatg

SEQ ID NO: 535960 - DNA, 15 bp, Homo sapiens
tacgggtacagctat

SEQ ID NO: 535961 - DNA, 15 bp, Homo sapiens
ctacgggtacagcta

SEQ ID NO: 535962 - DNA, 15 bp, Homo sapiens
tctacgggtacagct

SEQ ID NO: 535963 - DNA, 15 bp, Homo sapiens
atctacgggtacagc

SEQ ID NO: 535964 - DNA, 15 bp, Homo sapiens
catctacgggtacag

SEQ ID NO: 535965 - DNA, 15 bp, Homo sapiens
tcatctacgggtaca

SEQ ID NO: 535966 - DNA, 15 bp, Homo sapiens
gtcatctacgggtac

SEQ ID NO: 535967 - DNA, 15 bp, Homo sapiens
agtcatctacgggta

SEQ ID NO: 535968 - DNA, 15 bp, Homo sapiens
gagtcatctacgggt

SEQ ID NO: 535969 - DNA, 15 bp, Homo sapiens
ggagtcatctacggg

SEQ ID NO: 535970 - DNA, 15 bp, Homo sapiens
gggagtcatctacgg

SEQ ID NO: 535971 - DNA, 15 bp, Homo sapiens
ggggagtcatctacg

SEQ ID NO: 535972 - DNA, 15 bp, Homo sapiens
gggggagtcatctac

SEQ ID NO: 535973 - DNA, 15 bp, Homo sapiens
agggggagtcatcta

SEQ ID NO: 535974 - DNA, 15 bp, Homo sapiens
gagggggagtcatct

SEQ ID NO: 535975 - DNA, 15 bp, Homo sapiens
ggagggggagtcatc

SEQ ID NO: 535976 - DNA, 15 bp, Homo sapiens
gggagggggagtcat

SEQ ID NO: 535977 - DNA, 15 bp, Homo sapiens
ggggagggggagtca

SEQ ID NO: 535978 - DNA, 15 bp, Homo sapiens
tggggagggggagtc

SEQ ID NO: 535979 - DNA, 15 bp, Homo sapiens
ctggggagggggagt

SEQ ID NO: 535980 - DNA, 15 bp, Homo sapiens
cctggggagggggag

SEQ ID NO: 535981 - DNA, 15 bp, Homo sapiens
acctggggaggggga

SEQ ID NO: 535982 - DNA, 15 bp, Homo sapiens
gacctggggaggggg

SEQ ID NO: 535983 - DNA, 15 bp, Homo sapiens
tgacctggggagggg

SEQ ID NO: 535984 - DNA, 15 bp, Homo sapiens
ctgacctggggaggg

SEQ ID NO: 535985 - DNA, 15 bp, Homo sapiens
gctgacctggggagg

SEQ ID NO: 535986 - DNA, 15 bp, Homo sapiens
ggctgacctggggag

SEQ ID NO: 535987 - DNA, 15 bp, Homo sapiens
aggctgacctgggga

SEQ ID NO: 535988 - DNA, 15 bp, Homo sapiens
caggctgacctgggg

SEQ ID NO: 535989 - DNA, 15 bp, Homo sapiens
gcaggctgacctggg

SEQ ID NO: 535990 - DNA, 15 bp, Homo sapiens
cgcaggctgacctgg

SEQ ID NO: 535991 - DNA, 15 bp, Homo sapiens
tcgcaggctgacctg

SEQ ID NO: 535992 - DNA, 15 bp, Homo sapiens
atcgcaggctgacct

SEQ ID NO: 535993 - DNA, 15 bp, Homo sapiens
catcgcaggctgacc

SEQ ID NO: 535994 - DNA, 15 bp, Homo sapiens
acatcgcaggctgac

SEQ ID NO: 535995 - DNA, 15 bp, Homo sapiens
aacatcgcaggctga

SEQ ID NO: 535996 - DNA, 15 bp, Homo sapiens
aaacatcgcaggctg

SEQ ID NO: 535997 - DNA, 15 bp, Homo sapiens
gaaacatcgcaggct

SEQ ID NO: 535998 - DNA, 15 bp, Homo sapiens
ggaaacatcgcaggc

SEQ ID NO: 535999 - DNA, 15 bp, Homo sapiens
gggaaacatcgcagg

SEQ ID NO: 536000 - DNA, 15 bp, Homo sapiens
ggggaaacatcgcag

SEQ ID NO: 536001 - DNA, 15 bp, Homo sapiens
aggggaaacatcgca

SEQ ID NO: 536002 - DNA, 15 bp, Homo sapiens
aaggggaaacatcgc

SEQ ID NO: 536003 - DNA, 15 bp, Homo sapiens
taaggggaaacatcg

SEQ ID NO: 536004 - DNA, 15 bp, Homo sapiens
ctaaggggaaacatc

SEQ ID NO: 536005 - DNA, 15 bp, Homo sapiens
actaaggggaaacat

SEQ ID NO: 536006 - DNA, 15 bp, Homo sapiens
gactaaggggaaaca

SEQ ID NO: 536007 - DNA, 15 bp, Homo sapiens
ggactaaggggaaac

SEQ ID NO: 536008 - DNA, 15 bp, Homo sapiens
aggactaaggggaaa

SEQ ID NO: 536009 - DNA, 15 bp, Homo sapiens
gaggactaaggggaa

SEQ ID NO: 536010 - DNA, 15 bp, Homo sapiens
tgaggactaagggga

SEQ ID NO: 536011 - DNA, 15 bp, Homo sapiens
atgaggactaagggg

SEQ ID NO: 536012 - DNA, 15 bp, Homo sapiens
catgaggactaaggg

SEQ ID NO: 536013 - DNA, 15 bp, Homo sapiens
gcatgaggactaagg

SEQ ID NO: 536014 - DNA, 15 bp, Homo sapiens
cgcatgaggactaag

SEQ ID NO: 536015 - DNA, 15 bp, Homo sapiens
acgcatgaggactaa

SEQ ID NO: 536016 - DNA, 15 bp, Homo sapiens
tacgcatgaggacta

SEQ ID NO: 536017 - DNA, 15 bp, Homo sapiens
gtacgcatgaggact

SEQ ID NO: 536018 - DNA, 15 bp, Homo sapiens
agtacgcatgaggac

SEQ ID NO: 536019 - DNA, 15 bp, Homo sapiens
cagtacgcatgagga

SEQ ID NO: 536020 - DNA, 15 bp, Homo sapiens
tcagtacgcatgagg

SEQ ID NO: 536021 - DNA, 15 bp, Homo sapiens
ctcagtacgcatgag

SEQ ID NO: 536022 - DNA, 15 bp, Homo sapiens
gctcagtacgcatga

SEQ ID NO: 536023 - DNA, 15 bp, Homo sapiens
tgctcagtacgcatg

SEQ ID NO: 536024 - DNA, 15 bp, Homo sapiens
atgctcagtacgcat

SEQ ID NO: 536025 - DNA, 15 bp, Homo sapiens
gatgctcagtacgca

SEQ ID NO: 536026 - DNA, 15 bp, Homo sapiens
tgatgctcagtacgc

SEQ ID NO: 536027 - DNA, 15 bp, Homo sapiens
gtgatgctcagtacg

SEQ ID NO: 536028 - DNA, 15 bp, Homo sapiens
tgtgatgctcagtac

SEQ ID NO: 536029 - DNA, 15 bp, Homo sapiens
atgtgatgctcagta

SEQ ID NO: 536030 - DNA, 15 bp, Homo sapiens
catgtgatgctcagt

SEQ ID NO: 536031 - DNA, 15 bp, Homo sapiens
ccatgtgatgctcag

SEQ ID NO: 536032 - DNA, 15 bp, Homo sapiens
cccatgtgatgctca

SEQ ID NO: 536033 - DNA, 15 bp, Homo sapiens
gcccatgtgatgctc

SEQ ID NO: 536034 - DNA, 15 bp, Homo sapiens
agcccatgtgatgct

SEQ ID NO: 536035 - DNA, 15 bp, Homo sapiens
cagcccatgtgatgc

SEQ ID NO: 536036 - DNA, 15 bp, Homo sapiens
gcagcccatgtgatg

SEQ ID NO: 536037 - DNA, 15 bp, Homo sapiens
agcagcccatgtgat

SEQ ID NO: 536038 - DNA, 15 bp, Homo sapiens
aagcagcccatgtga

SEQ ID NO: 536039 - DNA, 15 bp, Homo sapiens
caagcagcccatgtg

SEQ ID NO: 536040 - DNA, 15 bp, Homo sapiens
ccaagcagcccatgt

SEQ ID NO: 536041 - DNA, 15 bp, Homo sapiens
cccaagcagcccatg

SEQ ID NO: 536042 - DNA, 15 bp, Homo sapiens
tcccaagcagcccat

SEQ ID NO: 536043 - DNA, 15 bp, Homo sapiens
ctcccaagcagccca

SEQ ID NO: 536044 - DNA, 15 bp, Homo sapiens
tctcccaagcagccc

SEQ ID NO: 536045 - DNA, 15 bp, Homo sapiens
ctctcccaagcagcc

SEQ ID NO: 536046 - DNA, 15 bp, Homo sapiens
cctctcccaagcagc

SEQ ID NO: 536047 - DNA, 15 bp, Homo sapiens
acctctcccaagcag

SEQ ID NO: 536048 - DNA, 15 bp, Homo sapiens
cacctctcccaagca

SEQ ID NO: 536049 - DNA, 15 bp, Homo sapiens
ccacctctcccaagc

SEQ ID NO: 536050 - DNA, 15 bp, Homo sapiens
tccacctctcccaag

SEQ ID NO: 536051 - DNA, 15 bp, Homo sapiens
ctccacctctcccaa

SEQ ID NO: 536052 - DNA, 15 bp, Homo sapiens
tctccacctctccca

SEQ ID NO: 536053 - DNA, 15 bp, Homo sapiens
atctccacctctccc

SEQ ID NO: 536054 - DNA, 15 bp, Homo sapiens
tatctccacctctcc

SEQ ID NO: 536055 - DNA, 15 bp, Homo sapiens
ttatctccacctctc

SEQ ID NO: 536056 - DNA, 15 bp, Homo sapiens
cttatctccacctct

SEQ ID NO: 536057 - DNA, 15 bp, Homo sapiens
ccttatctccacctc

SEQ ID NO: 536058 - DNA, 15 bp, Homo sapiens
cccttatctccacct

SEQ ID NO: 536059 - DNA, 15 bp, Homo sapiens
tcccttatctccacc

SEQ ID NO: 536060 - DNA, 15 bp, Homo sapiens
ctcccttatctccac

SEQ ID NO: 536061 - DNA, 15 bp, Homo sapiens
cctcccttatctcca

SEQ ID NO: 536062 - DNA, 15 bp, Homo sapiens
ccctcccttatctcc

SEQ ID NO: 536063 - DNA, 15 bp, Homo sapiens
cccctcccttatctc

SEQ ID NO: 536064 - DNA, 15 bp, Homo sapiens
ccccctcccttatct

SEQ ID NO: 536065 - DNA, 15 bp, Homo sapiens
cccccctcccttatc

SEQ ID NO: 536066 - DNA, 15 bp, Homo sapiens
gcccccctcccttat

SEQ ID NO: 536067 - DNA, 15 bp, Homo sapiens
agcccccctccctta

SEQ ID NO: 536068 - DNA, 15 bp, Homo sapiens
cagcccccctccctt

SEQ ID NO: 536069 - DNA, 15 bp, Homo sapiens
ccagcccccctccct

SEQ ID NO: 536070 - DNA, 15 bp, Homo sapiens
accagcccccctccc

SEQ ID NO: 536071 - DNA, 15 bp, Homo sapiens
aaccagcccccctcc

SEQ ID NO: 536072 - DNA, 15 bp, Homo sapiens
gaaccagcccccctc

SEQ ID NO: 536073 - DNA, 15 bp, Homo sapiens
tgaaccagcccccct

SEQ ID NO: 536074 - DNA, 15 bp, Homo sapiens
ctgaaccagcccccc

SEQ ID NO: 536075 - DNA, 15 bp, Homo sapiens
tctgaaccagccccc

SEQ ID NO: 536076 - DNA, 15 bp, Homo sapiens
ttctgaaccagcccc

SEQ ID NO: 536077 - DNA, 15 bp, Homo sapiens
gttctgaaccagccc

SEQ ID NO: 536078 - DNA, 15 bp, Homo sapiens
ggttctgaaccagcc

SEQ ID NO: 536079 - DNA, 15 bp, Homo sapiens
gggttctgaaccagc

SEQ ID NO: 536080 - DNA, 15 bp, Homo sapiens
tgggttctgaaccag

SEQ ID NO: 536081 - DNA, 15 bp, Homo sapiens
ctgggttctgaacca

SEQ ID NO: 536082 - DNA, 15 bp, Homo sapiens
cctgggttctgaacc

SEQ ID NO: 536083 - DNA, 15 bp, Homo sapiens
acctgggttctgaac

SEQ ID NO: 536084 - DNA, 15 bp, Homo sapiens
gacctgggttctgaa

SEQ ID NO: 536085 - DNA, 15 bp, Homo sapiens
agacctgggttctga

SEQ ID NO: 536086 - DNA, 15 bp, Homo sapiens
gagacctgggttctg

SEQ ID NO: 536087 - DNA, 15 bp, Homo sapiens
ggagacctgggttct

SEQ ID NO: 536088 - DNA, 15 bp, Homo sapiens
tggagacctgggttc

SEQ ID NO: 536089 - DNA, 15 bp, Homo sapiens
atggagacctgggtt

SEQ ID NO: 536090 - DNA, 15 bp, Homo sapiens
aatggagacctgggt

SEQ ID NO: 536091 - DNA, 15 bp, Homo sapiens
gaatggagacctggg

SEQ ID NO: 536092 - DNA, 15 bp, Homo sapiens
tgaatggagacctgg

SEQ ID NO: 536093 - DNA, 15 bp, Homo sapiens
ctgaatggagacctg

SEQ ID NO: 536094 - DNA, 15 bp, Homo sapiens
tctgaatggagacct

SEQ ID NO: 536095 - DNA, 15 bp, Homo sapiens
atctgaatggagacc

SEQ ID NO: 536096 - DNA, 15 bp, Homo sapiens
gatctgaatggagac

SEQ ID NO: 536097 - DNA, 15 bp, Homo sapiens
ggatctgaatggaga

SEQ ID NO: 536098 - DNA, 15 bp, Homo sapiens
aggatctgaatggag

SEQ ID NO: 536099 - DNA, 15 bp, Homo sapiens
caggatctgaatgga

SEQ ID NO: 536100 - DNA, 15 bp, Homo sapiens
ccaggatctgaatgg

SEQ ID NO: 536101 - DNA, 15 bp, Homo sapiens
gccaggatctgaatg

SEQ ID NO: 536102 - DNA, 15 bp, Homo sapiens
agccaggatctgaat

SEQ ID NO: 536103 - DNA, 15 bp, Homo sapiens
cagccaggatctgaa

SEQ ID NO: 536104 - DNA, 15 bp, Homo sapiens
ccagccaggatctga

SEQ ID NO: 536105 - DNA, 15 bp, Homo sapiens
gccagccaggatctg

SEQ ID NO: 536106 - DNA, 15 bp, Homo sapiens
ggccagccaggatct

SEQ ID NO: 536107 - DNA, 15 bp, Homo sapiens
tggccagccaggatc

SEQ ID NO: 536108 - DNA, 15 bp, Homo sapiens
ttggccagccaggat

SEQ ID NO: 536109 - DNA, 15 bp, Homo sapiens
gttggccagccagga

SEQ ID NO: 536110 - DNA, 15 bp, Homo sapiens
tgttggccagccagg

SEQ ID NO: 536111 - DNA, 15 bp, Homo sapiens
gtgttggccagccag

SEQ ID NO: 536112 - DNA, 15 bp, Homo sapiens
ggtgttggccagcca

SEQ ID NO: 536113 - DNA, 15 bp, Homo sapiens
gggtgttggccagcc

SEQ ID NO: 536114 - DNA, 15 bp, Homo sapiens
agggtgttggccagc

SEQ ID NO: 536115 - DNA, 15 bp, Homo sapiens
cagggtgttggccag

SEQ ID NO: 536116 - DNA, 15 bp, Homo sapiens
ccagggtgttggcca

SEQ ID NO: 536117 - DNA, 15 bp, Homo sapiens
cccagggtgttggcc

SEQ ID NO: 536118 - DNA, 15 bp, Homo sapiens
ccccagggtgttggc

SEQ ID NO: 536119 - DNA, 15 bp, Homo sapiens
gccccagggtgttgg

SEQ ID NO: 536120 - DNA, 15 bp, Homo sapiens
tgccccagggtgttg

SEQ ID NO: 536121 - DNA, 15 bp, Homo sapiens
ctgccccagggtgtt

SEQ ID NO: 536122 - DNA, 15 bp, Homo sapiens
tctgccccagggtgt

SEQ ID NO: 536123 - DNA, 15 bp, Homo sapiens
ctctgccccagggtg

SEQ ID NO: 536124 - DNA, 15 bp, Homo sapiens
actctgccccagggt

SEQ ID NO: 536125 - DNA, 15 bp, Homo sapiens
cactctgccccaggg

SEQ ID NO: 536126 - DNA, 15 bp, Homo sapiens
ccactctgccccagg

SEQ ID NO: 536127 - DNA, 15 bp, Homo sapiens
gccactctgccccag

SEQ ID NO: 536128 - DNA, 15 bp, Homo sapiens
ggccactctgcccca

SEQ ID NO: 536129 - DNA, 15 bp, Homo sapiens
tggccactctgcccc

SEQ ID NO: 536130 - DNA, 15 bp, Homo sapiens
gtggccactctgccc

SEQ ID NO: 536131 - DNA, 15 bp, Homo sapiens
tgtggccactctgcc

SEQ ID NO: 536132 - DNA, 15 bp, Homo sapiens
gtgtggccactctgc

SEQ ID NO: 536133 - DNA, 15 bp, Homo sapiens
ggtgtggccactctg

SEQ ID NO: 536134 - DNA, 15 bp, Homo sapiens
gggtgtggccactct

SEQ ID NO: 536135 - DNA, 15 bp, Homo sapiens
ggggtgtggccactc

SEQ ID NO: 536136 - DNA, 15 bp, Homo sapiens
aggggtgtggccact

SEQ ID NO: 536137 - DNA, 15 bp, Homo sapiens
caggggtgtggccac

SEQ ID NO: 536138 - DNA, 15 bp, Homo sapiens
ccaggggtgtggcca

SEQ ID NO: 536139 - DNA, 15 bp, Homo sapiens
accaggggtgtggcc

SEQ ID NO: 536140 - DNA, 15 bp, Homo sapiens
caccaggggtgtggc

SEQ ID NO: 536141 - DNA, 15 bp, Homo sapiens
gcaccaggggtgtgg

SEQ ID NO: 536142 - DNA, 15 bp, Homo sapiens
ggcaccaggggtgtg

SEQ ID NO: 536143 - DNA, 15 bp, Homo sapiens
tggcaccaggggtgt

SEQ ID NO: 536144 - DNA, 15 bp, Homo sapiens
gtggcaccaggggtg

SEQ ID NO: 536145 - DNA, 15 bp, Homo sapiens
tgtggcaccaggggt

SEQ ID NO: 536146 - DNA, 15 bp, Homo sapiens
ctgtggcaccagggg

SEQ ID NO: 536147 - DNA, 15 bp, Homo sapiens
actgtggcaccaggg

SEQ ID NO: 536148 - DNA, 15 bp, Homo sapiens
gactgtggcaccagg

SEQ ID NO: 536149 - DNA, 15 bp, Homo sapiens
agactgtggcaccag

SEQ ID NO: 536150 - DNA, 15 bp, Homo sapiens
gagactgtggcacca

SEQ ID NO: 536151 - DNA, 15 bp, Homo sapiens
ggagactgtggcacc

SEQ ID NO: 536152 - DNA, 15 bp, Homo sapiens
aggagactgtggcac

SEQ ID NO: 536153 - DNA, 15 bp, Homo sapiens
caggagactgtggca

SEQ ID NO: 536154 - DNA, 15 bp, Homo sapiens
acaggagactgtggc

SEQ ID NO: 536155 - DNA, 15 bp, Homo sapiens
gacaggagactgtgg

SEQ ID NO: 536156 - DNA, 15 bp, Homo sapiens
agacaggagactgtg

SEQ ID NO: 536157 - DNA, 15 bp, Homo sapiens
aagacaggagactgt

SEQ ID NO: 536158 - DNA, 15 bp, Homo sapiens
caagacaggagactg

SEQ ID NO: 536159 - DNA, 15 bp, Homo sapiens
ccaagacaggagact

SEQ ID NO: 536160 - DNA, 15 bp, Homo sapiens
gccaagacaggagac

SEQ ID NO: 536161 - DNA, 15 bp, Homo sapiens
ggccaagacaggaga

SEQ ID NO: 536162 - DNA, 15 bp, Homo sapiens
aggccaagacaggag

SEQ ID NO: 536163 - DNA, 15 bp, Homo sapiens
gaggccaagacagga

SEQ ID NO: 536164 - DNA, 15 bp, Homo sapiens
ggaggccaagacagg

SEQ ID NO: 536165 - DNA, 15 bp, Homo sapiens
gggaggccaagacag

SEQ ID NO: 536166 - DNA, 15 bp, Homo sapiens
agggaggccaagaca

SEQ ID NO: 536167 - DNA, 15 bp, Homo sapiens
cagggaggccaagac

SEQ ID NO: 536168 - DNA, 15 bp, Homo sapiens
acagggaggccaaga

SEQ ID NO: 536169 - DNA, 15 bp, Homo sapiens
cacagggaggccaag

SEQ ID NO: 536170 - DNA, 15 bp, Homo sapiens
ccacagggaggccaa

SEQ ID NO: 536171 - DNA, 15 bp, Homo sapiens
gccacagggaggcca

SEQ ID NO: 536172 - DNA, 15 bp, Homo sapiens
ggccacagggaggcc

SEQ ID NO: 536173 - DNA, 15 bp, Homo sapiens
tggccacagggaggc

SEQ ID NO: 536174 - DNA, 15 bp, Homo sapiens
ttggccacagggagg

SEQ ID NO: 536175 - DNA, 15 bp, Homo sapiens
tttggccacagggag

SEQ ID NO: 536176 - DNA, 15 bp, Homo sapiens
ttttggccacaggga

SEQ ID NO: 536177 - DNA, 15 bp, Homo sapiens
attttggccacaggg

SEQ ID NO: 536178 - DNA, 15 bp, Homo sapiens
gattttggccacagg

SEQ ID NO: 536179 - DNA, 15 bp, Homo sapiens
agattttggccacag

SEQ ID NO: 536180 - DNA, 15 bp, Homo sapiens
tagattttggccaca

SEQ ID NO: 536181 - DNA, 15 bp, Homo sapiens
gtagattttggccac

SEQ ID NO: 536182 - DNA, 15 bp, Homo sapiens
ggtagattttggcca

SEQ ID NO: 536183 - DNA, 15 bp, Homo sapiens
gggtagattttggcc

SEQ ID NO: 536184 - DNA, 15 bp, Homo sapiens
agggtagattttggc

SEQ ID NO: 536185 - DNA, 15 bp, Homo sapiens
aagggtagattttgg

SEQ ID NO: 536186 - DNA, 15 bp, Homo sapiens
caagggtagattttg

SEQ ID NO: 536187 - DNA, 15 bp, Homo sapiens
ccaagggtagatttt

SEQ ID NO: 536188 - DNA, 15 bp, Homo sapiens
gccaagggtagattt

SEQ ID NO: 536189 - DNA, 15 bp, Homo sapiens
ggccaagggtagatt

SEQ ID NO: 536190 - DNA, 15 bp, Homo sapiens
tggccaagggtagat

SEQ ID NO: 536191 - DNA, 15 bp, Homo sapiens
gtggccaagggtaga

SEQ ID NO: 536192 - DNA, 15 bp, Homo sapiens
ggtggccaagggtag

SEQ ID NO: 536193 - DNA, 15 bp, Homo sapiens
aggtggccaagggta

SEQ ID NO: 536194 - DNA, 15 bp, Homo sapiens
gaggtggccaagggt

SEQ ID NO: 536195 - DNA, 15 bp, Homo sapiens
tgaggtggccaaggg

SEQ ID NO: 536196 - DNA, 15 bp, Homo sapiens
ttgaggtggccaagg

SEQ ID NO: 536197 - DNA, 15 bp, Homo sapiens
cttgaggtggccaag

SEQ ID NO: 536198 - DNA, 15 bp, Homo sapiens
gcttgaggtggccaa

SEQ ID NO: 536199 - DNA, 15 bp, Homo sapiens
tgcttgaggtggcca

SEQ ID NO: 536200 - DNA, 15 bp, Homo sapiens
atgcttgaggtggcc

SEQ ID NO: 536201 - DNA, 15 bp, Homo sapiens
catgcttgaggtggc

SEQ ID NO: 536202 - DNA, 15 bp, Homo sapiens
ccatgcttgaggtgg

SEQ ID NO: 536203 - DNA, 15 bp, Homo sapiens
accatgcttgaggtg

SEQ ID NO: 536204 - DNA, 15 bp, Homo sapiens
taccatgcttgaggt

SEQ ID NO: 536205 - DNA, 15 bp, Homo sapiens
ctaccatgcttgagg

SEQ ID NO: 536206 - DNA, 15 bp, Homo sapiens
actaccatgcttgag

SEQ ID NO: 536207 - DNA, 15 bp, Homo sapiens
cactaccatgcttga

SEQ ID NO: 536208 - DNA, 15 bp, Homo sapiens
tcactaccatgcttg

SEQ ID NO: 536209 - DNA, 15 bp, Homo sapiens
ctcactaccatgctt

SEQ ID NO: 536210 - DNA, 15 bp, Homo sapiens
cctcactaccatgct

SEQ ID NO: 536211 - DNA, 15 bp, Homo sapiens
tcctcactaccatgc

SEQ ID NO: 536212 - DNA, 15 bp, Homo sapiens
ctcctcactaccatg

SEQ ID NO: 536213 - DNA, 15 bp, Homo sapiens
actcctcactaccat

SEQ ID NO: 536214 - DNA, 15 bp, Homo sapiens
gactcctcactacca

SEQ ID NO: 536215 - DNA, 15 bp, Homo sapiens
tgactcctcactacc

SEQ ID NO: 536216 - DNA, 15 bp, Homo sapiens
ctgactcctcactac

SEQ ID NO: 536217 - DNA, 15 bp, Homo sapiens
actgactcctcacta

SEQ ID NO: 536218 - DNA, 15 bp, Homo sapiens
cactgactcctcact

SEQ ID NO: 536219 - DNA, 15 bp, Homo sapiens
tcactgactcctcac

SEQ ID NO: 536220 - DNA, 15 bp, Homo sapiens
ctcactgactcctca

SEQ ID NO: 536221 - DNA, 15 bp, Homo sapiens
gctcactgactcctc

SEQ ID NO: 536222 - DNA, 15 bp, Homo sapiens
agctcactgactcct

SEQ ID NO: 536223 - DNA, 15 bp, Homo sapiens
tagctcactgactcc

SEQ ID NO: 536224 - DNA, 15 bp, Homo sapiens
atagctcactgactc

SEQ ID NO: 536225 - DNA, 15 bp, Homo sapiens
tatagctcactgact

SEQ ID NO: 536226 - DNA, 15 bp, Homo sapiens
ctatagctcactgac

SEQ ID NO: 536227 - DNA, 15 bp, Homo sapiens
actatagctcactga

SEQ ID NO: 536228 - DNA, 15 bp, Homo sapiens
tactatagctcactg

SEQ ID NO: 536229 - DNA, 15 bp, Homo sapiens
gtactatagctcact

SEQ ID NO: 536230 - DNA, 15 bp, Homo sapiens
tgtactatagctcac

SEQ ID NO: 536231 - DNA, 15 bp, Homo sapiens
ctgtactatagctca

SEQ ID NO: 536232 - DNA, 15 bp, Homo sapiens
gctgtactatagctc

SEQ ID NO: 536233 - DNA, 15 bp, Homo sapiens
tgctgtactatagct

SEQ ID NO: 536234 - DNA, 15 bp, Homo sapiens
ctgctgtactatagc

SEQ ID NO: 536235 - DNA, 15 bp, Homo sapiens
cctgctgtactatag

SEQ ID NO: 536236 - DNA, 15 bp, Homo sapiens
tcctgctgtactata

SEQ ID NO: 536237 - DNA, 15 bp, Homo sapiens
ctcctgctgtactat

SEQ ID NO: 536238 - DNA, 15 bp, Homo sapiens
gctcctgctgtacta

SEQ ID NO: 536239 - DNA, 15 bp, Homo sapiens
tgctcctgctgtact

SEQ ID NO: 536240 - DNA, 15 bp, Homo sapiens
gtgctcctgctgtac

SEQ ID NO: 536241 - DNA, 15 bp, Homo sapiens
ggtgctcctgctgta

SEQ ID NO: 536242 - DNA, 15 bp, Homo sapiens
gggtgctcctgctgt

SEQ ID NO: 536243 - DNA, 15 bp, Homo sapiens
tgggtgctcctgctg

SEQ ID NO: 536244 - DNA, 15 bp, Homo sapiens
ctgggtgctcctgct

SEQ ID NO: 536245 - DNA, 15 bp, Homo sapiens
cctgggtgctcctgc

SEQ ID NO: 536246 - DNA, 15 bp, Homo sapiens
ccctgggtgctcctg

SEQ ID NO: 536247 - DNA, 15 bp, Homo sapiens
gccctgggtgctcct

SEQ ID NO: 536248 - DNA, 15 bp, Homo sapiens
ggccctgggtgctcc

SEQ ID NO: 536249 - DNA, 15 bp, Homo sapiens
aggccctgggtgctc

SEQ ID NO: 536250 - DNA, 15 bp, Homo sapiens
caggccctgggtgct

SEQ ID NO: 536251 - DNA, 15 bp, Homo sapiens
ccaggccctgggtgc

SEQ ID NO: 536252 - DNA, 15 bp, Homo sapiens
gccaggccctgggtg

SEQ ID NO: 536253 - DNA, 15 bp, Homo sapiens
tgccaggccctgggt

SEQ ID NO: 536254 - DNA, 15 bp, Homo sapiens
atgccaggccctggg

SEQ ID NO: 536255 - DNA, 15 bp, Homo sapiens
catgccaggccctgg

SEQ ID NO: 536256 - DNA, 15 bp, Homo sapiens
tcatgccaggccctg

SEQ ID NO: 536257 - DNA, 15 bp, Homo sapiens
ctcatgccaggccct

SEQ ID NO: 536258 - DNA, 15 bp, Homo sapiens
gctcatgccaggccc

SEQ ID NO: 536259 - DNA, 15 bp, Homo sapiens
agctcatgccaggcc

SEQ ID NO: 536260 - DNA, 15 bp, Homo sapiens
gagctcatgccaggc

SEQ ID NO: 536261 - DNA, 15 bp, Homo sapiens
tgagctcatgccagg

SEQ ID NO: 536262 - DNA, 15 bp, Homo sapiens
ttgagctcatgccag

SEQ ID NO: 536263 - DNA, 15 bp, Homo sapiens
attgagctcatgcca

SEQ ID NO: 536264 - DNA, 15 bp, Homo sapiens
aattgagctcatgcc

SEQ ID NO: 536265 - DNA, 15 bp, Homo sapiens
gaattgagctcatgc

SEQ ID NO: 536266 - DNA, 15 bp, Homo sapiens
agaattgagctcatg

SEQ ID NO: 536267 - DNA, 15 bp, Homo sapiens
cagaattgagctcat

SEQ ID NO: 536268 - DNA, 15 bp, Homo sapiens
acagaattgagctca

SEQ ID NO: 536269 - DNA, 15 bp, Homo sapiens
tacagaattgagctc

SEQ ID NO: 536270 - DNA, 15 bp, Homo sapiens
atacagaattgagct

SEQ ID NO: 536271 - DNA, 15 bp, Homo sapiens
gatacagaattgagc

SEQ ID NO: 536272 - DNA, 15 bp, Homo sapiens
tgatacagaattgag

SEQ ID NO: 536273 - DNA, 15 bp, Homo sapiens
gtgatacagaattga

SEQ ID NO: 536274 - DNA, 15 bp, Homo sapiens
agtgatacagaattg

SEQ ID NO: 536275 - DNA, 15 bp, Homo sapiens
cagtgatacagaatt

SEQ ID NO: 536276 - DNA, 15 bp, Homo sapiens
tcagtgatacagaat

SEQ ID NO: 536277 - DNA, 15 bp, Homo sapiens
gtcagtgatacagaa

SEQ ID NO: 536278 - DNA, 15 bp, Homo sapiens
agtcagtgatacaga

SEQ ID NO: 536279 - DNA, 15 bp, Homo sapiens
gagtcagtgatacag

SEQ ID NO: 536280 - DNA, 15 bp, Homo sapiens
tgagtcagtgataca

SEQ ID NO: 536281 - DNA, 15 bp, Homo sapiens
ctgagtcagtgatac

SEQ ID NO: 536282 - DNA, 15 bp, Homo sapiens
cctgagtcagtgata

SEQ ID NO: 536283 - DNA, 15 bp, Homo sapiens
gcctgagtcagtgat

SEQ ID NO: 536284 - DNA, 15 bp, Homo sapiens
ggcctgagtcagtga

SEQ ID NO: 536285 - DNA, 15 bp, Homo sapiens
aggcctgagtcagtg

SEQ ID NO: 536286 - DNA, 15 bp, Homo sapiens
gaggcctgagtcagt

SEQ ID NO: 536287 - DNA, 15 bp, Homo sapiens
ggaggcctgagtcag

SEQ ID NO: 536288 - DNA, 15 bp, Homo sapiens
aggaggcctgagtca

SEQ ID NO: 536289 - DNA, 15 bp, Homo sapiens
taggaggcctgagtc

SEQ ID NO: 536290 - DNA, 15 bp, Homo sapiens
ctaggaggcctgagt

SEQ ID NO: 536291 - DNA, 15 bp, Homo sapiens
cctaggaggcctgag

SEQ ID NO: 536292 - DNA, 15 bp, Homo sapiens
tcctaggaggcctga

SEQ ID NO: 536293 - DNA, 15 bp, Homo sapiens
ctcctaggaggcctg

SEQ ID NO: 536294 - DNA, 15 bp, Homo sapiens
gctcctaggaggcct

SEQ ID NO: 536295 - DNA, 15 bp, Homo sapiens
ggctcctaggaggcc

SEQ ID NO: 536296 - DNA, 15 bp, Homo sapiens
aggctcctaggaggc

SEQ ID NO: 536297 - DNA, 15 bp, Homo sapiens
aaggctcctaggagg

SEQ ID NO: 536298 - DNA, 15 bp, Homo sapiens
caaggctcctaggag

SEQ ID NO: 536299 - DNA, 15 bp, Homo sapiens
ccaaggctcctagga

SEQ ID NO: 536300 - DNA, 15 bp, Homo sapiens
tccaaggctcctagg

SEQ ID NO: 536301 - DNA, 15 bp, Homo sapiens
ctccaaggctcctag

SEQ ID NO: 536302 - DNA, 15 bp, Homo sapiens
gctccaaggctccta

SEQ ID NO: 536303 - DNA, 15 bp, Homo sapiens
tgctccaaggctcct

SEQ ID NO: 536304 - DNA, 15 bp, Homo sapiens
atgctccaaggctcc

SEQ ID NO: 536305 - DNA, 15 bp, Homo sapiens
aatgctccaaggctc

SEQ ID NO: 536306 - DNA, 15 bp, Homo sapiens
aaatgctccaaggct

SEQ ID NO: 536307 - DNA, 15 bp, Homo sapiens
taaatgctccaaggc

SEQ ID NO: 536308 - DNA, 15 bp, Homo sapiens
ctaaatgctccaagg

SEQ ID NO: 536309 - DNA, 15 bp, Homo sapiens
actaaatgctccaag

SEQ ID NO: 536310 - DNA, 15 bp, Homo sapiens
gactaaatgctccaa

SEQ ID NO: 536311 - DNA, 15 bp, Homo sapiens
tgactaaatgctcca

SEQ ID NO: 536312 - DNA, 15 bp, Homo sapiens
ctgactaaatgctcc

SEQ ID NO: 536313 - DNA, 15 bp, Homo sapiens
actgactaaatgctc

SEQ ID NO: 536314 - DNA, 15 bp, Homo sapiens
gactgactaaatgct

SEQ ID NO: 536315 - DNA, 15 bp, Homo sapiens
tgactgactaaatgc

SEQ ID NO: 536316 - DNA, 15 bp, Homo sapiens
ttgactgactaaatg

SEQ ID NO: 536317 - DNA, 15 bp, Homo sapiens
cttgactgactaaat

SEQ ID NO: 536318 - DNA, 15 bp, Homo sapiens
acttgactgactaaa

SEQ ID NO: 536319 - DNA, 15 bp, Homo sapiens
cacttgactgactaa

SEQ ID NO: 536320 - DNA, 15 bp, Homo sapiens
acacttgactgacta

SEQ ID NO: 536321 - DNA, 15 bp, Homo sapiens
gacacttgactgact

SEQ ID NO: 536322 - DNA, 15 bp, Homo sapiens
tgacacttgactgac

SEQ ID NO: 536323 - DNA, 15 bp, Homo sapiens
gtgacacttgactga

SEQ ID NO: 536324 - DNA, 15 bp, Homo sapiens
tgtgacacttgactg

SEQ ID NO: 536325 - DNA, 15 bp, Homo sapiens
ttgtgacacttgact

SEQ ID NO: 536326 - DNA, 15 bp, Homo sapiens
tttgtgacacttgac

SEQ ID NO: 536327 - DNA, 15 bp, Homo sapiens
ttttgtgacacttga

SEQ ID NO: 536328 - DNA, 15 bp, Homo sapiens
cttttgtgacacttg

SEQ ID NO: 536329 - DNA, 15 bp, Homo sapiens
tcttttgtgacactt

SEQ ID NO: 536330 - DNA, 15 bp, Homo sapiens
ttcttttgtgacact

SEQ ID NO: 536331 - DNA, 15 bp, Homo sapiens
attcttttgtgacac

SEQ ID NO: 536332 - DNA, 15 bp, Homo sapiens
cattcttttgtgaca

SEQ ID NO: 536333 - DNA, 15 bp, Homo sapiens
ccattcttttgtgac

SEQ ID NO: 536334 - DNA, 15 bp, Homo sapiens
tccattcttttgtga

SEQ ID NO: 536335 - DNA, 15 bp, Homo sapiens
ttccattcttttgtg

SEQ ID NO: 536336 - DNA, 15 bp, Homo sapiens
tttccattcttttgt

SEQ ID NO: 536337 - DNA, 15 bp, Homo sapiens
ctttccattcttttg

SEQ ID NO: 536338 - DNA, 15 bp, Homo sapiens
actttccattctttt

SEQ ID NO: 536339 - DNA, 15 bp, Homo sapiens
cactttccattcttt

SEQ ID NO: 536340 - DNA, 15 bp, Homo sapiens
acactttccattctt

SEQ ID NO: 536341 - DNA, 15 bp, Homo sapiens
gacactttccattct

SEQ ID NO: 536342 - DNA, 15 bp, Homo sapiens
tgacactttccattc

SEQ ID NO: 536343 - DNA, 15 bp, Homo sapiens
ctgacactttccatt

SEQ ID NO: 536344 - DNA, 15 bp, Homo sapiens
gctgacactttccat

SEQ ID NO: 536345 - DNA, 15 bp, Homo sapiens
ggctgacactttcca

SEQ ID NO: 536346 - DNA, 15 bp, Homo sapiens
gggctgacactttcc

SEQ ID NO: 536347 - DNA, 15 bp, Homo sapiens
agggctgacactttc

SEQ ID NO: 536348 - DNA, 15 bp, Homo sapiens
gagggctgacacttt

SEQ ID NO: 536349 - DNA, 15 bp, Homo sapiens
agagggctgacactt

SEQ ID NO: 536350 - DNA, 15 bp, Homo sapiens
tagagggctgacact

SEQ ID NO: 536351 - DNA, 15 bp, Homo sapiens
ctagagggctgacac

SEQ ID NO: 536352 - DNA, 15 bp, Homo sapiens
cctagagggctgaca

SEQ ID NO: 536353 - DNA, 15 bp, Homo sapiens
tcctagagggctgac

SEQ ID NO: 536354 - DNA, 15 bp, Homo sapiens
ctcctagagggctga

SEQ ID NO: 536355 - DNA, 15 bp, Homo sapiens
actcctagagggctg

SEQ ID NO: 536356 - DNA, 15 bp, Homo sapiens
aactcctagagggct

SEQ ID NO: 536357 - DNA, 15 bp, Homo sapiens
caactcctagagggc

SEQ ID NO: 536358 - DNA, 15 bp, Homo sapiens
ccaactcctagaggg

SEQ ID NO: 536359 - DNA, 15 bp, Homo sapiens
cccaactcctagagg

SEQ ID NO: 536360 - DNA, 15 bp, Homo sapiens
ccccaactcctagag

SEQ ID NO: 536361 - DNA, 15 bp, Homo sapiens
cccccaactcctaga

SEQ ID NO: 536362 - DNA, 15 bp, Homo sapiens
acccccaactcctag

SEQ ID NO: 536363 - DNA, 15 bp, Homo sapiens
cacccccaactccta

SEQ ID NO: 536364 - DNA, 15 bp, Homo sapiens
ccacccccaactcct

SEQ ID NO: 536365 - DNA, 15 bp, Homo sapiens
accacccccaactcc

SEQ ID NO: 536366 - DNA, 15 bp, Homo sapiens
gaccacccccaactc

SEQ ID NO: 536367 - DNA, 15 bp, Homo sapiens
agaccacccccaact

SEQ ID NO: 536368 - DNA, 15 bp, Homo sapiens
cagaccacccccaac

SEQ ID NO: 536369 - DNA, 15 bp, Homo sapiens
ccagaccacccccaa

SEQ ID NO: 536370 - DNA, 15 bp, Homo sapiens
tccagaccaccccca

SEQ ID NO: 536371 - DNA, 15 bp, Homo sapiens
ttccagaccaccccc

SEQ ID NO: 536372 - DNA, 15 bp, Homo sapiens
cttccagaccacccc

SEQ ID NO: 536373 - DNA, 15 bp, Homo sapiens
ccttccagaccaccc

SEQ ID NO: 536374 - DNA, 15 bp, Homo sapiens
tccttccagaccacc

SEQ ID NO: 536375 - DNA, 15 bp, Homo sapiens
ctccttccagaccac

SEQ ID NO: 536376 - DNA, 15 bp, Homo sapiens
tctccttccagacca

SEQ ID NO: 536377 - DNA, 15 bp, Homo sapiens
ttctccttccagacc

SEQ ID NO: 536378 - DNA, 15 bp, Homo sapiens
tttctccttccagac

SEQ ID NO: 536379 - DNA, 15 bp, Homo sapiens
ctttctccttccaga

SEQ ID NO: 536380 - DNA, 15 bp, Homo sapiens
gctttctccttccag

SEQ ID NO: 536381 - DNA, 15 bp, Homo sapiens
agctttctccttcca

SEQ ID NO: 536382 - DNA, 15 bp, Homo sapiens
gagctttctccttcc

SEQ ID NO: 536383 - DNA, 15 bp, Homo sapiens
agagctttctccttc

SEQ ID NO: 536384 - DNA, 15 bp, Homo sapiens
aagagctttctcctt

SEQ ID NO: 536385 - DNA, 15 bp, Homo sapiens
gaagagctttctcct

SEQ ID NO: 536386 - DNA, 15 bp, Homo sapiens
ggaagagctttctcc

SEQ ID NO: 536387 - DNA, 15 bp, Homo sapiens
tggaagagctttctc

SEQ ID NO: 536388 - DNA, 15 bp, Homo sapiens
ctggaagagctttct

SEQ ID NO: 536389 - DNA, 15 bp, Homo sapiens
cctggaagagctttc

SEQ ID NO: 536390 - DNA, 15 bp, Homo sapiens
gcctggaagagcttt

SEQ ID NO: 536391 - DNA, 15 bp, Homo sapiens
tgcctggaagagctt

SEQ ID NO: 536392 - DNA, 15 bp, Homo sapiens
ctgcctggaagagct

SEQ ID NO: 536393 - DNA, 15 bp, Homo sapiens
tctgcctggaagagc

SEQ ID NO: 536394 - DNA, 15 bp, Homo sapiens
ctctgcctggaagag

SEQ ID NO: 536395 - DNA, 15 bp, Homo sapiens
actctgcctggaaga

SEQ ID NO: 536396 - DNA, 15 bp, Homo sapiens
cactctgcctggaag

SEQ ID NO: 536397 - DNA, 15 bp, Homo sapiens
ccactctgcctggaa

SEQ ID NO: 536398 - DNA, 15 bp, Homo sapiens
cccactctgcctgga

SEQ ID NO: 536399 - DNA, 15 bp, Homo sapiens
ccccactctgcctgg

SEQ ID NO: 536400 - DNA, 15 bp, Homo sapiens
gccccactctgcctg

SEQ ID NO: 536401 - DNA, 15 bp, Homo sapiens
agccccactctgcct

SEQ ID NO: 536402 - DNA, 15 bp, Homo sapiens
aagccccactctgcc

SEQ ID NO: 536403 - DNA, 15 bp, Homo sapiens
caagccccactctgc

SEQ ID NO: 536404 - DNA, 15 bp, Homo sapiens
ccaagccccactctg

SEQ ID NO: 536405 - DNA, 15 bp, Homo sapiens
gccaagccccactct

SEQ ID NO: 536406 - DNA, 15 bp, Homo sapiens
agccaagccccactc

SEQ ID NO: 536407 - DNA, 15 bp, Homo sapiens
gagccaagccccact

SEQ ID NO: 536408 - DNA, 15 bp, Homo sapiens
tgagccaagccccac

SEQ ID NO: 536409 - DNA, 15 bp, Homo sapiens
gtgagccaagcccca

SEQ ID NO: 536410 - DNA, 15 bp, Homo sapiens
tgtgagccaagcccc

SEQ ID NO: 536411 - DNA, 15 bp, Homo sapiens
gtgtgagccaagccc

SEQ ID NO: 536412 - DNA, 15 bp, Homo sapiens
tgtgtgagccaagcc

SEQ ID NO: 536413 - DNA, 15 bp, Homo sapiens
atgtgtgagccaagc

SEQ ID NO: 536414 - DNA, 15 bp, Homo sapiens
gatgtgtgagccaag

SEQ ID NO: 536415 - DNA, 15 bp, Homo sapiens
tgatgtgtgagccaa

SEQ ID NO: 536416 - DNA, 15 bp, Homo sapiens
atgatgtgtgagcca

SEQ ID NO: 536417 - DNA, 15 bp, Homo sapiens
aatgatgtgtgagcc

SEQ ID NO: 536418 - DNA, 15 bp, Homo sapiens
caatgatgtgtgagc

SEQ ID NO: 536419 - DNA, 15 bp, Homo sapiens
gcaatgatgtgtgag

SEQ ID NO: 536420 - DNA, 15 bp, Homo sapiens
agcaatgatgtgtga

SEQ ID NO: 536421 - DNA, 15 bp, Homo sapiens
cagcaatgatgtgtg

SEQ ID NO: 536422 - DNA, 15 bp, Homo sapiens
ccagcaatgatgtgt

SEQ ID NO: 536423 - DNA, 15 bp, Homo sapiens
accagcaatgatgtg

SEQ ID NO: 536424 - DNA, 15 bp, Homo sapiens
caccagcaatgatgt

SEQ ID NO: 536425 - DNA, 15 bp, Homo sapiens
ccaccagcaatgatg

SEQ ID NO: 536426 - DNA, 15 bp, Homo sapiens
accaccagcaatgat

SEQ ID NO: 536427 - DNA, 15 bp, Homo sapiens
aaccaccagcaatga

SEQ ID NO: 536428 - DNA, 15 bp, Homo sapiens
caaccaccagcaatg

SEQ ID NO: 536429 - DNA, 15 bp, Homo sapiens
ccaaccaccagcaat

SEQ ID NO: 536430 - DNA, 15 bp, Homo sapiens
tccaaccaccagcaa

SEQ ID NO: 536431 - DNA, 15 bp, Homo sapiens
atccaaccaccagca

SEQ ID NO: 536432 - DNA, 15 bp, Homo sapiens
catccaaccaccagc

SEQ ID NO: 536433 - DNA, 15 bp, Homo sapiens
acatccaaccaccag

SEQ ID NO: 536434 - DNA, 15 bp, Homo sapiens
aacatccaaccacca

SEQ ID NO: 536435 - DNA, 15 bp, Homo sapiens
caacatccaaccacc

SEQ ID NO: 536436 - DNA, 15 bp, Homo sapiens
ccaacatccaaccac

SEQ ID NO: 536437 - DNA, 15 bp, Homo sapiens
gccaacatccaacca

SEQ ID NO: 536438 - DNA, 15 bp, Homo sapiens
ggccaacatccaacc

SEQ ID NO: 536439 - DNA, 15 bp, Homo sapiens
aggccaacatccaac

SEQ ID NO: 536440 - DNA, 15 bp, Homo sapiens
aaggccaacatccaa

SEQ ID NO: 536441 - DNA, 15 bp, Homo sapiens
gaaggccaacatcca

SEQ ID NO: 536442 - DNA, 15 bp, Homo sapiens
agaaggccaacatcc

SEQ ID NO: 536443 - DNA, 15 bp, Homo sapiens
gagaaggccaacatc

SEQ ID NO: 536444 - DNA, 15 bp, Homo sapiens
tgagaaggccaacat

SEQ ID NO: 536445 - DNA, 15 bp, Homo sapiens
gtgagaaggccaaca

SEQ ID NO: 536446 - DNA, 15 bp, Homo sapiens
tgtgagaaggccaac

SEQ ID NO: 536447 - DNA, 15 bp, Homo sapiens
atgtgagaaggccaa

SEQ ID NO: 536448 - DNA, 15 bp, Homo sapiens
catgtgagaaggcca

SEQ ID NO: 536449 - DNA, 15 bp, Homo sapiens
ccatgtgagaaggcc

SEQ ID NO: 536450 - DNA, 15 bp, Homo sapiens
gccatgtgagaaggc

SEQ ID NO: 536451 - DNA, 15 bp, Homo sapiens
tgccatgtgagaagg

SEQ ID NO: 536452 - DNA, 15 bp, Homo sapiens
ctgccatgtgagaag

SEQ ID NO: 536453 - DNA, 15 bp, Homo sapiens
actgccatgtgagaa

SEQ ID NO: 536454 - DNA, 15 bp, Homo sapiens
cactgccatgtgaga

SEQ ID NO: 536455 - DNA, 15 bp, Homo sapiens
ccactgccatgtgag

SEQ ID NO: 536456 - DNA, 15 bp, Homo sapiens
cccactgccatgtga

SEQ ID NO: 536457 - DNA, 15 bp, Homo sapiens
gcccactgccatgtg

SEQ ID NO: 536458 - DNA, 15 bp, Homo sapiens
cgcccactgccatgt

SEQ ID NO: 536459 - DNA, 15 bp, Homo sapiens
ccgcccactgccatg

SEQ ID NO: 536460 - DNA, 15 bp, Homo sapiens
tccgcccactgccat

SEQ ID NO: 536461 - DNA, 15 bp, Homo sapiens
ttccgcccactgcca

SEQ ID NO: 536462 - DNA, 15 bp, Homo sapiens
attccgcccactgcc

SEQ ID NO: 536463 - DNA, 15 bp, Homo sapiens
aattccgcccactgc

SEQ ID NO: 536464 - DNA, 15 bp, Homo sapiens
aaattccgcccactg

SEQ ID NO: 536465 - DNA, 15 bp, Homo sapiens
caaattccgcccact

SEQ ID NO: 536466 - DNA, 15 bp, Homo sapiens
ccaaattccgcccac

SEQ ID NO: 536467 - DNA, 15 bp, Homo sapiens
tccaaattccgccca

SEQ ID NO: 536468 - DNA, 15 bp, Homo sapiens
gtccaaattccgccc

SEQ ID NO: 536469 - DNA, 15 bp, Homo sapiens
agtccaaattccgcc

SEQ ID NO: 536470 - DNA, 15 bp, Homo sapiens
gagtccaaattccgc

SEQ ID NO: 536471 - DNA, 15 bp, Homo sapiens
ggagtccaaattccg

SEQ ID NO: 536472 - DNA, 15 bp, Homo sapiens
tggagtccaaattcc

SEQ ID NO: 536473 - DNA, 15 bp, Homo sapiens
gtggagtccaaattc

SEQ ID NO: 536474 - DNA, 15 bp, Homo sapiens
agtggagtccaaatt

SEQ ID NO: 536475 - DNA, 15 bp, Homo sapiens
gagtggagtccaaat

SEQ ID NO: 536476 - DNA, 15 bp, Homo sapiens
ggagtggagtccaaa

SEQ ID NO: 536477 - DNA, 15 bp, Homo sapiens
cggagtggagtccaa

SEQ ID NO: 536478 - DNA, 15 bp, Homo sapiens
gcggagtggagtcca

SEQ ID NO: 536479 - DNA, 15 bp, Homo sapiens
ggcggagtggagtcc

SEQ ID NO: 536480 - DNA, 15 bp, Homo sapiens
tggcggagtggagtc

SEQ ID NO: 536481 - DNA, 15 bp, Homo sapiens
gtggcggagtggagt

SEQ ID NO: 536482 - DNA, 15 bp, Homo sapiens
agtggcggagtggag

SEQ ID NO: 536483 - DNA, 15 bp, Homo sapiens
gagtggcggagtgga

SEQ ID NO: 536484 - DNA, 15 bp, Homo sapiens
ggagtggcggagtgg

SEQ ID NO: 536485 - DNA, 15 bp, Homo sapiens
gggagtggcggagtg

SEQ ID NO: 536486 - DNA, 15 bp, Homo sapiens
agggagtggcggagt

SEQ ID NO: 536487 - DNA, 15 bp, Homo sapiens
aagggagtggcggag

SEQ ID NO: 536488 - DNA, 15 bp, Homo sapiens
gaagggagtggcgga

SEQ ID NO: 536489 - DNA, 15 bp, Homo sapiens
agaagggagtggcgg

SEQ ID NO: 536490 - DNA, 15 bp, Homo sapiens
aagaagggagtggcg

SEQ ID NO: 536491 - DNA, 15 bp, Homo sapiens
aaagaagggagtggc

SEQ ID NO: 536492 - DNA, 15 bp, Homo sapiens
aaaagaagggagtgg

SEQ ID NO: 536493 - DNA, 15 bp, Homo sapiens
aaaaagaagggagtg

SEQ ID NO: 536494 - DNA, 15 bp, Homo sapiens
aaaaaagaagggagt

SEQ ID NO: 536495 - DNA, 15 bp, Homo sapiens
aaaaaaagaagggag

SEQ ID NO: 536496 - DNA, 15 bp, Homo sapiens
aaaaaaaagaaggga

SEQ ID NO: 536497 - DNA, 15 bp, Homo sapiens
aaaaaaaaagaaggg

SEQ ID NO: 536498 - DNA, 15 bp, Homo sapiens
aaaaaaaaaagaagg

SEQ ID NO: 536499 - DNA, 15 bp, Homo sapiens
aaaaaaaaaaagaag

SEQ ID NO: 536500 - DNA, 15 bp, Homo sapiens
aaaaaaaaaaaagaa

SEQ ID NO: 536501 - DNA, 15 bp, Homo sapiens
aaaaaaaaaaaaaga

SEQ ID NO: 536502 - DNA, 15 bp, Homo sapiens
caaaaaaaaaaaaaa

SEQ ID NO: 536503 - DNA, 15 bp, Homo sapiens
tcaaaaaaaaaaaaa

SEQ ID NO: 536504 - DNA, 15 bp, Homo sapiens
ctcaaaaaaaaaaaa

SEQ ID NO: 536505 - DNA, 15 bp, Homo sapiens
tctcaaaaaaaaaaa

SEQ ID NO: 536506 - DNA, 15 bp, Homo sapiens
gtctcaaaaaaaaaa

SEQ ID NO: 536507 - DNA, 15 bp, Homo sapiens
tgtctcaaaaaaaaa

SEQ ID NO: 536508 - DNA, 15 bp, Homo sapiens
ctgtctcaaaaaaaa

SEQ ID NO: 536509 - DNA, 15 bp, Homo sapiens
tctgtctcaaaaaaa

SEQ ID NO: 536510 - DNA, 15 bp, Homo sapiens
ctctgtctcaaaaaa

SEQ ID NO: 536511 - DNA, 15 bp, Homo sapiens
actctgtctcaaaaa

SEQ ID NO: 536512 - DNA, 15 bp, Homo sapiens
aagactctgtctcaa

SEQ ID NO: 536513 - DNA, 15 bp, Homo sapiens
caagactctgtctca

SEQ ID NO: 536514 - DNA, 15 bp, Homo sapiens
gcaagactctgtctc

SEQ ID NO: 536515 - DNA, 15 bp, Homo sapiens
agcaagactctgtct

SEQ ID NO: 536516 - DNA, 15 bp, Homo sapiens
gagcaagactctgtc

SEQ ID NO: 536517 - DNA, 15 bp, Homo sapiens
agagcaagactctgt

SEQ ID NO: 536518 - DNA, 15 bp, Homo sapiens
cagagcaagactctg

SEQ ID NO: 536519 - DNA, 15 bp, Homo sapiens
acagagcaagactct

SEQ ID NO: 536520 - DNA, 15 bp, Homo sapiens
gacagagcaagactc

SEQ ID NO: 536521 - DNA, 15 bp, Homo sapiens
cgacagagcaagact

SEQ ID NO: 536522 - DNA, 15 bp, Homo sapiens
gcgacagagcaagac

SEQ ID NO: 536523 - DNA, 15 bp, Homo sapiens
ggcgacagagcaaga

SEQ ID NO: 536524 - DNA, 15 bp, Homo sapiens
gggcgacagagcaag

SEQ ID NO: 536525 - DNA, 15 bp, Homo sapiens
tgggcgacagagcaa

SEQ ID NO: 536526 - DNA, 15 bp, Homo sapiens
ctgggcgacagagca

SEQ ID NO: 536527 - DNA, 15 bp, Homo sapiens
cctgggcgacagagc

SEQ ID NO: 536528 - DNA, 15 bp, Homo sapiens
gcctgggcgacagag

SEQ ID NO: 536529 - DNA, 15 bp, Homo sapiens
agcctgggcgacaga

SEQ ID NO: 536530 - DNA, 15 bp, Homo sapiens
cagcctgggcgacag

SEQ ID NO: 536531 - DNA, 15 bp, Homo sapiens
ccagcctgggcgaca

SEQ ID NO: 536532 - DNA, 15 bp, Homo sapiens
tccagcctgggcgac

SEQ ID NO: 536533 - DNA, 15 bp, Homo sapiens
ctccagcctgggcga

SEQ ID NO: 536534 - DNA, 15 bp, Homo sapiens
actccagcctgggcg

SEQ ID NO: 536535 - DNA, 15 bp, Homo sapiens
cactccagcctgggc

SEQ ID NO: 536536 - DNA, 15 bp, Homo sapiens
gcactccagcctggg

SEQ ID NO: 536537 - DNA, 15 bp, Homo sapiens
tgcactccagcctgg

SEQ ID NO: 536538 - DNA, 15 bp, Homo sapiens
ctgcactccagcctg

SEQ ID NO: 536539 - DNA, 15 bp, Homo sapiens
actgcactccagcct

SEQ ID NO: 536540 - DNA, 15 bp, Homo sapiens
cactgcactccagcc

SEQ ID NO: 536541 - DNA, 15 bp, Homo sapiens
ccactgcactccagc

SEQ ID NO: 536542 - DNA, 15 bp, Homo sapiens
accactgcactccag

SEQ ID NO: 536543 - DNA, 15 bp, Homo sapiens
caccactgcactcca

SEQ ID NO: 536544 - DNA, 15 bp, Homo sapiens
tgcaccactgcactc

SEQ ID NO: 536545 - DNA, 15 bp, Homo sapiens
ttgcaccactgcact

SEQ ID NO: 536546 - DNA, 15 bp, Homo sapiens
attgcaccactgcac

SEQ ID NO: 536547 - DNA, 15 bp, Homo sapiens
cattgcaccactgca

SEQ ID NO: 536548 - DNA, 15 bp, Homo sapiens
acattgcaccactgc

SEQ ID NO: 536549 - DNA, 15 bp, Homo sapiens
gacattgcaccactg

SEQ ID NO: 536550 - DNA, 15 bp, Homo sapiens
tgacattgcaccact

SEQ ID NO: 536551 - DNA, 15 bp, Homo sapiens
ctgacattgcaccac

SEQ ID NO: 536552 - DNA, 15 bp, Homo sapiens
gctgacattgcacca

SEQ ID NO: 536553 - DNA, 15 bp, Homo sapiens
agctgacattgcacc

SEQ ID NO: 536554 - DNA, 15 bp, Homo sapiens
gagctgacattgcac

SEQ ID NO: 536555 - DNA, 15 bp, Homo sapiens
tgagctgacattgca

SEQ ID NO: 536556 - DNA, 15 bp, Homo sapiens
gtgagctgacattgc

SEQ ID NO: 536557 - DNA, 15 bp, Homo sapiens
agtgagctgacattg

SEQ ID NO: 536558 - DNA, 15 bp, Homo sapiens
cagtgagctgacatt

SEQ ID NO: 536559 - DNA, 15 bp, Homo sapiens
gcagtgagctgacat

SEQ ID NO: 536560 - DNA, 15 bp, Homo sapiens
tgcagtgagctgaca

SEQ ID NO: 536561 - DNA, 15 bp, Homo sapiens
ttgcagtgagctgac

SEQ ID NO: 536562 - DNA, 15 bp, Homo sapiens
gttgcagtgagctga

SEQ ID NO: 536563 - DNA, 15 bp, Homo sapiens
ggttgcagtgagctg

SEQ ID NO: 536564 - DNA, 15 bp, Homo sapiens
aggttgcagtgagct

SEQ ID NO: 536565 - DNA, 15 bp, Homo sapiens
agaggttgcagtgag

SEQ ID NO: 536566 - DNA, 15 bp, Homo sapiens
cagaggttgcagtga

SEQ ID NO: 536567 - DNA, 15 bp, Homo sapiens
gcagaggttgcagtg

SEQ ID NO: 536568 - DNA, 15 bp, Homo sapiens
tggcagaggttgcag

SEQ ID NO: 536569 - DNA, 15 bp, Homo sapiens
gtggcagaggttgca

SEQ ID NO: 536570 - DNA, 15 bp, Homo sapiens
ggtggcagaggttgc

SEQ ID NO: 536571 - DNA, 15 bp, Homo sapiens
aggtggcagaggttg

SEQ ID NO: 536572 - DNA, 15 bp, Homo sapiens
caggtggcagaggtt

SEQ ID NO: 536573 - DNA, 15 bp, Homo sapiens
ccaggtggcagaggt

SEQ ID NO: 536574 - DNA, 15 bp, Homo sapiens
cccaggtggcagagg

SEQ ID NO: 536575 - DNA, 15 bp, Homo sapiens
acccaggtggcagag

SEQ ID NO: 536576 - DNA, 15 bp, Homo sapiens
aacccaggtggcaga

SEQ ID NO: 536577 - DNA, 15 bp, Homo sapiens
gaacccaggtggcag

SEQ ID NO: 536578 - DNA, 15 bp, Homo sapiens
tgaacccaggtggca

SEQ ID NO: 536579 - DNA, 15 bp, Homo sapiens
ttgaacccaggtggc

SEQ ID NO: 536580 - DNA, 15 bp, Homo sapiens
cttgaacccaggtgg

SEQ ID NO: 536581 - DNA, 15 bp, Homo sapiens
gcttgaacccaggtg

SEQ ID NO: 536582 - DNA, 15 bp, Homo sapiens
tgcttgaacccaggt

SEQ ID NO: 536583 - DNA, 15 bp, Homo sapiens
ttgcttgaacccagg

SEQ ID NO: 536584 - DNA, 15 bp, Homo sapiens
attgcttgaacccag

SEQ ID NO: 536585 - DNA, 15 bp, Homo sapiens
aattgcttgaaccca

SEQ ID NO: 536586 - DNA, 15 bp, Homo sapiens
gaattgcttgaaccc

SEQ ID NO: 536587 - DNA, 15 bp, Homo sapiens
agaattgcttgaacc

SEQ ID NO: 536588 - DNA, 15 bp, Homo sapiens
gagaattgcttgaac

SEQ ID NO: 536589 - DNA, 15 bp, Homo sapiens
ggagaattgcttgaa

SEQ ID NO: 536590 - DNA, 15 bp, Homo sapiens
aggagaattgcttga

SEQ ID NO: 536591 - DNA, 15 bp, Homo sapiens
taggagaattgcttg

SEQ ID NO: 536592 - DNA, 15 bp, Homo sapiens
ataggagaattgctt

SEQ ID NO: 536593 - DNA, 15 bp, Homo sapiens
gataggagaattgct

SEQ ID NO: 536594 - DNA, 15 bp, Homo sapiens
agataggagaattgc

SEQ ID NO: 536595 - DNA, 15 bp, Homo sapiens
gagataggagaattg

SEQ ID NO: 536596 - DNA, 15 bp, Homo sapiens
tgagataggagaatt

SEQ ID NO: 536597 - DNA, 15 bp, Homo sapiens
ctgagataggagaat

SEQ ID NO: 536598 - DNA, 15 bp, Homo sapiens
gctgagataggagaa

SEQ ID NO: 536599 - DNA, 15 bp, Homo sapiens
agctgagataggaga

SEQ ID NO: 536600 - DNA, 15 bp, Homo sapiens
aagctgagataggag

SEQ ID NO: 536601 - DNA, 15 bp, Homo sapiens
gaagctgagatagga

SEQ ID NO: 536602 - DNA, 15 bp, Homo sapiens
ggaagctgagatagg

SEQ ID NO: 536603 - DNA, 15 bp, Homo sapiens
gggaagctgagatag

SEQ ID NO: 536604 - DNA, 15 bp, Homo sapiens
cgggaagctgagata

SEQ ID NO: 536605 - DNA, 15 bp, Homo sapiens
tcgggaagctgagat

SEQ ID NO: 536606 - DNA, 15 bp, Homo sapiens
ctcgggaagctgaga

SEQ ID NO: 536607 - DNA, 15 bp, Homo sapiens
actcgggaagctgag

SEQ ID NO: 536608 - DNA, 15 bp, Homo sapiens
tactcgggaagctga

SEQ ID NO: 536609 - DNA, 15 bp, Homo sapiens
ctactcgggaagctg

SEQ ID NO: 536610 - DNA, 15 bp, Homo sapiens
gctactcgggaagct

SEQ ID NO: 536611 - DNA, 15 bp, Homo sapiens
agctactcgggaagc

SEQ ID NO: 536612 - DNA, 15 bp, Homo sapiens
cagctactcgggaag

SEQ ID NO: 536613 - DNA, 15 bp, Homo sapiens
ccagctactcgggaa

SEQ ID NO: 536614 - DNA, 15 bp, Homo sapiens
gtgcctgtagtccca

SEQ ID NO: 536615 - DNA, 15 bp, Homo sapiens
tgtgcctgtagtccc

SEQ ID NO: 536616 - DNA, 15 bp, Homo sapiens
gtgtgcctgtagtcc

SEQ ID NO: 536617 - DNA, 15 bp, Homo sapiens
tgtgtgcctgtagtc

SEQ ID NO: 536618 - DNA, 15 bp, Homo sapiens
gtgtgtgcctgtagt

SEQ ID NO: 536619 - DNA, 15 bp, Homo sapiens
ggtgtgtgcctgtag

SEQ ID NO: 536620 - DNA, 15 bp, Homo sapiens
tggtgtgtgcctgta

SEQ ID NO: 536621 - DNA, 15 bp, Homo sapiens
gtggtgtgtgcctgt

SEQ ID NO: 536622 - DNA, 15 bp, Homo sapiens
ggtggtgtgtgcctg

SEQ ID NO: 536623 - DNA, 15 bp, Homo sapiens
tggtggtgtgtgcct

SEQ ID NO: 536624 - DNA, 15 bp, Homo sapiens
gtggtggtgtgtgcc

SEQ ID NO: 536625 - DNA, 15 bp, Homo sapiens
tgtggtggtgtgtgc

SEQ ID NO: 536626 - DNA, 15 bp, Homo sapiens
gtgtggtggtgtgtg

SEQ ID NO: 536627 - DNA, 15 bp, Homo sapiens
ggtgtggtggtgtgt

SEQ ID NO: 536628 - DNA, 15 bp, Homo sapiens
aggtgtggtggtgtg

SEQ ID NO: 536629 - DNA, 15 bp, Homo sapiens
caggtgtggtggtgt

SEQ ID NO: 536630 - DNA, 15 bp, Homo sapiens
ccaggtgtggtggtg

SEQ ID NO: 536631 - DNA, 15 bp, Homo sapiens
gccaggtgtggtggt

SEQ ID NO: 536632 - DNA, 15 bp, Homo sapiens
ctagccaggtgtggt

SEQ ID NO: 536633 - DNA, 15 bp, Homo sapiens
actagccaggtgtgg

SEQ ID NO: 536634 - DNA, 15 bp, Homo sapiens
aactagccaggtgtg

SEQ ID NO: 536635 - DNA, 15 bp, Homo sapiens
aaactagccaggtgt

SEQ ID NO: 536636 - DNA, 15 bp, Homo sapiens
aaaactagccaggtg

SEQ ID NO: 536637 - DNA, 15 bp, Homo sapiens
aaaaactagccaggt

SEQ ID NO: 536638 - DNA, 15 bp, Homo sapiens
taaaaactagccagg

SEQ ID NO: 536639 - DNA, 15 bp, Homo sapiens
ataaaaactagccag

SEQ ID NO: 536640 - DNA, 15 bp, Homo sapiens
tataaaaactagcca

SEQ ID NO: 536641 - DNA, 15 bp, Homo sapiens
atataaaaactagcc

SEQ ID NO: 536642 - DNA, 15 bp, Homo sapiens
aatataaaaactagc

SEQ ID NO: 536643 - DNA, 15 bp, Homo sapiens
aaatataaaaactag

SEQ ID NO: 536644 - DNA, 15 bp, Homo sapiens
aaaatataaaaacta

SEQ ID NO: 536645 - DNA, 15 bp, Homo sapiens
aaaaatataaaaact

SEQ ID NO: 536646 - DNA, 15 bp, Homo sapiens
taaaaatataaaaac

SEQ ID NO: 536647 - DNA, 15 bp, Homo sapiens
ctaaaaatataaaaa

SEQ ID NO: 536648 - DNA, 15 bp, Homo sapiens
actaaaaatataaaa

SEQ ID NO: 536649 - DNA, 15 bp, Homo sapiens
tactaaaaatataaa

SEQ ID NO: 536650 - DNA, 15 bp, Homo sapiens
ctactaaaaatataa

SEQ ID NO: 536651 - DNA, 15 bp, Homo sapiens
tctactaaaaatata

SEQ ID NO: 536652 - DNA, 15 bp, Homo sapiens
ctctactaaaaatat

SEQ ID NO: 536653 - DNA, 15 bp, Homo sapiens
tgtctctactaaaaa

SEQ ID NO: 536654 - DNA, 15 bp, Homo sapiens
ctgtctctactaaaa

SEQ ID NO: 536655 - DNA, 15 bp, Homo sapiens
cctgtctctactaaa

SEQ ID NO: 536656 - DNA, 15 bp, Homo sapiens
ccctgtctctactaa

SEQ ID NO: 536657 - DNA, 15 bp, Homo sapiens
accctgtctctacta

SEQ ID NO: 536658 - DNA, 15 bp, Homo sapiens
aaccctgtctctact

SEQ ID NO: 536659 - DNA, 15 bp, Homo sapiens
aaaccctgtctctac

SEQ ID NO: 536660 - DNA, 15 bp, Homo sapiens
gaaaccctgtctcta

SEQ ID NO: 536661 - DNA, 15 bp, Homo sapiens
tgaaaccctgtctct

SEQ ID NO: 536662 - DNA, 15 bp, Homo sapiens
gtgaaaccctgtctc

SEQ ID NO: 536663 - DNA, 15 bp, Homo sapiens
ggtgaaaccctgtct

SEQ ID NO: 536664 - DNA, 15 bp, Homo sapiens
tggtgaaaccctgtc

SEQ ID NO: 536665 - DNA, 15 bp, Homo sapiens
atggtgaaaccctgt

SEQ ID NO: 536666 - DNA, 15 bp, Homo sapiens
tatggtgaaaccctg

SEQ ID NO: 536667 - DNA, 15 bp, Homo sapiens
atatggtgaaaccct

SEQ ID NO: 536668 - DNA, 15 bp, Homo sapiens
aatatggtgaaaccc

SEQ ID NO: 536669 - DNA, 15 bp, Homo sapiens
caatatggtgaaacc

SEQ ID NO: 536670 - DNA, 15 bp, Homo sapiens
ccaatatggtgaaac

SEQ ID NO: 536671 - DNA, 15 bp, Homo sapiens
accaatatggtgaaa

SEQ ID NO: 536672 - DNA, 15 bp, Homo sapiens
gaccaatatggtgaa

SEQ ID NO: 536673 - DNA, 15 bp, Homo sapiens
tgaccaatatggtga

SEQ ID NO: 536674 - DNA, 15 bp, Homo sapiens
ctgaccaatatggtg

SEQ ID NO: 536675 - DNA, 15 bp, Homo sapiens
cctgaccaatatggt

SEQ ID NO: 536676 - DNA, 15 bp, Homo sapiens
gcctgaccaatatgg

SEQ ID NO: 536677 - DNA, 15 bp, Homo sapiens
agcctgaccaatatg

SEQ ID NO: 536678 - DNA, 15 bp, Homo sapiens
cagcctgaccaatat

SEQ ID NO: 536679 - DNA, 15 bp, Homo sapiens
ccagcctgaccaata

SEQ ID NO: 536680 - DNA, 15 bp, Homo sapiens
accagcctgaccaat

SEQ ID NO: 536681 - DNA, 15 bp, Homo sapiens
gaccagcctgaccaa

SEQ ID NO: 536682 - DNA, 15 bp, Homo sapiens
agaccagcctgacca

SEQ ID NO: 536683 - DNA, 15 bp, Homo sapiens
gagaccagcctgacc

SEQ ID NO: 536684 - DNA, 15 bp, Homo sapiens
cgagaccagcctgac

SEQ ID NO: 536685 - DNA, 15 bp, Homo sapiens
tcgagaccagcctga

SEQ ID NO: 536686 - DNA, 15 bp, Homo sapiens
ttcgagaccagcctg

SEQ ID NO: 536687 - DNA, 15 bp, Homo sapiens
gttcgagaccagcct

SEQ ID NO: 536688 - DNA, 15 bp, Homo sapiens
agttcgagaccagcc

SEQ ID NO: 536689 - DNA, 15 bp, Homo sapiens
gagttcgagaccagc

SEQ ID NO: 536690 - DNA, 15 bp, Homo sapiens
agagttcgagaccag

SEQ ID NO: 536691 - DNA, 15 bp, Homo sapiens
aagagttcgagacca

SEQ ID NO: 536692 - DNA, 15 bp, Homo sapiens
caagagttcgagacc

SEQ ID NO: 536693 - DNA, 15 bp, Homo sapiens
tcaagagttcgagac

SEQ ID NO: 536694 - DNA, 15 bp, Homo sapiens
gtcaagagttcgaga

SEQ ID NO: 536695 - DNA, 15 bp, Homo sapiens
ggtcaagagttcgag

SEQ ID NO: 536696 - DNA, 15 bp, Homo sapiens
aggtcaagagttcga

SEQ ID NO: 536697 - DNA, 15 bp, Homo sapiens
gaggtcaagagttcg

SEQ ID NO: 536698 - DNA, 15 bp, Homo sapiens
tgaggtcaagagttc

SEQ ID NO: 536699 - DNA, 15 bp, Homo sapiens
ctgaggtcaagagtt

SEQ ID NO: 536700 - DNA, 15 bp, Homo sapiens
cctgaggtcaagagt

SEQ ID NO: 536701 - DNA, 15 bp, Homo sapiens
acctgaggtcaagag

SEQ ID NO: 536702 - DNA, 15 bp, Homo sapiens
cacctgaggtcaaga

SEQ ID NO: 536703 - DNA, 15 bp, Homo sapiens
tcacctgaggtcaag

SEQ ID NO: 536704 - DNA, 15 bp, Homo sapiens
atcacctgaggtcaa

SEQ ID NO: 536705 - DNA, 15 bp, Homo sapiens
gatcacctgaggtca

SEQ ID NO: 536706 - DNA, 15 bp, Homo sapiens
ggatcacctgaggtc

SEQ ID NO: 536707 - DNA, 15 bp, Homo sapiens
tggatcacctgaggt

SEQ ID NO: 536708 - DNA, 15 bp, Homo sapiens
gtggatcacctgagg

SEQ ID NO: 536709 - DNA, 15 bp, Homo sapiens
ggtggatcacctgag

SEQ ID NO: 536710 - DNA, 15 bp, Homo sapiens
aggtggatcacctga

SEQ ID NO: 536711 - DNA, 15 bp, Homo sapiens
caggtggatcacctg

SEQ ID NO: 536712 - DNA, 15 bp, Homo sapiens
gcaggtggatcacct

SEQ ID NO: 536713 - DNA, 15 bp, Homo sapiens
ggcaggtggatcacc

SEQ ID NO: 536714 - DNA, 15 bp, Homo sapiens
aggcaggtggatcac

SEQ ID NO: 536715 - DNA, 15 bp, Homo sapiens
gaggcaggtggatca

SEQ ID NO: 536716 - DNA, 15 bp, Homo sapiens
cgaggcaggtggatc

SEQ ID NO: 536717 - DNA, 15 bp, Homo sapiens
ccgaggcaggtggat

SEQ ID NO: 536718 - DNA, 15 bp, Homo sapiens
gccgaggcaggtgga

SEQ ID NO: 536719 - DNA, 15 bp, Homo sapiens
ggccgaggcaggtgg

SEQ ID NO: 536720 - DNA, 15 bp, Homo sapiens
aggccgaggcaggtg

SEQ ID NO: 536721 - DNA, 15 bp, Homo sapiens
aaggccgaggcaggt

SEQ ID NO: 536722 - DNA, 15 bp, Homo sapiens
gaaggccgaggcagg

SEQ ID NO: 536723 - DNA, 15 bp, Homo sapiens
ggaaggccgaggcag

SEQ ID NO: 536724 - DNA, 15 bp, Homo sapiens
tggaaggccgaggca

SEQ ID NO: 536725 - DNA, 15 bp, Homo sapiens
ctggaaggccgaggc

SEQ ID NO: 536726 - DNA, 15 bp, Homo sapiens
tctggaaggccgagg

SEQ ID NO: 536727 - DNA, 15 bp, Homo sapiens
ctctggaaggccgag

SEQ ID NO: 536728 - DNA, 15 bp, Homo sapiens
actctggaaggccga

SEQ ID NO: 536729 - DNA, 15 bp, Homo sapiens
cactctggaaggccg

SEQ ID NO: 536730 - DNA, 15 bp, Homo sapiens
gcactctggaaggcc

SEQ ID NO: 536731 - DNA, 15 bp, Homo sapiens
agcactctggaaggc

SEQ ID NO: 536732 - DNA, 15 bp, Homo sapiens
cagcactctggaagg

SEQ ID NO: 536733 - DNA, 15 bp, Homo sapiens
ccagcactctggaag

SEQ ID NO: 536734 - DNA, 15 bp, Homo sapiens
cccagcactctggaa

SEQ ID NO: 536735 - DNA, 15 bp, Homo sapiens
tcccagcactctgga

SEQ ID NO: 536736 - DNA, 15 bp, Homo sapiens
atcccagcactctgg

SEQ ID NO: 536737 - DNA, 15 bp, Homo sapiens
aatcccagcactctg

SEQ ID NO: 536738 - DNA, 15 bp, Homo sapiens
taatcccagcactct

SEQ ID NO: 536739 - DNA, 15 bp, Homo sapiens
ttaatcccagcactc

SEQ ID NO: 536740 - DNA, 15 bp, Homo sapiens
tttaatcccagcact

SEQ ID NO: 536741 - DNA, 15 bp, Homo sapiens
ctttaatcccagcac

SEQ ID NO: 536742 - DNA, 15 bp, Homo sapiens
cctttaatcccagca

SEQ ID NO: 536743 - DNA, 15 bp, Homo sapiens
acctttaatcccagc

SEQ ID NO: 536744 - DNA, 15 bp, Homo sapiens
cacctttaatcccag

SEQ ID NO: 536745 - DNA, 15 bp, Homo sapiens
acacctttaatccca

SEQ ID NO: 536746 - DNA, 15 bp, Homo sapiens
cacacctttaatccc

SEQ ID NO: 536747 - DNA, 15 bp, Homo sapiens
tcacacctttaatcc

SEQ ID NO: 536748 - DNA, 15 bp, Homo sapiens
ctcacacctttaatc

SEQ ID NO: 536749 - DNA, 15 bp, Homo sapiens
gctcacacctttaat

SEQ ID NO: 536750 - DNA, 15 bp, Homo sapiens
ggctcacacctttaa

SEQ ID NO: 536751 - DNA, 15 bp, Homo sapiens
tggctcacaccttta

SEQ ID NO: 536752 - DNA, 15 bp, Homo sapiens
gtggctcacaccttt

SEQ ID NO: 536753 - DNA, 15 bp, Homo sapiens
agtggctcacacctt

SEQ ID NO: 536754 - DNA, 15 bp, Homo sapiens
cagtggctcacacct

SEQ ID NO: 536755 - DNA, 15 bp, Homo sapiens
acagtggctcacacc

SEQ ID NO: 536756 - DNA, 15 bp, Homo sapiens
cacagtggctcacac

SEQ ID NO: 536757 - DNA, 15 bp, Homo sapiens
gcacagtggctcaca

SEQ ID NO: 536758 - DNA, 15 bp, Homo sapiens
ggcacagtggctcac

SEQ ID NO: 536759 - DNA, 15 bp, Homo sapiens
aggcacagtggctca

SEQ ID NO: 536760 - DNA, 15 bp, Homo sapiens
caggcacagtggctc

SEQ ID NO: 536761 - DNA, 15 bp, Homo sapiens
ccaggcacagtggct

SEQ ID NO: 536762 - DNA, 15 bp, Homo sapiens
gccaggcacagtggc

SEQ ID NO: 536763 - DNA, 15 bp, Homo sapiens
ggccaggcacagtgg

SEQ ID NO: 536764 - DNA, 15 bp, Homo sapiens
tggccaggcacagtg

SEQ ID NO: 536765 - DNA, 15 bp, Homo sapiens
gtggccaggcacagt

SEQ ID NO: 536766 - DNA, 15 bp, Homo sapiens
agtggccaggcacag

SEQ ID NO: 536767 - DNA, 15 bp, Homo sapiens
gagtggccaggcaca

SEQ ID NO: 536768 - DNA, 15 bp, Homo sapiens
ggagtggccaggcac

SEQ ID NO: 536769 - DNA, 15 bp, Homo sapiens
gggagtggccaggca

SEQ ID NO: 536770 - DNA, 15 bp, Homo sapiens
agggagtggccaggc

SEQ ID NO: 536771 - DNA, 15 bp, Homo sapiens
aagggagtggccagg

SEQ ID NO: 536772 - DNA, 15 bp, Homo sapiens
caagggagtggccag

SEQ ID NO: 536773 - DNA, 15 bp, Homo sapiens
tcaagggagtggcca

SEQ ID NO: 536774 - DNA, 15 bp, Homo sapiens
ctcaagggagtggcc

SEQ ID NO: 536775 - DNA, 15 bp, Homo sapiens
tctcaagggagtggc

SEQ ID NO: 536776 - DNA, 15 bp, Homo sapiens
gtctcaagggagtgg

SEQ ID NO: 536777 - DNA, 15 bp, Homo sapiens
ggtctcaagggagtg

SEQ ID NO: 536778 - DNA, 15 bp, Homo sapiens
gggtctcaagggagt

SEQ ID NO: 536779 - DNA, 15 bp, Homo sapiens
tgggtctcaagggag

SEQ ID NO: 536780 - DNA, 15 bp, Homo sapiens
ctgggtctcaaggga

SEQ ID NO: 536781 - DNA, 15 bp, Homo sapiens
actgggtctcaaggg

SEQ ID NO: 536782 - DNA, 15 bp, Homo sapiens
aactgggtctcaagg

SEQ ID NO: 536783 - DNA, 15 bp, Homo sapiens
aaactgggtctcaag

SEQ ID NO: 536784 - DNA, 15 bp, Homo sapiens
gaaactgggtctcaa

SEQ ID NO: 536785 - DNA, 15 bp, Homo sapiens
ggaaactgggtctca

SEQ ID NO: 536786 - DNA, 15 bp, Homo sapiens
tggaaactgggtctc

SEQ ID NO: 536787 - DNA, 15 bp, Homo sapiens
gtggaaactgggtct

SEQ ID NO: 536788 - DNA, 15 bp, Homo sapiens
cgtggaaactgggtc

SEQ ID NO: 536789 - DNA, 15 bp, Homo sapiens
acgtggaaactgggt

SEQ ID NO: 536790 - DNA, 15 bp, Homo sapiens
gacgtggaaactggg

SEQ ID NO: 536791 - DNA, 15 bp, Homo sapiens
agacgtggaaactgg

SEQ ID NO: 536792 - DNA, 15 bp, Homo sapiens
cagacgtggaaactg

SEQ ID NO: 536793 - DNA, 15 bp, Homo sapiens
acagacgtggaaact

SEQ ID NO: 536794 - DNA, 15 bp, Homo sapiens
cacagacgtggaaac

SEQ ID NO: 536795 - DNA, 15 bp, Homo sapiens
tcacagacgtggaaa

SEQ ID NO: 536796 - DNA, 15 bp, Homo sapiens
ttcacagacgtggaa

SEQ ID NO: 536797 - DNA, 15 bp, Homo sapiens
tttcacagacgtgga

SEQ ID NO: 536798 - DNA, 15 bp, Homo sapiens
atttcacagacgtgg

SEQ ID NO: 536799 - DNA, 15 bp, Homo sapiens
catttcacagacgtg

SEQ ID NO: 536800 - DNA, 15 bp, Homo sapiens
ccatttcacagacgt

SEQ ID NO: 536801 - DNA, 15 bp, Homo sapiens
cccatttcacagacg

SEQ ID NO: 536802 - DNA, 15 bp, Homo sapiens
ccccatttcacagac

SEQ ID NO: 536803 - DNA, 15 bp, Homo sapiens
cccccatttcacaga

SEQ ID NO: 536804 - DNA, 15 bp, Homo sapiens
tcccccatttcacag

SEQ ID NO: 536805 - DNA, 15 bp, Homo sapiens
ttcccccatttcaca

SEQ ID NO: 536806 - DNA, 15 bp, Homo sapiens
attcccccatttcac

SEQ ID NO: 536807 - DNA, 15 bp, Homo sapiens
tattcccccatttca

SEQ ID NO: 536808 - DNA, 15 bp, Homo sapiens
gtattcccccatttc

SEQ ID NO: 536809 - DNA, 15 bp, Homo sapiens
ggtattcccccattt

SEQ ID NO: 536810 - DNA, 15 bp, Homo sapiens
gggtattcccccatt

SEQ ID NO: 536811 - DNA, 15 bp, Homo sapiens
tgggtattcccccat

SEQ ID NO: 536812 - DNA, 15 bp, Homo sapiens
gtgggtattccccca

SEQ ID NO: 536813 - DNA, 15 bp, Homo sapiens
tgtgggtattccccc

SEQ ID NO: 536814 - DNA, 15 bp, Homo sapiens
ctgtgggtattcccc

SEQ ID NO: 536815 - DNA, 15 bp, Homo sapiens
actgtgggtattccc

SEQ ID NO: 536816 - DNA, 15 bp, Homo sapiens
cactgtgggtattcc

SEQ ID NO: 536817 - DNA, 15 bp, Homo sapiens
tcactgtgggtattc

SEQ ID NO: 536818 - DNA, 15 bp, Homo sapiens
ctcactgtgggtatt

SEQ ID NO: 536819 - DNA, 15 bp, Homo sapiens
tctcactgtgggtat

SEQ ID NO: 536820 - DNA, 15 bp, Homo sapiens
ttctcactgtgggta

SEQ ID NO: 536821 - DNA, 15 bp, Homo sapiens
attctcactgtgggt

SEQ ID NO: 536822 - DNA, 15 bp, Homo sapiens
aattctcactgtggg

SEQ ID NO: 536823 - DNA, 15 bp, Homo sapiens
taattctcactgtgg

SEQ ID NO: 536824 - DNA, 15 bp, Homo sapiens
ctaattctcactgtg

SEQ ID NO: 536825 - DNA, 15 bp, Homo sapiens
tctaattctcactgt

SEQ ID NO: 536826 - DNA, 15 bp, Homo sapiens
atctaattctcactg

SEQ ID NO: 536827 - DNA, 15 bp, Homo sapiens
catctaattctcact

SEQ ID NO: 536828 - DNA, 15 bp, Homo sapiens
tcatctaattctcac

SEQ ID NO: 536829 - DNA, 15 bp, Homo sapiens
ctcatctaattctca

SEQ ID NO: 536830 - DNA, 15 bp, Homo sapiens
tctcatctaattctc

SEQ ID NO: 536831 - DNA, 15 bp, Homo sapiens
atctcatctaattct

SEQ ID NO: 536832 - DNA, 15 bp, Homo sapiens
tatctcatctaattc

SEQ ID NO: 536833 - DNA, 15 bp, Homo sapiens
ctatctcatctaatt

SEQ ID NO: 536834 - DNA, 15 bp, Homo sapiens
tctatctcatctaat

SEQ ID NO: 536835 - DNA, 15 bp, Homo sapiens
atctatctcatctaa

SEQ ID NO: 536836 - DNA, 15 bp, Homo sapiens
catctatctcatcta

SEQ ID NO: 536837 - DNA, 15 bp, Homo sapiens
gcatctatctcatct

SEQ ID NO: 536838 - DNA, 15 bp, Homo sapiens
tgcatctatctcatc

SEQ ID NO: 536839 - DNA, 15 bp, Homo sapiens
atgcatctatctcat

SEQ ID NO: 536840 - DNA, 15 bp, Homo sapiens
aatgcatctatctca

SEQ ID NO: 536841 - DNA, 15 bp, Homo sapiens
aaatgcatctatctc

SEQ ID NO: 536842 - DNA, 15 bp, Homo sapiens
caaatgcatctatct

SEQ ID NO: 536843 - DNA, 15 bp, Homo sapiens
tcaaatgcatctatc

SEQ ID NO: 536844 - DNA, 15 bp, Homo sapiens
ttcaaatgcatctat

SEQ ID NO: 536845 - DNA, 15 bp, Homo sapiens
tttcaaatgcatcta

SEQ ID NO: 536846 - DNA, 15 bp, Homo sapiens
gtttcaaatgcatct

SEQ ID NO: 536847 - DNA, 15 bp, Homo sapiens
ggtttcaaatgcatc

SEQ ID NO: 536848 - DNA, 15 bp, Homo sapiens
tggtttcaaatgcat

SEQ ID NO: 536849 - DNA, 15 bp, Homo sapiens
gtggtttcaaatgca

SEQ ID NO: 536850 - DNA, 15 bp, Homo sapiens
tgtggtttcaaatgc

SEQ ID NO: 536851 - DNA, 15 bp, Homo sapiens
ttgtggtttcaaatg

SEQ ID NO: 536852 - DNA, 15 bp, Homo sapiens
tttgtggtttcaaat

SEQ ID NO: 536853 - DNA, 15 bp, Homo sapiens
atttgtggtttcaaa

SEQ ID NO: 536854 - DNA, 15 bp, Homo sapiens
gatttgtggtttcaa

SEQ ID NO: 536855 - DNA, 15 bp, Homo sapiens
cgatttgtggtttca

SEQ ID NO: 536856 - DNA, 15 bp, Homo sapiens
ccgatttgtggtttc

SEQ ID NO: 536857 - DNA, 15 bp, Homo sapiens
cccgatttgtggttt

SEQ ID NO: 536858 - DNA, 15 bp, Homo sapiens
ccccgatttgtggtt

SEQ ID NO: 536859 - DNA, 15 bp, Homo sapiens
accccgatttgtggt

SEQ ID NO: 536860 - DNA, 15 bp, Homo sapiens
caccccgatttgtgg

SEQ ID NO: 536861 - DNA, 15 bp, Homo sapiens
gcaccccgatttgtg

SEQ ID NO: 536862 - DNA, 15 bp, Homo sapiens
ggcaccccgatttgt

SEQ ID NO: 536863 - DNA, 15 bp, Homo sapiens
gggcaccccgatttg

SEQ ID NO: 536864 - DNA, 15 bp, Homo sapiens
tgggcaccccgattt

SEQ ID NO: 536865 - DNA, 15 bp, Homo sapiens
gtgggcaccccgatt

SEQ ID NO: 536866 - DNA, 15 bp, Homo sapiens
ggtgggcaccccgat

SEQ ID NO: 536867 - DNA, 15 bp, Homo sapiens
aggtgggcaccccga

SEQ ID NO: 536868 - DNA, 15 bp, Homo sapiens
caggtgggcaccccg

SEQ ID NO: 536869 - DNA, 15 bp, Homo sapiens
acaggtgggcacccc

SEQ ID NO: 536870 - DNA, 15 bp, Homo sapiens
cacaggtgggcaccc

SEQ ID NO: 536871 - DNA, 15 bp, Homo sapiens
ccacaggtgggcacc

SEQ ID NO: 536872 - DNA, 15 bp, Homo sapiens
accacaggtgggcac

SEQ ID NO: 536873 - DNA, 15 bp, Homo sapiens
caccacaggtgggca

SEQ ID NO: 536874 - DNA, 15 bp, Homo sapiens
ccaccacaggtgggc

SEQ ID NO: 536875 - DNA, 15 bp, Homo sapiens
cccaccacaggtggg

SEQ ID NO: 536876 - DNA, 15 bp, Homo sapiens
acccaccacaggtgg

SEQ ID NO: 536877 - DNA, 15 bp, Homo sapiens
tacccaccacaggtg

SEQ ID NO: 536878 - DNA, 15 bp, Homo sapiens
ctacccaccacaggt

SEQ ID NO: 536879 - DNA, 15 bp, Homo sapiens
actacccaccacagg

SEQ ID NO: 536880 - DNA, 15 bp, Homo sapiens
aactacccaccacag

SEQ ID NO: 536881 - DNA, 15 bp, Homo sapiens
taactacccaccaca

SEQ ID NO: 536882 - DNA, 15 bp, Homo sapiens
ctaactacccaccac

SEQ ID NO: 536883 - DNA, 15 bp, Homo sapiens
cctaactacccacca

SEQ ID NO: 536884 - DNA, 15 bp, Homo sapiens
acctaactacccacc

SEQ ID NO: 536885 - DNA, 15 bp, Homo sapiens
tacctaactacccac

SEQ ID NO: 536886 - DNA, 15 bp, Homo sapiens
ctacctaactaccca

SEQ ID NO: 536887 - DNA, 15 bp, Homo sapiens
gctacctaactaccc

SEQ ID NO: 536888 - DNA, 15 bp, Homo sapiens
agctacctaactacc

SEQ ID NO: 536889 - DNA, 15 bp, Homo sapiens
cagctacctaactac

SEQ ID NO: 536890 - DNA, 15 bp, Homo sapiens
acagctacctaacta

SEQ ID NO: 536891 - DNA, 15 bp, Homo sapiens
aacagctacctaact

SEQ ID NO: 536892 - DNA, 15 bp, Homo sapiens
taacagctacctaac

SEQ ID NO: 536893 - DNA, 15 bp, Homo sapiens
gtaacagctacctaa

SEQ ID NO: 536894 - DNA, 15 bp, Homo sapiens
tgtaacagctaccta

SEQ ID NO: 536895 - DNA, 15 bp, Homo sapiens
ttgtaacagctacct

SEQ ID NO: 536896 - DNA, 15 bp, Homo sapiens
tttgtaacagctacc

SEQ ID NO: 536897 - DNA, 15 bp, Homo sapiens
ctttgtaacagctac

SEQ ID NO: 536898 - DNA, 15 bp, Homo sapiens
actttgtaacagcta

SEQ ID NO: 536899 - DNA, 15 bp, Homo sapiens
cactttgtaacagct

SEQ ID NO: 536900 - DNA, 15 bp, Homo sapiens
gcactttgtaacagc

SEQ ID NO: 536901 - DNA, 15 bp, Homo sapiens
ggcactttgtaacag

SEQ ID NO: 536902 - DNA, 15 bp, Homo sapiens
gggcactttgtaaca

SEQ ID NO: 536903 - DNA, 15 bp, Homo sapiens
ggggcactttgtaac

SEQ ID NO: 536904 - DNA, 15 bp, Homo sapiens
tggggcactttgtaa

SEQ ID NO: 536905 - DNA, 15 bp, Homo sapiens
ctggggcactttgta

SEQ ID NO: 536906 - DNA, 15 bp, Homo sapiens
gctggggcactttgt

SEQ ID NO: 536907 - DNA, 15 bp, Homo sapiens
tgctggggcactttg

SEQ ID NO: 536908 - DNA, 15 bp, Homo sapiens
ctgctggggcacttt

SEQ ID NO: 536909 - DNA, 15 bp, Homo sapiens
tctgctggggcactt

SEQ ID NO: 536910 - DNA, 15 bp, Homo sapiens
ctctgctggggcact

SEQ ID NO: 536911 - DNA, 15 bp, Homo sapiens
tctctgctggggcac

SEQ ID NO: 536912 - DNA, 15 bp, Homo sapiens
gtctctgctggggca

SEQ ID NO: 536913 - DNA, 15 bp, Homo sapiens
ggtctctgctggggc

SEQ ID NO: 536914 - DNA, 15 bp, Homo sapiens
gggtctctgctgggg

SEQ ID NO: 536915 - DNA, 15 bp, Homo sapiens
ggggtctctgctggg

SEQ ID NO: 536916 - DNA, 15 bp, Homo sapiens
gggggtctctgctgg

SEQ ID NO: 536917 - DNA, 15 bp, Homo sapiens
agggggtctctgctg

SEQ ID NO: 536918 - DNA, 15 bp, Homo sapiens
aagggggtctctgct

SEQ ID NO: 536919 - DNA, 15 bp, Homo sapiens
caagggggtctctgc

SEQ ID NO: 536920 - DNA, 15 bp, Homo sapiens
tcaagggggtctctg

SEQ ID NO: 536921 - DNA, 15 bp, Homo sapiens
gtcaagggggtctct

SEQ ID NO: 536922 - DNA, 15 bp, Homo sapiens
agtcaagggggtctc

SEQ ID NO: 536923 - DNA, 15 bp, Homo sapiens
tagtcaagggggtct

SEQ ID NO: 536924 - DNA, 15 bp, Homo sapiens
ttagtcaagggggtc

SEQ ID NO: 536925 - DNA, 15 bp, Homo sapiens
gttagtcaagggggt

SEQ ID NO: 536926 - DNA, 15 bp, Homo sapiens
agttagtcaaggggg

SEQ ID NO: 536927 - DNA, 15 bp, Homo sapiens
aagttagtcaagggg

SEQ ID NO: 536928 - DNA, 15 bp, Homo sapiens
aaagttagtcaaggg

SEQ ID NO: 536929 - DNA, 15 bp, Homo sapiens
aaaagttagtcaagg

SEQ ID NO: 536930 - DNA, 15 bp, Homo sapiens
taaaagttagtcaag

SEQ ID NO: 536931 - DNA, 15 bp, Homo sapiens
ataaaagttagtcaa

SEQ ID NO: 536932 - DNA, 15 bp, Homo sapiens
aataaaagttagtca

SEQ ID NO: 536933 - DNA, 15 bp, Homo sapiens
gaataaaagttagtc

SEQ ID NO: 536934 - DNA, 15 bp, Homo sapiens
agaataaaagttagt

SEQ ID NO: 536935 - DNA, 15 bp, Homo sapiens
aagaataaaagttag

SEQ ID NO: 536936 - DNA, 15 bp, Homo sapiens
gaagaataaaagtta

SEQ ID NO: 536937 - DNA, 15 bp, Homo sapiens
ggaagaataaaagtt

SEQ ID NO: 536938 - DNA, 15 bp, Homo sapiens
tggaagaataaaagt

SEQ ID NO: 536939 - DNA, 15 bp, Homo sapiens
atggaagaataaaag

SEQ ID NO: 536940 - DNA, 15 bp, Homo sapiens
gatggaagaataaaa

SEQ ID NO: 536941 - DNA, 15 bp, Homo sapiens
agatggaagaataaa

SEQ ID NO: 536942 - DNA, 15 bp, Homo sapiens
aagatggaagaataa

SEQ ID NO: 536943 - DNA, 15 bp, Homo sapiens
aaagatggaagaata

SEQ ID NO: 536944 - DNA, 15 bp, Homo sapiens
aaaagatggaagaat

SEQ ID NO: 536945 - DNA, 15 bp, Homo sapiens
gaaaagatggaagaa

SEQ ID NO: 536946 - DNA, 15 bp, Homo sapiens
ggaaaagatggaaga

SEQ ID NO: 536947 - DNA, 15 bp, Homo sapiens
gggaaaagatggaag

SEQ ID NO: 536948 - DNA, 15 bp, Homo sapiens
tgggaaaagatggaa

SEQ ID NO: 536949 - DNA, 15 bp, Homo sapiens
gtgggaaaagatgga

SEQ ID NO: 536950 - DNA, 15 bp, Homo sapiens
tgtgggaaaagatgg

SEQ ID NO: 536951 - DNA, 15 bp, Homo sapiens
ctgtgggaaaagatg

SEQ ID NO: 536952 - DNA, 15 bp, Homo sapiens
cctgtgggaaaagat

SEQ ID NO: 536953 - DNA, 15 bp, Homo sapiens
acctgtgggaaaaga

SEQ ID NO: 536954 - DNA, 15 bp, Homo sapiens
cacctgtgggaaaag

SEQ ID NO: 536955 - DNA, 15 bp, Homo sapiens
ccacctgtgggaaaa

SEQ ID NO: 536956 - DNA, 15 bp, Homo sapiens
gccacctgtgggaaa

SEQ ID NO: 536957 - DNA, 15 bp, Homo sapiens
tgccacctgtgggaa

SEQ ID NO: 536958 - DNA, 15 bp, Homo sapiens
ctgccacctgtggga

SEQ ID NO: 536959 - DNA, 15 bp, Homo sapiens
gctgccacctgtggg

SEQ ID NO: 536960 - DNA, 15 bp, Homo sapiens
agctgccacctgtgg

SEQ ID NO: 536961 - DNA, 15 bp, Homo sapiens
cagctgccacctgtg

SEQ ID NO: 536962 - DNA, 15 bp, Homo sapiens
gcagctgccacctgt

SEQ ID NO: 536963 - DNA, 15 bp, Homo sapiens
ggcagctgccacctg

SEQ ID NO: 536964 - DNA, 15 bp, Homo sapiens
tggcagctgccacct

SEQ ID NO: 536965 - DNA, 15 bp, Homo sapiens
ttggcagctgccacc

SEQ ID NO: 536966 - DNA, 15 bp, Homo sapiens
gttggcagctgccac

SEQ ID NO: 536967 - DNA, 15 bp, Homo sapiens
tgttggcagctgcca

SEQ ID NO: 536968 - DNA, 15 bp, Homo sapiens
ttgttggcagctgcc

SEQ ID NO: 536969 - DNA, 15 bp, Homo sapiens
cttgttggcagctgc

SEQ ID NO: 536970 - DNA, 15 bp, Homo sapiens
tcttgttggcagctg

SEQ ID NO: 536971 - DNA, 15 bp, Homo sapiens
ttcttgttggcagct

SEQ ID NO: 536972 - DNA, 15 bp, Homo sapiens
cttcttgttggcagc

SEQ ID NO: 536973 - DNA, 15 bp, Homo sapiens
gcttcttgttggcag

SEQ ID NO: 536974 - DNA, 15 bp, Homo sapiens
tgcttcttgttggca

SEQ ID NO: 536975 - DNA, 15 bp, Homo sapiens
atgcttcttgttggc

SEQ ID NO: 536976 - DNA, 15 bp, Homo sapiens
aatgcttcttgttgg

SEQ ID NO: 536977 - DNA, 15 bp, Homo sapiens
taatgcttcttgttg

SEQ ID NO: 536978 - DNA, 15 bp, Homo sapiens
ctaatgcttcttgtt

SEQ ID NO: 536979 - DNA, 15 bp, Homo sapiens
tctaatgcttcttgt

SEQ ID NO: 536980 - DNA, 15 bp, Homo sapiens
ttctaatgcttcttg

SEQ ID NO: 536981 - DNA, 15 bp, Homo sapiens
gttctaatgcttctt

SEQ ID NO: 536982 - DNA, 15 bp, Homo sapiens
tgttctaatgcttct

SEQ ID NO: 536983 - DNA, 15 bp, Homo sapiens
ttgttctaatgcttc

SEQ ID NO: 536984 - DNA, 15 bp, Homo sapiens
tttgttctaatgctt

SEQ ID NO: 536985 - DNA, 15 bp, Homo sapiens
gtttgttctaatgct

SEQ ID NO: 536986 - DNA, 15 bp, Homo sapiens
ggtttgttctaatgc

SEQ ID NO: 536987 - DNA, 15 bp, Homo sapiens
tggtttgttctaatg

SEQ ID NO: 536988 - DNA, 15 bp, Homo sapiens
atggtttgttctaat

SEQ ID NO: 536989 - DNA, 15 bp, Homo sapiens
catggtttgttctaa

SEQ ID NO: 536990 - DNA, 15 bp, Homo sapiens
gcatggtttgttcta

SEQ ID NO: 536991 - DNA, 15 bp, Homo sapiens
agcatggtttgttct

SEQ ID NO: 536992 - DNA, 15 bp, Homo sapiens
cagcatggtttgttc

SEQ ID NO: 536993 - DNA, 15 bp, Homo sapiens
ccagcatggtttgtt

SEQ ID NO: 536994 - DNA, 15 bp, Homo sapiens
cccagcatggtttgt

SEQ ID NO: 536995 - DNA, 15 bp, Homo sapiens
acccagcatggtttg

SEQ ID NO: 536996 - DNA, 15 bp, Homo sapiens
aacccagcatggttt

SEQ ID NO: 536997 - DNA, 15 bp, Homo sapiens
taacccagcatggtt

SEQ ID NO: 536998 - DNA, 15 bp, Homo sapiens
ttaacccagcatggt

SEQ ID NO: 536999 - DNA, 15 bp, Homo sapiens
attaacccagcatgg

SEQ ID NO: 537000 - DNA, 15 bp, Homo sapiens
tattaacccagcatg

SEQ ID NO: 537001 - DNA, 15 bp, Homo sapiens
ttattaacccagcat

SEQ ID NO: 537002 - DNA, 15 bp, Homo sapiens
tttattaacccagca

SEQ ID NO: 537003 - DNA, 15 bp, Homo sapiens
atttattaacccagc

SEQ ID NO: 537004 - DNA, 15 bp, Homo sapiens
aatttattaacccag

SEQ ID NO: 537005 - DNA, 15 bp, Homo sapiens
caatttattaaccca

SEQ ID NO: 537006 - DNA, 15 bp, Homo sapiens
gcaatttattaaccc

SEQ ID NO: 537007 - DNA, 15 bp, Homo sapiens
ggcaatttattaacc

SEQ ID NO: 537008 - DNA, 15 bp, Homo sapiens
aggcaatttattaac

SEQ ID NO: 537009 - DNA, 15 bp, Homo sapiens
gaggcaatttattaa

SEQ ID NO: 537010 - DNA, 15 bp, Homo sapiens
tgaggcaatttatta

SEQ ID NO: 537011 - DNA, 15 bp, Homo sapiens
atgaggcaatttatt

SEQ ID NO: 537012 - DNA, 15 bp, Homo sapiens
aatgaggcaatttat

SEQ ID NO: 537013 - DNA, 15 bp, Homo sapiens
gaatgaggcaattta

SEQ ID NO: 537014 - DNA, 15 bp, Homo sapiens
cgaatgaggcaattt

SEQ ID NO: 537015 - DNA, 15 bp, Homo sapiens
acgaatgaggcaatt

SEQ ID NO: 537016 - DNA, 15 bp, Homo sapiens
tacgaatgaggcaat

SEQ ID NO: 537017 - DNA, 15 bp, Homo sapiens
ttacgaatgaggcaa

SEQ ID NO: 537018 - DNA, 15 bp, Homo sapiens
attacgaatgaggca

SEQ ID NO: 537019 - DNA, 15 bp, Homo sapiens
gattacgaatgaggc

SEQ ID NO: 537020 - DNA, 15 bp, Homo sapiens
ggattacgaatgagg

SEQ ID NO: 537021 - DNA, 15 bp, Homo sapiens
aggattacgaatgag

SEQ ID NO: 537022 - DNA, 15 bp, Homo sapiens
caggattacgaatga

SEQ ID NO: 537023 - DNA, 15 bp, Homo sapiens
ccaggattacgaatg

SEQ ID NO: 537024 - DNA, 15 bp, Homo sapiens
accaggattacgaat

SEQ ID NO: 537025 - DNA, 15 bp, Homo sapiens
gaccaggattacgaa

SEQ ID NO: 537026 - DNA, 15 bp, Homo sapiens
agaccaggattacga

SEQ ID NO: 537027 - DNA, 15 bp, Homo sapiens
cagaccaggattacg

SEQ ID NO: 537028 - DNA, 15 bp, Homo sapiens
ccagaccaggattac

SEQ ID NO: 537029 - DNA, 15 bp, Homo sapiens
cccagaccaggatta

SEQ ID NO: 537030 - DNA, 15 bp, Homo sapiens
acccagaccaggatt

SEQ ID NO: 537031 - DNA, 15 bp, Homo sapiens
gacccagaccaggat

SEQ ID NO: 537032 - DNA, 15 bp, Homo sapiens
agacccagaccagga

SEQ ID NO: 537033 - DNA, 15 bp, Homo sapiens
gagacccagaccagg

SEQ ID NO: 537034 - DNA, 15 bp, Homo sapiens
agagacccagaccag

SEQ ID NO: 537035 - DNA, 15 bp, Homo sapiens
aagagacccagacca

SEQ ID NO: 537036 - DNA, 15 bp, Homo sapiens
aaagagacccagacc

SEQ ID NO: 537037 - DNA, 15 bp, Homo sapiens
aaaagagacccagac

SEQ ID NO: 537038 - DNA, 15 bp, Homo sapiens
aaaaagagacccaga

SEQ ID NO: 537039 - DNA, 15 bp, Homo sapiens
aaaaaagagacccag

SEQ ID NO: 537040 - DNA, 15 bp, Homo sapiens
caaaaaagagaccca

SEQ ID NO: 537041 - DNA, 15 bp, Homo sapiens
tcaaaaaagagaccc

SEQ ID NO: 537042 - DNA, 15 bp, Homo sapiens
ctcaaaaaagagacc

SEQ ID NO: 537043 - DNA, 15 bp, Homo sapiens
actcaaaaaagagac

SEQ ID NO: 537044 - DNA, 15 bp, Homo sapiens
gactcaaaaaagaga

SEQ ID NO: 537045 - DNA, 15 bp, Homo sapiens
agactcaaaaaagag

SEQ ID NO: 537046 - DNA, 15 bp, Homo sapiens
gagactcaaaaaaga

SEQ ID NO: 537047 - DNA, 15 bp, Homo sapiens
agagactcaaaaaag

SEQ ID NO: 537048 - DNA, 15 bp, Homo sapiens
aagagactcaaaaaa

SEQ ID NO: 537049 - DNA, 15 bp, Homo sapiens
caagagactcaaaaa

SEQ ID NO: 537050 - DNA, 15 bp, Homo sapiens
gcaagagactcaaaa

SEQ ID NO: 537051 - DNA, 15 bp, Homo sapiens
agcaagagactcaaa

SEQ ID NO: 537052 - DNA, 15 bp, Homo sapiens
gagcaagagactcaa

SEQ ID NO: 537053 - DNA, 15 bp, Homo sapiens
agagcaagagactca

SEQ ID NO: 537054 - DNA, 15 bp, Homo sapiens
cagagcaagagactc

SEQ ID NO: 537055 - DNA, 15 bp, Homo sapiens
acagagcaagagact

SEQ ID NO: 537056 - DNA, 15 bp, Homo sapiens
gacagagcaagagac

SEQ ID NO: 537057 - DNA, 15 bp, Homo sapiens
cgacagagcaagaga

SEQ ID NO: 537058 - DNA, 15 bp, Homo sapiens
gcgacagagcaagag

SEQ ID NO: 537059 - DNA, 15 bp, Homo sapiens
cgccactgcactcca

SEQ ID NO: 537060 - DNA, 15 bp, Homo sapiens
gcgccactgcactcc

SEQ ID NO: 537061 - DNA, 15 bp, Homo sapiens
ggcgccactgcactc

SEQ ID NO: 537062 - DNA, 15 bp, Homo sapiens
tggcgccactgcact

SEQ ID NO: 537063 - DNA, 15 bp, Homo sapiens
atggcgccactgcac

SEQ ID NO: 537064 - DNA, 15 bp, Homo sapiens
gatggcgccactgca

SEQ ID NO: 537065 - DNA, 15 bp, Homo sapiens
agatggcgccactgc

SEQ ID NO: 537066 - DNA, 15 bp, Homo sapiens
gagatggcgccactg

SEQ ID NO: 537067 - DNA, 15 bp, Homo sapiens
tgagatggcgccact

SEQ ID NO: 537068 - DNA, 15 bp, Homo sapiens
ctgagatggcgccac

SEQ ID NO: 537069 - DNA, 15 bp, Homo sapiens
gctgagatggcgcca

SEQ ID NO: 537070 - DNA, 15 bp, Homo sapiens
agctgagatggcgcc

SEQ ID NO: 537071 - DNA, 15 bp, Homo sapiens
gagctgagatggcgc

SEQ ID NO: 537072 - DNA, 15 bp, Homo sapiens
tgagctgagatggcg

SEQ ID NO: 537073 - DNA, 15 bp, Homo sapiens
gtgagctgagatggc

SEQ ID NO: 537074 - DNA, 15 bp, Homo sapiens
agtgagctgagatgg

SEQ ID NO: 537075 - DNA, 15 bp, Homo sapiens
cagtgagctgagatg

SEQ ID NO: 537076 - DNA, 15 bp, Homo sapiens
gcagtgagctgagat

SEQ ID NO: 537077 - DNA, 15 bp, Homo sapiens
tgcagtgagctgaga

SEQ ID NO: 537078 - DNA, 15 bp, Homo sapiens
ttgcagtgagctgag

SEQ ID NO: 537079 - DNA, 15 bp, Homo sapiens
attgcagtgagctga

SEQ ID NO: 537080 - DNA, 15 bp, Homo sapiens
gattgcagtgagctg

SEQ ID NO: 537081 - DNA, 15 bp, Homo sapiens
agattgcagtgagct

SEQ ID NO: 537082 - DNA, 15 bp, Homo sapiens
gagattgcagtgagc

SEQ ID NO: 537083 - DNA, 15 bp, Homo sapiens
ggagattgcagtgag

SEQ ID NO: 537084 - DNA, 15 bp, Homo sapiens
cggagattgcagtga

SEQ ID NO: 537085 - DNA, 15 bp, Homo sapiens
gcggagattgcagtg

SEQ ID NO: 537086 - DNA, 15 bp, Homo sapiens
ggcggagattgcagt

SEQ ID NO: 537087 - DNA, 15 bp, Homo sapiens
aggcggagattgcag

SEQ ID NO: 537088 - DNA, 15 bp, Homo sapiens
aaggcggagattgca

SEQ ID NO: 537089 - DNA, 15 bp, Homo sapiens
gaaggcggagattgc

SEQ ID NO: 537090 - DNA, 15 bp, Homo sapiens
agaaggcggagattg

SEQ ID NO: 537091 - DNA, 15 bp, Homo sapiens
cagaaggcggagatt

SEQ ID NO: 537092 - DNA, 15 bp, Homo sapiens
ccagaaggcggagat

SEQ ID NO: 537093 - DNA, 15 bp, Homo sapiens
cccagaaggcggaga

SEQ ID NO: 537094 - DNA, 15 bp, Homo sapiens
acccagaaggcggag

SEQ ID NO: 537095 - DNA, 15 bp, Homo sapiens
aacccagaaggcgga

SEQ ID NO: 537096 - DNA, 15 bp, Homo sapiens
gaacccagaaggcgg

SEQ ID NO: 537097 - DNA, 15 bp, Homo sapiens
tgaacccagaaggcg

SEQ ID NO: 537098 - DNA, 15 bp, Homo sapiens
ttgaacccagaaggc

SEQ ID NO: 537099 - DNA, 15 bp, Homo sapiens
tttgaacccagaagg

SEQ ID NO: 537100 - DNA, 15 bp, Homo sapiens
atttgaacccagaag

SEQ ID NO: 537101 - DNA, 15 bp, Homo sapiens
catttgaacccagaa

SEQ ID NO: 537102 - DNA, 15 bp, Homo sapiens
tcatttgaacccaga

SEQ ID NO: 537103 - DNA, 15 bp, Homo sapiens
atcatttgaacccag

SEQ ID NO: 537104 - DNA, 15 bp, Homo sapiens
aatcatttgaaccca

SEQ ID NO: 537105 - DNA, 15 bp, Homo sapiens
gaatcatttgaaccc

SEQ ID NO: 537106 - DNA, 15 bp, Homo sapiens
agaatcatttgaacc

SEQ ID NO: 537107 - DNA, 15 bp, Homo sapiens
gagaatcatttgaac

SEQ ID NO: 537108 - DNA, 15 bp, Homo sapiens
ggagaatcatttgaa

SEQ ID NO: 537109 - DNA, 15 bp, Homo sapiens
aggagaatcatttga

SEQ ID NO: 537110 - DNA, 15 bp, Homo sapiens
caggagaatcatttg

SEQ ID NO: 537111 - DNA, 15 bp, Homo sapiens
gcaggagaatcattt

SEQ ID NO: 537112 - DNA, 15 bp, Homo sapiens
ggcaggagaatcatt

SEQ ID NO: 537113 - DNA, 15 bp, Homo sapiens
aggcaggagaatcat

SEQ ID NO: 537114 - DNA, 15 bp, Homo sapiens
gaggcaggagaatca

SEQ ID NO: 537115 - DNA, 15 bp, Homo sapiens
tgaggcaggagaatc

SEQ ID NO: 537116 - DNA, 15 bp, Homo sapiens
ttgtaatcccagcac

SEQ ID NO: 537117 - DNA, 15 bp, Homo sapiens
cttgtaatcccagca

SEQ ID NO: 537118 - DNA, 15 bp, Homo sapiens
acttgtaatcccagc

SEQ ID NO: 537119 - DNA, 15 bp, Homo sapiens
cacttgtaatcccag

SEQ ID NO: 537120 - DNA, 15 bp, Homo sapiens
acacttgtaatccca

SEQ ID NO: 537121 - DNA, 15 bp, Homo sapiens
cacacttgtaatccc

SEQ ID NO: 537122 - DNA, 15 bp, Homo sapiens
tcacacttgtaatcc

SEQ ID NO: 537123 - DNA, 15 bp, Homo sapiens
ctcacacttgtaatc

SEQ ID NO: 537124 - DNA, 15 bp, Homo sapiens
gctcacacttgtaat

SEQ ID NO: 537125 - DNA, 15 bp, Homo sapiens
atttattgcagggag

SEQ ID NO: 537126 - DNA, 15 bp, Homo sapiens
aatttattgcaggga

SEQ ID NO: 537127 - DNA, 15 bp, Homo sapiens
aaatttattgcaggg

SEQ ID NO: 537128 - DNA, 15 bp, Homo sapiens
taaatttattgcagg

SEQ ID NO: 537129 - DNA, 15 bp, Homo sapiens
ataaatttattgcag

SEQ ID NO: 537130 - DNA, 15 bp, Homo sapiens
aataaatttattgca

SEQ ID NO: 537131 - DNA, 15 bp, Homo sapiens
aaataaatttattgc

SEQ ID NO: 537132 - DNA, 15 bp, Homo sapiens
aaaataaatttattg

SEQ ID NO: 537133 - DNA, 15 bp, Homo sapiens
taaaataaatttatt

SEQ ID NO: 537134 - DNA, 15 bp, Homo sapiens
ataaaataaatttat

SEQ ID NO: 537135 - DNA, 15 bp, Homo sapiens
tataaaataaattta

SEQ ID NO: 537136 - DNA, 15 bp, Homo sapiens
atataaaataaattt

SEQ ID NO: 537137 - DNA, 15 bp, Homo sapiens
tatataaaataaatt

SEQ ID NO: 537138 - DNA, 15 bp, Homo sapiens
atatataaaataaat

SEQ ID NO: 537139 - DNA, 15 bp, Homo sapiens
gatatataaaataaa

SEQ ID NO: 537140 - DNA, 15 bp, Homo sapiens
ggatatataaaataa

SEQ ID NO: 537141 - DNA, 15 bp, Homo sapiens
gggatatataaaata

SEQ ID NO: 537142 - DNA, 15 bp, Homo sapiens
ggggatatataaaat

SEQ ID NO: 537143 - DNA, 15 bp, Homo sapiens
aggggatatataaaa

SEQ ID NO: 537144 - DNA, 15 bp, Homo sapiens
aaggggatatataaa

SEQ ID NO: 537145 - DNA, 15 bp, Homo sapiens
caaggggatatataa

SEQ ID NO: 537146 - DNA, 15 bp, Homo sapiens
acaaggggatatata

SEQ ID NO: 537147 - DNA, 15 bp, Homo sapiens
tacaaggggatatat

SEQ ID NO: 537148 - DNA, 15 bp, Homo sapiens
atacaaggggatata

SEQ ID NO: 537149 - DNA, 15 bp, Homo sapiens
catacaaggggatat

SEQ ID NO: 537150 - DNA, 15 bp, Homo sapiens
acatacaaggggata

SEQ ID NO: 537151 - DNA, 15 bp, Homo sapiens
cacatacaaggggat

SEQ ID NO: 537152 - DNA, 15 bp, Homo sapiens
acacatacaagggga

SEQ ID NO: 537153 - DNA, 15 bp, Homo sapiens
cacacatacaagggg

SEQ ID NO: 537154 - DNA, 15 bp, Homo sapiens
acacacatacaaggg

SEQ ID NO: 537155 - DNA, 15 bp, Homo sapiens
cacacacatacaagg

SEQ ID NO: 537156 - DNA, 15 bp, Homo sapiens
tcacacacatacaag

SEQ ID NO: 537157 - DNA, 15 bp, Homo sapiens
ctcacacacatacaa

SEQ ID NO: 537158 - DNA, 15 bp, Homo sapiens
cctcacacacataca

SEQ ID NO: 537159 - DNA, 15 bp, Homo sapiens
ccctcacacacatac

SEQ ID NO: 537160 - DNA, 15 bp, Homo sapiens
accctcacacacata

SEQ ID NO: 537161 - DNA, 15 bp, Homo sapiens
gaccctcacacacat

SEQ ID NO: 537162 - DNA, 15 bp, Homo sapiens
ggaccctcacacaca

SEQ ID NO: 537163 - DNA, 15 bp, Homo sapiens
gggaccctcacacac

SEQ ID NO: 537164 - DNA, 15 bp, Homo sapiens
ggggaccctcacaca

SEQ ID NO: 537165 - DNA, 15 bp, Homo sapiens
aggggaccctcacac

SEQ ID NO: 537166 - DNA, 15 bp, Homo sapiens
taggggaccctcaca

SEQ ID NO: 537167 - DNA, 15 bp, Homo sapiens
ttaggggaccctcac

SEQ ID NO: 537168 - DNA, 15 bp, Homo sapiens
gttaggggaccctca

SEQ ID NO: 537169 - DNA, 15 bp, Homo sapiens
agttaggggaccctc

SEQ ID NO: 537170 - DNA, 15 bp, Homo sapiens
cagttaggggaccct

SEQ ID NO: 537171 - DNA, 15 bp, Homo sapiens
gcagttaggggaccc

SEQ ID NO: 537172 - DNA, 15 bp, Homo sapiens
agcagttaggggacc

SEQ ID NO: 537173 - DNA, 15 bp, Homo sapiens
gagcagttaggggac

SEQ ID NO: 537174 - DNA, 15 bp, Homo sapiens
tgagcagttagggga

SEQ ID NO: 537175 - DNA, 15 bp, Homo sapiens
gtgagcagttagggg

SEQ ID NO: 537176 - DNA, 15 bp, Homo sapiens
tgtgagcagttaggg

SEQ ID NO: 537177 - DNA, 15 bp, Homo sapiens
ttgtgagcagttagg

SEQ ID NO: 537178 - DNA, 15 bp, Homo sapiens
tttgtgagcagttag

SEQ ID NO: 537179 - DNA, 15 bp, Homo sapiens
atttgtgagcagtta

SEQ ID NO: 537180 - DNA, 15 bp, Homo sapiens
tatttgtgagcagtt

SEQ ID NO: 537181 - DNA, 15 bp, Homo sapiens
atatttgtgagcagt

SEQ ID NO: 537182 - DNA, 15 bp, Homo sapiens
gatatttgtgagcag

SEQ ID NO: 537183 - DNA, 15 bp, Homo sapiens
agatatttgtgagca

SEQ ID NO: 537184 - DNA, 15 bp, Homo sapiens
gagatatttgtgagc

SEQ ID NO: 537185 - DNA, 15 bp, Homo sapiens
tgagatatttgtgag

SEQ ID NO: 537186 - DNA, 15 bp, Homo sapiens
ctgagatatttgtga

SEQ ID NO: 537187 - DNA, 15 bp, Homo sapiens
gctgagatatttgtg

SEQ ID NO: 537188 - DNA, 15 bp, Homo sapiens
tgctgagatatttgt

SEQ ID NO: 537189 - DNA, 15 bp, Homo sapiens
ttgctgagatatttg

SEQ ID NO: 537190 - DNA, 15 bp, Homo sapiens
gttgctgagatattt

SEQ ID NO: 537191 - DNA, 15 bp, Homo sapiens
agttgctgagatatt

SEQ ID NO: 537192 - DNA, 15 bp, Homo sapiens
gagttgctgagatat

SEQ ID NO: 537193 - DNA, 15 bp, Homo sapiens
ggagttgctgagata

SEQ ID NO: 537194 - DNA, 15 bp, Homo sapiens
cggagttgctgagat

SEQ ID NO: 537195 - DNA, 15 bp, Homo sapiens
gcggagttgctgaga

SEQ ID NO: 537196 - DNA, 15 bp, Homo sapiens
ggcggagttgctgag

SEQ ID NO: 537197 - DNA, 15 bp, Homo sapiens
gggcggagttgctga

SEQ ID NO: 537198 - DNA, 15 bp, Homo sapiens
agggcggagttgctg

SEQ ID NO: 537199 - DNA, 15 bp, Homo sapiens
gagggcggagttgct

SEQ ID NO: 537200 - DNA, 15 bp, Homo sapiens
ggagggcggagttgc

SEQ ID NO: 537201 - DNA, 15 bp, Homo sapiens
gggagggcggagttg

SEQ ID NO: 537202 - DNA, 15 bp, Homo sapiens
ggggagggcggagtt

SEQ ID NO: 537203 - DNA, 15 bp, Homo sapiens
tggggagggcggagt

SEQ ID NO: 537204 - DNA, 15 bp, Homo sapiens
gtggggagggcggag

SEQ ID NO: 537205 - DNA, 15 bp, Homo sapiens
agtggggagggcgga

SEQ ID NO: 537206 - DNA, 15 bp, Homo sapiens
gagtggggagggcgg

SEQ ID NO: 537207 - DNA, 15 bp, Homo sapiens
tgagtggggagggcg

SEQ ID NO: 537208 - DNA, 15 bp, Homo sapiens
ctgagtggggagggc

SEQ ID NO: 537209 - DNA, 15 bp, Homo sapiens
tctgagtggggaggg

SEQ ID NO: 537210 - DNA, 15 bp, Homo sapiens
gtctgagtggggagg

SEQ ID NO: 537211 - DNA, 15 bp, Homo sapiens
ggtctgagtggggag

SEQ ID NO: 537212 - DNA, 15 bp, Homo sapiens
aggtctgagtgggga

SEQ ID NO: 537213 - DNA, 15 bp, Homo sapiens
gaggtctgagtgggg

SEQ ID NO: 537214 - DNA, 15 bp, Homo sapiens
tgaggtctgagtggg

SEQ ID NO: 537215 - DNA, 15 bp, Homo sapiens
atgaggtctgagtgg

SEQ ID NO: 537216 - DNA, 15 bp, Homo sapiens
aatgaggtctgagtg

SEQ ID NO: 537217 - DNA, 15 bp, Homo sapiens
aaatgaggtctgagt

SEQ ID NO: 537218 - DNA, 15 bp, Homo sapiens
gaaatgaggtctgag

SEQ ID NO: 537219 - DNA, 15 bp, Homo sapiens
ggaaatgaggtctga

SEQ ID NO: 537220 - DNA, 15 bp, Homo sapiens
gggaaatgaggtctg

SEQ ID NO: 537221 - DNA, 15 bp, Homo sapiens
agggaaatgaggtct

SEQ ID NO: 537222 - DNA, 15 bp, Homo sapiens
gagggaaatgaggtc

SEQ ID NO: 537223 - DNA, 15 bp, Homo sapiens
ggagggaaatgaggt

SEQ ID NO: 537224 - DNA, 15 bp, Homo sapiens
aggagggaaatgagg

SEQ ID NO: 537225 - DNA, 15 bp, Homo sapiens
taggagggaaatgag

SEQ ID NO: 537226 - DNA, 15 bp, Homo sapiens
gtaggagggaaatga

SEQ ID NO: 537227 - DNA, 15 bp, Homo sapiens
ggtaggagggaaatg

SEQ ID NO: 537228 - DNA, 15 bp, Homo sapiens
tggtaggagggaaat

SEQ ID NO: 537229 - DNA, 15 bp, Homo sapiens
ctggtaggagggaaa

SEQ ID NO: 537230 - DNA, 15 bp, Homo sapiens
tctggtaggagggaa

SEQ ID NO: 537231 - DNA, 15 bp, Homo sapiens
gtctggtaggaggga

SEQ ID NO: 537232 - DNA, 15 bp, Homo sapiens
tgtctggtaggaggg

SEQ ID NO: 537233 - DNA, 15 bp, Homo sapiens
atgtctggtaggagg

SEQ ID NO: 537234 - DNA, 15 bp, Homo sapiens
catgtctggtaggag

SEQ ID NO: 537235 - DNA, 15 bp, Homo sapiens
gcatgtctggtagga

SEQ ID NO: 537236 - DNA, 15 bp, Homo sapiens
agcatgtctggtagg

SEQ ID NO: 537237 - DNA, 15 bp, Homo sapiens
gagcatgtctggtag

SEQ ID NO: 537238 - DNA, 15 bp, Homo sapiens
tgagcatgtctggta

SEQ ID NO: 537239 - DNA, 15 bp, Homo sapiens
ttgagcatgtctggt

SEQ ID NO: 537240 - DNA, 15 bp, Homo sapiens
tttgagcatgtctgg

SEQ ID NO: 537241 - DNA, 15 bp, Homo sapiens
ctttgagcatgtctg

SEQ ID NO: 537242 - DNA, 15 bp, Homo sapiens
cctttgagcatgtct

SEQ ID NO: 537243 - DNA, 15 bp, Homo sapiens
tcctttgagcatgtc

SEQ ID NO: 537244 - DNA, 15 bp, Homo sapiens
ttcctttgagcatgt

SEQ ID NO: 537245 - DNA, 15 bp, Homo sapiens
tttcctttgagcatg

SEQ ID NO: 537246 - DNA, 15 bp, Homo sapiens
gtttcctttgagcat

SEQ ID NO: 537247 - DNA, 15 bp, Homo sapiens
agtttcctttgagca

SEQ ID NO: 537248 - DNA, 15 bp, Homo sapiens
cagtttcctttgagc

SEQ ID NO: 537249 - DNA, 15 bp, Homo sapiens
ccagtttcctttgag

SEQ ID NO: 537250 - DNA, 15 bp, Homo sapiens
cccagtttcctttga

SEQ ID NO: 537251 - DNA, 15 bp, Homo sapiens
tcccagtttcctttg

SEQ ID NO: 537252 - DNA, 15 bp, Homo sapiens
ctcccagtttccttt

SEQ ID NO: 537253 - DNA, 15 bp, Homo sapiens
gctcccagtttcctt

SEQ ID NO: 537254 - DNA, 15 bp, Homo sapiens
tgctcccagtttcct

SEQ ID NO: 537255 - DNA, 15 bp, Homo sapiens
ttgctcccagtttcc

SEQ ID NO: 537256 - DNA, 15 bp, Homo sapiens
gttgctcccagtttc

SEQ ID NO: 537257 - DNA, 15 bp, Homo sapiens
tgttgctcccagttt

SEQ ID NO: 537258 - DNA, 15 bp, Homo sapiens
gtgttgctcccagtt

SEQ ID NO: 537259 - DNA, 15 bp, Homo sapiens
tgtgttgctcccagt

SEQ ID NO: 537260 - DNA, 15 bp, Homo sapiens
ttgtgttgctcccag

SEQ ID NO: 537261 - DNA, 15 bp, Homo sapiens
tttgtgttgctccca

SEQ ID NO: 537262 - DNA, 15 bp, Homo sapiens
ctttgtgttgctccc

SEQ ID NO: 537263 - DNA, 15 bp, Homo sapiens
tctttgtgttgctcc

SEQ ID NO: 537264 - DNA, 15 bp, Homo sapiens
atctttgtgttgctc

SEQ ID NO: 537265 - DNA, 15 bp, Homo sapiens
catctttgtgttgct

SEQ ID NO: 537266 - DNA, 15 bp, Homo sapiens
tcatctttgtgttgc

SEQ ID NO: 537267 - DNA, 15 bp, Homo sapiens
gtcatctttgtgttg

SEQ ID NO: 537268 - DNA, 15 bp, Homo sapiens
agtcatctttgtgtt

SEQ ID NO: 537269 - DNA, 15 bp, Homo sapiens
aagtcatctttgtgt

SEQ ID NO: 537270 - DNA, 15 bp, Homo sapiens
aaagtcatctttgtg

SEQ ID NO: 537271 - DNA, 15 bp, Homo sapiens
caaagtcatctttgt

SEQ ID NO: 537272 - DNA, 15 bp, Homo sapiens
tcaaagtcatctttg

SEQ ID NO: 537273 - DNA, 15 bp, Homo sapiens
ttcaaagtcatcttt

SEQ ID NO: 537274 - DNA, 15 bp, Homo sapiens
attcaaagtcatctt

SEQ ID NO: 537275 - DNA, 15 bp, Homo sapiens
gattcaaagtcatct

SEQ ID NO: 537276 - DNA, 15 bp, Homo sapiens
agattcaaagtcatc

SEQ ID NO: 537277 - DNA, 15 bp, Homo sapiens
gagattcaaagtcat

SEQ ID NO: 537278 - DNA, 15 bp, Homo sapiens
agagattcaaagtca

SEQ ID NO: 537279 - DNA, 15 bp, Homo sapiens
cagagattcaaagtc

SEQ ID NO: 537280 - DNA, 15 bp, Homo sapiens
acagagattcaaagt

SEQ ID NO: 537281 - DNA, 15 bp, Homo sapiens
gacagagattcaaag

SEQ ID NO: 537282 - DNA, 15 bp, Homo sapiens
ggacagagattcaaa

SEQ ID NO: 537283 - DNA, 15 bp, Homo sapiens
tggacagagattcaa

SEQ ID NO: 537284 - DNA, 15 bp, Homo sapiens
gtggacagagattca

SEQ ID NO: 537285 - DNA, 15 bp, Homo sapiens
ggtggacagagattc

SEQ ID NO: 537286 - DNA, 15 bp, Homo sapiens
tggtggacagagatt

SEQ ID NO: 537287 - DNA, 15 bp, Homo sapiens
gtggtggacagagat

SEQ ID NO: 537288 - DNA, 15 bp, Homo sapiens
ggtggtggacagaga

SEQ ID NO: 537289 - DNA, 15 bp, Homo sapiens
gggtggtggacagag

SEQ ID NO: 537290 - DNA, 15 bp, Homo sapiens
ggggtggtggacaga

SEQ ID NO: 537291 - DNA, 15 bp, Homo sapiens
aggggtggtggacag

SEQ ID NO: 537292 - DNA, 15 bp, Homo sapiens
taggggtggtggaca

SEQ ID NO: 537293 - DNA, 15 bp, Homo sapiens
ctaggggtggtggac

SEQ ID NO: 537294 - DNA, 15 bp, Homo sapiens
tctaggggtggtgga

SEQ ID NO: 537295 - DNA, 15 bp, Homo sapiens
gtctaggggtggtgg

SEQ ID NO: 537296 - DNA, 15 bp, Homo sapiens
agtctaggggtggtg

SEQ ID NO: 537297 - DNA, 15 bp, Homo sapiens
cagtctaggggtggt

SEQ ID NO: 537298 - DNA, 15 bp, Homo sapiens
acagtctaggggtgg

SEQ ID NO: 537299 - DNA, 15 bp, Homo sapiens
tacagtctaggggtg

SEQ ID NO: 537300 - DNA, 15 bp, Homo sapiens
atacagtctaggggt

SEQ ID NO: 537301 - DNA, 15 bp, Homo sapiens
catacagtctagggg

SEQ ID NO: 537302 - DNA, 15 bp, Homo sapiens
tcatacagtctaggg

SEQ ID NO: 537303 - DNA, 15 bp, Homo sapiens
gtcatacagtctagg

SEQ ID NO: 537304 - DNA, 15 bp, Homo sapiens
tgtcatacagtctag

SEQ ID NO: 537305 - DNA, 15 bp, Homo sapiens
gtgtcatacagtcta

SEQ ID NO: 537306 - DNA, 15 bp, Homo sapiens
ggtgtcatacagtct

SEQ ID NO: 537307 - DNA, 15 bp, Homo sapiens
gggtgtcatacagtc

SEQ ID NO: 537308 - DNA, 15 bp, Homo sapiens
cgggtgtcatacagt

SEQ ID NO: 537309 - DNA, 15 bp, Homo sapiens
gcgggtgtcatacag

SEQ ID NO: 537310 - DNA, 15 bp, Homo sapiens
tgcgggtgtcataca

SEQ ID NO: 537311 - DNA, 15 bp, Homo sapiens
ttgcgggtgtcatac

SEQ ID NO: 537312 - DNA, 15 bp, Homo sapiens
cttgcgggtgtcata

SEQ ID NO: 537313 - DNA, 15 bp, Homo sapiens
acttgcgggtgtcat

SEQ ID NO: 537314 - DNA, 15 bp, Homo sapiens
cacttgcgggtgtca

SEQ ID NO: 537315 - DNA, 15 bp, Homo sapiens
tcacttgcgggtgtc

SEQ ID NO: 537316 - DNA, 15 bp, Homo sapiens
gtcacttgcgggtgt

SEQ ID NO: 537317 - DNA, 15 bp, Homo sapiens
tgtcacttgcgggtg

SEQ ID NO: 537318 - DNA, 15 bp, Homo sapiens
ttgtcacttgcgggt

SEQ ID NO: 537319 - DNA, 15 bp, Homo sapiens
gttgtcacttgcggg

SEQ ID NO: 537320 - DNA, 15 bp, Homo sapiens
ggttgtcacttgcgg

SEQ ID NO: 537321 - DNA, 15 bp, Homo sapiens
aggttgtcacttgcg

SEQ ID NO: 537322 - DNA, 15 bp, Homo sapiens
gaggttgtcacttgc

SEQ ID NO: 537323 - DNA, 15 bp, Homo sapiens
ggaggttgtcacttg

SEQ ID NO: 537324 - DNA, 15 bp, Homo sapiens
gggaggttgtcactt

SEQ ID NO: 537325 - DNA, 15 bp, Homo sapiens
ggggaggttgtcact

SEQ ID NO: 537326 - DNA, 15 bp, Homo sapiens
aggggaggttgtcac

SEQ ID NO: 537327 - DNA, 15 bp, Homo sapiens
gaggggaggttgtca

SEQ ID NO: 537328 - DNA, 15 bp, Homo sapiens
agaggggaggttgtc

SEQ ID NO: 537329 - DNA, 15 bp, Homo sapiens
gagaggggaggttgt

SEQ ID NO: 537330 - DNA, 15 bp, Homo sapiens
agagaggggaggttg

SEQ ID NO: 537331 - DNA, 15 bp, Homo sapiens
cagagaggggaggtt

SEQ ID NO: 537332 - DNA, 15 bp, Homo sapiens
ccagagaggggaggt

SEQ ID NO: 537333 - DNA, 15 bp, Homo sapiens
gccagagaggggagg

SEQ ID NO: 537334 - DNA, 15 bp, Homo sapiens
ggccagagaggggag

SEQ ID NO: 537335 - DNA, 15 bp, Homo sapiens
aggccagagagggga

SEQ ID NO: 537336 - DNA, 15 bp, Homo sapiens
gaggccagagagggg

SEQ ID NO: 537337 - DNA, 15 bp, Homo sapiens
cgaggccagagaggg

SEQ ID NO: 537338 - DNA, 15 bp, Homo sapiens
ccgaggccagagagg

SEQ ID NO: 537339 - DNA, 15 bp, Homo sapiens
accgaggccagagag

SEQ ID NO: 537340 - DNA, 15 bp, Homo sapiens
aaccgaggccagaga

SEQ ID NO: 537341 - DNA, 15 bp, Homo sapiens
aaaccgaggccagag

SEQ ID NO: 537342 - DNA, 15 bp, Homo sapiens
gaaaccgaggccaga

SEQ ID NO: 537343 - DNA, 15 bp, Homo sapiens
ggaaaccgaggccag

SEQ ID NO: 537344 - DNA, 15 bp, Homo sapiens
gggaaaccgaggcca

SEQ ID NO: 537345 - DNA, 15 bp, Homo sapiens
ggggaaaccgaggcc

SEQ ID NO: 537346 - DNA, 15 bp, Homo sapiens
gggggaaaccgaggc

SEQ ID NO: 537347 - DNA, 15 bp, Homo sapiens
agggggaaaccgagg

SEQ ID NO: 537348 - DNA, 15 bp, Homo sapiens
gagggggaaaccgag

SEQ ID NO: 537349 - DNA, 15 bp, Homo sapiens
agagggggaaaccga

SEQ ID NO: 537350 - DNA, 15 bp, Homo sapiens
cagagggggaaaccg

SEQ ID NO: 537351 - DNA, 15 bp, Homo sapiens
acagagggggaaacc

SEQ ID NO: 537352 - DNA, 15 bp, Homo sapiens
tacagagggggaaac

SEQ ID NO: 537353 - DNA, 15 bp, Homo sapiens
ttacagagggggaaa

SEQ ID NO: 537354 - DNA, 15 bp, Homo sapiens
tttacagagggggaa

SEQ ID NO: 537355 - DNA, 15 bp, Homo sapiens
ttttacagaggggga

SEQ ID NO: 537356 - DNA, 15 bp, Homo sapiens
attttacagaggggg

SEQ ID NO: 537357 - DNA, 15 bp, Homo sapiens
cattttacagagggg

SEQ ID NO: 537358 - DNA, 15 bp, Homo sapiens
ccattttacagaggg

SEQ ID NO: 537359 - DNA, 15 bp, Homo sapiens
cccattttacagagg

SEQ ID NO: 537360 - DNA, 15 bp, Homo sapiens
ccccattttacagag

SEQ ID NO: 537361 - DNA, 15 bp, Homo sapiens
cccccattttacaga

SEQ ID NO: 537362 - DNA, 15 bp, Homo sapiens
tcccccattttacag

SEQ ID NO: 537363 - DNA, 15 bp, Homo sapiens
atcccccattttaca

SEQ ID NO: 537364 - DNA, 15 bp, Homo sapiens
catcccccattttac

SEQ ID NO: 537365 - DNA, 15 bp, Homo sapiens
ccatcccccatttta

SEQ ID NO: 537366 - DNA, 15 bp, Homo sapiens
gccatcccccatttt

SEQ ID NO: 537367 - DNA, 15 bp, Homo sapiens
ggccatcccccattt

SEQ ID NO: 537368 - DNA, 15 bp, Homo sapiens
aggccatcccccatt

SEQ ID NO: 537369 - DNA, 15 bp, Homo sapiens
taggccatcccccat

SEQ ID NO: 537370 - DNA, 15 bp, Homo sapiens
gtaggccatccccca

SEQ ID NO: 537371 - DNA, 15 bp, Homo sapiens
ggtaggccatccccc

SEQ ID NO: 537372 - DNA, 15 bp, Homo sapiens
aggtaggccatcccc

SEQ ID NO: 537373 - DNA, 15 bp, Homo sapiens
aaggtaggccatccc

SEQ ID NO: 537374 - DNA, 15 bp, Homo sapiens
caaggtaggccatcc

SEQ ID NO: 537375 - DNA, 15 bp, Homo sapiens
gcaaggtaggccatc

SEQ ID NO: 537376 - DNA, 15 bp, Homo sapiens
ggcaaggtaggccat

SEQ ID NO: 537377 - DNA, 15 bp, Homo sapiens
tggcaaggtaggcca

SEQ ID NO: 537378 - DNA, 15 bp, Homo sapiens
ctggcaaggtaggcc

SEQ ID NO: 537379 - DNA, 15 bp, Homo sapiens
actggcaaggtaggc

SEQ ID NO: 537380 - DNA, 15 bp, Homo sapiens
gactggcaaggtagg

SEQ ID NO: 537381 - DNA, 15 bp, Homo sapiens
tgactggcaaggtag

SEQ ID NO: 537382 - DNA, 15 bp, Homo sapiens
atgactggcaaggta

SEQ ID NO: 537383 - DNA, 15 bp, Homo sapiens
catgactggcaaggt

SEQ ID NO: 537384 - DNA, 15 bp, Homo sapiens
ccatgactggcaagg

SEQ ID NO: 537385 - DNA, 15 bp, Homo sapiens
gccatgactggcaag

SEQ ID NO: 537386 - DNA, 15 bp, Homo sapiens
tgccatgactggcaa

SEQ ID NO: 537387 - DNA, 15 bp, Homo sapiens
ctgccatgactggca

SEQ ID NO: 537388 - DNA, 15 bp, Homo sapiens
cctgccatgactggc

SEQ ID NO: 537389 - DNA, 15 bp, Homo sapiens
acctgccatgactgg

SEQ ID NO: 537390 - DNA, 15 bp, Homo sapiens
gacctgccatgactg

SEQ ID NO: 537391 - DNA, 15 bp, Homo sapiens
tgacctgccatgact

SEQ ID NO: 537392 - DNA, 15 bp, Homo sapiens
ttgacctgccatgac

SEQ ID NO: 537393 - DNA, 15 bp, Homo sapiens
attgacctgccatga

SEQ ID NO: 537394 - DNA, 15 bp, Homo sapiens
tattgacctgccatg

SEQ ID NO: 537395 - DNA, 15 bp, Homo sapiens
atattgacctgccat

SEQ ID NO: 537396 - DNA, 15 bp, Homo sapiens
tatattgacctgcca

SEQ ID NO: 537397 - DNA, 15 bp, Homo sapiens
ttatattgacctgcc

SEQ ID NO: 537398 - DNA, 15 bp, Homo sapiens
tttatattgacctgc

SEQ ID NO: 537399 - DNA, 15 bp, Homo sapiens
ttttatattgacctg

SEQ ID NO: 537400 - DNA, 15 bp, Homo sapiens
gttttatattgacct

SEQ ID NO: 537401 - DNA, 15 bp, Homo sapiens
tgttttatattgacc

SEQ ID NO: 537402 - DNA, 15 bp, Homo sapiens
ttgttttatattgac

SEQ ID NO: 537403 - DNA, 15 bp, Homo sapiens
gttgttttatattga

SEQ ID NO: 537404 - DNA, 15 bp, Homo sapiens
agttgttttatattg

SEQ ID NO: 537405 - DNA, 15 bp, Homo sapiens
aagttgttttatatt

SEQ ID NO: 537406 - DNA, 15 bp, Homo sapiens
gaagttgttttatat

SEQ ID NO: 537407 - DNA, 15 bp, Homo sapiens
agaagttgttttata

SEQ ID NO: 537408 - DNA, 15 bp, Homo sapiens
cagaagttgttttat

SEQ ID NO: 537409 - DNA, 15 bp, Homo sapiens
ccagaagttgtttta

SEQ ID NO: 537410 - DNA, 15 bp, Homo sapiens
gccagaagttgtttt

SEQ ID NO: 537411 - DNA, 15 bp, Homo sapiens
agccagaagttgttt

SEQ ID NO: 537412 - DNA, 15 bp, Homo sapiens
cagccagaagttgtt

SEQ ID NO: 537413 - DNA, 15 bp, Homo sapiens
acagccagaagttgt

SEQ ID NO: 537414 - DNA, 15 bp, Homo sapiens
cacagccagaagttg

SEQ ID NO: 537415 - DNA, 15 bp, Homo sapiens
gcacagccagaagtt

SEQ ID NO: 537416 - DNA, 15 bp, Homo sapiens
tgcacagccagaagt

SEQ ID NO: 537417 - DNA, 15 bp, Homo sapiens
gtgcacagccagaag

SEQ ID NO: 537418 - DNA, 15 bp, Homo sapiens
tgtgcacagccagaa

SEQ ID NO: 537419 - DNA, 15 bp, Homo sapiens
ctgtgcacagccaga

SEQ ID NO: 537420 - DNA, 15 bp, Homo sapiens
actgtgcacagccag

SEQ ID NO: 537421 - DNA, 15 bp, Homo sapiens
cactgtgcacagcca

SEQ ID NO: 537422 - DNA, 15 bp, Homo sapiens
ccactgtgcacagcc

SEQ ID NO: 537423 - DNA, 15 bp, Homo sapiens
gccactgtgcacagc

SEQ ID NO: 537424 - DNA, 15 bp, Homo sapiens
tgccactgtgcacag

SEQ ID NO: 537425 - DNA, 15 bp, Homo sapiens
gtgccactgtgcaca

SEQ ID NO: 537426 - DNA, 15 bp, Homo sapiens
tgtgccactgtgcac

SEQ ID NO: 537427 - DNA, 15 bp, Homo sapiens
atgtgccactgtgca

SEQ ID NO: 537428 - DNA, 15 bp, Homo sapiens
catgtgccactgtgc

SEQ ID NO: 537429 - DNA, 15 bp, Homo sapiens
gcatgtgccactgtg

SEQ ID NO: 537430 - DNA, 15 bp, Homo sapiens
ggcatgtgccactgt

SEQ ID NO: 537431 - DNA, 15 bp, Homo sapiens
aggcatgtgccactg

SEQ ID NO: 537432 - DNA, 15 bp, Homo sapiens
caggcatgtgccact

SEQ ID NO: 537433 - DNA, 15 bp, Homo sapiens
acaggcatgtgccac

SEQ ID NO: 537434 - DNA, 15 bp, Homo sapiens
tacaggcatgtgcca

SEQ ID NO: 537435 - DNA, 15 bp, Homo sapiens
ttacaggcatgtgcc

SEQ ID NO: 537436 - DNA, 15 bp, Homo sapiens
attacaggcatgtgc

SEQ ID NO: 537437 - DNA, 15 bp, Homo sapiens
gattacaggcatgtg

SEQ ID NO: 537438 - DNA, 15 bp, Homo sapiens
ggattacaggcatgt

SEQ ID NO: 537439 - DNA, 15 bp, Homo sapiens
ttcccaaagtgctgg

SEQ ID NO: 537440 - DNA, 15 bp, Homo sapiens
cttcccaaagtgctg

SEQ ID NO: 537441 - DNA, 15 bp, Homo sapiens
gcttcccaaagtgct

SEQ ID NO: 537442 - DNA, 15 bp, Homo sapiens
agcttcccaaagtgc

SEQ ID NO: 537443 - DNA, 15 bp, Homo sapiens
cagcttcccaaagtg

SEQ ID NO: 537444 - DNA, 15 bp, Homo sapiens
tcagcttcccaaagt

SEQ ID NO: 537445 - DNA, 15 bp, Homo sapiens
ctcagcttcccaaag

SEQ ID NO: 537446 - DNA, 15 bp, Homo sapiens
cctcagcttcccaaa

SEQ ID NO: 537447 - DNA, 15 bp, Homo sapiens
cctcctgcctcagct

SEQ ID NO: 537448 - DNA, 15 bp, Homo sapiens
tcctcctgcctcagc

SEQ ID NO: 537449 - DNA, 15 bp, Homo sapiens
atcctcctgcctcag

SEQ ID NO: 537450 - DNA, 15 bp, Homo sapiens
aatcctcctgcctca

SEQ ID NO: 537451 - DNA, 15 bp, Homo sapiens
caatcctcctgcctc

SEQ ID NO: 537452 - DNA, 15 bp, Homo sapiens
gcaatcctcctgcct

SEQ ID NO: 537453 - DNA, 15 bp, Homo sapiens
agcaatcctcctgcc

SEQ ID NO: 537454 - DNA, 15 bp, Homo sapiens
aagcaatcctcctgc

SEQ ID NO: 537455 - DNA, 15 bp, Homo sapiens
caagcaatcctcctg

SEQ ID NO: 537456 - DNA, 15 bp, Homo sapiens
tcaagcaatcctcct

SEQ ID NO: 537457 - DNA, 15 bp, Homo sapiens
cctcaagcaatcctc

SEQ ID NO: 537458 - DNA, 15 bp, Homo sapiens
gcctcaagcaatcct

SEQ ID NO: 537459 - DNA, 15 bp, Homo sapiens
ggcctcaagcaatcc

SEQ ID NO: 537460 - DNA, 15 bp, Homo sapiens
tggcctcaagcaatc

SEQ ID NO: 537461 - DNA, 15 bp, Homo sapiens
ctggcctcaagcaat

SEQ ID NO: 537462 - DNA, 15 bp, Homo sapiens
cctggcctcaagcaa

SEQ ID NO: 537463 - DNA, 15 bp, Homo sapiens
tcctggcctcaagca

SEQ ID NO: 537464 - DNA, 15 bp, Homo sapiens
ctcctggcctcaagc

SEQ ID NO: 537465 - DNA, 15 bp, Homo sapiens
actcctggcctcaag

SEQ ID NO: 537466 - DNA, 15 bp, Homo sapiens
aactcctggcctcaa

SEQ ID NO: 537467 - DNA, 15 bp, Homo sapiens
gaactcctggcctca

SEQ ID NO: 537468 - DNA, 15 bp, Homo sapiens
tgaactcctggcctc

SEQ ID NO: 537469 - DNA, 15 bp, Homo sapiens
ttgaactcctggcct

SEQ ID NO: 537470 - DNA, 15 bp, Homo sapiens
cttgaactcctggcc

SEQ ID NO: 537471 - DNA, 15 bp, Homo sapiens
tcttgaactcctggc

SEQ ID NO: 537472 - DNA, 15 bp, Homo sapiens
gtcttgaactcctgg

SEQ ID NO: 537473 - DNA, 15 bp, Homo sapiens
ctggtcttgaactcc

SEQ ID NO: 537474 - DNA, 15 bp, Homo sapiens
gctggtcttgaactc

SEQ ID NO: 537475 - DNA, 15 bp, Homo sapiens
ggctggtcttgaact

SEQ ID NO: 537476 - DNA, 15 bp, Homo sapiens
aggctggtcttgaac

SEQ ID NO: 537477 - DNA, 15 bp, Homo sapiens
caggctggtcttgaa

SEQ ID NO: 537478 - DNA, 15 bp, Homo sapiens
ccaggctggtcttga

SEQ ID NO: 537479 - DNA, 15 bp, Homo sapiens
cccaggctggtcttg

SEQ ID NO: 537480 - DNA, 15 bp, Homo sapiens
gcccaggctggtctt

SEQ ID NO: 537481 - DNA, 15 bp, Homo sapiens
tgcccaggctggtct

SEQ ID NO: 537482 - DNA, 15 bp, Homo sapiens
attgcccaggctggt

SEQ ID NO: 537483 - DNA, 15 bp, Homo sapiens
tattgcccaggctgg

SEQ ID NO: 537484 - DNA, 15 bp, Homo sapiens
atattgcccaggctg

SEQ ID NO: 537485 - DNA, 15 bp, Homo sapiens
tatattgcccaggct

SEQ ID NO: 537486 - DNA, 15 bp, Homo sapiens
ctatattgcccaggc

SEQ ID NO: 537487 - DNA, 15 bp, Homo sapiens
gctatattgcccagg

SEQ ID NO: 537488 - DNA, 15 bp, Homo sapiens
tgctatattgcccag

SEQ ID NO: 537489 - DNA, 15 bp, Homo sapiens
ttgctatattgccca

SEQ ID NO: 537490 - DNA, 15 bp, Homo sapiens
cttgctatattgccc

SEQ ID NO: 537491 - DNA, 15 bp, Homo sapiens
tcttgctatattgcc

SEQ ID NO: 537492 - DNA, 15 bp, Homo sapiens
atcttgctatattgc

SEQ ID NO: 537493 - DNA, 15 bp, Homo sapiens
gatcttgctatattg

SEQ ID NO: 537494 - DNA, 15 bp, Homo sapiens
ggatcttgctatatt

SEQ ID NO: 537495 - DNA, 15 bp, Homo sapiens
gggatcttgctatat

SEQ ID NO: 537496 - DNA, 15 bp, Homo sapiens
tgggatcttgctata

SEQ ID NO: 537497 - DNA, 15 bp, Homo sapiens
atgggatcttgctat

SEQ ID NO: 537498 - DNA, 15 bp, Homo sapiens
gatgggatcttgcta

SEQ ID NO: 537499 - DNA, 15 bp, Homo sapiens
ggatgggatcttgct

SEQ ID NO: 537500 - DNA, 15 bp, Homo sapiens
gggatgggatcttgc

SEQ ID NO: 537501 - DNA, 15 bp, Homo sapiens
agggatgggatcttg

SEQ ID NO: 537502 - DNA, 15 bp, Homo sapiens
gagggatgggatctt

SEQ ID NO: 537503 - DNA, 15 bp, Homo sapiens
agagggatgggatct

SEQ ID NO: 537504 - DNA, 15 bp, Homo sapiens
aagagggatgggatc

SEQ ID NO: 537505 - DNA, 15 bp, Homo sapiens
taagagggatgggat

SEQ ID NO: 537506 - DNA, 15 bp, Homo sapiens
ttaagagggatggga

SEQ ID NO: 537507 - DNA, 15 bp, Homo sapiens
tttaagagggatggg

SEQ ID NO: 537508 - DNA, 15 bp, Homo sapiens
ttttaagagggatgg

SEQ ID NO: 537509 - DNA, 15 bp, Homo sapiens
tttttaagagggatg

SEQ ID NO: 537510 - DNA, 15 bp, Homo sapiens
ttttttaagagggat

SEQ ID NO: 537511 - DNA, 15 bp, Homo sapiens
tttttttaagaggga

SEQ ID NO: 537512 - DNA, 15 bp, Homo sapiens
ttttttttaagaggg

SEQ ID NO: 537513 - DNA, 15 bp, Homo sapiens
tttttttttaagagg

SEQ ID NO: 537514 - DNA, 15 bp, Homo sapiens
ttttttttttaagag

SEQ ID NO: 537515 - DNA, 15 bp, Homo sapiens
tttttttttttaaga

SEQ ID NO: 537516 - DNA, 15 bp, Homo sapiens
ttttttttttttaag

SEQ ID NO: 537517 - DNA, 15 bp, Homo sapiens
cttttttttttttaa

SEQ ID NO: 537518 - DNA, 15 bp, Homo sapiens
tctttttttttttta

SEQ ID NO: 537519 - DNA, 15 bp, Homo sapiens
ttctttttttttttt

SEQ ID NO: 537520 - DNA, 15 bp, Homo sapiens
cttcttttttttttt

SEQ ID NO: 537521 - DNA, 15 bp, Homo sapiens
tcttctttttttttt

SEQ ID NO: 537522 - DNA, 15 bp, Homo sapiens
ttcttcttttttttt

SEQ ID NO: 537523 - DNA, 15 bp, Homo sapiens
tttcttctttttttt

SEQ ID NO: 537524 - DNA, 15 bp, Homo sapiens
ttttcttcttttttt

SEQ ID NO: 537525 - DNA, 15 bp, Homo sapiens
tttttcttctttttt

SEQ ID NO: 537526 - DNA, 15 bp, Homo sapiens
atttttcttcttttt

SEQ ID NO: 537527 - DNA, 15 bp, Homo sapiens
tatttttcttctttt

SEQ ID NO: 537528 - DNA, 15 bp, Homo sapiens
atatttttcttcttt

SEQ ID NO: 537529 - DNA, 15 bp, Homo sapiens
tatatttttcttctt

SEQ ID NO: 537530 - DNA, 15 bp, Homo sapiens
atatatttttcttct

SEQ ID NO: 537531 - DNA, 15 bp, Homo sapiens
catatatttttcttc

SEQ ID NO: 537532 - DNA, 15 bp, Homo sapiens
acatatatttttctt

SEQ ID NO: 537533 - DNA, 15 bp, Homo sapiens
aacatatatttttct

SEQ ID NO: 537534 - DNA, 15 bp, Homo sapiens
caacatatatttttc

SEQ ID NO: 537535 - DNA, 15 bp, Homo sapiens
acaacatatattttt

SEQ ID NO: 537536 - DNA, 15 bp, Homo sapiens
aacaacatatatttt

SEQ ID NO: 537537 - DNA, 15 bp, Homo sapiens
caacaacatatattt

SEQ ID NO: 537538 - DNA, 15 bp, Homo sapiens
acaacaacatatatt

SEQ ID NO: 537539 - DNA, 15 bp, Homo sapiens
aacaacaacatatat

SEQ ID NO: 537540 - DNA, 15 bp, Homo sapiens
caacaacaacatata

SEQ ID NO: 537541 - DNA, 15 bp, Homo sapiens
acaacaacaacatat

SEQ ID NO: 537542 - DNA, 15 bp, Homo sapiens
aacaacaacaacata

SEQ ID NO: 537543 - DNA, 15 bp, Homo sapiens
taacaacaacaacat

SEQ ID NO: 537544 - DNA, 15 bp, Homo sapiens
ataacaacaacaaca

SEQ ID NO: 537545 - DNA, 15 bp, Homo sapiens
aataacaacaacaac

SEQ ID NO: 537546 - DNA, 15 bp, Homo sapiens
taataacaacaacaa

SEQ ID NO: 537547 - DNA, 15 bp, Homo sapiens
ataataacaacaaca

SEQ ID NO: 537548 - DNA, 15 bp, Homo sapiens
aataataacaacaac

SEQ ID NO: 537549 - DNA, 15 bp, Homo sapiens
caataataacaacaa

SEQ ID NO: 537550 - DNA, 15 bp, Homo sapiens
acaataataacaaca

SEQ ID NO: 537551 - DNA, 15 bp, Homo sapiens
aacaataataacaac

SEQ ID NO: 537552 - DNA, 15 bp, Homo sapiens
taacaataataacaa

SEQ ID NO: 537553 - DNA, 15 bp, Homo sapiens
ataacaataataaca

SEQ ID NO: 537554 - DNA, 15 bp, Homo sapiens
aataacaataataac

SEQ ID NO: 537555 - DNA, 15 bp, Homo sapiens
taataacaataataa

SEQ ID NO: 537556 - DNA, 15 bp, Homo sapiens
ataataacaataata

SEQ ID NO: 537557 - DNA, 15 bp, Homo sapiens
aataataacaataat

SEQ ID NO: 537558 - DNA, 15 bp, Homo sapiens
taataataacaataa

SEQ ID NO: 537559 - DNA, 15 bp, Homo sapiens
ctaataataacaata

SEQ ID NO: 537560 - DNA, 15 bp, Homo sapiens
tctaataataacaat

SEQ ID NO: 537561 - DNA, 15 bp, Homo sapiens
ctctaataataacaa

SEQ ID NO: 537562 - DNA, 15 bp, Homo sapiens
tctctaataataaca

SEQ ID NO: 537563 - DNA, 15 bp, Homo sapiens
gtctctaataataac

SEQ ID NO: 537564 - DNA, 15 bp, Homo sapiens
tgtctctaataataa

SEQ ID NO: 537565 - DNA, 15 bp, Homo sapiens
ctgtctctaataata

SEQ ID NO: 537566 - DNA, 15 bp, Homo sapiens
tctgtctctaataat

SEQ ID NO: 537567 - DNA, 15 bp, Homo sapiens
ctctgtctctaataa

SEQ ID NO: 537568 - DNA, 15 bp, Homo sapiens
actctgtctctaata

SEQ ID NO: 537569 - DNA, 15 bp, Homo sapiens
aactctgtctctaat

SEQ ID NO: 537570 - DNA, 15 bp, Homo sapiens
aaactctgtctctaa

SEQ ID NO: 537571 - DNA, 15 bp, Homo sapiens
gaaactctgtctcta

SEQ ID NO: 537572 - DNA, 15 bp, Homo sapiens
cgaaactctgtctct

SEQ ID NO: 537573 - DNA, 15 bp, Homo sapiens
gcgaaactctgtctc

SEQ ID NO: 537574 - DNA, 15 bp, Homo sapiens
agcgaaactctgtct

SEQ ID NO: 537575 - DNA, 15 bp, Homo sapiens
aagcgaaactctgtc

SEQ ID NO: 537576 - DNA, 15 bp, Homo sapiens
aaagcgaaactctgt

SEQ ID NO: 537577 - DNA, 15 bp, Homo sapiens
aaaagcgaaactctg

SEQ ID NO: 537578 - DNA, 15 bp, Homo sapiens
caaaagcgaaactct

SEQ ID NO: 537579 - DNA, 15 bp, Homo sapiens
acaaaagcgaaactc

SEQ ID NO: 537580 - DNA, 15 bp, Homo sapiens
gacaaaagcgaaact

SEQ ID NO: 537581 - DNA, 15 bp, Homo sapiens
tgacaaaagcgaaac

SEQ ID NO: 537582 - DNA, 15 bp, Homo sapiens
gtgacaaaagcgaaa

SEQ ID NO: 537583 - DNA, 15 bp, Homo sapiens
ggtgacaaaagcgaa

SEQ ID NO: 537584 - DNA, 15 bp, Homo sapiens
gggtgacaaaagcga

SEQ ID NO: 537585 - DNA, 15 bp, Homo sapiens
tgggtgacaaaagcg

SEQ ID NO: 537586 - DNA, 15 bp, Homo sapiens
ctgggtgacaaaagc

SEQ ID NO: 537587 - DNA, 15 bp, Homo sapiens
cctgggtgacaaaag

SEQ ID NO: 537588 - DNA, 15 bp, Homo sapiens
gcctgggtgacaaaa

SEQ ID NO: 537589 - DNA, 15 bp, Homo sapiens
agcctgggtgacaaa

SEQ ID NO: 537590 - DNA, 15 bp, Homo sapiens
cagcctgggtgacaa

SEQ ID NO: 537591 - DNA, 15 bp, Homo sapiens
ccagcctgggtgaca

SEQ ID NO: 537592 - DNA, 15 bp, Homo sapiens
tccagcctgggtgac

SEQ ID NO: 537593 - DNA, 15 bp, Homo sapiens
ctccagcctgggtga

SEQ ID NO: 537594 - DNA, 15 bp, Homo sapiens
actccagcctgggtg

SEQ ID NO: 537595 - DNA, 15 bp, Homo sapiens
cactccagcctgggt

SEQ ID NO: 537596 - DNA, 15 bp, Homo sapiens
ttgcactccagcctg

SEQ ID NO: 537597 - DNA, 15 bp, Homo sapiens
attgcactccagcct

SEQ ID NO: 537598 - DNA, 15 bp, Homo sapiens
cattgcactccagcc

SEQ ID NO: 537599 - DNA, 15 bp, Homo sapiens
ccattgcactccagc

SEQ ID NO: 537600 - DNA, 15 bp, Homo sapiens
accattgcactccag

SEQ ID NO: 537601 - DNA, 15 bp, Homo sapiens
caccattgcactcca

SEQ ID NO: 537602 - DNA, 15 bp, Homo sapiens
acaccattgcactcc

SEQ ID NO: 537603 - DNA, 15 bp, Homo sapiens
cacaccattgcactc

SEQ ID NO: 537604 - DNA, 15 bp, Homo sapiens
tcacaccattgcact

SEQ ID NO: 537605 - DNA, 15 bp, Homo sapiens
atcacaccattgcac

SEQ ID NO: 537606 - DNA, 15 bp, Homo sapiens
gatcacaccattgca

SEQ ID NO: 537607 - DNA, 15 bp, Homo sapiens
agatcacaccattgc

SEQ ID NO: 537608 - DNA, 15 bp, Homo sapiens
gagatcacaccattg

SEQ ID NO: 537609 - DNA, 15 bp, Homo sapiens
tgagatcacaccatt

SEQ ID NO: 537610 - DNA, 15 bp, Homo sapiens
ctgagatcacaccat

SEQ ID NO: 537611 - DNA, 15 bp, Homo sapiens
gctgagatcacacca

SEQ ID NO: 537612 - DNA, 15 bp, Homo sapiens
agctgagatcacacc

SEQ ID NO: 537613 - DNA, 15 bp, Homo sapiens
gagctgagatcacac

SEQ ID NO: 537614 - DNA, 15 bp, Homo sapiens
tgagctgagatcaca

SEQ ID NO: 537615 - DNA, 15 bp, Homo sapiens
gtgagctgagatcac

SEQ ID NO: 537616 - DNA, 15 bp, Homo sapiens
agtgagctgagatca

SEQ ID NO: 537617 - DNA, 15 bp, Homo sapiens
cagtgagctgagatc

SEQ ID NO: 537618 - DNA, 15 bp, Homo sapiens
tggaggttgcagtga

SEQ ID NO: 537619 - DNA, 15 bp, Homo sapiens
gtggaggttgcagtg

SEQ ID NO: 537620 - DNA, 15 bp, Homo sapiens
ggtggaggttgcagt

SEQ ID NO: 537621 - DNA, 15 bp, Homo sapiens
aggtggaggttgcag

SEQ ID NO: 537622 - DNA, 15 bp, Homo sapiens
gaggtggaggttgca

SEQ ID NO: 537623 - DNA, 15 bp, Homo sapiens
ggaggtggaggttgc

SEQ ID NO: 537624 - DNA, 15 bp, Homo sapiens
aggaggtggaggttg

SEQ ID NO: 537625 - DNA, 15 bp, Homo sapiens
caggaggtggaggtt

SEQ ID NO: 537626 - DNA, 15 bp, Homo sapiens
ccaggaggtggaggt

SEQ ID NO: 537627 - DNA, 15 bp, Homo sapiens
cccaggaggtggagg

SEQ ID NO: 537628 - DNA, 15 bp, Homo sapiens
acccaggaggtggag

SEQ ID NO: 537629 - DNA, 15 bp, Homo sapiens
aacccaggaggtgga

SEQ ID NO: 537630 - DNA, 15 bp, Homo sapiens
gaacccaggaggtgg

SEQ ID NO: 537631 - DNA, 15 bp, Homo sapiens
tgaacccaggaggtg

SEQ ID NO: 537632 - DNA, 15 bp, Homo sapiens
ttgaacccaggaggt

SEQ ID NO: 537633 - DNA, 15 bp, Homo sapiens
gttgaacccaggagg

SEQ ID NO: 537634 - DNA, 15 bp, Homo sapiens
agttgaacccaggag

SEQ ID NO: 537635 - DNA, 15 bp, Homo sapiens
cagttgaacccagga

SEQ ID NO: 537636 - DNA, 15 bp, Homo sapiens
tcagttgaacccagg

SEQ ID NO: 537637 - DNA, 15 bp, Homo sapiens
atcagttgaacccag

SEQ ID NO: 537638 - DNA, 15 bp, Homo sapiens
aatcagttgaaccca

SEQ ID NO: 537639 - DNA, 15 bp, Homo sapiens
gaatcagttgaaccc

SEQ ID NO: 537640 - DNA, 15 bp, Homo sapiens
agaatcagttgaacc

SEQ ID NO: 537641 - DNA, 15 bp, Homo sapiens
gagaatcagttgaac

SEQ ID NO: 537642 - DNA, 15 bp, Homo sapiens
ggagaatcagttgaa

SEQ ID NO: 537643 - DNA, 15 bp, Homo sapiens
aggagaatcagttga

SEQ ID NO: 537644 - DNA, 15 bp, Homo sapiens
caggagaatcagttg

SEQ ID NO: 537645 - DNA, 15 bp, Homo sapiens
gcaggagaatcagtt

SEQ ID NO: 537646 - DNA, 15 bp, Homo sapiens
ggcaggagaatcagt

SEQ ID NO: 537647 - DNA, 15 bp, Homo sapiens
aggcaggagaatcag

SEQ ID NO: 537648 - DNA, 15 bp, Homo sapiens
aggaggctgaggcag

SEQ ID NO: 537649 - DNA, 15 bp, Homo sapiens
caggaggctgaggca

SEQ ID NO: 537650 - DNA, 15 bp, Homo sapiens
tccagctactcagga

SEQ ID NO: 537651 - DNA, 15 bp, Homo sapiens
ttccagctactcagg

SEQ ID NO: 537652 - DNA, 15 bp, Homo sapiens
attccagctactcag

SEQ ID NO: 537653 - DNA, 15 bp, Homo sapiens
tattccagctactca

SEQ ID NO: 537654 - DNA, 15 bp, Homo sapiens
ttattccagctactc

SEQ ID NO: 537655 - DNA, 15 bp, Homo sapiens
attattccagctact

SEQ ID NO: 537656 - DNA, 15 bp, Homo sapiens
tattattccagctac

SEQ ID NO: 537657 - DNA, 15 bp, Homo sapiens
ctattattccagcta

SEQ ID NO: 537658 - DNA, 15 bp, Homo sapiens
cctattattccagct

SEQ ID NO: 537659 - DNA, 15 bp, Homo sapiens
gcctattattccagc

SEQ ID NO: 537660 - DNA, 15 bp, Homo sapiens
tgcctattattccag

SEQ ID NO: 537661 - DNA, 15 bp, Homo sapiens
atgcctattattcca

SEQ ID NO: 537662 - DNA, 15 bp, Homo sapiens
catgcctattattcc

SEQ ID NO: 537663 - DNA, 15 bp, Homo sapiens
acatgcctattattc

SEQ ID NO: 537664 - DNA, 15 bp, Homo sapiens
cacatgcctattatt

SEQ ID NO: 537665 - DNA, 15 bp, Homo sapiens
gcacatgcctattat

SEQ ID NO: 537666 - DNA, 15 bp, Homo sapiens
ggcacatgcctatta

SEQ ID NO: 537667 - DNA, 15 bp, Homo sapiens
tggcacatgcctatt

SEQ ID NO: 537668 - DNA, 15 bp, Homo sapiens
gtggcacatgcctat

SEQ ID NO: 537669 - DNA, 15 bp, Homo sapiens
tgtggcacatgccta

SEQ ID NO: 537670 - DNA, 15 bp, Homo sapiens
ttgtggcacatgcct

SEQ ID NO: 537671 - DNA, 15 bp, Homo sapiens
gttgtggcacatgcc

SEQ ID NO: 537672 - DNA, 15 bp, Homo sapiens
tgttgtggcacatgc

SEQ ID NO: 537673 - DNA, 15 bp, Homo sapiens
atgttgtggcacatg

SEQ ID NO: 537674 - DNA, 15 bp, Homo sapiens
gatgttgtggcacat

SEQ ID NO: 537675 - DNA, 15 bp, Homo sapiens
agatgttgtggcaca

SEQ ID NO: 537676 - DNA, 15 bp, Homo sapiens
cagatgttgtggcac

SEQ ID NO: 537677 - DNA, 15 bp, Homo sapiens
ccagatgttgtggca

SEQ ID NO: 537678 - DNA, 15 bp, Homo sapiens
gccagatgttgtggc

SEQ ID NO: 537679 - DNA, 15 bp, Homo sapiens
agccagatgttgtgg

SEQ ID NO: 537680 - DNA, 15 bp, Homo sapiens
tagccagatgttgtg

SEQ ID NO: 537681 - DNA, 15 bp, Homo sapiens
ttagccagatgttgt

SEQ ID NO: 537682 - DNA, 15 bp, Homo sapiens
attagccagatgttg

SEQ ID NO: 537683 - DNA, 15 bp, Homo sapiens
aattagccagatgtt

SEQ ID NO: 537684 - DNA, 15 bp, Homo sapiens
aaattagccagatgt

SEQ ID NO: 537685 - DNA, 15 bp, Homo sapiens
aaaattagccagatg

SEQ ID NO: 537686 - DNA, 15 bp, Homo sapiens
caaaattagccagat

SEQ ID NO: 537687 - DNA, 15 bp, Homo sapiens
acaaaattagccaga

SEQ ID NO: 537688 - DNA, 15 bp, Homo sapiens
tacaaaattagccag

SEQ ID NO: 537689 - DNA, 15 bp, Homo sapiens
atacaaaattagcca

SEQ ID NO: 537690 - DNA, 15 bp, Homo sapiens
aatacaaaattagcc

SEQ ID NO: 537691 - DNA, 15 bp, Homo sapiens
aaatacaaaattagc

SEQ ID NO: 537692 - DNA, 15 bp, Homo sapiens
aaaatacaaaattag

SEQ ID NO: 537693 - DNA, 15 bp, Homo sapiens
aaaaatacaaaatta

SEQ ID NO: 537694 - DNA, 15 bp, Homo sapiens
taaaaatacaaaatt

SEQ ID NO: 537695 - DNA, 15 bp, Homo sapiens
ctaaaaatacaaaat

SEQ ID NO: 537696 - DNA, 15 bp, Homo sapiens
atctctactaaaaat

SEQ ID NO: 537697 - DNA, 15 bp, Homo sapiens
catctctactaaaaa

SEQ ID NO: 537698 - DNA, 15 bp, Homo sapiens
ccatctctactaaaa

SEQ ID NO: 537699 - DNA, 15 bp, Homo sapiens
cccatctctactaaa

SEQ ID NO: 537700 - DNA, 15 bp, Homo sapiens
ccccatctctactaa

SEQ ID NO: 537701 - DNA, 15 bp, Homo sapiens
accccatctctacta

SEQ ID NO: 537702 - DNA, 15 bp, Homo sapiens
cgaaaccccatctct

SEQ ID NO: 537703 - DNA, 15 bp, Homo sapiens
gcgaaaccccatctc

SEQ ID NO: 537704 - DNA, 15 bp, Homo sapiens
ggcgaaaccccatct

SEQ ID NO: 537705 - DNA, 15 bp, Homo sapiens
tggcgaaaccccatc

SEQ ID NO: 537706 - DNA, 15 bp, Homo sapiens
atggcgaaaccccat

SEQ ID NO: 537707 - DNA, 15 bp, Homo sapiens
catggcgaaacccca

SEQ ID NO: 537708 - DNA, 15 bp, Homo sapiens
acatggcgaaacccc

SEQ ID NO: 537709 - DNA, 15 bp, Homo sapiens
aacatggcgaaaccc

SEQ ID NO: 537710 - DNA, 15 bp, Homo sapiens
caacatggcgaaacc

SEQ ID NO: 537711 - DNA, 15 bp, Homo sapiens
ccaacatggcgaaac

SEQ ID NO: 537712 - DNA, 15 bp, Homo sapiens
gccaacatggcgaaa

SEQ ID NO: 537713 - DNA, 15 bp, Homo sapiens
ggccaacatggcgaa

SEQ ID NO: 537714 - DNA, 15 bp, Homo sapiens
tggccaacatggcga

SEQ ID NO: 537715 - DNA, 15 bp, Homo sapiens
ctggccaacatggcg

SEQ ID NO: 537716 - DNA, 15 bp, Homo sapiens
cctggccaacatggc

SEQ ID NO: 537717 - DNA, 15 bp, Homo sapiens
cgagtttgagaccag

SEQ ID NO: 537718 - DNA, 15 bp, Homo sapiens
tcgagtttgagacca

SEQ ID NO: 537719 - DNA, 15 bp, Homo sapiens
gtcgagtttgagacc

SEQ ID NO: 537720 - DNA, 15 bp, Homo sapiens
ggtcgagtttgagac

SEQ ID NO: 537721 - DNA, 15 bp, Homo sapiens
aggtcgagtttgaga

SEQ ID NO: 537722 - DNA, 15 bp, Homo sapiens
gaggtcgagtttgag

SEQ ID NO: 537723 - DNA, 15 bp, Homo sapiens
tgaggtcgagtttga

SEQ ID NO: 537724 - DNA, 15 bp, Homo sapiens
ctgaggtcgagtttg

SEQ ID NO: 537725 - DNA, 15 bp, Homo sapiens
cctgaggtcgagttt

SEQ ID NO: 537726 - DNA, 15 bp, Homo sapiens
acctgaggtcgagtt

SEQ ID NO: 537727 - DNA, 15 bp, Homo sapiens
cacctgaggtcgagt

SEQ ID NO: 537728 - DNA, 15 bp, Homo sapiens
tcacctgaggtcgag

SEQ ID NO: 537729 - DNA, 15 bp, Homo sapiens
atcacctgaggtcga

SEQ ID NO: 537730 - DNA, 15 bp, Homo sapiens
aatcacctgaggtcg

SEQ ID NO: 537731 - DNA, 15 bp, Homo sapiens
aggagaatcacctga

SEQ ID NO: 537732 - DNA, 15 bp, Homo sapiens
caggagaatcacctg

SEQ ID NO: 537733 - DNA, 15 bp, Homo sapiens
acaggagaatcacct

SEQ ID NO: 537734 - DNA, 15 bp, Homo sapiens
gacaggagaatcacc

SEQ ID NO: 537735 - DNA, 15 bp, Homo sapiens
agacaggagaatcac

SEQ ID NO: 537736 - DNA, 15 bp, Homo sapiens
gagacaggagaatca

SEQ ID NO: 537737 - DNA, 15 bp, Homo sapiens
tgagacaggagaatc

SEQ ID NO: 537738 - DNA, 15 bp, Homo sapiens
ctgagacaggagaat

SEQ ID NO: 537739 - DNA, 15 bp, Homo sapiens
gctgagacaggagaa

SEQ ID NO: 537740 - DNA, 15 bp, Homo sapiens
ggctgagacaggaga

SEQ ID NO: 537741 - DNA, 15 bp, Homo sapiens
cctttgggaggctga

SEQ ID NO: 537742 - DNA, 15 bp, Homo sapiens
ccctttgggaggctg

SEQ ID NO: 537743 - DNA, 15 bp, Homo sapiens
gccctttgggaggct

SEQ ID NO: 537744 - DNA, 15 bp, Homo sapiens
agccctttgggaggc

SEQ ID NO: 537745 - DNA, 15 bp, Homo sapiens
cagccctttgggagg

SEQ ID NO: 537746 - DNA, 15 bp, Homo sapiens
ccagccctttgggag

SEQ ID NO: 537747 - DNA, 15 bp, Homo sapiens
cccagccctttggga

SEQ ID NO: 537748 - DNA, 15 bp, Homo sapiens
tcccagccctttggg

SEQ ID NO: 537749 - DNA, 15 bp, Homo sapiens
atcccagccctttgg

SEQ ID NO: 537750 - DNA, 15 bp, Homo sapiens
aatcccagccctttg

SEQ ID NO: 537751 - DNA, 15 bp, Homo sapiens
taatcccagcccttt

SEQ ID NO: 537752 - DNA, 15 bp, Homo sapiens
gtaatcccagccctt

SEQ ID NO: 537753 - DNA, 15 bp, Homo sapiens
tgtaatcccagccct

SEQ ID NO: 537754 - DNA, 15 bp, Homo sapiens
ctgtaatcccagccc

SEQ ID NO: 537755 - DNA, 15 bp, Homo sapiens
cctgtaatcccagcc

SEQ ID NO: 537756 - DNA, 15 bp, Homo sapiens
tatgcctgtaatccc

SEQ ID NO: 537757 - DNA, 15 bp, Homo sapiens
ttatgcctgtaatcc

SEQ ID NO: 537758 - DNA, 15 bp, Homo sapiens
cttatgcctgtaatc

SEQ ID NO: 537759 - DNA, 15 bp, Homo sapiens
gcttatgcctgtaat

SEQ ID NO: 537760 - DNA, 15 bp, Homo sapiens
ggcttatgcctgtaa

SEQ ID NO: 537761 - DNA, 15 bp, Homo sapiens
tggcttatgcctgta

SEQ ID NO: 537762 - DNA, 15 bp, Homo sapiens
gtggcttatgcctgt

SEQ ID NO: 537763 - DNA, 15 bp, Homo sapiens
ggtggcttatgcctg

SEQ ID NO: 537764 - DNA, 15 bp, Homo sapiens
tggtggcttatgcct

SEQ ID NO: 537765 - DNA, 15 bp, Homo sapiens
atggtggcttatgcc

SEQ ID NO: 537766 - DNA, 15 bp, Homo sapiens
tatggtggcttatgc

SEQ ID NO: 537767 - DNA, 15 bp, Homo sapiens
ctatggtggcttatg

SEQ ID NO: 537768 - DNA, 15 bp, Homo sapiens
gctatggtggcttat

SEQ ID NO: 537769 - DNA, 15 bp, Homo sapiens
agctatggtggctta

SEQ ID NO: 537770 - DNA, 15 bp, Homo sapiens
cagctatggtggctt

SEQ ID NO: 537771 - DNA, 15 bp, Homo sapiens
ccagctatggtggct

SEQ ID NO: 537772 - DNA, 15 bp, Homo sapiens
gccagctatggtggc

SEQ ID NO: 537773 - DNA, 15 bp, Homo sapiens
ggccagctatggtgg

SEQ ID NO: 537774 - DNA, 15 bp, Homo sapiens
aggccagctatggtg

SEQ ID NO: 537775 - DNA, 15 bp, Homo sapiens
caggccagctatggt

SEQ ID NO: 537776 - DNA, 15 bp, Homo sapiens
acaggccagctatgg

SEQ ID NO: 537777 - DNA, 15 bp, Homo sapiens
aacaggccagctatg

SEQ ID NO: 537778 - DNA, 15 bp, Homo sapiens
aaacaggccagctat

SEQ ID NO: 537779 - DNA, 15 bp, Homo sapiens
aaaacaggccagcta

SEQ ID NO: 537780 - DNA, 15 bp, Homo sapiens
aaaaacaggccagct

SEQ ID NO: 537781 - DNA, 15 bp, Homo sapiens
aaaaaacaggccagc

SEQ ID NO: 537782 - DNA, 15 bp, Homo sapiens
aaaaaaacaggccag

SEQ ID NO: 537783 - DNA, 15 bp, Homo sapiens
taaaaaaacaggcca

SEQ ID NO: 537784 - DNA, 15 bp, Homo sapiens
ttaaaaaaacaggcc

SEQ ID NO: 537785 - DNA, 15 bp, Homo sapiens
tttaaaaaaacaggc

SEQ ID NO: 537786 - DNA, 15 bp, Homo sapiens
ttttaaaaaaacagg

SEQ ID NO: 537787 - DNA, 15 bp, Homo sapiens
tttttaaaaaaacag

SEQ ID NO: 537788 - DNA, 15 bp, Homo sapiens
ttttttaaaaaaaca

SEQ ID NO: 537789 - DNA, 15 bp, Homo sapiens
tttttttaaaaaaac

SEQ ID NO: 537790 - DNA, 15 bp, Homo sapiens
ctttttttaaaaaaa

SEQ ID NO: 537791 - DNA, 15 bp, Homo sapiens
tctttttttaaaaaa

SEQ ID NO: 537792 - DNA, 15 bp, Homo sapiens
ttctttttttaaaaa

SEQ ID NO: 537793 - DNA, 15 bp, Homo sapiens
attctttttttaaaa

SEQ ID NO: 537794 - DNA, 15 bp, Homo sapiens
aattctttttttaaa

SEQ ID NO: 537795 - DNA, 15 bp, Homo sapiens
gaattctttttttaa

SEQ ID NO: 537796 - DNA, 15 bp, Homo sapiens
ggaattcttttttta

SEQ ID NO: 537797 - DNA, 15 bp, Homo sapiens
tggaattcttttttt

SEQ ID NO: 537798 - DNA, 15 bp, Homo sapiens
ctggaattctttttt

SEQ ID NO: 537799 - DNA, 15 bp, Homo sapiens
actggaattcttttt

SEQ ID NO: 537800 - DNA, 15 bp, Homo sapiens
tactggaattctttt

SEQ ID NO: 537801 - DNA, 15 bp, Homo sapiens
ttactggaattcttt

SEQ ID NO: 537802 - DNA, 15 bp, Homo sapiens
tttactggaattctt

SEQ ID NO: 537803 - DNA, 15 bp, Homo sapiens
ctttactggaattct

SEQ ID NO: 537804 - DNA, 15 bp, Homo sapiens
tctttactggaattc

SEQ ID NO: 537805 - DNA, 15 bp, Homo sapiens
ctctttactggaatt

SEQ ID NO: 537806 - DNA, 15 bp, Homo sapiens
gctctttactggaat

SEQ ID NO: 537807 - DNA, 15 bp, Homo sapiens
agctctttactggaa

SEQ ID NO: 537808 - DNA, 15 bp, Homo sapiens
cagctctttactgga

SEQ ID NO: 537809 - DNA, 15 bp, Homo sapiens
tcagctctttactgg

SEQ ID NO: 537810 - DNA, 15 bp, Homo sapiens
atcagctctttactg

SEQ ID NO: 537811 - DNA, 15 bp, Homo sapiens
gatcagctctttact

SEQ ID NO: 537812 - DNA, 15 bp, Homo sapiens
tgatcagctctttac

SEQ ID NO: 537813 - DNA, 15 bp, Homo sapiens
atgatcagctcttta

SEQ ID NO: 537814 - DNA, 15 bp, Homo sapiens
catgatcagctcttt

SEQ ID NO: 537815 - DNA, 15 bp, Homo sapiens
ccatgatcagctctt

SEQ ID NO: 537816 - DNA, 15 bp, Homo sapiens
accatgatcagctct

SEQ ID NO: 537817 - DNA, 15 bp, Homo sapiens
aaccatgatcagctc

SEQ ID NO: 537818 - DNA, 15 bp, Homo sapiens
gaaccatgatcagct

SEQ ID NO: 537819 - DNA, 15 bp, Homo sapiens
agaaccatgatcagc

SEQ ID NO: 537820 - DNA, 15 bp, Homo sapiens
gagaaccatgatcag

SEQ ID NO: 537821 - DNA, 15 bp, Homo sapiens
tgagaaccatgatca

SEQ ID NO: 537822 - DNA, 15 bp, Homo sapiens
gtgagaaccatgatc

SEQ ID NO: 537823 - DNA, 15 bp, Homo sapiens
agtgagaaccatgat

SEQ ID NO: 537824 - DNA, 15 bp, Homo sapiens
gagtgagaaccatga

SEQ ID NO: 537825 - DNA, 15 bp, Homo sapiens
ggagtgagaaccatg

SEQ ID NO: 537826 - DNA, 15 bp, Homo sapiens
aggagtgagaaccat

SEQ ID NO: 537827 - DNA, 15 bp, Homo sapiens
aaggagtgagaacca

SEQ ID NO: 537828 - DNA, 15 bp, Homo sapiens
caaggagtgagaacc

SEQ ID NO: 537829 - DNA, 15 bp, Homo sapiens
tcaaggagtgagaac

SEQ ID NO: 537830 - DNA, 15 bp, Homo sapiens
ttcaaggagtgagaa

SEQ ID NO: 537831 - DNA, 15 bp, Homo sapiens
attcaaggagtgaga

SEQ ID NO: 537832 - DNA, 15 bp, Homo sapiens
tattcaaggagtgag

SEQ ID NO: 537833 - DNA, 15 bp, Homo sapiens
gtattcaaggagtga

SEQ ID NO: 537834 - DNA, 15 bp, Homo sapiens
ggtattcaaggagtg

SEQ ID NO: 537835 - DNA, 15 bp, Homo sapiens
tggtattcaaggagt

SEQ ID NO: 537836 - DNA, 15 bp, Homo sapiens
ctggtattcaaggag

SEQ ID NO: 537837 - DNA, 15 bp, Homo sapiens
cctggtattcaagga

SEQ ID NO: 537838 - DNA, 15 bp, Homo sapiens
tcctggtattcaagg

SEQ ID NO: 537839 - DNA, 15 bp, Homo sapiens
ttcctggtattcaag

SEQ ID NO: 537840 - DNA, 15 bp, Homo sapiens
gttcctggtattcaa

SEQ ID NO: 537841 - DNA, 15 bp, Homo sapiens
tgttcctggtattca

SEQ ID NO: 537842 - DNA, 15 bp, Homo sapiens
gtgttcctggtattc

SEQ ID NO: 537843 - DNA, 15 bp, Homo sapiens
ggtgttcctggtatt

SEQ ID NO: 537844 - DNA, 15 bp, Homo sapiens
tggtgttcctggtat

SEQ ID NO: 537845 - DNA, 15 bp, Homo sapiens
atggtgttcctggta

SEQ ID NO: 537846 - DNA, 15 bp, Homo sapiens
gatggtgttcctggt

SEQ ID NO: 537847 - DNA, 15 bp, Homo sapiens
agatggtgttcctgg

SEQ ID NO: 537848 - DNA, 15 bp, Homo sapiens
gagatggtgttcctg

SEQ ID NO: 537849 - DNA, 15 bp, Homo sapiens
cgagatggtgttcct

SEQ ID NO: 537850 - DNA, 15 bp, Homo sapiens
acgagatggtgttcc

SEQ ID NO: 537851 - DNA, 15 bp, Homo sapiens
tacgagatggtgttc

SEQ ID NO: 537852 - DNA, 15 bp, Homo sapiens
atacgagatggtgtt

SEQ ID NO: 537853 - DNA, 15 bp, Homo sapiens
gatacgagatggtgt

SEQ ID NO: 537854 - DNA, 15 bp, Homo sapiens
tgatacgagatggtg

SEQ ID NO: 537855 - DNA, 15 bp, Homo sapiens
gtgatacgagatggt

SEQ ID NO: 537856 - DNA, 15 bp, Homo sapiens
tgtgatacgagatgg

SEQ ID NO: 537857 - DNA, 15 bp, Homo sapiens
atgtgatacgagatg

SEQ ID NO: 537858 - DNA, 15 bp, Homo sapiens
tatgtgatacgagat

SEQ ID NO: 537859 - DNA, 15 bp, Homo sapiens
ttatgtgatacgaga

SEQ ID NO: 537860 - DNA, 15 bp, Homo sapiens
attatgtgatacgag

SEQ ID NO: 537861 - DNA, 15 bp, Homo sapiens
cattatgtgatacga

SEQ ID NO: 537862 - DNA, 15 bp, Homo sapiens
tcattatgtgatacg

SEQ ID NO: 537863 - DNA, 15 bp, Homo sapiens
ctcattatgtgatac

SEQ ID NO: 537864 - DNA, 15 bp, Homo sapiens
tctcattatgtgata

SEQ ID NO: 537865 - DNA, 15 bp, Homo sapiens
gtctcattatgtgat

SEQ ID NO: 537866 - DNA, 15 bp, Homo sapiens
tgtctcattatgtga

SEQ ID NO: 537867 - DNA, 15 bp, Homo sapiens
ctgtctcattatgtg

SEQ ID NO: 537868 - DNA, 15 bp, Homo sapiens
cctgtctcattatgt

SEQ ID NO: 537869 - DNA, 15 bp, Homo sapiens
ccctgtctcattatg

SEQ ID NO: 537870 - DNA, 15 bp, Homo sapiens
tccctgtctcattat

SEQ ID NO: 537871 - DNA, 15 bp, Homo sapiens
ctccctgtctcatta

SEQ ID NO: 537872 - DNA, 15 bp, Homo sapiens
tctccctgtctcatt

SEQ ID NO: 537873 - DNA, 15 bp, Homo sapiens
gtctccctgtctcat

SEQ ID NO: 537874 - DNA, 15 bp, Homo sapiens
tgtctccctgtctca

SEQ ID NO: 537875 - DNA, 15 bp, Homo sapiens
atgtctccctgtctc

SEQ ID NO: 537876 - DNA, 15 bp, Homo sapiens
aatgtctccctgtct

SEQ ID NO: 537877 - DNA, 15 bp, Homo sapiens
gaatgtctccctgtc

SEQ ID NO: 537878 - DNA, 15 bp, Homo sapiens
agaatgtctccctgt

SEQ ID NO: 537879 - DNA, 15 bp, Homo sapiens
cagaatgtctccctg

SEQ ID NO: 537880 - DNA, 15 bp, Homo sapiens
ccagaatgtctccct

SEQ ID NO: 537881 - DNA, 15 bp, Homo sapiens
accagaatgtctccc

SEQ ID NO: 537882 - DNA, 15 bp, Homo sapiens
gaccagaatgtctcc

SEQ ID NO: 537883 - DNA, 15 bp, Homo sapiens
ggaccagaatgtctc

SEQ ID NO: 537884 - DNA, 15 bp, Homo sapiens
aggaccagaatgtct

SEQ ID NO: 537885 - DNA, 15 bp, Homo sapiens
gaggaccagaatgtc

SEQ ID NO: 537886 - DNA, 15 bp, Homo sapiens
tgaggaccagaatgt

SEQ ID NO: 537887 - DNA, 15 bp, Homo sapiens
atgaggaccagaatg

SEQ ID NO: 537888 - DNA, 15 bp, Homo sapiens
gatgaggaccagaat

SEQ ID NO: 537889 - DNA, 15 bp, Homo sapiens
agatgaggaccagaa

SEQ ID NO: 537890 - DNA, 15 bp, Homo sapiens
gagatgaggaccaga

SEQ ID NO: 537891 - DNA, 15 bp, Homo sapiens
tgagatgaggaccag

SEQ ID NO: 537892 - DNA, 15 bp, Homo sapiens
gtgagatgaggacca

SEQ ID NO: 537893 - DNA, 15 bp, Homo sapiens
tgtgagatgaggacc

SEQ ID NO: 537894 - DNA, 15 bp, Homo sapiens
ctgtgagatgaggac

SEQ ID NO: 537895 - DNA, 15 bp, Homo sapiens
tctgtgagatgagga

SEQ ID NO: 537896 - DNA, 15 bp, Homo sapiens
atctgtgagatgagg

SEQ ID NO: 537897 - DNA, 15 bp, Homo sapiens
catctgtgagatgag

SEQ ID NO: 537898 - DNA, 15 bp, Homo sapiens
tcatctgtgagatga

SEQ ID NO: 537899 - DNA, 15 bp, Homo sapiens
ttcatctgtgagatg

SEQ ID NO: 537900 - DNA, 15 bp, Homo sapiens
tttcatctgtgagat

SEQ ID NO: 537901 - DNA, 15 bp, Homo sapiens
ttttcatctgtgaga

SEQ ID NO: 537902 - DNA, 15 bp, Homo sapiens
tttttcatctgtgag

SEQ ID NO: 537903 - DNA, 15 bp, Homo sapiens
atttttcatctgtga

SEQ ID NO: 537904 - DNA, 15 bp, Homo sapiens
catttttcatctgtg

SEQ ID NO: 537905 - DNA, 15 bp, Homo sapiens
acatttttcatctgt

SEQ ID NO: 537906 - DNA, 15 bp, Homo sapiens
gacatttttcatctg

SEQ ID NO: 537907 - DNA, 15 bp, Homo sapiens
tgacatttttcatct

SEQ ID NO: 537908 - DNA, 15 bp, Homo sapiens
ttgacatttttcatc

SEQ ID NO: 537909 - DNA, 15 bp, Homo sapiens
cttgacatttttcat

SEQ ID NO: 537910 - DNA, 15 bp, Homo sapiens
gcttgacatttttca

SEQ ID NO: 537911 - DNA, 15 bp, Homo sapiens
agcttgacatttttc

SEQ ID NO: 537912 - DNA, 15 bp, Homo sapiens
aagcttgacattttt

SEQ ID NO: 537913 - DNA, 15 bp, Homo sapiens
gaagcttgacatttt

SEQ ID NO: 537914 - DNA, 15 bp, Homo sapiens
cgaagcttgacattt

SEQ ID NO: 537915 - DNA, 15 bp, Homo sapiens
tcgaagcttgacatt

SEQ ID NO: 537916 - DNA, 15 bp, Homo sapiens
ttcgaagcttgacat

SEQ ID NO: 537917 - DNA, 15 bp, Homo sapiens
cttcgaagcttgaca

SEQ ID NO: 537918 - DNA, 15 bp, Homo sapiens
ccttcgaagcttgac

SEQ ID NO: 537919 - DNA, 15 bp, Homo sapiens
tccttcgaagcttga

SEQ ID NO: 537920 - DNA, 15 bp, Homo sapiens
atccttcgaagcttg

SEQ ID NO: 537921 - DNA, 15 bp, Homo sapiens
gatccttcgaagctt

SEQ ID NO: 537922 - DNA, 15 bp, Homo sapiens
tgatccttcgaagct

SEQ ID NO: 537923 - DNA, 15 bp, Homo sapiens
ttgatccttcgaagc

SEQ ID NO: 537924 - DNA, 15 bp, Homo sapiens
tttgatccttcgaag

SEQ ID NO: 537925 - DNA, 15 bp, Homo sapiens
ctttgatccttcgaa

SEQ ID NO: 537926 - DNA, 15 bp, Homo sapiens
actttgatccttcga

SEQ ID NO: 537927 - DNA, 15 bp, Homo sapiens
cactttgatccttcg

SEQ ID NO: 537928 - DNA, 15 bp, Homo sapiens
gcactttgatccttc

SEQ ID NO: 537929 - DNA, 15 bp, Homo sapiens
ggcactttgatcctt

SEQ ID NO: 537930 - DNA, 15 bp, Homo sapiens
gggcactttgatcct

SEQ ID NO: 537931 - DNA, 15 bp, Homo sapiens
tgggcactttgatcc

SEQ ID NO: 537932 - DNA, 15 bp, Homo sapiens
gtgggcactttgatc

SEQ ID NO: 537933 - DNA, 15 bp, Homo sapiens
ggtgggcactttgat

SEQ ID NO: 537934 - DNA, 15 bp, Homo sapiens
aggtgggcactttga

SEQ ID NO: 537935 - DNA, 15 bp, Homo sapiens
taggtgggcactttg

SEQ ID NO: 537936 - DNA, 15 bp, Homo sapiens
ctaggtgggcacttt

SEQ ID NO: 537937 - DNA, 15 bp, Homo sapiens
actaggtgggcactt

SEQ ID NO: 537938 - DNA, 15 bp, Homo sapiens
gactaggtgggcact

SEQ ID NO: 537939 - DNA, 15 bp, Homo sapiens
tgactaggtgggcac

SEQ ID NO: 537940 - DNA, 15 bp, Homo sapiens
gtgactaggtgggca

SEQ ID NO: 537941 - DNA, 15 bp, Homo sapiens
tgtgactaggtgggc

SEQ ID NO: 537942 - DNA, 15 bp, Homo sapiens
gtgtgactaggtggg

SEQ ID NO: 537943 - DNA, 15 bp, Homo sapiens
cgtgtgactaggtgg

SEQ ID NO: 537944 - DNA, 15 bp, Homo sapiens
ccgtgtgactaggtg

SEQ ID NO: 537945 - DNA, 15 bp, Homo sapiens
cccgtgtgactaggt

SEQ ID NO: 537946 - DNA, 15 bp, Homo sapiens
acccgtgtgactagg

SEQ ID NO: 537947 - DNA, 15 bp, Homo sapiens
tacccgtgtgactag

SEQ ID NO: 537948 - DNA, 15 bp, Homo sapiens
ctacccgtgtgacta

SEQ ID NO: 537949 - DNA, 15 bp, Homo sapiens
actacccgtgtgact

SEQ ID NO: 537950 - DNA, 15 bp, Homo sapiens
gactacccgtgtgac

SEQ ID NO: 537951 - DNA, 15 bp, Homo sapiens
tgactacccgtgtga

SEQ ID NO: 537952 - DNA, 15 bp, Homo sapiens
ctgactacccgtgtg

SEQ ID NO: 537953 - DNA, 15 bp, Homo sapiens
gctgactacccgtgt

SEQ ID NO: 537954 - DNA, 15 bp, Homo sapiens
ggctgactacccgtg

SEQ ID NO: 537955 - DNA, 15 bp, Homo sapiens
tggctgactacccgt

SEQ ID NO: 537956 - DNA, 15 bp, Homo sapiens
gtggctgactacccg

SEQ ID NO: 537957 - DNA, 15 bp, Homo sapiens
tgtggctgactaccc

SEQ ID NO: 537958 - DNA, 15 bp, Homo sapiens
ctgtggctgactacc

SEQ ID NO: 537959 - DNA, 15 bp, Homo sapiens
cctgtggctgactac

SEQ ID NO: 537960 - DNA, 15 bp, Homo sapiens
acctgtggctgacta

SEQ ID NO: 537961 - DNA, 15 bp, Homo sapiens
gacctgtggctgact

SEQ ID NO: 537962 - DNA, 15 bp, Homo sapiens
tgacctgtggctgac

SEQ ID NO: 537963 - DNA, 15 bp, Homo sapiens
ctgacctgtggctga

SEQ ID NO: 537964 - DNA, 15 bp, Homo sapiens
gctgacctgtggctg

SEQ ID NO: 537965 - DNA, 15 bp, Homo sapiens
ggctgacctgtggct

SEQ ID NO: 537966 - DNA, 15 bp, Homo sapiens
aggctgacctgtggc

SEQ ID NO: 537967 - DNA, 15 bp, Homo sapiens
caggctgacctgtgg

SEQ ID NO: 537968 - DNA, 15 bp, Homo sapiens
gcaggctgacctgtg

SEQ ID NO: 537969 - DNA, 15 bp, Homo sapiens
ggcaggctgacctgt

SEQ ID NO: 537970 - DNA, 15 bp, Homo sapiens
aggcaggctgacctg

SEQ ID NO: 537971 - DNA, 15 bp, Homo sapiens
aaggcaggctgacct

SEQ ID NO: 537972 - DNA, 15 bp, Homo sapiens
taaggcaggctgacc

SEQ ID NO: 537973 - DNA, 15 bp, Homo sapiens
ataaggcaggctgac

SEQ ID NO: 537974 - DNA, 15 bp, Homo sapiens
aataaggcaggctga

SEQ ID NO: 537975 - DNA, 15 bp, Homo sapiens
aaataaggcaggctg

SEQ ID NO: 537976 - DNA, 15 bp, Homo sapiens
taaataaggcaggct

SEQ ID NO: 537977 - DNA, 15 bp, Homo sapiens
ataaataaggcaggc

SEQ ID NO: 537978 - DNA, 15 bp, Homo sapiens
aataaataaggcagg

SEQ ID NO: 537979 - DNA, 15 bp, Homo sapiens
gaataaataaggcag

SEQ ID NO: 537980 - DNA, 15 bp, Homo sapiens
agaataaataaggca

SEQ ID NO: 537981 - DNA, 15 bp, Homo sapiens
aagaataaataaggc

SEQ ID NO: 537982 - DNA, 15 bp, Homo sapiens
gaagaataaataagg

SEQ ID NO: 537983 - DNA, 15 bp, Homo sapiens
tgaagaataaataag

SEQ ID NO: 537984 - DNA, 15 bp, Homo sapiens
atgaagaataaataa

SEQ ID NO: 537985 - DNA, 15 bp, Homo sapiens
catgaagaataaata

SEQ ID NO: 537986 - DNA, 15 bp, Homo sapiens
tcatgaagaataaat

SEQ ID NO: 537987 - DNA, 15 bp, Homo sapiens
ctcatgaagaataaa

SEQ ID NO: 537988 - DNA, 15 bp, Homo sapiens
actcatgaagaataa

SEQ ID NO: 537989 - DNA, 15 bp, Homo sapiens
tactcatgaagaata

SEQ ID NO: 537990 - DNA, 15 bp, Homo sapiens
atactcatgaagaat

SEQ ID NO: 537991 - DNA, 15 bp, Homo sapiens
aatactcatgaagaa

SEQ ID NO: 537992 - DNA, 15 bp, Homo sapiens
aaatactcatgaaga

SEQ ID NO: 537993 - DNA, 15 bp, Homo sapiens
taaatactcatgaag

SEQ ID NO: 537994 - DNA, 15 bp, Homo sapiens
ataaatactcatgaa

SEQ ID NO: 537995 - DNA, 15 bp, Homo sapiens
tataaatactcatga

SEQ ID NO: 537996 - DNA, 15 bp, Homo sapiens
ctataaatactcatg

SEQ ID NO: 537997 - DNA, 15 bp, Homo sapiens
actataaatactcat

SEQ ID NO: 537998 - DNA, 15 bp, Homo sapiens
cactataaatactca

SEQ ID NO: 537999 - DNA, 15 bp, Homo sapiens
tcactataaatactc

SEQ ID NO: 538000 - DNA, 15 bp, Homo sapiens
gtcactataaatact

SEQ ID NO: 538001 - DNA, 15 bp, Homo sapiens
agtcactataaatac

SEQ ID NO: 538002 - DNA, 15 bp, Homo sapiens
tagtcactataaata

SEQ ID NO: 538003 - DNA, 15 bp, Homo sapiens
ttagtcactataaat

SEQ ID NO: 538004 - DNA, 15 bp, Homo sapiens
gttagtcactataaa

SEQ ID NO: 538005 - DNA, 15 bp, Homo sapiens
tgttagtcactataa

SEQ ID NO: 538006 - DNA, 15 bp, Homo sapiens
atgttagtcactata

SEQ ID NO: 538007 - DNA, 15 bp, Homo sapiens
aatgttagtcactat

SEQ ID NO: 538008 - DNA, 15 bp, Homo sapiens
aaatgttagtcacta

SEQ ID NO: 538009 - DNA, 15 bp, Homo sapiens
taaatgttagtcact

SEQ ID NO: 538010 - DNA, 15 bp, Homo sapiens
gtaaatgttagtcac

SEQ ID NO: 538011 - DNA, 15 bp, Homo sapiens
agtaaatgttagtca

SEQ ID NO: 538012 - DNA, 15 bp, Homo sapiens
cagtaaatgttagtc

SEQ ID NO: 538013 - DNA, 15 bp, Homo sapiens
ccagtaaatgttagt

SEQ ID NO: 538014 - DNA, 15 bp, Homo sapiens
cccagtaaatgttag

SEQ ID NO: 538015 - DNA, 15 bp, Homo sapiens
gcccagtaaatgtta

SEQ ID NO: 538016 - DNA, 15 bp, Homo sapiens
cgcccagtaaatgtt

SEQ ID NO: 538017 - DNA, 15 bp, Homo sapiens
gcgcccagtaaatgt

SEQ ID NO: 538018 - DNA, 15 bp, Homo sapiens
ggcgcccagtaaatg

SEQ ID NO: 538019 - DNA, 15 bp, Homo sapiens
aggcgcccagtaaat

SEQ ID NO: 538020 - DNA, 15 bp, Homo sapiens
taggcgcccagtaaa

SEQ ID NO: 538021 - DNA, 15 bp, Homo sapiens
gtaggcgcccagtaa

SEQ ID NO: 538022 - DNA, 15 bp, Homo sapiens
agtaggcgcccagta

SEQ ID NO: 538023 - DNA, 15 bp, Homo sapiens
cagtaggcgcccagt

SEQ ID NO: 538024 - DNA, 15 bp, Homo sapiens
acagtaggcgcccag

SEQ ID NO: 538025 - DNA, 15 bp, Homo sapiens
cacagtaggcgccca

SEQ ID NO: 538026 - DNA, 15 bp, Homo sapiens
ccacagtaggcgccc

SEQ ID NO: 538027 - DNA, 15 bp, Homo sapiens
cccacagtaggcgcc

SEQ ID NO: 538028 - DNA, 15 bp, Homo sapiens
gcccacagtaggcgc

SEQ ID NO: 538029 - DNA, 15 bp, Homo sapiens
ggcccacagtaggcg

SEQ ID NO: 538030 - DNA, 15 bp, Homo sapiens
tggcccacagtaggc

SEQ ID NO: 538031 - DNA, 15 bp, Homo sapiens
atggcccacagtagg

SEQ ID NO: 538032 - DNA, 15 bp, Homo sapiens
aatggcccacagtag

SEQ ID NO: 538033 - DNA, 15 bp, Homo sapiens
aaatggcccacagta

SEQ ID NO: 538034 - DNA, 15 bp, Homo sapiens
gaaatggcccacagt

SEQ ID NO: 538035 - DNA, 15 bp, Homo sapiens
agaaatggcccacag

SEQ ID NO: 538036 - DNA, 15 bp, Homo sapiens
cagaaatggcccaca

SEQ ID NO: 538037 - DNA, 15 bp, Homo sapiens
acagaaatggcccac

SEQ ID NO: 538038 - DNA, 15 bp, Homo sapiens
cacagaaatggccca

SEQ ID NO: 538039 - DNA, 15 bp, Homo sapiens
gcacagaaatggccc

SEQ ID NO: 538040 - DNA, 15 bp, Homo sapiens
tgcacagaaatggcc

SEQ ID NO: 538041 - DNA, 15 bp, Homo sapiens
atgcacagaaatggc

SEQ ID NO: 538042 - DNA, 15 bp, Homo sapiens
catgcacagaaatgg

SEQ ID NO: 538043 - DNA, 15 bp, Homo sapiens
acatgcacagaaatg

SEQ ID NO: 538044 - DNA, 15 bp, Homo sapiens
cacatgcacagaaat

SEQ ID NO: 538045 - DNA, 15 bp, Homo sapiens
tcacatgcacagaaa

SEQ ID NO: 538046 - DNA, 15 bp, Homo sapiens
gtcacatgcacagaa

SEQ ID NO: 538047 - DNA, 15 bp, Homo sapiens
tgtcacatgcacaga

SEQ ID NO: 538048 - DNA, 15 bp, Homo sapiens
ttgtcacatgcacag

SEQ ID NO: 538049 - DNA, 15 bp, Homo sapiens
gttgtcacatgcaca

SEQ ID NO: 538050 - DNA, 15 bp, Homo sapiens
ggttgtcacatgcac

SEQ ID NO: 538051 - DNA, 15 bp, Homo sapiens
gggttgtcacatgca

SEQ ID NO: 538052 - DNA, 15 bp, Homo sapiens
ggggttgtcacatgc

SEQ ID NO: 538053 - DNA, 15 bp, Homo sapiens
aggggttgtcacatg

SEQ ID NO: 538054 - DNA, 15 bp, Homo sapiens
aaggggttgtcacat

SEQ ID NO: 538055 - DNA, 15 bp, Homo sapiens
aaaggggttgtcaca

SEQ ID NO: 538056 - DNA, 15 bp, Homo sapiens
taaaggggttgtcac

SEQ ID NO: 538057 - DNA, 15 bp, Homo sapiens
ttaaaggggttgtca

SEQ ID NO: 538058 - DNA, 15 bp, Homo sapiens
cttaaaggggttgtc

SEQ ID NO: 538059 - DNA, 15 bp, Homo sapiens
acttaaaggggttgt

SEQ ID NO: 538060 - DNA, 15 bp, Homo sapiens
gacttaaaggggttg

SEQ ID NO: 538061 - DNA, 15 bp, Homo sapiens
ggacttaaaggggtt

SEQ ID NO: 538062 - DNA, 15 bp, Homo sapiens
aggacttaaaggggt

SEQ ID NO: 538063 - DNA, 15 bp, Homo sapiens
aaggacttaaagggg

SEQ ID NO: 538064 - DNA, 15 bp, Homo sapiens
caaggacttaaaggg

SEQ ID NO: 538065 - DNA, 15 bp, Homo sapiens
acaaggacttaaagg

SEQ ID NO: 538066 - DNA, 15 bp, Homo sapiens
aacaaggacttaaag

SEQ ID NO: 538067 - DNA, 15 bp, Homo sapiens
aaacaaggacttaaa

SEQ ID NO: 538068 - DNA, 15 bp, Homo sapiens
gaaacaaggacttaa

SEQ ID NO: 538069 - DNA, 15 bp, Homo sapiens
agaaacaaggactta

SEQ ID NO: 538070 - DNA, 15 bp, Homo sapiens
tagaaacaaggactt

SEQ ID NO: 538071 - DNA, 15 bp, Homo sapiens
ttagaaacaaggact

SEQ ID NO: 538072 - DNA, 15 bp, Homo sapiens
attagaaacaaggac

SEQ ID NO: 538073 - DNA, 15 bp, Homo sapiens
gattagaaacaagga

SEQ ID NO: 538074 - DNA, 15 bp, Homo sapiens
ggattagaaacaagg

SEQ ID NO: 538075 - DNA, 15 bp, Homo sapiens
gggattagaaacaag

SEQ ID NO: 538076 - DNA, 15 bp, Homo sapiens
tgggattagaaacaa

SEQ ID NO: 538077 - DNA, 15 bp, Homo sapiens
ttgggattagaaaca

SEQ ID NO: 538078 - DNA, 15 bp, Homo sapiens
cttgggattagaaac

SEQ ID NO: 538079 - DNA, 15 bp, Homo sapiens
tcttgggattagaaa

SEQ ID NO: 538080 - DNA, 15 bp, Homo sapiens
ttcttgggattagaa

SEQ ID NO: 538081 - DNA, 15 bp, Homo sapiens
cttcttgggattaga

SEQ ID NO: 538082 - DNA, 15 bp, Homo sapiens
gcttcttgggattag

SEQ ID NO: 538083 - DNA, 15 bp, Homo sapiens
tgcttcttgggatta

SEQ ID NO: 538084 - DNA, 15 bp, Homo sapiens
ttgcttcttgggatt

SEQ ID NO: 538085 - DNA, 15 bp, Homo sapiens
cttgcttcttgggat

SEQ ID NO: 538086 - DNA, 15 bp, Homo sapiens
ccttgcttcttggga

SEQ ID NO: 538087 - DNA, 15 bp, Homo sapiens
tccttgcttcttggg

SEQ ID NO: 538088 - DNA, 15 bp, Homo sapiens
ttccttgcttcttgg

SEQ ID NO: 538089 - DNA, 15 bp, Homo sapiens
tttccttgcttcttg

SEQ ID NO: 538090 - DNA, 15 bp, Homo sapiens
atttccttgcttctt

SEQ ID NO: 538091 - DNA, 15 bp, Homo sapiens
catttccttgcttct

SEQ ID NO: 538092 - DNA, 15 bp, Homo sapiens
ccatttccttgcttc

SEQ ID NO: 538093 - DNA, 15 bp, Homo sapiens
cccatttccttgctt

SEQ ID NO: 538094 - DNA, 15 bp, Homo sapiens
ccccatttccttgct

SEQ ID NO: 538095 - DNA, 15 bp, Homo sapiens
accccatttccttgc

SEQ ID NO: 538096 - DNA, 15 bp, Homo sapiens
gaccccatttccttg

SEQ ID NO: 538097 - DNA, 15 bp, Homo sapiens
tgaccccatttcctt

SEQ ID NO: 538098 - DNA, 15 bp, Homo sapiens
ctgaccccatttcct

SEQ ID NO: 538099 - DNA, 15 bp, Homo sapiens
cctgaccccatttcc

SEQ ID NO: 538100 - DNA, 15 bp, Homo sapiens
ccctgaccccatttc

SEQ ID NO: 538101 - DNA, 15 bp, Homo sapiens
tccctgaccccattt

SEQ ID NO: 538102 - DNA, 15 bp, Homo sapiens
ttccctgaccccatt

SEQ ID NO: 538103 - DNA, 15 bp, Homo sapiens
cttccctgaccccat

SEQ ID NO: 538104 - DNA, 15 bp, Homo sapiens
ccttccctgacccca

SEQ ID NO: 538105 - DNA, 15 bp, Homo sapiens
cccttccctgacccc

SEQ ID NO: 538106 - DNA, 15 bp, Homo sapiens
tcccttccctgaccc

SEQ ID NO: 538107 - DNA, 15 bp, Homo sapiens
gtcccttccctgacc

SEQ ID NO: 538108 - DNA, 15 bp, Homo sapiens
tgtcccttccctgac

SEQ ID NO: 538109 - DNA, 15 bp, Homo sapiens
ttgtcccttccctga

SEQ ID NO: 538110 - DNA, 15 bp, Homo sapiens
cttgtcccttccctg

SEQ ID NO: 538111 - DNA, 15 bp, Homo sapiens
ccttgtcccttccct

SEQ ID NO: 538112 - DNA, 15 bp, Homo sapiens
accttgtcccttccc

SEQ ID NO: 538113 - DNA, 15 bp, Homo sapiens
aaccttgtcccttcc

SEQ ID NO: 538114 - DNA, 15 bp, Homo sapiens
aaaccttgtcccttc

SEQ ID NO: 538115 - DNA, 15 bp, Homo sapiens
caaaccttgtccctt

SEQ ID NO: 538116 - DNA, 15 bp, Homo sapiens
gcaaaccttgtccct

SEQ ID NO: 538117 - DNA, 15 bp, Homo sapiens
ggcaaaccttgtccc

SEQ ID NO: 538118 - DNA, 15 bp, Homo sapiens
gggcaaaccttgtcc

SEQ ID NO: 538119 - DNA, 15 bp, Homo sapiens
tgggcaaaccttgtc

SEQ ID NO: 538120 - DNA, 15 bp, Homo sapiens
ttgggcaaaccttgt

SEQ ID NO: 538121 - DNA, 15 bp, Homo sapiens
cttgggcaaaccttg

SEQ ID NO: 538122 - DNA, 15 bp, Homo sapiens
acttgggcaaacctt

SEQ ID NO: 538123 - DNA, 15 bp, Homo sapiens
gacttgggcaaacct

SEQ ID NO: 538124 - DNA, 15 bp, Homo sapiens
ggacttgggcaaacc

SEQ ID NO: 538125 - DNA, 15 bp, Homo sapiens
tggacttgggcaaac

SEQ ID NO: 538126 - DNA, 15 bp, Homo sapiens
ctggacttgggcaaa

SEQ ID NO: 538127 - DNA, 15 bp, Homo sapiens
cctggacttgggcaa

SEQ ID NO: 538128 - DNA, 15 bp, Homo sapiens
gcctggacttgggca

SEQ ID NO: 538129 - DNA, 15 bp, Homo sapiens
tgcctggacttgggc

SEQ ID NO: 538130 - DNA, 15 bp, Homo sapiens
ctgcctggacttggg

SEQ ID NO: 538131 - DNA, 15 bp, Homo sapiens
cctgcctggacttgg

SEQ ID NO: 538132 - DNA, 15 bp, Homo sapiens
ccctgcctggacttg

SEQ ID NO: 538133 - DNA, 15 bp, Homo sapiens
cccctgcctggactt

SEQ ID NO: 538134 - DNA, 15 bp, Homo sapiens
ccccctgcctggact

SEQ ID NO: 538135 - DNA, 15 bp, Homo sapiens
tccccctgcctggac

SEQ ID NO: 538136 - DNA, 15 bp, Homo sapiens
ctccccctgcctgga

SEQ ID NO: 538137 - DNA, 15 bp, Homo sapiens
tctccccctgcctgg

SEQ ID NO: 538138 - DNA, 15 bp, Homo sapiens
ctctccccctgcctg

SEQ ID NO: 538139 - DNA, 15 bp, Homo sapiens
cctctccccctgcct

SEQ ID NO: 538140 - DNA, 15 bp, Homo sapiens
acctctccccctgcc

SEQ ID NO: 538141 - DNA, 15 bp, Homo sapiens
gacctctccccctgc

SEQ ID NO: 538142 - DNA, 15 bp, Homo sapiens
tgacctctccccctg

SEQ ID NO: 538143 - DNA, 15 bp, Homo sapiens
ttgacctctccccct

SEQ ID NO: 538144 - DNA, 15 bp, Homo sapiens
cttgacctctccccc

SEQ ID NO: 538145 - DNA, 15 bp, Homo sapiens
gcttgacctctcccc

SEQ ID NO: 538146 - DNA, 15 bp, Homo sapiens
agcttgacctctccc

SEQ ID NO: 538147 - DNA, 15 bp, Homo sapiens
gagcttgacctctcc

SEQ ID NO: 538148 - DNA, 15 bp, Homo sapiens
tgagcttgacctctc

SEQ ID NO: 538149 - DNA, 15 bp, Homo sapiens
ctgagcttgacctct

SEQ ID NO: 538150 - DNA, 15 bp, Homo sapiens
tctgagcttgacctc

SEQ ID NO: 538151 - DNA, 15 bp, Homo sapiens
ttctgagcttgacct

SEQ ID NO: 538152 - DNA, 15 bp, Homo sapiens
gttctgagcttgacc

SEQ ID NO: 538153 - DNA, 15 bp, Homo sapiens
ggttctgagcttgac

SEQ ID NO: 538154 - DNA, 15 bp, Homo sapiens
tggttctgagcttga

SEQ ID NO: 538155 - DNA, 15 bp, Homo sapiens
atggttctgagcttg

SEQ ID NO: 538156 - DNA, 15 bp, Homo sapiens
gatggttctgagctt

SEQ ID NO: 538157 - DNA, 15 bp, Homo sapiens
tgatggttctgagct

SEQ ID NO: 538158 - DNA, 15 bp, Homo sapiens
gtgatggttctgagc

SEQ ID NO: 538159 - DNA, 15 bp, Homo sapiens
ggtgatggttctgag

SEQ ID NO: 538160 - DNA, 15 bp, Homo sapiens
aggtgatggttctga

SEQ ID NO: 538161 - DNA, 15 bp, Homo sapiens
caggtgatggttctg

SEQ ID NO: 538162 - DNA, 15 bp, Homo sapiens
gcaggtgatggttct

SEQ ID NO: 538163 - DNA, 15 bp, Homo sapiens
ggcaggtgatggttc

SEQ ID NO: 538164 - DNA, 15 bp, Homo sapiens
gggcaggtgatggtt

SEQ ID NO: 538165 - DNA, 15 bp, Homo sapiens
tgggcaggtgatggt

SEQ ID NO: 538166 - DNA, 15 bp, Homo sapiens
atgggcaggtgatgg

SEQ ID NO: 538167 - DNA, 15 bp, Homo sapiens
catgggcaggtgatg

SEQ ID NO: 538168 - DNA, 15 bp, Homo sapiens
tcatgggcaggtgat

SEQ ID NO: 538169 - DNA, 15 bp, Homo sapiens
gtcatgggcaggtga

SEQ ID NO: 538170 - DNA, 15 bp, Homo sapiens
tgtcatgggcaggtg

SEQ ID NO: 538171 - DNA, 15 bp, Homo sapiens
gtgtcatgggcaggt

SEQ ID NO: 538172 - DNA, 15 bp, Homo sapiens
tgtgtcatgggcagg

SEQ ID NO: 538173 - DNA, 15 bp, Homo sapiens
atgtgtcatgggcag

SEQ ID NO: 538174 - DNA, 15 bp, Homo sapiens
catgtgtcatgggca

SEQ ID NO: 538175 - DNA, 15 bp, Homo sapiens
gcatgtgtcatgggc

SEQ ID NO: 538176 - DNA, 15 bp, Homo sapiens
ggcatgtgtcatggg

SEQ ID NO: 538177 - DNA, 15 bp, Homo sapiens
gggcatgtgtcatgg

SEQ ID NO: 538178 - DNA, 15 bp, Homo sapiens
tgggcatgtgtcatg

SEQ ID NO: 538179 - DNA, 15 bp, Homo sapiens
ctgggcatgtgtcat

SEQ ID NO: 538180 - DNA, 15 bp, Homo sapiens
cctgggcatgtgtca

SEQ ID NO: 538181 - DNA, 15 bp, Homo sapiens
tcctgggcatgtgtc

SEQ ID NO: 538182 - DNA, 15 bp, Homo sapiens
gtcctgggcatgtgt

SEQ ID NO: 538183 - DNA, 15 bp, Homo sapiens
agtcctgggcatgtg

SEQ ID NO: 538184 - DNA, 15 bp, Homo sapiens
gagtcctgggcatgt

SEQ ID NO: 538185 - DNA, 15 bp, Homo sapiens
tgagtcctgggcatg

SEQ ID NO: 538186 - DNA, 15 bp, Homo sapiens
ctgagtcctgggcat

SEQ ID NO: 538187 - DNA, 15 bp, Homo sapiens
cctgagtcctgggca

SEQ ID NO: 538188 - DNA, 15 bp, Homo sapiens
acctgagtcctgggc

SEQ ID NO: 538189 - DNA, 15 bp, Homo sapiens
aacctgagtcctggg

SEQ ID NO: 538190 - DNA, 15 bp, Homo sapiens
gaacctgagtcctgg

SEQ ID NO: 538191 - DNA, 15 bp, Homo sapiens
ggaacctgagtcctg

SEQ ID NO: 538192 - DNA, 15 bp, Homo sapiens
gggaacctgagtcct

SEQ ID NO: 538193 - DNA, 15 bp, Homo sapiens
agggaacctgagtcc

SEQ ID NO: 538194 - DNA, 15 bp, Homo sapiens
tagggaacctgagtc

SEQ ID NO: 538195 - DNA, 15 bp, Homo sapiens
ctagggaacctgagt

SEQ ID NO: 538196 - DNA, 15 bp, Homo sapiens
cctagggaacctgag

SEQ ID NO: 538197 - DNA, 15 bp, Homo sapiens
gcctagggaacctga

SEQ ID NO: 538198 - DNA, 15 bp, Homo sapiens
agcctagggaacctg

SEQ ID NO: 538199 - DNA, 15 bp, Homo sapiens
aagcctagggaacct

SEQ ID NO: 538200 - DNA, 15 bp, Homo sapiens
gaagcctagggaacc

SEQ ID NO: 538201 - DNA, 15 bp, Homo sapiens
ggaagcctagggaac

SEQ ID NO: 538202 - DNA, 15 bp, Homo sapiens
aggaagcctagggaa

SEQ ID NO: 538203 - DNA, 15 bp, Homo sapiens
aaggaagcctaggga

SEQ ID NO: 538204 - DNA, 15 bp, Homo sapiens
gaaggaagcctaggg

SEQ ID NO: 538205 - DNA, 15 bp, Homo sapiens
ggaaggaagcctagg

SEQ ID NO: 538206 - DNA, 15 bp, Homo sapiens
tggaaggaagcctag

SEQ ID NO: 538207 - DNA, 15 bp, Homo sapiens
ttggaaggaagccta

SEQ ID NO: 538208 - DNA, 15 bp, Homo sapiens
tttggaaggaagcct

SEQ ID NO: 538209 - DNA, 15 bp, Homo sapiens
ctttggaaggaagcc

SEQ ID NO: 538210 - DNA, 15 bp, Homo sapiens
cctttggaaggaagc

SEQ ID NO: 538211 - DNA, 15 bp, Homo sapiens
gcctttggaaggaag

SEQ ID NO: 538212 - DNA, 15 bp, Homo sapiens
agcctttggaaggaa

SEQ ID NO: 538213 - DNA, 15 bp, Homo sapiens
gagcctttggaagga

SEQ ID NO: 538214 - DNA, 15 bp, Homo sapiens
tgagcctttggaagg

SEQ ID NO: 538215 - DNA, 15 bp, Homo sapiens
ctgagcctttggaag

SEQ ID NO: 538216 - DNA, 15 bp, Homo sapiens
gctgagcctttggaa

SEQ ID NO: 538217 - DNA, 15 bp, Homo sapiens
tgctgagcctttgga

SEQ ID NO: 538218 - DNA, 15 bp, Homo sapiens
ctgctgagcctttgg

SEQ ID NO: 538219 - DNA, 15 bp, Homo sapiens
actgctgagcctttg

SEQ ID NO: 538220 - DNA, 15 bp, Homo sapiens
cactgctgagccttt

SEQ ID NO: 538221 - DNA, 15 bp, Homo sapiens
tcactgctgagcctt

SEQ ID NO: 538222 - DNA, 15 bp, Homo sapiens
gtcactgctgagcct

SEQ ID NO: 538223 - DNA, 15 bp, Homo sapiens
cgtcactgctgagcc

SEQ ID NO: 538224 - DNA, 15 bp, Homo sapiens
tcgtcactgctgagc

SEQ ID NO: 538225 - DNA, 15 bp, Homo sapiens
ctcgtcactgctgag

SEQ ID NO: 538226 - DNA, 15 bp, Homo sapiens
gctcgtcactgctga

SEQ ID NO: 538227 - DNA, 15 bp, Homo sapiens
ggctcgtcactgctg

SEQ ID NO: 538228 - DNA, 15 bp, Homo sapiens
tggctcgtcactgct

SEQ ID NO: 538229 - DNA, 15 bp, Homo sapiens
ctggctcgtcactgc

SEQ ID NO: 538230 - DNA, 15 bp, Homo sapiens
gctggctcgtcactg

SEQ ID NO: 538231 - DNA, 15 bp, Homo sapiens
ggctggctcgtcact

SEQ ID NO: 538232 - DNA, 15 bp, Homo sapiens
gggctggctcgtcac

SEQ ID NO: 538233 - DNA, 15 bp, Homo sapiens
agggctggctcgtca

SEQ ID NO: 538234 - DNA, 15 bp, Homo sapiens
aagggctggctcgtc

SEQ ID NO: 538235 - DNA, 15 bp, Homo sapiens
caagggctggctcgt

SEQ ID NO: 538236 - DNA, 15 bp, Homo sapiens
tcaagggctggctcg

SEQ ID NO: 538237 - DNA, 15 bp, Homo sapiens
ttcaagggctggctc

SEQ ID NO: 538238 - DNA, 15 bp, Homo sapiens
gttcaagggctggct

SEQ ID NO: 538239 - DNA, 15 bp, Homo sapiens
ggttcaagggctggc

SEQ ID NO: 538240 - DNA, 15 bp, Homo sapiens
tggttcaagggctgg

SEQ ID NO: 538241 - DNA, 15 bp, Homo sapiens
ctggttcaagggctg

SEQ ID NO: 538242 - DNA, 15 bp, Homo sapiens
gctggttcaagggct

SEQ ID NO: 538243 - DNA, 15 bp, Homo sapiens
ggctggttcaagggc

SEQ ID NO: 538244 - DNA, 15 bp, Homo sapiens
aggctggttcaaggg

SEQ ID NO: 538245 - DNA, 15 bp, Homo sapiens
gaggctggttcaagg

SEQ ID NO: 538246 - DNA, 15 bp, Homo sapiens
agaggctggttcaag

SEQ ID NO: 538247 - DNA, 15 bp, Homo sapiens
aagaggctggttcaa

SEQ ID NO: 538248 - DNA, 15 bp, Homo sapiens
gaagaggctggttca

SEQ ID NO: 538249 - DNA, 15 bp, Homo sapiens
ggaagaggctggttc

SEQ ID NO: 538250 - DNA, 15 bp, Homo sapiens
gggaagaggctggtt

SEQ ID NO: 538251 - DNA, 15 bp, Homo sapiens
ggggaagaggctggt

SEQ ID NO: 538252 - DNA, 15 bp, Homo sapiens
gggggaagaggctgg

SEQ ID NO: 538253 - DNA, 15 bp, Homo sapiens
tgggggaagaggctg

SEQ ID NO: 538254 - DNA, 15 bp, Homo sapiens
gtgggggaagaggct

SEQ ID NO: 538255 - DNA, 15 bp, Homo sapiens
ggtgggggaagaggc

SEQ ID NO: 538256 - DNA, 15 bp, Homo sapiens
gggtgggggaagagg

SEQ ID NO: 538257 - DNA, 15 bp, Homo sapiens
tgggtgggggaagag

SEQ ID NO: 538258 - DNA, 15 bp, Homo sapiens
ttgggtgggggaaga

SEQ ID NO: 538259 - DNA, 15 bp, Homo sapiens
cttgggtgggggaag

SEQ ID NO: 538260 - DNA, 15 bp, Homo sapiens
gcttgggtgggggaa

SEQ ID NO: 538261 - DNA, 15 bp, Homo sapiens
tgcttgggtggggga

SEQ ID NO: 538262 - DNA, 15 bp, Homo sapiens
ctgcttgggtggggg

SEQ ID NO: 538263 - DNA, 15 bp, Homo sapiens
gctgcttgggtgggg

SEQ ID NO: 538264 - DNA, 15 bp, Homo sapiens
ggctgcttgggtggg

SEQ ID NO: 538265 - DNA, 15 bp, Homo sapiens
tggctgcttgggtgg

SEQ ID NO: 538266 - DNA, 15 bp, Homo sapiens
gtggctgcttgggtg

SEQ ID NO: 538267 - DNA, 15 bp, Homo sapiens
ggtggctgcttgggt

SEQ ID NO: 538268 - DNA, 15 bp, Homo sapiens
aggtggctgcttggg

SEQ ID NO: 538269 - DNA, 15 bp, Homo sapiens
gaggtggctgcttgg

SEQ ID NO: 538270 - DNA, 15 bp, Homo sapiens
agaggtggctgcttg

SEQ ID NO: 538271 - DNA, 15 bp, Homo sapiens
gagaggtggctgctt

SEQ ID NO: 538272 - DNA, 15 bp, Homo sapiens
tgagaggtggctgct

SEQ ID NO: 538273 - DNA, 15 bp, Homo sapiens
ctgagaggtggctgc

SEQ ID NO: 538274 - DNA, 15 bp, Homo sapiens
cctgagaggtggctg

SEQ ID NO: 538275 - DNA, 15 bp, Homo sapiens
ccctgagaggtggct

SEQ ID NO: 538276 - DNA, 15 bp, Homo sapiens
cccctgagaggtggc

SEQ ID NO: 538277 - DNA, 15 bp, Homo sapiens
tcccctgagaggtgg

SEQ ID NO: 538278 - DNA, 15 bp, Homo sapiens
ttcccctgagaggtg

SEQ ID NO: 538279 - DNA, 15 bp, Homo sapiens
attcccctgagaggt

SEQ ID NO: 538280 - DNA, 15 bp, Homo sapiens
aattcccctgagagg

SEQ ID NO: 538281 - DNA, 15 bp, Homo sapiens
caattcccctgagag

SEQ ID NO: 538282 - DNA, 15 bp, Homo sapiens
acaattcccctgaga

SEQ ID NO: 538283 - DNA, 15 bp, Homo sapiens
cacaattcccctgag

SEQ ID NO: 538284 - DNA, 15 bp, Homo sapiens
ccacaattcccctga

SEQ ID NO: 538285 - DNA, 15 bp, Homo sapiens
gccacaattcccctg

SEQ ID NO: 538286 - DNA, 15 bp, Homo sapiens
ggccacaattcccct

SEQ ID NO: 538287 - DNA, 15 bp, Homo sapiens
tggccacaattcccc

SEQ ID NO: 538288 - DNA, 15 bp, Homo sapiens
gtggccacaattccc

SEQ ID NO: 538289 - DNA, 15 bp, Homo sapiens
ggtggccacaattcc

SEQ ID NO: 538290 - DNA, 15 bp, Homo sapiens
tggtggccacaattc

SEQ ID NO: 538291 - DNA, 15 bp, Homo sapiens
gtggtggccacaatt

SEQ ID NO: 538292 - DNA, 15 bp, Homo sapiens
tgtggtggccacaat

SEQ ID NO: 538293 - DNA, 15 bp, Homo sapiens
ctgtggtggccacaa

SEQ ID NO: 538294 - DNA, 15 bp, Homo sapiens
cctgtggtggccaca

SEQ ID NO: 538295 - DNA, 15 bp, Homo sapiens
acctgtggtggccac

SEQ ID NO: 538296 - DNA, 15 bp, Homo sapiens
cacctgtggtggcca

SEQ ID NO: 538297 - DNA, 15 bp, Homo sapiens
gcacctgtggtggcc

SEQ ID NO: 538298 - DNA, 15 bp, Homo sapiens
tgcacctgtggtggc

SEQ ID NO: 538299 - DNA, 15 bp, Homo sapiens
ctgcacctgtggtgg

SEQ ID NO: 538300 - DNA, 15 bp, Homo sapiens
cctgcacctgtggtg

SEQ ID NO: 538301 - DNA, 15 bp, Homo sapiens
ccctgcacctgtggt

SEQ ID NO: 538302 - DNA, 15 bp, Homo sapiens
tccctgcacctgtgg

SEQ ID NO: 538303 - DNA, 15 bp, Homo sapiens
ctccctgcacctgtg

SEQ ID NO: 538304 - DNA, 15 bp, Homo sapiens
gctccctgcacctgt

SEQ ID NO: 538305 - DNA, 15 bp, Homo sapiens
tgctccctgcacctg

SEQ ID NO: 538306 - DNA, 15 bp, Homo sapiens
ctgctccctgcacct

SEQ ID NO: 538307 - DNA, 15 bp, Homo sapiens
actgctccctgcacc

SEQ ID NO: 538308 - DNA, 15 bp, Homo sapiens
aactgctccctgcac

SEQ ID NO: 538309 - DNA, 15 bp, Homo sapiens
aaactgctccctgca

SEQ ID NO: 538310 - DNA, 15 bp, Homo sapiens
gaaactgctccctgc

SEQ ID NO: 538311 - DNA, 15 bp, Homo sapiens
agaaactgctccctg

SEQ ID NO: 538312 - DNA, 15 bp, Homo sapiens
gagaaactgctccct

SEQ ID NO: 538313 - DNA, 15 bp, Homo sapiens
agagaaactgctccc

SEQ ID NO: 538314 - DNA, 15 bp, Homo sapiens
gagagaaactgctcc

SEQ ID NO: 538315 - DNA, 15 bp, Homo sapiens
ggagagaaactgctc

SEQ ID NO: 538316 - DNA, 15 bp, Homo sapiens
tggagagaaactgct

SEQ ID NO: 538317 - DNA, 15 bp, Homo sapiens
gtggagagaaactgc

SEQ ID NO: 538318 - DNA, 15 bp, Homo sapiens
agtggagagaaactg

SEQ ID NO: 538319 - DNA, 15 bp, Homo sapiens
gagtggagagaaact

SEQ ID NO: 538320 - DNA, 15 bp, Homo sapiens
tgagtggagagaaac

SEQ ID NO: 538321 - DNA, 15 bp, Homo sapiens
gtgagtggagagaaa

SEQ ID NO: 538322 - DNA, 15 bp, Homo sapiens
tgtgagtggagagaa

SEQ ID NO: 538323 - DNA, 15 bp, Homo sapiens
ctgtgagtggagaga

SEQ ID NO: 538324 - DNA, 15 bp, Homo sapiens
gctgtgagtggagag

SEQ ID NO: 538325 - DNA, 15 bp, Homo sapiens
ggctgtgagtggaga

SEQ ID NO: 538326 - DNA, 15 bp, Homo sapiens
aggctgtgagtggag

SEQ ID NO: 538327 - DNA, 15 bp, Homo sapiens
caggctgtgagtgga

SEQ ID NO: 538328 - DNA, 15 bp, Homo sapiens
tcaggctgtgagtgg

SEQ ID NO: 538329 - DNA, 15 bp, Homo sapiens
ttcaggctgtgagtg

SEQ ID NO: 538330 - DNA, 15 bp, Homo sapiens
cttcaggctgtgagt

SEQ ID NO: 538331 - DNA, 15 bp, Homo sapiens
gcttcaggctgtgag

SEQ ID NO: 538332 - DNA, 15 bp, Homo sapiens
tgcttcaggctgtga

SEQ ID NO: 538333 - DNA, 15 bp, Homo sapiens
atgcttcaggctgtg

SEQ ID NO: 538334 - DNA, 15 bp, Homo sapiens
tatgcttcaggctgt

SEQ ID NO: 538335 - DNA, 15 bp, Homo sapiens
gtatgcttcaggctg

SEQ ID NO: 538336 - DNA, 15 bp, Homo sapiens
ggtatgcttcaggct

SEQ ID NO: 538337 - DNA, 15 bp, Homo sapiens
gggtatgcttcaggc

SEQ ID NO: 538338 - DNA, 15 bp, Homo sapiens
cgggtatgcttcagg

SEQ ID NO: 538339 - DNA, 15 bp, Homo sapiens
ccgggtatgcttcag

SEQ ID NO: 538340 - DNA, 15 bp, Homo sapiens
gccgggtatgcttca

SEQ ID NO: 538341 - DNA, 15 bp, Homo sapiens
tgccgggtatgcttc

SEQ ID NO: 538342 - DNA, 15 bp, Homo sapiens
ctgccgggtatgctt

SEQ ID NO: 538343 - DNA, 15 bp, Homo sapiens
cctgccgggtatgct

SEQ ID NO: 538344 - DNA, 15 bp, Homo sapiens
ccctgccgggtatgc

SEQ ID NO: 538345 - DNA, 15 bp, Homo sapiens
cccctgccgggtatg

SEQ ID NO: 538346 - DNA, 15 bp, Homo sapiens
gcccctgccgggtat

SEQ ID NO: 538347 - DNA, 15 bp, Homo sapiens
agcccctgccgggta

SEQ ID NO: 538348 - DNA, 15 bp, Homo sapiens
cagcccctgccgggt

SEQ ID NO: 538349 - DNA, 15 bp, Homo sapiens
acagcccctgccggg

SEQ ID NO: 538350 - DNA, 15 bp, Homo sapiens
gacagcccctgccgg

SEQ ID NO: 538351 - DNA, 15 bp, Homo sapiens
ggacagcccctgccg

SEQ ID NO: 538352 - DNA, 15 bp, Homo sapiens
gggacagcccctgcc

SEQ ID NO: 538353 - DNA, 15 bp, Homo sapiens
ggggacagcccctgc

SEQ ID NO: 538354 - DNA, 15 bp, Homo sapiens
tggggacagcccctg

SEQ ID NO: 538355 - DNA, 15 bp, Homo sapiens
ctggggacagcccct

SEQ ID NO: 538356 - DNA, 15 bp, Homo sapiens
cctggggacagcccc

SEQ ID NO: 538357 - DNA, 15 bp, Homo sapiens
gcctggggacagccc

SEQ ID NO: 538358 - DNA, 15 bp, Homo sapiens
ggcctggggacagcc

SEQ ID NO: 538359 - DNA, 15 bp, Homo sapiens
gggcctggggacagc

SEQ ID NO: 538360 - DNA, 15 bp, Homo sapiens
tgggcctggggacag

SEQ ID NO: 538361 - DNA, 15 bp, Homo sapiens
ttgggcctggggaca

SEQ ID NO: 538362 - DNA, 15 bp, Homo sapiens
gttgggcctggggac

SEQ ID NO: 538363 - DNA, 15 bp, Homo sapiens
tgttgggcctgggga

SEQ ID NO: 538364 - DNA, 15 bp, Homo sapiens
ttgttgggcctgggg

SEQ ID NO: 538365 - DNA, 15 bp, Homo sapiens
cttgttgggcctggg

SEQ ID NO: 538366 - DNA, 15 bp, Homo sapiens
gcttgttgggcctgg

SEQ ID NO: 538367 - DNA, 15 bp, Homo sapiens
tgcttgttgggcctg

SEQ ID NO: 538368 - DNA, 15 bp, Homo sapiens
ttgcttgttgggcct

SEQ ID NO: 538369 - DNA, 15 bp, Homo sapiens
tttgcttgttgggcc

SEQ ID NO: 538370 - DNA, 15 bp, Homo sapiens
ctttgcttgttgggc

SEQ ID NO: 538371 - DNA, 15 bp, Homo sapiens
cctttgcttgttggg

SEQ ID NO: 538372 - DNA, 15 bp, Homo sapiens
ccctttgcttgttgg

SEQ ID NO: 538373 - DNA, 15 bp, Homo sapiens
gccctttgcttgttg

SEQ ID NO: 538374 - DNA, 15 bp, Homo sapiens
ggccctttgcttgtt

SEQ ID NO: 538375 - DNA, 15 bp, Homo sapiens
gggccctttgcttgt

SEQ ID NO: 538376 - DNA, 15 bp, Homo sapiens
tgggccctttgcttg

SEQ ID NO: 538377 - DNA, 15 bp, Homo sapiens
ctgggccctttgctt

SEQ ID NO: 538378 - DNA, 15 bp, Homo sapiens
actgggccctttgct

SEQ ID NO: 538379 - DNA, 15 bp, Homo sapiens
tactgggccctttgc

SEQ ID NO: 538380 - DNA, 15 bp, Homo sapiens
ctactgggccctttg

SEQ ID NO: 538381 - DNA, 15 bp, Homo sapiens
gctactgggcccttt

SEQ ID NO: 538382 - DNA, 15 bp, Homo sapiens
cgctactgggccctt

SEQ ID NO: 538383 - DNA, 15 bp, Homo sapiens
tcgctactgggccct

SEQ ID NO: 538384 - DNA, 15 bp, Homo sapiens
ctcgctactgggccc

SEQ ID NO: 538385 - DNA, 15 bp, Homo sapiens
cctcgctactgggcc

SEQ ID NO: 538386 - DNA, 15 bp, Homo sapiens
ccctcgctactgggc

SEQ ID NO: 538387 - DNA, 15 bp, Homo sapiens
gccctcgctactggg

SEQ ID NO: 538388 - DNA, 15 bp, Homo sapiens
ggccctcgctactgg

SEQ ID NO: 538389 - DNA, 15 bp, Homo sapiens
tggccctcgctactg

SEQ ID NO: 538390 - DNA, 15 bp, Homo sapiens
gtggccctcgctact

SEQ ID NO: 538391 - DNA, 15 bp, Homo sapiens
agtggccctcgctac

SEQ ID NO: 538392 - DNA, 15 bp, Homo sapiens
cagtggccctcgcta

SEQ ID NO: 538393 - DNA, 15 bp, Homo sapiens
ccagtggccctcgct

SEQ ID NO: 538394 - DNA, 15 bp, Homo sapiens
tccagtggccctcgc

SEQ ID NO: 538395 - DNA, 15 bp, Homo sapiens
ctccagtggccctcg

SEQ ID NO: 538396 - DNA, 15 bp, Homo sapiens
gctccagtggccctc

SEQ ID NO: 538397 - DNA, 15 bp, Homo sapiens
ggctccagtggccct

SEQ ID NO: 538398 - DNA, 15 bp, Homo sapiens
gggctccagtggccc

SEQ ID NO: 538399 - DNA, 15 bp, Homo sapiens
tgggctccagtggcc

SEQ ID NO: 538400 - DNA, 15 bp, Homo sapiens
atgggctccagtggc

SEQ ID NO: 538401 - DNA, 15 bp, Homo sapiens
gatgggctccagtgg

SEQ ID NO: 538402 - DNA, 15 bp, Homo sapiens
agatgggctccagtg

SEQ ID NO: 538403 - DNA, 15 bp, Homo sapiens
gagatgggctccagt

SEQ ID NO: 538404 - DNA, 15 bp, Homo sapiens
ggagatgggctccag

SEQ ID NO: 538405 - DNA, 15 bp, Homo sapiens
cggagatgggctcca

SEQ ID NO: 538406 - DNA, 15 bp, Homo sapiens
ccggagatgggctcc

SEQ ID NO: 538407 - DNA, 15 bp, Homo sapiens
cccggagatgggctc

SEQ ID NO: 538408 - DNA, 15 bp, Homo sapiens
ccccggagatgggct

SEQ ID NO: 538409 - DNA, 15 bp, Homo sapiens
cccccggagatgggc

SEQ ID NO: 538410 - DNA, 15 bp, Homo sapiens
ccccccggagatggg

SEQ ID NO: 538411 - DNA, 15 bp, Homo sapiens
gccccccggagatgg

SEQ ID NO: 538412 - DNA, 15 bp, Homo sapiens
agccccccggagatg

SEQ ID NO: 538413 - DNA, 15 bp, Homo sapiens
cagccccccggagat

SEQ ID NO: 538414 - DNA, 15 bp, Homo sapiens
ccagccccccggaga

SEQ ID NO: 538415 - DNA, 15 bp, Homo sapiens
cccagccccccggag

SEQ ID NO: 538416 - DNA, 15 bp, Homo sapiens
gcccagccccccgga

SEQ ID NO: 538417 - DNA, 15 bp, Homo sapiens
tgcccagccccccgg

SEQ ID NO: 538418 - DNA, 15 bp, Homo sapiens
ctgcccagccccccg

SEQ ID NO: 538419 - DNA, 15 bp, Homo sapiens
cctgcccagcccccc

SEQ ID NO: 538420 - DNA, 15 bp, Homo sapiens
tcctgcccagccccc

SEQ ID NO: 538421 - DNA, 15 bp, Homo sapiens
ttcctgcccagcccc

SEQ ID NO: 538422 - DNA, 15 bp, Homo sapiens
cttcctgcccagccc

SEQ ID NO: 538423 - DNA, 15 bp, Homo sapiens
acttcctgcccagcc

SEQ ID NO: 538424 - DNA, 15 bp, Homo sapiens
tacttcctgcccagc

SEQ ID NO: 538425 - DNA, 15 bp, Homo sapiens
ctacttcctgcccag

SEQ ID NO: 538426 - DNA, 15 bp, Homo sapiens
cctacttcctgccca

SEQ ID NO: 538427 - DNA, 15 bp, Homo sapiens
ccctacttcctgccc

SEQ ID NO: 538428 - DNA, 15 bp, Homo sapiens
accctacttcctgcc

SEQ ID NO: 538429 - DNA, 15 bp, Homo sapiens
caccctacttcctgc

SEQ ID NO: 538430 - DNA, 15 bp, Homo sapiens
ccaccctacttcctg

SEQ ID NO: 538431 - DNA, 15 bp, Homo sapiens
cccaccctacttcct

SEQ ID NO: 538432 - DNA, 15 bp, Homo sapiens
ccccaccctacttcc

SEQ ID NO: 538433 - DNA, 15 bp, Homo sapiens
accccaccctacttc

SEQ ID NO: 538434 - DNA, 15 bp, Homo sapiens
aaccccaccctactt

SEQ ID NO: 538435 - DNA, 15 bp, Homo sapiens
aaaccccaccctact

SEQ ID NO: 538436 - DNA, 15 bp, Homo sapiens
caaaccccaccctac

SEQ ID NO: 538437 - DNA, 15 bp, Homo sapiens
ccaaaccccacccta

SEQ ID NO: 538438 - DNA, 15 bp, Homo sapiens
cccaaaccccaccct

SEQ ID NO: 538439 - DNA, 15 bp, Homo sapiens
ccccaaaccccaccc

SEQ ID NO: 538440 - DNA, 15 bp, Homo sapiens
accccaaaccccacc

SEQ ID NO: 538441 - DNA, 15 bp, Homo sapiens
taccccaaaccccac

SEQ ID NO: 538442 - DNA, 15 bp, Homo sapiens
ctaccccaaacccca

SEQ ID NO: 538443 - DNA, 15 bp, Homo sapiens
cctaccccaaacccc

SEQ ID NO: 538444 - DNA, 15 bp, Homo sapiens
ccctaccccaaaccc

SEQ ID NO: 538445 - DNA, 15 bp, Homo sapiens
tccctaccccaaacc

SEQ ID NO: 538446 - DNA, 15 bp, Homo sapiens
atccctaccccaaac

SEQ ID NO: 538447 - DNA, 15 bp, Homo sapiens
gatccctaccccaaa

SEQ ID NO: 538448 - DNA, 15 bp, Homo sapiens
agatccctaccccaa

SEQ ID NO: 538449 - DNA, 15 bp, Homo sapiens
cagatccctacccca

SEQ ID NO: 538450 - DNA, 15 bp, Homo sapiens
ccagatccctacccc

SEQ ID NO: 538451 - DNA, 15 bp, Homo sapiens
accagatccctaccc

SEQ ID NO: 538452 - DNA, 15 bp, Homo sapiens
taccagatccctacc

SEQ ID NO: 538453 - DNA, 15 bp, Homo sapiens
gtaccagatccctac

SEQ ID NO: 538454 - DNA, 15 bp, Homo sapiens
ggtaccagatcccta

SEQ ID NO: 538455 - DNA, 15 bp, Homo sapiens
gggtaccagatccct

SEQ ID NO: 538456 - DNA, 15 bp, Homo sapiens
agggtaccagatccc

SEQ ID NO: 538457 - DNA, 15 bp, Homo sapiens
cagggtaccagatcc

SEQ ID NO: 538458 - DNA, 15 bp, Homo sapiens
ccagggtaccagatc

SEQ ID NO: 538459 - DNA, 15 bp, Homo sapiens
cccagggtaccagat

SEQ ID NO: 538460 - DNA, 15 bp, Homo sapiens
tcccagggtaccaga

SEQ ID NO: 538461 - DNA, 15 bp, Homo sapiens
gtcccagggtaccag

SEQ ID NO: 538462 - DNA, 15 bp, Homo sapiens
agtcccagggtacca

SEQ ID NO: 538463 - DNA, 15 bp, Homo sapiens
cagtcccagggtacc

SEQ ID NO: 538464 - DNA, 15 bp, Homo sapiens
gcagtcccagggtac

SEQ ID NO: 538465 - DNA, 15 bp, Homo sapiens
agcagtcccagggta

SEQ ID NO: 538466 - DNA, 15 bp, Homo sapiens
cagcagtcccagggt

SEQ ID NO: 538467 - DNA, 15 bp, Homo sapiens
gcagcagtcccaggg

SEQ ID NO: 538468 - DNA, 15 bp, Homo sapiens
tgcagcagtcccagg

SEQ ID NO: 538469 - DNA, 15 bp, Homo sapiens
ttgcagcagtcccag

SEQ ID NO: 538470 - DNA, 15 bp, Homo sapiens
gttgcagcagtccca

SEQ ID NO: 538471 - DNA, 15 bp, Homo sapiens
agttgcagcagtccc

SEQ ID NO: 538472 - DNA, 15 bp, Homo sapiens
gagttgcagcagtcc

SEQ ID NO: 538473 - DNA, 15 bp, Homo sapiens
tgagttgcagcagtc

SEQ ID NO: 538474 - DNA, 15 bp, Homo sapiens
ttgagttgcagcagt

SEQ ID NO: 538475 - DNA, 15 bp, Homo sapiens
tttgagttgcagcag

SEQ ID NO: 538476 - DNA, 15 bp, Homo sapiens
gtttgagttgcagca

SEQ ID NO: 538477 - DNA, 15 bp, Homo sapiens
agtttgagttgcagc

SEQ ID NO: 538478 - DNA, 15 bp, Homo sapiens
tagtttgagttgcag

SEQ ID NO: 538479 - DNA, 15 bp, Homo sapiens
ttagtttgagttgca

SEQ ID NO: 538480 - DNA, 15 bp, Homo sapiens
gttagtttgagttgc

SEQ ID NO: 538481 - DNA, 15 bp, Homo sapiens
ggttagtttgagttg

SEQ ID NO: 538482 - DNA, 15 bp, Homo sapiens
tggttagtttgagtt

SEQ ID NO: 538483 - DNA, 15 bp, Homo sapiens
ttggttagtttgagt

SEQ ID NO: 538484 - DNA, 15 bp, Homo sapiens
gttggttagtttgag

SEQ ID NO: 538485 - DNA, 15 bp, Homo sapiens
ggttggttagtttga

SEQ ID NO: 538486 - DNA, 15 bp, Homo sapiens
gggttggttagtttg

SEQ ID NO: 538487 - DNA, 15 bp, Homo sapiens
tgggttggttagttt

SEQ ID NO: 538488 - DNA, 15 bp, Homo sapiens
gtgggttggttagtt

SEQ ID NO: 538489 - DNA, 15 bp, Homo sapiens
agtgggttggttagt

SEQ ID NO: 538490 - DNA, 15 bp, Homo sapiens
cagtgggttggttag

SEQ ID NO: 538491 - DNA, 15 bp, Homo sapiens
ccagtgggttggtta

SEQ ID NO: 538492 - DNA, 15 bp, Homo sapiens
cccagtgggttggtt

SEQ ID NO: 538493 - DNA, 15 bp, Homo sapiens
tcccagtgggttggt

SEQ ID NO: 538494 - DNA, 15 bp, Homo sapiens
ctcccagtgggttgg

SEQ ID NO: 538495 - DNA, 15 bp, Homo sapiens
tctcccagtgggttg

SEQ ID NO: 538496 - DNA, 15 bp, Homo sapiens
ttctcccagtgggtt

SEQ ID NO: 538497 - DNA, 15 bp, Homo sapiens
cttctcccagtgggt

SEQ ID NO: 538498 - DNA, 15 bp, Homo sapiens
tcttctcccagtggg

SEQ ID NO: 538499 - DNA, 15 bp, Homo sapiens
atcttctcccagtgg

SEQ ID NO: 538500 - DNA, 15 bp, Homo sapiens
catcttctcccagtg

SEQ ID NO: 538501 - DNA, 15 bp, Homo sapiens
gcatcttctcccagt

SEQ ID NO: 538502 - DNA, 15 bp, Homo sapiens
ggcatcttctcccag

SEQ ID NO: 538503 - DNA, 15 bp, Homo sapiens
aggcatcttctccca

SEQ ID NO: 538504 - DNA, 15 bp, Homo sapiens
caggcatcttctccc

SEQ ID NO: 538505 - DNA, 15 bp, Homo sapiens
ccaggcatcttctcc

SEQ ID NO: 538506 - DNA, 15 bp, Homo sapiens
cccaggcatcttctc

SEQ ID NO: 538507 - DNA, 15 bp, Homo sapiens
ccccaggcatcttct

SEQ ID NO: 538508 - DNA, 15 bp, Homo sapiens
cccccaggcatcttc

SEQ ID NO: 538509 - DNA, 15 bp, Homo sapiens
acccccaggcatctt

SEQ ID NO: 538510 - DNA, 15 bp, Homo sapiens
gacccccaggcatct

SEQ ID NO: 538511 - DNA, 15 bp, Homo sapiens
ggacccccaggcatc

SEQ ID NO: 538512 - DNA, 15 bp, Homo sapiens
tggacccccaggcat

SEQ ID NO: 538513 - DNA, 15 bp, Homo sapiens
ctggacccccaggca

SEQ ID NO: 538514 - DNA, 15 bp, Homo sapiens
cctggacccccaggc

SEQ ID NO: 538515 - DNA, 15 bp, Homo sapiens
tcctggacccccagg

SEQ ID NO: 538516 - DNA, 15 bp, Homo sapiens
ctcctggacccccag

SEQ ID NO: 538517 - DNA, 15 bp, Homo sapiens
actcctggaccccca

SEQ ID NO: 538518 - DNA, 15 bp, Homo sapiens
gactcctggaccccc

SEQ ID NO: 538519 - DNA, 15 bp, Homo sapiens
ggactcctggacccc

SEQ ID NO: 538520 - DNA, 15 bp, Homo sapiens
aggactcctggaccc

SEQ ID NO: 538521 - DNA, 15 bp, Homo sapiens
gaggactcctggacc

SEQ ID NO: 538522 - DNA, 15 bp, Homo sapiens
ggaggactcctggac

SEQ ID NO: 538523 - DNA, 15 bp, Homo sapiens
tggaggactcctgga

SEQ ID NO: 538524 - DNA, 15 bp, Homo sapiens
ttggaggactcctgg

SEQ ID NO: 538525 - DNA, 15 bp, Homo sapiens
cttggaggactcctg

SEQ ID NO: 538526 - DNA, 15 bp, Homo sapiens
gcttggaggactcct

SEQ ID NO: 538527 - DNA, 15 bp, Homo sapiens
agcttggaggactcc

SEQ ID NO: 538528 - DNA, 15 bp, Homo sapiens
gagcttggaggactc

SEQ ID NO: 538529 - DNA, 15 bp, Homo sapiens
agagcttggaggact

SEQ ID NO: 538530 - DNA, 15 bp, Homo sapiens
cagagcttggaggac

SEQ ID NO: 538531 - DNA, 15 bp, Homo sapiens
gcagagcttggagga

SEQ ID NO: 538532 - DNA, 15 bp, Homo sapiens
ggcagagcttggagg

SEQ ID NO: 538533 - DNA, 15 bp, Homo sapiens
aggcagagcttggag

SEQ ID NO: 538534 - DNA, 15 bp, Homo sapiens
caggcagagcttgga

SEQ ID NO: 538535 - DNA, 15 bp, Homo sapiens
gcaggcagagcttgg

SEQ ID NO: 538536 - DNA, 15 bp, Homo sapiens
ggcaggcagagcttg

SEQ ID NO: 538537 - DNA, 15 bp, Homo sapiens
tggcaggcagagctt

SEQ ID NO: 538538 - DNA, 15 bp, Homo sapiens
gtggcaggcagagct

SEQ ID NO: 538539 - DNA, 15 bp, Homo sapiens
ggtggcaggcagagc

SEQ ID NO: 538540 - DNA, 15 bp, Homo sapiens
tggtggcaggcagag

SEQ ID NO: 538541 - DNA, 15 bp, Homo sapiens
atggtggcaggcaga

SEQ ID NO: 538542 - DNA, 15 bp, Homo sapiens
gatggtggcaggcag

SEQ ID NO: 538543 - DNA, 15 bp, Homo sapiens
agatggtggcaggca

SEQ ID NO: 538544 - DNA, 15 bp, Homo sapiens
aagatggtggcaggc

SEQ ID NO: 538545 - DNA, 15 bp, Homo sapiens
gaagatggtggcagg

SEQ ID NO: 538546 - DNA, 15 bp, Homo sapiens
ggaagatggtggcag

SEQ ID NO: 538547 - DNA, 15 bp, Homo sapiens
aggaagatggtggca

SEQ ID NO: 538548 - DNA, 15 bp, Homo sapiens
gaggaagatggtggc

SEQ ID NO: 538549 - DNA, 15 bp, Homo sapiens
ggaggaagatggtgg

SEQ ID NO: 538550 - DNA, 15 bp, Homo sapiens
aggaggaagatggtg

SEQ ID NO: 538551 - DNA, 15 bp, Homo sapiens
gaggaggaagatggt

SEQ ID NO: 538552 - DNA, 15 bp, Homo sapiens
agaggaggaagatgg

SEQ ID NO: 538553 - DNA, 15 bp, Homo sapiens
aagaggaggaagatg

SEQ ID NO: 538554 - DNA, 15 bp, Homo sapiens
gaagaggaggaagat

SEQ ID NO: 538555 - DNA, 15 bp, Homo sapiens
ggaagaggaggaaga

SEQ ID NO: 538556 - DNA, 15 bp, Homo sapiens
aggaagaggaggaag

SEQ ID NO: 538557 - DNA, 15 bp, Homo sapiens
caggaagaggaggaa

SEQ ID NO: 538558 - DNA, 15 bp, Homo sapiens
gcaggaagaggagga

SEQ ID NO: 538559 - DNA, 15 bp, Homo sapiens
agcaggaagaggagg

SEQ ID NO: 538560 - DNA, 15 bp, Homo sapiens
cagcaggaagaggag

SEQ ID NO: 538561 - DNA, 15 bp, Homo sapiens
acagcaggaagagga

SEQ ID NO: 538562 - DNA, 15 bp, Homo sapiens
gacagcaggaagagg

SEQ ID NO: 538563 - DNA, 15 bp, Homo sapiens
agacagcaggaagag

SEQ ID NO: 538564 - DNA, 15 bp, Homo sapiens
cagacagcaggaaga

SEQ ID NO: 538565 - DNA, 15 bp, Homo sapiens
gcagacagcaggaag

SEQ ID NO: 538566 - DNA, 15 bp, Homo sapiens
agcagacagcaggaa

SEQ ID NO: 538567 - DNA, 15 bp, Homo sapiens
cagcagacagcagga

SEQ ID NO: 538568 - DNA, 15 bp, Homo sapiens
acagcagacagcagg

SEQ ID NO: 538569 - DNA, 15 bp, Homo sapiens
gacagcagacagcag

SEQ ID NO: 538570 - DNA, 15 bp, Homo sapiens
agacagcagacagca

SEQ ID NO: 538571 - DNA, 15 bp, Homo sapiens
tagacagcagacagc

SEQ ID NO: 538572 - DNA, 15 bp, Homo sapiens
gtagacagcagacag

SEQ ID NO: 538573 - DNA, 15 bp, Homo sapiens
ggtagacagcagaca

SEQ ID NO: 538574 - DNA, 15 bp, Homo sapiens
aggtagacagcagac

SEQ ID NO: 538575 - DNA, 15 bp, Homo sapiens
caggtagacagcaga

SEQ ID NO: 538576 - DNA, 15 bp, Homo sapiens
ccaggtagacagcag

SEQ ID NO: 538577 - DNA, 15 bp, Homo sapiens
cccaggtagacagca

SEQ ID NO: 538578 - DNA, 15 bp, Homo sapiens
acccaggtagacagc

SEQ ID NO: 538579 - DNA, 15 bp, Homo sapiens
tacccaggtagacag

SEQ ID NO: 538580 - DNA, 15 bp, Homo sapiens
atacccaggtagaca

SEQ ID NO: 538581 - DNA, 15 bp, Homo sapiens
catacccaggtagac

SEQ ID NO: 538582 - DNA, 15 bp, Homo sapiens
acatacccaggtaga

SEQ ID NO: 538583 - DNA, 15 bp, Homo sapiens
cacatacccaggtag

SEQ ID NO: 538584 - DNA, 15 bp, Homo sapiens
ccacatacccaggta

SEQ ID NO: 538585 - DNA, 15 bp, Homo sapiens
gccacatacccaggt

SEQ ID NO: 538586 - DNA, 15 bp, Homo sapiens
ggccacatacccagg

SEQ ID NO: 538587 - DNA, 15 bp, Homo sapiens
tggccacatacccag

SEQ ID NO: 538588 - DNA, 15 bp, Homo sapiens
ttggccacataccca

SEQ ID NO: 538589 - DNA, 15 bp, Homo sapiens
tttggccacataccc

SEQ ID NO: 538590 - DNA, 15 bp, Homo sapiens
ctttggccacatacc

SEQ ID NO: 538591 - DNA, 15 bp, Homo sapiens
cctttggccacatac

SEQ ID NO: 538592 - DNA, 15 bp, Homo sapiens
ccctttggccacata

SEQ ID NO: 538593 - DNA, 15 bp, Homo sapiens
gccctttggccacat

SEQ ID NO: 538594 - DNA, 15 bp, Homo sapiens
tgccctttggccaca

SEQ ID NO: 538595 - DNA, 15 bp, Homo sapiens
ctgccctttggccac

SEQ ID NO: 538596 - DNA, 15 bp, Homo sapiens
cctgccctttggcca

SEQ ID NO: 538597 - DNA, 15 bp, Homo sapiens
tcctgccctttggcc

SEQ ID NO: 538598 - DNA, 15 bp, Homo sapiens
ttcctgccctttggc

SEQ ID NO: 538599 - DNA, 15 bp, Homo sapiens
gttcctgccctttgg

SEQ ID NO: 538600 - DNA, 15 bp, Homo sapiens
agttcctgccctttg

SEQ ID NO: 538601 - DNA, 15 bp, Homo sapiens
cagttcctgcccttt

SEQ ID NO: 538602 - DNA, 15 bp, Homo sapiens
ccagttcctgccctt

SEQ ID NO: 538603 - DNA, 15 bp, Homo sapiens
gccagttcctgccct

SEQ ID NO: 538604 - DNA, 15 bp, Homo sapiens
cgccagttcctgccc

SEQ ID NO: 538605 - DNA, 15 bp, Homo sapiens
ccgccagttcctgcc

SEQ ID NO: 538606 - DNA, 15 bp, Homo sapiens
cccgccagttcctgc

SEQ ID NO: 538607 - DNA, 15 bp, Homo sapiens
tcccgccagttcctg

SEQ ID NO: 538608 - DNA, 15 bp, Homo sapiens
ctcccgccagttcct

SEQ ID NO: 538609 - DNA, 15 bp, Homo sapiens
cctcccgccagttcc

SEQ ID NO: 538610 - DNA, 15 bp, Homo sapiens
acctcccgccagttc

SEQ ID NO: 538611 - DNA, 15 bp, Homo sapiens
cacctcccgccagtt

SEQ ID NO: 538612 - DNA, 15 bp, Homo sapiens
ccacctcccgccagt

SEQ ID NO: 538613 - DNA, 15 bp, Homo sapiens
cccacctcccgccag

SEQ ID NO: 538614 - DNA, 15 bp, Homo sapiens
ccccacctcccgcca

SEQ ID NO: 538615 - DNA, 15 bp, Homo sapiens
cccccacctcccgcc

SEQ ID NO: 538616 - DNA, 15 bp, Homo sapiens
tcccccacctcccgc

SEQ ID NO: 538617 - DNA, 15 bp, Homo sapiens
ttcccccacctcccg

SEQ ID NO: 538618 - DNA, 15 bp, Homo sapiens
cttcccccacctccc

SEQ ID NO: 538619 - DNA, 15 bp, Homo sapiens
gcttcccccacctcc

SEQ ID NO: 538620 - DNA, 15 bp, Homo sapiens
agcttcccccacctc

SEQ ID NO: 538621 - DNA, 15 bp, Homo sapiens
cagcttcccccacct

SEQ ID NO: 538622 - DNA, 15 bp, Homo sapiens
acagcttcccccacc

SEQ ID NO: 538623 - DNA, 15 bp, Homo sapiens
cacagcttcccccac

SEQ ID NO: 538624 - DNA, 15 bp, Homo sapiens
ccacagcttccccca

SEQ ID NO: 538625 - DNA, 15 bp, Homo sapiens
tccacagcttccccc

SEQ ID NO: 538626 - DNA, 15 bp, Homo sapiens
ctccacagcttcccc

SEQ ID NO: 538627 - DNA, 15 bp, Homo sapiens
cctccacagcttccc

SEQ ID NO: 538628 - DNA, 15 bp, Homo sapiens
gcctccacagcttcc

SEQ ID NO: 538629 - DNA, 15 bp, Homo sapiens
agcctccacagcttc

SEQ ID NO: 538630 - DNA, 15 bp, Homo sapiens
cagcctccacagctt

SEQ ID NO: 538631 - DNA, 15 bp, Homo sapiens
gcagcctccacagct

SEQ ID NO: 538632 - DNA, 15 bp, Homo sapiens
tgcagcctccacagc

SEQ ID NO: 538633 - DNA, 15 bp, Homo sapiens
ctgcagcctccacag

SEQ ID NO: 538634 - DNA, 15 bp, Homo sapiens
tctgcagcctccaca

SEQ ID NO: 538635 - DNA, 15 bp, Homo sapiens
ctctgcagcctccac

SEQ ID NO: 538636 - DNA, 15 bp, Homo sapiens
tctctgcagcctcca

SEQ ID NO: 538637 - DNA, 15 bp, Homo sapiens
ctctctgcagcctcc

SEQ ID NO: 538638 - DNA, 15 bp, Homo sapiens
cctctctgcagcctc

SEQ ID NO: 538639 - DNA, 15 bp, Homo sapiens
ccctctctgcagcct

SEQ ID NO: 538640 - DNA, 15 bp, Homo sapiens
gccctctctgcagcc

SEQ ID NO: 538641 - DNA, 15 bp, Homo sapiens
tgccctctctgcagc

SEQ ID NO: 538642 - DNA, 15 bp, Homo sapiens
gtgccctctctgcag

SEQ ID NO: 538643 - DNA, 15 bp, Homo sapiens
tgtgccctctctgca

SEQ ID NO: 538644 - DNA, 15 bp, Homo sapiens
ctgtgccctctctgc

SEQ ID NO: 538645 - DNA, 15 bp, Homo sapiens
cctgtgccctctctg

SEQ ID NO: 538646 - DNA, 15 bp, Homo sapiens
gcctgtgccctctct

SEQ ID NO: 538647 - DNA, 15 bp, Homo sapiens
tgcctgtgccctctc

SEQ ID NO: 538648 - DNA, 15 bp, Homo sapiens
ctgcctgtgccctct

SEQ ID NO: 538649 - DNA, 15 bp, Homo sapiens
tctgcctgtgccctc

SEQ ID NO: 538650 - DNA, 15 bp, Homo sapiens
ctctgcctgtgccct

SEQ ID NO: 538651 - DNA, 15 bp, Homo sapiens
cctctgcctgtgccc

SEQ ID NO: 538652 - DNA, 15 bp, Homo sapiens
ccctctgcctgtgcc

SEQ ID NO: 538653 - DNA, 15 bp, Homo sapiens
tccctctgcctgtgc

SEQ ID NO: 538654 - DNA, 15 bp, Homo sapiens
ttccctctgcctgtg

SEQ ID NO: 538655 - DNA, 15 bp, Homo sapiens
cttccctctgcctgt

SEQ ID NO: 538656 - DNA, 15 bp, Homo sapiens
ccttccctctgcctg

SEQ ID NO: 538657 - DNA, 15 bp, Homo sapiens
cccttccctctgcct

SEQ ID NO: 538658 - DNA, 15 bp, Homo sapiens
ccccttccctctgcc

SEQ ID NO: 538659 - DNA, 15 bp, Homo sapiens
cccccttccctctgc

SEQ ID NO: 538660 - DNA, 15 bp, Homo sapiens
gcccccttccctctg

SEQ ID NO: 538661 - DNA, 15 bp, Homo sapiens
agcccccttccctct

SEQ ID NO: 538662 - DNA, 15 bp, Homo sapiens
gagcccccttccctc

SEQ ID NO: 538663 - DNA, 15 bp, Homo sapiens
tgagcccccttccct

SEQ ID NO: 538664 - DNA, 15 bp, Homo sapiens
ctgagcccccttccc

SEQ ID NO: 538665 - DNA, 15 bp, Homo sapiens
cctgagcccccttcc

SEQ ID NO: 538666 - DNA, 15 bp, Homo sapiens
ccctgagcccccttc

SEQ ID NO: 538667 - DNA, 15 bp, Homo sapiens
tccctgagccccctt

SEQ ID NO: 538668 - DNA, 15 bp, Homo sapiens
ttccctgagccccct

SEQ ID NO: 538669 - DNA, 15 bp, Homo sapiens
tttccctgagccccc

SEQ ID NO: 538670 - DNA, 15 bp, Homo sapiens
ctttccctgagcccc

SEQ ID NO: 538671 - DNA, 15 bp, Homo sapiens
cctttccctgagccc

SEQ ID NO: 538672 - DNA, 15 bp, Homo sapiens
ccctttccctgagcc

SEQ ID NO: 538673 - DNA, 15 bp, Homo sapiens
cccctttccctgagc

SEQ ID NO: 538674 - DNA, 15 bp, Homo sapiens
tcccctttccctgag

SEQ ID NO: 538675 - DNA, 15 bp, Homo sapiens
ttcccctttccctga

SEQ ID NO: 538676 - DNA, 15 bp, Homo sapiens
cttcccctttccctg

SEQ ID NO: 538677 - DNA, 15 bp, Homo sapiens
tcttcccctttccct

SEQ ID NO: 538678 - DNA, 15 bp, Homo sapiens
ctcttcccctttccc

SEQ ID NO: 538679 - DNA, 15 bp, Homo sapiens
cctcttcccctttcc

SEQ ID NO: 538680 - DNA, 15 bp, Homo sapiens
tcctcttcccctttc

SEQ ID NO: 538681 - DNA, 15 bp, Homo sapiens
ctcctcttccccttt

SEQ ID NO: 538682 - DNA, 15 bp, Homo sapiens
cctcctcttcccctt

SEQ ID NO: 538683 - DNA, 15 bp, Homo sapiens
gcctcctcttcccct

SEQ ID NO: 538684 - DNA, 15 bp, Homo sapiens
tgcctcctcttcccc

SEQ ID NO: 538685 - DNA, 15 bp, Homo sapiens
ctgcctcctcttccc

SEQ ID NO: 538686 - DNA, 15 bp, Homo sapiens
tctgcctcctcttcc

SEQ ID NO: 538687 - DNA, 15 bp, Homo sapiens
ctctgcctcctcttc

SEQ ID NO: 538688 - DNA, 15 bp, Homo sapiens
cctctgcctcctctt

SEQ ID NO: 538689 - DNA, 15 bp, Homo sapiens
tcctctgcctcctct

SEQ ID NO: 538690 - DNA, 15 bp, Homo sapiens
atcctctgcctcctc

SEQ ID NO: 538691 - DNA, 15 bp, Homo sapiens
tatcctctgcctcct

SEQ ID NO: 538692 - DNA, 15 bp, Homo sapiens
ctatcctctgcctcc

SEQ ID NO: 538693 - DNA, 15 bp, Homo sapiens
cctatcctctgcctc

SEQ ID NO: 538694 - DNA, 15 bp, Homo sapiens
ccctatcctctgcct

SEQ ID NO: 538695 - DNA, 15 bp, Homo sapiens
cccctatcctctgcc

SEQ ID NO: 538696 - DNA, 15 bp, Homo sapiens
tcccctatcctctgc

SEQ ID NO: 538697 - DNA, 15 bp, Homo sapiens
gtcccctatcctctg

SEQ ID NO: 538698 - DNA, 15 bp, Homo sapiens
ggtcccctatcctct

SEQ ID NO: 538699 - DNA, 15 bp, Homo sapiens
gggtcccctatcctc

SEQ ID NO: 538700 - DNA, 15 bp, Homo sapiens
tgggtcccctatcct

SEQ ID NO: 538701 - DNA, 15 bp, Homo sapiens
ctgggtcccctatcc

SEQ ID NO: 538702 - DNA, 15 bp, Homo sapiens
cctgggtcccctatc

SEQ ID NO: 538703 - DNA, 15 bp, Homo sapiens
ccctgggtcccctat

SEQ ID NO: 538704 - DNA, 15 bp, Homo sapiens
tccctgggtccccta

SEQ ID NO: 538705 - DNA, 15 bp, Homo sapiens
ttccctgggtcccct

SEQ ID NO: 538706 - DNA, 15 bp, Homo sapiens
cttccctgggtcccc

SEQ ID NO: 538707 - DNA, 15 bp, Homo sapiens
tcttccctgggtccc

SEQ ID NO: 538708 - DNA, 15 bp, Homo sapiens
atcttccctgggtcc

SEQ ID NO: 538709 - DNA, 15 bp, Homo sapiens
catcttccctgggtc

SEQ ID NO: 538710 - DNA, 15 bp, Homo sapiens
gcatcttccctgggt

SEQ ID NO: 538711 - DNA, 15 bp, Homo sapiens
ggcatcttccctggg

SEQ ID NO: 538712 - DNA, 15 bp, Homo sapiens
aggcatcttccctgg

SEQ ID NO: 538713 - DNA, 15 bp, Homo sapiens
taggcatcttccctg

SEQ ID NO: 538714 - DNA, 15 bp, Homo sapiens
ataggcatcttccct

SEQ ID NO: 538715 - DNA, 15 bp, Homo sapiens
tataggcatcttccc

SEQ ID NO: 538716 - DNA, 15 bp, Homo sapiens
ctataggcatcttcc

SEQ ID NO: 538717 - DNA, 15 bp, Homo sapiens
tctataggcatcttc

SEQ ID NO: 538718 - DNA, 15 bp, Homo sapiens
ttctataggcatctt

SEQ ID NO: 538719 - DNA, 15 bp, Homo sapiens
tttctataggcatct

SEQ ID NO: 538720 - DNA, 15 bp, Homo sapiens
atttctataggcatc

SEQ ID NO: 538721 - DNA, 15 bp, Homo sapiens
gatttctataggcat

SEQ ID NO: 538722 - DNA, 15 bp, Homo sapiens
cgatttctataggca

SEQ ID NO: 538723 - DNA, 15 bp, Homo sapiens
acgatttctataggc

SEQ ID NO: 538724 - DNA, 15 bp, Homo sapiens
tacgatttctatagg

SEQ ID NO: 538725 - DNA, 15 bp, Homo sapiens
atacgatttctatag

SEQ ID NO: 538726 - DNA, 15 bp, Homo sapiens
gatacgatttctata

SEQ ID NO: 538727 - DNA, 15 bp, Homo sapiens
agatacgatttctat

SEQ ID NO: 538728 - DNA, 15 bp, Homo sapiens
cagatacgatttcta

SEQ ID NO: 538729 - DNA, 15 bp, Homo sapiens
acagatacgatttct

SEQ ID NO: 538730 - DNA, 15 bp, Homo sapiens
cacagatacgatttc

SEQ ID NO: 538731 - DNA, 15 bp, Homo sapiens
gcacagatacgattt

SEQ ID NO: 538732 - DNA, 15 bp, Homo sapiens
ggcacagatacgatt

SEQ ID NO: 538733 - DNA, 15 bp, Homo sapiens
tggcacagatacgat

SEQ ID NO: 538734 - DNA, 15 bp, Homo sapiens
ttggcacagatacga

SEQ ID NO: 538735 - DNA, 15 bp, Homo sapiens
cttggcacagatacg

SEQ ID NO: 538736 - DNA, 15 bp, Homo sapiens
tcttggcacagatac

SEQ ID NO: 538737 - DNA, 15 bp, Homo sapiens
atcttggcacagata

SEQ ID NO: 538738 - DNA, 15 bp, Homo sapiens
catcttggcacagat

SEQ ID NO: 538739 - DNA, 15 bp, Homo sapiens
ccatcttggcacaga

SEQ ID NO: 538740 - DNA, 15 bp, Homo sapiens
cccatcttggcacag

SEQ ID NO: 538741 - DNA, 15 bp, Homo sapiens
gcccatcttggcaca

SEQ ID NO: 538742 - DNA, 15 bp, Homo sapiens
ggcccatcttggcac

SEQ ID NO: 538743 - DNA, 15 bp, Homo sapiens
tggcccatcttggca

SEQ ID NO: 538744 - DNA, 15 bp, Homo sapiens
ttggcccatcttggc

SEQ ID NO: 538745 - DNA, 15 bp, Homo sapiens
cttggcccatcttgg

SEQ ID NO: 538746 - DNA, 15 bp, Homo sapiens
ccttggcccatcttg

SEQ ID NO: 538747 - DNA, 15 bp, Homo sapiens
accttggcccatctt

SEQ ID NO: 538748 - DNA, 15 bp, Homo sapiens
caccttggcccatct

SEQ ID NO: 538749 - DNA, 15 bp, Homo sapiens
ccaccttggcccatc

SEQ ID NO: 538750 - DNA, 15 bp, Homo sapiens
cccaccttggcccat

SEQ ID NO: 538751 - DNA, 15 bp, Homo sapiens
ccccaccttggccca

SEQ ID NO: 538752 - DNA, 15 bp, Homo sapiens
gccccaccttggccc

SEQ ID NO: 538753 - DNA, 15 bp, Homo sapiens
agccccaccttggcc

SEQ ID NO: 538754 - DNA, 15 bp, Homo sapiens
cagccccaccttggc

SEQ ID NO: 538755 - DNA, 15 bp, Homo sapiens
ccagccccaccttgg

SEQ ID NO: 538756 - DNA, 15 bp, Homo sapiens
tccagccccaccttg

SEQ ID NO: 538757 - DNA, 15 bp, Homo sapiens
ctccagccccacctt

SEQ ID NO: 538758 - DNA, 15 bp, Homo sapiens
cctccagccccacct

SEQ ID NO: 538759 - DNA, 15 bp, Homo sapiens
ccctccagccccacc

SEQ ID NO: 538760 - DNA, 15 bp, Homo sapiens
tccctccagccccac

SEQ ID NO: 538761 - DNA, 15 bp, Homo sapiens
ctccctccagcccca

SEQ ID NO: 538762 - DNA, 15 bp, Homo sapiens
gctccctccagcccc

SEQ ID NO: 538763 - DNA, 15 bp, Homo sapiens
ggctccctccagccc

SEQ ID NO: 538764 - DNA, 15 bp, Homo sapiens
gggctccctccagcc

SEQ ID NO: 538765 - DNA, 15 bp, Homo sapiens
tgggctccctccagc

SEQ ID NO: 538766 - DNA, 15 bp, Homo sapiens
ctgggctccctccag

SEQ ID NO: 538767 - DNA, 15 bp, Homo sapiens
gctgggctccctcca

SEQ ID NO: 538768 - DNA, 15 bp, Homo sapiens
cgctgggctccctcc

SEQ ID NO: 538769 - DNA, 15 bp, Homo sapiens
tcgctgggctccctc

SEQ ID NO: 538770 - DNA, 15 bp, Homo sapiens
ttcgctgggctccct

SEQ ID NO: 538771 - DNA, 15 bp, Homo sapiens
cttcgctgggctccc

SEQ ID NO: 538772 - DNA, 15 bp, Homo sapiens
ccttcgctgggctcc

SEQ ID NO: 538773 - DNA, 15 bp, Homo sapiens
tccttcgctgggctc

SEQ ID NO: 538774 - DNA, 15 bp, Homo sapiens
ctccttcgctgggct

SEQ ID NO: 538775 - DNA, 15 bp, Homo sapiens
tctccttcgctgggc

SEQ ID NO: 538776 - DNA, 15 bp, Homo sapiens
ttctccttcgctggg

SEQ ID NO: 538777 - DNA, 15 bp, Homo sapiens
cttctccttcgctgg

SEQ ID NO: 538778 - DNA, 15 bp, Homo sapiens
ccttctccttcgctg

SEQ ID NO: 538779 - DNA, 15 bp, Homo sapiens
cccttctccttcgct

SEQ ID NO: 538780 - DNA, 15 bp, Homo sapiens
ccccttctccttcgc

SEQ ID NO: 538781 - DNA, 15 bp, Homo sapiens
gccccttctccttcg

SEQ ID NO: 538782 - DNA, 15 bp, Homo sapiens
cgccccttctccttc

SEQ ID NO: 538783 - DNA, 15 bp, Homo sapiens
acgccccttctcctt

SEQ ID NO: 538784 - DNA, 15 bp, Homo sapiens
gacgccccttctcct

SEQ ID NO: 538785 - DNA, 15 bp, Homo sapiens
ggacgccccttctcc

SEQ ID NO: 538786 - DNA, 15 bp, Homo sapiens
tggacgccccttctc

SEQ ID NO: 538787 - DNA, 15 bp, Homo sapiens
gtggacgccccttct

SEQ ID NO: 538788 - DNA, 15 bp, Homo sapiens
tgtggacgccccttc

SEQ ID NO: 538789 - DNA, 15 bp, Homo sapiens
ctgtggacgcccctt

SEQ ID NO: 538790 - DNA, 15 bp, Homo sapiens
actgtggacgcccct

SEQ ID NO: 538791 - DNA, 15 bp, Homo sapiens
gactgtggacgcccc

SEQ ID NO: 538792 - DNA, 15 bp, Homo sapiens
agactgtggacgccc

SEQ ID NO: 538793 - DNA, 15 bp, Homo sapiens
gagactgtggacgcc

SEQ ID NO: 538794 - DNA, 15 bp, Homo sapiens
tgagactgtggacgc

SEQ ID NO: 538795 - DNA, 15 bp, Homo sapiens
gtgagactgtggacg

SEQ ID NO: 538796 - DNA, 15 bp, Homo sapiens
tgtgagactgtggac

SEQ ID NO: 538797 - DNA, 15 bp, Homo sapiens
gtgtgagactgtgga

SEQ ID NO: 538798 - DNA, 15 bp, Homo sapiens
tgtgtgagactgtgg

SEQ ID NO: 538799 - DNA, 15 bp, Homo sapiens
ctgtgtgagactgtg

SEQ ID NO: 538800 - DNA, 15 bp, Homo sapiens
cctgtgtgagactgt

SEQ ID NO: 538801 - DNA, 15 bp, Homo sapiens
ccctgtgtgagactg

SEQ ID NO: 538802 - DNA, 15 bp, Homo sapiens
tccctgtgtgagact

SEQ ID NO: 538803 - DNA, 15 bp, Homo sapiens
ctccctgtgtgagac

SEQ ID NO: 538804 - DNA, 15 bp, Homo sapiens
cctccctgtgtgaga

SEQ ID NO: 538805 - DNA, 15 bp, Homo sapiens
gcctccctgtgtgag

SEQ ID NO: 538806 - DNA, 15 bp, Homo sapiens
tgcctccctgtgtga

SEQ ID NO: 538807 - DNA, 15 bp, Homo sapiens
ctgcctccctgtgtg

SEQ ID NO: 538808 - DNA, 15 bp, Homo sapiens
cctgcctccctgtgt

SEQ ID NO: 538809 - DNA, 15 bp, Homo sapiens
tcctgcctccctgtg

SEQ ID NO: 538810 - DNA, 15 bp, Homo sapiens
ctcctgcctccctgt

SEQ ID NO: 538811 - DNA, 15 bp, Homo sapiens
gctcctgcctccctg

SEQ ID NO: 538812 - DNA, 15 bp, Homo sapiens
tgctcctgcctccct

SEQ ID NO: 538813 - DNA, 15 bp, Homo sapiens
ttgctcctgcctccc

SEQ ID NO: 538814 - DNA, 15 bp, Homo sapiens
cttgctcctgcctcc

SEQ ID NO: 538815 - DNA, 15 bp, Homo sapiens
tcttgctcctgcctc

SEQ ID NO: 538816 - DNA, 15 bp, Homo sapiens
ctcttgctcctgcct

SEQ ID NO: 538817 - DNA, 15 bp, Homo sapiens
actcttgctcctgcc

SEQ ID NO: 538818 - DNA, 15 bp, Homo sapiens
gactcttgctcctgc

SEQ ID NO: 538819 - DNA, 15 bp, Homo sapiens
tgactcttgctcctg

SEQ ID NO: 538820 - DNA, 15 bp, Homo sapiens
gtgactcttgctcct

SEQ ID NO: 538821 - DNA, 15 bp, Homo sapiens
ggtgactcttgctcc

SEQ ID NO: 538822 - DNA, 15 bp, Homo sapiens
aggtgactcttgctc

SEQ ID NO: 538823 - DNA, 15 bp, Homo sapiens
gaggtgactcttgct

SEQ ID NO: 538824 - DNA, 15 bp, Homo sapiens
ggaggtgactcttgc

SEQ ID NO: 538825 - DNA, 15 bp, Homo sapiens
gggaggtgactcttg

SEQ ID NO: 538826 - DNA, 15 bp, Homo sapiens
ggggaggtgactctt

SEQ ID NO: 538827 - DNA, 15 bp, Homo sapiens
gggggaggtgactct

SEQ ID NO: 538828 - DNA, 15 bp, Homo sapiens
tgggggaggtgactc

SEQ ID NO: 538829 - DNA, 15 bp, Homo sapiens
gtgggggaggtgact

SEQ ID NO: 538830 - DNA, 15 bp, Homo sapiens
ggtgggggaggtgac

SEQ ID NO: 538831 - DNA, 15 bp, Homo sapiens
aggtgggggaggtga

SEQ ID NO: 538832 - DNA, 15 bp, Homo sapiens
gaggtgggggaggtg

SEQ ID NO: 538833 - DNA, 15 bp, Homo sapiens
ggaggtgggggaggt

SEQ ID NO: 538834 - DNA, 15 bp, Homo sapiens
aggaggtgggggagg

SEQ ID NO: 538835 - DNA, 15 bp, Homo sapiens
caggaggtgggggag

SEQ ID NO: 538836 - DNA, 15 bp, Homo sapiens
acaggaggtggggga

SEQ ID NO: 538837 - DNA, 15 bp, Homo sapiens
aacaggaggtggggg

SEQ ID NO: 538838 - DNA, 15 bp, Homo sapiens
gaacaggaggtgggg

SEQ ID NO: 538839 - DNA, 15 bp, Homo sapiens
ggaacaggaggtggg

SEQ ID NO: 538840 - DNA, 15 bp, Homo sapiens
gggaacaggaggtgg

SEQ ID NO: 538841 - DNA, 15 bp, Homo sapiens
ggggaacaggaggtg

SEQ ID NO: 538842 - DNA, 15 bp, Homo sapiens
tggggaacaggaggt

SEQ ID NO: 538843 - DNA, 15 bp, Homo sapiens
gtggggaacaggagg

SEQ ID NO: 538844 - DNA, 15 bp, Homo sapiens
tgtggggaacaggag

SEQ ID NO: 538845 - DNA, 15 bp, Homo sapiens
ctgtggggaacagga

SEQ ID NO: 538846 - DNA, 15 bp, Homo sapiens
cctgtggggaacagg

SEQ ID NO: 538847 - DNA, 15 bp, Homo sapiens
gcctgtggggaacag

SEQ ID NO: 538848 - DNA, 15 bp, Homo sapiens
ggcctgtggggaaca

SEQ ID NO: 538849 - DNA, 15 bp, Homo sapiens
tggcctgtggggaac

SEQ ID NO: 538850 - DNA, 15 bp, Homo sapiens
ttggcctgtggggaa

SEQ ID NO: 538851 - DNA, 15 bp, Homo sapiens
tttggcctgtgggga

SEQ ID NO: 538852 - DNA, 15 bp, Homo sapiens
ttttggcctgtgggg

SEQ ID NO: 538853 - DNA, 15 bp, Homo sapiens
attttggcctgtggg

SEQ ID NO: 538854 - DNA, 15 bp, Homo sapiens
tattttggcctgtgg

SEQ ID NO: 538855 - DNA, 15 bp, Homo sapiens
ttattttggcctgtg

SEQ ID NO: 538856 - DNA, 15 bp, Homo sapiens
cttattttggcctgt

SEQ ID NO: 538857 - DNA, 15 bp, Homo sapiens
ccttattttggcctg

SEQ ID NO: 538858 - DNA, 15 bp, Homo sapiens
tccttattttggcct

SEQ ID NO: 538859 - DNA, 15 bp, Homo sapiens
ttccttattttggcc

SEQ ID NO: 538860 - DNA, 15 bp, Homo sapiens
gttccttattttggc

SEQ ID NO: 538861 - DNA, 15 bp, Homo sapiens
agttccttattttgg

SEQ ID NO: 538862 - DNA, 15 bp, Homo sapiens
tagttccttattttg

SEQ ID NO: 538863 - DNA, 15 bp, Homo sapiens
ttagttccttatttt

SEQ ID NO: 538864 - DNA, 15 bp, Homo sapiens
tttagttccttattt

SEQ ID NO: 538865 - DNA, 15 bp, Homo sapiens
ctttagttccttatt

SEQ ID NO: 538866 - DNA, 15 bp, Homo sapiens
actttagttccttat

SEQ ID NO: 538867 - DNA, 15 bp, Homo sapiens
aactttagttcctta

SEQ ID NO: 538868 - DNA, 15 bp, Homo sapiens
caactttagttcctt

SEQ ID NO: 538869 - DNA, 15 bp, Homo sapiens
gcaactttagttcct

SEQ ID NO: 538870 - DNA, 15 bp, Homo sapiens
agcaactttagttcc

SEQ ID NO: 538871 - DNA, 15 bp, Homo sapiens
gagcaactttagttc

SEQ ID NO: 538872 - DNA, 15 bp, Homo sapiens
agagcaactttagtt

SEQ ID NO: 538873 - DNA, 15 bp, Homo sapiens
aagagcaactttagt

SEQ ID NO: 538874 - DNA, 15 bp, Homo sapiens
caagagcaactttag

SEQ ID NO: 538875 - DNA, 15 bp, Homo sapiens
tcaagagcaacttta

SEQ ID NO: 538876 - DNA, 15 bp, Homo sapiens
gtcaagagcaacttt

SEQ ID NO: 538877 - DNA, 15 bp, Homo sapiens
agtcaagagcaactt

SEQ ID NO: 538878 - DNA, 15 bp, Homo sapiens
cagtcaagagcaact

SEQ ID NO: 538879 - DNA, 15 bp, Homo sapiens
tcagtcaagagcaac

SEQ ID NO: 538880 - DNA, 15 bp, Homo sapiens
ctcagtcaagagcaa

SEQ ID NO: 538881 - DNA, 15 bp, Homo sapiens
gctcagtcaagagca

SEQ ID NO: 538882 - DNA, 15 bp, Homo sapiens
tgctcagtcaagagc

SEQ ID NO: 538883 - DNA, 15 bp, Homo sapiens
gtgctcagtcaagag

SEQ ID NO: 538884 - DNA, 15 bp, Homo sapiens
ggtgctcagtcaaga

SEQ ID NO: 538885 - DNA, 15 bp, Homo sapiens
tggtgctcagtcaag

SEQ ID NO: 538886 - DNA, 15 bp, Homo sapiens
ctggtgctcagtcaa

SEQ ID NO: 538887 - DNA, 15 bp, Homo sapiens
cctggtgctcagtca

SEQ ID NO: 538888 - DNA, 15 bp, Homo sapiens
ccctggtgctcagtc

SEQ ID NO: 538889 - DNA, 15 bp, Homo sapiens
gccctggtgctcagt

SEQ ID NO: 538890 - DNA, 15 bp, Homo sapiens
agccctggtgctcag

SEQ ID NO: 538891 - DNA, 15 bp, Homo sapiens
cagccctggtgctca

SEQ ID NO: 538892 - DNA, 15 bp, Homo sapiens
ccagccctggtgctc

SEQ ID NO: 538893 - DNA, 15 bp, Homo sapiens
cccagccctggtgct

SEQ ID NO: 538894 - DNA, 15 bp, Homo sapiens
ccccagccctggtgc

SEQ ID NO: 538895 - DNA, 15 bp, Homo sapiens
cccccagccctggtg

SEQ ID NO: 538896 - DNA, 15 bp, Homo sapiens
gcccccagccctggt

SEQ ID NO: 538897 - DNA, 15 bp, Homo sapiens
tgcccccagccctgg

SEQ ID NO: 538898 - DNA, 15 bp, Homo sapiens
ctgcccccagccctg

SEQ ID NO: 538899 - DNA, 15 bp, Homo sapiens
cctgcccccagccct

SEQ ID NO: 538900 - DNA, 15 bp, Homo sapiens
tcctgcccccagccc

SEQ ID NO: 538901 - DNA, 15 bp, Homo sapiens
ttcctgcccccagcc

SEQ ID NO: 538902 - DNA, 15 bp, Homo sapiens
cttcctgcccccagc

SEQ ID NO: 538903 - DNA, 15 bp, Homo sapiens
ccttcctgcccccag

SEQ ID NO: 538904 - DNA, 15 bp, Homo sapiens
cccttcctgccccca

SEQ ID NO: 538905 - DNA, 15 bp, Homo sapiens
ccccttcctgccccc

SEQ ID NO: 538906 - DNA, 15 bp, Homo sapiens
tccccttcctgcccc

SEQ ID NO: 538907 - DNA, 15 bp, Homo sapiens
gtccccttcctgccc

SEQ ID NO: 538908 - DNA, 15 bp, Homo sapiens
agtccccttcctgcc

SEQ ID NO: 538909 - DNA, 15 bp, Homo sapiens
aagtccccttcctgc

SEQ ID NO: 538910 - DNA, 15 bp, Homo sapiens
taagtccccttcctg

SEQ ID NO: 538911 - DNA, 15 bp, Homo sapiens
ctaagtccccttcct

SEQ ID NO: 538912 - DNA, 15 bp, Homo sapiens
cctaagtccccttcc

SEQ ID NO: 538913 - DNA, 15 bp, Homo sapiens
ccctaagtccccttc

SEQ ID NO: 538914 - DNA, 15 bp, Homo sapiens
cccctaagtcccctt

SEQ ID NO: 538915 - DNA, 15 bp, Homo sapiens
acccctaagtcccct

SEQ ID NO: 538916 - DNA, 15 bp, Homo sapiens
tacccctaagtcccc

SEQ ID NO: 538917 - DNA, 15 bp, Homo sapiens
ctacccctaagtccc

SEQ ID NO: 538918 - DNA, 15 bp, Homo sapiens
gctacccctaagtcc

SEQ ID NO: 538919 - DNA, 15 bp, Homo sapiens
tgctacccctaagtc

SEQ ID NO: 538920 - DNA, 15 bp, Homo sapiens
ctgctacccctaagt

SEQ ID NO: 538921 - DNA, 15 bp, Homo sapiens
gctgctacccctaag

SEQ ID NO: 538922 - DNA, 15 bp, Homo sapiens
tgctgctacccctaa

SEQ ID NO: 538923 - DNA, 15 bp, Homo sapiens
atgctgctaccccta

SEQ ID NO: 538924 - DNA, 15 bp, Homo sapiens
aatgctgctacccct

SEQ ID NO: 538925 - DNA, 15 bp, Homo sapiens
gaatgctgctacccc

SEQ ID NO: 538926 - DNA, 15 bp, Homo sapiens
tgaatgctgctaccc

SEQ ID NO: 538927 - DNA, 15 bp, Homo sapiens
ctgaatgctgctacc

SEQ ID NO: 538928 - DNA, 15 bp, Homo sapiens
gctgaatgctgctac

SEQ ID NO: 538929 - DNA, 15 bp, Homo sapiens
cgctgaatgctgcta

SEQ ID NO: 538930 - DNA, 15 bp, Homo sapiens
acgctgaatgctgct

SEQ ID NO: 538931 - DNA, 15 bp, Homo sapiens
gacgctgaatgctgc

SEQ ID NO: 538932 - DNA, 15 bp, Homo sapiens
agacgctgaatgctg

SEQ ID NO: 538933 - DNA, 15 bp, Homo sapiens
cagacgctgaatgct

SEQ ID NO: 538934 - DNA, 15 bp, Homo sapiens
acagacgctgaatgc

SEQ ID NO: 538935 - DNA, 15 bp, Homo sapiens
gacagacgctgaatg

SEQ ID NO: 538936 - DNA, 15 bp, Homo sapiens
tgacagacgctgaat

SEQ ID NO: 538937 - DNA, 15 bp, Homo sapiens
ttgacagacgctgaa

SEQ ID NO: 538938 - DNA, 15 bp, Homo sapiens
cttgacagacgctga

SEQ ID NO: 538939 - DNA, 15 bp, Homo sapiens
ccttgacagacgctg

SEQ ID NO: 538940 - DNA, 15 bp, Homo sapiens
cccttgacagacgct

SEQ ID NO: 538941 - DNA, 15 bp, Homo sapiens
ccccttgacagacgc

SEQ ID NO: 538942 - DNA, 15 bp, Homo sapiens
tccccttgacagacg

SEQ ID NO: 538943 - DNA, 15 bp, Homo sapiens
ctccccttgacagac

SEQ ID NO: 538944 - DNA, 15 bp, Homo sapiens
tctccccttgacaga

SEQ ID NO: 538945 - DNA, 15 bp, Homo sapiens
ttctccccttgacag

SEQ ID NO: 538946 - DNA, 15 bp, Homo sapiens
tttctccccttgaca

SEQ ID NO: 538947 - DNA, 15 bp, Homo sapiens
ttttctccccttgac

SEQ ID NO: 538948 - DNA, 15 bp, Homo sapiens
tttttctccccttga

SEQ ID NO: 538949 - DNA, 15 bp, Homo sapiens
ctttttctccccttg

SEQ ID NO: 538950 - DNA, 15 bp, Homo sapiens
gctttttctcccctt

SEQ ID NO: 538951 - DNA, 15 bp, Homo sapiens
agctttttctcccct

SEQ ID NO: 538952 - DNA, 15 bp, Homo sapiens
aagctttttctcccc

SEQ ID NO: 538953 - DNA, 15 bp, Homo sapiens
aaagctttttctccc

SEQ ID NO: 538954 - DNA, 15 bp, Homo sapiens
gaaagctttttctcc

SEQ ID NO: 538955 - DNA, 15 bp, Homo sapiens
agaaagctttttctc

SEQ ID NO: 538956 - DNA, 15 bp, Homo sapiens
gagaaagctttttct

SEQ ID NO: 538957 - DNA, 15 bp, Homo sapiens
agagaaagctttttc

SEQ ID NO: 538958 - DNA, 15 bp, Homo sapiens
cagagaaagcttttt

SEQ ID NO: 538959 - DNA, 15 bp, Homo sapiens
gcagagaaagctttt

SEQ ID NO: 538960 - DNA, 15 bp, Homo sapiens
ggcagagaaagcttt

SEQ ID NO: 538961 - DNA, 15 bp, Homo sapiens
aggcagagaaagctt

SEQ ID NO: 538962 - DNA, 15 bp, Homo sapiens
aaggcagagaaagct

SEQ ID NO: 538963 - DNA, 15 bp, Homo sapiens
taaggcagagaaagc

SEQ ID NO: 538964 - DNA, 15 bp, Homo sapiens
ttaaggcagagaaag

SEQ ID NO: 538965 - DNA, 15 bp, Homo sapiens
tttaaggcagagaaa

SEQ ID NO: 538966 - DNA, 15 bp, Homo sapiens
gtttaaggcagagaa

SEQ ID NO: 538967 - DNA, 15 bp, Homo sapiens
ggtttaaggcagaga

SEQ ID NO: 538968 - DNA, 15 bp, Homo sapiens
aggtttaaggcagag

SEQ ID NO: 538969 - DNA, 15 bp, Homo sapiens
gaggtttaaggcaga

SEQ ID NO: 538970 - DNA, 15 bp, Homo sapiens
tgaggtttaaggcag

SEQ ID NO: 538971 - DNA, 15 bp, Homo sapiens
ctgaggtttaaggca

SEQ ID NO: 538972 - DNA, 15 bp, Homo sapiens
cctgaggtttaaggc

SEQ ID NO: 538973 - DNA, 15 bp, Homo sapiens
acctgaggtttaagg

SEQ ID NO: 538974 - DNA, 15 bp, Homo sapiens
cacctgaggtttaag

SEQ ID NO: 538975 - DNA, 15 bp, Homo sapiens
gcacctgaggtttaa

SEQ ID NO: 538976 - DNA, 15 bp, Homo sapiens
ggcacctgaggttta

SEQ ID NO: 538977 - DNA, 15 bp, Homo sapiens
aggcacctgaggttt

SEQ ID NO: 538978 - DNA, 15 bp, Homo sapiens
gaggcacctgaggtt

SEQ ID NO: 538979 - DNA, 15 bp, Homo sapiens
agaggcacctgaggt

SEQ ID NO: 538980 - DNA, 15 bp, Homo sapiens
gagaggcacctgagg

SEQ ID NO: 538981 - DNA, 15 bp, Homo sapiens
agagaggcacctgag

SEQ ID NO: 538982 - DNA, 15 bp, Homo sapiens
gagagaggcacctga

SEQ ID NO: 538983 - DNA, 15 bp, Homo sapiens
agagagaggcacctg

SEQ ID NO: 538984 - DNA, 15 bp, Homo sapiens
cagagagaggcacct

SEQ ID NO: 538985 - DNA, 15 bp, Homo sapiens
acagagagaggcacc

SEQ ID NO: 538986 - DNA, 15 bp, Homo sapiens
aacagagagaggcac

SEQ ID NO: 538987 - DNA, 15 bp, Homo sapiens
caacagagagaggca

SEQ ID NO: 538988 - DNA, 15 bp, Homo sapiens
ccaacagagagaggc

SEQ ID NO: 538989 - DNA, 15 bp, Homo sapiens
cccaacagagagagg

SEQ ID NO: 538990 - DNA, 15 bp, Homo sapiens
tcccaacagagagag

SEQ ID NO: 538991 - DNA, 15 bp, Homo sapiens
ctcccaacagagaga

SEQ ID NO: 538992 - DNA, 15 bp, Homo sapiens
actcccaacagagag

SEQ ID NO: 538993 - DNA, 15 bp, Homo sapiens
gactcccaacagaga

SEQ ID NO: 538994 - DNA, 15 bp, Homo sapiens
ggactcccaacagag

SEQ ID NO: 538995 - DNA, 15 bp, Homo sapiens
gggactcccaacaga

SEQ ID NO: 538996 - DNA, 15 bp, Homo sapiens
agggactcccaacag

SEQ ID NO: 538997 - DNA, 15 bp, Homo sapiens
aagggactcccaaca

SEQ ID NO: 538998 - DNA, 15 bp, Homo sapiens
gaagggactcccaac

SEQ ID NO: 538999 - DNA, 15 bp, Homo sapiens
agaagggactcccaa

SEQ ID NO: 539000 - DNA, 15 bp, Homo sapiens
gagaagggactccca

SEQ ID NO: 539001 - DNA, 15 bp, Homo sapiens
tgagaagggactccc

SEQ ID NO: 539002 - DNA, 15 bp, Homo sapiens
ctgagaagggactcc

SEQ ID NO: 539003 - DNA, 15 bp, Homo sapiens
gctgagaagggactc

SEQ ID NO: 539004 - DNA, 15 bp, Homo sapiens
tgctgagaagggact

SEQ ID NO: 539005 - DNA, 15 bp, Homo sapiens
gtgctgagaagggac

SEQ ID NO: 539006 - DNA, 15 bp, Homo sapiens
agtgctgagaaggga

SEQ ID NO: 539007 - DNA, 15 bp, Homo sapiens
cagtgctgagaaggg

SEQ ID NO: 539008 - DNA, 15 bp, Homo sapiens
ccagtgctgagaagg

SEQ ID NO: 539009 - DNA, 15 bp, Homo sapiens
cccagtgctgagaag

SEQ ID NO: 539010 - DNA, 15 bp, Homo sapiens
ccccagtgctgagaa

SEQ ID NO: 539011 - DNA, 15 bp, Homo sapiens
cccccagtgctgaga

SEQ ID NO: 539012 - DNA, 15 bp, Homo sapiens
tcccccagtgctgag

SEQ ID NO: 539013 - DNA, 15 bp, Homo sapiens
ttcccccagtgctga

SEQ ID NO: 539014 - DNA, 15 bp, Homo sapiens
attcccccagtgctg

SEQ ID NO: 539015 - DNA, 15 bp, Homo sapiens
cattcccccagtgct

SEQ ID NO: 539016 - DNA, 15 bp, Homo sapiens
ccattcccccagtgc

SEQ ID NO: 539017 - DNA, 15 bp, Homo sapiens
cccattcccccagtg

SEQ ID NO: 539018 - DNA, 15 bp, Homo sapiens
acccattcccccagt

SEQ ID NO: 539019 - DNA, 15 bp, Homo sapiens
cacccattcccccag

SEQ ID NO: 539020 - DNA, 15 bp, Homo sapiens
acacccattccccca

SEQ ID NO: 539021 - DNA, 15 bp, Homo sapiens
gacacccattccccc

SEQ ID NO: 539022 - DNA, 15 bp, Homo sapiens
agacacccattcccc

SEQ ID NO: 539023 - DNA, 15 bp, Homo sapiens
gagacacccattccc

SEQ ID NO: 539024 - DNA, 15 bp, Homo sapiens
tgagacacccattcc

SEQ ID NO: 539025 - DNA, 15 bp, Homo sapiens
atgagacacccattc

SEQ ID NO: 539026 - DNA, 15 bp, Homo sapiens
catgagacacccatt

SEQ ID NO: 539027 - DNA, 15 bp, Homo sapiens
ccatgagacacccat

SEQ ID NO: 539028 - DNA, 15 bp, Homo sapiens
tccatgagacaccca

SEQ ID NO: 539029 - DNA, 15 bp, Homo sapiens
gtccatgagacaccc

SEQ ID NO: 539030 - DNA, 15 bp, Homo sapiens
agtccatgagacacc

SEQ ID NO: 539031 - DNA, 15 bp, Homo sapiens
gagtccatgagacac

SEQ ID NO: 539032 - DNA, 15 bp, Homo sapiens
ggagtccatgagaca

SEQ ID NO: 539033 - DNA, 15 bp, Homo sapiens
gggagtccatgagac

SEQ ID NO: 539034 - DNA, 15 bp, Homo sapiens
ggggagtccatgaga

SEQ ID NO: 539035 - DNA, 15 bp, Homo sapiens
gggggagtccatgag

SEQ ID NO: 539036 - DNA, 15 bp, Homo sapiens
agggggagtccatga

SEQ ID NO: 539037 - DNA, 15 bp, Homo sapiens
gagggggagtccatg

SEQ ID NO: 539038 - DNA, 15 bp, Homo sapiens
tgagggggagtccat

SEQ ID NO: 539039 - DNA, 15 bp, Homo sapiens
gtgagggggagtcca

SEQ ID NO: 539040 - DNA, 15 bp, Homo sapiens
ggtgagggggagtcc

SEQ ID NO: 539041 - DNA, 15 bp, Homo sapiens
aggtgagggggagtc

SEQ ID NO: 539042 - DNA, 15 bp, Homo sapiens
caggtgagggggagt

SEQ ID NO: 539043 - DNA, 15 bp, Homo sapiens
gcaggtgagggggag

SEQ ID NO: 539044 - DNA, 15 bp, Homo sapiens
agcaggtgaggggga

SEQ ID NO: 539045 - DNA, 15 bp, Homo sapiens
gagcaggtgaggggg

SEQ ID NO: 539046 - DNA, 15 bp, Homo sapiens
tgagcaggtgagggg

SEQ ID NO: 539047 - DNA, 15 bp, Homo sapiens
ttgagcaggtgaggg

SEQ ID NO: 539048 - DNA, 15 bp, Homo sapiens
cttgagcaggtgagg

SEQ ID NO: 539049 - DNA, 15 bp, Homo sapiens
ccttgagcaggtgag

SEQ ID NO: 539050 - DNA, 15 bp, Homo sapiens
tccttgagcaggtga

SEQ ID NO: 539051 - DNA, 15 bp, Homo sapiens
gtccttgagcaggtg

SEQ ID NO: 539052 - DNA, 15 bp, Homo sapiens
tgtccttgagcaggt

SEQ ID NO: 539053 - DNA, 15 bp, Homo sapiens
ctgtccttgagcagg

SEQ ID NO: 539054 - DNA, 15 bp, Homo sapiens
gctgtccttgagcag

SEQ ID NO: 539055 - DNA, 15 bp, Homo sapiens
agctgtccttgagca

SEQ ID NO: 539056 - DNA, 15 bp, Homo sapiens
cagctgtccttgagc

SEQ ID NO: 539057 - DNA, 15 bp, Homo sapiens
ccagctgtccttgag

SEQ ID NO: 539058 - DNA, 15 bp, Homo sapiens
gccagctgtccttga

SEQ ID NO: 539059 - DNA, 15 bp, Homo sapiens
tgccagctgtccttg

SEQ ID NO: 539060 - DNA, 15 bp, Homo sapiens
ctgccagctgtcctt

SEQ ID NO: 539061 - DNA, 15 bp, Homo sapiens
cctgccagctgtcct

SEQ ID NO: 539062 - DNA, 15 bp, Homo sapiens
ccctgccagctgtcc

SEQ ID NO: 539063 - DNA, 15 bp, Homo sapiens
cccctgccagctgtc

SEQ ID NO: 539064 - DNA, 15 bp, Homo sapiens
gcccctgccagctgt

SEQ ID NO: 539065 - DNA, 15 bp, Homo sapiens
agcccctgccagctg

SEQ ID NO: 539066 - DNA, 15 bp, Homo sapiens
cagcccctgccagct

SEQ ID NO: 539067 - DNA, 15 bp, Homo sapiens
acagcccctgccagc

SEQ ID NO: 539068 - DNA, 15 bp, Homo sapiens
cacagcccctgccag

SEQ ID NO: 539069 - DNA, 15 bp, Homo sapiens
ccacagcccctgcca

SEQ ID NO: 539070 - DNA, 15 bp, Homo sapiens
gccacagcccctgcc

SEQ ID NO: 539071 - DNA, 15 bp, Homo sapiens
ggccacagcccctgc

SEQ ID NO: 539072 - DNA, 15 bp, Homo sapiens
tggccacagcccctg

SEQ ID NO: 539073 - DNA, 15 bp, Homo sapiens
gtggccacagcccct

SEQ ID NO: 539074 - DNA, 15 bp, Homo sapiens
cgtggccacagcccc

SEQ ID NO: 539075 - DNA, 15 bp, Homo sapiens
gcgtggccacagccc

SEQ ID NO: 539076 - DNA, 15 bp, Homo sapiens
agcgtggccacagcc

SEQ ID NO: 539077 - DNA, 15 bp, Homo sapiens
tagcgtggccacagc

SEQ ID NO: 539078 - DNA, 15 bp, Homo sapiens
ttagcgtggccacag

SEQ ID NO: 539079 - DNA, 15 bp, Homo sapiens
gttagcgtggccaca

SEQ ID NO: 539080 - DNA, 15 bp, Homo sapiens
ggttagcgtggccac

SEQ ID NO: 539081 - DNA, 15 bp, Homo sapiens
gggttagcgtggcca

SEQ ID NO: 539082 - DNA, 15 bp, Homo sapiens
tgggttagcgtggcc

SEQ ID NO: 539083 - DNA, 15 bp, Homo sapiens
ctgggttagcgtggc

SEQ ID NO: 539084 - DNA, 15 bp, Homo sapiens
cctgggttagcgtgg

SEQ ID NO: 539085 - DNA, 15 bp, Homo sapiens
tcctgggttagcgtg

SEQ ID NO: 539086 - DNA, 15 bp, Homo sapiens
ctcctgggttagcgt

SEQ ID NO: 539087 - DNA, 15 bp, Homo sapiens
actcctgggttagcg

SEQ ID NO: 539088 - DNA, 15 bp, Homo sapiens
aactcctgggttagc

SEQ ID NO: 539089 - DNA, 15 bp, Homo sapiens
gaactcctgggttag

SEQ ID NO: 539090 - DNA, 15 bp, Homo sapiens
tgaactcctgggtta

SEQ ID NO: 539091 - DNA, 15 bp, Homo sapiens
ctgaactcctgggtt

SEQ ID NO: 539092 - DNA, 15 bp, Homo sapiens
tctgaactcctgggt

SEQ ID NO: 539093 - DNA, 15 bp, Homo sapiens
ctctgaactcctggg

SEQ ID NO: 539094 - DNA, 15 bp, Homo sapiens
tctctgaactcctgg

SEQ ID NO: 539095 - DNA, 15 bp, Homo sapiens
ttctctgaactcctg

SEQ ID NO: 539096 - DNA, 15 bp, Homo sapiens
tttctctgaactcct

SEQ ID NO: 539097 - DNA, 15 bp, Homo sapiens
ttttctctgaactcc

SEQ ID NO: 539098 - DNA, 15 bp, Homo sapiens
tttttctctgaactc

SEQ ID NO: 539099 - DNA, 15 bp, Homo sapiens
ctttttctctgaact

SEQ ID NO: 539100 - DNA, 15 bp, Homo sapiens
cctttttctctgaac

SEQ ID NO: 539101 - DNA, 15 bp, Homo sapiens
acctttttctctgaa

SEQ ID NO: 539102 - DNA, 15 bp, Homo sapiens
aacctttttctctga

SEQ ID NO: 539103 - DNA, 15 bp, Homo sapiens
gaacctttttctctg

SEQ ID NO: 539104 - DNA, 15 bp, Homo sapiens
ggaacctttttctct

SEQ ID NO: 539105 - DNA, 15 bp, Homo sapiens
gggaacctttttctc

SEQ ID NO: 539106 - DNA, 15 bp, Homo sapiens
ggggaacctttttct

SEQ ID NO: 539107 - DNA, 15 bp, Homo sapiens
tggggaacctttttc

SEQ ID NO: 539108 - DNA, 15 bp, Homo sapiens
gtggggaaccttttt

SEQ ID NO: 539109 - DNA, 15 bp, Homo sapiens
ggtggggaacctttt

SEQ ID NO: 539110 - DNA, 15 bp, Homo sapiens
gggtggggaaccttt

SEQ ID NO: 539111 - DNA, 15 bp, Homo sapiens
tgggtggggaacctt

SEQ ID NO: 539112 - DNA, 15 bp, Homo sapiens
ttgggtggggaacct

SEQ ID NO: 539113 - DNA, 15 bp, Homo sapiens
cttgggtggggaacc

SEQ ID NO: 539114 - DNA, 15 bp, Homo sapiens
ccttgggtggggaac

SEQ ID NO: 539115 - DNA, 15 bp, Homo sapiens
cccttgggtggggaa

SEQ ID NO: 539116 - DNA, 15 bp, Homo sapiens
ccccttgggtgggga

SEQ ID NO: 539117 - DNA, 15 bp, Homo sapiens
tccccttgggtgggg

SEQ ID NO: 539118 - DNA, 15 bp, Homo sapiens
gtccccttgggtggg

SEQ ID NO: 539119 - DNA, 15 bp, Homo sapiens
tgtccccttgggtgg

SEQ ID NO: 539120 - DNA, 15 bp, Homo sapiens
gtgtccccttgggtg

SEQ ID NO: 539121 - DNA, 15 bp, Homo sapiens
agtgtccccttgggt

SEQ ID NO: 539122 - DNA, 15 bp, Homo sapiens
cagtgtccccttggg

SEQ ID NO: 539123 - DNA, 15 bp, Homo sapiens
ccagtgtccccttgg

SEQ ID NO: 539124 - DNA, 15 bp, Homo sapiens
cccagtgtccccttg

SEQ ID NO: 539125 - DNA, 15 bp, Homo sapiens
tcccagtgtcccctt

SEQ ID NO: 539126 - DNA, 15 bp, Homo sapiens
ctcccagtgtcccct

SEQ ID NO: 539127 - DNA, 15 bp, Homo sapiens
gctcccagtgtcccc

SEQ ID NO: 539128 - DNA, 15 bp, Homo sapiens
tgctcccagtgtccc

SEQ ID NO: 539129 - DNA, 15 bp, Homo sapiens
ttgctcccagtgtcc

SEQ ID NO: 539130 - DNA, 15 bp, Homo sapiens
cttgctcccagtgtc

SEQ ID NO: 539131 - DNA, 15 bp, Homo sapiens
ccttgctcccagtgt

SEQ ID NO: 539132 - DNA, 15 bp, Homo sapiens
tccttgctcccagtg

SEQ ID NO: 539133 - DNA, 15 bp, Homo sapiens
atccttgctcccagt

SEQ ID NO: 539134 - DNA, 15 bp, Homo sapiens
aatccttgctcccag

SEQ ID NO: 539135 - DNA, 15 bp, Homo sapiens
caatccttgctccca

SEQ ID NO: 539136 - DNA, 15 bp, Homo sapiens
ccaatccttgctccc

SEQ ID NO: 539137 - DNA, 15 bp, Homo sapiens
tccaatccttgctcc

SEQ ID NO: 539138 - DNA, 15 bp, Homo sapiens
ctccaatccttgctc

SEQ ID NO: 539139 - DNA, 15 bp, Homo sapiens
actccaatccttgct

SEQ ID NO: 539140 - DNA, 15 bp, Homo sapiens
aactccaatccttgc

SEQ ID NO: 539141 - DNA, 15 bp, Homo sapiens
gaactccaatccttg

SEQ ID NO: 539142 - DNA, 15 bp, Homo sapiens
tgaactccaatcctt

SEQ ID NO: 539143 - DNA, 15 bp, Homo sapiens
gtgaactccaatcct

SEQ ID NO: 539144 - DNA, 15 bp, Homo sapiens
cgtgaactccaatcc

SEQ ID NO: 539145 - DNA, 15 bp, Homo sapiens
acgtgaactccaatc

SEQ ID NO: 539146 - DNA, 15 bp, Homo sapiens
gacgtgaactccaat

SEQ ID NO: 539147 - DNA, 15 bp, Homo sapiens
agacgtgaactccaa

SEQ ID NO: 539148 - DNA, 15 bp, Homo sapiens
cagacgtgaactcca

SEQ ID NO: 539149 - DNA, 15 bp, Homo sapiens
tcagacgtgaactcc

SEQ ID NO: 539150 - DNA, 15 bp, Homo sapiens
ctcagacgtgaactc

SEQ ID NO: 539151 - DNA, 15 bp, Homo sapiens
actcagacgtgaact

SEQ ID NO: 539152 - DNA, 15 bp, Homo sapiens
gactcagacgtgaac

SEQ ID NO: 539153 - DNA, 15 bp, Homo sapiens
agactcagacgtgaa

SEQ ID NO: 539154 - DNA, 15 bp, Homo sapiens
aagactcagacgtga

SEQ ID NO: 539155 - DNA, 15 bp, Homo sapiens
taagactcagacgtg

SEQ ID NO: 539156 - DNA, 15 bp, Homo sapiens
ttaagactcagacgt

SEQ ID NO: 539157 - DNA, 15 bp, Homo sapiens
cttaagactcagacg

SEQ ID NO: 539158 - DNA, 15 bp, Homo sapiens
gcttaagactcagac

SEQ ID NO: 539159 - DNA, 15 bp, Homo sapiens
ggcttaagactcaga

SEQ ID NO: 539160 - DNA, 15 bp, Homo sapiens
gggcttaagactcag

SEQ ID NO: 539161 - DNA, 15 bp, Homo sapiens
cgggcttaagactca

SEQ ID NO: 539162 - DNA, 15 bp, Homo sapiens
acgggcttaagactc

SEQ ID NO: 539163 - DNA, 15 bp, Homo sapiens
cacgggcttaagact

SEQ ID NO: 539164 - DNA, 15 bp, Homo sapiens
tcacgggcttaagac

SEQ ID NO: 539165 - DNA, 15 bp, Homo sapiens
gctctcagccaggcc

SEQ ID NO: 539166 - DNA, 15 bp, Homo sapiens
agctctcagccaggc

SEQ ID NO: 539167 - DNA, 15 bp, Homo sapiens
cagctctcagccagg

SEQ ID NO: 539168 - DNA, 15 bp, Homo sapiens
ccagctctcagccag

SEQ ID NO: 539169 - DNA, 15 bp, Homo sapiens
cccagctctcagcca

SEQ ID NO: 539170 - DNA, 15 bp, Homo sapiens
ccccagctctcagcc

SEQ ID NO: 539171 - DNA, 15 bp, Homo sapiens
gccccagctctcagc

SEQ ID NO: 539172 - DNA, 15 bp, Homo sapiens
agccccagctctcag

SEQ ID NO: 539173 - DNA, 15 bp, Homo sapiens
aagccccagctctca

SEQ ID NO: 539174 - DNA, 15 bp, Homo sapiens
gaagccccagctctc

SEQ ID NO: 539175 - DNA, 15 bp, Homo sapiens
ggaagccccagctct

SEQ ID NO: 539176 - DNA, 15 bp, Homo sapiens
gggaagccccagctc

SEQ ID NO: 539177 - DNA, 15 bp, Homo sapiens
tgggaagccccagct

SEQ ID NO: 539178 - DNA, 15 bp, Homo sapiens
ctgggaagccccagc

SEQ ID NO: 539179 - DNA, 15 bp, Homo sapiens
tctgggaagccccag

SEQ ID NO: 539180 - DNA, 15 bp, Homo sapiens
ctctgggaagcccca

SEQ ID NO: 539181 - DNA, 15 bp, Homo sapiens
cctctgggaagcccc

SEQ ID NO: 539182 - DNA, 15 bp, Homo sapiens
tcctctgggaagccc

SEQ ID NO: 539183 - DNA, 15 bp, Homo sapiens
ctcctctgggaagcc

SEQ ID NO: 539184 - DNA, 15 bp, Homo sapiens
gctcctctgggaagc

SEQ ID NO: 539185 - DNA, 15 bp, Homo sapiens
ggctcctctgggaag

SEQ ID NO: 539186 - DNA, 15 bp, Homo sapiens
gggctcctctgggaa

SEQ ID NO: 539187 - DNA, 15 bp, Homo sapiens
cgggctcctctggga

SEQ ID NO: 539188 - DNA, 15 bp, Homo sapiens
ccgggctcctctggg

SEQ ID NO: 539189 - DNA, 15 bp, Homo sapiens
tccgggctcctctgg

SEQ ID NO: 539190 - DNA, 15 bp, Homo sapiens
atccgggctcctctg

SEQ ID NO: 539191 - DNA, 15 bp, Homo sapiens
aatccgggctcctct

SEQ ID NO: 539192 - DNA, 15 bp, Homo sapiens
caatccgggctcctc

SEQ ID NO: 539193 - DNA, 15 bp, Homo sapiens
ccaatccgggctcct

SEQ ID NO: 539194 - DNA, 15 bp, Homo sapiens
tccaatccgggctcc

SEQ ID NO: 539195 - DNA, 15 bp, Homo sapiens
gtccaatccgggctc

SEQ ID NO: 539196 - DNA, 15 bp, Homo sapiens
tgtccaatccgggct

SEQ ID NO: 539197 - DNA, 15 bp, Homo sapiens
gtgtccaatccgggc

SEQ ID NO: 539198 - DNA, 15 bp, Homo sapiens
agtgtccaatccggg

SEQ ID NO: 539199 - DNA, 15 bp, Homo sapiens
cagtgtccaatccgg

SEQ ID NO: 539200 - DNA, 15 bp, Homo sapiens
gcagtgtccaatccg

SEQ ID NO: 539201 - DNA, 15 bp, Homo sapiens
tgcagtgtccaatcc

SEQ ID NO: 539202 - DNA, 15 bp, Homo sapiens
ctgcagtgtccaatc

SEQ ID NO: 539203 - DNA, 15 bp, Homo sapiens
gctgcagtgtccaat

SEQ ID NO: 539204 - DNA, 15 bp, Homo sapiens
ggctgcagtgtccaa

SEQ ID NO: 539205 - DNA, 15 bp, Homo sapiens
tggctgcagtgtcca

SEQ ID NO: 539206 - DNA, 15 bp, Homo sapiens
ctggctgcagtgtcc

SEQ ID NO: 539207 - DNA, 15 bp, Homo sapiens
gctggctgcagtgtc

SEQ ID NO: 539208 - DNA, 15 bp, Homo sapiens
ggctggctgcagtgt

SEQ ID NO: 539209 - DNA, 15 bp, Homo sapiens
aggctggctgcagtg

SEQ ID NO: 539210 - DNA, 15 bp, Homo sapiens
caggctggctgcagt

SEQ ID NO: 539211 - DNA, 15 bp, Homo sapiens
tcaggctggctgcag

SEQ ID NO: 539212 - DNA, 15 bp, Homo sapiens
ctcaggctggctgca

SEQ ID NO: 539213 - DNA, 15 bp, Homo sapiens
gctcaggctggctgc

SEQ ID NO: 539214 - DNA, 15 bp, Homo sapiens
ggctcaggctggctg

SEQ ID NO: 539215 - DNA, 15 bp, Homo sapiens
cggctcaggctggct

SEQ ID NO: 539216 - DNA, 15 bp, Homo sapiens
gcggctcaggctggc

SEQ ID NO: 539217 - DNA, 15 bp, Homo sapiens
ggcggctcaggctgg

SEQ ID NO: 539218 - DNA, 15 bp, Homo sapiens
aggcggctcaggctg

SEQ ID NO: 539219 - DNA, 15 bp, Homo sapiens
gaggcggctcaggct

SEQ ID NO: 539220 - DNA, 15 bp, Homo sapiens
cgaggcggctcaggc

SEQ ID NO: 539221 - DNA, 15 bp, Homo sapiens
acgaggcggctcagg

SEQ ID NO: 539222 - DNA, 15 bp, Homo sapiens
gacgaggcggctcag

SEQ ID NO: 539223 - DNA, 15 bp, Homo sapiens
agacgaggcggctca

SEQ ID NO: 539224 - DNA, 15 bp, Homo sapiens
gagacgaggcggctc

SEQ ID NO: 539225 - DNA, 15 bp, Homo sapiens
tgagacgaggcggct

SEQ ID NO: 539226 - DNA, 15 bp, Homo sapiens
gtgagacgaggcggc

SEQ ID NO: 539227 - DNA, 15 bp, Homo sapiens
agtgagacgaggcgg

SEQ ID NO: 539228 - DNA, 15 bp, Homo sapiens
gagtgagacgaggcg

SEQ ID NO: 539229 - DNA, 15 bp, Homo sapiens
tgagtgagacgaggc

SEQ ID NO: 539230 - DNA, 15 bp, Homo sapiens
ctgagtgagacgagg

SEQ ID NO: 539231 - DNA, 15 bp, Homo sapiens
tctgagtgagacgag

SEQ ID NO: 539232 - DNA, 15 bp, Homo sapiens
ctctgagtgagacga

SEQ ID NO: 539233 - DNA, 15 bp, Homo sapiens
tctctgagtgagacg

SEQ ID NO: 539234 - DNA, 15 bp, Homo sapiens
gtctctgagtgagac

SEQ ID NO: 539235 - DNA, 15 bp, Homo sapiens
tgtctctgagtgaga

SEQ ID NO: 539236 - DNA, 15 bp, Homo sapiens
gtgtctctgagtgag

SEQ ID NO: 539237 - DNA, 15 bp, Homo sapiens
ggtgtctctgagtga

SEQ ID NO: 539238 - DNA, 15 bp, Homo sapiens
gggtgtctctgagtg

SEQ ID NO: 539239 - DNA, 15 bp, Homo sapiens
ggggtgtctctgagt

SEQ ID NO: 539240 - DNA, 15 bp, Homo sapiens
gggggtgtctctgag

SEQ ID NO: 539241 - DNA, 15 bp, Homo sapiens
tgggggtgtctctga

SEQ ID NO: 539242 - DNA, 15 bp, Homo sapiens
ctgggggtgtctctg

SEQ ID NO: 539243 - DNA, 15 bp, Homo sapiens
actgggggtgtctct

SEQ ID NO: 539244 - DNA, 15 bp, Homo sapiens
gactgggggtgtctc

SEQ ID NO: 539245 - DNA, 15 bp, Homo sapiens
agactgggggtgtct

SEQ ID NO: 539246 - DNA, 15 bp, Homo sapiens
gagactgggggtgtc

SEQ ID NO: 539247 - DNA, 15 bp, Homo sapiens
ggagactgggggtgt

SEQ ID NO: 539248 - DNA, 15 bp, Homo sapiens
tggagactgggggtg

SEQ ID NO: 539249 - DNA, 15 bp, Homo sapiens
gtggagactgggggt

SEQ ID NO: 539250 - DNA, 15 bp, Homo sapiens
ggtggagactggggg

SEQ ID NO: 539251 - DNA, 15 bp, Homo sapiens
gggtggagactgggg

SEQ ID NO: 539252 - DNA, 15 bp, Homo sapiens
ggggtggagactggg

SEQ ID NO: 539253 - DNA, 15 bp, Homo sapiens
cggggtggagactgg

SEQ ID NO: 539254 - DNA, 15 bp, Homo sapiens
gcggggtggagactg

SEQ ID NO: 539255 - DNA, 15 bp, Homo sapiens
agcggggtggagact

SEQ ID NO: 539256 - DNA, 15 bp, Homo sapiens
gagcggggtggagac

SEQ ID NO: 539257 - DNA, 15 bp, Homo sapiens
agagcggggtggaga

SEQ ID NO: 539258 - DNA, 15 bp, Homo sapiens
cagagcggggtggag

SEQ ID NO: 539259 - DNA, 15 bp, Homo sapiens
tcagagcggggtgga

SEQ ID NO: 539260 - DNA, 15 bp, Homo sapiens
ctcagagcggggtgg

SEQ ID NO: 539261 - DNA, 15 bp, Homo sapiens
gctcagagcggggtg

SEQ ID NO: 539262 - DNA, 15 bp, Homo sapiens
ggctcagagcggggt

SEQ ID NO: 539263 - DNA, 15 bp, Homo sapiens
gggctcagagcgggg

SEQ ID NO: 539264 - DNA, 15 bp, Homo sapiens
ggggctcagagcggg

SEQ ID NO: 539265 - DNA, 15 bp, Homo sapiens
aggggctcagagcgg

SEQ ID NO: 539266 - DNA, 15 bp, Homo sapiens
aaggggctcagagcg

SEQ ID NO: 539267 - DNA, 15 bp, Homo sapiens
gaaggggctcagagc

SEQ ID NO: 539268 - DNA, 15 bp, Homo sapiens
tgaaggggctcagag

SEQ ID NO: 539269 - DNA, 15 bp, Homo sapiens
ttgaaggggctcaga

SEQ ID NO: 539270 - DNA, 15 bp, Homo sapiens
attgaaggggctcag

SEQ ID NO: 539271 - DNA, 15 bp, Homo sapiens
gattgaaggggctca

SEQ ID NO: 539272 - DNA, 15 bp, Homo sapiens
tgattgaaggggctc

SEQ ID NO: 539273 - DNA, 15 bp, Homo sapiens
gtgattgaaggggct

SEQ ID NO: 539274 - DNA, 15 bp, Homo sapiens
ggtgattgaaggggc

SEQ ID NO: 539275 - DNA, 15 bp, Homo sapiens
tggtgattgaagggg

SEQ ID NO: 539276 - DNA, 15 bp, Homo sapiens
ctggtgattgaaggg

SEQ ID NO: 539277 - DNA, 15 bp, Homo sapiens
gctggtgattgaagg

SEQ ID NO: 539278 - DNA, 15 bp, Homo sapiens
tgctggtgattgaag

SEQ ID NO: 539279 - DNA, 15 bp, Homo sapiens
ctgctggtgattgaa

SEQ ID NO: 539280 - DNA, 15 bp, Homo sapiens
gctgctggtgattga

SEQ ID NO: 539281 - DNA, 15 bp, Homo sapiens
ggctgctggtgattg

SEQ ID NO: 539282 - DNA, 15 bp, Homo sapiens
gggctgctggtgatt

SEQ ID NO: 539283 - DNA, 15 bp, Homo sapiens
tgggctgctggtgat

SEQ ID NO: 539284 - DNA, 15 bp, Homo sapiens
ctgggctgctggtga

SEQ ID NO: 539285 - DNA, 15 bp, Homo sapiens
gctgggctgctggtg

SEQ ID NO: 539286 - DNA, 15 bp, Homo sapiens
ggctgggctgctggt

SEQ ID NO: 539287 - DNA, 15 bp, Homo sapiens
gggctgggctgctgg

SEQ ID NO: 539288 - DNA, 15 bp, Homo sapiens
tgggctgggctgctg

SEQ ID NO: 539289 - DNA, 15 bp, Homo sapiens
ttgggctgggctgct

SEQ ID NO: 539290 - DNA, 15 bp, Homo sapiens
cttgggctgggctgc

SEQ ID NO: 539291 - DNA, 15 bp, Homo sapiens
ccttgggctgggctg

SEQ ID NO: 539292 - DNA, 15 bp, Homo sapiens
tccttgggctgggct

SEQ ID NO: 539293 - DNA, 15 bp, Homo sapiens
gtccttgggctgggc

SEQ ID NO: 539294 - DNA, 15 bp, Homo sapiens
agtccttgggctggg

SEQ ID NO: 539295 - DNA, 15 bp, Homo sapiens
cagtccttgggctgg

SEQ ID NO: 539296 - DNA, 15 bp, Homo sapiens
tcagtccttgggctg

SEQ ID NO: 539297 - DNA, 15 bp, Homo sapiens
ttcagtccttgggct

SEQ ID NO: 539298 - DNA, 15 bp, Homo sapiens
gttcagtccttgggc

SEQ ID NO: 539299 - DNA, 15 bp, Homo sapiens
agttcagtccttggg

SEQ ID NO: 539300 - DNA, 15 bp, Homo sapiens
gagttcagtccttgg

SEQ ID NO: 539301 - DNA, 15 bp, Homo sapiens
tgagttcagtccttg

SEQ ID NO: 539302 - DNA, 15 bp, Homo sapiens
gtgagttcagtcctt

SEQ ID NO: 539303 - DNA, 15 bp, Homo sapiens
ggtgagttcagtcct

SEQ ID NO: 539304 - DNA, 15 bp, Homo sapiens
gggtgagttcagtcc

SEQ ID NO: 539305 - DNA, 15 bp, Homo sapiens
ggggtgagttcagtc

SEQ ID NO: 539306 - DNA, 15 bp, Homo sapiens
aggggtgagttcagt

SEQ ID NO: 539307 - DNA, 15 bp, Homo sapiens
caggggtgagttcag

SEQ ID NO: 539308 - DNA, 15 bp, Homo sapiens
tcaggggtgagttca

SEQ ID NO: 539309 - DNA, 15 bp, Homo sapiens
gtcaggggtgagttc

SEQ ID NO: 539310 - DNA, 15 bp, Homo sapiens
ggtcaggggtgagtt

SEQ ID NO: 539311 - DNA, 15 bp, Homo sapiens
gggtcaggggtgagt

SEQ ID NO: 539312 - DNA, 15 bp, Homo sapiens
ggggtcaggggtgag

SEQ ID NO: 539313 - DNA, 15 bp, Homo sapiens
aggggtcaggggtga

SEQ ID NO: 539314 - DNA, 15 bp, Homo sapiens
taggggtcaggggtg

SEQ ID NO: 539315 - DNA, 15 bp, Homo sapiens
ctaggggtcaggggt

SEQ ID NO: 539316 - DNA, 15 bp, Homo sapiens
cctaggggtcagggg

SEQ ID NO: 539317 - DNA, 15 bp, Homo sapiens
acctaggggtcaggg

SEQ ID NO: 539318 - DNA, 15 bp, Homo sapiens
aacctaggggtcagg

SEQ ID NO: 539319 - DNA, 15 bp, Homo sapiens
caacctaggggtcag

SEQ ID NO: 539320 - DNA, 15 bp, Homo sapiens
tcaacctaggggtca

SEQ ID NO: 539321 - DNA, 15 bp, Homo sapiens
gtcaacctaggggtc

SEQ ID NO: 539322 - DNA, 15 bp, Homo sapiens
tgtcaacctaggggt

SEQ ID NO: 539323 - DNA, 15 bp, Homo sapiens
gtgtcaacctagggg

SEQ ID NO: 539324 - DNA, 15 bp, Homo sapiens
tgtgtcaacctaggg

SEQ ID NO: 539325 - DNA, 15 bp, Homo sapiens
atgtgtcaacctagg

SEQ ID NO: 539326 - DNA, 15 bp, Homo sapiens
tatgtgtcaacctag

SEQ ID NO: 539327 - DNA, 15 bp, Homo sapiens
gtatgtgtcaaccta

SEQ ID NO: 539328 - DNA, 15 bp, Homo sapiens
tgtatgtgtcaacct

SEQ ID NO: 539329 - DNA, 15 bp, Homo sapiens
ttgtatgtgtcaacc

SEQ ID NO: 539330 - DNA, 15 bp, Homo sapiens
gttgtatgtgtcaac

SEQ ID NO: 539331 - DNA, 15 bp, Homo sapiens
agttgtatgtgtcaa

SEQ ID NO: 539332 - DNA, 15 bp, Homo sapiens
aagttgtatgtgtca

SEQ ID NO: 539333 - DNA, 15 bp, Homo sapiens
taagttgtatgtgtc

SEQ ID NO: 539334 - DNA, 15 bp, Homo sapiens
gtaagttgtatgtgt

SEQ ID NO: 539335 - DNA, 15 bp, Homo sapiens
tgtaagttgtatgtg

SEQ ID NO: 539336 - DNA, 15 bp, Homo sapiens
ctgtaagttgtatgt

SEQ ID NO: 539337 - DNA, 15 bp, Homo sapiens
tctgtaagttgtatg

SEQ ID NO: 539338 - DNA, 15 bp, Homo sapiens
ctctgtaagttgtat

SEQ ID NO: 539339 - DNA, 15 bp, Homo sapiens
tctctgtaagttgta

SEQ ID NO: 539340 - DNA, 15 bp, Homo sapiens
ttctctgtaagttgt

SEQ ID NO: 539341 - DNA, 15 bp, Homo sapiens
attctctgtaagttg

SEQ ID NO: 539342 - DNA, 15 bp, Homo sapiens
cattctctgtaagtt

SEQ ID NO: 539343 - DNA, 15 bp, Homo sapiens
tcattctctgtaagt

SEQ ID NO: 539344 - DNA, 15 bp, Homo sapiens
ctcattctctgtaag

SEQ ID NO: 539345 - DNA, 15 bp, Homo sapiens
cctcattctctgtaa

SEQ ID NO: 539346 - DNA, 15 bp, Homo sapiens
ccctcattctctgta

SEQ ID NO: 539347 - DNA, 15 bp, Homo sapiens
gccctcattctctgt

SEQ ID NO: 539348 - DNA, 15 bp, Homo sapiens
ggccctcattctctg

SEQ ID NO: 539349 - DNA, 15 bp, Homo sapiens
tggccctcattctct

SEQ ID NO: 539350 - DNA, 15 bp, Homo sapiens
ctggccctcattctc

SEQ ID NO: 539351 - DNA, 15 bp, Homo sapiens
cctggccctcattct

SEQ ID NO: 539352 - DNA, 15 bp, Homo sapiens
gcctggccctcattc

SEQ ID NO: 539353 - DNA, 15 bp, Homo sapiens
tgcctggccctcatt

SEQ ID NO: 539354 - DNA, 15 bp, Homo sapiens
gtgcctggccctcat

SEQ ID NO: 539355 - DNA, 15 bp, Homo sapiens
tgtgcctggccctca

SEQ ID NO: 539356 - DNA, 15 bp, Homo sapiens
ctgtgcctggccctc

SEQ ID NO: 539357 - DNA, 15 bp, Homo sapiens
cctgtgcctggccct

SEQ ID NO: 539358 - DNA, 15 bp, Homo sapiens
ccctgtgcctggccc

SEQ ID NO: 539359 - DNA, 15 bp, Homo sapiens
accctgtgcctggcc

SEQ ID NO: 539360 - DNA, 15 bp, Homo sapiens
gaccctgtgcctggc

SEQ ID NO: 539361 - DNA, 15 bp, Homo sapiens
tgaccctgtgcctgg

SEQ ID NO: 539362 - DNA, 15 bp, Homo sapiens
gtgaccctgtgcctg

SEQ ID NO: 539363 - DNA, 15 bp, Homo sapiens
tgtgaccctgtgcct

SEQ ID NO: 539364 - DNA, 15 bp, Homo sapiens
ctgtgaccctgtgcc

SEQ ID NO: 539365 - DNA, 15 bp, Homo sapiens
cctgtgaccctgtgc

SEQ ID NO: 539366 - DNA, 15 bp, Homo sapiens
gcctgtgaccctgtg

SEQ ID NO: 539367 - DNA, 15 bp, Homo sapiens
ggcctgtgaccctgt

SEQ ID NO: 539368 - DNA, 15 bp, Homo sapiens
tggcctgtgaccctg

SEQ ID NO: 539369 - DNA, 15 bp, Homo sapiens
ctggcctgtgaccct

SEQ ID NO: 539370 - DNA, 15 bp, Homo sapiens
cctggcctgtgaccc

SEQ ID NO: 539371 - DNA, 15 bp, Homo sapiens
ccctggcctgtgacc

SEQ ID NO: 539372 - DNA, 15 bp, Homo sapiens
gccctggcctgtgac

SEQ ID NO: 539373 - DNA, 15 bp, Homo sapiens
tgccctggcctgtga

SEQ ID NO: 539374 - DNA, 15 bp, Homo sapiens
ctgccctggcctgtg

SEQ ID NO: 539375 - DNA, 15 bp, Homo sapiens
cctgccctggcctgt

SEQ ID NO: 539376 - DNA, 15 bp, Homo sapiens
gcctgccctggcctg

SEQ ID NO: 539377 - DNA, 15 bp, Homo sapiens
ggcctgccctggcct

SEQ ID NO: 539378 - DNA, 15 bp, Homo sapiens
tggcctgccctggcc

SEQ ID NO: 539379 - DNA, 15 bp, Homo sapiens
gtggcctgccctggc

SEQ ID NO: 539380 - DNA, 15 bp, Homo sapiens
tgtggcctgccctgg

SEQ ID NO: 539381 - DNA, 15 bp, Homo sapiens
ctgtggcctgccctg

SEQ ID NO: 539382 - DNA, 15 bp, Homo sapiens
tctgtggcctgccct

SEQ ID NO: 539383 - DNA, 15 bp, Homo sapiens
gtctgtggcctgccc

SEQ ID NO: 539384 - DNA, 15 bp, Homo sapiens
agtctgtggcctgcc

SEQ ID NO: 539385 - DNA, 15 bp, Homo sapiens
cagtctgtggcctgc

SEQ ID NO: 539386 - DNA, 15 bp, Homo sapiens
ccagtctgtggcctg

SEQ ID NO: 539387 - DNA, 15 bp, Homo sapiens
gccagtctgtggcct

SEQ ID NO: 539388 - DNA, 15 bp, Homo sapiens
agccagtctgtggcc

SEQ ID NO: 539389 - DNA, 15 bp, Homo sapiens
gagccagtctgtggc

SEQ ID NO: 539390 - DNA, 15 bp, Homo sapiens
ggagccagtctgtgg

SEQ ID NO: 539391 - DNA, 15 bp, Homo sapiens
aggagccagtctgtg

SEQ ID NO: 539392 - DNA, 15 bp, Homo sapiens
gaggagccagtctgt

SEQ ID NO: 539393 - DNA, 15 bp, Homo sapiens
tgaggagccagtctg

SEQ ID NO: 539394 - DNA, 15 bp, Homo sapiens
ctgaggagccagtct

SEQ ID NO: 539395 - DNA, 15 bp, Homo sapiens
gctgaggagccagtc

SEQ ID NO: 539396 - DNA, 15 bp, Homo sapiens
ggctgaggagccagt

SEQ ID NO: 539397 - DNA, 15 bp, Homo sapiens
gggctgaggagccag

SEQ ID NO: 539398 - DNA, 15 bp, Homo sapiens
tgggctgaggagcca

SEQ ID NO: 539399 - DNA, 15 bp, Homo sapiens
ctgggctgaggagcc

SEQ ID NO: 539400 - DNA, 15 bp, Homo sapiens
cctgggctgaggagc

SEQ ID NO: 539401 - DNA, 15 bp, Homo sapiens
gcctgggctgaggag

SEQ ID NO: 539402 - DNA, 15 bp, Homo sapiens
tgcctgggctgagga

SEQ ID NO: 539403 - DNA, 15 bp, Homo sapiens
ctgcctgggctgagg

SEQ ID NO: 539404 - DNA, 15 bp, Homo sapiens
cctgcctgggctgag

SEQ ID NO: 539405 - DNA, 15 bp, Homo sapiens
ccctgcctgggctga

SEQ ID NO: 539406 - DNA, 15 bp, Homo sapiens
tccctgcctgggctg

SEQ ID NO: 539407 - DNA, 15 bp, Homo sapiens
ctccctgcctgggct

SEQ ID NO: 539408 - DNA, 15 bp, Homo sapiens
tctccctgcctgggc

SEQ ID NO: 539409 - DNA, 15 bp, Homo sapiens
ctctccctgcctggg

SEQ ID NO: 539410 - DNA, 15 bp, Homo sapiens
cctctccctgcctgg

SEQ ID NO: 539411 - DNA, 15 bp, Homo sapiens
gcctctccctgcctg

SEQ ID NO: 539412 - DNA, 15 bp, Homo sapiens
ggcctctccctgcct

SEQ ID NO: 539413 - DNA, 15 bp, Homo sapiens
tggcctctccctgcc

SEQ ID NO: 539414 - DNA, 15 bp, Homo sapiens
ctggcctctccctgc

SEQ ID NO: 539415 - DNA, 15 bp, Homo sapiens
cctggcctctccctg

SEQ ID NO: 539416 - DNA, 15 bp, Homo sapiens
ccctggcctctccct

SEQ ID NO: 539417 - DNA, 15 bp, Homo sapiens
tccctggcctctccc

SEQ ID NO: 539418 - DNA, 15 bp, Homo sapiens
ctccctggcctctcc

SEQ ID NO: 539419 - DNA, 15 bp, Homo sapiens
gctccctggcctctc

SEQ ID NO: 539420 - DNA, 15 bp, Homo sapiens
ggctccctggcctct

SEQ ID NO: 539421 - DNA, 15 bp, Homo sapiens
tggctccctggcctc

SEQ ID NO: 539422 - DNA, 15 bp, Homo sapiens
ttggctccctggcct

SEQ ID NO: 539423 - DNA, 15 bp, Homo sapiens
cttggctccctggcc

SEQ ID NO: 539424 - DNA, 15 bp, Homo sapiens
tcttggctccctggc

SEQ ID NO: 539425 - DNA, 15 bp, Homo sapiens
ctcttggctccctgg

SEQ ID NO: 539426 - DNA, 15 bp, Homo sapiens
actcttggctccctg

SEQ ID NO: 539427 - DNA, 15 bp, Homo sapiens
aactcttggctccct

SEQ ID NO: 539428 - DNA, 15 bp, Homo sapiens
aaactcttggctccc

SEQ ID NO: 539429 - DNA, 15 bp, Homo sapiens
caaactcttggctcc

SEQ ID NO: 539430 - DNA, 15 bp, Homo sapiens
tcaaactcttggctc

SEQ ID NO: 539431 - DNA, 15 bp, Homo sapiens
ttcaaactcttggct

SEQ ID NO: 539432 - DNA, 15 bp, Homo sapiens
gttcaaactcttggc

SEQ ID NO: 539433 - DNA, 15 bp, Homo sapiens
ggttcaaactcttgg

SEQ ID NO: 539434 - DNA, 15 bp, Homo sapiens
gggttcaaactcttg

SEQ ID NO: 539435 - DNA, 15 bp, Homo sapiens
tgggttcaaactctt

SEQ ID NO: 539436 - DNA, 15 bp, Homo sapiens
ctgggttcaaactct

SEQ ID NO: 539437 - DNA, 15 bp, Homo sapiens
actgggttcaaactc

SEQ ID NO: 539438 - DNA, 15 bp, Homo sapiens
cactgggttcaaact

SEQ ID NO: 539439 - DNA, 15 bp, Homo sapiens
gcactgggttcaaac

SEQ ID NO: 539440 - DNA, 15 bp, Homo sapiens
ggcactgggttcaaa

SEQ ID NO: 539441 - DNA, 15 bp, Homo sapiens
tggcactgggttcaa

SEQ ID NO: 539442 - DNA, 15 bp, Homo sapiens
gtggcactgggttca

SEQ ID NO: 539443 - DNA, 15 bp, Homo sapiens
agtggcactgggttc

SEQ ID NO: 539444 - DNA, 15 bp, Homo sapiens
gagtggcactgggtt

SEQ ID NO: 539445 - DNA, 15 bp, Homo sapiens
ggagtggcactgggt

SEQ ID NO: 539446 - DNA, 15 bp, Homo sapiens
aggagtggcactggg

SEQ ID NO: 539447 - DNA, 15 bp, Homo sapiens
caggagtggcactgg

SEQ ID NO: 539448 - DNA, 15 bp, Homo sapiens
tcaggagtggcactg

SEQ ID NO: 539449 - DNA, 15 bp, Homo sapiens
gtcaggagtggcact

SEQ ID NO: 539450 - DNA, 15 bp, Homo sapiens
agtcaggagtggcac

SEQ ID NO: 539451 - DNA, 15 bp, Homo sapiens
cagtcaggagtggca

SEQ ID NO: 539452 - DNA, 15 bp, Homo sapiens
gcagtcaggagtggc

SEQ ID NO: 539453 - DNA, 15 bp, Homo sapiens
ggcagtcaggagtgg

SEQ ID NO: 539454 - DNA, 15 bp, Homo sapiens
aggcagtcaggagtg

SEQ ID NO: 539455 - DNA, 15 bp, Homo sapiens
caggcagtcaggagt

SEQ ID NO: 539456 - DNA, 15 bp, Homo sapiens
ccaggcagtcaggag

SEQ ID NO: 539457 - DNA, 15 bp, Homo sapiens
accaggcagtcagga

SEQ ID NO: 539458 - DNA, 15 bp, Homo sapiens
caccaggcagtcagg

SEQ ID NO: 539459 - DNA, 15 bp, Homo sapiens
tcaccaggcagtcag

SEQ ID NO: 539460 - DNA, 15 bp, Homo sapiens
atcaccaggcagtca

SEQ ID NO: 539461 - DNA, 15 bp, Homo sapiens
catcaccaggcagtc

SEQ ID NO: 539462 - DNA, 15 bp, Homo sapiens
gcatcaccaggcagt

SEQ ID NO: 539463 - DNA, 15 bp, Homo sapiens
agcatcaccaggcag

SEQ ID NO: 539464 - DNA, 15 bp, Homo sapiens
cagcatcaccaggca

SEQ ID NO: 539465 - DNA, 15 bp, Homo sapiens
ccagcatcaccaggc

SEQ ID NO: 539466 - DNA, 15 bp, Homo sapiens
gccagcatcaccagg

SEQ ID NO: 539467 - DNA, 15 bp, Homo sapiens
tgccagcatcaccag

SEQ ID NO: 539468 - DNA, 15 bp, Homo sapiens
ttgccagcatcacca

SEQ ID NO: 539469 - DNA, 15 bp, Homo sapiens
gttgccagcatcacc

SEQ ID NO: 539470 - DNA, 15 bp, Homo sapiens
ggttgccagcatcac

SEQ ID NO: 539471 - DNA, 15 bp, Homo sapiens
gggttgccagcatca

SEQ ID NO: 539472 - DNA, 15 bp, Homo sapiens
cgggttgccagcatc

SEQ ID NO: 539473 - DNA, 15 bp, Homo sapiens
gcgggttgccagcat

SEQ ID NO: 539474 - DNA, 15 bp, Homo sapiens
ggcgggttgccagca

SEQ ID NO: 539475 - DNA, 15 bp, Homo sapiens
aggcgggttgccagc

SEQ ID NO: 539476 - DNA, 15 bp, Homo sapiens
caggcgggttgccag

SEQ ID NO: 539477 - DNA, 15 bp, Homo sapiens
gcaggcgggttgcca

SEQ ID NO: 539478 - DNA, 15 bp, Homo sapiens
ggcaggcgggttgcc

SEQ ID NO: 539479 - DNA, 15 bp, Homo sapiens
gggcaggcgggttgc

SEQ ID NO: 539480 - DNA, 15 bp, Homo sapiens
agggcaggcgggttg

SEQ ID NO: 539481 - DNA, 15 bp, Homo sapiens
gagggcaggcgggtt

SEQ ID NO: 539482 - DNA, 15 bp, Homo sapiens
ggagggcaggcgggt

SEQ ID NO: 539483 - DNA, 15 bp, Homo sapiens
gggagggcaggcggg

SEQ ID NO: 539484 - DNA, 15 bp, Homo sapiens
tgggagggcaggcgg

SEQ ID NO: 539485 - DNA, 15 bp, Homo sapiens
ctgggagggcaggcg

SEQ ID NO: 539486 - DNA, 15 bp, Homo sapiens
tctgggagggcaggc

SEQ ID NO: 539487 - DNA, 15 bp, Homo sapiens
ctctgggagggcagg

SEQ ID NO: 539488 - DNA, 15 bp, Homo sapiens
gctctgggagggcag

SEQ ID NO: 539489 - DNA, 15 bp, Homo sapiens
ggctctgggagggca

SEQ ID NO: 539490 - DNA, 15 bp, Homo sapiens
aggctctgggagggc

SEQ ID NO: 539491 - DNA, 15 bp, Homo sapiens
gaggctctgggaggg

SEQ ID NO: 539492 - DNA, 15 bp, Homo sapiens
tgaggctctgggagg

SEQ ID NO: 539493 - DNA, 15 bp, Homo sapiens
ctgaggctctgggag

SEQ ID NO: 539494 - DNA, 15 bp, Homo sapiens
gctgaggctctggga

SEQ ID NO: 539495 - DNA, 15 bp, Homo sapiens
ggctgaggctctggg

SEQ ID NO: 539496 - DNA, 15 bp, Homo sapiens
tggctgaggctctgg

SEQ ID NO: 539497 - DNA, 15 bp, Homo sapiens
atggctgaggctctg

SEQ ID NO: 539498 - DNA, 15 bp, Homo sapiens
gatggctgaggctct

SEQ ID NO: 539499 - DNA, 15 bp, Homo sapiens
ggatggctgaggctc

SEQ ID NO: 539500 - DNA, 15 bp, Homo sapiens
gggatggctgaggct

SEQ ID NO: 539501 - DNA, 15 bp, Homo sapiens
agggatggctgaggc

SEQ ID NO: 539502 - DNA, 15 bp, Homo sapiens
gagggatggctgagg

SEQ ID NO: 539503 - DNA, 15 bp, Homo sapiens
ggagggatggctgag

SEQ ID NO: 539504 - DNA, 15 bp, Homo sapiens
aggagggatggctga

SEQ ID NO: 539505 - DNA, 15 bp, Homo sapiens
caggagggatggctg

SEQ ID NO: 539506 - DNA, 15 bp, Homo sapiens
acaggagggatggct

SEQ ID NO: 539507 - DNA, 15 bp, Homo sapiens
tacaggagggatggc

SEQ ID NO: 539508 - DNA, 15 bp, Homo sapiens
ttacaggagggatgg

SEQ ID NO: 539509 - DNA, 15 bp, Homo sapiens
tttacaggagggatg

SEQ ID NO: 539510 - DNA, 15 bp, Homo sapiens
ttttacaggagggat

SEQ ID NO: 539511 - DNA, 15 bp, Homo sapiens
attttacaggaggga

SEQ ID NO: 539512 - DNA, 15 bp, Homo sapiens
cattttacaggaggg

SEQ ID NO: 539513 - DNA, 15 bp, Homo sapiens
ccattttacaggagg

SEQ ID NO: 539514 - DNA, 15 bp, Homo sapiens
cccattttacaggag

SEQ ID NO: 539515 - DNA, 15 bp, Homo sapiens
ccccattttacagga

SEQ ID NO: 539516 - DNA, 15 bp, Homo sapiens
gccccattttacagg

SEQ ID NO: 539517 - DNA, 15 bp, Homo sapiens
agccccattttacag

SEQ ID NO: 539518 - DNA, 15 bp, Homo sapiens
tagccccattttaca

SEQ ID NO: 539519 - DNA, 15 bp, Homo sapiens
ttagccccattttac

SEQ ID NO: 539520 - DNA, 15 bp, Homo sapiens
cttagccccatttta

SEQ ID NO: 539521 - DNA, 15 bp, Homo sapiens
ccttagccccatttt

SEQ ID NO: 539522 - DNA, 15 bp, Homo sapiens
tccttagccccattt

SEQ ID NO: 539523 - DNA, 15 bp, Homo sapiens
ctccttagccccatt

SEQ ID NO: 539524 - DNA, 15 bp, Homo sapiens
tctccttagccccat

SEQ ID NO: 539525 - DNA, 15 bp, Homo sapiens
ctctccttagcccca

SEQ ID NO: 539526 - DNA, 15 bp, Homo sapiens
tctctccttagcccc

SEQ ID NO: 539527 - DNA, 15 bp, Homo sapiens
ttctctccttagccc

SEQ ID NO: 539528 - DNA, 15 bp, Homo sapiens
gttctctccttagcc

SEQ ID NO: 539529 - DNA, 15 bp, Homo sapiens
ggttctctccttagc

SEQ ID NO: 539530 - DNA, 15 bp, Homo sapiens
aggttctctccttag

SEQ ID NO: 539531 - DNA, 15 bp, Homo sapiens
taggttctctcctta

SEQ ID NO: 539532 - DNA, 15 bp, Homo sapiens
gtaggttctctcctt

SEQ ID NO: 539533 - DNA, 15 bp, Homo sapiens
agtaggttctctcct

SEQ ID NO: 539534 - DNA, 15 bp, Homo sapiens
aagtaggttctctcc

SEQ ID NO: 539535 - DNA, 15 bp, Homo sapiens
gaagtaggttctctc

SEQ ID NO: 539536 - DNA, 15 bp, Homo sapiens
agaagtaggttctct

SEQ ID NO: 539537 - DNA, 15 bp, Homo sapiens
tagaagtaggttctc

SEQ ID NO: 539538 - DNA, 15 bp, Homo sapiens
ctagaagtaggttct

SEQ ID NO: 539539 - DNA, 15 bp, Homo sapiens
cctagaagtaggttc

SEQ ID NO: 539540 - DNA, 15 bp, Homo sapiens
ccctagaagtaggtt

SEQ ID NO: 539541 - DNA, 15 bp, Homo sapiens
accctagaagtaggt

SEQ ID NO: 539542 - DNA, 15 bp, Homo sapiens
aaccctagaagtagg

SEQ ID NO: 539543 - DNA, 15 bp, Homo sapiens
gaaccctagaagtag

SEQ ID NO: 539544 - DNA, 15 bp, Homo sapiens
agaaccctagaagta

SEQ ID NO: 539545 - DNA, 15 bp, Homo sapiens
cagaaccctagaagt

SEQ ID NO: 539546 - DNA, 15 bp, Homo sapiens
acagaaccctagaag

SEQ ID NO: 539547 - DNA, 15 bp, Homo sapiens
cacagaaccctagaa

SEQ ID NO: 539548 - DNA, 15 bp, Homo sapiens
tcacagaaccctaga

SEQ ID NO: 539549 - DNA, 15 bp, Homo sapiens
ttcacagaaccctag

SEQ ID NO: 539550 - DNA, 15 bp, Homo sapiens
attcacagaacccta

SEQ ID NO: 539551 - DNA, 15 bp, Homo sapiens
cattcacagaaccct

SEQ ID NO: 539552 - DNA, 15 bp, Homo sapiens
tcattcacagaaccc

SEQ ID NO: 539553 - DNA, 15 bp, Homo sapiens
atcattcacagaacc

SEQ ID NO: 539554 - DNA, 15 bp, Homo sapiens
aatcattcacagaac

SEQ ID NO: 539555 - DNA, 15 bp, Homo sapiens
taatcattcacagaa

SEQ ID NO: 539556 - DNA, 15 bp, Homo sapiens
gtaatcattcacaga

SEQ ID NO: 539557 - DNA, 15 bp, Homo sapiens
tgtaatcattcacag

SEQ ID NO: 539558 - DNA, 15 bp, Homo sapiens
gtgtaatcattcaca

SEQ ID NO: 539559 - DNA, 15 bp, Homo sapiens
tgtgtaatcattcac

SEQ ID NO: 539560 - DNA, 15 bp, Homo sapiens
ttgtgtaatcattca

SEQ ID NO: 539561 - DNA, 15 bp, Homo sapiens
cttgtgtaatcattc

SEQ ID NO: 539562 - DNA, 15 bp, Homo sapiens
tcttgtgtaatcatt

SEQ ID NO: 539563 - DNA, 15 bp, Homo sapiens
ttcttgtgtaatcat

SEQ ID NO: 539564 - DNA, 15 bp, Homo sapiens
tttcttgtgtaatca

SEQ ID NO: 539565 - DNA, 15 bp, Homo sapiens
ttttcttgtgtaatc

SEQ ID NO: 539566 - DNA, 15 bp, Homo sapiens
tttttcttgtgtaat

SEQ ID NO: 539567 - DNA, 15 bp, Homo sapiens
ctttttcttgtgtaa

SEQ ID NO: 539568 - DNA, 15 bp, Homo sapiens
gctttttcttgtgta

SEQ ID NO: 539569 - DNA, 15 bp, Homo sapiens
cgctttttcttgtgt

SEQ ID NO: 539570 - DNA, 15 bp, Homo sapiens
gcgctttttcttgtg

SEQ ID NO: 539571 - DNA, 15 bp, Homo sapiens
ggcgctttttcttgt

SEQ ID NO: 539572 - DNA, 15 bp, Homo sapiens
tggcgctttttcttg

SEQ ID NO: 539573 - DNA, 15 bp, Homo sapiens
ctggcgctttttctt

SEQ ID NO: 539574 - DNA, 15 bp, Homo sapiens
cctggcgctttttct

SEQ ID NO: 539575 - DNA, 15 bp, Homo sapiens
acctggcgctttttc

SEQ ID NO: 539576 - DNA, 15 bp, Homo sapiens
cacctggcgcttttt

SEQ ID NO: 539577 - DNA, 15 bp, Homo sapiens
gcacctggcgctttt

SEQ ID NO: 539578 - DNA, 15 bp, Homo sapiens
agcacctggcgcttt

SEQ ID NO: 539579 - DNA, 15 bp, Homo sapiens
cagcacctggcgctt

SEQ ID NO: 539580 - DNA, 15 bp, Homo sapiens
ccagcacctggcgct

SEQ ID NO: 539581 - DNA, 15 bp, Homo sapiens
cccagcacctggcgc

SEQ ID NO: 539582 - DNA, 15 bp, Homo sapiens
gcccagcacctggcg

SEQ ID NO: 539583 - DNA, 15 bp, Homo sapiens
ggcccagcacctggc

SEQ ID NO: 539584 - DNA, 15 bp, Homo sapiens
aggcccagcacctgg

SEQ ID NO: 539585 - DNA, 15 bp, Homo sapiens
caggcccagcacctg

SEQ ID NO: 539586 - DNA, 15 bp, Homo sapiens
ccaggcccagcacct

SEQ ID NO: 539587 - DNA, 15 bp, Homo sapiens
gccaggcccagcacc

SEQ ID NO: 539588 - DNA, 15 bp, Homo sapiens
agccaggcccagcac

SEQ ID NO: 539589 - DNA, 15 bp, Homo sapiens
cagccaggcccagca

SEQ ID NO: 539590 - DNA, 15 bp, Homo sapiens
tcagccaggcccagc

SEQ ID NO: 539591 - DNA, 15 bp, Homo sapiens
ctcagccaggcccag

SEQ ID NO: 539592 - DNA, 15 bp, Homo sapiens
cctcagccaggccca

SEQ ID NO: 539593 - DNA, 15 bp, Homo sapiens
gcctcagccaggccc

SEQ ID NO: 539594 - DNA, 15 bp, Homo sapiens
agcctcagccaggcc

SEQ ID NO: 539595 - DNA, 15 bp, Homo sapiens
cagcctcagccaggc

SEQ ID NO: 539596 - DNA, 15 bp, Homo sapiens
ccagcctcagccagg

SEQ ID NO: 539597 - DNA, 15 bp, Homo sapiens
cccagcctcagccag

SEQ ID NO: 539598 - DNA, 15 bp, Homo sapiens
ccccagcctcagcca

SEQ ID NO: 539599 - DNA, 15 bp, Homo sapiens
accccagcctcagcc

SEQ ID NO: 539600 - DNA, 15 bp, Homo sapiens
caccccagcctcagc

SEQ ID NO: 539601 - DNA, 15 bp, Homo sapiens
gcaccccagcctcag

SEQ ID NO: 539602 - DNA, 15 bp, Homo sapiens
tgcaccccagcctca

SEQ ID NO: 539603 - DNA, 15 bp, Homo sapiens
ttgcaccccagcctc

SEQ ID NO: 539604 - DNA, 15 bp, Homo sapiens
tttgcaccccagcct

SEQ ID NO: 539605 - DNA, 15 bp, Homo sapiens
ttttgcaccccagcc

SEQ ID NO: 539606 - DNA, 15 bp, Homo sapiens
tttttgcaccccagc

SEQ ID NO: 539607 - DNA, 15 bp, Homo sapiens
atttttgcaccccag

SEQ ID NO: 539608 - DNA, 15 bp, Homo sapiens
catttttgcacccca

SEQ ID NO: 539609 - DNA, 15 bp, Homo sapiens
ccatttttgcacccc

SEQ ID NO: 539610 - DNA, 15 bp, Homo sapiens
tccatttttgcaccc

SEQ ID NO: 539611 - DNA, 15 bp, Homo sapiens
gtccatttttgcacc

SEQ ID NO: 539612 - DNA, 15 bp, Homo sapiens
ggtccatttttgcac

SEQ ID NO: 539613 - DNA, 15 bp, Homo sapiens
cggtccatttttgca

SEQ ID NO: 539614 - DNA, 15 bp, Homo sapiens
ccggtccatttttgc

SEQ ID NO: 539615 - DNA, 15 bp, Homo sapiens
cccggtccatttttg

SEQ ID NO: 539616 - DNA, 15 bp, Homo sapiens
tcccggtccattttt

SEQ ID NO: 539617 - DNA, 15 bp, Homo sapiens
ttcccggtccatttt

SEQ ID NO: 539618 - DNA, 15 bp, Homo sapiens
cttcccggtccattt

SEQ ID NO: 539619 - DNA, 15 bp, Homo sapiens
ccttcccggtccatt

SEQ ID NO: 539620 - DNA, 15 bp, Homo sapiens
gccttcccggtccat

SEQ ID NO: 539621 - DNA, 15 bp, Homo sapiens
agccttcccggtcca

SEQ ID NO: 539622 - DNA, 15 bp, Homo sapiens
cagccttcccggtcc

SEQ ID NO: 539623 - DNA, 15 bp, Homo sapiens
gcagccttcccggtc

SEQ ID NO: 539624 - DNA, 15 bp, Homo sapiens
cgcagccttcccggt

SEQ ID NO: 539625 - DNA, 15 bp, Homo sapiens
ccgcagccttcccgg

SEQ ID NO: 539626 - DNA, 15 bp, Homo sapiens
cccgcagccttcccg

SEQ ID NO: 539627 - DNA, 15 bp, Homo sapiens
tcccgcagccttccc

SEQ ID NO: 539628 - DNA, 15 bp, Homo sapiens
ctcccgcagccttcc

SEQ ID NO: 539629 - DNA, 15 bp, Homo sapiens
cctcccgcagccttc

SEQ ID NO: 539630 - DNA, 15 bp, Homo sapiens
tcctcccgcagcctt

SEQ ID NO: 539631 - DNA, 15 bp, Homo sapiens
ctcctcccgcagcct

SEQ ID NO: 539632 - DNA, 15 bp, Homo sapiens
cctcctcccgcagcc

SEQ ID NO: 539633 - DNA, 15 bp, Homo sapiens
ccctcctcccgcagc

SEQ ID NO: 539634 - DNA, 15 bp, Homo sapiens
cccctcctcccgcag

SEQ ID NO: 539635 - DNA, 15 bp, Homo sapiens
tcccctcctcccgca

SEQ ID NO: 539636 - DNA, 15 bp, Homo sapiens
gtcccctcctcccgc

SEQ ID NO: 539637 - DNA, 15 bp, Homo sapiens
cgtcccctcctcccg

SEQ ID NO: 539638 - DNA, 15 bp, Homo sapiens
gcgtcccctcctccc

SEQ ID NO: 539639 - DNA, 15 bp, Homo sapiens
ggcgtcccctcctcc

SEQ ID NO: 539640 - DNA, 15 bp, Homo sapiens
aggcgtcccctcctc

SEQ ID NO: 539641 - DNA, 15 bp, Homo sapiens
caggcgtcccctcct

SEQ ID NO: 539642 - DNA, 15 bp, Homo sapiens
gcaggcgtcccctcc

SEQ ID NO: 539643 - DNA, 15 bp, Homo sapiens
tgcaggcgtcccctc

SEQ ID NO: 539644 - DNA, 15 bp, Homo sapiens
gtgcaggcgtcccct

SEQ ID NO: 539645 - DNA, 15 bp, Homo sapiens
agtgcaggcgtcccc

SEQ ID NO: 539646 - DNA, 15 bp, Homo sapiens
cagtgcaggcgtccc

SEQ ID NO: 539647 - DNA, 15 bp, Homo sapiens
gcagtgcaggcgtcc

SEQ ID NO: 539648 - DNA, 15 bp, Homo sapiens
agcagtgcaggcgtc

SEQ ID NO: 539649 - DNA, 15 bp, Homo sapiens
aagcagtgcaggcgt

SEQ ID NO: 539650 - DNA, 15 bp, Homo sapiens
gaagcagtgcaggcg

SEQ ID NO: 539651 - DNA, 15 bp, Homo sapiens
agaagcagtgcaggc

SEQ ID NO: 539652 - DNA, 15 bp, Homo sapiens
cagaagcagtgcagg

SEQ ID NO: 539653 - DNA, 15 bp, Homo sapiens
ccagaagcagtgcag

SEQ ID NO: 539654 - DNA, 15 bp, Homo sapiens
tccagaagcagtgca

SEQ ID NO: 539655 - DNA, 15 bp, Homo sapiens
ttccagaagcagtgc

SEQ ID NO: 539656 - DNA, 15 bp, Homo sapiens
cttccagaagcagtg

SEQ ID NO: 539657 - DNA, 15 bp, Homo sapiens
ccttccagaagcagt

SEQ ID NO: 539658 - DNA, 15 bp, Homo sapiens
tccttccagaagcag

SEQ ID NO: 539659 - DNA, 15 bp, Homo sapiens
ctccttccagaagca

SEQ ID NO: 539660 - DNA, 15 bp, Homo sapiens
gctccttccagaagc

SEQ ID NO: 539661 - DNA, 15 bp, Homo sapiens
agctccttccagaag

SEQ ID NO: 539662 - DNA, 15 bp, Homo sapiens
cagctccttccagaa

SEQ ID NO: 539663 - DNA, 15 bp, Homo sapiens
acagctccttccaga

SEQ ID NO: 539664 - DNA, 15 bp, Homo sapiens
gacagctccttccag

SEQ ID NO: 539665 - DNA, 15 bp, Homo sapiens
agacagctccttcca

SEQ ID NO: 539666 - DNA, 15 bp, Homo sapiens
cagacagctccttcc

SEQ ID NO: 539667 - DNA, 15 bp, Homo sapiens
ccagacagctccttc

SEQ ID NO: 539668 - DNA, 15 bp, Homo sapiens
tccagacagctcctt

SEQ ID NO: 539669 - DNA, 15 bp, Homo sapiens
gtccagacagctcct

SEQ ID NO: 539670 - DNA, 15 bp, Homo sapiens
tgtccagacagctcc

SEQ ID NO: 539671 - DNA, 15 bp, Homo sapiens
ctgtccagacagctc

SEQ ID NO: 539672 - DNA, 15 bp, Homo sapiens
gctgtccagacagct

SEQ ID NO: 539673 - DNA, 15 bp, Homo sapiens
cgctgtccagacagc

SEQ ID NO: 539674 - DNA, 15 bp, Homo sapiens
ccgctgtccagacag

SEQ ID NO: 539675 - DNA, 15 bp, Homo sapiens
accgctgtccagaca

SEQ ID NO: 539676 - DNA, 15 bp, Homo sapiens
gaccgctgtccagac

SEQ ID NO: 539677 - DNA, 15 bp, Homo sapiens
ggaccgctgtccaga

SEQ ID NO: 539678 - DNA, 15 bp, Homo sapiens
aggaccgctgtccag

SEQ ID NO: 539679 - DNA, 15 bp, Homo sapiens
gaggaccgctgtcca

SEQ ID NO: 539680 - DNA, 15 bp, Homo sapiens
ggaggaccgctgtcc

SEQ ID NO: 539681 - DNA, 15 bp, Homo sapiens
tggaggaccgctgtc

SEQ ID NO: 539682 - DNA, 15 bp, Homo sapiens
ctggaggaccgctgt

SEQ ID NO: 539683 - DNA, 15 bp, Homo sapiens
actggaggaccgctg

SEQ ID NO: 539684 - DNA, 15 bp, Homo sapiens
cactggaggaccgct

SEQ ID NO: 539685 - DNA, 15 bp, Homo sapiens
gcactggaggaccgc

SEQ ID NO: 539686 - DNA, 15 bp, Homo sapiens
ggcactggaggaccg

SEQ ID NO: 539687 - DNA, 15 bp, Homo sapiens
aggcactggaggacc

SEQ ID NO: 539688 - DNA, 15 bp, Homo sapiens
caggcactggaggac

SEQ ID NO: 539689 - DNA, 15 bp, Homo sapiens
ccaggcactggagga

SEQ ID NO: 539690 - DNA, 15 bp, Homo sapiens
tccaggcactggagg

SEQ ID NO: 539691 - DNA, 15 bp, Homo sapiens
ttccaggcactggag

SEQ ID NO: 539692 - DNA, 15 bp, Homo sapiens
gttccaggcactgga

SEQ ID NO: 539693 - DNA, 15 bp, Homo sapiens
tgttccaggcactgg

SEQ ID NO: 539694 - DNA, 15 bp, Homo sapiens
ttgttccaggcactg

SEQ ID NO: 539695 - DNA, 15 bp, Homo sapiens
tttgttccaggcact

SEQ ID NO: 539696 - DNA, 15 bp, Homo sapiens
gtttgttccaggcac

SEQ ID NO: 539697 - DNA, 15 bp, Homo sapiens
tgtttgttccaggca

SEQ ID NO: 539698 - DNA, 15 bp, Homo sapiens
atgtttgttccaggc

SEQ ID NO: 539699 - DNA, 15 bp, Homo sapiens
gatgtttgttccagg

SEQ ID NO: 539700 - DNA, 15 bp, Homo sapiens
ggatgtttgttccag

SEQ ID NO: 539701 - DNA, 15 bp, Homo sapiens
tggatgtttgttcca

SEQ ID NO: 539702 - DNA, 15 bp, Homo sapiens
ttggatgtttgttcc

SEQ ID NO: 539703 - DNA, 15 bp, Homo sapiens
tttggatgtttgttc

SEQ ID NO: 539704 - DNA, 15 bp, Homo sapiens
ttttggatgtttgtt

SEQ ID NO: 539705 - DNA, 15 bp, Homo sapiens
attttggatgtttgt

SEQ ID NO: 539706 - DNA, 15 bp, Homo sapiens
gattttggatgtttg

SEQ ID NO: 539707 - DNA, 15 bp, Homo sapiens
ggattttggatgttt

SEQ ID NO: 539708 - DNA, 15 bp, Homo sapiens
tggattttggatgtt

SEQ ID NO: 539709 - DNA, 15 bp, Homo sapiens
ctggattttggatgt

SEQ ID NO: 539710 - DNA, 15 bp, Homo sapiens
tctggattttggatg

SEQ ID NO: 539711 - DNA, 15 bp, Homo sapiens
ctctggattttggat

SEQ ID NO: 539712 - DNA, 15 bp, Homo sapiens
tctctggattttgga

SEQ ID NO: 539713 - DNA, 15 bp, Homo sapiens
ctctctggattttgg

SEQ ID NO: 539714 - DNA, 15 bp, Homo sapiens
actctctggattttg

SEQ ID NO: 539715 - DNA, 15 bp, Homo sapiens
aactctctggatttt

SEQ ID NO: 539716 - DNA, 15 bp, Homo sapiens
gaactctctggattt

SEQ ID NO: 539717 - DNA, 15 bp, Homo sapiens
tgaactctctggatt

SEQ ID NO: 539718 - DNA, 15 bp, Homo sapiens
gtgaactctctggat

SEQ ID NO: 539719 - DNA, 15 bp, Homo sapiens
tgtgaactctctgga

SEQ ID NO: 539720 - DNA, 15 bp, Homo sapiens
ctgtgaactctctgg

SEQ ID NO: 539721 - DNA, 15 bp, Homo sapiens
cctgtgaactctctg

SEQ ID NO: 539722 - DNA, 15 bp, Homo sapiens
ccctgtgaactctct

SEQ ID NO: 539723 - DNA, 15 bp, Homo sapiens
gccctgtgaactctc

SEQ ID NO: 539724 - DNA, 15 bp, Homo sapiens
ggccctgtgaactct

SEQ ID NO: 539725 - DNA, 15 bp, Homo sapiens
tggccctgtgaactc

SEQ ID NO: 539726 - DNA, 15 bp, Homo sapiens
ctggccctgtgaact

SEQ ID NO: 539727 - DNA, 15 bp, Homo sapiens
tctggccctgtgaac

SEQ ID NO: 539728 - DNA, 15 bp, Homo sapiens
ctctggccctgtgaa

SEQ ID NO: 539729 - DNA, 15 bp, Homo sapiens
actctggccctgtga

SEQ ID NO: 539730 - DNA, 15 bp, Homo sapiens
tactctggccctgtg

SEQ ID NO: 539731 - DNA, 15 bp, Homo sapiens
gtactctggccctgt

SEQ ID NO: 539732 - DNA, 15 bp, Homo sapiens
tgtactctggccctg

SEQ ID NO: 539733 - DNA, 15 bp, Homo sapiens
ttgtactctggccct

SEQ ID NO: 539734 - DNA, 15 bp, Homo sapiens
tttgtactctggccc

SEQ ID NO: 539735 - DNA, 15 bp, Homo sapiens
ctttgtactctggcc

SEQ ID NO: 539736 - DNA, 15 bp, Homo sapiens
actttgtactctggc

SEQ ID NO: 539737 - DNA, 15 bp, Homo sapiens
cactttgtactctgg

SEQ ID NO: 539738 - DNA, 15 bp, Homo sapiens
gcactttgtactctg

SEQ ID NO: 539739 - DNA, 15 bp, Homo sapiens
cgcactttgtactct

SEQ ID NO: 539740 - DNA, 15 bp, Homo sapiens
acgcactttgtactc

SEQ ID NO: 539741 - DNA, 15 bp, Homo sapiens
tacgcactttgtact

SEQ ID NO: 539742 - DNA, 15 bp, Homo sapiens
atacgcactttgtac

SEQ ID NO: 539743 - DNA, 15 bp, Homo sapiens
catacgcactttgta

SEQ ID NO: 539744 - DNA, 15 bp, Homo sapiens
gcatacgcactttgt

SEQ ID NO: 539745 - DNA, 15 bp, Homo sapiens
cgcatacgcactttg

SEQ ID NO: 539746 - DNA, 15 bp, Homo sapiens
ccgcatacgcacttt

SEQ ID NO: 539747 - DNA, 15 bp, Homo sapiens
cccgcatacgcactt

SEQ ID NO: 539748 - DNA, 15 bp, Homo sapiens
tcccgcatacgcact

SEQ ID NO: 539749 - DNA, 15 bp, Homo sapiens
ctcccgcatacgcac

SEQ ID NO: 539750 - DNA, 15 bp, Homo sapiens
cctcccgcatacgca

SEQ ID NO: 539751 - DNA, 15 bp, Homo sapiens
ccctcccgcatacgc

SEQ ID NO: 539752 - DNA, 15 bp, Homo sapiens
cccctcccgcatacg

SEQ ID NO: 539753 - DNA, 15 bp, Homo sapiens
ccccctcccgcatac

SEQ ID NO: 539754 - DNA, 15 bp, Homo sapiens
tccccctcccgcata

SEQ ID NO: 539755 - DNA, 15 bp, Homo sapiens
gtccccctcccgcat

SEQ ID NO: 539756 - DNA, 15 bp, Homo sapiens
tgtccccctcccgca

SEQ ID NO: 539757 - DNA, 15 bp, Homo sapiens
ttgtccccctcccgc

SEQ ID NO: 539758 - DNA, 15 bp, Homo sapiens
cttgtccccctcccg

SEQ ID NO: 539759 - DNA, 15 bp, Homo sapiens
tcttgtccccctccc

SEQ ID NO: 539760 - DNA, 15 bp, Homo sapiens
ctcttgtccccctcc

SEQ ID NO: 539761 - DNA, 15 bp, Homo sapiens
tctcttgtccccctc

SEQ ID NO: 539762 - DNA, 15 bp, Homo sapiens
atctcttgtccccct

SEQ ID NO: 539763 - DNA, 15 bp, Homo sapiens
catctcttgtccccc

SEQ ID NO: 539764 - DNA, 15 bp, Homo sapiens
ccatctcttgtcccc

SEQ ID NO: 539765 - DNA, 15 bp, Homo sapiens
gccatctcttgtccc

SEQ ID NO: 539766 - DNA, 15 bp, Homo sapiens
cgccatctcttgtcc

SEQ ID NO: 539767 - DNA, 15 bp, Homo sapiens
gcgccatctcttgtc

SEQ ID NO: 539768 - DNA, 15 bp, Homo sapiens
agcgccatctcttgt

SEQ ID NO: 539769 - DNA, 15 bp, Homo sapiens
cagcgccatctcttg

SEQ ID NO: 539770 - DNA, 15 bp, Homo sapiens
gcagcgccatctctt

SEQ ID NO: 539771 - DNA, 15 bp, Homo sapiens
tgcagcgccatctct

SEQ ID NO: 539772 - DNA, 15 bp, Homo sapiens
ctgcagcgccatctc

SEQ ID NO: 539773 - DNA, 15 bp, Homo sapiens
tctgcagcgccatct

SEQ ID NO: 539774 - DNA, 15 bp, Homo sapiens
ctctgcagcgccatc

SEQ ID NO: 539775 - DNA, 15 bp, Homo sapiens
cctctgcagcgccat

SEQ ID NO: 539776 - DNA, 15 bp, Homo sapiens
acctctgcagcgcca

SEQ ID NO: 539777 - DNA, 15 bp, Homo sapiens
cacctctgcagcgcc

SEQ ID NO: 539778 - DNA, 15 bp, Homo sapiens
tcacctctgcagcgc

SEQ ID NO: 539779 - DNA, 15 bp, Homo sapiens
ctcacctctgcagcg

SEQ ID NO: 539780 - DNA, 15 bp, Homo sapiens
tctcacctctgcagc

SEQ ID NO: 539781 - DNA, 15 bp, Homo sapiens
ttctcacctctgcag

SEQ ID NO: 539782 - DNA, 15 bp, Homo sapiens
cttctcacctctgca

SEQ ID NO: 539783 - DNA, 15 bp, Homo sapiens
ccttctcacctctgc

SEQ ID NO: 539784 - DNA, 15 bp, Homo sapiens
cccttctcacctctg

SEQ ID NO: 539785 - DNA, 15 bp, Homo sapiens
gcccttctcacctct

SEQ ID NO: 539786 - DNA, 15 bp, Homo sapiens
ggcccttctcacctc

SEQ ID NO: 539787 - DNA, 15 bp, Homo sapiens
aggcccttctcacct

SEQ ID NO: 539788 - DNA, 15 bp, Homo sapiens
gaggcccttctcacc

SEQ ID NO: 539789 - DNA, 15 bp, Homo sapiens
ggaggcccttctcac

SEQ ID NO: 539790 - DNA, 15 bp, Homo sapiens
gggaggcccttctca

SEQ ID NO: 539791 - DNA, 15 bp, Homo sapiens
tgggaggcccttctc

SEQ ID NO: 539792 - DNA, 15 bp, Homo sapiens
ctgggaggcccttct

SEQ ID NO: 539793 - DNA, 15 bp, Homo sapiens
cctgggaggcccttc

SEQ ID NO: 539794 - DNA, 15 bp, Homo sapiens
ccctgggaggccctt

SEQ ID NO: 539795 - DNA, 15 bp, Homo sapiens
cccctgggaggccct

SEQ ID NO: 539796 - DNA, 15 bp, Homo sapiens
acccctgggaggccc

SEQ ID NO: 539797 - DNA, 15 bp, Homo sapiens
gacccctgggaggcc

SEQ ID NO: 539798 - DNA, 15 bp, Homo sapiens
agacccctgggaggc

SEQ ID NO: 539799 - DNA, 15 bp, Homo sapiens
aagacccctgggagg

SEQ ID NO: 539800 - DNA, 15 bp, Homo sapiens
taagacccctgggag

SEQ ID NO: 539801 - DNA, 15 bp, Homo sapiens
gtaagacccctggga

SEQ ID NO: 539802 - DNA, 15 bp, Homo sapiens
ggtaagacccctggg

SEQ ID NO: 539803 - DNA, 15 bp, Homo sapiens
tggtaagacccctgg

SEQ ID NO: 539804 - DNA, 15 bp, Homo sapiens
atggtaagacccctg

SEQ ID NO: 539805 - DNA, 15 bp, Homo sapiens
gatggtaagacccct

SEQ ID NO: 539806 - DNA, 15 bp, Homo sapiens
ggatggtaagacccc

SEQ ID NO: 539807 - DNA, 15 bp, Homo sapiens
gggatggtaagaccc

SEQ ID NO: 539808 - DNA, 15 bp, Homo sapiens
tgggatggtaagacc

SEQ ID NO: 539809 - DNA, 15 bp, Homo sapiens
ctgggatggtaagac

SEQ ID NO: 539810 - DNA, 15 bp, Homo sapiens
cctgggatggtaaga

SEQ ID NO: 539811 - DNA, 15 bp, Homo sapiens
ccctgggatggtaag

SEQ ID NO: 539812 - DNA, 15 bp, Homo sapiens
tccctgggatggtaa

SEQ ID NO: 539813 - DNA, 15 bp, Homo sapiens
ctccctgggatggta

SEQ ID NO: 539814 - DNA, 15 bp, Homo sapiens
actccctgggatggt

SEQ ID NO: 539815 - DNA, 15 bp, Homo sapiens
gactccctgggatgg

SEQ ID NO: 539816 - DNA, 15 bp, Homo sapiens
agactccctgggatg

SEQ ID NO: 539817 - DNA, 15 bp, Homo sapiens
gagactccctgggat

SEQ ID NO: 539818 - DNA, 15 bp, Homo sapiens
tgagactccctggga

SEQ ID NO: 539819 - DNA, 15 bp, Homo sapiens
atgagactccctggg

SEQ ID NO: 539820 - DNA, 15 bp, Homo sapiens
aatgagactccctgg

SEQ ID NO: 539821 - DNA, 15 bp, Homo sapiens
gaatgagactccctg

SEQ ID NO: 539822 - DNA, 15 bp, Homo sapiens
agaatgagactccct

SEQ ID NO: 539823 - DNA, 15 bp, Homo sapiens
gagaatgagactccc

SEQ ID NO: 539824 - DNA, 15 bp, Homo sapiens
ggagaatgagactcc

SEQ ID NO: 539825 - DNA, 15 bp, Homo sapiens
aggagaatgagactc

SEQ ID NO: 539826 - DNA, 15 bp, Homo sapiens
gaggagaatgagact

SEQ ID NO: 539827 - DNA, 15 bp, Homo sapiens
agaggagaatgagac

SEQ ID NO: 539828 - DNA, 15 bp, Homo sapiens
gagaggagaatgaga

SEQ ID NO: 539829 - DNA, 15 bp, Homo sapiens
ggagaggagaatgag

SEQ ID NO: 539830 - DNA, 15 bp, Homo sapiens
gggagaggagaatga

SEQ ID NO: 539831 - DNA, 15 bp, Homo sapiens
tgggagaggagaatg

SEQ ID NO: 539832 - DNA, 15 bp, Homo sapiens
ctgggagaggagaat

SEQ ID NO: 539833 - DNA, 15 bp, Homo sapiens
cctgggagaggagaa

SEQ ID NO: 539834 - DNA, 15 bp, Homo sapiens
tcctgggagaggaga

SEQ ID NO: 539835 - DNA, 15 bp, Homo sapiens
atcctgggagaggag

SEQ ID NO: 539836 - DNA, 15 bp, Homo sapiens
tatcctgggagagga

SEQ ID NO: 539837 - DNA, 15 bp, Homo sapiens
atatcctgggagagg

SEQ ID NO: 539838 - DNA, 15 bp, Homo sapiens
gatatcctgggagag

SEQ ID NO: 539839 - DNA, 15 bp, Homo sapiens
ggatatcctgggaga

SEQ ID NO: 539840 - DNA, 15 bp, Homo sapiens
aggatatcctgggag

SEQ ID NO: 539841 - DNA, 15 bp, Homo sapiens
gaggatatcctggga

SEQ ID NO: 539842 - DNA, 15 bp, Homo sapiens
tgaggatatcctggg

SEQ ID NO: 539843 - DNA, 15 bp, Homo sapiens
gtgaggatatcctgg

SEQ ID NO: 539844 - DNA, 15 bp, Homo sapiens
ggtgaggatatcctg

SEQ ID NO: 539845 - DNA, 15 bp, Homo sapiens
gggtgaggatatcct

SEQ ID NO: 539846 - DNA, 15 bp, Homo sapiens
tgggtgaggatatcc

SEQ ID NO: 539847 - DNA, 15 bp, Homo sapiens
gtgggtgaggatatc

SEQ ID NO: 539848 - DNA, 15 bp, Homo sapiens
ggtgggtgaggatat

SEQ ID NO: 539849 - DNA, 15 bp, Homo sapiens
gggtgggtgaggata

SEQ ID NO: 539850 - DNA, 15 bp, Homo sapiens
ggggtgggtgaggat

SEQ ID NO: 539851 - DNA, 15 bp, Homo sapiens
tggggtgggtgagga

SEQ ID NO: 539852 - DNA, 15 bp, Homo sapiens
ttggggtgggtgagg

SEQ ID NO: 539853 - DNA, 15 bp, Homo sapiens
gttggggtgggtgag

SEQ ID NO: 539854 - DNA, 15 bp, Homo sapiens
ggttggggtgggtga

SEQ ID NO: 539855 - DNA, 15 bp, Homo sapiens
tggttggggtgggtg

SEQ ID NO: 539856 - DNA, 15 bp, Homo sapiens
ctggttggggtgggt

SEQ ID NO: 539857 - DNA, 15 bp, Homo sapiens
cctggttggggtggg

SEQ ID NO: 539858 - DNA, 15 bp, Homo sapiens
acctggttggggtgg

SEQ ID NO: 539859 - DNA, 15 bp, Homo sapiens
tacctggttggggtg

SEQ ID NO: 539860 - DNA, 15 bp, Homo sapiens
atacctggttggggt

SEQ ID NO: 539861 - DNA, 15 bp, Homo sapiens
catacctggttgggg

SEQ ID NO: 539862 - DNA, 15 bp, Homo sapiens
acatacctggttggg

SEQ ID NO: 539863 - DNA, 15 bp, Homo sapiens
gacatacctggttgg

SEQ ID NO: 539864 - DNA, 15 bp, Homo sapiens
ggacatacctggttg

SEQ ID NO: 539865 - DNA, 15 bp, Homo sapiens
aggacatacctggtt

SEQ ID NO: 539866 - DNA, 15 bp, Homo sapiens
gaggacatacctggt

SEQ ID NO: 539867 - DNA, 15 bp, Homo sapiens
agaggacatacctgg

SEQ ID NO: 539868 - DNA, 15 bp, Homo sapiens
gagaggacatacctg

SEQ ID NO: 539869 - DNA, 15 bp, Homo sapiens
agagaggacatacct

SEQ ID NO: 539870 - DNA, 15 bp, Homo sapiens
gagagaggacatacc

SEQ ID NO: 539871 - DNA, 15 bp, Homo sapiens
ggagagaggacatac

SEQ ID NO: 539872 - DNA, 15 bp, Homo sapiens
aggagagaggacata

SEQ ID NO: 539873 - DNA, 15 bp, Homo sapiens
aaggagagaggacat

SEQ ID NO: 539874 - DNA, 15 bp, Homo sapiens
gaaggagagaggaca

SEQ ID NO: 539875 - DNA, 15 bp, Homo sapiens
ggaaggagagaggac

SEQ ID NO: 539876 - DNA, 15 bp, Homo sapiens
gggaaggagagagga

SEQ ID NO: 539877 - DNA, 15 bp, Homo sapiens
tgggaaggagagagg

SEQ ID NO: 539878 - DNA, 15 bp, Homo sapiens
ctgggaaggagagag

SEQ ID NO: 539879 - DNA, 15 bp, Homo sapiens
cctgggaaggagaga

SEQ ID NO: 539880 - DNA, 15 bp, Homo sapiens
ccctgggaaggagag

SEQ ID NO: 539881 - DNA, 15 bp, Homo sapiens
cccctgggaaggaga

SEQ ID NO: 539882 - DNA, 15 bp, Homo sapiens
gcccctgggaaggag

SEQ ID NO: 539883 - DNA, 15 bp, Homo sapiens
agcccctgggaagga

SEQ ID NO: 539884 - DNA, 15 bp, Homo sapiens
aagcccctgggaagg

SEQ ID NO: 539885 - DNA, 15 bp, Homo sapiens
gaagcccctgggaag

SEQ ID NO: 539886 - DNA, 15 bp, Homo sapiens
agaagcccctgggaa

SEQ ID NO: 539887 - DNA, 15 bp, Homo sapiens
aagaagcccctggga

SEQ ID NO: 539888 - DNA, 15 bp, Homo sapiens
gaagaagcccctggg

SEQ ID NO: 539889 - DNA, 15 bp, Homo sapiens
tgaagaagcccctgg

SEQ ID NO: 539890 - DNA, 15 bp, Homo sapiens
gtgaagaagcccctg

SEQ ID NO: 539891 - DNA, 15 bp, Homo sapiens
agtgaagaagcccct

SEQ ID NO: 539892 - DNA, 15 bp, Homo sapiens
aagtgaagaagcccc

SEQ ID NO: 539893 - DNA, 15 bp, Homo sapiens
aaagtgaagaagccc

SEQ ID NO: 539894 - DNA, 15 bp, Homo sapiens
gaaagtgaagaagcc

SEQ ID NO: 539895 - DNA, 15 bp, Homo sapiens
ggaaagtgaagaagc

SEQ ID NO: 539896 - DNA, 15 bp, Homo sapiens
gggaaagtgaagaag

SEQ ID NO: 539897 - DNA, 15 bp, Homo sapiens
cgggaaagtgaagaa

SEQ ID NO: 539898 - DNA, 15 bp, Homo sapiens
gcgggaaagtgaaga

SEQ ID NO: 539899 - DNA, 15 bp, Homo sapiens
tgcgggaaagtgaag

SEQ ID NO: 539900 - DNA, 15 bp, Homo sapiens
atgcgggaaagtgaa

SEQ ID NO: 539901 - DNA, 15 bp, Homo sapiens
gatgcgggaaagtga

SEQ ID NO: 539902 - DNA, 15 bp, Homo sapiens
ggatgcgggaaagtg

SEQ ID NO: 539903 - DNA, 15 bp, Homo sapiens
gggatgcgggaaagt

SEQ ID NO: 539904 - DNA, 15 bp, Homo sapiens
ggggatgcgggaaag

SEQ ID NO: 539905 - DNA, 15 bp, Homo sapiens
gggggatgcgggaaa

SEQ ID NO: 539906 - DNA, 15 bp, Homo sapiens
ggggggatgcgggaa

SEQ ID NO: 539907 - DNA, 15 bp, Homo sapiens
aggggggatgcggga

SEQ ID NO: 539908 - DNA, 15 bp, Homo sapiens
gaggggggatgcggg

SEQ ID NO: 539909 - DNA, 15 bp, Homo sapiens
agaggggggatgcgg

SEQ ID NO: 539910 - DNA, 15 bp, Homo sapiens
gagaggggggatgcg

SEQ ID NO: 539911 - DNA, 15 bp, Homo sapiens
ggagaggggggatgc

SEQ ID NO: 539912 - DNA, 15 bp, Homo sapiens
gggagaggggggatg

SEQ ID NO: 539913 - DNA, 15 bp, Homo sapiens
ggggagaggggggat

SEQ ID NO: 539914 - DNA, 15 bp, Homo sapiens
tggggagagggggga

SEQ ID NO: 539915 - DNA, 15 bp, Homo sapiens
ctggggagagggggg

SEQ ID NO: 539916 - DNA, 15 bp, Homo sapiens
cctggggagaggggg

SEQ ID NO: 539917 - DNA, 15 bp, Homo sapiens
tcctggggagagggg

SEQ ID NO: 539918 - DNA, 15 bp, Homo sapiens
atcctggggagaggg

SEQ ID NO: 539919 - DNA, 15 bp, Homo sapiens
catcctggggagagg

SEQ ID NO: 539920 - DNA, 15 bp, Homo sapiens
acatcctggggagag

SEQ ID NO: 539921 - DNA, 15 bp, Homo sapiens
tacatcctggggaga

SEQ ID NO: 539922 - DNA, 15 bp, Homo sapiens
atacatcctggggag

SEQ ID NO: 539923 - DNA, 15 bp, Homo sapiens
gatacatcctgggga

SEQ ID NO: 539924 - DNA, 15 bp, Homo sapiens
tgatacatcctgggg

SEQ ID NO: 539925 - DNA, 15 bp, Homo sapiens
ctgatacatcctggg

SEQ ID NO: 539926 - DNA, 15 bp, Homo sapiens
gctgatacatcctgg

SEQ ID NO: 539927 - DNA, 15 bp, Homo sapiens
ggctgatacatcctg

SEQ ID NO: 539928 - DNA, 15 bp, Homo sapiens
gggctgatacatcct

SEQ ID NO: 539929 - DNA, 15 bp, Homo sapiens
ggggctgatacatcc

SEQ ID NO: 539930 - DNA, 15 bp, Homo sapiens
aggggctgatacatc

SEQ ID NO: 539931 - DNA, 15 bp, Homo sapiens
caggggctgatacat

SEQ ID NO: 539932 - DNA, 15 bp, Homo sapiens
acaggggctgataca

SEQ ID NO: 539933 - DNA, 15 bp, Homo sapiens
gacaggggctgatac

SEQ ID NO: 539934 - DNA, 15 bp, Homo sapiens
tgacaggggctgata

SEQ ID NO: 539935 - DNA, 15 bp, Homo sapiens
ctgacaggggctgat

SEQ ID NO: 539936 - DNA, 15 bp, Homo sapiens
cctgacaggggctga

SEQ ID NO: 539937 - DNA, 15 bp, Homo sapiens
ccctgacaggggctg

SEQ ID NO: 539938 - DNA, 15 bp, Homo sapiens
cccctgacaggggct

SEQ ID NO: 539939 - DNA, 15 bp, Homo sapiens
gcccctgacaggggc

SEQ ID NO: 539940 - DNA, 15 bp, Homo sapiens
agcccctgacagggg

SEQ ID NO: 539941 - DNA, 15 bp, Homo sapiens
gagcccctgacaggg

SEQ ID NO: 539942 - DNA, 15 bp, Homo sapiens
agagcccctgacagg

SEQ ID NO: 539943 - DNA, 15 bp, Homo sapiens
gagagcccctgacag

SEQ ID NO: 539944 - DNA, 15 bp, Homo sapiens
agagagcccctgaca

SEQ ID NO: 539945 - DNA, 15 bp, Homo sapiens
gagagagcccctgac

SEQ ID NO: 539946 - DNA, 15 bp, Homo sapiens
agagagagcccctga

SEQ ID NO: 539947 - DNA, 15 bp, Homo sapiens
gagagagagcccctg

SEQ ID NO: 539948 - DNA, 15 bp, Homo sapiens
agagagagagcccct

SEQ ID NO: 539949 - DNA, 15 bp, Homo sapiens
gagagagagagcccc

SEQ ID NO: 539950 - DNA, 15 bp, Homo sapiens
ggagagagagagccc

SEQ ID NO: 539951 - DNA, 15 bp, Homo sapiens
gggagagagagagcc

SEQ ID NO: 539952 - DNA, 15 bp, Homo sapiens
agggagagagagagc

SEQ ID NO: 539953 - DNA, 15 bp, Homo sapiens
gagggagagagagag

SEQ ID NO: 539954 - DNA, 15 bp, Homo sapiens
ggagggagagagaga

SEQ ID NO: 539955 - DNA, 15 bp, Homo sapiens
gggagggagagagag

SEQ ID NO: 539956 - DNA, 15 bp, Homo sapiens
ggggagggagagaga

SEQ ID NO: 539957 - DNA, 15 bp, Homo sapiens
tggggagggagagag

SEQ ID NO: 539958 - DNA, 15 bp, Homo sapiens
gtggggagggagaga

SEQ ID NO: 539959 - DNA, 15 bp, Homo sapiens
ggtggggagggagag

SEQ ID NO: 539960 - DNA, 15 bp, Homo sapiens
gggtggggagggaga

SEQ ID NO: 539961 - DNA, 15 bp, Homo sapiens
tgggtggggagggag

SEQ ID NO: 539962 - DNA, 15 bp, Homo sapiens
ctgggtggggaggga

SEQ ID NO: 539963 - DNA, 15 bp, Homo sapiens
cctgggtggggaggg

SEQ ID NO: 539964 - DNA, 15 bp, Homo sapiens
tcctgggtggggagg

SEQ ID NO: 539965 - DNA, 15 bp, Homo sapiens
ctcctgggtggggag

SEQ ID NO: 539966 - DNA, 15 bp, Homo sapiens
tctcctgggtgggga

SEQ ID NO: 539967 - DNA, 15 bp, Homo sapiens
ctctcctgggtgggg

SEQ ID NO: 539968 - DNA, 15 bp, Homo sapiens
actctcctgggtggg

SEQ ID NO: 539969 - DNA, 15 bp, Homo sapiens
gactctcctgggtgg

SEQ ID NO: 539970 - DNA, 15 bp, Homo sapiens
ggactctcctgggtg

SEQ ID NO: 539971 - DNA, 15 bp, Homo sapiens
aggactctcctgggt

SEQ ID NO: 539972 - DNA, 15 bp, Homo sapiens
gaggactctcctggg

SEQ ID NO: 539973 - DNA, 15 bp, Homo sapiens
tgaggactctcctgg

SEQ ID NO: 539974 - DNA, 15 bp, Homo sapiens
gtgaggactctcctg

SEQ ID NO: 539975 - DNA, 15 bp, Homo sapiens
ggtgaggactctcct

SEQ ID NO: 539976 - DNA, 15 bp, Homo sapiens
gggtgaggactctcc

SEQ ID NO: 539977 - DNA, 15 bp, Homo sapiens
agggtgaggactctc

SEQ ID NO: 539978 - DNA, 15 bp, Homo sapiens
gagggtgaggactct

SEQ ID NO: 539979 - DNA, 15 bp, Homo sapiens
agagggtgaggactc

SEQ ID NO: 539980 - DNA, 15 bp, Homo sapiens
aagagggtgaggact

SEQ ID NO: 539981 - DNA, 15 bp, Homo sapiens
gaagagggtgaggac

SEQ ID NO: 539982 - DNA, 15 bp, Homo sapiens
ggaagagggtgagga

SEQ ID NO: 539983 - DNA, 15 bp, Homo sapiens
gggaagagggtgagg

SEQ ID NO: 539984 - DNA, 15 bp, Homo sapiens
tgggaagagggtgag

SEQ ID NO: 539985 - DNA, 15 bp, Homo sapiens
ctgggaagagggtga

SEQ ID NO: 539986 - DNA, 15 bp, Homo sapiens
cctgggaagagggtg

SEQ ID NO: 539987 - DNA, 15 bp, Homo sapiens
tcctgggaagagggt

SEQ ID NO: 539988 - DNA, 15 bp, Homo sapiens
ctcctgggaagaggg

SEQ ID NO: 539989 - DNA, 15 bp, Homo sapiens
actcctgggaagagg

SEQ ID NO: 539990 - DNA, 15 bp, Homo sapiens
cactcctgggaagag

SEQ ID NO: 539991 - DNA, 15 bp, Homo sapiens
gcactcctgggaaga

SEQ ID NO: 539992 - DNA, 15 bp, Homo sapiens
agcactcctgggaag

SEQ ID NO: 539993 - DNA, 15 bp, Homo sapiens
cagcactcctgggaa

SEQ ID NO: 539994 - DNA, 15 bp, Homo sapiens
ccagcactcctggga

SEQ ID NO: 539995 - DNA, 15 bp, Homo sapiens
tccagcactcctggg

SEQ ID NO: 539996 - DNA, 15 bp, Homo sapiens
ttccagcactcctgg

SEQ ID NO: 539997 - DNA, 15 bp, Homo sapiens
gttccagcactcctg

SEQ ID NO: 539998 - DNA, 15 bp, Homo sapiens
agttccagcactcct

SEQ ID NO: 539999 - DNA, 15 bp, Homo sapiens
cagttccagcactcc

SEQ ID NO: 540000 - DNA, 15 bp, Homo sapiens
gcagttccagcactc

SEQ ID NO: 540001 - DNA, 15 bp, Homo sapiens
tgcagttccagcact

SEQ ID NO: 540002 - DNA, 15 bp, Homo sapiens
ctgcagttccagcac

SEQ ID NO: 540003 - DNA, 15 bp, Homo sapiens
cctgcagttccagca

SEQ ID NO: 540004 - DNA, 15 bp, Homo sapiens
ccctgcagttccagc

SEQ ID NO: 540005 - DNA, 15 bp, Homo sapiens
cccctgcagttccag

SEQ ID NO: 540006 - DNA, 15 bp, Homo sapiens
gcccctgcagttcca

SEQ ID NO: 540007 - DNA, 15 bp, Homo sapiens
ggcccctgcagttcc

SEQ ID NO: 540008 - DNA, 15 bp, Homo sapiens
tggcccctgcagttc

SEQ ID NO: 540009 - DNA, 15 bp, Homo sapiens
ctggcccctgcagtt

SEQ ID NO: 540010 - DNA, 15 bp, Homo sapiens
cctggcccctgcagt

SEQ ID NO: 540011 - DNA, 15 bp, Homo sapiens
ccctggcccctgcag

SEQ ID NO: 540012 - DNA, 15 bp, Homo sapiens
gccctggcccctgca

SEQ ID NO: 540013 - DNA, 15 bp, Homo sapiens
agccctggcccctgc

SEQ ID NO: 540014 - DNA, 15 bp, Homo sapiens
cagccctggcccctg

SEQ ID NO: 540015 - DNA, 15 bp, Homo sapiens
ccagccctggcccct

SEQ ID NO: 540016 - DNA, 15 bp, Homo sapiens
cccagccctggcccc

SEQ ID NO: 540017 - DNA, 15 bp, Homo sapiens
ccccagccctggccc

SEQ ID NO: 540018 - DNA, 15 bp, Homo sapiens
tccccagccctggcc

SEQ ID NO: 540019 - DNA, 15 bp, Homo sapiens
ttccccagccctggc

SEQ ID NO: 540020 - DNA, 15 bp, Homo sapiens
tttccccagccctgg

SEQ ID NO: 540021 - DNA, 15 bp, Homo sapiens
atttccccagccctg

SEQ ID NO: 540022 - DNA, 15 bp, Homo sapiens
catttccccagccct

SEQ ID NO: 540023 - DNA, 15 bp, Homo sapiens
acatttccccagccc

SEQ ID NO: 540024 - DNA, 15 bp, Homo sapiens
cacatttccccagcc

SEQ ID NO: 540025 - DNA, 15 bp, Homo sapiens
acacatttccccagc

SEQ ID NO: 540026 - DNA, 15 bp, Homo sapiens
gacacatttccccag

SEQ ID NO: 540027 - DNA, 15 bp, Homo sapiens
tgacacatttcccca

SEQ ID NO: 540028 - DNA, 15 bp, Homo sapiens
gtgacacatttcccc

SEQ ID NO: 540029 - DNA, 15 bp, Homo sapiens
ggtgacacatttccc

SEQ ID NO: 540030 - DNA, 15 bp, Homo sapiens
tggtgacacatttcc

SEQ ID NO: 540031 - DNA, 15 bp, Homo sapiens
atggtgacacatttc

SEQ ID NO: 540032 - DNA, 15 bp, Homo sapiens
gatggtgacacattt

SEQ ID NO: 540033 - DNA, 15 bp, Homo sapiens
ggatggtgacacatt

SEQ ID NO: 540034 - DNA, 15 bp, Homo sapiens
gggatggtgacacat

SEQ ID NO: 540035 - DNA, 15 bp, Homo sapiens
ggggatggtgacaca

SEQ ID NO: 540036 - DNA, 15 bp, Homo sapiens
tggggatggtgacac

SEQ ID NO: 540037 - DNA, 15 bp, Homo sapiens
ctggggatggtgaca

SEQ ID NO: 540038 - DNA, 15 bp, Homo sapiens
actggggatggtgac

SEQ ID NO: 540039 - DNA, 15 bp, Homo sapiens
gactggggatggtga

SEQ ID NO: 540040 - DNA, 15 bp, Homo sapiens
ggactggggatggtg

SEQ ID NO: 540041 - DNA, 15 bp, Homo sapiens
gggactggggatggt

SEQ ID NO: 540042 - DNA, 15 bp, Homo sapiens
agggactggggatgg

SEQ ID NO: 540043 - DNA, 15 bp, Homo sapiens
cagggactggggatg

SEQ ID NO: 540044 - DNA, 15 bp, Homo sapiens
tcagggactggggat

SEQ ID NO: 540045 - DNA, 15 bp, Homo sapiens
gtcagggactgggga

SEQ ID NO: 540046 - DNA, 15 bp, Homo sapiens
ggtcagggactgggg

SEQ ID NO: 540047 - DNA, 15 bp, Homo sapiens
gggtcagggactggg

SEQ ID NO: 540048 - DNA, 15 bp, Homo sapiens
tgggtcagggactgg

SEQ ID NO: 540049 - DNA, 15 bp, Homo sapiens
gtgggtcagggactg

SEQ ID NO: 540050 - DNA, 15 bp, Homo sapiens
ggtgggtcagggact

SEQ ID NO: 540051 - DNA, 15 bp, Homo sapiens
gggtgggtcagggac

SEQ ID NO: 540052 - DNA, 15 bp, Homo sapiens
tgggtgggtcaggga

SEQ ID NO: 540053 - DNA, 15 bp, Homo sapiens
gtgggtgggtcaggg

SEQ ID NO: 540054 - DNA, 15 bp, Homo sapiens
ggtgggtgggtcagg

SEQ ID NO: 540055 - DNA, 15 bp, Homo sapiens
gggtgggtgggtcag

SEQ ID NO: 540056 - DNA, 15 bp, Homo sapiens
agggtgggtgggtca

SEQ ID NO: 540057 - DNA, 15 bp, Homo sapiens
cagggtgggtgggtc

SEQ ID NO: 540058 - DNA, 15 bp, Homo sapiens
acagggtgggtgggt

SEQ ID NO: 540059 - DNA, 15 bp, Homo sapiens
gacagggtgggtggg

SEQ ID NO: 540060 - DNA, 15 bp, Homo sapiens
agacagggtgggtgg

SEQ ID NO: 540061 - DNA, 15 bp, Homo sapiens
gagacagggtgggtg

SEQ ID NO: 540062 - DNA, 15 bp, Homo sapiens
agagacagggtgggt

SEQ ID NO: 540063 - DNA, 15 bp, Homo sapiens
gagagacagggtggg

SEQ ID NO: 540064 - DNA, 15 bp, Homo sapiens
ggagagacagggtgg

SEQ ID NO: 540065 - DNA, 15 bp, Homo sapiens
tggagagacagggtg

SEQ ID NO: 540066 - DNA, 15 bp, Homo sapiens
gtggagagacagggt

SEQ ID NO: 540067 - DNA, 15 bp, Homo sapiens
tgtggagagacaggg

SEQ ID NO: 540068 - DNA, 15 bp, Homo sapiens
ctgtggagagacagg

SEQ ID NO: 540069 - DNA, 15 bp, Homo sapiens
cctgtggagagacag

SEQ ID NO: 540070 - DNA, 15 bp, Homo sapiens
gcctgtggagagaca

SEQ ID NO: 540071 - DNA, 15 bp, Homo sapiens
ggcctgtggagagac

SEQ ID NO: 540072 - DNA, 15 bp, Homo sapiens
gggcctgtggagaga

SEQ ID NO: 540073 - DNA, 15 bp, Homo sapiens
agggcctgtggagag

SEQ ID NO: 540074 - DNA, 15 bp, Homo sapiens
cagggcctgtggaga

SEQ ID NO: 540075 - DNA, 15 bp, Homo sapiens
ccagggcctgtggag

SEQ ID NO: 540076 - DNA, 15 bp, Homo sapiens
cccagggcctgtgga

SEQ ID NO: 540077 - DNA, 15 bp, Homo sapiens
acccagggcctgtgg

SEQ ID NO: 540078 - DNA, 15 bp, Homo sapiens
cacccagggcctgtg

SEQ ID NO: 540079 - DNA, 15 bp, Homo sapiens
gcacccagggcctgt

SEQ ID NO: 540080 - DNA, 15 bp, Homo sapiens
ggcacccagggcctg

SEQ ID NO: 540081 - DNA, 15 bp, Homo sapiens
tggcacccagggcct

SEQ ID NO: 540082 - DNA, 15 bp, Homo sapiens
ctggcacccagggcc

SEQ ID NO: 540083 - DNA, 15 bp, Homo sapiens
cctggcacccagggc

SEQ ID NO: 540084 - DNA, 15 bp, Homo sapiens
gcctggcacccaggg

SEQ ID NO: 540085 - DNA, 15 bp, Homo sapiens
ggcctggcacccagg

SEQ ID NO: 540086 - DNA, 15 bp, Homo sapiens
gggcctggcacccag

SEQ ID NO: 540087 - DNA, 15 bp, Homo sapiens
agggcctggcaccca

SEQ ID NO: 540088 - DNA, 15 bp, Homo sapiens
cagggcctggcaccc

SEQ ID NO: 540089 - DNA, 15 bp, Homo sapiens
acagggcctggcacc

SEQ ID NO: 540090 - DNA, 15 bp, Homo sapiens
cacagggcctggcac

SEQ ID NO: 540091 - DNA, 15 bp, Homo sapiens
ccacagggcctggca

SEQ ID NO: 540092 - DNA, 15 bp, Homo sapiens
tccacagggcctggc

SEQ ID NO: 540093 - DNA, 15 bp, Homo sapiens
atccacagggcctgg

SEQ ID NO: 540094 - DNA, 15 bp, Homo sapiens
catccacagggcctg

SEQ ID NO: 540095 - DNA, 15 bp, Homo sapiens
gcatccacagggcct

SEQ ID NO: 540096 - DNA, 15 bp, Homo sapiens
tgcatccacagggcc

SEQ ID NO: 540097 - DNA, 15 bp, Homo sapiens
gtgcatccacagggc

SEQ ID NO: 540098 - DNA, 15 bp, Homo sapiens
tgtgcatccacaggg

SEQ ID NO: 540099 - DNA, 15 bp, Homo sapiens
ttgtgcatccacagg

SEQ ID NO: 540100 - DNA, 15 bp, Homo sapiens
cttgtgcatccacag

SEQ ID NO: 540101 - DNA, 15 bp, Homo sapiens
ccttgtgcatccaca

SEQ ID NO: 540102 - DNA, 15 bp, Homo sapiens
accttgtgcatccac

SEQ ID NO: 540103 - DNA, 15 bp, Homo sapiens
gaccttgtgcatcca

SEQ ID NO: 540104 - DNA, 15 bp, Homo sapiens
ggaccttgtgcatcc

SEQ ID NO: 540105 - DNA, 15 bp, Homo sapiens
gggaccttgtgcatc

SEQ ID NO: 540106 - DNA, 15 bp, Homo sapiens
tgggaccttgtgcat

SEQ ID NO: 540107 - DNA, 15 bp, Homo sapiens
ctgggaccttgtgca

SEQ ID NO: 540108 - DNA, 15 bp, Homo sapiens
gctgggaccttgtgc

SEQ ID NO: 540109 - DNA, 15 bp, Homo sapiens
tgctgggaccttgtg

SEQ ID NO: 540110 - DNA, 15 bp, Homo sapiens
atgctgggaccttgt

SEQ ID NO: 540111 - DNA, 15 bp, Homo sapiens
gatgctgggaccttg

SEQ ID NO: 540112 - DNA, 15 bp, Homo sapiens
tgatgctgggacctt

SEQ ID NO: 540113 - DNA, 15 bp, Homo sapiens
atgatgctgggacct

SEQ ID NO: 540114 - DNA, 15 bp, Homo sapiens
aatgatgctgggacc

SEQ ID NO: 540115 - DNA, 15 bp, Homo sapiens
caatgatgctgggac

SEQ ID NO: 540116 - DNA, 15 bp, Homo sapiens
tcaatgatgctggga

SEQ ID NO: 540117 - DNA, 15 bp, Homo sapiens
atcaatgatgctggg

SEQ ID NO: 540118 - DNA, 15 bp, Homo sapiens
catcaatgatgctgg

SEQ ID NO: 540119 - DNA, 15 bp, Homo sapiens
ccatcaatgatgctg

SEQ ID NO: 540120 - DNA, 15 bp, Homo sapiens
accatcaatgatgct

SEQ ID NO: 540121 - DNA, 15 bp, Homo sapiens
caccatcaatgatgc

SEQ ID NO: 540122 - DNA, 15 bp, Homo sapiens
tcaccatcaatgatg

SEQ ID NO: 540123 - DNA, 15 bp, Homo sapiens
ctcaccatcaatgat

SEQ ID NO: 540124 - DNA, 15 bp, Homo sapiens
gctcaccatcaatga

SEQ ID NO: 540125 - DNA, 15 bp, Homo sapiens
ggctcaccatcaatg

SEQ ID NO: 540126 - DNA, 15 bp, Homo sapiens
aggctcaccatcaat

SEQ ID NO: 540127 - DNA, 15 bp, Homo sapiens
caggctcaccatcaa

SEQ ID NO: 540128 - DNA, 15 bp, Homo sapiens
ccaggctcaccatca

SEQ ID NO: 540129 - DNA, 15 bp, Homo sapiens
cccaggctcaccatc

SEQ ID NO: 540130 - DNA, 15 bp, Homo sapiens
ccccaggctcaccat

SEQ ID NO: 540131 - DNA, 15 bp, Homo sapiens
cccccaggctcacca

SEQ ID NO: 540132 - DNA, 15 bp, Homo sapiens
tcccccaggctcacc

SEQ ID NO: 540133 - DNA, 15 bp, Homo sapiens
ttcccccaggctcac

SEQ ID NO: 540134 - DNA, 15 bp, Homo sapiens
cttcccccaggctca

SEQ ID NO: 540135 - DNA, 15 bp, Homo sapiens
tcttcccccaggctc

SEQ ID NO: 540136 - DNA, 15 bp, Homo sapiens
gtcttcccccaggct

SEQ ID NO: 540137 - DNA, 15 bp, Homo sapiens
cgtcttcccccaggc

SEQ ID NO: 540138 - DNA, 15 bp, Homo sapiens
gcgtcttcccccagg

SEQ ID NO: 540139 - DNA, 15 bp, Homo sapiens
ggcgtcttcccccag

SEQ ID NO: 540140 - DNA, 15 bp, Homo sapiens
gggcgtcttccccca

SEQ ID NO: 540141 - DNA, 15 bp, Homo sapiens
tgggcgtcttccccc

SEQ ID NO: 540142 - DNA, 15 bp, Homo sapiens
gtgggcgtcttcccc

SEQ ID NO: 540143 - DNA, 15 bp, Homo sapiens
agtgggcgtcttccc

SEQ ID NO: 540144 - DNA, 15 bp, Homo sapiens
aagtgggcgtcttcc

SEQ ID NO: 540145 - DNA, 15 bp, Homo sapiens
gaagtgggcgtcttc

SEQ ID NO: 540146 - DNA, 15 bp, Homo sapiens
ggaagtgggcgtctt

SEQ ID NO: 540147 - DNA, 15 bp, Homo sapiens
tggaagtgggcgtct

SEQ ID NO: 540148 - DNA, 15 bp, Homo sapiens
ttggaagtgggcgtc

SEQ ID NO: 540149 - DNA, 15 bp, Homo sapiens
attggaagtgggcgt

SEQ ID NO: 540150 - DNA, 15 bp, Homo sapiens
cattggaagtgggcg

SEQ ID NO: 540151 - DNA, 15 bp, Homo sapiens
gcattggaagtgggc

SEQ ID NO: 540152 - DNA, 15 bp, Homo sapiens
ggcattggaagtggg

SEQ ID NO: 540153 - DNA, 15 bp, Homo sapiens
gggcattggaagtgg

SEQ ID NO: 540154 - DNA, 15 bp, Homo sapiens
cgggcattggaagtg

SEQ ID NO: 540155 - DNA, 15 bp, Homo sapiens
gcgggcattggaagt

SEQ ID NO: 540156 - DNA, 15 bp, Homo sapiens
tgcgggcattggaag

SEQ ID NO: 540157 - DNA, 15 bp, Homo sapiens
gtgcgggcattggaa

SEQ ID NO: 540158 - DNA, 15 bp, Homo sapiens
tgtgcgggcattgga

SEQ ID NO: 540159 - DNA, 15 bp, Homo sapiens
ttgtgcgggcattgg

SEQ ID NO: 540160 - DNA, 15 bp, Homo sapiens
attgtgcgggcattg

SEQ ID NO: 540161 - DNA, 15 bp, Homo sapiens
tattgtgcgggcatt

SEQ ID NO: 540162 - DNA, 15 bp, Homo sapiens
ctattgtgcgggcat

SEQ ID NO: 540163 - DNA, 15 bp, Homo sapiens
gctattgtgcgggca

SEQ ID NO: 540164 - DNA, 15 bp, Homo sapiens
tgctattgtgcgggc

SEQ ID NO: 540165 - DNA, 15 bp, Homo sapiens
ctgctattgtgcggg

SEQ ID NO: 540166 - DNA, 15 bp, Homo sapiens
gctgctattgtgcgg

SEQ ID NO: 540167 - DNA, 15 bp, Homo sapiens
tgctgctattgtgcg

SEQ ID NO: 540168 - DNA, 15 bp, Homo sapiens
ttgctgctattgtgc

SEQ ID NO: 540169 - DNA, 15 bp, Homo sapiens
gttgctgctattgtg

SEQ ID NO: 540170 - DNA, 15 bp, Homo sapiens
tgttgctgctattgt

SEQ ID NO: 540171 - DNA, 15 bp, Homo sapiens
ttgttgctgctattg

SEQ ID NO: 540172 - DNA, 15 bp, Homo sapiens
gttgttgctgctatt

SEQ ID NO: 540173 - DNA, 15 bp, Homo sapiens
cgttgttgctgctat

SEQ ID NO: 540174 - DNA, 15 bp, Homo sapiens
gcgttgttgctgcta

SEQ ID NO: 540175 - DNA, 15 bp, Homo sapiens
ggcgttgttgctgct

SEQ ID NO: 540176 - DNA, 15 bp, Homo sapiens
tggcgttgttgctgc

SEQ ID NO: 540177 - DNA, 15 bp, Homo sapiens
ttggcgttgttgctg

SEQ ID NO: 540178 - DNA, 15 bp, Homo sapiens
gttggcgttgttgct

SEQ ID NO: 540179 - DNA, 15 bp, Homo sapiens
cgttggcgttgttgc

SEQ ID NO: 540180 - DNA, 15 bp, Homo sapiens
acgttggcgttgttg

SEQ ID NO: 540181 - DNA, 15 bp, Homo sapiens
gacgttggcgttgtt

SEQ ID NO: 540182 - DNA, 15 bp, Homo sapiens
tgacgttggcgttgt

SEQ ID NO: 540183 - DNA, 15 bp, Homo sapiens
gtgacgttggcgttg

SEQ ID NO: 540184 - DNA, 15 bp, Homo sapiens
ggtgacgttggcgtt

SEQ ID NO: 540185 - DNA, 15 bp, Homo sapiens
aggtgacgttggcgt

SEQ ID NO: 540186 - DNA, 15 bp, Homo sapiens
caggtgacgttggcg

SEQ ID NO: 540187 - DNA, 15 bp, Homo sapiens
ccaggtgacgttggc

SEQ ID NO: 540188 - DNA, 15 bp, Homo sapiens
accaggtgacgttgg

SEQ ID NO: 540189 - DNA, 15 bp, Homo sapiens
caccaggtgacgttg

SEQ ID NO: 540190 - DNA, 15 bp, Homo sapiens
ccaccaggtgacgtt

SEQ ID NO: 540191 - DNA, 15 bp, Homo sapiens
gccaccaggtgacgt

SEQ ID NO: 540192 - DNA, 15 bp, Homo sapiens
cgccaccaggtgacg

SEQ ID NO: 540193 - DNA, 15 bp, Homo sapiens
gcgccaccaggtgac

SEQ ID NO: 540194 - DNA, 15 bp, Homo sapiens
cgcgccaccaggtga

SEQ ID NO: 540195 - DNA, 15 bp, Homo sapiens
acgcgccaccaggtg

SEQ ID NO: 540196 - DNA, 15 bp, Homo sapiens
gacgcgccaccaggt

SEQ ID NO: 540197 - DNA, 15 bp, Homo sapiens
ggacgcgccaccagg

SEQ ID NO: 540198 - DNA, 15 bp, Homo sapiens
aggacgcgccaccag

SEQ ID NO: 540199 - DNA, 15 bp, Homo sapiens
gaggacgcgccacca

SEQ ID NO: 540200 - DNA, 15 bp, Homo sapiens
ggaggacgcgccacc

SEQ ID NO: 540201 - DNA, 15 bp, Homo sapiens
tggaggacgcgccac

SEQ ID NO: 540202 - DNA, 15 bp, Homo sapiens
atggaggacgcgcca

SEQ ID NO: 540203 - DNA, 15 bp, Homo sapiens
catggaggacgcgcc

SEQ ID NO: 540204 - DNA, 15 bp, Homo sapiens
ccatggaggacgcgc

SEQ ID NO: 540205 - DNA, 15 bp, Homo sapiens
gccatggaggacgcg

SEQ ID NO: 540206 - DNA, 15 bp, Homo sapiens
tgccatggaggacgc

SEQ ID NO: 540207 - DNA, 15 bp, Homo sapiens
ttgccatggaggacg

SEQ ID NO: 540208 - DNA, 15 bp, Homo sapiens
gttgccatggaggac

SEQ ID NO: 540209 - DNA, 15 bp, Homo sapiens
agttgccatggagga

SEQ ID NO: 540210 - DNA, 15 bp, Homo sapiens
tagttgccatggagg

SEQ ID NO: 540211 - DNA, 15 bp, Homo sapiens
gtagttgccatggag

SEQ ID NO: 540212 - DNA, 15 bp, Homo sapiens
tgtagttgccatgga

SEQ ID NO: 540213 - DNA, 15 bp, Homo sapiens
gtgtagttgccatgg

SEQ ID NO: 540214 - DNA, 15 bp, Homo sapiens
cgtgtagttgccatg

SEQ ID NO: 540215 - DNA, 15 bp, Homo sapiens
acgtgtagttgccat

SEQ ID NO: 540216 - DNA, 15 bp, Homo sapiens
cacgtgtagttgcca

SEQ ID NO: 540217 - DNA, 15 bp, Homo sapiens
ccacgtgtagttgcc

SEQ ID NO: 540218 - DNA, 15 bp, Homo sapiens
gccacgtgtagttgc

SEQ ID NO: 540219 - DNA, 15 bp, Homo sapiens
ggccacgtgtagttg

SEQ ID NO: 540220 - DNA, 15 bp, Homo sapiens
gggccacgtgtagtt

SEQ ID NO: 540221 - DNA, 15 bp, Homo sapiens
ggggccacgtgtagt

SEQ ID NO: 540222 - DNA, 15 bp, Homo sapiens
gggggccacgtgtag

SEQ ID NO: 540223 - DNA, 15 bp, Homo sapiens
agggggccacgtgta

SEQ ID NO: 540224 - DNA, 15 bp, Homo sapiens
cagggggccacgtgt

SEQ ID NO: 540225 - DNA, 15 bp, Homo sapiens
tcagggggccacgtg

SEQ ID NO: 540226 - DNA, 15 bp, Homo sapiens
ctcagggggccacgt

SEQ ID NO: 540227 - DNA, 15 bp, Homo sapiens
actcagggggccacg

SEQ ID NO: 540228 - DNA, 15 bp, Homo sapiens
aactcagggggccac

SEQ ID NO: 540229 - DNA, 15 bp, Homo sapiens
gaactcagggggcca

SEQ ID NO: 540230 - DNA, 15 bp, Homo sapiens
agaactcagggggcc

SEQ ID NO: 540231 - DNA, 15 bp, Homo sapiens
aagaactcagggggc

SEQ ID NO: 540232 - DNA, 15 bp, Homo sapiens
caagaactcaggggg

SEQ ID NO: 540233 - DNA, 15 bp, Homo sapiens
ccaagaactcagggg

SEQ ID NO: 540234 - DNA, 15 bp, Homo sapiens
cccaagaactcaggg

SEQ ID NO: 540235 - DNA, 15 bp, Homo sapiens
gcccaagaactcagg

SEQ ID NO: 540236 - DNA, 15 bp, Homo sapiens
ggcccaagaactcag

SEQ ID NO: 540237 - DNA, 15 bp, Homo sapiens
gggcccaagaactca

SEQ ID NO: 540238 - DNA, 15 bp, Homo sapiens
cgggcccaagaactc

SEQ ID NO: 540239 - DNA, 15 bp, Homo sapiens
ccgggcccaagaact

SEQ ID NO: 540240 - DNA, 15 bp, Homo sapiens
cccgggcccaagaac

SEQ ID NO: 540241 - DNA, 15 bp, Homo sapiens
gcccgggcccaagaa

SEQ ID NO: 540242 - DNA, 15 bp, Homo sapiens
cgcccgggcccaaga

SEQ ID NO: 540243 - DNA, 15 bp, Homo sapiens
tcgcccgggcccaag

SEQ ID NO: 540244 - DNA, 15 bp, Homo sapiens
ctcgcccgggcccaa

SEQ ID NO: 540245 - DNA, 15 bp, Homo sapiens
cctcgcccgggccca

SEQ ID NO: 540246 - DNA, 15 bp, Homo sapiens
tcctcgcccgggccc

SEQ ID NO: 540247 - DNA, 15 bp, Homo sapiens
gtcctcgcccgggcc

SEQ ID NO: 540248 - DNA, 15 bp, Homo sapiens
ggtcctcgcccgggc

SEQ ID NO: 540249 - DNA, 15 bp, Homo sapiens
gggtcctcgcccggg

SEQ ID NO: 540250 - DNA, 15 bp, Homo sapiens
ggggtcctcgcccgg

SEQ ID NO: 540251 - DNA, 15 bp, Homo sapiens
tggggtcctcgcccg

SEQ ID NO: 540252 - DNA, 15 bp, Homo sapiens
ttggggtcctcgccc

SEQ ID NO: 540253 - DNA, 15 bp, Homo sapiens
attggggtcctcgcc

SEQ ID NO: 540254 - DNA, 15 bp, Homo sapiens
cattggggtcctcgc

SEQ ID NO: 540255 - DNA, 15 bp, Homo sapiens
ccattggggtcctcg

SEQ ID NO: 540256 - DNA, 15 bp, Homo sapiens
accattggggtcctc

SEQ ID NO: 540257 - DNA, 15 bp, Homo sapiens
taccattggggtcct

SEQ ID NO: 540258 - DNA, 15 bp, Homo sapiens
gtaccattggggtcc

SEQ ID NO: 540259 - DNA, 15 bp, Homo sapiens
cgtaccattggggtc

SEQ ID NO: 540260 - DNA, 15 bp, Homo sapiens
gcgtaccattggggt

SEQ ID NO: 540261 - DNA, 15 bp, Homo sapiens
agcgtaccattgggg

SEQ ID NO: 540262 - DNA, 15 bp, Homo sapiens
cagcgtaccattggg

SEQ ID NO: 540263 - DNA, 15 bp, Homo sapiens
tcagcgtaccattgg

SEQ ID NO: 540264 - DNA, 15 bp, Homo sapiens
atcagcgtaccattg

SEQ ID NO: 540265 - DNA, 15 bp, Homo sapiens
gatcagcgtaccatt

SEQ ID NO: 540266 - DNA, 15 bp, Homo sapiens
tgatcagcgtaccat

SEQ ID NO: 540267 - DNA, 15 bp, Homo sapiens
atgatcagcgtacca

SEQ ID NO: 540268 - DNA, 15 bp, Homo sapiens
gatgatcagcgtacc

SEQ ID NO: 540269 - DNA, 15 bp, Homo sapiens
ggatgatcagcgtac

SEQ ID NO: 540270 - DNA, 15 bp, Homo sapiens
tggatgatcagcgta

SEQ ID NO: 540271 - DNA, 15 bp, Homo sapiens
ctggatgatcagcgt

SEQ ID NO: 540272 - DNA, 15 bp, Homo sapiens
tctggatgatcagcg

SEQ ID NO: 540273 - DNA, 15 bp, Homo sapiens
ttctggatgatcagc

SEQ ID NO: 540274 - DNA, 15 bp, Homo sapiens
attctggatgatcag

SEQ ID NO: 540275 - DNA, 15 bp, Homo sapiens
cattctggatgatca

SEQ ID NO: 540276 - DNA, 15 bp, Homo sapiens
acattctggatgatc

SEQ ID NO: 540277 - DNA, 15 bp, Homo sapiens
cacattctggatgat

SEQ ID NO: 540278 - DNA, 15 bp, Homo sapiens
tcacattctggatga

SEQ ID NO: 540279 - DNA, 15 bp, Homo sapiens
ttcacattctggatg

SEQ ID NO: 540280 - DNA, 15 bp, Homo sapiens
gttcacattctggat

SEQ ID NO: 540281 - DNA, 15 bp, Homo sapiens
tgttcacattctgga

SEQ ID NO: 540282 - DNA, 15 bp, Homo sapiens
ttgttcacattctgg

SEQ ID NO: 540283 - DNA, 15 bp, Homo sapiens
cttgttcacattctg

SEQ ID NO: 540284 - DNA, 15 bp, Homo sapiens
tcttgttcacattct

SEQ ID NO: 540285 - DNA, 15 bp, Homo sapiens
ctcttgttcacattc

SEQ ID NO: 540286 - DNA, 15 bp, Homo sapiens
gctcttgttcacatt

SEQ ID NO: 540287 - DNA, 15 bp, Homo sapiens
ggctcttgttcacat

SEQ ID NO: 540288 - DNA, 15 bp, Homo sapiens
tggctcttgttcaca

SEQ ID NO: 540289 - DNA, 15 bp, Homo sapiens
atggctcttgttcac

SEQ ID NO: 540290 - DNA, 15 bp, Homo sapiens
catggctcttgttca

SEQ ID NO: 540291 - DNA, 15 bp, Homo sapiens
ccatggctcttgttc

SEQ ID NO: 540292 - DNA, 15 bp, Homo sapiens
cccatggctcttgtt

SEQ ID NO: 540293 - DNA, 15 bp, Homo sapiens
ccccatggctcttgt

SEQ ID NO: 540294 - DNA, 15 bp, Homo sapiens
cccccatggctcttg

SEQ ID NO: 540295 - DNA, 15 bp, Homo sapiens
gcccccatggctctt

SEQ ID NO: 540296 - DNA, 15 bp, Homo sapiens
tgcccccatggctct

SEQ ID NO: 540297 - DNA, 15 bp, Homo sapiens
atgcccccatggctc

SEQ ID NO: 540298 - DNA, 15 bp, Homo sapiens
tatgcccccatggct

SEQ ID NO: 540299 - DNA, 15 bp, Homo sapiens
atatgcccccatggc

SEQ ID NO: 540300 - DNA, 15 bp, Homo sapiens
tatatgcccccatgg

SEQ ID NO: 540301 - DNA, 15 bp, Homo sapiens
gtatatgcccccatg

SEQ ID NO: 540302 - DNA, 15 bp, Homo sapiens
cgtatatgcccccat

SEQ ID NO: 540303 - DNA, 15 bp, Homo sapiens
acgtatatgccccca

SEQ ID NO: 540304 - DNA, 15 bp, Homo sapiens
cacgtatatgccccc

SEQ ID NO: 540305 - DNA, 15 bp, Homo sapiens
acacgtatatgcccc

SEQ ID NO: 540306 - DNA, 15 bp, Homo sapiens
cacacgtatatgccc

SEQ ID NO: 540307 - DNA, 15 bp, Homo sapiens
gcacacgtatatgcc

SEQ ID NO: 540308 - DNA, 15 bp, Homo sapiens
ggcacacgtatatgc

SEQ ID NO: 540309 - DNA, 15 bp, Homo sapiens
cggcacacgtatatg

SEQ ID NO: 540310 - DNA, 15 bp, Homo sapiens
ccggcacacgtatat

SEQ ID NO: 540311 - DNA, 15 bp, Homo sapiens
cccggcacacgtata

SEQ ID NO: 540312 - DNA, 15 bp, Homo sapiens
acccggcacacgtat

SEQ ID NO: 540313 - DNA, 15 bp, Homo sapiens
gacccggcacacgta

SEQ ID NO: 540314 - DNA, 15 bp, Homo sapiens
ggacccggcacacgt

SEQ ID NO: 540315 - DNA, 15 bp, Homo sapiens
tggacccggcacacg

SEQ ID NO: 540316 - DNA, 15 bp, Homo sapiens
ctggacccggcacac

SEQ ID NO: 540317 - DNA, 15 bp, Homo sapiens
cctggacccggcaca

SEQ ID NO: 540318 - DNA, 15 bp, Homo sapiens
tcctggacccggcac

SEQ ID NO: 540319 - DNA, 15 bp, Homo sapiens
ctcctggacccggca

SEQ ID NO: 540320 - DNA, 15 bp, Homo sapiens
cctcctggacccggc

SEQ ID NO: 540321 - DNA, 15 bp, Homo sapiens
ccctcctggacccgg

SEQ ID NO: 540322 - DNA, 15 bp, Homo sapiens
gccctcctggacccg

SEQ ID NO: 540323 - DNA, 15 bp, Homo sapiens
tgccctcctggaccc

SEQ ID NO: 540324 - DNA, 15 bp, Homo sapiens
ttgccctcctggacc

SEQ ID NO: 540325 - DNA, 15 bp, Homo sapiens
gttgccctcctggac

SEQ ID NO: 540326 - DNA, 15 bp, Homo sapiens
cgttgccctcctgga

SEQ ID NO: 540327 - DNA, 15 bp, Homo sapiens
tcgttgccctcctgg

SEQ ID NO: 540328 - DNA, 15 bp, Homo sapiens
ctcgttgccctcctg

SEQ ID NO: 540329 - DNA, 15 bp, Homo sapiens
actcgttgccctcct

SEQ ID NO: 540330 - DNA, 15 bp, Homo sapiens
gactcgttgccctcc

SEQ ID NO: 540331 - DNA, 15 bp, Homo sapiens
tgactcgttgccctc

SEQ ID NO: 540332 - DNA, 15 bp, Homo sapiens
atgactcgttgccct

SEQ ID NO: 540333 - DNA, 15 bp, Homo sapiens
tatgactcgttgccc

SEQ ID NO: 540334 - DNA, 15 bp, Homo sapiens
gtatgactcgttgcc

SEQ ID NO: 540335 - DNA, 15 bp, Homo sapiens
ggtatgactcgttgc

SEQ ID NO: 540336 - DNA, 15 bp, Homo sapiens
tggtatgactcgttg

SEQ ID NO: 540337 - DNA, 15 bp, Homo sapiens
ctggtatgactcgtt

SEQ ID NO: 540338 - DNA, 15 bp, Homo sapiens
gctggtatgactcgt

SEQ ID NO: 540339 - DNA, 15 bp, Homo sapiens
tgctggtatgactcg

SEQ ID NO: 540340 - DNA, 15 bp, Homo sapiens
ctgctggtatgactc

SEQ ID NO: 540341 - DNA, 15 bp, Homo sapiens
actgctggtatgact

SEQ ID NO: 540342 - DNA, 15 bp, Homo sapiens
gactgctggtatgac

SEQ ID NO: 540343 - DNA, 15 bp, Homo sapiens
ggactgctggtatga

SEQ ID NO: 540344 - DNA, 15 bp, Homo sapiens
aggactgctggtatg

SEQ ID NO: 540345 - DNA, 15 bp, Homo sapiens
caggactgctggtat

SEQ ID NO: 540346 - DNA, 15 bp, Homo sapiens
gcaggactgctggta

SEQ ID NO: 540347 - DNA, 15 bp, Homo sapiens
cgcaggactgctggt

SEQ ID NO: 540348 - DNA, 15 bp, Homo sapiens
ccgcaggactgctgg

SEQ ID NO: 540349 - DNA, 15 bp, Homo sapiens
gccgcaggactgctg

SEQ ID NO: 540350 - DNA, 15 bp, Homo sapiens
tgccgcaggactgct

SEQ ID NO: 540351 - DNA, 15 bp, Homo sapiens
gtgccgcaggactgc

SEQ ID NO: 540352 - DNA, 15 bp, Homo sapiens
ggtgccgcaggactg

SEQ ID NO: 540353 - DNA, 15 bp, Homo sapiens
aggtgccgcaggact

SEQ ID NO: 540354 - DNA, 15 bp, Homo sapiens
taggtgccgcaggac

SEQ ID NO: 540355 - DNA, 15 bp, Homo sapiens
gtaggtgccgcagga

SEQ ID NO: 540356 - DNA, 15 bp, Homo sapiens
ggtaggtgccgcagg

SEQ ID NO: 540357 - DNA, 15 bp, Homo sapiens
aggtaggtgccgcag

SEQ ID NO: 540358 - DNA, 15 bp, Homo sapiens
gaggtaggtgccgca

SEQ ID NO: 540359 - DNA, 15 bp, Homo sapiens
ggaggtaggtgccgc

SEQ ID NO: 540360 - DNA, 15 bp, Homo sapiens
cggaggtaggtgccg

SEQ ID NO: 540361 - DNA, 15 bp, Homo sapiens
gcggaggtaggtgcc

SEQ ID NO: 540362 - DNA, 15 bp, Homo sapiens
cgcggaggtaggtgc

SEQ ID NO: 540363 - DNA, 15 bp, Homo sapiens
acgcggaggtaggtg

SEQ ID NO: 540364 - DNA, 15 bp, Homo sapiens
cacgcggaggtaggt

SEQ ID NO: 540365 - DNA, 15 bp, Homo sapiens
gcacgcggaggtagg

SEQ ID NO: 540366 - DNA, 15 bp, Homo sapiens
cgcacgcggaggtag

SEQ ID NO: 540367 - DNA, 15 bp, Homo sapiens
gcgcacgcggaggta

SEQ ID NO: 540368 - DNA, 15 bp, Homo sapiens
ggcgcacgcggaggt

SEQ ID NO: 540369 - DNA, 15 bp, Homo sapiens
cggcgcacgcggagg

SEQ ID NO: 540370 - DNA, 15 bp, Homo sapiens
acggcgcacgcggag

SEQ ID NO: 540371 - DNA, 15 bp, Homo sapiens
cacggcgcacgcgga

SEQ ID NO: 540372 - DNA, 15 bp, Homo sapiens
tcacggcgcacgcgg

SEQ ID NO: 540373 - DNA, 15 bp, Homo sapiens
ctcacggcgcacgcg

SEQ ID NO: 540374 - DNA, 15 bp, Homo sapiens
actcacggcgcacgc

SEQ ID NO: 540375 - DNA, 15 bp, Homo sapiens
cactcacggcgcacg

SEQ ID NO: 540376 - DNA, 15 bp, Homo sapiens
ccactcacggcgcac

SEQ ID NO: 540377 - DNA, 15 bp, Homo sapiens
gccactcacggcgca

SEQ ID NO: 540378 - DNA, 15 bp, Homo sapiens
ggccactcacggcgc

SEQ ID NO: 540379 - DNA, 15 bp, Homo sapiens
gggccactcacggcg

SEQ ID NO: 540380 - DNA, 15 bp, Homo sapiens
tgggccactcacggc

SEQ ID NO: 540381 - DNA, 15 bp, Homo sapiens
ctgggccactcacgg

SEQ ID NO: 540382 - DNA, 15 bp, Homo sapiens
gctgggccactcacg

SEQ ID NO: 540383 - DNA, 15 bp, Homo sapiens
ggctgggccactcac

SEQ ID NO: 540384 - DNA, 15 bp, Homo sapiens
gggctgggccactca

SEQ ID NO: 540385 - DNA, 15 bp, Homo sapiens
agggctgggccactc

SEQ ID NO: 540386 - DNA, 15 bp, Homo sapiens
cagggctgggccact

SEQ ID NO: 540387 - DNA, 15 bp, Homo sapiens
ccagggctgggccac

SEQ ID NO: 540388 - DNA, 15 bp, Homo sapiens
gccagggctgggcca

SEQ ID NO: 540389 - DNA, 15 bp, Homo sapiens
ggccagggctgggcc

SEQ ID NO: 540390 - DNA, 15 bp, Homo sapiens
gggccagggctgggc

SEQ ID NO: 540391 - DNA, 15 bp, Homo sapiens
ggggccagggctggg

SEQ ID NO: 540392 - DNA, 15 bp, Homo sapiens
aggggccagggctgg

SEQ ID NO: 540393 - DNA, 15 bp, Homo sapiens
taggggccagggctg

SEQ ID NO: 540394 - DNA, 15 bp, Homo sapiens
gtaggggccagggct

SEQ ID NO: 540395 - DNA, 15 bp, Homo sapiens
agtaggggccagggc

SEQ ID NO: 540396 - DNA, 15 bp, Homo sapiens
gagtaggggccaggg

SEQ ID NO: 540397 - DNA, 15 bp, Homo sapiens
ggagtaggggccagg

SEQ ID NO: 540398 - DNA, 15 bp, Homo sapiens
gggagtaggggccag

SEQ ID NO: 540399 - DNA, 15 bp, Homo sapiens
tgggagtaggggcca

SEQ ID NO: 540400 - DNA, 15 bp, Homo sapiens
gtgggagtaggggcc

SEQ ID NO: 540401 - DNA, 15 bp, Homo sapiens
agtgggagtaggggc

SEQ ID NO: 540402 - DNA, 15 bp, Homo sapiens
cagtgggagtagggg

SEQ ID NO: 540403 - DNA, 15 bp, Homo sapiens
acagtgggagtaggg

SEQ ID NO: 540404 - DNA, 15 bp, Homo sapiens
gacagtgggagtagg

SEQ ID NO: 540405 - DNA, 15 bp, Homo sapiens
ggacagtgggagtag

SEQ ID NO: 540406 - DNA, 15 bp, Homo sapiens
gggacagtgggagta

SEQ ID NO: 540407 - DNA, 15 bp, Homo sapiens
cgggacagtgggagt

SEQ ID NO: 540408 - DNA, 15 bp, Homo sapiens
gcgggacagtgggag

SEQ ID NO: 540409 - DNA, 15 bp, Homo sapiens
agcgggacagtggga

SEQ ID NO: 540410 - DNA, 15 bp, Homo sapiens
cagcgggacagtggg

SEQ ID NO: 540411 - DNA, 15 bp, Homo sapiens
ccagcgggacagtgg

SEQ ID NO: 540412 - DNA, 15 bp, Homo sapiens
cccagcgggacagtg

SEQ ID NO: 540413 - DNA, 15 bp, Homo sapiens
ccccagcgggacagt

SEQ ID NO: 540414 - DNA, 15 bp, Homo sapiens
tccccagcgggacag

SEQ ID NO: 540415 - DNA, 15 bp, Homo sapiens
gtccccagcgggaca

SEQ ID NO: 540416 - DNA, 15 bp, Homo sapiens
tgtccccagcgggac

SEQ ID NO: 540417 - DNA, 15 bp, Homo sapiens
gtgtccccagcggga

SEQ ID NO: 540418 - DNA, 15 bp, Homo sapiens
agtgtccccagcggg

SEQ ID NO: 540419 - DNA, 15 bp, Homo sapiens
gagtgtccccagcgg

SEQ ID NO: 540420 - DNA, 15 bp, Homo sapiens
cgagtgtccccagcg

SEQ ID NO: 540421 - DNA, 15 bp, Homo sapiens
ccgagtgtccccagc

SEQ ID NO: 540422 - DNA, 15 bp, Homo sapiens
accgagtgtccccag

SEQ ID NO: 540423 - DNA, 15 bp, Homo sapiens
aaccgagtgtcccca

SEQ ID NO: 540424 - DNA, 15 bp, Homo sapiens
aaaccgagtgtcccc

SEQ ID NO: 540425 - DNA, 15 bp, Homo sapiens
taaaccgagtgtccc

SEQ ID NO: 540426 - DNA, 15 bp, Homo sapiens
ataaaccgagtgtcc

SEQ ID NO: 540427 - DNA, 15 bp, Homo sapiens
gataaaccgagtgtc

SEQ ID NO: 540428 - DNA, 15 bp, Homo sapiens
agataaaccgagtgt

SEQ ID NO: 540429 - DNA, 15 bp, Homo sapiens
aagataaaccgagtg

SEQ ID NO: 540430 - DNA, 15 bp, Homo sapiens
aaagataaaccgagt

SEQ ID NO: 540431 - DNA, 15 bp, Homo sapiens
caaagataaaccgag

SEQ ID NO: 540432 - DNA, 15 bp, Homo sapiens
tcaaagataaaccga

SEQ ID NO: 540433 - DNA, 15 bp, Homo sapiens
ttcaaagataaaccg

SEQ ID NO: 540434 - DNA, 15 bp, Homo sapiens
cttcaaagataaacc

SEQ ID NO: 540435 - DNA, 15 bp, Homo sapiens
acttcaaagataaac

SEQ ID NO: 540436 - DNA, 15 bp, Homo sapiens
cacttcaaagataaa

SEQ ID NO: 540437 - DNA, 15 bp, Homo sapiens
ccacttcaaagataa

SEQ ID NO: 540438 - DNA, 15 bp, Homo sapiens
cccacttcaaagata

SEQ ID NO: 540439 - DNA, 15 bp, Homo sapiens
ccccacttcaaagat

SEQ ID NO: 540440 - DNA, 15 bp, Homo sapiens
tccccacttcaaaga

SEQ ID NO: 540441 - DNA, 15 bp, Homo sapiens
atccccacttcaaag

SEQ ID NO: 540442 - DNA, 15 bp, Homo sapiens
tatccccacttcaaa

SEQ ID NO: 540443 - DNA, 15 bp, Homo sapiens
ctatccccacttcaa

SEQ ID NO: 540444 - DNA, 15 bp, Homo sapiens
tctatccccacttca

SEQ ID NO: 540445 - DNA, 15 bp, Homo sapiens
ctctatccccacttc

SEQ ID NO: 540446 - DNA, 15 bp, Homo sapiens
gctctatccccactt

SEQ ID NO: 540447 - DNA, 15 bp, Homo sapiens
ggctctatccccact

SEQ ID NO: 540448 - DNA, 15 bp, Homo sapiens
tggctctatccccac

SEQ ID NO: 540449 - DNA, 15 bp, Homo sapiens
ctggctctatcccca

SEQ ID NO: 540450 - DNA, 15 bp, Homo sapiens
actggctctatcccc

SEQ ID NO: 540451 - DNA, 15 bp, Homo sapiens
tactggctctatccc

SEQ ID NO: 540452 - DNA, 15 bp, Homo sapiens
gtactggctctatcc

SEQ ID NO: 540453 - DNA, 15 bp, Homo sapiens
ggtactggctctatc

SEQ ID NO: 540454 - DNA, 15 bp, Homo sapiens
aggtactggctctat

SEQ ID NO: 540455 - DNA, 15 bp, Homo sapiens
aaggtactggctcta

SEQ ID NO: 540456 - DNA, 15 bp, Homo sapiens
gaaggtactggctct

SEQ ID NO: 540457 - DNA, 15 bp, Homo sapiens
tgaaggtactggctc

SEQ ID NO: 540458 - DNA, 15 bp, Homo sapiens
ttgaaggtactggct

SEQ ID NO: 540459 - DNA, 15 bp, Homo sapiens
attgaaggtactggc

SEQ ID NO: 540460 - DNA, 15 bp, Homo sapiens
cattgaaggtactgg

SEQ ID NO: 540461 - DNA, 15 bp, Homo sapiens
acattgaaggtactg

SEQ ID NO: 540462 - DNA, 15 bp, Homo sapiens
cacattgaaggtact

SEQ ID NO: 540463 - DNA, 15 bp, Homo sapiens
ccacattgaaggtac

SEQ ID NO: 540464 - DNA, 15 bp, Homo sapiens
cccacattgaaggta

SEQ ID NO: 540465 - DNA, 15 bp, Homo sapiens
acccacattgaaggt

SEQ ID NO: 540466 - DNA, 15 bp, Homo sapiens
aacccacattgaagg

SEQ ID NO: 540467 - DNA, 15 bp, Homo sapiens
aaacccacattgaag

SEQ ID NO: 540468 - DNA, 15 bp, Homo sapiens
gaaacccacattgaa

SEQ ID NO: 540469 - DNA, 15 bp, Homo sapiens
tgaaacccacattga

SEQ ID NO: 540470 - DNA, 15 bp, Homo sapiens
ttgaaacccacattg

SEQ ID NO: 540471 - DNA, 15 bp, Homo sapiens
tttgaaacccacatt

SEQ ID NO: 540472 - DNA, 15 bp, Homo sapiens
gtttgaaacccacat

SEQ ID NO: 540473 - DNA, 15 bp, Homo sapiens
ggtttgaaacccaca

SEQ ID NO: 540474 - DNA, 15 bp, Homo sapiens
cggtttgaaacccac

SEQ ID NO: 540475 - DNA, 15 bp, Homo sapiens
ccggtttgaaaccca

SEQ ID NO: 540476 - DNA, 15 bp, Homo sapiens
gccggtttgaaaccc

SEQ ID NO: 540477 - DNA, 15 bp, Homo sapiens
agccggtttgaaacc

SEQ ID NO: 540478 - DNA, 15 bp, Homo sapiens
aagccggtttgaaac

SEQ ID NO: 540479 - DNA, 15 bp, Homo sapiens
caagccggtttgaaa

SEQ ID NO: 540480 - DNA, 15 bp, Homo sapiens
ccaagccggtttgaa

SEQ ID NO: 540481 - DNA, 15 bp, Homo sapiens
tccaagccggtttga

SEQ ID NO: 540482 - DNA, 15 bp, Homo sapiens
gtccaagccggtttg

SEQ ID NO: 540483 - DNA, 15 bp, Homo sapiens
tgtccaagccggttt

SEQ ID NO: 540484 - DNA, 15 bp, Homo sapiens
ctgtccaagccggtt

SEQ ID NO: 540485 - DNA, 15 bp, Homo sapiens
tctgtccaagccggt

SEQ ID NO: 540486 - DNA, 15 bp, Homo sapiens
ctctgtccaagccgg

SEQ ID NO: 540487 - DNA, 15 bp, Homo sapiens
cctctgtccaagccg

SEQ ID NO: 540488 - DNA, 15 bp, Homo sapiens
ccctctgtccaagcc

SEQ ID NO: 540489 - DNA, 15 bp, Homo sapiens
tccctctgtccaagc

SEQ ID NO: 540490 - DNA, 15 bp, Homo sapiens
gtccctctgtccaag

SEQ ID NO: 540491 - DNA, 15 bp, Homo sapiens
cgtccctctgtccaa

SEQ ID NO: 540492 - DNA, 15 bp, Homo sapiens
ccgtccctctgtcca

SEQ ID NO: 540493 - DNA, 15 bp, Homo sapiens
tccgtccctctgtcc

SEQ ID NO: 540494 - DNA, 15 bp, Homo sapiens
gtccgtccctctgtc

SEQ ID NO: 540495 - DNA, 15 bp, Homo sapiens
tgtccgtccctctgt

SEQ ID NO: 540496 - DNA, 15 bp, Homo sapiens
atgtccgtccctctg

SEQ ID NO: 540497 - DNA, 15 bp, Homo sapiens
aatgtccgtccctct

SEQ ID NO: 540498 - DNA, 15 bp, Homo sapiens
gaatgtccgtccctc

SEQ ID NO: 540499 - DNA, 15 bp, Homo sapiens
agaatgtccgtccct

SEQ ID NO: 540500 - DNA, 15 bp, Homo sapiens
gagaatgtccgtccc

SEQ ID NO: 540501 - DNA, 15 bp, Homo sapiens
ggagaatgtccgtcc

SEQ ID NO: 540502 - DNA, 15 bp, Homo sapiens
aggagaatgtccgtc

SEQ ID NO: 540503 - DNA, 15 bp, Homo sapiens
gaggagaatgtccgt

SEQ ID NO: 540504 - DNA, 15 bp, Homo sapiens
agaggagaatgtccg

SEQ ID NO: 540505 - DNA, 15 bp, Homo sapiens
cagaggagaatgtcc

SEQ ID NO: 540506 - DNA, 15 bp, Homo sapiens
gcagaggagaatgtc

SEQ ID NO: 540507 - DNA, 15 bp, Homo sapiens
tgcagaggagaatgt

SEQ ID NO: 540508 - DNA, 15 bp, Homo sapiens
ctgcagaggagaatg

SEQ ID NO: 540509 - DNA, 15 bp, Homo sapiens
tctgcagaggagaat

SEQ ID NO: 540510 - DNA, 15 bp, Homo sapiens
ctctgcagaggagaa

SEQ ID NO: 540511 - DNA, 15 bp, Homo sapiens
actctgcagaggaga

SEQ ID NO: 540512 - DNA, 15 bp, Homo sapiens
cactctgcagaggag

SEQ ID NO: 540513 - DNA, 15 bp, Homo sapiens
ccactctgcagagga

SEQ ID NO: 540514 - DNA, 15 bp, Homo sapiens
cccactctgcagagg

SEQ ID NO: 540515 - DNA, 15 bp, Homo sapiens
ccccactctgcagag

SEQ ID NO: 540516 - DNA, 15 bp, Homo sapiens
accccactctgcaga

SEQ ID NO: 540517 - DNA, 15 bp, Homo sapiens
gaccccactctgcag

SEQ ID NO: 540518 - DNA, 15 bp, Homo sapiens
agaccccactctgca

SEQ ID NO: 540519 - DNA, 15 bp, Homo sapiens
gagaccccactctgc

SEQ ID NO: 540520 - DNA, 15 bp, Homo sapiens
agagaccccactctg

SEQ ID NO: 540521 - DNA, 15 bp, Homo sapiens
cagagaccccactct

SEQ ID NO: 540522 - DNA, 15 bp, Homo sapiens
ccagagaccccactc

SEQ ID NO: 540523 - DNA, 15 bp, Homo sapiens
cccagagaccccact

SEQ ID NO: 540524 - DNA, 15 bp, Homo sapiens
ccccagagaccccac

SEQ ID NO: 540525 - DNA, 15 bp, Homo sapiens
cccccagagacccca

SEQ ID NO: 540526 - DNA, 15 bp, Homo sapiens
ccccccagagacccc

SEQ ID NO: 540527 - DNA, 15 bp, Homo sapiens
accccccagagaccc

SEQ ID NO: 540528 - DNA, 15 bp, Homo sapiens
gaccccccagagacc

SEQ ID NO: 540529 - DNA, 15 bp, Homo sapiens
agaccccccagagac

SEQ ID NO: 540530 - DNA, 15 bp, Homo sapiens
cagaccccccagaga

SEQ ID NO: 540531 - DNA, 15 bp, Homo sapiens
ccagaccccccagag

SEQ ID NO: 540532 - DNA, 15 bp, Homo sapiens
cccagaccccccaga

SEQ ID NO: 540533 - DNA, 15 bp, Homo sapiens
ccccagaccccccag

SEQ ID NO: 540534 - DNA, 15 bp, Homo sapiens
gccccagacccccca

SEQ ID NO: 540535 - DNA, 15 bp, Homo sapiens
ggccccagacccccc

SEQ ID NO: 540536 - DNA, 15 bp, Homo sapiens
aggccccagaccccc

SEQ ID NO: 540537 - DNA, 15 bp, Homo sapiens
aaggccccagacccc

SEQ ID NO: 540538 - DNA, 15 bp, Homo sapiens
caaggccccagaccc

SEQ ID NO: 540539 - DNA, 15 bp, Homo sapiens
gcaaggccccagacc

SEQ ID NO: 540540 - DNA, 15 bp, Homo sapiens
tgcaaggccccagac

SEQ ID NO: 540541 - DNA, 15 bp, Homo sapiens
ctgcaaggccccaga

SEQ ID NO: 540542 - DNA, 15 bp, Homo sapiens
cctgcaaggccccag

SEQ ID NO: 540543 - DNA, 15 bp, Homo sapiens
tcctgcaaggcccca

SEQ ID NO: 540544 - DNA, 15 bp, Homo sapiens
ctcctgcaaggcccc

SEQ ID NO: 540545 - DNA, 15 bp, Homo sapiens
cctcctgcaaggccc

SEQ ID NO: 540546 - DNA, 15 bp, Homo sapiens
acctcctgcaaggcc

SEQ ID NO: 540547 - DNA, 15 bp, Homo sapiens
cacctcctgcaaggc

SEQ ID NO: 540548 - DNA, 15 bp, Homo sapiens
ccacctcctgcaagg

SEQ ID NO: 540549 - DNA, 15 bp, Homo sapiens
cccacctcctgcaag

SEQ ID NO: 540550 - DNA, 15 bp, Homo sapiens
gcccacctcctgcaa

SEQ ID NO: 540551 - DNA, 15 bp, Homo sapiens
cgcccacctcctgca

SEQ ID NO: 540552 - DNA, 15 bp, Homo sapiens
ccgcccacctcctgc

SEQ ID NO: 540553 - DNA, 15 bp, Homo sapiens
cccgcccacctcctg

SEQ ID NO: 540554 - DNA, 15 bp, Homo sapiens
ccccgcccacctcct

SEQ ID NO: 540555 - DNA, 15 bp, Homo sapiens
gccccgcccacctcc

SEQ ID NO: 540556 - DNA, 15 bp, Homo sapiens
ggccccgcccacctc

SEQ ID NO: 540557 - DNA, 15 bp, Homo sapiens
tggccccgcccacct

SEQ ID NO: 540558 - DNA, 15 bp, Homo sapiens
ctggccccgcccacc

SEQ ID NO: 540559 - DNA, 15 bp, Homo sapiens
cctggccccgcccac

SEQ ID NO: 540560 - DNA, 15 bp, Homo sapiens
tcctggccccgccca

SEQ ID NO: 540561 - DNA, 15 bp, Homo sapiens
ctcctggccccgccc

SEQ ID NO: 540562 - DNA, 15 bp, Homo sapiens
cctcctggccccgcc

SEQ ID NO: 540563 - DNA, 15 bp, Homo sapiens
gcctcctggccccgc

SEQ ID NO: 540564 - DNA, 15 bp, Homo sapiens
agcctcctggccccg

SEQ ID NO: 540565 - DNA, 15 bp, Homo sapiens
tagcctcctggcccc

SEQ ID NO: 540566 - DNA, 15 bp, Homo sapiens
ctagcctcctggccc

SEQ ID NO: 540567 - DNA, 15 bp, Homo sapiens
cctagcctcctggcc

SEQ ID NO: 540568 - DNA, 15 bp, Homo sapiens
ccctagcctcctggc

SEQ ID NO: 540569 - DNA, 15 bp, Homo sapiens
tccctagcctcctgg

SEQ ID NO: 540570 - DNA, 15 bp, Homo sapiens
ctccctagcctcctg

SEQ ID NO: 540571 - DNA, 15 bp, Homo sapiens
cctccctagcctcct

SEQ ID NO: 540572 - DNA, 15 bp, Homo sapiens
ccctccctagcctcc

SEQ ID NO: 540573 - DNA, 15 bp, Homo sapiens
gccctccctagcctc

SEQ ID NO: 540574 - DNA, 15 bp, Homo sapiens
tgccctccctagcct

SEQ ID NO: 540575 - DNA, 15 bp, Homo sapiens
ttgccctccctagcc

SEQ ID NO: 540576 - DNA, 15 bp, Homo sapiens
cttgccctccctagc

SEQ ID NO: 540577 - DNA, 15 bp, Homo sapiens
tcttgccctccctag

SEQ ID NO: 540578 - DNA, 15 bp, Homo sapiens
ctcttgccctcccta

SEQ ID NO: 540579 - DNA, 15 bp, Homo sapiens
cctcttgccctccct

SEQ ID NO: 540580 - DNA, 15 bp, Homo sapiens
ccctcttgccctccc

SEQ ID NO: 540581 - DNA, 15 bp, Homo sapiens
cccctcttgccctcc

SEQ ID NO: 540582 - DNA, 15 bp, Homo sapiens
gcccctcttgccctc

SEQ ID NO: 540583 - DNA, 15 bp, Homo sapiens
ggcccctcttgccct

SEQ ID NO: 540584 - DNA, 15 bp, Homo sapiens
tggcccctcttgccc

SEQ ID NO: 540585 - DNA, 15 bp, Homo sapiens
ctggcccctcttgcc

SEQ ID NO: 540586 - DNA, 15 bp, Homo sapiens
cctggcccctcttgc

SEQ ID NO: 540587 - DNA, 15 bp, Homo sapiens
ccctggcccctcttg

SEQ ID NO: 540588 - DNA, 15 bp, Homo sapiens
gccctggcccctctt

SEQ ID NO: 540589 - DNA, 15 bp, Homo sapiens
agccctggcccctct

SEQ ID NO: 540590 - DNA, 15 bp, Homo sapiens
gagccctggcccctc

SEQ ID NO: 540591 - DNA, 15 bp, Homo sapiens
agagccctggcccct

SEQ ID NO: 540592 - DNA, 15 bp, Homo sapiens
cagagccctggcccc

SEQ ID NO: 540593 - DNA, 15 bp, Homo sapiens
tcagagccctggccc

SEQ ID NO: 540594 - DNA, 15 bp, Homo sapiens
ctcagagccctggcc

SEQ ID NO: 540595 - DNA, 15 bp, Homo sapiens
gctcagagccctggc

SEQ ID NO: 540596 - DNA, 15 bp, Homo sapiens
ggctcagagccctgg

SEQ ID NO: 540597 - DNA, 15 bp, Homo sapiens
tggctcagagccctg

SEQ ID NO: 540598 - DNA, 15 bp, Homo sapiens
atggctcagagccct

SEQ ID NO: 540599 - DNA, 15 bp, Homo sapiens
tatggctcagagccc

SEQ ID NO: 540600 - DNA, 15 bp, Homo sapiens
gtatggctcagagcc

SEQ ID NO: 540601 - DNA, 15 bp, Homo sapiens
agtatggctcagagc

SEQ ID NO: 540602 - DNA, 15 bp, Homo sapiens
tagtatggctcagag

SEQ ID NO: 540603 - DNA, 15 bp, Homo sapiens
gtagtatggctcaga

SEQ ID NO: 540604 - DNA, 15 bp, Homo sapiens
ggtagtatggctcag

SEQ ID NO: 540605 - DNA, 15 bp, Homo sapiens
aggtagtatggctca

SEQ ID NO: 540606 - DNA, 15 bp, Homo sapiens
gaggtagtatggctc

SEQ ID NO: 540607 - DNA, 15 bp, Homo sapiens
ggaggtagtatggct

SEQ ID NO: 540608 - DNA, 15 bp, Homo sapiens
aggaggtagtatggc

SEQ ID NO: 540609 - DNA, 15 bp, Homo sapiens
aaggaggtagtatgg

SEQ ID NO: 540610 - DNA, 15 bp, Homo sapiens
caaggaggtagtatg

SEQ ID NO: 540611 - DNA, 15 bp, Homo sapiens
gcaaggaggtagtat

SEQ ID NO: 540612 - DNA, 15 bp, Homo sapiens
tgcaaggaggtagta

SEQ ID NO: 540613 - DNA, 15 bp, Homo sapiens
ctgcaaggaggtagt

SEQ ID NO: 540614 - DNA, 15 bp, Homo sapiens
tctgcaaggaggtag

SEQ ID NO: 540615 - DNA, 15 bp, Homo sapiens
ctctgcaaggaggta

SEQ ID NO: 540616 - DNA, 15 bp, Homo sapiens
gctctgcaaggaggt

SEQ ID NO: 540617 - DNA, 15 bp, Homo sapiens
ggctctgcaaggagg

SEQ ID NO: 540618 - DNA, 15 bp, Homo sapiens
cggctctgcaaggag

SEQ ID NO: 540619 - DNA, 15 bp, Homo sapiens
gcggctctgcaagga

SEQ ID NO: 540620 - DNA, 15 bp, Homo sapiens
ggcggctctgcaagg

SEQ ID NO: 540621 - DNA, 15 bp, Homo sapiens
gggcggctctgcaag

SEQ ID NO: 540622 - DNA, 15 bp, Homo sapiens
ggggcggctctgcaa

SEQ ID NO: 540623 - DNA, 15 bp, Homo sapiens
gggggcggctctgca

SEQ ID NO: 540624 - DNA, 15 bp, Homo sapiens
ggggggcggctctgc

SEQ ID NO: 540625 - DNA, 15 bp, Homo sapiens
tggggggcggctctg

SEQ ID NO: 540626 - DNA, 15 bp, Homo sapiens
ctggggggcggctct

SEQ ID NO: 540627 - DNA, 15 bp, Homo sapiens
cctggggggcggctc

SEQ ID NO: 540628 - DNA, 15 bp, Homo sapiens
gcctggggggcggct

SEQ ID NO: 540629 - DNA, 15 bp, Homo sapiens
ggcctggggggcggc

SEQ ID NO: 540630 - DNA, 15 bp, Homo sapiens
gggcctggggggcgg

SEQ ID NO: 540631 - DNA, 15 bp, Homo sapiens
agggcctggggggcg

SEQ ID NO: 540632 - DNA, 15 bp, Homo sapiens
aagggcctggggggc

SEQ ID NO: 540633 - DNA, 15 bp, Homo sapiens
gaagggcctgggggg

SEQ ID NO: 540634 - DNA, 15 bp, Homo sapiens
ggaagggcctggggg

SEQ ID NO: 540635 - DNA, 15 bp, Homo sapiens
aggaagggcctgggg

SEQ ID NO: 540636 - DNA, 15 bp, Homo sapiens
caggaagggcctggg

SEQ ID NO: 540637 - DNA, 15 bp, Homo sapiens
ccaggaagggcctgg

SEQ ID NO: 540638 - DNA, 15 bp, Homo sapiens
tccaggaagggcctg

SEQ ID NO: 540639 - DNA, 15 bp, Homo sapiens
gtccaggaagggcct

SEQ ID NO: 540640 - DNA, 15 bp, Homo sapiens
tgtccaggaagggcc

SEQ ID NO: 540641 - DNA, 15 bp, Homo sapiens
atgtccaggaagggc

SEQ ID NO: 540642 - DNA, 15 bp, Homo sapiens
catgtccaggaaggg

SEQ ID NO: 540643 - DNA, 15 bp, Homo sapiens
ccatgtccaggaagg

SEQ ID NO: 540644 - DNA, 15 bp, Homo sapiens
cccatgtccaggaag

SEQ ID NO: 540645 - DNA, 15 bp, Homo sapiens
ccccatgtccaggaa

SEQ ID NO: 540646 - DNA, 15 bp, Homo sapiens
cccccatgtccagga

SEQ ID NO: 540647 - DNA, 15 bp, Homo sapiens
tcccccatgtccagg

SEQ ID NO: 540648 - DNA, 15 bp, Homo sapiens
ctcccccatgtccag

SEQ ID NO: 540649 - DNA, 15 bp, Homo sapiens
cctcccccatgtcca

SEQ ID NO: 540650 - DNA, 15 bp, Homo sapiens
ccctcccccatgtcc

SEQ ID NO: 540651 - DNA, 15 bp, Homo sapiens
gccctcccccatgtc

SEQ ID NO: 540652 - DNA, 15 bp, Homo sapiens
tgccctcccccatgt

SEQ ID NO: 540653 - DNA, 15 bp, Homo sapiens
gtgccctcccccatg

SEQ ID NO: 540654 - DNA, 15 bp, Homo sapiens
ggtgccctcccccat

SEQ ID NO: 540655 - DNA, 15 bp, Homo sapiens
tggtgccctccccca

SEQ ID NO: 540656 - DNA, 15 bp, Homo sapiens
ttggtgccctccccc

SEQ ID NO: 540657 - DNA, 15 bp, Homo sapiens
cttggtgccctcccc

SEQ ID NO: 540658 - DNA, 15 bp, Homo sapiens
tcttggtgccctccc

SEQ ID NO: 540659 - DNA, 15 bp, Homo sapiens
ttcttggtgccctcc

SEQ ID NO: 540660 - DNA, 15 bp, Homo sapiens
gttcttggtgccctc

SEQ ID NO: 540661 - DNA, 15 bp, Homo sapiens
ggttcttggtgccct

SEQ ID NO: 540662 - DNA, 15 bp, Homo sapiens
cggttcttggtgccc

SEQ ID NO: 540663 - DNA, 15 bp, Homo sapiens
tcggttcttggtgcc

SEQ ID NO: 540664 - DNA, 15 bp, Homo sapiens
ttcggttcttggtgc

SEQ ID NO: 540665 - DNA, 15 bp, Homo sapiens
attcggttcttggtg

SEQ ID NO: 540666 - DNA, 15 bp, Homo sapiens
gattcggttcttggt

SEQ ID NO: 540667 - DNA, 15 bp, Homo sapiens
tgattcggttcttgg

SEQ ID NO: 540668 - DNA, 15 bp, Homo sapiens
atgattcggttcttg

SEQ ID NO: 540669 - DNA, 15 bp, Homo sapiens
gatgattcggttctt

SEQ ID NO: 540670 - DNA, 15 bp, Homo sapiens
tgatgattcggttct

SEQ ID NO: 540671 - DNA, 15 bp, Homo sapiens
gtgatgattcggttc

SEQ ID NO: 540672 - DNA, 15 bp, Homo sapiens
tgtgatgattcggtt

SEQ ID NO: 540673 - DNA, 15 bp, Homo sapiens
ctgtgatgattcggt

SEQ ID NO: 540674 - DNA, 15 bp, Homo sapiens
gctgtgatgattcgg

SEQ ID NO: 540675 - DNA, 15 bp, Homo sapiens
ggctgtgatgattcg

SEQ ID NO: 540676 - DNA, 15 bp, Homo sapiens
cggctgtgatgattc

SEQ ID NO: 540677 - DNA, 15 bp, Homo sapiens
tcggctgtgatgatt

SEQ ID NO: 540678 - DNA, 15 bp, Homo sapiens
ctcggctgtgatgat

SEQ ID NO: 540679 - DNA, 15 bp, Homo sapiens
cctcggctgtgatga

SEQ ID NO: 540680 - DNA, 15 bp, Homo sapiens
ccctcggctgtgatg

SEQ ID NO: 540681 - DNA, 15 bp, Homo sapiens
cccctcggctgtgat

SEQ ID NO: 540682 - DNA, 15 bp, Homo sapiens
tcccctcggctgtga

SEQ ID NO: 540683 - DNA, 15 bp, Homo sapiens
atcccctcggctgtg

SEQ ID NO: 540684 - DNA, 15 bp, Homo sapiens
gatcccctcggctgt

SEQ ID NO: 540685 - DNA, 15 bp, Homo sapiens
tgatcccctcggctg

SEQ ID NO: 540686 - DNA, 15 bp, Homo sapiens
atgatcccctcggct

SEQ ID NO: 540687 - DNA, 15 bp, Homo sapiens
gatgatcccctcggc

SEQ ID NO: 540688 - DNA, 15 bp, Homo sapiens
ggatgatcccctcgg

SEQ ID NO: 540689 - DNA, 15 bp, Homo sapiens
aggatgatcccctcg

SEQ ID NO: 540690 - DNA, 15 bp, Homo sapiens
gaggatgatcccctc

SEQ ID NO: 540691 - DNA, 15 bp, Homo sapiens
ggaggatgatcccct

SEQ ID NO: 540692 - DNA, 15 bp, Homo sapiens
aggaggatgatcccc

SEQ ID NO: 540693 - DNA, 15 bp, Homo sapiens
caggaggatgatccc

SEQ ID NO: 540694 - DNA, 15 bp, Homo sapiens
acaggaggatgatcc

SEQ ID NO: 540695 - DNA, 15 bp, Homo sapiens
aacaggaggatgatc

SEQ ID NO: 540696 - DNA, 15 bp, Homo sapiens
gaacaggaggatgat

SEQ ID NO: 540697 - DNA, 15 bp, Homo sapiens
agaacaggaggatga

SEQ ID NO: 540698 - DNA, 15 bp, Homo sapiens
cagaacaggaggatg

SEQ ID NO: 540699 - DNA, 15 bp, Homo sapiens
gcagaacaggaggat

SEQ ID NO: 540700 - DNA, 15 bp, Homo sapiens
cgcagaacaggagga

SEQ ID NO: 540701 - DNA, 15 bp, Homo sapiens
gcgcagaacaggagg

SEQ ID NO: 540702 - DNA, 15 bp, Homo sapiens
cgcgcagaacaggag

SEQ ID NO: 540703 - DNA, 15 bp, Homo sapiens
ccgcgcagaacagga

SEQ ID NO: 540704 - DNA, 15 bp, Homo sapiens
accgcgcagaacagg

SEQ ID NO: 540705 - DNA, 15 bp, Homo sapiens
caccgcgcagaacag

SEQ ID NO: 540706 - DNA, 15 bp, Homo sapiens
ccaccgcgcagaaca

SEQ ID NO: 540707 - DNA, 15 bp, Homo sapiens
accaccgcgcagaac

SEQ ID NO: 540708 - DNA, 15 bp, Homo sapiens
caccaccgcgcagaa

SEQ ID NO: 540709 - DNA, 15 bp, Homo sapiens
gcaccaccgcgcaga

SEQ ID NO: 540710 - DNA, 15 bp, Homo sapiens
ggcaccaccgcgcag

SEQ ID NO: 540711 - DNA, 15 bp, Homo sapiens
aggcaccaccgcgca

SEQ ID NO: 540712 - DNA, 15 bp, Homo sapiens
caggcaccaccgcgc

SEQ ID NO: 540713 - DNA, 15 bp, Homo sapiens
ccaggcaccaccgcg

SEQ ID NO: 540714 - DNA, 15 bp, Homo sapiens
cccaggcaccaccgc

SEQ ID NO: 540715 - DNA, 15 bp, Homo sapiens
tcccaggcaccaccg

SEQ ID NO: 540716 - DNA, 15 bp, Homo sapiens
gtcccaggcaccacc

SEQ ID NO: 540717 - DNA, 15 bp, Homo sapiens
cgtcccaggcaccac

SEQ ID NO: 540718 - DNA, 15 bp, Homo sapiens
gcgtcccaggcacca

SEQ ID NO: 540719 - DNA, 15 bp, Homo sapiens
agcgtcccaggcacc

SEQ ID NO: 540720 - DNA, 15 bp, Homo sapiens
cagcgtcccaggcac

SEQ ID NO: 540721 - DNA, 15 bp, Homo sapiens
gcagcgtcccaggca

SEQ ID NO: 540722 - DNA, 15 bp, Homo sapiens
agcagcgtcccaggc

SEQ ID NO: 540723 - DNA, 15 bp, Homo sapiens
cagcagcgtcccagg

SEQ ID NO: 540724 - DNA, 15 bp, Homo sapiens
gcagcagcgtcccag

SEQ ID NO: 540725 - DNA, 15 bp, Homo sapiens
agcagcagcgtccca

SEQ ID NO: 540726 - DNA, 15 bp, Homo sapiens
cagcagcagcgtccc

SEQ ID NO: 540727 - DNA, 15 bp, Homo sapiens
acagcagcagcgtcc

SEQ ID NO: 540728 - DNA, 15 bp, Homo sapiens
aacagcagcagcgtc

SEQ ID NO: 540729 - DNA, 15 bp, Homo sapiens
gggacctctttgcag

SEQ ID NO: 540730 - DNA, 15 bp, Homo sapiens
cgggacctctttgca

SEQ ID NO: 540731 - DNA, 15 bp, Homo sapiens
ccgggacctctttgc

SEQ ID NO: 540732 - DNA, 15 bp, Homo sapiens
accgggacctctttg

SEQ ID NO: 540733 - DNA, 15 bp, Homo sapiens
caccgggacctcttt

SEQ ID NO: 540734 - DNA, 15 bp, Homo sapiens
ccaccgggacctctt

SEQ ID NO: 540735 - DNA, 15 bp, Homo sapiens
tccaccgggacctct

SEQ ID NO: 540736 - DNA, 15 bp, Homo sapiens
atccaccgggacctc

SEQ ID NO: 540737 - DNA, 15 bp, Homo sapiens
catccaccgggacct

SEQ ID NO: 540738 - DNA, 15 bp, Homo sapiens
ccatccaccgggacc

SEQ ID NO: 540739 - DNA, 15 bp, Homo sapiens
accatccaccgggac

SEQ ID NO: 540740 - DNA, 15 bp, Homo sapiens
caccatccaccggga

SEQ ID NO: 540741 - DNA, 15 bp, Homo sapiens
tcaccatccaccggg

SEQ ID NO: 540742 - DNA, 15 bp, Homo sapiens
gtcaccatccaccgg

SEQ ID NO: 540743 - DNA, 15 bp, Homo sapiens
tgtcaccatccaccg

SEQ ID NO: 540744 - DNA, 15 bp, Homo sapiens
gtgtcaccatccacc

SEQ ID NO: 540745 - DNA, 15 bp, Homo sapiens
agtgtcaccatccac

SEQ ID NO: 540746 - DNA, 15 bp, Homo sapiens
cagtgtcaccatcca

SEQ ID NO: 540747 - DNA, 15 bp, Homo sapiens
acagtgtcaccatcc

SEQ ID NO: 540748 - DNA, 15 bp, Homo sapiens
gacagtgtcaccatc

SEQ ID NO: 540749 - DNA, 15 bp, Homo sapiens
agacagtgtcaccat

SEQ ID NO: 540750 - DNA, 15 bp, Homo sapiens
gagacagtgtcacca

SEQ ID NO: 540751 - DNA, 15 bp, Homo sapiens
agagacagtgtcacc

SEQ ID NO: 540752 - DNA, 15 bp, Homo sapiens
cagagacagtgtcac

SEQ ID NO: 540753 - DNA, 15 bp, Homo sapiens
ccagagacagtgtca

SEQ ID NO: 540754 - DNA, 15 bp, Homo sapiens
cccagagacagtgtc

SEQ ID NO: 540755 - DNA, 15 bp, Homo sapiens
ccccagagacagtgt

SEQ ID NO: 540756 - DNA, 15 bp, Homo sapiens
tccccagagacagtg

SEQ ID NO: 540757 - DNA, 15 bp, Homo sapiens
atccccagagacagt

SEQ ID NO: 540758 - DNA, 15 bp, Homo sapiens
catccccagagacag

SEQ ID NO: 540759 - DNA, 15 bp, Homo sapiens
ccatccccagagaca

SEQ ID NO: 540760 - DNA, 15 bp, Homo sapiens
gccatccccagagac

SEQ ID NO: 540761 - DNA, 15 bp, Homo sapiens
tgccatccccagaga

SEQ ID NO: 540762 - DNA, 15 bp, Homo sapiens
ctgccatccccagag

SEQ ID NO: 540763 - DNA, 15 bp, Homo sapiens
cctgccatccccaga

SEQ ID NO: 540764 - DNA, 15 bp, Homo sapiens
tcctgccatccccag

SEQ ID NO: 540765 - DNA, 15 bp, Homo sapiens
ttcctgccatcccca

SEQ ID NO: 540766 - DNA, 15 bp, Homo sapiens
tttcctgccatcccc

SEQ ID NO: 540767 - DNA, 15 bp, Homo sapiens
ttttcctgccatccc

SEQ ID NO: 540768 - DNA, 15 bp, Homo sapiens
attttcctgccatcc

SEQ ID NO: 540769 - DNA, 15 bp, Homo sapiens
gattttcctgccatc

SEQ ID NO: 540770 - DNA, 15 bp, Homo sapiens
tgattttcctgccat

SEQ ID NO: 540771 - DNA, 15 bp, Homo sapiens
ctgattttcctgcca

SEQ ID NO: 540772 - DNA, 15 bp, Homo sapiens
gctgattttcctgcc

SEQ ID NO: 540773 - DNA, 15 bp, Homo sapiens
tgctgattttcctgc

SEQ ID NO: 540774 - DNA, 15 bp, Homo sapiens
ctgctgattttcctg

SEQ ID NO: 540775 - DNA, 15 bp, Homo sapiens
tctgctgattttcct

SEQ ID NO: 540776 - DNA, 15 bp, Homo sapiens
ttctgctgattttcc

SEQ ID NO: 540777 - DNA, 15 bp, Homo sapiens
attctgctgattttc

SEQ ID NO: 540778 - DNA, 15 bp, Homo sapiens
cattctgctgatttt

SEQ ID NO: 540779 - DNA, 15 bp, Homo sapiens
ccattctgctgattt

SEQ ID NO: 540780 - DNA, 15 bp, Homo sapiens
gccattctgctgatt

SEQ ID NO: 540781 - DNA, 15 bp, Homo sapiens
ggccattctgctgat

SEQ ID NO: 540782 - DNA, 15 bp, Homo sapiens
aggccattctgctga

SEQ ID NO: 540783 - DNA, 15 bp, Homo sapiens
gaggccattctgctg

SEQ ID NO: 540784 - DNA, 15 bp, Homo sapiens
agaggccattctgct

SEQ ID NO: 540785 - DNA, 15 bp, Homo sapiens
aagaggccattctgc

SEQ ID NO: 540786 - DNA, 15 bp, Homo sapiens
gaagaggccattctg

SEQ ID NO: 540787 - DNA, 15 bp, Homo sapiens
agaagaggccattct

SEQ ID NO: 540788 - DNA, 15 bp, Homo sapiens
gagaagaggccattc

SEQ ID NO: 540789 - DNA, 15 bp, Homo sapiens
ggagaagaggccatt

SEQ ID NO: 540790 - DNA, 15 bp, Homo sapiens
gggagaagaggccat

SEQ ID NO: 540791 - DNA, 15 bp, Homo sapiens
ggggagaagaggcca

SEQ ID NO: 540792 - DNA, 15 bp, Homo sapiens
gggggagaagaggcc

SEQ ID NO: 540793 - DNA, 15 bp, Homo sapiens
tgggggagaagaggc

SEQ ID NO: 540794 - DNA, 15 bp, Homo sapiens
atgggggagaagagg

SEQ ID NO: 540795 - DNA, 15 bp, Homo sapiens
catgggggagaagag

SEQ ID NO: 540796 - DNA, 15 bp, Homo sapiens
tcatgggggagaaga

SEQ ID NO: 540797 - DNA, 15 bp, Homo sapiens
gtcatgggggagaag

SEQ ID NO: 540798 - DNA, 15 bp, Homo sapiens
tgtcatgggggagaa

SEQ ID NO: 540799 - DNA, 15 bp, Homo sapiens
ctgtcatgggggaga

SEQ ID NO: 540800 - DNA, 15 bp, Homo sapiens
gctgtcatgggggag

SEQ ID NO: 540801 - DNA, 15 bp, Homo sapiens
agctgtcatggggga

SEQ ID NO: 540802 - DNA, 15 bp, Homo sapiens
gagctgtcatggggg

SEQ ID NO: 540803 - DNA, 15 bp, Homo sapiens
tgagctgtcatgggg

SEQ ID NO: 540804 - DNA, 15 bp, Homo sapiens
ctgagctgtcatggg

SEQ ID NO: 540805 - DNA, 15 bp, Homo sapiens
tctgagctgtcatgg

SEQ ID NO: 540806 - DNA, 15 bp, Homo sapiens
ctctgagctgtcatg

SEQ ID NO: 540807 - DNA, 15 bp, Homo sapiens
cctctgagctgtcat

SEQ ID NO: 540808 - DNA, 15 bp, Homo sapiens
gcctctgagctgtca

SEQ ID NO: 540809 - DNA, 15 bp, Homo sapiens
agcctctgagctgtc

SEQ ID NO: 540810 - DNA, 15 bp, Homo sapiens
aagcctctgagctgt

SEQ ID NO: 540811 - DNA, 15 bp, Homo sapiens
aaagcctctgagctg

SEQ ID NO: 540812 - DNA, 15 bp, Homo sapiens
gaaagcctctgagct

SEQ ID NO: 540813 - DNA, 15 bp, Homo sapiens
agaaagcctctgagc

SEQ ID NO: 540814 - DNA, 15 bp, Homo sapiens
gagaaagcctctgag

SEQ ID NO: 540815 - DNA, 15 bp, Homo sapiens
agagaaagcctctga

SEQ ID NO: 540816 - DNA, 15 bp, Homo sapiens
cagagaaagcctctg

SEQ ID NO: 540817 - DNA, 15 bp, Homo sapiens
acagagaaagcctct

SEQ ID NO: 540818 - DNA, 15 bp, Homo sapiens
aacagagaaagcctc

SEQ ID NO: 540819 - DNA, 15 bp, Homo sapiens
taacagagaaagcct

SEQ ID NO: 540820 - DNA, 15 bp, Homo sapiens
gtaacagagaaagcc

SEQ ID NO: 540821 - DNA, 15 bp, Homo sapiens
tgtaacagagaaagc

SEQ ID NO: 540822 - DNA, 15 bp, Homo sapiens
gtgtaacagagaaag

SEQ ID NO: 540823 - DNA, 15 bp, Homo sapiens
agtgtaacagagaaa

SEQ ID NO: 540824 - DNA, 15 bp, Homo sapiens
cagtgtaacagagaa

SEQ ID NO: 540825 - DNA, 15 bp, Homo sapiens
tcagtgtaacagaga

SEQ ID NO: 540826 - DNA, 15 bp, Homo sapiens
ctcagtgtaacagag

SEQ ID NO: 540827 - DNA, 15 bp, Homo sapiens
cctcagtgtaacaga

SEQ ID NO: 540828 - DNA, 15 bp, Homo sapiens
ccctcagtgtaacag

SEQ ID NO: 540829 - DNA, 15 bp, Homo sapiens
tccctcagtgtaaca

SEQ ID NO: 540830 - DNA, 15 bp, Homo sapiens
ctccctcagtgtaac

SEQ ID NO: 540831 - DNA, 15 bp, Homo sapiens
gctccctcagtgtaa

SEQ ID NO: 540832 - DNA, 15 bp, Homo sapiens
agctccctcagtgta

SEQ ID NO: 540833 - DNA, 15 bp, Homo sapiens
aagctccctcagtgt

SEQ ID NO: 540834 - DNA, 15 bp, Homo sapiens
aaagctccctcagtg

SEQ ID NO: 540835 - DNA, 15 bp, Homo sapiens
taaagctccctcagt

SEQ ID NO: 540836 - DNA, 15 bp, Homo sapiens
ataaagctccctcag

SEQ ID NO: 540837 - DNA, 15 bp, Homo sapiens
aataaagctccctca

SEQ ID NO: 540838 - DNA, 15 bp, Homo sapiens
aaataaagctccctc

SEQ ID NO: 540839 - DNA, 15 bp, Homo sapiens
aaaataaagctccct

SEQ ID NO: 540840 - DNA, 15 bp, Homo sapiens
aaaaataaagctccc

SEQ ID NO: 540841 - DNA, 15 bp, Homo sapiens
gaaaaataaagctcc

SEQ ID NO: 540842 - DNA, 15 bp, Homo sapiens
agaaaaataaagctc

SEQ ID NO: 540843 - DNA, 15 bp, Homo sapiens
cagaaaaataaagct

SEQ ID NO: 540844 - DNA, 15 bp, Homo sapiens
acagaaaaataaagc

SEQ ID NO: 540845 - DNA, 15 bp, Homo sapiens
cacagaaaaataaag

SEQ ID NO: 540846 - DNA, 15 bp, Homo sapiens
ccacagaaaaataaa

SEQ ID NO: 540847 - DNA, 15 bp, Homo sapiens
gccacagaaaaataa

SEQ ID NO: 540848 - DNA, 15 bp, Homo sapiens
ggccacagaaaaata

SEQ ID NO: 540849 - DNA, 15 bp, Homo sapiens
aggccacagaaaaat

SEQ ID NO: 540850 - DNA, 15 bp, Homo sapiens
taggccacagaaaaa

SEQ ID NO: 540851 - DNA, 15 bp, Homo sapiens
gtaggccacagaaaa

SEQ ID NO: 540852 - DNA, 15 bp, Homo sapiens
agtaggccacagaaa

SEQ ID NO: 540853 - DNA, 15 bp, Homo sapiens
gagtaggccacagaa

SEQ ID NO: 540854 - DNA, 15 bp, Homo sapiens
tgagtaggccacaga

SEQ ID NO: 540855 - DNA, 15 bp, Homo sapiens
atgagtaggccacag

SEQ ID NO: 540856 - DNA, 15 bp, Homo sapiens
tatgagtaggccaca

SEQ ID NO: 540857 - DNA, 15 bp, Homo sapiens
gtatgagtaggccac

SEQ ID NO: 540858 - DNA, 15 bp, Homo sapiens
agtatgagtaggcca

SEQ ID NO: 540859 - DNA, 15 bp, Homo sapiens
cagtatgagtaggcc

SEQ ID NO: 540860 - DNA, 15 bp, Homo sapiens
tcagtatgagtaggc

SEQ ID NO: 540861 - DNA, 15 bp, Homo sapiens
ttcagtatgagtagg

SEQ ID NO: 540862 - DNA, 15 bp, Homo sapiens
tttcagtatgagtag

SEQ ID NO: 540863 - DNA, 15 bp, Homo sapiens
gtttcagtatgagta

SEQ ID NO: 540864 - DNA, 15 bp, Homo sapiens
cgtttcagtatgagt

SEQ ID NO: 540865 - DNA, 15 bp, Homo sapiens
acgtttcagtatgag

SEQ ID NO: 540866 - DNA, 15 bp, Homo sapiens
cacgtttcagtatga

SEQ ID NO: 540867 - DNA, 15 bp, Homo sapiens
acacgtttcagtatg

SEQ ID NO: 540868 - DNA, 15 bp, Homo sapiens
cacacgtttcagtat

SEQ ID NO: 540869 - DNA, 15 bp, Homo sapiens
acacacgtttcagta

SEQ ID NO: 540870 - DNA, 15 bp, Homo sapiens
cacacacgtttcagt

SEQ ID NO: 540871 - DNA, 15 bp, Homo sapiens
acacacacgtttcag

SEQ ID NO: 540872 - DNA, 15 bp, Homo sapiens
gacacacacgtttca

SEQ ID NO: 540873 - DNA, 15 bp, Homo sapiens
tgacacacacgtttc

SEQ ID NO: 540874 - DNA, 15 bp, Homo sapiens
ctgacacacacgttt

SEQ ID NO: 540875 - DNA, 15 bp, Homo sapiens
actgacacacacgtt

SEQ ID NO: 540876 - DNA, 15 bp, Homo sapiens
cactgacacacacgt

SEQ ID NO: 540877 - DNA, 15 bp, Homo sapiens
tcactgacacacacg

SEQ ID NO: 540878 - DNA, 15 bp, Homo sapiens
gtcactgacacacac

SEQ ID NO: 540879 - DNA, 15 bp, Homo sapiens
tgtcactgacacaca

SEQ ID NO: 540880 - DNA, 15 bp, Homo sapiens
ctgtcactgacacac

SEQ ID NO: 540881 - DNA, 15 bp, Homo sapiens
gctgtcactgacaca

SEQ ID NO: 540882 - DNA, 15 bp, Homo sapiens
ggctgtcactgacac

SEQ ID NO: 540883 - DNA, 15 bp, Homo sapiens
aggctgtcactgaca

SEQ ID NO: 540884 - DNA, 15 bp, Homo sapiens
aaggctgtcactgac

SEQ ID NO: 540885 - DNA, 15 bp, Homo sapiens
caaggctgtcactga

SEQ ID NO: 540886 - DNA, 15 bp, Homo sapiens
acaaggctgtcactg

SEQ ID NO: 540887 - DNA, 15 bp, Homo sapiens
cacaaggctgtcact

SEQ ID NO: 540888 - DNA, 15 bp, Homo sapiens
ccacaaggctgtcac

SEQ ID NO: 540889 - DNA, 15 bp, Homo sapiens
gccacaaggctgtca

SEQ ID NO: 540890 - DNA, 15 bp, Homo sapiens
agccacaaggctgtc

SEQ ID NO: 540891 - DNA, 15 bp, Homo sapiens
cagccacaaggctgt

SEQ ID NO: 540892 - DNA, 15 bp, Homo sapiens
gcagccacaaggctg

SEQ ID NO: 540893 - DNA, 15 bp, Homo sapiens
agcagccacaaggct

SEQ ID NO: 540894 - DNA, 15 bp, Homo sapiens
cagcagccacaaggc

SEQ ID NO: 540895 - DNA, 15 bp, Homo sapiens
gcagcagccacaagg

SEQ ID NO: 540896 - DNA, 15 bp, Homo sapiens
tgcagcagccacaag

SEQ ID NO: 540897 - DNA, 15 bp, Homo sapiens
ctgcagcagccacaa

SEQ ID NO: 540898 - DNA, 15 bp, Homo sapiens
actgcagcagccaca

SEQ ID NO: 540899 - DNA, 15 bp, Homo sapiens
cactgcagcagccac

SEQ ID NO: 540900 - DNA, 15 bp, Homo sapiens
gcactgcagcagcca

SEQ ID NO: 540901 - DNA, 15 bp, Homo sapiens
ggcactgcagcagcc

SEQ ID NO: 540902 - DNA, 15 bp, Homo sapiens
tggcactgcagcagc

SEQ ID NO: 540903 - DNA, 15 bp, Homo sapiens
ctggcactgcagcag

SEQ ID NO: 540904 - DNA, 15 bp, Homo sapiens
cctggcactgcagca

SEQ ID NO: 540905 - DNA, 15 bp, Homo sapiens
tcctggcactgcagc

SEQ ID NO: 540906 - DNA, 15 bp, Homo sapiens
gtcctggcactgcag

SEQ ID NO: 540907 - DNA, 15 bp, Homo sapiens
ggtcctggcactgca

SEQ ID NO: 540908 - DNA, 15 bp, Homo sapiens
gggtcctggcactgc

SEQ ID NO: 540909 - DNA, 15 bp, Homo sapiens
ggggtcctggcactg

SEQ ID NO: 540910 - DNA, 15 bp, Homo sapiens
tggggtcctggcact

SEQ ID NO: 540911 - DNA, 15 bp, Homo sapiens
gtggggtcctggcac

SEQ ID NO: 540912 - DNA, 15 bp, Homo sapiens
agtggggtcctggca

SEQ ID NO: 540913 - DNA, 15 bp, Homo sapiens
cagtggggtcctggc

SEQ ID NO: 540914 - DNA, 15 bp, Homo sapiens
acagtggggtcctgg

SEQ ID NO: 540915 - DNA, 15 bp, Homo sapiens
cacagtggggtcctg

SEQ ID NO: 540916 - DNA, 15 bp, Homo sapiens
acacagtggggtcct

SEQ ID NO: 540917 - DNA, 15 bp, Homo sapiens
cacacagtggggtcc

SEQ ID NO: 540918 - DNA, 15 bp, Homo sapiens
acacacagtggggtc

SEQ ID NO: 540919 - DNA, 15 bp, Homo sapiens
tacacacagtggggt

SEQ ID NO: 540920 - DNA, 15 bp, Homo sapiens
atacacacagtgggg

SEQ ID NO: 540921 - DNA, 15 bp, Homo sapiens
catacacacagtggg

SEQ ID NO: 540922 - DNA, 15 bp, Homo sapiens
gcatacacacagtgg

SEQ ID NO: 540923 - DNA, 15 bp, Homo sapiens
tgcatacacacagtg

SEQ ID NO: 540924 - DNA, 15 bp, Homo sapiens
ctgcatacacacagt

SEQ ID NO: 540925 - DNA, 15 bp, Homo sapiens
cctgcatacacacag

SEQ ID NO: 540926 - DNA, 15 bp, Homo sapiens
ccctgcatacacaca

SEQ ID NO: 540927 - DNA, 15 bp, Homo sapiens
accctgcatacacac

SEQ ID NO: 540928 - DNA, 15 bp, Homo sapiens
gaccctgcatacaca

SEQ ID NO: 540929 - DNA, 15 bp, Homo sapiens
ggaccctgcatacac

SEQ ID NO: 540930 - DNA, 15 bp, Homo sapiens
gggaccctgcataca

SEQ ID NO: 540931 - DNA, 15 bp, Homo sapiens
agggaccctgcatac

SEQ ID NO: 540932 - DNA, 15 bp, Homo sapiens
tagggaccctgcata

SEQ ID NO: 540933 - DNA, 15 bp, Homo sapiens
ctagggaccctgcat

SEQ ID NO: 540934 - DNA, 15 bp, Homo sapiens
tctagggaccctgca

SEQ ID NO: 540935 - DNA, 15 bp, Homo sapiens
ctctagggaccctgc

SEQ ID NO: 540936 - DNA, 15 bp, Homo sapiens
cctctagggaccctg

SEQ ID NO: 540937 - DNA, 15 bp, Homo sapiens
ccctctagggaccct

SEQ ID NO: 540938 - DNA, 15 bp, Homo sapiens
cccctctagggaccc

SEQ ID NO: 540939 - DNA, 15 bp, Homo sapiens
gcccctctagggacc

SEQ ID NO: 540940 - DNA, 15 bp, Homo sapiens
agcccctctagggac

SEQ ID NO: 540941 - DNA, 15 bp, Homo sapiens
tagcccctctaggga

SEQ ID NO: 540942 - DNA, 15 bp, Homo sapiens
atagcccctctaggg

SEQ ID NO: 540943 - DNA, 15 bp, Homo sapiens
gatagcccctctagg

SEQ ID NO: 540944 - DNA, 15 bp, Homo sapiens
tgatagcccctctag

SEQ ID NO: 540945 - DNA, 15 bp, Homo sapiens
gtgatagcccctcta

SEQ ID NO: 540946 - DNA, 15 bp, Homo sapiens
agtgatagcccctct

SEQ ID NO: 540947 - DNA, 15 bp, Homo sapiens
gagtgatagcccctc

SEQ ID NO: 540948 - DNA, 15 bp, Homo sapiens
tgagtgatagcccct

SEQ ID NO: 540949 - DNA, 15 bp, Homo sapiens
ctgagtgatagcccc

SEQ ID NO: 540950 - DNA, 15 bp, Homo sapiens
cctgagtgatagccc

SEQ ID NO: 540951 - DNA, 15 bp, Homo sapiens
gcctgagtgatagcc

SEQ ID NO: 540952 - DNA, 15 bp, Homo sapiens
tgcctgagtgatagc

SEQ ID NO: 540953 - DNA, 15 bp, Homo sapiens
ctgcctgagtgatag

SEQ ID NO: 540954 - DNA, 15 bp, Homo sapiens
actgcctgagtgata

SEQ ID NO: 540955 - DNA, 15 bp, Homo sapiens
aactgcctgagtgat

SEQ ID NO: 540956 - DNA, 15 bp, Homo sapiens
gaactgcctgagtga

SEQ ID NO: 540957 - DNA, 15 bp, Homo sapiens
tgaactgcctgagtg

SEQ ID NO: 540958 - DNA, 15 bp, Homo sapiens
ttgaactgcctgagt

SEQ ID NO: 540959 - DNA, 15 bp, Homo sapiens
cttgaactgcctgag

SEQ ID NO: 540960 - DNA, 15 bp, Homo sapiens
gcttgaactgcctga

SEQ ID NO: 540961 - DNA, 15 bp, Homo sapiens
tgcttgaactgcctg

SEQ ID NO: 540962 - DNA, 15 bp, Homo sapiens
atgcttgaactgcct

SEQ ID NO: 540963 - DNA, 15 bp, Homo sapiens
catgcttgaactgcc

SEQ ID NO: 540964 - DNA, 15 bp, Homo sapiens
acatgcttgaactgc

SEQ ID NO: 540965 - DNA, 15 bp, Homo sapiens
cacatgcttgaactg

SEQ ID NO: 540966 - DNA, 15 bp, Homo sapiens
tcacatgcttgaact

SEQ ID NO: 540967 - DNA, 15 bp, Homo sapiens
gtcacatgcttgaac

SEQ ID NO: 540968 - DNA, 15 bp, Homo sapiens
ggtcacatgcttgaa

SEQ ID NO: 540969 - DNA, 15 bp, Homo sapiens
gggtcacatgcttga

SEQ ID NO: 540970 - DNA, 15 bp, Homo sapiens
agggtcacatgcttg

SEQ ID NO: 540971 - DNA, 15 bp, Homo sapiens
cagggtcacatgctt

SEQ ID NO: 540972 - DNA, 15 bp, Homo sapiens
acagggtcacatgct

SEQ ID NO: 540973 - DNA, 15 bp, Homo sapiens
cacagggtcacatgc

SEQ ID NO: 540974 - DNA, 15 bp, Homo sapiens
gcacagggtcacatg

SEQ ID NO: 540975 - DNA, 15 bp, Homo sapiens
agcacagggtcacat

SEQ ID NO: 540976 - DNA, 15 bp, Homo sapiens
cagcacagggtcaca

SEQ ID NO: 540977 - DNA, 15 bp, Homo sapiens
acagcacagggtcac

SEQ ID NO: 540978 - DNA, 15 bp, Homo sapiens
cacagcacagggtca

SEQ ID NO: 540979 - DNA, 15 bp, Homo sapiens
tcacagcacagggtc

SEQ ID NO: 540980 - DNA, 15 bp, Homo sapiens
ctcacagcacagggt

SEQ ID NO: 540981 - DNA, 15 bp, Homo sapiens
actcacagcacaggg

SEQ ID NO: 540982 - DNA, 15 bp, Homo sapiens
cactcacagcacagg

SEQ ID NO: 540983 - DNA, 15 bp, Homo sapiens
tcactcacagcacag

SEQ ID NO: 540984 - DNA, 15 bp, Homo sapiens
ctcactcacagcaca

SEQ ID NO: 540985 - DNA, 15 bp, Homo sapiens
gctcactcacagcac

SEQ ID NO: 540986 - DNA, 15 bp, Homo sapiens
tgctcactcacagca

SEQ ID NO: 540987 - DNA, 15 bp, Homo sapiens
gtgctcactcacagc

SEQ ID NO: 540988 - DNA, 15 bp, Homo sapiens
ggtgctcactcacag

SEQ ID NO: 540989 - DNA, 15 bp, Homo sapiens
aggtgctcactcaca

SEQ ID NO: 540990 - DNA, 15 bp, Homo sapiens
caggtgctcactcac

SEQ ID NO: 540991 - DNA, 15 bp, Homo sapiens
ccaggtgctcactca

SEQ ID NO: 540992 - DNA, 15 bp, Homo sapiens
accaggtgctcactc

SEQ ID NO: 540993 - DNA, 15 bp, Homo sapiens
gaccaggtgctcact

SEQ ID NO: 540994 - DNA, 15 bp, Homo sapiens
agaccaggtgctcac

SEQ ID NO: 540995 - DNA, 15 bp, Homo sapiens
gagaccaggtgctca

SEQ ID NO: 540996 - DNA, 15 bp, Homo sapiens
agagaccaggtgctc

SEQ ID NO: 540997 - DNA, 15 bp, Homo sapiens
aagagaccaggtgct

SEQ ID NO: 540998 - DNA, 15 bp, Homo sapiens
caagagaccaggtgc

SEQ ID NO: 540999 - DNA, 15 bp, Homo sapiens
gcaagagaccaggtg

SEQ ID NO: 541000 - DNA, 15 bp, Homo sapiens
agcaagagaccaggt

SEQ ID NO: 541001 - DNA, 15 bp, Homo sapiens
tagcaagagaccagg

SEQ ID NO: 541002 - DNA, 15 bp, Homo sapiens
atagcaagagaccag

SEQ ID NO: 541003 - DNA, 15 bp, Homo sapiens
catagcaagagacca

SEQ ID NO: 541004 - DNA, 15 bp, Homo sapiens
ccatagcaagagacc

SEQ ID NO: 541005 - DNA, 15 bp, Homo sapiens
cccatagcaagagac

SEQ ID NO: 541006 - DNA, 15 bp, Homo sapiens
tcccatagcaagaga

SEQ ID NO: 541007 - DNA, 15 bp, Homo sapiens
ctcccatagcaagag

SEQ ID NO: 541008 - DNA, 15 bp, Homo sapiens
actcccatagcaaga

SEQ ID NO: 541009 - DNA, 15 bp, Homo sapiens
cactcccatagcaag

SEQ ID NO: 541010 - DNA, 15 bp, Homo sapiens
acactcccatagcaa

SEQ ID NO: 541011 - DNA, 15 bp, Homo sapiens
cacactcccatagca

SEQ ID NO: 541012 - DNA, 15 bp, Homo sapiens
ccacactcccatagc

SEQ ID NO: 541013 - DNA, 15 bp, Homo sapiens
cccacactcccatag

SEQ ID NO: 541014 - DNA, 15 bp, Homo sapiens
ccccacactcccata

SEQ ID NO: 541015 - DNA, 15 bp, Homo sapiens
tccccacactcccat

SEQ ID NO: 541016 - DNA, 15 bp, Homo sapiens
gtccccacactccca

SEQ ID NO: 541017 - DNA, 15 bp, Homo sapiens
agtccccacactccc

SEQ ID NO: 541018 - DNA, 15 bp, Homo sapiens
aagtccccacactcc

SEQ ID NO: 541019 - DNA, 15 bp, Homo sapiens
taagtccccacactc

SEQ ID NO: 541020 - DNA, 15 bp, Homo sapiens
ataagtccccacact

SEQ ID NO: 541021 - DNA, 15 bp, Homo sapiens
cataagtccccacac

SEQ ID NO: 541022 - DNA, 15 bp, Homo sapiens
gcataagtccccaca

SEQ ID NO: 541023 - DNA, 15 bp, Homo sapiens
ggcataagtccccac

SEQ ID NO: 541024 - DNA, 15 bp, Homo sapiens
tggcataagtcccca

SEQ ID NO: 541025 - DNA, 15 bp, Homo sapiens
ctggcataagtcccc

SEQ ID NO: 541026 - DNA, 15 bp, Homo sapiens
cctggcataagtccc

SEQ ID NO: 541027 - DNA, 15 bp, Homo sapiens
acctggcataagtcc

SEQ ID NO: 541028 - DNA, 15 bp, Homo sapiens
tacctggcataagtc

SEQ ID NO: 541029 - DNA, 15 bp, Homo sapiens
ttacctggcataagt

SEQ ID NO: 541030 - DNA, 15 bp, Homo sapiens
tttacctggcataag

SEQ ID NO: 541031 - DNA, 15 bp, Homo sapiens
ctttacctggcataa

SEQ ID NO: 541032 - DNA, 15 bp, Homo sapiens
tctttacctggcata

SEQ ID NO: 541033 - DNA, 15 bp, Homo sapiens
ctctttacctggcat

SEQ ID NO: 541034 - DNA, 15 bp, Homo sapiens
actctttacctggca

SEQ ID NO: 541035 - DNA, 15 bp, Homo sapiens
gactctttacctggc

SEQ ID NO: 541036 - DNA, 15 bp, Homo sapiens
agactctttacctgg

SEQ ID NO: 541037 - DNA, 15 bp, Homo sapiens
aagactctttacctg

SEQ ID NO: 541038 - DNA, 15 bp, Homo sapiens
caagactctttacct

SEQ ID NO: 541039 - DNA, 15 bp, Homo sapiens
gcaagactctttacc

SEQ ID NO: 541040 - DNA, 15 bp, Homo sapiens
ggcaagactctttac

SEQ ID NO: 541041 - DNA, 15 bp, Homo sapiens
tggcaagactcttta

SEQ ID NO: 541042 - DNA, 15 bp, Homo sapiens
ttggcaagactcttt

SEQ ID NO: 541043 - DNA, 15 bp, Homo sapiens
gttggcaagactctt

SEQ ID NO: 541044 - DNA, 15 bp, Homo sapiens
agttggcaagactct

SEQ ID NO: 541045 - DNA, 15 bp, Homo sapiens
gagttggcaagactc

SEQ ID NO: 541046 - DNA, 15 bp, Homo sapiens
tgagttggcaagact

SEQ ID NO: 541047 - DNA, 15 bp, Homo sapiens
ctgagttggcaagac

SEQ ID NO: 541048 - DNA, 15 bp, Homo sapiens
actgagttggcaaga

SEQ ID NO: 541049 - DNA, 15 bp, Homo sapiens
aactgagttggcaag

SEQ ID NO: 541050 - DNA, 15 bp, Homo sapiens
taactgagttggcaa

SEQ ID NO: 541051 - DNA, 15 bp, Homo sapiens
ataactgagttggca

SEQ ID NO: 541052 - DNA, 15 bp, Homo sapiens
aataactgagttggc

SEQ ID NO: 541053 - DNA, 15 bp, Homo sapiens
gaataactgagttgg

SEQ ID NO: 541054 - DNA, 15 bp, Homo sapiens
cgaataactgagttg

SEQ ID NO: 541055 - DNA, 15 bp, Homo sapiens
ccgaataactgagtt

SEQ ID NO: 541056 - DNA, 15 bp, Homo sapiens
cccgaataactgagt

SEQ ID NO: 541057 - DNA, 15 bp, Homo sapiens
ccccgaataactgag

SEQ ID NO: 541058 - DNA, 15 bp, Homo sapiens
cccccgaataactga

SEQ ID NO: 541059 - DNA, 15 bp, Homo sapiens
gcccccgaataactg

SEQ ID NO: 541060 - DNA, 15 bp, Homo sapiens
agcccccgaataact

SEQ ID NO: 541061 - DNA, 15 bp, Homo sapiens
aagcccccgaataac

SEQ ID NO: 541062 - DNA, 15 bp, Homo sapiens
taagcccccgaataa

SEQ ID NO: 541063 - DNA, 15 bp, Homo sapiens
ataagcccccgaata

SEQ ID NO: 541064 - DNA, 15 bp, Homo sapiens
aataagcccccgaat

SEQ ID NO: 541065 - DNA, 15 bp, Homo sapiens
aaataagcccccgaa

SEQ ID NO: 541066 - DNA, 15 bp, Homo sapiens
gaaataagcccccga

SEQ ID NO: 541067 - DNA, 15 bp, Homo sapiens
tgaaataagcccccg

SEQ ID NO: 541068 - DNA, 15 bp, Homo sapiens
ttgaaataagccccc

SEQ ID NO: 541069 - DNA, 15 bp, Homo sapiens
cttgaaataagcccc

SEQ ID NO: 541070 - DNA, 15 bp, Homo sapiens
ccttgaaataagccc

SEQ ID NO: 541071 - DNA, 15 bp, Homo sapiens
accttgaaataagcc

SEQ ID NO: 541072 - DNA, 15 bp, Homo sapiens
caccttgaaataagc

SEQ ID NO: 541073 - DNA, 15 bp, Homo sapiens
acaccttgaaataag

SEQ ID NO: 541074 - DNA, 15 bp, Homo sapiens
aacaccttgaaataa

SEQ ID NO: 541075 - DNA, 15 bp, Homo sapiens
aaacaccttgaaata

SEQ ID NO: 541076 - DNA, 15 bp, Homo sapiens
aaaacaccttgaaat

SEQ ID NO: 541077 - DNA, 15 bp, Homo sapiens
gaaaacaccttgaaa

SEQ ID NO: 541078 - DNA, 15 bp, Homo sapiens
agaaaacaccttgaa

SEQ ID NO: 541079 - DNA, 15 bp, Homo sapiens
aagaaaacaccttga

SEQ ID NO: 541080 - DNA, 15 bp, Homo sapiens
aaagaaaacaccttg

SEQ ID NO: 541081 - DNA, 15 bp, Homo sapiens
gaaagaaaacacctt

SEQ ID NO: 541082 - DNA, 15 bp, Homo sapiens
agaaagaaaacacct

SEQ ID NO: 541083 - DNA, 15 bp, Homo sapiens
gagaaagaaaacacc

SEQ ID NO: 541084 - DNA, 15 bp, Homo sapiens
tgagaaagaaaacac

SEQ ID NO: 541085 - DNA, 15 bp, Homo sapiens
ctgagaaagaaaaca

SEQ ID NO: 541086 - DNA, 15 bp, Homo sapiens
cctgagaaagaaaac

SEQ ID NO: 541087 - DNA, 15 bp, Homo sapiens
tcctgagaaagaaaa

SEQ ID NO: 541088 - DNA, 15 bp, Homo sapiens
atcctgagaaagaaa

SEQ ID NO: 541089 - DNA, 15 bp, Homo sapiens
catcctgagaaagaa

SEQ ID NO: 541090 - DNA, 15 bp, Homo sapiens
acatcctgagaaaga

SEQ ID NO: 541091 - DNA, 15 bp, Homo sapiens
gacatcctgagaaag

SEQ ID NO: 541092 - DNA, 15 bp, Homo sapiens
tgacatcctgagaaa

SEQ ID NO: 541093 - DNA, 15 bp, Homo sapiens
atgacatcctgagaa

SEQ ID NO: 541094 - DNA, 15 bp, Homo sapiens
gatgacatcctgaga

SEQ ID NO: 541095 - DNA, 15 bp, Homo sapiens
tgatgacatcctgag

SEQ ID NO: 541096 - DNA, 15 bp, Homo sapiens
ctgatgacatcctga

SEQ ID NO: 541097 - DNA, 15 bp, Homo sapiens
cctgatgacatcctg

SEQ ID NO: 541098 - DNA, 15 bp, Homo sapiens
acctgatgacatcct

SEQ ID NO: 541099 - DNA, 15 bp, Homo sapiens
aacctgatgacatcc

SEQ ID NO: 541100 - DNA, 15 bp, Homo sapiens
taacctgatgacatc

SEQ ID NO: 541101 - DNA, 15 bp, Homo sapiens
ttaacctgatgacat

SEQ ID NO: 541102 - DNA, 15 bp, Homo sapiens
cttaacctgatgaca

SEQ ID NO: 541103 - DNA, 15 bp, Homo sapiens
acttaacctgatgac

SEQ ID NO: 541104 - DNA, 15 bp, Homo sapiens
tacttaacctgatga

SEQ ID NO: 541105 - DNA, 15 bp, Homo sapiens
atacttaacctgatg

SEQ ID NO: 541106 - DNA, 15 bp, Homo sapiens
catacttaacctgat

SEQ ID NO: 541107 - DNA, 15 bp, Homo sapiens
acatacttaacctga

SEQ ID NO: 541108 - DNA, 15 bp, Homo sapiens
gacatacttaacctg

SEQ ID NO: 541109 - DNA, 15 bp, Homo sapiens
tgacatacttaacct

SEQ ID NO: 541110 - DNA, 15 bp, Homo sapiens
ctgacatacttaacc

SEQ ID NO: 541111 - DNA, 15 bp, Homo sapiens
actgacatacttaac

SEQ ID NO: 541112 - DNA, 15 bp, Homo sapiens
tactgacatacttaa

SEQ ID NO: 541113 - DNA, 15 bp, Homo sapiens
ctactgacatactta

SEQ ID NO: 541114 - DNA, 15 bp, Homo sapiens
cctactgacatactt

SEQ ID NO: 541115 - DNA, 15 bp, Homo sapiens
tcctactgacatact

SEQ ID NO: 541116 - DNA, 15 bp, Homo sapiens
atcctactgacatac

SEQ ID NO: 541117 - DNA, 15 bp, Homo sapiens
catcctactgacata

SEQ ID NO: 541118 - DNA, 15 bp, Homo sapiens
acatcctactgacat

SEQ ID NO: 541119 - DNA, 15 bp, Homo sapiens
cacatcctactgaca

SEQ ID NO: 541120 - DNA, 15 bp, Homo sapiens
acacatcctactgac

SEQ ID NO: 541121 - DNA, 15 bp, Homo sapiens
cacacatcctactga

SEQ ID NO: 541122 - DNA, 15 bp, Homo sapiens
acacacatcctactg

SEQ ID NO: 541123 - DNA, 15 bp, Homo sapiens
cacacacatcctact

SEQ ID NO: 541124 - DNA, 15 bp, Homo sapiens
acacacacatcctac

SEQ ID NO: 541125 - DNA, 15 bp, Homo sapiens
cacacacacatccta

SEQ ID NO: 541126 - DNA, 15 bp, Homo sapiens
acacacacacatcct

SEQ ID NO: 541127 - DNA, 15 bp, Homo sapiens
cacacacacacatcc

SEQ ID NO: 541128 - DNA, 15 bp, Homo sapiens
acacacacacacatc

SEQ ID NO: 541129 - DNA, 15 bp, Homo sapiens
cacacacacacacat

SEQ ID NO: 541130 - DNA, 15 bp, Homo sapiens
acacacacacacaca

SEQ ID NO: 541131 - DNA, 15 bp, Homo sapiens
cacacacacacacac

SEQ ID NO: 541132 - DNA, 15 bp, Homo sapiens
gcacacacacacaca

SEQ ID NO: 541133 - DNA, 15 bp, Homo sapiens
tgcacacacacacac

SEQ ID NO: 541134 - DNA, 15 bp, Homo sapiens
gtgcacacacacaca

SEQ ID NO: 541135 - DNA, 15 bp, Homo sapiens
ggtgcacacacacac

SEQ ID NO: 541136 - DNA, 15 bp, Homo sapiens
tggtgcacacacaca

SEQ ID NO: 541137 - DNA, 15 bp, Homo sapiens
gtggtgcacacacac

SEQ ID NO: 541138 - DNA, 15 bp, Homo sapiens
tgtggtgcacacaca

SEQ ID NO: 541139 - DNA, 15 bp, Homo sapiens
gtgtggtgcacacac

SEQ ID NO: 541140 - DNA, 15 bp, Homo sapiens
tgtgtggtgcacaca

SEQ ID NO: 541141 - DNA, 15 bp, Homo sapiens
atgtgtggtgcacac

SEQ ID NO: 541142 - DNA, 15 bp, Homo sapiens
catgtgtggtgcaca

SEQ ID NO: 541143 - DNA, 15 bp, Homo sapiens
gcatgtgtggtgcac

SEQ ID NO: 541144 - DNA, 15 bp, Homo sapiens
tgcatgtgtggtgca

SEQ ID NO: 541145 - DNA, 15 bp, Homo sapiens
atgcatgtgtggtgc

SEQ ID NO: 541146 - DNA, 15 bp, Homo sapiens
catgcatgtgtggtg

SEQ ID NO: 541147 - DNA, 15 bp, Homo sapiens
gcatgcatgtgtggt

SEQ ID NO: 541148 - DNA, 15 bp, Homo sapiens
tgcatgcatgtgtgg

SEQ ID NO: 541149 - DNA, 15 bp, Homo sapiens
gtgcatgcatgtgtg

SEQ ID NO: 541150 - DNA, 15 bp, Homo sapiens
ggtgcatgcatgtgt

SEQ ID NO: 541151 - DNA, 15 bp, Homo sapiens
tggtgcatgcatgtg

SEQ ID NO: 541152 - DNA, 15 bp, Homo sapiens
gtggtgcatgcatgt

SEQ ID NO: 541153 - DNA, 15 bp, Homo sapiens
ggtggtgcatgcatg

SEQ ID NO: 541154 - DNA, 15 bp, Homo sapiens
tggtggtgcatgcat

SEQ ID NO: 541155 - DNA, 15 bp, Homo sapiens
ttggtggtgcatgca

SEQ ID NO: 541156 - DNA, 15 bp, Homo sapiens
tttggtggtgcatgc

SEQ ID NO: 541157 - DNA, 15 bp, Homo sapiens
atttggtggtgcatg

SEQ ID NO: 541158 - DNA, 15 bp, Homo sapiens
aatttggtggtgcat

SEQ ID NO: 541159 - DNA, 15 bp, Homo sapiens
aaatttggtggtgca

SEQ ID NO: 541160 - DNA, 15 bp, Homo sapiens
gaaatttggtggtgc

SEQ ID NO: 541161 - DNA, 15 bp, Homo sapiens
ggaaatttggtggtg

SEQ ID NO: 541162 - DNA, 15 bp, Homo sapiens
gggaaatttggtggt

SEQ ID NO: 541163 - DNA, 15 bp, Homo sapiens
ggggaaatttggtgg

SEQ ID NO: 541164 - DNA, 15 bp, Homo sapiens
tggggaaatttggtg

SEQ ID NO: 541165 - DNA, 15 bp, Homo sapiens
gtggggaaatttggt

SEQ ID NO: 541166 - DNA, 15 bp, Homo sapiens
agtggggaaatttgg

SEQ ID NO: 541167 - DNA, 15 bp, Homo sapiens
gagtggggaaatttg

SEQ ID NO: 541168 - DNA, 15 bp, Homo sapiens
ggagtggggaaattt

SEQ ID NO: 541169 - DNA, 15 bp, Homo sapiens
aggagtggggaaatt

SEQ ID NO: 541170 - DNA, 15 bp, Homo sapiens
gaggagtggggaaat

SEQ ID NO: 541171 - DNA, 15 bp, Homo sapiens
agaggagtggggaaa

SEQ ID NO: 541172 - DNA, 15 bp, Homo sapiens
gagaggagtggggaa

SEQ ID NO: 541173 - DNA, 15 bp, Homo sapiens
ggagaggagtgggga

SEQ ID NO: 541174 - DNA, 15 bp, Homo sapiens
aggagaggagtgggg

SEQ ID NO: 541175 - DNA, 15 bp, Homo sapiens
caggagaggagtggg

SEQ ID NO: 541176 - DNA, 15 bp, Homo sapiens
ccaggagaggagtgg

SEQ ID NO: 541177 - DNA, 15 bp, Homo sapiens
cccaggagaggagtg

SEQ ID NO: 541178 - DNA, 15 bp, Homo sapiens
gcccaggagaggagt

SEQ ID NO: 541179 - DNA, 15 bp, Homo sapiens
agcccaggagaggag

SEQ ID NO: 541180 - DNA, 15 bp, Homo sapiens
aagcccaggagagga

SEQ ID NO: 541181 - DNA, 15 bp, Homo sapiens
gaagcccaggagagg

SEQ ID NO: 541182 - DNA, 15 bp, Homo sapiens
agaagcccaggagag

SEQ ID NO: 541183 - DNA, 15 bp, Homo sapiens
tagaagcccaggaga

SEQ ID NO: 541184 - DNA, 15 bp, Homo sapiens
ttagaagcccaggag

SEQ ID NO: 541185 - DNA, 15 bp, Homo sapiens
tttagaagcccagga

SEQ ID NO: 541186 - DNA, 15 bp, Homo sapiens
ctttagaagcccagg

SEQ ID NO: 541187 - DNA, 15 bp, Homo sapiens
tctttagaagcccag

SEQ ID NO: 541188 - DNA, 15 bp, Homo sapiens
ctctttagaagccca

SEQ ID NO: 541189 - DNA, 15 bp, Homo sapiens
cctctttagaagccc

SEQ ID NO: 541190 - DNA, 15 bp, Homo sapiens
tcctctttagaagcc

SEQ ID NO: 541191 - DNA, 15 bp, Homo sapiens
ttcctctttagaagc

SEQ ID NO: 541192 - DNA, 15 bp, Homo sapiens
tttcctctttagaag

SEQ ID NO: 541193 - DNA, 15 bp, Homo sapiens
ttttcctctttagaa

SEQ ID NO: 541194 - DNA, 15 bp, Homo sapiens
gttttcctctttaga

SEQ ID NO: 541195 - DNA, 15 bp, Homo sapiens
ggttttcctctttag

SEQ ID NO: 541196 - DNA, 15 bp, Homo sapiens
tggttttcctcttta

SEQ ID NO: 541197 - DNA, 15 bp, Homo sapiens
gtggttttcctcttt

SEQ ID NO: 541198 - DNA, 15 bp, Homo sapiens
tgtggttttcctctt

SEQ ID NO: 541199 - DNA, 15 bp, Homo sapiens
atgtggttttcctct

SEQ ID NO: 541200 - DNA, 15 bp, Homo sapiens
aatgtggttttcctc

SEQ ID NO: 541201 - DNA, 15 bp, Homo sapiens
caatgtggttttcct

SEQ ID NO: 541202 - DNA, 15 bp, Homo sapiens
acaatgtggttttcc

SEQ ID NO: 541203 - DNA, 15 bp, Homo sapiens
gacaatgtggttttc

SEQ ID NO: 541204 - DNA, 15 bp, Homo sapiens
ggacaatgtggtttt

SEQ ID NO: 541205 - DNA, 15 bp, Homo sapiens
aggacaatgtggttt

SEQ ID NO: 541206 - DNA, 15 bp, Homo sapiens
gaggacaatgtggtt

SEQ ID NO: 541207 - DNA, 15 bp, Homo sapiens
tgaggacaatgtggt

SEQ ID NO: 541208 - DNA, 15 bp, Homo sapiens
ttgaggacaatgtgg

SEQ ID NO: 541209 - DNA, 15 bp, Homo sapiens
attgaggacaatgtg

SEQ ID NO: 541210 - DNA, 15 bp, Homo sapiens
aattgaggacaatgt

SEQ ID NO: 541211 - DNA, 15 bp, Homo sapiens
caattgaggacaatg

SEQ ID NO: 541212 - DNA, 15 bp, Homo sapiens
acaattgaggacaat

SEQ ID NO: 541213 - DNA, 15 bp, Homo sapiens
gacaattgaggacaa

SEQ ID NO: 541214 - DNA, 15 bp, Homo sapiens
ggacaattgaggaca

SEQ ID NO: 541215 - DNA, 15 bp, Homo sapiens
aggacaattgaggac

SEQ ID NO: 541216 - DNA, 15 bp, Homo sapiens
caggacaattgagga

SEQ ID NO: 541217 - DNA, 15 bp, Homo sapiens
ccaggacaattgagg

SEQ ID NO: 541218 - DNA, 15 bp, Homo sapiens
tccaggacaattgag

SEQ ID NO: 541219 - DNA, 15 bp, Homo sapiens
ctccaggacaattga

SEQ ID NO: 541220 - DNA, 15 bp, Homo sapiens
gctccaggacaattg

SEQ ID NO: 541221 - DNA, 15 bp, Homo sapiens
agctccaggacaatt

SEQ ID NO: 541222 - DNA, 15 bp, Homo sapiens
tagctccaggacaat

SEQ ID NO: 541223 - DNA, 15 bp, Homo sapiens
ctagctccaggacaa

SEQ ID NO: 541224 - DNA, 15 bp, Homo sapiens
cctagctccaggaca

SEQ ID NO: 541225 - DNA, 15 bp, Homo sapiens
tcctagctccaggac

SEQ ID NO: 541226 - DNA, 15 bp, Homo sapiens
ctcctagctccagga

SEQ ID NO: 541227 - DNA, 15 bp, Homo sapiens
gctcctagctccagg

SEQ ID NO: 541228 - DNA, 15 bp, Homo sapiens
tgctcctagctccag

SEQ ID NO: 541229 - DNA, 15 bp, Homo sapiens
atgctcctagctcca

SEQ ID NO: 541230 - DNA, 15 bp, Homo sapiens
gatgctcctagctcc

SEQ ID NO: 541231 - DNA, 15 bp, Homo sapiens
agatgctcctagctc

SEQ ID NO: 541232 - DNA, 15 bp, Homo sapiens
cagatgctcctagct

SEQ ID NO: 541233 - DNA, 15 bp, Homo sapiens
ccagatgctcctagc

SEQ ID NO: 541234 - DNA, 15 bp, Homo sapiens
gccagatgctcctag

SEQ ID NO: 541235 - DNA, 15 bp, Homo sapiens
agccagatgctccta

SEQ ID NO: 541236 - DNA, 15 bp, Homo sapiens
aagccagatgctcct

SEQ ID NO: 541237 - DNA, 15 bp, Homo sapiens
taagccagatgctcc

SEQ ID NO: 541238 - DNA, 15 bp, Homo sapiens
ttaagccagatgctc

SEQ ID NO: 541239 - DNA, 15 bp, Homo sapiens
tttaagccagatgct

SEQ ID NO: 541240 - DNA, 15 bp, Homo sapiens
ctttaagccagatgc

SEQ ID NO: 541241 - DNA, 15 bp, Homo sapiens
actttaagccagatg

SEQ ID NO: 541242 - DNA, 15 bp, Homo sapiens
aactttaagccagat

SEQ ID NO: 541243 - DNA, 15 bp, Homo sapiens
caactttaagccaga

SEQ ID NO: 541244 - DNA, 15 bp, Homo sapiens
tcaactttaagccag

SEQ ID NO: 541245 - DNA, 15 bp, Homo sapiens
ttcaactttaagcca

SEQ ID NO: 541246 - DNA, 15 bp, Homo sapiens
gttcaactttaagcc

SEQ ID NO: 541247 - DNA, 15 bp, Homo sapiens
tgttcaactttaagc

SEQ ID NO: 541248 - DNA, 15 bp, Homo sapiens
ctgttcaactttaag

SEQ ID NO: 541249 - DNA, 15 bp, Homo sapiens
cctgttcaactttaa

SEQ ID NO: 541250 - DNA, 15 bp, Homo sapiens
tcctgttcaacttta

SEQ ID NO: 541251 - DNA, 15 bp, Homo sapiens
ctcctgttcaacttt

SEQ ID NO: 541252 - DNA, 15 bp, Homo sapiens
gctcctgttcaactt

SEQ ID NO: 541253 - DNA, 15 bp, Homo sapiens
ggctcctgttcaact

SEQ ID NO: 541254 - DNA, 15 bp, Homo sapiens
aggctcctgttcaac

SEQ ID NO: 541255 - DNA, 15 bp, Homo sapiens
gaggctcctgttcaa

SEQ ID NO: 541256 - DNA, 15 bp, Homo sapiens
ggaggctcctgttca

SEQ ID NO: 541257 - DNA, 15 bp, Homo sapiens
gggaggctcctgttc

SEQ ID NO: 541258 - DNA, 15 bp, Homo sapiens
tgggaggctcctgtt

SEQ ID NO: 541259 - DNA, 15 bp, Homo sapiens
ctgggaggctcctgt

SEQ ID NO: 541260 - DNA, 15 bp, Homo sapiens
gctgggaggctcctg

SEQ ID NO: 541261 - DNA, 15 bp, Homo sapiens
tgctgggaggctcct

SEQ ID NO: 541262 - DNA, 15 bp, Homo sapiens
atgctgggaggctcc

SEQ ID NO: 541263 - DNA, 15 bp, Homo sapiens
gatgctgggaggctc

SEQ ID NO: 541264 - DNA, 15 bp, Homo sapiens
ggatgctgggaggct

SEQ ID NO: 541265 - DNA, 15 bp, Homo sapiens
aggatgctgggaggc

SEQ ID NO: 541266 - DNA, 15 bp, Homo sapiens
aaggatgctgggagg

SEQ ID NO: 541267 - DNA, 15 bp, Homo sapiens
gaaggatgctgggag

SEQ ID NO: 541268 - DNA, 15 bp, Homo sapiens
agaaggatgctggga

SEQ ID NO: 541269 - DNA, 15 bp, Homo sapiens
cagaaggatgctggg

SEQ ID NO: 541270 - DNA, 15 bp, Homo sapiens
acagaaggatgctgg

SEQ ID NO: 541271 - DNA, 15 bp, Homo sapiens
cacagaaggatgctg

SEQ ID NO: 541272 - DNA, 15 bp, Homo sapiens
ccacagaaggatgct

SEQ ID NO: 541273 - DNA, 15 bp, Homo sapiens
tccacagaaggatgc

SEQ ID NO: 541274 - DNA, 15 bp, Homo sapiens
atccacagaaggatg

SEQ ID NO: 541275 - DNA, 15 bp, Homo sapiens
tatccacagaaggat

SEQ ID NO: 541276 - DNA, 15 bp, Homo sapiens
atatccacagaagga

SEQ ID NO: 541277 - DNA, 15 bp, Homo sapiens
gatatccacagaagg

SEQ ID NO: 541278 - DNA, 15 bp, Homo sapiens
ggatatccacagaag

SEQ ID NO: 541279 - DNA, 15 bp, Homo sapiens
gggatatccacagaa

SEQ ID NO: 541280 - DNA, 15 bp, Homo sapiens
tgggatatccacaga

SEQ ID NO: 541281 - DNA, 15 bp, Homo sapiens
ttgggatatccacag

SEQ ID NO: 541282 - DNA, 15 bp, Homo sapiens
tttgggatatccaca

SEQ ID NO: 541283 - DNA, 15 bp, Homo sapiens
ctttgggatatccac

SEQ ID NO: 541284 - DNA, 15 bp, Homo sapiens
cctttgggatatcca

SEQ ID NO: 541285 - DNA, 15 bp, Homo sapiens
gcctttgggatatcc

SEQ ID NO: 541286 - DNA, 15 bp, Homo sapiens
cgcctttgggatatc

SEQ ID NO: 541287 - DNA, 15 bp, Homo sapiens
tcgcctttgggatat

SEQ ID NO: 541288 - DNA, 15 bp, Homo sapiens
atcgcctttgggata

SEQ ID NO: 541289 - DNA, 15 bp, Homo sapiens
aatcgcctttgggat

SEQ ID NO: 541290 - DNA, 15 bp, Homo sapiens
caatcgcctttggga

SEQ ID NO: 541291 - DNA, 15 bp, Homo sapiens
ccaatcgcctttggg

SEQ ID NO: 541292 - DNA, 15 bp, Homo sapiens
accaatcgcctttgg

SEQ ID NO: 541293 - DNA, 15 bp, Homo sapiens
aaccaatcgcctttg

SEQ ID NO: 541294 - DNA, 15 bp, Homo sapiens
aaaccaatcgccttt

SEQ ID NO: 541295 - DNA, 15 bp, Homo sapiens
caaaccaatcgcctt

SEQ ID NO: 541296 - DNA, 15 bp, Homo sapiens
ccaaaccaatcgcct

SEQ ID NO: 541297 - DNA, 15 bp, Homo sapiens
cccaaaccaatcgcc

SEQ ID NO: 541298 - DNA, 15 bp, Homo sapiens
ccccaaaccaatcgc

SEQ ID NO: 541299 - DNA, 15 bp, Homo sapiens
gccccaaaccaatcg

SEQ ID NO: 541300 - DNA, 15 bp, Homo sapiens
ggccccaaaccaatc

SEQ ID NO: 541301 - DNA, 15 bp, Homo sapiens
cggccccaaaccaat

SEQ ID NO: 541302 - DNA, 15 bp, Homo sapiens
tcggccccaaaccaa

SEQ ID NO: 541303 - DNA, 15 bp, Homo sapiens
ctcggccccaaacca

SEQ ID NO: 541304 - DNA, 15 bp, Homo sapiens
actcggccccaaacc

SEQ ID NO: 541305 - DNA, 15 bp, Homo sapiens
cactcggccccaaac

SEQ ID NO: 541306 - DNA, 15 bp, Homo sapiens
ccactcggccccaaa

SEQ ID NO: 541307 - DNA, 15 bp, Homo sapiens
accactcggccccaa

SEQ ID NO: 541308 - DNA, 15 bp, Homo sapiens
caccactcggcccca

SEQ ID NO: 541309 - DNA, 15 bp, Homo sapiens
acaccactcggcccc

SEQ ID NO: 541310 - DNA, 15 bp, Homo sapiens
cacaccactcggccc

SEQ ID NO: 541311 - DNA, 15 bp, Homo sapiens
tcacaccactcggcc

SEQ ID NO: 541312 - DNA, 15 bp, Homo sapiens
ttcacaccactcggc

SEQ ID NO: 541313 - DNA, 15 bp, Homo sapiens
cttcacaccactcgg

SEQ ID NO: 541314 - DNA, 15 bp, Homo sapiens
ccttcacaccactcg

SEQ ID NO: 541315 - DNA, 15 bp, Homo sapiens
gccttcacaccactc

SEQ ID NO: 541316 - DNA, 15 bp, Homo sapiens
tgccttcacaccact

SEQ ID NO: 541317 - DNA, 15 bp, Homo sapiens
ctgccttcacaccac

SEQ ID NO: 541318 - DNA, 15 bp, Homo sapiens
cctgccttcacacca

SEQ ID NO: 541319 - DNA, 15 bp, Homo sapiens
tcctgccttcacacc

SEQ ID NO: 541320 - DNA, 15 bp, Homo sapiens
ttcctgccttcacac

SEQ ID NO: 541321 - DNA, 15 bp, Homo sapiens
cttcctgccttcaca

SEQ ID NO: 541322 - DNA, 15 bp, Homo sapiens
tcttcctgccttcac

SEQ ID NO: 541323 - DNA, 15 bp, Homo sapiens
gtcttcctgccttca

SEQ ID NO: 541324 - DNA, 15 bp, Homo sapiens
tgtcttcctgccttc

SEQ ID NO: 541325 - DNA, 15 bp, Homo sapiens
gtgtcttcctgcctt

SEQ ID NO: 541326 - DNA, 15 bp, Homo sapiens
cgtgtcttcctgcct

SEQ ID NO: 541327 - DNA, 15 bp, Homo sapiens
gcgtgtcttcctgcc

SEQ ID NO: 541328 - DNA, 15 bp, Homo sapiens
ggcgtgtcttcctgc

SEQ ID NO: 541329 - DNA, 15 bp, Homo sapiens
gggcgtgtcttcctg

SEQ ID NO: 541330 - DNA, 15 bp, Homo sapiens
tgggcgtgtcttcct

SEQ ID NO: 541331 - DNA, 15 bp, Homo sapiens
ctgggcgtgtcttcc

SEQ ID NO: 541332 - DNA, 15 bp, Homo sapiens
gctgggcgtgtcttc

SEQ ID NO: 541333 - DNA, 15 bp, Homo sapiens
ggctgggcgtgtctt

SEQ ID NO: 541334 - DNA, 15 bp, Homo sapiens
gggctgggcgtgtct

SEQ ID NO: 541335 - DNA, 15 bp, Homo sapiens
tgggctgggcgtgtc

SEQ ID NO: 541336 - DNA, 15 bp, Homo sapiens
ttgggctgggcgtgt

SEQ ID NO: 541337 - DNA, 15 bp, Homo sapiens
cttgggctgggcgtg

SEQ ID NO: 541338 - DNA, 15 bp, Homo sapiens
tcttgggctgggcgt

SEQ ID NO: 541339 - DNA, 15 bp, Homo sapiens
gtcttgggctgggcg

SEQ ID NO: 541340 - DNA, 15 bp, Homo sapiens
cgtcttgggctgggc

SEQ ID NO: 541341 - DNA, 15 bp, Homo sapiens
ccgtcttgggctggg

SEQ ID NO: 541342 - DNA, 15 bp, Homo sapiens
gccgtcttgggctgg

SEQ ID NO: 541343 - DNA, 15 bp, Homo sapiens
ggccgtcttgggctg

SEQ ID NO: 541344 - DNA, 15 bp, Homo sapiens
tggccgtcttgggct

SEQ ID NO: 541345 - DNA, 15 bp, Homo sapiens
gtggccgtcttgggc

SEQ ID NO: 541346 - DNA, 15 bp, Homo sapiens
agtggccgtcttggg

SEQ ID NO: 541347 - DNA, 15 bp, Homo sapiens
aagtggccgtcttgg

SEQ ID NO: 541348 - DNA, 15 bp, Homo sapiens
gaagtggccgtcttg

SEQ ID NO: 541349 - DNA, 15 bp, Homo sapiens
agaagtggccgtctt

SEQ ID NO: 541350 - DNA, 15 bp, Homo sapiens
cagaagtggccgtct

SEQ ID NO: 541351 - DNA, 15 bp, Homo sapiens
ccagaagtggccgtc

SEQ ID NO: 541352 - DNA, 15 bp, Homo sapiens
tccagaagtggccgt

SEQ ID NO: 541353 - DNA, 15 bp, Homo sapiens
ttccagaagtggccg

SEQ ID NO: 541354 - DNA, 15 bp, Homo sapiens
gttccagaagtggcc

SEQ ID NO: 541355 - DNA, 15 bp, Homo sapiens
ggttccagaagtggc

SEQ ID NO: 541356 - DNA, 15 bp, Homo sapiens
cggttccagaagtgg

SEQ ID NO: 541357 - DNA, 15 bp, Homo sapiens
gcggttccagaagtg

SEQ ID NO: 541358 - DNA, 15 bp, Homo sapiens
ggcggttccagaagt

SEQ ID NO: 541359 - DNA, 15 bp, Homo sapiens
gggcggttccagaag

SEQ ID NO: 541360 - DNA, 15 bp, Homo sapiens
tgggcggttccagaa

SEQ ID NO: 541361 - DNA, 15 bp, Homo sapiens
ctgggcggttccaga

SEQ ID NO: 541362 - DNA, 15 bp, Homo sapiens
cctgggcggttccag

SEQ ID NO: 541363 - DNA, 15 bp, Homo sapiens
gcctgggcggttcca

SEQ ID NO: 541364 - DNA, 15 bp, Homo sapiens
agcctgggcggttcc

SEQ ID NO: 541365 - DNA, 15 bp, Homo sapiens
cagcctgggcggttc

SEQ ID NO: 541366 - DNA, 15 bp, Homo sapiens
ccagcctgggcggtt

SEQ ID NO: 541367 - DNA, 15 bp, Homo sapiens
tccagcctgggcggt

SEQ ID NO: 541368 - DNA, 15 bp, Homo sapiens
ctccagcctgggcgg

SEQ ID NO: 541369 - DNA, 15 bp, Homo sapiens
gctccagcctgggcg

SEQ ID NO: 541370 - DNA, 15 bp, Homo sapiens
tgctccagcctgggc

SEQ ID NO: 541371 - DNA, 15 bp, Homo sapiens
ctgctccagcctggg

SEQ ID NO: 541372 - DNA, 15 bp, Homo sapiens
gctgctccagcctgg

SEQ ID NO: 541373 - DNA, 15 bp, Homo sapiens
cgctgctccagcctg

SEQ ID NO: 541374 - DNA, 15 bp, Homo sapiens
ccgctgctccagcct

SEQ ID NO: 541375 - DNA, 15 bp, Homo sapiens
gccgctgctccagcc

SEQ ID NO: 541376 - DNA, 15 bp, Homo sapiens
ggccgctgctccagc

SEQ ID NO: 541377 - DNA, 15 bp, Homo sapiens
tggccgctgctccag

SEQ ID NO: 541378 - DNA, 15 bp, Homo sapiens
ttggccgctgctcca

SEQ ID NO: 541379 - DNA, 15 bp, Homo sapiens
cttggccgctgctcc

SEQ ID NO: 541380 - DNA, 15 bp, Homo sapiens
acttggccgctgctc

SEQ ID NO: 541381 - DNA, 15 bp, Homo sapiens
cacttggccgctgct

SEQ ID NO: 541382 - DNA, 15 bp, Homo sapiens
gcacttggccgctgc

SEQ ID NO: 541383 - DNA, 15 bp, Homo sapiens
ggcacttggccgctg

SEQ ID NO: 541384 - DNA, 15 bp, Homo sapiens
aggcacttggccgct

SEQ ID NO: 541385 - DNA, 15 bp, Homo sapiens
aaggcacttggccgc

SEQ ID NO: 541386 - DNA, 15 bp, Homo sapiens
taaggcacttggccg

SEQ ID NO: 541387 - DNA, 15 bp, Homo sapiens
ctaaggcacttggcc

SEQ ID NO: 541388 - DNA, 15 bp, Homo sapiens
gctaaggcacttggc

SEQ ID NO: 541389 - DNA, 15 bp, Homo sapiens
tgctaaggcacttgg

SEQ ID NO: 541390 - DNA, 15 bp, Homo sapiens
atgctaaggcacttg

SEQ ID NO: 541391 - DNA, 15 bp, Homo sapiens
catgctaaggcactt

SEQ ID NO: 541392 - DNA, 15 bp, Homo sapiens
ccatgctaaggcact

SEQ ID NO: 541393 - DNA, 15 bp, Homo sapiens
tccatgctaaggcac

SEQ ID NO: 541394 - DNA, 15 bp, Homo sapiens
ttccatgctaaggca

SEQ ID NO: 541395 - DNA, 15 bp, Homo sapiens
cttccatgctaaggc

SEQ ID NO: 541396 - DNA, 15 bp, Homo sapiens
tcttccatgctaagg

SEQ ID NO: 541397 - DNA, 15 bp, Homo sapiens
ttcttccatgctaag

SEQ ID NO: 541398 - DNA, 15 bp, Homo sapiens
cttcttccatgctaa

SEQ ID NO: 541399 - DNA, 15 bp, Homo sapiens
tcttcttccatgcta

SEQ ID NO: 541400 - DNA, 15 bp, Homo sapiens
ctcttcttccatgct

SEQ ID NO: 541401 - DNA, 15 bp, Homo sapiens
tctcttcttccatgc

SEQ ID NO: 541402 - DNA, 15 bp, Homo sapiens
ctctcttcttccatg

SEQ ID NO: 541403 - DNA, 15 bp, Homo sapiens
gctctcttcttccat

SEQ ID NO: 541404 - DNA, 15 bp, Homo sapiens
ggctctcttcttcca

SEQ ID NO: 541405 - DNA, 15 bp, Homo sapiens
aggctctcttcttcc

SEQ ID NO: 541406 - DNA, 15 bp, Homo sapiens
caggctctcttcttc

SEQ ID NO: 541407 - DNA, 15 bp, Homo sapiens
acaggctctcttctt

SEQ ID NO: 541408 - DNA, 15 bp, Homo sapiens
cacaggctctcttct

SEQ ID NO: 541409 - DNA, 15 bp, Homo sapiens
acacaggctctcttc

SEQ ID NO: 541410 - DNA, 15 bp, Homo sapiens
aacacaggctctctt

SEQ ID NO: 541411 - DNA, 15 bp, Homo sapiens
gaacacaggctctct

SEQ ID NO: 541412 - DNA, 15 bp, Homo sapiens
tgaacacaggctctc

SEQ ID NO: 541413 - DNA, 15 bp, Homo sapiens
ctgaacacaggctct

SEQ ID NO: 541414 - DNA, 15 bp, Homo sapiens
cctgaacacaggctc

SEQ ID NO: 541415 - DNA, 15 bp, Homo sapiens
ccctgaacacaggct

SEQ ID NO: 541416 - DNA, 15 bp, Homo sapiens
cccctgaacacaggc

SEQ ID NO: 541417 - DNA, 15 bp, Homo sapiens
tcccctgaacacagg

SEQ ID NO: 541418 - DNA, 15 bp, Homo sapiens
gtcccctgaacacag

SEQ ID NO: 541419 - DNA, 15 bp, Homo sapiens
ggtcccctgaacaca

SEQ ID NO: 541420 - DNA, 15 bp, Homo sapiens
tggtcccctgaacac

SEQ ID NO: 541421 - DNA, 15 bp, Homo sapiens
ctggtcccctgaaca

SEQ ID NO: 541422 - DNA, 15 bp, Homo sapiens
cctggtcccctgaac

SEQ ID NO: 541423 - DNA, 15 bp, Homo sapiens
gcctggtcccctgaa

SEQ ID NO: 541424 - DNA, 15 bp, Homo sapiens
cgcctggtcccctga

SEQ ID NO: 541425 - DNA, 15 bp, Homo sapiens
ccgcctggtcccctg

SEQ ID NO: 541426 - DNA, 15 bp, Homo sapiens
cccgcctggtcccct

SEQ ID NO: 541427 - DNA, 15 bp, Homo sapiens
acccgcctggtcccc

SEQ ID NO: 541428 - DNA, 15 bp, Homo sapiens
cacccgcctggtccc

SEQ ID NO: 541429 - DNA, 15 bp, Homo sapiens
tcacccgcctggtcc

SEQ ID NO: 541430 - DNA, 15 bp, Homo sapiens
ctcacccgcctggtc

SEQ ID NO: 541431 - DNA, 15 bp, Homo sapiens
tctcacccgcctggt

SEQ ID NO: 541432 - DNA, 15 bp, Homo sapiens
gtctcacccgcctgg

SEQ ID NO: 541433 - DNA, 15 bp, Homo sapiens
tgtctcacccgcctg

SEQ ID NO: 541434 - DNA, 15 bp, Homo sapiens
gtgtctcacccgcct

SEQ ID NO: 541435 - DNA, 15 bp, Homo sapiens
tgtgtctcacccgcc

SEQ ID NO: 541436 - DNA, 15 bp, Homo sapiens
gtgtgtctcacccgc

SEQ ID NO: 541437 - DNA, 15 bp, Homo sapiens
cgtgtgtctcacccg

SEQ ID NO: 541438 - DNA, 15 bp, Homo sapiens
gcgtgtgtctcaccc

SEQ ID NO: 541439 - DNA, 15 bp, Homo sapiens
tgcgtgtgtctcacc

SEQ ID NO: 541440 - DNA, 15 bp, Homo sapiens
atgcgtgtgtctcac

SEQ ID NO: 541441 - DNA, 15 bp, Homo sapiens
tatgcgtgtgtctca

SEQ ID NO: 541442 - DNA, 15 bp, Homo sapiens
ttatgcgtgtgtctc

SEQ ID NO: 541443 - DNA, 15 bp, Homo sapiens
cttatgcgtgtgtct

SEQ ID NO: 541444 - DNA, 15 bp, Homo sapiens
gcttatgcgtgtgtc

SEQ ID NO: 541445 - DNA, 15 bp, Homo sapiens
tgcttatgcgtgtgt

SEQ ID NO: 541446 - DNA, 15 bp, Homo sapiens
ctgcttatgcgtgtg

SEQ ID NO: 541447 - DNA, 15 bp, Homo sapiens
cctgcttatgcgtgt

SEQ ID NO: 541448 - DNA, 15 bp, Homo sapiens
ccctgcttatgcgtg

SEQ ID NO: 541449 - DNA, 15 bp, Homo sapiens
tccctgcttatgcgt

SEQ ID NO: 541450 - DNA, 15 bp, Homo sapiens
gtccctgcttatgcg

SEQ ID NO: 541451 - DNA, 15 bp, Homo sapiens
agtccctgcttatgc

SEQ ID NO: 541452 - DNA, 15 bp, Homo sapiens
cagtccctgcttatg

SEQ ID NO: 541453 - DNA, 15 bp, Homo sapiens
gcagtccctgcttat

SEQ ID NO: 541454 - DNA, 15 bp, Homo sapiens
ggcagtccctgctta

SEQ ID NO: 541455 - DNA, 15 bp, Homo sapiens
gggcagtccctgctt

SEQ ID NO: 541456 - DNA, 15 bp, Homo sapiens
cgggcagtccctgct

SEQ ID NO: 541457 - DNA, 15 bp, Homo sapiens
gcgggcagtccctgc

SEQ ID NO: 541458 - DNA, 15 bp, Homo sapiens
agcgggcagtccctg

SEQ ID NO: 541459 - DNA, 15 bp, Homo sapiens
cagcgggcagtccct

SEQ ID NO: 541460 - DNA, 15 bp, Homo sapiens
ccagcgggcagtccc

SEQ ID NO: 541461 - DNA, 15 bp, Homo sapiens
accagcgggcagtcc

SEQ ID NO: 541462 - DNA, 15 bp, Homo sapiens
caccagcgggcagtc

SEQ ID NO: 541463 - DNA, 15 bp, Homo sapiens
acaccagcgggcagt

SEQ ID NO: 541464 - DNA, 15 bp, Homo sapiens
aacaccagcgggcag

SEQ ID NO: 541465 - DNA, 15 bp, Homo sapiens
aaacaccagcgggca

SEQ ID NO: 541466 - DNA, 15 bp, Homo sapiens
aaaacaccagcgggc

SEQ ID NO: 541467 - DNA, 15 bp, Homo sapiens
gaaaacaccagcggg

SEQ ID NO: 541468 - DNA, 15 bp, Homo sapiens
agaaaacaccagcgg

SEQ ID NO: 541469 - DNA, 15 bp, Homo sapiens
aagaaaacaccagcg

SEQ ID NO: 541470 - DNA, 15 bp, Homo sapiens
aaagaaaacaccagc

SEQ ID NO: 541471 - DNA, 15 bp, Homo sapiens
caaagaaaacaccag

SEQ ID NO: 541472 - DNA, 15 bp, Homo sapiens
ccaaagaaaacacca

SEQ ID NO: 541473 - DNA, 15 bp, Homo sapiens
gccaaagaaaacacc

SEQ ID NO: 541474 - DNA, 15 bp, Homo sapiens
agccaaagaaaacac

SEQ ID NO: 541475 - DNA, 15 bp, Homo sapiens
tagccaaagaaaaca

SEQ ID NO: 541476 - DNA, 15 bp, Homo sapiens
gtagccaaagaaaac

SEQ ID NO: 541477 - DNA, 15 bp, Homo sapiens
tgtagccaaagaaaa

SEQ ID NO: 541478 - DNA, 15 bp, Homo sapiens
atgtagccaaagaaa

SEQ ID NO: 541479 - DNA, 15 bp, Homo sapiens
catgtagccaaagaa

SEQ ID NO: 541480 - DNA, 15 bp, Homo sapiens
tcatgtagccaaaga

SEQ ID NO: 541481 - DNA, 15 bp, Homo sapiens
ctcatgtagccaaag

SEQ ID NO: 541482 - DNA, 15 bp, Homo sapiens
actcatgtagccaaa

SEQ ID NO: 541483 - DNA, 15 bp, Homo sapiens
gactcatgtagccaa

SEQ ID NO: 541484 - DNA, 15 bp, Homo sapiens
agactcatgtagcca

SEQ ID NO: 541485 - DNA, 15 bp, Homo sapiens
cagactcatgtagcc

SEQ ID NO: 541486 - DNA, 15 bp, Homo sapiens
acagactcatgtagc

SEQ ID NO: 541487 - DNA, 15 bp, Homo sapiens
cacagactcatgtag

SEQ ID NO: 541488 - DNA, 15 bp, Homo sapiens
acacagactcatgta

SEQ ID NO: 541489 - DNA, 15 bp, Homo sapiens
cacacagactcatgt

SEQ ID NO: 541490 - DNA, 15 bp, Homo sapiens
gcacacagactcatg

SEQ ID NO: 541491 - DNA, 15 bp, Homo sapiens
tgcacacagactcat

SEQ ID NO: 541492 - DNA, 15 bp, Homo sapiens
ttgcacacagactca

SEQ ID NO: 541493 - DNA, 15 bp, Homo sapiens
gttgcacacagactc

SEQ ID NO: 541494 - DNA, 15 bp, Homo sapiens
agttgcacacagact

SEQ ID NO: 541495 - DNA, 15 bp, Homo sapiens
aagttgcacacagac

SEQ ID NO: 541496 - DNA, 15 bp, Homo sapiens
caagttgcacacaga

SEQ ID NO: 541497 - DNA, 15 bp, Homo sapiens
tcaagttgcacacag

SEQ ID NO: 541498 - DNA, 15 bp, Homo sapiens
ttcaagttgcacaca

SEQ ID NO: 541499 - DNA, 15 bp, Homo sapiens
attcaagttgcacac

SEQ ID NO: 541500 - DNA, 15 bp, Homo sapiens
cattcaagttgcaca

SEQ ID NO: 541501 - DNA, 15 bp, Homo sapiens
ccattcaagttgcac

SEQ ID NO: 541502 - DNA, 15 bp, Homo sapiens
cccattcaagttgca

SEQ ID NO: 541503 - DNA, 15 bp, Homo sapiens
tcccattcaagttgc

SEQ ID NO: 541504 - DNA, 15 bp, Homo sapiens
ctcccattcaagttg

SEQ ID NO: 541505 - DNA, 15 bp, Homo sapiens
cctcccattcaagtt

SEQ ID NO: 541506 - DNA, 15 bp, Homo sapiens
gcctcccattcaagt

SEQ ID NO: 541507 - DNA, 15 bp, Homo sapiens
ggcctcccattcaag

SEQ ID NO: 541508 - DNA, 15 bp, Homo sapiens
aggcctcccattcaa

SEQ ID NO: 541509 - DNA, 15 bp, Homo sapiens
aaggcctcccattca

SEQ ID NO: 541510 - DNA, 15 bp, Homo sapiens
caaggcctcccattc

SEQ ID NO: 541511 - DNA, 15 bp, Homo sapiens
acaaggcctcccatt

SEQ ID NO: 541512 - DNA, 15 bp, Homo sapiens
cacaaggcctcccat

SEQ ID NO: 541513 - DNA, 15 bp, Homo sapiens
gcacaaggcctccca

SEQ ID NO: 541514 - DNA, 15 bp, Homo sapiens
agcacaaggcctccc

SEQ ID NO: 541515 - DNA, 15 bp, Homo sapiens
aagcacaaggcctcc

SEQ ID NO: 541516 - DNA, 15 bp, Homo sapiens
aaagcacaaggcctc

SEQ ID NO: 541517 - DNA, 15 bp, Homo sapiens
aaaagcacaaggcct

SEQ ID NO: 541518 - DNA, 15 bp, Homo sapiens
taaaagcacaaggcc

SEQ ID NO: 541519 - DNA, 15 bp, Homo sapiens
ataaaagcacaaggc

SEQ ID NO: 541520 - DNA, 15 bp, Homo sapiens
aataaaagcacaagg

SEQ ID NO: 541521 - DNA, 15 bp, Homo sapiens
aaataaaagcacaag

SEQ ID NO: 541522 - DNA, 15 bp, Homo sapiens
aaaataaaagcacaa

SEQ ID NO: 541523 - DNA, 15 bp, Homo sapiens
aaaaataaaagcaca

SEQ ID NO: 541524 - DNA, 15 bp, Homo sapiens
aaaaaataaaagcac

SEQ ID NO: 541525 - DNA, 15 bp, Homo sapiens
aaaaaaataaaagca

SEQ ID NO: 541526 - DNA, 15 bp, Homo sapiens
aaaaaaaataaaagc

SEQ ID NO: 541527 - DNA, 15 bp, Homo sapiens
aaaaaaaaataaaag

SEQ ID NO: 541528 - DNA, 15 bp, Homo sapiens
aaaaaaaaaataaaa

SEQ ID NO: 541529 - DNA, 15 bp, Homo sapiens
aaaaaaaaaaataaa

SEQ ID NO: 541530 - DNA, 15 bp, Homo sapiens
aaaaaaaaaaaataa

SEQ ID NO: 541531 - DNA, 15 bp, Homo sapiens
taaaaaaaaaaaata

SEQ ID NO: 541532 - DNA, 15 bp, Homo sapiens
ttaaaaaaaaaaaat

SEQ ID NO: 541533 - DNA, 15 bp, Homo sapiens
cattaaaaaaaaaaa

SEQ ID NO: 541534 - DNA, 15 bp, Homo sapiens
acattaaaaaaaaaa

SEQ ID NO: 541535 - DNA, 15 bp, Homo sapiens
cacattaaaaaaaaa

SEQ ID NO: 541536 - DNA, 15 bp, Homo sapiens
gcacattaaaaaaaa

SEQ ID NO: 541537 - DNA, 15 bp, Homo sapiens
agcacattaaaaaaa

SEQ ID NO: 541538 - DNA, 15 bp, Homo sapiens
aagcacattaaaaaa

SEQ ID NO: 541539 - DNA, 15 bp, Homo sapiens
aaagcacattaaaaa

SEQ ID NO: 541540 - DNA, 15 bp, Homo sapiens
aaaagcacattaaaa

SEQ ID NO: 541541 - DNA, 15 bp, Homo sapiens
aaaaagcacattaaa

SEQ ID NO: 541542 - DNA, 15 bp, Homo sapiens
caaaaagcacattaa

SEQ ID NO: 541543 - DNA, 15 bp, Homo sapiens
ccaaaaagcacatta

SEQ ID NO: 541544 - DNA, 15 bp, Homo sapiens
accaaaaagcacatt

SEQ ID NO: 541545 - DNA, 15 bp, Homo sapiens
aaccaaaaagcacat

SEQ ID NO: 541546 - DNA, 15 bp, Homo sapiens
taaccaaaaagcaca

SEQ ID NO: 541547 - DNA, 15 bp, Homo sapiens
ttaaccaaaaagcac

SEQ ID NO: 541548 - DNA, 15 bp, Homo sapiens
gttaaccaaaaagca

SEQ ID NO: 541549 - DNA, 15 bp, Homo sapiens
tgttaaccaaaaagc

SEQ ID NO: 541550 - DNA, 15 bp, Homo sapiens
ttgttaaccaaaaag

SEQ ID NO: 541551 - DNA, 15 bp, Homo sapiens
gttgttaaccaaaaa

SEQ ID NO: 541552 - DNA, 15 bp, Homo sapiens
tgttgttaaccaaaa

SEQ ID NO: 541553 - DNA, 15 bp, Homo sapiens
ctgttgttaaccaaa

SEQ ID NO: 541554 - DNA, 15 bp, Homo sapiens
tctgttgttaaccaa

SEQ ID NO: 541555 - DNA, 15 bp, Homo sapiens
ttctgttgttaacca

SEQ ID NO: 541556 - DNA, 15 bp, Homo sapiens
cttctgttgttaacc

SEQ ID NO: 541557 - DNA, 15 bp, Homo sapiens
acttctgttgttaac

SEQ ID NO: 541558 - DNA, 15 bp, Homo sapiens
gacttctgttgttaa

SEQ ID NO: 541559 - DNA, 15 bp, Homo sapiens
ggacttctgttgtta

SEQ ID NO: 541560 - DNA, 15 bp, Homo sapiens
gggacttctgttgtt

SEQ ID NO: 541561 - DNA, 15 bp, Homo sapiens
agggacttctgttgt

SEQ ID NO: 541562 - DNA, 15 bp, Homo sapiens
tagggacttctgttg

SEQ ID NO: 541563 - DNA, 15 bp, Homo sapiens
gtagggacttctgtt

SEQ ID NO: 541564 - DNA, 15 bp, Homo sapiens
tgtagggacttctgt

SEQ ID NO: 541565 - DNA, 15 bp, Homo sapiens
ctgtagggacttctg

SEQ ID NO: 541566 - DNA, 15 bp, Homo sapiens
actgtagggacttct

SEQ ID NO: 541567 - DNA, 15 bp, Homo sapiens
aactgtagggacttc

SEQ ID NO: 541568 - DNA, 15 bp, Homo sapiens
caactgtagggactt

SEQ ID NO: 541569 - DNA, 15 bp, Homo sapiens
ccaactgtagggact

SEQ ID NO: 541570 - DNA, 15 bp, Homo sapiens
gccaactgtagggac

SEQ ID NO: 541571 - DNA, 15 bp, Homo sapiens
ggccaactgtaggga

SEQ ID NO: 541572 - DNA, 15 bp, Homo sapiens
gggccaactgtaggg

SEQ ID NO: 541573 - DNA, 15 bp, Homo sapiens
agggccaactgtagg

SEQ ID NO: 541574 - DNA, 15 bp, Homo sapiens
gagggccaactgtag

SEQ ID NO: 541575 - DNA, 15 bp, Homo sapiens
agagggccaactgta

SEQ ID NO: 541576 - DNA, 15 bp, Homo sapiens
cagagggccaactgt

SEQ ID NO: 541577 - DNA, 15 bp, Homo sapiens
acagagggccaactg

SEQ ID NO: 541578 - DNA, 15 bp, Homo sapiens
cacagagggccaact

SEQ ID NO: 541579 - DNA, 15 bp, Homo sapiens
acacagagggccaac

SEQ ID NO: 541580 - DNA, 15 bp, Homo sapiens
gacacagagggccaa

SEQ ID NO: 541581 - DNA, 15 bp, Homo sapiens
agacacagagggcca

SEQ ID NO: 541582 - DNA, 15 bp, Homo sapiens
cagacacagagggcc

SEQ ID NO: 541583 - DNA, 15 bp, Homo sapiens
gcagacacagagggc

SEQ ID NO: 541584 - DNA, 15 bp, Homo sapiens
tgcagacacagaggg

SEQ ID NO: 541585 - DNA, 15 bp, Homo sapiens
ctgcagacacagagg

SEQ ID NO: 541586 - DNA, 15 bp, Homo sapiens
cctgcagacacagag

SEQ ID NO: 541587 - DNA, 15 bp, Homo sapiens
acctgcagacacaga

SEQ ID NO: 541588 - DNA, 15 bp, Homo sapiens
aacctgcagacacag

SEQ ID NO: 541589 - DNA, 15 bp, Homo sapiens
gaacctgcagacaca

SEQ ID NO: 541590 - DNA, 15 bp, Homo sapiens
agaacctgcagacac

SEQ ID NO: 541591 - DNA, 15 bp, Homo sapiens
cagaacctgcagaca

SEQ ID NO: 541592 - DNA, 15 bp, Homo sapiens
gcagaacctgcagac

SEQ ID NO: 541593 - DNA, 15 bp, Homo sapiens
tgcagaacctgcaga

SEQ ID NO: 541594 - DNA, 15 bp, Homo sapiens
atgcagaacctgcag

SEQ ID NO: 541595 - DNA, 15 bp, Homo sapiens
gatgcagaacctgca

SEQ ID NO: 541596 - DNA, 15 bp, Homo sapiens
ggatgcagaacctgc

SEQ ID NO: 541597 - DNA, 15 bp, Homo sapiens
cggatgcagaacctg

SEQ ID NO: 541598 - DNA, 15 bp, Homo sapiens
acggatgcagaacct

SEQ ID NO: 541599 - DNA, 15 bp, Homo sapiens
cacggatgcagaacc

SEQ ID NO: 541600 - DNA, 15 bp, Homo sapiens
ccacggatgcagaac

SEQ ID NO: 541601 - DNA, 15 bp, Homo sapiens
tccacggatgcagaa

SEQ ID NO: 541602 - DNA, 15 bp, Homo sapiens
atccacggatgcaga

SEQ ID NO: 541603 - DNA, 15 bp, Homo sapiens
aatccacggatgcag

SEQ ID NO: 541604 - DNA, 15 bp, Homo sapiens
gaatccacggatgca

SEQ ID NO: 541605 - DNA, 15 bp, Homo sapiens
tgaatccacggatgc

SEQ ID NO: 541606 - DNA, 15 bp, Homo sapiens
ttgaatccacggatg

SEQ ID NO: 541607 - DNA, 15 bp, Homo sapiens
attgaatccacggat

SEQ ID NO: 541608 - DNA, 15 bp, Homo sapiens
gattgaatccacgga

SEQ ID NO: 541609 - DNA, 15 bp, Homo sapiens
tgattgaatccacgg

SEQ ID NO: 541610 - DNA, 15 bp, Homo sapiens
ttgattgaatccacg

SEQ ID NO: 541611 - DNA, 15 bp, Homo sapiens
gttgattgaatccac

SEQ ID NO: 541612 - DNA, 15 bp, Homo sapiens
agttgattgaatcca

SEQ ID NO: 541613 - DNA, 15 bp, Homo sapiens
cagttgattgaatcc

SEQ ID NO: 541614 - DNA, 15 bp, Homo sapiens
gcagttgattgaatc

SEQ ID NO: 541615 - DNA, 15 bp, Homo sapiens
tgcagttgattgaat

SEQ ID NO: 541616 - DNA, 15 bp, Homo sapiens
ctgcagttgattgaa

SEQ ID NO: 541617 - DNA, 15 bp, Homo sapiens
tctgcagttgattga

SEQ ID NO: 541618 - DNA, 15 bp, Homo sapiens
atctgcagttgattg

SEQ ID NO: 541619 - DNA, 15 bp, Homo sapiens
catctgcagttgatt

SEQ ID NO: 541620 - DNA, 15 bp, Homo sapiens
tcatctgcagttgat

SEQ ID NO: 541621 - DNA, 15 bp, Homo sapiens
ttcatctgcagttga

SEQ ID NO: 541622 - DNA, 15 bp, Homo sapiens
tttcatctgcagttg

SEQ ID NO: 541623 - DNA, 15 bp, Homo sapiens
ttttcatctgcagtt

SEQ ID NO: 541624 - DNA, 15 bp, Homo sapiens
cttttcatctgcagt

SEQ ID NO: 541625 - DNA, 15 bp, Homo sapiens
acttttcatctgcag

SEQ ID NO: 541626 - DNA, 15 bp, Homo sapiens
aacttttcatctgca

SEQ ID NO: 541627 - DNA, 15 bp, Homo sapiens
aaacttttcatctgc

SEQ ID NO: 541628 - DNA, 15 bp, Homo sapiens
aaaacttttcatctg

SEQ ID NO: 541629 - DNA, 15 bp, Homo sapiens
gaaaacttttcatct

SEQ ID NO: 541630 - DNA, 15 bp, Homo sapiens
tgaaaacttttcatc

SEQ ID NO: 541631 - DNA, 15 bp, Homo sapiens
ctgaaaacttttcat

SEQ ID NO: 541632 - DNA, 15 bp, Homo sapiens
tctgaaaacttttca

SEQ ID NO: 541633 - DNA, 15 bp, Homo sapiens
ttctgaaaacttttc

SEQ ID NO: 541634 - DNA, 15 bp, Homo sapiens
tttctgaaaactttt

SEQ ID NO: 541635 - DNA, 15 bp, Homo sapiens
ttttctgaaaacttt

SEQ ID NO: 541636 - DNA, 15 bp, Homo sapiens
tttttctgaaaactt

SEQ ID NO: 541637 - DNA, 15 bp, Homo sapiens
ttttttctgaaaact

SEQ ID NO: 541638 - DNA, 15 bp, Homo sapiens
attttttctgaaaac

SEQ ID NO: 541639 - DNA, 15 bp, Homo sapiens
gattttttctgaaaa

SEQ ID NO: 541640 - DNA, 15 bp, Homo sapiens
ggattttttctgaaa

SEQ ID NO: 541641 - DNA, 15 bp, Homo sapiens
gggattttttctgaa

SEQ ID NO: 541642 - DNA, 15 bp, Homo sapiens
ggggattttttctga

SEQ ID NO: 541643 - DNA, 15 bp, Homo sapiens
gggggattttttctg

SEQ ID NO: 541644 - DNA, 15 bp, Homo sapiens
ggggggattttttct

SEQ ID NO: 541645 - DNA, 15 bp, Homo sapiens
tggggggattttttc

SEQ ID NO: 541646 - DNA, 15 bp, Homo sapiens
ttggggggatttttt

SEQ ID NO: 541647 - DNA, 15 bp, Homo sapiens
tttggggggattttt

SEQ ID NO: 541648 - DNA, 15 bp, Homo sapiens
ttttggggggatttt

SEQ ID NO: 541649 - DNA, 15 bp, Homo sapiens
attttggggggattt

SEQ ID NO: 541650 - DNA, 15 bp, Homo sapiens
tattttggggggatt

SEQ ID NO: 541651 - DNA, 15 bp, Homo sapiens
ttattttggggggat

SEQ ID NO: 541652 - DNA, 15 bp, Homo sapiens
gttattttgggggga

SEQ ID NO: 541653 - DNA, 15 bp, Homo sapiens
tgttattttgggggg

SEQ ID NO: 541654 - DNA, 15 bp, Homo sapiens
ttgttattttggggg

SEQ ID NO: 541655 - DNA, 15 bp, Homo sapiens
attgttattttgggg

SEQ ID NO: 541656 - DNA, 15 bp, Homo sapiens
tattgttattttggg

SEQ ID NO: 541657 - DNA, 15 bp, Homo sapiens
gtattgttattttgg

SEQ ID NO: 541658 - DNA, 15 bp, Homo sapiens
tgtattgttattttg

SEQ ID NO: 541659 - DNA, 15 bp, Homo sapiens
ttgtattgttatttt

SEQ ID NO: 541660 - DNA, 15 bp, Homo sapiens
gttgtattgttattt

SEQ ID NO: 541661 - DNA, 15 bp, Homo sapiens
agttgtattgttatt

SEQ ID NO: 541662 - DNA, 15 bp, Homo sapiens
tagttgtattgttat

SEQ ID NO: 541663 - DNA, 15 bp, Homo sapiens
ttagttgtattgtta

SEQ ID NO: 541664 - DNA, 15 bp, Homo sapiens
tttagttgtattgtt

SEQ ID NO: 541665 - DNA, 15 bp, Homo sapiens
ttttagttgtattgt

SEQ ID NO: 541666 - DNA, 15 bp, Homo sapiens
tttttagttgtattg

SEQ ID NO: 541667 - DNA, 15 bp, Homo sapiens
ttttttagttgtatt

SEQ ID NO: 541668 - DNA, 15 bp, Homo sapiens
tttttttagttgtat

SEQ ID NO: 541669 - DNA, 15 bp, Homo sapiens
ctttttttagttgta

SEQ ID NO: 541670 - DNA, 15 bp, Homo sapiens
tctttttttagttgt

SEQ ID NO: 541671 - DNA, 15 bp, Homo sapiens
gtctttttttagttg

SEQ ID NO: 541672 - DNA, 15 bp, Homo sapiens
tgtctttttttagtt

SEQ ID NO: 541673 - DNA, 15 bp, Homo sapiens
atgtctttttttagt

SEQ ID NO: 541674 - DNA, 15 bp, Homo sapiens
tatgtctttttttag

SEQ ID NO: 541675 - DNA, 15 bp, Homo sapiens
ttatgtcttttttta

SEQ ID NO: 541676 - DNA, 15 bp, Homo sapiens
tttatgtcttttttt

SEQ ID NO: 541677 - DNA, 15 bp, Homo sapiens
ttttatgtctttttt

SEQ ID NO: 541678 - DNA, 15 bp, Homo sapiens
tttttatgtcttttt

SEQ ID NO: 541679 - DNA, 15 bp, Homo sapiens
gtttttatgtctttt

SEQ ID NO: 541680 - DNA, 15 bp, Homo sapiens
tgtttttatgtcttt

SEQ ID NO: 541681 - DNA, 15 bp, Homo sapiens
ttgtttttatgtctt

SEQ ID NO: 541682 - DNA, 15 bp, Homo sapiens
attgtttttatgtct

SEQ ID NO: 541683 - DNA, 15 bp, Homo sapiens
tattgtttttatgtc

SEQ ID NO: 541684 - DNA, 15 bp, Homo sapiens
gtattgtttttatgt

SEQ ID NO: 541685 - DNA, 15 bp, Homo sapiens
agtattgtttttatg

SEQ ID NO: 541686 - DNA, 15 bp, Homo sapiens
cagtattgtttttat

SEQ ID NO: 541687 - DNA, 15 bp, Homo sapiens
acagtattgttttta

SEQ ID NO: 541688 - DNA, 15 bp, Homo sapiens
tacagtattgttttt

SEQ ID NO: 541689 - DNA, 15 bp, Homo sapiens
atacagtattgtttt

SEQ ID NO: 541690 - DNA, 15 bp, Homo sapiens
tatacagtattgttt

SEQ ID NO: 541691 - DNA, 15 bp, Homo sapiens
ttatacagtattgtt

SEQ ID NO: 541692 - DNA, 15 bp, Homo sapiens
gttatacagtattgt

SEQ ID NO: 541693 - DNA, 15 bp, Homo sapiens
tgttatacagtattg

SEQ ID NO: 541694 - DNA, 15 bp, Homo sapiens
ttgttatacagtatt

SEQ ID NO: 541695 - DNA, 15 bp, Homo sapiens
gttgttatacagtat

SEQ ID NO: 541696 - DNA, 15 bp, Homo sapiens
agttgttatacagta

SEQ ID NO: 541697 - DNA, 15 bp, Homo sapiens
tagttgttatacagt

SEQ ID NO: 541698 - DNA, 15 bp, Homo sapiens
atagttgttatacag

SEQ ID NO: 541699 - DNA, 15 bp, Homo sapiens
aatagttgttataca

SEQ ID NO: 541700 - DNA, 15 bp, Homo sapiens
caatagttgttatac

SEQ ID NO: 541701 - DNA, 15 bp, Homo sapiens
tcaatagttgttata

SEQ ID NO: 541702 - DNA, 15 bp, Homo sapiens
gtcaatagttgttat

SEQ ID NO: 541703 - DNA, 15 bp, Homo sapiens
tgtcaatagttgtta

SEQ ID NO: 541704 - DNA, 15 bp, Homo sapiens
atgtcaatagttgtt

SEQ ID NO: 541705 - DNA, 15 bp, Homo sapiens
tatgtcaatagttgt

SEQ ID NO: 541706 - DNA, 15 bp, Homo sapiens
ctatgtcaatagttg

SEQ ID NO: 541707 - DNA, 15 bp, Homo sapiens
gctatgtcaatagtt

SEQ ID NO: 541708 - DNA, 15 bp, Homo sapiens
tgctatgtcaatagt

SEQ ID NO: 541709 - DNA, 15 bp, Homo sapiens
atgctatgtcaatag

SEQ ID NO: 541710 - DNA, 15 bp, Homo sapiens
aatgctatgtcaata

SEQ ID NO: 541711 - DNA, 15 bp, Homo sapiens
aaatgctatgtcaat

SEQ ID NO: 541712 - DNA, 15 bp, Homo sapiens
taaatgctatgtcaa

SEQ ID NO: 541713 - DNA, 15 bp, Homo sapiens
gtaaatgctatgtca

SEQ ID NO: 541714 - DNA, 15 bp, Homo sapiens
tgtaaatgctatgtc

SEQ ID NO: 541715 - DNA, 15 bp, Homo sapiens
atgtaaatgctatgt

SEQ ID NO: 541716 - DNA, 15 bp, Homo sapiens
gatgtaaatgctatg

SEQ ID NO: 541717 - DNA, 15 bp, Homo sapiens
cgatgtaaatgctat

SEQ ID NO: 541718 - DNA, 15 bp, Homo sapiens
acgatgtaaatgcta

SEQ ID NO: 541719 - DNA, 15 bp, Homo sapiens
tacgatgtaaatgct

SEQ ID NO: 541720 - DNA, 15 bp, Homo sapiens
atacgatgtaaatgc

SEQ ID NO: 541721 - DNA, 15 bp, Homo sapiens
aatacgatgtaaatg

SEQ ID NO: 541722 - DNA, 15 bp, Homo sapiens
taatacgatgtaaat

SEQ ID NO: 541723 - DNA, 15 bp, Homo sapiens
ctaatacgatgtaaa

SEQ ID NO: 541724 - DNA, 15 bp, Homo sapiens
cctaatacgatgtaa

SEQ ID NO: 541725 - DNA, 15 bp, Homo sapiens
acctaatacgatgta

SEQ ID NO: 541726 - DNA, 15 bp, Homo sapiens
tacctaatacgatgt

SEQ ID NO: 541727 - DNA, 15 bp, Homo sapiens
atacctaatacgatg

SEQ ID NO: 541728 - DNA, 15 bp, Homo sapiens
aatacctaatacgat

SEQ ID NO: 541729 - DNA, 15 bp, Homo sapiens
taatacctaatacga

SEQ ID NO: 541730 - DNA, 15 bp, Homo sapiens
ataatacctaatacg

SEQ ID NO: 541731 - DNA, 15 bp, Homo sapiens
tataatacctaatac

SEQ ID NO: 541732 - DNA, 15 bp, Homo sapiens
ttataatacctaata

SEQ ID NO: 541733 - DNA, 15 bp, Homo sapiens
cttataatacctaat

SEQ ID NO: 541734 - DNA, 15 bp, Homo sapiens
acttataatacctaa

SEQ ID NO: 541735 - DNA, 15 bp, Homo sapiens
tacttataataccta

SEQ ID NO: 541736 - DNA, 15 bp, Homo sapiens
ttacttataatacct

SEQ ID NO: 541737 - DNA, 15 bp, Homo sapiens
gttacttataatacc

SEQ ID NO: 541738 - DNA, 15 bp, Homo sapiens
ggttacttataatac

SEQ ID NO: 541739 - DNA, 15 bp, Homo sapiens
aggttacttataata

SEQ ID NO: 541740 - DNA, 15 bp, Homo sapiens
taggttacttataat

SEQ ID NO: 541741 - DNA, 15 bp, Homo sapiens
ctaggttacttataa

SEQ ID NO: 541742 - DNA, 15 bp, Homo sapiens
tctaggttacttata

SEQ ID NO: 541743 - DNA, 15 bp, Homo sapiens
ctctaggttacttat

SEQ ID NO: 541744 - DNA, 15 bp, Homo sapiens
tctctaggttactta

SEQ ID NO: 541745 - DNA, 15 bp, Homo sapiens
atctctaggttactt

SEQ ID NO: 541746 - DNA, 15 bp, Homo sapiens
catctctaggttact

SEQ ID NO: 541747 - DNA, 15 bp, Homo sapiens
tcatctctaggttac

SEQ ID NO: 541748 - DNA, 15 bp, Homo sapiens
atcatctctaggtta

SEQ ID NO: 541749 - DNA, 15 bp, Homo sapiens
aatcatctctaggtt

SEQ ID NO: 541750 - DNA, 15 bp, Homo sapiens
aaatcatctctaggt

SEQ ID NO: 541751 - DNA, 15 bp, Homo sapiens
taaatcatctctagg

SEQ ID NO: 541752 - DNA, 15 bp, Homo sapiens
ttaaatcatctctag

SEQ ID NO: 541753 - DNA, 15 bp, Homo sapiens
tttaaatcatctcta

SEQ ID NO: 541754 - DNA, 15 bp, Homo sapiens
ctttaaatcatctct

SEQ ID NO: 541755 - DNA, 15 bp, Homo sapiens
tctttaaatcatctc

SEQ ID NO: 541756 - DNA, 15 bp, Homo sapiens
ttctttaaatcatct

SEQ ID NO: 541757 - DNA, 15 bp, Homo sapiens
attctttaaatcatc

SEQ ID NO: 541758 - DNA, 15 bp, Homo sapiens
tattctttaaatcat

SEQ ID NO: 541759 - DNA, 15 bp, Homo sapiens
gtattctttaaatca

SEQ ID NO: 541760 - DNA, 15 bp, Homo sapiens
cgtattctttaaatc

SEQ ID NO: 541761 - DNA, 15 bp, Homo sapiens
ccgtattctttaaat

SEQ ID NO: 541762 - DNA, 15 bp, Homo sapiens
cccgtattctttaaa

SEQ ID NO: 541763 - DNA, 15 bp, Homo sapiens
tcccgtattctttaa

SEQ ID NO: 541764 - DNA, 15 bp, Homo sapiens
ctcccgtattcttta

SEQ ID NO: 541765 - DNA, 15 bp, Homo sapiens
cctcccgtattcttt

SEQ ID NO: 541766 - DNA, 15 bp, Homo sapiens
tcctcccgtattctt

SEQ ID NO: 541767 - DNA, 15 bp, Homo sapiens
atcctcccgtattct

SEQ ID NO: 541768 - DNA, 15 bp, Homo sapiens
catcctcccgtattc

SEQ ID NO: 541769 - DNA, 15 bp, Homo sapiens
gcatcctcccgtatt

SEQ ID NO: 541770 - DNA, 15 bp, Homo sapiens
cgcatcctcccgtat

SEQ ID NO: 541771 - DNA, 15 bp, Homo sapiens
gcgcatcctcccgta

SEQ ID NO: 541772 - DNA, 15 bp, Homo sapiens
tgcgcatcctcccgt

SEQ ID NO: 541773 - DNA, 15 bp, Homo sapiens
atgcgcatcctcccg

SEQ ID NO: 541774 - DNA, 15 bp, Homo sapiens
tatgcgcatcctccc

SEQ ID NO: 541775 - DNA, 15 bp, Homo sapiens
ctatgcgcatcctcc

SEQ ID NO: 541776 - DNA, 15 bp, Homo sapiens
cctatgcgcatcctc

SEQ ID NO: 541777 - DNA, 15 bp, Homo sapiens
acctatgcgcatcct

SEQ ID NO: 541778 - DNA, 15 bp, Homo sapiens
cacctatgcgcatcc

SEQ ID NO: 541779 - DNA, 15 bp, Homo sapiens
tcacctatgcgcatc

SEQ ID NO: 541780 - DNA, 15 bp, Homo sapiens
atcacctatgcgcat

SEQ ID NO: 541781 - DNA, 15 bp, Homo sapiens
tatcacctatgcgca

SEQ ID NO: 541782 - DNA, 15 bp, Homo sapiens
atatcacctatgcgc

SEQ ID NO: 541783 - DNA, 15 bp, Homo sapiens
catatcacctatgcg

SEQ ID NO: 541784 - DNA, 15 bp, Homo sapiens
gcatatcacctatgc

SEQ ID NO: 541785 - DNA, 15 bp, Homo sapiens
tgcatatcacctatg

SEQ ID NO: 541786 - DNA, 15 bp, Homo sapiens
ttgcatatcacctat

SEQ ID NO: 541787 - DNA, 15 bp, Homo sapiens
tttgcatatcaccta

SEQ ID NO: 541788 - DNA, 15 bp, Homo sapiens
atttgcatatcacct

SEQ ID NO: 541789 - DNA, 15 bp, Homo sapiens
tatttgcatatcacc

SEQ ID NO: 541790 - DNA, 15 bp, Homo sapiens
gtatttgcatatcac

SEQ ID NO: 541791 - DNA, 15 bp, Homo sapiens
ggtatttgcatatca

SEQ ID NO: 541792 - DNA, 15 bp, Homo sapiens
tggtatttgcatatc

SEQ ID NO: 541793 - DNA, 15 bp, Homo sapiens
gtggtatttgcatat

SEQ ID NO: 541794 - DNA, 15 bp, Homo sapiens
tgtggtatttgcata

SEQ ID NO: 541795 - DNA, 15 bp, Homo sapiens
ctgtggtatttgcat

SEQ ID NO: 541796 - DNA, 15 bp, Homo sapiens
gctgtggtatttgca

SEQ ID NO: 541797 - DNA, 15 bp, Homo sapiens
tgctgtggtatttgc

SEQ ID NO: 541798 - DNA, 15 bp, Homo sapiens
atgctgtggtatttg

SEQ ID NO: 541799 - DNA, 15 bp, Homo sapiens
aatgctgtggtattt

SEQ ID NO: 541800 - DNA, 15 bp, Homo sapiens
aaatgctgtggtatt

SEQ ID NO: 541801 - DNA, 15 bp, Homo sapiens
aaaatgctgtggtat

SEQ ID NO: 541802 - DNA, 15 bp, Homo sapiens
taaaatgctgtggta

SEQ ID NO: 541803 - DNA, 15 bp, Homo sapiens
ataaaatgctgtggt

SEQ ID NO: 541804 - DNA, 15 bp, Homo sapiens
cataaaatgctgtgg

SEQ ID NO: 541805 - DNA, 15 bp, Homo sapiens
acataaaatgctgtg

SEQ ID NO: 541806 - DNA, 15 bp, Homo sapiens
gacataaaatgctgt

SEQ ID NO: 541807 - DNA, 15 bp, Homo sapiens
cgacataaaatgctg

SEQ ID NO: 541808 - DNA, 15 bp, Homo sapiens
ccgacataaaatgct

SEQ ID NO: 541809 - DNA, 15 bp, Homo sapiens
cccgacataaaatgc

SEQ ID NO: 541810 - DNA, 15 bp, Homo sapiens
ccccgacataaaatg

SEQ ID NO: 541811 - DNA, 15 bp, Homo sapiens
tccccgacataaaat

SEQ ID NO: 541812 - DNA, 15 bp, Homo sapiens
gtccccgacataaaa

SEQ ID NO: 541813 - DNA, 15 bp, Homo sapiens
agtccccgacataaa

SEQ ID NO: 541814 - DNA, 15 bp, Homo sapiens
aagtccccgacataa

SEQ ID NO: 541815 - DNA, 15 bp, Homo sapiens
caagtccccgacata

SEQ ID NO: 541816 - DNA, 15 bp, Homo sapiens
tcaagtccccgacat

SEQ ID NO: 541817 - DNA, 15 bp, Homo sapiens
ctcaagtccccgaca

SEQ ID NO: 541818 - DNA, 15 bp, Homo sapiens
gctcaagtccccgac

SEQ ID NO: 541819 - DNA, 15 bp, Homo sapiens
tgctcaagtccccga

SEQ ID NO: 541820 - DNA, 15 bp, Homo sapiens
atgctcaagtccccg

SEQ ID NO: 541821 - DNA, 15 bp, Homo sapiens
gatgctcaagtcccc

SEQ ID NO: 541822 - DNA, 15 bp, Homo sapiens
agatgctcaagtccc

SEQ ID NO: 541823 - DNA, 15 bp, Homo sapiens
cagatgctcaagtcc

SEQ ID NO: 541824 - DNA, 15 bp, Homo sapiens
gcagatgctcaagtc

SEQ ID NO: 541825 - DNA, 15 bp, Homo sapiens
tgcagatgctcaagt

SEQ ID NO: 541826 - DNA, 15 bp, Homo sapiens
ctgcagatgctcaag

SEQ ID NO: 541827 - DNA, 15 bp, Homo sapiens
tctgcagatgctcaa

SEQ ID NO: 541828 - DNA, 15 bp, Homo sapiens
atctgcagatgctca

SEQ ID NO: 541829 - DNA, 15 bp, Homo sapiens
gatctgcagatgctc

SEQ ID NO: 541830 - DNA, 15 bp, Homo sapiens
agatctgcagatgct

SEQ ID NO: 541831 - DNA, 15 bp, Homo sapiens
aagatctgcagatgc

SEQ ID NO: 541832 - DNA, 15 bp, Homo sapiens
caagatctgcagatg

SEQ ID NO: 541833 - DNA, 15 bp, Homo sapiens
ccaagatctgcagat

SEQ ID NO: 541834 - DNA, 15 bp, Homo sapiens
accaagatctgcaga

SEQ ID NO: 541835 - DNA, 15 bp, Homo sapiens
taccaagatctgcag

SEQ ID NO: 541836 - DNA, 15 bp, Homo sapiens
ataccaagatctgca

SEQ ID NO: 541837 - DNA, 15 bp, Homo sapiens
gataccaagatctgc

SEQ ID NO: 541838 - DNA, 15 bp, Homo sapiens
agataccaagatctg

SEQ ID NO: 541839 - DNA, 15 bp, Homo sapiens
tagataccaagatct

SEQ ID NO: 541840 - DNA, 15 bp, Homo sapiens
atagataccaagatc

SEQ ID NO: 541841 - DNA, 15 bp, Homo sapiens
catagataccaagat

SEQ ID NO: 541842 - DNA, 15 bp, Homo sapiens
ccatagataccaaga

SEQ ID NO: 541843 - DNA, 15 bp, Homo sapiens
cccatagataccaag

SEQ ID NO: 541844 - DNA, 15 bp, Homo sapiens
ccccatagataccaa

SEQ ID NO: 541845 - DNA, 15 bp, Homo sapiens
cccccatagatacca

SEQ ID NO: 541846 - DNA, 15 bp, Homo sapiens
acccccatagatacc

SEQ ID NO: 541847 - DNA, 15 bp, Homo sapiens
gacccccatagatac

SEQ ID NO: 541848 - DNA, 15 bp, Homo sapiens
ggacccccatagata

SEQ ID NO: 541849 - DNA, 15 bp, Homo sapiens
aggacccccatagat

SEQ ID NO: 541850 - DNA, 15 bp, Homo sapiens
caggacccccataga

SEQ ID NO: 541851 - DNA, 15 bp, Homo sapiens
tcaggacccccatag

SEQ ID NO: 541852 - DNA, 15 bp, Homo sapiens
ttcaggacccccata

SEQ ID NO: 541853 - DNA, 15 bp, Homo sapiens
tttcaggacccccat

SEQ ID NO: 541854 - DNA, 15 bp, Homo sapiens
gtttcaggaccccca

SEQ ID NO: 541855 - DNA, 15 bp, Homo sapiens
ggtttcaggaccccc

SEQ ID NO: 541856 - DNA, 15 bp, Homo sapiens
tggtttcaggacccc

SEQ ID NO: 541857 - DNA, 15 bp, Homo sapiens
ttggtttcaggaccc

SEQ ID NO: 541858 - DNA, 15 bp, Homo sapiens
attggtttcaggacc

SEQ ID NO: 541859 - DNA, 15 bp, Homo sapiens
aattggtttcaggac

SEQ ID NO: 541860 - DNA, 15 bp, Homo sapiens
gaattggtttcagga

SEQ ID NO: 541861 - DNA, 15 bp, Homo sapiens
ggaattggtttcagg

SEQ ID NO: 541862 - DNA, 15 bp, Homo sapiens
gggaattggtttcag

SEQ ID NO: 541863 - DNA, 15 bp, Homo sapiens
ggggaattggtttca

SEQ ID NO: 541864 - DNA, 15 bp, Homo sapiens
aggggaattggtttc

SEQ ID NO: 541865 - DNA, 15 bp, Homo sapiens
gaggggaattggttt

SEQ ID NO: 541866 - DNA, 15 bp, Homo sapiens
agaggggaattggtt

SEQ ID NO: 541867 - DNA, 15 bp, Homo sapiens
cagaggggaattggt

SEQ ID NO: 541868 - DNA, 15 bp, Homo sapiens
tcagaggggaattgg

SEQ ID NO: 541869 - DNA, 15 bp, Homo sapiens
gtcagaggggaattg

SEQ ID NO: 541870 - DNA, 15 bp, Homo sapiens
tgtcagaggggaatt

SEQ ID NO: 541871 - DNA, 15 bp, Homo sapiens
atgtcagaggggaat

SEQ ID NO: 541872 - DNA, 15 bp, Homo sapiens
aatgtcagaggggaa

SEQ ID NO: 541873 - DNA, 15 bp, Homo sapiens
caatgtcagagggga

SEQ ID NO: 541874 - DNA, 15 bp, Homo sapiens
tcaatgtcagagggg

SEQ ID NO: 541875 - DNA, 15 bp, Homo sapiens
ctcaatgtcagaggg

SEQ ID NO: 541876 - DNA, 15 bp, Homo sapiens
cctcaatgtcagagg

SEQ ID NO: 541877 - DNA, 15 bp, Homo sapiens
ccctcaatgtcagag

SEQ ID NO: 541878 - DNA, 15 bp, Homo sapiens
tccctcaatgtcaga

SEQ ID NO: 541879 - DNA, 15 bp, Homo sapiens
gtccctcaatgtcag

SEQ ID NO: 541880 - DNA, 15 bp, Homo sapiens
cgtccctcaatgtca

SEQ ID NO: 541881 - DNA, 15 bp, Homo sapiens
tcgtccctcaatgtc

SEQ ID NO: 541882 - DNA, 15 bp, Homo sapiens
gtcgtccctcaatgt

SEQ ID NO: 541883 - DNA, 15 bp, Homo sapiens
agtcgtccctcaatg

SEQ ID NO: 541884 - DNA, 15 bp, Homo sapiens
aagtcgtccctcaat

SEQ ID NO: 541885 - DNA, 15 bp, Homo sapiens
aaagtcgtccctcaa

SEQ ID NO: 541886 - DNA, 15 bp, Homo sapiens
taaagtcgtccctca

SEQ ID NO: 541887 - DNA, 15 bp, Homo sapiens
ataaagtcgtccctc

SEQ ID NO: 541888 - DNA, 15 bp, Homo sapiens
tataaagtcgtccct

SEQ ID NO: 541889 - DNA, 15 bp, Homo sapiens
atataaagtcgtccc

SEQ ID NO: 541890 - DNA, 15 bp, Homo sapiens
tatataaagtcgtcc

SEQ ID NO: 541891 - DNA, 15 bp, Homo sapiens
ttatataaagtcgtc

SEQ ID NO: 541892 - DNA, 15 bp, Homo sapiens
tttatataaagtcgt

SEQ ID NO: 541893 - DNA, 15 bp, Homo sapiens
ttttatataaagtcg

SEQ ID NO: 541894 - DNA, 15 bp, Homo sapiens
attttatataaagtc

SEQ ID NO: 541895 - DNA, 15 bp, Homo sapiens
tattttatataaagt

SEQ ID NO: 541896 - DNA, 15 bp, Homo sapiens
atattttatataaag

SEQ ID NO: 541897 - DNA, 15 bp, Homo sapiens
tatattttatataaa

SEQ ID NO: 541898 - DNA, 15 bp, Homo sapiens
atatattttatataa

SEQ ID NO: 541899 - DNA, 15 bp, Homo sapiens
catatattttatata

SEQ ID NO: 541900 - DNA, 15 bp, Homo sapiens
tcatatattttatat

SEQ ID NO: 541901 - DNA, 15 bp, Homo sapiens
ttcatatattttata

SEQ ID NO: 541902 - DNA, 15 bp, Homo sapiens
attcatatattttat

SEQ ID NO: 541903 - DNA, 15 bp, Homo sapiens
tattcatatatttta

SEQ ID NO: 541904 - DNA, 15 bp, Homo sapiens
gtattcatatatttt

SEQ ID NO: 541905 - DNA, 15 bp, Homo sapiens
agtattcatatattt

SEQ ID NO: 541906 - DNA, 15 bp, Homo sapiens
aagtattcatatatt

SEQ ID NO: 541907 - DNA, 15 bp, Homo sapiens
caagtattcatatat

SEQ ID NO: 541908 - DNA, 15 bp, Homo sapiens
gcaagtattcatata

SEQ ID NO: 541909 - DNA, 15 bp, Homo sapiens
agcaagtattcatat

SEQ ID NO: 541910 - DNA, 15 bp, Homo sapiens
gagcaagtattcata

SEQ ID NO: 541911 - DNA, 15 bp, Homo sapiens
cgagcaagtattcat

SEQ ID NO: 541912 - DNA, 15 bp, Homo sapiens
acgagcaagtattca

SEQ ID NO: 541913 - DNA, 15 bp, Homo sapiens
tacgagcaagtattc

SEQ ID NO: 541914 - DNA, 15 bp, Homo sapiens
ttacgagcaagtatt

SEQ ID NO: 541915 - DNA, 15 bp, Homo sapiens
tttacgagcaagtat

SEQ ID NO: 541916 - DNA, 15 bp, Homo sapiens
ttttacgagcaagta

SEQ ID NO: 541917 - DNA, 15 bp, Homo sapiens
tttttacgagcaagt

SEQ ID NO: 541918 - DNA, 15 bp, Homo sapiens
ttttttacgagcaag

SEQ ID NO: 541919 - DNA, 15 bp, Homo sapiens
tttttttacgagcaa

SEQ ID NO: 541920 - DNA, 15 bp, Homo sapiens
ttttttttacgagca

SEQ ID NO: 541921 - DNA, 15 bp, Homo sapiens
cttttttttacgagc

SEQ ID NO: 541922 - DNA, 15 bp, Homo sapiens
acttttttttacgag

SEQ ID NO: 541923 - DNA, 15 bp, Homo sapiens
aacttttttttacga

SEQ ID NO: 541924 - DNA, 15 bp, Homo sapiens
gaacttttttttacg

SEQ ID NO: 541925 - DNA, 15 bp, Homo sapiens
tgaacttttttttac

SEQ ID NO: 541926 - DNA, 15 bp, Homo sapiens
ttgaactttttttta

SEQ ID NO: 541927 - DNA, 15 bp, Homo sapiens
tttgaactttttttt

SEQ ID NO: 541928 - DNA, 15 bp, Homo sapiens
atttgaacttttttt

SEQ ID NO: 541929 - DNA, 15 bp, Homo sapiens
catttgaactttttt

SEQ ID NO: 541930 - DNA, 15 bp, Homo sapiens
ccatttgaacttttt

SEQ ID NO: 541931 - DNA, 15 bp, Homo sapiens
tccatttgaactttt

SEQ ID NO: 541932 - DNA, 15 bp, Homo sapiens
ctccatttgaacttt

SEQ ID NO: 541933 - DNA, 15 bp, Homo sapiens
cctccatttgaactt

SEQ ID NO: 541934 - DNA, 15 bp, Homo sapiens
tcctccatttgaact

SEQ ID NO: 541935 - DNA, 15 bp, Homo sapiens
ttcctccatttgaac

SEQ ID NO: 541936 - DNA, 15 bp, Homo sapiens
tttcctccatttgaa

SEQ ID NO: 541937 - DNA, 15 bp, Homo sapiens
ttttcctccatttga

SEQ ID NO: 541938 - DNA, 15 bp, Homo sapiens
cttttcctccatttg

SEQ ID NO: 541939 - DNA, 15 bp, Homo sapiens
tcttttcctccattt

SEQ ID NO: 541940 - DNA, 15 bp, Homo sapiens
ctcttttcctccatt

SEQ ID NO: 541941 - DNA, 15 bp, Homo sapiens
tctcttttcctccat

SEQ ID NO: 541942 - DNA, 15 bp, Homo sapiens
ctctcttttcctcca

SEQ ID NO: 541943 - DNA, 15 bp, Homo sapiens
tctctcttttcctcc

SEQ ID NO: 541944 - DNA, 15 bp, Homo sapiens
ttctctcttttcctc

SEQ ID NO: 541945 - DNA, 15 bp, Homo sapiens
tttctctcttttcct

SEQ ID NO: 541946 - DNA, 15 bp, Homo sapiens
ctttctctcttttcc

SEQ ID NO: 541947 - DNA, 15 bp, Homo sapiens
actttctctcttttc

SEQ ID NO: 541948 - DNA, 15 bp, Homo sapiens
aactttctctctttt

SEQ ID NO: 541949 - DNA, 15 bp, Homo sapiens
aaactttctctcttt

SEQ ID NO: 541950 - DNA, 15 bp, Homo sapiens
gaaactttctctctt

SEQ ID NO: 541951 - DNA, 15 bp, Homo sapiens
ggaaactttctctct

SEQ ID NO: 541952 - DNA, 15 bp, Homo sapiens
gggaaactttctctc

SEQ ID NO: 541953 - DNA, 15 bp, Homo sapiens
ggggaaactttctct

SEQ ID NO: 541954 - DNA, 15 bp, Homo sapiens
gggggaaactttctc

SEQ ID NO: 541955 - DNA, 15 bp, Homo sapiens
tgggggaaactttct

SEQ ID NO: 541956 - DNA, 15 bp, Homo sapiens
atgggggaaactttc

SEQ ID NO: 541957 - DNA, 15 bp, Homo sapiens
aatgggggaaacttt

SEQ ID NO: 541958 - DNA, 15 bp, Homo sapiens
aaatgggggaaactt

SEQ ID NO: 541959 - DNA, 15 bp, Homo sapiens
aaaatgggggaaact

SEQ ID NO: 541960 - DNA, 15 bp, Homo sapiens
taaaatgggggaaac

SEQ ID NO: 541961 - DNA, 15 bp, Homo sapiens
ataaaatgggggaaa

SEQ ID NO: 541962 - DNA, 15 bp, Homo sapiens
aataaaatgggggaa

SEQ ID NO: 541963 - DNA, 15 bp, Homo sapiens
gaataaaatggggga

SEQ ID NO: 541964 - DNA, 15 bp, Homo sapiens
ggaataaaatggggg

SEQ ID NO: 541965 - DNA, 15 bp, Homo sapiens
gggaataaaatgggg

SEQ ID NO: 541966 - DNA, 15 bp, Homo sapiens
ggggaataaaatggg

SEQ ID NO: 541967 - DNA, 15 bp, Homo sapiens
aggggaataaaatgg

SEQ ID NO: 541968 - DNA, 15 bp, Homo sapiens
gaggggaataaaatg

SEQ ID NO: 541969 - DNA, 15 bp, Homo sapiens
ggaggggaataaaat

SEQ ID NO: 541970 - DNA, 15 bp, Homo sapiens
aggaggggaataaaa

SEQ ID NO: 541971 - DNA, 15 bp, Homo sapiens
caggaggggaataaa

SEQ ID NO: 541972 - DNA, 15 bp, Homo sapiens
tcaggaggggaataa

SEQ ID NO: 541973 - DNA, 15 bp, Homo sapiens
ctcaggaggggaata

SEQ ID NO: 541974 - DNA, 15 bp, Homo sapiens
gctcaggaggggaat

SEQ ID NO: 541975 - DNA, 15 bp, Homo sapiens
agctcaggaggggaa

SEQ ID NO: 541976 - DNA, 15 bp, Homo sapiens
tagctcaggagggga

SEQ ID NO: 541977 - DNA, 15 bp, Homo sapiens
atagctcaggagggg

SEQ ID NO: 541978 - DNA, 15 bp, Homo sapiens
aatagctcaggaggg

SEQ ID NO: 541979 - DNA, 15 bp, Homo sapiens
taatagctcaggagg

SEQ ID NO: 541980 - DNA, 15 bp, Homo sapiens
ataatagctcaggag

SEQ ID NO: 541981 - DNA, 15 bp, Homo sapiens
gataatagctcagga

SEQ ID NO: 541982 - DNA, 15 bp, Homo sapiens
tgataatagctcagg

SEQ ID NO: 541983 - DNA, 15 bp, Homo sapiens
gtgataatagctcag

SEQ ID NO: 541984 - DNA, 15 bp, Homo sapiens
ggtgataatagctca

SEQ ID NO: 541985 - DNA, 15 bp, Homo sapiens
tggtgataatagctc

SEQ ID NO: 541986 - DNA, 15 bp, Homo sapiens
atggtgataatagct

SEQ ID NO: 541987 - DNA, 15 bp, Homo sapiens
gatggtgataatagc

SEQ ID NO: 541988 - DNA, 15 bp, Homo sapiens
tgatggtgataatag

SEQ ID NO: 541989 - DNA, 15 bp, Homo sapiens
atgatggtgataata

SEQ ID NO: 541990 - DNA, 15 bp, Homo sapiens
aatgatggtgataat

SEQ ID NO: 541991 - DNA, 15 bp, Homo sapiens
caatgatggtgataa

SEQ ID NO: 541992 - DNA, 15 bp, Homo sapiens
tcaatgatggtgata

SEQ ID NO: 541993 - DNA, 15 bp, Homo sapiens
atcaatgatggtgat

SEQ ID NO: 541994 - DNA, 15 bp, Homo sapiens
catcaatgatggtga

SEQ ID NO: 541995 - DNA, 15 bp, Homo sapiens
acatcaatgatggtg

SEQ ID NO: 541996 - DNA, 15 bp, Homo sapiens
cacatcaatgatggt

SEQ ID NO: 541997 - DNA, 15 bp, Homo sapiens
ccacatcaatgatgg

SEQ ID NO: 541998 - DNA, 15 bp, Homo sapiens
tccacatcaatgatg

SEQ ID NO: 541999 - DNA, 15 bp, Homo sapiens
atccacatcaatgat

SEQ ID NO: 542000 - DNA, 15 bp, Homo sapiens
gatccacatcaatga

SEQ ID NO: 542001 - DNA, 15 bp, Homo sapiens
agatccacatcaatg

SEQ ID NO: 542002 - DNA, 15 bp, Homo sapiens
aagatccacatcaat

SEQ ID NO: 542003 - DNA, 15 bp, Homo sapiens
aaagatccacatcaa

SEQ ID NO: 542004 - DNA, 15 bp, Homo sapiens
gaaagatccacatca

SEQ ID NO: 542005 - DNA, 15 bp, Homo sapiens
agaaagatccacatc

SEQ ID NO: 542006 - DNA, 15 bp, Homo sapiens
tagaaagatccacat

SEQ ID NO: 542007 - DNA, 15 bp, Homo sapiens
ctagaaagatccaca

SEQ ID NO: 542008 - DNA, 15 bp, Homo sapiens
tctagaaagatccac

SEQ ID NO: 542009 - DNA, 15 bp, Homo sapiens
gtctagaaagatcca

SEQ ID NO: 542010 - DNA, 15 bp, Homo sapiens
ggtctagaaagatcc

SEQ ID NO: 542011 - DNA, 15 bp, Homo sapiens
gggtctagaaagatc

SEQ ID NO: 542012 - DNA, 15 bp, Homo sapiens
agggtctagaaagat

SEQ ID NO: 542013 - DNA, 15 bp, Homo sapiens
aagggtctagaaaga

SEQ ID NO: 542014 - DNA, 15 bp, Homo sapiens
aaagggtctagaaag

SEQ ID NO: 542015 - DNA, 15 bp, Homo sapiens
aaaagggtctagaaa

SEQ ID NO: 542016 - DNA, 15 bp, Homo sapiens
gaaaagggtctagaa

SEQ ID NO: 542017 - DNA, 15 bp, Homo sapiens
agaaaagggtctaga

SEQ ID NO: 542018 - DNA, 15 bp, Homo sapiens
cagaaaagggtctag

SEQ ID NO: 542019 - DNA, 15 bp, Homo sapiens
acagaaaagggtcta

SEQ ID NO: 542020 - DNA, 15 bp, Homo sapiens
cacagaaaagggtct

SEQ ID NO: 542021 - DNA, 15 bp, Homo sapiens
acacagaaaagggtc

SEQ ID NO: 542022 - DNA, 15 bp, Homo sapiens
tacacagaaaagggt

SEQ ID NO: 542023 - DNA, 15 bp, Homo sapiens
gtacacagaaaaggg

SEQ ID NO: 542024 - DNA, 15 bp, Homo sapiens
ggtacacagaaaagg

SEQ ID NO: 542025 - DNA, 15 bp, Homo sapiens
tggtacacagaaaag

SEQ ID NO: 542026 - DNA, 15 bp, Homo sapiens
ctggtacacagaaaa

SEQ ID NO: 542027 - DNA, 15 bp, Homo sapiens
cctggtacacagaaa

SEQ ID NO: 542028 - DNA, 15 bp, Homo sapiens
tcctggtacacagaa

SEQ ID NO: 542029 - DNA, 15 bp, Homo sapiens
ctcctggtacacaga

SEQ ID NO: 542030 - DNA, 15 bp, Homo sapiens
gctcctggtacacag

SEQ ID NO: 542031 - DNA, 15 bp, Homo sapiens
ggctcctggtacaca

SEQ ID NO: 542032 - DNA, 15 bp, Homo sapiens
aggctcctggtacac

SEQ ID NO: 542033 - DNA, 15 bp, Homo sapiens
caggctcctggtaca

SEQ ID NO: 542034 - DNA, 15 bp, Homo sapiens
acaggctcctggtac

SEQ ID NO: 542035 - DNA, 15 bp, Homo sapiens
tacaggctcctggta

SEQ ID NO: 542036 - DNA, 15 bp, Homo sapiens
atacaggctcctggt

SEQ ID NO: 542037 - DNA, 15 bp, Homo sapiens
catacaggctcctgg

SEQ ID NO: 542038 - DNA, 15 bp, Homo sapiens
acatacaggctcctg

SEQ ID NO: 542039 - DNA, 15 bp, Homo sapiens
tacatacaggctcct

SEQ ID NO: 542040 - DNA, 15 bp, Homo sapiens
atacatacaggctcc

SEQ ID NO: 542041 - DNA, 15 bp, Homo sapiens
tatacatacaggctc

SEQ ID NO: 542042 - DNA, 15 bp, Homo sapiens
gtatacatacaggct

SEQ ID NO: 542043 - DNA, 15 bp, Homo sapiens
tgtatacatacaggc

SEQ ID NO: 542044 - DNA, 15 bp, Homo sapiens
atgtatacatacagg

SEQ ID NO: 542045 - DNA, 15 bp, Homo sapiens
tatgtatacatacag

SEQ ID NO: 542046 - DNA, 15 bp, Homo sapiens
atatgtatacataca

SEQ ID NO: 542047 - DNA, 15 bp, Homo sapiens
aatatgtatacatac

SEQ ID NO: 542048 - DNA, 15 bp, Homo sapiens
taatatgtatacata

SEQ ID NO: 542049 - DNA, 15 bp, Homo sapiens
ttaatatgtatacat

SEQ ID NO: 542050 - DNA, 15 bp, Homo sapiens
attaatatgtataca

SEQ ID NO: 542051 - DNA, 15 bp, Homo sapiens
tattaatatgtatac

SEQ ID NO: 542052 - DNA, 15 bp, Homo sapiens
atattaatatgtata

SEQ ID NO: 542053 - DNA, 15 bp, Homo sapiens
tatattaatatgtat

SEQ ID NO: 542054 - DNA, 15 bp, Homo sapiens
atatattaatatgta

SEQ ID NO: 542055 - DNA, 15 bp, Homo sapiens
tatatattaatatgt

SEQ ID NO: 542056 - DNA, 15 bp, Homo sapiens
atatatattaatatg

SEQ ID NO: 542057 - DNA, 15 bp, Homo sapiens
aatatatattaatat

SEQ ID NO: 542058 - DNA, 15 bp, Homo sapiens
aaatatatattaata

SEQ ID NO: 542059 - DNA, 15 bp, Homo sapiens
aaaatatatattaat

SEQ ID NO: 542060 - DNA, 15 bp, Homo sapiens
taaaatatatattaa

SEQ ID NO: 542061 - DNA, 15 bp, Homo sapiens
gtaaaatatatatta

SEQ ID NO: 542062 - DNA, 15 bp, Homo sapiens
tgtaaaatatatatt

SEQ ID NO: 542063 - DNA, 15 bp, Homo sapiens
atgtaaaatatatat

SEQ ID NO: 542064 - DNA, 15 bp, Homo sapiens
tatgtaaaatatata

SEQ ID NO: 542065 - DNA, 15 bp, Homo sapiens
ttatgtaaaatatat

SEQ ID NO: 542066 - DNA, 15 bp, Homo sapiens
gttatgtaaaatata

SEQ ID NO: 542067 - DNA, 15 bp, Homo sapiens
agttatgtaaaatat

SEQ ID NO: 542068 - DNA, 15 bp, Homo sapiens
aagttatgtaaaata

SEQ ID NO: 542069 - DNA, 15 bp, Homo sapiens
caagttatgtaaaat

SEQ ID NO: 542070 - DNA, 15 bp, Homo sapiens
tcaagttatgtaaaa

SEQ ID NO: 542071 - DNA, 15 bp, Homo sapiens
ttcaagttatgtaaa

SEQ ID NO: 542072 - DNA, 15 bp, Homo sapiens
gttcaagttatgtaa

SEQ ID NO: 542073 - DNA, 15 bp, Homo sapiens
agttcaagttatgta

SEQ ID NO: 542074 - DNA, 15 bp, Homo sapiens
tagttcaagttatgt

SEQ ID NO: 542075 - DNA, 15 bp, Homo sapiens
ttagttcaagttatg

SEQ ID NO: 542076 - DNA, 15 bp, Homo sapiens
cttagttcaagttat

SEQ ID NO: 542077 - DNA, 15 bp, Homo sapiens
acttagttcaagtta

SEQ ID NO: 542078 - DNA, 15 bp, Homo sapiens
cacttagttcaagtt

SEQ ID NO: 542079 - DNA, 15 bp, Homo sapiens
acacttagttcaagt

SEQ ID NO: 542080 - DNA, 15 bp, Homo sapiens
tacacttagttcaag

SEQ ID NO: 542081 - DNA, 15 bp, Homo sapiens
ctacacttagttcaa

SEQ ID NO: 542082 - DNA, 15 bp, Homo sapiens
cctacacttagttca

SEQ ID NO: 542083 - DNA, 15 bp, Homo sapiens
acctacacttagttc

SEQ ID NO: 542084 - DNA, 15 bp, Homo sapiens
cacctacacttagtt

SEQ ID NO: 542085 - DNA, 15 bp, Homo sapiens
tcacctacacttagt

SEQ ID NO: 542086 - DNA, 15 bp, Homo sapiens
ttcacctacacttag

SEQ ID NO: 542087 - DNA, 15 bp, Homo sapiens
gttcacctacactta

SEQ ID NO: 542088 - DNA, 15 bp, Homo sapiens
agttcacctacactt

SEQ ID NO: 542089 - DNA, 15 bp, Homo sapiens
aagttcacctacact

SEQ ID NO: 542090 - DNA, 15 bp, Homo sapiens
caagttcacctacac

SEQ ID NO: 542091 - DNA, 15 bp, Homo sapiens
tcaagttcacctaca

SEQ ID NO: 542092 - DNA, 15 bp, Homo sapiens
ttcaagttcacctac

SEQ ID NO: 542093 - DNA, 15 bp, Homo sapiens
gttcaagttcaccta

SEQ ID NO: 542094 - DNA, 15 bp, Homo sapiens
tgttcaagttcacct

SEQ ID NO: 542095 - DNA, 15 bp, Homo sapiens
atgttcaagttcacc

SEQ ID NO: 542096 - DNA, 15 bp, Homo sapiens
catgttcaagttcac

SEQ ID NO: 542097 - DNA, 15 bp, Homo sapiens
acatgttcaagttca

SEQ ID NO: 542098 - DNA, 15 bp, Homo sapiens
tacatgttcaagttc

SEQ ID NO: 542099 - DNA, 15 bp, Homo sapiens
atacatgttcaagtt

SEQ ID NO: 542100 - DNA, 15 bp, Homo sapiens
tatacatgttcaagt

SEQ ID NO: 542101 - DNA, 15 bp, Homo sapiens
ttatacatgttcaag

SEQ ID NO: 542102 - DNA, 15 bp, Homo sapiens
attatacatgttcaa

SEQ ID NO: 542103 - DNA, 15 bp, Homo sapiens
aattatacatgttca

SEQ ID NO: 542104 - DNA, 15 bp, Homo sapiens
taattatacatgttc

SEQ ID NO: 542105 - DNA, 15 bp, Homo sapiens
ataattatacatgtt

SEQ ID NO: 542106 - DNA, 15 bp, Homo sapiens
gataattatacatgt

SEQ ID NO: 542107 - DNA, 15 bp, Homo sapiens
agataattatacatg

SEQ ID NO: 542108 - DNA, 15 bp, Homo sapiens
aagataattatacat

SEQ ID NO: 542109 - DNA, 15 bp, Homo sapiens
caagataattataca

SEQ ID NO: 542110 - DNA, 15 bp, Homo sapiens
gcaagataattatac

SEQ ID NO: 542111 - DNA, 15 bp, Homo sapiens
tgcaagataattata

SEQ ID NO: 542112 - DNA, 15 bp, Homo sapiens
ttgcaagataattat

SEQ ID NO: 542113 - DNA, 15 bp, Homo sapiens
attgcaagataatta

SEQ ID NO: 542114 - DNA, 15 bp, Homo sapiens
aattgcaagataatt

SEQ ID NO: 542115 - DNA, 15 bp, Homo sapiens
aaattgcaagataat

SEQ ID NO: 542116 - DNA, 15 bp, Homo sapiens
caaattgcaagataa

SEQ ID NO: 542117 - DNA, 15 bp, Homo sapiens
acaaattgcaagata

SEQ ID NO: 542118 - DNA, 15 bp, Homo sapiens
aacaaattgcaagat

SEQ ID NO: 542119 - DNA, 15 bp, Homo sapiens
aaacaaattgcaaga

SEQ ID NO: 542120 - DNA, 15 bp, Homo sapiens
aaaacaaattgcaag

SEQ ID NO: 542121 - DNA, 15 bp, Homo sapiens
aaaaacaaattgcaa

SEQ ID NO: 542122 - DNA, 15 bp, Homo sapiens
gaaaaacaaattgca

SEQ ID NO: 542123 - DNA, 15 bp, Homo sapiens
tgaaaaacaaattgc

SEQ ID NO: 542124 - DNA, 15 bp, Homo sapiens
ttgaaaaacaaattg

SEQ ID NO: 542125 - DNA, 15 bp, Homo sapiens
attgaaaaacaaatt

SEQ ID NO: 542126 - DNA, 15 bp, Homo sapiens
aattgaaaaacaaat

SEQ ID NO: 542127 - DNA, 15 bp, Homo sapiens
gaattgaaaaacaaa

SEQ ID NO: 542128 - DNA, 15 bp, Homo sapiens
tgaattgaaaaacaa

SEQ ID NO: 542129 - DNA, 15 bp, Homo sapiens
ttgaattgaaaaaca

SEQ ID NO: 542130 - DNA, 15 bp, Homo sapiens
tttgaattgaaaaac

SEQ ID NO: 542131 - DNA, 15 bp, Homo sapiens
ctttgaattgaaaaa

SEQ ID NO: 542132 - DNA, 15 bp, Homo sapiens
tctttgaattgaaaa

SEQ ID NO: 542133 - DNA, 15 bp, Homo sapiens
atctttgaattgaaa

SEQ ID NO: 542134 - DNA, 15 bp, Homo sapiens
tatctttgaattgaa

SEQ ID NO: 542135 - DNA, 15 bp, Homo sapiens
gtatctttgaattga

SEQ ID NO: 542136 - DNA, 15 bp, Homo sapiens
ggtatctttgaattg

SEQ ID NO: 542137 - DNA, 15 bp, Homo sapiens
tggtatctttgaatt

SEQ ID NO: 542138 - DNA, 15 bp, Homo sapiens
ctggtatctttgaat

SEQ ID NO: 542139 - DNA, 15 bp, Homo sapiens
gctggtatctttgaa

SEQ ID NO: 542140 - DNA, 15 bp, Homo sapiens
agctggtatctttga

SEQ ID NO: 542141 - DNA, 15 bp, Homo sapiens
cagctggtatctttg

SEQ ID NO: 542142 - DNA, 15 bp, Homo sapiens
tcagctggtatcttt

SEQ ID NO: 542143 - DNA, 15 bp, Homo sapiens
ttcagctggtatctt

SEQ ID NO: 542144 - DNA, 15 bp, Homo sapiens
tttcagctggtatct

SEQ ID NO: 542145 - DNA, 15 bp, Homo sapiens
ttttcagctggtatc

SEQ ID NO: 542146 - DNA, 15 bp, Homo sapiens
tttttcagctggtat

SEQ ID NO: 542147 - DNA, 15 bp, Homo sapiens
atttttcagctggta

SEQ ID NO: 542148 - DNA, 15 bp, Homo sapiens
aatttttcagctggt

SEQ ID NO: 542149 - DNA, 15 bp, Homo sapiens
aaatttttcagctgg

SEQ ID NO: 542150 - DNA, 15 bp, Homo sapiens
aaaatttttcagctg

SEQ ID NO: 542151 - DNA, 15 bp, Homo sapiens
gaaaatttttcagct

SEQ ID NO: 542152 - DNA, 15 bp, Homo sapiens
ggaaaatttttcagc

SEQ ID NO: 542153 - DNA, 15 bp, Homo sapiens
tggaaaatttttcag

SEQ ID NO: 542154 - DNA, 15 bp, Homo sapiens
atggaaaatttttca

SEQ ID NO: 542155 - DNA, 15 bp, Homo sapiens
catggaaaatttttc

SEQ ID NO: 542156 - DNA, 15 bp, Homo sapiens
acatggaaaattttt

SEQ ID NO: 542157 - DNA, 15 bp, Homo sapiens
gacatggaaaatttt

SEQ ID NO: 542158 - DNA, 15 bp, Homo sapiens
agacatggaaaattt

SEQ ID NO: 542159 - DNA, 15 bp, Homo sapiens
gagacatggaaaatt

SEQ ID NO: 542160 - DNA, 15 bp, Homo sapiens
tgagacatggaaaat

SEQ ID NO: 542161 - DNA, 15 bp, Homo sapiens
ctgagacatggaaaa

SEQ ID NO: 542162 - DNA, 15 bp, Homo sapiens
gctgagacatggaaa

SEQ ID NO: 542163 - DNA, 15 bp, Homo sapiens
tgctgagacatggaa

SEQ ID NO: 542164 - DNA, 15 bp, Homo sapiens
ttgctgagacatgga

SEQ ID NO: 542165 - DNA, 15 bp, Homo sapiens
attgctgagacatgg

SEQ ID NO: 542166 - DNA, 15 bp, Homo sapiens
tattgctgagacatg

SEQ ID NO: 542167 - DNA, 15 bp, Homo sapiens
ttattgctgagacat

SEQ ID NO: 542168 - DNA, 15 bp, Homo sapiens
cttattgctgagaca

SEQ ID NO: 542169 - DNA, 15 bp, Homo sapiens
acttattgctgagac

SEQ ID NO: 542170 - DNA, 15 bp, Homo sapiens
gacttattgctgaga

SEQ ID NO: 542171 - DNA, 15 bp, Homo sapiens
agacttattgctgag

SEQ ID NO: 542172 - DNA, 15 bp, Homo sapiens
tagacttattgctga

SEQ ID NO: 542173 - DNA, 15 bp, Homo sapiens
gtagacttattgctg

SEQ ID NO: 542174 - DNA, 15 bp, Homo sapiens
ggtagacttattgct

SEQ ID NO: 542175 - DNA, 15 bp, Homo sapiens
gggtagacttattgc

SEQ ID NO: 542176 - DNA, 15 bp, Homo sapiens
ggggtagacttattg

SEQ ID NO: 542177 - DNA, 15 bp, Homo sapiens
cggggtagacttatt

SEQ ID NO: 542178 - DNA, 15 bp, Homo sapiens
gcggggtagacttat

SEQ ID NO: 542179 - DNA, 15 bp, Homo sapiens
cgcggggtagactta

SEQ ID NO: 542180 - DNA, 15 bp, Homo sapiens
acgcggggtagactt

SEQ ID NO: 542181 - DNA, 15 bp, Homo sapiens
aacgcggggtagact

SEQ ID NO: 542182 - DNA, 15 bp, Homo sapiens
aaacgcggggtagac

SEQ ID NO: 542183 - DNA, 15 bp, Homo sapiens
aaaacgcggggtaga

SEQ ID NO: 542184 - DNA, 15 bp, Homo sapiens
gaaaacgcggggtag

SEQ ID NO: 542185 - DNA, 15 bp, Homo sapiens
ggaaaacgcggggta

SEQ ID NO: 542186 - DNA, 15 bp, Homo sapiens
aggaaaacgcggggt

SEQ ID NO: 542187 - DNA, 15 bp, Homo sapiens
aaggaaaacgcgggg

SEQ ID NO: 542188 - DNA, 15 bp, Homo sapiens
gaaggaaaacgcggg

SEQ ID NO: 542189 - DNA, 15 bp, Homo sapiens
tgaaggaaaacgcgg

SEQ ID NO: 542190 - DNA, 15 bp, Homo sapiens
atgaaggaaaacgcg

SEQ ID NO: 542191 - DNA, 15 bp, Homo sapiens
gatgaaggaaaacgc

SEQ ID NO: 542192 - DNA, 15 bp, Homo sapiens
tgatgaaggaaaacg

SEQ ID NO: 542193 - DNA, 15 bp, Homo sapiens
gtgatgaaggaaaac

SEQ ID NO: 542194 - DNA, 15 bp, Homo sapiens
agtgatgaaggaaaa

SEQ ID NO: 542195 - DNA, 15 bp, Homo sapiens
cagtgatgaaggaaa

SEQ ID NO: 542196 - DNA, 15 bp, Homo sapiens
gcagtgatgaaggaa

SEQ ID NO: 542197 - DNA, 15 bp, Homo sapiens
agcagtgatgaagga

SEQ ID NO: 542198 - DNA, 15 bp, Homo sapiens
cagcagtgatgaagg

SEQ ID NO: 542199 - DNA, 15 bp, Homo sapiens
ccagcagtgatgaag

SEQ ID NO: 542200 - DNA, 15 bp, Homo sapiens
accagcagtgatgaa

SEQ ID NO: 542201 - DNA, 15 bp, Homo sapiens
taccagcagtgatga

SEQ ID NO: 542202 - DNA, 15 bp, Homo sapiens
ataccagcagtgatg

SEQ ID NO: 542203 - DNA, 15 bp, Homo sapiens
aataccagcagtgat

SEQ ID NO: 542204 - DNA, 15 bp, Homo sapiens
gaataccagcagtga

SEQ ID NO: 542205 - DNA, 15 bp, Homo sapiens
ggaataccagcagtg

SEQ ID NO: 542206 - DNA, 15 bp, Homo sapiens
aggaataccagcagt

SEQ ID NO: 542207 - DNA, 15 bp, Homo sapiens
aaggaataccagcag

SEQ ID NO: 542208 - DNA, 15 bp, Homo sapiens
aaaggaataccagca

SEQ ID NO: 542209 - DNA, 15 bp, Homo sapiens
caaaggaataccagc

SEQ ID NO: 542210 - DNA, 15 bp, Homo sapiens
tcaaaggaataccag

SEQ ID NO: 542211 - DNA, 15 bp, Homo sapiens
ttcaaaggaatacca

SEQ ID NO: 542212 - DNA, 15 bp, Homo sapiens
attcaaaggaatacc

SEQ ID NO: 542213 - DNA, 15 bp, Homo sapiens
cattcaaaggaatac

SEQ ID NO: 542214 - DNA, 15 bp, Homo sapiens
ccattcaaaggaata

SEQ ID NO: 542215 - DNA, 15 bp, Homo sapiens
accattcaaaggaat

SEQ ID NO: 542216 - DNA, 15 bp, Homo sapiens
aaccattcaaaggaa

SEQ ID NO: 542217 - DNA, 15 bp, Homo sapiens
taaccattcaaagga

SEQ ID NO: 542218 - DNA, 15 bp, Homo sapiens
ataaccattcaaagg

SEQ ID NO: 542219 - DNA, 15 bp, Homo sapiens
tataaccattcaaag

SEQ ID NO: 542220 - DNA, 15 bp, Homo sapiens
ctataaccattcaaa

SEQ ID NO: 542221 - DNA, 15 bp, Homo sapiens
tctataaccattcaa

SEQ ID NO: 542222 - DNA, 15 bp, Homo sapiens
gtctataaccattca

SEQ ID NO: 542223 - DNA, 15 bp, Homo sapiens
agtctataaccattc

SEQ ID NO: 542224 - DNA, 15 bp, Homo sapiens
aagtctataaccatt

SEQ ID NO: 542225 - DNA, 15 bp, Homo sapiens
caagtctataaccat

SEQ ID NO: 542226 - DNA, 15 bp, Homo sapiens
acaagtctataacca

SEQ ID NO: 542227 - DNA, 15 bp, Homo sapiens
aacaagtctataacc

SEQ ID NO: 542228 - DNA, 15 bp, Homo sapiens
aaacaagtctataac

SEQ ID NO: 542229 - DNA, 15 bp, Homo sapiens
taaacaagtctataa

SEQ ID NO: 542230 - DNA, 15 bp, Homo sapiens
gtaaacaagtctata

SEQ ID NO: 542231 - DNA, 15 bp, Homo sapiens
ggtaaacaagtctat

SEQ ID NO: 542232 - DNA, 15 bp, Homo sapiens
aggtaaacaagtcta

SEQ ID NO: 542233 - DNA, 15 bp, Homo sapiens
caggtaaacaagtct

SEQ ID NO: 542234 - DNA, 15 bp, Homo sapiens
acaggtaaacaagtc

SEQ ID NO: 542235 - DNA, 15 bp, Homo sapiens
aacaggtaaacaagt

SEQ ID NO: 542236 - DNA, 15 bp, Homo sapiens
aaacaggtaaacaag

SEQ ID NO: 542237 - DNA, 15 bp, Homo sapiens
gaaacaggtaaacaa

SEQ ID NO: 542238 - DNA, 15 bp, Homo sapiens
agaaacaggtaaaca

SEQ ID NO: 542239 - DNA, 15 bp, Homo sapiens
gagaaacaggtaaac

SEQ ID NO: 542240 - DNA, 15 bp, Homo sapiens
ggagaaacaggtaaa

SEQ ID NO: 542241 - DNA, 15 bp, Homo sapiens
tggagaaacaggtaa

SEQ ID NO: 542242 - DNA, 15 bp, Homo sapiens
atggagaaacaggta

SEQ ID NO: 542243 - DNA, 15 bp, Homo sapiens
aatggagaaacaggt

SEQ ID NO: 542244 - DNA, 15 bp, Homo sapiens
caatggagaaacagg

SEQ ID NO: 542245 - DNA, 15 bp, Homo sapiens
tcaatggagaaacag

SEQ ID NO: 542246 - DNA, 15 bp, Homo sapiens
gtcaatggagaaaca

SEQ ID NO: 542247 - DNA, 15 bp, Homo sapiens
agtcaatggagaaac

SEQ ID NO: 542248 - DNA, 15 bp, Homo sapiens
cagtcaatggagaaa

SEQ ID NO: 542249 - DNA, 15 bp, Homo sapiens
tcagtcaatggagaa

SEQ ID NO: 542250 - DNA, 15 bp, Homo sapiens
atcagtcaatggaga

SEQ ID NO: 542251 - DNA, 15 bp, Homo sapiens
gatcagtcaatggag

SEQ ID NO: 542252 - DNA, 15 bp, Homo sapiens
tgatcagtcaatgga

SEQ ID NO: 542253 - DNA, 15 bp, Homo sapiens
atgatcagtcaatgg

SEQ ID NO: 542254 - DNA, 15 bp, Homo sapiens
aatgatcagtcaatg

SEQ ID NO: 542255 - DNA, 15 bp, Homo sapiens
aaatgatcagtcaat

SEQ ID NO: 542256 - DNA, 15 bp, Homo sapiens
aaaatgatcagtcaa

SEQ ID NO: 542257 - DNA, 15 bp, Homo sapiens
gaaaatgatcagtca

SEQ ID NO: 542258 - DNA, 15 bp, Homo sapiens
agaaaatgatcagtc

SEQ ID NO: 542259 - DNA, 15 bp, Homo sapiens
gagaaaatgatcagt

SEQ ID NO: 542260 - DNA, 15 bp, Homo sapiens
agagaaaatgatcag

SEQ ID NO: 542261 - DNA, 15 bp, Homo sapiens
cagagaaaatgatca

SEQ ID NO: 542262 - DNA, 15 bp, Homo sapiens
acagagaaaatgatc

SEQ ID NO: 542263 - DNA, 15 bp, Homo sapiens
gacagagaaaatgat

SEQ ID NO: 542264 - DNA, 15 bp, Homo sapiens
tgacagagaaaatga

SEQ ID NO: 542265 - DNA, 15 bp, Homo sapiens
gtgacagagaaaatg

SEQ ID NO: 542266 - DNA, 15 bp, Homo sapiens
tgtgacagagaaaat

SEQ ID NO: 542267 - DNA, 15 bp, Homo sapiens
ttgtgacagagaaaa

SEQ ID NO: 542268 - DNA, 15 bp, Homo sapiens
tttgtgacagagaaa

SEQ ID NO: 542269 - DNA, 15 bp, Homo sapiens
atttgtgacagagaa

SEQ ID NO: 542270 - DNA, 15 bp, Homo sapiens
catttgtgacagaga

SEQ ID NO: 542271 - DNA, 15 bp, Homo sapiens
tcatttgtgacagag

SEQ ID NO: 542272 - DNA, 15 bp, Homo sapiens
gtcatttgtgacaga

SEQ ID NO: 542273 - DNA, 15 bp, Homo sapiens
tgtcatttgtgacag

SEQ ID NO: 542274 - DNA, 15 bp, Homo sapiens
ctgtcatttgtgaca

SEQ ID NO: 542275 - DNA, 15 bp, Homo sapiens
gctgtcatttgtgac

SEQ ID NO: 542276 - DNA, 15 bp, Homo sapiens
cgctgtcatttgtga

SEQ ID NO: 542277 - DNA, 15 bp, Homo sapiens
tcgctgtcatttgtg

SEQ ID NO: 542278 - DNA, 15 bp, Homo sapiens
atcgctgtcatttgt

SEQ ID NO: 542279 - DNA, 15 bp, Homo sapiens
tatcgctgtcatttg

SEQ ID NO: 542280 - DNA, 15 bp, Homo sapiens
atatcgctgtcattt

SEQ ID NO: 542281 - DNA, 15 bp, Homo sapiens
gatatcgctgtcatt

SEQ ID NO: 542282 - DNA, 15 bp, Homo sapiens
ggatatcgctgtcat

SEQ ID NO: 542283 - DNA, 15 bp, Homo sapiens
gggatatcgctgtca

SEQ ID NO: 542284 - DNA, 15 bp, Homo sapiens
cgggatatcgctgtc

SEQ ID NO: 542285 - DNA, 15 bp, Homo sapiens
tcgggatatcgctgt

SEQ ID NO: 542286 - DNA, 15 bp, Homo sapiens
gtcgggatatcgctg

SEQ ID NO: 542287 - DNA, 15 bp, Homo sapiens
tgtcgggatatcgct

SEQ ID NO: 542288 - DNA, 15 bp, Homo sapiens
gtgtcgggatatcgc

SEQ ID NO: 542289 - DNA, 15 bp, Homo sapiens
tgtgtcgggatatcg

SEQ ID NO: 542290 - DNA, 15 bp, Homo sapiens
atgtgtcgggatatc

SEQ ID NO: 542291 - DNA, 15 bp, Homo sapiens
gatgtgtcgggatat

SEQ ID NO: 542292 - DNA, 15 bp, Homo sapiens
ggatgtgtcgggata

SEQ ID NO: 542293 - DNA, 15 bp, Homo sapiens
gggatgtgtcgggat

SEQ ID NO: 542294 - DNA, 15 bp, Homo sapiens
agggatgtgtcggga

SEQ ID NO: 542295 - DNA, 15 bp, Homo sapiens
gagggatgtgtcggg

SEQ ID NO: 542296 - DNA, 15 bp, Homo sapiens
agagggatgtgtcgg

SEQ ID NO: 542297 - DNA, 15 bp, Homo sapiens
aagagggatgtgtcg

SEQ ID NO: 542298 - DNA, 15 bp, Homo sapiens
gaagagggatgtgtc

SEQ ID NO: 542299 - DNA, 15 bp, Homo sapiens
cgaagagggatgtgt

SEQ ID NO: 542300 - DNA, 15 bp, Homo sapiens
acgaagagggatgtg

SEQ ID NO: 542301 - DNA, 15 bp, Homo sapiens
cacgaagagggatgt

SEQ ID NO: 542302 - DNA, 15 bp, Homo sapiens
acacgaagagggatg

SEQ ID NO: 542303 - DNA, 15 bp, Homo sapiens
cacacgaagagggat

SEQ ID NO: 542304 - DNA, 15 bp, Homo sapiens
ccacacgaagaggga

SEQ ID NO: 542305 - DNA, 15 bp, Homo sapiens
accacacgaagaggg

SEQ ID NO: 542306 - DNA, 15 bp, Homo sapiens
aaccacacgaagagg

SEQ ID NO: 542307 - DNA, 15 bp, Homo sapiens
gaaccacacgaagag

SEQ ID NO: 542308 - DNA, 15 bp, Homo sapiens
tgaaccacacgaaga

SEQ ID NO: 542309 - DNA, 15 bp, Homo sapiens
atgaaccacacgaag

SEQ ID NO: 542310 - DNA, 15 bp, Homo sapiens
catgaaccacacgaa

SEQ ID NO: 542311 - DNA, 15 bp, Homo sapiens
tcatgaaccacacga

SEQ ID NO: 542312 - DNA, 15 bp, Homo sapiens
ttcatgaaccacacg

SEQ ID NO: 542313 - DNA, 15 bp, Homo sapiens
gttcatgaaccacac

SEQ ID NO: 542314 - DNA, 15 bp, Homo sapiens
tgttcatgaaccaca

SEQ ID NO: 542315 - DNA, 15 bp, Homo sapiens
atgttcatgaaccac

SEQ ID NO: 542316 - DNA, 15 bp, Homo sapiens
aatgttcatgaacca

SEQ ID NO: 542317 - DNA, 15 bp, Homo sapiens
aaatgttcatgaacc

SEQ ID NO: 542318 - DNA, 15 bp, Homo sapiens
gaaatgttcatgaac

SEQ ID NO: 542319 - DNA, 15 bp, Homo sapiens
ggaaatgttcatgaa

SEQ ID NO: 542320 - DNA, 15 bp, Homo sapiens
tggaaatgttcatga

SEQ ID NO: 542321 - DNA, 15 bp, Homo sapiens
atggaaatgttcatg

SEQ ID NO: 542322 - DNA, 15 bp, Homo sapiens
tatggaaatgttcat

SEQ ID NO: 542323 - DNA, 15 bp, Homo sapiens
ctatggaaatgttca

SEQ ID NO: 542324 - DNA, 15 bp, Homo sapiens
cctatggaaatgttc

SEQ ID NO: 542325 - DNA, 15 bp, Homo sapiens
ccctatggaaatgtt

SEQ ID NO: 542326 - DNA, 15 bp, Homo sapiens
accctatggaaatgt

SEQ ID NO: 542327 - DNA, 15 bp, Homo sapiens
caccctatggaaatg

SEQ ID NO: 542328 - DNA, 15 bp, Homo sapiens
ccaccctatggaaat

SEQ ID NO: 542329 - DNA, 15 bp, Homo sapiens
tccaccctatggaaa

SEQ ID NO: 542330 - DNA, 15 bp, Homo sapiens
atccaccctatggaa

SEQ ID NO: 542331 - DNA, 15 bp, Homo sapiens
aatccaccctatgga

SEQ ID NO: 542332 - DNA, 15 bp, Homo sapiens
aaatccaccctatgg

SEQ ID NO: 542333 - DNA, 15 bp, Homo sapiens
gaaatccaccctatg

SEQ ID NO: 542334 - DNA, 15 bp, Homo sapiens
agaaatccaccctat

SEQ ID NO: 542335 - DNA, 15 bp, Homo sapiens
tagaaatccacccta

SEQ ID NO: 542336 - DNA, 15 bp, Homo sapiens
ctagaaatccaccct

SEQ ID NO: 542337 - DNA, 15 bp, Homo sapiens
tctagaaatccaccc

SEQ ID NO: 542338 - DNA, 15 bp, Homo sapiens
ttctagaaatccacc

SEQ ID NO: 542339 - DNA, 15 bp, Homo sapiens
cttctagaaatccac

SEQ ID NO: 542340 - DNA, 15 bp, Homo sapiens
acttctagaaatcca

SEQ ID NO: 542341 - DNA, 15 bp, Homo sapiens
cacttctagaaatcc

SEQ ID NO: 542342 - DNA, 15 bp, Homo sapiens
ccacttctagaaatc

SEQ ID NO: 542343 - DNA, 15 bp, Homo sapiens
cccacttctagaaat

SEQ ID NO: 542344 - DNA, 15 bp, Homo sapiens
ccccacttctagaaa

SEQ ID NO: 542345 - DNA, 15 bp, Homo sapiens
gccccacttctagaa

SEQ ID NO: 542346 - DNA, 15 bp, Homo sapiens
ggccccacttctaga

SEQ ID NO: 542347 - DNA, 15 bp, Homo sapiens
aggccccacttctag

SEQ ID NO: 542348 - DNA, 15 bp, Homo sapiens
aaggccccacttcta

SEQ ID NO: 542349 - DNA, 15 bp, Homo sapiens
caaggccccacttct

SEQ ID NO: 542350 - DNA, 15 bp, Homo sapiens
ccaaggccccacttc

SEQ ID NO: 542351 - DNA, 15 bp, Homo sapiens
cccaaggccccactt

SEQ ID NO: 542352 - DNA, 15 bp, Homo sapiens
tcccaaggccccact

SEQ ID NO: 542353 - DNA, 15 bp, Homo sapiens
ctcccaaggccccac

SEQ ID NO: 542354 - DNA, 15 bp, Homo sapiens
gctcccaaggcccca

SEQ ID NO: 542355 - DNA, 15 bp, Homo sapiens
tgctcccaaggcccc

SEQ ID NO: 542356 - DNA, 15 bp, Homo sapiens
ctgctcccaaggccc

SEQ ID NO: 542357 - DNA, 15 bp, Homo sapiens
cctgctcccaaggcc

SEQ ID NO: 542358 - DNA, 15 bp, Homo sapiens
acctgctcccaaggc

SEQ ID NO: 542359 - DNA, 15 bp, Homo sapiens
cacctgctcccaagg

SEQ ID NO: 542360 - DNA, 15 bp, Homo sapiens
acacctgctcccaag

SEQ ID NO: 542361 - DNA, 15 bp, Homo sapiens
cacacctgctcccaa

SEQ ID NO: 542362 - DNA, 15 bp, Homo sapiens
gcacacctgctccca

SEQ ID NO: 542363 - DNA, 15 bp, Homo sapiens
agcacacctgctccc

SEQ ID NO: 542364 - DNA, 15 bp, Homo sapiens
gagcacacctgctcc

SEQ ID NO: 542365 - DNA, 15 bp, Homo sapiens
tgagcacacctgctc

SEQ ID NO: 542366 - DNA, 15 bp, Homo sapiens
ctgagcacacctgct

SEQ ID NO: 542367 - DNA, 15 bp, Homo sapiens
actgagcacacctgc

SEQ ID NO: 542368 - DNA, 15 bp, Homo sapiens
aactgagcacacctg

SEQ ID NO: 542369 - DNA, 15 bp, Homo sapiens
aaactgagcacacct

SEQ ID NO: 542370 - DNA, 15 bp, Homo sapiens
caaactgagcacacc

SEQ ID NO: 542371 - DNA, 15 bp, Homo sapiens
tcaaactgagcacac

SEQ ID NO: 542372 - DNA, 15 bp, Homo sapiens
ctcaaactgagcaca

SEQ ID NO: 542373 - DNA, 15 bp, Homo sapiens
actcaaactgagcac

SEQ ID NO: 542374 - DNA, 15 bp, Homo sapiens
aactcaaactgagca

SEQ ID NO: 542375 - DNA, 15 bp, Homo sapiens
aaactcaaactgagc

SEQ ID NO: 542376 - DNA, 15 bp, Homo sapiens
aaaactcaaactgag

SEQ ID NO: 542377 - DNA, 15 bp, Homo sapiens
caaaactcaaactga

SEQ ID NO: 542378 - DNA, 15 bp, Homo sapiens
tcaaaactcaaactg

SEQ ID NO: 542379 - DNA, 15 bp, Homo sapiens
atcaaaactcaaact

SEQ ID NO: 542380 - DNA, 15 bp, Homo sapiens
catcaaaactcaaac

SEQ ID NO: 542381 - DNA, 15 bp, Homo sapiens
tcatcaaaactcaaa

SEQ ID NO: 542382 - DNA, 15 bp, Homo sapiens
atcatcaaaactcaa

SEQ ID NO: 542383 - DNA, 15 bp, Homo sapiens
aatcatcaaaactca

SEQ ID NO: 542384 - DNA, 15 bp, Homo sapiens
taatcatcaaaactc

SEQ ID NO: 542385 - DNA, 15 bp, Homo sapiens
gtaatcatcaaaact

SEQ ID NO: 542386 - DNA, 15 bp, Homo sapiens
cgtaatcatcaaaac

SEQ ID NO: 542387 - DNA, 15 bp, Homo sapiens
ccgtaatcatcaaaa

SEQ ID NO: 542388 - DNA, 15 bp, Homo sapiens
gccgtaatcatcaaa

SEQ ID NO: 542389 - DNA, 15 bp, Homo sapiens
ggccgtaatcatcaa

SEQ ID NO: 542390 - DNA, 15 bp, Homo sapiens
tggccgtaatcatca

SEQ ID NO: 542391 - DNA, 15 bp, Homo sapiens
ttggccgtaatcatc

SEQ ID NO: 542392 - DNA, 15 bp, Homo sapiens
tttggccgtaatcat

SEQ ID NO: 542393 - DNA, 15 bp, Homo sapiens
atttggccgtaatca

SEQ ID NO: 542394 - DNA, 15 bp, Homo sapiens
aatttggccgtaatc

SEQ ID NO: 542395 - DNA, 15 bp, Homo sapiens
caatttggccgtaat

SEQ ID NO: 542396 - DNA, 15 bp, Homo sapiens
gcaatttggccgtaa

SEQ ID NO: 542397 - DNA, 15 bp, Homo sapiens
ggcaatttggccgta

SEQ ID NO: 542398 - DNA, 15 bp, Homo sapiens
gggcaatttggccgt

SEQ ID NO: 542399 - DNA, 15 bp, Homo sapiens
agggcaatttggccg

SEQ ID NO: 542400 - DNA, 15 bp, Homo sapiens
aagggcaatttggcc

SEQ ID NO: 542401 - DNA, 15 bp, Homo sapiens
gaagggcaatttggc

SEQ ID NO: 542402 - DNA, 15 bp, Homo sapiens
agaagggcaatttgg

SEQ ID NO: 542403 - DNA, 15 bp, Homo sapiens
cagaagggcaatttg

SEQ ID NO: 542404 - DNA, 15 bp, Homo sapiens
gcagaagggcaattt

SEQ ID NO: 542405 - DNA, 15 bp, Homo sapiens
tgcagaagggcaatt

SEQ ID NO: 542406 - DNA, 15 bp, Homo sapiens
gtgcagaagggcaat

SEQ ID NO: 542407 - DNA, 15 bp, Homo sapiens
tgtgcagaagggcaa

SEQ ID NO: 542408 - DNA, 15 bp, Homo sapiens
ctgtgcagaagggca

SEQ ID NO: 542409 - DNA, 15 bp, Homo sapiens
gctgtgcagaagggc

SEQ ID NO: 542410 - DNA, 15 bp, Homo sapiens
agctgtgcagaaggg

SEQ ID NO: 542411 - DNA, 15 bp, Homo sapiens
gagctgtgcagaagg

SEQ ID NO: 542412 - DNA, 15 bp, Homo sapiens
agagctgtgcagaag

SEQ ID NO: 542413 - DNA, 15 bp, Homo sapiens
cagagctgtgcagaa

SEQ ID NO: 542414 - DNA, 15 bp, Homo sapiens
acagagctgtgcaga

SEQ ID NO: 542415 - DNA, 15 bp, Homo sapiens
aacagagctgtgcag

SEQ ID NO: 542416 - DNA, 15 bp, Homo sapiens
caacagagctgtgca

SEQ ID NO: 542417 - DNA, 15 bp, Homo sapiens
gcaacagagctgtgc

SEQ ID NO: 542418 - DNA, 15 bp, Homo sapiens
agcaacagagctgtg

SEQ ID NO: 542419 - DNA, 15 bp, Homo sapiens
cagcaacagagctgt

SEQ ID NO: 542420 - DNA, 15 bp, Homo sapiens
gcagcaacagagctg

SEQ ID NO: 542421 - DNA, 15 bp, Homo sapiens
tgcagcaacagagct

SEQ ID NO: 542422 - DNA, 15 bp, Homo sapiens
atgcagcaacagagc

SEQ ID NO: 542423 - DNA, 15 bp, Homo sapiens
gatgcagcaacagag

SEQ ID NO: 542424 - DNA, 15 bp, Homo sapiens
ggatgcagcaacaga

SEQ ID NO: 542425 - DNA, 15 bp, Homo sapiens
tggatgcagcaacag

SEQ ID NO: 542426 - DNA, 15 bp, Homo sapiens
gtggatgcagcaaca

SEQ ID NO: 542427 - DNA, 15 bp, Homo sapiens
ggtggatgcagcaac

SEQ ID NO: 542428 - DNA, 15 bp, Homo sapiens
gggtggatgcagcaa

SEQ ID NO: 542429 - DNA, 15 bp, Homo sapiens
tgggtggatgcagca

SEQ ID NO: 542430 - DNA, 15 bp, Homo sapiens
gtgggtggatgcagc

SEQ ID NO: 542431 - DNA, 15 bp, Homo sapiens
tgtgggtggatgcag

SEQ ID NO: 542432 - DNA, 15 bp, Homo sapiens
ttgtgggtggatgca

SEQ ID NO: 542433 - DNA, 15 bp, Homo sapiens
cttgtgggtggatgc

SEQ ID NO: 542434 - DNA, 15 bp, Homo sapiens
ccttgtgggtggatg

SEQ ID NO: 542435 - DNA, 15 bp, Homo sapiens
accttgtgggtggat

SEQ ID NO: 542436 - DNA, 15 bp, Homo sapiens
taccttgtgggtgga

SEQ ID NO: 542437 - DNA, 15 bp, Homo sapiens
ataccttgtgggtgg

SEQ ID NO: 542438 - DNA, 15 bp, Homo sapiens
cataccttgtgggtg

SEQ ID NO: 542439 - DNA, 15 bp, Homo sapiens
ccataccttgtgggt

SEQ ID NO: 542440 - DNA, 15 bp, Homo sapiens
cccataccttgtggg

SEQ ID NO: 542441 - DNA, 15 bp, Homo sapiens
tcccataccttgtgg

SEQ ID NO: 542442 - DNA, 15 bp, Homo sapiens
gtcccataccttgtg

SEQ ID NO: 542443 - DNA, 15 bp, Homo sapiens
agtcccataccttgt

SEQ ID NO: 542444 - DNA, 15 bp, Homo sapiens
cagtcccataccttg

SEQ ID NO: 542445 - DNA, 15 bp, Homo sapiens
acagtcccatacctt

SEQ ID NO: 542446 - DNA, 15 bp, Homo sapiens
cacagtcccatacct

SEQ ID NO: 542447 - DNA, 15 bp, Homo sapiens
gcacagtcccatacc

SEQ ID NO: 542448 - DNA, 15 bp, Homo sapiens
agcacagtcccatac

SEQ ID NO: 542449 - DNA, 15 bp, Homo sapiens
tagcacagtcccata

SEQ ID NO: 542450 - DNA, 15 bp, Homo sapiens
gtagcacagtcccat

SEQ ID NO: 542451 - DNA, 15 bp, Homo sapiens
agtagcacagtccca

SEQ ID NO: 542452 - DNA, 15 bp, Homo sapiens
aagtagcacagtccc

SEQ ID NO: 542453 - DNA, 15 bp, Homo sapiens
gaagtagcacagtcc

SEQ ID NO: 542454 - DNA, 15 bp, Homo sapiens
ggaagtagcacagtc

SEQ ID NO: 542455 - DNA, 15 bp, Homo sapiens
gggaagtagcacagt

SEQ ID NO: 542456 - DNA, 15 bp, Homo sapiens
ggggaagtagcacag

SEQ ID NO: 542457 - DNA, 15 bp, Homo sapiens
aggggaagtagcaca

SEQ ID NO: 542458 - DNA, 15 bp, Homo sapiens
taggggaagtagcac

SEQ ID NO: 542459 - DNA, 15 bp, Homo sapiens
ataggggaagtagca

SEQ ID NO: 542460 - DNA, 15 bp, Homo sapiens
gataggggaagtagc

SEQ ID NO: 542461 - DNA, 15 bp, Homo sapiens
agataggggaagtag

SEQ ID NO: 542462 - DNA, 15 bp, Homo sapiens
gagataggggaagta

SEQ ID NO: 542463 - DNA, 15 bp, Homo sapiens
agagataggggaagt

SEQ ID NO: 542464 - DNA, 15 bp, Homo sapiens
cagagataggggaag

SEQ ID NO: 542465 - DNA, 15 bp, Homo sapiens
gcagagataggggaa

SEQ ID NO: 542466 - DNA, 15 bp, Homo sapiens
ggcagagatagggga

SEQ ID NO: 542467 - DNA, 15 bp, Homo sapiens
tggcagagatagggg

SEQ ID NO: 542468 - DNA, 15 bp, Homo sapiens
atggcagagataggg

SEQ ID NO: 542469 - DNA, 15 bp, Homo sapiens
gatggcagagatagg

SEQ ID NO: 542470 - DNA, 15 bp, Homo sapiens
tgatggcagagatag

SEQ ID NO: 542471 - DNA, 15 bp, Homo sapiens
gtgatggcagagata

SEQ ID NO: 542472 - DNA, 15 bp, Homo sapiens
agtgatggcagagat

SEQ ID NO: 542473 - DNA, 15 bp, Homo sapiens
cagtgatggcagaga

SEQ ID NO: 542474 - DNA, 15 bp, Homo sapiens
ccagtgatggcagag

SEQ ID NO: 542475 - DNA, 15 bp, Homo sapiens
accagtgatggcaga

SEQ ID NO: 542476 - DNA, 15 bp, Homo sapiens
taccagtgatggcag

SEQ ID NO: 542477 - DNA, 15 bp, Homo sapiens
ttaccagtgatggca

SEQ ID NO: 542478 - DNA, 15 bp, Homo sapiens
attaccagtgatggc

SEQ ID NO: 542479 - DNA, 15 bp, Homo sapiens
aattaccagtgatgg

SEQ ID NO: 542480 - DNA, 15 bp, Homo sapiens
taattaccagtgatg

SEQ ID NO: 542481 - DNA, 15 bp, Homo sapiens
gtaattaccagtgat

SEQ ID NO: 542482 - DNA, 15 bp, Homo sapiens
agtaattaccagtga

SEQ ID NO: 542483 - DNA, 15 bp, Homo sapiens
cagtaattaccagtg

SEQ ID NO: 542484 - DNA, 15 bp, Homo sapiens
tcagtaattaccagt

SEQ ID NO: 542485 - DNA, 15 bp, Homo sapiens
atcagtaattaccag

SEQ ID NO: 542486 - DNA, 15 bp, Homo sapiens
aatcagtaattacca

SEQ ID NO: 542487 - DNA, 15 bp, Homo sapiens
aaatcagtaattacc

SEQ ID NO: 542488 - DNA, 15 bp, Homo sapiens
taaatcagtaattac

SEQ ID NO: 542489 - DNA, 15 bp, Homo sapiens
ataaatcagtaatta

SEQ ID NO: 542490 - DNA, 15 bp, Homo sapiens
gataaatcagtaatt

SEQ ID NO: 542491 - DNA, 15 bp, Homo sapiens
tgataaatcagtaat

SEQ ID NO: 542492 - DNA, 15 bp, Homo sapiens
atgataaatcagtaa

SEQ ID NO: 542493 - DNA, 15 bp, Homo sapiens
aatgataaatcagta

SEQ ID NO: 542494 - DNA, 15 bp, Homo sapiens
taatgataaatcagt

SEQ ID NO: 542495 - DNA, 15 bp, Homo sapiens
gtaatgataaatcag

SEQ ID NO: 542496 - DNA, 15 bp, Homo sapiens
ggtaatgataaatca

SEQ ID NO: 542497 - DNA, 15 bp, Homo sapiens
tggtaatgataaatc

SEQ ID NO: 542498 - DNA, 15 bp, Homo sapiens
atggtaatgataaat

SEQ ID NO: 542499 - DNA, 15 bp, Homo sapiens
aatggtaatgataaa

SEQ ID NO: 542500 - DNA, 15 bp, Homo sapiens
aaatggtaatgataa

SEQ ID NO: 542501 - DNA, 15 bp, Homo sapiens
aaaatggtaatgata

SEQ ID NO: 542502 - DNA, 15 bp, Homo sapiens
aaaaatggtaatgat

SEQ ID NO: 542503 - DNA, 15 bp, Homo sapiens
aaaaaatggtaatga

SEQ ID NO: 542504 - DNA, 15 bp, Homo sapiens
caaaaaatggtaatg

SEQ ID NO: 542505 - DNA, 15 bp, Homo sapiens
ccaaaaaatggtaat

SEQ ID NO: 542506 - DNA, 15 bp, Homo sapiens
accaaaaaatggtaa

SEQ ID NO: 542507 - DNA, 15 bp, Homo sapiens
taccaaaaaatggta

SEQ ID NO: 542508 - DNA, 15 bp, Homo sapiens
ctaccaaaaaatggt

SEQ ID NO: 542509 - DNA, 15 bp, Homo sapiens
gctaccaaaaaatgg

SEQ ID NO: 542510 - DNA, 15 bp, Homo sapiens
ggctaccaaaaaatg

SEQ ID NO: 542511 - DNA, 15 bp, Homo sapiens
tggctaccaaaaaat

SEQ ID NO: 542512 - DNA, 15 bp, Homo sapiens
ttggctaccaaaaaa

SEQ ID NO: 542513 - DNA, 15 bp, Homo sapiens
cttggctaccaaaaa

SEQ ID NO: 542514 - DNA, 15 bp, Homo sapiens
acttggctaccaaaa

SEQ ID NO: 542515 - DNA, 15 bp, Homo sapiens
aacttggctaccaaa

SEQ ID NO: 542516 - DNA, 15 bp, Homo sapiens
gaacttggctaccaa

SEQ ID NO: 542517 - DNA, 15 bp, Homo sapiens
ggaacttggctacca

SEQ ID NO: 542518 - DNA, 15 bp, Homo sapiens
gggaacttggctacc

SEQ ID NO: 542519 - DNA, 15 bp, Homo sapiens
cgggaacttggctac

SEQ ID NO: 542520 - DNA, 15 bp, Homo sapiens
acgggaacttggcta

SEQ ID NO: 542521 - DNA, 15 bp, Homo sapiens
cacgggaacttggct

SEQ ID NO: 542522 - DNA, 15 bp, Homo sapiens
acacgggaacttggc

SEQ ID NO: 542523 - DNA, 15 bp, Homo sapiens
cacacgggaacttgg

SEQ ID NO: 542524 - DNA, 15 bp, Homo sapiens
acacacgggaacttg

SEQ ID NO: 542525 - DNA, 15 bp, Homo sapiens
gacacacgggaactt

SEQ ID NO: 542526 - DNA, 15 bp, Homo sapiens
agacacacgggaact

SEQ ID NO: 542527 - DNA, 15 bp, Homo sapiens
gagacacacgggaac

SEQ ID NO: 542528 - DNA, 15 bp, Homo sapiens
agagacacacgggaa

SEQ ID NO: 542529 - DNA, 15 bp, Homo sapiens
cagagacacacggga

SEQ ID NO: 542530 - DNA, 15 bp, Homo sapiens
ccagagacacacggg

SEQ ID NO: 542531 - DNA, 15 bp, Homo sapiens
accagagacacacgg

SEQ ID NO: 542532 - DNA, 15 bp, Homo sapiens
gaccagagacacacg

SEQ ID NO: 542533 - DNA, 15 bp, Homo sapiens
ggaccagagacacac

SEQ ID NO: 542534 - DNA, 15 bp, Homo sapiens
aggaccagagacaca

SEQ ID NO: 542535 - DNA, 15 bp, Homo sapiens
gaggaccagagacac

SEQ ID NO: 542536 - DNA, 15 bp, Homo sapiens
ggaggaccagagaca

SEQ ID NO: 542537 - DNA, 15 bp, Homo sapiens
tggaggaccagagac

SEQ ID NO: 542538 - DNA, 15 bp, Homo sapiens
ttggaggaccagaga

SEQ ID NO: 542539 - DNA, 15 bp, Homo sapiens
cttggaggaccagag

SEQ ID NO: 542540 - DNA, 15 bp, Homo sapiens
ccttggaggaccaga

SEQ ID NO: 542541 - DNA, 15 bp, Homo sapiens
tccttggaggaccag

SEQ ID NO: 542542 - DNA, 15 bp, Homo sapiens
ttccttggaggacca

SEQ ID NO: 542543 - DNA, 15 bp, Homo sapiens
cttccttggaggacc

SEQ ID NO: 542544 - DNA, 15 bp, Homo sapiens
ccttccttggaggac

SEQ ID NO: 542545 - DNA, 15 bp, Homo sapiens
gccttccttggagga

SEQ ID NO: 542546 - DNA, 15 bp, Homo sapiens
ggccttccttggagg

SEQ ID NO: 542547 - DNA, 15 bp, Homo sapiens
gggccttccttggag

SEQ ID NO: 542548 - DNA, 15 bp, Homo sapiens
tgggccttccttgga

SEQ ID NO: 542549 - DNA, 15 bp, Homo sapiens
ctgggccttccttgg

SEQ ID NO: 542550 - DNA, 15 bp, Homo sapiens
gctgggccttccttg

SEQ ID NO: 542551 - DNA, 15 bp, Homo sapiens
agctgggccttcctt

SEQ ID NO: 542552 - DNA, 15 bp, Homo sapiens
cagctgggccttcct

SEQ ID NO: 542553 - DNA, 15 bp, Homo sapiens
ccagctgggccttcc

SEQ ID NO: 542554 - DNA, 15 bp, Homo sapiens
accagctgggccttc

SEQ ID NO: 542555 - DNA, 15 bp, Homo sapiens
caccagctgggcctt

SEQ ID NO: 542556 - DNA, 15 bp, Homo sapiens
ccaccagctgggcct

SEQ ID NO: 542557 - DNA, 15 bp, Homo sapiens
tccaccagctgggcc

SEQ ID NO: 542558 - DNA, 15 bp, Homo sapiens
gtccaccagctgggc

SEQ ID NO: 542559 - DNA, 15 bp, Homo sapiens
tgtccaccagctggg

SEQ ID NO: 542560 - DNA, 15 bp, Homo sapiens
atgtccaccagctgg

SEQ ID NO: 542561 - DNA, 15 bp, Homo sapiens
catgtccaccagctg

SEQ ID NO: 542562 - DNA, 15 bp, Homo sapiens
ccatgtccaccagct

SEQ ID NO: 542563 - DNA, 15 bp, Homo sapiens
cccatgtccaccagc

SEQ ID NO: 542564 - DNA, 15 bp, Homo sapiens
ccccatgtccaccag

SEQ ID NO: 542565 - DNA, 15 bp, Homo sapiens
cccccatgtccacca

SEQ ID NO: 542566 - DNA, 15 bp, Homo sapiens
tcccccatgtccacc

SEQ ID NO: 542567 - DNA, 15 bp, Homo sapiens
ctcccccatgtccac

SEQ ID NO: 542568 - DNA, 15 bp, Homo sapiens
tctcccccatgtcca

SEQ ID NO: 542569 - DNA, 15 bp, Homo sapiens
ctctcccccatgtcc

SEQ ID NO: 542570 - DNA, 15 bp, Homo sapiens
cctctcccccatgtc

SEQ ID NO: 542571 - DNA, 15 bp, Homo sapiens
gcctctcccccatgt

SEQ ID NO: 542572 - DNA, 15 bp, Homo sapiens
ggcctctcccccatg

SEQ ID NO: 542573 - DNA, 15 bp, Homo sapiens
gggcctctcccccat

SEQ ID NO: 542574 - DNA, 15 bp, Homo sapiens
ggggcctctccccca

SEQ ID NO: 542575 - DNA, 15 bp, Homo sapiens
aggggcctctccccc

SEQ ID NO: 542576 - DNA, 15 bp, Homo sapiens
gaggggcctctcccc

SEQ ID NO: 542577 - DNA, 15 bp, Homo sapiens
tgaggggcctctccc

SEQ ID NO: 542578 - DNA, 15 bp, Homo sapiens
gtgaggggcctctcc

SEQ ID NO: 542579 - DNA, 15 bp, Homo sapiens
agtgaggggcctctc

SEQ ID NO: 542580 - DNA, 15 bp, Homo sapiens
cagtgaggggcctct

SEQ ID NO: 542581 - DNA, 15 bp, Homo sapiens
gcagtgaggggcctc

SEQ ID NO: 542582 - DNA, 15 bp, Homo sapiens
tgcagtgaggggcct

SEQ ID NO: 542583 - DNA, 15 bp, Homo sapiens
ctgcagtgaggggcc

SEQ ID NO: 542584 - DNA, 15 bp, Homo sapiens
gctgcagtgaggggc

SEQ ID NO: 542585 - DNA, 15 bp, Homo sapiens
agctgcagtgagggg

SEQ ID NO: 542586 - DNA, 15 bp, Homo sapiens
cagctgcagtgaggg

SEQ ID NO: 542587 - DNA, 15 bp, Homo sapiens
ccagctgcagtgagg

SEQ ID NO: 542588 - DNA, 15 bp, Homo sapiens
cccagctgcagtgag

SEQ ID NO: 542589 - DNA, 15 bp, Homo sapiens
gcccagctgcagtga

SEQ ID NO: 542590 - DNA, 15 bp, Homo sapiens
agcccagctgcagtg

SEQ ID NO: 542591 - DNA, 15 bp, Homo sapiens
cagcccagctgcagt

SEQ ID NO: 542592 - DNA, 15 bp, Homo sapiens
gcagcccagctgcag

SEQ ID NO: 542593 - DNA, 15 bp, Homo sapiens
tgcagcccagctgca

SEQ ID NO: 542594 - DNA, 15 bp, Homo sapiens
ttgcagcccagctgc

SEQ ID NO: 542595 - DNA, 15 bp, Homo sapiens
tttgcagcccagctg

SEQ ID NO: 542596 - DNA, 15 bp, Homo sapiens
ttttgcagcccagct

SEQ ID NO: 542597 - DNA, 15 bp, Homo sapiens
tttttgcagcccagc

SEQ ID NO: 542598 - DNA, 15 bp, Homo sapiens
ttttttgcagcccag

SEQ ID NO: 542599 - DNA, 15 bp, Homo sapiens
cttttttgcagccca

SEQ ID NO: 542600 - DNA, 15 bp, Homo sapiens
ccttttttgcagccc

SEQ ID NO: 542601 - DNA, 15 bp, Homo sapiens
cccttttttgcagcc

SEQ ID NO: 542602 - DNA, 15 bp, Homo sapiens
tcccttttttgcagc

SEQ ID NO: 542603 - DNA, 15 bp, Homo sapiens
atcccttttttgcag

SEQ ID NO: 542604 - DNA, 15 bp, Homo sapiens
catcccttttttgca

SEQ ID NO: 542605 - DNA, 15 bp, Homo sapiens
gcatcccttttttgc

SEQ ID NO: 542606 - DNA, 15 bp, Homo sapiens
agcatcccttttttg

SEQ ID NO: 542607 - DNA, 15 bp, Homo sapiens
gagcatccctttttt

SEQ ID NO: 542608 - DNA, 15 bp, Homo sapiens
tgagcatcccttttt

SEQ ID NO: 542609 - DNA, 15 bp, Homo sapiens
atgagcatccctttt

SEQ ID NO: 542610 - DNA, 15 bp, Homo sapiens
gatgagcatcccttt

SEQ ID NO: 542611 - DNA, 15 bp, Homo sapiens
agatgagcatccctt

SEQ ID NO: 542612 - DNA, 15 bp, Homo sapiens
aagatgagcatccct

SEQ ID NO: 542613 - DNA, 15 bp, Homo sapiens
gaagatgagcatccc

SEQ ID NO: 542614 - DNA, 15 bp, Homo sapiens
ggaagatgagcatcc

SEQ ID NO: 542615 - DNA, 15 bp, Homo sapiens
cggaagatgagcatc

SEQ ID NO: 542616 - DNA, 15 bp, Homo sapiens
tcggaagatgagcat

SEQ ID NO: 542617 - DNA, 15 bp, Homo sapiens
ctcggaagatgagca

SEQ ID NO: 542618 - DNA, 15 bp, Homo sapiens
cctcggaagatgagc

SEQ ID NO: 542619 - DNA, 15 bp, Homo sapiens
gcctcggaagatgag

SEQ ID NO: 542620 - DNA, 15 bp, Homo sapiens
agcctcggaagatga

SEQ ID NO: 542621 - DNA, 15 bp, Homo sapiens
cagcctcggaagatg

SEQ ID NO: 542622 - DNA, 15 bp, Homo sapiens
gcagcctcggaagat

SEQ ID NO: 542623 - DNA, 15 bp, Homo sapiens
agcagcctcggaaga

SEQ ID NO: 542624 - DNA, 15 bp, Homo sapiens
cagcagcctcggaag

SEQ ID NO: 542625 - DNA, 15 bp, Homo sapiens
acagcagcctcggaa

SEQ ID NO: 542626 - DNA, 15 bp, Homo sapiens
gacagcagcctcgga

SEQ ID NO: 542627 - DNA, 15 bp, Homo sapiens
agacagcagcctcgg

SEQ ID NO: 542628 - DNA, 15 bp, Homo sapiens
aagacagcagcctcg

SEQ ID NO: 542629 - DNA, 15 bp, Homo sapiens
gaagacagcagcctc

SEQ ID NO: 542630 - DNA, 15 bp, Homo sapiens
tgaagacagcagcct

SEQ ID NO: 542631 - DNA, 15 bp, Homo sapiens
ttgaagacagcagcc

SEQ ID NO: 542632 - DNA, 15 bp, Homo sapiens
attgaagacagcagc

SEQ ID NO: 542633 - DNA, 15 bp, Homo sapiens
cattgaagacagcag

SEQ ID NO: 542634 - DNA, 15 bp, Homo sapiens
tcattgaagacagca

SEQ ID NO: 542635 - DNA, 15 bp, Homo sapiens
atcattgaagacagc

SEQ ID NO: 542636 - DNA, 15 bp, Homo sapiens
catcattgaagacag

SEQ ID NO: 542637 - DNA, 15 bp, Homo sapiens
tcatcattgaagaca

SEQ ID NO: 542638 - DNA, 15 bp, Homo sapiens
ctcatcattgaagac

SEQ ID NO: 542639 - DNA, 15 bp, Homo sapiens
gctcatcattgaaga

SEQ ID NO: 542640 - DNA, 15 bp, Homo sapiens
agctcatcattgaag

SEQ ID NO: 542641 - DNA, 15 bp, Homo sapiens
cagctcatcattgaa

SEQ ID NO: 542642 - DNA, 15 bp, Homo sapiens
ccagctcatcattga

SEQ ID NO: 542643 - DNA, 15 bp, Homo sapiens
cccagctcatcattg

SEQ ID NO: 542644 - DNA, 15 bp, Homo sapiens
ccccagctcatcatt

SEQ ID NO: 542645 - DNA, 15 bp, Homo sapiens
accccagctcatcat

SEQ ID NO: 542646 - DNA, 15 bp, Homo sapiens
caccccagctcatca

SEQ ID NO: 542647 - DNA, 15 bp, Homo sapiens
tcaccccagctcatc

SEQ ID NO: 542648 - DNA, 15 bp, Homo sapiens
ttcaccccagctcat

SEQ ID NO: 542649 - DNA, 15 bp, Homo sapiens
cttcaccccagctca

SEQ ID NO: 542650 - DNA, 15 bp, Homo sapiens
atccacatcttcacc

SEQ ID NO: 542651 - DNA, 15 bp, Homo sapiens
tatccacatcttcac

SEQ ID NO: 542652 - DNA, 15 bp, Homo sapiens
atatccacatcttca

SEQ ID NO: 542653 - DNA, 15 bp, Homo sapiens
aatatccacatcttc

SEQ ID NO: 542654 - DNA, 15 bp, Homo sapiens
caatatccacatctt

SEQ ID NO: 542655 - DNA, 15 bp, Homo sapiens
acaatatccacatct

SEQ ID NO: 542656 - DNA, 15 bp, Homo sapiens
gacaatatccacatc

SEQ ID NO: 542657 - DNA, 15 bp, Homo sapiens
tgacaatatccacat

SEQ ID NO: 542658 - DNA, 15 bp, Homo sapiens
gtgacaatatccaca

SEQ ID NO: 542659 - DNA, 15 bp, Homo sapiens
tgtgacaatatccac

SEQ ID NO: 542660 - DNA, 15 bp, Homo sapiens
gtgtgacaatatcca

SEQ ID NO: 542661 - DNA, 15 bp, Homo sapiens
agtgtgacaatatcc

SEQ ID NO: 542662 - DNA, 15 bp, Homo sapiens
tagtgtgacaatatc

SEQ ID NO: 542663 - DNA, 15 bp, Homo sapiens
ctagtgtgacaatat

SEQ ID NO: 542664 - DNA, 15 bp, Homo sapiens
actagtgtgacaata

SEQ ID NO: 542665 - DNA, 15 bp, Homo sapiens
aactagtgtgacaat

SEQ ID NO: 542666 - DNA, 15 bp, Homo sapiens
caactagtgtgacaa

SEQ ID NO: 542667 - DNA, 15 bp, Homo sapiens
tcaactagtgtgaca

SEQ ID NO: 542668 - DNA, 15 bp, Homo sapiens
gtcaactagtgtgac

SEQ ID NO: 542669 - DNA, 15 bp, Homo sapiens
tgtcaactagtgtga

SEQ ID NO: 542670 - DNA, 15 bp, Homo sapiens
atgtcaactagtgtg

SEQ ID NO: 542671 - DNA, 15 bp, Homo sapiens
gatgtcaactagtgt

SEQ ID NO: 542672 - DNA, 15 bp, Homo sapiens
agatgtcaactagtg

SEQ ID NO: 542673 - DNA, 15 bp, Homo sapiens
aagatgtcaactagt

SEQ ID NO: 542674 - DNA, 15 bp, Homo sapiens
aaagatgtcaactag

SEQ ID NO: 542675 - DNA, 15 bp, Homo sapiens
aaaagatgtcaacta

SEQ ID NO: 542676 - DNA, 15 bp, Homo sapiens
aaaaagatgtcaact

SEQ ID NO: 542677 - DNA, 15 bp, Homo sapiens
gaaaaagatgtcaac

SEQ ID NO: 542678 - DNA, 15 bp, Homo sapiens
ggaaaaagatgtcaa

SEQ ID NO: 542679 - DNA, 15 bp, Homo sapiens
gggaaaaagatgtca

SEQ ID NO: 542680 - DNA, 15 bp, Homo sapiens
agggaaaaagatgtc

SEQ ID NO: 542681 - DNA, 15 bp, Homo sapiens
aagggaaaaagatgt

SEQ ID NO: 542682 - DNA, 15 bp, Homo sapiens
aaagggaaaaagatg

SEQ ID NO: 542683 - DNA, 15 bp, Homo sapiens
caaagggaaaaagat

SEQ ID NO: 542684 - DNA, 15 bp, Homo sapiens
ccaaagggaaaaaga

SEQ ID NO: 542685 - DNA, 15 bp, Homo sapiens
gccaaagggaaaaag

SEQ ID NO: 542686 - DNA, 15 bp, Homo sapiens
ggccaaagggaaaaa

SEQ ID NO: 542687 - DNA, 15 bp, Homo sapiens
aggccaaagggaaaa

SEQ ID NO: 542688 - DNA, 15 bp, Homo sapiens
caggccaaagggaaa

SEQ ID NO: 542689 - DNA, 15 bp, Homo sapiens
gcaggccaaagggaa

SEQ ID NO: 542690 - DNA, 15 bp, Homo sapiens
agcaggccaaaggga

SEQ ID NO: 542691 - DNA, 15 bp, Homo sapiens
aagcaggccaaaggg

SEQ ID NO: 542692 - DNA, 15 bp, Homo sapiens
gaagcaggccaaagg

SEQ ID NO: 542693 - DNA, 15 bp, Homo sapiens
agaagcaggccaaag

SEQ ID NO: 542694 - DNA, 15 bp, Homo sapiens
aagaagcaggccaaa

SEQ ID NO: 542695 - DNA, 15 bp, Homo sapiens
aaagaagcaggccaa

SEQ ID NO: 542696 - DNA, 15 bp, Homo sapiens
taaagaagcaggcca

SEQ ID NO: 542697 - DNA, 15 bp, Homo sapiens
ctaaagaagcaggcc

SEQ ID NO: 542698 - DNA, 15 bp, Homo sapiens
tctaaagaagcaggc

SEQ ID NO: 542699 - DNA, 15 bp, Homo sapiens
gtctaaagaagcagg

SEQ ID NO: 542700 - DNA, 15 bp, Homo sapiens
agtctaaagaagcag

SEQ ID NO: 542701 - DNA, 15 bp, Homo sapiens
cagtctaaagaagca

SEQ ID NO: 542702 - DNA, 15 bp, Homo sapiens
tcagtctaaagaagc

SEQ ID NO: 542703 - DNA, 15 bp, Homo sapiens
ttcagtctaaagaag

SEQ ID NO: 542704 - DNA, 15 bp, Homo sapiens
attcagtctaaagaa

SEQ ID NO: 542705 - DNA, 15 bp, Homo sapiens
aattcagtctaaaga

SEQ ID NO: 542706 - DNA, 15 bp, Homo sapiens
aaattcagtctaaag

SEQ ID NO: 542707 - DNA, 15 bp, Homo sapiens
gaaattcagtctaaa

SEQ ID NO: 542708 - DNA, 15 bp, Homo sapiens
agaaattcagtctaa

SEQ ID NO: 542709 - DNA, 15 bp, Homo sapiens
aagaaattcagtcta

SEQ ID NO: 542710 - DNA, 15 bp, Homo sapiens
taagaaattcagtct

SEQ ID NO: 542711 - DNA, 15 bp, Homo sapiens
ttaagaaattcagtc

SEQ ID NO: 542712 - DNA, 15 bp, Homo sapiens
cttaagaaattcagt

SEQ ID NO: 542713 - DNA, 15 bp, Homo sapiens
tcttaagaaattcag

SEQ ID NO: 542714 - DNA, 15 bp, Homo sapiens
ttcttaagaaattca

SEQ ID NO: 542715 - DNA, 15 bp, Homo sapiens
attcttaagaaattc

SEQ ID NO: 542716 - DNA, 15 bp, Homo sapiens
cattcttaagaaatt

SEQ ID NO: 542717 - DNA, 15 bp, Homo sapiens
ccattcttaagaaat

SEQ ID NO: 542718 - DNA, 15 bp, Homo sapiens
gccattcttaagaaa

SEQ ID NO: 542719 - DNA, 15 bp, Homo sapiens
agccattcttaagaa

SEQ ID NO: 542720 - DNA, 15 bp, Homo sapiens
aagccattcttaaga

SEQ ID NO: 542721 - DNA, 15 bp, Homo sapiens
gaagccattcttaag

SEQ ID NO: 542722 - DNA, 15 bp, Homo sapiens
agaagccattcttaa

SEQ ID NO: 542723 - DNA, 15 bp, Homo sapiens
aagaagccattctta

SEQ ID NO: 542724 - DNA, 15 bp, Homo sapiens
caagaagccattctt

SEQ ID NO: 542725 - DNA, 15 bp, Homo sapiens
acaagaagccattct

SEQ ID NO: 542726 - DNA, 15 bp, Homo sapiens
gacaagaagccattc

SEQ ID NO: 542727 - DNA, 15 bp, Homo sapiens
ggacaagaagccatt

SEQ ID NO: 542728 - DNA, 15 bp, Homo sapiens
tggacaagaagccat

SEQ ID NO: 542729 - DNA, 15 bp, Homo sapiens
gtggacaagaagcca

SEQ ID NO: 542730 - DNA, 15 bp, Homo sapiens
tgtggacaagaagcc

SEQ ID NO: 542731 - DNA, 15 bp, Homo sapiens
atgtggacaagaagc

SEQ ID NO: 542732 - DNA, 15 bp, Homo sapiens
aatgtggacaagaag

SEQ ID NO: 542733 - DNA, 15 bp, Homo sapiens
aaatgtggacaagaa

SEQ ID NO: 542734 - DNA, 15 bp, Homo sapiens
gaaatgtggacaaga

SEQ ID NO: 542735 - DNA, 15 bp, Homo sapiens
tagacatgaaatgtg

SEQ ID NO: 542736 - DNA, 15 bp, Homo sapiens
atagacatgaaatgt

SEQ ID NO: 542737 - DNA, 15 bp, Homo sapiens
catagacatgaaatg

SEQ ID NO: 542738 - DNA, 15 bp, Homo sapiens
acatagacatgaaat

SEQ ID NO: 542739 - DNA, 15 bp, Homo sapiens
gacatagacatgaaa

SEQ ID NO: 542740 - DNA, 15 bp, Homo sapiens
ggacatagacatgaa

SEQ ID NO: 542741 - DNA, 15 bp, Homo sapiens
aggacatagacatga

SEQ ID NO: 542742 - DNA, 15 bp, Homo sapiens
aaggacatagacatg

SEQ ID NO: 542743 - DNA, 15 bp, Homo sapiens
aaaggacatagacat

SEQ ID NO: 542744 - DNA, 15 bp, Homo sapiens
aaaaggacatagaca

SEQ ID NO: 542745 - DNA, 15 bp, Homo sapiens
gaaaaggacatagac

SEQ ID NO: 542746 - DNA, 15 bp, Homo sapiens
tgaaaaggacataga

SEQ ID NO: 542747 - DNA, 15 bp, Homo sapiens
gtgaaaaggacatag

SEQ ID NO: 542748 - DNA, 15 bp, Homo sapiens
tgtgaaaaggacata

SEQ ID NO: 542749 - DNA, 15 bp, Homo sapiens
ctgtgaaaaggacat

SEQ ID NO: 542750 - DNA, 15 bp, Homo sapiens
tctgtgaaaaggaca

SEQ ID NO: 542751 - DNA, 15 bp, Homo sapiens
ttctgtgaaaaggac

SEQ ID NO: 542752 - DNA, 15 bp, Homo sapiens
gttctgtgaaaagga

SEQ ID NO: 542753 - DNA, 15 bp, Homo sapiens
agttctgtgaaaagg

SEQ ID NO: 542754 - DNA, 15 bp, Homo sapiens
aagttctgtgaaaag

SEQ ID NO: 542755 - DNA, 15 bp, Homo sapiens
caagttctgtgaaaa

SEQ ID NO: 542756 - DNA, 15 bp, Homo sapiens
ccaagttctgtgaaa

SEQ ID NO: 542757 - DNA, 15 bp, Homo sapiens
tccaagttctgtgaa

SEQ ID NO: 542758 - DNA, 15 bp, Homo sapiens
atccaagttctgtga

SEQ ID NO: 542759 - DNA, 15 bp, Homo sapiens
catccaagttctgtg

SEQ ID NO: 542760 - DNA, 15 bp, Homo sapiens
acatccaagttctgt

SEQ ID NO: 542761 - DNA, 15 bp, Homo sapiens
cacatccaagttctg

SEQ ID NO: 542762 - DNA, 15 bp, Homo sapiens
acacatccaagttct

SEQ ID NO: 542763 - DNA, 15 bp, Homo sapiens
cacacatccaagttc

SEQ ID NO: 542764 - DNA, 15 bp, Homo sapiens
gcacacatccaagtt

SEQ ID NO: 542765 - DNA, 15 bp, Homo sapiens
ggcacacatccaagt

SEQ ID NO: 542766 - DNA, 15 bp, Homo sapiens
gggcacacatccaag

SEQ ID NO: 542767 - DNA, 15 bp, Homo sapiens
ggggcacacatccaa

SEQ ID NO: 542768 - DNA, 15 bp, Homo sapiens
gggggcacacatcca

SEQ ID NO: 542769 - DNA, 15 bp, Homo sapiens
tgggggcacacatcc

SEQ ID NO: 542770 - DNA, 15 bp, Homo sapiens
ctgggggcacacatc

SEQ ID NO: 542771 - DNA, 15 bp, Homo sapiens
cctgggggcacacat

SEQ ID NO: 542772 - DNA, 15 bp, Homo sapiens
ccctgggggcacaca

SEQ ID NO: 542773 - DNA, 15 bp, Homo sapiens
tccctgggggcacac

SEQ ID NO: 542774 - DNA, 15 bp, Homo sapiens
atccctgggggcaca

SEQ ID NO: 542775 - DNA, 15 bp, Homo sapiens
gatccctgggggcac

SEQ ID NO: 542776 - DNA, 15 bp, Homo sapiens
agatccctgggggca

SEQ ID NO: 542777 - DNA, 15 bp, Homo sapiens
cagatccctgggggc

SEQ ID NO: 542778 - DNA, 15 bp, Homo sapiens
tcagatccctggggg

SEQ ID NO: 542779 - DNA, 15 bp, Homo sapiens
ttcagatccctgggg

SEQ ID NO: 542780 - DNA, 15 bp, Homo sapiens
gttcagatccctggg

SEQ ID NO: 542781 - DNA, 15 bp, Homo sapiens
ggttcagatccctgg

SEQ ID NO: 542782 - DNA, 15 bp, Homo sapiens
tggttcagatccctg

SEQ ID NO: 542783 - DNA, 15 bp, Homo sapiens
atggttcagatccct

SEQ ID NO: 542784 - DNA, 15 bp, Homo sapiens
catggttcagatccc

SEQ ID NO: 542785 - DNA, 15 bp, Homo sapiens
acatggttcagatcc

SEQ ID NO: 542786 - DNA, 15 bp, Homo sapiens
gacatggttcagatc

SEQ ID NO: 542787 - DNA, 15 bp, Homo sapiens
agacatggttcagat

SEQ ID NO: 542788 - DNA, 15 bp, Homo sapiens
aagacatggttcaga

SEQ ID NO: 542789 - DNA, 15 bp, Homo sapiens
gaagacatggttcag

SEQ ID NO: 542790 - DNA, 15 bp, Homo sapiens
tgaagacatggttca

SEQ ID NO: 542791 - DNA, 15 bp, Homo sapiens
atgaagacatggttc

SEQ ID NO: 542792 - DNA, 15 bp, Homo sapiens
aatgaagacatggtt

SEQ ID NO: 542793 - DNA, 15 bp, Homo sapiens
taatgaagacatggt

SEQ ID NO: 542794 - DNA, 15 bp, Homo sapiens
ataatgaagacatgg

SEQ ID NO: 542795 - DNA, 15 bp, Homo sapiens
aataatgaagacatg

SEQ ID NO: 542796 - DNA, 15 bp, Homo sapiens
gaataatgaagacat

SEQ ID NO: 542797 - DNA, 15 bp, Homo sapiens
tgaataatgaagaca

SEQ ID NO: 542798 - DNA, 15 bp, Homo sapiens
gtgaataatgaagac

SEQ ID NO: 542799 - DNA, 15 bp, Homo sapiens
ggtgaataatgaaga

SEQ ID NO: 542800 - DNA, 15 bp, Homo sapiens
cggtgaataatgaag

SEQ ID NO: 542801 - DNA, 15 bp, Homo sapiens
ccggtgaataatgaa

SEQ ID NO: 542802 - DNA, 15 bp, Homo sapiens
tccggtgaataatga

SEQ ID NO: 542803 - DNA, 15 bp, Homo sapiens
atccggtgaataatg

SEQ ID NO: 542804 - DNA, 15 bp, Homo sapiens
gatccggtgaataat

SEQ ID NO: 542805 - DNA, 15 bp, Homo sapiens
tgatccggtgaataa

SEQ ID NO: 542806 - DNA, 15 bp, Homo sapiens
gtgatccggtgaata

SEQ ID NO: 542807 - DNA, 15 bp, Homo sapiens
ggtgatccggtgaat

SEQ ID NO: 542808 - DNA, 15 bp, Homo sapiens
aggtgatccggtgaa

SEQ ID NO: 542809 - DNA, 15 bp, Homo sapiens
caggtgatccggtga

SEQ ID NO: 542810 - DNA, 15 bp, Homo sapiens
tcaggtgatccggtg

SEQ ID NO: 542811 - DNA, 15 bp, Homo sapiens
ctcaggtgatccggt

SEQ ID NO: 542812 - DNA, 15 bp, Homo sapiens
cctcaggtgatccgg

SEQ ID NO: 542813 - DNA, 15 bp, Homo sapiens
acctcaggtgatccg

SEQ ID NO: 542814 - DNA, 15 bp, Homo sapiens
gacctcaggtgatcc

SEQ ID NO: 542815 - DNA, 15 bp, Homo sapiens
tgacctcaggtgatc

SEQ ID NO: 542816 - DNA, 15 bp, Homo sapiens
ctgacctcaggtgat

SEQ ID NO: 542817 - DNA, 15 bp, Homo sapiens
cctgacctcaggtga

SEQ ID NO: 542818 - DNA, 15 bp, Homo sapiens
aaactcctgacctca

SEQ ID NO: 542819 - DNA, 15 bp, Homo sapiens
caaactcctgacctc

SEQ ID NO: 542820 - DNA, 15 bp, Homo sapiens
tcaaactcctgacct

SEQ ID NO: 542821 - DNA, 15 bp, Homo sapiens
ctcaaactcctgacc

SEQ ID NO: 542822 - DNA, 15 bp, Homo sapiens
tctcaaactcctgac

SEQ ID NO: 542823 - DNA, 15 bp, Homo sapiens
gtctcaaactcctga

SEQ ID NO: 542824 - DNA, 15 bp, Homo sapiens
ggtctcaaactcctg

SEQ ID NO: 542825 - DNA, 15 bp, Homo sapiens
tggtctcaaactcct

SEQ ID NO: 542826 - DNA, 15 bp, Homo sapiens
ctggtctcaaactcc

SEQ ID NO: 542827 - DNA, 15 bp, Homo sapiens
gctggtctcaaactc

SEQ ID NO: 542828 - DNA, 15 bp, Homo sapiens
ggctggtctcaaact

SEQ ID NO: 542829 - DNA, 15 bp, Homo sapiens
aggctggtctcaaac

SEQ ID NO: 542830 - DNA, 15 bp, Homo sapiens
caggctggtctcaaa

SEQ ID NO: 542831 - DNA, 15 bp, Homo sapiens
ccaggctggtctcaa

SEQ ID NO: 542832 - DNA, 15 bp, Homo sapiens
gccaggctggtctca

SEQ ID NO: 542833 - DNA, 15 bp, Homo sapiens
gccatgttggccagg

SEQ ID NO: 542834 - DNA, 15 bp, Homo sapiens
agccatgttggccag

SEQ ID NO: 542835 - DNA, 15 bp, Homo sapiens
tagccatgttggcca

SEQ ID NO: 542836 - DNA, 15 bp, Homo sapiens
ttagccatgttggcc

SEQ ID NO: 542837 - DNA, 15 bp, Homo sapiens
tttagccatgttggc

SEQ ID NO: 542838 - DNA, 15 bp, Homo sapiens
gtttagccatgttgg

SEQ ID NO: 542839 - DNA, 15 bp, Homo sapiens
ggtttagccatgttg

SEQ ID NO: 542840 - DNA, 15 bp, Homo sapiens
gggtttagccatgtt

SEQ ID NO: 542841 - DNA, 15 bp, Homo sapiens
agggtttagccatgt

SEQ ID NO: 542842 - DNA, 15 bp, Homo sapiens
cagggtttagccatg

SEQ ID NO: 542843 - DNA, 15 bp, Homo sapiens
acagggtttagccat

SEQ ID NO: 542844 - DNA, 15 bp, Homo sapiens
gacagggtttagcca

SEQ ID NO: 542845 - DNA, 15 bp, Homo sapiens
agacagggtttagcc

SEQ ID NO: 542846 - DNA, 15 bp, Homo sapiens
gagacagggtttagc

SEQ ID NO: 542847 - DNA, 15 bp, Homo sapiens
agagacagggtttag

SEQ ID NO: 542848 - DNA, 15 bp, Homo sapiens
tagagacagggttta

SEQ ID NO: 542849 - DNA, 15 bp, Homo sapiens
gtagagacagggttt

SEQ ID NO: 542850 - DNA, 15 bp, Homo sapiens
agtagagacagggtt

SEQ ID NO: 542851 - DNA, 15 bp, Homo sapiens
tagtagagacagggt

SEQ ID NO: 542852 - DNA, 15 bp, Homo sapiens
ttagtagagacaggg

SEQ ID NO: 542853 - DNA, 15 bp, Homo sapiens
tttagtagagacagg

SEQ ID NO: 542854 - DNA, 15 bp, Homo sapiens
ttttagtagagacag

SEQ ID NO: 542855 - DNA, 15 bp, Homo sapiens
tttttagtagagaca

SEQ ID NO: 542856 - DNA, 15 bp, Homo sapiens
ttttttagtagagac

SEQ ID NO: 542857 - DNA, 15 bp, Homo sapiens
attttttagtagaga

SEQ ID NO: 542858 - DNA, 15 bp, Homo sapiens
tattttttagtagag

SEQ ID NO: 542859 - DNA, 15 bp, Homo sapiens
gtttttgtatttttt

SEQ ID NO: 542860 - DNA, 15 bp, Homo sapiens
agtttttgtattttt

SEQ ID NO: 542861 - DNA, 15 bp, Homo sapiens
tagtttttgtatttt

SEQ ID NO: 542862 - DNA, 15 bp, Homo sapiens
ctagtttttgtattt

SEQ ID NO: 542863 - DNA, 15 bp, Homo sapiens
gctagtttttgtatt

SEQ ID NO: 542864 - DNA, 15 bp, Homo sapiens
agctagtttttgtat

SEQ ID NO: 542865 - DNA, 15 bp, Homo sapiens
cagctagtttttgta

SEQ ID NO: 542866 - DNA, 15 bp, Homo sapiens
ccagctagtttttgt

SEQ ID NO: 542867 - DNA, 15 bp, Homo sapiens
tccagctagtttttg

SEQ ID NO: 542868 - DNA, 15 bp, Homo sapiens
gtccagctagttttt

SEQ ID NO: 542869 - DNA, 15 bp, Homo sapiens
tgtccagctagtttt

SEQ ID NO: 542870 - DNA, 15 bp, Homo sapiens
atgtccagctagttt

SEQ ID NO: 542871 - DNA, 15 bp, Homo sapiens
catgtccagctagtt

SEQ ID NO: 542872 - DNA, 15 bp, Homo sapiens
ccatgtccagctagt

SEQ ID NO: 542873 - DNA, 15 bp, Homo sapiens
accatgtccagctag

SEQ ID NO: 542874 - DNA, 15 bp, Homo sapiens
caccatgtccagcta

SEQ ID NO: 542875 - DNA, 15 bp, Homo sapiens
ccaccatgtccagct

SEQ ID NO: 542876 - DNA, 15 bp, Homo sapiens
accaccatgtccagc

SEQ ID NO: 542877 - DNA, 15 bp, Homo sapiens
caccaccatgtccag

SEQ ID NO: 542878 - DNA, 15 bp, Homo sapiens
gcaccaccatgtcca

SEQ ID NO: 542879 - DNA, 15 bp, Homo sapiens
tgcaccaccatgtcc

SEQ ID NO: 542880 - DNA, 15 bp, Homo sapiens
gtgcaccaccatgtc

SEQ ID NO: 542881 - DNA, 15 bp, Homo sapiens
cgtgcaccaccatgt

SEQ ID NO: 542882 - DNA, 15 bp, Homo sapiens
gcgtgcaccaccatg

SEQ ID NO: 542883 - DNA, 15 bp, Homo sapiens
ggcgtgcaccaccat

SEQ ID NO: 542884 - DNA, 15 bp, Homo sapiens
aggcgtgcaccacca

SEQ ID NO: 542885 - DNA, 15 bp, Homo sapiens
caggcgtgcaccacc

SEQ ID NO: 542886 - DNA, 15 bp, Homo sapiens
acaggcgtgcaccac

SEQ ID NO: 542887 - DNA, 15 bp, Homo sapiens
tacaggcgtgcacca

SEQ ID NO: 542888 - DNA, 15 bp, Homo sapiens
ttacaggcgtgcacc

SEQ ID NO: 542889 - DNA, 15 bp, Homo sapiens
attacaggcgtgcac

SEQ ID NO: 542890 - DNA, 15 bp, Homo sapiens
gattacaggcgtgca

SEQ ID NO: 542891 - DNA, 15 bp, Homo sapiens
ggattacaggcgtgc

SEQ ID NO: 542892 - DNA, 15 bp, Homo sapiens
atagctgggattaca

SEQ ID NO: 542893 - DNA, 15 bp, Homo sapiens
aatagctgggattac

SEQ ID NO: 542894 - DNA, 15 bp, Homo sapiens
gaatagctgggatta

SEQ ID NO: 542895 - DNA, 15 bp, Homo sapiens
cgaatagctgggatt

SEQ ID NO: 542896 - DNA, 15 bp, Homo sapiens
ccgaatagctgggat

SEQ ID NO: 542897 - DNA, 15 bp, Homo sapiens
cccgaatagctggga

SEQ ID NO: 542898 - DNA, 15 bp, Homo sapiens
tcccgaatagctggg

SEQ ID NO: 542899 - DNA, 15 bp, Homo sapiens
gtcccgaatagctgg

SEQ ID NO: 542900 - DNA, 15 bp, Homo sapiens
cgtcccgaatagctg

SEQ ID NO: 542901 - DNA, 15 bp, Homo sapiens
gcgtcccgaatagct

SEQ ID NO: 542902 - DNA, 15 bp, Homo sapiens
agcgtcccgaatagc

SEQ ID NO: 542903 - DNA, 15 bp, Homo sapiens
cagcgtcccgaatag

SEQ ID NO: 542904 - DNA, 15 bp, Homo sapiens
tcagcgtcccgaata

SEQ ID NO: 542905 - DNA, 15 bp, Homo sapiens
ttcagcgtcccgaat

SEQ ID NO: 542906 - DNA, 15 bp, Homo sapiens
cttcagcgtcccgaa

SEQ ID NO: 542907 - DNA, 15 bp, Homo sapiens
gcttcagcgtcccga

SEQ ID NO: 542908 - DNA, 15 bp, Homo sapiens
tgcttcagcgtcccg

SEQ ID NO: 542909 - DNA, 15 bp, Homo sapiens
ctgcttcagcgtccc

SEQ ID NO: 542910 - DNA, 15 bp, Homo sapiens
cctgcttcagcgtcc

SEQ ID NO: 542911 - DNA, 15 bp, Homo sapiens
tcctgcttcagcgtc

SEQ ID NO: 542912 - DNA, 15 bp, Homo sapiens
ctcctgcttcagcgt

SEQ ID NO: 542913 - DNA, 15 bp, Homo sapiens
tctcctgcttcagcg

SEQ ID NO: 542914 - DNA, 15 bp, Homo sapiens
ttctcctgcttcagc

SEQ ID NO: 542915 - DNA, 15 bp, Homo sapiens
attctcctgcttcag

SEQ ID NO: 542916 - DNA, 15 bp, Homo sapiens
tattctcctgcttca

SEQ ID NO: 542917 - DNA, 15 bp, Homo sapiens
ctattctcctgcttc

SEQ ID NO: 542918 - DNA, 15 bp, Homo sapiens
gctattctcctgctt

SEQ ID NO: 542919 - DNA, 15 bp, Homo sapiens
agctattctcctgct

SEQ ID NO: 542920 - DNA, 15 bp, Homo sapiens
aagctattctcctgc

SEQ ID NO: 542921 - DNA, 15 bp, Homo sapiens
caagctattctcctg

SEQ ID NO: 542922 - DNA, 15 bp, Homo sapiens
tcaagctattctcct

SEQ ID NO: 542923 - DNA, 15 bp, Homo sapiens
ttcaagctattctcc

SEQ ID NO: 542924 - DNA, 15 bp, Homo sapiens
gttcaagctattctc

SEQ ID NO: 542925 - DNA, 15 bp, Homo sapiens
ggttcaagctattct

SEQ ID NO: 542926 - DNA, 15 bp, Homo sapiens
aggttcaagctattc

SEQ ID NO: 542927 - DNA, 15 bp, Homo sapiens
caggttcaagctatt

SEQ ID NO: 542928 - DNA, 15 bp, Homo sapiens
ccaggttcaagctat

SEQ ID NO: 542929 - DNA, 15 bp, Homo sapiens
tccaggttcaagcta

SEQ ID NO: 542930 - DNA, 15 bp, Homo sapiens
ttccaggttcaagct

SEQ ID NO: 542931 - DNA, 15 bp, Homo sapiens
cttccaggttcaagc

SEQ ID NO: 542932 - DNA, 15 bp, Homo sapiens
ccttccaggttcaag

SEQ ID NO: 542933 - DNA, 15 bp, Homo sapiens
gccttccaggttcaa

SEQ ID NO: 542934 - DNA, 15 bp, Homo sapiens
agccttccaggttca

SEQ ID NO: 542935 - DNA, 15 bp, Homo sapiens
cagccttccaggttc

SEQ ID NO: 542936 - DNA, 15 bp, Homo sapiens
tcagccttccaggtt

SEQ ID NO: 542937 - DNA, 15 bp, Homo sapiens
ctcagccttccaggt

SEQ ID NO: 542938 - DNA, 15 bp, Homo sapiens
cctcagccttccagg

SEQ ID NO: 542939 - DNA, 15 bp, Homo sapiens
acctcagccttccag

SEQ ID NO: 542940 - DNA, 15 bp, Homo sapiens
aacctcagccttcca

SEQ ID NO: 542941 - DNA, 15 bp, Homo sapiens
caacctcagccttcc

SEQ ID NO: 542942 - DNA, 15 bp, Homo sapiens
gcaacctcagccttc

SEQ ID NO: 542943 - DNA, 15 bp, Homo sapiens
tgcaacctcagcctt

SEQ ID NO: 542944 - DNA, 15 bp, Homo sapiens
ctgcaacctcagcct

SEQ ID NO: 542945 - DNA, 15 bp, Homo sapiens
actgcaacctcagcc

SEQ ID NO: 542946 - DNA, 15 bp, Homo sapiens
cactgcaacctcagc

SEQ ID NO: 542947 - DNA, 15 bp, Homo sapiens
tcactgcaacctcag

SEQ ID NO: 542948 - DNA, 15 bp, Homo sapiens
ttcactgcaacctca

SEQ ID NO: 542949 - DNA, 15 bp, Homo sapiens
gttcactgcaacctc

SEQ ID NO: 542950 - DNA, 15 bp, Homo sapiens
agttcactgcaacct

SEQ ID NO: 542951 - DNA, 15 bp, Homo sapiens
cagttcactgcaacc

SEQ ID NO: 542952 - DNA, 15 bp, Homo sapiens
tcagttcactgcaac

SEQ ID NO: 542953 - DNA, 15 bp, Homo sapiens
ctcagttcactgcaa

SEQ ID NO: 542954 - DNA, 15 bp, Homo sapiens
tctcagttcactgca

SEQ ID NO: 542955 - DNA, 15 bp, Homo sapiens
atctcagttcactgc

SEQ ID NO: 542956 - DNA, 15 bp, Homo sapiens
gatctcagttcactg

SEQ ID NO: 542957 - DNA, 15 bp, Homo sapiens
tgatctcagttcact

SEQ ID NO: 542958 - DNA, 15 bp, Homo sapiens
gtgatctcagttcac

SEQ ID NO: 542959 - DNA, 15 bp, Homo sapiens
cgtgatctcagttca

SEQ ID NO: 542960 - DNA, 15 bp, Homo sapiens
gcgtgatctcagttc

SEQ ID NO: 542961 - DNA, 15 bp, Homo sapiens
ggcgtgatctcagtt

SEQ ID NO: 542962 - DNA, 15 bp, Homo sapiens
tggcgtgatctcagt

SEQ ID NO: 542963 - DNA, 15 bp, Homo sapiens
gtggcgtgatctcag

SEQ ID NO: 542964 - DNA, 15 bp, Homo sapiens
agtggcgtgatctca

SEQ ID NO: 542965 - DNA, 15 bp, Homo sapiens
cagtggcgtgatctc

SEQ ID NO: 542966 - DNA, 15 bp, Homo sapiens
gcagtggcgtgatct

SEQ ID NO: 542967 - DNA, 15 bp, Homo sapiens
ggcagtggcgtgatc

SEQ ID NO: 542968 - DNA, 15 bp, Homo sapiens
gggcagtggcgtgat

SEQ ID NO: 542969 - DNA, 15 bp, Homo sapiens
agggcagtggcgtga

SEQ ID NO: 542970 - DNA, 15 bp, Homo sapiens
gagggcagtggcgtg

SEQ ID NO: 542971 - DNA, 15 bp, Homo sapiens
ggagggcagtggcgt

SEQ ID NO: 542972 - DNA, 15 bp, Homo sapiens
tggagggcagtggcg

SEQ ID NO: 542973 - DNA, 15 bp, Homo sapiens
ctggagggcagtggc

SEQ ID NO: 542974 - DNA, 15 bp, Homo sapiens
gctggagggcagtgg

SEQ ID NO: 542975 - DNA, 15 bp, Homo sapiens
ggctggagggcagtg

SEQ ID NO: 542976 - DNA, 15 bp, Homo sapiens
aggctggagggcagt

SEQ ID NO: 542977 - DNA, 15 bp, Homo sapiens
caggctggagggcag

SEQ ID NO: 542978 - DNA, 15 bp, Homo sapiens
gcaggctggagggca

SEQ ID NO: 542979 - DNA, 15 bp, Homo sapiens
cgcaggctggagggc

SEQ ID NO: 542980 - DNA, 15 bp, Homo sapiens
acgcaggctggaggg

SEQ ID NO: 542981 - DNA, 15 bp, Homo sapiens
tacgcaggctggagg

SEQ ID NO: 542982 - DNA, 15 bp, Homo sapiens
ttacgcaggctggag

SEQ ID NO: 542983 - DNA, 15 bp, Homo sapiens
attacgcaggctgga

SEQ ID NO: 542984 - DNA, 15 bp, Homo sapiens
tattacgcaggctgg

SEQ ID NO: 542985 - DNA, 15 bp, Homo sapiens
ctattacgcaggctg

SEQ ID NO: 542986 - DNA, 15 bp, Homo sapiens
tctattacgcaggct

SEQ ID NO: 542987 - DNA, 15 bp, Homo sapiens
ctctattacgcaggc

SEQ ID NO: 542988 - DNA, 15 bp, Homo sapiens
actctattacgcagg

SEQ ID NO: 542989 - DNA, 15 bp, Homo sapiens
cactctattacgcag

SEQ ID NO: 542990 - DNA, 15 bp, Homo sapiens
tcactctattacgca

SEQ ID NO: 542991 - DNA, 15 bp, Homo sapiens
ctcactctattacgc

SEQ ID NO: 542992 - DNA, 15 bp, Homo sapiens
tctcactctattacg

SEQ ID NO: 542993 - DNA, 15 bp, Homo sapiens
gtctcactctattac

SEQ ID NO: 542994 - DNA, 15 bp, Homo sapiens
agtctcactctatta

SEQ ID NO: 542995 - DNA, 15 bp, Homo sapiens
gagtctcactctatt

SEQ ID NO: 542996 - DNA, 15 bp, Homo sapiens
ggagtctcactctat

SEQ ID NO: 542997 - DNA, 15 bp, Homo sapiens
tggagtctcactcta

SEQ ID NO: 542998 - DNA, 15 bp, Homo sapiens
atggagtctcactct

SEQ ID NO: 542999 - DNA, 15 bp, Homo sapiens
gatggagtctcactc

SEQ ID NO: 543000 - DNA, 15 bp, Homo sapiens
agatggagtctcact

SEQ ID NO: 543001 - DNA, 15 bp, Homo sapiens
gagatggagtctcac

SEQ ID NO: 543002 - DNA, 15 bp, Homo sapiens
tgagatggagtctca

SEQ ID NO: 543003 - DNA, 15 bp, Homo sapiens
ttgagatggagtctc

SEQ ID NO: 543004 - DNA, 15 bp, Homo sapiens
tttgagatggagtct

SEQ ID NO: 543005 - DNA, 15 bp, Homo sapiens
ttttgagatggagtc

SEQ ID NO: 543006 - DNA, 15 bp, Homo sapiens
tttttgagatggagt

SEQ ID NO: 543007 - DNA, 15 bp, Homo sapiens
ttttttgagatggag

SEQ ID NO: 543008 - DNA, 15 bp, Homo sapiens
tttttttgagatgga

SEQ ID NO: 543009 - DNA, 15 bp, Homo sapiens
ttttttttgagatgg

SEQ ID NO: 543010 - DNA, 15 bp, Homo sapiens
tttttttttgagatg

SEQ ID NO: 543011 - DNA, 15 bp, Homo sapiens
ttttttttttgagat

SEQ ID NO: 543012 - DNA, 15 bp, Homo sapiens
tttttttttttgaga

SEQ ID NO: 543013 - DNA, 15 bp, Homo sapiens
ttttttttttttgag

SEQ ID NO: 543014 - DNA, 15 bp, Homo sapiens
tttttttttttttga

SEQ ID NO: 543015 - DNA, 15 bp, Homo sapiens
ttttttttttttttg

SEQ ID NO: 543016 - DNA, 15 bp, Homo sapiens
cattttttttttttt

SEQ ID NO: 543017 - DNA, 15 bp, Homo sapiens
tcatttttttttttt

SEQ ID NO: 543018 - DNA, 15 bp, Homo sapiens
ttcattttttttttt

SEQ ID NO: 543019 - DNA, 15 bp, Homo sapiens
cttcatttttttttt

SEQ ID NO: 543020 - DNA, 15 bp, Homo sapiens
ccttcattttttttt

SEQ ID NO: 543021 - DNA, 15 bp, Homo sapiens
tccttcatttttttt

SEQ ID NO: 543022 - DNA, 15 bp, Homo sapiens
ttccttcattttttt

SEQ ID NO: 543023 - DNA, 15 bp, Homo sapiens
gttccttcatttttt

SEQ ID NO: 543024 - DNA, 15 bp, Homo sapiens
agttccttcattttt

SEQ ID NO: 543025 - DNA, 15 bp, Homo sapiens
aagttccttcatttt

SEQ ID NO: 543026 - DNA, 15 bp, Homo sapiens
taagttccttcattt

SEQ ID NO: 543027 - DNA, 15 bp, Homo sapiens
ctaagttccttcatt

SEQ ID NO: 543028 - DNA, 15 bp, Homo sapiens
tctaagttccttcat

SEQ ID NO: 543029 - DNA, 15 bp, Homo sapiens
ttctaagttccttca

SEQ ID NO: 543030 - DNA, 15 bp, Homo sapiens
tttctaagttccttc

SEQ ID NO: 543031 - DNA, 15 bp, Homo sapiens
atttctaagttcctt

SEQ ID NO: 543032 - DNA, 15 bp, Homo sapiens
tatttctaagttcct

SEQ ID NO: 543033 - DNA, 15 bp, Homo sapiens
atatttctaagttcc

SEQ ID NO: 543034 - DNA, 15 bp, Homo sapiens
catatttctaagttc

SEQ ID NO: 543035 - DNA, 15 bp, Homo sapiens
acatatttctaagtt

SEQ ID NO: 543036 - DNA, 15 bp, Homo sapiens
gacatatttctaagt

SEQ ID NO: 543037 - DNA, 15 bp, Homo sapiens
agacatatttctaag

SEQ ID NO: 543038 - DNA, 15 bp, Homo sapiens
gagacatatttctaa

SEQ ID NO: 543039 - DNA, 15 bp, Homo sapiens
tgagacatatttcta

SEQ ID NO: 543040 - DNA, 15 bp, Homo sapiens
ctgagacatatttct

SEQ ID NO: 543041 - DNA, 15 bp, Homo sapiens
gctgagacatatttc

SEQ ID NO: 543042 - DNA, 15 bp, Homo sapiens
tgctgagacatattt

SEQ ID NO: 543043 - DNA, 15 bp, Homo sapiens
atgctgagacatatt

SEQ ID NO: 543044 - DNA, 15 bp, Homo sapiens
catgctgagacatat

SEQ ID NO: 543045 - DNA, 15 bp, Homo sapiens
ccatgctgagacata

SEQ ID NO: 543046 - DNA, 15 bp, Homo sapiens
cccatgctgagacat

SEQ ID NO: 543047 - DNA, 15 bp, Homo sapiens
acccatgctgagaca

SEQ ID NO: 543048 - DNA, 15 bp, Homo sapiens
tacccatgctgagac

SEQ ID NO: 543049 - DNA, 15 bp, Homo sapiens
ctacccatgctgaga

SEQ ID NO: 543050 - DNA, 15 bp, Homo sapiens
cctacccatgctgag

SEQ ID NO: 543051 - DNA, 15 bp, Homo sapiens
gcctacccatgctga

SEQ ID NO: 543052 - DNA, 15 bp, Homo sapiens
ggcctacccatgctg

SEQ ID NO: 543053 - DNA, 15 bp, Homo sapiens
tggcctacccatgct

SEQ ID NO: 543054 - DNA, 15 bp, Homo sapiens
atggcctacccatgc

SEQ ID NO: 543055 - DNA, 15 bp, Homo sapiens
tatggcctacccatg

SEQ ID NO: 543056 - DNA, 15 bp, Homo sapiens
ttatggcctacccat

SEQ ID NO: 543057 - DNA, 15 bp, Homo sapiens
tttatggcctaccca

SEQ ID NO: 543058 - DNA, 15 bp, Homo sapiens
ttttatggcctaccc

SEQ ID NO: 543059 - DNA, 15 bp, Homo sapiens
tttttatggcctacc

SEQ ID NO: 543060 - DNA, 15 bp, Homo sapiens
gtttttatggcctac

SEQ ID NO: 543061 - DNA, 15 bp, Homo sapiens
tgtttttatggccta

SEQ ID NO: 543062 - DNA, 15 bp, Homo sapiens
gtgtttttatggcct

SEQ ID NO: 543063 - DNA, 15 bp, Homo sapiens
tgtgtttttatggcc

SEQ ID NO: 543064 - DNA, 15 bp, Homo sapiens
atgtgtttttatggc

SEQ ID NO: 543065 - DNA, 15 bp, Homo sapiens
aatgtgtttttatgg

SEQ ID NO: 543066 - DNA, 15 bp, Homo sapiens
taatgtgtttttatg

SEQ ID NO: 543067 - DNA, 15 bp, Homo sapiens
gtaatgtgtttttat

SEQ ID NO: 543068 - DNA, 15 bp, Homo sapiens
agtaatgtgttttta

SEQ ID NO: 543069 - DNA, 15 bp, Homo sapiens
tagtaatgtgttttt

SEQ ID NO: 543070 - DNA, 15 bp, Homo sapiens
ttagtaatgtgtttt

SEQ ID NO: 543071 - DNA, 15 bp, Homo sapiens
attagtaatgtgttt

SEQ ID NO: 543072 - DNA, 15 bp, Homo sapiens
aattagtaatgtgtt

SEQ ID NO: 543073 - DNA, 15 bp, Homo sapiens
caattagtaatgtgt

SEQ ID NO: 543074 - DNA, 15 bp, Homo sapiens
tcaattagtaatgtg

SEQ ID NO: 543075 - DNA, 15 bp, Homo sapiens
ttcaattagtaatgt

SEQ ID NO: 543076 - DNA, 15 bp, Homo sapiens
tttcaattagtaatg

SEQ ID NO: 543077 - DNA, 15 bp, Homo sapiens
ttttcaattagtaat

SEQ ID NO: 543078 - DNA, 15 bp, Homo sapiens
tttttcaattagtaa

SEQ ID NO: 543079 - DNA, 15 bp, Homo sapiens
ttttttcaattagta

SEQ ID NO: 543080 - DNA, 15 bp, Homo sapiens
cttttttcaattagt

SEQ ID NO: 543081 - DNA, 15 bp, Homo sapiens
gcttttttcaattag

SEQ ID NO: 543082 - DNA, 15 bp, Homo sapiens
agcttttttcaatta

SEQ ID NO: 543083 - DNA, 15 bp, Homo sapiens
gagcttttttcaatt

SEQ ID NO: 543084 - DNA, 15 bp, Homo sapiens
agagcttttttcaat

SEQ ID NO: 543085 - DNA, 15 bp, Homo sapiens
cagagcttttttcaa

SEQ ID NO: 543086 - DNA, 15 bp, Homo sapiens
ccagagcttttttca

SEQ ID NO: 543087 - DNA, 15 bp, Homo sapiens
accagagcttttttc

SEQ ID NO: 543088 - DNA, 15 bp, Homo sapiens
caccagagctttttt

SEQ ID NO: 543089 - DNA, 15 bp, Homo sapiens
gcaccagagcttttt

SEQ ID NO: 543090 - DNA, 15 bp, Homo sapiens
agcaccagagctttt

SEQ ID NO: 543091 - DNA, 15 bp, Homo sapiens
tagcaccagagcttt

SEQ ID NO: 543092 - DNA, 15 bp, Homo sapiens
atagcaccagagctt

SEQ ID NO: 543093 - DNA, 15 bp, Homo sapiens
aatagcaccagagct

SEQ ID NO: 543094 - DNA, 15 bp, Homo sapiens
aaatagcaccagagc

SEQ ID NO: 543095 - DNA, 15 bp, Homo sapiens
taaatagcaccagag

SEQ ID NO: 543096 - DNA, 15 bp, Homo sapiens
ataaatagcaccaga

SEQ ID NO: 543097 - DNA, 15 bp, Homo sapiens
cataaatagcaccag

SEQ ID NO: 543098 - DNA, 15 bp, Homo sapiens
acataaatagcacca

SEQ ID NO: 543099 - DNA, 15 bp, Homo sapiens
aacataaatagcacc

SEQ ID NO: 543100 - DNA, 15 bp, Homo sapiens
aaacataaatagcac

SEQ ID NO: 543101 - DNA, 15 bp, Homo sapiens
taaacataaatagca

SEQ ID NO: 543102 - DNA, 15 bp, Homo sapiens
ttaaacataaatagc

SEQ ID NO: 543103 - DNA, 15 bp, Homo sapiens
tttaaacataaatag

SEQ ID NO: 543104 - DNA, 15 bp, Homo sapiens
ttttaaacataaata

SEQ ID NO: 543105 - DNA, 15 bp, Homo sapiens
tttttaaacataaat

SEQ ID NO: 543106 - DNA, 15 bp, Homo sapiens
ttttttaaacataaa

SEQ ID NO: 543107 - DNA, 15 bp, Homo sapiens
tttttttaaacataa

SEQ ID NO: 543108 - DNA, 15 bp, Homo sapiens
ttttttttaaacata

SEQ ID NO: 543109 - DNA, 15 bp, Homo sapiens
gttttttttaaacat

SEQ ID NO: 543110 - DNA, 15 bp, Homo sapiens
ggttttttttaaaca

SEQ ID NO: 543111 - DNA, 15 bp, Homo sapiens
gggttttttttaaac

SEQ ID NO: 543112 - DNA, 15 bp, Homo sapiens
tgggttttttttaaa

SEQ ID NO: 543113 - DNA, 15 bp, Homo sapiens
gtgggttttttttaa

SEQ ID NO: 543114 - DNA, 15 bp, Homo sapiens
ggtgggtttttttta

SEQ ID NO: 543115 - DNA, 15 bp, Homo sapiens
tggtgggtttttttt

SEQ ID NO: 543116 - DNA, 15 bp, Homo sapiens
ttggtgggttttttt

SEQ ID NO: 543117 - DNA, 15 bp, Homo sapiens
tttggtgggtttttt

SEQ ID NO: 543118 - DNA, 15 bp, Homo sapiens
gtttggtgggttttt

SEQ ID NO: 543119 - DNA, 15 bp, Homo sapiens
tgtttggtgggtttt

SEQ ID NO: 543120 - DNA, 15 bp, Homo sapiens
ttgtttggtgggttt

SEQ ID NO: 543121 - DNA, 15 bp, Homo sapiens
attgtttggtgggtt

SEQ ID NO: 543122 - DNA, 15 bp, Homo sapiens
tattgtttggtgggt

SEQ ID NO: 543123 - DNA, 15 bp, Homo sapiens
atattgtttggtggg

SEQ ID NO: 543124 - DNA, 15 bp, Homo sapiens
aatattgtttggtgg

SEQ ID NO: 543125 - DNA, 15 bp, Homo sapiens
gaatattgtttggtg

SEQ ID NO: 543126 - DNA, 15 bp, Homo sapiens
agaatattgtttggt

SEQ ID NO: 543127 - DNA, 15 bp, Homo sapiens
tagaatattgtttgg

SEQ ID NO: 543128 - DNA, 15 bp, Homo sapiens
atagaatattgtttg

SEQ ID NO: 543129 - DNA, 15 bp, Homo sapiens
tatagaatattgttt

SEQ ID NO: 543130 - DNA, 15 bp, Homo sapiens
atatagaatattgtt

SEQ ID NO: 543131 - DNA, 15 bp, Homo sapiens
aatatagaatattgt

SEQ ID NO: 543132 - DNA, 15 bp, Homo sapiens
aaatatagaatattg

SEQ ID NO: 543133 - DNA, 15 bp, Homo sapiens
aaaatatagaatatt

SEQ ID NO: 543134 - DNA, 15 bp, Homo sapiens
gaaaatatagaatat

SEQ ID NO: 543135 - DNA, 15 bp, Homo sapiens
agaaaatatagaata

SEQ ID NO: 543136 - DNA, 15 bp, Homo sapiens
aagaaaatatagaat

SEQ ID NO: 543137 - DNA, 15 bp, Homo sapiens
aaagaaaatatagaa

SEQ ID NO: 543138 - DNA, 15 bp, Homo sapiens
gaaagaaaatataga

SEQ ID NO: 543139 - DNA, 15 bp, Homo sapiens
ggaaagaaaatatag

SEQ ID NO: 543140 - DNA, 15 bp, Homo sapiens
tggaaagaaaatata

SEQ ID NO: 543141 - DNA, 15 bp, Homo sapiens
atggaaagaaaatat

SEQ ID NO: 543142 - DNA, 15 bp, Homo sapiens
aatggaaagaaaata

SEQ ID NO: 543143 - DNA, 15 bp, Homo sapiens
aaatggaaagaaaat

SEQ ID NO: 543144 - DNA, 15 bp, Homo sapiens
aaaatggaaagaaaa

SEQ ID NO: 543145 - DNA, 15 bp, Homo sapiens
aaaaatggaaagaaa

SEQ ID NO: 543146 - DNA, 15 bp, Homo sapiens
taaaaatggaaagaa

SEQ ID NO: 543147 - DNA, 15 bp, Homo sapiens
ataaaaatggaaaga

SEQ ID NO: 543148 - DNA, 15 bp, Homo sapiens
aataaaaatggaaag

SEQ ID NO: 543149 - DNA, 15 bp, Homo sapiens
aaataaaaatggaaa

SEQ ID NO: 543150 - DNA, 15 bp, Homo sapiens
aaaataaaaatggaa

SEQ ID NO: 543151 - DNA, 15 bp, Homo sapiens
aaaaataaaaatgga

SEQ ID NO: 543152 - DNA, 15 bp, Homo sapiens
taaaaataaaaatgg

SEQ ID NO: 543153 - DNA, 15 bp, Homo sapiens
ataaaaataaaaatg

SEQ ID NO: 543154 - DNA, 15 bp, Homo sapiens
aataaaaataaaaat

SEQ ID NO: 543155 - DNA, 15 bp, Homo sapiens
aaataaaaataaaaa

SEQ ID NO: 543156 - DNA, 15 bp, Homo sapiens
aaaataaaaataaaa

SEQ ID NO: 543157 - DNA, 15 bp, Homo sapiens
gaaaataaaaataaa

SEQ ID NO: 543158 - DNA, 15 bp, Homo sapiens
cgaaaataaaaataa

SEQ ID NO: 543159 - DNA, 15 bp, Homo sapiens
acgaaaataaaaata

SEQ ID NO: 543160 - DNA, 15 bp, Homo sapiens
tacgaaaataaaaat

SEQ ID NO: 543161 - DNA, 15 bp, Homo sapiens
ctacgaaaataaaaa

SEQ ID NO: 543162 - DNA, 15 bp, Homo sapiens
tctacgaaaataaaa

SEQ ID NO: 543163 - DNA, 15 bp, Homo sapiens
ctctacgaaaataaa

SEQ ID NO: 543164 - DNA, 15 bp, Homo sapiens
tctctacgaaaataa

SEQ ID NO: 543165 - DNA, 15 bp, Homo sapiens
gtctctacgaaaata

SEQ ID NO: 543166 - DNA, 15 bp, Homo sapiens
tgtctctacgaaaat

SEQ ID NO: 543167 - DNA, 15 bp, Homo sapiens
ttgtctctacgaaaa

SEQ ID NO: 543168 - DNA, 15 bp, Homo sapiens
cttgtctctacgaaa

SEQ ID NO: 543169 - DNA, 15 bp, Homo sapiens
ccttgtctctacgaa

SEQ ID NO: 543170 - DNA, 15 bp, Homo sapiens
accttgtctctacga

SEQ ID NO: 543171 - DNA, 15 bp, Homo sapiens
gaccttgtctctacg

SEQ ID NO: 543172 - DNA, 15 bp, Homo sapiens
agaccttgtctctac

SEQ ID NO: 543173 - DNA, 15 bp, Homo sapiens
gagaccttgtctcta

SEQ ID NO: 543174 - DNA, 15 bp, Homo sapiens
tgagaccttgtctct

SEQ ID NO: 543175 - DNA, 15 bp, Homo sapiens
gtgagaccttgtctc

SEQ ID NO: 543176 - DNA, 15 bp, Homo sapiens
agtgagaccttgtct

SEQ ID NO: 543177 - DNA, 15 bp, Homo sapiens
tagtgagaccttgtc

SEQ ID NO: 543178 - DNA, 15 bp, Homo sapiens
atagtgagaccttgt

SEQ ID NO: 543179 - DNA, 15 bp, Homo sapiens
catagtgagaccttg

SEQ ID NO: 543180 - DNA, 15 bp, Homo sapiens
acatagtgagacctt

SEQ ID NO: 543181 - DNA, 15 bp, Homo sapiens
aacatagtgagacct

SEQ ID NO: 543182 - DNA, 15 bp, Homo sapiens
taacatagtgagacc

SEQ ID NO: 543183 - DNA, 15 bp, Homo sapiens
gtaacatagtgagac

SEQ ID NO: 543184 - DNA, 15 bp, Homo sapiens
ggtaacatagtgaga

SEQ ID NO: 543185 - DNA, 15 bp, Homo sapiens
gggtaacatagtgag

SEQ ID NO: 543186 - DNA, 15 bp, Homo sapiens
tgggtaacatagtga

SEQ ID NO: 543187 - DNA, 15 bp, Homo sapiens
ctgggtaacatagtg

SEQ ID NO: 543188 - DNA, 15 bp, Homo sapiens
cctgggtaacatagt

SEQ ID NO: 543189 - DNA, 15 bp, Homo sapiens
gcctgggtaacatag

SEQ ID NO: 543190 - DNA, 15 bp, Homo sapiens
agcctgggtaacata

SEQ ID NO: 543191 - DNA, 15 bp, Homo sapiens
cagcctgggtaacat

SEQ ID NO: 543192 - DNA, 15 bp, Homo sapiens
ccagcctgggtaaca

SEQ ID NO: 543193 - DNA, 15 bp, Homo sapiens
accagcctgggtaac

SEQ ID NO: 543194 - DNA, 15 bp, Homo sapiens
gaccagcctgggtaa

SEQ ID NO: 543195 - DNA, 15 bp, Homo sapiens
agaccagcctgggta

SEQ ID NO: 543196 - DNA, 15 bp, Homo sapiens
gagaccagcctgggt

SEQ ID NO: 543197 - DNA, 15 bp, Homo sapiens
cgagaccagcctggg

SEQ ID NO: 543198 - DNA, 15 bp, Homo sapiens
tcgagaccagcctgg

SEQ ID NO: 543199 - DNA, 15 bp, Homo sapiens
ttcgagaccagcctg

SEQ ID NO: 543200 - DNA, 15 bp, Homo sapiens
gttcgagaccagcct

SEQ ID NO: 543201 - DNA, 15 bp, Homo sapiens
agttcgagaccagcc

SEQ ID NO: 543202 - DNA, 15 bp, Homo sapiens
gagttcgagaccagc

SEQ ID NO: 543203 - DNA, 15 bp, Homo sapiens
ggagttcgagaccag

SEQ ID NO: 543204 - DNA, 15 bp, Homo sapiens
aggagttcgagacca

SEQ ID NO: 543205 - DNA, 15 bp, Homo sapiens
caggagttcgagacc

SEQ ID NO: 543206 - DNA, 15 bp, Homo sapiens
ccaggagttcgagac

SEQ ID NO: 543207 - DNA, 15 bp, Homo sapiens
aaggccaggagttcg

SEQ ID NO: 543208 - DNA, 15 bp, Homo sapiens
taaggccaggagttc

SEQ ID NO: 543209 - DNA, 15 bp, Homo sapiens
ttaaggccaggagtt

SEQ ID NO: 543210 - DNA, 15 bp, Homo sapiens
cttaaggccaggagt

SEQ ID NO: 543211 - DNA, 15 bp, Homo sapiens
acttaaggccaggag

SEQ ID NO: 543212 - DNA, 15 bp, Homo sapiens
cacttaaggccagga

SEQ ID NO: 543213 - DNA, 15 bp, Homo sapiens
tcacttaaggccagg

SEQ ID NO: 543214 - DNA, 15 bp, Homo sapiens
atcacttaaggccag

SEQ ID NO: 543215 - DNA, 15 bp, Homo sapiens
gatcacttaaggcca

SEQ ID NO: 543216 - DNA, 15 bp, Homo sapiens
ggatcacttaaggcc

SEQ ID NO: 543217 - DNA, 15 bp, Homo sapiens
aggatcacttaaggc

SEQ ID NO: 543218 - DNA, 15 bp, Homo sapiens
aaggatcacttaagg

SEQ ID NO: 543219 - DNA, 15 bp, Homo sapiens
gaaggatcacttaag

SEQ ID NO: 543220 - DNA, 15 bp, Homo sapiens
agaaggatcacttaa

SEQ ID NO: 543221 - DNA, 15 bp, Homo sapiens
cagaaggatcactta

SEQ ID NO: 543222 - DNA, 15 bp, Homo sapiens
gcagaaggatcactt

SEQ ID NO: 543223 - DNA, 15 bp, Homo sapiens
ggcagaaggatcact

SEQ ID NO: 543224 - DNA, 15 bp, Homo sapiens
aggcagaaggatcac

SEQ ID NO: 543225 - DNA, 15 bp, Homo sapiens
aaggcagaaggatca

SEQ ID NO: 543226 - DNA, 15 bp, Homo sapiens
caaggcagaaggatc

SEQ ID NO: 543227 - DNA, 15 bp, Homo sapiens
ccaaggcagaaggat

SEQ ID NO: 543228 - DNA, 15 bp, Homo sapiens
gccaaggcagaagga

SEQ ID NO: 543229 - DNA, 15 bp, Homo sapiens
ggccaaggcagaagg

SEQ ID NO: 543230 - DNA, 15 bp, Homo sapiens
aggccaaggcagaag

SEQ ID NO: 543231 - DNA, 15 bp, Homo sapiens
aaggccaaggcagaa

SEQ ID NO: 543232 - DNA, 15 bp, Homo sapiens
gaaggccaaggcaga

SEQ ID NO: 543233 - DNA, 15 bp, Homo sapiens
ggaaggccaaggcag

SEQ ID NO: 543234 - DNA, 15 bp, Homo sapiens
tggaaggccaaggca

SEQ ID NO: 543235 - DNA, 15 bp, Homo sapiens
ttggaaggccaaggc

SEQ ID NO: 543236 - DNA, 15 bp, Homo sapiens
tttggaaggccaagg

SEQ ID NO: 543237 - DNA, 15 bp, Homo sapiens
ttttggaaggccaag

SEQ ID NO: 543238 - DNA, 15 bp, Homo sapiens
gttttggaaggccaa

SEQ ID NO: 543239 - DNA, 15 bp, Homo sapiens
tgttttggaaggcca

SEQ ID NO: 543240 - DNA, 15 bp, Homo sapiens
gtgttttggaaggcc

SEQ ID NO: 543241 - DNA, 15 bp, Homo sapiens
agtgttttggaaggc

SEQ ID NO: 543242 - DNA, 15 bp, Homo sapiens
cagtgttttggaagg

SEQ ID NO: 543243 - DNA, 15 bp, Homo sapiens
ccagtgttttggaag

SEQ ID NO: 543244 - DNA, 15 bp, Homo sapiens
cccagtgttttggaa

SEQ ID NO: 543245 - DNA, 15 bp, Homo sapiens
tcccagtgttttgga

SEQ ID NO: 543246 - DNA, 15 bp, Homo sapiens
atcccagtgttttgg

SEQ ID NO: 543247 - DNA, 15 bp, Homo sapiens
catcccagtgttttg

SEQ ID NO: 543248 - DNA, 15 bp, Homo sapiens
tcatcccagtgtttt

SEQ ID NO: 543249 - DNA, 15 bp, Homo sapiens
atcatcccagtgttt

SEQ ID NO: 543250 - DNA, 15 bp, Homo sapiens
tatcatcccagtgtt

SEQ ID NO: 543251 - DNA, 15 bp, Homo sapiens
ctatcatcccagtgt

SEQ ID NO: 543252 - DNA, 15 bp, Homo sapiens
cctatcatcccagtg

SEQ ID NO: 543253 - DNA, 15 bp, Homo sapiens
acctatcatcccagt

SEQ ID NO: 543254 - DNA, 15 bp, Homo sapiens
cacctatcatcccag

SEQ ID NO: 543255 - DNA, 15 bp, Homo sapiens
acacctatcatccca

SEQ ID NO: 543256 - DNA, 15 bp, Homo sapiens
cacacctatcatccc

SEQ ID NO: 543257 - DNA, 15 bp, Homo sapiens
tcacacctatcatcc

SEQ ID NO: 543258 - DNA, 15 bp, Homo sapiens
ttcacacctatcatc

SEQ ID NO: 543259 - DNA, 15 bp, Homo sapiens
gttcacacctatcat

SEQ ID NO: 543260 - DNA, 15 bp, Homo sapiens
ggttcacacctatca

SEQ ID NO: 543261 - DNA, 15 bp, Homo sapiens
tggttcacacctatc

SEQ ID NO: 543262 - DNA, 15 bp, Homo sapiens
gtggttcacacctat

SEQ ID NO: 543263 - DNA, 15 bp, Homo sapiens
ggtggttcacaccta

SEQ ID NO: 543264 - DNA, 15 bp, Homo sapiens
cggtggttcacacct

SEQ ID NO: 543265 - DNA, 15 bp, Homo sapiens
gcggtggttcacacc

SEQ ID NO: 543266 - DNA, 15 bp, Homo sapiens
cgcggtggttcacac

SEQ ID NO: 543267 - DNA, 15 bp, Homo sapiens
gcgcggtggttcaca

SEQ ID NO: 543268 - DNA, 15 bp, Homo sapiens
ggcgcggtggttcac

SEQ ID NO: 543269 - DNA, 15 bp, Homo sapiens
gggcgcggtggttca

SEQ ID NO: 543270 - DNA, 15 bp, Homo sapiens
agggcgcggtggttc

SEQ ID NO: 543271 - DNA, 15 bp, Homo sapiens
cagggcgcggtggtt

SEQ ID NO: 543272 - DNA, 15 bp, Homo sapiens
gcagggcgcggtggt

SEQ ID NO: 543273 - DNA, 15 bp, Homo sapiens
ggcagggcgcggtgg

SEQ ID NO: 543274 - DNA, 15 bp, Homo sapiens
tggcagggcgcggtg

SEQ ID NO: 543275 - DNA, 15 bp, Homo sapiens
atggcagggcgcggt

SEQ ID NO: 543276 - DNA, 15 bp, Homo sapiens
aatggcagggcgcgg

SEQ ID NO: 543277 - DNA, 15 bp, Homo sapiens
taatggcagggcgcg

SEQ ID NO: 543278 - DNA, 15 bp, Homo sapiens
ataatggcagggcgc

SEQ ID NO: 543279 - DNA, 15 bp, Homo sapiens
aataatggcagggcg

SEQ ID NO: 543280 - DNA, 15 bp, Homo sapiens
aaataatggcagggc

SEQ ID NO: 543281 - DNA, 15 bp, Homo sapiens
aaaataatggcaggg

SEQ ID NO: 543282 - DNA, 15 bp, Homo sapiens
gaaaataatggcagg

SEQ ID NO: 543283 - DNA, 15 bp, Homo sapiens
tgaaaataatggcag

SEQ ID NO: 543284 - DNA, 15 bp, Homo sapiens
gatacattttctctg

SEQ ID NO: 543285 - DNA, 15 bp, Homo sapiens
ggatacattttctct

SEQ ID NO: 543286 - DNA, 15 bp, Homo sapiens
tggatacattttctc

SEQ ID NO: 543287 - DNA, 15 bp, Homo sapiens
gtggatacattttct

SEQ ID NO: 543288 - DNA, 15 bp, Homo sapiens
tgtggatacattttc

SEQ ID NO: 543289 - DNA, 15 bp, Homo sapiens
atgtggatacatttt

SEQ ID NO: 543290 - DNA, 15 bp, Homo sapiens
catgtggatacattt

SEQ ID NO: 543291 - DNA, 15 bp, Homo sapiens
gcatgtggatacatt

SEQ ID NO: 543292 - DNA, 15 bp, Homo sapiens
agcatgtggatacat

SEQ ID NO: 543293 - DNA, 15 bp, Homo sapiens
tagcatgtggataca

SEQ ID NO: 543294 - DNA, 15 bp, Homo sapiens
gtagcatgtggatac

SEQ ID NO: 543295 - DNA, 15 bp, Homo sapiens
cgtagcatgtggata

SEQ ID NO: 543296 - DNA, 15 bp, Homo sapiens
acgtagcatgtggat

SEQ ID NO: 543297 - DNA, 15 bp, Homo sapiens
cacgtagcatgtgga

SEQ ID NO: 543298 - DNA, 15 bp, Homo sapiens
acacgtagcatgtgg

SEQ ID NO: 543299 - DNA, 15 bp, Homo sapiens
aacacgtagcatgtg

SEQ ID NO: 543300 - DNA, 15 bp, Homo sapiens
aaacacgtagcatgt

SEQ ID NO: 543301 - DNA, 15 bp, Homo sapiens
caaacacgtagcatg

SEQ ID NO: 543302 - DNA, 15 bp, Homo sapiens
tcaaacacgtagcat

SEQ ID NO: 543303 - DNA, 15 bp, Homo sapiens
atcaaacacgtagca

SEQ ID NO: 543304 - DNA, 15 bp, Homo sapiens
aatcaaacacgtagc

SEQ ID NO: 543305 - DNA, 15 bp, Homo sapiens
taatcaaacacgtag

SEQ ID NO: 543306 - DNA, 15 bp, Homo sapiens
ttaatcaaacacgta

SEQ ID NO: 543307 - DNA, 15 bp, Homo sapiens
tttaatcaaacacgt

SEQ ID NO: 543308 - DNA, 15 bp, Homo sapiens
ttttaatcaaacacg

SEQ ID NO: 543309 - DNA, 15 bp, Homo sapiens
tttttaatcaaacac

SEQ ID NO: 543310 - DNA, 15 bp, Homo sapiens
atttttaatcaaaca

SEQ ID NO: 543311 - DNA, 15 bp, Homo sapiens
aatttttaatcaaac

SEQ ID NO: 543312 - DNA, 15 bp, Homo sapiens
taatttttaatcaaa

SEQ ID NO: 543313 - DNA, 15 bp, Homo sapiens
gtaatttttaatcaa

SEQ ID NO: 543314 - DNA, 15 bp, Homo sapiens
tgtaatttttaatca

SEQ ID NO: 543315 - DNA, 15 bp, Homo sapiens
ttgtaatttttaatc

SEQ ID NO: 543316 - DNA, 15 bp, Homo sapiens
cttgtaatttttaat

SEQ ID NO: 543317 - DNA, 15 bp, Homo sapiens
ccttgtaatttttaa

SEQ ID NO: 543318 - DNA, 15 bp, Homo sapiens
gccttgtaattttta

SEQ ID NO: 543319 - DNA, 15 bp, Homo sapiens
ggccttgtaattttt

SEQ ID NO: 543320 - DNA, 15 bp, Homo sapiens
tggccttgtaatttt

SEQ ID NO: 543321 - DNA, 15 bp, Homo sapiens
ttggccttgtaattt

SEQ ID NO: 543322 - DNA, 15 bp, Homo sapiens
cttggccttgtaatt

SEQ ID NO: 543323 - DNA, 15 bp, Homo sapiens
gcttggccttgtaat

SEQ ID NO: 543324 - DNA, 15 bp, Homo sapiens
tgcttggccttgtaa

SEQ ID NO: 543325 - DNA, 15 bp, Homo sapiens
atgcttggccttgta

SEQ ID NO: 543326 - DNA, 15 bp, Homo sapiens
catgcttggccttgt

SEQ ID NO: 543327 - DNA, 15 bp, Homo sapiens
ccatgcttggccttg

SEQ ID NO: 543328 - DNA, 15 bp, Homo sapiens
accatgcttggcctt

SEQ ID NO: 543329 - DNA, 15 bp, Homo sapiens
caccatgcttggcct

SEQ ID NO: 543330 - DNA, 15 bp, Homo sapiens
ccaccatgcttggcc

SEQ ID NO: 543331 - DNA, 15 bp, Homo sapiens
gccaccatgcttggc

SEQ ID NO: 543332 - DNA, 15 bp, Homo sapiens
agccaccatgcttgg

SEQ ID NO: 543333 - DNA, 15 bp, Homo sapiens
gagccaccatgcttg

SEQ ID NO: 543334 - DNA, 15 bp, Homo sapiens
tgagccaccatgctt

SEQ ID NO: 543335 - DNA, 15 bp, Homo sapiens
ttgagccaccatgct

SEQ ID NO: 543336 - DNA, 15 bp, Homo sapiens
tttgagccaccatgc

SEQ ID NO: 543337 - DNA, 15 bp, Homo sapiens
gtttgagccaccatg

SEQ ID NO: 543338 - DNA, 15 bp, Homo sapiens
agtttgagccaccat

SEQ ID NO: 543339 - DNA, 15 bp, Homo sapiens
aagtttgagccacca

SEQ ID NO: 543340 - DNA, 15 bp, Homo sapiens
caagtttgagccacc

SEQ ID NO: 543341 - DNA, 15 bp, Homo sapiens
gcaagtttgagccac

SEQ ID NO: 543342 - DNA, 15 bp, Homo sapiens
cgcaagtttgagcca

SEQ ID NO: 543343 - DNA, 15 bp, Homo sapiens
tcgcaagtttgagcc

SEQ ID NO: 543344 - DNA, 15 bp, Homo sapiens
atcgcaagtttgagc

SEQ ID NO: 543345 - DNA, 15 bp, Homo sapiens
gatcgcaagtttgag

SEQ ID NO: 543346 - DNA, 15 bp, Homo sapiens
ggatcgcaagtttga

SEQ ID NO: 543347 - DNA, 15 bp, Homo sapiens
gggatcgcaagtttg

SEQ ID NO: 543348 - DNA, 15 bp, Homo sapiens
tgggatcgcaagttt

SEQ ID NO: 543349 - DNA, 15 bp, Homo sapiens
ctgggatcgcaagtt

SEQ ID NO: 543350 - DNA, 15 bp, Homo sapiens
gctgggatcgcaagt

SEQ ID NO: 543351 - DNA, 15 bp, Homo sapiens
tgctgggatcgcaag

SEQ ID NO: 543352 - DNA, 15 bp, Homo sapiens
gtgctgggatcgcaa

SEQ ID NO: 543353 - DNA, 15 bp, Homo sapiens
agtgctgggatcgca

SEQ ID NO: 543354 - DNA, 15 bp, Homo sapiens
aagtgctgggatcgc

SEQ ID NO: 543355 - DNA, 15 bp, Homo sapiens
aaagtgctgggatcg

SEQ ID NO: 543356 - DNA, 15 bp, Homo sapiens
taaagtgctgggatc

SEQ ID NO: 543357 - DNA, 15 bp, Homo sapiens
ataaagtgctgggat

SEQ ID NO: 543358 - DNA, 15 bp, Homo sapiens
cataaagtgctggga

SEQ ID NO: 543359 - DNA, 15 bp, Homo sapiens
ccataaagtgctggg

SEQ ID NO: 543360 - DNA, 15 bp, Homo sapiens
cccataaagtgctgg

SEQ ID NO: 543361 - DNA, 15 bp, Homo sapiens
ccccataaagtgctg

SEQ ID NO: 543362 - DNA, 15 bp, Homo sapiens
gccccataaagtgct

SEQ ID NO: 543363 - DNA, 15 bp, Homo sapiens
agccccataaagtgc

SEQ ID NO: 543364 - DNA, 15 bp, Homo sapiens
cagccccataaagtg

SEQ ID NO: 543365 - DNA, 15 bp, Homo sapiens
tcagccccataaagt

SEQ ID NO: 543366 - DNA, 15 bp, Homo sapiens
ctcagccccataaag

SEQ ID NO: 543367 - DNA, 15 bp, Homo sapiens
cctcagccccataaa

SEQ ID NO: 543368 - DNA, 15 bp, Homo sapiens
acctcagccccataa

SEQ ID NO: 543369 - DNA, 15 bp, Homo sapiens
cacctcagccccata

SEQ ID NO: 543370 - DNA, 15 bp, Homo sapiens
ccacctcagccccat

SEQ ID NO: 543371 - DNA, 15 bp, Homo sapiens
cccacctcagcccca

SEQ ID NO: 543372 - DNA, 15 bp, Homo sapiens
tcccacctcagcccc

SEQ ID NO: 543373 - DNA, 15 bp, Homo sapiens
ctcccacctcagccc

SEQ ID NO: 543374 - DNA, 15 bp, Homo sapiens
cctcccacctcagcc

SEQ ID NO: 543375 - DNA, 15 bp, Homo sapiens
ccctcccacctcagc

SEQ ID NO: 543376 - DNA, 15 bp, Homo sapiens
accctcccacctcag

SEQ ID NO: 543377 - DNA, 15 bp, Homo sapiens
gaccctcccacctca

SEQ ID NO: 543378 - DNA, 15 bp, Homo sapiens
tgaccctcccacctc

SEQ ID NO: 543379 - DNA, 15 bp, Homo sapiens
gtgaccctcccacct

SEQ ID NO: 543380 - DNA, 15 bp, Homo sapiens
agtgaccctcccacc

SEQ ID NO: 543381 - DNA, 15 bp, Homo sapiens
aagtgaccctcccac

SEQ ID NO: 543382 - DNA, 15 bp, Homo sapiens
caagtgaccctccca

SEQ ID NO: 543383 - DNA, 15 bp, Homo sapiens
tcaagtgaccctccc

SEQ ID NO: 543384 - DNA, 15 bp, Homo sapiens
ttcaagtgaccctcc

SEQ ID NO: 543385 - DNA, 15 bp, Homo sapiens
cttcaagtgaccctc

SEQ ID NO: 543386 - DNA, 15 bp, Homo sapiens
gcttcaagtgaccct

SEQ ID NO: 543387 - DNA, 15 bp, Homo sapiens
ggcttcaagtgaccc

SEQ ID NO: 543388 - DNA, 15 bp, Homo sapiens
gggcttcaagtgacc

SEQ ID NO: 543389 - DNA, 15 bp, Homo sapiens
agggcttcaagtgac

SEQ ID NO: 543390 - DNA, 15 bp, Homo sapiens
cagggcttcaagtga

SEQ ID NO: 543391 - DNA, 15 bp, Homo sapiens
tcagggcttcaagtg

SEQ ID NO: 543392 - DNA, 15 bp, Homo sapiens
ctcagggcttcaagt

SEQ ID NO: 543393 - DNA, 15 bp, Homo sapiens
actcagggcttcaag

SEQ ID NO: 543394 - DNA, 15 bp, Homo sapiens
aactcagggcttcaa

SEQ ID NO: 543395 - DNA, 15 bp, Homo sapiens
aaactcagggcttca

SEQ ID NO: 543396 - DNA, 15 bp, Homo sapiens
taaactcagggcttc

SEQ ID NO: 543397 - DNA, 15 bp, Homo sapiens
ttaaactcagggctt

SEQ ID NO: 543398 - DNA, 15 bp, Homo sapiens
cttaaactcagggct

SEQ ID NO: 543399 - DNA, 15 bp, Homo sapiens
tcttaaactcagggc

SEQ ID NO: 543400 - DNA, 15 bp, Homo sapiens
gtcttaaactcaggg

SEQ ID NO: 543401 - DNA, 15 bp, Homo sapiens
agtcttaaactcagg

SEQ ID NO: 543402 - DNA, 15 bp, Homo sapiens
tagtcttaaactcag

SEQ ID NO: 543403 - DNA, 15 bp, Homo sapiens
ctagtcttaaactca

SEQ ID NO: 543404 - DNA, 15 bp, Homo sapiens
gctagtcttaaactc

SEQ ID NO: 543405 - DNA, 15 bp, Homo sapiens
cgctagtcttaaact

SEQ ID NO: 543406 - DNA, 15 bp, Homo sapiens
acgctagtcttaaac

SEQ ID NO: 543407 - DNA, 15 bp, Homo sapiens
cacgctagtcttaaa

SEQ ID NO: 543408 - DNA, 15 bp, Homo sapiens
ccacgctagtcttaa

SEQ ID NO: 543409 - DNA, 15 bp, Homo sapiens
cccacgctagtctta

SEQ ID NO: 543410 - DNA, 15 bp, Homo sapiens
gcccacgctagtctt

SEQ ID NO: 543411 - DNA, 15 bp, Homo sapiens
tgcccacgctagtct

SEQ ID NO: 543412 - DNA, 15 bp, Homo sapiens
ttgcccacgctagtc

SEQ ID NO: 543413 - DNA, 15 bp, Homo sapiens
gttgcccacgctagt

SEQ ID NO: 543414 - DNA, 15 bp, Homo sapiens
tgttgcccacgctag

SEQ ID NO: 543415 - DNA, 15 bp, Homo sapiens
atgttgcccacgcta

SEQ ID NO: 543416 - DNA, 15 bp, Homo sapiens
tatgttgcccacgct

SEQ ID NO: 543417 - DNA, 15 bp, Homo sapiens
ctatgttgcccacgc

SEQ ID NO: 543418 - DNA, 15 bp, Homo sapiens
actatgttgcccacg

SEQ ID NO: 543419 - DNA, 15 bp, Homo sapiens
cactatgttgcccac

SEQ ID NO: 543420 - DNA, 15 bp, Homo sapiens
tcactatgttgccca

SEQ ID NO: 543421 - DNA, 15 bp, Homo sapiens
ctcactatgttgccc

SEQ ID NO: 543422 - DNA, 15 bp, Homo sapiens
tctcactatgttgcc

SEQ ID NO: 543423 - DNA, 15 bp, Homo sapiens
gtctcactatgttgc

SEQ ID NO: 543424 - DNA, 15 bp, Homo sapiens
ggtctcactatgttg

SEQ ID NO: 543425 - DNA, 15 bp, Homo sapiens
gggtctcactatgtt

SEQ ID NO: 543426 - DNA, 15 bp, Homo sapiens
ggggtctcactatgt

SEQ ID NO: 543427 - DNA, 15 bp, Homo sapiens
gggggtctcactatg

SEQ ID NO: 543428 - DNA, 15 bp, Homo sapiens
tgggggtctcactat

SEQ ID NO: 543429 - DNA, 15 bp, Homo sapiens
atgggggtctcacta

SEQ ID NO: 543430 - DNA, 15 bp, Homo sapiens
gatgggggtctcact

SEQ ID NO: 543431 - DNA, 15 bp, Homo sapiens
agatgggggtctcac

SEQ ID NO: 543432 - DNA, 15 bp, Homo sapiens
gagatgggggtctca

SEQ ID NO: 543433 - DNA, 15 bp, Homo sapiens
agagatgggggtctc

SEQ ID NO: 543434 - DNA, 15 bp, Homo sapiens
tagagatgggggtct

SEQ ID NO: 543435 - DNA, 15 bp, Homo sapiens
gtagagatgggggtc

SEQ ID NO: 543436 - DNA, 15 bp, Homo sapiens
tgtagagatgggggt

SEQ ID NO: 543437 - DNA, 15 bp, Homo sapiens
ttgtagagatggggg

SEQ ID NO: 543438 - DNA, 15 bp, Homo sapiens
tttgtagagatgggg

SEQ ID NO: 543439 - DNA, 15 bp, Homo sapiens
ttttgtagagatggg

SEQ ID NO: 543440 - DNA, 15 bp, Homo sapiens
gttttgtagagatgg

SEQ ID NO: 543441 - DNA, 15 bp, Homo sapiens
tgttttgtagagatg

SEQ ID NO: 543442 - DNA, 15 bp, Homo sapiens
ttgttttgtagagat

SEQ ID NO: 543443 - DNA, 15 bp, Homo sapiens
tttgttttgtagaga

SEQ ID NO: 543444 - DNA, 15 bp, Homo sapiens
ttttgttttgtagag

SEQ ID NO: 543445 - DNA, 15 bp, Homo sapiens
gttttgttttgtaga

SEQ ID NO: 543446 - DNA, 15 bp, Homo sapiens
tgttttgttttgtag

SEQ ID NO: 543447 - DNA, 15 bp, Homo sapiens
ttgttttgttttgta

SEQ ID NO: 543448 - DNA, 15 bp, Homo sapiens
gttgttttgttttgt

SEQ ID NO: 543449 - DNA, 15 bp, Homo sapiens
tgttgttttgttttg

SEQ ID NO: 543450 - DNA, 15 bp, Homo sapiens
ttgttgttttgtttt

SEQ ID NO: 543451 - DNA, 15 bp, Homo sapiens
gttgttgttttgttt

SEQ ID NO: 543452 - DNA, 15 bp, Homo sapiens
tgttgttgttttgtt

SEQ ID NO: 543453 - DNA, 15 bp, Homo sapiens
ttgttgttgttttgt

SEQ ID NO: 543454 - DNA, 15 bp, Homo sapiens
tttgttgttgttttg

SEQ ID NO: 543455 - DNA, 15 bp, Homo sapiens
ttttgttgttgtttt

SEQ ID NO: 543456 - DNA, 15 bp, Homo sapiens
gttttgttgttgttt

SEQ ID NO: 543457 - DNA, 15 bp, Homo sapiens
agttttgttgttgtt

SEQ ID NO: 543458 - DNA, 15 bp, Homo sapiens
tagttttgttgttgt

SEQ ID NO: 543459 - DNA, 15 bp, Homo sapiens
ttagttttgttgttg

SEQ ID NO: 543460 - DNA, 15 bp, Homo sapiens
cttagttttgttgtt

SEQ ID NO: 543461 - DNA, 15 bp, Homo sapiens
gcttagttttgttgt

SEQ ID NO: 543462 - DNA, 15 bp, Homo sapiens
agcttagttttgttg

SEQ ID NO: 543463 - DNA, 15 bp, Homo sapiens
cagcttagttttgtt

SEQ ID NO: 543464 - DNA, 15 bp, Homo sapiens
ccagcttagttttgt

SEQ ID NO: 543465 - DNA, 15 bp, Homo sapiens
accagcttagttttg

SEQ ID NO: 543466 - DNA, 15 bp, Homo sapiens
caccagcttagtttt

SEQ ID NO: 543467 - DNA, 15 bp, Homo sapiens
gcaccagcttagttt

SEQ ID NO: 543468 - DNA, 15 bp, Homo sapiens
tgcaccagcttagtt

SEQ ID NO: 543469 - DNA, 15 bp, Homo sapiens
atgcaccagcttagt

SEQ ID NO: 543470 - DNA, 15 bp, Homo sapiens
catgcaccagcttag

SEQ ID NO: 543471 - DNA, 15 bp, Homo sapiens
ccatgcaccagctta

SEQ ID NO: 543472 - DNA, 15 bp, Homo sapiens
accatgcaccagctt

SEQ ID NO: 543473 - DNA, 15 bp, Homo sapiens
caccatgcaccagct

SEQ ID NO: 543474 - DNA, 15 bp, Homo sapiens
ccaccatgcaccagc

SEQ ID NO: 543475 - DNA, 15 bp, Homo sapiens
gccaccatgcaccag

SEQ ID NO: 543476 - DNA, 15 bp, Homo sapiens
tgccaccatgcacca

SEQ ID NO: 543477 - DNA, 15 bp, Homo sapiens
atgccaccatgcacc

SEQ ID NO: 543478 - DNA, 15 bp, Homo sapiens
catgccaccatgcac

SEQ ID NO: 543479 - DNA, 15 bp, Homo sapiens
gcatgccaccatgca

SEQ ID NO: 543480 - DNA, 15 bp, Homo sapiens
tgcatgccaccatgc

SEQ ID NO: 543481 - DNA, 15 bp, Homo sapiens
gtgcatgccaccatg

SEQ ID NO: 543482 - DNA, 15 bp, Homo sapiens
ggtgcatgccaccat

SEQ ID NO: 543483 - DNA, 15 bp, Homo sapiens
aggtgcatgccacca

SEQ ID NO: 543484 - DNA, 15 bp, Homo sapiens
taggtgcatgccacc

SEQ ID NO: 543485 - DNA, 15 bp, Homo sapiens
ataggtgcatgccac

SEQ ID NO: 543486 - DNA, 15 bp, Homo sapiens
tataggtgcatgcca

SEQ ID NO: 543487 - DNA, 15 bp, Homo sapiens
ctataggtgcatgcc

SEQ ID NO: 543488 - DNA, 15 bp, Homo sapiens
actataggtgcatgc

SEQ ID NO: 543489 - DNA, 15 bp, Homo sapiens
gactataggtgcatg

SEQ ID NO: 543490 - DNA, 15 bp, Homo sapiens
ggactataggtgcat

SEQ ID NO: 543491 - DNA, 15 bp, Homo sapiens
aggactataggtgca

SEQ ID NO: 543492 - DNA, 15 bp, Homo sapiens
taggactataggtgc

SEQ ID NO: 543493 - DNA, 15 bp, Homo sapiens
ctaggactataggtg

SEQ ID NO: 543494 - DNA, 15 bp, Homo sapiens
gctaggactataggt

SEQ ID NO: 543495 - DNA, 15 bp, Homo sapiens
agctaggactatagg

SEQ ID NO: 543496 - DNA, 15 bp, Homo sapiens
tagctaggactatag

SEQ ID NO: 543497 - DNA, 15 bp, Homo sapiens
gtagctaggactata

SEQ ID NO: 543498 - DNA, 15 bp, Homo sapiens
agtagctaggactat

SEQ ID NO: 543499 - DNA, 15 bp, Homo sapiens
aagtagctaggacta

SEQ ID NO: 543500 - DNA, 15 bp, Homo sapiens
caagtagctaggact

SEQ ID NO: 543501 - DNA, 15 bp, Homo sapiens
tcaagtagctaggac

SEQ ID NO: 543502 - DNA, 15 bp, Homo sapiens
ctcaagtagctagga

SEQ ID NO: 543503 - DNA, 15 bp, Homo sapiens
tctcaagtagctagg

SEQ ID NO: 543504 - DNA, 15 bp, Homo sapiens
ctctcaagtagctag

SEQ ID NO: 543505 - DNA, 15 bp, Homo sapiens
cctctcaagtagcta

SEQ ID NO: 543506 - DNA, 15 bp, Homo sapiens
gcctctcaagtagct

SEQ ID NO: 543507 - DNA, 15 bp, Homo sapiens
agcctctcaagtagc

SEQ ID NO: 543508 - DNA, 15 bp, Homo sapiens
cagcctctcaagtag

SEQ ID NO: 543509 - DNA, 15 bp, Homo sapiens
tcagcctctcaagta

SEQ ID NO: 543510 - DNA, 15 bp, Homo sapiens
ctcagcctctcaagt

SEQ ID NO: 543511 - DNA, 15 bp, Homo sapiens
cctcagcctctcaag

SEQ ID NO: 543512 - DNA, 15 bp, Homo sapiens
acctcagcctctcaa

SEQ ID NO: 543513 - DNA, 15 bp, Homo sapiens
cacctcagcctctca

SEQ ID NO: 543514 - DNA, 15 bp, Homo sapiens
ccacctcagcctctc

SEQ ID NO: 543515 - DNA, 15 bp, Homo sapiens
cccacctcagcctct

SEQ ID NO: 543516 - DNA, 15 bp, Homo sapiens
tcccacctcagcctc

SEQ ID NO: 543517 - DNA, 15 bp, Homo sapiens
ctcccacctcagcct

SEQ ID NO: 543518 - DNA, 15 bp, Homo sapiens
tcctcccacctcagc

SEQ ID NO: 543519 - DNA, 15 bp, Homo sapiens
atcctcccacctcag

SEQ ID NO: 543520 - DNA, 15 bp, Homo sapiens
tatcctcccacctca

SEQ ID NO: 543521 - DNA, 15 bp, Homo sapiens
atatcctcccacctc

SEQ ID NO: 543522 - DNA, 15 bp, Homo sapiens
gatatcctcccacct

SEQ ID NO: 543523 - DNA, 15 bp, Homo sapiens
agatatcctcccacc

SEQ ID NO: 543524 - DNA, 15 bp, Homo sapiens
aagatatcctcccac

SEQ ID NO: 543525 - DNA, 15 bp, Homo sapiens
caagatatcctccca

SEQ ID NO: 543526 - DNA, 15 bp, Homo sapiens
tcaagatatcctccc

SEQ ID NO: 543527 - DNA, 15 bp, Homo sapiens
ctcaagatatcctcc

SEQ ID NO: 543528 - DNA, 15 bp, Homo sapiens
gctcaagatatcctc

SEQ ID NO: 543529 - DNA, 15 bp, Homo sapiens
ggctcaagatatcct

SEQ ID NO: 543530 - DNA, 15 bp, Homo sapiens
gggctcaagatatcc

SEQ ID NO: 543531 - DNA, 15 bp, Homo sapiens
tgggctcaagatatc

SEQ ID NO: 543532 - DNA, 15 bp, Homo sapiens
ctgggctcaagatat

SEQ ID NO: 543533 - DNA, 15 bp, Homo sapiens
cctgggctcaagata

SEQ ID NO: 543534 - DNA, 15 bp, Homo sapiens
tcctgggctcaagat

SEQ ID NO: 543535 - DNA, 15 bp, Homo sapiens
ctcctgggctcaaga

SEQ ID NO: 543536 - DNA, 15 bp, Homo sapiens
gctcctgggctcaag

SEQ ID NO: 543537 - DNA, 15 bp, Homo sapiens
agctcctgggctcaa

SEQ ID NO: 543538 - DNA, 15 bp, Homo sapiens
gagctcctgggctca

SEQ ID NO: 543539 - DNA, 15 bp, Homo sapiens
cgagctcctgggctc

SEQ ID NO: 543540 - DNA, 15 bp, Homo sapiens
tcgagctcctgggct

SEQ ID NO: 543541 - DNA, 15 bp, Homo sapiens
ctcgagctcctgggc

SEQ ID NO: 543542 - DNA, 15 bp, Homo sapiens
cctcgagctcctggg

SEQ ID NO: 543543 - DNA, 15 bp, Homo sapiens
gcctcgagctcctgg

SEQ ID NO: 543544 - DNA, 15 bp, Homo sapiens
agcctcgagctcctg

SEQ ID NO: 543545 - DNA, 15 bp, Homo sapiens
cagcctcgagctcct

SEQ ID NO: 543546 - DNA, 15 bp, Homo sapiens
gcagcctcgagctcc

SEQ ID NO: 543547 - DNA, 15 bp, Homo sapiens
tgcagcctcgagctc

SEQ ID NO: 543548 - DNA, 15 bp, Homo sapiens
ctgcagcctcgagct

SEQ ID NO: 543549 - DNA, 15 bp, Homo sapiens
actgcagcctcgagc

SEQ ID NO: 543550 - DNA, 15 bp, Homo sapiens
cactgcagcctcgag

SEQ ID NO: 543551 - DNA, 15 bp, Homo sapiens
tcactgcagcctcga

SEQ ID NO: 543552 - DNA, 15 bp, Homo sapiens
ctcactgcagcctcg

SEQ ID NO: 543553 - DNA, 15 bp, Homo sapiens
acagctcactgcagc

SEQ ID NO: 543554 - DNA, 15 bp, Homo sapiens
cacagctcactgcag

SEQ ID NO: 543555 - DNA, 15 bp, Homo sapiens
acacagctcactgca

SEQ ID NO: 543556 - DNA, 15 bp, Homo sapiens
aacacagctcactgc

SEQ ID NO: 543557 - DNA, 15 bp, Homo sapiens
aaacacagctcactg

SEQ ID NO: 543558 - DNA, 15 bp, Homo sapiens
caaacacagctcact

SEQ ID NO: 543559 - DNA, 15 bp, Homo sapiens
acaaacacagctcac

SEQ ID NO: 543560 - DNA, 15 bp, Homo sapiens
cacaaacacagctca

SEQ ID NO: 543561 - DNA, 15 bp, Homo sapiens
gcacaaacacagctc

SEQ ID NO: 543562 - DNA, 15 bp, Homo sapiens
ggcacaaacacagct

SEQ ID NO: 543563 - DNA, 15 bp, Homo sapiens
tggcacaaacacagc

SEQ ID NO: 543564 - DNA, 15 bp, Homo sapiens
gtggcacaaacacag

SEQ ID NO: 543565 - DNA, 15 bp, Homo sapiens
agtggcacaaacaca

SEQ ID NO: 543566 - DNA, 15 bp, Homo sapiens
cagtggcacaaacac

SEQ ID NO: 543567 - DNA, 15 bp, Homo sapiens
acagtggcacaaaca

SEQ ID NO: 543568 - DNA, 15 bp, Homo sapiens
tacagtggcacaaac

SEQ ID NO: 543569 - DNA, 15 bp, Homo sapiens
gtacagtggcacaaa

SEQ ID NO: 543570 - DNA, 15 bp, Homo sapiens
agtacagtggcacaa

SEQ ID NO: 543571 - DNA, 15 bp, Homo sapiens
gagtacagtggcaca

SEQ ID NO: 543572 - DNA, 15 bp, Homo sapiens
ggagtacagtggcac

SEQ ID NO: 543573 - DNA, 15 bp, Homo sapiens
tggagtacagtggca

SEQ ID NO: 543574 - DNA, 15 bp, Homo sapiens
ttggagtacagtggc

SEQ ID NO: 543575 - DNA, 15 bp, Homo sapiens
gttggagtacagtgg

SEQ ID NO: 543576 - DNA, 15 bp, Homo sapiens
ggttggagtacagtg

SEQ ID NO: 543577 - DNA, 15 bp, Homo sapiens
aggttggagtacagt

SEQ ID NO: 543578 - DNA, 15 bp, Homo sapiens
caggttggagtacag

SEQ ID NO: 543579 - DNA, 15 bp, Homo sapiens
ccaggttggagtaca

SEQ ID NO: 543580 - DNA, 15 bp, Homo sapiens
cccaggttggagtac

SEQ ID NO: 543581 - DNA, 15 bp, Homo sapiens
gcccaggttggagta

SEQ ID NO: 543582 - DNA, 15 bp, Homo sapiens
tgcccaggttggagt

SEQ ID NO: 543583 - DNA, 15 bp, Homo sapiens
ttgcccaggttggag

SEQ ID NO: 543584 - DNA, 15 bp, Homo sapiens
gttgcccaggttgga

SEQ ID NO: 543585 - DNA, 15 bp, Homo sapiens
tgttgcccaggttgg

SEQ ID NO: 543586 - DNA, 15 bp, Homo sapiens
ttgttgcccaggttg

SEQ ID NO: 543587 - DNA, 15 bp, Homo sapiens
tttgttgcccaggtt

SEQ ID NO: 543588 - DNA, 15 bp, Homo sapiens
ctttgttgcccaggt

SEQ ID NO: 543589 - DNA, 15 bp, Homo sapiens
ttcactttgttgccc

SEQ ID NO: 543590 - DNA, 15 bp, Homo sapiens
tttcactttgttgcc

SEQ ID NO: 543591 - DNA, 15 bp, Homo sapiens
atttcactttgttgc

SEQ ID NO: 543592 - DNA, 15 bp, Homo sapiens
gatttcactttgttg

SEQ ID NO: 543593 - DNA, 15 bp, Homo sapiens
ggatttcactttgtt

SEQ ID NO: 543594 - DNA, 15 bp, Homo sapiens
gggatttcactttgt

SEQ ID NO: 543595 - DNA, 15 bp, Homo sapiens
tgggatttcactttg

SEQ ID NO: 543596 - DNA, 15 bp, Homo sapiens
atgggatttcacttt

SEQ ID NO: 543597 - DNA, 15 bp, Homo sapiens
gatgggatttcactt

SEQ ID NO: 543598 - DNA, 15 bp, Homo sapiens
agatgggatttcact

SEQ ID NO: 543599 - DNA, 15 bp, Homo sapiens
gagatgggatttcac

SEQ ID NO: 543600 - DNA, 15 bp, Homo sapiens
agagatgggatttca

SEQ ID NO: 543601 - DNA, 15 bp, Homo sapiens
aagagatgggatttc

SEQ ID NO: 543602 - DNA, 15 bp, Homo sapiens
aaagagatgggattt

SEQ ID NO: 543603 - DNA, 15 bp, Homo sapiens
aaaagagatgggatt

SEQ ID NO: 543604 - DNA, 15 bp, Homo sapiens
aaaaagagatgggat

SEQ ID NO: 543605 - DNA, 15 bp, Homo sapiens
aaaaaagagatggga

SEQ ID NO: 543606 - DNA, 15 bp, Homo sapiens
aaaaaaagagatggg

SEQ ID NO: 543607 - DNA, 15 bp, Homo sapiens
aaaaaaaagagatgg

SEQ ID NO: 543608 - DNA, 15 bp, Homo sapiens
aaaaaaaaagagatg

SEQ ID NO: 543609 - DNA, 15 bp, Homo sapiens
aaaaaaaaaagagat

SEQ ID NO: 543610 - DNA, 15 bp, Homo sapiens
aaaaaaaaaaagaga

SEQ ID NO: 543611 - DNA, 15 bp, Homo sapiens
aaaaaaaaaaaagag

SEQ ID NO: 543612 - DNA, 15 bp, Homo sapiens
gtctcaaaaaaaaaa

SEQ ID NO: 543613 - DNA, 15 bp, Homo sapiens
cgtctcaaaaaaaaa

SEQ ID NO: 543614 - DNA, 15 bp, Homo sapiens
ccgtctcaaaaaaaa

SEQ ID NO: 543615 - DNA, 15 bp, Homo sapiens
tccgtctcaaaaaaa

SEQ ID NO: 543616 - DNA, 15 bp, Homo sapiens
ctccgtctcaaaaaa

SEQ ID NO: 543617 - DNA, 15 bp, Homo sapiens
actccgtctcaaaaa

SEQ ID NO: 543618 - DNA, 15 bp, Homo sapiens
gactccgtctcaaaa

SEQ ID NO: 543619 - DNA, 15 bp, Homo sapiens
agactccgtctcaaa

SEQ ID NO: 543620 - DNA, 15 bp, Homo sapiens
cagactccgtctcaa

SEQ ID NO: 543621 - DNA, 15 bp, Homo sapiens
ccagactccgtctca

SEQ ID NO: 543622 - DNA, 15 bp, Homo sapiens
gccagactccgtctc

SEQ ID NO: 543623 - DNA, 15 bp, Homo sapiens
agccagactccgtct

SEQ ID NO: 543624 - DNA, 15 bp, Homo sapiens
gagccagactccgtc

SEQ ID NO: 543625 - DNA, 15 bp, Homo sapiens
agagccagactccgt

SEQ ID NO: 543626 - DNA, 15 bp, Homo sapiens
cagagccagactccg

SEQ ID NO: 543627 - DNA, 15 bp, Homo sapiens
acagagccagactcc

SEQ ID NO: 543628 - DNA, 15 bp, Homo sapiens
gacagagccagactc

SEQ ID NO: 543629 - DNA, 15 bp, Homo sapiens
cgacagagccagact

SEQ ID NO: 543630 - DNA, 15 bp, Homo sapiens
gcgacagagccagac

SEQ ID NO: 543631 - DNA, 15 bp, Homo sapiens
ggcgacagagccaga

SEQ ID NO: 543632 - DNA, 15 bp, Homo sapiens
gggcgacagagccag

SEQ ID NO: 543633 - DNA, 15 bp, Homo sapiens
tgggcgacagagcca

SEQ ID NO: 543634 - DNA, 15 bp, Homo sapiens
ctgggcgacagagcc

SEQ ID NO: 543635 - DNA, 15 bp, Homo sapiens
accactgcactccag

SEQ ID NO: 543636 - DNA, 15 bp, Homo sapiens
caccactgcactcca

SEQ ID NO: 543637 - DNA, 15 bp, Homo sapiens
gcaccactgcactcc

SEQ ID NO: 543638 - DNA, 15 bp, Homo sapiens
cgcaccactgcactc

SEQ ID NO: 543639 - DNA, 15 bp, Homo sapiens
tcgcaccactgcact

SEQ ID NO: 543640 - DNA, 15 bp, Homo sapiens
atcgcaccactgcac

SEQ ID NO: 543641 - DNA, 15 bp, Homo sapiens
gatcgcaccactgca

SEQ ID NO: 543642 - DNA, 15 bp, Homo sapiens
agatcgcaccactgc

SEQ ID NO: 543643 - DNA, 15 bp, Homo sapiens
gagatcgcaccactg

SEQ ID NO: 543644 - DNA, 15 bp, Homo sapiens
cgagatcgcaccact

SEQ ID NO: 543645 - DNA, 15 bp, Homo sapiens
ccgagatcgcaccac

SEQ ID NO: 543646 - DNA, 15 bp, Homo sapiens
gccgagatcgcacca

SEQ ID NO: 543647 - DNA, 15 bp, Homo sapiens
agccgagatcgcacc

SEQ ID NO: 543648 - DNA, 15 bp, Homo sapiens
gagccgagatcgcac

SEQ ID NO: 543649 - DNA, 15 bp, Homo sapiens
tgagccgagatcgca

SEQ ID NO: 543650 - DNA, 15 bp, Homo sapiens
gtgagccgagatcgc

SEQ ID NO: 543651 - DNA, 15 bp, Homo sapiens
ttgcagtgagccgag

SEQ ID NO: 543652 - DNA, 15 bp, Homo sapiens
cttgcagtgagccga

SEQ ID NO: 543653 - DNA, 15 bp, Homo sapiens
gcttgcagtgagccg

SEQ ID NO: 543654 - DNA, 15 bp, Homo sapiens
agcttgcagtgagcc

SEQ ID NO: 543655 - DNA, 15 bp, Homo sapiens
gagcttgcagtgagc

SEQ ID NO: 543656 - DNA, 15 bp, Homo sapiens
ggagcttgcagtgag

SEQ ID NO: 543657 - DNA, 15 bp, Homo sapiens
tggagcttgcagtga

SEQ ID NO: 543658 - DNA, 15 bp, Homo sapiens
gtggagcttgcagtg

SEQ ID NO: 543659 - DNA, 15 bp, Homo sapiens
ggtggagcttgcagt

SEQ ID NO: 543660 - DNA, 15 bp, Homo sapiens
aggtggagcttgcag

SEQ ID NO: 543661 - DNA, 15 bp, Homo sapiens
aaggtggagcttgca

SEQ ID NO: 543662 - DNA, 15 bp, Homo sapiens
gaaggtggagcttgc

SEQ ID NO: 543663 - DNA, 15 bp, Homo sapiens
ggaaggtggagcttg

SEQ ID NO: 543664 - DNA, 15 bp, Homo sapiens
cggaaggtggagctt

SEQ ID NO: 543665 - DNA, 15 bp, Homo sapiens
ccggaaggtggagct

SEQ ID NO: 543666 - DNA, 15 bp, Homo sapiens
cccggaaggtggagc

SEQ ID NO: 543667 - DNA, 15 bp, Homo sapiens
acccggaaggtggag

SEQ ID NO: 543668 - DNA, 15 bp, Homo sapiens
aacccggaaggtgga

SEQ ID NO: 543669 - DNA, 15 bp, Homo sapiens
gaacccggaaggtgg

SEQ ID NO: 543670 - DNA, 15 bp, Homo sapiens
tgaacccggaaggtg

SEQ ID NO: 543671 - DNA, 15 bp, Homo sapiens
gtgaacccggaaggt

SEQ ID NO: 543672 - DNA, 15 bp, Homo sapiens
cgtgaacccggaagg

SEQ ID NO: 543673 - DNA, 15 bp, Homo sapiens
gcgtgaacccggaag

SEQ ID NO: 543674 - DNA, 15 bp, Homo sapiens
ggcgtgaacccggaa

SEQ ID NO: 543675 - DNA, 15 bp, Homo sapiens
tggcgtgaacccgga

SEQ ID NO: 543676 - DNA, 15 bp, Homo sapiens
atggcgtgaacccgg

SEQ ID NO: 543677 - DNA, 15 bp, Homo sapiens
aatggcgtgaacccg

SEQ ID NO: 543678 - DNA, 15 bp, Homo sapiens
gaatggcgtgaaccc

SEQ ID NO: 543679 - DNA, 15 bp, Homo sapiens
agaatggcgtgaacc

SEQ ID NO: 543680 - DNA, 15 bp, Homo sapiens
gagaatggcgtgaac

SEQ ID NO: 543681 - DNA, 15 bp, Homo sapiens
ggagaatggcgtgaa

SEQ ID NO: 543682 - DNA, 15 bp, Homo sapiens
aggagaatggcgtga

SEQ ID NO: 543683 - DNA, 15 bp, Homo sapiens
caggagaatggcgtg

SEQ ID NO: 543684 - DNA, 15 bp, Homo sapiens
gcaggagaatggcgt

SEQ ID NO: 543685 - DNA, 15 bp, Homo sapiens
ggcaggagaatggcg

SEQ ID NO: 543686 - DNA, 15 bp, Homo sapiens
aggcaggagaatggc

SEQ ID NO: 543687 - DNA, 15 bp, Homo sapiens
tcccagctactcagg

SEQ ID NO: 543688 - DNA, 15 bp, Homo sapiens
gtcccagctactcag

SEQ ID NO: 543689 - DNA, 15 bp, Homo sapiens
agtcccagctactca

SEQ ID NO: 543690 - DNA, 15 bp, Homo sapiens
gtagtcccagctact

SEQ ID NO: 543691 - DNA, 15 bp, Homo sapiens
tgtagtcccagctac

SEQ ID NO: 543692 - DNA, 15 bp, Homo sapiens
ctgtagtcccagcta

SEQ ID NO: 543693 - DNA, 15 bp, Homo sapiens
cctgtagtcccagct

SEQ ID NO: 543694 - DNA, 15 bp, Homo sapiens
gcctgtagtcccagc

SEQ ID NO: 543695 - DNA, 15 bp, Homo sapiens
cgcctgtagtcccag

SEQ ID NO: 543696 - DNA, 15 bp, Homo sapiens
gcgcctgtagtccca

SEQ ID NO: 543697 - DNA, 15 bp, Homo sapiens
ggcgcctgtagtccc

SEQ ID NO: 543698 - DNA, 15 bp, Homo sapiens
gggcgcctgtagtcc

SEQ ID NO: 543699 - DNA, 15 bp, Homo sapiens
cgggcgcctgtagtc

SEQ ID NO: 543700 - DNA, 15 bp, Homo sapiens
gcgggcgcctgtagt

SEQ ID NO: 543701 - DNA, 15 bp, Homo sapiens
ggcgggcgcctgtag

SEQ ID NO: 543702 - DNA, 15 bp, Homo sapiens
tggcgggcgcctgta

SEQ ID NO: 543703 - DNA, 15 bp, Homo sapiens
gtggcgggcgcctgt

SEQ ID NO: 543704 - DNA, 15 bp, Homo sapiens
ggtggcgggcgcctg

SEQ ID NO: 543705 - DNA, 15 bp, Homo sapiens
cggtggcgggcgcct

SEQ ID NO: 543706 - DNA, 15 bp, Homo sapiens
gcggtggcgggcgcc

SEQ ID NO: 543707 - DNA, 15 bp, Homo sapiens
tgcggtggcgggcgc

SEQ ID NO: 543708 - DNA, 15 bp, Homo sapiens
gtgcggtggcgggcg

SEQ ID NO: 543709 - DNA, 15 bp, Homo sapiens
ggtgcggtggcgggc

SEQ ID NO: 543710 - DNA, 15 bp, Homo sapiens
gggtgcggtggcggg

SEQ ID NO: 543711 - DNA, 15 bp, Homo sapiens
tgggtgcggtggcgg

SEQ ID NO: 543712 - DNA, 15 bp, Homo sapiens
gtgggtgcggtggcg

SEQ ID NO: 543713 - DNA, 15 bp, Homo sapiens
ggtgggtgcggtggc

SEQ ID NO: 543714 - DNA, 15 bp, Homo sapiens
aggtgggtgcggtgg

SEQ ID NO: 543715 - DNA, 15 bp, Homo sapiens
taggtgggtgcggtg

SEQ ID NO: 543716 - DNA, 15 bp, Homo sapiens
ctaggtgggtgcggt

SEQ ID NO: 543717 - DNA, 15 bp, Homo sapiens
actaggtgggtgcgg

SEQ ID NO: 543718 - DNA, 15 bp, Homo sapiens
aactaggtgggtgcg

SEQ ID NO: 543719 - DNA, 15 bp, Homo sapiens
aaactaggtgggtgc

SEQ ID NO: 543720 - DNA, 15 bp, Homo sapiens
aaaactaggtgggtg

SEQ ID NO: 543721 - DNA, 15 bp, Homo sapiens
aaaaactaggtgggt

SEQ ID NO: 543722 - DNA, 15 bp, Homo sapiens
aaaaaactaggtggg

SEQ ID NO: 543723 - DNA, 15 bp, Homo sapiens
caaaaaactaggtgg

SEQ ID NO: 543724 - DNA, 15 bp, Homo sapiens
acaaaaaactaggtg

SEQ ID NO: 543725 - DNA, 15 bp, Homo sapiens
tacaaaaaactaggt

SEQ ID NO: 543726 - DNA, 15 bp, Homo sapiens
atacaaaaaactagg

SEQ ID NO: 543727 - DNA, 15 bp, Homo sapiens
aatacaaaaaactag

SEQ ID NO: 543728 - DNA, 15 bp, Homo sapiens
aaatacaaaaaacta

SEQ ID NO: 543729 - DNA, 15 bp, Homo sapiens
aaaatacaaaaaact

SEQ ID NO: 543730 - DNA, 15 bp, Homo sapiens
aaaaatacaaaaaac

SEQ ID NO: 543731 - DNA, 15 bp, Homo sapiens
cactaaaaatacaaa

SEQ ID NO: 543732 - DNA, 15 bp, Homo sapiens
ccactaaaaatacaa

SEQ ID NO: 543733 - DNA, 15 bp, Homo sapiens
tccactaaaaataca

SEQ ID NO: 543734 - DNA, 15 bp, Homo sapiens
ctccactaaaaatac

SEQ ID NO: 543735 - DNA, 15 bp, Homo sapiens
tctccactaaaaata

SEQ ID NO: 543736 - DNA, 15 bp, Homo sapiens
gtctccactaaaaat

SEQ ID NO: 543737 - DNA, 15 bp, Homo sapiens
cgtctccactaaaaa

SEQ ID NO: 543738 - DNA, 15 bp, Homo sapiens
ccgtctccactaaaa

SEQ ID NO: 543739 - DNA, 15 bp, Homo sapiens
cccgtctccactaaa

SEQ ID NO: 543740 - DNA, 15 bp, Homo sapiens
ccccgtctccactaa

SEQ ID NO: 543741 - DNA, 15 bp, Homo sapiens
accccgtctccacta

SEQ ID NO: 543742 - DNA, 15 bp, Homo sapiens
aaccccgtctccact

SEQ ID NO: 543743 - DNA, 15 bp, Homo sapiens
aaaccccgtctccac

SEQ ID NO: 543744 - DNA, 15 bp, Homo sapiens
gaaaccccgtctcca

SEQ ID NO: 543745 - DNA, 15 bp, Homo sapiens
tgaaaccccgtctcc

SEQ ID NO: 543746 - DNA, 15 bp, Homo sapiens
gtgaaaccccgtctc

SEQ ID NO: 543747 - DNA, 15 bp, Homo sapiens
agtgaaaccccgtct

SEQ ID NO: 543748 - DNA, 15 bp, Homo sapiens
cagtgaaaccccgtc

SEQ ID NO: 543749 - DNA, 15 bp, Homo sapiens
acagtgaaaccccgt

SEQ ID NO: 543750 - DNA, 15 bp, Homo sapiens
aacagtgaaaccccg

SEQ ID NO: 543751 - DNA, 15 bp, Homo sapiens
aaacagtgaaacccc

SEQ ID NO: 543752 - DNA, 15 bp, Homo sapiens
aaaacagtgaaaccc

SEQ ID NO: 543753 - DNA, 15 bp, Homo sapiens
taaaacagtgaaacc

SEQ ID NO: 543754 - DNA, 15 bp, Homo sapiens
ctaaaacagtgaaac

SEQ ID NO: 543755 - DNA, 15 bp, Homo sapiens
gctaaaacagtgaaa

SEQ ID NO: 543756 - DNA, 15 bp, Homo sapiens
ggctaaaacagtgaa

SEQ ID NO: 543757 - DNA, 15 bp, Homo sapiens
tggctaaaacagtga

SEQ ID NO: 543758 - DNA, 15 bp, Homo sapiens
ctggctaaaacagtg

SEQ ID NO: 543759 - DNA, 15 bp, Homo sapiens
cctggctaaaacagt

SEQ ID NO: 543760 - DNA, 15 bp, Homo sapiens
tcctggctaaaacag

SEQ ID NO: 543761 - DNA, 15 bp, Homo sapiens
atcctggctaaaaca

SEQ ID NO: 543762 - DNA, 15 bp, Homo sapiens
catcctggctaaaac

SEQ ID NO: 543763 - DNA, 15 bp, Homo sapiens
ccatcctggctaaaa

SEQ ID NO: 543764 - DNA, 15 bp, Homo sapiens
accatcctggctaaa

SEQ ID NO: 543765 - DNA, 15 bp, Homo sapiens
gaccatcctggctaa

SEQ ID NO: 543766 - DNA, 15 bp, Homo sapiens
agaccatcctggcta

SEQ ID NO: 543767 - DNA, 15 bp, Homo sapiens
gagaccatcctggct

SEQ ID NO: 543768 - DNA, 15 bp, Homo sapiens
tgagaccatcctggc

SEQ ID NO: 543769 - DNA, 15 bp, Homo sapiens
ttgagaccatcctgg

SEQ ID NO: 543770 - DNA, 15 bp, Homo sapiens
attgagaccatcctg

SEQ ID NO: 543771 - DNA, 15 bp, Homo sapiens
gattgagaccatcct

SEQ ID NO: 543772 - DNA, 15 bp, Homo sapiens
agattgagaccatcc

SEQ ID NO: 543773 - DNA, 15 bp, Homo sapiens
gagattgagaccatc

SEQ ID NO: 543774 - DNA, 15 bp, Homo sapiens
ggagattgagaccat

SEQ ID NO: 543775 - DNA, 15 bp, Homo sapiens
aggagattgagacca

SEQ ID NO: 543776 - DNA, 15 bp, Homo sapiens
caggagattgagacc

SEQ ID NO: 543777 - DNA, 15 bp, Homo sapiens
tcaggagattgagac

SEQ ID NO: 543778 - DNA, 15 bp, Homo sapiens
gtcaggagattgaga

SEQ ID NO: 543779 - DNA, 15 bp, Homo sapiens
ggtcaggagattgag

SEQ ID NO: 543780 - DNA, 15 bp, Homo sapiens
aggtcaggagattga

SEQ ID NO: 543781 - DNA, 15 bp, Homo sapiens
gaggtcaggagattg

SEQ ID NO: 543782 - DNA, 15 bp, Homo sapiens
cgaggtcaggagatt

SEQ ID NO: 543783 - DNA, 15 bp, Homo sapiens
acgaggtcaggagat

SEQ ID NO: 543784 - DNA, 15 bp, Homo sapiens
cacgaggtcaggaga

SEQ ID NO: 543785 - DNA, 15 bp, Homo sapiens
tcacgaggtcaggag

SEQ ID NO: 543786 - DNA, 15 bp, Homo sapiens
atcacgaggtcagga

SEQ ID NO: 543787 - DNA, 15 bp, Homo sapiens
gatcacgaggtcagg

SEQ ID NO: 543788 - DNA, 15 bp, Homo sapiens
ggatcacgaggtcag

SEQ ID NO: 543789 - DNA, 15 bp, Homo sapiens
cggatcacgaggtca

SEQ ID NO: 543790 - DNA, 15 bp, Homo sapiens
gcggatcacgaggtc

SEQ ID NO: 543791 - DNA, 15 bp, Homo sapiens
ggcggatcacgaggt

SEQ ID NO: 543792 - DNA, 15 bp, Homo sapiens
gggcggatcacgagg

SEQ ID NO: 543793 - DNA, 15 bp, Homo sapiens
cgggcggatcacgag

SEQ ID NO: 543794 - DNA, 15 bp, Homo sapiens
acgggcggatcacga

SEQ ID NO: 543795 - DNA, 15 bp, Homo sapiens
gacgggcggatcacg

SEQ ID NO: 543796 - DNA, 15 bp, Homo sapiens
agacgggcggatcac

SEQ ID NO: 543797 - DNA, 15 bp, Homo sapiens
gagacgggcggatca

SEQ ID NO: 543798 - DNA, 15 bp, Homo sapiens
cgagacgggcggatc

SEQ ID NO: 543799 - DNA, 15 bp, Homo sapiens
ccgagacgggcggat

SEQ ID NO: 543800 - DNA, 15 bp, Homo sapiens
gccgagacgggcgga

SEQ ID NO: 543801 - DNA, 15 bp, Homo sapiens
ggccgagacgggcgg

SEQ ID NO: 543802 - DNA, 15 bp, Homo sapiens
aggccgagacgggcg

SEQ ID NO: 543803 - DNA, 15 bp, Homo sapiens
gaggccgagacgggc

SEQ ID NO: 543804 - DNA, 15 bp, Homo sapiens
ggaggccgagacggg

SEQ ID NO: 543805 - DNA, 15 bp, Homo sapiens
gggaggccgagacgg

SEQ ID NO: 543806 - DNA, 15 bp, Homo sapiens
tgggaggccgagacg

SEQ ID NO: 543807 - DNA, 15 bp, Homo sapiens
ttgggaggccgagac

SEQ ID NO: 543808 - DNA, 15 bp, Homo sapiens
gcggtggctcacacc

SEQ ID NO: 543809 - DNA, 15 bp, Homo sapiens
cgcggtggctcacac

SEQ ID NO: 543810 - DNA, 15 bp, Homo sapiens
gcgcggtggctcaca

SEQ ID NO: 543811 - DNA, 15 bp, Homo sapiens
ggcgcggtggctcac

SEQ ID NO: 543812 - DNA, 15 bp, Homo sapiens
gggcgcggtggctca

SEQ ID NO: 543813 - DNA, 15 bp, Homo sapiens
cgggcgcggtggctc

SEQ ID NO: 543814 - DNA, 15 bp, Homo sapiens
ccgggcgcggtggct

SEQ ID NO: 543815 - DNA, 15 bp, Homo sapiens
gccgggcgcggtggc

SEQ ID NO: 543816 - DNA, 15 bp, Homo sapiens
ggccgggcgcggtgg

SEQ ID NO: 543817 - DNA, 15 bp, Homo sapiens
tggccgggcgcggtg

SEQ ID NO: 543818 - DNA, 15 bp, Homo sapiens
ttggccgggcgcggt

SEQ ID NO: 543819 - DNA, 15 bp, Homo sapiens
tttggccgggcgcgg

SEQ ID NO: 543820 - DNA, 15 bp, Homo sapiens
ttttggccgggcgcg

SEQ ID NO: 543821 - DNA, 15 bp, Homo sapiens
attttggccgggcgc

SEQ ID NO: 543822 - DNA, 15 bp, Homo sapiens
gattttggccgggcg

SEQ ID NO: 543823 - DNA, 15 bp, Homo sapiens
ggattttggccgggc

SEQ ID NO: 543824 - DNA, 15 bp, Homo sapiens
gggattttggccggg

SEQ ID NO: 543825 - DNA, 15 bp, Homo sapiens
tgggattttggccgg

SEQ ID NO: 543826 - DNA, 15 bp, Homo sapiens
atgggattttggccg

SEQ ID NO: 543827 - DNA, 15 bp, Homo sapiens
gatgggattttggcc

SEQ ID NO: 543828 - DNA, 15 bp, Homo sapiens
agatgggattttggc

SEQ ID NO: 543829 - DNA, 15 bp, Homo sapiens
gagatgggattttgg

SEQ ID NO: 543830 - DNA, 15 bp, Homo sapiens
agagatgggattttg

SEQ ID NO: 543831 - DNA, 15 bp, Homo sapiens
aagagatgggatttt

SEQ ID NO: 543832 - DNA, 15 bp, Homo sapiens
taagagatgggattt

SEQ ID NO: 543833 - DNA, 15 bp, Homo sapiens
ttaagagatgggatt

SEQ ID NO: 543834 - DNA, 15 bp, Homo sapiens
tttaagagatgggat

SEQ ID NO: 543835 - DNA, 15 bp, Homo sapiens
ttttaagagatggga

SEQ ID NO: 543836 - DNA, 15 bp, Homo sapiens
tttttaagagatggg

SEQ ID NO: 543837 - DNA, 15 bp, Homo sapiens
ttttttaagagatgg

SEQ ID NO: 543838 - DNA, 15 bp, Homo sapiens
tttttttaagagatg

SEQ ID NO: 543839 - DNA, 15 bp, Homo sapiens
ttttttttaagagat

SEQ ID NO: 543840 - DNA, 15 bp, Homo sapiens
tttttttttaagaga

SEQ ID NO: 543841 - DNA, 15 bp, Homo sapiens
ttttttttttaagag

SEQ ID NO: 543842 - DNA, 15 bp, Homo sapiens
attttttttttaaga

SEQ ID NO: 543843 - DNA, 15 bp, Homo sapiens
aattttttttttaag

SEQ ID NO: 543844 - DNA, 15 bp, Homo sapiens
taattttttttttaa

SEQ ID NO: 543845 - DNA, 15 bp, Homo sapiens
gtaatttttttttta

SEQ ID NO: 543846 - DNA, 15 bp, Homo sapiens
cgtaatttttttttt

SEQ ID NO: 543847 - DNA, 15 bp, Homo sapiens
tcgtaattttttttt

SEQ ID NO: 543848 - DNA, 15 bp, Homo sapiens
ttcgtaatttttttt

SEQ ID NO: 543849 - DNA, 15 bp, Homo sapiens
attcgtaattttttt

SEQ ID NO: 543850 - DNA, 15 bp, Homo sapiens
cattcgtaatttttt

SEQ ID NO: 543851 - DNA, 15 bp, Homo sapiens
tcattcgtaattttt

SEQ ID NO: 543852 - DNA, 15 bp, Homo sapiens
ttcattcgtaatttt

SEQ ID NO: 543853 - DNA, 15 bp, Homo sapiens
gttcattcgtaattt

SEQ ID NO: 543854 - DNA, 15 bp, Homo sapiens
tgttcattcgtaatt

SEQ ID NO: 543855 - DNA, 15 bp, Homo sapiens
ctgttcattcgtaat

SEQ ID NO: 543856 - DNA, 15 bp, Homo sapiens
tctgttcattcgtaa

SEQ ID NO: 543857 - DNA, 15 bp, Homo sapiens
atctgttcattcgta

SEQ ID NO: 543858 - DNA, 15 bp, Homo sapiens
tatctgttcattcgt

SEQ ID NO: 543859 - DNA, 15 bp, Homo sapiens
gtatctgttcattcg

SEQ ID NO: 543860 - DNA, 15 bp, Homo sapiens
tgtatctgttcattc

SEQ ID NO: 543861 - DNA, 15 bp, Homo sapiens
atgtatctgttcatt

SEQ ID NO: 543862 - DNA, 15 bp, Homo sapiens
tatgtatctgttcat

SEQ ID NO: 543863 - DNA, 15 bp, Homo sapiens
ctatgtatctgttca

SEQ ID NO: 543864 - DNA, 15 bp, Homo sapiens
actatgtatctgttc

SEQ ID NO: 543865 - DNA, 15 bp, Homo sapiens
aactatgtatctgtt

SEQ ID NO: 543866 - DNA, 15 bp, Homo sapiens
aaactatgtatctgt

SEQ ID NO: 543867 - DNA, 15 bp, Homo sapiens
aaaactatgtatctg

SEQ ID NO: 543868 - DNA, 15 bp, Homo sapiens
gaaaactatgtatct

SEQ ID NO: 543869 - DNA, 15 bp, Homo sapiens
ggaaaactatgtatc

SEQ ID NO: 543870 - DNA, 15 bp, Homo sapiens
aggaaaactatgtat

SEQ ID NO: 543871 - DNA, 15 bp, Homo sapiens
gaggaaaactatgta

SEQ ID NO: 543872 - DNA, 15 bp, Homo sapiens
tgaggaaaactatgt

SEQ ID NO: 543873 - DNA, 15 bp, Homo sapiens
ttgaggaaaactatg

SEQ ID NO: 543874 - DNA, 15 bp, Homo sapiens
tttgaggaaaactat

SEQ ID NO: 543875 - DNA, 15 bp, Homo sapiens
ctttgaggaaaacta

SEQ ID NO: 543876 - DNA, 15 bp, Homo sapiens
tctttgaggaaaact

SEQ ID NO: 543877 - DNA, 15 bp, Homo sapiens
gtctttgaggaaaac

SEQ ID NO: 543878 - DNA, 15 bp, Homo sapiens
agtctttgaggaaaa

SEQ ID NO: 543879 - DNA, 15 bp, Homo sapiens
cagtctttgaggaaa

SEQ ID NO: 543880 - DNA, 15 bp, Homo sapiens
ccagtctttgaggaa

SEQ ID NO: 543881 - DNA, 15 bp, Homo sapiens
gccagtctttgagga

SEQ ID NO: 543882 - DNA, 15 bp, Homo sapiens
ggccagtctttgagg

SEQ ID NO: 543883 - DNA, 15 bp, Homo sapiens
tggccagtctttgag

SEQ ID NO: 543884 - DNA, 15 bp, Homo sapiens
ctggccagtctttga

SEQ ID NO: 543885 - DNA, 15 bp, Homo sapiens
tctggccagtctttg

SEQ ID NO: 543886 - DNA, 15 bp, Homo sapiens
atctggccagtcttt

SEQ ID NO: 543887 - DNA, 15 bp, Homo sapiens
catctggccagtctt

SEQ ID NO: 543888 - DNA, 15 bp, Homo sapiens
tcatctggccagtct

SEQ ID NO: 543889 - DNA, 15 bp, Homo sapiens
ttcatctggccagtc

SEQ ID NO: 543890 - DNA, 15 bp, Homo sapiens
attcatctggccagt

SEQ ID NO: 543891 - DNA, 15 bp, Homo sapiens
cattcatctggccag

SEQ ID NO: 543892 - DNA, 15 bp, Homo sapiens
gcattcatctggcca

SEQ ID NO: 543893 - DNA, 15 bp, Homo sapiens
cgcattcatctggcc

SEQ ID NO: 543894 - DNA, 15 bp, Homo sapiens
gcgcattcatctggc

SEQ ID NO: 543895 - DNA, 15 bp, Homo sapiens
ggcgcattcatctgg

SEQ ID NO: 543896 - DNA, 15 bp, Homo sapiens
tggcgcattcatctg

SEQ ID NO: 543897 - DNA, 15 bp, Homo sapiens
gtggcgcattcatct

SEQ ID NO: 543898 - DNA, 15 bp, Homo sapiens
tgtggcgcattcatc

SEQ ID NO: 543899 - DNA, 15 bp, Homo sapiens
gtgtggcgcattcat

SEQ ID NO: 543900 - DNA, 15 bp, Homo sapiens
tgtgtggcgcattca

SEQ ID NO: 543901 - DNA, 15 bp, Homo sapiens
ctgtgtggcgcattc

SEQ ID NO: 543902 - DNA, 15 bp, Homo sapiens
tctgtgtggcgcatt

SEQ ID NO: 543903 - DNA, 15 bp, Homo sapiens
gtctgtgtggcgcat

SEQ ID NO: 543904 - DNA, 15 bp, Homo sapiens
ggtctgtgtggcgca

SEQ ID NO: 543905 - DNA, 15 bp, Homo sapiens
cggtctgtgtggcgc

SEQ ID NO: 543906 - DNA, 15 bp, Homo sapiens
tcggtctgtgtggcg

SEQ ID NO: 543907 - DNA, 15 bp, Homo sapiens
atcggtctgtgtggc

SEQ ID NO: 543908 - DNA, 15 bp, Homo sapiens
catcggtctgtgtgg

SEQ ID NO: 543909 - DNA, 15 bp, Homo sapiens
tcatcggtctgtgtg

SEQ ID NO: 543910 - DNA, 15 bp, Homo sapiens
ctcatcggtctgtgt

SEQ ID NO: 543911 - DNA, 15 bp, Homo sapiens
cctcatcggtctgtg

SEQ ID NO: 543912 - DNA, 15 bp, Homo sapiens
gcctcatcggtctgt

SEQ ID NO: 543913 - DNA, 15 bp, Homo sapiens
tgcctcatcggtctg

SEQ ID NO: 543914 - DNA, 15 bp, Homo sapiens
gtgcctcatcggtct

SEQ ID NO: 543915 - DNA, 15 bp, Homo sapiens
tgtgcctcatcggtc

SEQ ID NO: 543916 - DNA, 15 bp, Homo sapiens
gtgtgcctcatcggt

SEQ ID NO: 543917 - DNA, 15 bp, Homo sapiens
agtgtgcctcatcgg

SEQ ID NO: 543918 - DNA, 15 bp, Homo sapiens
cagtgtgcctcatcg

SEQ ID NO: 543919 - DNA, 15 bp, Homo sapiens
gcagtgtgcctcatc

SEQ ID NO: 543920 - DNA, 15 bp, Homo sapiens
tgcagtgtgcctcat

SEQ ID NO: 543921 - DNA, 15 bp, Homo sapiens
ttgcagtgtgcctca

SEQ ID NO: 543922 - DNA, 15 bp, Homo sapiens
tttgcagtgtgcctc

SEQ ID NO: 543923 - DNA, 15 bp, Homo sapiens
ctttgcagtgtgcct

SEQ ID NO: 543924 - DNA, 15 bp, Homo sapiens
cctttgcagtgtgcc

SEQ ID NO: 543925 - DNA, 15 bp, Homo sapiens
ccctttgcagtgtgc

SEQ ID NO: 543926 - DNA, 15 bp, Homo sapiens
cccctttgcagtgtg

SEQ ID NO: 543927 - DNA, 15 bp, Homo sapiens
gcccctttgcagtgt

SEQ ID NO: 543928 - DNA, 15 bp, Homo sapiens
ggcccctttgcagtg

SEQ ID NO: 543929 - DNA, 15 bp, Homo sapiens
gggcccctttgcagt

SEQ ID NO: 543930 - DNA, 15 bp, Homo sapiens
agggcccctttgcag

SEQ ID NO: 543931 - DNA, 15 bp, Homo sapiens
cagggcccctttgca

SEQ ID NO: 543932 - DNA, 15 bp, Homo sapiens
acagggcccctttgc

SEQ ID NO: 543933 - DNA, 15 bp, Homo sapiens
cacagggcccctttg

SEQ ID NO: 543934 - DNA, 15 bp, Homo sapiens
ccacagggccccttt

SEQ ID NO: 543935 - DNA, 15 bp, Homo sapiens
accacagggcccctt

SEQ ID NO: 543936 - DNA, 15 bp, Homo sapiens
gaccacagggcccct

SEQ ID NO: 543937 - DNA, 15 bp, Homo sapiens
cgaccacagggcccc

SEQ ID NO: 543938 - DNA, 15 bp, Homo sapiens
tcgaccacagggccc

SEQ ID NO: 543939 - DNA, 15 bp, Homo sapiens
ctcgaccacagggcc

SEQ ID NO: 543940 - DNA, 15 bp, Homo sapiens
cctcgaccacagggc

SEQ ID NO: 543941 - DNA, 15 bp, Homo sapiens
acctcgaccacaggg

SEQ ID NO: 543942 - DNA, 15 bp, Homo sapiens
aacctcgaccacagg

SEQ ID NO: 543943 - DNA, 15 bp, Homo sapiens
caacctcgaccacag

SEQ ID NO: 543944 - DNA, 15 bp, Homo sapiens
gcaacctcgaccaca

SEQ ID NO: 543945 - DNA, 15 bp, Homo sapiens
agcaacctcgaccac

SEQ ID NO: 543946 - DNA, 15 bp, Homo sapiens
aagcaacctcgacca

SEQ ID NO: 543947 - DNA, 15 bp, Homo sapiens
caagcaacctcgacc

SEQ ID NO: 543948 - DNA, 15 bp, Homo sapiens
ccaagcaacctcgac

SEQ ID NO: 543949 - DNA, 15 bp, Homo sapiens
tccaagcaacctcga

SEQ ID NO: 543950 - DNA, 15 bp, Homo sapiens
ctccaagcaacctcg

SEQ ID NO: 543951 - DNA, 15 bp, Homo sapiens
tctccaagcaacctc

SEQ ID NO: 543952 - DNA, 15 bp, Homo sapiens
ctctccaagcaacct

SEQ ID NO: 543953 - DNA, 15 bp, Homo sapiens
cctctccaagcaacc

SEQ ID NO: 543954 - DNA, 15 bp, Homo sapiens
gcctctccaagcaac

SEQ ID NO: 543955 - DNA, 15 bp, Homo sapiens
agcctctccaagcaa

SEQ ID NO: 543956 - DNA, 15 bp, Homo sapiens
aagcctctccaagca

SEQ ID NO: 543957 - DNA, 15 bp, Homo sapiens
aaagcctctccaagc

SEQ ID NO: 543958 - DNA, 15 bp, Homo sapiens
caaagcctctccaag

SEQ ID NO: 543959 - DNA, 15 bp, Homo sapiens
ccaaagcctctccaa

SEQ ID NO: 543960 - DNA, 15 bp, Homo sapiens
cccaaagcctctcca

SEQ ID NO: 543961 - DNA, 15 bp, Homo sapiens
ccccaaagcctctcc

SEQ ID NO: 543962 - DNA, 15 bp, Homo sapiens
tccccaaagcctctc

SEQ ID NO: 543963 - DNA, 15 bp, Homo sapiens
ttccccaaagcctct

SEQ ID NO: 543964 - DNA, 15 bp, Homo sapiens
cttccccaaagcctc

SEQ ID NO: 543965 - DNA, 15 bp, Homo sapiens
gcttccccaaagcct

SEQ ID NO: 543966 - DNA, 15 bp, Homo sapiens
cgcttccccaaagcc

SEQ ID NO: 543967 - DNA, 15 bp, Homo sapiens
gcgcttccccaaagc

SEQ ID NO: 543968 - DNA, 15 bp, Homo sapiens
tgcgcttccccaaag

SEQ ID NO: 543969 - DNA, 15 bp, Homo sapiens
ttgcgcttccccaaa

SEQ ID NO: 543970 - DNA, 15 bp, Homo sapiens
gttgcgcttccccaa

SEQ ID NO: 543971 - DNA, 15 bp, Homo sapiens
agttgcgcttcccca

SEQ ID NO: 543972 - DNA, 15 bp, Homo sapiens
gagttgcgcttcccc

SEQ ID NO: 543973 - DNA, 15 bp, Homo sapiens
tgagttgcgcttccc

SEQ ID NO: 543974 - DNA, 15 bp, Homo sapiens
atgagttgcgcttcc

SEQ ID NO: 543975 - DNA, 15 bp, Homo sapiens
aatgagttgcgcttc

SEQ ID NO: 543976 - DNA, 15 bp, Homo sapiens
aaatgagttgcgctt

SEQ ID NO: 543977 - DNA, 15 bp, Homo sapiens
gaaatgagttgcgct

SEQ ID NO: 543978 - DNA, 15 bp, Homo sapiens
agaaatgagttgcgc

SEQ ID NO: 543979 - DNA, 15 bp, Homo sapiens
aagaaatgagttgcg

SEQ ID NO: 543980 - DNA, 15 bp, Homo sapiens
aaagaaatgagttgc

SEQ ID NO: 543981 - DNA, 15 bp, Homo sapiens
aaaagaaatgagttg

SEQ ID NO: 543982 - DNA, 15 bp, Homo sapiens
gaaaagaaatgagtt

SEQ ID NO: 543983 - DNA, 15 bp, Homo sapiens
ggaaaagaaatgagt

SEQ ID NO: 543984 - DNA, 15 bp, Homo sapiens
gggaaaagaaatgag

SEQ ID NO: 543985 - DNA, 15 bp, Homo sapiens
agggaaaagaaatga

SEQ ID NO: 543986 - DNA, 15 bp, Homo sapiens
aagggaaaagaaatg

SEQ ID NO: 543987 - DNA, 15 bp, Homo sapiens
gaagggaaaagaaat

SEQ ID NO: 543988 - DNA, 15 bp, Homo sapiens
agaagggaaaagaaa

SEQ ID NO: 543989 - DNA, 15 bp, Homo sapiens
cagaagggaaaagaa

SEQ ID NO: 543990 - DNA, 15 bp, Homo sapiens
gcagaagggaaaaga

SEQ ID NO: 543991 - DNA, 15 bp, Homo sapiens
ggcagaagggaaaag

SEQ ID NO: 543992 - DNA, 15 bp, Homo sapiens
tggcagaagggaaaa

SEQ ID NO: 543993 - DNA, 15 bp, Homo sapiens
ctggcagaagggaaa

SEQ ID NO: 543994 - DNA, 15 bp, Homo sapiens
actggcagaagggaa

SEQ ID NO: 543995 - DNA, 15 bp, Homo sapiens
cactggcagaaggga

SEQ ID NO: 543996 - DNA, 15 bp, Homo sapiens
ccactggcagaaggg

SEQ ID NO: 543997 - DNA, 15 bp, Homo sapiens
cccactggcagaagg

SEQ ID NO: 543998 - DNA, 15 bp, Homo sapiens
acccactggcagaag

SEQ ID NO: 543999 - DNA, 15 bp, Homo sapiens
tacccactggcagaa

SEQ ID NO: 544000 - DNA, 15 bp, Homo sapiens
ctacccactggcaga

SEQ ID NO: 544001 - DNA, 15 bp, Homo sapiens
cctacccactggcag

SEQ ID NO: 544002 - DNA, 15 bp, Homo sapiens
tcctacccactggca

SEQ ID NO: 544003 - DNA, 15 bp, Homo sapiens
atcctacccactggc

SEQ ID NO: 544004 - DNA, 15 bp, Homo sapiens
aatcctacccactgg

SEQ ID NO: 544005 - DNA, 15 bp, Homo sapiens
caatcctacccactg

SEQ ID NO: 544006 - DNA, 15 bp, Homo sapiens
ccaatcctacccact

SEQ ID NO: 544007 - DNA, 15 bp, Homo sapiens
tccaatcctacccac

SEQ ID NO: 544008 - DNA, 15 bp, Homo sapiens
ctccaatcctaccca

SEQ ID NO: 544009 - DNA, 15 bp, Homo sapiens
tctccaatcctaccc

SEQ ID NO: 544010 - DNA, 15 bp, Homo sapiens
ctctccaatcctacc

SEQ ID NO: 544011 - DNA, 15 bp, Homo sapiens
tctctccaatcctac

SEQ ID NO: 544012 - DNA, 15 bp, Homo sapiens
ctctctccaatccta

SEQ ID NO: 544013 - DNA, 15 bp, Homo sapiens
cctctctccaatcct

SEQ ID NO: 544014 - DNA, 15 bp, Homo sapiens
acctctctccaatcc

SEQ ID NO: 544015 - DNA, 15 bp, Homo sapiens
cacctctctccaatc

SEQ ID NO: 544016 - DNA, 15 bp, Homo sapiens
acacctctctccaat

SEQ ID NO: 544017 - DNA, 15 bp, Homo sapiens
aacacctctctccaa

SEQ ID NO: 544018 - DNA, 15 bp, Homo sapiens
aaacacctctctcca

SEQ ID NO: 544019 - DNA, 15 bp, Homo sapiens
caaacacctctctcc

SEQ ID NO: 544020 - DNA, 15 bp, Homo sapiens
ccaaacacctctctc

SEQ ID NO: 544021 - DNA, 15 bp, Homo sapiens
tccaaacacctctct

SEQ ID NO: 544022 - DNA, 15 bp, Homo sapiens
gtccaaacacctctc

SEQ ID NO: 544023 - DNA, 15 bp, Homo sapiens
tgtccaaacacctct

SEQ ID NO: 544024 - DNA, 15 bp, Homo sapiens
ctgtccaaacacctc

SEQ ID NO: 544025 - DNA, 15 bp, Homo sapiens
cctgtccaaacacct

SEQ ID NO: 544026 - DNA, 15 bp, Homo sapiens
gcctgtccaaacacc

SEQ ID NO: 544027 - DNA, 15 bp, Homo sapiens
tgcctgtccaaacac

SEQ ID NO: 544028 - DNA, 15 bp, Homo sapiens
gtgcctgtccaaaca

SEQ ID NO: 544029 - DNA, 15 bp, Homo sapiens
tgtgcctgtccaaac

SEQ ID NO: 544030 - DNA, 15 bp, Homo sapiens
gtgtgcctgtccaaa

SEQ ID NO: 544031 - DNA, 15 bp, Homo sapiens
agtgtgcctgtccaa

SEQ ID NO: 544032 - DNA, 15 bp, Homo sapiens
tagtgtgcctgtcca

SEQ ID NO: 544033 - DNA, 15 bp, Homo sapiens
ttagtgtgcctgtcc

SEQ ID NO: 544034 - DNA, 15 bp, Homo sapiens
cttagtgtgcctgtc

SEQ ID NO: 544035 - DNA, 15 bp, Homo sapiens
ccttagtgtgcctgt

SEQ ID NO: 544036 - DNA, 15 bp, Homo sapiens
cccttagtgtgcctg

SEQ ID NO: 544037 - DNA, 15 bp, Homo sapiens
gcccttagtgtgcct

SEQ ID NO: 544038 - DNA, 15 bp, Homo sapiens
ggcccttagtgtgcc

SEQ ID NO: 544039 - DNA, 15 bp, Homo sapiens
cggcccttagtgtgc

SEQ ID NO: 544040 - DNA, 15 bp, Homo sapiens
gcggcccttagtgtg

SEQ ID NO: 544041 - DNA, 15 bp, Homo sapiens
cgcggcccttagtgt

SEQ ID NO: 544042 - DNA, 15 bp, Homo sapiens
tcgcggcccttagtg

SEQ ID NO: 544043 - DNA, 15 bp, Homo sapiens
atcgcggcccttagt

SEQ ID NO: 544044 - DNA, 15 bp, Homo sapiens
aatcgcggcccttag

SEQ ID NO: 544045 - DNA, 15 bp, Homo sapiens
caatcgcggccctta

SEQ ID NO: 544046 - DNA, 15 bp, Homo sapiens
acaatcgcggccctt

SEQ ID NO: 544047 - DNA, 15 bp, Homo sapiens
cacaatcgcggccct

SEQ ID NO: 544048 - DNA, 15 bp, Homo sapiens
tcacaatcgcggccc

SEQ ID NO: 544049 - DNA, 15 bp, Homo sapiens
ttcacaatcgcggcc

SEQ ID NO: 544050 - DNA, 15 bp, Homo sapiens
gttcacaatcgcggc

SEQ ID NO: 544051 - DNA, 15 bp, Homo sapiens
agttcacaatcgcgg

SEQ ID NO: 544052 - DNA, 15 bp, Homo sapiens
aagttcacaatcgcg

SEQ ID NO: 544053 - DNA, 15 bp, Homo sapiens
gaagttcacaatcgc

SEQ ID NO: 544054 - DNA, 15 bp, Homo sapiens
tgaagttcacaatcg

SEQ ID NO: 544055 - DNA, 15 bp, Homo sapiens
atgaagttcacaatc

SEQ ID NO: 544056 - DNA, 15 bp, Homo sapiens
catgaagttcacaat

SEQ ID NO: 544057 - DNA, 15 bp, Homo sapiens
ccatgaagttcacaa

SEQ ID NO: 544058 - DNA, 15 bp, Homo sapiens
gccatgaagttcaca

SEQ ID NO: 544059 - DNA, 15 bp, Homo sapiens
tgccatgaagttcac

SEQ ID NO: 544060 - DNA, 15 bp, Homo sapiens
atgccatgaagttca

SEQ ID NO: 544061 - DNA, 15 bp, Homo sapiens
gatgccatgaagttc

SEQ ID NO: 544062 - DNA, 15 bp, Homo sapiens
ggatgccatgaagtt

SEQ ID NO: 544063 - DNA, 15 bp, Homo sapiens
tggatgccatgaagt

SEQ ID NO: 544064 - DNA, 15 bp, Homo sapiens
atggatgccatgaag

SEQ ID NO: 544065 - DNA, 15 bp, Homo sapiens
aatggatgccatgaa

SEQ ID NO: 544066 - DNA, 15 bp, Homo sapiens
gaatggatgccatga

SEQ ID NO: 544067 - DNA, 15 bp, Homo sapiens
tgaatggatgccatg

SEQ ID NO: 544068 - DNA, 15 bp, Homo sapiens
atgaatggatgccat

SEQ ID NO: 544069 - DNA, 15 bp, Homo sapiens
catgaatggatgcca

SEQ ID NO: 544070 - DNA, 15 bp, Homo sapiens
ccatgaatggatgcc

SEQ ID NO: 544071 - DNA, 15 bp, Homo sapiens
cccatgaatggatgc

SEQ ID NO: 544072 - DNA, 15 bp, Homo sapiens
gcccatgaatggatg

SEQ ID NO: 544073 - DNA, 15 bp, Homo sapiens
tgcccatgaatggat

SEQ ID NO: 544074 - DNA, 15 bp, Homo sapiens
ctgcccatgaatgga

SEQ ID NO: 544075 - DNA, 15 bp, Homo sapiens
gctgcccatgaatgg

SEQ ID NO: 544076 - DNA, 15 bp, Homo sapiens
agctgcccatgaatg

SEQ ID NO: 544077 - DNA, 15 bp, Homo sapiens
aagctgcccatgaat

SEQ ID NO: 544078 - DNA, 15 bp, Homo sapiens
taagctgcccatgaa

SEQ ID NO: 544079 - DNA, 15 bp, Homo sapiens
gtaagctgcccatga

SEQ ID NO: 544080 - DNA, 15 bp, Homo sapiens
agtaagctgcccatg

SEQ ID NO: 544081 - DNA, 15 bp, Homo sapiens
cagtaagctgcccat

SEQ ID NO: 544082 - DNA, 15 bp, Homo sapiens
acagtaagctgccca

SEQ ID NO: 544083 - DNA, 15 bp, Homo sapiens
cacagtaagctgccc

SEQ ID NO: 544084 - DNA, 15 bp, Homo sapiens
gcacagtaagctgcc

SEQ ID NO: 544085 - DNA, 15 bp, Homo sapiens
tgcacagtaagctgc

SEQ ID NO: 544086 - DNA, 15 bp, Homo sapiens
gtgcacagtaagctg

SEQ ID NO: 544087 - DNA, 15 bp, Homo sapiens
ggtgcacagtaagct

SEQ ID NO: 544088 - DNA, 15 bp, Homo sapiens
tggtgcacagtaagc

SEQ ID NO: 544089 - DNA, 15 bp, Homo sapiens
ctggtgcacagtaag

SEQ ID NO: 544090 - DNA, 15 bp, Homo sapiens
cctggtgcacagtaa

SEQ ID NO: 544091 - DNA, 15 bp, Homo sapiens
gcctggtgcacagta

SEQ ID NO: 544092 - DNA, 15 bp, Homo sapiens
tgcctggtgcacagt

SEQ ID NO: 544093 - DNA, 15 bp, Homo sapiens
ctgcctggtgcacag

SEQ ID NO: 544094 - DNA, 15 bp, Homo sapiens
cctgcctggtgcaca

SEQ ID NO: 544095 - DNA, 15 bp, Homo sapiens
ccctgcctggtgcac

SEQ ID NO: 544096 - DNA, 15 bp, Homo sapiens
accctgcctggtgca

SEQ ID NO: 544097 - DNA, 15 bp, Homo sapiens
aaccctgcctggtgc

SEQ ID NO: 544098 - DNA, 15 bp, Homo sapiens
gaaccctgcctggtg

SEQ ID NO: 544099 - DNA, 15 bp, Homo sapiens
tgaaccctgcctggt

SEQ ID NO: 544100 - DNA, 15 bp, Homo sapiens
ttgaaccctgcctgg

SEQ ID NO: 544101 - DNA, 15 bp, Homo sapiens
tttgaaccctgcctg

SEQ ID NO: 544102 - DNA, 15 bp, Homo sapiens
ctttgaaccctgcct

SEQ ID NO: 544103 - DNA, 15 bp, Homo sapiens
gctttgaaccctgcc

SEQ ID NO: 544104 - DNA, 15 bp, Homo sapiens
tgctttgaaccctgc

SEQ ID NO: 544105 - DNA, 15 bp, Homo sapiens
gtgctttgaaccctg

SEQ ID NO: 544106 - DNA, 15 bp, Homo sapiens
ggtgctttgaaccct

SEQ ID NO: 544107 - DNA, 15 bp, Homo sapiens
aggtgctttgaaccc

SEQ ID NO: 544108 - DNA, 15 bp, Homo sapiens
aaggtgctttgaacc

SEQ ID NO: 544109 - DNA, 15 bp, Homo sapiens
aaaggtgctttgaac

SEQ ID NO: 544110 - DNA, 15 bp, Homo sapiens
caaaggtgctttgaa

SEQ ID NO: 544111 - DNA, 15 bp, Homo sapiens
acaaaggtgctttga

SEQ ID NO: 544112 - DNA, 15 bp, Homo sapiens
cacaaaggtgctttg

SEQ ID NO: 544113 - DNA, 15 bp, Homo sapiens
tcacaaaggtgcttt

SEQ ID NO: 544114 - DNA, 15 bp, Homo sapiens
ttcacaaaggtgctt

SEQ ID NO: 544115 - DNA, 15 bp, Homo sapiens
tttcacaaaggtgct

SEQ ID NO: 544116 - DNA, 15 bp, Homo sapiens
ttttcacaaaggtgc

SEQ ID NO: 544117 - DNA, 15 bp, Homo sapiens
attttcacaaaggtg

SEQ ID NO: 544118 - DNA, 15 bp, Homo sapiens
aattttcacaaaggt

SEQ ID NO: 544119 - DNA, 15 bp, Homo sapiens
caattttcacaaagg

SEQ ID NO: 544120 - DNA, 15 bp, Homo sapiens
acaattttcacaaag

SEQ ID NO: 544121 - DNA, 15 bp, Homo sapiens
gacaattttcacaaa

SEQ ID NO: 544122 - DNA, 15 bp, Homo sapiens
agacaattttcacaa

SEQ ID NO: 544123 - DNA, 15 bp, Homo sapiens
gagacaattttcaca

SEQ ID NO: 544124 - DNA, 15 bp, Homo sapiens
tgagacaattttcac

SEQ ID NO: 544125 - DNA, 15 bp, Homo sapiens
atgagacaattttca

SEQ ID NO: 544126 - DNA, 15 bp, Homo sapiens
aatgagacaattttc

SEQ ID NO: 544127 - DNA, 15 bp, Homo sapiens
aaatgagacaatttt

SEQ ID NO: 544128 - DNA, 15 bp, Homo sapiens
taaatgagacaattt

SEQ ID NO: 544129 - DNA, 15 bp, Homo sapiens
ctaaatgagacaatt

SEQ ID NO: 544130 - DNA, 15 bp, Homo sapiens
actaaatgagacaat

SEQ ID NO: 544131 - DNA, 15 bp, Homo sapiens
gactaaatgagacaa

SEQ ID NO: 544132 - DNA, 15 bp, Homo sapiens
ggactaaatgagaca

SEQ ID NO: 544133 - DNA, 15 bp, Homo sapiens
gggactaaatgagac

SEQ ID NO: 544134 - DNA, 15 bp, Homo sapiens
agggactaaatgaga

SEQ ID NO: 544135 - DNA, 15 bp, Homo sapiens
cagggactaaatgag

SEQ ID NO: 544136 - DNA, 15 bp, Homo sapiens
gcagggactaaatga

SEQ ID NO: 544137 - DNA, 15 bp, Homo sapiens
tgcagggactaaatg

SEQ ID NO: 544138 - DNA, 15 bp, Homo sapiens
ctgcagggactaaat

SEQ ID NO: 544139 - DNA, 15 bp, Homo sapiens
tctgcagggactaaa

SEQ ID NO: 544140 - DNA, 15 bp, Homo sapiens
ctctgcagggactaa

SEQ ID NO: 544141 - DNA, 15 bp, Homo sapiens
cctctgcagggacta

SEQ ID NO: 544142 - DNA, 15 bp, Homo sapiens
ccctctgcagggact

SEQ ID NO: 544143 - DNA, 15 bp, Homo sapiens
gccctctgcagggac

SEQ ID NO: 544144 - DNA, 15 bp, Homo sapiens
ggccctctgcaggga

SEQ ID NO: 544145 - DNA, 15 bp, Homo sapiens
cggccctctgcaggg

SEQ ID NO: 544146 - DNA, 15 bp, Homo sapiens
acggccctctgcagg

SEQ ID NO: 544147 - DNA, 15 bp, Homo sapiens
cacggccctctgcag

SEQ ID NO: 544148 - DNA, 15 bp, Homo sapiens
tcacggccctctgca

SEQ ID NO: 544149 - DNA, 15 bp, Homo sapiens
gtcacggccctctgc

SEQ ID NO: 544150 - DNA, 15 bp, Homo sapiens
tgtcacggccctctg

SEQ ID NO: 544151 - DNA, 15 bp, Homo sapiens
atgtcacggccctct

SEQ ID NO: 544152 - DNA, 15 bp, Homo sapiens
tatgtcacggccctc

SEQ ID NO: 544153 - DNA, 15 bp, Homo sapiens
atatgtcacggccct

SEQ ID NO: 544154 - DNA, 15 bp, Homo sapiens
catatgtcacggccc

SEQ ID NO: 544155 - DNA, 15 bp, Homo sapiens
tcatatgtcacggcc

SEQ ID NO: 544156 - DNA, 15 bp, Homo sapiens
atcatatgtcacggc

SEQ ID NO: 544157 - DNA, 15 bp, Homo sapiens
aatcatatgtcacgg

SEQ ID NO: 544158 - DNA, 15 bp, Homo sapiens
aaatcatatgtcacg

SEQ ID NO: 544159 - DNA, 15 bp, Homo sapiens
taaatcatatgtcac

SEQ ID NO: 544160 - DNA, 15 bp, Homo sapiens
ataaatcatatgtca

SEQ ID NO: 544161 - DNA, 15 bp, Homo sapiens
aataaatcatatgtc

SEQ ID NO: 544162 - DNA, 15 bp, Homo sapiens
caataaatcatatgt

SEQ ID NO: 544163 - DNA, 15 bp, Homo sapiens
acaataaatcatatg

SEQ ID NO: 544164 - DNA, 15 bp, Homo sapiens
gacaataaatcatat

SEQ ID NO: 544165 - DNA, 15 bp, Homo sapiens
agacaataaatcata

SEQ ID NO: 544166 - DNA, 15 bp, Homo sapiens
aagacaataaatcat

SEQ ID NO: 544167 - DNA, 15 bp, Homo sapiens
gaagacaataaatca

SEQ ID NO: 544168 - DNA, 15 bp, Homo sapiens
tgaagacaataaatc

SEQ ID NO: 544169 - DNA, 15 bp, Homo sapiens
ctgaagacaataaat

SEQ ID NO: 544170 - DNA, 15 bp, Homo sapiens
actgaagacaataaa

SEQ ID NO: 544171 - DNA, 15 bp, Homo sapiens
cactgaagacaataa

SEQ ID NO: 544172 - DNA, 15 bp, Homo sapiens
acactgaagacaata

SEQ ID NO: 544173 - DNA, 15 bp, Homo sapiens
gacactgaagacaat

SEQ ID NO: 544174 - DNA, 15 bp, Homo sapiens
ggacactgaagacaa

SEQ ID NO: 544175 - DNA, 15 bp, Homo sapiens
cggacactgaagaca

SEQ ID NO: 544176 - DNA, 15 bp, Homo sapiens
acggacactgaagac

SEQ ID NO: 544177 - DNA, 15 bp, Homo sapiens
aacggacactgaaga

SEQ ID NO: 544178 - DNA, 15 bp, Homo sapiens
taacggacactgaag

SEQ ID NO: 544179 - DNA, 15 bp, Homo sapiens
ttaacggacactgaa

SEQ ID NO: 544180 - DNA, 15 bp, Homo sapiens
cttaacggacactga

SEQ ID NO: 544181 - DNA, 15 bp, Homo sapiens
ccttaacggacactg

SEQ ID NO: 544182 - DNA, 15 bp, Homo sapiens
tccttaacggacact

SEQ ID NO: 544183 - DNA, 15 bp, Homo sapiens
ctccttaacggacac

SEQ ID NO: 544184 - DNA, 15 bp, Homo sapiens
tctccttaacggaca

SEQ ID NO: 544185 - DNA, 15 bp, Homo sapiens
gtctccttaacggac

SEQ ID NO: 544186 - DNA, 15 bp, Homo sapiens
tgtctccttaacgga

SEQ ID NO: 544187 - DNA, 15 bp, Homo sapiens
ttgtctccttaacgg

SEQ ID NO: 544188 - DNA, 15 bp, Homo sapiens
cttgtctccttaacg

SEQ ID NO: 544189 - DNA, 15 bp, Homo sapiens
gcttgtctccttaac

SEQ ID NO: 544190 - DNA, 15 bp, Homo sapiens
agcttgtctccttaa

SEQ ID NO: 544191 - DNA, 15 bp, Homo sapiens
cagcttgtctcctta

SEQ ID NO: 544192 - DNA, 15 bp, Homo sapiens
tcagcttgtctcctt

SEQ ID NO: 544193 - DNA, 15 bp, Homo sapiens
ttcagcttgtctcct

SEQ ID NO: 544194 - DNA, 15 bp, Homo sapiens
cttcagcttgtctcc

SEQ ID NO: 544195 - DNA, 15 bp, Homo sapiens
tcttcagcttgtctc

SEQ ID NO: 544196 - DNA, 15 bp, Homo sapiens
ctcttcagcttgtct

SEQ ID NO: 544197 - DNA, 15 bp, Homo sapiens
tctcttcagcttgtc

SEQ ID NO: 544198 - DNA, 15 bp, Homo sapiens
ctctcttcagcttgt

SEQ ID NO: 544199 - DNA, 15 bp, Homo sapiens
actctcttcagcttg

SEQ ID NO: 544200 - DNA, 15 bp, Homo sapiens
tactctcttcagctt

SEQ ID NO: 544201 - DNA, 15 bp, Homo sapiens
ttactctcttcagct

SEQ ID NO: 544202 - DNA, 15 bp, Homo sapiens
attactctcttcagc

SEQ ID NO: 544203 - DNA, 15 bp, Homo sapiens
aattactctcttcag

SEQ ID NO: 544204 - DNA, 15 bp, Homo sapiens
aaattactctcttca

SEQ ID NO: 544205 - DNA, 15 bp, Homo sapiens
caaattactctcttc

SEQ ID NO: 544206 - DNA, 15 bp, Homo sapiens
gcaaattactctctt

SEQ ID NO: 544207 - DNA, 15 bp, Homo sapiens
ggcaaattactctct

SEQ ID NO: 544208 - DNA, 15 bp, Homo sapiens
gggcaaattactctc

SEQ ID NO: 544209 - DNA, 15 bp, Homo sapiens
ggggcaaattactct

SEQ ID NO: 544210 - DNA, 15 bp, Homo sapiens
tggggcaaattactc

SEQ ID NO: 544211 - DNA, 15 bp, Homo sapiens
ttggggcaaattact

SEQ ID NO: 544212 - DNA, 15 bp, Homo sapiens
cttggggcaaattac

SEQ ID NO: 544213 - DNA, 15 bp, Homo sapiens
acttggggcaaatta

SEQ ID NO: 544214 - DNA, 15 bp, Homo sapiens
cacttggggcaaatt

SEQ ID NO: 544215 - DNA, 15 bp, Homo sapiens
tcacttggggcaaat

SEQ ID NO: 544216 - DNA, 15 bp, Homo sapiens
gtcacttggggcaaa

SEQ ID NO: 544217 - DNA, 15 bp, Homo sapiens
ggtcacttggggcaa

SEQ ID NO: 544218 - DNA, 15 bp, Homo sapiens
aggtcacttggggca

SEQ ID NO: 544219 - DNA, 15 bp, Homo sapiens
gaggtcacttggggc

SEQ ID NO: 544220 - DNA, 15 bp, Homo sapiens
cgaggtcacttgggg

SEQ ID NO: 544221 - DNA, 15 bp, Homo sapiens
gcgaggtcacttggg

SEQ ID NO: 544222 - DNA, 15 bp, Homo sapiens
agcgaggtcacttgg

SEQ ID NO: 544223 - DNA, 15 bp, Homo sapiens
tagcgaggtcacttg

SEQ ID NO: 544224 - DNA, 15 bp, Homo sapiens
ctagcgaggtcactt

SEQ ID NO: 544225 - DNA, 15 bp, Homo sapiens
actagcgaggtcact

SEQ ID NO: 544226 - DNA, 15 bp, Homo sapiens
cactagcgaggtcac

SEQ ID NO: 544227 - DNA, 15 bp, Homo sapiens
acactagcgaggtca

SEQ ID NO: 544228 - DNA, 15 bp, Homo sapiens
tacactagcgaggtc

SEQ ID NO: 544229 - DNA, 15 bp, Homo sapiens
atacactagcgaggt

SEQ ID NO: 544230 - DNA, 15 bp, Homo sapiens
catacactagcgagg

SEQ ID NO: 544231 - DNA, 15 bp, Homo sapiens
acatacactagcgag

SEQ ID NO: 544232 - DNA, 15 bp, Homo sapiens
cacatacactagcga

SEQ ID NO: 544233 - DNA, 15 bp, Homo sapiens
acacatacactagcg

SEQ ID NO: 544234 - DNA, 15 bp, Homo sapiens
cacacatacactagc

SEQ ID NO: 544235 - DNA, 15 bp, Homo sapiens
acacacatacactag

SEQ ID NO: 544236 - DNA, 15 bp, Homo sapiens
cacacacatacacta

SEQ ID NO: 544237 - DNA, 15 bp, Homo sapiens
gcacacacatacact

SEQ ID NO: 544238 - DNA, 15 bp, Homo sapiens
cgcacacacatacac

SEQ ID NO: 544239 - DNA, 15 bp, Homo sapiens
acgcacacacataca

SEQ ID NO: 544240 - DNA, 15 bp, Homo sapiens
cacgcacacacatac

SEQ ID NO: 544241 - DNA, 15 bp, Homo sapiens
gcacgcacacacata

SEQ ID NO: 544242 - DNA, 15 bp, Homo sapiens
tgcacgcacacacat

SEQ ID NO: 544243 - DNA, 15 bp, Homo sapiens
atgcacgcacacaca

SEQ ID NO: 544244 - DNA, 15 bp, Homo sapiens
catgcacgcacacac

SEQ ID NO: 544245 - DNA, 15 bp, Homo sapiens
acatgcacgcacaca

SEQ ID NO: 544246 - DNA, 15 bp, Homo sapiens
cacatgcacgcacac

SEQ ID NO: 544247 - DNA, 15 bp, Homo sapiens
acacatgcacgcaca

SEQ ID NO: 544248 - DNA, 15 bp, Homo sapiens
cacacatgcacgcac

SEQ ID NO: 544249 - DNA, 15 bp, Homo sapiens
gcacacatgcacgca

SEQ ID NO: 544250 - DNA, 15 bp, Homo sapiens
tgcacacatgcacgc

SEQ ID NO: 544251 - DNA, 15 bp, Homo sapiens
gtgcacacatgcacg

SEQ ID NO: 544252 - DNA, 15 bp, Homo sapiens
cgtgcacacatgcac

SEQ ID NO: 544253 - DNA, 15 bp, Homo sapiens
acgtgcacacatgca

SEQ ID NO: 544254 - DNA, 15 bp, Homo sapiens
cacgtgcacacatgc

SEQ ID NO: 544255 - DNA, 15 bp, Homo sapiens
acacgtgcacacatg

SEQ ID NO: 544256 - DNA, 15 bp, Homo sapiens
cacacgtgcacacat

SEQ ID NO: 544257 - DNA, 15 bp, Homo sapiens
acacacgtgcacaca

SEQ ID NO: 544258 - DNA, 15 bp, Homo sapiens
cacacacgtgcacac

SEQ ID NO: 544259 - DNA, 15 bp, Homo sapiens
acacacacgtgcaca

SEQ ID NO: 544260 - DNA, 15 bp, Homo sapiens
cacacacacgtgcac

SEQ ID NO: 544261 - DNA, 15 bp, Homo sapiens
acacacacacgtgca

SEQ ID NO: 544262 - DNA, 15 bp, Homo sapiens
cacacacacacgtgc

SEQ ID NO: 544263 - DNA, 15 bp, Homo sapiens
acacacacacacgtg

SEQ ID NO: 544264 - DNA, 15 bp, Homo sapiens
cacacacacacacgt

SEQ ID NO: 544265 - DNA, 15 bp, Homo sapiens
acacacacacacacg

SEQ ID NO: 544266 - DNA, 15 bp, Homo sapiens
tcacacacacacaca

SEQ ID NO: 544267 - DNA, 15 bp, Homo sapiens
ttcacacacacacac

SEQ ID NO: 544268 - DNA, 15 bp, Homo sapiens
cttcacacacacaca

SEQ ID NO: 544269 - DNA, 15 bp, Homo sapiens
ccttcacacacacac

SEQ ID NO: 544270 - DNA, 15 bp, Homo sapiens
accttcacacacaca

SEQ ID NO: 544271 - DNA, 15 bp, Homo sapiens
caccttcacacacac

SEQ ID NO: 544272 - DNA, 15 bp, Homo sapiens
acaccttcacacaca

SEQ ID NO: 544273 - DNA, 15 bp, Homo sapiens
gacaccttcacacac

SEQ ID NO: 544274 - DNA, 15 bp, Homo sapiens
agacaccttcacaca

SEQ ID NO: 544275 - DNA, 15 bp, Homo sapiens
cagacaccttcacac

SEQ ID NO: 544276 - DNA, 15 bp, Homo sapiens
acagacaccttcaca

SEQ ID NO: 544277 - DNA, 15 bp, Homo sapiens
gacagacaccttcac

SEQ ID NO: 544278 - DNA, 15 bp, Homo sapiens
agacagacaccttca

SEQ ID NO: 544279 - DNA, 15 bp, Homo sapiens
cagacagacaccttc

SEQ ID NO: 544280 - DNA, 15 bp, Homo sapiens
acagacagacacctt

SEQ ID NO: 544281 - DNA, 15 bp, Homo sapiens
gacagacagacacct

SEQ ID NO: 544282 - DNA, 15 bp, Homo sapiens
ggacagacagacacc

SEQ ID NO: 544283 - DNA, 15 bp, Homo sapiens
gggacagacagacac

SEQ ID NO: 544284 - DNA, 15 bp, Homo sapiens
tgggacagacagaca

SEQ ID NO: 544285 - DNA, 15 bp, Homo sapiens
ctgggacagacagac

SEQ ID NO: 544286 - DNA, 15 bp, Homo sapiens
tctgggacagacaga

SEQ ID NO: 544287 - DNA, 15 bp, Homo sapiens
ctctgggacagacag

SEQ ID NO: 544288 - DNA, 15 bp, Homo sapiens
cctctgggacagaca

SEQ ID NO: 544289 - DNA, 15 bp, Homo sapiens
gcctctgggacagac

SEQ ID NO: 544290 - DNA, 15 bp, Homo sapiens
tgcctctgggacaga

SEQ ID NO: 544291 - DNA, 15 bp, Homo sapiens
ctgcctctgggacag

SEQ ID NO: 544292 - DNA, 15 bp, Homo sapiens
tctgcctctgggaca

SEQ ID NO: 544293 - DNA, 15 bp, Homo sapiens
atctgcctctgggac

SEQ ID NO: 544294 - DNA, 15 bp, Homo sapiens
catctgcctctggga

SEQ ID NO: 544295 - DNA, 15 bp, Homo sapiens
gcatctgcctctggg

SEQ ID NO: 544296 - DNA, 15 bp, Homo sapiens
ggcatctgcctctgg

SEQ ID NO: 544297 - DNA, 15 bp, Homo sapiens
tggcatctgcctctg

SEQ ID NO: 544298 - DNA, 15 bp, Homo sapiens
atggcatctgcctct

SEQ ID NO: 544299 - DNA, 15 bp, Homo sapiens
catggcatctgcctc

SEQ ID NO: 544300 - DNA, 15 bp, Homo sapiens
tcatggcatctgcct

SEQ ID NO: 544301 - DNA, 15 bp, Homo sapiens
ctcatggcatctgcc

SEQ ID NO: 544302 - DNA, 15 bp, Homo sapiens
tctcatggcatctgc

SEQ ID NO: 544303 - DNA, 15 bp, Homo sapiens
ttctcatggcatctg

SEQ ID NO: 544304 - DNA, 15 bp, Homo sapiens
attctcatggcatct

SEQ ID NO: 544305 - DNA, 15 bp, Homo sapiens
cattctcatggcatc

SEQ ID NO: 544306 - DNA, 15 bp, Homo sapiens
ccattctcatggcat

SEQ ID NO: 544307 - DNA, 15 bp, Homo sapiens
cccattctcatggca

SEQ ID NO: 544308 - DNA, 15 bp, Homo sapiens
ccccattctcatggc

SEQ ID NO: 544309 - DNA, 15 bp, Homo sapiens
tccccattctcatgg

SEQ ID NO: 544310 - DNA, 15 bp, Homo sapiens
gtccccattctcatg

SEQ ID NO: 544311 - DNA, 15 bp, Homo sapiens
agtccccattctcat

SEQ ID NO: 544312 - DNA, 15 bp, Homo sapiens
gagtccccattctca

SEQ ID NO: 544313 - DNA, 15 bp, Homo sapiens
agagtccccattctc

SEQ ID NO: 544314 - DNA, 15 bp, Homo sapiens
aagagtccccattct

SEQ ID NO: 544315 - DNA, 15 bp, Homo sapiens
caagagtccccattc

SEQ ID NO: 544316 - DNA, 15 bp, Homo sapiens
gcaagagtccccatt

SEQ ID NO: 544317 - DNA, 15 bp, Homo sapiens
agcaagagtccccat

SEQ ID NO: 544318 - DNA, 15 bp, Homo sapiens
gagcaagagtcccca

SEQ ID NO: 544319 - DNA, 15 bp, Homo sapiens
ggagcaagagtcccc

SEQ ID NO: 544320 - DNA, 15 bp, Homo sapiens
gggagcaagagtccc

SEQ ID NO: 544321 - DNA, 15 bp, Homo sapiens
tgggagcaagagtcc

SEQ ID NO: 544322 - DNA, 15 bp, Homo sapiens
atgggagcaagagtc

SEQ ID NO: 544323 - DNA, 15 bp, Homo sapiens
aatgggagcaagagt

SEQ ID NO: 544324 - DNA, 15 bp, Homo sapiens
gaatgggagcaagag

SEQ ID NO: 544325 - DNA, 15 bp, Homo sapiens
ggaatgggagcaaga

SEQ ID NO: 544326 - DNA, 15 bp, Homo sapiens
gggaatgggagcaag

SEQ ID NO: 544327 - DNA, 15 bp, Homo sapiens
agggaatgggagcaa

SEQ ID NO: 544328 - DNA, 15 bp, Homo sapiens
cagggaatgggagca

SEQ ID NO: 544329 - DNA, 15 bp, Homo sapiens
ccagggaatgggagc

SEQ ID NO: 544330 - DNA, 15 bp, Homo sapiens
tccagggaatgggag

SEQ ID NO: 544331 - DNA, 15 bp, Homo sapiens
atccagggaatggga

SEQ ID NO: 544332 - DNA, 15 bp, Homo sapiens
gatccagggaatggg

SEQ ID NO: 544333 - DNA, 15 bp, Homo sapiens
agatccagggaatgg

SEQ ID NO: 544334 - DNA, 15 bp, Homo sapiens
cagatccagggaatg

SEQ ID NO: 544335 - DNA, 15 bp, Homo sapiens
tcagatccagggaat

SEQ ID NO: 544336 - DNA, 15 bp, Homo sapiens
ctcagatccagggaa

SEQ ID NO: 544337 - DNA, 15 bp, Homo sapiens
gctcagatccaggga

SEQ ID NO: 544338 - DNA, 15 bp, Homo sapiens
ggctcagatccaggg

SEQ ID NO: 544339 - DNA, 15 bp, Homo sapiens
aggctcagatccagg

SEQ ID NO: 544340 - DNA, 15 bp, Homo sapiens
caggctcagatccag

SEQ ID NO: 544341 - DNA, 15 bp, Homo sapiens
ccaggctcagatcca

SEQ ID NO: 544342 - DNA, 15 bp, Homo sapiens
gccaggctcagatcc

SEQ ID NO: 544343 - DNA, 15 bp, Homo sapiens
tgccaggctcagatc

SEQ ID NO: 544344 - DNA, 15 bp, Homo sapiens
atgccaggctcagat

SEQ ID NO: 544345 - DNA, 15 bp, Homo sapiens
catgccaggctcaga

SEQ ID NO: 544346 - DNA, 15 bp, Homo sapiens
gcatgccaggctcag

SEQ ID NO: 544347 - DNA, 15 bp, Homo sapiens
tgcatgccaggctca

SEQ ID NO: 544348 - DNA, 15 bp, Homo sapiens
ctgcatgccaggctc

SEQ ID NO: 544349 - DNA, 15 bp, Homo sapiens
gctgcatgccaggct

SEQ ID NO: 544350 - DNA, 15 bp, Homo sapiens
agctgcatgccaggc

SEQ ID NO: 544351 - DNA, 15 bp, Homo sapiens
cagctgcatgccagg

SEQ ID NO: 544352 - DNA, 15 bp, Homo sapiens
acagctgcatgccag

SEQ ID NO: 544353 - DNA, 15 bp, Homo sapiens
cacagctgcatgcca

SEQ ID NO: 544354 - DNA, 15 bp, Homo sapiens
gcacagctgcatgcc

SEQ ID NO: 544355 - DNA, 15 bp, Homo sapiens
agcacagctgcatgc

SEQ ID NO: 544356 - DNA, 15 bp, Homo sapiens
gagcacagctgcatg

SEQ ID NO: 544357 - DNA, 15 bp, Homo sapiens
tgagcacagctgcat

SEQ ID NO: 544358 - DNA, 15 bp, Homo sapiens
ctgagcacagctgca

SEQ ID NO: 544359 - DNA, 15 bp, Homo sapiens
cctgagcacagctgc

SEQ ID NO: 544360 - DNA, 15 bp, Homo sapiens
acctgagcacagctg

SEQ ID NO: 544361 - DNA, 15 bp, Homo sapiens
tacctgagcacagct

SEQ ID NO: 544362 - DNA, 15 bp, Homo sapiens
atacctgagcacagc

SEQ ID NO: 544363 - DNA, 15 bp, Homo sapiens
catacctgagcacag

SEQ ID NO: 544364 - DNA, 15 bp, Homo sapiens
acatacctgagcaca

SEQ ID NO: 544365 - DNA, 15 bp, Homo sapiens
cacatacctgagcac

SEQ ID NO: 544366 - DNA, 15 bp, Homo sapiens
ccacatacctgagca

SEQ ID NO: 544367 - DNA, 15 bp, Homo sapiens
cccacatacctgagc

SEQ ID NO: 544368 - DNA, 15 bp, Homo sapiens
acccacatacctgag

SEQ ID NO: 544369 - DNA, 15 bp, Homo sapiens
cacccacatacctga

SEQ ID NO: 544370 - DNA, 15 bp, Homo sapiens
tcacccacatacctg

SEQ ID NO: 544371 - DNA, 15 bp, Homo sapiens
ctcacccacatacct

SEQ ID NO: 544372 - DNA, 15 bp, Homo sapiens
actcacccacatacc

SEQ ID NO: 544373 - DNA, 15 bp, Homo sapiens
tactcacccacatac

SEQ ID NO: 544374 - DNA, 15 bp, Homo sapiens
ttactcacccacata

SEQ ID NO: 544375 - DNA, 15 bp, Homo sapiens
gttactcacccacat

SEQ ID NO: 544376 - DNA, 15 bp, Homo sapiens
cgttactcacccaca

SEQ ID NO: 544377 - DNA, 15 bp, Homo sapiens
tcgttactcacccac

SEQ ID NO: 544378 - DNA, 15 bp, Homo sapiens
ttcgttactcaccca

SEQ ID NO: 544379 - DNA, 15 bp, Homo sapiens
cttcgttactcaccc

SEQ ID NO: 544380 - DNA, 15 bp, Homo sapiens
ccttcgttactcacc

SEQ ID NO: 544381 - DNA, 15 bp, Homo sapiens
gccttcgttactcac

SEQ ID NO: 544382 - DNA, 15 bp, Homo sapiens
ggccttcgttactca

SEQ ID NO: 544383 - DNA, 15 bp, Homo sapiens
aggccttcgttactc

SEQ ID NO: 544384 - DNA, 15 bp, Homo sapiens
caggccttcgttact

SEQ ID NO: 544385 - DNA, 15 bp, Homo sapiens
ccaggccttcgttac

SEQ ID NO: 544386 - DNA, 15 bp, Homo sapiens
accaggccttcgtta

SEQ ID NO: 544387 - DNA, 15 bp, Homo sapiens
aaccaggccttcgtt

SEQ ID NO: 544388 - DNA, 15 bp, Homo sapiens
gaaccaggccttcgt

SEQ ID NO: 544389 - DNA, 15 bp, Homo sapiens
tgaaccaggccttcg

SEQ ID NO: 544390 - DNA, 15 bp, Homo sapiens
ctgaaccaggccttc

SEQ ID NO: 544391 - DNA, 15 bp, Homo sapiens
cctgaaccaggcctt

SEQ ID NO: 544392 - DNA, 15 bp, Homo sapiens
acctgaaccaggcct

SEQ ID NO: 544393 - DNA, 15 bp, Homo sapiens
gacctgaaccaggcc

SEQ ID NO: 544394 - DNA, 15 bp, Homo sapiens
ggacctgaaccaggc

SEQ ID NO: 544395 - DNA, 15 bp, Homo sapiens
aggacctgaaccagg

SEQ ID NO: 544396 - DNA, 15 bp, Homo sapiens
caggacctgaaccag

SEQ ID NO: 544397 - DNA, 15 bp, Homo sapiens
ccaggacctgaacca

SEQ ID NO: 544398 - DNA, 15 bp, Homo sapiens
cccaggacctgaacc

SEQ ID NO: 544399 - DNA, 15 bp, Homo sapiens
ccccaggacctgaac

SEQ ID NO: 544400 - DNA, 15 bp, Homo sapiens
cccccaggacctgaa

SEQ ID NO: 544401 - DNA, 15 bp, Homo sapiens
ccccccaggacctga

SEQ ID NO: 544402 - DNA, 15 bp, Homo sapiens
gccccccaggacctg

SEQ ID NO: 544403 - DNA, 15 bp, Homo sapiens
tgccccccaggacct

SEQ ID NO: 544404 - DNA, 15 bp, Homo sapiens
gtgccccccaggacc

SEQ ID NO: 544405 - DNA, 15 bp, Homo sapiens
tgtgccccccaggac

SEQ ID NO: 544406 - DNA, 15 bp, Homo sapiens
gtgtgccccccagga

SEQ ID NO: 544407 - DNA, 15 bp, Homo sapiens
tgtgtgccccccagg

SEQ ID NO: 544408 - DNA, 15 bp, Homo sapiens
atgtgtgccccccag

SEQ ID NO: 544409 - DNA, 15 bp, Homo sapiens
gatgtgtgcccccca

SEQ ID NO: 544410 - DNA, 15 bp, Homo sapiens
ggatgtgtgcccccc

SEQ ID NO: 544411 - DNA, 15 bp, Homo sapiens
tggatgtgtgccccc

SEQ ID NO: 544412 - DNA, 15 bp, Homo sapiens
ttggatgtgtgcccc

SEQ ID NO: 544413 - DNA, 15 bp, Homo sapiens
cttggatgtgtgccc

SEQ ID NO: 544414 - DNA, 15 bp, Homo sapiens
acttggatgtgtgcc

SEQ ID NO: 544415 - DNA, 15 bp, Homo sapiens
aacttggatgtgtgc

SEQ ID NO: 544416 - DNA, 15 bp, Homo sapiens
gaacttggatgtgtg

SEQ ID NO: 544417 - DNA, 15 bp, Homo sapiens
ggaacttggatgtgt

SEQ ID NO: 544418 - DNA, 15 bp, Homo sapiens
gggaacttggatgtg

SEQ ID NO: 544419 - DNA, 15 bp, Homo sapiens
cgggaacttggatgt

SEQ ID NO: 544420 - DNA, 15 bp, Homo sapiens
acgggaacttggatg

SEQ ID NO: 544421 - DNA, 15 bp, Homo sapiens
tacgggaacttggat

SEQ ID NO: 544422 - DNA, 15 bp, Homo sapiens
atacgggaacttgga

SEQ ID NO: 544423 - DNA, 15 bp, Homo sapiens
catacgggaacttgg

SEQ ID NO: 544424 - DNA, 15 bp, Homo sapiens
acatacgggaacttg

SEQ ID NO: 544425 - DNA, 15 bp, Homo sapiens
gacatacgggaactt

SEQ ID NO: 544426 - DNA, 15 bp, Homo sapiens
agacatacgggaact

SEQ ID NO: 544427 - DNA, 15 bp, Homo sapiens
gagacatacgggaac

SEQ ID NO: 544428 - DNA, 15 bp, Homo sapiens
agagacatacgggaa

SEQ ID NO: 544429 - DNA, 15 bp, Homo sapiens
cagagacatacggga

SEQ ID NO: 544430 - DNA, 15 bp, Homo sapiens
ccagagacatacggg

SEQ ID NO: 544431 - DNA, 15 bp, Homo sapiens
accagagacatacgg

SEQ ID NO: 544432 - DNA, 15 bp, Homo sapiens
gaccagagacatacg

SEQ ID NO: 544433 - DNA, 15 bp, Homo sapiens
ggaccagagacatac

SEQ ID NO: 544434 - DNA, 15 bp, Homo sapiens
aggaccagagacata

SEQ ID NO: 544435 - DNA, 15 bp, Homo sapiens
gaggaccagagacat

SEQ ID NO: 544436 - DNA, 15 bp, Homo sapiens
cgtccaccagctggg

SEQ ID NO: 544437 - DNA, 15 bp, Homo sapiens
acgtccaccagctgg

SEQ ID NO: 544438 - DNA, 15 bp, Homo sapiens
cacgtccaccagctg

SEQ ID NO: 544439 - DNA, 15 bp, Homo sapiens
ccacgtccaccagct

SEQ ID NO: 544440 - DNA, 15 bp, Homo sapiens
cccacgtccaccagc

SEQ ID NO: 544441 - DNA, 15 bp, Homo sapiens
ccccacgtccaccag

SEQ ID NO: 544442 - DNA, 15 bp, Homo sapiens
tccccacgtccacca

SEQ ID NO: 544443 - DNA, 15 bp, Homo sapiens
ctccccacgtccacc

SEQ ID NO: 544444 - DNA, 15 bp, Homo sapiens
tctccccacgtccac

SEQ ID NO: 544445 - DNA, 15 bp, Homo sapiens
ctctccccacgtcca

SEQ ID NO: 544446 - DNA, 15 bp, Homo sapiens
cctctccccacgtcc

SEQ ID NO: 544447 - DNA, 15 bp, Homo sapiens
gcctctccccacgtc

SEQ ID NO: 544448 - DNA, 15 bp, Homo sapiens
ggcctctccccacgt

SEQ ID NO: 544449 - DNA, 15 bp, Homo sapiens
gggcctctccccacg

SEQ ID NO: 544450 - DNA, 15 bp, Homo sapiens
ggggcctctccccac

SEQ ID NO: 544451 - DNA, 15 bp, Homo sapiens
aggggcctctcccca

SEQ ID NO: 544452 - DNA, 15 bp, Homo sapiens
tagtgaggggcctct

SEQ ID NO: 544453 - DNA, 15 bp, Homo sapiens
gtagtgaggggcctc

SEQ ID NO: 544454 - DNA, 15 bp, Homo sapiens
agtagtgaggggcct

SEQ ID NO: 544455 - DNA, 15 bp, Homo sapiens
cagtagtgaggggcc

SEQ ID NO: 544456 - DNA, 15 bp, Homo sapiens
gcagtagtgaggggc

SEQ ID NO: 544457 - DNA, 15 bp, Homo sapiens
agcagtagtgagggg

SEQ ID NO: 544458 - DNA, 15 bp, Homo sapiens
cagcagtagtgaggg

SEQ ID NO: 544459 - DNA, 15 bp, Homo sapiens
ccagcagtagtgagg

SEQ ID NO: 544460 - DNA, 15 bp, Homo sapiens
cccagcagtagtgag

SEQ ID NO: 544461 - DNA, 15 bp, Homo sapiens
gcccagcagtagtga

SEQ ID NO: 544462 - DNA, 15 bp, Homo sapiens
agcccagcagtagtg

SEQ ID NO: 544463 - DNA, 15 bp, Homo sapiens
cagcccagcagtagt

SEQ ID NO: 544464 - DNA, 15 bp, Homo sapiens
gcagcccagcagtag

SEQ ID NO: 544465 - DNA, 15 bp, Homo sapiens
tgcagcccagcagta

SEQ ID NO: 544466 - DNA, 15 bp, Homo sapiens
ctgcagcccagcagt

SEQ ID NO: 544467 - DNA, 15 bp, Homo sapiens
cctgcagcccagcag

SEQ ID NO: 544468 - DNA, 15 bp, Homo sapiens
ccctgcagcccagca

SEQ ID NO: 544469 - DNA, 15 bp, Homo sapiens
tccctgcagcccagc

SEQ ID NO: 544470 - DNA, 15 bp, Homo sapiens
ttccctgcagcccag

SEQ ID NO: 544471 - DNA, 15 bp, Homo sapiens
cttccctgcagccca

SEQ ID NO: 544472 - DNA, 15 bp, Homo sapiens
ccttccctgcagccc

SEQ ID NO: 544473 - DNA, 15 bp, Homo sapiens
cccttccctgcagcc

SEQ ID NO: 544474 - DNA, 15 bp, Homo sapiens
ccccttccctgcagc

SEQ ID NO: 544475 - DNA, 15 bp, Homo sapiens
accccttccctgcag

SEQ ID NO: 544476 - DNA, 15 bp, Homo sapiens
gaccccttccctgca

SEQ ID NO: 544477 - DNA, 15 bp, Homo sapiens
tgaccccttccctgc

SEQ ID NO: 544478 - DNA, 15 bp, Homo sapiens
atgaccccttccctg

SEQ ID NO: 544479 - DNA, 15 bp, Homo sapiens
gatgaccccttccct

SEQ ID NO: 544480 - DNA, 15 bp, Homo sapiens
agatgaccccttccc

SEQ ID NO: 544481 - DNA, 15 bp, Homo sapiens
aagatgaccccttcc

SEQ ID NO: 544482 - DNA, 15 bp, Homo sapiens
gaagatgaccccttc

SEQ ID NO: 544483 - DNA, 15 bp, Homo sapiens
ggaagatgacccctt

SEQ ID NO: 544484 - DNA, 15 bp, Homo sapiens
tggaagatgacccct

SEQ ID NO: 544485 - DNA, 15 bp, Homo sapiens
ttggaagatgacccc

SEQ ID NO: 544486 - DNA, 15 bp, Homo sapiens
cttggaagatgaccc

SEQ ID NO: 544487 - DNA, 15 bp, Homo sapiens
tcttggaagatgacc

SEQ ID NO: 544488 - DNA, 15 bp, Homo sapiens
gtcttggaagatgac

SEQ ID NO: 544489 - DNA, 15 bp, Homo sapiens
ggtcttggaagatga

SEQ ID NO: 544490 - DNA, 15 bp, Homo sapiens
tggtcttggaagatg

SEQ ID NO: 544491 - DNA, 15 bp, Homo sapiens
gtggtcttggaagat

SEQ ID NO: 544492 - DNA, 15 bp, Homo sapiens
ggtggtcttggaaga

SEQ ID NO: 544493 - DNA, 15 bp, Homo sapiens
tggtggtcttggaag

SEQ ID NO: 544494 - DNA, 15 bp, Homo sapiens
atggtggtcttggaa

SEQ ID NO: 544495 - DNA, 15 bp, Homo sapiens
gatggtggtcttgga

SEQ ID NO: 544496 - DNA, 15 bp, Homo sapiens
agatggtggtcttgg

SEQ ID NO: 544497 - DNA, 15 bp, Homo sapiens
aagatggtggtcttg

SEQ ID NO: 544498 - DNA, 15 bp, Homo sapiens
gaagatggtggtctt

SEQ ID NO: 544499 - DNA, 15 bp, Homo sapiens
tgaagatggtggtct

SEQ ID NO: 544500 - DNA, 15 bp, Homo sapiens
ttgaagatggtggtc

SEQ ID NO: 544501 - DNA, 15 bp, Homo sapiens
attgaagatggtggt

SEQ ID NO: 544502 - DNA, 15 bp, Homo sapiens
cattgaagatggtgg

SEQ ID NO: 544503 - DNA, 15 bp, Homo sapiens
tcattgaagatggtg

SEQ ID NO: 544504 - DNA, 15 bp, Homo sapiens
atcattgaagatggt

SEQ ID NO: 544505 - DNA, 15 bp, Homo sapiens
tatcattgaagatgg

SEQ ID NO: 544506 - DNA, 15 bp, Homo sapiens
ctatcattgaagatg

SEQ ID NO: 544507 - DNA, 15 bp, Homo sapiens
cctatcattgaagat

SEQ ID NO: 544508 - DNA, 15 bp, Homo sapiens
gcctatcattgaaga

SEQ ID NO: 544509 - DNA, 15 bp, Homo sapiens
ggcctatcattgaag

SEQ ID NO: 544510 - DNA, 15 bp, Homo sapiens
aggcctatcattgaa

SEQ ID NO: 544511 - DNA, 15 bp, Homo sapiens
gaggcctatcattga

SEQ ID NO: 544512 - DNA, 15 bp, Homo sapiens
tgaggcctatcattg

SEQ ID NO: 544513 - DNA, 15 bp, Homo sapiens
atgaggcctatcatt

SEQ ID NO: 544514 - DNA, 15 bp, Homo sapiens
catgaggcctatcat

SEQ ID NO: 544515 - DNA, 15 bp, Homo sapiens
ccatgaggcctatca

SEQ ID NO: 544516 - DNA, 15 bp, Homo sapiens
gccatgaggcctatc

SEQ ID NO: 544517 - DNA, 15 bp, Homo sapiens
ggccatgaggcctat

SEQ ID NO: 544518 - DNA, 15 bp, Homo sapiens
aggccatgaggccta

SEQ ID NO: 544519 - DNA, 15 bp, Homo sapiens
aaggccatgaggcct

SEQ ID NO: 544520 - DNA, 15 bp, Homo sapiens
gaaggccatgaggcc

SEQ ID NO: 544521 - DNA, 15 bp, Homo sapiens
agaaggccatgaggc

SEQ ID NO: 544522 - DNA, 15 bp, Homo sapiens
aagaaggccatgagg

SEQ ID NO: 544523 - DNA, 15 bp, Homo sapiens
gaagaaggccatgag

SEQ ID NO: 544524 - DNA, 15 bp, Homo sapiens
ggaagaaggccatga

SEQ ID NO: 544525 - DNA, 15 bp, Homo sapiens
tggaagaaggccatg

SEQ ID NO: 544526 - DNA, 15 bp, Homo sapiens
atggaagaaggccat

SEQ ID NO: 544527 - DNA, 15 bp, Homo sapiens
catggaagaaggcca

SEQ ID NO: 544528 - DNA, 15 bp, Homo sapiens
acatggaagaaggcc

SEQ ID NO: 544529 - DNA, 15 bp, Homo sapiens
gacatggaagaaggc

SEQ ID NO: 544530 - DNA, 15 bp, Homo sapiens
ggacatggaagaagg

SEQ ID NO: 544531 - DNA, 15 bp, Homo sapiens
tggacatggaagaag

SEQ ID NO: 544532 - DNA, 15 bp, Homo sapiens
ctggacatggaagaa

SEQ ID NO: 544533 - DNA, 15 bp, Homo sapiens
cctggacatggaaga

SEQ ID NO: 544534 - DNA, 15 bp, Homo sapiens
tcctggacatggaag

SEQ ID NO: 544535 - DNA, 15 bp, Homo sapiens
ctcctggacatggaa

SEQ ID NO: 544536 - DNA, 15 bp, Homo sapiens
tctcctggacatgga

SEQ ID NO: 544537 - DNA, 15 bp, Homo sapiens
ctctcctggacatgg

SEQ ID NO: 544538 - DNA, 15 bp, Homo sapiens
tctctcctggacatg

SEQ ID NO: 544539 - DNA, 15 bp, Homo sapiens
ttctctcctggacat

SEQ ID NO: 544540 - DNA, 15 bp, Homo sapiens
gttctctcctggaca

SEQ ID NO: 544541 - DNA, 15 bp, Homo sapiens
ggttctctcctggac

SEQ ID NO: 544542 - DNA, 15 bp, Homo sapiens
aggttctctcctgga

SEQ ID NO: 544543 - DNA, 15 bp, Homo sapiens
caggttctctcctgg

SEQ ID NO: 544544 - DNA, 15 bp, Homo sapiens
ccaggttctctcctg

SEQ ID NO: 544545 - DNA, 15 bp, Homo sapiens
cccaggttctctcct

SEQ ID NO: 544546 - DNA, 15 bp, Homo sapiens
acccaggttctctcc

SEQ ID NO: 544547 - DNA, 15 bp, Homo sapiens
gacccaggttctctc

SEQ ID NO: 544548 - DNA, 15 bp, Homo sapiens
ggacccaggttctct

SEQ ID NO: 544549 - DNA, 15 bp, Homo sapiens
gggacccaggttctc

SEQ ID NO: 544550 - DNA, 15 bp, Homo sapiens
ggggacccaggttct

SEQ ID NO: 544551 - DNA, 15 bp, Homo sapiens
aggggacccaggttc

SEQ ID NO: 544552 - DNA, 15 bp, Homo sapiens
gaggggacccaggtt

SEQ ID NO: 544553 - DNA, 15 bp, Homo sapiens
agaggggacccaggt

SEQ ID NO: 544554 - DNA, 15 bp, Homo sapiens
cagaggggacccagg

SEQ ID NO: 544555 - DNA, 15 bp, Homo sapiens
gcagaggggacccag

SEQ ID NO: 544556 - DNA, 15 bp, Homo sapiens
agcagaggggaccca

SEQ ID NO: 544557 - DNA, 15 bp, Homo sapiens
cagcagaggggaccc

SEQ ID NO: 544558 - DNA, 15 bp, Homo sapiens
acagcagaggggacc

SEQ ID NO: 544559 - DNA, 15 bp, Homo sapiens
gacagcagaggggac

SEQ ID NO: 544560 - DNA, 15 bp, Homo sapiens
agacagcagagggga

SEQ ID NO: 544561 - DNA, 15 bp, Homo sapiens
aagacagcagagggg

SEQ ID NO: 544562 - DNA, 15 bp, Homo sapiens
aaagacagcagaggg

SEQ ID NO: 544563 - DNA, 15 bp, Homo sapiens
taaagacagcagagg

SEQ ID NO: 544564 - DNA, 15 bp, Homo sapiens
ttaaagacagcagag

SEQ ID NO: 544565 - DNA, 15 bp, Homo sapiens
cttaaagacagcaga

SEQ ID NO: 544566 - DNA, 15 bp, Homo sapiens
acttaaagacagcag

SEQ ID NO: 544567 - DNA, 15 bp, Homo sapiens
aacttaaagacagca

SEQ ID NO: 544568 - DNA, 15 bp, Homo sapiens
caacttaaagacagc

SEQ ID NO: 544569 - DNA, 15 bp, Homo sapiens
ccaacttaaagacag

SEQ ID NO: 544570 - DNA, 15 bp, Homo sapiens
accaacttaaagaca

SEQ ID NO: 544571 - DNA, 15 bp, Homo sapiens
aaccaacttaaagac

SEQ ID NO: 544572 - DNA, 15 bp, Homo sapiens
aaaccaacttaaaga

SEQ ID NO: 544573 - DNA, 15 bp, Homo sapiens
aaaaccaacttaaag

SEQ ID NO: 544574 - DNA, 15 bp, Homo sapiens
gaaaaccaacttaaa

SEQ ID NO: 544575 - DNA, 15 bp, Homo sapiens
agaaaaccaacttaa

SEQ ID NO: 544576 - DNA, 15 bp, Homo sapiens
tagaaaaccaactta

SEQ ID NO: 544577 - DNA, 15 bp, Homo sapiens
ctagaaaaccaactt

SEQ ID NO: 544578 - DNA, 15 bp, Homo sapiens
tctagaaaaccaact

SEQ ID NO: 544579 - DNA, 15 bp, Homo sapiens
atctagaaaaccaac

SEQ ID NO: 544580 - DNA, 15 bp, Homo sapiens
catctagaaaaccaa

SEQ ID NO: 544581 - DNA, 15 bp, Homo sapiens
ccatctagaaaacca

SEQ ID NO: 544582 - DNA, 15 bp, Homo sapiens
tccatctagaaaacc

SEQ ID NO: 544583 - DNA, 15 bp, Homo sapiens
gtccatctagaaaac

SEQ ID NO: 544584 - DNA, 15 bp, Homo sapiens
agtccatctagaaaa

SEQ ID NO: 544585 - DNA, 15 bp, Homo sapiens
gagtccatctagaaa

SEQ ID NO: 544586 - DNA, 15 bp, Homo sapiens
tgagtccatctagaa

SEQ ID NO: 544587 - DNA, 15 bp, Homo sapiens
ttgagtccatctaga

SEQ ID NO: 544588 - DNA, 15 bp, Homo sapiens
gttgagtccatctag

SEQ ID NO: 544589 - DNA, 15 bp, Homo sapiens
ggttgagtccatcta

SEQ ID NO: 544590 - DNA, 15 bp, Homo sapiens
aggttgagtccatct

SEQ ID NO: 544591 - DNA, 15 bp, Homo sapiens
gaggttgagtccatc

SEQ ID NO: 544592 - DNA, 15 bp, Homo sapiens
cgaggttgagtccat

SEQ ID NO: 544593 - DNA, 15 bp, Homo sapiens
ccgaggttgagtcca

SEQ ID NO: 544594 - DNA, 15 bp, Homo sapiens
accgaggttgagtcc

SEQ ID NO: 544595 - DNA, 15 bp, Homo sapiens
aaccgaggttgagtc

SEQ ID NO: 544596 - DNA, 15 bp, Homo sapiens
caaccgaggttgagt

SEQ ID NO: 544597 - DNA, 15 bp, Homo sapiens
gcaaccgaggttgag

SEQ ID NO: 544598 - DNA, 15 bp, Homo sapiens
ggcaaccgaggttga

SEQ ID NO: 544599 - DNA, 15 bp, Homo sapiens
aggcaaccgaggttg

SEQ ID NO: 544600 - DNA, 15 bp, Homo sapiens
aaggcaaccgaggtt

SEQ ID NO: 544601 - DNA, 15 bp, Homo sapiens
caaggcaaccgaggt

SEQ ID NO: 544602 - DNA, 15 bp, Homo sapiens
acaaggcaaccgagg

SEQ ID NO: 544603 - DNA, 15 bp, Homo sapiens
gacaaggcaaccgag

SEQ ID NO: 544604 - DNA, 15 bp, Homo sapiens
ggacaaggcaaccga

SEQ ID NO: 544605 - DNA, 15 bp, Homo sapiens
aggacaaggcaaccg

SEQ ID NO: 544606 - DNA, 15 bp, Homo sapiens
caggacaaggcaacc

SEQ ID NO: 544607 - DNA, 15 bp, Homo sapiens
gcaggacaaggcaac

SEQ ID NO: 544608 - DNA, 15 bp, Homo sapiens
agcaggacaaggcaa

SEQ ID NO: 544609 - DNA, 15 bp, Homo sapiens
cagcaggacaaggca

SEQ ID NO: 544610 - DNA, 15 bp, Homo sapiens
gcagcaggacaaggc

SEQ ID NO: 544611 - DNA, 15 bp, Homo sapiens
agcagcaggacaagg

SEQ ID NO: 544612 - DNA, 15 bp, Homo sapiens
cagcagcaggacaag

SEQ ID NO: 544613 - DNA, 15 bp, Homo sapiens
ccagcagcaggacaa

SEQ ID NO: 544614 - DNA, 15 bp, Homo sapiens
cccagcagcaggaca

SEQ ID NO: 544615 - DNA, 15 bp, Homo sapiens
gcccagcagcaggac

SEQ ID NO: 544616 - DNA, 15 bp, Homo sapiens
agcccagcagcagga

SEQ ID NO: 544617 - DNA, 15 bp, Homo sapiens
aagcccagcagcagg

SEQ ID NO: 544618 - DNA, 15 bp, Homo sapiens
gaagcccagcagcag

SEQ ID NO: 544619 - DNA, 15 bp, Homo sapiens
ggaagcccagcagca

SEQ ID NO: 544620 - DNA, 15 bp, Homo sapiens
gggaagcccagcagc

SEQ ID NO: 544621 - DNA, 15 bp, Homo sapiens
ggggaagcccagcag

SEQ ID NO: 544622 - DNA, 15 bp, Homo sapiens
gggggaagcccagca

SEQ ID NO: 544623 - DNA, 15 bp, Homo sapiens
tgggggaagcccagc

SEQ ID NO: 544624 - DNA, 15 bp, Homo sapiens
gtgggggaagcccag

SEQ ID NO: 544625 - DNA, 15 bp, Homo sapiens
ggtgggggaagccca

SEQ ID NO: 544626 - DNA, 15 bp, Homo sapiens
aggtgggggaagccc

SEQ ID NO: 544627 - DNA, 15 bp, Homo sapiens
taggtgggggaagcc

SEQ ID NO: 544628 - DNA, 15 bp, Homo sapiens
ataggtgggggaagc

SEQ ID NO: 544629 - DNA, 15 bp, Homo sapiens
cataggtgggggaag

SEQ ID NO: 544630 - DNA, 15 bp, Homo sapiens
tcataggtgggggaa

SEQ ID NO: 544631 - DNA, 15 bp, Homo sapiens
atcataggtggggga

SEQ ID NO: 544632 - DNA, 15 bp, Homo sapiens
gatcataggtggggg

SEQ ID NO: 544633 - DNA, 15 bp, Homo sapiens
ggatcataggtgggg

SEQ ID NO: 544634 - DNA, 15 bp, Homo sapiens
gggatcataggtggg

SEQ ID NO: 544635 - DNA, 15 bp, Homo sapiens
agggatcataggtgg

SEQ ID NO: 544636 - DNA, 15 bp, Homo sapiens
cagggatcataggtg

SEQ ID NO: 544637 - DNA, 15 bp, Homo sapiens
acagggatcataggt

SEQ ID NO: 544638 - DNA, 15 bp, Homo sapiens
gacagggatcatagg

SEQ ID NO: 544639 - DNA, 15 bp, Homo sapiens
agacagggatcatag

SEQ ID NO: 544640 - DNA, 15 bp, Homo sapiens
gagacagggatcata

SEQ ID NO: 544641 - DNA, 15 bp, Homo sapiens
tgagacagggatcat

SEQ ID NO: 544642 - DNA, 15 bp, Homo sapiens
ttgagacagggatca

SEQ ID NO: 544643 - DNA, 15 bp, Homo sapiens
attgagacagggatc

SEQ ID NO: 544644 - DNA, 15 bp, Homo sapiens
tattgagacagggat

SEQ ID NO: 544645 - DNA, 15 bp, Homo sapiens
ttattgagacaggga

SEQ ID NO: 544646 - DNA, 15 bp, Homo sapiens
tttattgagacaggg

SEQ ID NO: 544647 - DNA, 15 bp, Homo sapiens
gtttattgagacagg

SEQ ID NO: 544648 - DNA, 15 bp, Homo sapiens
cgtttattgagacag

SEQ ID NO: 544649 - DNA, 15 bp, Homo sapiens
ccgtttattgagaca

SEQ ID NO: 544650 - DNA, 15 bp, Homo sapiens
gccgtttattgagac

SEQ ID NO: 544651 - DNA, 15 bp, Homo sapiens
tgccgtttattgaga

SEQ ID NO: 544652 - DNA, 15 bp, Homo sapiens
gtgccgtttattgag

SEQ ID NO: 544653 - DNA, 15 bp, Homo sapiens
ggtgccgtttattga

SEQ ID NO: 544654 - DNA, 15 bp, Homo sapiens
aggtgccgtttattg

SEQ ID NO: 544655 - DNA, 15 bp, Homo sapiens
gaggtgccgtttatt

SEQ ID NO: 544656 - DNA, 15 bp, Homo sapiens
ggaggtgccgtttat

SEQ ID NO: 544657 - DNA, 15 bp, Homo sapiens
aggaggtgccgttta

SEQ ID NO: 544658 - DNA, 15 bp, Homo sapiens
aaggaggtgccgttt

SEQ ID NO: 544659 - DNA, 15 bp, Homo sapiens
aaaggaggtgccgtt

SEQ ID NO: 544660 - DNA, 15 bp, Homo sapiens
aaaaggaggtgccgt

SEQ ID NO: 544661 - DNA, 15 bp, Homo sapiens
caaaaggaggtgccg

SEQ ID NO: 544662 - DNA, 15 bp, Homo sapiens
acaaaaggaggtgcc

SEQ ID NO: 544663 - DNA, 15 bp, Homo sapiens
aacaaaaggaggtgc

SEQ ID NO: 544664 - DNA, 15 bp, Homo sapiens
aaacaaaaggaggtg

SEQ ID NO: 544665 - DNA, 15 bp, Homo sapiens
gaaacaaaaggaggt

SEQ ID NO: 544666 - DNA, 15 bp, Homo sapiens
ggaaacaaaaggagg

SEQ ID NO: 544667 - DNA, 15 bp, Homo sapiens
gggaaacaaaaggag

SEQ ID NO: 544668 - DNA, 15 bp, Homo sapiens
ggggaaacaaaagga

SEQ ID NO: 544669 - DNA, 15 bp, Homo sapiens
aggggaaacaaaagg

SEQ ID NO: 544670 - DNA, 15 bp, Homo sapiens
caggggaaacaaaag

SEQ ID NO: 544671 - DNA, 15 bp, Homo sapiens
ccaggggaaacaaaa

SEQ ID NO: 544672 - DNA, 15 bp, Homo sapiens
cccaggggaaacaaa

SEQ ID NO: 544673 - DNA, 15 bp, Homo sapiens
ccccaggggaaacaa

SEQ ID NO: 544674 - DNA, 15 bp, Homo sapiens
accccaggggaaaca

SEQ ID NO: 544675 - DNA, 15 bp, Homo sapiens
taccccaggggaaac

SEQ ID NO: 544676 - DNA, 15 bp, Homo sapiens
ctaccccaggggaaa

SEQ ID NO: 544677 - DNA, 15 bp, Homo sapiens
tctaccccaggggaa

SEQ ID NO: 544678 - DNA, 15 bp, Homo sapiens
ctctaccccagggga

SEQ ID NO: 544679 - DNA, 15 bp, Homo sapiens
cctctaccccagggg

SEQ ID NO: 544680 - DNA, 15 bp, Homo sapiens
gcctctaccccaggg

SEQ ID NO: 544681 - DNA, 15 bp, Homo sapiens
tgcctctaccccagg

SEQ ID NO: 544682 - DNA, 15 bp, Homo sapiens
ttgcctctaccccag

SEQ ID NO: 544683 - DNA, 15 bp, Homo sapiens
tttgcctctacccca

SEQ ID NO: 544684 - DNA, 15 bp, Homo sapiens
ttttgcctctacccc

SEQ ID NO: 544685 - DNA, 15 bp, Homo sapiens
tttttgcctctaccc

SEQ ID NO: 544686 - DNA, 15 bp, Homo sapiens
gtttttgcctctacc

SEQ ID NO: 544687 - DNA, 15 bp, Homo sapiens
ggtttttgcctctac

SEQ ID NO: 544688 - DNA, 15 bp, Homo sapiens
aggtttttgcctcta

SEQ ID NO: 544689 - DNA, 15 bp, Homo sapiens
aaggtttttgcctct

SEQ ID NO: 544690 - DNA, 15 bp, Homo sapiens
gaaggtttttgcctc

SEQ ID NO: 544691 - DNA, 15 bp, Homo sapiens
cgaaggtttttgcct

SEQ ID NO: 544692 - DNA, 15 bp, Homo sapiens
ccgaaggtttttgcc

SEQ ID NO: 544693 - DNA, 15 bp, Homo sapiens
accgaaggtttttgc

SEQ ID NO: 544694 - DNA, 15 bp, Homo sapiens
gaccgaaggtttttg

SEQ ID NO: 544695 - DNA, 15 bp, Homo sapiens
tgaccgaaggttttt

SEQ ID NO: 544696 - DNA, 15 bp, Homo sapiens
atgaccgaaggtttt

SEQ ID NO: 544697 - DNA, 15 bp, Homo sapiens
gatgaccgaaggttt

SEQ ID NO: 544698 - DNA, 15 bp, Homo sapiens
agatgaccgaaggtt

SEQ ID NO: 544699 - DNA, 15 bp, Homo sapiens
aagatgaccgaaggt

SEQ ID NO: 544700 - DNA, 15 bp, Homo sapiens
aaagatgaccgaagg

SEQ ID NO: 544701 - DNA, 15 bp, Homo sapiens
caaagatgaccgaag

SEQ ID NO: 544702 - DNA, 15 bp, Homo sapiens
gcaaagatgaccgaa

SEQ ID NO: 544703 - DNA, 15 bp, Homo sapiens
ggcaaagatgaccga

SEQ ID NO: 544704 - DNA, 15 bp, Homo sapiens
aggcaaagatgaccg

SEQ ID NO: 544705 - DNA, 15 bp, Homo sapiens
caggcaaagatgacc

SEQ ID NO: 544706 - DNA, 15 bp, Homo sapiens
gcaggcaaagatgac

SEQ ID NO: 544707 - DNA, 15 bp, Homo sapiens
tgcaggcaaagatga

SEQ ID NO: 544708 - DNA, 15 bp, Homo sapiens
atgcaggcaaagatg

SEQ ID NO: 544709 - DNA, 15 bp, Homo sapiens
catgcaggcaaagat

SEQ ID NO: 544710 - DNA, 15 bp, Homo sapiens
gcatgcaggcaaaga

SEQ ID NO: 544711 - DNA, 15 bp, Homo sapiens
agcatgcaggcaaag

SEQ ID NO: 544712 - DNA, 15 bp, Homo sapiens
aagcatgcaggcaaa

SEQ ID NO: 544713 - DNA, 15 bp, Homo sapiens
aaagcatgcaggcaa

SEQ ID NO: 544714 - DNA, 15 bp, Homo sapiens
aaaagcatgcaggca

SEQ ID NO: 544715 - DNA, 15 bp, Homo sapiens
aaaaagcatgcaggc

SEQ ID NO: 544716 - DNA, 15 bp, Homo sapiens
aaaaaagcatgcagg

SEQ ID NO: 544717 - DNA, 15 bp, Homo sapiens
gaaaaaagcatgcag

SEQ ID NO: 544718 - DNA, 15 bp, Homo sapiens
ggaaaaaagcatgca

SEQ ID NO: 544719 - DNA, 15 bp, Homo sapiens
aggaaaaaagcatgc

SEQ ID NO: 544720 - DNA, 15 bp, Homo sapiens
caggaaaaaagcatg

SEQ ID NO: 544721 - DNA, 15 bp, Homo sapiens
tcaggaaaaaagcat

SEQ ID NO: 544722 - DNA, 15 bp, Homo sapiens
atcaggaaaaaagca

SEQ ID NO: 544723 - DNA, 15 bp, Homo sapiens
tatcaggaaaaaagc

SEQ ID NO: 544724 - DNA, 15 bp, Homo sapiens
gtatcaggaaaaaag

SEQ ID NO: 544725 - DNA, 15 bp, Homo sapiens
ggtatcaggaaaaaa

SEQ ID NO: 544726 - DNA, 15 bp, Homo sapiens
gggtatcaggaaaaa

SEQ ID NO: 544727 - DNA, 15 bp, Homo sapiens
ggggtatcaggaaaa

SEQ ID NO: 544728 - DNA, 15 bp, Homo sapiens
aggggtatcaggaaa

SEQ ID NO: 544729 - DNA, 15 bp, Homo sapiens
caggggtatcaggaa

SEQ ID NO: 544730 - DNA, 15 bp, Homo sapiens
acaggggtatcagga

SEQ ID NO: 544731 - DNA, 15 bp, Homo sapiens
tacaggggtatcagg

SEQ ID NO: 544732 - DNA, 15 bp, Homo sapiens
atacaggggtatcag

SEQ ID NO: 544733 - DNA, 15 bp, Homo sapiens
gatacaggggtatca

SEQ ID NO: 544734 - DNA, 15 bp, Homo sapiens
agatacaggggtatc

SEQ ID NO: 544735 - DNA, 15 bp, Homo sapiens
cagatacaggggtat

SEQ ID NO: 544736 - DNA, 15 bp, Homo sapiens
gcagatacaggggta

SEQ ID NO: 544737 - DNA, 15 bp, Homo sapiens
agcagatacaggggt

SEQ ID NO: 544738 - DNA, 15 bp, Homo sapiens
cagcagatacagggg

SEQ ID NO: 544739 - DNA, 15 bp, Homo sapiens
tcagcagatacaggg

SEQ ID NO: 544740 - DNA, 15 bp, Homo sapiens
ctcagcagatacagg

SEQ ID NO: 544741 - DNA, 15 bp, Homo sapiens
cctcagcagatacag

SEQ ID NO: 544742 - DNA, 15 bp, Homo sapiens
gcctcagcagataca

SEQ ID NO: 544743 - DNA, 15 bp, Homo sapiens
tgcctcagcagatac

SEQ ID NO: 544744 - DNA, 15 bp, Homo sapiens
ctgcctcagcagata

SEQ ID NO: 544745 - DNA, 15 bp, Homo sapiens
cctgcctcagcagat

SEQ ID NO: 544746 - DNA, 15 bp, Homo sapiens
ccctgcctcagcaga

SEQ ID NO: 544747 - DNA, 15 bp, Homo sapiens
cccctgcctcagcag

SEQ ID NO: 544748 - DNA, 15 bp, Homo sapiens
gcccctgcctcagca

SEQ ID NO: 544749 - DNA, 15 bp, Homo sapiens
agcccctgcctcagc

SEQ ID NO: 544750 - DNA, 15 bp, Homo sapiens
aagcccctgcctcag

SEQ ID NO: 544751 - DNA, 15 bp, Homo sapiens
aaagcccctgcctca

SEQ ID NO: 544752 - DNA, 15 bp, Homo sapiens
gaaagcccctgcctc

SEQ ID NO: 544753 - DNA, 15 bp, Homo sapiens
ggaaagcccctgcct

SEQ ID NO: 544754 - DNA, 15 bp, Homo sapiens
gggaaagcccctgcc

SEQ ID NO: 544755 - DNA, 15 bp, Homo sapiens
tgggaaagcccctgc

SEQ ID NO: 544756 - DNA, 15 bp, Homo sapiens
atgggaaagcccctg

SEQ ID NO: 544757 - DNA, 15 bp, Homo sapiens
gatgggaaagcccct

SEQ ID NO: 544758 - DNA, 15 bp, Homo sapiens
tgatgggaaagcccc

SEQ ID NO: 544759 - DNA, 15 bp, Homo sapiens
gtgatgggaaagccc

SEQ ID NO: 544760 - DNA, 15 bp, Homo sapiens
agtgatgggaaagcc

SEQ ID NO: 544761 - DNA, 15 bp, Homo sapiens
cagtgatgggaaagc

SEQ ID NO: 544762 - DNA, 15 bp, Homo sapiens
acagtgatgggaaag

SEQ ID NO: 544763 - DNA, 15 bp, Homo sapiens
gacagtgatgggaaa

SEQ ID NO: 544764 - DNA, 15 bp, Homo sapiens
tgacagtgatgggaa

SEQ ID NO: 544765 - DNA, 15 bp, Homo sapiens
gtgacagtgatggga

SEQ ID NO: 544766 - DNA, 15 bp, Homo sapiens
agtgacagtgatggg

SEQ ID NO: 544767 - DNA, 15 bp, Homo sapiens
cagtgacagtgatgg

SEQ ID NO: 544768 - DNA, 15 bp, Homo sapiens
gcagtgacagtgatg

SEQ ID NO: 544769 - DNA, 15 bp, Homo sapiens
tgcagtgacagtgat

SEQ ID NO: 544770 - DNA, 15 bp, Homo sapiens
ctgcagtgacagtga

SEQ ID NO: 544771 - DNA, 15 bp, Homo sapiens
gctgcagtgacagtg

SEQ ID NO: 544772 - DNA, 15 bp, Homo sapiens
cgctgcagtgacagt

SEQ ID NO: 544773 - DNA, 15 bp, Homo sapiens
acgctgcagtgacag

SEQ ID NO: 544774 - DNA, 15 bp, Homo sapiens
gacgctgcagtgaca

SEQ ID NO: 544775 - DNA, 15 bp, Homo sapiens
ggacgctgcagtgac

SEQ ID NO: 544776 - DNA, 15 bp, Homo sapiens
gggacgctgcagtga

SEQ ID NO: 544777 - DNA, 15 bp, Homo sapiens
ggggacgctgcagtg

SEQ ID NO: 544778 - DNA, 15 bp, Homo sapiens
cggggacgctgcagt

SEQ ID NO: 544779 - DNA, 15 bp, Homo sapiens
tcggggacgctgcag

SEQ ID NO: 544780 - DNA, 15 bp, Homo sapiens
ctcggggacgctgca

SEQ ID NO: 544781 - DNA, 15 bp, Homo sapiens
cctcggggacgctgc

SEQ ID NO: 544782 - DNA, 15 bp, Homo sapiens
ccctcggggacgctg

SEQ ID NO: 544783 - DNA, 15 bp, Homo sapiens
gccctcggggacgct

SEQ ID NO: 544784 - DNA, 15 bp, Homo sapiens
ggccctcggggacgc

SEQ ID NO: 544785 - DNA, 15 bp, Homo sapiens
tggccctcggggacg

SEQ ID NO: 544786 - DNA, 15 bp, Homo sapiens
atggccctcggggac

SEQ ID NO: 544787 - DNA, 15 bp, Homo sapiens
tatggccctcgggga

SEQ ID NO: 544788 - DNA, 15 bp, Homo sapiens
ctatggccctcgggg

SEQ ID NO: 544789 - DNA, 15 bp, Homo sapiens
gctatggccctcggg

SEQ ID NO: 544790 - DNA, 15 bp, Homo sapiens
tgctatggccctcgg

SEQ ID NO: 544791 - DNA, 15 bp, Homo sapiens
ctgctatggccctcg

SEQ ID NO: 544792 - DNA, 15 bp, Homo sapiens
gctgctatggccctc

SEQ ID NO: 544793 - DNA, 15 bp, Homo sapiens
cgctgctatggccct

SEQ ID NO: 544794 - DNA, 15 bp, Homo sapiens
gcgctgctatggccc

SEQ ID NO: 544795 - DNA, 15 bp, Homo sapiens
ggcgctgctatggcc

SEQ ID NO: 544796 - DNA, 15 bp, Homo sapiens
aggcgctgctatggc

SEQ ID NO: 544797 - DNA, 15 bp, Homo sapiens
caggcgctgctatgg

SEQ ID NO: 544798 - DNA, 15 bp, Homo sapiens
tcaggcgctgctatg

SEQ ID NO: 544799 - DNA, 15 bp, Homo sapiens
ctcaggcgctgctat

SEQ ID NO: 544800 - DNA, 15 bp, Homo sapiens
gctcaggcgctgcta

SEQ ID NO: 544801 - DNA, 15 bp, Homo sapiens
agctcaggcgctgct

SEQ ID NO: 544802 - DNA, 15 bp, Homo sapiens
gagctcaggcgctgc

SEQ ID NO: 544803 - DNA, 15 bp, Homo sapiens
ggagctcaggcgctg

SEQ ID NO: 544804 - DNA, 15 bp, Homo sapiens
aggagctcaggcgct

SEQ ID NO: 544805 - DNA, 15 bp, Homo sapiens
aaggagctcaggcgc

SEQ ID NO: 544806 - DNA, 15 bp, Homo sapiens
caaggagctcaggcg

SEQ ID NO: 544807 - DNA, 15 bp, Homo sapiens
gcaaggagctcaggc

SEQ ID NO: 544808 - DNA, 15 bp, Homo sapiens
ggcaaggagctcagg

SEQ ID NO: 544809 - DNA, 15 bp, Homo sapiens
tggcaaggagctcag

SEQ ID NO: 544810 - DNA, 15 bp, Homo sapiens
gtggcaaggagctca

SEQ ID NO: 544811 - DNA, 15 bp, Homo sapiens
ggtggcaaggagctc

SEQ ID NO: 544812 - DNA, 15 bp, Homo sapiens
gggtggcaaggagct

SEQ ID NO: 544813 - DNA, 15 bp, Homo sapiens
ggggtggcaaggagc

SEQ ID NO: 544814 - DNA, 15 bp, Homo sapiens
aggggtggcaaggag

SEQ ID NO: 544815 - DNA, 15 bp, Homo sapiens
aaggggtggcaagga

SEQ ID NO: 544816 - DNA, 15 bp, Homo sapiens
gaaggggtggcaagg

SEQ ID NO: 544817 - DNA, 15 bp, Homo sapiens
tgaaggggtggcaag

SEQ ID NO: 544818 - DNA, 15 bp, Homo sapiens
ttgaaggggtggcaa

SEQ ID NO: 544819 - DNA, 15 bp, Homo sapiens
gttgaaggggtggca

SEQ ID NO: 544820 - DNA, 15 bp, Homo sapiens
tgttgaaggggtggc

SEQ ID NO: 544821 - DNA, 15 bp, Homo sapiens
gtgttgaaggggtgg

SEQ ID NO: 544822 - DNA, 15 bp, Homo sapiens
ggtgttgaaggggtg

SEQ ID NO: 544823 - DNA, 15 bp, Homo sapiens
tggtgttgaaggggt

SEQ ID NO: 544824 - DNA, 15 bp, Homo sapiens
ctggtgttgaagggg

SEQ ID NO: 544825 - DNA, 15 bp, Homo sapiens
actggtgttgaaggg

SEQ ID NO: 544826 - DNA, 15 bp, Homo sapiens
gactggtgttgaagg

SEQ ID NO: 544827 - DNA, 15 bp, Homo sapiens
tgactggtgttgaag

SEQ ID NO: 544828 - DNA, 15 bp, Homo sapiens
ctgactggtgttgaa

SEQ ID NO: 544829 - DNA, 15 bp, Homo sapiens
cctgactggtgttga

SEQ ID NO: 544830 - DNA, 15 bp, Homo sapiens
acctgactggtgttg

SEQ ID NO: 544831 - DNA, 15 bp, Homo sapiens
aacctgactggtgtt

SEQ ID NO: 544832 - DNA, 15 bp, Homo sapiens
taacctgactggtgt

SEQ ID NO: 544833 - DNA, 15 bp, Homo sapiens
gtaacctgactggtg

SEQ ID NO: 544834 - DNA, 15 bp, Homo sapiens
tgtaacctgactggt

SEQ ID NO: 544835 - DNA, 15 bp, Homo sapiens
ctgtaacctgactgg

SEQ ID NO: 544836 - DNA, 15 bp, Homo sapiens
tctgtaacctgactg

SEQ ID NO: 544837 - DNA, 15 bp, Homo sapiens
ttctgtaacctgact

SEQ ID NO: 544838 - DNA, 15 bp, Homo sapiens
attctgtaacctgac

SEQ ID NO: 544839 - DNA, 15 bp, Homo sapiens
cattctgtaacctga

SEQ ID NO: 544840 - DNA, 15 bp, Homo sapiens
tcattctgtaacctg

SEQ ID NO: 544841 - DNA, 15 bp, Homo sapiens
ttcattctgtaacct

SEQ ID NO: 544842 - DNA, 15 bp, Homo sapiens
attcattctgtaacc

SEQ ID NO: 544843 - DNA, 15 bp, Homo sapiens
cattcattctgtaac

SEQ ID NO: 544844 - DNA, 15 bp, Homo sapiens
tcattcattctgtaa

SEQ ID NO: 544845 - DNA, 15 bp, Homo sapiens
ctcattcattctgta

SEQ ID NO: 544846 - DNA, 15 bp, Homo sapiens
cctcattcattctgt

SEQ ID NO: 544847 - DNA, 15 bp, Homo sapiens
gcctcattcattctg

SEQ ID NO: 544848 - DNA, 15 bp, Homo sapiens
cgcctcattcattct

SEQ ID NO: 544849 - DNA, 15 bp, Homo sapiens
ccgcctcattcattc

SEQ ID NO: 544850 - DNA, 15 bp, Homo sapiens
cccgcctcattcatt

SEQ ID NO: 544851 - DNA, 15 bp, Homo sapiens
gcccgcctcattcat

SEQ ID NO: 544852 - DNA, 15 bp, Homo sapiens
cgcccgcctcattca

SEQ ID NO: 544853 - DNA, 15 bp, Homo sapiens
gcgcccgcctcattc

SEQ ID NO: 544854 - DNA, 15 bp, Homo sapiens
cgcgcccgcctcatt

SEQ ID NO: 544855 - DNA, 15 bp, Homo sapiens
tcgcgcccgcctcat

SEQ ID NO: 544856 - DNA, 15 bp, Homo sapiens
gtcgcgcccgcctca

SEQ ID NO: 544857 - DNA, 15 bp, Homo sapiens
ggtcgcgcccgcctc

SEQ ID NO: 544858 - DNA, 15 bp, Homo sapiens
gggtcgcgcccgcct

SEQ ID NO: 544859 - DNA, 15 bp, Homo sapiens
ggggtcgcgcccgcc

SEQ ID NO: 544860 - DNA, 15 bp, Homo sapiens
gggggtcgcgcccgc

SEQ ID NO: 544861 - DNA, 15 bp, Homo sapiens
tgggggtcgcgcccg

SEQ ID NO: 544862 - DNA, 15 bp, Homo sapiens
ctgggggtcgcgccc

SEQ ID NO: 544863 - DNA, 15 bp, Homo sapiens
gctgggggtcgcgcc

SEQ ID NO: 544864 - DNA, 15 bp, Homo sapiens
ggctgggggtcgcgc

SEQ ID NO: 544865 - DNA, 15 bp, Homo sapiens
gggctgggggtcgcg

SEQ ID NO: 544866 - DNA, 15 bp, Homo sapiens
agggctgggggtcgc

SEQ ID NO: 544867 - DNA, 15 bp, Homo sapiens
cagggctgggggtcg

SEQ ID NO: 544868 - DNA, 15 bp, Homo sapiens
ccagggctgggggtc

SEQ ID NO: 544869 - DNA, 15 bp, Homo sapiens
gccagggctgggggt

SEQ ID NO: 544870 - DNA, 15 bp, Homo sapiens
ggccagggctggggg

SEQ ID NO: 544871 - DNA, 15 bp, Homo sapiens
aggccagggctgggg

SEQ ID NO: 544872 - DNA, 15 bp, Homo sapiens
gaggccagggctggg

SEQ ID NO: 544873 - DNA, 15 bp, Homo sapiens
tgaggccagggctgg

SEQ ID NO: 544874 - DNA, 15 bp, Homo sapiens
ctgaggccagggctg

SEQ ID NO: 544875 - DNA, 15 bp, Homo sapiens
cctgaggccagggct

SEQ ID NO: 544876 - DNA, 15 bp, Homo sapiens
gcctgaggccagggc

SEQ ID NO: 544877 - DNA, 15 bp, Homo sapiens
agcctgaggccaggg

SEQ ID NO: 544878 - DNA, 15 bp, Homo sapiens
gagcctgaggccagg

SEQ ID NO: 544879 - DNA, 15 bp, Homo sapiens
agagcctgaggccag

SEQ ID NO: 544880 - DNA, 15 bp, Homo sapiens
aagagcctgaggcca

SEQ ID NO: 544881 - DNA, 15 bp, Homo sapiens
aaagagcctgaggcc

SEQ ID NO: 544882 - DNA, 15 bp, Homo sapiens
taaagagcctgaggc

SEQ ID NO: 544883 - DNA, 15 bp, Homo sapiens
ctaaagagcctgagg

SEQ ID NO: 544884 - DNA, 15 bp, Homo sapiens
gctaaagagcctgag

SEQ ID NO: 544885 - DNA, 15 bp, Homo sapiens
agctaaagagcctga

SEQ ID NO: 544886 - DNA, 15 bp, Homo sapiens
gagctaaagagcctg

SEQ ID NO: 544887 - DNA, 15 bp, Homo sapiens
tgagctaaagagcct

SEQ ID NO: 544888 - DNA, 15 bp, Homo sapiens
gtgagctaaagagcc

SEQ ID NO: 544889 - DNA, 15 bp, Homo sapiens
ggtgagctaaagagc

SEQ ID NO: 544890 - DNA, 15 bp, Homo sapiens
gggtgagctaaagag

SEQ ID NO: 544891 - DNA, 15 bp, Homo sapiens
ggggtgagctaaaga

SEQ ID NO: 544892 - DNA, 15 bp, Homo sapiens
aggggtgagctaaag

SEQ ID NO: 544893 - DNA, 15 bp, Homo sapiens
caggggtgagctaaa

SEQ ID NO: 544894 - DNA, 15 bp, Homo sapiens
gcaggggtgagctaa

SEQ ID NO: 544895 - DNA, 15 bp, Homo sapiens
ggcaggggtgagcta

SEQ ID NO: 544896 - DNA, 15 bp, Homo sapiens
aggcaggggtgagct

SEQ ID NO: 544897 - DNA, 15 bp, Homo sapiens
gaggcaggggtgagc

SEQ ID NO: 544898 - DNA, 15 bp, Homo sapiens
ggaggcaggggtgag

SEQ ID NO: 544899 - DNA, 15 bp, Homo sapiens
gggaggcaggggtga

SEQ ID NO: 544900 - DNA, 15 bp, Homo sapiens
agggaggcaggggtg

SEQ ID NO: 544901 - DNA, 15 bp, Homo sapiens
gagggaggcaggggt

SEQ ID NO: 544902 - DNA, 15 bp, Homo sapiens
tgagggaggcagggg

SEQ ID NO: 544903 - DNA, 15 bp, Homo sapiens
ctgagggaggcaggg

SEQ ID NO: 544904 - DNA, 15 bp, Homo sapiens
gctgagggaggcagg

SEQ ID NO: 544905 - DNA, 15 bp, Homo sapiens
ggctgagggaggcag

SEQ ID NO: 544906 - DNA, 15 bp, Homo sapiens
tggctgagggaggca

SEQ ID NO: 544907 - DNA, 15 bp, Homo sapiens
ctggctgagggaggc

SEQ ID NO: 544908 - DNA, 15 bp, Homo sapiens
tctggctgagggagg

SEQ ID NO: 544909 - DNA, 15 bp, Homo sapiens
ctctggctgagggag

SEQ ID NO: 544910 - DNA, 15 bp, Homo sapiens
gctctggctgaggga

SEQ ID NO: 544911 - DNA, 15 bp, Homo sapiens
ggctctggctgaggg

SEQ ID NO: 544912 - DNA, 15 bp, Homo sapiens
tggctctggctgagg

SEQ ID NO: 544913 - DNA, 15 bp, Homo sapiens
gtggctctggctgag

SEQ ID NO: 544914 - DNA, 15 bp, Homo sapiens
tgtggctctggctga

SEQ ID NO: 544915 - DNA, 15 bp, Homo sapiens
gtgtggctctggctg

SEQ ID NO: 544916 - DNA, 15 bp, Homo sapiens
tgtgtggctctggct

SEQ ID NO: 544917 - DNA, 15 bp, Homo sapiens
ctgtgtggctctggc

SEQ ID NO: 544918 - DNA, 15 bp, Homo sapiens
actgtgtggctctgg

SEQ ID NO: 544919 - DNA, 15 bp, Homo sapiens
cactgtgtggctctg

SEQ ID NO: 544920 - DNA, 15 bp, Homo sapiens
tcactgtgtggctct

SEQ ID NO: 544921 - DNA, 15 bp, Homo sapiens
ctcactgtgtggctc

SEQ ID NO: 544922 - DNA, 15 bp, Homo sapiens
gctcactgtgtggct

SEQ ID NO: 544923 - DNA, 15 bp, Homo sapiens
ggctcactgtgtggc

SEQ ID NO: 544924 - DNA, 15 bp, Homo sapiens
aggctcactgtgtgg

SEQ ID NO: 544925 - DNA, 15 bp, Homo sapiens
aaggctcactgtgtg

SEQ ID NO: 544926 - DNA, 15 bp, Homo sapiens
caaggctcactgtgt

SEQ ID NO: 544927 - DNA, 15 bp, Homo sapiens
ccaaggctcactgtg

SEQ ID NO: 544928 - DNA, 15 bp, Homo sapiens
cccaaggctcactgt

SEQ ID NO: 544929 - DNA, 15 bp, Homo sapiens
ccccaaggctcactg

SEQ ID NO: 544930 - DNA, 15 bp, Homo sapiens
tccccaaggctcact

SEQ ID NO: 544931 - DNA, 15 bp, Homo sapiens
ctccccaaggctcac

SEQ ID NO: 544932 - DNA, 15 bp, Homo sapiens
gctccccaaggctca

SEQ ID NO: 544933 - DNA, 15 bp, Homo sapiens
ggctccccaaggctc

SEQ ID NO: 544934 - DNA, 15 bp, Homo sapiens
gggctccccaaggct

SEQ ID NO: 544935 - DNA, 15 bp, Homo sapiens
ggggctccccaaggc

SEQ ID NO: 544936 - DNA, 15 bp, Homo sapiens
cggggctccccaagg

SEQ ID NO: 544937 - DNA, 15 bp, Homo sapiens
ccggggctccccaag

SEQ ID NO: 544938 - DNA, 15 bp, Homo sapiens
gccggggctccccaa

SEQ ID NO: 544939 - DNA, 15 bp, Homo sapiens
tgccggggctcccca

SEQ ID NO: 544940 - DNA, 15 bp, Homo sapiens
gtgccggggctcccc

SEQ ID NO: 544941 - DNA, 15 bp, Homo sapiens
ggtgccggggctccc

SEQ ID NO: 544942 - DNA, 15 bp, Homo sapiens
tggtgccggggctcc

SEQ ID NO: 544943 - DNA, 15 bp, Homo sapiens
ctggtgccggggctc

SEQ ID NO: 544944 - DNA, 15 bp, Homo sapiens
cctggtgccggggct

SEQ ID NO: 544945 - DNA, 15 bp, Homo sapiens
ccctggtgccggggc

SEQ ID NO: 544946 - DNA, 15 bp, Homo sapiens
gccctggtgccgggg

SEQ ID NO: 544947 - DNA, 15 bp, Homo sapiens
ggccctggtgccggg

SEQ ID NO: 544948 - DNA, 15 bp, Homo sapiens
tggccctggtgccgg

SEQ ID NO: 544949 - DNA, 15 bp, Homo sapiens
ctggccctggtgccg

SEQ ID NO: 544950 - DNA, 15 bp, Homo sapiens
gctggccctggtgcc

SEQ ID NO: 544951 - DNA, 15 bp, Homo sapiens
ggctggccctggtgc

SEQ ID NO: 544952 - DNA, 15 bp, Homo sapiens
tggctggccctggtg

SEQ ID NO: 544953 - DNA, 15 bp, Homo sapiens
ctggctggccctggt

SEQ ID NO: 544954 - DNA, 15 bp, Homo sapiens
cctggctggccctgg

SEQ ID NO: 544955 - DNA, 15 bp, Homo sapiens
ccctggctggccctg

SEQ ID NO: 544956 - DNA, 15 bp, Homo sapiens
tccctggctggccct

SEQ ID NO: 544957 - DNA, 15 bp, Homo sapiens
atccctggctggccc

SEQ ID NO: 544958 - DNA, 15 bp, Homo sapiens
catccctggctggcc

SEQ ID NO: 544959 - DNA, 15 bp, Homo sapiens
acatccctggctggc

SEQ ID NO: 544960 - DNA, 15 bp, Homo sapiens
gacatccctggctgg

SEQ ID NO: 544961 - DNA, 15 bp, Homo sapiens
tgacatccctggctg

SEQ ID NO: 544962 - DNA, 15 bp, Homo sapiens
gtgacatccctggct

SEQ ID NO: 544963 - DNA, 15 bp, Homo sapiens
ggtgacatccctggc

SEQ ID NO: 544964 - DNA, 15 bp, Homo sapiens
cggtgacatccctgg

SEQ ID NO: 544965 - DNA, 15 bp, Homo sapiens
ccggtgacatccctg

SEQ ID NO: 544966 - DNA, 15 bp, Homo sapiens
gccggtgacatccct

SEQ ID NO: 544967 - DNA, 15 bp, Homo sapiens
agccggtgacatccc

SEQ ID NO: 544968 - DNA, 15 bp, Homo sapiens
cagccggtgacatcc

SEQ ID NO: 544969 - DNA, 15 bp, Homo sapiens
acagccggtgacatc

SEQ ID NO: 544970 - DNA, 15 bp, Homo sapiens
gacagccggtgacat

SEQ ID NO: 544971 - DNA, 15 bp, Homo sapiens
ggacagccggtgaca

SEQ ID NO: 544972 - DNA, 15 bp, Homo sapiens
gggacagccggtgac

SEQ ID NO: 544973 - DNA, 15 bp, Homo sapiens
agggacagccggtga

SEQ ID NO: 544974 - DNA, 15 bp, Homo sapiens
cagggacagccggtg

SEQ ID NO: 544975 - DNA, 15 bp, Homo sapiens
tcagggacagccggt

SEQ ID NO: 544976 - DNA, 15 bp, Homo sapiens
ctcagggacagccgg

SEQ ID NO: 544977 - DNA, 15 bp, Homo sapiens
actcagggacagccg

SEQ ID NO: 544978 - DNA, 15 bp, Homo sapiens
aactcagggacagcc

SEQ ID NO: 544979 - DNA, 15 bp, Homo sapiens
aaactcagggacagc

SEQ ID NO: 544980 - DNA, 15 bp, Homo sapiens
caaactcagggacag

SEQ ID NO: 544981 - DNA, 15 bp, Homo sapiens
acaaactcagggaca

SEQ ID NO: 544982 - DNA, 15 bp, Homo sapiens
cacaaactcagggac

SEQ ID NO: 544983 - DNA, 15 bp, Homo sapiens
gcacaaactcaggga

SEQ ID NO: 544984 - DNA, 15 bp, Homo sapiens
ggcacaaactcaggg

SEQ ID NO: 544985 - DNA, 15 bp, Homo sapiens
aggcacaaactcagg

SEQ ID NO: 544986 - DNA, 15 bp, Homo sapiens
aaggcacaaactcag

SEQ ID NO: 544987 - DNA, 15 bp, Homo sapiens
aaaggcacaaactca

SEQ ID NO: 544988 - DNA, 15 bp, Homo sapiens
aaaaggcacaaactc

SEQ ID NO: 544989 - DNA, 15 bp, Homo sapiens
caaaaggcacaaact

SEQ ID NO: 544990 - DNA, 15 bp, Homo sapiens
ccaaaaggcacaaac

SEQ ID NO: 544991 - DNA, 15 bp, Homo sapiens
cccaaaaggcacaaa

SEQ ID NO: 544992 - DNA, 15 bp, Homo sapiens
tcccaaaaggcacaa

SEQ ID NO: 544993 - DNA, 15 bp, Homo sapiens
ttcccaaaaggcaca

SEQ ID NO: 544994 - DNA, 15 bp, Homo sapiens
tttcccaaaaggcac

SEQ ID NO: 544995 - DNA, 15 bp, Homo sapiens
atttcccaaaaggca

SEQ ID NO: 544996 - DNA, 15 bp, Homo sapiens
gatttcccaaaaggc

SEQ ID NO: 544997 - DNA, 15 bp, Homo sapiens
agatttcccaaaagg

SEQ ID NO: 544998 - DNA, 15 bp, Homo sapiens
aagatttcccaaaag

SEQ ID NO: 544999 - DNA, 15 bp, Homo sapiens
aaagatttcccaaaa

SEQ ID NO: 545000 - DNA, 15 bp, Homo sapiens
caaagatttcccaaa

SEQ ID NO: 545001 - DNA, 15 bp, Homo sapiens
acaaagatttcccaa

SEQ ID NO: 545002 - DNA, 15 bp, Homo sapiens
gacaaagatttccca

SEQ ID NO: 545003 - DNA, 15 bp, Homo sapiens
tgacaaagatttccc

SEQ ID NO: 545004 - DNA, 15 bp, Homo sapiens
ttgacaaagatttcc

SEQ ID NO: 545005 - DNA, 15 bp, Homo sapiens
attgacaaagatttc

SEQ ID NO: 545006 - DNA, 15 bp, Homo sapiens
gattgacaaagattt

SEQ ID NO: 545007 - DNA, 15 bp, Homo sapiens
tgattgacaaagatt

SEQ ID NO: 545008 - DNA, 15 bp, Homo sapiens
ctgattgacaaagat

SEQ ID NO: 545009 - DNA, 15 bp, Homo sapiens
actgattgacaaaga

SEQ ID NO: 545010 - DNA, 15 bp, Homo sapiens
aactgattgacaaag

SEQ ID NO: 545011 - DNA, 15 bp, Homo sapiens
taactgattgacaaa

SEQ ID NO: 545012 - DNA, 15 bp, Homo sapiens
ttaactgattgacaa

SEQ ID NO: 545013 - DNA, 15 bp, Homo sapiens
tttaactgattgaca

SEQ ID NO: 545014 - DNA, 15 bp, Homo sapiens
ttttaactgattgac

SEQ ID NO: 545015 - DNA, 15 bp, Homo sapiens
cttttaactgattga

SEQ ID NO: 545016 - DNA, 15 bp, Homo sapiens
tcttttaactgattg

SEQ ID NO: 545017 - DNA, 15 bp, Homo sapiens
atcttttaactgatt

SEQ ID NO: 545018 - DNA, 15 bp, Homo sapiens
catcttttaactgat

SEQ ID NO: 545019 - DNA, 15 bp, Homo sapiens
ccatcttttaactga

SEQ ID NO: 545020 - DNA, 15 bp, Homo sapiens
cccatcttttaactg

SEQ ID NO: 545021 - DNA, 15 bp, Homo sapiens
ccccatcttttaact

SEQ ID NO: 545022 - DNA, 15 bp, Homo sapiens
cccccatcttttaac

SEQ ID NO: 545023 - DNA, 15 bp, Homo sapiens
acccccatcttttaa

SEQ ID NO: 545024 - DNA, 15 bp, Homo sapiens
aacccccatctttta

SEQ ID NO: 545025 - DNA, 15 bp, Homo sapiens
caacccccatctttt

SEQ ID NO: 545026 - DNA, 15 bp, Homo sapiens
tcaacccccatcttt

SEQ ID NO: 545027 - DNA, 15 bp, Homo sapiens
atcaacccccatctt

SEQ ID NO: 545028 - DNA, 15 bp, Homo sapiens
catcaacccccatct

SEQ ID NO: 545029 - DNA, 15 bp, Homo sapiens
ccatcaacccccatc

SEQ ID NO: 545030 - DNA, 15 bp, Homo sapiens
cccatcaacccccat

SEQ ID NO: 545031 - DNA, 15 bp, Homo sapiens
tcccatcaaccccca

SEQ ID NO: 545032 - DNA, 15 bp, Homo sapiens
ctcccatcaaccccc

SEQ ID NO: 545033 - DNA, 15 bp, Homo sapiens
tctcccatcaacccc

SEQ ID NO: 545034 - DNA, 15 bp, Homo sapiens
atctcccatcaaccc

SEQ ID NO: 545035 - DNA, 15 bp, Homo sapiens
tatctcccatcaacc

SEQ ID NO: 545036 - DNA, 15 bp, Homo sapiens
ttatctcccatcaac

SEQ ID NO: 545037 - DNA, 15 bp, Homo sapiens
gttatctcccatcaa

SEQ ID NO: 545038 - DNA, 15 bp, Homo sapiens
tgttatctcccatca

SEQ ID NO: 545039 - DNA, 15 bp, Homo sapiens
ctgttatctcccatc

SEQ ID NO: 545040 - DNA, 15 bp, Homo sapiens
actgttatctcccat

SEQ ID NO: 545041 - DNA, 15 bp, Homo sapiens
gactgttatctccca

SEQ ID NO: 545042 - DNA, 15 bp, Homo sapiens
tgactgttatctccc

SEQ ID NO: 545043 - DNA, 15 bp, Homo sapiens
ttgactgttatctcc

SEQ ID NO: 545044 - DNA, 15 bp, Homo sapiens
attgactgttatctc

SEQ ID NO: 545045 - DNA, 15 bp, Homo sapiens
cattgactgttatct

SEQ ID NO: 545046 - DNA, 15 bp, Homo sapiens
ccattgactgttatc

SEQ ID NO: 545047 - DNA, 15 bp, Homo sapiens
cccattgactgttat

SEQ ID NO: 545048 - DNA, 15 bp, Homo sapiens
gcccattgactgtta

SEQ ID NO: 545049 - DNA, 15 bp, Homo sapiens
tgcccattgactgtt

SEQ ID NO: 545050 - DNA, 15 bp, Homo sapiens
gtgcccattgactgt

SEQ ID NO: 545051 - DNA, 15 bp, Homo sapiens
agtgcccattgactg

SEQ ID NO: 545052 - DNA, 15 bp, Homo sapiens
gagtgcccattgact

SEQ ID NO: 545053 - DNA, 15 bp, Homo sapiens
cgagtgcccattgac

SEQ ID NO: 545054 - DNA, 15 bp, Homo sapiens
acgagtgcccattga

SEQ ID NO: 545055 - DNA, 15 bp, Homo sapiens
aacgagtgcccattg

SEQ ID NO: 545056 - DNA, 15 bp, Homo sapiens
caacgagtgcccatt

SEQ ID NO: 545057 - DNA, 15 bp, Homo sapiens
acaacgagtgcccat

SEQ ID NO: 545058 - DNA, 15 bp, Homo sapiens
cacaacgagtgccca

SEQ ID NO: 545059 - DNA, 15 bp, Homo sapiens
ccacaacgagtgccc

SEQ ID NO: 545060 - DNA, 15 bp, Homo sapiens
gccacaacgagtgcc

SEQ ID NO: 545061 - DNA, 15 bp, Homo sapiens
ggccacaacgagtgc

SEQ ID NO: 545062 - DNA, 15 bp, Homo sapiens
cggccacaacgagtg

SEQ ID NO: 545063 - DNA, 15 bp, Homo sapiens
ccggccacaacgagt

SEQ ID NO: 545064 - DNA, 15 bp, Homo sapiens
tccggccacaacgag

SEQ ID NO: 545065 - DNA, 15 bp, Homo sapiens
atccggccacaacga

SEQ ID NO: 545066 - DNA, 15 bp, Homo sapiens
tatccggccacaacg

SEQ ID NO: 545067 - DNA, 15 bp, Homo sapiens
gtatccggccacaac

SEQ ID NO: 545068 - DNA, 15 bp, Homo sapiens
agtatccggccacaa

SEQ ID NO: 545069 - DNA, 15 bp, Homo sapiens
cagtatccggccaca

SEQ ID NO: 545070 - DNA, 15 bp, Homo sapiens
acagtatccggccac

SEQ ID NO: 545071 - DNA, 15 bp, Homo sapiens
aacagtatccggcca

SEQ ID NO: 545072 - DNA, 15 bp, Homo sapiens
gaacagtatccggcc

SEQ ID NO: 545073 - DNA, 15 bp, Homo sapiens
ggaacagtatccggc

SEQ ID NO: 545074 - DNA, 15 bp, Homo sapiens
tggaacagtatccgg

SEQ ID NO: 545075 - DNA, 15 bp, Homo sapiens
ttggaacagtatccg

SEQ ID NO: 545076 - DNA, 15 bp, Homo sapiens
cttggaacagtatcc

SEQ ID NO: 545077 - DNA, 15 bp, Homo sapiens
acttggaacagtatc

SEQ ID NO: 545078 - DNA, 15 bp, Homo sapiens
cacttggaacagtat

SEQ ID NO: 545079 - DNA, 15 bp, Homo sapiens
acacttggaacagta

SEQ ID NO: 545080 - DNA, 15 bp, Homo sapiens
aacacttggaacagt

SEQ ID NO: 545081 - DNA, 15 bp, Homo sapiens
aaacacttggaacag

SEQ ID NO: 545082 - DNA, 15 bp, Homo sapiens
taaacacttggaaca

SEQ ID NO: 545083 - DNA, 15 bp, Homo sapiens
ataaacacttggaac

SEQ ID NO: 545084 - DNA, 15 bp, Homo sapiens
cataaacacttggaa

SEQ ID NO: 545085 - DNA, 15 bp, Homo sapiens
acataaacacttgga

SEQ ID NO: 545086 - DNA, 15 bp, Homo sapiens
cacataaacacttgg

SEQ ID NO: 545087 - DNA, 15 bp, Homo sapiens
gcacataaacacttg

SEQ ID NO: 545088 - DNA, 15 bp, Homo sapiens
tgcacataaacactt

SEQ ID NO: 545089 - DNA, 15 bp, Homo sapiens
atgcacataaacact

SEQ ID NO: 545090 - DNA, 15 bp, Homo sapiens
aatgcacataaacac

SEQ ID NO: 545091 - DNA, 15 bp, Homo sapiens
taatgcacataaaca

SEQ ID NO: 545092 - DNA, 15 bp, Homo sapiens
ataatgcacataaac

SEQ ID NO: 545093 - DNA, 15 bp, Homo sapiens
aataatgcacataaa

SEQ ID NO: 545094 - DNA, 15 bp, Homo sapiens
gaataatgcacataa

SEQ ID NO: 545095 - DNA, 15 bp, Homo sapiens
tgaataatgcacata

SEQ ID NO: 545096 - DNA, 15 bp, Homo sapiens
atgaataatgcacat

SEQ ID NO: 545097 - DNA, 15 bp, Homo sapiens
aatgaataatgcaca

SEQ ID NO: 545098 - DNA, 15 bp, Homo sapiens
aaatgaataatgcac

SEQ ID NO: 545099 - DNA, 15 bp, Homo sapiens
aaaatgaataatgca

SEQ ID NO: 545100 - DNA, 15 bp, Homo sapiens
taaaatgaataatgc

SEQ ID NO: 545101 - DNA, 15 bp, Homo sapiens
ctaaaatgaataatg

SEQ ID NO: 545102 - DNA, 15 bp, Homo sapiens
actaaaatgaataat

SEQ ID NO: 545103 - DNA, 15 bp, Homo sapiens
tactaaaatgaataa

SEQ ID NO: 545104 - DNA, 15 bp, Homo sapiens
atactaaaatgaata

SEQ ID NO: 545105 - DNA, 15 bp, Homo sapiens
gatactaaaatgaat

SEQ ID NO: 545106 - DNA, 15 bp, Homo sapiens
agatactaaaatgaa

SEQ ID NO: 545107 - DNA, 15 bp, Homo sapiens
tagatactaaaatga

SEQ ID NO: 545108 - DNA, 15 bp, Homo sapiens
ttagatactaaaatg

SEQ ID NO: 545109 - DNA, 15 bp, Homo sapiens
tttagatactaaaat

SEQ ID NO: 545110 - DNA, 15 bp, Homo sapiens
ttttagatactaaaa

SEQ ID NO: 545111 - DNA, 15 bp, Homo sapiens
attttagatactaaa

SEQ ID NO: 545112 - DNA, 15 bp, Homo sapiens
tattttagatactaa

SEQ ID NO: 545113 - DNA, 15 bp, Homo sapiens
ctattttagatacta

SEQ ID NO: 545114 - DNA, 15 bp, Homo sapiens
cctattttagatact

SEQ ID NO: 545115 - DNA, 15 bp, Homo sapiens
acctattttagatac

SEQ ID NO: 545116 - DNA, 15 bp, Homo sapiens
tacctattttagata

SEQ ID NO: 545117 - DNA, 15 bp, Homo sapiens
gtacctattttagat

SEQ ID NO: 545118 - DNA, 15 bp, Homo sapiens
agtacctattttaga

SEQ ID NO: 545119 - DNA, 15 bp, Homo sapiens
tagtacctattttag

SEQ ID NO: 545120 - DNA, 15 bp, Homo sapiens
atagtacctatttta

SEQ ID NO: 545121 - DNA, 15 bp, Homo sapiens
aatagtacctatttt

SEQ ID NO: 545122 - DNA, 15 bp, Homo sapiens
caatagtacctattt

SEQ ID NO: 545123 - DNA, 15 bp, Homo sapiens
acaatagtacctatt

SEQ ID NO: 545124 - DNA, 15 bp, Homo sapiens
cacaatagtacctat

SEQ ID NO: 545125 - DNA, 15 bp, Homo sapiens
acacaatagtaccta

SEQ ID NO: 545126 - DNA, 15 bp, Homo sapiens
gacacaatagtacct

SEQ ID NO: 545127 - DNA, 15 bp, Homo sapiens
agacacaatagtacc

SEQ ID NO: 545128 - DNA, 15 bp, Homo sapiens
aagacacaatagtac

SEQ ID NO: 545129 - DNA, 15 bp, Homo sapiens
taagacacaatagta

SEQ ID NO: 545130 - DNA, 15 bp, Homo sapiens
ataagacacaatagt

SEQ ID NO: 545131 - DNA, 15 bp, Homo sapiens
aataagacacaatag

SEQ ID NO: 545132 - DNA, 15 bp, Homo sapiens
aaataagacacaata

SEQ ID NO: 545133 - DNA, 15 bp, Homo sapiens
aaaataagacacaat

SEQ ID NO: 545134 - DNA, 15 bp, Homo sapiens
taaaataagacacaa

SEQ ID NO: 545135 - DNA, 15 bp, Homo sapiens
ataaaataagacaca

SEQ ID NO: 545136 - DNA, 15 bp, Homo sapiens
aataaaataagacac

SEQ ID NO: 545137 - DNA, 15 bp, Homo sapiens
caataaaataagaca

SEQ ID NO: 545138 - DNA, 15 bp, Homo sapiens
tcaataaaataagac

SEQ ID NO: 545139 - DNA, 15 bp, Homo sapiens
ctcaataaaataaga

SEQ ID NO: 545140 - DNA, 15 bp, Homo sapiens
cctcaataaaataag

SEQ ID NO: 545141 - DNA, 15 bp, Homo sapiens
ccctcaataaaataa

SEQ ID NO: 545142 - DNA, 15 bp, Homo sapiens
tccctcaataaaata

SEQ ID NO: 545143 - DNA, 15 bp, Homo sapiens
ttccctcaataaaat

SEQ ID NO: 545144 - DNA, 15 bp, Homo sapiens
tttccctcaataaaa

SEQ ID NO: 545145 - DNA, 15 bp, Homo sapiens
atttccctcaataaa

SEQ ID NO: 545146 - DNA, 15 bp, Homo sapiens
catttccctcaataa

SEQ ID NO: 545147 - DNA, 15 bp, Homo sapiens
ccatttccctcaata

SEQ ID NO: 545148 - DNA, 15 bp, Homo sapiens
tccatttccctcaat

SEQ ID NO: 545149 - DNA, 15 bp, Homo sapiens
atccatttccctcaa

SEQ ID NO: 545150 - DNA, 15 bp, Homo sapiens
catccatttccctca

SEQ ID NO: 545151 - DNA, 15 bp, Homo sapiens
gcatccatttccctc

SEQ ID NO: 545152 - DNA, 15 bp, Homo sapiens
tgcatccatttccct

SEQ ID NO: 545153 - DNA, 15 bp, Homo sapiens
gtgcatccatttccc

SEQ ID NO: 545154 - DNA, 15 bp, Homo sapiens
tgtgcatccatttcc

SEQ ID NO: 545155 - DNA, 15 bp, Homo sapiens
ctgtgcatccatttc

SEQ ID NO: 545156 - DNA, 15 bp, Homo sapiens
tctgtgcatccattt

SEQ ID NO: 545157 - DNA, 15 bp, Homo sapiens
ctctgtgcatccatt

SEQ ID NO: 545158 - DNA, 15 bp, Homo sapiens
cctctgtgcatccat

SEQ ID NO: 545159 - DNA, 15 bp, Homo sapiens
gcctctgtgcatcca

SEQ ID NO: 545160 - DNA, 15 bp, Homo sapiens
cgcctctgtgcatcc

SEQ ID NO: 545161 - DNA, 15 bp, Homo sapiens
ccgcctctgtgcatc

SEQ ID NO: 545162 - DNA, 15 bp, Homo sapiens
tccgcctctgtgcat

SEQ ID NO: 545163 - DNA, 15 bp, Homo sapiens
ttccgcctctgtgca

SEQ ID NO: 545164 - DNA, 15 bp, Homo sapiens
tttccgcctctgtgc

SEQ ID NO: 545165 - DNA, 15 bp, Homo sapiens
ctttccgcctctgtg

SEQ ID NO: 545166 - DNA, 15 bp, Homo sapiens
actttccgcctctgt

SEQ ID NO: 545167 - DNA, 15 bp, Homo sapiens
tactttccgcctctg

SEQ ID NO: 545168 - DNA, 15 bp, Homo sapiens
ttactttccgcctct

SEQ ID NO: 545169 - DNA, 15 bp, Homo sapiens
gttactttccgcctc

SEQ ID NO: 545170 - DNA, 15 bp, Homo sapiens
agttactttccgcct

SEQ ID NO: 545171 - DNA, 15 bp, Homo sapiens
aagttactttccgcc

SEQ ID NO: 545172 - DNA, 15 bp, Homo sapiens
caagttactttccgc

SEQ ID NO: 545173 - DNA, 15 bp, Homo sapiens
gcaagttactttccg

SEQ ID NO: 545174 - DNA, 15 bp, Homo sapiens
ggcaagttactttcc

SEQ ID NO: 545175 - DNA, 15 bp, Homo sapiens
gggcaagttactttc

SEQ ID NO: 545176 - DNA, 15 bp, Homo sapiens
ggggcaagttacttt

SEQ ID NO: 545177 - DNA, 15 bp, Homo sapiens
tggggcaagttactt

SEQ ID NO: 545178 - DNA, 15 bp, Homo sapiens
atggggcaagttact

SEQ ID NO: 545179 - DNA, 15 bp, Homo sapiens
catggggcaagttac

SEQ ID NO: 545180 - DNA, 15 bp, Homo sapiens
acatggggcaagtta

SEQ ID NO: 545181 - DNA, 15 bp, Homo sapiens
gacatggggcaagtt

SEQ ID NO: 545182 - DNA, 15 bp, Homo sapiens
tgacatggggcaagt

SEQ ID NO: 545183 - DNA, 15 bp, Homo sapiens
gtgacatggggcaag

SEQ ID NO: 545184 - DNA, 15 bp, Homo sapiens
tgtgacatggggcaa

SEQ ID NO: 545185 - DNA, 15 bp, Homo sapiens
atgtgacatggggca

SEQ ID NO: 545186 - DNA, 15 bp, Homo sapiens
tatgtgacatggggc

SEQ ID NO: 545187 - DNA, 15 bp, Homo sapiens
ctatgtgacatgggg

SEQ ID NO: 545188 - DNA, 15 bp, Homo sapiens
gctatgtgacatggg

SEQ ID NO: 545189 - DNA, 15 bp, Homo sapiens
agctatgtgacatgg

SEQ ID NO: 545190 - DNA, 15 bp, Homo sapiens
gagctatgtgacatg

SEQ ID NO: 545191 - DNA, 15 bp, Homo sapiens
ggagctatgtgacat

SEQ ID NO: 545192 - DNA, 15 bp, Homo sapiens
tggagctatgtgaca

SEQ ID NO: 545193 - DNA, 15 bp, Homo sapiens
ttggagctatgtgac

SEQ ID NO: 545194 - DNA, 15 bp, Homo sapiens
cttggagctatgtga

SEQ ID NO: 545195 - DNA, 15 bp, Homo sapiens
gcttggagctatgtg

SEQ ID NO: 545196 - DNA, 15 bp, Homo sapiens
cgcttggagctatgt

SEQ ID NO: 545197 - DNA, 15 bp, Homo sapiens
ccgcttggagctatg

SEQ ID NO: 545198 - DNA, 15 bp, Homo sapiens
accgcttggagctat

SEQ ID NO: 545199 - DNA, 15 bp, Homo sapiens
aaccgcttggagcta

SEQ ID NO: 545200 - DNA, 15 bp, Homo sapiens
caaccgcttggagct

SEQ ID NO: 545201 - DNA, 15 bp, Homo sapiens
tcaaccgcttggagc

SEQ ID NO: 545202 - DNA, 15 bp, Homo sapiens
ttcaaccgcttggag

SEQ ID NO: 545203 - DNA, 15 bp, Homo sapiens
attcaaccgcttgga

SEQ ID NO: 545204 - DNA, 15 bp, Homo sapiens
gattcaaccgcttgg

SEQ ID NO: 545205 - DNA, 15 bp, Homo sapiens
tgattcaaccgcttg

SEQ ID NO: 545206 - DNA, 15 bp, Homo sapiens
ctgattcaaccgctt

SEQ ID NO: 545207 - DNA, 15 bp, Homo sapiens
cctgattcaaccgct

SEQ ID NO: 545208 - DNA, 15 bp, Homo sapiens
tcctgattcaaccgc

SEQ ID NO: 545209 - DNA, 15 bp, Homo sapiens
atcctgattcaaccg

SEQ ID NO: 545210 - DNA, 15 bp, Homo sapiens
aatcctgattcaacc

SEQ ID NO: 545211 - DNA, 15 bp, Homo sapiens
aaatcctgattcaac

SEQ ID NO: 545212 - DNA, 15 bp, Homo sapiens
gaaatcctgattcaa

SEQ ID NO: 545213 - DNA, 15 bp, Homo sapiens
tgaaatcctgattca

SEQ ID NO: 545214 - DNA, 15 bp, Homo sapiens
ttgaaatcctgattc

SEQ ID NO: 545215 - DNA, 15 bp, Homo sapiens
cttgaaatcctgatt

SEQ ID NO: 545216 - DNA, 15 bp, Homo sapiens
acttgaaatcctgat

SEQ ID NO: 545217 - DNA, 15 bp, Homo sapiens
gacttgaaatcctga

SEQ ID NO: 545218 - DNA, 15 bp, Homo sapiens
agacttgaaatcctg

SEQ ID NO: 545219 - DNA, 15 bp, Homo sapiens
cagacttgaaatcct

SEQ ID NO: 545220 - DNA, 15 bp, Homo sapiens
ccagacttgaaatcc

SEQ ID NO: 545221 - DNA, 15 bp, Homo sapiens
cccagacttgaaatc

SEQ ID NO: 545222 - DNA, 15 bp, Homo sapiens
ccccagacttgaaat

SEQ ID NO: 545223 - DNA, 15 bp, Homo sapiens
cccccagacttgaaa

SEQ ID NO: 545224 - DNA, 15 bp, Homo sapiens
gcccccagacttgaa

SEQ ID NO: 545225 - DNA, 15 bp, Homo sapiens
tgtttttgtttctct

SEQ ID NO: 545226 - DNA, 15 bp, Homo sapiens
ttgtttttgtttctc

SEQ ID NO: 545227 - DNA, 15 bp, Homo sapiens
gttgtttttgtttct

SEQ ID NO: 545228 - DNA, 15 bp, Homo sapiens
tgttgtttttgtttc

SEQ ID NO: 545229 - DNA, 15 bp, Homo sapiens
gtgttgtttttgttt

SEQ ID NO: 545230 - DNA, 15 bp, Homo sapiens
tgtgttgtttttgtt

SEQ ID NO: 545231 - DNA, 15 bp, Homo sapiens
ttgtgttgtttttgt

SEQ ID NO: 545232 - DNA, 15 bp, Homo sapiens
tttgtgttgtttttg

SEQ ID NO: 545233 - DNA, 15 bp, Homo sapiens
ttttgtgttgttttt

SEQ ID NO: 545234 - DNA, 15 bp, Homo sapiens
tttttgtgttgtttt

SEQ ID NO: 545235 - DNA, 15 bp, Homo sapiens
ctttttgtgttgttt

SEQ ID NO: 545236 - DNA, 15 bp, Homo sapiens
gctttttgtgttgtt

SEQ ID NO: 545237 - DNA, 15 bp, Homo sapiens
agctttttgtgttgt

SEQ ID NO: 545238 - DNA, 15 bp, Homo sapiens
cagctttttgtgttg

SEQ ID NO: 545239 - DNA, 15 bp, Homo sapiens
gcagctttttgtgtt

SEQ ID NO: 545240 - DNA, 15 bp, Homo sapiens
cgcagctttttgtgt

SEQ ID NO: 545241 - DNA, 15 bp, Homo sapiens
acgcagctttttgtg

SEQ ID NO: 545242 - DNA, 15 bp, Homo sapiens
aacgcagctttttgt

SEQ ID NO: 545243 - DNA, 15 bp, Homo sapiens
gaacgcagctttttg

SEQ ID NO: 545244 - DNA, 15 bp, Homo sapiens
agaacgcagcttttt

SEQ ID NO: 545245 - DNA, 15 bp, Homo sapiens
aagaacgcagctttt

SEQ ID NO: 545246 - DNA, 15 bp, Homo sapiens
caagaacgcagcttt

SEQ ID NO: 545247 - DNA, 15 bp, Homo sapiens
tcaagaacgcagctt

SEQ ID NO: 545248 - DNA, 15 bp, Homo sapiens
gtcaagaacgcagct

SEQ ID NO: 545249 - DNA, 15 bp, Homo sapiens
agtcaagaacgcagc

SEQ ID NO: 545250 - DNA, 15 bp, Homo sapiens
aagtcaagaacgcag

SEQ ID NO: 545251 - DNA, 15 bp, Homo sapiens
aaagtcaagaacgca

SEQ ID NO: 545252 - DNA, 15 bp, Homo sapiens
caaagtcaagaacgc

SEQ ID NO: 545253 - DNA, 15 bp, Homo sapiens
tcaaagtcaagaacg

SEQ ID NO: 545254 - DNA, 15 bp, Homo sapiens
ttcaaagtcaagaac

SEQ ID NO: 545255 - DNA, 15 bp, Homo sapiens
cttcaaagtcaagaa

SEQ ID NO: 545256 - DNA, 15 bp, Homo sapiens
gcttcaaagtcaaga

SEQ ID NO: 545257 - DNA, 15 bp, Homo sapiens
ggcttcaaagtcaag

SEQ ID NO: 545258 - DNA, 15 bp, Homo sapiens
aggcttcaaagtcaa

SEQ ID NO: 545259 - DNA, 15 bp, Homo sapiens
aaggcttcaaagtca

SEQ ID NO: 545260 - DNA, 15 bp, Homo sapiens
taaggcttcaaagtc

SEQ ID NO: 545261 - DNA, 15 bp, Homo sapiens
ttaaggcttcaaagt

SEQ ID NO: 545262 - DNA, 15 bp, Homo sapiens
tttaaggcttcaaag

SEQ ID NO: 545263 - DNA, 15 bp, Homo sapiens
ctttaaggcttcaaa

SEQ ID NO: 545264 - DNA, 15 bp, Homo sapiens
cctttaaggcttcaa

SEQ ID NO: 545265 - DNA, 15 bp, Homo sapiens
ccctttaaggcttca

SEQ ID NO: 545266 - DNA, 15 bp, Homo sapiens
gccctttaaggcttc

SEQ ID NO: 545267 - DNA, 15 bp, Homo sapiens
ggccctttaaggctt

SEQ ID NO: 545268 - DNA, 15 bp, Homo sapiens
gggccctttaaggct

SEQ ID NO: 545269 - DNA, 15 bp, Homo sapiens
tgggccctttaaggc

SEQ ID NO: 545270 - DNA, 15 bp, Homo sapiens
ctgggccctttaagg

SEQ ID NO: 545271 - DNA, 15 bp, Homo sapiens
cctgggccctttaag

SEQ ID NO: 545272 - DNA, 15 bp, Homo sapiens
ccctgggccctttaa

SEQ ID NO: 545273 - DNA, 15 bp, Homo sapiens
cccctgggcccttta

SEQ ID NO: 545274 - DNA, 15 bp, Homo sapiens
gcccctgggcccttt

SEQ ID NO: 545275 - DNA, 15 bp, Homo sapiens
agcccctgggccctt

SEQ ID NO: 545276 - DNA, 15 bp, Homo sapiens
cagcccctgggccct

SEQ ID NO: 545277 - DNA, 15 bp, Homo sapiens
ccagcccctgggccc

SEQ ID NO: 545278 - DNA, 15 bp, Homo sapiens
gccagcccctgggcc

SEQ ID NO: 545279 - DNA, 15 bp, Homo sapiens
agccagcccctgggc

SEQ ID NO: 545280 - DNA, 15 bp, Homo sapiens
gagccagcccctggg

SEQ ID NO: 545281 - DNA, 15 bp, Homo sapiens
ggagccagcccctgg

SEQ ID NO: 545282 - DNA, 15 bp, Homo sapiens
gggagccagcccctg

SEQ ID NO: 545283 - DNA, 15 bp, Homo sapiens
agggagccagcccct

SEQ ID NO: 545284 - DNA, 15 bp, Homo sapiens
cagggagccagcccc

SEQ ID NO: 545285 - DNA, 15 bp, Homo sapiens
acagggagccagccc

SEQ ID NO: 545286 - DNA, 15 bp, Homo sapiens
cacagggagccagcc

SEQ ID NO: 545287 - DNA, 15 bp, Homo sapiens
ccacagggagccagc

SEQ ID NO: 545288 - DNA, 15 bp, Homo sapiens
cccacagggagccag

SEQ ID NO: 545289 - DNA, 15 bp, Homo sapiens
acccacagggagcca

SEQ ID NO: 545290 - DNA, 15 bp, Homo sapiens
cacccacagggagcc

SEQ ID NO: 545291 - DNA, 15 bp, Homo sapiens
acacccacagggagc

SEQ ID NO: 545292 - DNA, 15 bp, Homo sapiens
aacacccacagggag

SEQ ID NO: 545293 - DNA, 15 bp, Homo sapiens
caacacccacaggga

SEQ ID NO: 545294 - DNA, 15 bp, Homo sapiens
ccaacacccacaggg

SEQ ID NO: 545295 - DNA, 15 bp, Homo sapiens
cccaacacccacagg

SEQ ID NO: 545296 - DNA, 15 bp, Homo sapiens
ccccaacacccacag

SEQ ID NO: 545297 - DNA, 15 bp, Homo sapiens
cccccaacacccaca

SEQ ID NO: 545298 - DNA, 15 bp, Homo sapiens
gcccccaacacccac

SEQ ID NO: 545299 - DNA, 15 bp, Homo sapiens
cgcccccaacaccca

SEQ ID NO: 545300 - DNA, 15 bp, Homo sapiens
tcgcccccaacaccc

SEQ ID NO: 545301 - DNA, 15 bp, Homo sapiens
atcgcccccaacacc

SEQ ID NO: 545302 - DNA, 15 bp, Homo sapiens
aatcgcccccaacac

SEQ ID NO: 545303 - DNA, 15 bp, Homo sapiens
aaatcgcccccaaca

SEQ ID NO: 545304 - DNA, 15 bp, Homo sapiens
aaaatcgcccccaac

SEQ ID NO: 545305 - DNA, 15 bp, Homo sapiens
gaaaatcgcccccaa

SEQ ID NO: 545306 - DNA, 15 bp, Homo sapiens
ggaaaatcgccccca

SEQ ID NO: 545307 - DNA, 15 bp, Homo sapiens
aggaaaatcgccccc

SEQ ID NO: 545308 - DNA, 15 bp, Homo sapiens
gaggaaaatcgcccc

SEQ ID NO: 545309 - DNA, 15 bp, Homo sapiens
ggaggaaaatcgccc

SEQ ID NO: 545310 - DNA, 15 bp, Homo sapiens
gggaggaaaatcgcc

SEQ ID NO: 545311 - DNA, 15 bp, Homo sapiens
tgggaggaaaatcgc

SEQ ID NO: 545312 - DNA, 15 bp, Homo sapiens
ttgggaggaaaatcg

SEQ ID NO: 545313 - DNA, 15 bp, Homo sapiens
tttgggaggaaaatc

SEQ ID NO: 545314 - DNA, 15 bp, Homo sapiens
ctttgggaggaaaat

SEQ ID NO: 545315 - DNA, 15 bp, Homo sapiens
gctttgggaggaaaa

SEQ ID NO: 545316 - DNA, 15 bp, Homo sapiens
ggctttgggaggaaa

SEQ ID NO: 545317 - DNA, 15 bp, Homo sapiens
aggctttgggaggaa

SEQ ID NO: 545318 - DNA, 15 bp, Homo sapiens
caggctttgggagga

SEQ ID NO: 545319 - DNA, 15 bp, Homo sapiens
gcaggctttgggagg

SEQ ID NO: 545320 - DNA, 15 bp, Homo sapiens
cgcaggctttgggag

SEQ ID NO: 545321 - DNA, 15 bp, Homo sapiens
acgcaggctttggga

SEQ ID NO: 545322 - DNA, 15 bp, Homo sapiens
cacgcaggctttggg

SEQ ID NO: 545323 - DNA, 15 bp, Homo sapiens
tcacgcaggctttgg

SEQ ID NO: 545324 - DNA, 15 bp, Homo sapiens
ctcacgcaggctttg

SEQ ID NO: 545325 - DNA, 15 bp, Homo sapiens
tctcacgcaggcttt

SEQ ID NO: 545326 - DNA, 15 bp, Homo sapiens
atctcacgcaggctt

SEQ ID NO: 545327 - DNA, 15 bp, Homo sapiens
tatctcacgcaggct

SEQ ID NO: 545328 - DNA, 15 bp, Homo sapiens
atatctcacgcaggc

SEQ ID NO: 545329 - DNA, 15 bp, Homo sapiens
catatctcacgcagg

SEQ ID NO: 545330 - DNA, 15 bp, Homo sapiens
ccatatctcacgcag

SEQ ID NO: 545331 - DNA, 15 bp, Homo sapiens
tccatatctcacgca

SEQ ID NO: 545332 - DNA, 15 bp, Homo sapiens
ctccatatctcacgc

SEQ ID NO: 545333 - DNA, 15 bp, Homo sapiens
tctccatatctcacg

SEQ ID NO: 545334 - DNA, 15 bp, Homo sapiens
gtctccatatctcac

SEQ ID NO: 545335 - DNA, 15 bp, Homo sapiens
tgtctccatatctca

SEQ ID NO: 545336 - DNA, 15 bp, Homo sapiens
gtgtctccatatctc

SEQ ID NO: 545337 - DNA, 15 bp, Homo sapiens
agtgtctccatatct

SEQ ID NO: 545338 - DNA, 15 bp, Homo sapiens
gagtgtctccatatc

SEQ ID NO: 545339 - DNA, 15 bp, Homo sapiens
ggagtgtctccatat

SEQ ID NO: 545340 - DNA, 15 bp, Homo sapiens
cggagtgtctccata

SEQ ID NO: 545341 - DNA, 15 bp, Homo sapiens
gcggagtgtctccat

SEQ ID NO: 545342 - DNA, 15 bp, Homo sapiens
ggcggagtgtctcca

SEQ ID NO: 545343 - DNA, 15 bp, Homo sapiens
aggcggagtgtctcc

SEQ ID NO: 545344 - DNA, 15 bp, Homo sapiens
caggcggagtgtctc

SEQ ID NO: 545345 - DNA, 15 bp, Homo sapiens
gcaggcggagtgtct

SEQ ID NO: 545346 - DNA, 15 bp, Homo sapiens
agcaggcggagtgtc

SEQ ID NO: 545347 - DNA, 15 bp, Homo sapiens
gagcaggcggagtgt

SEQ ID NO: 545348 - DNA, 15 bp, Homo sapiens
tgagcaggcggagtg

SEQ ID NO: 545349 - DNA, 15 bp, Homo sapiens
ctgagcaggcggagt

SEQ ID NO: 545350 - DNA, 15 bp, Homo sapiens
tctgagcaggcggag

SEQ ID NO: 545351 - DNA, 15 bp, Homo sapiens
ttctgagcaggcgga

SEQ ID NO: 545352 - DNA, 15 bp, Homo sapiens
cttctgagcaggcgg

SEQ ID NO: 545353 - DNA, 15 bp, Homo sapiens
gcttctgagcaggcg

SEQ ID NO: 545354 - DNA, 15 bp, Homo sapiens
agcttctgagcaggc

SEQ ID NO: 545355 - DNA, 15 bp, Homo sapiens
gagcttctgagcagg

SEQ ID NO: 545356 - DNA, 15 bp, Homo sapiens
ggagcttctgagcag

SEQ ID NO: 545357 - DNA, 15 bp, Homo sapiens
gggagcttctgagca

SEQ ID NO: 545358 - DNA, 15 bp, Homo sapiens
ggggagcttctgagc

SEQ ID NO: 545359 - DNA, 15 bp, Homo sapiens
tggggagcttctgag

SEQ ID NO: 545360 - DNA, 15 bp, Homo sapiens
ctggggagcttctga

SEQ ID NO: 545361 - DNA, 15 bp, Homo sapiens
cctggggagcttctg

SEQ ID NO: 545362 - DNA, 15 bp, Homo sapiens
acctggggagcttct

SEQ ID NO: 545363 - DNA, 15 bp, Homo sapiens
gacctggggagcttc

SEQ ID NO: 545364 - DNA, 15 bp, Homo sapiens
ggacctggggagctt

SEQ ID NO: 545365 - DNA, 15 bp, Homo sapiens
gggacctggggagct

SEQ ID NO: 545366 - DNA, 15 bp, Homo sapiens
cgggacctggggagc

SEQ ID NO: 545367 - DNA, 15 bp, Homo sapiens
ccgggacctggggag

SEQ ID NO: 545368 - DNA, 15 bp, Homo sapiens
cccgggacctgggga

SEQ ID NO: 545369 - DNA, 15 bp, Homo sapiens
acccgggacctgggg

SEQ ID NO: 545370 - DNA, 15 bp, Homo sapiens
aacccgggacctggg

SEQ ID NO: 545371 - DNA, 15 bp, Homo sapiens
gaacccgggacctgg

SEQ ID NO: 545372 - DNA, 15 bp, Homo sapiens
ggaacccgggacctg

SEQ ID NO: 545373 - DNA, 15 bp, Homo sapiens
tggaacccgggacct

SEQ ID NO: 545374 - DNA, 15 bp, Homo sapiens
ctggaacccgggacc

SEQ ID NO: 545375 - DNA, 15 bp, Homo sapiens
cctggaacccgggac

SEQ ID NO: 545376 - DNA, 15 bp, Homo sapiens
tcctggaacccggga

SEQ ID NO: 545377 - DNA, 15 bp, Homo sapiens
ttcctggaacccggg

SEQ ID NO: 545378 - DNA, 15 bp, Homo sapiens
cttcctggaacccgg

SEQ ID NO: 545379 - DNA, 15 bp, Homo sapiens
gcttcctggaacccg

SEQ ID NO: 545380 - DNA, 15 bp, Homo sapiens
ggcttcctggaaccc

SEQ ID NO: 545381 - DNA, 15 bp, Homo sapiens
aggcttcctggaacc

SEQ ID NO: 545382 - DNA, 15 bp, Homo sapiens
gaggcttcctggaac

SEQ ID NO: 545383 - DNA, 15 bp, Homo sapiens
tgaggcttcctggaa

SEQ ID NO: 545384 - DNA, 15 bp, Homo sapiens
atgaggcttcctgga

SEQ ID NO: 545385 - DNA, 15 bp, Homo sapiens
catgaggcttcctgg

SEQ ID NO: 545386 - DNA, 15 bp, Homo sapiens
ccatgaggcttcctg

SEQ ID NO: 545387 - DNA, 15 bp, Homo sapiens
gccatgaggcttcct

SEQ ID NO: 545388 - DNA, 15 bp, Homo sapiens
ggccatgaggcttcc

SEQ ID NO: 545389 - DNA, 15 bp, Homo sapiens
gggccatgaggcttc

SEQ ID NO: 545390 - DNA, 15 bp, Homo sapiens
tgggccatgaggctt

SEQ ID NO: 545391 - DNA, 15 bp, Homo sapiens
ttgggccatgaggct

SEQ ID NO: 545392 - DNA, 15 bp, Homo sapiens
cttgggccatgaggc

SEQ ID NO: 545393 - DNA, 15 bp, Homo sapiens
ccttgggccatgagg

SEQ ID NO: 545394 - DNA, 15 bp, Homo sapiens
gccttgggccatgag

SEQ ID NO: 545395 - DNA, 15 bp, Homo sapiens
ggccttgggccatga

SEQ ID NO: 545396 - DNA, 15 bp, Homo sapiens
aggccttgggccatg

SEQ ID NO: 545397 - DNA, 15 bp, Homo sapiens
caggccttgggccat

SEQ ID NO: 545398 - DNA, 15 bp, Homo sapiens
ccaggccttgggcca

SEQ ID NO: 545399 - DNA, 15 bp, Homo sapiens
gccaggccttgggcc

SEQ ID NO: 545400 - DNA, 15 bp, Homo sapiens
ggccaggccttgggc

SEQ ID NO: 545401 - DNA, 15 bp, Homo sapiens
cggccaggccttggg

SEQ ID NO: 545402 - DNA, 15 bp, Homo sapiens
acggccaggccttgg

SEQ ID NO: 545403 - DNA, 15 bp, Homo sapiens
gacggccaggccttg

SEQ ID NO: 545404 - DNA, 15 bp, Homo sapiens
agacggccaggcctt

SEQ ID NO: 545405 - DNA, 15 bp, Homo sapiens
aagacggccaggcct

SEQ ID NO: 545406 - DNA, 15 bp, Homo sapiens
taagacggccaggcc

SEQ ID NO: 545407 - DNA, 15 bp, Homo sapiens
ttaagacggccaggc

SEQ ID NO: 545408 - DNA, 15 bp, Homo sapiens
attaagacggccagg

SEQ ID NO: 545409 - DNA, 15 bp, Homo sapiens
aattaagacggccag

SEQ ID NO: 545410 - DNA, 15 bp, Homo sapiens
aaattaagacggcca

SEQ ID NO: 545411 - DNA, 15 bp, Homo sapiens
aaaattaagacggcc

SEQ ID NO: 545412 - DNA, 15 bp, Homo sapiens
gaaaattaagacggc

SEQ ID NO: 545413 - DNA, 15 bp, Homo sapiens
agaaaattaagacgg

SEQ ID NO: 545414 - DNA, 15 bp, Homo sapiens
aagaaaattaagacg

SEQ ID NO: 545415 - DNA, 15 bp, Homo sapiens
caagaaaattaagac

SEQ ID NO: 545416 - DNA, 15 bp, Homo sapiens
acaagaaaattaaga

SEQ ID NO: 545417 - DNA, 15 bp, Homo sapiens
aacaagaaaattaag

SEQ ID NO: 545418 - DNA, 15 bp, Homo sapiens
aaacaagaaaattaa

SEQ ID NO: 545419 - DNA, 15 bp, Homo sapiens
aaaacaagaaaatta

SEQ ID NO: 545420 - DNA, 15 bp, Homo sapiens
gaaaacaagaaaatt

SEQ ID NO: 545421 - DNA, 15 bp, Homo sapiens
agaaaacaagaaaat

SEQ ID NO: 545422 - DNA, 15 bp, Homo sapiens
aagaaaacaagaaaa

SEQ ID NO: 545423 - DNA, 15 bp, Homo sapiens
aaagaaaacaagaaa

SEQ ID NO: 545424 - DNA, 15 bp, Homo sapiens
gaaagaaaacaagaa

SEQ ID NO: 545425 - DNA, 15 bp, Homo sapiens
ggaaagaaaacaaga

SEQ ID NO: 545426 - DNA, 15 bp, Homo sapiens
gggaaagaaaacaag

SEQ ID NO: 545427 - DNA, 15 bp, Homo sapiens
agggaaagaaaacaa

SEQ ID NO: 545428 - DNA, 15 bp, Homo sapiens
gagggaaagaaaaca

SEQ ID NO: 545429 - DNA, 15 bp, Homo sapiens
ggagggaaagaaaac

SEQ ID NO: 545430 - DNA, 15 bp, Homo sapiens
tggagggaaagaaaa

SEQ ID NO: 545431 - DNA, 15 bp, Homo sapiens
gtggagggaaagaaa

SEQ ID NO: 545432 - DNA, 15 bp, Homo sapiens
agtggagggaaagaa

SEQ ID NO: 545433 - DNA, 15 bp, Homo sapiens
gagtggagggaaaga

SEQ ID NO: 545434 - DNA, 15 bp, Homo sapiens
ggagtggagggaaag

SEQ ID NO: 545435 - DNA, 15 bp, Homo sapiens
tggagtggagggaaa

SEQ ID NO: 545436 - DNA, 15 bp, Homo sapiens
gtggagtggagggaa

SEQ ID NO: 545437 - DNA, 15 bp, Homo sapiens
agtggagtggaggga

SEQ ID NO: 545438 - DNA, 15 bp, Homo sapiens
cagtggagtggaggg

SEQ ID NO: 545439 - DNA, 15 bp, Homo sapiens
acagtggagtggagg

SEQ ID NO: 545440 - DNA, 15 bp, Homo sapiens
aacagtggagtggag

SEQ ID NO: 545441 - DNA, 15 bp, Homo sapiens
aaacagtggagtgga

SEQ ID NO: 545442 - DNA, 15 bp, Homo sapiens
gaaacagtggagtgg

SEQ ID NO: 545443 - DNA, 15 bp, Homo sapiens
agaaacagtggagtg

SEQ ID NO: 545444 - DNA, 15 bp, Homo sapiens
aagaaacagtggagt

SEQ ID NO: 545445 - DNA, 15 bp, Homo sapiens
gaagaaacagtggag

SEQ ID NO: 545446 - DNA, 15 bp, Homo sapiens
ggaagaaacagtgga

SEQ ID NO: 545447 - DNA, 15 bp, Homo sapiens
aggaagaaacagtgg

SEQ ID NO: 545448 - DNA, 15 bp, Homo sapiens
caggaagaaacagtg

SEQ ID NO: 545449 - DNA, 15 bp, Homo sapiens
acaggaagaaacagt

SEQ ID NO: 545450 - DNA, 15 bp, Homo sapiens
aacaggaagaaacag

SEQ ID NO: 545451 - DNA, 15 bp, Homo sapiens
gaacaggaagaaaca

SEQ ID NO: 545452 - DNA, 15 bp, Homo sapiens
tgaacaggaagaaac

SEQ ID NO: 545453 - DNA, 15 bp, Homo sapiens
gtgaacaggaagaaa

SEQ ID NO: 545454 - DNA, 15 bp, Homo sapiens
agtgaacaggaagaa

SEQ ID NO: 545455 - DNA, 15 bp, Homo sapiens
cagtgaacaggaaga

SEQ ID NO: 545456 - DNA, 15 bp, Homo sapiens
tcagtgaacaggaag

SEQ ID NO: 545457 - DNA, 15 bp, Homo sapiens
atcagtgaacaggaa

SEQ ID NO: 545458 - DNA, 15 bp, Homo sapiens
aatcagtgaacagga

SEQ ID NO: 545459 - DNA, 15 bp, Homo sapiens
caatcagtgaacagg

SEQ ID NO: 545460 - DNA, 15 bp, Homo sapiens
gcaatcagtgaacag

SEQ ID NO: 545461 - DNA, 15 bp, Homo sapiens
ggcaatcagtgaaca

SEQ ID NO: 545462 - DNA, 15 bp, Homo sapiens
aggcaatcagtgaac

SEQ ID NO: 545463 - DNA, 15 bp, Homo sapiens
caggcaatcagtgaa

SEQ ID NO: 545464 - DNA, 15 bp, Homo sapiens
acaggcaatcagtga

SEQ ID NO: 545465 - DNA, 15 bp, Homo sapiens
cacaggcaatcagtg

SEQ ID NO: 545466 - DNA, 15 bp, Homo sapiens
gcacaggcaatcagt

SEQ ID NO: 545467 - DNA, 15 bp, Homo sapiens
agcacaggcaatcag

SEQ ID NO: 545468 - DNA, 15 bp, Homo sapiens
cagcacaggcaatca

SEQ ID NO: 545469 - DNA, 15 bp, Homo sapiens
ccagcacaggcaatc

SEQ ID NO: 545470 - DNA, 15 bp, Homo sapiens
cccagcacaggcaat

SEQ ID NO: 545471 - DNA, 15 bp, Homo sapiens
ccccagcacaggcaa

SEQ ID NO: 545472 - DNA, 15 bp, Homo sapiens
tccccagcacaggca

SEQ ID NO: 545473 - DNA, 15 bp, Homo sapiens
ctccccagcacaggc

SEQ ID NO: 545474 - DNA, 15 bp, Homo sapiens
cctccccagcacagg

SEQ ID NO: 545475 - DNA, 15 bp, Homo sapiens
ccctccccagcacag

SEQ ID NO: 545476 - DNA, 15 bp, Homo sapiens
cccctccccagcaca

SEQ ID NO: 545477 - DNA, 15 bp, Homo sapiens
ccccctccccagcac

SEQ ID NO: 545478 - DNA, 15 bp, Homo sapiens
tccccctccccagca

SEQ ID NO: 545479 - DNA, 15 bp, Homo sapiens
ttccccctccccagc

SEQ ID NO: 545480 - DNA, 15 bp, Homo sapiens
cttccccctccccag

SEQ ID NO: 545481 - DNA, 15 bp, Homo sapiens
ccttccccctcccca

SEQ ID NO: 545482 - DNA, 15 bp, Homo sapiens
tccttccccctcccc

SEQ ID NO: 545483 - DNA, 15 bp, Homo sapiens
ttccttccccctccc

SEQ ID NO: 545484 - DNA, 15 bp, Homo sapiens
gttccttccccctcc

SEQ ID NO: 545485 - DNA, 15 bp, Homo sapiens
cgttccttccccctc

SEQ ID NO: 545486 - DNA, 15 bp, Homo sapiens
ccgttccttccccct

SEQ ID NO: 545487 - DNA, 15 bp, Homo sapiens
cccgttccttccccc

SEQ ID NO: 545488 - DNA, 15 bp, Homo sapiens
tcccgttccttcccc

SEQ ID NO: 545489 - DNA, 15 bp, Homo sapiens
ctcccgttccttccc

SEQ ID NO: 545490 - DNA, 15 bp, Homo sapiens
cctcccgttccttcc

SEQ ID NO: 545491 - DNA, 15 bp, Homo sapiens
ccctcccgttccttc

SEQ ID NO: 545492 - DNA, 15 bp, Homo sapiens
cccctcccgttcctt

SEQ ID NO: 545493 - DNA, 15 bp, Homo sapiens
gcccctcccgttcct

SEQ ID NO: 545494 - DNA, 15 bp, Homo sapiens
ggcccctcccgttcc

SEQ ID NO: 545495 - DNA, 15 bp, Homo sapiens
aggcccctcccgttc

SEQ ID NO: 545496 - DNA, 15 bp, Homo sapiens
caggcccctcccgtt

SEQ ID NO: 545497 - DNA, 15 bp, Homo sapiens
tcaggcccctcccgt

SEQ ID NO: 545498 - DNA, 15 bp, Homo sapiens
gtcaggcccctcccg

SEQ ID NO: 545499 - DNA, 15 bp, Homo sapiens
ggtcaggcccctccc

SEQ ID NO: 545500 - DNA, 15 bp, Homo sapiens
aggtcaggcccctcc

SEQ ID NO: 545501 - DNA, 15 bp, Homo sapiens
aaggtcaggcccctc

SEQ ID NO: 545502 - DNA, 15 bp, Homo sapiens
caaggtcaggcccct

SEQ ID NO: 545503 - DNA, 15 bp, Homo sapiens
acaaggtcaggcccc

SEQ ID NO: 545504 - DNA, 15 bp, Homo sapiens
aacaaggtcaggccc

SEQ ID NO: 545505 - DNA, 15 bp, Homo sapiens
gaacaaggtcaggcc

SEQ ID NO: 545506 - DNA, 15 bp, Homo sapiens
tgaacaaggtcaggc

SEQ ID NO: 545507 - DNA, 15 bp, Homo sapiens
gtgaacaaggtcagg

SEQ ID NO: 545508 - DNA, 15 bp, Homo sapiens
agtgaacaaggtcag

SEQ ID NO: 545509 - DNA, 15 bp, Homo sapiens
aagtgaacaaggtca

SEQ ID NO: 545510 - DNA, 15 bp, Homo sapiens
gaagtgaacaaggtc

SEQ ID NO: 545511 - DNA, 15 bp, Homo sapiens
ggaagtgaacaaggt

SEQ ID NO: 545512 - DNA, 15 bp, Homo sapiens
aggaagtgaacaagg

SEQ ID NO: 545513 - DNA, 15 bp, Homo sapiens
caggaagtgaacaag

SEQ ID NO: 545514 - DNA, 15 bp, Homo sapiens
ccaggaagtgaacaa

SEQ ID NO: 545515 - DNA, 15 bp, Homo sapiens
gccaggaagtgaaca

SEQ ID NO: 545516 - DNA, 15 bp, Homo sapiens
tgccaggaagtgaac

SEQ ID NO: 545517 - DNA, 15 bp, Homo sapiens
atgccaggaagtgaa

SEQ ID NO: 545518 - DNA, 15 bp, Homo sapiens
aatgccaggaagtga

SEQ ID NO: 545519 - DNA, 15 bp, Homo sapiens
aaatgccaggaagtg

SEQ ID NO: 545520 - DNA, 15 bp, Homo sapiens
aaaatgccaggaagt

SEQ ID NO: 545521 - DNA, 15 bp, Homo sapiens
caaaatgccaggaag

SEQ ID NO: 545522 - DNA, 15 bp, Homo sapiens
ccaaaatgccaggaa

SEQ ID NO: 545523 - DNA, 15 bp, Homo sapiens
cccaaaatgccagga

SEQ ID NO: 545524 - DNA, 15 bp, Homo sapiens
acccaaaatgccagg

SEQ ID NO: 545525 - DNA, 15 bp, Homo sapiens
cacccaaaatgccag

SEQ ID NO: 545526 - DNA, 15 bp, Homo sapiens
tcacccaaaatgcca

SEQ ID NO: 545527 - DNA, 15 bp, Homo sapiens
ttcacccaaaatgcc

SEQ ID NO: 545528 - DNA, 15 bp, Homo sapiens
cttcacccaaaatgc

SEQ ID NO: 545529 - DNA, 15 bp, Homo sapiens
acttcacccaaaatg

SEQ ID NO: 545530 - DNA, 15 bp, Homo sapiens
aacttcacccaaaat

SEQ ID NO: 545531 - DNA, 15 bp, Homo sapiens
gaacttcacccaaaa

SEQ ID NO: 545532 - DNA, 15 bp, Homo sapiens
ggaacttcacccaaa

SEQ ID NO: 545533 - DNA, 15 bp, Homo sapiens
aggaacttcacccaa

SEQ ID NO: 545534 - DNA, 15 bp, Homo sapiens
aaggaacttcaccca

SEQ ID NO: 545535 - DNA, 15 bp, Homo sapiens
taaggaacttcaccc

SEQ ID NO: 545536 - DNA, 15 bp, Homo sapiens
gtaaggaacttcacc

SEQ ID NO: 545537 - DNA, 15 bp, Homo sapiens
tgtaaggaacttcac

SEQ ID NO: 545538 - DNA, 15 bp, Homo sapiens
gtgtaaggaacttca

SEQ ID NO: 545539 - DNA, 15 bp, Homo sapiens
ggtgtaaggaacttc

SEQ ID NO: 545540 - DNA, 15 bp, Homo sapiens
aggtgtaaggaactt

SEQ ID NO: 545541 - DNA, 15 bp, Homo sapiens
aaggtgtaaggaact

SEQ ID NO: 545542 - DNA, 15 bp, Homo sapiens
gaaggtgtaaggaac

SEQ ID NO: 545543 - DNA, 15 bp, Homo sapiens
agaaggtgtaaggaa

SEQ ID NO: 545544 - DNA, 15 bp, Homo sapiens
gagaaggtgtaagga

SEQ ID NO: 545545 - DNA, 15 bp, Homo sapiens
agagaaggtgtaagg

SEQ ID NO: 545546 - DNA, 15 bp, Homo sapiens
cagagaaggtgtaag

SEQ ID NO: 545547 - DNA, 15 bp, Homo sapiens
ccagagaaggtgtaa

SEQ ID NO: 545548 - DNA, 15 bp, Homo sapiens
tccagagaaggtgta

SEQ ID NO: 545549 - DNA, 15 bp, Homo sapiens
ttccagagaaggtgt

SEQ ID NO: 545550 - DNA, 15 bp, Homo sapiens
cttccagagaaggtg

SEQ ID NO: 545551 - DNA, 15 bp, Homo sapiens
gcttccagagaaggt

SEQ ID NO: 545552 - DNA, 15 bp, Homo sapiens
agcttccagagaagg

SEQ ID NO: 545553 - DNA, 15 bp, Homo sapiens
aagcttccagagaag

SEQ ID NO: 545554 - DNA, 15 bp, Homo sapiens
gaagcttccagagaa

SEQ ID NO: 545555 - DNA, 15 bp, Homo sapiens
agaagcttccagaga

SEQ ID NO: 545556 - DNA, 15 bp, Homo sapiens
tagaagcttccagag

SEQ ID NO: 545557 - DNA, 15 bp, Homo sapiens
ctagaagcttccaga

SEQ ID NO: 545558 - DNA, 15 bp, Homo sapiens
tctagaagcttccag

SEQ ID NO: 545559 - DNA, 15 bp, Homo sapiens
ttctagaagcttcca

SEQ ID NO: 545560 - DNA, 15 bp, Homo sapiens
cttctagaagcttcc

SEQ ID NO: 545561 - DNA, 15 bp, Homo sapiens
ccttctagaagcttc

SEQ ID NO: 545562 - DNA, 15 bp, Homo sapiens
tccttctagaagctt

SEQ ID NO: 545563 - DNA, 15 bp, Homo sapiens
gtccttctagaagct

SEQ ID NO: 545564 - DNA, 15 bp, Homo sapiens
ggtccttctagaagc

SEQ ID NO: 545565 - DNA, 15 bp, Homo sapiens
gggtccttctagaag

SEQ ID NO: 545566 - DNA, 15 bp, Homo sapiens
agggtccttctagaa

SEQ ID NO: 545567 - DNA, 15 bp, Homo sapiens
aagggtccttctaga

SEQ ID NO: 545568 - DNA, 15 bp, Homo sapiens
caagggtccttctag

SEQ ID NO: 545569 - DNA, 15 bp, Homo sapiens
tcaagggtccttcta

SEQ ID NO: 545570 - DNA, 15 bp, Homo sapiens
ctcaagggtccttct

SEQ ID NO: 545571 - DNA, 15 bp, Homo sapiens
cctcaagggtccttc

SEQ ID NO: 545572 - DNA, 15 bp, Homo sapiens
gcctcaagggtcctt

SEQ ID NO: 545573 - DNA, 15 bp, Homo sapiens
cgcctcaagggtcct

SEQ ID NO: 545574 - DNA, 15 bp, Homo sapiens
gcgcctcaagggtcc

SEQ ID NO: 545575 - DNA, 15 bp, Homo sapiens
agcgcctcaagggtc

SEQ ID NO: 545576 - DNA, 15 bp, Homo sapiens
aagcgcctcaagggt

SEQ ID NO: 545577 - DNA, 15 bp, Homo sapiens
aaagcgcctcaaggg

SEQ ID NO: 545578 - DNA, 15 bp, Homo sapiens
taaagcgcctcaagg

SEQ ID NO: 545579 - DNA, 15 bp, Homo sapiens
ttaaagcgcctcaag

SEQ ID NO: 545580 - DNA, 15 bp, Homo sapiens
tttaaagcgcctcaa

SEQ ID NO: 545581 - DNA, 15 bp, Homo sapiens
atttaaagcgcctca

SEQ ID NO: 545582 - DNA, 15 bp, Homo sapiens
gatttaaagcgcctc

SEQ ID NO: 545583 - DNA, 15 bp, Homo sapiens
agatttaaagcgcct

SEQ ID NO: 545584 - DNA, 15 bp, Homo sapiens
gagatttaaagcgcc

SEQ ID NO: 545585 - DNA, 15 bp, Homo sapiens
ggagatttaaagcgc

SEQ ID NO: 545586 - DNA, 15 bp, Homo sapiens
tggagatttaaagcg

SEQ ID NO: 545587 - DNA, 15 bp, Homo sapiens
atggagatttaaagc

SEQ ID NO: 545588 - DNA, 15 bp, Homo sapiens
aatggagatttaaag

SEQ ID NO: 545589 - DNA, 15 bp, Homo sapiens
gaatggagatttaaa

SEQ ID NO: 545590 - DNA, 15 bp, Homo sapiens
agaatggagatttaa

SEQ ID NO: 545591 - DNA, 15 bp, Homo sapiens
gagaatggagattta

SEQ ID NO: 545592 - DNA, 15 bp, Homo sapiens
agagaatggagattt

SEQ ID NO: 545593 - DNA, 15 bp, Homo sapiens
cagagaatggagatt

SEQ ID NO: 545594 - DNA, 15 bp, Homo sapiens
ccagagaatggagat

SEQ ID NO: 545595 - DNA, 15 bp, Homo sapiens
cccagagaatggaga

SEQ ID NO: 545596 - DNA, 15 bp, Homo sapiens
acccagagaatggag

SEQ ID NO: 545597 - DNA, 15 bp, Homo sapiens
aacccagagaatgga

SEQ ID NO: 545598 - DNA, 15 bp, Homo sapiens
aaacccagagaatgg

SEQ ID NO: 545599 - DNA, 15 bp, Homo sapiens
aaaacccagagaatg

SEQ ID NO: 545600 - DNA, 15 bp, Homo sapiens
gaaaacccagagaat

SEQ ID NO: 545601 - DNA, 15 bp, Homo sapiens
ggaaaacccagagaa

SEQ ID NO: 545602 - DNA, 15 bp, Homo sapiens
aggaaaacccagaga

SEQ ID NO: 545603 - DNA, 15 bp, Homo sapiens
gaggaaaacccagag

SEQ ID NO: 545604 - DNA, 15 bp, Homo sapiens
ggaggaaaacccaga

SEQ ID NO: 545605 - DNA, 15 bp, Homo sapiens
gggaggaaaacccag

SEQ ID NO: 545606 - DNA, 15 bp, Homo sapiens
tgggaggaaaaccca

SEQ ID NO: 545607 - DNA, 15 bp, Homo sapiens
gtgggaggaaaaccc

SEQ ID NO: 545608 - DNA, 15 bp, Homo sapiens
ggtgggaggaaaacc

SEQ ID NO: 545609 - DNA, 15 bp, Homo sapiens
aggtgggaggaaaac

SEQ ID NO: 545610 - DNA, 15 bp, Homo sapiens
aaggtgggaggaaaa

SEQ ID NO: 545611 - DNA, 15 bp, Homo sapiens
gaaggtgggaggaaa

SEQ ID NO: 545612 - DNA, 15 bp, Homo sapiens
ggaaggtgggaggaa

SEQ ID NO: 545613 - DNA, 15 bp, Homo sapiens
aggaaggtgggagga

SEQ ID NO: 545614 - DNA, 15 bp, Homo sapiens
caggaaggtgggagg

SEQ ID NO: 545615 - DNA, 15 bp, Homo sapiens
ccaggaaggtgggag

SEQ ID NO: 545616 - DNA, 15 bp, Homo sapiens
gccaggaaggtggga

SEQ ID NO: 545617 - DNA, 15 bp, Homo sapiens
agccaggaaggtggg

SEQ ID NO: 545618 - DNA, 15 bp, Homo sapiens
cagccaggaaggtgg

SEQ ID NO: 545619 - DNA, 15 bp, Homo sapiens
gcagccaggaaggtg

SEQ ID NO: 545620 - DNA, 15 bp, Homo sapiens
agcagccaggaaggt

SEQ ID NO: 545621 - DNA, 15 bp, Homo sapiens
gagcagccaggaagg

SEQ ID NO: 545622 - DNA, 15 bp, Homo sapiens
agagcagccaggaag

SEQ ID NO: 545623 - DNA, 15 bp, Homo sapiens
cagagcagccaggaa

SEQ ID NO: 545624 - DNA, 15 bp, Homo sapiens
acagagcagccagga

SEQ ID NO: 545625 - DNA, 15 bp, Homo sapiens
gacagagcagccagg

SEQ ID NO: 545626 - DNA, 15 bp, Homo sapiens
agacagagcagccag

SEQ ID NO: 545627 - DNA, 15 bp, Homo sapiens
aagacagagcagcca

SEQ ID NO: 545628 - DNA, 15 bp, Homo sapiens
gaagacagagcagcc

SEQ ID NO: 545629 - DNA, 15 bp, Homo sapiens
agaagacagagcagc

SEQ ID NO: 545630 - DNA, 15 bp, Homo sapiens
aagaagacagagcag

SEQ ID NO: 545631 - DNA, 15 bp, Homo sapiens
caagaagacagagca

SEQ ID NO: 545632 - DNA, 15 bp, Homo sapiens
gcaagaagacagagc

SEQ ID NO: 545633 - DNA, 15 bp, Homo sapiens
ggcaagaagacagag

SEQ ID NO: 545634 - DNA, 15 bp, Homo sapiens
aggcaagaagacaga

SEQ ID NO: 545635 - DNA, 15 bp, Homo sapiens
caggcaagaagacag

SEQ ID NO: 545636 - DNA, 15 bp, Homo sapiens
gcaggcaagaagaca

SEQ ID NO: 545637 - DNA, 15 bp, Homo sapiens
agcaggcaagaagac

SEQ ID NO: 545638 - DNA, 15 bp, Homo sapiens
cagcaggcaagaaga

SEQ ID NO: 545639 - DNA, 15 bp, Homo sapiens
tcagcaggcaagaag

SEQ ID NO: 545640 - DNA, 15 bp, Homo sapiens
atcagcaggcaagaa

SEQ ID NO: 545641 - DNA, 15 bp, Homo sapiens
catcagcaggcaaga

SEQ ID NO: 545642 - DNA, 15 bp, Homo sapiens
gcatcagcaggcaag

SEQ ID NO: 545643 - DNA, 15 bp, Homo sapiens
ggcatcagcaggcaa

SEQ ID NO: 545644 - DNA, 15 bp, Homo sapiens
aggcatcagcaggca

SEQ ID NO: 545645 - DNA, 15 bp, Homo sapiens
gaggcatcagcaggc

SEQ ID NO: 545646 - DNA, 15 bp, Homo sapiens
ggaggcatcagcagg

SEQ ID NO: 545647 - DNA, 15 bp, Homo sapiens
aggaggcatcagcag

SEQ ID NO: 545648 - DNA, 15 bp, Homo sapiens
gaggaggcatcagca

SEQ ID NO: 545649 - DNA, 15 bp, Homo sapiens
tgaggaggcatcagc

SEQ ID NO: 545650 - DNA, 15 bp, Homo sapiens
atgaggaggcatcag

SEQ ID NO: 545651 - DNA, 15 bp, Homo sapiens
gatgaggaggcatca

SEQ ID NO: 545652 - DNA, 15 bp, Homo sapiens
agatgaggaggcatc

SEQ ID NO: 545653 - DNA, 15 bp, Homo sapiens
gagatgaggaggcat

SEQ ID NO: 545654 - DNA, 15 bp, Homo sapiens
ggagatgaggaggca

SEQ ID NO: 545655 - DNA, 15 bp, Homo sapiens
gggagatgaggaggc

SEQ ID NO: 545656 - DNA, 15 bp, Homo sapiens
agggagatgaggagg

SEQ ID NO: 545657 - DNA, 15 bp, Homo sapiens
cagggagatgaggag

SEQ ID NO: 545658 - DNA, 15 bp, Homo sapiens
ccagggagatgagga

SEQ ID NO: 545659 - DNA, 15 bp, Homo sapiens
gccagggagatgagg

SEQ ID NO: 545660 - DNA, 15 bp, Homo sapiens
ggccagggagatgag

SEQ ID NO: 545661 - DNA, 15 bp, Homo sapiens
aggccagggagatga

SEQ ID NO: 545662 - DNA, 15 bp, Homo sapiens
gaggccagggagatg

SEQ ID NO: 545663 - DNA, 15 bp, Homo sapiens
ggaggccagggagat

SEQ ID NO: 545664 - DNA, 15 bp, Homo sapiens
aggaggccagggaga

SEQ ID NO: 545665 - DNA, 15 bp, Homo sapiens
caggaggccagggag

SEQ ID NO: 545666 - DNA, 15 bp, Homo sapiens
gcaggaggccaggga

SEQ ID NO: 545667 - DNA, 15 bp, Homo sapiens
ggcaggaggccaggg

SEQ ID NO: 545668 - DNA, 15 bp, Homo sapiens
aggcaggaggccagg

SEQ ID NO: 545669 - DNA, 15 bp, Homo sapiens
gaggcaggaggccag

SEQ ID NO: 545670 - DNA, 15 bp, Homo sapiens
ggaggcaggaggcca

SEQ ID NO: 545671 - DNA, 15 bp, Homo sapiens
aggaggcaggaggcc

SEQ ID NO: 545672 - DNA, 15 bp, Homo sapiens
caggaggcaggaggc

SEQ ID NO: 545673 - DNA, 15 bp, Homo sapiens
gcaggaggcaggagg

SEQ ID NO: 545674 - DNA, 15 bp, Homo sapiens
agcaggaggcaggag

SEQ ID NO: 545675 - DNA, 15 bp, Homo sapiens
cagcaggaggcagga

SEQ ID NO: 545676 - DNA, 15 bp, Homo sapiens
ccagcaggaggcagg

SEQ ID NO: 545677 - DNA, 15 bp, Homo sapiens
accagcaggaggcag

SEQ ID NO: 545678 - DNA, 15 bp, Homo sapiens
caccagcaggaggca

SEQ ID NO: 545679 - DNA, 15 bp, Homo sapiens
ccaccagcaggaggc

SEQ ID NO: 545680 - DNA, 15 bp, Homo sapiens
tccaccagcaggagg

SEQ ID NO: 545681 - DNA, 15 bp, Homo sapiens
ctccaccagcaggag

SEQ ID NO: 545682 - DNA, 15 bp, Homo sapiens
gctccaccagcagga

SEQ ID NO: 545683 - DNA, 15 bp, Homo sapiens
agctccaccagcagg

SEQ ID NO: 545684 - DNA, 15 bp, Homo sapiens
gagctccaccagcag

SEQ ID NO: 545685 - DNA, 15 bp, Homo sapiens
ggagctccaccagca

SEQ ID NO: 545686 - DNA, 15 bp, Homo sapiens
tggagctccaccagc

SEQ ID NO: 545687 - DNA, 15 bp, Homo sapiens
ctggagctccaccag

SEQ ID NO: 545688 - DNA, 15 bp, Homo sapiens
cctggagctccacca

SEQ ID NO: 545689 - DNA, 15 bp, Homo sapiens
gcctggagctccacc

SEQ ID NO: 545690 - DNA, 15 bp, Homo sapiens
tgcctggagctccac

SEQ ID NO: 545691 - DNA, 15 bp, Homo sapiens
atgcctggagctcca

SEQ ID NO: 545692 - DNA, 15 bp, Homo sapiens
gatgcctggagctcc

SEQ ID NO: 545693 - DNA, 15 bp, Homo sapiens
ggatgcctggagctc

SEQ ID NO: 545694 - DNA, 15 bp, Homo sapiens
aggatgcctggagct

SEQ ID NO: 545695 - DNA, 15 bp, Homo sapiens
aaggatgcctggagc

SEQ ID NO: 545696 - DNA, 15 bp, Homo sapiens
aaaggatgcctggag

SEQ ID NO: 545697 - DNA, 15 bp, Homo sapiens
gaaaggatgcctgga

SEQ ID NO: 545698 - DNA, 15 bp, Homo sapiens
agaaaggatgcctgg

SEQ ID NO: 545699 - DNA, 15 bp, Homo sapiens
cagaaaggatgcctg

SEQ ID NO: 545700 - DNA, 15 bp, Homo sapiens
acagaaaggatgcct

SEQ ID NO: 545701 - DNA, 15 bp, Homo sapiens
cacagaaaggatgcc

SEQ ID NO: 545702 - DNA, 15 bp, Homo sapiens
acacagaaaggatgc

SEQ ID NO: 545703 - DNA, 15 bp, Homo sapiens
cacacagaaaggatg

SEQ ID NO: 545704 - DNA, 15 bp, Homo sapiens
acacacagaaaggat

SEQ ID NO: 545705 - DNA, 15 bp, Homo sapiens
gacacacagaaagga

SEQ ID NO: 545706 - DNA, 15 bp, Homo sapiens
ggacacacagaaagg

SEQ ID NO: 545707 - DNA, 15 bp, Homo sapiens
aggacacacagaaag

SEQ ID NO: 545708 - DNA, 15 bp, Homo sapiens
gaggacacacagaaa

SEQ ID NO: 545709 - DNA, 15 bp, Homo sapiens
tgaggacacacagaa

SEQ ID NO: 545710 - DNA, 15 bp, Homo sapiens
atgaggacacacaga

SEQ ID NO: 545711 - DNA, 15 bp, Homo sapiens
gatgaggacacacag

SEQ ID NO: 545712 - DNA, 15 bp, Homo sapiens
ggatgaggacacaca

SEQ ID NO: 545713 - DNA, 15 bp, Homo sapiens
gggatgaggacacac

SEQ ID NO: 545714 - DNA, 15 bp, Homo sapiens
agggatgaggacaca

SEQ ID NO: 545715 - DNA, 15 bp, Homo sapiens
gagggatgaggacac

SEQ ID NO: 545716 - DNA, 15 bp, Homo sapiens
tgagggatgaggaca

SEQ ID NO: 545717 - DNA, 15 bp, Homo sapiens
atgagggatgaggac

SEQ ID NO: 545718 - DNA, 15 bp, Homo sapiens
gatgagggatgagga

SEQ ID NO: 545719 - DNA, 15 bp, Homo sapiens
ggatgagggatgagg

SEQ ID NO: 545720 - DNA, 15 bp, Homo sapiens
gggatgagggatgag

SEQ ID NO: 545721 - DNA, 15 bp, Homo sapiens
agggatgagggatga

SEQ ID NO: 545722 - DNA, 15 bp, Homo sapiens
cagggatgagggatg

SEQ ID NO: 545723 - DNA, 15 bp, Homo sapiens
ccagggatgagggat

SEQ ID NO: 545724 - DNA, 15 bp, Homo sapiens
cccagggatgaggga

SEQ ID NO: 545725 - DNA, 15 bp, Homo sapiens
ccccagggatgaggg

SEQ ID NO: 545726 - DNA, 15 bp, Homo sapiens
accccagggatgagg

SEQ ID NO: 545727 - DNA, 15 bp, Homo sapiens
caccccagggatgag

SEQ ID NO: 545728 - DNA, 15 bp, Homo sapiens
ccaccccagggatga

SEQ ID NO: 545729 - DNA, 15 bp, Homo sapiens
cccaccccagggatg

SEQ ID NO: 545730 - DNA, 15 bp, Homo sapiens
gcccaccccagggat

SEQ ID NO: 545731 - DNA, 15 bp, Homo sapiens
agcccaccccaggga

SEQ ID NO: 545732 - DNA, 15 bp, Homo sapiens
gagcccaccccaggg

SEQ ID NO: 545733 - DNA, 15 bp, Homo sapiens
ggagcccaccccagg

SEQ ID NO: 545734 - DNA, 15 bp, Homo sapiens
aggagcccaccccag

SEQ ID NO: 545735 - DNA, 15 bp, Homo sapiens
gaggagcccacccca

SEQ ID NO: 545736 - DNA, 15 bp, Homo sapiens
ggaggagcccacccc

SEQ ID NO: 545737 - DNA, 15 bp, Homo sapiens
tggaggagcccaccc

SEQ ID NO: 545738 - DNA, 15 bp, Homo sapiens
ctggaggagcccacc

SEQ ID NO: 545739 - DNA, 15 bp, Homo sapiens
gctggaggagcccac

SEQ ID NO: 545740 - DNA, 15 bp, Homo sapiens
ggctggaggagccca

SEQ ID NO: 545741 - DNA, 15 bp, Homo sapiens
aggctggaggagccc

SEQ ID NO: 545742 - DNA, 15 bp, Homo sapiens
aaggctggaggagcc

SEQ ID NO: 545743 - DNA, 15 bp, Homo sapiens
caaggctggaggagc

SEQ ID NO: 545744 - DNA, 15 bp, Homo sapiens
gcaaggctggaggag

SEQ ID NO: 545745 - DNA, 15 bp, Homo sapiens
cgcaaggctggagga

SEQ ID NO: 545746 - DNA, 15 bp, Homo sapiens
gcgcaaggctggagg

SEQ ID NO: 545747 - DNA, 15 bp, Homo sapiens
ggcgcaaggctggag

SEQ ID NO: 545748 - DNA, 15 bp, Homo sapiens
aggcgcaaggctgga

SEQ ID NO: 545749 - DNA, 15 bp, Homo sapiens
caggcgcaaggctgg

SEQ ID NO: 545750 - DNA, 15 bp, Homo sapiens
tcaggcgcaaggctg

SEQ ID NO: 545751 - DNA, 15 bp, Homo sapiens
ttcaggcgcaaggct

SEQ ID NO: 545752 - DNA, 15 bp, Homo sapiens
attcaggcgcaaggc

SEQ ID NO: 545753 - DNA, 15 bp, Homo sapiens
cattcaggcgcaagg

SEQ ID NO: 545754 - DNA, 15 bp, Homo sapiens
ccattcaggcgcaag

SEQ ID NO: 545755 - DNA, 15 bp, Homo sapiens
gccattcaggcgcaa

SEQ ID NO: 545756 - DNA, 15 bp, Homo sapiens
tgccattcaggcgca

SEQ ID NO: 545757 - DNA, 15 bp, Homo sapiens
atgccattcaggcgc

SEQ ID NO: 545758 - DNA, 15 bp, Homo sapiens
gatgccattcaggcg

SEQ ID NO: 545759 - DNA, 15 bp, Homo sapiens
agatgccattcaggc

SEQ ID NO: 545760 - DNA, 15 bp, Homo sapiens
gagatgccattcagg

SEQ ID NO: 545761 - DNA, 15 bp, Homo sapiens
agagatgccattcag

SEQ ID NO: 545762 - DNA, 15 bp, Homo sapiens
cagagatgccattca

SEQ ID NO: 545763 - DNA, 15 bp, Homo sapiens
acagagatgccattc

SEQ ID NO: 545764 - DNA, 15 bp, Homo sapiens
gacagagatgccatt

SEQ ID NO: 545765 - DNA, 15 bp, Homo sapiens
ggacagagatgccat

SEQ ID NO: 545766 - DNA, 15 bp, Homo sapiens
aggacagagatgcca

SEQ ID NO: 545767 - DNA, 15 bp, Homo sapiens
caggacagagatgcc

SEQ ID NO: 545768 - DNA, 15 bp, Homo sapiens
tcaggacagagatgc

SEQ ID NO: 545769 - DNA, 15 bp, Homo sapiens
gtcaggacagagatg

SEQ ID NO: 545770 - DNA, 15 bp, Homo sapiens
ggtcaggacagagat

SEQ ID NO: 545771 - DNA, 15 bp, Homo sapiens
tggtcaggacagaga

SEQ ID NO: 545772 - DNA, 15 bp, Homo sapiens
gtggtcaggacagag

SEQ ID NO: 545773 - DNA, 15 bp, Homo sapiens
agtggtcaggacaga

SEQ ID NO: 545774 - DNA, 15 bp, Homo sapiens
gagtggtcaggacag

SEQ ID NO: 545775 - DNA, 15 bp, Homo sapiens
ggagtggtcaggaca

SEQ ID NO: 545776 - DNA, 15 bp, Homo sapiens
gggagtggtcaggac

SEQ ID NO: 545777 - DNA, 15 bp, Homo sapiens
tgggagtggtcagga

SEQ ID NO: 545778 - DNA, 15 bp, Homo sapiens
ttgggagtggtcagg

SEQ ID NO: 545779 - DNA, 15 bp, Homo sapiens
tttgggagtggtcag

SEQ ID NO: 545780 - DNA, 15 bp, Homo sapiens
atttgggagtggtca

SEQ ID NO: 545781 - DNA, 15 bp, Homo sapiens
aatttgggagtggtc

SEQ ID NO: 545782 - DNA, 15 bp, Homo sapiens
caatttgggagtggt

SEQ ID NO: 545783 - DNA, 15 bp, Homo sapiens
ccaatttgggagtgg

SEQ ID NO: 545784 - DNA, 15 bp, Homo sapiens
accaatttgggagtg

SEQ ID NO: 545785 - DNA, 15 bp, Homo sapiens
taccaatttgggagt

SEQ ID NO: 545786 - DNA, 15 bp, Homo sapiens
ataccaatttgggag

SEQ ID NO: 545787 - DNA, 15 bp, Homo sapiens
gataccaatttggga

SEQ ID NO: 545788 - DNA, 15 bp, Homo sapiens
ggataccaatttggg

SEQ ID NO: 545789 - DNA, 15 bp, Homo sapiens
gggataccaatttgg

SEQ ID NO: 545790 - DNA, 15 bp, Homo sapiens
agggataccaatttg

SEQ ID NO: 545791 - DNA, 15 bp, Homo sapiens
cagggataccaattt

SEQ ID NO: 545792 - DNA, 15 bp, Homo sapiens
ccagggataccaatt

SEQ ID NO: 545793 - DNA, 15 bp, Homo sapiens
cccagggataccaat

SEQ ID NO: 545794 - DNA, 15 bp, Homo sapiens
gcccagggataccaa

SEQ ID NO: 545795 - DNA, 15 bp, Homo sapiens
ggcccagggatacca

SEQ ID NO: 545796 - DNA, 15 bp, Homo sapiens
gggcccagggatacc

SEQ ID NO: 545797 - DNA, 15 bp, Homo sapiens
tgggcccagggatac

SEQ ID NO: 545798 - DNA, 15 bp, Homo sapiens
ctgggcccagggata

SEQ ID NO: 545799 - DNA, 15 bp, Homo sapiens
tctgggcccagggat

SEQ ID NO: 545800 - DNA, 15 bp, Homo sapiens
gtctgggcccaggga

SEQ ID NO: 545801 - DNA, 15 bp, Homo sapiens
ggtctgggcccaggg

SEQ ID NO: 545802 - DNA, 15 bp, Homo sapiens
aggtctgggcccagg

SEQ ID NO: 545803 - DNA, 15 bp, Homo sapiens
aaggtctgggcccag

SEQ ID NO: 545804 - DNA, 15 bp, Homo sapiens
aaaggtctgggccca

SEQ ID NO: 545805 - DNA, 15 bp, Homo sapiens
gaaaggtctgggccc

SEQ ID NO: 545806 - DNA, 15 bp, Homo sapiens
ggaaaggtctgggcc

SEQ ID NO: 545807 - DNA, 15 bp, Homo sapiens
gggaaaggtctgggc

SEQ ID NO: 545808 - DNA, 15 bp, Homo sapiens
ggggaaaggtctggg

SEQ ID NO: 545809 - DNA, 15 bp, Homo sapiens
aggggaaaggtctgg

SEQ ID NO: 545810 - DNA, 15 bp, Homo sapiens
caggggaaaggtctg

SEQ ID NO: 545811 - DNA, 15 bp, Homo sapiens
tcaggggaaaggtct

SEQ ID NO: 545812 - DNA, 15 bp, Homo sapiens
ttcaggggaaaggtc

SEQ ID NO: 545813 - DNA, 15 bp, Homo sapiens
gttcaggggaaaggt

SEQ ID NO: 545814 - DNA, 15 bp, Homo sapiens
ggttcaggggaaagg

SEQ ID NO: 545815 - DNA, 15 bp, Homo sapiens
gggttcaggggaaag

SEQ ID NO: 545816 - DNA, 15 bp, Homo sapiens
ggggttcaggggaaa

SEQ ID NO: 545817 - DNA, 15 bp, Homo sapiens
tggggttcaggggaa

SEQ ID NO: 545818 - DNA, 15 bp, Homo sapiens
gtggggttcagggga

SEQ ID NO: 545819 - DNA, 15 bp, Homo sapiens
ggtggggttcagggg

SEQ ID NO: 545820 - DNA, 15 bp, Homo sapiens
gggtggggttcaggg

SEQ ID NO: 545821 - DNA, 15 bp, Homo sapiens
ggggtggggttcagg

SEQ ID NO: 545822 - DNA, 15 bp, Homo sapiens
gggggtggggttcag

SEQ ID NO: 545823 - DNA, 15 bp, Homo sapiens
cgggggtggggttca

SEQ ID NO: 545824 - DNA, 15 bp, Homo sapiens
tcgggggtggggttc

SEQ ID NO: 545825 - DNA, 15 bp, Homo sapiens
ctcgggggtggggtt

SEQ ID NO: 545826 - DNA, 15 bp, Homo sapiens
actcgggggtggggt

SEQ ID NO: 545827 - DNA, 15 bp, Homo sapiens
cactcgggggtgggg

SEQ ID NO: 545828 - DNA, 15 bp, Homo sapiens
acactcgggggtggg

SEQ ID NO: 545829 - DNA, 15 bp, Homo sapiens
gacactcgggggtgg

SEQ ID NO: 545830 - DNA, 15 bp, Homo sapiens
ggacactcgggggtg

SEQ ID NO: 545831 - DNA, 15 bp, Homo sapiens
tggacactcgggggt

SEQ ID NO: 545832 - DNA, 15 bp, Homo sapiens
ttggacactcggggg

SEQ ID NO: 545833 - DNA, 15 bp, Homo sapiens
gttggacactcgggg

SEQ ID NO: 545834 - DNA, 15 bp, Homo sapiens
tgttggacactcggg

SEQ ID NO: 545835 - DNA, 15 bp, Homo sapiens
ctgttggacactcgg

SEQ ID NO: 545836 - DNA, 15 bp, Homo sapiens
gctgttggacactcg

SEQ ID NO: 545837 - DNA, 15 bp, Homo sapiens
tgctgttggacactc

SEQ ID NO: 545838 - DNA, 15 bp, Homo sapiens
ctgctgttggacact

SEQ ID NO: 545839 - DNA, 15 bp, Homo sapiens
tctgctgttggacac

SEQ ID NO: 545840 - DNA, 15 bp, Homo sapiens
ctctgctgttggaca

SEQ ID NO: 545841 - DNA, 15 bp, Homo sapiens
actctgctgttggac

SEQ ID NO: 545842 - DNA, 15 bp, Homo sapiens
gactctgctgttgga

SEQ ID NO: 545843 - DNA, 15 bp, Homo sapiens
ggactctgctgttgg

SEQ ID NO: 545844 - DNA, 15 bp, Homo sapiens
cggactctgctgttg

SEQ ID NO: 545845 - DNA, 15 bp, Homo sapiens
acggactctgctgtt

SEQ ID NO: 545846 - DNA, 15 bp, Homo sapiens
tacggactctgctgt

SEQ ID NO: 545847 - DNA, 15 bp, Homo sapiens
atacggactctgctg

SEQ ID NO: 545848 - DNA, 15 bp, Homo sapiens
gatacggactctgct

SEQ ID NO: 545849 - DNA, 15 bp, Homo sapiens
agatacggactctgc

SEQ ID NO: 545850 - DNA, 15 bp, Homo sapiens
gagatacggactctg

SEQ ID NO: 545851 - DNA, 15 bp, Homo sapiens
tgagatacggactct

SEQ ID NO: 545852 - DNA, 15 bp, Homo sapiens
ttgagatacggactc

SEQ ID NO: 545853 - DNA, 15 bp, Homo sapiens
gttgagatacggact

SEQ ID NO: 545854 - DNA, 15 bp, Homo sapiens
agttgagatacggac

SEQ ID NO: 545855 - DNA, 15 bp, Homo sapiens
gagttgagatacgga

SEQ ID NO: 545856 - DNA, 15 bp, Homo sapiens
cgagttgagatacgg

SEQ ID NO: 545857 - DNA, 15 bp, Homo sapiens
ccgagttgagatacg

SEQ ID NO: 545858 - DNA, 15 bp, Homo sapiens
cccgagttgagatac

SEQ ID NO: 545859 - DNA, 15 bp, Homo sapiens
ccccgagttgagata

SEQ ID NO: 545860 - DNA, 15 bp, Homo sapiens
accccgagttgagat

SEQ ID NO: 545861 - DNA, 15 bp, Homo sapiens
gaccccgagttgaga

SEQ ID NO: 545862 - DNA, 15 bp, Homo sapiens
tgaccccgagttgag

SEQ ID NO: 545863 - DNA, 15 bp, Homo sapiens
ttgaccccgagttga

SEQ ID NO: 545864 - DNA, 15 bp, Homo sapiens
tttgaccccgagttg

SEQ ID NO: 545865 - DNA, 15 bp, Homo sapiens
ctttgaccccgagtt

SEQ ID NO: 545866 - DNA, 15 bp, Homo sapiens
cctttgaccccgagt

SEQ ID NO: 545867 - DNA, 15 bp, Homo sapiens
gcctttgaccccgag

SEQ ID NO: 545868 - DNA, 15 bp, Homo sapiens
tgcctttgaccccga

SEQ ID NO: 545869 - DNA, 15 bp, Homo sapiens
ctgcctttgaccccg

SEQ ID NO: 545870 - DNA, 15 bp, Homo sapiens
gctgcctttgacccc

SEQ ID NO: 545871 - DNA, 15 bp, Homo sapiens
agctgcctttgaccc

SEQ ID NO: 545872 - DNA, 15 bp, Homo sapiens
gagctgcctttgacc

SEQ ID NO: 545873 - DNA, 15 bp, Homo sapiens
tgagctgcctttgac

SEQ ID NO: 545874 - DNA, 15 bp, Homo sapiens
gtgagctgcctttga

SEQ ID NO: 545875 - DNA, 15 bp, Homo sapiens
cgtgagctgcctttg

SEQ ID NO: 545876 - DNA, 15 bp, Homo sapiens
gcgtgagctgccttt

SEQ ID NO: 545877 - DNA, 15 bp, Homo sapiens
agcgtgagctgcctt

SEQ ID NO: 545878 - DNA, 15 bp, Homo sapiens
gagcgtgagctgcct

SEQ ID NO: 545879 - DNA, 15 bp, Homo sapiens
cgagcgtgagctgcc

SEQ ID NO: 545880 - DNA, 15 bp, Homo sapiens
gcgagcgtgagctgc

SEQ ID NO: 545881 - DNA, 15 bp, Homo sapiens
ggcgagcgtgagctg

SEQ ID NO: 545882 - DNA, 15 bp, Homo sapiens
gggcgagcgtgagct

SEQ ID NO: 545883 - DNA, 15 bp, Homo sapiens
ggggcgagcgtgagc

SEQ ID NO: 545884 - DNA, 15 bp, Homo sapiens
cggggcgagcgtgag

SEQ ID NO: 545885 - DNA, 15 bp, Homo sapiens
ccggggcgagcgtga

SEQ ID NO: 545886 - DNA, 15 bp, Homo sapiens
gccggggcgagcgtg

SEQ ID NO: 545887 - DNA, 15 bp, Homo sapiens
agccggggcgagcgt

SEQ ID NO: 545888 - DNA, 15 bp, Homo sapiens
cagccggggcgagcg

SEQ ID NO: 545889 - DNA, 15 bp, Homo sapiens
ccagccggggcgagc

SEQ ID NO: 545890 - DNA, 15 bp, Homo sapiens
gccagccggggcgag

SEQ ID NO: 545891 - DNA, 15 bp, Homo sapiens
agccagccggggcga

SEQ ID NO: 545892 - DNA, 15 bp, Homo sapiens
gagccagccggggcg

SEQ ID NO: 545893 - DNA, 15 bp, Homo sapiens
ggagccagccggggc

SEQ ID NO: 545894 - DNA, 15 bp, Homo sapiens
aggagccagccgggg

SEQ ID NO: 545895 - DNA, 15 bp, Homo sapiens
gaggagccagccggg

SEQ ID NO: 545896 - DNA, 15 bp, Homo sapiens
tgaggagccagccgg

SEQ ID NO: 545897 - DNA, 15 bp, Homo sapiens
atgaggagccagccg

SEQ ID NO: 545898 - DNA, 15 bp, Homo sapiens
gatgaggagccagcc

SEQ ID NO: 545899 - DNA, 15 bp, Homo sapiens
tgatgaggagccagc

SEQ ID NO: 545900 - DNA, 15 bp, Homo sapiens
gtgatgaggagccag

SEQ ID NO: 545901 - DNA, 15 bp, Homo sapiens
ggtgatgaggagcca

SEQ ID NO: 545902 - DNA, 15 bp, Homo sapiens
gggtgatgaggagcc

SEQ ID NO: 545903 - DNA, 15 bp, Homo sapiens
agggtgatgaggagc

SEQ ID NO: 545904 - DNA, 15 bp, Homo sapiens
gagggtgatgaggag

SEQ ID NO: 545905 - DNA, 15 bp, Homo sapiens
cgagggtgatgagga

SEQ ID NO: 545906 - DNA, 15 bp, Homo sapiens
ccgagggtgatgagg

SEQ ID NO: 545907 - DNA, 15 bp, Homo sapiens
gccgagggtgatgag

SEQ ID NO: 545908 - DNA, 15 bp, Homo sapiens
ggccgagggtgatga

SEQ ID NO: 545909 - DNA, 15 bp, Homo sapiens
tggccgagggtgatg

SEQ ID NO: 545910 - DNA, 15 bp, Homo sapiens
gtggccgagggtgat

SEQ ID NO: 545911 - DNA, 15 bp, Homo sapiens
tgtggccgagggtga

SEQ ID NO: 545912 - DNA, 15 bp, Homo sapiens
gtgtggccgagggtg

SEQ ID NO: 545913 - DNA, 15 bp, Homo sapiens
ggtgtggccgagggt

SEQ ID NO: 545914 - DNA, 15 bp, Homo sapiens
aggtgtggccgaggg

SEQ ID NO: 545915 - DNA, 15 bp, Homo sapiens
caggtgtggccgagg

SEQ ID NO: 545916 - DNA, 15 bp, Homo sapiens
acaggtgtggccgag

SEQ ID NO: 545917 - DNA, 15 bp, Homo sapiens
cacaggtgtggccga

SEQ ID NO: 545918 - DNA, 15 bp, Homo sapiens
ccacaggtgtggccg

SEQ ID NO: 545919 - DNA, 15 bp, Homo sapiens
gccacaggtgtggcc

SEQ ID NO: 545920 - DNA, 15 bp, Homo sapiens
agccacaggtgtggc

SEQ ID NO: 545921 - DNA, 15 bp, Homo sapiens
gagccacaggtgtgg

SEQ ID NO: 545922 - DNA, 15 bp, Homo sapiens
ggagccacaggtgtg

SEQ ID NO: 545923 - DNA, 15 bp, Homo sapiens
gggagccacaggtgt

SEQ ID NO: 545924 - DNA, 15 bp, Homo sapiens
tgggagccacaggtg

SEQ ID NO: 545925 - DNA, 15 bp, Homo sapiens
gtgggagccacaggt

SEQ ID NO: 545926 - DNA, 15 bp, Homo sapiens
ggtgggagccacagg

SEQ ID NO: 545927 - DNA, 15 bp, Homo sapiens
tggtgggagccacag

SEQ ID NO: 545928 - DNA, 15 bp, Homo sapiens
ctggtgggagccaca

SEQ ID NO: 545929 - DNA, 15 bp, Homo sapiens
gctggtgggagccac

SEQ ID NO: 545930 - DNA, 15 bp, Homo sapiens
agctggtgggagcca

SEQ ID NO: 545931 - DNA, 15 bp, Homo sapiens
aagctggtgggagcc

SEQ ID NO: 545932 - DNA, 15 bp, Homo sapiens
gaagctggtgggagc

SEQ ID NO: 545933 - DNA, 15 bp, Homo sapiens
ggaagctggtgggag

SEQ ID NO: 545934 - DNA, 15 bp, Homo sapiens
gggaagctggtggga

SEQ ID NO: 545935 - DNA, 15 bp, Homo sapiens
tgggaagctggtggg

SEQ ID NO: 545936 - DNA, 15 bp, Homo sapiens
gtgggaagctggtgg

SEQ ID NO: 545937 - DNA, 15 bp, Homo sapiens
agtgggaagctggtg

SEQ ID NO: 545938 - DNA, 15 bp, Homo sapiens
gagtgggaagctggt

SEQ ID NO: 545939 - DNA, 15 bp, Homo sapiens
ggagtgggaagctgg

SEQ ID NO: 545940 - DNA, 15 bp, Homo sapiens
tggagtgggaagctg

SEQ ID NO: 545941 - DNA, 15 bp, Homo sapiens
atggagtgggaagct

SEQ ID NO: 545942 - DNA, 15 bp, Homo sapiens
gatggagtgggaagc

SEQ ID NO: 545943 - DNA, 15 bp, Homo sapiens
tgatggagtgggaag

SEQ ID NO: 545944 - DNA, 15 bp, Homo sapiens
atgatggagtgggaa

SEQ ID NO: 545945 - DNA, 15 bp, Homo sapiens
tatgatggagtggga

SEQ ID NO: 545946 - DNA, 15 bp, Homo sapiens
ctatgatggagtggg

SEQ ID NO: 545947 - DNA, 15 bp, Homo sapiens
gctatgatggagtgg

SEQ ID NO: 545948 - DNA, 15 bp, Homo sapiens
ggctatgatggagtg

SEQ ID NO: 545949 - DNA, 15 bp, Homo sapiens
gggctatgatggagt

SEQ ID NO: 545950 - DNA, 15 bp, Homo sapiens
ggggctatgatggag

SEQ ID NO: 545951 - DNA, 15 bp, Homo sapiens
gggggctatgatgga

SEQ ID NO: 545952 - DNA, 15 bp, Homo sapiens
ggggggctatgatgg

SEQ ID NO: 545953 - DNA, 15 bp, Homo sapiens
gggggggctatgatg

SEQ ID NO: 545954 - DNA, 15 bp, Homo sapiens
tgggggggctatgat

SEQ ID NO: 545955 - DNA, 15 bp, Homo sapiens
atgggggggctatga

SEQ ID NO: 545956 - DNA, 15 bp, Homo sapiens
gatgggggggctatg

SEQ ID NO: 545957 - DNA, 15 bp, Homo sapiens
agatgggggggctat

SEQ ID NO: 545958 - DNA, 15 bp, Homo sapiens
aagatgggggggcta

SEQ ID NO: 545959 - DNA, 15 bp, Homo sapiens
gaagatgggggggct

SEQ ID NO: 545960 - DNA, 15 bp, Homo sapiens
ggaagatgggggggc

SEQ ID NO: 545961 - DNA, 15 bp, Homo sapiens
tggaagatggggggg

SEQ ID NO: 545962 - DNA, 15 bp, Homo sapiens
ctggaagatgggggg

SEQ ID NO: 545963 - DNA, 15 bp, Homo sapiens
actggaagatggggg

SEQ ID NO: 545964 - DNA, 15 bp, Homo sapiens
aactggaagatgggg

SEQ ID NO: 545965 - DNA, 15 bp, Homo sapiens
caactggaagatggg

SEQ ID NO: 545966 - DNA, 15 bp, Homo sapiens
gcaactggaagatgg

SEQ ID NO: 545967 - DNA, 15 bp, Homo sapiens
ggcaactggaagatg

SEQ ID NO: 545968 - DNA, 15 bp, Homo sapiens
gggcaactggaagat

SEQ ID NO: 545969 - DNA, 15 bp, Homo sapiens
cgggcaactggaaga

SEQ ID NO: 545970 - DNA, 15 bp, Homo sapiens
ccgggcaactggaag

SEQ ID NO: 545971 - DNA, 15 bp, Homo sapiens
cccgggcaactggaa

SEQ ID NO: 545972 - DNA, 15 bp, Homo sapiens
gcccgggcaactgga

SEQ ID NO: 545973 - DNA, 15 bp, Homo sapiens
ggcccgggcaactgg

SEQ ID NO: 545974 - DNA, 15 bp, Homo sapiens
tggcccgggcaactg

SEQ ID NO: 545975 - DNA, 15 bp, Homo sapiens
ttggcccgggcaact

SEQ ID NO: 545976 - DNA, 15 bp, Homo sapiens
gttggcccgggcaac

SEQ ID NO: 545977 - DNA, 15 bp, Homo sapiens
tgttggcccgggcaa

SEQ ID NO: 545978 - DNA, 15 bp, Homo sapiens
atgttggcccgggca

SEQ ID NO: 545979 - DNA, 15 bp, Homo sapiens
gatgttggcccgggc

SEQ ID NO: 545980 - DNA, 15 bp, Homo sapiens
agatgttggcccggg

SEQ ID NO: 545981 - DNA, 15 bp, Homo sapiens
aagatgttggcccgg

SEQ ID NO: 545982 - DNA, 15 bp, Homo sapiens
caagatgttggcccg

SEQ ID NO: 545983 - DNA, 15 bp, Homo sapiens
gcaagatgttggccc

SEQ ID NO: 545984 - DNA, 15 bp, Homo sapiens
tgcaagatgttggcc

SEQ ID NO: 545985 - DNA, 15 bp, Homo sapiens
gtgcaagatgttggc

SEQ ID NO: 545986 - DNA, 15 bp, Homo sapiens
agtgcaagatgttgg

SEQ ID NO: 545987 - DNA, 15 bp, Homo sapiens
gagtgcaagatgttg

SEQ ID NO: 545988 - DNA, 15 bp, Homo sapiens
tgagtgcaagatgtt

SEQ ID NO: 545989 - DNA, 15 bp, Homo sapiens
ctgagtgcaagatgt

SEQ ID NO: 545990 - DNA, 15 bp, Homo sapiens
gctgagtgcaagatg

SEQ ID NO: 545991 - DNA, 15 bp, Homo sapiens
ggctgagtgcaagat

SEQ ID NO: 545992 - DNA, 15 bp, Homo sapiens
aggctgagtgcaaga

SEQ ID NO: 545993 - DNA, 15 bp, Homo sapiens
aaggctgagtgcaag

SEQ ID NO: 545994 - DNA, 15 bp, Homo sapiens
caaggctgagtgcaa

SEQ ID NO: 545995 - DNA, 15 bp, Homo sapiens
tcaaggctgagtgca

SEQ ID NO: 545996 - DNA, 15 bp, Homo sapiens
gtcaaggctgagtgc

SEQ ID NO: 545997 - DNA, 15 bp, Homo sapiens
agtcaaggctgagtg

SEQ ID NO: 545998 - DNA, 15 bp, Homo sapiens
gagtcaaggctgagt

SEQ ID NO: 545999 - DNA, 15 bp, Homo sapiens
agagtcaaggctgag

SEQ ID NO: 546000 - DNA, 15 bp, Homo sapiens
cagagtcaaggctga

SEQ ID NO: 546001 - DNA, 15 bp, Homo sapiens
acagagtcaaggctg

SEQ ID NO: 546002 - DNA, 15 bp, Homo sapiens
aacagagtcaaggct

SEQ ID NO: 546003 - DNA, 15 bp, Homo sapiens
gaacagagtcaaggc

SEQ ID NO: 546004 - DNA, 15 bp, Homo sapiens
agaacagagtcaagg

SEQ ID NO: 546005 - DNA, 15 bp, Homo sapiens
gagaacagagtcaag

SEQ ID NO: 546006 - DNA, 15 bp, Homo sapiens
agagaacagagtcaa

SEQ ID NO: 546007 - DNA, 15 bp, Homo sapiens
gagagaacagagtca

SEQ ID NO: 546008 - DNA, 15 bp, Homo sapiens
ggagagaacagagtc

SEQ ID NO: 546009 - DNA, 15 bp, Homo sapiens
tggagagaacagagt

SEQ ID NO: 546010 - DNA, 15 bp, Homo sapiens
gtggagagaacagag

SEQ ID NO: 546011 - DNA, 15 bp, Homo sapiens
agtggagagaacaga

SEQ ID NO: 546012 - DNA, 15 bp, Homo sapiens
aagtggagagaacag

SEQ ID NO: 546013 - DNA, 15 bp, Homo sapiens
gaagtggagagaaca

SEQ ID NO: 546014 - DNA, 15 bp, Homo sapiens
ggaagtggagagaac

SEQ ID NO: 546015 - DNA, 15 bp, Homo sapiens
gggaagtggagagaa

SEQ ID NO: 546016 - DNA, 15 bp, Homo sapiens
agggaagtggagaga

SEQ ID NO: 546017 - DNA, 15 bp, Homo sapiens
gagggaagtggagag

SEQ ID NO: 546018 - DNA, 15 bp, Homo sapiens
tgagggaagtggaga

SEQ ID NO: 546019 - DNA, 15 bp, Homo sapiens
ctgagggaagtggag

SEQ ID NO: 546020 - DNA, 15 bp, Homo sapiens
tctgagggaagtgga

SEQ ID NO: 546021 - DNA, 15 bp, Homo sapiens
ctctgagggaagtgg

SEQ ID NO: 546022 - DNA, 15 bp, Homo sapiens
tctctgagggaagtg

SEQ ID NO: 546023 - DNA, 15 bp, Homo sapiens
ttctctgagggaagt

SEQ ID NO: 546024 - DNA, 15 bp, Homo sapiens
gttctctgagggaag

SEQ ID NO: 546025 - DNA, 15 bp, Homo sapiens
ggttctctgagggaa

SEQ ID NO: 546026 - DNA, 15 bp, Homo sapiens
gggttctctgaggga

SEQ ID NO: 546027 - DNA, 15 bp, Homo sapiens
cgggttctctgaggg

SEQ ID NO: 546028 - DNA, 15 bp, Homo sapiens
acgggttctctgagg

SEQ ID NO: 546029 - DNA, 15 bp, Homo sapiens
gacgggttctctgag

SEQ ID NO: 546030 - DNA, 15 bp, Homo sapiens
tgacgggttctctga

SEQ ID NO: 546031 - DNA, 15 bp, Homo sapiens
ctgacgggttctctg

SEQ ID NO: 546032 - DNA, 15 bp, Homo sapiens
tctgacgggttctct

SEQ ID NO: 546033 - DNA, 15 bp, Homo sapiens
ttctgacgggttctc

SEQ ID NO: 546034 - DNA, 15 bp, Homo sapiens
tttctgacgggttct

SEQ ID NO: 546035 - DNA, 15 bp, Homo sapiens
ctttctgacgggttc

SEQ ID NO: 546036 - DNA, 15 bp, Homo sapiens
actttctgacgggtt

SEQ ID NO: 546037 - DNA, 15 bp, Homo sapiens
aactttctgacgggt

SEQ ID NO: 546038 - DNA, 15 bp, Homo sapiens
aaactttctgacggg

SEQ ID NO: 546039 - DNA, 15 bp, Homo sapiens
aaaactttctgacgg

SEQ ID NO: 546040 - DNA, 15 bp, Homo sapiens
gaaaactttctgacg

SEQ ID NO: 546041 - DNA, 15 bp, Homo sapiens
agaaaactttctgac

SEQ ID NO: 546042 - DNA, 15 bp, Homo sapiens
tagaaaactttctga

SEQ ID NO: 546043 - DNA, 15 bp, Homo sapiens
ctagaaaactttctg

SEQ ID NO: 546044 - DNA, 15 bp, Homo sapiens
gctagaaaactttct

SEQ ID NO: 546045 - DNA, 15 bp, Homo sapiens
agctagaaaactttc

SEQ ID NO: 546046 - DNA, 15 bp, Homo sapiens
aagctagaaaacttt

SEQ ID NO: 546047 - DNA, 15 bp, Homo sapiens
gaagctagaaaactt

SEQ ID NO: 546048 - DNA, 15 bp, Homo sapiens
tgaagctagaaaact

SEQ ID NO: 546049 - DNA, 15 bp, Homo sapiens
atgaagctagaaaac

SEQ ID NO: 546050 - DNA, 15 bp, Homo sapiens
gatgaagctagaaaa

SEQ ID NO: 546051 - DNA, 15 bp, Homo sapiens
tgatgaagctagaaa

SEQ ID NO: 546052 - DNA, 15 bp, Homo sapiens
atgatgaagctagaa

SEQ ID NO: 546053 - DNA, 15 bp, Homo sapiens
gatgatgaagctaga

SEQ ID NO: 546054 - DNA, 15 bp, Homo sapiens
agatgatgaagctag

SEQ ID NO: 546055 - DNA, 15 bp, Homo sapiens
tagatgatgaagcta

SEQ ID NO: 546056 - DNA, 15 bp, Homo sapiens
ttagatgatgaagct

SEQ ID NO: 546057 - DNA, 15 bp, Homo sapiens
tttagatgatgaagc

SEQ ID NO: 546058 - DNA, 15 bp, Homo sapiens
atttagatgatgaag

SEQ ID NO: 546059 - DNA, 15 bp, Homo sapiens
tatttagatgatgaa

SEQ ID NO: 546060 - DNA, 15 bp, Homo sapiens
atatttagatgatga

SEQ ID NO: 546061 - DNA, 15 bp, Homo sapiens
tatatttagatgatg

SEQ ID NO: 546062 - DNA, 15 bp, Homo sapiens
gtatatttagatgat

SEQ ID NO: 546063 - DNA, 15 bp, Homo sapiens
ggtatatttagatga

SEQ ID NO: 546064 - DNA, 15 bp, Homo sapiens
gggtatatttagatg

SEQ ID NO: 546065 - DNA, 15 bp, Homo sapiens
tgggtatatttagat

SEQ ID NO: 546066 - DNA, 15 bp, Homo sapiens
ctgggtatatttaga

SEQ ID NO: 546067 - DNA, 15 bp, Homo sapiens
tctgggtatatttag

SEQ ID NO: 546068 - DNA, 15 bp, Homo sapiens
atctgggtatattta

SEQ ID NO: 546069 - DNA, 15 bp, Homo sapiens
aatctgggtatattt

SEQ ID NO: 546070 - DNA, 15 bp, Homo sapiens
gaatctgggtatatt

SEQ ID NO: 546071 - DNA, 15 bp, Homo sapiens
ggaatctgggtatat

SEQ ID NO: 546072 - DNA, 15 bp, Homo sapiens
tggaatctgggtata

SEQ ID NO: 546073 - DNA, 15 bp, Homo sapiens
ttggaatctgggtat

SEQ ID NO: 546074 - DNA, 15 bp, Homo sapiens
gttggaatctgggta

SEQ ID NO: 546075 - DNA, 15 bp, Homo sapiens
agttggaatctgggt

SEQ ID NO: 546076 - DNA, 15 bp, Homo sapiens
tagttggaatctggg

SEQ ID NO: 546077 - DNA, 15 bp, Homo sapiens
gtagttggaatctgg

SEQ ID NO: 546078 - DNA, 15 bp, Homo sapiens
agtagttggaatctg

SEQ ID NO: 546079 - DNA, 15 bp, Homo sapiens
aagtagttggaatct

SEQ ID NO: 546080 - DNA, 15 bp, Homo sapiens
gaagtagttggaatc

SEQ ID NO: 546081 - DNA, 15 bp, Homo sapiens
agaagtagttggaat

SEQ ID NO: 546082 - DNA, 15 bp, Homo sapiens
gagaagtagttggaa

SEQ ID NO: 546083 - DNA, 15 bp, Homo sapiens
tgagaagtagttgga

SEQ ID NO: 546084 - DNA, 15 bp, Homo sapiens
gtgagaagtagttgg

SEQ ID NO: 546085 - DNA, 15 bp, Homo sapiens
ggtgagaagtagttg

SEQ ID NO: 546086 - DNA, 15 bp, Homo sapiens
tggtgagaagtagtt

SEQ ID NO: 546087 - DNA, 15 bp, Homo sapiens
gtggtgagaagtagt

SEQ ID NO: 546088 - DNA, 15 bp, Homo sapiens
cgtggtgagaagtag

SEQ ID NO: 546089 - DNA, 15 bp, Homo sapiens
gcgtggtgagaagta

SEQ ID NO: 546090 - DNA, 15 bp, Homo sapiens
ggcgtggtgagaagt

SEQ ID NO: 546091 - DNA, 15 bp, Homo sapiens
gggcgtggtgagaag

SEQ ID NO: 546092 - DNA, 15 bp, Homo sapiens
cgggcgtggtgagaa

SEQ ID NO: 546093 - DNA, 15 bp, Homo sapiens
tcgggcgtggtgaga

SEQ ID NO: 546094 - DNA, 15 bp, Homo sapiens
ctcgggcgtggtgag

SEQ ID NO: 546095 - DNA, 15 bp, Homo sapiens
cctcgggcgtggtga

SEQ ID NO: 546096 - DNA, 15 bp, Homo sapiens
gcctcgggcgtggtg

SEQ ID NO: 546097 - DNA, 15 bp, Homo sapiens
cgcctcgggcgtggt

SEQ ID NO: 546098 - DNA, 15 bp, Homo sapiens
gcgcctcgggcgtgg

SEQ ID NO: 546099 - DNA, 15 bp, Homo sapiens
ggcgcctcgggcgtg

SEQ ID NO: 546100 - DNA, 15 bp, Homo sapiens
tggcgcctcgggcgt

SEQ ID NO: 546101 - DNA, 15 bp, Homo sapiens
atggcgcctcgggcg

SEQ ID NO: 546102 - DNA, 15 bp, Homo sapiens
gatggcgcctcgggc

SEQ ID NO: 546103 - DNA, 15 bp, Homo sapiens
tgatggcgcctcggg

SEQ ID NO: 546104 - DNA, 15 bp, Homo sapiens
gtgatggcgcctcgg

SEQ ID NO: 546105 - DNA, 15 bp, Homo sapiens
ggtgatggcgcctcg

SEQ ID NO: 546106 - DNA, 15 bp, Homo sapiens
aggtgatggcgcctc

SEQ ID NO: 546107 - DNA, 15 bp, Homo sapiens
gaggtgatggcgcct

SEQ ID NO: 546108 - DNA, 15 bp, Homo sapiens
agaggtgatggcgcc

SEQ ID NO: 546109 - DNA, 15 bp, Homo sapiens
cagaggtgatggcgc

SEQ ID NO: 546110 - DNA, 15 bp, Homo sapiens
ccagaggtgatggcg

SEQ ID NO: 546111 - DNA, 15 bp, Homo sapiens
accagaggtgatggc

SEQ ID NO: 546112 - DNA, 15 bp, Homo sapiens
gaccagaggtgatgg

SEQ ID NO: 546113 - DNA, 15 bp, Homo sapiens
ggaccagaggtgatg

SEQ ID NO: 546114 - DNA, 15 bp, Homo sapiens
tggaccagaggtgat

SEQ ID NO: 546115 - DNA, 15 bp, Homo sapiens
ttggaccagaggtga

SEQ ID NO: 546116 - DNA, 15 bp, Homo sapiens
cttggaccagaggtg

SEQ ID NO: 546117 - DNA, 15 bp, Homo sapiens
ccttggaccagaggt

SEQ ID NO: 546118 - DNA, 15 bp, Homo sapiens
gccttggaccagagg

SEQ ID NO: 546119 - DNA, 15 bp, Homo sapiens
tgccttggaccagag

SEQ ID NO: 546120 - DNA, 15 bp, Homo sapiens
gtgccttggaccaga

SEQ ID NO: 546121 - DNA, 15 bp, Homo sapiens
ggtgccttggaccag

SEQ ID NO: 546122 - DNA, 15 bp, Homo sapiens
tggtgccttggacca

SEQ ID NO: 546123 - DNA, 15 bp, Homo sapiens
atggtgccttggacc

SEQ ID NO: 546124 - DNA, 15 bp, Homo sapiens
gatggtgccttggac

SEQ ID NO: 546125 - DNA, 15 bp, Homo sapiens
tgatggtgccttgga

SEQ ID NO: 546126 - DNA, 15 bp, Homo sapiens
gtgatggtgccttgg

SEQ ID NO: 546127 - DNA, 15 bp, Homo sapiens
ggtgatggtgccttg

SEQ ID NO: 546128 - DNA, 15 bp, Homo sapiens
aggtgatggtgcctt

SEQ ID NO: 546129 - DNA, 15 bp, Homo sapiens
gaggtgatggtgcct

SEQ ID NO: 546130 - DNA, 15 bp, Homo sapiens
agaggtgatggtgcc

SEQ ID NO: 546131 - DNA, 15 bp, Homo sapiens
gagaggtgatggtgc

SEQ ID NO: 546132 - DNA, 15 bp, Homo sapiens
ggagaggtgatggtg

SEQ ID NO: 546133 - DNA, 15 bp, Homo sapiens
gggagaggtgatggt

SEQ ID NO: 546134 - DNA, 15 bp, Homo sapiens
ggggagaggtgatgg

SEQ ID NO: 546135 - DNA, 15 bp, Homo sapiens
gggggagaggtgatg

SEQ ID NO: 546136 - DNA, 15 bp, Homo sapiens
tgggggagaggtgat

SEQ ID NO: 546137 - DNA, 15 bp, Homo sapiens
ctgggggagaggtga

SEQ ID NO: 546138 - DNA, 15 bp, Homo sapiens
tctgggggagaggtg

SEQ ID NO: 546139 - DNA, 15 bp, Homo sapiens
atctgggggagaggt

SEQ ID NO: 546140 - DNA, 15 bp, Homo sapiens
aatctgggggagagg

SEQ ID NO: 546141 - DNA, 15 bp, Homo sapiens
gaatctgggggagag

SEQ ID NO: 546142 - DNA, 15 bp, Homo sapiens
ggaatctgggggaga

SEQ ID NO: 546143 - DNA, 15 bp, Homo sapiens
aggaatctgggggag

SEQ ID NO: 546144 - DNA, 15 bp, Homo sapiens
caggaatctggggga

SEQ ID NO: 546145 - DNA, 15 bp, Homo sapiens
gcaggaatctggggg

SEQ ID NO: 546146 - DNA, 15 bp, Homo sapiens
tgcaggaatctgggg

SEQ ID NO: 546147 - DNA, 15 bp, Homo sapiens
atgcaggaatctggg

SEQ ID NO: 546148 - DNA, 15 bp, Homo sapiens
gatgcaggaatctgg

SEQ ID NO: 546149 - DNA, 15 bp, Homo sapiens
ggatgcaggaatctg

SEQ ID NO: 546150 - DNA, 15 bp, Homo sapiens
cggatgcaggaatct

SEQ ID NO: 546151 - DNA, 15 bp, Homo sapiens
gcggatgcaggaatc

SEQ ID NO: 546152 - DNA, 15 bp, Homo sapiens
ggcggatgcaggaat

SEQ ID NO: 546153 - DNA, 15 bp, Homo sapiens
aggcggatgcaggaa

SEQ ID NO: 546154 - DNA, 15 bp, Homo sapiens
gaggcggatgcagga

SEQ ID NO: 546155 - DNA, 15 bp, Homo sapiens
ggaggcggatgcagg

SEQ ID NO: 546156 - DNA, 15 bp, Homo sapiens
aggaggcggatgcag

SEQ ID NO: 546157 - DNA, 15 bp, Homo sapiens
gaggaggcggatgca

SEQ ID NO: 546158 - DNA, 15 bp, Homo sapiens
tgaggaggcggatgc

SEQ ID NO: 546159 - DNA, 15 bp, Homo sapiens
gtgaggaggcggatg

SEQ ID NO: 546160 - DNA, 15 bp, Homo sapiens
agtgaggaggcggat

SEQ ID NO: 546161 - DNA, 15 bp, Homo sapiens
cagtgaggaggcgga

SEQ ID NO: 546162 - DNA, 15 bp, Homo sapiens
ccagtgaggaggcgg

SEQ ID NO: 546163 - DNA, 15 bp, Homo sapiens
gccagtgaggaggcg

SEQ ID NO: 546164 - DNA, 15 bp, Homo sapiens
ggccagtgaggaggc

SEQ ID NO: 546165 - DNA, 15 bp, Homo sapiens
aggccagtgaggagg

SEQ ID NO: 546166 - DNA, 15 bp, Homo sapiens
gaggccagtgaggag

SEQ ID NO: 546167 - DNA, 15 bp, Homo sapiens
ggaggccagtgagga

SEQ ID NO: 546168 - DNA, 15 bp, Homo sapiens
gggaggccagtgagg

SEQ ID NO: 546169 - DNA, 15 bp, Homo sapiens
agggaggccagtgag

SEQ ID NO: 546170 - DNA, 15 bp, Homo sapiens
cagggaggccagtga

SEQ ID NO: 546171 - DNA, 15 bp, Homo sapiens
acagggaggccagtg

SEQ ID NO: 546172 - DNA, 15 bp, Homo sapiens
cacagggaggccagt

SEQ ID NO: 546173 - DNA, 15 bp, Homo sapiens
gcacagggaggccag

SEQ ID NO: 546174 - DNA, 15 bp, Homo sapiens
agcacagggaggcca

SEQ ID NO: 546175 - DNA, 15 bp, Homo sapiens
gagcacagggaggcc

SEQ ID NO: 546176 - DNA, 15 bp, Homo sapiens
tgagcacagggaggc

SEQ ID NO: 546177 - DNA, 15 bp, Homo sapiens
atgagcacagggagg

SEQ ID NO: 546178 - DNA, 15 bp, Homo sapiens
gatgagcacagggag

SEQ ID NO: 546179 - DNA, 15 bp, Homo sapiens
ggatgagcacaggga

SEQ ID NO: 546180 - DNA, 15 bp, Homo sapiens
aggatgagcacaggg

SEQ ID NO: 546181 - DNA, 15 bp, Homo sapiens
aaggatgagcacagg

SEQ ID NO: 546182 - DNA, 15 bp, Homo sapiens
caaggatgagcacag

SEQ ID NO: 546183 - DNA, 15 bp, Homo sapiens
gcaaggatgagcaca

SEQ ID NO: 546184 - DNA, 15 bp, Homo sapiens
agcaaggatgagcac

SEQ ID NO: 546185 - DNA, 15 bp, Homo sapiens
gagcaaggatgagca

SEQ ID NO: 546186 - DNA, 15 bp, Homo sapiens
ggagcaaggatgagc

SEQ ID NO: 546187 - DNA, 15 bp, Homo sapiens
gggagcaaggatgag

SEQ ID NO: 546188 - DNA, 15 bp, Homo sapiens
ggggagcaaggatga

SEQ ID NO: 546189 - DNA, 15 bp, Homo sapiens
tggggagcaaggatg

SEQ ID NO: 546190 - DNA, 15 bp, Homo sapiens
ctggggagcaaggat

SEQ ID NO: 546191 - DNA, 15 bp, Homo sapiens
actggggagcaagga

SEQ ID NO: 546192 - DNA, 15 bp, Homo sapiens
cactggggagcaagg

SEQ ID NO: 546193 - DNA, 15 bp, Homo sapiens
ccactggggagcaag

SEQ ID NO: 546194 - DNA, 15 bp, Homo sapiens
cccactggggagcaa

SEQ ID NO: 546195 - DNA, 15 bp, Homo sapiens
ccccactggggagca

SEQ ID NO: 546196 - DNA, 15 bp, Homo sapiens
accccactggggagc

SEQ ID NO: 546197 - DNA, 15 bp, Homo sapiens
aaccccactggggag

SEQ ID NO: 546198 - DNA, 15 bp, Homo sapiens
aaaccccactgggga

SEQ ID NO: 546199 - DNA, 15 bp, Homo sapiens
gaaaccccactgggg

SEQ ID NO: 546200 - DNA, 15 bp, Homo sapiens
agaaaccccactggg

SEQ ID NO: 546201 - DNA, 15 bp, Homo sapiens
gagaaaccccactgg

SEQ ID NO: 546202 - DNA, 15 bp, Homo sapiens
tgagaaaccccactg

SEQ ID NO: 546203 - DNA, 15 bp, Homo sapiens
ttgagaaaccccact

SEQ ID NO: 546204 - DNA, 15 bp, Homo sapiens
attgagaaaccccac

SEQ ID NO: 546205 - DNA, 15 bp, Homo sapiens
tattgagaaacccca

SEQ ID NO: 546206 - DNA, 15 bp, Homo sapiens
ttattgagaaacccc

SEQ ID NO: 546207 - DNA, 15 bp, Homo sapiens
cttattgagaaaccc

SEQ ID NO: 546208 - DNA, 15 bp, Homo sapiens
gcttattgagaaacc

SEQ ID NO: 546209 - DNA, 15 bp, Homo sapiens
tgcttattgagaaac

SEQ ID NO: 546210 - DNA, 15 bp, Homo sapiens
ctgcttattgagaaa

SEQ ID NO: 546211 - DNA, 15 bp, Homo sapiens
gctgcttattgagaa

SEQ ID NO: 546212 - DNA, 15 bp, Homo sapiens
ggctgcttattgaga

SEQ ID NO: 546213 - DNA, 15 bp, Homo sapiens
tggctgcttattgag

SEQ ID NO: 546214 - DNA, 15 bp, Homo sapiens
atggctgcttattga

SEQ ID NO: 546215 - DNA, 15 bp, Homo sapiens
catggctgcttattg

SEQ ID NO: 546216 - DNA, 15 bp, Homo sapiens
ccatggctgcttatt

SEQ ID NO: 546217 - DNA, 15 bp, Homo sapiens
cccatggctgcttat

SEQ ID NO: 546218 - DNA, 15 bp, Homo sapiens
tcccatggctgctta

SEQ ID NO: 546219 - DNA, 15 bp, Homo sapiens
ctcccatggctgctt

SEQ ID NO: 546220 - DNA, 15 bp, Homo sapiens
gctcccatggctgct

SEQ ID NO: 546221 - DNA, 15 bp, Homo sapiens
ggctcccatggctgc

SEQ ID NO: 546222 - DNA, 15 bp, Homo sapiens
gggctcccatggctg

SEQ ID NO: 546223 - DNA, 15 bp, Homo sapiens
tgggctcccatggct

SEQ ID NO: 546224 - DNA, 15 bp, Homo sapiens
atgggctcccatggc

SEQ ID NO: 546225 - DNA, 15 bp, Homo sapiens
gatgggctcccatgg

SEQ ID NO: 546226 - DNA, 15 bp, Homo sapiens
tgatgggctcccatg

SEQ ID NO: 546227 - DNA, 15 bp, Homo sapiens
ttgatgggctcccat

SEQ ID NO: 546228 - DNA, 15 bp, Homo sapiens
cttgatgggctccca

SEQ ID NO: 546229 - DNA, 15 bp, Homo sapiens
tcttgatgggctccc

SEQ ID NO: 546230 - DNA, 15 bp, Homo sapiens
atcttgatgggctcc

SEQ ID NO: 546231 - DNA, 15 bp, Homo sapiens
aatcttgatgggctc

SEQ ID NO: 546232 - DNA, 15 bp, Homo sapiens
caatcttgatgggct

SEQ ID NO: 546233 - DNA, 15 bp, Homo sapiens
gcaatcttgatgggc

SEQ ID NO: 546234 - DNA, 15 bp, Homo sapiens
tgcaatcttgatggg

SEQ ID NO: 546235 - DNA, 15 bp, Homo sapiens
gtgcaatcttgatgg

SEQ ID NO: 546236 - DNA, 15 bp, Homo sapiens
agtgcaatcttgatg

SEQ ID NO: 546237 - DNA, 15 bp, Homo sapiens
aagtgcaatcttgat

SEQ ID NO: 546238 - DNA, 15 bp, Homo sapiens
taagtgcaatcttga

SEQ ID NO: 546239 - DNA, 15 bp, Homo sapiens
ctaagtgcaatcttg

SEQ ID NO: 546240 - DNA, 15 bp, Homo sapiens
gctaagtgcaatctt

SEQ ID NO: 546241 - DNA, 15 bp, Homo sapiens
tgctaagtgcaatct

SEQ ID NO: 546242 - DNA, 15 bp, Homo sapiens
gtgctaagtgcaatc

SEQ ID NO: 546243 - DNA, 15 bp, Homo sapiens
ggtgctaagtgcaat

SEQ ID NO: 546244 - DNA, 15 bp, Homo sapiens
aggtgctaagtgcaa

SEQ ID NO: 546245 - DNA, 15 bp, Homo sapiens
gaggtgctaagtgca

SEQ ID NO: 546246 - DNA, 15 bp, Homo sapiens
ggaggtgctaagtgc

SEQ ID NO: 546247 - DNA, 15 bp, Homo sapiens
aggaggtgctaagtg

SEQ ID NO: 546248 - DNA, 15 bp, Homo sapiens
gaggaggtgctaagt

SEQ ID NO: 546249 - DNA, 15 bp, Homo sapiens
ggaggaggtgctaag

SEQ ID NO: 546250 - DNA, 15 bp, Homo sapiens
gggaggaggtgctaa

SEQ ID NO: 546251 - DNA, 15 bp, Homo sapiens
ggggaggaggtgcta

SEQ ID NO: 546252 - DNA, 15 bp, Homo sapiens
aggggaggaggtgct

SEQ ID NO: 546253 - DNA, 15 bp, Homo sapiens
gaggggaggaggtgc

SEQ ID NO: 546254 - DNA, 15 bp, Homo sapiens
tgaggggaggaggtg

SEQ ID NO: 546255 - DNA, 15 bp, Homo sapiens
ttgaggggaggaggt

SEQ ID NO: 546256 - DNA, 15 bp, Homo sapiens
tttgaggggaggagg

SEQ ID NO: 546257 - DNA, 15 bp, Homo sapiens
ctttgaggggaggag

SEQ ID NO: 546258 - DNA, 15 bp, Homo sapiens
gctttgaggggagga

SEQ ID NO: 546259 - DNA, 15 bp, Homo sapiens
ggctttgaggggagg

SEQ ID NO: 546260 - DNA, 15 bp, Homo sapiens
gggctttgaggggag

SEQ ID NO: 546261 - DNA, 15 bp, Homo sapiens
agggctttgagggga

SEQ ID NO: 546262 - DNA, 15 bp, Homo sapiens
cagggctttgagggg

SEQ ID NO: 546263 - DNA, 15 bp, Homo sapiens
tcagggctttgaggg

SEQ ID NO: 546264 - DNA, 15 bp, Homo sapiens
gtcagggctttgagg

SEQ ID NO: 546265 - DNA, 15 bp, Homo sapiens
tgtcagggctttgag

SEQ ID NO: 546266 - DNA, 15 bp, Homo sapiens
atgtcagggctttga

SEQ ID NO: 546267 - DNA, 15 bp, Homo sapiens
catgtcagggctttg

SEQ ID NO: 546268 - DNA, 15 bp, Homo sapiens
ccatgtcagggcttt

SEQ ID NO: 546269 - DNA, 15 bp, Homo sapiens
gccatgtcagggctt

SEQ ID NO: 546270 - DNA, 15 bp, Homo sapiens
ggccatgtcagggct

SEQ ID NO: 546271 - DNA, 15 bp, Homo sapiens
tggccatgtcagggc

SEQ ID NO: 546272 - DNA, 15 bp, Homo sapiens
ctggccatgtcaggg

SEQ ID NO: 546273 - DNA, 15 bp, Homo sapiens
tctggccatgtcagg

SEQ ID NO: 546274 - DNA, 15 bp, Homo sapiens
gtctggccatgtcag

SEQ ID NO: 546275 - DNA, 15 bp, Homo sapiens
ggtctggccatgtca

SEQ ID NO: 546276 - DNA, 15 bp, Homo sapiens
gggtctggccatgtc

SEQ ID NO: 546277 - DNA, 15 bp, Homo sapiens
cgggtctggccatgt

SEQ ID NO: 546278 - DNA, 15 bp, Homo sapiens
acgggtctggccatg

SEQ ID NO: 546279 - DNA, 15 bp, Homo sapiens
gacgggtctggccat

SEQ ID NO: 546280 - DNA, 15 bp, Homo sapiens
ggacgggtctggcca

SEQ ID NO: 546281 - DNA, 15 bp, Homo sapiens
gggacgggtctggcc

SEQ ID NO: 546282 - DNA, 15 bp, Homo sapiens
ggggacgggtctggc

SEQ ID NO: 546283 - DNA, 15 bp, Homo sapiens
aggggacgggtctgg

SEQ ID NO: 546284 - DNA, 15 bp, Homo sapiens
taggggacgggtctg

SEQ ID NO: 546285 - DNA, 15 bp, Homo sapiens
ctaggggacgggtct

SEQ ID NO: 546286 - DNA, 15 bp, Homo sapiens
cctaggggacgggtc

SEQ ID NO: 546287 - DNA, 15 bp, Homo sapiens
tcctaggggacgggt

SEQ ID NO: 546288 - DNA, 15 bp, Homo sapiens
ctcctaggggacggg

SEQ ID NO: 546289 - DNA, 15 bp, Homo sapiens
actcctaggggacgg

SEQ ID NO: 546290 - DNA, 15 bp, Homo sapiens
gactcctaggggacg

SEQ ID NO: 546291 - DNA, 15 bp, Homo sapiens
tgactcctaggggac

SEQ ID NO: 546292 - DNA, 15 bp, Homo sapiens
gtgactcctagggga

SEQ ID NO: 546293 - DNA, 15 bp, Homo sapiens
tgtgactcctagggg

SEQ ID NO: 546294 - DNA, 15 bp, Homo sapiens
ctgtgactcctaggg

SEQ ID NO: 546295 - DNA, 15 bp, Homo sapiens
gctgtgactcctagg

SEQ ID NO: 546296 - DNA, 15 bp, Homo sapiens
ggctgtgactcctag

SEQ ID NO: 546297 - DNA, 15 bp, Homo sapiens
tggctgtgactccta

SEQ ID NO: 546298 - DNA, 15 bp, Homo sapiens
ctggctgtgactcct

SEQ ID NO: 546299 - DNA, 15 bp, Homo sapiens
cctggctgtgactcc

SEQ ID NO: 546300 - DNA, 15 bp, Homo sapiens
acctggctgtgactc

SEQ ID NO: 546301 - DNA, 15 bp, Homo sapiens
gacctggctgtgact

SEQ ID NO: 546302 - DNA, 15 bp, Homo sapiens
ggacctggctgtgac

SEQ ID NO: 546303 - DNA, 15 bp, Homo sapiens
aggacctggctgtga

SEQ ID NO: 546304 - DNA, 15 bp, Homo sapiens
taggacctggctgtg

SEQ ID NO: 546305 - DNA, 15 bp, Homo sapiens
ttaggacctggctgt

SEQ ID NO: 546306 - DNA, 15 bp, Homo sapiens
gttaggacctggctg

SEQ ID NO: 546307 - DNA, 15 bp, Homo sapiens
ggttaggacctggct

SEQ ID NO: 546308 - DNA, 15 bp, Homo sapiens
aggttaggacctggc

SEQ ID NO: 546309 - DNA, 15 bp, Homo sapiens
caggttaggacctgg

SEQ ID NO: 546310 - DNA, 15 bp, Homo sapiens
ccaggttaggacctg

SEQ ID NO: 546311 - DNA, 15 bp, Homo sapiens
gccaggttaggacct

SEQ ID NO: 546312 - DNA, 15 bp, Homo sapiens
ggccaggttaggacc

SEQ ID NO: 546313 - DNA, 15 bp, Homo sapiens
gggccaggttaggac

SEQ ID NO: 546314 - DNA, 15 bp, Homo sapiens
tgggccaggttagga

SEQ ID NO: 546315 - DNA, 15 bp, Homo sapiens
ctgggccaggttagg

SEQ ID NO: 546316 - DNA, 15 bp, Homo sapiens
cctgggccaggttag

SEQ ID NO: 546317 - DNA, 15 bp, Homo sapiens
ccctgggccaggtta

SEQ ID NO: 546318 - DNA, 15 bp, Homo sapiens
gccctgggccaggtt

SEQ ID NO: 546319 - DNA, 15 bp, Homo sapiens
ggccctgggccaggt

SEQ ID NO: 546320 - DNA, 15 bp, Homo sapiens
aggccctgggccagg

SEQ ID NO: 546321 - DNA, 15 bp, Homo sapiens
caggccctgggccag

SEQ ID NO: 546322 - DNA, 15 bp, Homo sapiens
acaggccctgggcca

SEQ ID NO: 546323 - DNA, 15 bp, Homo sapiens
cacaggccctgggcc

SEQ ID NO: 546324 - DNA, 15 bp, Homo sapiens
gcacaggccctgggc

SEQ ID NO: 546325 - DNA, 15 bp, Homo sapiens
ggcacaggccctggg

SEQ ID NO: 546326 - DNA, 15 bp, Homo sapiens
tggcacaggccctgg

SEQ ID NO: 546327 - DNA, 15 bp, Homo sapiens
atggcacaggccctg

SEQ ID NO: 546328 - DNA, 15 bp, Homo sapiens
gatggcacaggccct

SEQ ID NO: 546329 - DNA, 15 bp, Homo sapiens
ggatggcacaggccc

SEQ ID NO: 546330 - DNA, 15 bp, Homo sapiens
tggatggcacaggcc

SEQ ID NO: 546331 - DNA, 15 bp, Homo sapiens
gtggatggcacaggc

SEQ ID NO: 546332 - DNA, 15 bp, Homo sapiens
ggtggatggcacagg

SEQ ID NO: 546333 - DNA, 15 bp, Homo sapiens
gggtggatggcacag

SEQ ID NO: 546334 - DNA, 15 bp, Homo sapiens
ggggtggatggcaca

SEQ ID NO: 546335 - DNA, 15 bp, Homo sapiens
aggggtggatggcac

SEQ ID NO: 546336 - DNA, 15 bp, Homo sapiens
caggggtggatggca

SEQ ID NO: 546337 - DNA, 15 bp, Homo sapiens
gcaggggtggatggc

SEQ ID NO: 546338 - DNA, 15 bp, Homo sapiens
ggcaggggtggatgg

SEQ ID NO: 546339 - DNA, 15 bp, Homo sapiens
tggcaggggtggatg

SEQ ID NO: 546340 - DNA, 15 bp, Homo sapiens
gtggcaggggtggat

SEQ ID NO: 546341 - DNA, 15 bp, Homo sapiens
agtggcaggggtgga

SEQ ID NO: 546342 - DNA, 15 bp, Homo sapiens
aagtggcaggggtgg

SEQ ID NO: 546343 - DNA, 15 bp, Homo sapiens
aaagtggcaggggtg

SEQ ID NO: 546344 - DNA, 15 bp, Homo sapiens
aaaagtggcaggggt

SEQ ID NO: 546345 - DNA, 15 bp, Homo sapiens
gaaaagtggcagggg

SEQ ID NO: 546346 - DNA, 15 bp, Homo sapiens
agaaaagtggcaggg

SEQ ID NO: 546347 - DNA, 15 bp, Homo sapiens
cagaaaagtggcagg

SEQ ID NO: 546348 - DNA, 15 bp, Homo sapiens
ccagaaaagtggcag

SEQ ID NO: 546349 - DNA, 15 bp, Homo sapiens
gccagaaaagtggca

SEQ ID NO: 546350 - DNA, 15 bp, Homo sapiens
cgccagaaaagtggc

SEQ ID NO: 546351 - DNA, 15 bp, Homo sapiens
tcgccagaaaagtgg

SEQ ID NO: 546352 - DNA, 15 bp, Homo sapiens
gtcgccagaaaagtg

SEQ ID NO: 546353 - DNA, 15 bp, Homo sapiens
cgtcgccagaaaagt

SEQ ID NO: 546354 - DNA, 15 bp, Homo sapiens
acgtcgccagaaaag

SEQ ID NO: 546355 - DNA, 15 bp, Homo sapiens
gacgtcgccagaaaa

SEQ ID NO: 546356 - DNA, 15 bp, Homo sapiens
ggacgtcgccagaaa

SEQ ID NO: 546357 - DNA, 15 bp, Homo sapiens
cggacgtcgccagaa

SEQ ID NO: 546358 - DNA, 15 bp, Homo sapiens
gcggacgtcgccaga

SEQ ID NO: 546359 - DNA, 15 bp, Homo sapiens
tgcggacgtcgccag

SEQ ID NO: 546360 - DNA, 15 bp, Homo sapiens
atgcggacgtcgcca

SEQ ID NO: 546361 - DNA, 15 bp, Homo sapiens
aatgcggacgtcgcc

SEQ ID NO: 546362 - DNA, 15 bp, Homo sapiens
gaatgcggacgtcgc

SEQ ID NO: 546363 - DNA, 15 bp, Homo sapiens
ggaatgcggacgtcg

SEQ ID NO: 546364 - DNA, 15 bp, Homo sapiens
gggaatgcggacgtc

SEQ ID NO: 546365 - DNA, 15 bp, Homo sapiens
agggaatgcggacgt

SEQ ID NO: 546366 - DNA, 15 bp, Homo sapiens
aagggaatgcggacg

SEQ ID NO: 546367 - DNA, 15 bp, Homo sapiens
aaagggaatgcggac

SEQ ID NO: 546368 - DNA, 15 bp, Homo sapiens
aaaagggaatgcgga

SEQ ID NO: 546369 - DNA, 15 bp, Homo sapiens
gaaaagggaatgcgg

SEQ ID NO: 546370 - DNA, 15 bp, Homo sapiens
ggaaaagggaatgcg

SEQ ID NO: 546371 - DNA, 15 bp, Homo sapiens
gggaaaagggaatgc

SEQ ID NO: 546372 - DNA, 15 bp, Homo sapiens
agggaaaagggaatg

SEQ ID NO: 546373 - DNA, 15 bp, Homo sapiens
aagggaaaagggaat

SEQ ID NO: 546374 - DNA, 15 bp, Homo sapiens
caagggaaaagggaa

SEQ ID NO: 546375 - DNA, 15 bp, Homo sapiens
gcaagggaaaaggga

SEQ ID NO: 546376 - DNA, 15 bp, Homo sapiens
tgcaagggaaaaggg

SEQ ID NO: 546377 - DNA, 15 bp, Homo sapiens
gtgcaagggaaaagg

SEQ ID NO: 546378 - DNA, 15 bp, Homo sapiens
tgtgcaagggaaaag

SEQ ID NO: 546379 - DNA, 15 bp, Homo sapiens
ttgtgcaagggaaaa

SEQ ID NO: 546380 - DNA, 15 bp, Homo sapiens
attgtgcaagggaaa

SEQ ID NO: 546381 - DNA, 15 bp, Homo sapiens
cattgtgcaagggaa

SEQ ID NO: 546382 - DNA, 15 bp, Homo sapiens
ccattgtgcaaggga

SEQ ID NO: 546383 - DNA, 15 bp, Homo sapiens
gccattgtgcaaggg

SEQ ID NO: 546384 - DNA, 15 bp, Homo sapiens
ggccattgtgcaagg

SEQ ID NO: 546385 - DNA, 15 bp, Homo sapiens
aggccattgtgcaag

SEQ ID NO: 546386 - DNA, 15 bp, Homo sapiens
gaggccattgtgcaa

SEQ ID NO: 546387 - DNA, 15 bp, Homo sapiens
ggaggccattgtgca

SEQ ID NO: 546388 - DNA, 15 bp, Homo sapiens
aggaggccattgtgc

SEQ ID NO: 546389 - DNA, 15 bp, Homo sapiens
caggaggccattgtg

SEQ ID NO: 546390 - DNA, 15 bp, Homo sapiens
ccaggaggccattgt

SEQ ID NO: 546391 - DNA, 15 bp, Homo sapiens
gccaggaggccattg

SEQ ID NO: 546392 - DNA, 15 bp, Homo sapiens
ggccaggaggccatt

SEQ ID NO: 546393 - DNA, 15 bp, Homo sapiens
tggccaggaggccat

SEQ ID NO: 546394 - DNA, 15 bp, Homo sapiens
atggccaggaggcca

SEQ ID NO: 546395 - DNA, 15 bp, Homo sapiens
aatggccaggaggcc

SEQ ID NO: 546396 - DNA, 15 bp, Homo sapiens
gaatggccaggaggc

SEQ ID NO: 546397 - DNA, 15 bp, Homo sapiens
ggaatggccaggagg

SEQ ID NO: 546398 - DNA, 15 bp, Homo sapiens
aggaatggccaggag

SEQ ID NO: 546399 - DNA, 15 bp, Homo sapiens
gaggaatggccagga

SEQ ID NO: 546400 - DNA, 15 bp, Homo sapiens
tgaggaatggccagg

SEQ ID NO: 546401 - DNA, 15 bp, Homo sapiens
ctgaggaatggccag

SEQ ID NO: 546402 - DNA, 15 bp, Homo sapiens
gctgaggaatggcca

SEQ ID NO: 546403 - DNA, 15 bp, Homo sapiens
ggctgaggaatggcc

SEQ ID NO: 546404 - DNA, 15 bp, Homo sapiens
gggctgaggaatggc

SEQ ID NO: 546405 - DNA, 15 bp, Homo sapiens
ggggctgaggaatgg

SEQ ID NO: 546406 - DNA, 15 bp, Homo sapiens
tggggctgaggaatg

SEQ ID NO: 546407 - DNA, 15 bp, Homo sapiens
atggggctgaggaat

SEQ ID NO: 546408 - DNA, 15 bp, Homo sapiens
catggggctgaggaa

SEQ ID NO: 546409 - DNA, 15 bp, Homo sapiens
ccatggggctgagga

SEQ ID NO: 546410 - DNA, 15 bp, Homo sapiens
cccatggggctgagg

SEQ ID NO: 546411 - DNA, 15 bp, Homo sapiens
gcccatggggctgag

SEQ ID NO: 546412 - DNA, 15 bp, Homo sapiens
ggcccatggggctga

SEQ ID NO: 546413 - DNA, 15 bp, Homo sapiens
gggcccatggggctg

SEQ ID NO: 546414 - DNA, 15 bp, Homo sapiens
tgggcccatggggct

SEQ ID NO: 546415 - DNA, 15 bp, Homo sapiens
ttgggcccatggggc

SEQ ID NO: 546416 - DNA, 15 bp, Homo sapiens
attgggcccatgggg

SEQ ID NO: 546417 - DNA, 15 bp, Homo sapiens
gattgggcccatggg

SEQ ID NO: 546418 - DNA, 15 bp, Homo sapiens
cgattgggcccatgg

SEQ ID NO: 546419 - DNA, 15 bp, Homo sapiens
gcgattgggcccatg

SEQ ID NO: 546420 - DNA, 15 bp, Homo sapiens
ggcgattgggcccat

SEQ ID NO: 546421 - DNA, 15 bp, Homo sapiens
aggcgattgggccca

SEQ ID NO: 546422 - DNA, 15 bp, Homo sapiens
aaggcgattgggccc

SEQ ID NO: 546423 - DNA, 15 bp, Homo sapiens
taaggcgattgggcc

SEQ ID NO: 546424 - DNA, 15 bp, Homo sapiens
ctaaggcgattgggc

SEQ ID NO: 546425 - DNA, 15 bp, Homo sapiens
gctaaggcgattggg

SEQ ID NO: 546426 - DNA, 15 bp, Homo sapiens
agctaaggcgattgg

SEQ ID NO: 546427 - DNA, 15 bp, Homo sapiens
gagctaaggcgattg

SEQ ID NO: 546428 - DNA, 15 bp, Homo sapiens
agagctaaggcgatt

SEQ ID NO: 546429 - DNA, 15 bp, Homo sapiens
gagagctaaggcgat

SEQ ID NO: 546430 - DNA, 15 bp, Homo sapiens
ggagagctaaggcga

SEQ ID NO: 546431 - DNA, 15 bp, Homo sapiens
aggagagctaaggcg

SEQ ID NO: 546432 - DNA, 15 bp, Homo sapiens
caggagagctaaggc

SEQ ID NO: 546433 - DNA, 15 bp, Homo sapiens
tcaggagagctaagg

SEQ ID NO: 546434 - DNA, 15 bp, Homo sapiens
gtcaggagagctaag

SEQ ID NO: 546435 - DNA, 15 bp, Homo sapiens
tgtcaggagagctaa

SEQ ID NO: 546436 - DNA, 15 bp, Homo sapiens
gtgtcaggagagcta

SEQ ID NO: 546437 - DNA, 15 bp, Homo sapiens
tgtgtcaggagagct

SEQ ID NO: 546438 - DNA, 15 bp, Homo sapiens
ttgtgtcaggagagc

SEQ ID NO: 546439 - DNA, 15 bp, Homo sapiens
cttgtgtcaggagag

SEQ ID NO: 546440 - DNA, 15 bp, Homo sapiens
gcttgtgtcaggaga

SEQ ID NO: 546441 - DNA, 15 bp, Homo sapiens
ggcttgtgtcaggag

SEQ ID NO: 546442 - DNA, 15 bp, Homo sapiens
gggcttgtgtcagga

SEQ ID NO: 546443 - DNA, 15 bp, Homo sapiens
agggcttgtgtcagg

SEQ ID NO: 546444 - DNA, 15 bp, Homo sapiens
gagggcttgtgtcag

SEQ ID NO: 546445 - DNA, 15 bp, Homo sapiens
agagggcttgtgtca

SEQ ID NO: 546446 - DNA, 15 bp, Homo sapiens
gagagggcttgtgtc

SEQ ID NO: 546447 - DNA, 15 bp, Homo sapiens
tgagagggcttgtgt

SEQ ID NO: 546448 - DNA, 15 bp, Homo sapiens
atgagagggcttgtg

SEQ ID NO: 546449 - DNA, 15 bp, Homo sapiens
gatgagagggcttgt

SEQ ID NO: 546450 - DNA, 15 bp, Homo sapiens
agatgagagggcttg

SEQ ID NO: 546451 - DNA, 15 bp, Homo sapiens
gagatgagagggctt

SEQ ID NO: 546452 - DNA, 15 bp, Homo sapiens
ggagatgagagggct

SEQ ID NO: 546453 - DNA, 15 bp, Homo sapiens
gggagatgagagggc

SEQ ID NO: 546454 - DNA, 15 bp, Homo sapiens
cgggagatgagaggg

SEQ ID NO: 546455 - DNA, 15 bp, Homo sapiens
acgggagatgagagg

SEQ ID NO: 546456 - DNA, 15 bp, Homo sapiens
tacgggagatgagag

SEQ ID NO: 546457 - DNA, 15 bp, Homo sapiens
ctacgggagatgaga

SEQ ID NO: 546458 - DNA, 15 bp, Homo sapiens
cctacgggagatgag

SEQ ID NO: 546459 - DNA, 15 bp, Homo sapiens
acctacgggagatga

SEQ ID NO: 546460 - DNA, 15 bp, Homo sapiens
gacctacgggagatg

SEQ ID NO: 546461 - DNA, 15 bp, Homo sapiens
agacctacgggagat

SEQ ID NO: 546462 - DNA, 15 bp, Homo sapiens
gagacctacgggaga

SEQ ID NO: 546463 - DNA, 15 bp, Homo sapiens
agagacctacgggag

SEQ ID NO: 546464 - DNA, 15 bp, Homo sapiens
cagagacctacggga

SEQ ID NO: 546465 - DNA, 15 bp, Homo sapiens
acagagacctacggg

SEQ ID NO: 546466 - DNA, 15 bp, Homo sapiens
aacagagacctacgg

SEQ ID NO: 546467 - DNA, 15 bp, Homo sapiens
gaacagagacctacg

SEQ ID NO: 546468 - DNA, 15 bp, Homo sapiens
tgaacagagacctac

SEQ ID NO: 546469 - DNA, 15 bp, Homo sapiens
ctgaacagagaccta

SEQ ID NO: 546470 - DNA, 15 bp, Homo sapiens
gctgaacagagacct

SEQ ID NO: 546471 - DNA, 15 bp, Homo sapiens
agctgaacagagacc

SEQ ID NO: 546472 - DNA, 15 bp, Homo sapiens
gagctgaacagagac

SEQ ID NO: 546473 - DNA, 15 bp, Homo sapiens
agagctgaacagaga

SEQ ID NO: 546474 - DNA, 15 bp, Homo sapiens
gagagctgaacagag

SEQ ID NO: 546475 - DNA, 15 bp, Homo sapiens
tgagagctgaacaga

SEQ ID NO: 546476 - DNA, 15 bp, Homo sapiens
gtgagagctgaacag

SEQ ID NO: 546477 - DNA, 15 bp, Homo sapiens
agtgagagctgaaca

SEQ ID NO: 546478 - DNA, 15 bp, Homo sapiens
aagtgagagctgaac

SEQ ID NO: 546479 - DNA, 15 bp, Homo sapiens
caagtgagagctgaa

SEQ ID NO: 546480 - DNA, 15 bp, Homo sapiens
gcaagtgagagctga

SEQ ID NO: 546481 - DNA, 15 bp, Homo sapiens
agcaagtgagagctg

SEQ ID NO: 546482 - DNA, 15 bp, Homo sapiens
gagcaagtgagagct

SEQ ID NO: 546483 - DNA, 15 bp, Homo sapiens
tgagcaagtgagagc

SEQ ID NO: 546484 - DNA, 15 bp, Homo sapiens
gtgagcaagtgagag

SEQ ID NO: 546485 - DNA, 15 bp, Homo sapiens
cgtgagcaagtgaga

SEQ ID NO: 546486 - DNA, 15 bp, Homo sapiens
ccgtgagcaagtgag

SEQ ID NO: 546487 - DNA, 15 bp, Homo sapiens
tccgtgagcaagtga

SEQ ID NO: 546488 - DNA, 15 bp, Homo sapiens
ctccgtgagcaagtg

SEQ ID NO: 546489 - DNA, 15 bp, Homo sapiens
tctccgtgagcaagt

SEQ ID NO: 546490 - DNA, 15 bp, Homo sapiens
gtctccgtgagcaag

SEQ ID NO: 546491 - DNA, 15 bp, Homo sapiens
ggtctccgtgagcaa

SEQ ID NO: 546492 - DNA, 15 bp, Homo sapiens
gggtctccgtgagca

SEQ ID NO: 546493 - DNA, 15 bp, Homo sapiens
agggtctccgtgagc

SEQ ID NO: 546494 - DNA, 15 bp, Homo sapiens
gagggtctccgtgag

SEQ ID NO: 546495 - DNA, 15 bp, Homo sapiens
ggagggtctccgtga

SEQ ID NO: 546496 - DNA, 15 bp, Homo sapiens
gggagggtctccgtg

SEQ ID NO: 546497 - DNA, 15 bp, Homo sapiens
ggggagggtctccgt

SEQ ID NO: 546498 - DNA, 15 bp, Homo sapiens
aggggagggtctccg

SEQ ID NO: 546499 - DNA, 15 bp, Homo sapiens
caggggagggtctcc

SEQ ID NO: 546500 - DNA, 15 bp, Homo sapiens
tcaggggagggtctc

SEQ ID NO: 546501 - DNA, 15 bp, Homo sapiens
atcaggggagggtct

SEQ ID NO: 546502 - DNA, 15 bp, Homo sapiens
aatcaggggagggtc

SEQ ID NO: 546503 - DNA, 15 bp, Homo sapiens
gaatcaggggagggt

SEQ ID NO: 546504 - DNA, 15 bp, Homo sapiens
ggaatcaggggaggg

SEQ ID NO: 546505 - DNA, 15 bp, Homo sapiens
cggaatcaggggagg

SEQ ID NO: 546506 - DNA, 15 bp, Homo sapiens
acggaatcaggggag

SEQ ID NO: 546507 - DNA, 15 bp, Homo sapiens
aacggaatcagggga

SEQ ID NO: 546508 - DNA, 15 bp, Homo sapiens
aaacggaatcagggg

SEQ ID NO: 546509 - DNA, 15 bp, Homo sapiens
caaacggaatcaggg

SEQ ID NO: 546510 - DNA, 15 bp, Homo sapiens
acaaacggaatcagg

SEQ ID NO: 546511 - DNA, 15 bp, Homo sapiens
cacaaacggaatcag

SEQ ID NO: 546512 - DNA, 15 bp, Homo sapiens
gcacaaacggaatca

SEQ ID NO: 546513 - DNA, 15 bp, Homo sapiens
tgcacaaacggaatc

SEQ ID NO: 546514 - DNA, 15 bp, Homo sapiens
atgcacaaacggaat

SEQ ID NO: 546515 - DNA, 15 bp, Homo sapiens
gatgcacaaacggaa

SEQ ID NO: 546516 - DNA, 15 bp, Homo sapiens
tgatgcacaaacgga

SEQ ID NO: 546517 - DNA, 15 bp, Homo sapiens
atgatgcacaaacgg

SEQ ID NO: 546518 - DNA, 15 bp, Homo sapiens
catgatgcacaaacg

SEQ ID NO: 546519 - DNA, 15 bp, Homo sapiens
gcatgatgcacaaac

SEQ ID NO: 546520 - DNA, 15 bp, Homo sapiens
tgcatgatgcacaaa

SEQ ID NO: 546521 - DNA, 15 bp, Homo sapiens
ctgcatgatgcacaa

SEQ ID NO: 546522 - DNA, 15 bp, Homo sapiens
cctgcatgatgcaca

SEQ ID NO: 546523 - DNA, 15 bp, Homo sapiens
acctgcatgatgcac

SEQ ID NO: 546524 - DNA, 15 bp, Homo sapiens
aacctgcatgatgca

SEQ ID NO: 546525 - DNA, 15 bp, Homo sapiens
gaacctgcatgatgc

SEQ ID NO: 546526 - DNA, 15 bp, Homo sapiens
ggaacctgcatgatg

SEQ ID NO: 546527 - DNA, 15 bp, Homo sapiens
gggaacctgcatgat

SEQ ID NO: 546528 - DNA, 15 bp, Homo sapiens
ggggaacctgcatga

SEQ ID NO: 546529 - DNA, 15 bp, Homo sapiens
gggggaacctgcatg

SEQ ID NO: 546530 - DNA, 15 bp, Homo sapiens
agggggaacctgcat

SEQ ID NO: 546531 - DNA, 15 bp, Homo sapiens
aagggggaacctgca

SEQ ID NO: 546532 - DNA, 15 bp, Homo sapiens
caagggggaacctgc

SEQ ID NO: 546533 - DNA, 15 bp, Homo sapiens
acaagggggaacctg

SEQ ID NO: 546534 - DNA, 15 bp, Homo sapiens
gacaagggggaacct

SEQ ID NO: 546535 - DNA, 15 bp, Homo sapiens
ggacaagggggaacc

SEQ ID NO: 546536 - DNA, 15 bp, Homo sapiens
gggacaagggggaac

SEQ ID NO: 546537 - DNA, 15 bp, Homo sapiens
ggggacaagggggaa

SEQ ID NO: 546538 - DNA, 15 bp, Homo sapiens
gggggacaaggggga

SEQ ID NO: 546539 - DNA, 15 bp, Homo sapiens
agggggacaaggggg

SEQ ID NO: 546540 - DNA, 15 bp, Homo sapiens
cagggggacaagggg

SEQ ID NO: 546541 - DNA, 15 bp, Homo sapiens
acagggggacaaggg

SEQ ID NO: 546542 - DNA, 15 bp, Homo sapiens
cacagggggacaagg

SEQ ID NO: 546543 - DNA, 15 bp, Homo sapiens
gcacagggggacaag

SEQ ID NO: 546544 - DNA, 15 bp, Homo sapiens
agcacagggggacaa

SEQ ID NO: 546545 - DNA, 15 bp, Homo sapiens
cagcacagggggaca

SEQ ID NO: 546546 - DNA, 15 bp, Homo sapiens
gcagcacagggggac

SEQ ID NO: 546547 - DNA, 15 bp, Homo sapiens
ggcagcacaggggga

SEQ ID NO: 546548 - DNA, 15 bp, Homo sapiens
tggcagcacaggggg

SEQ ID NO: 546549 - DNA, 15 bp, Homo sapiens
ctggcagcacagggg

SEQ ID NO: 546550 - DNA, 15 bp, Homo sapiens
gctggcagcacaggg

SEQ ID NO: 546551 - DNA, 15 bp, Homo sapiens
ggctggcagcacagg

SEQ ID NO: 546552 - DNA, 15 bp, Homo sapiens
gggctggcagcacag

SEQ ID NO: 546553 - DNA, 15 bp, Homo sapiens
agggctggcagcaca

SEQ ID NO: 546554 - DNA, 15 bp, Homo sapiens
gagggctggcagcac

SEQ ID NO: 546555 - DNA, 15 bp, Homo sapiens
ggagggctggcagca

SEQ ID NO: 546556 - DNA, 15 bp, Homo sapiens
aggagggctggcagc

SEQ ID NO: 546557 - DNA, 15 bp, Homo sapiens
aaggagggctggcag

SEQ ID NO: 546558 - DNA, 15 bp, Homo sapiens
taaggagggctggca

SEQ ID NO: 546559 - DNA, 15 bp, Homo sapiens
gtaaggagggctggc

SEQ ID NO: 546560 - DNA, 15 bp, Homo sapiens
ggtaaggagggctgg

SEQ ID NO: 546561 - DNA, 15 bp, Homo sapiens
gggtaaggagggctg

SEQ ID NO: 546562 - DNA, 15 bp, Homo sapiens
cgggtaaggagggct

SEQ ID NO: 546563 - DNA, 15 bp, Homo sapiens
gcgggtaaggagggc

SEQ ID NO: 546564 - DNA, 15 bp, Homo sapiens
agcgggtaaggaggg

SEQ ID NO: 546565 - DNA, 15 bp, Homo sapiens
gagcgggtaaggagg

SEQ ID NO: 546566 - DNA, 15 bp, Homo sapiens
agagcgggtaaggag

SEQ ID NO: 546567 - DNA, 15 bp, Homo sapiens
cagagcgggtaagga

SEQ ID NO: 546568 - DNA, 15 bp, Homo sapiens
gcagagcgggtaagg

SEQ ID NO: 546569 - DNA, 15 bp, Homo sapiens
agcagagcgggtaag

SEQ ID NO: 546570 - DNA, 15 bp, Homo sapiens
aagcagagcgggtaa

SEQ ID NO: 546571 - DNA, 15 bp, Homo sapiens
taagcagagcgggta

SEQ ID NO: 546572 - DNA, 15 bp, Homo sapiens
ctaagcagagcgggt

SEQ ID NO: 546573 - DNA, 15 bp, Homo sapiens
tctaagcagagcggg

SEQ ID NO: 546574 - DNA, 15 bp, Homo sapiens
gtctaagcagagcgg

SEQ ID NO: 546575 - DNA, 15 bp, Homo sapiens
ggtctaagcagagcg

SEQ ID NO: 546576 - DNA, 15 bp, Homo sapiens
aggtctaagcagagc

SEQ ID NO: 546577 - DNA, 15 bp, Homo sapiens
caggtctaagcagag

SEQ ID NO: 546578 - DNA, 15 bp, Homo sapiens
acaggtctaagcaga

SEQ ID NO: 546579 - DNA, 15 bp, Homo sapiens
gacaggtctaagcag

SEQ ID NO: 546580 - DNA, 15 bp, Homo sapiens
tgacaggtctaagca

SEQ ID NO: 546581 - DNA, 15 bp, Homo sapiens
ctgacaggtctaagc

SEQ ID NO: 546582 - DNA, 15 bp, Homo sapiens
gctgacaggtctaag

SEQ ID NO: 546583 - DNA, 15 bp, Homo sapiens
ggctgacaggtctaa

SEQ ID NO: 546584 - DNA, 15 bp, Homo sapiens
tggctgacaggtcta

SEQ ID NO: 546585 - DNA, 15 bp, Homo sapiens
gtggctgacaggtct

SEQ ID NO: 546586 - DNA, 15 bp, Homo sapiens
agtggctgacaggtc

SEQ ID NO: 546587 - DNA, 15 bp, Homo sapiens
cagtggctgacaggt

SEQ ID NO: 546588 - DNA, 15 bp, Homo sapiens
acagtggctgacagg

SEQ ID NO: 546589 - DNA, 15 bp, Homo sapiens
tacagtggctgacag

SEQ ID NO: 546590 - DNA, 15 bp, Homo sapiens
ctacagtggctgaca

SEQ ID NO: 546591 - DNA, 15 bp, Homo sapiens
tctacagtggctgac

SEQ ID NO: 546592 - DNA, 15 bp, Homo sapiens
atctacagtggctga

SEQ ID NO: 546593 - DNA, 15 bp, Homo sapiens
tatctacagtggctg

SEQ ID NO: 546594 - DNA, 15 bp, Homo sapiens
gtatctacagtggct

SEQ ID NO: 546595 - DNA, 15 bp, Homo sapiens
ggtatctacagtggc

SEQ ID NO: 546596 - DNA, 15 bp, Homo sapiens
gggtatctacagtgg

SEQ ID NO: 546597 - DNA, 15 bp, Homo sapiens
agggtatctacagtg

SEQ ID NO: 546598 - DNA, 15 bp, Homo sapiens
cagggtatctacagt

SEQ ID NO: 546599 - DNA, 15 bp, Homo sapiens
ccagggtatctacag

SEQ ID NO: 546600 - DNA, 15 bp, Homo sapiens
tccagggtatctaca

SEQ ID NO: 546601 - DNA, 15 bp, Homo sapiens
ttccagggtatctac

SEQ ID NO: 546602 - DNA, 15 bp, Homo sapiens
gttccagggtatcta

SEQ ID NO: 546603 - DNA, 15 bp, Homo sapiens
agttccagggtatct

SEQ ID NO: 546604 - DNA, 15 bp, Homo sapiens
aagttccagggtatc

SEQ ID NO: 546605 - DNA, 15 bp, Homo sapiens
gaagttccagggtat

SEQ ID NO: 546606 - DNA, 15 bp, Homo sapiens
ggaagttccagggta

SEQ ID NO: 546607 - DNA, 15 bp, Homo sapiens
gggaagttccagggt

SEQ ID NO: 546608 - DNA, 15 bp, Homo sapiens
agggaagttccaggg

SEQ ID NO: 546609 - DNA, 15 bp, Homo sapiens
cagggaagttccagg

SEQ ID NO: 546610 - DNA, 15 bp, Homo sapiens
ccagggaagttccag

SEQ ID NO: 546611 - DNA, 15 bp, Homo sapiens
cccagggaagttcca

SEQ ID NO: 546612 - DNA, 15 bp, Homo sapiens
acccagggaagttcc

SEQ ID NO: 546613 - DNA, 15 bp, Homo sapiens
tacccagggaagttc

SEQ ID NO: 546614 - DNA, 15 bp, Homo sapiens
atacccagggaagtt

SEQ ID NO: 546615 - DNA, 15 bp, Homo sapiens
gatacccagggaagt

SEQ ID NO: 546616 - DNA, 15 bp, Homo sapiens
tgatacccagggaag

SEQ ID NO: 546617 - DNA, 15 bp, Homo sapiens
atgatacccagggaa

SEQ ID NO: 546618 - DNA, 15 bp, Homo sapiens
catgatacccaggga

SEQ ID NO: 546619 - DNA, 15 bp, Homo sapiens
acatgatacccaggg

SEQ ID NO: 546620 - DNA, 15 bp, Homo sapiens
aacatgatacccagg

SEQ ID NO: 546621 - DNA, 15 bp, Homo sapiens
caacatgatacccag

SEQ ID NO: 546622 - DNA, 15 bp, Homo sapiens
tcaacatgataccca

SEQ ID NO: 546623 - DNA, 15 bp, Homo sapiens
atcaacatgataccc

SEQ ID NO: 546624 - DNA, 15 bp, Homo sapiens
aatcaacatgatacc

SEQ ID NO: 546625 - DNA, 15 bp, Homo sapiens
caatcaacatgatac

SEQ ID NO: 546626 - DNA, 15 bp, Homo sapiens
acaatcaacatgata

SEQ ID NO: 546627 - DNA, 15 bp, Homo sapiens
aacaatcaacatgat

SEQ ID NO: 546628 - DNA, 15 bp, Homo sapiens
aaacaatcaacatga

SEQ ID NO: 546629 - DNA, 15 bp, Homo sapiens
taaacaatcaacatg

SEQ ID NO: 546630 - DNA, 15 bp, Homo sapiens
ataaacaatcaacat

SEQ ID NO: 546631 - DNA, 15 bp, Homo sapiens
aataaacaatcaaca

SEQ ID NO: 546632 - DNA, 15 bp, Homo sapiens
caataaacaatcaac

SEQ ID NO: 546633 - DNA, 15 bp, Homo sapiens
acaataaacaatcaa

SEQ ID NO: 546634 - DNA, 15 bp, Homo sapiens
gacaataaacaatca

SEQ ID NO: 546635 - DNA, 15 bp, Homo sapiens
agacaataaacaatc

SEQ ID NO: 546636 - DNA, 15 bp, Homo sapiens
tagacaataaacaat

SEQ ID NO: 546637 - DNA, 15 bp, Homo sapiens
atagacaataaacaa

SEQ ID NO: 546638 - DNA, 15 bp, Homo sapiens
aatagacaataaaca

SEQ ID NO: 546639 - DNA, 15 bp, Homo sapiens
aaatagacaataaac

SEQ ID NO: 546640 - DNA, 15 bp, Homo sapiens
gaaatagacaataaa

SEQ ID NO: 546641 - DNA, 15 bp, Homo sapiens
agaaatagacaataa

SEQ ID NO: 546642 - DNA, 15 bp, Homo sapiens
gagaaatagacaata

SEQ ID NO: 546643 - DNA, 15 bp, Homo sapiens
ggagaaatagacaat

SEQ ID NO: 546644 - DNA, 15 bp, Homo sapiens
gggagaaatagacaa

SEQ ID NO: 546645 - DNA, 15 bp, Homo sapiens
ggggagaaatagaca

SEQ ID NO: 546646 - DNA, 15 bp, Homo sapiens
tggggagaaatagac

SEQ ID NO: 546647 - DNA, 15 bp, Homo sapiens
atggggagaaataga

SEQ ID NO: 546648 - DNA, 15 bp, Homo sapiens
catggggagaaatag

SEQ ID NO: 546649 - DNA, 15 bp, Homo sapiens
tcatggggagaaata

SEQ ID NO: 546650 - DNA, 15 bp, Homo sapiens
ctcatggggagaaat

SEQ ID NO: 546651 - DNA, 15 bp, Homo sapiens
tctcatggggagaaa

SEQ ID NO: 546652 - DNA, 15 bp, Homo sapiens
ttctcatggggagaa

SEQ ID NO: 546653 - DNA, 15 bp, Homo sapiens
attctcatggggaga

SEQ ID NO: 546654 - DNA, 15 bp, Homo sapiens
cattctcatggggag

SEQ ID NO: 546655 - DNA, 15 bp, Homo sapiens
acattctcatgggga

SEQ ID NO: 546656 - DNA, 15 bp, Homo sapiens
gacattctcatgggg

SEQ ID NO: 546657 - DNA, 15 bp, Homo sapiens
cgacattctcatggg

SEQ ID NO: 546658 - DNA, 15 bp, Homo sapiens
ccgacattctcatgg

SEQ ID NO: 546659 - DNA, 15 bp, Homo sapiens
tccgacattctcatg

SEQ ID NO: 546660 - DNA, 15 bp, Homo sapiens
gtccgacattctcat

SEQ ID NO: 546661 - DNA, 15 bp, Homo sapiens
agtccgacattctca

SEQ ID NO: 546662 - DNA, 15 bp, Homo sapiens
cagtccgacattctc

SEQ ID NO: 546663 - DNA, 15 bp, Homo sapiens
acagtccgacattct

SEQ ID NO: 546664 - DNA, 15 bp, Homo sapiens
cacagtccgacattc

SEQ ID NO: 546665 - DNA, 15 bp, Homo sapiens
tcacagtccgacatt

SEQ ID NO: 546666 - DNA, 15 bp, Homo sapiens
ctcacagtccgacat

SEQ ID NO: 546667 - DNA, 15 bp, Homo sapiens
cctcacagtccgaca

SEQ ID NO: 546668 - DNA, 15 bp, Homo sapiens
ccctcacagtccgac

SEQ ID NO: 546669 - DNA, 15 bp, Homo sapiens
gccctcacagtccga

SEQ ID NO: 546670 - DNA, 15 bp, Homo sapiens
tgccctcacagtccg

SEQ ID NO: 546671 - DNA, 15 bp, Homo sapiens
ctgccctcacagtcc

SEQ ID NO: 546672 - DNA, 15 bp, Homo sapiens
cctgccctcacagtc

SEQ ID NO: 546673 - DNA, 15 bp, Homo sapiens
ccctgccctcacagt

SEQ ID NO: 546674 - DNA, 15 bp, Homo sapiens
tccctgccctcacag

SEQ ID NO: 546675 - DNA, 15 bp, Homo sapiens
gtccctgccctcaca

SEQ ID NO: 546676 - DNA, 15 bp, Homo sapiens
ggtccctgccctcac

SEQ ID NO: 546677 - DNA, 15 bp, Homo sapiens
aggtccctgccctca

SEQ ID NO: 546678 - DNA, 15 bp, Homo sapiens
aaggtccctgccctc

SEQ ID NO: 546679 - DNA, 15 bp, Homo sapiens
aaaggtccctgccct

SEQ ID NO: 546680 - DNA, 15 bp, Homo sapiens
caaaggtccctgccc

SEQ ID NO: 546681 - DNA, 15 bp, Homo sapiens
acaaaggtccctgcc

SEQ ID NO: 546682 - DNA, 15 bp, Homo sapiens
cacaaaggtccctgc

SEQ ID NO: 546683 - DNA, 15 bp, Homo sapiens
acacaaaggtccctg

SEQ ID NO: 546684 - DNA, 15 bp, Homo sapiens
aacacaaaggtccct

SEQ ID NO: 546685 - DNA, 15 bp, Homo sapiens
taacacaaaggtccc

SEQ ID NO: 546686 - DNA, 15 bp, Homo sapiens
ataacacaaaggtcc

SEQ ID NO: 546687 - DNA, 15 bp, Homo sapiens
aataacacaaaggtc

SEQ ID NO: 546688 - DNA, 15 bp, Homo sapiens
gaataacacaaaggt

SEQ ID NO: 546689 - DNA, 15 bp, Homo sapiens
cgaataacacaaagg

SEQ ID NO: 546690 - DNA, 15 bp, Homo sapiens
acgaataacacaaag

SEQ ID NO: 546691 - DNA, 15 bp, Homo sapiens
aacgaataacacaaa

SEQ ID NO: 546692 - DNA, 15 bp, Homo sapiens
caacgaataacacaa

SEQ ID NO: 546693 - DNA, 15 bp, Homo sapiens
gcaacgaataacaca

SEQ ID NO: 546694 - DNA, 15 bp, Homo sapiens
ggcaacgaataacac

SEQ ID NO: 546695 - DNA, 15 bp, Homo sapiens
cggcaacgaataaca

SEQ ID NO: 546696 - DNA, 15 bp, Homo sapiens
acggcaacgaataac

SEQ ID NO: 546697 - DNA, 15 bp, Homo sapiens
cacggcaacgaataa

SEQ ID NO: 546698 - DNA, 15 bp, Homo sapiens
tcacggcaacgaata

SEQ ID NO: 546699 - DNA, 15 bp, Homo sapiens
gtcacggcaacgaat

SEQ ID NO: 546700 - DNA, 15 bp, Homo sapiens
ggtcacggcaacgaa

SEQ ID NO: 546701 - DNA, 15 bp, Homo sapiens
gggtcacggcaacga

SEQ ID NO: 546702 - DNA, 15 bp, Homo sapiens
tgggtcacggcaacg

SEQ ID NO: 546703 - DNA, 15 bp, Homo sapiens
ttgggtcacggcaac

SEQ ID NO: 546704 - DNA, 15 bp, Homo sapiens
cttgggtcacggcaa

SEQ ID NO: 546705 - DNA, 15 bp, Homo sapiens
gcttgggtcacggca

SEQ ID NO: 546706 - DNA, 15 bp, Homo sapiens
ggcttgggtcacggc

SEQ ID NO: 546707 - DNA, 15 bp, Homo sapiens
gggcttgggtcacgg

SEQ ID NO: 546708 - DNA, 15 bp, Homo sapiens
ggggcttgggtcacg

SEQ ID NO: 546709 - DNA, 15 bp, Homo sapiens
aggggcttgggtcac

SEQ ID NO: 546710 - DNA, 15 bp, Homo sapiens
caggggcttgggtca

SEQ ID NO: 546711 - DNA, 15 bp, Homo sapiens
ccaggggcttgggtc

SEQ ID NO: 546712 - DNA, 15 bp, Homo sapiens
tccaggggcttgggt

SEQ ID NO: 546713 - DNA, 15 bp, Homo sapiens
ttccaggggcttggg

SEQ ID NO: 546714 - DNA, 15 bp, Homo sapiens
gttccaggggcttgg

SEQ ID NO: 546715 - DNA, 15 bp, Homo sapiens
cgttccaggggcttg

SEQ ID NO: 546716 - DNA, 15 bp, Homo sapiens
tcgttccaggggctt

SEQ ID NO: 546717 - DNA, 15 bp, Homo sapiens
atcgttccaggggct

SEQ ID NO: 546718 - DNA, 15 bp, Homo sapiens
catcgttccaggggc

SEQ ID NO: 546719 - DNA, 15 bp, Homo sapiens
gcatcgttccagggg

SEQ ID NO: 546720 - DNA, 15 bp, Homo sapiens
ggcatcgttccaggg

SEQ ID NO: 546721 - DNA, 15 bp, Homo sapiens
aggcatcgttccagg

SEQ ID NO: 546722 - DNA, 15 bp, Homo sapiens
taggcatcgttccag

SEQ ID NO: 546723 - DNA, 15 bp, Homo sapiens
ctaggcatcgttcca

SEQ ID NO: 546724 - DNA, 15 bp, Homo sapiens
gctaggcatcgttcc

SEQ ID NO: 546725 - DNA, 15 bp, Homo sapiens
tgctaggcatcgttc

SEQ ID NO: 546726 - DNA, 15 bp, Homo sapiens
gtgctaggcatcgtt

SEQ ID NO: 546727 - DNA, 15 bp, Homo sapiens
tgtgctaggcatcgt

SEQ ID NO: 546728 - DNA, 15 bp, Homo sapiens
atgtgctaggcatcg

SEQ ID NO: 546729 - DNA, 15 bp, Homo sapiens
tatgtgctaggcatc

SEQ ID NO: 546730 - DNA, 15 bp, Homo sapiens
ttatgtgctaggcat

SEQ ID NO: 546731 - DNA, 15 bp, Homo sapiens
attatgtgctaggca

SEQ ID NO: 546732 - DNA, 15 bp, Homo sapiens
gattatgtgctaggc

SEQ ID NO: 546733 - DNA, 15 bp, Homo sapiens
cgattatgtgctagg

SEQ ID NO: 546734 - DNA, 15 bp, Homo sapiens
gcgattatgtgctag

SEQ ID NO: 546735 - DNA, 15 bp, Homo sapiens
tgcgattatgtgcta

SEQ ID NO: 546736 - DNA, 15 bp, Homo sapiens
ctgcgattatgtgct

SEQ ID NO: 546737 - DNA, 15 bp, Homo sapiens
cctgcgattatgtgc

SEQ ID NO: 546738 - DNA, 15 bp, Homo sapiens
acctgcgattatgtg

SEQ ID NO: 546739 - DNA, 15 bp, Homo sapiens
aacctgcgattatgt

SEQ ID NO: 546740 - DNA, 15 bp, Homo sapiens
gaacctgcgattatg

SEQ ID NO: 546741 - DNA, 15 bp, Homo sapiens
agaacctgcgattat

SEQ ID NO: 546742 - DNA, 15 bp, Homo sapiens
gagaacctgcgatta

SEQ ID NO: 546743 - DNA, 15 bp, Homo sapiens
tgagaacctgcgatt

SEQ ID NO: 546744 - DNA, 15 bp, Homo sapiens
ttgagaacctgcgat

SEQ ID NO: 546745 - DNA, 15 bp, Homo sapiens
tttgagaacctgcga

SEQ ID NO: 546746 - DNA, 15 bp, Homo sapiens
atttgagaacctgcg

SEQ ID NO: 546747 - DNA, 15 bp, Homo sapiens
tatttgagaacctgc

SEQ ID NO: 546748 - DNA, 15 bp, Homo sapiens
atatttgagaacctg

SEQ ID NO: 546749 - DNA, 15 bp, Homo sapiens
aatatttgagaacct

SEQ ID NO: 546750 - DNA, 15 bp, Homo sapiens
aaatatttgagaacc

SEQ ID NO: 546751 - DNA, 15 bp, Homo sapiens
taaatatttgagaac

SEQ ID NO: 546752 - DNA, 15 bp, Homo sapiens
ataaatatttgagaa

SEQ ID NO: 546753 - DNA, 15 bp, Homo sapiens
aataaatatttgaga

SEQ ID NO: 546754 - DNA, 15 bp, Homo sapiens
caataaatatttgag

SEQ ID NO: 546755 - DNA, 15 bp, Homo sapiens
tcaataaatatttga

SEQ ID NO: 546756 - DNA, 15 bp, Homo sapiens
ttcaataaatatttg

SEQ ID NO: 546757 - DNA, 15 bp, Homo sapiens
tttcaataaatattt

SEQ ID NO: 546758 - DNA, 15 bp, Homo sapiens
ctttcaataaatatt

SEQ ID NO: 546759 - DNA, 15 bp, Homo sapiens
cctttcaataaatat

SEQ ID NO: 546760 - DNA, 15 bp, Homo sapiens
tcctttcaataaata

SEQ ID NO: 546761 - DNA, 15 bp, Homo sapiens
atcctttcaataaat

SEQ ID NO: 546762 - DNA, 15 bp, Homo sapiens
catcctttcaataaa

SEQ ID NO: 546763 - DNA, 15 bp, Homo sapiens
acatcctttcaataa

SEQ ID NO: 546764 - DNA, 15 bp, Homo sapiens
aacatcctttcaata

SEQ ID NO: 546765 - DNA, 15 bp, Homo sapiens
aaacatcctttcaat

SEQ ID NO: 546766 - DNA, 15 bp, Homo sapiens
taaacatcctttcaa

SEQ ID NO: 546767 - DNA, 15 bp, Homo sapiens
ttaaacatcctttca

SEQ ID NO: 546768 - DNA, 15 bp, Homo sapiens
tttaaacatcctttc

SEQ ID NO: 546769 - DNA, 15 bp, Homo sapiens
ttttaaacatccttt

SEQ ID NO: 546770 - DNA, 15 bp, Homo sapiens
cttttaaacatcctt

SEQ ID NO: 546771 - DNA, 15 bp, Homo sapiens
tcttttaaacatcct

SEQ ID NO: 546772 - DNA, 15 bp, Homo sapiens
gtcttttaaacatcc

SEQ ID NO: 546773 - DNA, 15 bp, Homo sapiens
tgtcttttaaacatc

SEQ ID NO: 546774 - DNA, 15 bp, Homo sapiens
ttgtcttttaaacat

SEQ ID NO: 546775 - DNA, 15 bp, Homo sapiens
cttgtcttttaaaca

SEQ ID NO: 546776 - DNA, 15 bp, Homo sapiens
ccttgtcttttaaac

SEQ ID NO: 546777 - DNA, 15 bp, Homo sapiens
cccttgtcttttaaa

SEQ ID NO: 546778 - DNA, 15 bp, Homo sapiens
acccttgtcttttaa

SEQ ID NO: 546779 - DNA, 15 bp, Homo sapiens
aacccttgtctttta

SEQ ID NO: 546780 - DNA, 15 bp, Homo sapiens
caacccttgtctttt

SEQ ID NO: 546781 - DNA, 15 bp, Homo sapiens
acaacccttgtcttt

SEQ ID NO: 546782 - DNA, 15 bp, Homo sapiens
aacaacccttgtctt

SEQ ID NO: 546783 - DNA, 15 bp, Homo sapiens
aaacaacccttgtct

SEQ ID NO: 546784 - DNA, 15 bp, Homo sapiens
gaaacaacccttgtc

SEQ ID NO: 546785 - DNA, 15 bp, Homo sapiens
tgaaacaacccttgt

SEQ ID NO: 546786 - DNA, 15 bp, Homo sapiens
gtgaaacaacccttg

SEQ ID NO: 546787 - DNA, 15 bp, Homo sapiens
tgtgaaacaaccctt

SEQ ID NO: 546788 - DNA, 15 bp, Homo sapiens
ctgtgaaacaaccct

SEQ ID NO: 546789 - DNA, 15 bp, Homo sapiens
cctgtgaaacaaccc

SEQ ID NO: 546790 - DNA, 15 bp, Homo sapiens
tcctgtgaaacaacc

SEQ ID NO: 546791 - DNA, 15 bp, Homo sapiens
atcctgtgaaacaac

SEQ ID NO: 546792 - DNA, 15 bp, Homo sapiens
catcctgtgaaacaa

SEQ ID NO: 546793 - DNA, 15 bp, Homo sapiens
ccatcctgtgaaaca

SEQ ID NO: 546794 - DNA, 15 bp, Homo sapiens
accatcctgtgaaac

SEQ ID NO: 546795 - DNA, 15 bp, Homo sapiens
aaccatcctgtgaaa

SEQ ID NO: 546796 - DNA, 15 bp, Homo sapiens
gaaccatcctgtgaa

SEQ ID NO: 546797 - DNA, 15 bp, Homo sapiens
cgaaccatcctgtga

SEQ ID NO: 546798 - DNA, 15 bp, Homo sapiens
acgaaccatcctgtg

SEQ ID NO: 546799 - DNA, 15 bp, Homo sapiens
cacgaaccatcctgt

SEQ ID NO: 546800 - DNA, 15 bp, Homo sapiens
tcacgaaccatcctg

SEQ ID NO: 546801 - DNA, 15 bp, Homo sapiens
gtcacgaaccatcct

SEQ ID NO: 546802 - DNA, 15 bp, Homo sapiens
ggtcacgaaccatcc

SEQ ID NO: 546803 - DNA, 15 bp, Homo sapiens
tggtcacgaaccatc

SEQ ID NO: 546804 - DNA, 15 bp, Homo sapiens
ctggtcacgaaccat

SEQ ID NO: 546805 - DNA, 15 bp, Homo sapiens
actggtcacgaacca

SEQ ID NO: 546806 - DNA, 15 bp, Homo sapiens
cactggtcacgaacc

SEQ ID NO: 546807 - DNA, 15 bp, Homo sapiens
ccactggtcacgaac

SEQ ID NO: 546808 - DNA, 15 bp, Homo sapiens
gccactggtcacgaa

SEQ ID NO: 546809 - DNA, 15 bp, Homo sapiens
tgccactggtcacga

SEQ ID NO: 546810 - DNA, 15 bp, Homo sapiens
ctgccactggtcacg

SEQ ID NO: 546811 - DNA, 15 bp, Homo sapiens
cctgccactggtcac

SEQ ID NO: 546812 - DNA, 15 bp, Homo sapiens
acctgccactggtca

SEQ ID NO: 546813 - DNA, 15 bp, Homo sapiens
aacctgccactggtc

SEQ ID NO: 546814 - DNA, 15 bp, Homo sapiens
caacctgccactggt

SEQ ID NO: 546815 - DNA, 15 bp, Homo sapiens
acaacctgccactgg

SEQ ID NO: 546816 - DNA, 15 bp, Homo sapiens
cacaacctgccactg

SEQ ID NO: 546817 - DNA, 15 bp, Homo sapiens
ccacaacctgccact

SEQ ID NO: 546818 - DNA, 15 bp, Homo sapiens
accacaacctgccac

SEQ ID NO: 546819 - DNA, 15 bp, Homo sapiens
gaccacaacctgcca

SEQ ID NO: 546820 - DNA, 15 bp, Homo sapiens
ggaccacaacctgcc

SEQ ID NO: 546821 - DNA, 15 bp, Homo sapiens
aggaccacaacctgc

SEQ ID NO: 546822 - DNA, 15 bp, Homo sapiens
caggaccacaacctg

SEQ ID NO: 546823 - DNA, 15 bp, Homo sapiens
acaggaccacaacct

SEQ ID NO: 546824 - DNA, 15 bp, Homo sapiens
cacaggaccacaacc

SEQ ID NO: 546825 - DNA, 15 bp, Homo sapiens
gcacaggaccacaac

SEQ ID NO: 546826 - DNA, 15 bp, Homo sapiens
tgcacaggaccacaa

SEQ ID NO: 546827 - DNA, 15 bp, Homo sapiens
ctgcacaggaccaca

SEQ ID NO: 546828 - DNA, 15 bp, Homo sapiens
cctgcacaggaccac

SEQ ID NO: 546829 - DNA, 15 bp, Homo sapiens
ccctgcacaggacca

SEQ ID NO: 546830 - DNA, 15 bp, Homo sapiens
gccctgcacaggacc

SEQ ID NO: 546831 - DNA, 15 bp, Homo sapiens
tgccctgcacaggac

SEQ ID NO: 546832 - DNA, 15 bp, Homo sapiens
ttgccctgcacagga

SEQ ID NO: 546833 - DNA, 15 bp, Homo sapiens
attgccctgcacagg

SEQ ID NO: 546834 - DNA, 15 bp, Homo sapiens
cattgccctgcacag

SEQ ID NO: 546835 - DNA, 15 bp, Homo sapiens
ccattgccctgcaca

SEQ ID NO: 546836 - DNA, 15 bp, Homo sapiens
cccattgccctgcac

SEQ ID NO: 546837 - DNA, 15 bp, Homo sapiens
ccccattgccctgca

SEQ ID NO: 546838 - DNA, 15 bp, Homo sapiens
gccccattgccctgc

SEQ ID NO: 546839 - DNA, 15 bp, Homo sapiens
ggccccattgccctg

SEQ ID NO: 546840 - DNA, 15 bp, Homo sapiens
aggccccattgccct

SEQ ID NO: 546841 - DNA, 15 bp, Homo sapiens
taggccccattgccc

SEQ ID NO: 546842 - DNA, 15 bp, Homo sapiens
gtaggccccattgcc

SEQ ID NO: 546843 - DNA, 15 bp, Homo sapiens
agtaggccccattgc

SEQ ID NO: 546844 - DNA, 15 bp, Homo sapiens
gagtaggccccattg

SEQ ID NO: 546845 - DNA, 15 bp, Homo sapiens
ggagtaggccccatt

SEQ ID NO: 546846 - DNA, 15 bp, Homo sapiens
aggagtaggccccat

SEQ ID NO: 546847 - DNA, 15 bp, Homo sapiens
gaggagtaggcccca

SEQ ID NO: 546848 - DNA, 15 bp, Homo sapiens
ggaggagtaggcccc

SEQ ID NO: 546849 - DNA, 15 bp, Homo sapiens
tggaggagtaggccc

SEQ ID NO: 546850 - DNA, 15 bp, Homo sapiens
gtggaggagtaggcc

SEQ ID NO: 546851 - DNA, 15 bp, Homo sapiens
ggtggaggagtaggc

SEQ ID NO: 546852 - DNA, 15 bp, Homo sapiens
aggtggaggagtagg

SEQ ID NO: 546853 - DNA, 15 bp, Homo sapiens
caggtggaggagtag

SEQ ID NO: 546854 - DNA, 15 bp, Homo sapiens
gcaggtggaggagta

SEQ ID NO: 546855 - DNA, 15 bp, Homo sapiens
ggcaggtggaggagt

SEQ ID NO: 546856 - DNA, 15 bp, Homo sapiens
cggcaggtggaggag

SEQ ID NO: 546857 - DNA, 15 bp, Homo sapiens
acggcaggtggagga

SEQ ID NO: 546858 - DNA, 15 bp, Homo sapiens
cacggcaggtggagg

SEQ ID NO: 546859 - DNA, 15 bp, Homo sapiens
ccacggcaggtggag

SEQ ID NO: 546860 - DNA, 15 bp, Homo sapiens
gccacggcaggtgga

SEQ ID NO: 546861 - DNA, 15 bp, Homo sapiens
ggccacggcaggtgg

SEQ ID NO: 546862 - DNA, 15 bp, Homo sapiens
cggccacggcaggtg

SEQ ID NO: 546863 - DNA, 15 bp, Homo sapiens
acggccacggcaggt

SEQ ID NO: 546864 - DNA, 15 bp, Homo sapiens
gacggccacggcagg

SEQ ID NO: 546865 - DNA, 15 bp, Homo sapiens
cgacggccacggcag

SEQ ID NO: 546866 - DNA, 15 bp, Homo sapiens
gcgacggccacggca

SEQ ID NO: 546867 - DNA, 15 bp, Homo sapiens
ggcgacggccacggc

SEQ ID NO: 546868 - DNA, 15 bp, Homo sapiens
gggcgacggccacgg

SEQ ID NO: 546869 - DNA, 15 bp, Homo sapiens
ggggcgacggccacg

SEQ ID NO: 546870 - DNA, 15 bp, Homo sapiens
tggggcgacggccac

SEQ ID NO: 546871 - DNA, 15 bp, Homo sapiens
ctggggcgacggcca

SEQ ID NO: 546872 - DNA, 15 bp, Homo sapiens
tctggggcgacggcc

SEQ ID NO: 546873 - DNA, 15 bp, Homo sapiens
gtctggggcgacggc

SEQ ID NO: 546874 - DNA, 15 bp, Homo sapiens
ggtctggggcgacgg

SEQ ID NO: 546875 - DNA, 15 bp, Homo sapiens
cggtctggggcgacg

SEQ ID NO: 546876 - DNA, 15 bp, Homo sapiens
tcggtctggggcgac

SEQ ID NO: 546877 - DNA, 15 bp, Homo sapiens
ctcggtctggggcga

SEQ ID NO: 546878 - DNA, 15 bp, Homo sapiens
gctcggtctggggcg

SEQ ID NO: 546879 - DNA, 15 bp, Homo sapiens
agctcggtctggggc

SEQ ID NO: 546880 - DNA, 15 bp, Homo sapiens
cagctcggtctgggg

SEQ ID NO: 546881 - DNA, 15 bp, Homo sapiens
gcagctcggtctggg

SEQ ID NO: 546882 - DNA, 15 bp, Homo sapiens
ggcagctcggtctgg

SEQ ID NO: 546883 - DNA, 15 bp, Homo sapiens
tggcagctcggtctg

SEQ ID NO: 546884 - DNA, 15 bp, Homo sapiens
gtggcagctcggtct

SEQ ID NO: 546885 - DNA, 15 bp, Homo sapiens
ggtggcagctcggtc

SEQ ID NO: 546886 - DNA, 15 bp, Homo sapiens
cggtggcagctcggt

SEQ ID NO: 546887 - DNA, 15 bp, Homo sapiens
acggtggcagctcgg

SEQ ID NO: 546888 - DNA, 15 bp, Homo sapiens
aacggtggcagctcg

SEQ ID NO: 546889 - DNA, 15 bp, Homo sapiens
caacggtggcagctc

SEQ ID NO: 546890 - DNA, 15 bp, Homo sapiens
acaacggtggcagct

SEQ ID NO: 546891 - DNA, 15 bp, Homo sapiens
aacaacggtggcagc

SEQ ID NO: 546892 - DNA, 15 bp, Homo sapiens
aaacaacggtggcag

SEQ ID NO: 546893 - DNA, 15 bp, Homo sapiens
gaaacaacggtggca

SEQ ID NO: 546894 - DNA, 15 bp, Homo sapiens
ggaaacaacggtggc

SEQ ID NO: 546895 - DNA, 15 bp, Homo sapiens
gggaaacaacggtgg

SEQ ID NO: 546896 - DNA, 15 bp, Homo sapiens
tgggaaacaacggtg

SEQ ID NO: 546897 - DNA, 15 bp, Homo sapiens
ctgggaaacaacggt

SEQ ID NO: 546898 - DNA, 15 bp, Homo sapiens
actgggaaacaacgg

SEQ ID NO: 546899 - DNA, 15 bp, Homo sapiens
cactgggaaacaacg

SEQ ID NO: 546900 - DNA, 15 bp, Homo sapiens
ccactgggaaacaac

SEQ ID NO: 546901 - DNA, 15 bp, Homo sapiens
tccactgggaaacaa

SEQ ID NO: 546902 - DNA, 15 bp, Homo sapiens
atccactgggaaaca

SEQ ID NO: 546903 - DNA, 15 bp, Homo sapiens
catccactgggaaac

SEQ ID NO: 546904 - DNA, 15 bp, Homo sapiens
gcatccactgggaaa

SEQ ID NO: 546905 - DNA, 15 bp, Homo sapiens
agcatccactgggaa

SEQ ID NO: 546906 - DNA, 15 bp, Homo sapiens
cagcatccactggga

SEQ ID NO: 546907 - DNA, 15 bp, Homo sapiens
ccagcatccactggg

SEQ ID NO: 546908 - DNA, 15 bp, Homo sapiens
tccagcatccactgg

SEQ ID NO: 546909 - DNA, 15 bp, Homo sapiens
ctccagcatccactg

SEQ ID NO: 546910 - DNA, 15 bp, Homo sapiens
actccagcatccact

SEQ ID NO: 546911 - DNA, 15 bp, Homo sapiens
cactccagcatccac

SEQ ID NO: 546912 - DNA, 15 bp, Homo sapiens
acactccagcatcca

SEQ ID NO: 546913 - DNA, 15 bp, Homo sapiens
gacactccagcatcc

SEQ ID NO: 546914 - DNA, 15 bp, Homo sapiens
tgacactccagcatc

SEQ ID NO: 546915 - DNA, 15 bp, Homo sapiens
atgacactccagcat

SEQ ID NO: 546916 - DNA, 15 bp, Homo sapiens
gatgacactccagca

SEQ ID NO: 546917 - DNA, 15 bp, Homo sapiens
tgatgacactccagc

SEQ ID NO: 546918 - DNA, 15 bp, Homo sapiens
atgatgacactccag

SEQ ID NO: 546919 - DNA, 15 bp, Homo sapiens
catgatgacactcca

SEQ ID NO: 546920 - DNA, 15 bp, Homo sapiens
ccatgatgacactcc

SEQ ID NO: 546921 - DNA, 15 bp, Homo sapiens
cccatgatgacactc

SEQ ID NO: 546922 - DNA, 15 bp, Homo sapiens
ccccatgatgacact

SEQ ID NO: 546923 - DNA, 15 bp, Homo sapiens
gccccatgatgacac

SEQ ID NO: 546924 - DNA, 15 bp, Homo sapiens
agccccatgatgaca

SEQ ID NO: 546925 - DNA, 15 bp, Homo sapiens
cagccccatgatgac

SEQ ID NO: 546926 - DNA, 15 bp, Homo sapiens
acagccccatgatga

SEQ ID NO: 546927 - DNA, 15 bp, Homo sapiens
aacagccccatgatg

SEQ ID NO: 546928 - DNA, 15 bp, Homo sapiens
aaacagccccatgat

SEQ ID NO: 546929 - DNA, 15 bp, Homo sapiens
caaacagccccatga

SEQ ID NO: 546930 - DNA, 15 bp, Homo sapiens
gcaaacagccccatg

SEQ ID NO: 546931 - DNA, 15 bp, Homo sapiens
agcaaacagccccat

SEQ ID NO: 546932 - DNA, 15 bp, Homo sapiens
gagcaaacagcccca

SEQ ID NO: 546933 - DNA, 15 bp, Homo sapiens
agagcaaacagcccc

SEQ ID NO: 546934 - DNA, 15 bp, Homo sapiens
cagagcaaacagccc

SEQ ID NO: 546935 - DNA, 15 bp, Homo sapiens
gcagagcaaacagcc

SEQ ID NO: 546936 - DNA, 15 bp, Homo sapiens
agcagagcaaacagc

SEQ ID NO: 546937 - DNA, 15 bp, Homo sapiens
cagcagagcaaacag

SEQ ID NO: 546938 - DNA, 15 bp, Homo sapiens
tcagcagagcaaaca

SEQ ID NO: 546939 - DNA, 15 bp, Homo sapiens
atcagcagagcaaac

SEQ ID NO: 546940 - DNA, 15 bp, Homo sapiens
aatcagcagagcaaa

SEQ ID NO: 546941 - DNA, 15 bp, Homo sapiens
aaatcagcagagcaa

SEQ ID NO: 546942 - DNA, 15 bp, Homo sapiens
taaatcagcagagca

SEQ ID NO: 546943 - DNA, 15 bp, Homo sapiens
ataaatcagcagagc

SEQ ID NO: 546944 - DNA, 15 bp, Homo sapiens
tataaatcagcagag

SEQ ID NO: 546945 - DNA, 15 bp, Homo sapiens
gtataaatcagcaga

SEQ ID NO: 546946 - DNA, 15 bp, Homo sapiens
ggtataaatcagcag

SEQ ID NO: 546947 - DNA, 15 bp, Homo sapiens
tggtataaatcagca

SEQ ID NO: 546948 - DNA, 15 bp, Homo sapiens
gtggtataaatcagc

SEQ ID NO: 546949 - DNA, 15 bp, Homo sapiens
tgtggtataaatcag

SEQ ID NO: 546950 - DNA, 15 bp, Homo sapiens
gtgtggtataaatca

SEQ ID NO: 546951 - DNA, 15 bp, Homo sapiens
agtgtggtataaatc

SEQ ID NO: 546952 - DNA, 15 bp, Homo sapiens
cagtgtggtataaat

SEQ ID NO: 546953 - DNA, 15 bp, Homo sapiens
acagtgtggtataaa

SEQ ID NO: 546954 - DNA, 15 bp, Homo sapiens
aacagtgtggtataa

SEQ ID NO: 546955 - DNA, 15 bp, Homo sapiens
caacagtgtggtata

SEQ ID NO: 546956 - DNA, 15 bp, Homo sapiens
acaacagtgtggtat

SEQ ID NO: 546957 - DNA, 15 bp, Homo sapiens
gacaacagtgtggta

SEQ ID NO: 546958 - DNA, 15 bp, Homo sapiens
tgacaacagtgtggt

SEQ ID NO: 546959 - DNA, 15 bp, Homo sapiens
gtgacaacagtgtgg

SEQ ID NO: 546960 - DNA, 15 bp, Homo sapiens
agtgacaacagtgtg

SEQ ID NO: 546961 - DNA, 15 bp, Homo sapiens
aagtgacaacagtgt

SEQ ID NO: 546962 - DNA, 15 bp, Homo sapiens
gaagtgacaacagtg

SEQ ID NO: 546963 - DNA, 15 bp, Homo sapiens
agaagtgacaacagt

SEQ ID NO: 546964 - DNA, 15 bp, Homo sapiens
gagaagtgacaacag

SEQ ID NO: 546965 - DNA, 15 bp, Homo sapiens
ggagaagtgacaaca

SEQ ID NO: 546966 - DNA, 15 bp, Homo sapiens
gggagaagtgacaac

SEQ ID NO: 546967 - DNA, 15 bp, Homo sapiens
ggggagaagtgacaa

SEQ ID NO: 546968 - DNA, 15 bp, Homo sapiens
tggggagaagtgaca

SEQ ID NO: 546969 - DNA, 15 bp, Homo sapiens
atggggagaagtgac

SEQ ID NO: 546970 - DNA, 15 bp, Homo sapiens
gatggggagaagtga

SEQ ID NO: 546971 - DNA, 15 bp, Homo sapiens
tgatggggagaagtg

SEQ ID NO: 546972 - DNA, 15 bp, Homo sapiens
ttgatggggagaagt

SEQ ID NO: 546973 - DNA, 15 bp, Homo sapiens
tttgatggggagaag

SEQ ID NO: 546974 - DNA, 15 bp, Homo sapiens
ctttgatggggagaa

SEQ ID NO: 546975 - DNA, 15 bp, Homo sapiens
gctttgatggggaga

SEQ ID NO: 546976 - DNA, 15 bp, Homo sapiens
ggctttgatggggag

SEQ ID NO: 546977 - DNA, 15 bp, Homo sapiens
tggctttgatgggga

SEQ ID NO: 546978 - DNA, 15 bp, Homo sapiens
ctggctttgatgggg

SEQ ID NO: 546979 - DNA, 15 bp, Homo sapiens
cctggctttgatggg

SEQ ID NO: 546980 - DNA, 15 bp, Homo sapiens
tcctggctttgatgg

SEQ ID NO: 546981 - DNA, 15 bp, Homo sapiens
atcctggctttgatg

SEQ ID NO: 546982 - DNA, 15 bp, Homo sapiens
catcctggctttgat

SEQ ID NO: 546983 - DNA, 15 bp, Homo sapiens
gcatcctggctttga

SEQ ID NO: 546984 - DNA, 15 bp, Homo sapiens
agcatcctggctttg

SEQ ID NO: 546985 - DNA, 15 bp, Homo sapiens
gagcatcctggcttt

SEQ ID NO: 546986 - DNA, 15 bp, Homo sapiens
agagcatcctggctt

SEQ ID NO: 546987 - DNA, 15 bp, Homo sapiens
aagagcatcctggct

SEQ ID NO: 546988 - DNA, 15 bp, Homo sapiens
aaagagcatcctggc

SEQ ID NO: 546989 - DNA, 15 bp, Homo sapiens
taaagagcatcctgg

SEQ ID NO: 546990 - DNA, 15 bp, Homo sapiens
ttaaagagcatcctg

SEQ ID NO: 546991 - DNA, 15 bp, Homo sapiens
tttaaagagcatcct

SEQ ID NO: 546992 - DNA, 15 bp, Homo sapiens
ttttaaagagcatcc

SEQ ID NO: 546993 - DNA, 15 bp, Homo sapiens
gttttaaagagcatc

SEQ ID NO: 546994 - DNA, 15 bp, Homo sapiens
tgttttaaagagcat

SEQ ID NO: 546995 - DNA, 15 bp, Homo sapiens
atgttttaaagagca

SEQ ID NO: 546996 - DNA, 15 bp, Homo sapiens
catgttttaaagagc

SEQ ID NO: 546997 - DNA, 15 bp, Homo sapiens
gcatgttttaaagag

SEQ ID NO: 546998 - DNA, 15 bp, Homo sapiens
tgcatgttttaaaga

SEQ ID NO: 546999 - DNA, 15 bp, Homo sapiens
ttgcatgttttaaag

SEQ ID NO: 547000 - DNA, 15 bp, Homo sapiens
tttgcatgttttaaa

SEQ ID NO: 547001 - DNA, 15 bp, Homo sapiens
atttgcatgttttaa

SEQ ID NO: 547002 - DNA, 15 bp, Homo sapiens
aatttgcatgtttta

SEQ ID NO: 547003 - DNA, 15 bp, Homo sapiens
caatttgcatgtttt

SEQ ID NO: 547004 - DNA, 15 bp, Homo sapiens
ccaatttgcatgttt

SEQ ID NO: 547005 - DNA, 15 bp, Homo sapiens
cccaatttgcatgtt

SEQ ID NO: 547006 - DNA, 15 bp, Homo sapiens
gcccaatttgcatgt

SEQ ID NO: 547007 - DNA, 15 bp, Homo sapiens
ggcccaatttgcatg

SEQ ID NO: 547008 - DNA, 15 bp, Homo sapiens
cggcccaatttgcat

SEQ ID NO: 547009 - DNA, 15 bp, Homo sapiens
ccggcccaatttgca

SEQ ID NO: 547010 - DNA, 15 bp, Homo sapiens
cccggcccaatttgc

SEQ ID NO: 547011 - DNA, 15 bp, Homo sapiens
gcccggcccaatttg

SEQ ID NO: 547012 - DNA, 15 bp, Homo sapiens
tgcccggcccaattt

SEQ ID NO: 547013 - DNA, 15 bp, Homo sapiens
gtgcccggcccaatt

SEQ ID NO: 547014 - DNA, 15 bp, Homo sapiens
tgtgcccggcccaat

SEQ ID NO: 547015 - DNA, 15 bp, Homo sapiens
ctgtgcccggcccaa

SEQ ID NO: 547016 - DNA, 15 bp, Homo sapiens
actgtgcccggccca

SEQ ID NO: 547017 - DNA, 15 bp, Homo sapiens
cactgtgcccggccc

SEQ ID NO: 547018 - DNA, 15 bp, Homo sapiens
ccactgtgcccggcc

SEQ ID NO: 547019 - DNA, 15 bp, Homo sapiens
gccactgtgcccggc

SEQ ID NO: 547020 - DNA, 15 bp, Homo sapiens
agccactgtgcccgg

SEQ ID NO: 547021 - DNA, 15 bp, Homo sapiens
gagccactgtgcccg

SEQ ID NO: 547022 - DNA, 15 bp, Homo sapiens
tgagccactgtgccc

SEQ ID NO: 547023 - DNA, 15 bp, Homo sapiens
atgagccactgtgcc

SEQ ID NO: 547024 - DNA, 15 bp, Homo sapiens
catgagccactgtgc

SEQ ID NO: 547025 - DNA, 15 bp, Homo sapiens
gcatgagccactgtg

SEQ ID NO: 547026 - DNA, 15 bp, Homo sapiens
ggcatgagccactgt

SEQ ID NO: 547027 - DNA, 15 bp, Homo sapiens
aggcatgagccactg

SEQ ID NO: 547028 - DNA, 15 bp, Homo sapiens
caggcatgagccact

SEQ ID NO: 547029 - DNA, 15 bp, Homo sapiens
acaggcatgagccac

SEQ ID NO: 547030 - DNA, 15 bp, Homo sapiens
tacaggcatgagcca

SEQ ID NO: 547031 - DNA, 15 bp, Homo sapiens
ttacaggcatgagcc

SEQ ID NO: 547032 - DNA, 15 bp, Homo sapiens
attacaggcatgagc

SEQ ID NO: 547033 - DNA, 15 bp, Homo sapiens
gattacaggcatgag

SEQ ID NO: 547034 - DNA, 15 bp, Homo sapiens
ggattacaggcatga

SEQ ID NO: 547035 - DNA, 15 bp, Homo sapiens
gggattacaggcatg

SEQ ID NO: 547036 - DNA, 15 bp, Homo sapiens
tgggattacaggcat

SEQ ID NO: 547037 - DNA, 15 bp, Homo sapiens
cggcctcccaaagtg

SEQ ID NO: 547038 - DNA, 15 bp, Homo sapiens
tcggcctcccaaagt

SEQ ID NO: 547039 - DNA, 15 bp, Homo sapiens
ttcggcctcccaaag

SEQ ID NO: 547040 - DNA, 15 bp, Homo sapiens
cttcggcctcccaaa

SEQ ID NO: 547041 - DNA, 15 bp, Homo sapiens
acttcggcctcccaa

SEQ ID NO: 547042 - DNA, 15 bp, Homo sapiens
cacttcggcctccca

SEQ ID NO: 547043 - DNA, 15 bp, Homo sapiens
ccacttcggcctccc

SEQ ID NO: 547044 - DNA, 15 bp, Homo sapiens
cccacttcggcctcc

SEQ ID NO: 547045 - DNA, 15 bp, Homo sapiens
acccacttcggcctc

SEQ ID NO: 547046 - DNA, 15 bp, Homo sapiens
cacccacttcggcct

SEQ ID NO: 547047 - DNA, 15 bp, Homo sapiens
ccacccacttcggcc

SEQ ID NO: 547048 - DNA, 15 bp, Homo sapiens
cccacccacttcggc

SEQ ID NO: 547049 - DNA, 15 bp, Homo sapiens
acccacccacttcgg

SEQ ID NO: 547050 - DNA, 15 bp, Homo sapiens
gacccacccacttcg

SEQ ID NO: 547051 - DNA, 15 bp, Homo sapiens
tgacccacccacttc

SEQ ID NO: 547052 - DNA, 15 bp, Homo sapiens
gtgacccacccactt

SEQ ID NO: 547053 - DNA, 15 bp, Homo sapiens
ggtgacccacccact

SEQ ID NO: 547054 - DNA, 15 bp, Homo sapiens
aggtgacccacccac

SEQ ID NO: 547055 - DNA, 15 bp, Homo sapiens
caggtgacccaccca

SEQ ID NO: 547056 - DNA, 15 bp, Homo sapiens
tcaggtgacccaccc

SEQ ID NO: 547057 - DNA, 15 bp, Homo sapiens
ctcaggtgacccacc

SEQ ID NO: 547058 - DNA, 15 bp, Homo sapiens
cctcaggtgacccac

SEQ ID NO: 547059 - DNA, 15 bp, Homo sapiens
acctcaggtgaccca

SEQ ID NO: 547060 - DNA, 15 bp, Homo sapiens
gacctcaggtgaccc

SEQ ID NO: 547061 - DNA, 15 bp, Homo sapiens
tgacctcaggtgacc

SEQ ID NO: 547062 - DNA, 15 bp, Homo sapiens
ctgacctcaggtgac

SEQ ID NO: 547063 - DNA, 15 bp, Homo sapiens
ttgaactcctgacct

SEQ ID NO: 547064 - DNA, 15 bp, Homo sapiens
cttgaactcctgacc

SEQ ID NO: 547065 - DNA, 15 bp, Homo sapiens
tcttgaactcctgac

SEQ ID NO: 547066 - DNA, 15 bp, Homo sapiens
gtcttgaactcctga

SEQ ID NO: 547067 - DNA, 15 bp, Homo sapiens
ggtcttgaactcctg

SEQ ID NO: 547068 - DNA, 15 bp, Homo sapiens
tggtcttgaactcct

SEQ ID NO: 547069 - DNA, 15 bp, Homo sapiens
ctggtcttgaactcc

SEQ ID NO: 547070 - DNA, 15 bp, Homo sapiens
gctggtcttgaactc

SEQ ID NO: 547071 - DNA, 15 bp, Homo sapiens
ggctggtcttgaact

SEQ ID NO: 547072 - DNA, 15 bp, Homo sapiens
aggctggtcttgaac

SEQ ID NO: 547073 - DNA, 15 bp, Homo sapiens
caggctggtcttgaa

SEQ ID NO: 547074 - DNA, 15 bp, Homo sapiens
ccaggctggtcttga

SEQ ID NO: 547075 - DNA, 15 bp, Homo sapiens
gccaggctggtcttg

SEQ ID NO: 547076 - DNA, 15 bp, Homo sapiens
ggccaggctggtctt

SEQ ID NO: 547077 - DNA, 15 bp, Homo sapiens
aggtttcaccatgtt

SEQ ID NO: 547078 - DNA, 15 bp, Homo sapiens
gaggtttcaccatgt

SEQ ID NO: 547079 - DNA, 15 bp, Homo sapiens
tgaggtttcaccatg

SEQ ID NO: 547080 - DNA, 15 bp, Homo sapiens
atgaggtttcaccat

SEQ ID NO: 547081 - DNA, 15 bp, Homo sapiens
gatgaggtttcacca

SEQ ID NO: 547082 - DNA, 15 bp, Homo sapiens
agatgaggtttcacc

SEQ ID NO: 547083 - DNA, 15 bp, Homo sapiens
gagatgaggtttcac

SEQ ID NO: 547084 - DNA, 15 bp, Homo sapiens
agagatgaggtttca

SEQ ID NO: 547085 - DNA, 15 bp, Homo sapiens
tagagatgaggtttc

SEQ ID NO: 547086 - DNA, 15 bp, Homo sapiens
gtagagatgaggttt

SEQ ID NO: 547087 - DNA, 15 bp, Homo sapiens
agtagagatgaggtt

SEQ ID NO: 547088 - DNA, 15 bp, Homo sapiens
tagtagagatgaggt

SEQ ID NO: 547089 - DNA, 15 bp, Homo sapiens
ttagtagagatgagg

SEQ ID NO: 547090 - DNA, 15 bp, Homo sapiens
tttagtagagatgag

SEQ ID NO: 547091 - DNA, 15 bp, Homo sapiens
ttttagtagagatga

SEQ ID NO: 547092 - DNA, 15 bp, Homo sapiens
tttttagtagagatg

SEQ ID NO: 547093 - DNA, 15 bp, Homo sapiens
atttttagtagagat

SEQ ID NO: 547094 - DNA, 15 bp, Homo sapiens
tatttttagtagaga

SEQ ID NO: 547095 - DNA, 15 bp, Homo sapiens
gtatttttagtagag

SEQ ID NO: 547096 - DNA, 15 bp, Homo sapiens
tgtatttttagtaga

SEQ ID NO: 547097 - DNA, 15 bp, Homo sapiens
ttgtatttttagtag

SEQ ID NO: 547098 - DNA, 15 bp, Homo sapiens
tttgtatttttagta

SEQ ID NO: 547099 - DNA, 15 bp, Homo sapiens
ttttgtatttttagt

SEQ ID NO: 547100 - DNA, 15 bp, Homo sapiens
tttttgtatttttag

SEQ ID NO: 547101 - DNA, 15 bp, Homo sapiens
cgcctggctaatttt

SEQ ID NO: 547102 - DNA, 15 bp, Homo sapiens
acgcctggctaattt

SEQ ID NO: 547103 - DNA, 15 bp, Homo sapiens
cacgcctggctaatt

SEQ ID NO: 547104 - DNA, 15 bp, Homo sapiens
ccacgcctggctaat

SEQ ID NO: 547105 - DNA, 15 bp, Homo sapiens
accacgcctggctaa

SEQ ID NO: 547106 - DNA, 15 bp, Homo sapiens
caccacgcctggcta

SEQ ID NO: 547107 - DNA, 15 bp, Homo sapiens
ccaccacgcctggct

SEQ ID NO: 547108 - DNA, 15 bp, Homo sapiens
gccaccacgcctggc

SEQ ID NO: 547109 - DNA, 15 bp, Homo sapiens
tgccaccacgcctgg

SEQ ID NO: 547110 - DNA, 15 bp, Homo sapiens
atgccaccacgcctg

SEQ ID NO: 547111 - DNA, 15 bp, Homo sapiens
catgccaccacgcct

SEQ ID NO: 547112 - DNA, 15 bp, Homo sapiens
acatgccaccacgcc

SEQ ID NO: 547113 - DNA, 15 bp, Homo sapiens
cacatgccaccacgc

SEQ ID NO: 547114 - DNA, 15 bp, Homo sapiens
gcacatgccaccacg

SEQ ID NO: 547115 - DNA, 15 bp, Homo sapiens
ggcacatgccaccac

SEQ ID NO: 547116 - DNA, 15 bp, Homo sapiens
aggcacatgccacca

SEQ ID NO: 547117 - DNA, 15 bp, Homo sapiens
caggcacatgccacc

SEQ ID NO: 547118 - DNA, 15 bp, Homo sapiens
acaggcacatgccac

SEQ ID NO: 547119 - DNA, 15 bp, Homo sapiens
tacaggcacatgcca

SEQ ID NO: 547120 - DNA, 15 bp, Homo sapiens
ttacaggcacatgcc

SEQ ID NO: 547121 - DNA, 15 bp, Homo sapiens
attacaggcacatgc

SEQ ID NO: 547122 - DNA, 15 bp, Homo sapiens
aattacaggcacatg

SEQ ID NO: 547123 - DNA, 15 bp, Homo sapiens
gaattacaggcacat

SEQ ID NO: 547124 - DNA, 15 bp, Homo sapiens
ggaattacaggcaca

SEQ ID NO: 547125 - DNA, 15 bp, Homo sapiens
tggaattacaggcac

SEQ ID NO: 547126 - DNA, 15 bp, Homo sapiens
ctggaattacaggca

SEQ ID NO: 547127 - DNA, 15 bp, Homo sapiens
gctggaattacaggc

SEQ ID NO: 547128 - DNA, 15 bp, Homo sapiens
agctggaattacagg

SEQ ID NO: 547129 - DNA, 15 bp, Homo sapiens
tagctggaattacag

SEQ ID NO: 547130 - DNA, 15 bp, Homo sapiens
gtagctggaattaca

SEQ ID NO: 547131 - DNA, 15 bp, Homo sapiens
agtagctggaattac

SEQ ID NO: 547132 - DNA, 15 bp, Homo sapiens
gagtagctggaatta

SEQ ID NO: 547133 - DNA, 15 bp, Homo sapiens
cgagtagctggaatt

SEQ ID NO: 547134 - DNA, 15 bp, Homo sapiens
ccgagtagctggaat

SEQ ID NO: 547135 - DNA, 15 bp, Homo sapiens
cccgagtagctggaa

SEQ ID NO: 547136 - DNA, 15 bp, Homo sapiens
tcccgagtagctgga

SEQ ID NO: 547137 - DNA, 15 bp, Homo sapiens
acctcccgagtagct

SEQ ID NO: 547138 - DNA, 15 bp, Homo sapiens
aacctcccgagtagc

SEQ ID NO: 547139 - DNA, 15 bp, Homo sapiens
caacctcccgagtag

SEQ ID NO: 547140 - DNA, 15 bp, Homo sapiens
tcaacctcccgagta

SEQ ID NO: 547141 - DNA, 15 bp, Homo sapiens
ctcaacctcccgagt

SEQ ID NO: 547142 - DNA, 15 bp, Homo sapiens
cctcaacctcccgag

SEQ ID NO: 547143 - DNA, 15 bp, Homo sapiens
gcctcaacctcccga

SEQ ID NO: 547144 - DNA, 15 bp, Homo sapiens
tgcctcaacctcccg

SEQ ID NO: 547145 - DNA, 15 bp, Homo sapiens
ctgcctcaacctccc

SEQ ID NO: 547146 - DNA, 15 bp, Homo sapiens
cctgcctcaacctcc

SEQ ID NO: 547147 - DNA, 15 bp, Homo sapiens
tcctgcctcaacctc

SEQ ID NO: 547148 - DNA, 15 bp, Homo sapiens
ctcctgcctcaacct

SEQ ID NO: 547149 - DNA, 15 bp, Homo sapiens
tctcctgcctcaacc

SEQ ID NO: 547150 - DNA, 15 bp, Homo sapiens
ttctcctgcctcaac

SEQ ID NO: 547151 - DNA, 15 bp, Homo sapiens
attctcctgcctcaa

SEQ ID NO: 547152 - DNA, 15 bp, Homo sapiens
aattctcctgcctca

SEQ ID NO: 547153 - DNA, 15 bp, Homo sapiens
caattctcctgcctc

SEQ ID NO: 547154 - DNA, 15 bp, Homo sapiens
acaattctcctgcct

SEQ ID NO: 547155 - DNA, 15 bp, Homo sapiens
aacaattctcctgcc

SEQ ID NO: 547156 - DNA, 15 bp, Homo sapiens
aaacaattctcctgc

SEQ ID NO: 547157 - DNA, 15 bp, Homo sapiens
caaacaattctcctg

SEQ ID NO: 547158 - DNA, 15 bp, Homo sapiens
tcaaacaattctcct

SEQ ID NO: 547159 - DNA, 15 bp, Homo sapiens
ttcaaacaattctcc

SEQ ID NO: 547160 - DNA, 15 bp, Homo sapiens
gttcaaacaattctc

SEQ ID NO: 547161 - DNA, 15 bp, Homo sapiens
ggttcaaacaattct

SEQ ID NO: 547162 - DNA, 15 bp, Homo sapiens
gggttcaaacaattc

SEQ ID NO: 547163 - DNA, 15 bp, Homo sapiens
cgggttcaaacaatt

SEQ ID NO: 547164 - DNA, 15 bp, Homo sapiens
ccgggttcaaacaat

SEQ ID NO: 547165 - DNA, 15 bp, Homo sapiens
cccgggttcaaacaa

SEQ ID NO: 547166 - DNA, 15 bp, Homo sapiens
tcccgggttcaaaca

SEQ ID NO: 547167 - DNA, 15 bp, Homo sapiens
ctcccgggttcaaac

SEQ ID NO: 547168 - DNA, 15 bp, Homo sapiens
cctcccgggttcaaa

SEQ ID NO: 547169 - DNA, 15 bp, Homo sapiens
acctcccgggttcaa

SEQ ID NO: 547170 - DNA, 15 bp, Homo sapiens
cacctcccgggttca

SEQ ID NO: 547171 - DNA, 15 bp, Homo sapiens
ccacctcccgggttc

SEQ ID NO: 547172 - DNA, 15 bp, Homo sapiens
tccacctcccgggtt

SEQ ID NO: 547173 - DNA, 15 bp, Homo sapiens
ctccacctcccgggt

SEQ ID NO: 547174 - DNA, 15 bp, Homo sapiens
cctccacctcccggg

SEQ ID NO: 547175 - DNA, 15 bp, Homo sapiens
acctccacctcccgg

SEQ ID NO: 547176 - DNA, 15 bp, Homo sapiens
aacctccacctcccg

SEQ ID NO: 547177 - DNA, 15 bp, Homo sapiens
caacctccacctccc

SEQ ID NO: 547178 - DNA, 15 bp, Homo sapiens
gcaacctccacctcc

SEQ ID NO: 547179 - DNA, 15 bp, Homo sapiens
tgcaacctccacctc

SEQ ID NO: 547180 - DNA, 15 bp, Homo sapiens
ctgcaacctccacct

SEQ ID NO: 547181 - DNA, 15 bp, Homo sapiens
actgcaacctccacc

SEQ ID NO: 547182 - DNA, 15 bp, Homo sapiens
cactgcaacctccac

SEQ ID NO: 547183 - DNA, 15 bp, Homo sapiens
tcactgcaacctcca

SEQ ID NO: 547184 - DNA, 15 bp, Homo sapiens
ggctcactgcaacct

SEQ ID NO: 547185 - DNA, 15 bp, Homo sapiens
cggctcactgcaacc

SEQ ID NO: 547186 - DNA, 15 bp, Homo sapiens
tcggctcactgcaac

SEQ ID NO: 547187 - DNA, 15 bp, Homo sapiens
ctcggctcactgcaa

SEQ ID NO: 547188 - DNA, 15 bp, Homo sapiens
tctcggctcactgca

SEQ ID NO: 547189 - DNA, 15 bp, Homo sapiens
atctcggctcactgc

SEQ ID NO: 547190 - DNA, 15 bp, Homo sapiens
aatctcggctcactg

SEQ ID NO: 547191 - DNA, 15 bp, Homo sapiens
caatctcggctcact

SEQ ID NO: 547192 - DNA, 15 bp, Homo sapiens
gcaatctcggctcac

SEQ ID NO: 547193 - DNA, 15 bp, Homo sapiens
tgcaatctcggctca

SEQ ID NO: 547194 - DNA, 15 bp, Homo sapiens
gtgcaatctcggctc

SEQ ID NO: 547195 - DNA, 15 bp, Homo sapiens
ggtgcaatctcggct

SEQ ID NO: 547196 - DNA, 15 bp, Homo sapiens
tggtgcaatctcggc

SEQ ID NO: 547197 - DNA, 15 bp, Homo sapiens
atggtgcaatctcgg

SEQ ID NO: 547198 - DNA, 15 bp, Homo sapiens
aatggtgcaatctcg

SEQ ID NO: 547199 - DNA, 15 bp, Homo sapiens
caatggtgcaatctc

SEQ ID NO: 547200 - DNA, 15 bp, Homo sapiens
gcaatggtgcaatct

SEQ ID NO: 547201 - DNA, 15 bp, Homo sapiens
tgcaatggtgcaatc

SEQ ID NO: 547202 - DNA, 15 bp, Homo sapiens
gtgcaatggtgcaat

SEQ ID NO: 547203 - DNA, 15 bp, Homo sapiens
agtgcaatggtgcaa

SEQ ID NO: 547204 - DNA, 15 bp, Homo sapiens
gagtgcaatggtgca

SEQ ID NO: 547205 - DNA, 15 bp, Homo sapiens
ggagtgcaatggtgc

SEQ ID NO: 547206 - DNA, 15 bp, Homo sapiens
tggagtgcaatggtg

SEQ ID NO: 547207 - DNA, 15 bp, Homo sapiens
ctggagtgcaatggt

SEQ ID NO: 547208 - DNA, 15 bp, Homo sapiens
gctggagtgcaatgg

SEQ ID NO: 547209 - DNA, 15 bp, Homo sapiens
ggctggagtgcaatg

SEQ ID NO: 547210 - DNA, 15 bp, Homo sapiens
aggctggagtgcaat

SEQ ID NO: 547211 - DNA, 15 bp, Homo sapiens
caggctggagtgcaa

SEQ ID NO: 547212 - DNA, 15 bp, Homo sapiens
gctctgtcacccagg

SEQ ID NO: 547213 - DNA, 15 bp, Homo sapiens
cgctctgtcacccag

SEQ ID NO: 547214 - DNA, 15 bp, Homo sapiens
tcgctctgtcaccca

SEQ ID NO: 547215 - DNA, 15 bp, Homo sapiens
ctcgctctgtcaccc

SEQ ID NO: 547216 - DNA, 15 bp, Homo sapiens
tctcgctctgtcacc

SEQ ID NO: 547217 - DNA, 15 bp, Homo sapiens
gtctcgctctgtcac

SEQ ID NO: 547218 - DNA, 15 bp, Homo sapiens
agtctcgctctgtca

SEQ ID NO: 547219 - DNA, 15 bp, Homo sapiens
gagtctcgctctgtc

SEQ ID NO: 547220 - DNA, 15 bp, Homo sapiens
ggagtctcgctctgt

SEQ ID NO: 547221 - DNA, 15 bp, Homo sapiens
cggagtctcgctctg

SEQ ID NO: 547222 - DNA, 15 bp, Homo sapiens
acggagtctcgctct

SEQ ID NO: 547223 - DNA, 15 bp, Homo sapiens
gacggagtctcgctc

SEQ ID NO: 547224 - DNA, 15 bp, Homo sapiens
agacggagtctcgct

SEQ ID NO: 547225 - DNA, 15 bp, Homo sapiens
gagacggagtctcgc

SEQ ID NO: 547226 - DNA, 15 bp, Homo sapiens
ggagacggagtctcg

SEQ ID NO: 547227 - DNA, 15 bp, Homo sapiens
gggagacggagtctc

SEQ ID NO: 547228 - DNA, 15 bp, Homo sapiens
tgggagacggagtct

SEQ ID NO: 547229 - DNA, 15 bp, Homo sapiens
ttgggagacggagtc

SEQ ID NO: 547230 - DNA, 15 bp, Homo sapiens
tttgggagacggagt

SEQ ID NO: 547231 - DNA, 15 bp, Homo sapiens
ttttgggagacggag

SEQ ID NO: 547232 - DNA, 15 bp, Homo sapiens
tttttgggagacgga

SEQ ID NO: 547233 - DNA, 15 bp, Homo sapiens
ttttttgggagacgg

SEQ ID NO: 547234 - DNA, 15 bp, Homo sapiens
tttttttgggagacg

SEQ ID NO: 547235 - DNA, 15 bp, Homo sapiens
ttttttttgggagac

SEQ ID NO: 547236 - DNA, 15 bp, Homo sapiens
tttttttttgggaga

SEQ ID NO: 547237 - DNA, 15 bp, Homo sapiens
ttttttttttgggag

SEQ ID NO: 547238 - DNA, 15 bp, Homo sapiens
tttttttttttggga

SEQ ID NO: 547239 - DNA, 15 bp, Homo sapiens
ttttttttttttggg

SEQ ID NO: 547240 - DNA, 15 bp, Homo sapiens
tttttttttttttgg

SEQ ID NO: 547241 - DNA, 15 bp, Homo sapiens
gtttttttttttttt

SEQ ID NO: 547242 - DNA, 15 bp, Homo sapiens
tgttttttttttttt

SEQ ID NO: 547243 - DNA, 15 bp, Homo sapiens
ttgtttttttttttt

SEQ ID NO: 547244 - DNA, 15 bp, Homo sapiens
tttgttttttttttt

SEQ ID NO: 547245 - DNA, 15 bp, Homo sapiens
ttttgtttttttttt

SEQ ID NO: 547246 - DNA, 15 bp, Homo sapiens
gttttgttttttttt

SEQ ID NO: 547247 - DNA, 15 bp, Homo sapiens
agttttgtttttttt

SEQ ID NO: 547248 - DNA, 15 bp, Homo sapiens
tagttttgttttttt

SEQ ID NO: 547249 - DNA, 15 bp, Homo sapiens
atagttttgtttttt

SEQ ID NO: 547250 - DNA, 15 bp, Homo sapiens
catagttttgttttt

SEQ ID NO: 547251 - DNA, 15 bp, Homo sapiens
gcatagttttgtttt

SEQ ID NO: 547252 - DNA, 15 bp, Homo sapiens
tgcatagttttgttt

SEQ ID NO: 547253 - DNA, 15 bp, Homo sapiens
ttgcatagttttgtt

SEQ ID NO: 547254 - DNA, 15 bp, Homo sapiens
tttgcatagttttgt

SEQ ID NO: 547255 - DNA, 15 bp, Homo sapiens
gtttgcatagttttg

SEQ ID NO: 547256 - DNA, 15 bp, Homo sapiens
agtttgcatagtttt

SEQ ID NO: 547257 - DNA, 15 bp, Homo sapiens
cagtttgcatagttt

SEQ ID NO: 547258 - DNA, 15 bp, Homo sapiens
ccagtttgcatagtt

SEQ ID NO: 547259 - DNA, 15 bp, Homo sapiens
tccagtttgcatagt

SEQ ID NO: 547260 - DNA, 15 bp, Homo sapiens
atccagtttgcatag

SEQ ID NO: 547261 - DNA, 15 bp, Homo sapiens
gatccagtttgcata

SEQ ID NO: 547262 - DNA, 15 bp, Homo sapiens
tgatccagtttgcat

SEQ ID NO: 547263 - DNA, 15 bp, Homo sapiens
atgatccagtttgca

SEQ ID NO: 547264 - DNA, 15 bp, Homo sapiens
aatgatccagtttgc

SEQ ID NO: 547265 - DNA, 15 bp, Homo sapiens
aaatgatccagtttg

SEQ ID NO: 547266 - DNA, 15 bp, Homo sapiens
gaaatgatccagttt

SEQ ID NO: 547267 - DNA, 15 bp, Homo sapiens
tgaaatgatccagtt

SEQ ID NO: 547268 - DNA, 15 bp, Homo sapiens
ttgaaatgatccagt

SEQ ID NO: 547269 - DNA, 15 bp, Homo sapiens
cttgaaatgatccag

SEQ ID NO: 547270 - DNA, 15 bp, Homo sapiens
tcttgaaatgatcca

SEQ ID NO: 547271 - DNA, 15 bp, Homo sapiens
ttcttgaaatgatcc

SEQ ID NO: 547272 - DNA, 15 bp, Homo sapiens
cttcttgaaatgatc

SEQ ID NO: 547273 - DNA, 15 bp, Homo sapiens
gcttcttgaaatgat

SEQ ID NO: 547274 - DNA, 15 bp, Homo sapiens
agcttcttgaaatga

SEQ ID NO: 547275 - DNA, 15 bp, Homo sapiens
cagcttcttgaaatg

SEQ ID NO: 547276 - DNA, 15 bp, Homo sapiens
tcagcttcttgaaat

SEQ ID NO: 547277 - DNA, 15 bp, Homo sapiens
ttcagcttcttgaaa

SEQ ID NO: 547278 - DNA, 15 bp, Homo sapiens
attcagcttcttgaa

SEQ ID NO: 547279 - DNA, 15 bp, Homo sapiens
tattcagcttcttga

SEQ ID NO: 547280 - DNA, 15 bp, Homo sapiens
ttattcagcttcttg

SEQ ID NO: 547281 - DNA, 15 bp, Homo sapiens
tttattcagcttctt

SEQ ID NO: 547282 - DNA, 15 bp, Homo sapiens
ttttattcagcttct

SEQ ID NO: 547283 - DNA, 15 bp, Homo sapiens
attttattcagcttc

SEQ ID NO: 547284 - DNA, 15 bp, Homo sapiens
gattttattcagctt

SEQ ID NO: 547285 - DNA, 15 bp, Homo sapiens
agattttattcagct

SEQ ID NO: 547286 - DNA, 15 bp, Homo sapiens
aagattttattcagc

SEQ ID NO: 547287 - DNA, 15 bp, Homo sapiens
gaagattttattcag

SEQ ID NO: 547288 - DNA, 15 bp, Homo sapiens
ggaagattttattca

SEQ ID NO: 547289 - DNA, 15 bp, Homo sapiens
aggaagattttattc

SEQ ID NO: 547290 - DNA, 15 bp, Homo sapiens
caggaagattttatt

SEQ ID NO: 547291 - DNA, 15 bp, Homo sapiens
gcaggaagattttat

SEQ ID NO: 547292 - DNA, 15 bp, Homo sapiens
tgcaggaagatttta

SEQ ID NO: 547293 - DNA, 15 bp, Homo sapiens
atgcaggaagatttt

SEQ ID NO: 547294 - DNA, 15 bp, Homo sapiens
aatgcaggaagattt

SEQ ID NO: 547295 - DNA, 15 bp, Homo sapiens
aaatgcaggaagatt

SEQ ID NO: 547296 - DNA, 15 bp, Homo sapiens
caaatgcaggaagat

SEQ ID NO: 547297 - DNA, 15 bp, Homo sapiens
ccaaatgcaggaaga

SEQ ID NO: 547298 - DNA, 15 bp, Homo sapiens
accaaatgcaggaag

SEQ ID NO: 547299 - DNA, 15 bp, Homo sapiens
taccaaatgcaggaa

SEQ ID NO: 547300 - DNA, 15 bp, Homo sapiens
ataccaaatgcagga

SEQ ID NO: 547301 - DNA, 15 bp, Homo sapiens
gataccaaatgcagg

SEQ ID NO: 547302 - DNA, 15 bp, Homo sapiens
tgataccaaatgcag

SEQ ID NO: 547303 - DNA, 15 bp, Homo sapiens
ttgataccaaatgca

SEQ ID NO: 547304 - DNA, 15 bp, Homo sapiens
tttgataccaaatgc

SEQ ID NO: 547305 - DNA, 15 bp, Homo sapiens
ctttgataccaaatg

SEQ ID NO: 547306 - DNA, 15 bp, Homo sapiens
gctttgataccaaat

SEQ ID NO: 547307 - DNA, 15 bp, Homo sapiens
agctttgataccaaa

SEQ ID NO: 547308 - DNA, 15 bp, Homo sapiens
cagctttgataccaa

SEQ ID NO: 547309 - DNA, 15 bp, Homo sapiens
acagctttgatacca

SEQ ID NO: 547310 - DNA, 15 bp, Homo sapiens
cacagctttgatacc

SEQ ID NO: 547311 - DNA, 15 bp, Homo sapiens
tcacagctttgatac

SEQ ID NO: 547312 - DNA, 15 bp, Homo sapiens
ctcacagctttgata

SEQ ID NO: 547313 - DNA, 15 bp, Homo sapiens
gctcacagctttgat

SEQ ID NO: 547314 - DNA, 15 bp, Homo sapiens
ggctcacagctttga

SEQ ID NO: 547315 - DNA, 15 bp, Homo sapiens
aggctcacagctttg

SEQ ID NO: 547316 - DNA, 15 bp, Homo sapiens
gaggctcacagcttt

SEQ ID NO: 547317 - DNA, 15 bp, Homo sapiens
tgaggctcacagctt

SEQ ID NO: 547318 - DNA, 15 bp, Homo sapiens
atgaggctcacagct

SEQ ID NO: 547319 - DNA, 15 bp, Homo sapiens
aatgaggctcacagc

SEQ ID NO: 547320 - DNA, 15 bp, Homo sapiens
aaatgaggctcacag

SEQ ID NO: 547321 - DNA, 15 bp, Homo sapiens
aaaatgaggctcaca

SEQ ID NO: 547322 - DNA, 15 bp, Homo sapiens
gaaaatgaggctcac

SEQ ID NO: 547323 - DNA, 15 bp, Homo sapiens
cgaaaatgaggctca

SEQ ID NO: 547324 - DNA, 15 bp, Homo sapiens
acgaaaatgaggctc

SEQ ID NO: 547325 - DNA, 15 bp, Homo sapiens
cacgaaaatgaggct

SEQ ID NO: 547326 - DNA, 15 bp, Homo sapiens
ccacgaaaatgaggc

SEQ ID NO: 547327 - DNA, 15 bp, Homo sapiens
cccacgaaaatgagg

SEQ ID NO: 547328 - DNA, 15 bp, Homo sapiens
gcccacgaaaatgag

SEQ ID NO: 547329 - DNA, 15 bp, Homo sapiens
ggcccacgaaaatga

SEQ ID NO: 547330 - DNA, 15 bp, Homo sapiens
gggcccacgaaaatg

SEQ ID NO: 547331 - DNA, 15 bp, Homo sapiens
agggcccacgaaaat

SEQ ID NO: 547332 - DNA, 15 bp, Homo sapiens
cagggcccacgaaaa

SEQ ID NO: 547333 - DNA, 15 bp, Homo sapiens
gcagggcccacgaaa

SEQ ID NO: 547334 - DNA, 15 bp, Homo sapiens
ggcagggcccacgaa

SEQ ID NO: 547335 - DNA, 15 bp, Homo sapiens
gggcagggcccacga

SEQ ID NO: 547336 - DNA, 15 bp, Homo sapiens
tgggcagggcccacg

SEQ ID NO: 547337 - DNA, 15 bp, Homo sapiens
atgggcagggcccac

SEQ ID NO: 547338 - DNA, 15 bp, Homo sapiens
gatgggcagggccca

SEQ ID NO: 547339 - DNA, 15 bp, Homo sapiens
agatgggcagggccc

SEQ ID NO: 547340 - DNA, 15 bp, Homo sapiens
gagatgggcagggcc

SEQ ID NO: 547341 - DNA, 15 bp, Homo sapiens
tgagatgggcagggc

SEQ ID NO: 547342 - DNA, 15 bp, Homo sapiens
ttgagatgggcaggg

SEQ ID NO: 547343 - DNA, 15 bp, Homo sapiens
gttgagatgggcagg

SEQ ID NO: 547344 - DNA, 15 bp, Homo sapiens
agttgagatgggcag

SEQ ID NO: 547345 - DNA, 15 bp, Homo sapiens
gagttgagatgggca

SEQ ID NO: 547346 - DNA, 15 bp, Homo sapiens
tgagttgagatgggc

SEQ ID NO: 547347 - DNA, 15 bp, Homo sapiens
ctgagttgagatggg

SEQ ID NO: 547348 - DNA, 15 bp, Homo sapiens
gctgagttgagatgg

SEQ ID NO: 547349 - DNA, 15 bp, Homo sapiens
tgctgagttgagatg

SEQ ID NO: 547350 - DNA, 15 bp, Homo sapiens
atgctgagttgagat

SEQ ID NO: 547351 - DNA, 15 bp, Homo sapiens
aatgctgagttgaga

SEQ ID NO: 547352 - DNA, 15 bp, Homo sapiens
gaatgctgagttgag

SEQ ID NO: 547353 - DNA, 15 bp, Homo sapiens
agaatgctgagttga

SEQ ID NO: 547354 - DNA, 15 bp, Homo sapiens
gagaatgctgagttg

SEQ ID NO: 547355 - DNA, 15 bp, Homo sapiens
tgagaatgctgagtt

SEQ ID NO: 547356 - DNA, 15 bp, Homo sapiens
gtgagaatgctgagt

SEQ ID NO: 547357 - DNA, 15 bp, Homo sapiens
ggtgagaatgctgag

SEQ ID NO: 547358 - DNA, 15 bp, Homo sapiens
gggtgagaatgctga

SEQ ID NO: 547359 - DNA, 15 bp, Homo sapiens
ggggtgagaatgctg

SEQ ID NO: 547360 - DNA, 15 bp, Homo sapiens
tggggtgagaatgct

SEQ ID NO: 547361 - DNA, 15 bp, Homo sapiens
gtggggtgagaatgc

SEQ ID NO: 547362 - DNA, 15 bp, Homo sapiens
agtggggtgagaatg

SEQ ID NO: 547363 - DNA, 15 bp, Homo sapiens
cagtggggtgagaat

SEQ ID NO: 547364 - DNA, 15 bp, Homo sapiens
gcagtggggtgagaa

SEQ ID NO: 547365 - DNA, 15 bp, Homo sapiens
tgcagtggggtgaga

SEQ ID NO: 547366 - DNA, 15 bp, Homo sapiens
ttgcagtggggtgag

SEQ ID NO: 547367 - DNA, 15 bp, Homo sapiens
gttgcagtggggtga

SEQ ID NO: 547368 - DNA, 15 bp, Homo sapiens
ggttgcagtggggtg

SEQ ID NO: 547369 - DNA, 15 bp, Homo sapiens
aggttgcagtggggt

SEQ ID NO: 547370 - DNA, 15 bp, Homo sapiens
gaggttgcagtgggg

SEQ ID NO: 547371 - DNA, 15 bp, Homo sapiens
tgaggttgcagtggg

SEQ ID NO: 547372 - DNA, 15 bp, Homo sapiens
gtgaggttgcagtgg

SEQ ID NO: 547373 - DNA, 15 bp, Homo sapiens
tgtgaggttgcagtg

SEQ ID NO: 547374 - DNA, 15 bp, Homo sapiens
ctgtgaggttgcagt

SEQ ID NO: 547375 - DNA, 15 bp, Homo sapiens
cctgtgaggttgcag

SEQ ID NO: 547376 - DNA, 15 bp, Homo sapiens
gcctgtgaggttgca

SEQ ID NO: 547377 - DNA, 15 bp, Homo sapiens
ggcctgtgaggttgc

SEQ ID NO: 547378 - DNA, 15 bp, Homo sapiens
aggcctgtgaggttg

SEQ ID NO: 547379 - DNA, 15 bp, Homo sapiens
aaggcctgtgaggtt

SEQ ID NO: 547380 - DNA, 15 bp, Homo sapiens
gaaggcctgtgaggt

SEQ ID NO: 547381 - DNA, 15 bp, Homo sapiens
ggaaggcctgtgagg

SEQ ID NO: 547382 - DNA, 15 bp, Homo sapiens
aggaaggcctgtgag

SEQ ID NO: 547383 - DNA, 15 bp, Homo sapiens
aaggaaggcctgtga

SEQ ID NO: 547384 - DNA, 15 bp, Homo sapiens
aaaggaaggcctgtg

SEQ ID NO: 547385 - DNA, 15 bp, Homo sapiens
aaaaggaaggcctgt

SEQ ID NO: 547386 - DNA, 15 bp, Homo sapiens
gaaaaggaaggcctg

SEQ ID NO: 547387 - DNA, 15 bp, Homo sapiens
ggaaaaggaaggcct

SEQ ID NO: 547388 - DNA, 15 bp, Homo sapiens
aggaaaaggaaggcc

SEQ ID NO: 547389 - DNA, 15 bp, Homo sapiens
gaggaaaaggaaggc

SEQ ID NO: 547390 - DNA, 15 bp, Homo sapiens
ggaggaaaaggaagg

SEQ ID NO: 547391 - DNA, 15 bp, Homo sapiens
tggaggaaaaggaag

SEQ ID NO: 547392 - DNA, 15 bp, Homo sapiens
ttggaggaaaaggaa

SEQ ID NO: 547393 - DNA, 15 bp, Homo sapiens
gttggaggaaaagga

SEQ ID NO: 547394 - DNA, 15 bp, Homo sapiens
cgttggaggaaaagg

SEQ ID NO: 547395 - DNA, 15 bp, Homo sapiens
acgttggaggaaaag

SEQ ID NO: 547396 - DNA, 15 bp, Homo sapiens
cacgttggaggaaaa

SEQ ID NO: 547397 - DNA, 15 bp, Homo sapiens
acacgttggaggaaa

SEQ ID NO: 547398 - DNA, 15 bp, Homo sapiens
gacacgttggaggaa

SEQ ID NO: 547399 - DNA, 15 bp, Homo sapiens
tgacacgttggagga

SEQ ID NO: 547400 - DNA, 15 bp, Homo sapiens
gtgacacgttggagg

SEQ ID NO: 547401 - DNA, 15 bp, Homo sapiens
tgtgacacgttggag

SEQ ID NO: 547402 - DNA, 15 bp, Homo sapiens
atgtgacacgttgga

SEQ ID NO: 547403 - DNA, 15 bp, Homo sapiens
catgtgacacgttgg

SEQ ID NO: 547404 - DNA, 15 bp, Homo sapiens
gcatgtgacacgttg

SEQ ID NO: 547405 - DNA, 15 bp, Homo sapiens
agcatgtgacacgtt

SEQ ID NO: 547406 - DNA, 15 bp, Homo sapiens
cagcatgtgacacgt

SEQ ID NO: 547407 - DNA, 15 bp, Homo sapiens
acagcatgtgacacg

SEQ ID NO: 547408 - DNA, 15 bp, Homo sapiens
gacagcatgtgacac

SEQ ID NO: 547409 - DNA, 15 bp, Homo sapiens
ggacagcatgtgaca

SEQ ID NO: 547410 - DNA, 15 bp, Homo sapiens
aggacagcatgtgac

SEQ ID NO: 547411 - DNA, 15 bp, Homo sapiens
caggacagcatgtga

SEQ ID NO: 547412 - DNA, 15 bp, Homo sapiens
gcaggacagcatgtg

SEQ ID NO: 547413 - DNA, 15 bp, Homo sapiens
ggcaggacagcatgt

SEQ ID NO: 547414 - DNA, 15 bp, Homo sapiens
aggcaggacagcatg

SEQ ID NO: 547415 - DNA, 15 bp, Homo sapiens
gaggcaggacagcat

SEQ ID NO: 547416 - DNA, 15 bp, Homo sapiens
tgaggcaggacagca

SEQ ID NO: 547417 - DNA, 15 bp, Homo sapiens
ctgaggcaggacagc

SEQ ID NO: 547418 - DNA, 15 bp, Homo sapiens
cctgaggcaggacag

SEQ ID NO: 547419 - DNA, 15 bp, Homo sapiens
ccctgaggcaggaca

SEQ ID NO: 547420 - DNA, 15 bp, Homo sapiens
gccctgaggcaggac

SEQ ID NO: 547421 - DNA, 15 bp, Homo sapiens
ggccctgaggcagga

SEQ ID NO: 547422 - DNA, 15 bp, Homo sapiens
aggccctgaggcagg

SEQ ID NO: 547423 - DNA, 15 bp, Homo sapiens
aaggccctgaggcag

SEQ ID NO: 547424 - DNA, 15 bp, Homo sapiens
aaaggccctgaggca

SEQ ID NO: 547425 - DNA, 15 bp, Homo sapiens
caaaggccctgaggc

SEQ ID NO: 547426 - DNA, 15 bp, Homo sapiens
ccaaaggccctgagg

SEQ ID NO: 547427 - DNA, 15 bp, Homo sapiens
tccaaaggccctgag

SEQ ID NO: 547428 - DNA, 15 bp, Homo sapiens
ttccaaaggccctga

SEQ ID NO: 547429 - DNA, 15 bp, Homo sapiens
cttccaaaggccctg

SEQ ID NO: 547430 - DNA, 15 bp, Homo sapiens
acttccaaaggccct

SEQ ID NO: 547431 - DNA, 15 bp, Homo sapiens
cacttccaaaggccc

SEQ ID NO: 547432 - DNA, 15 bp, Homo sapiens
gcacttccaaaggcc

SEQ ID NO: 547433 - DNA, 15 bp, Homo sapiens
agcacttccaaaggc

SEQ ID NO: 547434 - DNA, 15 bp, Homo sapiens
aagcacttccaaagg

SEQ ID NO: 547435 - DNA, 15 bp, Homo sapiens
aaagcacttccaaag

SEQ ID NO: 547436 - DNA, 15 bp, Homo sapiens
aaaagcacttccaaa

SEQ ID NO: 547437 - DNA, 15 bp, Homo sapiens
gaaaagcacttccaa

SEQ ID NO: 547438 - DNA, 15 bp, Homo sapiens
agaaaagcacttcca

SEQ ID NO: 547439 - DNA, 15 bp, Homo sapiens
aagaaaagcacttcc

SEQ ID NO: 547440 - DNA, 15 bp, Homo sapiens
aaagaaaagcacttc

SEQ ID NO: 547441 - DNA, 15 bp, Homo sapiens
gaaagaaaagcactt

SEQ ID NO: 547442 - DNA, 15 bp, Homo sapiens
agaaagaaaagcact

SEQ ID NO: 547443 - DNA, 15 bp, Homo sapiens
cagaaagaaaagcac

SEQ ID NO: 547444 - DNA, 15 bp, Homo sapiens
gcagaaagaaaagca

SEQ ID NO: 547445 - DNA, 15 bp, Homo sapiens
ggcagaaagaaaagc

SEQ ID NO: 547446 - DNA, 15 bp, Homo sapiens
aggcagaaagaaaag

SEQ ID NO: 547447 - DNA, 15 bp, Homo sapiens
caggcagaaagaaaa

SEQ ID NO: 547448 - DNA, 15 bp, Homo sapiens
ccaggcagaaagaaa

SEQ ID NO: 547449 - DNA, 15 bp, Homo sapiens
tccaggcagaaagaa

SEQ ID NO: 547450 - DNA, 15 bp, Homo sapiens
gtccaggcagaaaga

SEQ ID NO: 547451 - DNA, 15 bp, Homo sapiens
ggtccaggcagaaag

SEQ ID NO: 547452 - DNA, 15 bp, Homo sapiens
cggtccaggcagaaa

SEQ ID NO: 547453 - DNA, 15 bp, Homo sapiens
acggtccaggcagaa

SEQ ID NO: 547454 - DNA, 15 bp, Homo sapiens
gacggtccaggcaga

SEQ ID NO: 547455 - DNA, 15 bp, Homo sapiens
agacggtccaggcag

SEQ ID NO: 547456 - DNA, 15 bp, Homo sapiens
aagacggtccaggca

SEQ ID NO: 547457 - DNA, 15 bp, Homo sapiens
aaagacggtccaggc

SEQ ID NO: 547458 - DNA, 15 bp, Homo sapiens
aaaagacggtccagg

SEQ ID NO: 547459 - DNA, 15 bp, Homo sapiens
aaaaagacggtccag

SEQ ID NO: 547460 - DNA, 15 bp, Homo sapiens
caaaaagacggtcca

SEQ ID NO: 547461 - DNA, 15 bp, Homo sapiens
acaaaaagacggtcc

SEQ ID NO: 547462 - DNA, 15 bp, Homo sapiens
gacaaaaagacggtc

SEQ ID NO: 547463 - DNA, 15 bp, Homo sapiens
agacaaaaagacggt

SEQ ID NO: 547464 - DNA, 15 bp, Homo sapiens
gagacaaaaagacgg

SEQ ID NO: 547465 - DNA, 15 bp, Homo sapiens
ggagacaaaaagacg

SEQ ID NO: 547466 - DNA, 15 bp, Homo sapiens
gggagacaaaaagac

SEQ ID NO: 547467 - DNA, 15 bp, Homo sapiens
agggagacaaaaaga

SEQ ID NO: 547468 - DNA, 15 bp, Homo sapiens
cagggagacaaaaag

SEQ ID NO: 547469 - DNA, 15 bp, Homo sapiens
ccagggagacaaaaa

SEQ ID NO: 547470 - DNA, 15 bp, Homo sapiens
gccagggagacaaaa

SEQ ID NO: 547471 - DNA, 15 bp, Homo sapiens
agccagggagacaaa

SEQ ID NO: 547472 - DNA, 15 bp, Homo sapiens
gagccagggagacaa

SEQ ID NO: 547473 - DNA, 15 bp, Homo sapiens
agagccagggagaca

SEQ ID NO: 547474 - DNA, 15 bp, Homo sapiens
aagagccagggagac

SEQ ID NO: 547475 - DNA, 15 bp, Homo sapiens
taagagccagggaga

SEQ ID NO: 547476 - DNA, 15 bp, Homo sapiens
ataagagccagggag

SEQ ID NO: 547477 - DNA, 15 bp, Homo sapiens
cataagagccaggga

SEQ ID NO: 547478 - DNA, 15 bp, Homo sapiens
gcataagagccaggg

SEQ ID NO: 547479 - DNA, 15 bp, Homo sapiens
agcataagagccagg

SEQ ID NO: 547480 - DNA, 15 bp, Homo sapiens
aagcataagagccag

SEQ ID NO: 547481 - DNA, 15 bp, Homo sapiens
caagcataagagcca

SEQ ID NO: 547482 - DNA, 15 bp, Homo sapiens
ccaagcataagagcc

SEQ ID NO: 547483 - DNA, 15 bp, Homo sapiens
accaagcataagagc

SEQ ID NO: 547484 - DNA, 15 bp, Homo sapiens
aaccaagcataagag

SEQ ID NO: 547485 - DNA, 15 bp, Homo sapiens
gaaccaagcataaga

SEQ ID NO: 547486 - DNA, 15 bp, Homo sapiens
ggaaccaagcataag

SEQ ID NO: 547487 - DNA, 15 bp, Homo sapiens
aggaaccaagcataa

SEQ ID NO: 547488 - DNA, 15 bp, Homo sapiens
gaggaaccaagcata

SEQ ID NO: 547489 - DNA, 15 bp, Homo sapiens
agaggaaccaagcat

SEQ ID NO: 547490 - DNA, 15 bp, Homo sapiens
aagaggaaccaagca

SEQ ID NO: 547491 - DNA, 15 bp, Homo sapiens
aaagaggaaccaagc

SEQ ID NO: 547492 - DNA, 15 bp, Homo sapiens
aaaagaggaaccaag

SEQ ID NO: 547493 - DNA, 15 bp, Homo sapiens
taaaagaggaaccaa

SEQ ID NO: 547494 - DNA, 15 bp, Homo sapiens
ataaaagaggaacca

SEQ ID NO: 547495 - DNA, 15 bp, Homo sapiens
cataaaagaggaacc

SEQ ID NO: 547496 - DNA, 15 bp, Homo sapiens
acataaaagaggaac

SEQ ID NO: 547497 - DNA, 15 bp, Homo sapiens
aacataaaagaggaa

SEQ ID NO: 547498 - DNA, 15 bp, Homo sapiens
aaacataaaagagga

SEQ ID NO: 547499 - DNA, 15 bp, Homo sapiens
taaacataaaagagg

SEQ ID NO: 547500 - DNA, 15 bp, Homo sapiens
ttaaacataaaagag

SEQ ID NO: 547501 - DNA, 15 bp, Homo sapiens
tttaaacataaaaga

SEQ ID NO: 547502 - DNA, 15 bp, Homo sapiens
atttaaacataaaag

SEQ ID NO: 547503 - DNA, 15 bp, Homo sapiens
catttaaacataaaa

SEQ ID NO: 547504 - DNA, 15 bp, Homo sapiens
acatttaaacataaa

SEQ ID NO: 547505 - DNA, 15 bp, Homo sapiens
tacatttaaacataa

SEQ ID NO: 547506 - DNA, 15 bp, Homo sapiens
ttacatttaaacata

SEQ ID NO: 547507 - DNA, 15 bp, Homo sapiens
gttacatttaaacat

SEQ ID NO: 547508 - DNA, 15 bp, Homo sapiens
ggttacatttaaaca

SEQ ID NO: 547509 - DNA, 15 bp, Homo sapiens
aggttacatttaaac

SEQ ID NO: 547510 - DNA, 15 bp, Homo sapiens
aaggttacatttaaa

SEQ ID NO: 547511 - DNA, 15 bp, Homo sapiens
aaaggttacatttaa

SEQ ID NO: 547512 - DNA, 15 bp, Homo sapiens
aaaaggttacattta

SEQ ID NO: 547513 - DNA, 15 bp, Homo sapiens
caaaaggttacattt

SEQ ID NO: 547514 - DNA, 15 bp, Homo sapiens
tcaaaaggttacatt

SEQ ID NO: 547515 - DNA, 15 bp, Homo sapiens
ttcaaaaggttacat

SEQ ID NO: 547516 - DNA, 15 bp, Homo sapiens
cttcaaaaggttaca

SEQ ID NO: 547517 - DNA, 15 bp, Homo sapiens
gcttcaaaaggttac

SEQ ID NO: 547518 - DNA, 15 bp, Homo sapiens
agcttcaaaaggtta

SEQ ID NO: 547519 - DNA, 15 bp, Homo sapiens
aagcttcaaaaggtt

SEQ ID NO: 547520 - DNA, 15 bp, Homo sapiens
taagcttcaaaaggt

SEQ ID NO: 547521 - DNA, 15 bp, Homo sapiens
ttaagcttcaaaagg

SEQ ID NO: 547522 - DNA, 15 bp, Homo sapiens
tttaagcttcaaaag

SEQ ID NO: 547523 - DNA, 15 bp, Homo sapiens
atttaagcttcaaaa

SEQ ID NO: 547524 - DNA, 15 bp, Homo sapiens
catttaagcttcaaa

SEQ ID NO: 547525 - DNA, 15 bp, Homo sapiens
acatttaagcttcaa

SEQ ID NO: 547526 - DNA, 15 bp, Homo sapiens
tacatttaagcttca

SEQ ID NO: 547527 - DNA, 15 bp, Homo sapiens
ttacatttaagcttc

SEQ ID NO: 547528 - DNA, 15 bp, Homo sapiens
gttacatttaagctt

SEQ ID NO: 547529 - DNA, 15 bp, Homo sapiens
ggttacatttaagct

SEQ ID NO: 547530 - DNA, 15 bp, Homo sapiens
aggttacatttaagc

SEQ ID NO: 547531 - DNA, 15 bp, Homo sapiens
aaggttacatttaag

SEQ ID NO: 547532 - DNA, 15 bp, Homo sapiens
tcttcaaaaggttac

SEQ ID NO: 547533 - DNA, 15 bp, Homo sapiens
ttcttcaaaaggtta

SEQ ID NO: 547534 - DNA, 15 bp, Homo sapiens
cttcttcaaaaggtt

SEQ ID NO: 547535 - DNA, 15 bp, Homo sapiens
tcttcttcaaaaggt

SEQ ID NO: 547536 - DNA, 15 bp, Homo sapiens
gtcttcttcaaaagg

SEQ ID NO: 547537 - DNA, 15 bp, Homo sapiens
tgtcttcttcaaaag

SEQ ID NO: 547538 - DNA, 15 bp, Homo sapiens
gtgtcttcttcaaaa

SEQ ID NO: 547539 - DNA, 15 bp, Homo sapiens
ggtgtcttcttcaaa

SEQ ID NO: 547540 - DNA, 15 bp, Homo sapiens
gggtgtcttcttcaa

SEQ ID NO: 547541 - DNA, 15 bp, Homo sapiens
ggggtgtcttcttca

SEQ ID NO: 547542 - DNA, 15 bp, Homo sapiens
cggggtgtcttcttc

SEQ ID NO: 547543 - DNA, 15 bp, Homo sapiens
acggggtgtcttctt

SEQ ID NO: 547544 - DNA, 15 bp, Homo sapiens
cacggggtgtcttct

SEQ ID NO: 547545 - DNA, 15 bp, Homo sapiens
tcacggggtgtcttc

SEQ ID NO: 547546 - DNA, 15 bp, Homo sapiens
atcacggggtgtctt

SEQ ID NO: 547547 - DNA, 15 bp, Homo sapiens
aatcacggggtgtct

SEQ ID NO: 547548 - DNA, 15 bp, Homo sapiens
caatcacggggtgtc

SEQ ID NO: 547549 - DNA, 15 bp, Homo sapiens
gcaatcacggggtgt

SEQ ID NO: 547550 - DNA, 15 bp, Homo sapiens
ggcaatcacggggtg

SEQ ID NO: 547551 - DNA, 15 bp, Homo sapiens
gggcaatcacggggt

SEQ ID NO: 547552 - DNA, 15 bp, Homo sapiens
tgggcaatcacgggg

SEQ ID NO: 547553 - DNA, 15 bp, Homo sapiens
gtgggcaatcacggg

SEQ ID NO: 547554 - DNA, 15 bp, Homo sapiens
ggtgggcaatcacgg

SEQ ID NO: 547555 - DNA, 15 bp, Homo sapiens
gggtgggcaatcacg

SEQ ID NO: 547556 - DNA, 15 bp, Homo sapiens
ggggtgggcaatcac

SEQ ID NO: 547557 - DNA, 15 bp, Homo sapiens
tggggtgggcaatca

SEQ ID NO: 547558 - DNA, 15 bp, Homo sapiens
gtggggtgggcaatc

SEQ ID NO: 547559 - DNA, 15 bp, Homo sapiens
ggtggggtgggcaat

SEQ ID NO: 547560 - DNA, 15 bp, Homo sapiens
gggtggggtgggcaa

SEQ ID NO: 547561 - DNA, 15 bp, Homo sapiens
tgggtggggtgggca

SEQ ID NO: 547562 - DNA, 15 bp, Homo sapiens
ttgggtggggtgggc

SEQ ID NO: 547563 - DNA, 15 bp, Homo sapiens
attgggtggggtggg

SEQ ID NO: 547564 - DNA, 15 bp, Homo sapiens
cattgggtggggtgg

SEQ ID NO: 547565 - DNA, 15 bp, Homo sapiens
ccattgggtggggtg

SEQ ID NO: 547566 - DNA, 15 bp, Homo sapiens
tccattgggtggggt

SEQ ID NO: 547567 - DNA, 15 bp, Homo sapiens
gtccattgggtgggg

SEQ ID NO: 547568 - DNA, 15 bp, Homo sapiens
tgtccattgggtggg

SEQ ID NO: 547569 - DNA, 15 bp, Homo sapiens
ctgtccattgggtgg

SEQ ID NO: 547570 - DNA, 15 bp, Homo sapiens
actgtccattgggtg

SEQ ID NO: 547571 - DNA, 15 bp, Homo sapiens
aactgtccattgggt

SEQ ID NO: 547572 - DNA, 15 bp, Homo sapiens
caactgtccattggg

SEQ ID NO: 547573 - DNA, 15 bp, Homo sapiens
gcaactgtccattgg

SEQ ID NO: 547574 - DNA, 15 bp, Homo sapiens
ggcaactgtccattg

SEQ ID NO: 547575 - DNA, 15 bp, Homo sapiens
gggcaactgtccatt

SEQ ID NO: 547576 - DNA, 15 bp, Homo sapiens
ggggcaactgtccat

SEQ ID NO: 547577 - DNA, 15 bp, Homo sapiens
gggggcaactgtcca

SEQ ID NO: 547578 - DNA, 15 bp, Homo sapiens
ggggggcaactgtcc

SEQ ID NO: 547579 - DNA, 15 bp, Homo sapiens
tggggggcaactgtc

SEQ ID NO: 547580 - DNA, 15 bp, Homo sapiens
gtggggggcaactgt

SEQ ID NO: 547581 - DNA, 15 bp, Homo sapiens
cgtggggggcaactg

SEQ ID NO: 547582 - DNA, 15 bp, Homo sapiens
acgtggggggcaact

SEQ ID NO: 547583 - DNA, 15 bp, Homo sapiens
gacgtggggggcaac

SEQ ID NO: 547584 - DNA, 15 bp, Homo sapiens
ggacgtggggggcaa

SEQ ID NO: 547585 - DNA, 15 bp, Homo sapiens
tggacgtggggggca

SEQ ID NO: 547586 - DNA, 15 bp, Homo sapiens
gtggacgtggggggc

SEQ ID NO: 547587 - DNA, 15 bp, Homo sapiens
agtggacgtgggggg

SEQ ID NO: 547588 - DNA, 15 bp, Homo sapiens
cagtggacgtggggg

SEQ ID NO: 547589 - DNA, 15 bp, Homo sapiens
acagtggacgtgggg

SEQ ID NO: 547590 - DNA, 15 bp, Homo sapiens
gacagtggacgtggg

SEQ ID NO: 547591 - DNA, 15 bp, Homo sapiens
agacagtggacgtgg

SEQ ID NO: 547592 - DNA, 15 bp, Homo sapiens
cagacagtggacgtg

SEQ ID NO: 547593 - DNA, 15 bp, Homo sapiens
acagacagtggacgt

SEQ ID NO: 547594 - DNA, 15 bp, Homo sapiens
cacagacagtggacg

SEQ ID NO: 547595 - DNA, 15 bp, Homo sapiens
gcacagacagtggac

SEQ ID NO: 547596 - DNA, 15 bp, Homo sapiens
ggcacagacagtgga

SEQ ID NO: 547597 - DNA, 15 bp, Homo sapiens
tggcacagacagtgg

SEQ ID NO: 547598 - DNA, 15 bp, Homo sapiens
atggcacagacagtg

SEQ ID NO: 547599 - DNA, 15 bp, Homo sapiens
gatggcacagacagt

SEQ ID NO: 547600 - DNA, 15 bp, Homo sapiens
agatggcacagacag

SEQ ID NO: 547601 - DNA, 15 bp, Homo sapiens
cagatggcacagaca

SEQ ID NO: 547602 - DNA, 15 bp, Homo sapiens
acagatggcacagac

SEQ ID NO: 547603 - DNA, 15 bp, Homo sapiens
cacagatggcacaga

SEQ ID NO: 547604 - DNA, 15 bp, Homo sapiens
acacagatggcacag

SEQ ID NO: 547605 - DNA, 15 bp, Homo sapiens
cacacagatggcaca

SEQ ID NO: 547606 - DNA, 15 bp, Homo sapiens
ccacacagatggcac

SEQ ID NO: 547607 - DNA, 15 bp, Homo sapiens
accacacagatggca

SEQ ID NO: 547608 - DNA, 15 bp, Homo sapiens
aaccacacagatggc

SEQ ID NO: 547609 - DNA, 15 bp, Homo sapiens
aaaccacacagatgg

SEQ ID NO: 547610 - DNA, 15 bp, Homo sapiens
aaaaccacacagatg

SEQ ID NO: 547611 - DNA, 15 bp, Homo sapiens
aaaaaccacacagat

SEQ ID NO: 547612 - DNA, 15 bp, Homo sapiens
gaaaaaccacacaga

SEQ ID NO: 547613 - DNA, 15 bp, Homo sapiens
tgaaaaaccacacag

SEQ ID NO: 547614 - DNA, 15 bp, Homo sapiens
ctgaaaaaccacaca

SEQ ID NO: 547615 - DNA, 15 bp, Homo sapiens
gctgaaaaaccacac

SEQ ID NO: 547616 - DNA, 15 bp, Homo sapiens
agctgaaaaaccaca

SEQ ID NO: 547617 - DNA, 15 bp, Homo sapiens
cagctgaaaaaccac

SEQ ID NO: 547618 - DNA, 15 bp, Homo sapiens
ccagctgaaaaacca

SEQ ID NO: 547619 - DNA, 15 bp, Homo sapiens
tccagctgaaaaacc

SEQ ID NO: 547620 - DNA, 15 bp, Homo sapiens
ctccagctgaaaaac

SEQ ID NO: 547621 - DNA, 15 bp, Homo sapiens
cctccagctgaaaaa

SEQ ID NO: 547622 - DNA, 15 bp, Homo sapiens
ccctccagctgaaaa

SEQ ID NO: 547623 - DNA, 15 bp, Homo sapiens
gccctccagctgaaa

SEQ ID NO: 547624 - DNA, 15 bp, Homo sapiens
tgccctccagctgaa

SEQ ID NO: 547625 - DNA, 15 bp, Homo sapiens
ttgccctccagctga

SEQ ID NO: 547626 - DNA, 15 bp, Homo sapiens
attgccctccagctg

SEQ ID NO: 547627 - DNA, 15 bp, Homo sapiens
cattgccctccagct

SEQ ID NO: 547628 - DNA, 15 bp, Homo sapiens
ccattgccctccagc

SEQ ID NO: 547629 - DNA, 15 bp, Homo sapiens
gccattgccctccag

SEQ ID NO: 547630 - DNA, 15 bp, Homo sapiens
ggccattgccctcca

SEQ ID NO: 547631 - DNA, 15 bp, Homo sapiens
gggccattgccctcc

SEQ ID NO: 547632 - DNA, 15 bp, Homo sapiens
ggggccattgccctc

SEQ ID NO: 547633 - DNA, 15 bp, Homo sapiens
tggggccattgccct

SEQ ID NO: 547634 - DNA, 15 bp, Homo sapiens
atggggccattgccc

SEQ ID NO: 547635 - DNA, 15 bp, Homo sapiens
gatggggccattgcc

SEQ ID NO: 547636 - DNA, 15 bp, Homo sapiens
agatggggccattgc

SEQ ID NO: 547637 - DNA, 15 bp, Homo sapiens
gagatggggccattg

SEQ ID NO: 547638 - DNA, 15 bp, Homo sapiens
cgagatggggccatt

SEQ ID NO: 547639 - DNA, 15 bp, Homo sapiens
ccgagatggggccat

SEQ ID NO: 547640 - DNA, 15 bp, Homo sapiens
gccgagatggggcca

SEQ ID NO: 547641 - DNA, 15 bp, Homo sapiens
agccgagatggggcc

SEQ ID NO: 547642 - DNA, 15 bp, Homo sapiens
gagccgagatggggc

SEQ ID NO: 547643 - DNA, 15 bp, Homo sapiens
tgagccgagatgggg

SEQ ID NO: 547644 - DNA, 15 bp, Homo sapiens
gtgagccgagatggg

SEQ ID NO: 547645 - DNA, 15 bp, Homo sapiens
agtgagccgagatgg

SEQ ID NO: 547646 - DNA, 15 bp, Homo sapiens
cagtgagccgagatg

SEQ ID NO: 547647 - DNA, 15 bp, Homo sapiens
gttgcagtgagccga

SEQ ID NO: 547648 - DNA, 15 bp, Homo sapiens
ggttgcagtgagccg

SEQ ID NO: 547649 - DNA, 15 bp, Homo sapiens
aggttgcagtgagcc

SEQ ID NO: 547650 - DNA, 15 bp, Homo sapiens
gaggttgcagtgagc

SEQ ID NO: 547651 - DNA, 15 bp, Homo sapiens
ggaggttgcagtgag

SEQ ID NO: 547652 - DNA, 15 bp, Homo sapiens
aggaggttgcagtga

SEQ ID NO: 547653 - DNA, 15 bp, Homo sapiens
gaggaggttgcagtg

SEQ ID NO: 547654 - DNA, 15 bp, Homo sapiens
ggaggaggttgcagt

SEQ ID NO: 547655 - DNA, 15 bp, Homo sapiens
aggaggaggttgcag

SEQ ID NO: 547656 - DNA, 15 bp, Homo sapiens
gaggaggaggttgca

SEQ ID NO: 547657 - DNA, 15 bp, Homo sapiens
ggaggaggaggttgc

SEQ ID NO: 547658 - DNA, 15 bp, Homo sapiens
gggaggaggaggttg

SEQ ID NO: 547659 - DNA, 15 bp, Homo sapiens
ggggaggaggaggtt

SEQ ID NO: 547660 - DNA, 15 bp, Homo sapiens
cggggaggaggaggt

SEQ ID NO: 547661 - DNA, 15 bp, Homo sapiens
ccggggaggaggagg

SEQ ID NO: 547662 - DNA, 15 bp, Homo sapiens
accggggaggaggag

SEQ ID NO: 547663 - DNA, 15 bp, Homo sapiens
aaccggggaggagga

SEQ ID NO: 547664 - DNA, 15 bp, Homo sapiens
gaaccggggaggagg

SEQ ID NO: 547665 - DNA, 15 bp, Homo sapiens
tgaaccggggaggag

SEQ ID NO: 547666 - DNA, 15 bp, Homo sapiens
ttgaaccggggagga

SEQ ID NO: 547667 - DNA, 15 bp, Homo sapiens
tttgaaccggggagg

SEQ ID NO: 547668 - DNA, 15 bp, Homo sapiens
gtttgaaccggggag

SEQ ID NO: 547669 - DNA, 15 bp, Homo sapiens
cgtttgaaccgggga

SEQ ID NO: 547670 - DNA, 15 bp, Homo sapiens
tcgtttgaaccgggg

SEQ ID NO: 547671 - DNA, 15 bp, Homo sapiens
gtcgtttgaaccggg

SEQ ID NO: 547672 - DNA, 15 bp, Homo sapiens
agtcgtttgaaccgg

SEQ ID NO: 547673 - DNA, 15 bp, Homo sapiens
gagtcgtttgaaccg

SEQ ID NO: 547674 - DNA, 15 bp, Homo sapiens
agagtcgtttgaacc

SEQ ID NO: 547675 - DNA, 15 bp, Homo sapiens
gagagtcgtttgaac

SEQ ID NO: 547676 - DNA, 15 bp, Homo sapiens
ggagagtcgtttgaa

SEQ ID NO: 547677 - DNA, 15 bp, Homo sapiens
tggagagtcgtttga

SEQ ID NO: 547678 - DNA, 15 bp, Homo sapiens
ctggagagtcgtttg

SEQ ID NO: 547679 - DNA, 15 bp, Homo sapiens
gctggagagtcgttt

SEQ ID NO: 547680 - DNA, 15 bp, Homo sapiens
ggctggagagtcgtt

SEQ ID NO: 547681 - DNA, 15 bp, Homo sapiens
aggctggagagtcgt

SEQ ID NO: 547682 - DNA, 15 bp, Homo sapiens
aaggctggagagtcg

SEQ ID NO: 547683 - DNA, 15 bp, Homo sapiens
caaggctggagagtc

SEQ ID NO: 547684 - DNA, 15 bp, Homo sapiens
gcaaggctggagagt

SEQ ID NO: 547685 - DNA, 15 bp, Homo sapiens
ggcaaggctggagag

SEQ ID NO: 547686 - DNA, 15 bp, Homo sapiens
aggcaaggctggaga

SEQ ID NO: 547687 - DNA, 15 bp, Homo sapiens
gaggcaaggctggag

SEQ ID NO: 547688 - DNA, 15 bp, Homo sapiens
agaggcaaggctgga

SEQ ID NO: 547689 - DNA, 15 bp, Homo sapiens
aagaggcaaggctgg

SEQ ID NO: 547690 - DNA, 15 bp, Homo sapiens
caagaggcaaggctg

SEQ ID NO: 547691 - DNA, 15 bp, Homo sapiens
tcaagaggcaaggct

SEQ ID NO: 547692 - DNA, 15 bp, Homo sapiens
ctcaagaggcaaggc

SEQ ID NO: 547693 - DNA, 15 bp, Homo sapiens
actcaagaggcaagg

SEQ ID NO: 547694 - DNA, 15 bp, Homo sapiens
tactcaagaggcaag

SEQ ID NO: 547695 - DNA, 15 bp, Homo sapiens
ctactcaagaggcaa

SEQ ID NO: 547696 - DNA, 15 bp, Homo sapiens
gctactcaagaggca

SEQ ID NO: 547697 - DNA, 15 bp, Homo sapiens
agctactcaagaggc

SEQ ID NO: 547698 - DNA, 15 bp, Homo sapiens
cagctactcaagagg

SEQ ID NO: 547699 - DNA, 15 bp, Homo sapiens
ccagctactcaagag

SEQ ID NO: 547700 - DNA, 15 bp, Homo sapiens
cccagctactcaaga

SEQ ID NO: 547701 - DNA, 15 bp, Homo sapiens
tcccagctactcaag

SEQ ID NO: 547702 - DNA, 15 bp, Homo sapiens
atcccagctactcaa

SEQ ID NO: 547703 - DNA, 15 bp, Homo sapiens
aatcccagctactca

SEQ ID NO: 547704 - DNA, 15 bp, Homo sapiens
taatcccagctactc

SEQ ID NO: 547705 - DNA, 15 bp, Homo sapiens
gtaatcccagctact

SEQ ID NO: 547706 - DNA, 15 bp, Homo sapiens
tgtaatcccagctac

SEQ ID NO: 547707 - DNA, 15 bp, Homo sapiens
ctgtaatcccagcta

SEQ ID NO: 547708 - DNA, 15 bp, Homo sapiens
cctgtaatcccagct

SEQ ID NO: 547709 - DNA, 15 bp, Homo sapiens
gcacgcctgtaatcc

SEQ ID NO: 547710 - DNA, 15 bp, Homo sapiens
tgcacgcctgtaatc

SEQ ID NO: 547711 - DNA, 15 bp, Homo sapiens
gtgcacgcctgtaat

SEQ ID NO: 547712 - DNA, 15 bp, Homo sapiens
ggtgcacgcctgtaa

SEQ ID NO: 547713 - DNA, 15 bp, Homo sapiens
tggtgcacgcctgta

SEQ ID NO: 547714 - DNA, 15 bp, Homo sapiens
gtggtgcacgcctgt

SEQ ID NO: 547715 - DNA, 15 bp, Homo sapiens
agtggtgcacgcctg

SEQ ID NO: 547716 - DNA, 15 bp, Homo sapiens
tagtggtgcacgcct

SEQ ID NO: 547717 - DNA, 15 bp, Homo sapiens
atagtggtgcacgcc

SEQ ID NO: 547718 - DNA, 15 bp, Homo sapiens
catagtggtgcacgc

SEQ ID NO: 547719 - DNA, 15 bp, Homo sapiens
gcatagtggtgcacg

SEQ ID NO: 547720 - DNA, 15 bp, Homo sapiens
ggcatagtggtgcac

SEQ ID NO: 547721 - DNA, 15 bp, Homo sapiens
gggcatagtggtgca

SEQ ID NO: 547722 - DNA, 15 bp, Homo sapiens
tgggcatagtggtgc

SEQ ID NO: 547723 - DNA, 15 bp, Homo sapiens
ctgggcatagtggtg

SEQ ID NO: 547724 - DNA, 15 bp, Homo sapiens
gctgggcatagtggt

SEQ ID NO: 547725 - DNA, 15 bp, Homo sapiens
agctgggcatagtgg

SEQ ID NO: 547726 - DNA, 15 bp, Homo sapiens
tagctgggcatagtg

SEQ ID NO: 547727 - DNA, 15 bp, Homo sapiens
ttagctgggcatagt

SEQ ID NO: 547728 - DNA, 15 bp, Homo sapiens
attagctgggcatag

SEQ ID NO: 547729 - DNA, 15 bp, Homo sapiens
aattagctgggcata

SEQ ID NO: 547730 - DNA, 15 bp, Homo sapiens
caaattagctgggca

SEQ ID NO: 547731 - DNA, 15 bp, Homo sapiens
ccaaattagctgggc

SEQ ID NO: 547732 - DNA, 15 bp, Homo sapiens
accaaattagctggg

SEQ ID NO: 547733 - DNA, 15 bp, Homo sapiens
taccaaattagctgg

SEQ ID NO: 547734 - DNA, 15 bp, Homo sapiens
ataccaaattagctg

SEQ ID NO: 547735 - DNA, 15 bp, Homo sapiens
aataccaaattagct

SEQ ID NO: 547736 - DNA, 15 bp, Homo sapiens
aaataccaaattagc

SEQ ID NO: 547737 - DNA, 15 bp, Homo sapiens
aaaataccaaattag

SEQ ID NO: 547738 - DNA, 15 bp, Homo sapiens
aaaaataccaaatta

SEQ ID NO: 547739 - DNA, 15 bp, Homo sapiens
taaaaataccaaatt

SEQ ID NO: 547740 - DNA, 15 bp, Homo sapiens
ctaaaaataccaaat

SEQ ID NO: 547741 - DNA, 15 bp, Homo sapiens
actaaaaataccaaa

SEQ ID NO: 547742 - DNA, 15 bp, Homo sapiens
tactaaaaataccaa

SEQ ID NO: 547743 - DNA, 15 bp, Homo sapiens
ctactaaaaatacca

SEQ ID NO: 547744 - DNA, 15 bp, Homo sapiens
tctactaaaaatacc

SEQ ID NO: 547745 - DNA, 15 bp, Homo sapiens
gaccccatctctact

SEQ ID NO: 547746 - DNA, 15 bp, Homo sapiens
agaccccatctctac

SEQ ID NO: 547747 - DNA, 15 bp, Homo sapiens
gagaccccatctcta

SEQ ID NO: 547748 - DNA, 15 bp, Homo sapiens
tgagaccccatctct

SEQ ID NO: 547749 - DNA, 15 bp, Homo sapiens
gtgagaccccatctc

SEQ ID NO: 547750 - DNA, 15 bp, Homo sapiens
ggtgagaccccatct

SEQ ID NO: 547751 - DNA, 15 bp, Homo sapiens
tggtgagaccccatc

SEQ ID NO: 547752 - DNA, 15 bp, Homo sapiens
atggtgagaccccat

SEQ ID NO: 547753 - DNA, 15 bp, Homo sapiens
catggtgagacccca

SEQ ID NO: 547754 - DNA, 15 bp, Homo sapiens
acatggtgagacccc

SEQ ID NO: 547755 - DNA, 15 bp, Homo sapiens
aacatggtgagaccc

SEQ ID NO: 547756 - DNA, 15 bp, Homo sapiens
taacatggtgagacc

SEQ ID NO: 547757 - DNA, 15 bp, Homo sapiens
ctaacatggtgagac

SEQ ID NO: 547758 - DNA, 15 bp, Homo sapiens
gctaacatggtgaga

SEQ ID NO: 547759 - DNA, 15 bp, Homo sapiens
ggctaacatggtgag

SEQ ID NO: 547760 - DNA, 15 bp, Homo sapiens
tggctaacatggtga

SEQ ID NO: 547761 - DNA, 15 bp, Homo sapiens
ctggctaacatggtg

SEQ ID NO: 547762 - DNA, 15 bp, Homo sapiens
cctggctaacatggt

SEQ ID NO: 547763 - DNA, 15 bp, Homo sapiens
gcctggctaacatgg

SEQ ID NO: 547764 - DNA, 15 bp, Homo sapiens
agcctggctaacatg

SEQ ID NO: 547765 - DNA, 15 bp, Homo sapiens
cagcctggctaacat

SEQ ID NO: 547766 - DNA, 15 bp, Homo sapiens
ccagcctggctaaca

SEQ ID NO: 547767 - DNA, 15 bp, Homo sapiens
accagcctggctaac

SEQ ID NO: 547768 - DNA, 15 bp, Homo sapiens
gaccagcctggctaa

SEQ ID NO: 547769 - DNA, 15 bp, Homo sapiens
agaccagcctggcta

SEQ ID NO: 547770 - DNA, 15 bp, Homo sapiens
gagaccagcctggct

SEQ ID NO: 547771 - DNA, 15 bp, Homo sapiens
cgagaccagcctggc

SEQ ID NO: 547772 - DNA, 15 bp, Homo sapiens
tcaggagttcgagac

SEQ ID NO: 547773 - DNA, 15 bp, Homo sapiens
gtcaggagttcgaga

SEQ ID NO: 547774 - DNA, 15 bp, Homo sapiens
ggtcaggagttcgag

SEQ ID NO: 547775 - DNA, 15 bp, Homo sapiens
aggtcaggagttcga

SEQ ID NO: 547776 - DNA, 15 bp, Homo sapiens
gaggtcaggagttcg

SEQ ID NO: 547777 - DNA, 15 bp, Homo sapiens
tgaggtcaggagttc

SEQ ID NO: 547778 - DNA, 15 bp, Homo sapiens
ctgaggtcaggagtt

SEQ ID NO: 547779 - DNA, 15 bp, Homo sapiens
cctgaggtcaggagt

SEQ ID NO: 547780 - DNA, 15 bp, Homo sapiens
acctgaggtcaggag

SEQ ID NO: 547781 - DNA, 15 bp, Homo sapiens
cacctgaggtcagga

SEQ ID NO: 547782 - DNA, 15 bp, Homo sapiens
tcacctgaggtcagg

SEQ ID NO: 547783 - DNA, 15 bp, Homo sapiens
atcacctgaggtcag

SEQ ID NO: 547784 - DNA, 15 bp, Homo sapiens
gatcacctgaggtca

SEQ ID NO: 547785 - DNA, 15 bp, Homo sapiens
gtggatcacctgagg

SEQ ID NO: 547786 - DNA, 15 bp, Homo sapiens
ggtggatcacctgag

SEQ ID NO: 547787 - DNA, 15 bp, Homo sapiens
aggtggatcacctga

SEQ ID NO: 547788 - DNA, 15 bp, Homo sapiens
caggtggatcacctg

SEQ ID NO: 547789 - DNA, 15 bp, Homo sapiens
acaggtggatcacct

SEQ ID NO: 547790 - DNA, 15 bp, Homo sapiens
gacaggtggatcacc

SEQ ID NO: 547791 - DNA, 15 bp, Homo sapiens
agacaggtggatcac

SEQ ID NO: 547792 - DNA, 15 bp, Homo sapiens
aagacaggtggatca

SEQ ID NO: 547793 - DNA, 15 bp, Homo sapiens
taagacaggtggatc

SEQ ID NO: 547794 - DNA, 15 bp, Homo sapiens
ctaagacaggtggat

SEQ ID NO: 547795 - DNA, 15 bp, Homo sapiens
gctaagacaggtgga

SEQ ID NO: 547796 - DNA, 15 bp, Homo sapiens
agctaagacaggtgg

SEQ ID NO: 547797 - DNA, 15 bp, Homo sapiens
aagctaagacaggtg

SEQ ID NO: 547798 - DNA, 15 bp, Homo sapiens
gaagctaagacaggt

SEQ ID NO: 547799 - DNA, 15 bp, Homo sapiens
ggaagctaagacagg

SEQ ID NO: 547800 - DNA, 15 bp, Homo sapiens
gggaagctaagacag

SEQ ID NO: 547801 - DNA, 15 bp, Homo sapiens
tgggaagctaagaca

SEQ ID NO: 547802 - DNA, 15 bp, Homo sapiens
ttgggaagctaagac

SEQ ID NO: 547803 - DNA, 15 bp, Homo sapiens
tttgggaagctaaga

SEQ ID NO: 547804 - DNA, 15 bp, Homo sapiens
ctttgggaagctaag

SEQ ID NO: 547805 - DNA, 15 bp, Homo sapiens
actttgggaagctaa

SEQ ID NO: 547806 - DNA, 15 bp, Homo sapiens
cactttgggaagcta

SEQ ID NO: 547807 - DNA, 15 bp, Homo sapiens
gcactttgggaagct

SEQ ID NO: 547808 - DNA, 15 bp, Homo sapiens
agcactttgggaagc

SEQ ID NO: 547809 - DNA, 15 bp, Homo sapiens
aagcactttgggaag

SEQ ID NO: 547810 - DNA, 15 bp, Homo sapiens
caagcactttgggaa

SEQ ID NO: 547811 - DNA, 15 bp, Homo sapiens
ccaagcactttggga

SEQ ID NO: 547812 - DNA, 15 bp, Homo sapiens
tccaagcactttggg

SEQ ID NO: 547813 - DNA, 15 bp, Homo sapiens
atccaagcactttgg

SEQ ID NO: 547814 - DNA, 15 bp, Homo sapiens
aatccaagcactttg

SEQ ID NO: 547815 - DNA, 15 bp, Homo sapiens
taatccaagcacttt

SEQ ID NO: 547816 - DNA, 15 bp, Homo sapiens
gtaatccaagcactt

SEQ ID NO: 547817 - DNA, 15 bp, Homo sapiens
tgtaatccaagcact

SEQ ID NO: 547818 - DNA, 15 bp, Homo sapiens
ctgtaatccaagcac

SEQ ID NO: 547819 - DNA, 15 bp, Homo sapiens
cctgtaatccaagca

SEQ ID NO: 547820 - DNA, 15 bp, Homo sapiens
gcctgtaatccaagc

SEQ ID NO: 547821 - DNA, 15 bp, Homo sapiens
tgcctgtaatccaag

SEQ ID NO: 547822 - DNA, 15 bp, Homo sapiens
atgcctgtaatccaa

SEQ ID NO: 547823 - DNA, 15 bp, Homo sapiens
catgcctgtaatcca

SEQ ID NO: 547824 - DNA, 15 bp, Homo sapiens
tcatgcctgtaatcc

SEQ ID NO: 547825 - DNA, 15 bp, Homo sapiens
ctcatgcctgtaatc

SEQ ID NO: 547826 - DNA, 15 bp, Homo sapiens
gctcatgcctgtaat

SEQ ID NO: 547827 - DNA, 15 bp, Homo sapiens
ggctcatgcctgtaa

SEQ ID NO: 547828 - DNA, 15 bp, Homo sapiens
tggctcatgcctgta

SEQ ID NO: 547829 - DNA, 15 bp, Homo sapiens
gtggctcatgcctgt

SEQ ID NO: 547830 - DNA, 15 bp, Homo sapiens
ggtggctcatgcctg

SEQ ID NO: 547831 - DNA, 15 bp, Homo sapiens
cggtggctcatgcct

SEQ ID NO: 547832 - DNA, 15 bp, Homo sapiens
gcggtggctcatgcc

SEQ ID NO: 547833 - DNA, 15 bp, Homo sapiens
cgcggtggctcatgc

SEQ ID NO: 547834 - DNA, 15 bp, Homo sapiens
gcgcggtggctcatg

SEQ ID NO: 547835 - DNA, 15 bp, Homo sapiens
ggcgcggtggctcat

SEQ ID NO: 547836 - DNA, 15 bp, Homo sapiens
aggcgcggtggctca

SEQ ID NO: 547837 - DNA, 15 bp, Homo sapiens
caggcgcggtggctc

SEQ ID NO: 547838 - DNA, 15 bp, Homo sapiens
ccaggcgcggtggct

SEQ ID NO: 547839 - DNA, 15 bp, Homo sapiens
gccaggcgcggtggc

SEQ ID NO: 547840 - DNA, 15 bp, Homo sapiens
agccaggcgcggtgg

SEQ ID NO: 547841 - DNA, 15 bp, Homo sapiens
aagccaggcgcggtg

SEQ ID NO: 547842 - DNA, 15 bp, Homo sapiens
caagccaggcgcggt

SEQ ID NO: 547843 - DNA, 15 bp, Homo sapiens
gcaagccaggcgcgg

SEQ ID NO: 547844 - DNA, 15 bp, Homo sapiens
cgcaagccaggcgcg

SEQ ID NO: 547845 - DNA, 15 bp, Homo sapiens
gcgcaagccaggcgc

SEQ ID NO: 547846 - DNA, 15 bp, Homo sapiens
ggcgcaagccaggcg

SEQ ID NO: 547847 - DNA, 15 bp, Homo sapiens
tggcgcaagccaggc

SEQ ID NO: 547848 - DNA, 15 bp, Homo sapiens
atggcgcaagccagg

SEQ ID NO: 547849 - DNA, 15 bp, Homo sapiens
gatggcgcaagccag

SEQ ID NO: 547850 - DNA, 15 bp, Homo sapiens
agatggcgcaagcca

SEQ ID NO: 547851 - DNA, 15 bp, Homo sapiens
cagatggcgcaagcc

SEQ ID NO: 547852 - DNA, 15 bp, Homo sapiens
acagatggcgcaagc

SEQ ID NO: 547853 - DNA, 15 bp, Homo sapiens
cacagatggcgcaag

SEQ ID NO: 547854 - DNA, 15 bp, Homo sapiens
acacagatggcgcaa

SEQ ID NO: 547855 - DNA, 15 bp, Homo sapiens
aacacagatggcgca

SEQ ID NO: 547856 - DNA, 15 bp, Homo sapiens
taacacagatggcgc

SEQ ID NO: 547857 - DNA, 15 bp, Homo sapiens
ataacacagatggcg

SEQ ID NO: 547858 - DNA, 15 bp, Homo sapiens
tataacacagatggc

SEQ ID NO: 547859 - DNA, 15 bp, Homo sapiens
ttataacacagatgg

SEQ ID NO: 547860 - DNA, 15 bp, Homo sapiens
gttataacacagatg

SEQ ID NO: 547861 - DNA, 15 bp, Homo sapiens
ggttataacacagat

SEQ ID NO: 547862 - DNA, 15 bp, Homo sapiens
tggttataacacaga

SEQ ID NO: 547863 - DNA, 15 bp, Homo sapiens
gtggttataacacag

SEQ ID NO: 547864 - DNA, 15 bp, Homo sapiens
tgtggttataacaca

SEQ ID NO: 547865 - DNA, 15 bp, Homo sapiens
gtgtggttataacac

SEQ ID NO: 547866 - DNA, 15 bp, Homo sapiens
ggtgtggttataaca

SEQ ID NO: 547867 - DNA, 15 bp, Homo sapiens
tggtgtggttataac

SEQ ID NO: 547868 - DNA, 15 bp, Homo sapiens
atggtgtggttataa

SEQ ID NO: 547869 - DNA, 15 bp, Homo sapiens
catggtgtggttata

SEQ ID NO: 547870 - DNA, 15 bp, Homo sapiens
gcatggtgtggttat

SEQ ID NO: 547871 - DNA, 15 bp, Homo sapiens
agcatggtgtggtta

SEQ ID NO: 547872 - DNA, 15 bp, Homo sapiens
tagcatggtgtggtt

SEQ ID NO: 547873 - DNA, 15 bp, Homo sapiens
atagcatggtgtggt

SEQ ID NO: 547874 - DNA, 15 bp, Homo sapiens
aatagcatggtgtgg

SEQ ID NO: 547875 - DNA, 15 bp, Homo sapiens
gaatagcatggtgtg

SEQ ID NO: 547876 - DNA, 15 bp, Homo sapiens
ggaatagcatggtgt

SEQ ID NO: 547877 - DNA, 15 bp, Homo sapiens
gggaatagcatggtg

SEQ ID NO: 547878 - DNA, 15 bp, Homo sapiens
agggaatagcatggt

SEQ ID NO: 547879 - DNA, 15 bp, Homo sapiens
aagggaatagcatgg

SEQ ID NO: 547880 - DNA, 15 bp, Homo sapiens
gaagggaatagcatg

SEQ ID NO: 547881 - DNA, 15 bp, Homo sapiens
agaagggaatagcat

SEQ ID NO: 547882 - DNA, 15 bp, Homo sapiens
cagaagggaatagca

SEQ ID NO: 547883 - DNA, 15 bp, Homo sapiens
tcagaagggaatagc

SEQ ID NO: 547884 - DNA, 15 bp, Homo sapiens
ctcagaagggaatag

SEQ ID NO: 547885 - DNA, 15 bp, Homo sapiens
gctcagaagggaata

SEQ ID NO: 547886 - DNA, 15 bp, Homo sapiens
ggctcagaagggaat

SEQ ID NO: 547887 - DNA, 15 bp, Homo sapiens
gggctcagaagggaa

SEQ ID NO: 547888 - DNA, 15 bp, Homo sapiens
agggctcagaaggga

SEQ ID NO: 547889 - DNA, 15 bp, Homo sapiens
aagggctcagaaggg

SEQ ID NO: 547890 - DNA, 15 bp, Homo sapiens
taagggctcagaagg

SEQ ID NO: 547891 - DNA, 15 bp, Homo sapiens
ttaagggctcagaag

SEQ ID NO: 547892 - DNA, 15 bp, Homo sapiens
attaagggctcagaa

SEQ ID NO: 547893 - DNA, 15 bp, Homo sapiens
tattaagggctcaga

SEQ ID NO: 547894 - DNA, 15 bp, Homo sapiens
ctattaagggctcag

SEQ ID NO: 547895 - DNA, 15 bp, Homo sapiens
actattaagggctca

SEQ ID NO: 547896 - DNA, 15 bp, Homo sapiens
gactattaagggctc

SEQ ID NO: 547897 - DNA, 15 bp, Homo sapiens
agactattaagggct

SEQ ID NO: 547898 - DNA, 15 bp, Homo sapiens
gagactattaagggc

SEQ ID NO: 547899 - DNA, 15 bp, Homo sapiens
agagactattaaggg

SEQ ID NO: 547900 - DNA, 15 bp, Homo sapiens
cagagactattaagg

SEQ ID NO: 547901 - DNA, 15 bp, Homo sapiens
tcagagactattaag

SEQ ID NO: 547902 - DNA, 15 bp, Homo sapiens
ttcagagactattaa

SEQ ID NO: 547903 - DNA, 15 bp, Homo sapiens
tttcagagactatta

SEQ ID NO: 547904 - DNA, 15 bp, Homo sapiens
atttcagagactatt

SEQ ID NO: 547905 - DNA, 15 bp, Homo sapiens
aatttcagagactat

SEQ ID NO: 547906 - DNA, 15 bp, Homo sapiens
taatttcagagacta

SEQ ID NO: 547907 - DNA, 15 bp, Homo sapiens
ataatttcagagact

SEQ ID NO: 547908 - DNA, 15 bp, Homo sapiens
gataatttcagagac

SEQ ID NO: 547909 - DNA, 15 bp, Homo sapiens
agataatttcagaga

SEQ ID NO: 547910 - DNA, 15 bp, Homo sapiens
gagataatttcagag

SEQ ID NO: 547911 - DNA, 15 bp, Homo sapiens
tgagataatttcaga

SEQ ID NO: 547912 - DNA, 15 bp, Homo sapiens
atgagataatttcag

SEQ ID NO: 547913 - DNA, 15 bp, Homo sapiens
gatgagataatttca

SEQ ID NO: 547914 - DNA, 15 bp, Homo sapiens
ggatgagataatttc

SEQ ID NO: 547915 - DNA, 15 bp, Homo sapiens
tggatgagataattt

SEQ ID NO: 547916 - DNA, 15 bp, Homo sapiens
gtggatgagataatt

SEQ ID NO: 547917 - DNA, 15 bp, Homo sapiens
agtggatgagataat

SEQ ID NO: 547918 - DNA, 15 bp, Homo sapiens
aagtggatgagataa

SEQ ID NO: 547919 - DNA, 15 bp, Homo sapiens
caagtggatgagata

SEQ ID NO: 547920 - DNA, 15 bp, Homo sapiens
acaagtggatgagat

SEQ ID NO: 547921 - DNA, 15 bp, Homo sapiens
cacaagtggatgaga

SEQ ID NO: 547922 - DNA, 15 bp, Homo sapiens
acacaagtggatgag

SEQ ID NO: 547923 - DNA, 15 bp, Homo sapiens
cacacaagtggatga

SEQ ID NO: 547924 - DNA, 15 bp, Homo sapiens
tcacacaagtggatg

SEQ ID NO: 547925 - DNA, 15 bp, Homo sapiens
ctcacacaagtggat

SEQ ID NO: 547926 - DNA, 15 bp, Homo sapiens
actcacacaagtgga

SEQ ID NO: 547927 - DNA, 15 bp, Homo sapiens
aactcacacaagtgg

SEQ ID NO: 547928 - DNA, 15 bp, Homo sapiens
gaactcacacaagtg

SEQ ID NO: 547929 - DNA, 15 bp, Homo sapiens
ggaactcacacaagt

SEQ ID NO: 547930 - DNA, 15 bp, Homo sapiens
tggaactcacacaag

SEQ ID NO: 547931 - DNA, 15 bp, Homo sapiens
atggaactcacacaa

SEQ ID NO: 547932 - DNA, 15 bp, Homo sapiens
catggaactcacaca

SEQ ID NO: 547933 - DNA, 15 bp, Homo sapiens
tcatggaactcacac

SEQ ID NO: 547934 - DNA, 15 bp, Homo sapiens
ctcatggaactcaca

SEQ ID NO: 547935 - DNA, 15 bp, Homo sapiens
cctcatggaactcac

SEQ ID NO: 547936 - DNA, 15 bp, Homo sapiens
tcctcatggaactca

SEQ ID NO: 547937 - DNA, 15 bp, Homo sapiens
gtcctcatggaactc

SEQ ID NO: 547938 - DNA, 15 bp, Homo sapiens
tgtcctcatggaact

SEQ ID NO: 547939 - DNA, 15 bp, Homo sapiens
ctgtcctcatggaac

SEQ ID NO: 547940 - DNA, 15 bp, Homo sapiens
tctgtcctcatggaa

SEQ ID NO: 547941 - DNA, 15 bp, Homo sapiens
ctctgtcctcatgga

SEQ ID NO: 547942 - DNA, 15 bp, Homo sapiens
tctctgtcctcatgg

SEQ ID NO: 547943 - DNA, 15 bp, Homo sapiens
gtctctgtcctcatg

SEQ ID NO: 547944 - DNA, 15 bp, Homo sapiens
agtctctgtcctcat

SEQ ID NO: 547945 - DNA, 15 bp, Homo sapiens
aagtctctgtcctca

SEQ ID NO: 547946 - DNA, 15 bp, Homo sapiens
aaagtctctgtcctc

SEQ ID NO: 547947 - DNA, 15 bp, Homo sapiens
taaagtctctgtcct

SEQ ID NO: 547948 - DNA, 15 bp, Homo sapiens
ataaagtctctgtcc

SEQ ID NO: 547949 - DNA, 15 bp, Homo sapiens
gataaagtctctgtc

SEQ ID NO: 547950 - DNA, 15 bp, Homo sapiens
agataaagtctctgt

SEQ ID NO: 547951 - DNA, 15 bp, Homo sapiens
cagataaagtctctg

SEQ ID NO: 547952 - DNA, 15 bp, Homo sapiens
acagataaagtctct

SEQ ID NO: 547953 - DNA, 15 bp, Homo sapiens
gacagataaagtctc

SEQ ID NO: 547954 - DNA, 15 bp, Homo sapiens
agacagataaagtct

SEQ ID NO: 547955 - DNA, 15 bp, Homo sapiens
gagacagataaagtc

SEQ ID NO: 547956 - DNA, 15 bp, Homo sapiens
cgagacagataaagt

SEQ ID NO: 547957 - DNA, 15 bp, Homo sapiens
acgagacagataaag

SEQ ID NO: 547958 - DNA, 15 bp, Homo sapiens
aacgagacagataaa

SEQ ID NO: 547959 - DNA, 15 bp, Homo sapiens
gaacgagacagataa

SEQ ID NO: 547960 - DNA, 15 bp, Homo sapiens
tgaacgagacagata

SEQ ID NO: 547961 - DNA, 15 bp, Homo sapiens
atgaacgagacagat

SEQ ID NO: 547962 - DNA, 15 bp, Homo sapiens
catgaacgagacaga

SEQ ID NO: 547963 - DNA, 15 bp, Homo sapiens
ccatgaacgagacag

SEQ ID NO: 547964 - DNA, 15 bp, Homo sapiens
gccatgaacgagaca

SEQ ID NO: 547965 - DNA, 15 bp, Homo sapiens
agccatgaacgagac

SEQ ID NO: 547966 - DNA, 15 bp, Homo sapiens
cagccatgaacgaga

SEQ ID NO: 547967 - DNA, 15 bp, Homo sapiens
gcagccatgaacgag

SEQ ID NO: 547968 - DNA, 15 bp, Homo sapiens
tgcagccatgaacga

SEQ ID NO: 547969 - DNA, 15 bp, Homo sapiens
atgcagccatgaacg

SEQ ID NO: 547970 - DNA, 15 bp, Homo sapiens
aatgcagccatgaac

SEQ ID NO: 547971 - DNA, 15 bp, Homo sapiens
gaatgcagccatgaa

SEQ ID NO: 547972 - DNA, 15 bp, Homo sapiens
ggaatgcagccatga

SEQ ID NO: 547973 - DNA, 15 bp, Homo sapiens
tggaatgcagccatg

SEQ ID NO: 547974 - DNA, 15 bp, Homo sapiens
atggaatgcagccat

SEQ ID NO: 547975 - DNA, 15 bp, Homo sapiens
tatggaatgcagcca

SEQ ID NO: 547976 - DNA, 15 bp, Homo sapiens
ctatggaatgcagcc

SEQ ID NO: 547977 - DNA, 15 bp, Homo sapiens
actatggaatgcagc

SEQ ID NO: 547978 - DNA, 15 bp, Homo sapiens
aactatggaatgcag

SEQ ID NO: 547979 - DNA, 15 bp, Homo sapiens
caactatggaatgca

SEQ ID NO: 547980 - DNA, 15 bp, Homo sapiens
ccaactatggaatgc

SEQ ID NO: 547981 - DNA, 15 bp, Homo sapiens
tccaactatggaatg

SEQ ID NO: 547982 - DNA, 15 bp, Homo sapiens
ctccaactatggaat

SEQ ID NO: 547983 - DNA, 15 bp, Homo sapiens
tctccaactatggaa

SEQ ID NO: 547984 - DNA, 15 bp, Homo sapiens
gtctccaactatgga

SEQ ID NO: 547985 - DNA, 15 bp, Homo sapiens
ggtctccaactatgg

SEQ ID NO: 547986 - DNA, 15 bp, Homo sapiens
gggtctccaactatg

SEQ ID NO: 547987 - DNA, 15 bp, Homo sapiens
agggtctccaactat

SEQ ID NO: 547988 - DNA, 15 bp, Homo sapiens
aagggtctccaacta

SEQ ID NO: 547989 - DNA, 15 bp, Homo sapiens
caagggtctccaact

SEQ ID NO: 547990 - DNA, 15 bp, Homo sapiens
acaagggtctccaac

SEQ ID NO: 547991 - DNA, 15 bp, Homo sapiens
gacaagggtctccaa

SEQ ID NO: 547992 - DNA, 15 bp, Homo sapiens
ggacaagggtctcca

SEQ ID NO: 547993 - DNA, 15 bp, Homo sapiens
tggacaagggtctcc

SEQ ID NO: 547994 - DNA, 15 bp, Homo sapiens
ctggacaagggtctc

SEQ ID NO: 547995 - DNA, 15 bp, Homo sapiens
cctggacaagggtct

SEQ ID NO: 547996 - DNA, 15 bp, Homo sapiens
ccctggacaagggtc

SEQ ID NO: 547997 - DNA, 15 bp, Homo sapiens
gccctggacaagggt

SEQ ID NO: 547998 - DNA, 15 bp, Homo sapiens
tgccctggacaaggg

SEQ ID NO: 547999 - DNA, 15 bp, Homo sapiens
ctgccctggacaagg

SEQ ID NO: 548000 - DNA, 15 bp, Homo sapiens
tctgccctggacaag

SEQ ID NO: 548001 - DNA, 15 bp, Homo sapiens
ctctgccctggacaa

SEQ ID NO: 548002 - DNA, 15 bp, Homo sapiens
tctctgccctggaca

SEQ ID NO: 548003 - DNA, 15 bp, Homo sapiens
ttctctgccctggac

SEQ ID NO: 548004 - DNA, 15 bp, Homo sapiens
gttctctgccctgga

SEQ ID NO: 548005 - DNA, 15 bp, Homo sapiens
ggttctctgccctgg

SEQ ID NO: 548006 - DNA, 15 bp, Homo sapiens
tggttctctgccctg

SEQ ID NO: 548007 - DNA, 15 bp, Homo sapiens
gtggttctctgccct

SEQ ID NO: 548008 - DNA, 15 bp, Homo sapiens
ggtggttctctgccc

SEQ ID NO: 548009 - DNA, 15 bp, Homo sapiens
aggtggttctctgcc

SEQ ID NO: 548010 - DNA, 15 bp, Homo sapiens
taggtggttctctgc

SEQ ID NO: 548011 - DNA, 15 bp, Homo sapiens
ctaggtggttctctg

SEQ ID NO: 548012 - DNA, 15 bp, Homo sapiens
gctaggtggttctct

SEQ ID NO: 548013 - DNA, 15 bp, Homo sapiens
cgctaggtggttctc

SEQ ID NO: 548014 - DNA, 15 bp, Homo sapiens
acgctaggtggttct

SEQ ID NO: 548015 - DNA, 15 bp, Homo sapiens
tacgctaggtggttc

SEQ ID NO: 548016 - DNA, 15 bp, Homo sapiens
ctacgctaggtggtt

SEQ ID NO: 548017 - DNA, 15 bp, Homo sapiens
cctacgctaggtggt

SEQ ID NO: 548018 - DNA, 15 bp, Homo sapiens
tcctacgctaggtgg

SEQ ID NO: 548019 - DNA, 15 bp, Homo sapiens
gtcctacgctaggtg

SEQ ID NO: 548020 - DNA, 15 bp, Homo sapiens
ggtcctacgctaggt

SEQ ID NO: 548021 - DNA, 15 bp, Homo sapiens
aggtcctacgctagg

SEQ ID NO: 548022 - DNA, 15 bp, Homo sapiens
aaggtcctacgctag

SEQ ID NO: 548023 - DNA, 15 bp, Homo sapiens
caaggtcctacgcta

SEQ ID NO: 548024 - DNA, 15 bp, Homo sapiens
ccaaggtcctacgct

SEQ ID NO: 548025 - DNA, 15 bp, Homo sapiens
cccaaggtcctacgc

SEQ ID NO: 548026 - DNA, 15 bp, Homo sapiens
gcccaaggtcctacg

SEQ ID NO: 548027 - DNA, 15 bp, Homo sapiens
agcccaaggtcctac

SEQ ID NO: 548028 - DNA, 15 bp, Homo sapiens
tagcccaaggtccta

SEQ ID NO: 548029 - DNA, 15 bp, Homo sapiens
ttagcccaaggtcct

SEQ ID NO: 548030 - DNA, 15 bp, Homo sapiens
cttagcccaaggtcc

SEQ ID NO: 548031 - DNA, 15 bp, Homo sapiens
ccttagcccaaggtc

SEQ ID NO: 548032 - DNA, 15 bp, Homo sapiens
gccttagcccaaggt

SEQ ID NO: 548033 - DNA, 15 bp, Homo sapiens
tgccttagcccaagg

SEQ ID NO: 548034 - DNA, 15 bp, Homo sapiens
ctgccttagcccaag

SEQ ID NO: 548035 - DNA, 15 bp, Homo sapiens
tctgccttagcccaa

SEQ ID NO: 548036 - DNA, 15 bp, Homo sapiens
ctctgccttagccca

SEQ ID NO: 548037 - DNA, 15 bp, Homo sapiens
tctctgccttagccc

SEQ ID NO: 548038 - DNA, 15 bp, Homo sapiens
ctctctgccttagcc

SEQ ID NO: 548039 - DNA, 15 bp, Homo sapiens
cctctctgccttagc

SEQ ID NO: 548040 - DNA, 15 bp, Homo sapiens
gcctctctgccttag

SEQ ID NO: 548041 - DNA, 15 bp, Homo sapiens
ggcctctctgcctta

SEQ ID NO: 548042 - DNA, 15 bp, Homo sapiens
gggcctctctgcctt

SEQ ID NO: 548043 - DNA, 15 bp, Homo sapiens
ggggcctctctgcct

SEQ ID NO: 548044 - DNA, 15 bp, Homo sapiens
tggggcctctctgcc

SEQ ID NO: 548045 - DNA, 15 bp, Homo sapiens
ctggggcctctctgc

SEQ ID NO: 548046 - DNA, 15 bp, Homo sapiens
actggggcctctctg

SEQ ID NO: 548047 - DNA, 15 bp, Homo sapiens
cactggggcctctct

SEQ ID NO: 548048 - DNA, 15 bp, Homo sapiens
ccactggggcctctc

SEQ ID NO: 548049 - DNA, 15 bp, Homo sapiens
cccactggggcctct

SEQ ID NO: 548050 - DNA, 15 bp, Homo sapiens
ccccactggggcctc

SEQ ID NO: 548051 - DNA, 15 bp, Homo sapiens
cccccactggggcct

SEQ ID NO: 548052 - DNA, 15 bp, Homo sapiens
acccccactggggcc

SEQ ID NO: 548053 - DNA, 15 bp, Homo sapiens
gacccccactggggc

SEQ ID NO: 548054 - DNA, 15 bp, Homo sapiens
ggacccccactgggg

SEQ ID NO: 548055 - DNA, 15 bp, Homo sapiens
aggacccccactggg

SEQ ID NO: 548056 - DNA, 15 bp, Homo sapiens
gaggacccccactgg

SEQ ID NO: 548057 - DNA, 15 bp, Homo sapiens
ggaggacccccactg

SEQ ID NO: 548058 - DNA, 15 bp, Homo sapiens
cggaggacccccact

SEQ ID NO: 548059 - DNA, 15 bp, Homo sapiens
gcggaggacccccac

SEQ ID NO: 548060 - DNA, 15 bp, Homo sapiens
tgcggaggaccccca

SEQ ID NO: 548061 - DNA, 15 bp, Homo sapiens
ctgcggaggaccccc

SEQ ID NO: 548062 - DNA, 15 bp, Homo sapiens
gctgcggaggacccc

SEQ ID NO: 548063 - DNA, 15 bp, Homo sapiens
cgctgcggaggaccc

SEQ ID NO: 548064 - DNA, 15 bp, Homo sapiens
acgctgcggaggacc

SEQ ID NO: 548065 - DNA, 15 bp, Homo sapiens
cacgctgcggaggac

SEQ ID NO: 548066 - DNA, 15 bp, Homo sapiens
ccacgctgcggagga

SEQ ID NO: 548067 - DNA, 15 bp, Homo sapiens
tccacgctgcggagg

SEQ ID NO: 548068 - DNA, 15 bp, Homo sapiens
gtccacgctgcggag

SEQ ID NO: 548069 - DNA, 15 bp, Homo sapiens
agtccacgctgcgga

SEQ ID NO: 548070 - DNA, 15 bp, Homo sapiens
aagtccacgctgcgg

SEQ ID NO: 548071 - DNA, 15 bp, Homo sapiens
aaagtccacgctgcg

SEQ ID NO: 548072 - DNA, 15 bp, Homo sapiens
caaagtccacgctgc

SEQ ID NO: 548073 - DNA, 15 bp, Homo sapiens
ccaaagtccacgctg

SEQ ID NO: 548074 - DNA, 15 bp, Homo sapiens
tccaaagtccacgct

SEQ ID NO: 548075 - DNA, 15 bp, Homo sapiens
ttccaaagtccacgc

SEQ ID NO: 548076 - DNA, 15 bp, Homo sapiens
gttccaaagtccacg

SEQ ID NO: 548077 - DNA, 15 bp, Homo sapiens
ggttccaaagtccac

SEQ ID NO: 548078 - DNA, 15 bp, Homo sapiens
tggttccaaagtcca

SEQ ID NO: 548079 - DNA, 15 bp, Homo sapiens
ctggttccaaagtcc

SEQ ID NO: 548080 - DNA, 15 bp, Homo sapiens
tctggttccaaagtc

SEQ ID NO: 548081 - DNA, 15 bp, Homo sapiens
gtctggttccaaagt

SEQ ID NO: 548082 - DNA, 15 bp, Homo sapiens
agtctggttccaaag

SEQ ID NO: 548083 - DNA, 15 bp, Homo sapiens
gagtctggttccaaa

SEQ ID NO: 548084 - DNA, 15 bp, Homo sapiens
ggagtctggttccaa

SEQ ID NO: 548085 - DNA, 15 bp, Homo sapiens
gggagtctggttcca

SEQ ID NO: 548086 - DNA, 15 bp, Homo sapiens
agggagtctggttcc

SEQ ID NO: 548087 - DNA, 15 bp, Homo sapiens
cagggagtctggttc

SEQ ID NO: 548088 - DNA, 15 bp, Homo sapiens
tcagggagtctggtt

SEQ ID NO: 548089 - DNA, 15 bp, Homo sapiens
ctcagggagtctggt

SEQ ID NO: 548090 - DNA, 15 bp, Homo sapiens
actcagggagtctgg

SEQ ID NO: 548091 - DNA, 15 bp, Homo sapiens
aactcagggagtctg

SEQ ID NO: 548092 - DNA, 15 bp, Homo sapiens
gaactcagggagtct

SEQ ID NO: 548093 - DNA, 15 bp, Homo sapiens
tgaactcagggagtc

SEQ ID NO: 548094 - DNA, 15 bp, Homo sapiens
ctgaactcagggagt

SEQ ID NO: 548095 - DNA, 15 bp, Homo sapiens
gctgaactcagggag

SEQ ID NO: 548096 - DNA, 15 bp, Homo sapiens
tgctgaactcaggga

SEQ ID NO: 548097 - DNA, 15 bp, Homo sapiens
ctgctgaactcaggg

SEQ ID NO: 548098 - DNA, 15 bp, Homo sapiens
actgctgaactcagg

SEQ ID NO: 548099 - DNA, 15 bp, Homo sapiens
cactgctgaactcag

SEQ ID NO: 548100 - DNA, 15 bp, Homo sapiens
ccactgctgaactca

SEQ ID NO: 548101 - DNA, 15 bp, Homo sapiens
gccactgctgaactc

SEQ ID NO: 548102 - DNA, 15 bp, Homo sapiens
agccactgctgaact

SEQ ID NO: 548103 - DNA, 15 bp, Homo sapiens
gagccactgctgaac

SEQ ID NO: 548104 - DNA, 15 bp, Homo sapiens
agagccactgctgaa

SEQ ID NO: 548105 - DNA, 15 bp, Homo sapiens
aagagccactgctga

SEQ ID NO: 548106 - DNA, 15 bp, Homo sapiens
caagagccactgctg

SEQ ID NO: 548107 - DNA, 15 bp, Homo sapiens
gcaagagccactgct

SEQ ID NO: 548108 - DNA, 15 bp, Homo sapiens
tgcaagagccactgc

SEQ ID NO: 548109 - DNA, 15 bp, Homo sapiens
gtgcaagagccactg

SEQ ID NO: 548110 - DNA, 15 bp, Homo sapiens
agtgcaagagccact

SEQ ID NO: 548111 - DNA, 15 bp, Homo sapiens
aagtgcaagagccac

SEQ ID NO: 548112 - DNA, 15 bp, Homo sapiens
gaagtgcaagagcca

SEQ ID NO: 548113 - DNA, 15 bp, Homo sapiens
ggaagtgcaagagcc

SEQ ID NO: 548114 - DNA, 15 bp, Homo sapiens
aggaagtgcaagagc

SEQ ID NO: 548115 - DNA, 15 bp, Homo sapiens
caggaagtgcaagag

SEQ ID NO: 548116 - DNA, 15 bp, Homo sapiens
acaggaagtgcaaga

SEQ ID NO: 548117 - DNA, 15 bp, Homo sapiens
gacaggaagtgcaag

SEQ ID NO: 548118 - DNA, 15 bp, Homo sapiens
agacaggaagtgcaa

SEQ ID NO: 548119 - DNA, 15 bp, Homo sapiens
gagacaggaagtgca

SEQ ID NO: 548120 - DNA, 15 bp, Homo sapiens
agagacaggaagtgc

SEQ ID NO: 548121 - DNA, 15 bp, Homo sapiens
cagagacaggaagtg

SEQ ID NO: 548122 - DNA, 15 bp, Homo sapiens
acagagacaggaagt

SEQ ID NO: 548123 - DNA, 15 bp, Homo sapiens
cacagagacaggaag

SEQ ID NO: 548124 - DNA, 15 bp, Homo sapiens
ccacagagacaggaa

SEQ ID NO: 548125 - DNA, 15 bp, Homo sapiens
gccacagagacagga

SEQ ID NO: 548126 - DNA, 15 bp, Homo sapiens
agccacagagacagg

SEQ ID NO: 548127 - DNA, 15 bp, Homo sapiens
cagccacagagacag

SEQ ID NO: 548128 - DNA, 15 bp, Homo sapiens
acagccacagagaca

SEQ ID NO: 548129 - DNA, 15 bp, Homo sapiens
cacagccacagagac

SEQ ID NO: 548130 - DNA, 15 bp, Homo sapiens
ccacagccacagaga

SEQ ID NO: 548131 - DNA, 15 bp, Homo sapiens
cccacagccacagag

SEQ ID NO: 548132 - DNA, 15 bp, Homo sapiens
acccacagccacaga

SEQ ID NO: 548133 - DNA, 15 bp, Homo sapiens
cacccacagccacag

SEQ ID NO: 548134 - DNA, 15 bp, Homo sapiens
tcacccacagccaca

SEQ ID NO: 548135 - DNA, 15 bp, Homo sapiens
ctcacccacagccac

SEQ ID NO: 548136 - DNA, 15 bp, Homo sapiens
actcacccacagcca

SEQ ID NO: 548137 - DNA, 15 bp, Homo sapiens
aactcacccacagcc

SEQ ID NO: 548138 - DNA, 15 bp, Homo sapiens
caactcacccacagc

SEQ ID NO: 548139 - DNA, 15 bp, Homo sapiens
gcaactcacccacag

SEQ ID NO: 548140 - DNA, 15 bp, Homo sapiens
tgcaactcacccaca

SEQ ID NO: 548141 - DNA, 15 bp, Homo sapiens
atgcaactcacccac

SEQ ID NO: 548142 - DNA, 15 bp, Homo sapiens
tatgcaactcaccca

SEQ ID NO: 548143 - DNA, 15 bp, Homo sapiens
ttatgcaactcaccc

SEQ ID NO: 548144 - DNA, 15 bp, Homo sapiens
gttatgcaactcacc

SEQ ID NO: 548145 - DNA, 15 bp, Homo sapiens
ggttatgcaactcac

SEQ ID NO: 548146 - DNA, 15 bp, Homo sapiens
gggttatgcaactca

SEQ ID NO: 548147 - DNA, 15 bp, Homo sapiens
agggttatgcaactc

SEQ ID NO: 548148 - DNA, 15 bp, Homo sapiens
cagggttatgcaact

SEQ ID NO: 548149 - DNA, 15 bp, Homo sapiens
gcagggttatgcaac

SEQ ID NO: 548150 - DNA, 15 bp, Homo sapiens
ggcagggttatgcaa

SEQ ID NO: 548151 - DNA, 15 bp, Homo sapiens
cggcagggttatgca

SEQ ID NO: 548152 - DNA, 15 bp, Homo sapiens
ccggcagggttatgc

SEQ ID NO: 548153 - DNA, 15 bp, Homo sapiens
cccggcagggttatg

SEQ ID NO: 548154 - DNA, 15 bp, Homo sapiens
gcccggcagggttat

SEQ ID NO: 548155 - DNA, 15 bp, Homo sapiens
cgcccggcagggtta

SEQ ID NO: 548156 - DNA, 15 bp, Homo sapiens
acgcccggcagggtt

SEQ ID NO: 548157 - DNA, 15 bp, Homo sapiens
cacgcccggcagggt

SEQ ID NO: 548158 - DNA, 15 bp, Homo sapiens
acacgcccggcaggg

SEQ ID NO: 548159 - DNA, 15 bp, Homo sapiens
aacacgcccggcagg

SEQ ID NO: 548160 - DNA, 15 bp, Homo sapiens
aaacacgcccggcag

SEQ ID NO: 548161 - DNA, 15 bp, Homo sapiens
gaaacacgcccggca

SEQ ID NO: 548162 - DNA, 15 bp, Homo sapiens
agaaacacgcccggc

SEQ ID NO: 548163 - DNA, 15 bp, Homo sapiens
gagaaacacgcccgg

SEQ ID NO: 548164 - DNA, 15 bp, Homo sapiens
ggagaaacacgcccg

SEQ ID NO: 548165 - DNA, 15 bp, Homo sapiens
cggagaaacacgccc

SEQ ID NO: 548166 - DNA, 15 bp, Homo sapiens
ccggagaaacacgcc

SEQ ID NO: 548167 - DNA, 15 bp, Homo sapiens
cccggagaaacacgc

SEQ ID NO: 548168 - DNA, 15 bp, Homo sapiens
gcccggagaaacacg

SEQ ID NO: 548169 - DNA, 15 bp, Homo sapiens
ggcccggagaaacac

SEQ ID NO: 548170 - DNA, 15 bp, Homo sapiens
aggcccggagaaaca

SEQ ID NO: 548171 - DNA, 15 bp, Homo sapiens
gaggcccggagaaac

SEQ ID NO: 548172 - DNA, 15 bp, Homo sapiens
ggaggcccggagaaa

SEQ ID NO: 548173 - DNA, 15 bp, Homo sapiens
gggaggcccggagaa

SEQ ID NO: 548174 - DNA, 15 bp, Homo sapiens
agggaggcccggaga

SEQ ID NO: 548175 - DNA, 15 bp, Homo sapiens
gagggaggcccggag

SEQ ID NO: 548176 - DNA, 15 bp, Homo sapiens
ggagggaggcccgga

SEQ ID NO: 548177 - DNA, 15 bp, Homo sapiens
aggagggaggcccgg

SEQ ID NO: 548178 - DNA, 15 bp, Homo sapiens
gaggagggaggcccg

SEQ ID NO: 548179 - DNA, 15 bp, Homo sapiens
cgaggagggaggccc

SEQ ID NO: 548180 - DNA, 15 bp, Homo sapiens
ccgaggagggaggcc

SEQ ID NO: 548181 - DNA, 15 bp, Homo sapiens
cccgaggagggaggc

SEQ ID NO: 548182 - DNA, 15 bp, Homo sapiens
gcccgaggagggagg

SEQ ID NO: 548183 - DNA, 15 bp, Homo sapiens
agcccgaggagggag

SEQ ID NO: 548184 - DNA, 15 bp, Homo sapiens
cagcccgaggaggga

SEQ ID NO: 548185 - DNA, 15 bp, Homo sapiens
acagcccgaggaggg

SEQ ID NO: 548186 - DNA, 15 bp, Homo sapiens
tacagcccgaggagg

SEQ ID NO: 548187 - DNA, 15 bp, Homo sapiens
ctacagcccgaggag

SEQ ID NO: 548188 - DNA, 15 bp, Homo sapiens
gctacagcccgagga

SEQ ID NO: 548189 - DNA, 15 bp, Homo sapiens
cgctacagcccgagg

SEQ ID NO: 548190 - DNA, 15 bp, Homo sapiens
tcgctacagcccgag

SEQ ID NO: 548191 - DNA, 15 bp, Homo sapiens
ctcgctacagcccga

SEQ ID NO: 548192 - DNA, 15 bp, Homo sapiens
cctcgctacagcccg

SEQ ID NO: 548193 - DNA, 15 bp, Homo sapiens
ccctcgctacagccc

SEQ ID NO: 548194 - DNA, 15 bp, Homo sapiens
cccctcgctacagcc

SEQ ID NO: 548195 - DNA, 15 bp, Homo sapiens
acccctcgctacagc

SEQ ID NO: 548196 - DNA, 15 bp, Homo sapiens
tacccctcgctacag

SEQ ID NO: 548197 - DNA, 15 bp, Homo sapiens
ttacccctcgctaca

SEQ ID NO: 548198 - DNA, 15 bp, Homo sapiens
cttacccctcgctac

SEQ ID NO: 548199 - DNA, 15 bp, Homo sapiens
ccttacccctcgcta

SEQ ID NO: 548200 - DNA, 15 bp, Homo sapiens
cccttacccctcgct

SEQ ID NO: 548201 - DNA, 15 bp, Homo sapiens
tcccttacccctcgc

SEQ ID NO: 548202 - DNA, 15 bp, Homo sapiens
ctcccttacccctcg

SEQ ID NO: 548203 - DNA, 15 bp, Homo sapiens
cctcccttacccctc

SEQ ID NO: 548204 - DNA, 15 bp, Homo sapiens
acctcccttacccct

SEQ ID NO: 548205 - DNA, 15 bp, Homo sapiens
gacctcccttacccc

SEQ ID NO: 548206 - DNA, 15 bp, Homo sapiens
tgacctcccttaccc

SEQ ID NO: 548207 - DNA, 15 bp, Homo sapiens
atgacctcccttacc

SEQ ID NO: 548208 - DNA, 15 bp, Homo sapiens
tatgacctcccttac

SEQ ID NO: 548209 - DNA, 15 bp, Homo sapiens
gtatgacctccctta

SEQ ID NO: 548210 - DNA, 15 bp, Homo sapiens
cgtatgacctccctt

SEQ ID NO: 548211 - DNA, 15 bp, Homo sapiens
gcgtatgacctccct

SEQ ID NO: 548212 - DNA, 15 bp, Homo sapiens
ggcgtatgacctccc

SEQ ID NO: 548213 - DNA, 15 bp, Homo sapiens
gggcgtatgacctcc

SEQ ID NO: 548214 - DNA, 15 bp, Homo sapiens
agggcgtatgacctc

SEQ ID NO: 548215 - DNA, 15 bp, Homo sapiens
cagggcgtatgacct

SEQ ID NO: 548216 - DNA, 15 bp, Homo sapiens
ccagggcgtatgacc

SEQ ID NO: 548217 - DNA, 15 bp, Homo sapiens
cccagggcgtatgac

SEQ ID NO: 548218 - DNA, 15 bp, Homo sapiens
ccccagggcgtatga

SEQ ID NO: 548219 - DNA, 15 bp, Homo sapiens
tccccagggcgtatg

SEQ ID NO: 548220 - DNA, 15 bp, Homo sapiens
ttccccagggcgtat

SEQ ID NO: 548221 - DNA, 15 bp, Homo sapiens
gttccccagggcgta

SEQ ID NO: 548222 - DNA, 15 bp, Homo sapiens
tgttccccagggcgt

SEQ ID NO: 548223 - DNA, 15 bp, Homo sapiens
gtgttccccagggcg

SEQ ID NO: 548224 - DNA, 15 bp, Homo sapiens
ggtgttccccagggc

SEQ ID NO: 548225 - DNA, 15 bp, Homo sapiens
gggtgttccccaggg

SEQ ID NO: 548226 - DNA, 15 bp, Homo sapiens
ggggtgttccccagg

SEQ ID NO: 548227 - DNA, 15 bp, Homo sapiens
tggggtgttccccag

SEQ ID NO: 548228 - DNA, 15 bp, Homo sapiens
ttggggtgttcccca

SEQ ID NO: 548229 - DNA, 15 bp, Homo sapiens
tttggggtgttcccc

SEQ ID NO: 548230 - DNA, 15 bp, Homo sapiens
ctttggggtgttccc

SEQ ID NO: 548231 - DNA, 15 bp, Homo sapiens
gctttggggtgttcc

SEQ ID NO: 548232 - DNA, 15 bp, Homo sapiens
ggctttggggtgttc

SEQ ID NO: 548233 - DNA, 15 bp, Homo sapiens
aggctttggggtgtt

SEQ ID NO: 548234 - DNA, 15 bp, Homo sapiens
caggctttggggtgt

SEQ ID NO: 548235 - DNA, 15 bp, Homo sapiens
ccaggctttggggtg

SEQ ID NO: 548236 - DNA, 15 bp, Homo sapiens
cccaggctttggggt

SEQ ID NO: 548237 - DNA, 15 bp, Homo sapiens
acccaggctttgggg

SEQ ID NO: 548238 - DNA, 15 bp, Homo sapiens
gacccaggctttggg

SEQ ID NO: 548239 - DNA, 15 bp, Homo sapiens
ggacccaggctttgg

SEQ ID NO: 548240 - DNA, 15 bp, Homo sapiens
gggacccaggctttg

SEQ ID NO: 548241 - DNA, 15 bp, Homo sapiens
agggacccaggcttt

SEQ ID NO: 548242 - DNA, 15 bp, Homo sapiens
cagggacccaggctt

SEQ ID NO: 548243 - DNA, 15 bp, Homo sapiens
ccagggacccaggct

SEQ ID NO: 548244 - DNA, 15 bp, Homo sapiens
cccagggacccaggc

SEQ ID NO: 548245 - DNA, 15 bp, Homo sapiens
tcccagggacccagg

SEQ ID NO: 548246 - DNA, 15 bp, Homo sapiens
atcccagggacccag

SEQ ID NO: 548247 - DNA, 15 bp, Homo sapiens
catcccagggaccca

SEQ ID NO: 548248 - DNA, 15 bp, Homo sapiens
gcatcccagggaccc

SEQ ID NO: 548249 - DNA, 15 bp, Homo sapiens
tgcatcccagggacc

SEQ ID NO: 548250 - DNA, 15 bp, Homo sapiens
atgcatcccagggac

SEQ ID NO: 548251 - DNA, 15 bp, Homo sapiens
gatgcatcccaggga

SEQ ID NO: 548252 - DNA, 15 bp, Homo sapiens
ggatgcatcccaggg

SEQ ID NO: 548253 - DNA, 15 bp, Homo sapiens
tggatgcatcccagg

SEQ ID NO: 548254 - DNA, 15 bp, Homo sapiens
gtggatgcatcccag

SEQ ID NO: 548255 - DNA, 15 bp, Homo sapiens
tgtggatgcatccca

SEQ ID NO: 548256 - DNA, 15 bp, Homo sapiens
ctgtggatgcatccc

SEQ ID NO: 548257 - DNA, 15 bp, Homo sapiens
tctgtggatgcatcc

SEQ ID NO: 548258 - DNA, 15 bp, Homo sapiens
atctgtggatgcatc

SEQ ID NO: 548259 - DNA, 15 bp, Homo sapiens
aatctgtggatgcat

SEQ ID NO: 548260 - DNA, 15 bp, Homo sapiens
caatctgtggatgca

SEQ ID NO: 548261 - DNA, 15 bp, Homo sapiens
acaatctgtggatgc

SEQ ID NO: 548262 - DNA, 15 bp, Homo sapiens
tacaatctgtggatg

SEQ ID NO: 548263 - DNA, 15 bp, Homo sapiens
ctacaatctgtggat

SEQ ID NO: 548264 - DNA, 15 bp, Homo sapiens
cctacaatctgtgga

SEQ ID NO: 548265 - DNA, 15 bp, Homo sapiens
gcctacaatctgtgg

SEQ ID NO: 548266 - DNA, 15 bp, Homo sapiens
ggcctacaatctgtg

SEQ ID NO: 548267 - DNA, 15 bp, Homo sapiens
aggcctacaatctgt

SEQ ID NO: 548268 - DNA, 15 bp, Homo sapiens
caggcctacaatctg

SEQ ID NO: 548269 - DNA, 15 bp, Homo sapiens
tcaggcctacaatct

SEQ ID NO: 548270 - DNA, 15 bp, Homo sapiens
ctcaggcctacaatc

SEQ ID NO: 548271 - DNA, 15 bp, Homo sapiens
actcaggcctacaat

SEQ ID NO: 548272 - DNA, 15 bp, Homo sapiens
gactcaggcctacaa

SEQ ID NO: 548273 - DNA, 15 bp, Homo sapiens
agactcaggcctaca

SEQ ID NO: 548274 - DNA, 15 bp, Homo sapiens
aagactcaggcctac

SEQ ID NO: 548275 - DNA, 15 bp, Homo sapiens
taagactcaggccta

SEQ ID NO: 548276 - DNA, 15 bp, Homo sapiens
ttaagactcaggcct

SEQ ID NO: 548277 - DNA, 15 bp, Homo sapiens
gttaagactcaggcc

SEQ ID NO: 548278 - DNA, 15 bp, Homo sapiens
tgttaagactcaggc

SEQ ID NO: 548279 - DNA, 15 bp, Homo sapiens
gtgttaagactcagg

SEQ ID NO: 548280 - DNA, 15 bp, Homo sapiens
tgtgttaagactcag

SEQ ID NO: 548281 - DNA, 15 bp, Homo sapiens
gtgtgttaagactca

SEQ ID NO: 548282 - DNA, 15 bp, Homo sapiens
agtgtgttaagactc

SEQ ID NO: 548283 - DNA, 15 bp, Homo sapiens
gagtgtgttaagact

SEQ ID NO: 548284 - DNA, 15 bp, Homo sapiens
ggagtgtgttaagac

SEQ ID NO: 548285 - DNA, 15 bp, Homo sapiens
tggagtgtgttaaga

SEQ ID NO: 548286 - DNA, 15 bp, Homo sapiens
atggagtgtgttaag

SEQ ID NO: 548287 - DNA, 15 bp, Homo sapiens
gatggagtgtgttaa

SEQ ID NO: 548288 - DNA, 15 bp, Homo sapiens
agatggagtgtgtta

SEQ ID NO: 548289 - DNA, 15 bp, Homo sapiens
cagatggagtgtgtt

SEQ ID NO: 548290 - DNA, 15 bp, Homo sapiens
ccagatggagtgtgt

SEQ ID NO: 548291 - DNA, 15 bp, Homo sapiens
tccagatggagtgtg

SEQ ID NO: 548292 - DNA, 15 bp, Homo sapiens
atccagatggagtgt

SEQ ID NO: 548293 - DNA, 15 bp, Homo sapiens
aatccagatggagtg

SEQ ID NO: 548294 - DNA, 15 bp, Homo sapiens
aaatccagatggagt

SEQ ID NO: 548295 - DNA, 15 bp, Homo sapiens
gaaatccagatggag

SEQ ID NO: 548296 - DNA, 15 bp, Homo sapiens
tgaaatccagatgga

SEQ ID NO: 548297 - DNA, 15 bp, Homo sapiens
ttgaaatccagatgg

SEQ ID NO: 548298 - DNA, 15 bp, Homo sapiens
attgaaatccagatg

SEQ ID NO: 548299 - DNA, 15 bp, Homo sapiens
cattgaaatccagat

SEQ ID NO: 548300 - DNA, 15 bp, Homo sapiens
tcattgaaatccaga

SEQ ID NO: 548301 - DNA, 15 bp, Homo sapiens
gtcattgaaatccag

SEQ ID NO: 548302 - DNA, 15 bp, Homo sapiens
agtcattgaaatcca

SEQ ID NO: 548303 - DNA, 15 bp, Homo sapiens
aagtcattgaaatcc

SEQ ID NO: 548304 - DNA, 15 bp, Homo sapiens
gaagtcattgaaatc

SEQ ID NO: 548305 - DNA, 15 bp, Homo sapiens
agaagtcattgaaat

SEQ ID NO: 548306 - DNA, 15 bp, Homo sapiens
cagaagtcattgaaa

SEQ ID NO: 548307 - DNA, 15 bp, Homo sapiens
gcagaagtcattgaa

SEQ ID NO: 548308 - DNA, 15 bp, Homo sapiens
ggcagaagtcattga

SEQ ID NO: 548309 - DNA, 15 bp, Homo sapiens
aggcagaagtcattg

SEQ ID NO: 548310 - DNA, 15 bp, Homo sapiens
caggcagaagtcatt

SEQ ID NO: 548311 - DNA, 15 bp, Homo sapiens
ccaggcagaagtcat

SEQ ID NO: 548312 - DNA, 15 bp, Homo sapiens
accaggcagaagtca

SEQ ID NO: 548313 - DNA, 15 bp, Homo sapiens
aaccaggcagaagtc

SEQ ID NO: 548314 - DNA, 15 bp, Homo sapiens
gaaccaggcagaagt

SEQ ID NO: 548315 - DNA, 15 bp, Homo sapiens
ggaaccaggcagaag

SEQ ID NO: 548316 - DNA, 15 bp, Homo sapiens
tggaaccaggcagaa

SEQ ID NO: 548317 - DNA, 15 bp, Homo sapiens
ctggaaccaggcaga

SEQ ID NO: 548318 - DNA, 15 bp, Homo sapiens
actggaaccaggcag

SEQ ID NO: 548319 - DNA, 15 bp, Homo sapiens
cactggaaccaggca

SEQ ID NO: 548320 - DNA, 15 bp, Homo sapiens
gcactggaaccaggc

SEQ ID NO: 548321 - DNA, 15 bp, Homo sapiens
agcactggaaccagg

SEQ ID NO: 548322 - DNA, 15 bp, Homo sapiens
cagcactggaaccag

SEQ ID NO: 548323 - DNA, 15 bp, Homo sapiens
ccagcactggaacca

SEQ ID NO: 548324 - DNA, 15 bp, Homo sapiens
cccagcactggaacc

SEQ ID NO: 548325 - DNA, 15 bp, Homo sapiens
gcccagcactggaac

SEQ ID NO: 548326 - DNA, 15 bp, Homo sapiens
agcccagcactggaa

SEQ ID NO: 548327 - DNA, 15 bp, Homo sapiens
cagcccagcactgga

SEQ ID NO: 548328 - DNA, 15 bp, Homo sapiens
acagcccagcactgg

SEQ ID NO: 548329 - DNA, 15 bp, Homo sapiens
aacagcccagcactg

SEQ ID NO: 548330 - DNA, 15 bp, Homo sapiens
aaacagcccagcact

SEQ ID NO: 548331 - DNA, 15 bp, Homo sapiens
gaaacagcccagcac

SEQ ID NO: 548332 - DNA, 15 bp, Homo sapiens
ggaaacagcccagca

SEQ ID NO: 548333 - DNA, 15 bp, Homo sapiens
gggaaacagcccagc

SEQ ID NO: 548334 - DNA, 15 bp, Homo sapiens
agggaaacagcccag

SEQ ID NO: 548335 - DNA, 15 bp, Homo sapiens
cagggaaacagccca

SEQ ID NO: 548336 - DNA, 15 bp, Homo sapiens
acagggaaacagccc

SEQ ID NO: 548337 - DNA, 15 bp, Homo sapiens
gacagggaaacagcc

SEQ ID NO: 548338 - DNA, 15 bp, Homo sapiens
agacagggaaacagc

SEQ ID NO: 548339 - DNA, 15 bp, Homo sapiens
cagacagggaaacag

SEQ ID NO: 548340 - DNA, 15 bp, Homo sapiens
tcagacagggaaaca

SEQ ID NO: 548341 - DNA, 15 bp, Homo sapiens
ctcagacagggaaac

SEQ ID NO: 548342 - DNA, 15 bp, Homo sapiens
gctcagacagggaaa

SEQ ID NO: 548343 - DNA, 15 bp, Homo sapiens
agctcagacagggaa

SEQ ID NO: 548344 - DNA, 15 bp, Homo sapiens
aagctcagacaggga

SEQ ID NO: 548345 - DNA, 15 bp, Homo sapiens
aaagctcagacaggg

SEQ ID NO: 548346 - DNA, 15 bp, Homo sapiens
caaagctcagacagg

SEQ ID NO: 548347 - DNA, 15 bp, Homo sapiens
ccaaagctcagacag

SEQ ID NO: 548348 - DNA, 15 bp, Homo sapiens
accaaagctcagaca

SEQ ID NO: 548349 - DNA, 15 bp, Homo sapiens
caccaaagctcagac

SEQ ID NO: 548350 - DNA, 15 bp, Homo sapiens
ccaccaaagctcaga

SEQ ID NO: 548351 - DNA, 15 bp, Homo sapiens
gccaccaaagctcag

SEQ ID NO: 548352 - DNA, 15 bp, Homo sapiens
agccaccaaagctca

SEQ ID NO: 548353 - DNA, 15 bp, Homo sapiens
aagccaccaaagctc

SEQ ID NO: 548354 - DNA, 15 bp, Homo sapiens
aaagccaccaaagct

SEQ ID NO: 548355 - DNA, 15 bp, Homo sapiens
aaaagccaccaaagc

SEQ ID NO: 548356 - DNA, 15 bp, Homo sapiens
caaaagccaccaaag

SEQ ID NO: 548357 - DNA, 15 bp, Homo sapiens
tcaaaagccaccaaa

SEQ ID NO: 548358 - DNA, 15 bp, Homo sapiens
atcaaaagccaccaa

SEQ ID NO: 548359 - DNA, 15 bp, Homo sapiens
aatcaaaagccacca

SEQ ID NO: 548360 - DNA, 15 bp, Homo sapiens
caatcaaaagccacc

SEQ ID NO: 548361 - DNA, 15 bp, Homo sapiens
tcaatcaaaagccac

SEQ ID NO: 548362 - DNA, 15 bp, Homo sapiens
gtcaatcaaaagcca

SEQ ID NO: 548363 - DNA, 15 bp, Homo sapiens
ggtcaatcaaaagcc

SEQ ID NO: 548364 - DNA, 15 bp, Homo sapiens
gggtcaatcaaaagc

SEQ ID NO: 548365 - DNA, 15 bp, Homo sapiens
ggggtcaatcaaaag

SEQ ID NO: 548366 - DNA, 15 bp, Homo sapiens
aggggtcaatcaaaa

SEQ ID NO: 548367 - DNA, 15 bp, Homo sapiens
aaggggtcaatcaaa

SEQ ID NO: 548368 - DNA, 15 bp, Homo sapiens
aaaggggtcaatcaa

SEQ ID NO: 548369 - DNA, 15 bp, Homo sapiens
gaaaggggtcaatca

SEQ ID NO: 548370 - DNA, 15 bp, Homo sapiens
ggaaaggggtcaatc

SEQ ID NO: 548371 - DNA, 15 bp, Homo sapiens
aggaaaggggtcaat

SEQ ID NO: 548372 - DNA, 15 bp, Homo sapiens
caggaaaggggtcaa

SEQ ID NO: 548373 - DNA, 15 bp, Homo sapiens
gcaggaaaggggtca

SEQ ID NO: 548374 - DNA, 15 bp, Homo sapiens
ggcaggaaaggggtc

SEQ ID NO: 548375 - DNA, 15 bp, Homo sapiens
gggcaggaaaggggt

SEQ ID NO: 548376 - DNA, 15 bp, Homo sapiens
ggggcaggaaagggg

SEQ ID NO: 548377 - DNA, 15 bp, Homo sapiens
tggggcaggaaaggg

SEQ ID NO: 548378 - DNA, 15 bp, Homo sapiens
ctggggcaggaaagg

SEQ ID NO: 548379 - DNA, 15 bp, Homo sapiens
gctggggcaggaaag

SEQ ID NO: 548380 - DNA, 15 bp, Homo sapiens
tgctggggcaggaaa

SEQ ID NO: 548381 - DNA, 15 bp, Homo sapiens
atgctggggcaggaa

SEQ ID NO: 548382 - DNA, 15 bp, Homo sapiens
catgctggggcagga

SEQ ID NO: 548383 - DNA, 15 bp, Homo sapiens
tcatgctggggcagg

SEQ ID NO: 548384 - DNA, 15 bp, Homo sapiens
ttcatgctggggcag

SEQ ID NO: 548385 - DNA, 15 bp, Homo sapiens
cttcatgctggggca

SEQ ID NO: 548386 - DNA, 15 bp, Homo sapiens
ccttcatgctggggc

SEQ ID NO: 548387 - DNA, 15 bp, Homo sapiens
accttcatgctgggg

SEQ ID NO: 548388 - DNA, 15 bp, Homo sapiens
caccttcatgctggg

SEQ ID NO: 548389 - DNA, 15 bp, Homo sapiens
ccaccttcatgctgg

SEQ ID NO: 548390 - DNA, 15 bp, Homo sapiens
tccaccttcatgctg

SEQ ID NO: 548391 - DNA, 15 bp, Homo sapiens
ctccaccttcatgct

SEQ ID NO: 548392 - DNA, 15 bp, Homo sapiens
actccaccttcatgc

SEQ ID NO: 548393 - DNA, 15 bp, Homo sapiens
tactccaccttcatg

SEQ ID NO: 548394 - DNA, 15 bp, Homo sapiens
ctactccaccttcat

SEQ ID NO: 548395 - DNA, 15 bp, Homo sapiens
gctactccaccttca

SEQ ID NO: 548396 - DNA, 15 bp, Homo sapiens
ggctactccaccttc

SEQ ID NO: 548397 - DNA, 15 bp, Homo sapiens
tggctactccacctt

SEQ ID NO: 548398 - DNA, 15 bp, Homo sapiens
ctggctactccacct

SEQ ID NO: 548399 - DNA, 15 bp, Homo sapiens
tctggctactccacc

SEQ ID NO: 548400 - DNA, 15 bp, Homo sapiens
ttctggctactccac

SEQ ID NO: 548401 - DNA, 15 bp, Homo sapiens
cttctggctactcca

SEQ ID NO: 548402 - DNA, 15 bp, Homo sapiens
ccttctggctactcc

SEQ ID NO: 548403 - DNA, 15 bp, Homo sapiens
tccttctggctactc

SEQ ID NO: 548404 - DNA, 15 bp, Homo sapiens
ttccttctggctact

SEQ ID NO: 548405 - DNA, 15 bp, Homo sapiens
cttccttctggctac

SEQ ID NO: 548406 - DNA, 15 bp, Homo sapiens
ccttccttctggcta

SEQ ID NO: 548407 - DNA, 15 bp, Homo sapiens
cccttccttctggct

SEQ ID NO: 548408 - DNA, 15 bp, Homo sapiens
tcccttccttctggc

SEQ ID NO: 548409 - DNA, 15 bp, Homo sapiens
atcccttccttctgg

SEQ ID NO: 548410 - DNA, 15 bp, Homo sapiens
catcccttccttctg

SEQ ID NO: 548411 - DNA, 15 bp, Homo sapiens
gcatcccttccttct

SEQ ID NO: 548412 - DNA, 15 bp, Homo sapiens
cgcatcccttccttc

SEQ ID NO: 548413 - DNA, 15 bp, Homo sapiens
ccgcatcccttcctt

SEQ ID NO: 548414 - DNA, 15 bp, Homo sapiens
cccgcatcccttcct

SEQ ID NO: 548415 - DNA, 15 bp, Homo sapiens
acccgcatcccttcc

SEQ ID NO: 548416 - DNA, 15 bp, Homo sapiens
cacccgcatcccttc

SEQ ID NO: 548417 - DNA, 15 bp, Homo sapiens
acacccgcatccctt

SEQ ID NO: 548418 - DNA, 15 bp, Homo sapiens
tacacccgcatccct

SEQ ID NO: 548419 - DNA, 15 bp, Homo sapiens
atacacccgcatccc

SEQ ID NO: 548420 - DNA, 15 bp, Homo sapiens
tatacacccgcatcc

SEQ ID NO: 548421 - DNA, 15 bp, Homo sapiens
ttatacacccgcatc

SEQ ID NO: 548422 - DNA, 15 bp, Homo sapiens
tttatacacccgcat

SEQ ID NO: 548423 - DNA, 15 bp, Homo sapiens
ctttatacacccgca

SEQ ID NO: 548424 - DNA, 15 bp, Homo sapiens
tctttatacacccgc

SEQ ID NO: 548425 - DNA, 15 bp, Homo sapiens
atctttatacacccg

SEQ ID NO: 548426 - DNA, 15 bp, Homo sapiens
catctttatacaccc

SEQ ID NO: 548427 - DNA, 15 bp, Homo sapiens
acatctttatacacc

SEQ ID NO: 548428 - DNA, 15 bp, Homo sapiens
gacatctttatacac

SEQ ID NO: 548429 - DNA, 15 bp, Homo sapiens
tgacatctttataca

SEQ ID NO: 548430 - DNA, 15 bp, Homo sapiens
atgacatctttatac

SEQ ID NO: 548431 - DNA, 15 bp, Homo sapiens
gatgacatctttata

SEQ ID NO: 548432 - DNA, 15 bp, Homo sapiens
cgatgacatctttat

SEQ ID NO: 548433 - DNA, 15 bp, Homo sapiens
ccgatgacatcttta

SEQ ID NO: 548434 - DNA, 15 bp, Homo sapiens
cccgatgacatcttt

SEQ ID NO: 548435 - DNA, 15 bp, Homo sapiens
ccccgatgacatctt

SEQ ID NO: 548436 - DNA, 15 bp, Homo sapiens
gccccgatgacatct

SEQ ID NO: 548437 - DNA, 15 bp, Homo sapiens
agccccgatgacatc

SEQ ID NO: 548438 - DNA, 15 bp, Homo sapiens
cagccccgatgacat

SEQ ID NO: 548439 - DNA, 15 bp, Homo sapiens
acagccccgatgaca

SEQ ID NO: 548440 - DNA, 15 bp, Homo sapiens
gacagccccgatgac

SEQ ID NO: 548441 - DNA, 15 bp, Homo sapiens
agacagccccgatga

SEQ ID NO: 548442 - DNA, 15 bp, Homo sapiens
cagacagccccgatg

SEQ ID NO: 548443 - DNA, 15 bp, Homo sapiens
acagacagccccgat

SEQ ID NO: 548444 - DNA, 15 bp, Homo sapiens
cacagacagccccga

SEQ ID NO: 548445 - DNA, 15 bp, Homo sapiens
ccacagacagccccg

SEQ ID NO: 548446 - DNA, 15 bp, Homo sapiens
tccacagacagcccc

SEQ ID NO: 548447 - DNA, 15 bp, Homo sapiens
atccacagacagccc

SEQ ID NO: 548448 - DNA, 15 bp, Homo sapiens
catccacagacagcc

SEQ ID NO: 548449 - DNA, 15 bp, Homo sapiens
ccatccacagacagc

SEQ ID NO: 548450 - DNA, 15 bp, Homo sapiens
accatccacagacag

SEQ ID NO: 548451 - DNA, 15 bp, Homo sapiens
caccatccacagaca

SEQ ID NO: 548452 - DNA, 15 bp, Homo sapiens
ccaccatccacagac

SEQ ID NO: 548453 - DNA, 15 bp, Homo sapiens
cccaccatccacaga

SEQ ID NO: 548454 - DNA, 15 bp, Homo sapiens
acccaccatccacag

SEQ ID NO: 548455 - DNA, 15 bp, Homo sapiens
tacccaccatccaca

SEQ ID NO: 548456 - DNA, 15 bp, Homo sapiens
ttacccaccatccac

SEQ ID NO: 548457 - DNA, 15 bp, Homo sapiens
tttacccaccatcca

SEQ ID NO: 548458 - DNA, 15 bp, Homo sapiens
ctttacccaccatcc

SEQ ID NO: 548459 - DNA, 15 bp, Homo sapiens
tctttacccaccatc

SEQ ID NO: 548460 - DNA, 15 bp, Homo sapiens
ctctttacccaccat

SEQ ID NO: 548461 - DNA, 15 bp, Homo sapiens
tctctttacccacca

SEQ ID NO: 548462 - DNA, 15 bp, Homo sapiens
gtctctttacccacc

SEQ ID NO: 548463 - DNA, 15 bp, Homo sapiens
tgtctctttacccac

SEQ ID NO: 548464 - DNA, 15 bp, Homo sapiens
ctgtctctttaccca

SEQ ID NO: 548465 - DNA, 15 bp, Homo sapiens
gctgtctctttaccc

SEQ ID NO: 548466 - DNA, 15 bp, Homo sapiens
tgctgtctctttacc

SEQ ID NO: 548467 - DNA, 15 bp, Homo sapiens
gtgctgtctctttac

SEQ ID NO: 548468 - DNA, 15 bp, Homo sapiens
ggtgctgtctcttta

SEQ ID NO: 548469 - DNA, 15 bp, Homo sapiens
aggtgctgtctcttt

SEQ ID NO: 548470 - DNA, 15 bp, Homo sapiens
caggtgctgtctctt

SEQ ID NO: 548471 - DNA, 15 bp, Homo sapiens
acaggtgctgtctct

SEQ ID NO: 548472 - DNA, 15 bp, Homo sapiens
gacaggtgctgtctc

SEQ ID NO: 548473 - DNA, 15 bp, Homo sapiens
tgacaggtgctgtct

SEQ ID NO: 548474 - DNA, 15 bp, Homo sapiens
atgacaggtgctgtc

SEQ ID NO: 548475 - DNA, 15 bp, Homo sapiens
catgacaggtgctgt

SEQ ID NO: 548476 - DNA, 15 bp, Homo sapiens
ccatgacaggtgctg

SEQ ID NO: 548477 - DNA, 15 bp, Homo sapiens
accatgacaggtgct

SEQ ID NO: 548478 - DNA, 15 bp, Homo sapiens
caccatgacaggtgc

SEQ ID NO: 548479 - DNA, 15 bp, Homo sapiens
ccaccatgacaggtg

SEQ ID NO: 548480 - DNA, 15 bp, Homo sapiens
tccaccatgacaggt

SEQ ID NO: 548481 - DNA, 15 bp, Homo sapiens
ttccaccatgacagg

SEQ ID NO: 548482 - DNA, 15 bp, Homo sapiens
cttccaccatgacag

SEQ ID NO: 548483 - DNA, 15 bp, Homo sapiens
ccttccaccatgaca

SEQ ID NO: 548484 - DNA, 15 bp, Homo sapiens
cccttccaccatgac

SEQ ID NO: 548485 - DNA, 15 bp, Homo sapiens
gcccttccaccatga

SEQ ID NO: 548486 - DNA, 15 bp, Homo sapiens
ggcccttccaccatg

SEQ ID NO: 548487 - DNA, 15 bp, Homo sapiens
tggcccttccaccat

SEQ ID NO: 548488 - DNA, 15 bp, Homo sapiens
gtggcccttccacca

SEQ ID NO: 548489 - DNA, 15 bp, Homo sapiens
tgtggcccttccacc

SEQ ID NO: 548490 - DNA, 15 bp, Homo sapiens
ctgtggcccttccac

SEQ ID NO: 548491 - DNA, 15 bp, Homo sapiens
cctgtggcccttcca

SEQ ID NO: 548492 - DNA, 15 bp, Homo sapiens
tcctgtggcccttcc

SEQ ID NO: 548493 - DNA, 15 bp, Homo sapiens
ttcctgtggcccttc

SEQ ID NO: 548494 - DNA, 15 bp, Homo sapiens
cttcctgtggccctt

SEQ ID NO: 548495 - DNA, 15 bp, Homo sapiens
gcttcctgtggccct

SEQ ID NO: 548496 - DNA, 15 bp, Homo sapiens
cgcttcctgtggccc

SEQ ID NO: 548497 - DNA, 15 bp, Homo sapiens
acgcttcctgtggcc

SEQ ID NO: 548498 - DNA, 15 bp, Homo sapiens
cacgcttcctgtggc

SEQ ID NO: 548499 - DNA, 15 bp, Homo sapiens
ccacgcttcctgtgg

SEQ ID NO: 548500 - DNA, 15 bp, Homo sapiens
tccacgcttcctgtg

SEQ ID NO: 548501 - DNA, 15 bp, Homo sapiens
ctccacgcttcctgt

SEQ ID NO: 548502 - DNA, 15 bp, Homo sapiens
cctccacgcttcctg

SEQ ID NO: 548503 - DNA, 15 bp, Homo sapiens
gcctccacgcttcct

SEQ ID NO: 548504 - DNA, 15 bp, Homo sapiens
agcctccacgcttcc

SEQ ID NO: 548505 - DNA, 15 bp, Homo sapiens
cagcctccacgcttc

SEQ ID NO: 548506 - DNA, 15 bp, Homo sapiens
acagcctccacgctt

SEQ ID NO: 548507 - DNA, 15 bp, Homo sapiens
aacagcctccacgct

SEQ ID NO: 548508 - DNA, 15 bp, Homo sapiens
aaacagcctccacgc

SEQ ID NO: 548509 - DNA, 15 bp, Homo sapiens
gaaacagcctccacg

SEQ ID NO: 548510 - DNA, 15 bp, Homo sapiens
agaaacagcctccac

SEQ ID NO: 548511 - DNA, 15 bp, Homo sapiens
cagaaacagcctcca

SEQ ID NO: 548512 - DNA, 15 bp, Homo sapiens
ccagaaacagcctcc

SEQ ID NO: 548513 - DNA, 15 bp, Homo sapiens
cccagaaacagcctc

SEQ ID NO: 548514 - DNA, 15 bp, Homo sapiens
ccccagaaacagcct

SEQ ID NO: 548515 - DNA, 15 bp, Homo sapiens
gccccagaaacagcc

SEQ ID NO: 548516 - DNA, 15 bp, Homo sapiens
ggccccagaaacagc

SEQ ID NO: 548517 - DNA, 15 bp, Homo sapiens
tggccccagaaacag

SEQ ID NO: 548518 - DNA, 15 bp, Homo sapiens
gtggccccagaaaca

SEQ ID NO: 548519 - DNA, 15 bp, Homo sapiens
ggtggccccagaaac

SEQ ID NO: 548520 - DNA, 15 bp, Homo sapiens
aggtggccccagaaa

SEQ ID NO: 548521 - DNA, 15 bp, Homo sapiens
gaggtggccccagaa

SEQ ID NO: 548522 - DNA, 15 bp, Homo sapiens
ggaggtggccccaga

SEQ ID NO: 548523 - DNA, 15 bp, Homo sapiens
aggaggtggccccag

SEQ ID NO: 548524 - DNA, 15 bp, Homo sapiens
caggaggtggcccca

SEQ ID NO: 548525 - DNA, 15 bp, Homo sapiens
gcaggaggtggcccc

SEQ ID NO: 548526 - DNA, 15 bp, Homo sapiens
ggcaggaggtggccc

SEQ ID NO: 548527 - DNA, 15 bp, Homo sapiens
aggcaggaggtggcc

SEQ ID NO: 548528 - DNA, 15 bp, Homo sapiens
gaggcaggaggtggc

SEQ ID NO: 548529 - DNA, 15 bp, Homo sapiens
ggaggcaggaggtgg

SEQ ID NO: 548530 - DNA, 15 bp, Homo sapiens
tggaggcaggaggtg

SEQ ID NO: 548531 - DNA, 15 bp, Homo sapiens
ctggaggcaggaggt

SEQ ID NO: 548532 - DNA, 15 bp, Homo sapiens
cctggaggcaggagg

SEQ ID NO: 548533 - DNA, 15 bp, Homo sapiens
tcctggaggcaggag

SEQ ID NO: 548534 - DNA, 15 bp, Homo sapiens
ctcctggaggcagga

SEQ ID NO: 548535 - DNA, 15 bp, Homo sapiens
cctcctggaggcagg

SEQ ID NO: 548536 - DNA, 15 bp, Homo sapiens
tcctcctggaggcag

SEQ ID NO: 548537 - DNA, 15 bp, Homo sapiens
ttcctcctggaggca

SEQ ID NO: 548538 - DNA, 15 bp, Homo sapiens
cttcctcctggaggc

SEQ ID NO: 548539 - DNA, 15 bp, Homo sapiens
gcttcctcctggagg

SEQ ID NO: 548540 - DNA, 15 bp, Homo sapiens
tgcttcctcctggag

SEQ ID NO: 548541 - DNA, 15 bp, Homo sapiens
ctgcttcctcctgga

SEQ ID NO: 548542 - DNA, 15 bp, Homo sapiens
cctgcttcctcctgg

SEQ ID NO: 548543 - DNA, 15 bp, Homo sapiens
ccctgcttcctcctg

SEQ ID NO: 548544 - DNA, 15 bp, Homo sapiens
tccctgcttcctcct

SEQ ID NO: 548545 - DNA, 15 bp, Homo sapiens
atccctgcttcctcc

SEQ ID NO: 548546 - DNA, 15 bp, Homo sapiens
gatccctgcttcctc

SEQ ID NO: 548547 - DNA, 15 bp, Homo sapiens
ggatccctgcttcct

SEQ ID NO: 548548 - DNA, 15 bp, Homo sapiens
aggatccctgcttcc

SEQ ID NO: 548549 - DNA, 15 bp, Homo sapiens
gaggatccctgcttc

SEQ ID NO: 548550 - DNA, 15 bp, Homo sapiens
ggaggatccctgctt

SEQ ID NO: 548551 - DNA, 15 bp, Homo sapiens
aggaggatccctgct

SEQ ID NO: 548552 - DNA, 15 bp, Homo sapiens
caggaggatccctgc

SEQ ID NO: 548553 - DNA, 15 bp, Homo sapiens
acaggaggatccctg

SEQ ID NO: 548554 - DNA, 15 bp, Homo sapiens
aacaggaggatccct

SEQ ID NO: 548555 - DNA, 15 bp, Homo sapiens
caacaggaggatccc

SEQ ID NO: 548556 - DNA, 15 bp, Homo sapiens
ccaacaggaggatcc

SEQ ID NO: 548557 - DNA, 15 bp, Homo sapiens
gccaacaggaggatc

SEQ ID NO: 548558 - DNA, 15 bp, Homo sapiens
tgccaacaggaggat

SEQ ID NO: 548559 - DNA, 15 bp, Homo sapiens
atgccaacaggagga

SEQ ID NO: 548560 - DNA, 15 bp, Homo sapiens
gatgccaacaggagg

SEQ ID NO: 548561 - DNA, 15 bp, Homo sapiens
agatgccaacaggag

SEQ ID NO: 548562 - DNA, 15 bp, Homo sapiens
aagatgccaacagga

SEQ ID NO: 548563 - DNA, 15 bp, Homo sapiens
caagatgccaacagg

SEQ ID NO: 548564 - DNA, 15 bp, Homo sapiens
ccaagatgccaacag

SEQ ID NO: 548565 - DNA, 15 bp, Homo sapiens
accaagatgccaaca

SEQ ID NO: 548566 - DNA, 15 bp, Homo sapiens
gaccaagatgccaac

SEQ ID NO: 548567 - DNA, 15 bp, Homo sapiens
ggaccaagatgccaa

SEQ ID NO: 548568 - DNA, 15 bp, Homo sapiens
gggaccaagatgcca

SEQ ID NO: 548569 - DNA, 15 bp, Homo sapiens
tgggaccaagatgcc

SEQ ID NO: 548570 - DNA, 15 bp, Homo sapiens
atgggaccaagatgc

SEQ ID NO: 548571 - DNA, 15 bp, Homo sapiens
gatgggaccaagatg

SEQ ID NO: 548572 - DNA, 15 bp, Homo sapiens
tgatgggaccaagat

SEQ ID NO: 548573 - DNA, 15 bp, Homo sapiens
ctgatgggaccaaga

SEQ ID NO: 548574 - DNA, 15 bp, Homo sapiens
cctgatgggaccaag

SEQ ID NO: 548575 - DNA, 15 bp, Homo sapiens
acctgatgggaccaa

SEQ ID NO: 548576 - DNA, 15 bp, Homo sapiens
cacctgatgggacca

SEQ ID NO: 548577 - DNA, 15 bp, Homo sapiens
acacctgatgggacc

SEQ ID NO: 548578 - DNA, 15 bp, Homo sapiens
gacacctgatgggac

SEQ ID NO: 548579 - DNA, 15 bp, Homo sapiens
agacacctgatggga

SEQ ID NO: 548580 - DNA, 15 bp, Homo sapiens
aagacacctgatggg

SEQ ID NO: 548581 - DNA, 15 bp, Homo sapiens
caagacacctgatgg

SEQ ID NO: 548582 - DNA, 15 bp, Homo sapiens
ccaagacacctgatg

SEQ ID NO: 548583 - DNA, 15 bp, Homo sapiens
tccaagacacctgat

SEQ ID NO: 548584 - DNA, 15 bp, Homo sapiens
atccaagacacctga

SEQ ID NO: 548585 - DNA, 15 bp, Homo sapiens
catccaagacacctg

SEQ ID NO: 548586 - DNA, 15 bp, Homo sapiens
ccatccaagacacct

SEQ ID NO: 548587 - DNA, 15 bp, Homo sapiens
cccatccaagacacc

SEQ ID NO: 548588 - DNA, 15 bp, Homo sapiens
ccccatccaagacac

SEQ ID NO: 548589 - DNA, 15 bp, Homo sapiens
gccccatccaagaca

SEQ ID NO: 548590 - DNA, 15 bp, Homo sapiens
agccccatccaagac

SEQ ID NO: 548591 - DNA, 15 bp, Homo sapiens
cagccccatccaaga

SEQ ID NO: 548592 - DNA, 15 bp, Homo sapiens
ccagccccatccaag

SEQ ID NO: 548593 - DNA, 15 bp, Homo sapiens
cccagccccatccaa

SEQ ID NO: 548594 - DNA, 15 bp, Homo sapiens
ccccagccccatcca

SEQ ID NO: 548595 - DNA, 15 bp, Homo sapiens
gccccagccccatcc

SEQ ID NO: 548596 - DNA, 15 bp, Homo sapiens
agccccagccccatc

SEQ ID NO: 548597 - DNA, 15 bp, Homo sapiens
cagccccagccccat

SEQ ID NO: 548598 - DNA, 15 bp, Homo sapiens
ccagccccagcccca

SEQ ID NO: 548599 - DNA, 15 bp, Homo sapiens
cccagccccagcccc

SEQ ID NO: 548600 - DNA, 15 bp, Homo sapiens
tcccagccccagccc

SEQ ID NO: 548601 - DNA, 15 bp, Homo sapiens
ctcccagccccagcc

SEQ ID NO: 548602 - DNA, 15 bp, Homo sapiens
actcccagccccagc

SEQ ID NO: 548603 - DNA, 15 bp, Homo sapiens
cactcccagccccag

SEQ ID NO: 548604 - DNA, 15 bp, Homo sapiens
acactcccagcccca

SEQ ID NO: 548605 - DNA, 15 bp, Homo sapiens
aacactcccagcccc

SEQ ID NO: 548606 - DNA, 15 bp, Homo sapiens
aaacactcccagccc

SEQ ID NO: 548607 - DNA, 15 bp, Homo sapiens
gaaacactcccagcc

SEQ ID NO: 548608 - DNA, 15 bp, Homo sapiens
agaaacactcccagc

SEQ ID NO: 548609 - DNA, 15 bp, Homo sapiens
gagaaacactcccag

SEQ ID NO: 548610 - DNA, 15 bp, Homo sapiens
agagaaacactccca

SEQ ID NO: 548611 - DNA, 15 bp, Homo sapiens
gagagaaacactccc

SEQ ID NO: 548612 - DNA, 15 bp, Homo sapiens
ggagagaaacactcc

SEQ ID NO: 548613 - DNA, 15 bp, Homo sapiens
gggagagaaacactc

SEQ ID NO: 548614 - DNA, 15 bp, Homo sapiens
agggagagaaacact

SEQ ID NO: 548615 - DNA, 15 bp, Homo sapiens
cagggagagaaacac

SEQ ID NO: 548616 - DNA, 15 bp, Homo sapiens
tcagggagagaaaca

SEQ ID NO: 548617 - DNA, 15 bp, Homo sapiens
ctcagggagagaaac

SEQ ID NO: 548618 - DNA, 15 bp, Homo sapiens
gctcagggagagaaa

SEQ ID NO: 548619 - DNA, 15 bp, Homo sapiens
tgctcagggagagaa

SEQ ID NO: 548620 - DNA, 15 bp, Homo sapiens
atgctcagggagaga

SEQ ID NO: 548621 - DNA, 15 bp, Homo sapiens
aatgctcagggagag

SEQ ID NO: 548622 - DNA, 15 bp, Homo sapiens
aaatgctcagggaga

SEQ ID NO: 548623 - DNA, 15 bp, Homo sapiens
taaatgctcagggag

SEQ ID NO: 548624 - DNA, 15 bp, Homo sapiens
ttaaatgctcaggga

SEQ ID NO: 548625 - DNA, 15 bp, Homo sapiens
cttaaatgctcaggg

SEQ ID NO: 548626 - DNA, 15 bp, Homo sapiens
gcttaaatgctcagg

SEQ ID NO: 548627 - DNA, 15 bp, Homo sapiens
ggcttaaatgctcag

SEQ ID NO: 548628 - DNA, 15 bp, Homo sapiens
tggcttaaatgctca

SEQ ID NO: 548629 - DNA, 15 bp, Homo sapiens
ttggcttaaatgctc

SEQ ID NO: 548630 - DNA, 15 bp, Homo sapiens
cttggcttaaatgct

SEQ ID NO: 548631 - DNA, 15 bp, Homo sapiens
ccttggcttaaatgc

SEQ ID NO: 548632 - DNA, 15 bp, Homo sapiens
accttggcttaaatg

SEQ ID NO: 548633 - DNA, 15 bp, Homo sapiens
aaccttggcttaaat

SEQ ID NO: 548634 - DNA, 15 bp, Homo sapiens
gaaccttggcttaaa

SEQ ID NO: 548635 - DNA, 15 bp, Homo sapiens
tgaaccttggcttaa

SEQ ID NO: 548636 - DNA, 15 bp, Homo sapiens
atgaaccttggctta

SEQ ID NO: 548637 - DNA, 15 bp, Homo sapiens
aatgaaccttggctt

SEQ ID NO: 548638 - DNA, 15 bp, Homo sapiens
taatgaaccttggct

SEQ ID NO: 548639 - DNA, 15 bp, Homo sapiens
ataatgaaccttggc

SEQ ID NO: 548640 - DNA, 15 bp, Homo sapiens
aataatgaaccttgg

SEQ ID NO: 548641 - DNA, 15 bp, Homo sapiens
aaataatgaaccttg

SEQ ID NO: 548642 - DNA, 15 bp, Homo sapiens
taaataatgaacctt

SEQ ID NO: 548643 - DNA, 15 bp, Homo sapiens
ctaaataatgaacct

SEQ ID NO: 548644 - DNA, 15 bp, Homo sapiens
tctaaataatgaacc

SEQ ID NO: 548645 - DNA, 15 bp, Homo sapiens
ttctaaataatgaac

SEQ ID NO: 548646 - DNA, 15 bp, Homo sapiens
attctaaataatgaa

SEQ ID NO: 548647 - DNA, 15 bp, Homo sapiens
cattctaaataatga

SEQ ID NO: 548648 - DNA, 15 bp, Homo sapiens
ccattctaaataatg

SEQ ID NO: 548649 - DNA, 15 bp, Homo sapiens
tccattctaaataat

SEQ ID NO: 548650 - DNA, 15 bp, Homo sapiens
ttccattctaaataa

SEQ ID NO: 548651 - DNA, 15 bp, Homo sapiens
gttccattctaaata

SEQ ID NO: 548652 - DNA, 15 bp, Homo sapiens
ggttccattctaaat

SEQ ID NO: 548653 - DNA, 15 bp, Homo sapiens
tggttccattctaaa

SEQ ID NO: 548654 - DNA, 15 bp, Homo sapiens
atggttccattctaa

SEQ ID NO: 548655 - DNA, 15 bp, Homo sapiens
aatggttccattcta

SEQ ID NO: 548656 - DNA, 15 bp, Homo sapiens
aaatggttccattct

SEQ ID NO: 548657 - DNA, 15 bp, Homo sapiens
taaatggttccattc

SEQ ID NO: 548658 - DNA, 15 bp, Homo sapiens
ataaatggttccatt

SEQ ID NO: 548659 - DNA, 15 bp, Homo sapiens
tataaatggttccat

SEQ ID NO: 548660 - DNA, 15 bp, Homo sapiens
ctataaatggttcca

SEQ ID NO: 548661 - DNA, 15 bp, Homo sapiens
cctataaatggttcc

SEQ ID NO: 548662 - DNA, 15 bp, Homo sapiens
gcctataaatggttc

SEQ ID NO: 548663 - DNA, 15 bp, Homo sapiens
ggcctataaatggtt

SEQ ID NO: 548664 - DNA, 15 bp, Homo sapiens
cggcctataaatggt

SEQ ID NO: 548665 - DNA, 15 bp, Homo sapiens
ccggcctataaatgg

SEQ ID NO: 548666 - DNA, 15 bp, Homo sapiens
cccggcctataaatg

SEQ ID NO: 548667 - DNA, 15 bp, Homo sapiens
gcccggcctataaat

SEQ ID NO: 548668 - DNA, 15 bp, Homo sapiens
cgcccggcctataaa

SEQ ID NO: 548669 - DNA, 15 bp, Homo sapiens
gcgcccggcctataa

SEQ ID NO: 548670 - DNA, 15 bp, Homo sapiens
ggcgcccggcctata

SEQ ID NO: 548671 - DNA, 15 bp, Homo sapiens
tggcgcccggcctat

SEQ ID NO: 548672 - DNA, 15 bp, Homo sapiens
atggcgcccggccta

SEQ ID NO: 548673 - DNA, 15 bp, Homo sapiens
aatggcgcccggcct

SEQ ID NO: 548674 - DNA, 15 bp, Homo sapiens
taatggcgcccggcc

SEQ ID NO: 548675 - DNA, 15 bp, Homo sapiens
ataatggcgcccggc

SEQ ID NO: 548676 - DNA, 15 bp, Homo sapiens
aataatggcgcccgg

SEQ ID NO: 548677 - DNA, 15 bp, Homo sapiens
taataatggcgcccg

SEQ ID NO: 548678 - DNA, 15 bp, Homo sapiens
gtaataatggcgccc

SEQ ID NO: 548679 - DNA, 15 bp, Homo sapiens
tgtaataatggcgcc

SEQ ID NO: 548680 - DNA, 15 bp, Homo sapiens
atgtaataatggcgc

SEQ ID NO: 548681 - DNA, 15 bp, Homo sapiens
aatgtaataatggcg

SEQ ID NO: 548682 - DNA, 15 bp, Homo sapiens
taatgtaataatggc

SEQ ID NO: 548683 - DNA, 15 bp, Homo sapiens
ataatgtaataatgg

SEQ ID NO: 548684 - DNA, 15 bp, Homo sapiens
aataatgtaataatg

SEQ ID NO: 548685 - DNA, 15 bp, Homo sapiens
gaataatgtaataat

SEQ ID NO: 548686 - DNA, 15 bp, Homo sapiens
ggaataatgtaataa

SEQ ID NO: 548687 - DNA, 15 bp, Homo sapiens
aggaataatgtaata

SEQ ID NO: 548688 - DNA, 15 bp, Homo sapiens
taggaataatgtaat

SEQ ID NO: 548689 - DNA, 15 bp, Homo sapiens
ttaggaataatgtaa

SEQ ID NO: 548690 - DNA, 15 bp, Homo sapiens
tttaggaataatgta

SEQ ID NO: 548691 - DNA, 15 bp, Homo sapiens
ctttaggaataatgt

SEQ ID NO: 548692 - DNA, 15 bp, Homo sapiens
actttaggaataatg

SEQ ID NO: 548693 - DNA, 15 bp, Homo sapiens
cactttaggaataat

SEQ ID NO: 548694 - DNA, 15 bp, Homo sapiens
acactttaggaataa

SEQ ID NO: 548695 - DNA, 15 bp, Homo sapiens
aacactttaggaata

SEQ ID NO: 548696 - DNA, 15 bp, Homo sapiens
taacactttaggaat

SEQ ID NO: 548697 - DNA, 15 bp, Homo sapiens
ctaacactttaggaa

SEQ ID NO: 548698 - DNA, 15 bp, Homo sapiens
cctaacactttagga

SEQ ID NO: 548699 - DNA, 15 bp, Homo sapiens
tcctaacactttagg

SEQ ID NO: 548700 - DNA, 15 bp, Homo sapiens
atcctaacactttag

SEQ ID NO: 548701 - DNA, 15 bp, Homo sapiens
aatcctaacacttta

SEQ ID NO: 548702 - DNA, 15 bp, Homo sapiens
taatcctaacacttt

SEQ ID NO: 548703 - DNA, 15 bp, Homo sapiens
gtaatcctaacactt

SEQ ID NO: 548704 - DNA, 15 bp, Homo sapiens
tgtaatcctaacact

SEQ ID NO: 548705 - DNA, 15 bp, Homo sapiens
ctgtaatcctaacac

SEQ ID NO: 548706 - DNA, 15 bp, Homo sapiens
cctgtaatcctaaca

SEQ ID NO: 548707 - DNA, 15 bp, Homo sapiens
acctgtaatcctaac

SEQ ID NO: 548708 - DNA, 15 bp, Homo sapiens
cacctgtaatcctaa

SEQ ID NO: 548709 - DNA, 15 bp, Homo sapiens
acacctgtaatccta

SEQ ID NO: 548710 - DNA, 15 bp, Homo sapiens
gacacctgtaatcct

SEQ ID NO: 548711 - DNA, 15 bp, Homo sapiens
tgacacctgtaatcc

SEQ ID NO: 548712 - DNA, 15 bp, Homo sapiens
atgacacctgtaatc

SEQ ID NO: 548713 - DNA, 15 bp, Homo sapiens
catgacacctgtaat

SEQ ID NO: 548714 - DNA, 15 bp, Homo sapiens
gcatgacacctgtaa

SEQ ID NO: 548715 - DNA, 15 bp, Homo sapiens
ggcatgacacctgta

SEQ ID NO: 548716 - DNA, 15 bp, Homo sapiens
aggcatgacacctgt

SEQ ID NO: 548717 - DNA, 15 bp, Homo sapiens
caggcatgacacctg

SEQ ID NO: 548718 - DNA, 15 bp, Homo sapiens
acaggcatgacacct

SEQ ID NO: 548719 - DNA, 15 bp, Homo sapiens
tacaggcatgacacc

SEQ ID NO: 548720 - DNA, 15 bp, Homo sapiens
ttacaggcatgacac

SEQ ID NO: 548721 - DNA, 15 bp, Homo sapiens
attacaggcatgaca

SEQ ID NO: 548722 - DNA, 15 bp, Homo sapiens
gattacaggcatgac

SEQ ID NO: 548723 - DNA, 15 bp, Homo sapiens
cgggattacaggcat

SEQ ID NO: 548724 - DNA, 15 bp, Homo sapiens
ccgggattacaggca

SEQ ID NO: 548725 - DNA, 15 bp, Homo sapiens
gccgggattacaggc

SEQ ID NO: 548726 - DNA, 15 bp, Homo sapiens
tgccgggattacagg

SEQ ID NO: 548727 - DNA, 15 bp, Homo sapiens
gtgccgggattacag

SEQ ID NO: 548728 - DNA, 15 bp, Homo sapiens
agtgccgggattaca

SEQ ID NO: 548729 - DNA, 15 bp, Homo sapiens
aagtgccgggattac

SEQ ID NO: 548730 - DNA, 15 bp, Homo sapiens
aaagtgccgggatta

SEQ ID NO: 548731 - DNA, 15 bp, Homo sapiens
taaagtgccgggatt

SEQ ID NO: 548732 - DNA, 15 bp, Homo sapiens
ctaaagtgccgggat

SEQ ID NO: 548733 - DNA, 15 bp, Homo sapiens
cctaaagtgccggga

SEQ ID NO: 548734 - DNA, 15 bp, Homo sapiens
tcctaaagtgccggg

SEQ ID NO: 548735 - DNA, 15 bp, Homo sapiens
ctcctaaagtgccgg

SEQ ID NO: 548736 - DNA, 15 bp, Homo sapiens
cctcctaaagtgccg

SEQ ID NO: 548737 - DNA, 15 bp, Homo sapiens
gcctcctaaagtgcc

SEQ ID NO: 548738 - DNA, 15 bp, Homo sapiens
agcctcctaaagtgc

SEQ ID NO: 548739 - DNA, 15 bp, Homo sapiens
cagcctcctaaagtg

SEQ ID NO: 548740 - DNA, 15 bp, Homo sapiens
tcagcctcctaaagt

SEQ ID NO: 548741 - DNA, 15 bp, Homo sapiens
ctcagcctcctaaag

SEQ ID NO: 548742 - DNA, 15 bp, Homo sapiens
cctcagcctcctaaa

SEQ ID NO: 548743 - DNA, 15 bp, Homo sapiens
acctcagcctcctaa

SEQ ID NO: 548744 - DNA, 15 bp, Homo sapiens
cacctcagcctccta

SEQ ID NO: 548745 - DNA, 15 bp, Homo sapiens
ccacctcagcctcct

SEQ ID NO: 548746 - DNA, 15 bp, Homo sapiens
cccacctcagcctcc

SEQ ID NO: 548747 - DNA, 15 bp, Homo sapiens
acccacctcagcctc

SEQ ID NO: 548748 - DNA, 15 bp, Homo sapiens
cacccacctcagcct

SEQ ID NO: 548749 - DNA, 15 bp, Homo sapiens
ccacccacctcagcc

SEQ ID NO: 548750 - DNA, 15 bp, Homo sapiens
tccacccacctcagc

SEQ ID NO: 548751 - DNA, 15 bp, Homo sapiens
atccacccacctcag

SEQ ID NO: 548752 - DNA, 15 bp, Homo sapiens
gatccacccacctca

SEQ ID NO: 548753 - DNA, 15 bp, Homo sapiens
tgatccacccacctc

SEQ ID NO: 548754 - DNA, 15 bp, Homo sapiens
gtgatccacccacct

SEQ ID NO: 548755 - DNA, 15 bp, Homo sapiens
agtgatccacccacc

SEQ ID NO: 548756 - DNA, 15 bp, Homo sapiens
aagtgatccacccac

SEQ ID NO: 548757 - DNA, 15 bp, Homo sapiens
caagtgatccaccca

SEQ ID NO: 548758 - DNA, 15 bp, Homo sapiens
tcaagtgatccaccc

SEQ ID NO: 548759 - DNA, 15 bp, Homo sapiens
ttcaagtgatccacc

SEQ ID NO: 548760 - DNA, 15 bp, Homo sapiens
cttcaagtgatccac

SEQ ID NO: 548761 - DNA, 15 bp, Homo sapiens
acttcaagtgatcca

SEQ ID NO: 548762 - DNA, 15 bp, Homo sapiens
gacttcaagtgatcc

SEQ ID NO: 548763 - DNA, 15 bp, Homo sapiens
tgacttcaagtgatc

SEQ ID NO: 548764 - DNA, 15 bp, Homo sapiens
ctgacttcaagtgat

SEQ ID NO: 548765 - DNA, 15 bp, Homo sapiens
cctgacttcaagtga

SEQ ID NO: 548766 - DNA, 15 bp, Homo sapiens
tcctgacttcaagtg

SEQ ID NO: 548767 - DNA, 15 bp, Homo sapiens
ctcctgacttcaagt

SEQ ID NO: 548768 - DNA, 15 bp, Homo sapiens
actcctgacttcaag

SEQ ID NO: 548769 - DNA, 15 bp, Homo sapiens
aactcctgacttcaa

SEQ ID NO: 548770 - DNA, 15 bp, Homo sapiens
gaactcctgacttca

SEQ ID NO: 548771 - DNA, 15 bp, Homo sapiens
cgaactcctgacttc

SEQ ID NO: 548772 - DNA, 15 bp, Homo sapiens
tcgaactcctgactt

SEQ ID NO: 548773 - DNA, 15 bp, Homo sapiens
ctcgaactcctgact

SEQ ID NO: 548774 - DNA, 15 bp, Homo sapiens
tctcgaactcctgac

SEQ ID NO: 548775 - DNA, 15 bp, Homo sapiens
gtctcgaactcctga

SEQ ID NO: 548776 - DNA, 15 bp, Homo sapiens
gatggggtttcacca

SEQ ID NO: 548777 - DNA, 15 bp, Homo sapiens
agatggggtttcacc

SEQ ID NO: 548778 - DNA, 15 bp, Homo sapiens
gagatggggtttcac

SEQ ID NO: 548779 - DNA, 15 bp, Homo sapiens
agagatggggtttca

SEQ ID NO: 548780 - DNA, 15 bp, Homo sapiens
tagagatggggtttc

SEQ ID NO: 548781 - DNA, 15 bp, Homo sapiens
gtagagatggggttt

SEQ ID NO: 548782 - DNA, 15 bp, Homo sapiens
agtagagatggggtt

SEQ ID NO: 548783 - DNA, 15 bp, Homo sapiens
tagtagagatggggt

SEQ ID NO: 548784 - DNA, 15 bp, Homo sapiens
ttagtagagatgggg

SEQ ID NO: 548785 - DNA, 15 bp, Homo sapiens
tttagtagagatggg

SEQ ID NO: 548786 - DNA, 15 bp, Homo sapiens
ttttagtagagatgg

SEQ ID NO: 548787 - DNA, 15 bp, Homo sapiens
gtttttagtagagat

SEQ ID NO: 548788 - DNA, 15 bp, Homo sapiens
tgtttttagtagaga

SEQ ID NO: 548789 - DNA, 15 bp, Homo sapiens
gtgtttttagtagag

SEQ ID NO: 548790 - DNA, 15 bp, Homo sapiens
tgtgtttttagtaga

SEQ ID NO: 548791 - DNA, 15 bp, Homo sapiens
ttgtgtttttagtag

SEQ ID NO: 548792 - DNA, 15 bp, Homo sapiens
tttgtgtttttagta

SEQ ID NO: 548793 - DNA, 15 bp, Homo sapiens
ttttgtgtttttagt

SEQ ID NO: 548794 - DNA, 15 bp, Homo sapiens
tttttgtgtttttag

SEQ ID NO: 548795 - DNA, 15 bp, Homo sapiens
atttttgtgttttta

SEQ ID NO: 548796 - DNA, 15 bp, Homo sapiens
aatttttgtgttttt

SEQ ID NO: 548797 - DNA, 15 bp, Homo sapiens
taatttttgtgtttt

SEQ ID NO: 548798 - DNA, 15 bp, Homo sapiens
ctaatttttgtgttt

SEQ ID NO: 548799 - DNA, 15 bp, Homo sapiens
gctaatttttgtgtt

SEQ ID NO: 548800 - DNA, 15 bp, Homo sapiens
agctaatttttgtgt

SEQ ID NO: 548801 - DNA, 15 bp, Homo sapiens
cagctaatttttgtg

SEQ ID NO: 548802 - DNA, 15 bp, Homo sapiens
gcccagctaattttt

SEQ ID NO: 548803 - DNA, 15 bp, Homo sapiens
tgcccagctaatttt

SEQ ID NO: 548804 - DNA, 15 bp, Homo sapiens
atgcccagctaattt

SEQ ID NO: 548805 - DNA, 15 bp, Homo sapiens
catgcccagctaatt

SEQ ID NO: 548806 - DNA, 15 bp, Homo sapiens
ccatgcccagctaat

SEQ ID NO: 548807 - DNA, 15 bp, Homo sapiens
accatgcccagctaa

SEQ ID NO: 548808 - DNA, 15 bp, Homo sapiens
caccatgcccagcta

SEQ ID NO: 548809 - DNA, 15 bp, Homo sapiens
ccaccatgcccagct

SEQ ID NO: 548810 - DNA, 15 bp, Homo sapiens
gccaccatgcccagc

SEQ ID NO: 548811 - DNA, 15 bp, Homo sapiens
tgccaccatgcccag

SEQ ID NO: 548812 - DNA, 15 bp, Homo sapiens
gtgccaccatgccca

SEQ ID NO: 548813 - DNA, 15 bp, Homo sapiens
tgtgccaccatgccc

SEQ ID NO: 548814 - DNA, 15 bp, Homo sapiens
gtgtgccaccatgcc

SEQ ID NO: 548815 - DNA, 15 bp, Homo sapiens
tgtgtgccaccatgc

SEQ ID NO: 548816 - DNA, 15 bp, Homo sapiens
gtgtgtgccaccatg

SEQ ID NO: 548817 - DNA, 15 bp, Homo sapiens
ggtgtgtgccaccat

SEQ ID NO: 548818 - DNA, 15 bp, Homo sapiens
aggtgtgtgccacca

SEQ ID NO: 548819 - DNA, 15 bp, Homo sapiens
caggtgtgtgccacc

SEQ ID NO: 548820 - DNA, 15 bp, Homo sapiens
acaggtgtgtgccac

SEQ ID NO: 548821 - DNA, 15 bp, Homo sapiens
tacaggtgtgtgcca

SEQ ID NO: 548822 - DNA, 15 bp, Homo sapiens
ctacaggtgtgtgcc

SEQ ID NO: 548823 - DNA, 15 bp, Homo sapiens
actacaggtgtgtgc

SEQ ID NO: 548824 - DNA, 15 bp, Homo sapiens
gactacaggtgtgtg

SEQ ID NO: 548825 - DNA, 15 bp, Homo sapiens
ggactacaggtgtgt

SEQ ID NO: 548826 - DNA, 15 bp, Homo sapiens
gggactacaggtgtg

SEQ ID NO: 548827 - DNA, 15 bp, Homo sapiens
tgggactacaggtgt

SEQ ID NO: 548828 - DNA, 15 bp, Homo sapiens
ctgggactacaggtg

SEQ ID NO: 548829 - DNA, 15 bp, Homo sapiens
gctgggactacaggt

SEQ ID NO: 548830 - DNA, 15 bp, Homo sapiens
aagtagctgggacta

SEQ ID NO: 548831 - DNA, 15 bp, Homo sapiens
caagtagctgggact

SEQ ID NO: 548832 - DNA, 15 bp, Homo sapiens
ccaagtagctgggac

SEQ ID NO: 548833 - DNA, 15 bp, Homo sapiens
tccaagtagctggga

SEQ ID NO: 548834 - DNA, 15 bp, Homo sapiens
ttccaagtagctggg

SEQ ID NO: 548835 - DNA, 15 bp, Homo sapiens
cttccaagtagctgg

SEQ ID NO: 548836 - DNA, 15 bp, Homo sapiens
ccttccaagtagctg

SEQ ID NO: 548837 - DNA, 15 bp, Homo sapiens
gccttccaagtagct

SEQ ID NO: 548838 - DNA, 15 bp, Homo sapiens
agccttccaagtagc

SEQ ID NO: 548839 - DNA, 15 bp, Homo sapiens
cagccttccaagtag

SEQ ID NO: 548840 - DNA, 15 bp, Homo sapiens
tcagccttccaagta

SEQ ID NO: 548841 - DNA, 15 bp, Homo sapiens
ctcagccttccaagt

SEQ ID NO: 548842 - DNA, 15 bp, Homo sapiens
cctcagccttccaag

SEQ ID NO: 548843 - DNA, 15 bp, Homo sapiens
gcctcagccttccaa

SEQ ID NO: 548844 - DNA, 15 bp, Homo sapiens
cgcctcagccttcca

SEQ ID NO: 548845 - DNA, 15 bp, Homo sapiens
ccgcctcagccttcc

SEQ ID NO: 548846 - DNA, 15 bp, Homo sapiens
tccgcctcagccttc

SEQ ID NO: 548847 - DNA, 15 bp, Homo sapiens
ctccgcctcagcctt

SEQ ID NO: 548848 - DNA, 15 bp, Homo sapiens
cctccgcctcagcct

SEQ ID NO: 548849 - DNA, 15 bp, Homo sapiens
tcctccgcctcagcc

SEQ ID NO: 548850 - DNA, 15 bp, Homo sapiens
gtcctccgcctcagc

SEQ ID NO: 548851 - DNA, 15 bp, Homo sapiens
agtcctccgcctcag

SEQ ID NO: 548852 - DNA, 15 bp, Homo sapiens
cagtcctccgcctca

SEQ ID NO: 548853 - DNA, 15 bp, Homo sapiens
gcagtcctccgcctc

SEQ ID NO: 548854 - DNA, 15 bp, Homo sapiens
agcagtcctccgcct

SEQ ID NO: 548855 - DNA, 15 bp, Homo sapiens
aagcagtcctccgcc

SEQ ID NO: 548856 - DNA, 15 bp, Homo sapiens
caagcagtcctccgc

SEQ ID NO: 548857 - DNA, 15 bp, Homo sapiens
tcaagcagtcctccg

SEQ ID NO: 548858 - DNA, 15 bp, Homo sapiens
ttcaagcagtcctcc

SEQ ID NO: 548859 - DNA, 15 bp, Homo sapiens
gttcaagcagtcctc

SEQ ID NO: 548860 - DNA, 15 bp, Homo sapiens
agttcaagcagtcct

SEQ ID NO: 548861 - DNA, 15 bp, Homo sapiens
gagttcaagcagtcc

SEQ ID NO: 548862 - DNA, 15 bp, Homo sapiens
cgagttcaagcagtc

SEQ ID NO: 548863 - DNA, 15 bp, Homo sapiens
ccgagttcaagcagt

SEQ ID NO: 548864 - DNA, 15 bp, Homo sapiens
cccgagttcaagcag

SEQ ID NO: 548865 - DNA, 15 bp, Homo sapiens
tcccgagttcaagca

SEQ ID NO: 548866 - DNA, 15 bp, Homo sapiens
ctcccgagttcaagc

SEQ ID NO: 548867 - DNA, 15 bp, Homo sapiens
cctcccgagttcaag

SEQ ID NO: 548868 - DNA, 15 bp, Homo sapiens
acctcccgagttcaa

SEQ ID NO: 548869 - DNA, 15 bp, Homo sapiens
cacctcccgagttca

SEQ ID NO: 548870 - DNA, 15 bp, Homo sapiens
ccacctcccgagttc

SEQ ID NO: 548871 - DNA, 15 bp, Homo sapiens
tccacctcccgagtt

SEQ ID NO: 548872 - DNA, 15 bp, Homo sapiens
ctccacctcccgagt

SEQ ID NO: 548873 - DNA, 15 bp, Homo sapiens
cctccacctcccgag

SEQ ID NO: 548874 - DNA, 15 bp, Homo sapiens
acctccacctcccga

SEQ ID NO: 548875 - DNA, 15 bp, Homo sapiens
cgatctcagctcact

SEQ ID NO: 548876 - DNA, 15 bp, Homo sapiens
gcgatctcagctcac

SEQ ID NO: 548877 - DNA, 15 bp, Homo sapiens
cgcgatctcagctca

SEQ ID NO: 548878 - DNA, 15 bp, Homo sapiens
gcgcgatctcagctc

SEQ ID NO: 548879 - DNA, 15 bp, Homo sapiens
ggcgcgatctcagct

SEQ ID NO: 548880 - DNA, 15 bp, Homo sapiens
tggcgcgatctcagc

SEQ ID NO: 548881 - DNA, 15 bp, Homo sapiens
gtggcgcgatctcag

SEQ ID NO: 548882 - DNA, 15 bp, Homo sapiens
agtggcgcgatctca

SEQ ID NO: 548883 - DNA, 15 bp, Homo sapiens
cagtggcgcgatctc

SEQ ID NO: 548884 - DNA, 15 bp, Homo sapiens
gcagtggcgcgatct

SEQ ID NO: 548885 - DNA, 15 bp, Homo sapiens
tgcagtggcgcgatc

SEQ ID NO: 548886 - DNA, 15 bp, Homo sapiens
gtgcagtggcgcgat

SEQ ID NO: 548887 - DNA, 15 bp, Homo sapiens
agtgcagtggcgcga

SEQ ID NO: 548888 - DNA, 15 bp, Homo sapiens
aagtgcagtggcgcg

SEQ ID NO: 548889 - DNA, 15 bp, Homo sapiens
gaagtgcagtggcgc

SEQ ID NO: 548890 - DNA, 15 bp, Homo sapiens
tgaagtgcagtggcg

SEQ ID NO: 548891 - DNA, 15 bp, Homo sapiens
ctgaagtgcagtggc

SEQ ID NO: 548892 - DNA, 15 bp, Homo sapiens
gctgaagtgcagtgg

SEQ ID NO: 548893 - DNA, 15 bp, Homo sapiens
ggctgaagtgcagtg

SEQ ID NO: 548894 - DNA, 15 bp, Homo sapiens
aggctgaagtgcagt

SEQ ID NO: 548895 - DNA, 15 bp, Homo sapiens
taggctgaagtgcag

SEQ ID NO: 548896 - DNA, 15 bp, Homo sapiens
ctaggctgaagtgca

SEQ ID NO: 548897 - DNA, 15 bp, Homo sapiens
cctaggctgaagtgc

SEQ ID NO: 548898 - DNA, 15 bp, Homo sapiens
acctaggctgaagtg

SEQ ID NO: 548899 - DNA, 15 bp, Homo sapiens
cacctaggctgaagt

SEQ ID NO: 548900 - DNA, 15 bp, Homo sapiens
tcacctaggctgaag

SEQ ID NO: 548901 - DNA, 15 bp, Homo sapiens
gtcacctaggctgaa

SEQ ID NO: 548902 - DNA, 15 bp, Homo sapiens
tgtcacctaggctga

SEQ ID NO: 548903 - DNA, 15 bp, Homo sapiens
ctgtcacctaggctg

SEQ ID NO: 548904 - DNA, 15 bp, Homo sapiens
actgtcacctaggct

SEQ ID NO: 548905 - DNA, 15 bp, Homo sapiens
cactgtcacctaggc

SEQ ID NO: 548906 - DNA, 15 bp, Homo sapiens
tcactgtcacctagg

SEQ ID NO: 548907 - DNA, 15 bp, Homo sapiens
ctcactgtcacctag

SEQ ID NO: 548908 - DNA, 15 bp, Homo sapiens
tctcactgtcaccta

SEQ ID NO: 548909 - DNA, 15 bp, Homo sapiens
gtctcactgtcacct

SEQ ID NO: 548910 - DNA, 15 bp, Homo sapiens
agtctcactgtcacc

SEQ ID NO: 548911 - DNA, 15 bp, Homo sapiens
gagtctcactgtcac

SEQ ID NO: 548912 - DNA, 15 bp, Homo sapiens
ggagtctcactgtca

SEQ ID NO: 548913 - DNA, 15 bp, Homo sapiens
tggagtctcactgtc

SEQ ID NO: 548914 - DNA, 15 bp, Homo sapiens
atggagtctcactgt

SEQ ID NO: 548915 - DNA, 15 bp, Homo sapiens
gatggagtctcactg

SEQ ID NO: 548916 - DNA, 15 bp, Homo sapiens
ccatttttttttttt

SEQ ID NO: 548917 - DNA, 15 bp, Homo sapiens
tccattttttttttt

SEQ ID NO: 548918 - DNA, 15 bp, Homo sapiens
ttccatttttttttt

SEQ ID NO: 548919 - DNA, 15 bp, Homo sapiens
attccattttttttt

SEQ ID NO: 548920 - DNA, 15 bp, Homo sapiens
gattccatttttttt

SEQ ID NO: 548921 - DNA, 15 bp, Homo sapiens
ggattccattttttt

SEQ ID NO: 548922 - DNA, 15 bp, Homo sapiens
aggattccatttttt

SEQ ID NO: 548923 - DNA, 15 bp, Homo sapiens
aaggattccattttt

SEQ ID NO: 548924 - DNA, 15 bp, Homo sapiens
aaaggattccatttt

SEQ ID NO: 548925 - DNA, 15 bp, Homo sapiens
taaaggattccattt

SEQ ID NO: 548926 - DNA, 15 bp, Homo sapiens
ataaaggattccatt

SEQ ID NO: 548927 - DNA, 15 bp, Homo sapiens
cataaaggattccat

SEQ ID NO: 548928 - DNA, 15 bp, Homo sapiens
acataaaggattcca

SEQ ID NO: 548929 - DNA, 15 bp, Homo sapiens
aacataaaggattcc

SEQ ID NO: 548930 - DNA, 15 bp, Homo sapiens
aaacataaaggattc

SEQ ID NO: 548931 - DNA, 15 bp, Homo sapiens
gaaacataaaggatt

SEQ ID NO: 548932 - DNA, 15 bp, Homo sapiens
tgaaacataaaggat

SEQ ID NO: 548933 - DNA, 15 bp, Homo sapiens
gtgaaacataaagga

SEQ ID NO: 548934 - DNA, 15 bp, Homo sapiens
agtgaaacataaagg

SEQ ID NO: 548935 - DNA, 15 bp, Homo sapiens
aagtgaaacataaag

SEQ ID NO: 548936 - DNA, 15 bp, Homo sapiens
aaagtgaaacataaa

SEQ ID NO: 548937 - DNA, 15 bp, Homo sapiens
caaagtgaaacataa

SEQ ID NO: 548938 - DNA, 15 bp, Homo sapiens
acaaagtgaaacata

SEQ ID NO: 548939 - DNA, 15 bp, Homo sapiens
aacaaagtgaaacat

SEQ ID NO: 548940 - DNA, 15 bp, Homo sapiens
gaacaaagtgaaaca

SEQ ID NO: 548941 - DNA, 15 bp, Homo sapiens
agaacaaagtgaaac

SEQ ID NO: 548942 - DNA, 15 bp, Homo sapiens
gagaacaaagtgaaa

SEQ ID NO: 548943 - DNA, 15 bp, Homo sapiens
tgagaacaaagtgaa

SEQ ID NO: 548944 - DNA, 15 bp, Homo sapiens
atgagaacaaagtga

SEQ ID NO: 548945 - DNA, 15 bp, Homo sapiens
aatgagaacaaagtg

SEQ ID NO: 548946 - DNA, 15 bp, Homo sapiens
taatgagaacaaagt

SEQ ID NO: 548947 - DNA, 15 bp, Homo sapiens
ctaatgagaacaaag

SEQ ID NO: 548948 - DNA, 15 bp, Homo sapiens
gctaatgagaacaaa

SEQ ID NO: 548949 - DNA, 15 bp, Homo sapiens
tgctaatgagaacaa

SEQ ID NO: 548950 - DNA, 15 bp, Homo sapiens
ctgctaatgagaaca

SEQ ID NO: 548951 - DNA, 15 bp, Homo sapiens
cctgctaatgagaac

SEQ ID NO: 548952 - DNA, 15 bp, Homo sapiens
tcctgctaatgagaa

SEQ ID NO: 548953 - DNA, 15 bp, Homo sapiens
gtcctgctaatgaga

SEQ ID NO: 548954 - DNA, 15 bp, Homo sapiens
agtcctgctaatgag

SEQ ID NO: 548955 - DNA, 15 bp, Homo sapiens
cagtcctgctaatga

SEQ ID NO: 548956 - DNA, 15 bp, Homo sapiens
acagtcctgctaatg

SEQ ID NO: 548957 - DNA, 15 bp, Homo sapiens
cacagtcctgctaat

SEQ ID NO: 548958 - DNA, 15 bp, Homo sapiens
gcacagtcctgctaa

SEQ ID NO: 548959 - DNA, 15 bp, Homo sapiens
cgcacagtcctgcta

SEQ ID NO: 548960 - DNA, 15 bp, Homo sapiens
tcgcacagtcctgct

SEQ ID NO: 548961 - DNA, 15 bp, Homo sapiens
ctcgcacagtcctgc

SEQ ID NO: 548962 - DNA, 15 bp, Homo sapiens
cctcgcacagtcctg

SEQ ID NO: 548963 - DNA, 15 bp, Homo sapiens
gcctcgcacagtcct

SEQ ID NO: 548964 - DNA, 15 bp, Homo sapiens
agcctcgcacagtcc

SEQ ID NO: 548965 - DNA, 15 bp, Homo sapiens
cagcctcgcacagtc

SEQ ID NO: 548966 - DNA, 15 bp, Homo sapiens
tcagcctcgcacagt

SEQ ID NO: 548967 - DNA, 15 bp, Homo sapiens
ctcagcctcgcacag

SEQ ID NO: 548968 - DNA, 15 bp, Homo sapiens
actcagcctcgcaca

SEQ ID NO: 548969 - DNA, 15 bp, Homo sapiens
gactcagcctcgcac

SEQ ID NO: 548970 - DNA, 15 bp, Homo sapiens
tgactcagcctcgca

SEQ ID NO: 548971 - DNA, 15 bp, Homo sapiens
ctgactcagcctcgc

SEQ ID NO: 548972 - DNA, 15 bp, Homo sapiens
cctgactcagcctcg

SEQ ID NO: 548973 - DNA, 15 bp, Homo sapiens
tcctgactcagcctc

SEQ ID NO: 548974 - DNA, 15 bp, Homo sapiens
ctcctgactcagcct

SEQ ID NO: 548975 - DNA, 15 bp, Homo sapiens
tctcctgactcagcc

SEQ ID NO: 548976 - DNA, 15 bp, Homo sapiens
gtctcctgactcagc

SEQ ID NO: 548977 - DNA, 15 bp, Homo sapiens
ggtctcctgactcag

SEQ ID NO: 548978 - DNA, 15 bp, Homo sapiens
cggtctcctgactca

SEQ ID NO: 548979 - DNA, 15 bp, Homo sapiens
tcggtctcctgactc

SEQ ID NO: 548980 - DNA, 15 bp, Homo sapiens
ctcggtctcctgact

SEQ ID NO: 548981 - DNA, 15 bp, Homo sapiens
cctcggtctcctgac

SEQ ID NO: 548982 - DNA, 15 bp, Homo sapiens
acctcggtctcctga

SEQ ID NO: 548983 - DNA, 15 bp, Homo sapiens
gacctcggtctcctg

SEQ ID NO: 548984 - DNA, 15 bp, Homo sapiens
ggacctcggtctcct

SEQ ID NO: 548985 - DNA, 15 bp, Homo sapiens
tggacctcggtctcc

SEQ ID NO: 548986 - DNA, 15 bp, Homo sapiens
atggacctcggtctc

SEQ ID NO: 548987 - DNA, 15 bp, Homo sapiens
aatggacctcggtct

SEQ ID NO: 548988 - DNA, 15 bp, Homo sapiens
gaatggacctcggtc

SEQ ID NO: 548989 - DNA, 15 bp, Homo sapiens
agaatggacctcggt

SEQ ID NO: 548990 - DNA, 15 bp, Homo sapiens
cagaatggacctcgg

SEQ ID NO: 548991 - DNA, 15 bp, Homo sapiens
gcagaatggacctcg

SEQ ID NO: 548992 - DNA, 15 bp, Homo sapiens
agcagaatggacctc

SEQ ID NO: 548993 - DNA, 15 bp, Homo sapiens
aagcagaatggacct

SEQ ID NO: 548994 - DNA, 15 bp, Homo sapiens
caagcagaatggacc

SEQ ID NO: 548995 - DNA, 15 bp, Homo sapiens
acaagcagaatggac

SEQ ID NO: 548996 - DNA, 15 bp, Homo sapiens
cacaagcagaatgga

SEQ ID NO: 548997 - DNA, 15 bp, Homo sapiens
tcacaagcagaatgg

SEQ ID NO: 548998 - DNA, 15 bp, Homo sapiens
atcacaagcagaatg

SEQ ID NO: 548999 - DNA, 15 bp, Homo sapiens
aatcacaagcagaat

SEQ ID NO: 549000 - DNA, 15 bp, Homo sapiens
aaatcacaagcagaa

SEQ ID NO: 549001 - DNA, 15 bp, Homo sapiens
aaaatcacaagcaga

SEQ ID NO: 549002 - DNA, 15 bp, Homo sapiens
caaaatcacaagcag

SEQ ID NO: 549003 - DNA, 15 bp, Homo sapiens
gcaaaatcacaagca

SEQ ID NO: 549004 - DNA, 15 bp, Homo sapiens
agcaaaatcacaagc

SEQ ID NO: 549005 - DNA, 15 bp, Homo sapiens
gagcaaaatcacaag

SEQ ID NO: 549006 - DNA, 15 bp, Homo sapiens
ggagcaaaatcacaa

SEQ ID NO: 549007 - DNA, 15 bp, Homo sapiens
cggagcaaaatcaca

SEQ ID NO: 549008 - DNA, 15 bp, Homo sapiens
acggagcaaaatcac

SEQ ID NO: 549009 - DNA, 15 bp, Homo sapiens
cacggagcaaaatca

SEQ ID NO: 549010 - DNA, 15 bp, Homo sapiens
gcacggagcaaaatc

SEQ ID NO: 549011 - DNA, 15 bp, Homo sapiens
tgcacggagcaaaat

SEQ ID NO: 549012 - DNA, 15 bp, Homo sapiens
ctgcacggagcaaaa

SEQ ID NO: 549013 - DNA, 15 bp, Homo sapiens
cctgcacggagcaaa

SEQ ID NO: 549014 - DNA, 15 bp, Homo sapiens
tcctgcacggagcaa

SEQ ID NO: 549015 - DNA, 15 bp, Homo sapiens
ttcctgcacggagca

SEQ ID NO: 549016 - DNA, 15 bp, Homo sapiens
attcctgcacggagc

SEQ ID NO: 549017 - DNA, 15 bp, Homo sapiens
cattcctgcacggag

SEQ ID NO: 549018 - DNA, 15 bp, Homo sapiens
acattcctgcacgga

SEQ ID NO: 549019 - DNA, 15 bp, Homo sapiens
cacattcctgcacgg

SEQ ID NO: 549020 - DNA, 15 bp, Homo sapiens
ccacattcctgcacg

SEQ ID NO: 549021 - DNA, 15 bp, Homo sapiens
tccacattcctgcac

SEQ ID NO: 549022 - DNA, 15 bp, Homo sapiens
ctccacattcctgca

SEQ ID NO: 549023 - DNA, 15 bp, Homo sapiens
cctccacattcctgc

SEQ ID NO: 549024 - DNA, 15 bp, Homo sapiens
acctccacattcctg

SEQ ID NO: 549025 - DNA, 15 bp, Homo sapiens
cacctccacattcct

SEQ ID NO: 549026 - DNA, 15 bp, Homo sapiens
acacctccacattcc

SEQ ID NO: 549027 - DNA, 15 bp, Homo sapiens
cacacctccacattc

SEQ ID NO: 549028 - DNA, 15 bp, Homo sapiens
ccacacctccacatt

SEQ ID NO: 549029 - DNA, 15 bp, Homo sapiens
gccacacctccacat

SEQ ID NO: 549030 - DNA, 15 bp, Homo sapiens
ggccacacctccaca

SEQ ID NO: 549031 - DNA, 15 bp, Homo sapiens
gggccacacctccac

SEQ ID NO: 549032 - DNA, 15 bp, Homo sapiens
tgggccacacctcca

SEQ ID NO: 549033 - DNA, 15 bp, Homo sapiens
atgggccacacctcc

SEQ ID NO: 549034 - DNA, 15 bp, Homo sapiens
tatgggccacacctc

SEQ ID NO: 549035 - DNA, 15 bp, Homo sapiens
ttatgggccacacct

SEQ ID NO: 549036 - DNA, 15 bp, Homo sapiens
cttatgggccacacc

SEQ ID NO: 549037 - DNA, 15 bp, Homo sapiens
gcttatgggccacac

SEQ ID NO: 549038 - DNA, 15 bp, Homo sapiens
tgcttatgggccaca

SEQ ID NO: 549039 - DNA, 15 bp, Homo sapiens
atgcttatgggccac

SEQ ID NO: 549040 - DNA, 15 bp, Homo sapiens
catgcttatgggcca

SEQ ID NO: 549041 - DNA, 15 bp, Homo sapiens
acatgcttatgggcc

SEQ ID NO: 549042 - DNA, 15 bp, Homo sapiens
gacatgcttatgggc

SEQ ID NO: 549043 - DNA, 15 bp, Homo sapiens
tgacatgcttatggg

SEQ ID NO: 549044 - DNA, 15 bp, Homo sapiens
atgacatgcttatgg

SEQ ID NO: 549045 - DNA, 15 bp, Homo sapiens
aatgacatgcttatg

SEQ ID NO: 549046 - DNA, 15 bp, Homo sapiens
gaatgacatgcttat

SEQ ID NO: 549047 - DNA, 15 bp, Homo sapiens
tgaatgacatgctta

SEQ ID NO: 549048 - DNA, 15 bp, Homo sapiens
atgaatgacatgctt

SEQ ID NO: 549049 - DNA, 15 bp, Homo sapiens
catgaatgacatgct

SEQ ID NO: 549050 - DNA, 15 bp, Homo sapiens
gcatgaatgacatgc

SEQ ID NO: 549051 - DNA, 15 bp, Homo sapiens
tgcatgaatgacatg

SEQ ID NO: 549052 - DNA, 15 bp, Homo sapiens
ttgcatgaatgacat

SEQ ID NO: 549053 - DNA, 15 bp, Homo sapiens
tttgcatgaatgaca

SEQ ID NO: 549054 - DNA, 15 bp, Homo sapiens
ttttgcatgaatgac

SEQ ID NO: 549055 - DNA, 15 bp, Homo sapiens
attttgcatgaatga

SEQ ID NO: 549056 - DNA, 15 bp, Homo sapiens
gattttgcatgaatg

SEQ ID NO: 549057 - DNA, 15 bp, Homo sapiens
tgattttgcatgaat

SEQ ID NO: 549058 - DNA, 15 bp, Homo sapiens
atgattttgcatgaa

SEQ ID NO: 549059 - DNA, 15 bp, Homo sapiens
gatgattttgcatga

SEQ ID NO: 549060 - DNA, 15 bp, Homo sapiens
agatgattttgcatg

SEQ ID NO: 549061 - DNA, 15 bp, Homo sapiens
tagatgattttgcat

SEQ ID NO: 549062 - DNA, 15 bp, Homo sapiens
gtagatgattttgca

SEQ ID NO: 549063 - DNA, 15 bp, Homo sapiens
tgtagatgattttgc

SEQ ID NO: 549064 - DNA, 15 bp, Homo sapiens
atgtagatgattttg

SEQ ID NO: 549065 - DNA, 15 bp, Homo sapiens
catgtagatgatttt

SEQ ID NO: 549066 - DNA, 15 bp, Homo sapiens
gcatgtagatgattt

SEQ ID NO: 549067 - DNA, 15 bp, Homo sapiens
tgcatgtagatgatt

SEQ ID NO: 549068 - DNA, 15 bp, Homo sapiens
atgcatgtagatgat

SEQ ID NO: 549069 - DNA, 15 bp, Homo sapiens
aatgcatgtagatga

SEQ ID NO: 549070 - DNA, 15 bp, Homo sapiens
gaatgcatgtagatg

SEQ ID NO: 549071 - DNA, 15 bp, Homo sapiens
tgaatgcatgtagat

SEQ ID NO: 549072 - DNA, 15 bp, Homo sapiens
ttgaatgcatgtaga

SEQ ID NO: 549073 - DNA, 15 bp, Homo sapiens
attgaatgcatgtag

SEQ ID NO: 549074 - DNA, 15 bp, Homo sapiens
aattgaatgcatgta

SEQ ID NO: 549075 - DNA, 15 bp, Homo sapiens
taattgaatgcatgt

SEQ ID NO: 549076 - DNA, 15 bp, Homo sapiens
ctaattgaatgcatg

SEQ ID NO: 549077 - DNA, 15 bp, Homo sapiens
tctaattgaatgcat

SEQ ID NO: 549078 - DNA, 15 bp, Homo sapiens
ttctaattgaatgca

SEQ ID NO: 549079 - DNA, 15 bp, Homo sapiens
tttctaattgaatgc

SEQ ID NO: 549080 - DNA, 15 bp, Homo sapiens
ttttctaattgaatg

SEQ ID NO: 549081 - DNA, 15 bp, Homo sapiens
tttttctaattgaat

SEQ ID NO: 549082 - DNA, 15 bp, Homo sapiens
ttttttctaattgaa

SEQ ID NO: 549083 - DNA, 15 bp, Homo sapiens
tttttttctaattga

SEQ ID NO: 549084 - DNA, 15 bp, Homo sapiens
ttttttttctaattg

SEQ ID NO: 549085 - DNA, 15 bp, Homo sapiens
tttttttttctaatt

SEQ ID NO: 549086 - DNA, 15 bp, Homo sapiens
ctttttttttctaat

SEQ ID NO: 549087 - DNA, 15 bp, Homo sapiens
cctttttttttctaa

SEQ ID NO: 549088 - DNA, 15 bp, Homo sapiens
tcctttttttttcta

SEQ ID NO: 549089 - DNA, 15 bp, Homo sapiens
ttcctttttttttct

SEQ ID NO: 549090 - DNA, 15 bp, Homo sapiens
tttcctttttttttc

SEQ ID NO: 549091 - DNA, 15 bp, Homo sapiens
ttttccttttttttt

SEQ ID NO: 549092 - DNA, 15 bp, Homo sapiens
gttttcctttttttt

SEQ ID NO: 549093 - DNA, 15 bp, Homo sapiens
tgttttccttttttt

SEQ ID NO: 549094 - DNA, 15 bp, Homo sapiens
ctgttttcctttttt

SEQ ID NO: 549095 - DNA, 15 bp, Homo sapiens
gctgttttccttttt

SEQ ID NO: 549096 - DNA, 15 bp, Homo sapiens
tgctgttttcctttt

SEQ ID NO: 549097 - DNA, 15 bp, Homo sapiens
ctgctgttttccttt

SEQ ID NO: 549098 - DNA, 15 bp, Homo sapiens
actgctgttttcctt

SEQ ID NO: 549099 - DNA, 15 bp, Homo sapiens
cactgctgttttcct

SEQ ID NO: 549100 - DNA, 15 bp, Homo sapiens
tcactgctgttttcc

SEQ ID NO: 549101 - DNA, 15 bp, Homo sapiens
gtcactgctgttttc

SEQ ID NO: 549102 - DNA, 15 bp, Homo sapiens
ggtcactgctgtttt

SEQ ID NO: 549103 - DNA, 15 bp, Homo sapiens
gggtcactgctgttt

SEQ ID NO: 549104 - DNA, 15 bp, Homo sapiens
agggtcactgctgtt

SEQ ID NO: 549105 - DNA, 15 bp, Homo sapiens
gagggtcactgctgt

SEQ ID NO: 549106 - DNA, 15 bp, Homo sapiens
tgagggtcactgctg

SEQ ID NO: 549107 - DNA, 15 bp, Homo sapiens
atgagggtcactgct

SEQ ID NO: 549108 - DNA, 15 bp, Homo sapiens
tatgagggtcactgc

SEQ ID NO: 549109 - DNA, 15 bp, Homo sapiens
ttatgagggtcactg

SEQ ID NO: 549110 - DNA, 15 bp, Homo sapiens
cttatgagggtcact

SEQ ID NO: 549111 - DNA, 15 bp, Homo sapiens
acttatgagggtcac

SEQ ID NO: 549112 - DNA, 15 bp, Homo sapiens
tacttatgagggtca

SEQ ID NO: 549113 - DNA, 15 bp, Homo sapiens
ctacttatgagggtc

SEQ ID NO: 549114 - DNA, 15 bp, Homo sapiens
tctacttatgagggt

SEQ ID NO: 549115 - DNA, 15 bp, Homo sapiens
gtctacttatgaggg

SEQ ID NO: 549116 - DNA, 15 bp, Homo sapiens
agtctacttatgagg

SEQ ID NO: 549117 - DNA, 15 bp, Homo sapiens
aagtctacttatgag

SEQ ID NO: 549118 - DNA, 15 bp, Homo sapiens
caagtctacttatga

SEQ ID NO: 549119 - DNA, 15 bp, Homo sapiens
ccaagtctacttatg

SEQ ID NO: 549120 - DNA, 15 bp, Homo sapiens
accaagtctacttat

SEQ ID NO: 549121 - DNA, 15 bp, Homo sapiens
aaccaagtctactta

SEQ ID NO: 549122 - DNA, 15 bp, Homo sapiens
taaccaagtctactt

SEQ ID NO: 549123 - DNA, 15 bp, Homo sapiens
ctaaccaagtctact

SEQ ID NO: 549124 - DNA, 15 bp, Homo sapiens
actaaccaagtctac

SEQ ID NO: 549125 - DNA, 15 bp, Homo sapiens
cactaaccaagtcta

SEQ ID NO: 549126 - DNA, 15 bp, Homo sapiens
acactaaccaagtct

SEQ ID NO: 549127 - DNA, 15 bp, Homo sapiens
gacactaaccaagtc

SEQ ID NO: 549128 - DNA, 15 bp, Homo sapiens
tgacactaaccaagt

SEQ ID NO: 549129 - DNA, 15 bp, Homo sapiens
ttgacactaaccaag

SEQ ID NO: 549130 - DNA, 15 bp, Homo sapiens
attgacactaaccaa

SEQ ID NO: 549131 - DNA, 15 bp, Homo sapiens
cattgacactaacca

SEQ ID NO: 549132 - DNA, 15 bp, Homo sapiens
acattgacactaacc

SEQ ID NO: 549133 - DNA, 15 bp, Homo sapiens
tacattgacactaac

SEQ ID NO: 549134 - DNA, 15 bp, Homo sapiens
ctacattgacactaa

SEQ ID NO: 549135 - DNA, 15 bp, Homo sapiens
cctacattgacacta

SEQ ID NO: 549136 - DNA, 15 bp, Homo sapiens
ccctacattgacact

SEQ ID NO: 549137 - DNA, 15 bp, Homo sapiens
tccctacattgacac

SEQ ID NO: 549138 - DNA, 15 bp, Homo sapiens
ctccctacattgaca

SEQ ID NO: 549139 - DNA, 15 bp, Homo sapiens
actccctacattgac

SEQ ID NO: 549140 - DNA, 15 bp, Homo sapiens
cactccctacattga

SEQ ID NO: 549141 - DNA, 15 bp, Homo sapiens
tcactccctacattg

SEQ ID NO: 549142 - DNA, 15 bp, Homo sapiens
ctcactccctacatt

SEQ ID NO: 549143 - DNA, 15 bp, Homo sapiens
actcactccctacat

SEQ ID NO: 549144 - DNA, 15 bp, Homo sapiens
aactcactccctaca

SEQ ID NO: 549145 - DNA, 15 bp, Homo sapiens
aaactcactccctac

SEQ ID NO: 549146 - DNA, 15 bp, Homo sapiens
gaaactcactcccta

SEQ ID NO: 549147 - DNA, 15 bp, Homo sapiens
agaaactcactccct

SEQ ID NO: 549148 - DNA, 15 bp, Homo sapiens
aagaaactcactccc

SEQ ID NO: 549149 - DNA, 15 bp, Homo sapiens
caagaaactcactcc

SEQ ID NO: 549150 - DNA, 15 bp, Homo sapiens
acaagaaactcactc

SEQ ID NO: 549151 - DNA, 15 bp, Homo sapiens
cacaagaaactcact

SEQ ID NO: 549152 - DNA, 15 bp, Homo sapiens
tcacaagaaactcac

SEQ ID NO: 549153 - DNA, 15 bp, Homo sapiens
gtcacaagaaactca

SEQ ID NO: 549154 - DNA, 15 bp, Homo sapiens
ggtcacaagaaactc

SEQ ID NO: 549155 - DNA, 15 bp, Homo sapiens
gggtcacaagaaact

SEQ ID NO: 549156 - DNA, 15 bp, Homo sapiens
agggtcacaagaaac

SEQ ID NO: 549157 - DNA, 15 bp, Homo sapiens
cagggtcacaagaaa

SEQ ID NO: 549158 - DNA, 15 bp, Homo sapiens
gcagggtcacaagaa

SEQ ID NO: 549159 - DNA, 15 bp, Homo sapiens
agcagggtcacaaga

SEQ ID NO: 549160 - DNA, 15 bp, Homo sapiens
cagcagggtcacaag

SEQ ID NO: 549161 - DNA, 15 bp, Homo sapiens
acagcagggtcacaa

SEQ ID NO: 549162 - DNA, 15 bp, Homo sapiens
aacagcagggtcaca

SEQ ID NO: 549163 - DNA, 15 bp, Homo sapiens
gaacagcagggtcac

SEQ ID NO: 549164 - DNA, 15 bp, Homo sapiens
agaacagcagggtca

SEQ ID NO: 549165 - DNA, 15 bp, Homo sapiens
aagaacagcagggtc

SEQ ID NO: 549166 - DNA, 15 bp, Homo sapiens
gaagaacagcagggt

SEQ ID NO: 549167 - DNA, 15 bp, Homo sapiens
ggaagaacagcaggg

SEQ ID NO: 549168 - DNA, 15 bp, Homo sapiens
aggaagaacagcagg

SEQ ID NO: 549169 - DNA, 15 bp, Homo sapiens
caggaagaacagcag

SEQ ID NO: 549170 - DNA, 15 bp, Homo sapiens
ccaggaagaacagca

SEQ ID NO: 549171 - DNA, 15 bp, Homo sapiens
cccaggaagaacagc

SEQ ID NO: 549172 - DNA, 15 bp, Homo sapiens
acccaggaagaacag

SEQ ID NO: 549173 - DNA, 15 bp, Homo sapiens
gacccaggaagaaca

SEQ ID NO: 549174 - DNA, 15 bp, Homo sapiens
ggacccaggaagaac

SEQ ID NO: 549175 - DNA, 15 bp, Homo sapiens
gggacccaggaagaa

SEQ ID NO: 549176 - DNA, 15 bp, Homo sapiens
cgggacccaggaaga

SEQ ID NO: 549177 - DNA, 15 bp, Homo sapiens
acgggacccaggaag

SEQ ID NO: 549178 - DNA, 15 bp, Homo sapiens
cacgggacccaggaa

SEQ ID NO: 549179 - DNA, 15 bp, Homo sapiens
tcacgggacccagga

SEQ ID NO: 549180 - DNA, 15 bp, Homo sapiens
gtcacgggacccagg

SEQ ID NO: 549181 - DNA, 15 bp, Homo sapiens
tgtcacgggacccag

SEQ ID NO: 549182 - DNA, 15 bp, Homo sapiens
ctgtcacgggaccca

SEQ ID NO: 549183 - DNA, 15 bp, Homo sapiens
cctgtcacgggaccc

SEQ ID NO: 549184 - DNA, 15 bp, Homo sapiens
ccctgtcacgggacc

SEQ ID NO: 549185 - DNA, 15 bp, Homo sapiens
gccctgtcacgggac

SEQ ID NO: 549186 - DNA, 15 bp, Homo sapiens
tgccctgtcacggga

SEQ ID NO: 549187 - DNA, 15 bp, Homo sapiens
atgccctgtcacggg

SEQ ID NO: 549188 - DNA, 15 bp, Homo sapiens
gatgccctgtcacgg

SEQ ID NO: 549189 - DNA, 15 bp, Homo sapiens
agatgccctgtcacg

SEQ ID NO: 549190 - DNA, 15 bp, Homo sapiens
cagatgccctgtcac

SEQ ID NO: 549191 - DNA, 15 bp, Homo sapiens
ccagatgccctgtca

SEQ ID NO: 549192 - DNA, 15 bp, Homo sapiens
tccagatgccctgtc

SEQ ID NO: 549193 - DNA, 15 bp, Homo sapiens
gtccagatgccctgt

SEQ ID NO: 549194 - DNA, 15 bp, Homo sapiens
tgtccagatgccctg

SEQ ID NO: 549195 - DNA, 15 bp, Homo sapiens
ctgtccagatgccct

SEQ ID NO: 549196 - DNA, 15 bp, Homo sapiens
cctgtccagatgccc

SEQ ID NO: 549197 - DNA, 15 bp, Homo sapiens
gcctgtccagatgcc

SEQ ID NO: 549198 - DNA, 15 bp, Homo sapiens
agcctgtccagatgc

SEQ ID NO: 549199 - DNA, 15 bp, Homo sapiens
cagcctgtccagatg

SEQ ID NO: 549200 - DNA, 15 bp, Homo sapiens
tcagcctgtccagat

SEQ ID NO: 549201 - DNA, 15 bp, Homo sapiens
ttcagcctgtccaga

SEQ ID NO: 549202 - DNA, 15 bp, Homo sapiens
attcagcctgtccag

SEQ ID NO: 549203 - DNA, 15 bp, Homo sapiens
cattcagcctgtcca

SEQ ID NO: 549204 - DNA, 15 bp, Homo sapiens
gcattcagcctgtcc

SEQ ID NO: 549205 - DNA, 15 bp, Homo sapiens
cgcattcagcctgtc

SEQ ID NO: 549206 - DNA, 15 bp, Homo sapiens
tcgcattcagcctgt

SEQ ID NO: 549207 - DNA, 15 bp, Homo sapiens
atcgcattcagcctg

SEQ ID NO: 549208 - DNA, 15 bp, Homo sapiens
aatcgcattcagcct

SEQ ID NO: 549209 - DNA, 15 bp, Homo sapiens
gaatcgcattcagcc

SEQ ID NO: 549210 - DNA, 15 bp, Homo sapiens
agaatcgcattcagc

SEQ ID NO: 549211 - DNA, 15 bp, Homo sapiens
tagaatcgcattcag

SEQ ID NO: 549212 - DNA, 15 bp, Homo sapiens
ctagaatcgcattca

SEQ ID NO: 549213 - DNA, 15 bp, Homo sapiens
tctagaatcgcattc

SEQ ID NO: 549214 - DNA, 15 bp, Homo sapiens
ttctagaatcgcatt

SEQ ID NO: 549215 - DNA, 15 bp, Homo sapiens
attctagaatcgcat

SEQ ID NO: 549216 - DNA, 15 bp, Homo sapiens
aattctagaatcgca

SEQ ID NO: 549217 - DNA, 15 bp, Homo sapiens
taattctagaatcgc

SEQ ID NO: 549218 - DNA, 15 bp, Homo sapiens
ctaattctagaatcg

SEQ ID NO: 549219 - DNA, 15 bp, Homo sapiens
tctaattctagaatc

SEQ ID NO: 549220 - DNA, 15 bp, Homo sapiens
atctaattctagaat

SEQ ID NO: 549221 - DNA, 15 bp, Homo sapiens
aatctaattctagaa

SEQ ID NO: 549222 - DNA, 15 bp, Homo sapiens
gaatctaattctaga

SEQ ID NO: 549223 - DNA, 15 bp, Homo sapiens
ggaatctaattctag

SEQ ID NO: 549224 - DNA, 15 bp, Homo sapiens
aggaatctaattcta

SEQ ID NO: 549225 - DNA, 15 bp, Homo sapiens
taggaatctaattct

SEQ ID NO: 549226 - DNA, 15 bp, Homo sapiens
ataggaatctaattc

SEQ ID NO: 549227 - DNA, 15 bp, Homo sapiens
cataggaatctaatt

SEQ ID NO: 549228 - DNA, 15 bp, Homo sapiens
acataggaatctaat

SEQ ID NO: 549229 - DNA, 15 bp, Homo sapiens
aacataggaatctaa

SEQ ID NO: 549230 - DNA, 15 bp, Homo sapiens
aaacataggaatcta

SEQ ID NO: 549231 - DNA, 15 bp, Homo sapiens
aaaacataggaatct

SEQ ID NO: 549232 - DNA, 15 bp, Homo sapiens
aaaaacataggaatc

SEQ ID NO: 549233 - DNA, 15 bp, Homo sapiens
taaaaacataggaat

SEQ ID NO: 549234 - DNA, 15 bp, Homo sapiens
ataaaaacataggaa

SEQ ID NO: 549235 - DNA, 15 bp, Homo sapiens
tataaaaacatagga

SEQ ID NO: 549236 - DNA, 15 bp, Homo sapiens
atataaaaacatagg

SEQ ID NO: 549237 - DNA, 15 bp, Homo sapiens
catataaaaacatag

SEQ ID NO: 549238 - DNA, 15 bp, Homo sapiens
acatataaaaacata

SEQ ID NO: 549239 - DNA, 15 bp, Homo sapiens
tacatataaaaacat

SEQ ID NO: 549240 - DNA, 15 bp, Homo sapiens
gtacatataaaaaca

SEQ ID NO: 549241 - DNA, 15 bp, Homo sapiens
cgtacatataaaaac

SEQ ID NO: 549242 - DNA, 15 bp, Homo sapiens
gcgtacatataaaaa

SEQ ID NO: 549243 - DNA, 15 bp, Homo sapiens
ggcgtacatataaaa

SEQ ID NO: 549244 - DNA, 15 bp, Homo sapiens
gggcgtacatataaa

SEQ ID NO: 549245 - DNA, 15 bp, Homo sapiens
ggggcgtacatataa

SEQ ID NO: 549246 - DNA, 15 bp, Homo sapiens
tggggcgtacatata

SEQ ID NO: 549247 - DNA, 15 bp, Homo sapiens
ctggggcgtacatat

SEQ ID NO: 549248 - DNA, 15 bp, Homo sapiens
actggggcgtacata

SEQ ID NO: 549249 - DNA, 15 bp, Homo sapiens
gactggggcgtacat

SEQ ID NO: 549250 - DNA, 15 bp, Homo sapiens
agactggggcgtaca

SEQ ID NO: 549251 - DNA, 15 bp, Homo sapiens
gagactggggcgtac

SEQ ID NO: 549252 - DNA, 15 bp, Homo sapiens
tgagactggggcgta

SEQ ID NO: 549253 - DNA, 15 bp, Homo sapiens
gtgagactggggcgt

SEQ ID NO: 549254 - DNA, 15 bp, Homo sapiens
agtgagactggggcg

SEQ ID NO: 549255 - DNA, 15 bp, Homo sapiens
aagtgagactggggc

SEQ ID NO: 549256 - DNA, 15 bp, Homo sapiens
caagtgagactgggg

SEQ ID NO: 549257 - DNA, 15 bp, Homo sapiens
gcaagtgagactggg

SEQ ID NO: 549258 - DNA, 15 bp, Homo sapiens
ggcaagtgagactgg

SEQ ID NO: 549259 - DNA, 15 bp, Homo sapiens
tggcaagtgagactg

SEQ ID NO: 549260 - DNA, 15 bp, Homo sapiens
ctggcaagtgagact

SEQ ID NO: 549261 - DNA, 15 bp, Homo sapiens
actggcaagtgagac

SEQ ID NO: 549262 - DNA, 15 bp, Homo sapiens
cactggcaagtgaga

SEQ ID NO: 549263 - DNA, 15 bp, Homo sapiens
ccactggcaagtgag

SEQ ID NO: 549264 - DNA, 15 bp, Homo sapiens
gccactggcaagtga

SEQ ID NO: 549265 - DNA, 15 bp, Homo sapiens
agccactggcaagtg

SEQ ID NO: 549266 - DNA, 15 bp, Homo sapiens
aagccactggcaagt

SEQ ID NO: 549267 - DNA, 15 bp, Homo sapiens
gaagccactggcaag

SEQ ID NO: 549268 - DNA, 15 bp, Homo sapiens
ggaagccactggcaa

SEQ ID NO: 549269 - DNA, 15 bp, Homo sapiens
aggaagccactggca

SEQ ID NO: 549270 - DNA, 15 bp, Homo sapiens
gaggaagccactggc

SEQ ID NO: 549271 - DNA, 15 bp, Homo sapiens
agaggaagccactgg

SEQ ID NO: 549272 - DNA, 15 bp, Homo sapiens
cagaggaagccactg

SEQ ID NO: 549273 - DNA, 15 bp, Homo sapiens
tcagaggaagccact

SEQ ID NO: 549274 - DNA, 15 bp, Homo sapiens
gtcagaggaagccac

SEQ ID NO: 549275 - DNA, 15 bp, Homo sapiens
cgtcagaggaagcca

SEQ ID NO: 549276 - DNA, 15 bp, Homo sapiens
gcgtcagaggaagcc

SEQ ID NO: 549277 - DNA, 15 bp, Homo sapiens
agcgtcagaggaagc

SEQ ID NO: 549278 - DNA, 15 bp, Homo sapiens
aagcgtcagaggaag

SEQ ID NO: 549279 - DNA, 15 bp, Homo sapiens
taagcgtcagaggaa

SEQ ID NO: 549280 - DNA, 15 bp, Homo sapiens
ctaagcgtcagagga

SEQ ID NO: 549281 - DNA, 15 bp, Homo sapiens
tctaagcgtcagagg

SEQ ID NO: 549282 - DNA, 15 bp, Homo sapiens
ttctaagcgtcagag

SEQ ID NO: 549283 - DNA, 15 bp, Homo sapiens
tttctaagcgtcaga

SEQ ID NO: 549284 - DNA, 15 bp, Homo sapiens
ttttctaagcgtcag

SEQ ID NO: 549285 - DNA, 15 bp, Homo sapiens
attttctaagcgtca

SEQ ID NO: 549286 - DNA, 15 bp, Homo sapiens
tattttctaagcgtc

SEQ ID NO: 549287 - DNA, 15 bp, Homo sapiens
ttattttctaagcgt

SEQ ID NO: 549288 - DNA, 15 bp, Homo sapiens
tttattttctaagcg

SEQ ID NO: 549289 - DNA, 15 bp, Homo sapiens
atttattttctaagc

SEQ ID NO: 549290 - DNA, 15 bp, Homo sapiens
catttattttctaag

SEQ ID NO: 549291 - DNA, 15 bp, Homo sapiens
ccatttattttctaa

SEQ ID NO: 549292 - DNA, 15 bp, Homo sapiens
gccatttattttcta

SEQ ID NO: 549293 - DNA, 15 bp, Homo sapiens
tgccatttattttct

SEQ ID NO: 549294 - DNA, 15 bp, Homo sapiens
atgccatttattttc

SEQ ID NO: 549295 - DNA, 15 bp, Homo sapiens
gatgccatttatttt

SEQ ID NO: 549296 - DNA, 15 bp, Homo sapiens
agatgccatttattt

SEQ ID NO: 549297 - DNA, 15 bp, Homo sapiens
cagatgccatttatt

SEQ ID NO: 549298 - DNA, 15 bp, Homo sapiens
gcagatgccatttat

SEQ ID NO: 549299 - DNA, 15 bp, Homo sapiens
tgcagatgccattta

SEQ ID NO: 549300 - DNA, 15 bp, Homo sapiens
gtgcagatgccattt

SEQ ID NO: 549301 - DNA, 15 bp, Homo sapiens
ggtgcagatgccatt

SEQ ID NO: 549302 - DNA, 15 bp, Homo sapiens
tggtgcagatgccat

SEQ ID NO: 549303 - DNA, 15 bp, Homo sapiens
gtggtgcagatgcca

SEQ ID NO: 549304 - DNA, 15 bp, Homo sapiens
cgtggtgcagatgcc

SEQ ID NO: 549305 - DNA, 15 bp, Homo sapiens
acgtggtgcagatgc

SEQ ID NO: 549306 - DNA, 15 bp, Homo sapiens
gacgtggtgcagatg

SEQ ID NO: 549307 - DNA, 15 bp, Homo sapiens
tgacgtggtgcagat

SEQ ID NO: 549308 - DNA, 15 bp, Homo sapiens
ctgacgtggtgcaga

SEQ ID NO: 549309 - DNA, 15 bp, Homo sapiens
cctgacgtggtgcag

SEQ ID NO: 549310 - DNA, 15 bp, Homo sapiens
ccctgacgtggtgca

SEQ ID NO: 549311 - DNA, 15 bp, Homo sapiens
tccctgacgtggtgc

SEQ ID NO: 549312 - DNA, 15 bp, Homo sapiens
ctccctgacgtggtg

SEQ ID NO: 549313 - DNA, 15 bp, Homo sapiens
tctccctgacgtggt

SEQ ID NO: 549314 - DNA, 15 bp, Homo sapiens
ttctccctgacgtgg

SEQ ID NO: 549315 - DNA, 15 bp, Homo sapiens
tttctccctgacgtg

SEQ ID NO: 549316 - DNA, 15 bp, Homo sapiens
gtttctccctgacgt

SEQ ID NO: 549317 - DNA, 15 bp, Homo sapiens
agtttctccctgacg

SEQ ID NO: 549318 - DNA, 15 bp, Homo sapiens
cagtttctccctgac

SEQ ID NO: 549319 - DNA, 15 bp, Homo sapiens
tcagtttctccctga

SEQ ID NO: 549320 - DNA, 15 bp, Homo sapiens
gtcagtttctccctg

SEQ ID NO: 549321 - DNA, 15 bp, Homo sapiens
agtcagtttctccct

SEQ ID NO: 549322 - DNA, 15 bp, Homo sapiens
cagtcagtttctccc

SEQ ID NO: 549323 - DNA, 15 bp, Homo sapiens
gcagtcagtttctcc

SEQ ID NO: 549324 - DNA, 15 bp, Homo sapiens
agcagtcagtttctc

SEQ ID NO: 549325 - DNA, 15 bp, Homo sapiens
aagcagtcagtttct

SEQ ID NO: 549326 - DNA, 15 bp, Homo sapiens
aaagcagtcagtttc

SEQ ID NO: 549327 - DNA, 15 bp, Homo sapiens
caaagcagtcagttt

SEQ ID NO: 549328 - DNA, 15 bp, Homo sapiens
ccaaagcagtcagtt

SEQ ID NO: 549329 - DNA, 15 bp, Homo sapiens
tccaaagcagtcagt

SEQ ID NO: 549330 - DNA, 15 bp, Homo sapiens
ttccaaagcagtcag

SEQ ID NO: 549331 - DNA, 15 bp, Homo sapiens
attccaaagcagtca

SEQ ID NO: 549332 - DNA, 15 bp, Homo sapiens
aattccaaagcagtc

SEQ ID NO: 549333 - DNA, 15 bp, Homo sapiens
gaattccaaagcagt

SEQ ID NO: 549334 - DNA, 15 bp, Homo sapiens
ggaattccaaagcag

SEQ ID NO: 549335 - DNA, 15 bp, Homo sapiens
gggaattccaaagca

SEQ ID NO: 549336 - DNA, 15 bp, Homo sapiens
tgggaattccaaagc

SEQ ID NO: 549337 - DNA, 15 bp, Homo sapiens
ctgggaattccaaag

SEQ ID NO: 549338 - DNA, 15 bp, Homo sapiens
tctgggaattccaaa

SEQ ID NO: 549339 - DNA, 15 bp, Homo sapiens
ttctgggaattccaa

SEQ ID NO: 549340 - DNA, 15 bp, Homo sapiens
cttctgggaattcca

SEQ ID NO: 549341 - DNA, 15 bp, Homo sapiens
gcttctgggaattcc

SEQ ID NO: 549342 - DNA, 15 bp, Homo sapiens
agcttctgggaattc

SEQ ID NO: 549343 - DNA, 15 bp, Homo sapiens
gagcttctgggaatt

SEQ ID NO: 549344 - DNA, 15 bp, Homo sapiens
agagcttctgggaat

SEQ ID NO: 549345 - DNA, 15 bp, Homo sapiens
aagagcttctgggaa

SEQ ID NO: 549346 - DNA, 15 bp, Homo sapiens
caagagcttctggga

SEQ ID NO: 549347 - DNA, 15 bp, Homo sapiens
ccaagagcttctggg

SEQ ID NO: 549348 - DNA, 15 bp, Homo sapiens
tccaagagcttctgg

SEQ ID NO: 549349 - DNA, 15 bp, Homo sapiens
ttccaagagcttctg

SEQ ID NO: 549350 - DNA, 15 bp, Homo sapiens
cttccaagagcttct

SEQ ID NO: 549351 - DNA, 15 bp, Homo sapiens
ccttccaagagcttc

SEQ ID NO: 549352 - DNA, 15 bp, Homo sapiens
cccttccaagagctt

SEQ ID NO: 549353 - DNA, 15 bp, Homo sapiens
tcccttccaagagct

SEQ ID NO: 549354 - DNA, 15 bp, Homo sapiens
ttcccttccaagagc

SEQ ID NO: 549355 - DNA, 15 bp, Homo sapiens
gttcccttccaagag

SEQ ID NO: 549356 - DNA, 15 bp, Homo sapiens
ggttcccttccaaga

SEQ ID NO: 549357 - DNA, 15 bp, Homo sapiens
aggttcccttccaag

SEQ ID NO: 549358 - DNA, 15 bp, Homo sapiens
aaggttcccttccaa

SEQ ID NO: 549359 - DNA, 15 bp, Homo sapiens
gaaggttcccttcca

SEQ ID NO: 549360 - DNA, 15 bp, Homo sapiens
ggaaggttcccttcc

SEQ ID NO: 549361 - DNA, 15 bp, Homo sapiens
aggaaggttcccttc

SEQ ID NO: 549362 - DNA, 15 bp, Homo sapiens
caggaaggttccctt

SEQ ID NO: 549363 - DNA, 15 bp, Homo sapiens
tcaggaaggttccct

SEQ ID NO: 549364 - DNA, 15 bp, Homo sapiens
ctcaggaaggttccc

SEQ ID NO: 549365 - DNA, 15 bp, Homo sapiens
cctcaggaaggttcc

SEQ ID NO: 549366 - DNA, 15 bp, Homo sapiens
ccctcaggaaggttc

SEQ ID NO: 549367 - DNA, 15 bp, Homo sapiens
tccctcaggaaggtt

SEQ ID NO: 549368 - DNA, 15 bp, Homo sapiens
atccctcaggaaggt

SEQ ID NO: 549369 - DNA, 15 bp, Homo sapiens
tatccctcaggaagg

SEQ ID NO: 549370 - DNA, 15 bp, Homo sapiens
atatccctcaggaag

SEQ ID NO: 549371 - DNA, 15 bp, Homo sapiens
aatatccctcaggaa

SEQ ID NO: 549372 - DNA, 15 bp, Homo sapiens
caatatccctcagga

SEQ ID NO: 549373 - DNA, 15 bp, Homo sapiens
tcaatatccctcagg

SEQ ID NO: 549374 - DNA, 15 bp, Homo sapiens
ttcaatatccctcag

SEQ ID NO: 549375 - DNA, 15 bp, Homo sapiens
cttcaatatccctca

SEQ ID NO: 549376 - DNA, 15 bp, Homo sapiens
ccttcaatatccctc

SEQ ID NO: 549377 - DNA, 15 bp, Homo sapiens
tccttcaatatccct

SEQ ID NO: 549378 - DNA, 15 bp, Homo sapiens
ctccttcaatatccc

SEQ ID NO: 549379 - DNA, 15 bp, Homo sapiens
tctccttcaatatcc

SEQ ID NO: 549380 - DNA, 15 bp, Homo sapiens
ttctccttcaatatc

SEQ ID NO: 549381 - DNA, 15 bp, Homo sapiens
attctccttcaatat

SEQ ID NO: 549382 - DNA, 15 bp, Homo sapiens
aattctccttcaata

SEQ ID NO: 549383 - DNA, 15 bp, Homo sapiens
taattctccttcaat

SEQ ID NO: 549384 - DNA, 15 bp, Homo sapiens
ttaattctccttcaa

SEQ ID NO: 549385 - DNA, 15 bp, Homo sapiens
tttaattctccttca

SEQ ID NO: 549386 - DNA, 15 bp, Homo sapiens
ctttaattctccttc

SEQ ID NO: 549387 - DNA, 15 bp, Homo sapiens
tctttaattctcctt

SEQ ID NO: 549388 - DNA, 15 bp, Homo sapiens
ttctttaattctcct

SEQ ID NO: 549389 - DNA, 15 bp, Homo sapiens
attctttaattctcc

SEQ ID NO: 549390 - DNA, 15 bp, Homo sapiens
aattctttaattctc

SEQ ID NO: 549391 - DNA, 15 bp, Homo sapiens
aaattctttaattct

SEQ ID NO: 549392 - DNA, 15 bp, Homo sapiens
aaaattctttaattc

SEQ ID NO: 549393 - DNA, 15 bp, Homo sapiens
gaaaattctttaatt

SEQ ID NO: 549394 - DNA, 15 bp, Homo sapiens
agaaaattctttaat

SEQ ID NO: 549395 - DNA, 15 bp, Homo sapiens
gagaaaattctttaa

SEQ ID NO: 549396 - DNA, 15 bp, Homo sapiens
tgagaaaattcttta

SEQ ID NO: 549397 - DNA, 15 bp, Homo sapiens
ctgagaaaattcttt

SEQ ID NO: 549398 - DNA, 15 bp, Homo sapiens
actgagaaaattctt

SEQ ID NO: 549399 - DNA, 15 bp, Homo sapiens
cactgagaaaattct

SEQ ID NO: 549400 - DNA, 15 bp, Homo sapiens
ccactgagaaaattc

SEQ ID NO: 549401 - DNA, 15 bp, Homo sapiens
gccactgagaaaatt

SEQ ID NO: 549402 - DNA, 15 bp, Homo sapiens
agccactgagaaaat

SEQ ID NO: 549403 - DNA, 15 bp, Homo sapiens
cagccactgagaaaa

SEQ ID NO: 549404 - DNA, 15 bp, Homo sapiens
ccagccactgagaaa

SEQ ID NO: 549405 - DNA, 15 bp, Homo sapiens
gccagccactgagaa

SEQ ID NO: 549406 - DNA, 15 bp, Homo sapiens
tgccagccactgaga

SEQ ID NO: 549407 - DNA, 15 bp, Homo sapiens
gtgccagccactgag

SEQ ID NO: 549408 - DNA, 15 bp, Homo sapiens
tgtgccagccactga

SEQ ID NO: 549409 - DNA, 15 bp, Homo sapiens
ttgtgccagccactg

SEQ ID NO: 549410 - DNA, 15 bp, Homo sapiens
gttgtgccagccact

SEQ ID NO: 549411 - DNA, 15 bp, Homo sapiens
agttgtgccagccac

SEQ ID NO: 549412 - DNA, 15 bp, Homo sapiens
aagttgtgccagcca

SEQ ID NO: 549413 - DNA, 15 bp, Homo sapiens
taagttgtgccagcc

SEQ ID NO: 549414 - DNA, 15 bp, Homo sapiens
ataagttgtgccagc

SEQ ID NO: 549415 - DNA, 15 bp, Homo sapiens
cataagttgtgccag

SEQ ID NO: 549416 - DNA, 15 bp, Homo sapiens
ccataagttgtgcca

SEQ ID NO: 549417 - DNA, 15 bp, Homo sapiens
tccataagttgtgcc

SEQ ID NO: 549418 - DNA, 15 bp, Homo sapiens
ctccataagttgtgc

SEQ ID NO: 549419 - DNA, 15 bp, Homo sapiens
actccataagttgtg

SEQ ID NO: 549420 - DNA, 15 bp, Homo sapiens
gactccataagttgt

SEQ ID NO: 549421 - DNA, 15 bp, Homo sapiens
tgactccataagttg

SEQ ID NO: 549422 - DNA, 15 bp, Homo sapiens
ttgactccataagtt

SEQ ID NO: 549423 - DNA, 15 bp, Homo sapiens
attgactccataagt

SEQ ID NO: 549424 - DNA, 15 bp, Homo sapiens
cattgactccataag

SEQ ID NO: 549425 - DNA, 15 bp, Homo sapiens
gcattgactccataa

SEQ ID NO: 549426 - DNA, 15 bp, Homo sapiens
agcattgactccata

SEQ ID NO: 549427 - DNA, 15 bp, Homo sapiens
gagcattgactccat

SEQ ID NO: 549428 - DNA, 15 bp, Homo sapiens
tgagcattgactcca

SEQ ID NO: 549429 - DNA, 15 bp, Homo sapiens
atgagcattgactcc

SEQ ID NO: 549430 - DNA, 15 bp, Homo sapiens
aatgagcattgactc

SEQ ID NO: 549431 - DNA, 15 bp, Homo sapiens
caatgagcattgact

SEQ ID NO: 549432 - DNA, 15 bp, Homo sapiens
ccaatgagcattgac

SEQ ID NO: 549433 - DNA, 15 bp, Homo sapiens
gccaatgagcattga

SEQ ID NO: 549434 - DNA, 15 bp, Homo sapiens
agccaatgagcattg

SEQ ID NO: 549435 - DNA, 15 bp, Homo sapiens
cagccaatgagcatt

SEQ ID NO: 549436 - DNA, 15 bp, Homo sapiens
acagccaatgagcat

SEQ ID NO: 549437 - DNA, 15 bp, Homo sapiens
cacagccaatgagca

SEQ ID NO: 549438 - DNA, 15 bp, Homo sapiens
tcacagccaatgagc

SEQ ID NO: 549439 - DNA, 15 bp, Homo sapiens
atcacagccaatgag

SEQ ID NO: 549440 - DNA, 15 bp, Homo sapiens
aatcacagccaatga

SEQ ID NO: 549441 - DNA, 15 bp, Homo sapiens
caatcacagccaatg

SEQ ID NO: 549442 - DNA, 15 bp, Homo sapiens
ccaatcacagccaat

SEQ ID NO: 549443 - DNA, 15 bp, Homo sapiens
gccaatcacagccaa

SEQ ID NO: 549444 - DNA, 15 bp, Homo sapiens
agccaatcacagcca

SEQ ID NO: 549445 - DNA, 15 bp, Homo sapiens
cagccaatcacagcc

SEQ ID NO: 549446 - DNA, 15 bp, Homo sapiens
tcagccaatcacagc

SEQ ID NO: 549447 - DNA, 15 bp, Homo sapiens
ctcagccaatcacag

SEQ ID NO: 549448 - DNA, 15 bp, Homo sapiens
gctcagccaatcaca

SEQ ID NO: 549449 - DNA, 15 bp, Homo sapiens
agctcagccaatcac

SEQ ID NO: 549450 - DNA, 15 bp, Homo sapiens
cagctcagccaatca

SEQ ID NO: 549451 - DNA, 15 bp, Homo sapiens
ccagctcagccaatc

SEQ ID NO: 549452 - DNA, 15 bp, Homo sapiens
cccagctcagccaat

SEQ ID NO: 549453 - DNA, 15 bp, Homo sapiens
tcccagctcagccaa

SEQ ID NO: 549454 - DNA, 15 bp, Homo sapiens
atcccagctcagcca

SEQ ID NO: 549455 - DNA, 15 bp, Homo sapiens
gatcccagctcagcc

SEQ ID NO: 549456 - DNA, 15 bp, Homo sapiens
tgatcccagctcagc

SEQ ID NO: 549457 - DNA, 15 bp, Homo sapiens
gtgatcccagctcag

SEQ ID NO: 549458 - DNA, 15 bp, Homo sapiens
tgtgatcccagctca

SEQ ID NO: 549459 - DNA, 15 bp, Homo sapiens
atgtgatcccagctc

SEQ ID NO: 549460 - DNA, 15 bp, Homo sapiens
catgtgatcccagct

SEQ ID NO: 549461 - DNA, 15 bp, Homo sapiens
acatgtgatcccagc

SEQ ID NO: 549462 - DNA, 15 bp, Homo sapiens
cacatgtgatcccag

SEQ ID NO: 549463 - DNA, 15 bp, Homo sapiens
gcacatgtgatccca

SEQ ID NO: 549464 - DNA, 15 bp, Homo sapiens
tgcacatgtgatccc

SEQ ID NO: 549465 - DNA, 15 bp, Homo sapiens
atgcacatgtgatcc

SEQ ID NO: 549466 - DNA, 15 bp, Homo sapiens
gatgcacatgtgatc

SEQ ID NO: 549467 - DNA, 15 bp, Homo sapiens
ggatgcacatgtgat

SEQ ID NO: 549468 - DNA, 15 bp, Homo sapiens
aggatgcacatgtga

SEQ ID NO: 549469 - DNA, 15 bp, Homo sapiens
aaggatgcacatgtg

SEQ ID NO: 549470 - DNA, 15 bp, Homo sapiens
caaggatgcacatgt

SEQ ID NO: 549471 - DNA, 15 bp, Homo sapiens
ccaaggatgcacatg

SEQ ID NO: 549472 - DNA, 15 bp, Homo sapiens
tccaaggatgcacat

SEQ ID NO: 549473 - DNA, 15 bp, Homo sapiens
gtccaaggatgcaca

SEQ ID NO: 549474 - DNA, 15 bp, Homo sapiens
ggtccaaggatgcac

SEQ ID NO: 549475 - DNA, 15 bp, Homo sapiens
tggtccaaggatgca

SEQ ID NO: 549476 - DNA, 15 bp, Homo sapiens
ttggtccaaggatgc

SEQ ID NO: 549477 - DNA, 15 bp, Homo sapiens
attggtccaaggatg

SEQ ID NO: 549478 - DNA, 15 bp, Homo sapiens
aattggtccaaggat

SEQ ID NO: 549479 - DNA, 15 bp, Homo sapiens
caattggtccaagga

SEQ ID NO: 549480 - DNA, 15 bp, Homo sapiens
gcaattggtccaagg

SEQ ID NO: 549481 - DNA, 15 bp, Homo sapiens
agcaattggtccaag

SEQ ID NO: 549482 - DNA, 15 bp, Homo sapiens
cagcaattggtccaa

SEQ ID NO: 549483 - DNA, 15 bp, Homo sapiens
acagcaattggtcca

SEQ ID NO: 549484 - DNA, 15 bp, Homo sapiens
cacagcaattggtcc

SEQ ID NO: 549485 - DNA, 15 bp, Homo sapiens
ccacagcaattggtc

SEQ ID NO: 549486 - DNA, 15 bp, Homo sapiens
gccacagcaattggt

SEQ ID NO: 549487 - DNA, 15 bp, Homo sapiens
agccacagcaattgg

SEQ ID NO: 549488 - DNA, 15 bp, Homo sapiens
gagccacagcaattg

SEQ ID NO: 549489 - DNA, 15 bp, Homo sapiens
cgagccacagcaatt

SEQ ID NO: 549490 - DNA, 15 bp, Homo sapiens
tcgagccacagcaat

SEQ ID NO: 549491 - DNA, 15 bp, Homo sapiens
ctcgagccacagcaa

SEQ ID NO: 549492 - DNA, 15 bp, Homo sapiens
actcgagccacagca

SEQ ID NO: 549493 - DNA, 15 bp, Homo sapiens
tactcgagccacagc

SEQ ID NO: 549494 - DNA, 15 bp, Homo sapiens
ttactcgagccacag

SEQ ID NO: 549495 - DNA, 15 bp, Homo sapiens
attactcgagccaca

SEQ ID NO: 549496 - DNA, 15 bp, Homo sapiens
cattactcgagccac

SEQ ID NO: 549497 - DNA, 15 bp, Homo sapiens
ccattactcgagcca

SEQ ID NO: 549498 - DNA, 15 bp, Homo sapiens
tccattactcgagcc

SEQ ID NO: 549499 - DNA, 15 bp, Homo sapiens
gtccattactcgagc

SEQ ID NO: 549500 - DNA, 15 bp, Homo sapiens
agtccattactcgag

SEQ ID NO: 549501 - DNA, 15 bp, Homo sapiens
cagtccattactcga

SEQ ID NO: 549502 - DNA, 15 bp, Homo sapiens
gcagtccattactcg

SEQ ID NO: 549503 - DNA, 15 bp, Homo sapiens
agcagtccattactc

SEQ ID NO: 549504 - DNA, 15 bp, Homo sapiens
cagcagtccattact

SEQ ID NO: 549505 - DNA, 15 bp, Homo sapiens
acagcagtccattac

SEQ ID NO: 549506 - DNA, 15 bp, Homo sapiens
cacagcagtccatta

SEQ ID NO: 549507 - DNA, 15 bp, Homo sapiens
tcacagcagtccatt

SEQ ID NO: 549508 - DNA, 15 bp, Homo sapiens
atcacagcagtccat

SEQ ID NO: 549509 - DNA, 15 bp, Homo sapiens
aatcacagcagtcca

SEQ ID NO: 549510 - DNA, 15 bp, Homo sapiens
caatcacagcagtcc

SEQ ID NO: 549511 - DNA, 15 bp, Homo sapiens
ccaatcacagcagtc

SEQ ID NO: 549512 - DNA, 15 bp, Homo sapiens
accaatcacagcagt

SEQ ID NO: 549513 - DNA, 15 bp, Homo sapiens
gaccaatcacagcag

SEQ ID NO: 549514 - DNA, 15 bp, Homo sapiens
tgaccaatcacagca

SEQ ID NO: 549515 - DNA, 15 bp, Homo sapiens
ctgaccaatcacagc

SEQ ID NO: 549516 - DNA, 15 bp, Homo sapiens
gctgaccaatcacag

SEQ ID NO: 549517 - DNA, 15 bp, Homo sapiens
ggctgaccaatcaca

SEQ ID NO: 549518 - DNA, 15 bp, Homo sapiens
aggctgaccaatcac

SEQ ID NO: 549519 - DNA, 15 bp, Homo sapiens
aaggctgaccaatca

SEQ ID NO: 549520 - DNA, 15 bp, Homo sapiens
caaggctgaccaatc

SEQ ID NO: 549521 - DNA, 15 bp, Homo sapiens
ccaaggctgaccaat

SEQ ID NO: 549522 - DNA, 15 bp, Homo sapiens
cccaaggctgaccaa

SEQ ID NO: 549523 - DNA, 15 bp, Homo sapiens
acccaaggctgacca

SEQ ID NO: 549524 - DNA, 15 bp, Homo sapiens
gacccaaggctgacc

SEQ ID NO: 549525 - DNA, 15 bp, Homo sapiens
cgacccaaggctgac

SEQ ID NO: 549526 - DNA, 15 bp, Homo sapiens
gcgacccaaggctga

SEQ ID NO: 549527 - DNA, 15 bp, Homo sapiens
ggcgacccaaggctg

SEQ ID NO: 549528 - DNA, 15 bp, Homo sapiens
aggcgacccaaggct

SEQ ID NO: 549529 - DNA, 15 bp, Homo sapiens
caggcgacccaaggc

SEQ ID NO: 549530 - DNA, 15 bp, Homo sapiens
gcaggcgacccaagg

SEQ ID NO: 549531 - DNA, 15 bp, Homo sapiens
ggcaggcgacccaag

SEQ ID NO: 549532 - DNA, 15 bp, Homo sapiens
gggcaggcgacccaa

SEQ ID NO: 549533 - DNA, 15 bp, Homo sapiens
tgggcaggcgaccca

SEQ ID NO: 549534 - DNA, 15 bp, Homo sapiens
atgggcaggcgaccc

SEQ ID NO: 549535 - DNA, 15 bp, Homo sapiens
aatgggcaggcgacc

SEQ ID NO: 549536 - DNA, 15 bp, Homo sapiens
aaatgggcaggcgac

SEQ ID NO: 549537 - DNA, 15 bp, Homo sapiens
caaatgggcaggcga

SEQ ID NO: 549538 - DNA, 15 bp, Homo sapiens
ccaaatgggcaggcg

SEQ ID NO: 549539 - DNA, 15 bp, Homo sapiens
tccaaatgggcaggc

SEQ ID NO: 549540 - DNA, 15 bp, Homo sapiens
ctccaaatgggcagg

SEQ ID NO: 549541 - DNA, 15 bp, Homo sapiens
gctccaaatgggcag

SEQ ID NO: 549542 - DNA, 15 bp, Homo sapiens
ggctccaaatgggca

SEQ ID NO: 549543 - DNA, 15 bp, Homo sapiens
tggctccaaatgggc

SEQ ID NO: 549544 - DNA, 15 bp, Homo sapiens
ctggctccaaatggg

SEQ ID NO: 549545 - DNA, 15 bp, Homo sapiens
cctggctccaaatgg

SEQ ID NO: 549546 - DNA, 15 bp, Homo sapiens
ccctggctccaaatg

SEQ ID NO: 549547 - DNA, 15 bp, Homo sapiens
tccctggctccaaat

SEQ ID NO: 549548 - DNA, 15 bp, Homo sapiens
ctccctggctccaaa

SEQ ID NO: 549549 - DNA, 15 bp, Homo sapiens
cctccctggctccaa

SEQ ID NO: 549550 - DNA, 15 bp, Homo sapiens
ccctccctggctcca

SEQ ID NO: 549551 - DNA, 15 bp, Homo sapiens
tccctccctggctcc

SEQ ID NO: 549552 - DNA, 15 bp, Homo sapiens
ttccctccctggctc

SEQ ID NO: 549553 - DNA, 15 bp, Homo sapiens
cttccctccctggct

SEQ ID NO: 549554 - DNA, 15 bp, Homo sapiens
acttccctccctggc

SEQ ID NO: 549555 - DNA, 15 bp, Homo sapiens
tacttccctccctgg

SEQ ID NO: 549556 - DNA, 15 bp, Homo sapiens
ctacttccctccctg

SEQ ID NO: 549557 - DNA, 15 bp, Homo sapiens
actacttccctccct

SEQ ID NO: 549558 - DNA, 15 bp, Homo sapiens
aactacttccctccc

SEQ ID NO: 549559 - DNA, 15 bp, Homo sapiens
gaactacttccctcc

SEQ ID NO: 549560 - DNA, 15 bp, Homo sapiens
agaactacttccctc

SEQ ID NO: 549561 - DNA, 15 bp, Homo sapiens
aagaactacttccct

SEQ ID NO: 549562 - DNA, 15 bp, Homo sapiens
caagaactacttccc

SEQ ID NO: 549563 - DNA, 15 bp, Homo sapiens
gcaagaactacttcc

SEQ ID NO: 549564 - DNA, 15 bp, Homo sapiens
ggcaagaactacttc

SEQ ID NO: 549565 - DNA, 15 bp, Homo sapiens
gggcaagaactactt

SEQ ID NO: 549566 - DNA, 15 bp, Homo sapiens
tgggcaagaactact

SEQ ID NO: 549567 - DNA, 15 bp, Homo sapiens
gtgggcaagaactac

SEQ ID NO: 549568 - DNA, 15 bp, Homo sapiens
tgtgggcaagaacta

SEQ ID NO: 549569 - DNA, 15 bp, Homo sapiens
ctgtgggcaagaact

SEQ ID NO: 549570 - DNA, 15 bp, Homo sapiens
tctgtgggcaagaac

SEQ ID NO: 549571 - DNA, 15 bp, Homo sapiens
ctctgtgggcaagaa

SEQ ID NO: 549572 - DNA, 15 bp, Homo sapiens
tctctgtgggcaaga

SEQ ID NO: 549573 - DNA, 15 bp, Homo sapiens
gtctctgtgggcaag

SEQ ID NO: 549574 - DNA, 15 bp, Homo sapiens
agtctctgtgggcaa

SEQ ID NO: 549575 - DNA, 15 bp, Homo sapiens
gagtctctgtgggca

SEQ ID NO: 549576 - DNA, 15 bp, Homo sapiens
tgagtctctgtgggc

SEQ ID NO: 549577 - DNA, 15 bp, Homo sapiens
ctgagtctctgtggg

SEQ ID NO: 549578 - DNA, 15 bp, Homo sapiens
cctgagtctctgtgg

SEQ ID NO: 549579 - DNA, 15 bp, Homo sapiens
acctgagtctctgtg

SEQ ID NO: 549580 - DNA, 15 bp, Homo sapiens
tacctgagtctctgt

SEQ ID NO: 549581 - DNA, 15 bp, Homo sapiens
ctacctgagtctctg

SEQ ID NO: 549582 - DNA, 15 bp, Homo sapiens
cctacctgagtctct

SEQ ID NO: 549583 - DNA, 15 bp, Homo sapiens
tcctacctgagtctc

SEQ ID NO: 549584 - DNA, 15 bp, Homo sapiens
ctcctacctgagtct

SEQ ID NO: 549585 - DNA, 15 bp, Homo sapiens
actcctacctgagtc

SEQ ID NO: 549586 - DNA, 15 bp, Homo sapiens
tactcctacctgagt

SEQ ID NO: 549587 - DNA, 15 bp, Homo sapiens
ctactcctacctgag

SEQ ID NO: 549588 - DNA, 15 bp, Homo sapiens
cctactcctacctga

SEQ ID NO: 549589 - DNA, 15 bp, Homo sapiens
ccctactcctacctg

SEQ ID NO: 549590 - DNA, 15 bp, Homo sapiens
accctactcctacct

SEQ ID NO: 549591 - DNA, 15 bp, Homo sapiens
caccctactcctacc

SEQ ID NO: 549592 - DNA, 15 bp, Homo sapiens
ccaccctactcctac

SEQ ID NO: 549593 - DNA, 15 bp, Homo sapiens
accaccctactccta

SEQ ID NO: 549594 - DNA, 15 bp, Homo sapiens
aaccaccctactcct

SEQ ID NO: 549595 - DNA, 15 bp, Homo sapiens
gaaccaccctactcc

SEQ ID NO: 549596 - DNA, 15 bp, Homo sapiens
ggaaccaccctactc

SEQ ID NO: 549597 - DNA, 15 bp, Homo sapiens
gggaaccaccctact

SEQ ID NO: 549598 - DNA, 15 bp, Homo sapiens
tgggaaccaccctac

SEQ ID NO: 549599 - DNA, 15 bp, Homo sapiens
ttgggaaccacccta

SEQ ID NO: 549600 - DNA, 15 bp, Homo sapiens
tttgggaaccaccct

SEQ ID NO: 549601 - DNA, 15 bp, Homo sapiens
ttttgggaaccaccc

SEQ ID NO: 549602 - DNA, 15 bp, Homo sapiens
cttttgggaaccacc

SEQ ID NO: 549603 - DNA, 15 bp, Homo sapiens
ccttttgggaaccac

SEQ ID NO: 549604 - DNA, 15 bp, Homo sapiens
gccttttgggaacca

SEQ ID NO: 549605 - DNA, 15 bp, Homo sapiens
tgccttttgggaacc

SEQ ID NO: 549606 - DNA, 15 bp, Homo sapiens
ttgccttttgggaac

SEQ ID NO: 549607 - DNA, 15 bp, Homo sapiens
tttgccttttgggaa

SEQ ID NO: 549608 - DNA, 15 bp, Homo sapiens
ttttgccttttggga

SEQ ID NO: 549609 - DNA, 15 bp, Homo sapiens
tttttgccttttggg

SEQ ID NO: 549610 - DNA, 15 bp, Homo sapiens
ctttttgccttttgg

SEQ ID NO: 549611 - DNA, 15 bp, Homo sapiens
cctttttgccttttg

SEQ ID NO: 549612 - DNA, 15 bp, Homo sapiens
tcctttttgcctttt

SEQ ID NO: 549613 - DNA, 15 bp, Homo sapiens
ctcctttttgccttt

SEQ ID NO: 549614 - DNA, 15 bp, Homo sapiens
cctcctttttgcctt

SEQ ID NO: 549615 - DNA, 15 bp, Homo sapiens
ccctcctttttgcct

SEQ ID NO: 549616 - DNA, 15 bp, Homo sapiens
cccctcctttttgcc

SEQ ID NO: 549617 - DNA, 15 bp, Homo sapiens
gcccctcctttttgc

SEQ ID NO: 549618 - DNA, 15 bp, Homo sapiens
agcccctcctttttg

SEQ ID NO: 549619 - DNA, 15 bp, Homo sapiens
cagcccctccttttt

SEQ ID NO: 549620 - DNA, 15 bp, Homo sapiens
acagcccctcctttt

SEQ ID NO: 549621 - DNA, 15 bp, Homo sapiens
aacagcccctccttt

SEQ ID NO: 549622 - DNA, 15 bp, Homo sapiens
caacagcccctcctt

SEQ ID NO: 549623 - DNA, 15 bp, Homo sapiens
acaacagcccctcct

SEQ ID NO: 549624 - DNA, 15 bp, Homo sapiens
gacaacagcccctcc

SEQ ID NO: 549625 - DNA, 15 bp, Homo sapiens
cgacaacagcccctc

SEQ ID NO: 549626 - DNA, 15 bp, Homo sapiens
ccgacaacagcccct

SEQ ID NO: 549627 - DNA, 15 bp, Homo sapiens
cccgacaacagcccc

SEQ ID NO: 549628 - DNA, 15 bp, Homo sapiens
ccccgacaacagccc

SEQ ID NO: 549629 - DNA, 15 bp, Homo sapiens
cccccgacaacagcc

SEQ ID NO: 549630 - DNA, 15 bp, Homo sapiens
tcccccgacaacagc

SEQ ID NO: 549631 - DNA, 15 bp, Homo sapiens
ttcccccgacaacag

SEQ ID NO: 549632 - DNA, 15 bp, Homo sapiens
cttcccccgacaaca

SEQ ID NO: 549633 - DNA, 15 bp, Homo sapiens
tcttcccccgacaac

SEQ ID NO: 549634 - DNA, 15 bp, Homo sapiens
ctcttcccccgacaa

SEQ ID NO: 549635 - DNA, 15 bp, Homo sapiens
cctcttcccccgaca

SEQ ID NO: 549636 - DNA, 15 bp, Homo sapiens
gcctcttcccccgac

SEQ ID NO: 549637 - DNA, 15 bp, Homo sapiens
cgcctcttcccccga

SEQ ID NO: 549638 - DNA, 15 bp, Homo sapiens
ccgcctcttcccccg

SEQ ID NO: 549639 - DNA, 15 bp, Homo sapiens
gccgcctcttccccc

SEQ ID NO: 549640 - DNA, 15 bp, Homo sapiens
ggccgcctcttcccc

SEQ ID NO: 549641 - DNA, 15 bp, Homo sapiens
tggccgcctcttccc

SEQ ID NO: 549642 - DNA, 15 bp, Homo sapiens
atggccgcctcttcc

SEQ ID NO: 549643 - DNA, 15 bp, Homo sapiens
tatggccgcctcttc

SEQ ID NO: 549644 - DNA, 15 bp, Homo sapiens
ctatggccgcctctt

SEQ ID NO: 549645 - DNA, 15 bp, Homo sapiens
cctatggccgcctct

SEQ ID NO: 549646 - DNA, 15 bp, Homo sapiens
gcctatggccgcctc

SEQ ID NO: 549647 - DNA, 15 bp, Homo sapiens
tgcctatggccgcct

SEQ ID NO: 549648 - DNA, 15 bp, Homo sapiens
ctgcctatggccgcc

SEQ ID NO: 549649 - DNA, 15 bp, Homo sapiens
gctgcctatggccgc

SEQ ID NO: 549650 - DNA, 15 bp, Homo sapiens
tgctgcctatggccg

SEQ ID NO: 549651 - DNA, 15 bp, Homo sapiens
ttgctgcctatggcc

SEQ ID NO: 549652 - DNA, 15 bp, Homo sapiens
tttgctgcctatggc

SEQ ID NO: 549653 - DNA, 15 bp, Homo sapiens
ttttgctgcctatgg

SEQ ID NO: 549654 - DNA, 15 bp, Homo sapiens
tttttgctgcctatg

SEQ ID NO: 549655 - DNA, 15 bp, Homo sapiens
atttttgctgcctat

SEQ ID NO: 549656 - DNA, 15 bp, Homo sapiens
catttttgctgccta

SEQ ID NO: 549657 - DNA, 15 bp, Homo sapiens
ccatttttgctgcct

SEQ ID NO: 549658 - DNA, 15 bp, Homo sapiens
cccatttttgctgcc

SEQ ID NO: 549659 - DNA, 15 bp, Homo sapiens
ccccatttttgctgc

SEQ ID NO: 549660 - DNA, 15 bp, Homo sapiens
gccccatttttgctg

SEQ ID NO: 549661 - DNA, 15 bp, Homo sapiens
agccccatttttgct

SEQ ID NO: 549662 - DNA, 15 bp, Homo sapiens
cagccccatttttgc

SEQ ID NO: 549663 - DNA, 15 bp, Homo sapiens
tcagccccatttttg

SEQ ID NO: 549664 - DNA, 15 bp, Homo sapiens
ctcagccccattttt

SEQ ID NO: 549665 - DNA, 15 bp, Homo sapiens
gctcagccccatttt

SEQ ID NO: 549666 - DNA, 15 bp, Homo sapiens
ggctcagccccattt

SEQ ID NO: 549667 - DNA, 15 bp, Homo sapiens
gggctcagccccatt

SEQ ID NO: 549668 - DNA, 15 bp, Homo sapiens
ggggctcagccccat

SEQ ID NO: 549669 - DNA, 15 bp, Homo sapiens
aggggctcagcccca

SEQ ID NO: 549670 - DNA, 15 bp, Homo sapiens
aaggggctcagcccc

SEQ ID NO: 549671 - DNA, 15 bp, Homo sapiens
aaaggggctcagccc

SEQ ID NO: 549672 - DNA, 15 bp, Homo sapiens
caaaggggctcagcc

SEQ ID NO: 549673 - DNA, 15 bp, Homo sapiens
gcaaaggggctcagc

SEQ ID NO: 549674 - DNA, 15 bp, Homo sapiens
ggcaaaggggctcag

SEQ ID NO: 549675 - DNA, 15 bp, Homo sapiens
gggcaaaggggctca

SEQ ID NO: 549676 - DNA, 15 bp, Homo sapiens
tttcttaatgcattt

SEQ ID NO: 549677 - DNA, 15 bp, Homo sapiens
ttttcttaatgcatt

SEQ ID NO: 549678 - DNA, 15 bp, Homo sapiens
cttttcttaatgcat

SEQ ID NO: 549679 - DNA, 15 bp, Homo sapiens
acttttcttaatgca

SEQ ID NO: 549680 - DNA, 15 bp, Homo sapiens
cacttttcttaatgc

SEQ ID NO: 549681 - DNA, 15 bp, Homo sapiens
gcacttttcttaatg

SEQ ID NO: 549682 - DNA, 15 bp, Homo sapiens
tgcacttttcttaat

SEQ ID NO: 549683 - DNA, 15 bp, Homo sapiens
gtgcacttttcttaa

SEQ ID NO: 549684 - DNA, 15 bp, Homo sapiens
tgtgcacttttctta

SEQ ID NO: 549685 - DNA, 15 bp, Homo sapiens
ttgtgcacttttctt

SEQ ID NO: 549686 - DNA, 15 bp, Homo sapiens
attgtgcacttttct

SEQ ID NO: 549687 - DNA, 15 bp, Homo sapiens
aattgtgcacttttc

SEQ ID NO: 549688 - DNA, 15 bp, Homo sapiens
aaattgtgcactttt

SEQ ID NO: 549689 - DNA, 15 bp, Homo sapiens
gaaattgtgcacttt

SEQ ID NO: 549690 - DNA, 15 bp, Homo sapiens
cgaaattgtgcactt

SEQ ID NO: 549691 - DNA, 15 bp, Homo sapiens
ccgaaattgtgcact

SEQ ID NO: 549692 - DNA, 15 bp, Homo sapiens
accgaaattgtgcac

SEQ ID NO: 549693 - DNA, 15 bp, Homo sapiens
aaccgaaattgtgca

SEQ ID NO: 549694 - DNA, 15 bp, Homo sapiens
taaccgaaattgtgc

SEQ ID NO: 549695 - DNA, 15 bp, Homo sapiens
ctaaccgaaattgtg

SEQ ID NO: 549696 - DNA, 15 bp, Homo sapiens
tctaaccgaaattgt

SEQ ID NO: 549697 - DNA, 15 bp, Homo sapiens
ctctaaccgaaattg

SEQ ID NO: 549698 - DNA, 15 bp, Homo sapiens
cctctaaccgaaatt

SEQ ID NO: 549699 - DNA, 15 bp, Homo sapiens
acctctaaccgaaat

SEQ ID NO: 549700 - DNA, 15 bp, Homo sapiens
aacctctaaccgaaa

SEQ ID NO: 549701 - DNA, 15 bp, Homo sapiens
caacctctaaccgaa

SEQ ID NO: 549702 - DNA, 15 bp, Homo sapiens
tcaacctctaaccga

SEQ ID NO: 549703 - DNA, 15 bp, Homo sapiens
atcaacctctaaccg

SEQ ID NO: 549704 - DNA, 15 bp, Homo sapiens
catcaacctctaacc

SEQ ID NO: 549705 - DNA, 15 bp, Homo sapiens
ccatcaacctctaac

SEQ ID NO: 549706 - DNA, 15 bp, Homo sapiens
tccatcaacctctaa

SEQ ID NO: 549707 - DNA, 15 bp, Homo sapiens
atccatcaacctcta

SEQ ID NO: 549708 - DNA, 15 bp, Homo sapiens
aatccatcaacctct

SEQ ID NO: 549709 - DNA, 15 bp, Homo sapiens
aaatccatcaacctc

SEQ ID NO: 549710 - DNA, 15 bp, Homo sapiens
aaaatccatcaacct

SEQ ID NO: 549711 - DNA, 15 bp, Homo sapiens
gaaaatccatcaacc

SEQ ID NO: 549712 - DNA, 15 bp, Homo sapiens
tgaaaatccatcaac

SEQ ID NO: 549713 - DNA, 15 bp, Homo sapiens
gtgaaaatccatcaa

SEQ ID NO: 549714 - DNA, 15 bp, Homo sapiens
ggtgaaaatccatca

SEQ ID NO: 549715 - DNA, 15 bp, Homo sapiens
aggtgaaaatccatc

SEQ ID NO: 549716 - DNA, 15 bp, Homo sapiens
taggtgaaaatccat

SEQ ID NO: 549717 - DNA, 15 bp, Homo sapiens
ctaggtgaaaatcca

SEQ ID NO: 549718 - DNA, 15 bp, Homo sapiens
cctaggtgaaaatcc

SEQ ID NO: 549719 - DNA, 15 bp, Homo sapiens
acctaggtgaaaatc

SEQ ID NO: 549720 - DNA, 15 bp, Homo sapiens
tacctaggtgaaaat

SEQ ID NO: 549721 - DNA, 15 bp, Homo sapiens
atacctaggtgaaaa

SEQ ID NO: 549722 - DNA, 15 bp, Homo sapiens
catacctaggtgaaa

SEQ ID NO: 549723 - DNA, 15 bp, Homo sapiens
gcatacctaggtgaa

SEQ ID NO: 549724 - DNA, 15 bp, Homo sapiens
tgcatacctaggtga

SEQ ID NO: 549725 - DNA, 15 bp, Homo sapiens
gtgcatacctaggtg

SEQ ID NO: 549726 - DNA, 15 bp, Homo sapiens
cgtgcatacctaggt

SEQ ID NO: 549727 - DNA, 15 bp, Homo sapiens
gcgtgcatacctagg

SEQ ID NO: 549728 - DNA, 15 bp, Homo sapiens
agcgtgcatacctag

SEQ ID NO: 549729 - DNA, 15 bp, Homo sapiens
aagcgtgcataccta

SEQ ID NO: 549730 - DNA, 15 bp, Homo sapiens
caagcgtgcatacct

SEQ ID NO: 549731 - DNA, 15 bp, Homo sapiens
acaagcgtgcatacc

SEQ ID NO: 549732 - DNA, 15 bp, Homo sapiens
tacaagcgtgcatac

SEQ ID NO: 549733 - DNA, 15 bp, Homo sapiens
ttacaagcgtgcata

SEQ ID NO: 549734 - DNA, 15 bp, Homo sapiens
attacaagcgtgcat

SEQ ID NO: 549735 - DNA, 15 bp, Homo sapiens
cattacaagcgtgca

SEQ ID NO: 549736 - DNA, 15 bp, Homo sapiens
tcattacaagcgtgc

SEQ ID NO: 549737 - DNA, 15 bp, Homo sapiens
gtcattacaagcgtg

SEQ ID NO: 549738 - DNA, 15 bp, Homo sapiens
ggtcattacaagcgt

SEQ ID NO: 549739 - DNA, 15 bp, Homo sapiens
gggtcattacaagcg

SEQ ID NO: 549740 - DNA, 15 bp, Homo sapiens
ggggtcattacaagc

SEQ ID NO: 549741 - DNA, 15 bp, Homo sapiens
gggggtcattacaag

SEQ ID NO: 549742 - DNA, 15 bp, Homo sapiens
agggggtcattacaa

SEQ ID NO: 549743 - DNA, 15 bp, Homo sapiens
tagggggtcattaca

SEQ ID NO: 549744 - DNA, 15 bp, Homo sapiens
atagggggtcattac

SEQ ID NO: 549745 - DNA, 15 bp, Homo sapiens
tatagggggtcatta

SEQ ID NO: 549746 - DNA, 15 bp, Homo sapiens
gtatagggggtcatt

SEQ ID NO: 549747 - DNA, 15 bp, Homo sapiens
ggtatagggggtcat

SEQ ID NO: 549748 - DNA, 15 bp, Homo sapiens
tggtatagggggtca

SEQ ID NO: 549749 - DNA, 15 bp, Homo sapiens
ttggtatagggggtc

SEQ ID NO: 549750 - DNA, 15 bp, Homo sapiens
cttggtatagggggt

SEQ ID NO: 549751 - DNA, 15 bp, Homo sapiens
acttggtataggggg

SEQ ID NO: 549752 - DNA, 15 bp, Homo sapiens
cacttggtatagggg

SEQ ID NO: 549753 - DNA, 15 bp, Homo sapiens
acacttggtataggg

SEQ ID NO: 549754 - DNA, 15 bp, Homo sapiens
tacacttggtatagg

SEQ ID NO: 549755 - DNA, 15 bp, Homo sapiens
ttacacttggtatag

SEQ ID NO: 549756 - DNA, 15 bp, Homo sapiens
tttacacttggtata

SEQ ID NO: 549757 - DNA, 15 bp, Homo sapiens
gtttacacttggtat

SEQ ID NO: 549758 - DNA, 15 bp, Homo sapiens
cgtttacacttggta

SEQ ID NO: 549759 - DNA, 15 bp, Homo sapiens
gcgtttacacttggt

SEQ ID NO: 549760 - DNA, 15 bp, Homo sapiens
ggcgtttacacttgg

SEQ ID NO: 549761 - DNA, 15 bp, Homo sapiens
aggcgtttacacttg

SEQ ID NO: 549762 - DNA, 15 bp, Homo sapiens
gaggcgtttacactt

SEQ ID NO: 549763 - DNA, 15 bp, Homo sapiens
ggaggcgtttacact

SEQ ID NO: 549764 - DNA, 15 bp, Homo sapiens
gggaggcgtttacac

SEQ ID NO: 549765 - DNA, 15 bp, Homo sapiens
ggggaggcgtttaca

SEQ ID NO: 549766 - DNA, 15 bp, Homo sapiens
gggggaggcgtttac

SEQ ID NO: 549767 - DNA, 15 bp, Homo sapiens
cgggggaggcgttta

SEQ ID NO: 549768 - DNA, 15 bp, Homo sapiens
gcgggggaggcgttt

SEQ ID NO: 549769 - DNA, 15 bp, Homo sapiens
tgcgggggaggcgtt

SEQ ID NO: 549770 - DNA, 15 bp, Homo sapiens
gtgcgggggaggcgt

SEQ ID NO: 549771 - DNA, 15 bp, Homo sapiens
ggtgcgggggaggcg

SEQ ID NO: 549772 - DNA, 15 bp, Homo sapiens
gggtgcgggggaggc

SEQ ID NO: 549773 - DNA, 15 bp, Homo sapiens
ggggtgcgggggagg

SEQ ID NO: 549774 - DNA, 15 bp, Homo sapiens
aggggtgcgggggag

SEQ ID NO: 549775 - DNA, 15 bp, Homo sapiens
gaggggtgcggggga

SEQ ID NO: 549776 - DNA, 15 bp, Homo sapiens
ggaggggtgcggggg

SEQ ID NO: 549777 - DNA, 15 bp, Homo sapiens
gggaggggtgcgggg

SEQ ID NO: 549778 - DNA, 15 bp, Homo sapiens
agggaggggtgcggg

SEQ ID NO: 549779 - DNA, 15 bp, Homo sapiens
cagggaggggtgcgg

SEQ ID NO: 549780 - DNA, 15 bp, Homo sapiens
acagggaggggtgcg

SEQ ID NO: 549781 - DNA, 15 bp, Homo sapiens
gacagggaggggtgc

SEQ ID NO: 549782 - DNA, 15 bp, Homo sapiens
tgacagggaggggtg

SEQ ID NO: 549783 - DNA, 15 bp, Homo sapiens
ctgacagggaggggt

SEQ ID NO: 549784 - DNA, 15 bp, Homo sapiens
actgacagggagggg

SEQ ID NO: 549785 - DNA, 15 bp, Homo sapiens
tactgacagggaggg

SEQ ID NO: 549786 - DNA, 15 bp, Homo sapiens
atactgacagggagg

SEQ ID NO: 549787 - DNA, 15 bp, Homo sapiens
gatactgacagggag

SEQ ID NO: 549788 - DNA, 15 bp, Homo sapiens
ggatactgacaggga

SEQ ID NO: 549789 - DNA, 15 bp, Homo sapiens
tggatactgacaggg

SEQ ID NO: 549790 - DNA, 15 bp, Homo sapiens
gtggatactgacagg

SEQ ID NO: 549791 - DNA, 15 bp, Homo sapiens
ggtggatactgacag

SEQ ID NO: 549792 - DNA, 15 bp, Homo sapiens
gggtggatactgaca

SEQ ID NO: 549793 - DNA, 15 bp, Homo sapiens
ggggtggatactgac

SEQ ID NO: 549794 - DNA, 15 bp, Homo sapiens
aggggtggatactga

SEQ ID NO: 549795 - DNA, 15 bp, Homo sapiens
caggggtggatactg

SEQ ID NO: 549796 - DNA, 15 bp, Homo sapiens
tcaggggtggatact

SEQ ID NO: 549797 - DNA, 15 bp, Homo sapiens
ctcaggggtggatac

SEQ ID NO: 549798 - DNA, 15 bp, Homo sapiens
cctcaggggtggata

SEQ ID NO: 549799 - DNA, 15 bp, Homo sapiens
acctcaggggtggat

SEQ ID NO: 549800 - DNA, 15 bp, Homo sapiens
gacctcaggggtgga

SEQ ID NO: 549801 - DNA, 15 bp, Homo sapiens
ggacctcaggggtgg

SEQ ID NO: 549802 - DNA, 15 bp, Homo sapiens
aggacctcaggggtg

SEQ ID NO: 549803 - DNA, 15 bp, Homo sapiens
caggacctcaggggt

SEQ ID NO: 549804 - DNA, 15 bp, Homo sapiens
gcaggacctcagggg

SEQ ID NO: 549805 - DNA, 15 bp, Homo sapiens
agcaggacctcaggg

SEQ ID NO: 549806 - DNA, 15 bp, Homo sapiens
cagcaggacctcagg

SEQ ID NO: 549807 - DNA, 15 bp, Homo sapiens
gcagcaggacctcag

SEQ ID NO: 549808 - DNA, 15 bp, Homo sapiens
ggcagcaggacctca

SEQ ID NO: 549809 - DNA, 15 bp, Homo sapiens
gggcagcaggacctc

SEQ ID NO: 549810 - DNA, 15 bp, Homo sapiens
ggggcagcaggacct

SEQ ID NO: 549811 - DNA, 15 bp, Homo sapiens
gggggcagcaggacc

SEQ ID NO: 549812 - DNA, 15 bp, Homo sapiens
tgggggcagcaggac

SEQ ID NO: 549813 - DNA, 15 bp, Homo sapiens
gtgggggcagcagga

SEQ ID NO: 549814 - DNA, 15 bp, Homo sapiens
ggtgggggcagcagg

SEQ ID NO: 549815 - DNA, 15 bp, Homo sapiens
aggtgggggcagcag

SEQ ID NO: 549816 - DNA, 15 bp, Homo sapiens
gaggtgggggcagca

SEQ ID NO: 549817 - DNA, 15 bp, Homo sapiens
agaggtgggggcagc

SEQ ID NO: 549818 - DNA, 15 bp, Homo sapiens
tagaggtgggggcag

SEQ ID NO: 549819 - DNA, 15 bp, Homo sapiens
atagaggtgggggca

SEQ ID NO: 549820 - DNA, 15 bp, Homo sapiens
gatagaggtgggggc

SEQ ID NO: 549821 - DNA, 15 bp, Homo sapiens
ggatagaggtggggg

SEQ ID NO: 549822 - DNA, 15 bp, Homo sapiens
gggatagaggtgggg

SEQ ID NO: 549823 - DNA, 15 bp, Homo sapiens
ggggatagaggtggg

SEQ ID NO: 549824 - DNA, 15 bp, Homo sapiens
tggggatagaggtgg

SEQ ID NO: 549825 - DNA, 15 bp, Homo sapiens
atggggatagaggtg

SEQ ID NO: 549826 - DNA, 15 bp, Homo sapiens
catggggatagaggt

SEQ ID NO: 549827 - DNA, 15 bp, Homo sapiens
ccatggggatagagg

SEQ ID NO: 549828 - DNA, 15 bp, Homo sapiens
tccatggggatagag

SEQ ID NO: 549829 - DNA, 15 bp, Homo sapiens
atccatggggataga

SEQ ID NO: 549830 - DNA, 15 bp, Homo sapiens
aatccatggggatag

SEQ ID NO: 549831 - DNA, 15 bp, Homo sapiens
caatccatggggata

SEQ ID NO: 549832 - DNA, 15 bp, Homo sapiens
ccaatccatggggat

SEQ ID NO: 549833 - DNA, 15 bp, Homo sapiens
accaatccatgggga

SEQ ID NO: 549834 - DNA, 15 bp, Homo sapiens
aaccaatccatgggg

SEQ ID NO: 549835 - DNA, 15 bp, Homo sapiens
aaaccaatccatggg

SEQ ID NO: 549836 - DNA, 15 bp, Homo sapiens
aaaaccaatccatgg

SEQ ID NO: 549837 - DNA, 15 bp, Homo sapiens
caaaaccaatccatg

SEQ ID NO: 549838 - DNA, 15 bp, Homo sapiens
gcaaaaccaatccat

SEQ ID NO: 549839 - DNA, 15 bp, Homo sapiens
ggcaaaaccaatcca

SEQ ID NO: 549840 - DNA, 15 bp, Homo sapiens
tggcaaaaccaatcc

SEQ ID NO: 549841 - DNA, 15 bp, Homo sapiens
atggcaaaaccaatc

SEQ ID NO: 549842 - DNA, 15 bp, Homo sapiens
aatggcaaaaccaat

SEQ ID NO: 549843 - DNA, 15 bp, Homo sapiens
gaatggcaaaaccaa

SEQ ID NO: 549844 - DNA, 15 bp, Homo sapiens
ggaatggcaaaacca

SEQ ID NO: 549845 - DNA, 15 bp, Homo sapiens
gggaatggcaaaacc

SEQ ID NO: 549846 - DNA, 15 bp, Homo sapiens
ggggaatggcaaaac

SEQ ID NO: 549847 - DNA, 15 bp, Homo sapiens
cggggaatggcaaaa

SEQ ID NO: 549848 - DNA, 15 bp, Homo sapiens
ccggggaatggcaaa

SEQ ID NO: 549849 - DNA, 15 bp, Homo sapiens
cccggggaatggcaa

SEQ ID NO: 549850 - DNA, 15 bp, Homo sapiens
tcccggggaatggca

SEQ ID NO: 549851 - DNA, 15 bp, Homo sapiens
gtcccggggaatggc

SEQ ID NO: 549852 - DNA, 15 bp, Homo sapiens
cgtcccggggaatgg

SEQ ID NO: 549853 - DNA, 15 bp, Homo sapiens
acgtcccggggaatg

SEQ ID NO: 549854 - DNA, 15 bp, Homo sapiens
gacgtcccggggaat

SEQ ID NO: 549855 - DNA, 15 bp, Homo sapiens
tgacgtcccggggaa

SEQ ID NO: 549856 - DNA, 15 bp, Homo sapiens
gtgacgtcccgggga

SEQ ID NO: 549857 - DNA, 15 bp, Homo sapiens
agtgacgtcccgggg

SEQ ID NO: 549858 - DNA, 15 bp, Homo sapiens
aagtgacgtcccggg

SEQ ID NO: 549859 - DNA, 15 bp, Homo sapiens
taagtgacgtcccgg

SEQ ID NO: 549860 - DNA, 15 bp, Homo sapiens
ataagtgacgtcccg

SEQ ID NO: 549861 - DNA, 15 bp, Homo sapiens
tataagtgacgtccc

SEQ ID NO: 549862 - DNA, 15 bp, Homo sapiens
atataagtgacgtcc

SEQ ID NO: 549863 - DNA, 15 bp, Homo sapiens
catataagtgacgtc

SEQ ID NO: 549864 - DNA, 15 bp, Homo sapiens
ccatataagtgacgt

SEQ ID NO: 549865 - DNA, 15 bp, Homo sapiens
tccatataagtgacg

SEQ ID NO: 549866 - DNA, 15 bp, Homo sapiens
gtccatataagtgac

SEQ ID NO: 549867 - DNA, 15 bp, Homo sapiens
agtccatataagtga

SEQ ID NO: 549868 - DNA, 15 bp, Homo sapiens
gagtccatataagtg

SEQ ID NO: 549869 - DNA, 15 bp, Homo sapiens
tgagtccatataagt

SEQ ID NO: 549870 - DNA, 15 bp, Homo sapiens
atgagtccatataag

SEQ ID NO: 549871 - DNA, 15 bp, Homo sapiens
catgagtccatataa

SEQ ID NO: 549872 - DNA, 15 bp, Homo sapiens
gcatgagtccatata

SEQ ID NO: 549873 - DNA, 15 bp, Homo sapiens
tgcatgagtccatat

SEQ ID NO: 549874 - DNA, 15 bp, Homo sapiens
gtgcatgagtccata

SEQ ID NO: 549875 - DNA, 15 bp, Homo sapiens
cgtgcatgagtccat

SEQ ID NO: 549876 - DNA, 15 bp, Homo sapiens
acgtgcatgagtcca

SEQ ID NO: 549877 - DNA, 15 bp, Homo sapiens
cacgtgcatgagtcc

SEQ ID NO: 549878 - DNA, 15 bp, Homo sapiens
ccacgtgcatgagtc

SEQ ID NO: 549879 - DNA, 15 bp, Homo sapiens
accacgtgcatgagt

SEQ ID NO: 549880 - DNA, 15 bp, Homo sapiens
gaccacgtgcatgag

SEQ ID NO: 549881 - DNA, 15 bp, Homo sapiens
ggaccacgtgcatga

SEQ ID NO: 549882 - DNA, 15 bp, Homo sapiens
gggaccacgtgcatg

SEQ ID NO: 549883 - DNA, 15 bp, Homo sapiens
agggaccacgtgcat

SEQ ID NO: 549884 - DNA, 15 bp, Homo sapiens
cagggaccacgtgca

SEQ ID NO: 549885 - DNA, 15 bp, Homo sapiens
acagggaccacgtgc

SEQ ID NO: 549886 - DNA, 15 bp, Homo sapiens
cacagggaccacgtg

SEQ ID NO: 549887 - DNA, 15 bp, Homo sapiens
acacagggaccacgt

SEQ ID NO: 549888 - DNA, 15 bp, Homo sapiens
cacacagggaccacg

SEQ ID NO: 549889 - DNA, 15 bp, Homo sapiens
acacacagggaccac

SEQ ID NO: 549890 - DNA, 15 bp, Homo sapiens
cacacacagggacca

SEQ ID NO: 549891 - DNA, 15 bp, Homo sapiens
tcacacacagggacc

SEQ ID NO: 549892 - DNA, 15 bp, Homo sapiens
atcacacacagggac

SEQ ID NO: 549893 - DNA, 15 bp, Homo sapiens
aatcacacacaggga

SEQ ID NO: 549894 - DNA, 15 bp, Homo sapiens
aaatcacacacaggg

SEQ ID NO: 549895 - DNA, 15 bp, Homo sapiens
taaatcacacacagg

SEQ ID NO: 549896 - DNA, 15 bp, Homo sapiens
gtaaatcacacacag

SEQ ID NO: 549897 - DNA, 15 bp, Homo sapiens
ggtaaatcacacaca

SEQ ID NO: 549898 - DNA, 15 bp, Homo sapiens
gggtaaatcacacac

SEQ ID NO: 549899 - DNA, 15 bp, Homo sapiens
agggtaaatcacaca

SEQ ID NO: 549900 - DNA, 15 bp, Homo sapiens
cagggtaaatcacac

SEQ ID NO: 549901 - DNA, 15 bp, Homo sapiens
acagggtaaatcaca

SEQ ID NO: 549902 - DNA, 15 bp, Homo sapiens
gacagggtaaatcac

SEQ ID NO: 549903 - DNA, 15 bp, Homo sapiens
tgacagggtaaatca

SEQ ID NO: 549904 - DNA, 15 bp, Homo sapiens
atgacagggtaaatc

SEQ ID NO: 549905 - DNA, 15 bp, Homo sapiens
aatgacagggtaaat

SEQ ID NO: 549906 - DNA, 15 bp, Homo sapiens
caatgacagggtaaa

SEQ ID NO: 549907 - DNA, 15 bp, Homo sapiens
acaatgacagggtaa

SEQ ID NO: 549908 - DNA, 15 bp, Homo sapiens
cacaatgacagggta

SEQ ID NO: 549909 - DNA, 15 bp, Homo sapiens
acacaatgacagggt

SEQ ID NO: 549910 - DNA, 15 bp, Homo sapiens
cacacaatgacaggg

SEQ ID NO: 549911 - DNA, 15 bp, Homo sapiens
acacacaatgacagg

SEQ ID NO: 549912 - DNA, 15 bp, Homo sapiens
gacacacaatgacag

SEQ ID NO: 549913 - DNA, 15 bp, Homo sapiens
agacacacaatgaca

SEQ ID NO: 549914 - DNA, 15 bp, Homo sapiens
gagacacacaatgac

SEQ ID NO: 549915 - DNA, 15 bp, Homo sapiens
tgagacacacaatga

SEQ ID NO: 549916 - DNA, 15 bp, Homo sapiens
ttgagacacacaatg

SEQ ID NO: 549917 - DNA, 15 bp, Homo sapiens
attgagacacacaat

SEQ ID NO: 549918 - DNA, 15 bp, Homo sapiens
aattgagacacacaa

SEQ ID NO: 549919 - DNA, 15 bp, Homo sapiens
caattgagacacaca

SEQ ID NO: 549920 - DNA, 15 bp, Homo sapiens
ccaattgagacacac

SEQ ID NO: 549921 - DNA, 15 bp, Homo sapiens
accaattgagacaca

SEQ ID NO: 549922 - DNA, 15 bp, Homo sapiens
gaccaattgagacac

SEQ ID NO: 549923 - DNA, 15 bp, Homo sapiens
tgaccaattgagaca

SEQ ID NO: 549924 - DNA, 15 bp, Homo sapiens
atgaccaattgagac

SEQ ID NO: 549925 - DNA, 15 bp, Homo sapiens
aatgaccaattgaga

SEQ ID NO: 549926 - DNA, 15 bp, Homo sapiens
gaatgaccaattgag

SEQ ID NO: 549927 - DNA, 15 bp, Homo sapiens
ggaatgaccaattga

SEQ ID NO: 549928 - DNA, 15 bp, Homo sapiens
gggaatgaccaattg

SEQ ID NO: 549929 - DNA, 15 bp, Homo sapiens
agggaatgaccaatt

SEQ ID NO: 549930 - DNA, 15 bp, Homo sapiens
aagggaatgaccaat

SEQ ID NO: 549931 - DNA, 15 bp, Homo sapiens
aaagggaatgaccaa

SEQ ID NO: 549932 - DNA, 15 bp, Homo sapiens
aaaagggaatgacca

SEQ ID NO: 549933 - DNA, 15 bp, Homo sapiens
caaaagggaatgacc

SEQ ID NO: 549934 - DNA, 15 bp, Homo sapiens
acaaaagggaatgac

SEQ ID NO: 549935 - DNA, 15 bp, Homo sapiens
gacaaaagggaatga

SEQ ID NO: 549936 - DNA, 15 bp, Homo sapiens
agacaaaagggaatg

SEQ ID NO: 549937 - DNA, 15 bp, Homo sapiens
gagacaaaagggaat

SEQ ID NO: 549938 - DNA, 15 bp, Homo sapiens
agagacaaaagggaa

SEQ ID NO: 549939 - DNA, 15 bp, Homo sapiens
cagagacaaaaggga

SEQ ID NO: 549940 - DNA, 15 bp, Homo sapiens
ccagagacaaaaggg

SEQ ID NO: 549941 - DNA, 15 bp, Homo sapiens
cccagagacaaaagg

SEQ ID NO: 549942 - DNA, 15 bp, Homo sapiens
acccagagacaaaag

SEQ ID NO: 549943 - DNA, 15 bp, Homo sapiens
tacccagagacaaaa

SEQ ID NO: 549944 - DNA, 15 bp, Homo sapiens
ctacccagagacaaa

SEQ ID NO: 549945 - DNA, 15 bp, Homo sapiens
gctacccagagacaa

SEQ ID NO: 549946 - DNA, 15 bp, Homo sapiens
tgctacccagagaca

SEQ ID NO: 549947 - DNA, 15 bp, Homo sapiens
atgctacccagagac

SEQ ID NO: 549948 - DNA, 15 bp, Homo sapiens
aatgctacccagaga

SEQ ID NO: 549949 - DNA, 15 bp, Homo sapiens
gaatgctacccagag

SEQ ID NO: 549950 - DNA, 15 bp, Homo sapiens
ggaatgctacccaga

SEQ ID NO: 549951 - DNA, 15 bp, Homo sapiens
tggaatgctacccag

SEQ ID NO: 549952 - DNA, 15 bp, Homo sapiens
atggaatgctaccca

SEQ ID NO: 549953 - DNA, 15 bp, Homo sapiens
catggaatgctaccc

SEQ ID NO: 549954 - DNA, 15 bp, Homo sapiens
ccatggaatgctacc

SEQ ID NO: 549955 - DNA, 15 bp, Homo sapiens
accatggaatgctac

SEQ ID NO: 549956 - DNA, 15 bp, Homo sapiens
taccatggaatgcta

SEQ ID NO: 549957 - DNA, 15 bp, Homo sapiens
ataccatggaatgct

SEQ ID NO: 549958 - DNA, 15 bp, Homo sapiens
cataccatggaatgc

SEQ ID NO: 549959 - DNA, 15 bp, Homo sapiens
tcataccatggaatg

SEQ ID NO: 549960 - DNA, 15 bp, Homo sapiens
ctcataccatggaat

SEQ ID NO: 549961 - DNA, 15 bp, Homo sapiens
actcataccatggaa

SEQ ID NO: 549962 - DNA, 15 bp, Homo sapiens
cactcataccatgga

SEQ ID NO: 549963 - DNA, 15 bp, Homo sapiens
acactcataccatgg

SEQ ID NO: 549964 - DNA, 15 bp, Homo sapiens
cacactcataccatg

SEQ ID NO: 549965 - DNA, 15 bp, Homo sapiens
acacactcataccat

SEQ ID NO: 549966 - DNA, 15 bp, Homo sapiens
gacacactcatacca

SEQ ID NO: 549967 - DNA, 15 bp, Homo sapiens
ggacacactcatacc

SEQ ID NO: 549968 - DNA, 15 bp, Homo sapiens
gggacacactcatac

SEQ ID NO: 549969 - DNA, 15 bp, Homo sapiens
ggggacacactcata

SEQ ID NO: 549970 - DNA, 15 bp, Homo sapiens
tggggacacactcat

SEQ ID NO: 549971 - DNA, 15 bp, Homo sapiens
atggggacacactca

SEQ ID NO: 549972 - DNA, 15 bp, Homo sapiens
aatggggacacactc

SEQ ID NO: 549973 - DNA, 15 bp, Homo sapiens
aaatggggacacact

SEQ ID NO: 549974 - DNA, 15 bp, Homo sapiens
caaatggggacacac

SEQ ID NO: 549975 - DNA, 15 bp, Homo sapiens
acaaatggggacaca

SEQ ID NO: 549976 - DNA, 15 bp, Homo sapiens
gacaaatggggacac

SEQ ID NO: 549977 - DNA, 15 bp, Homo sapiens
tgacaaatggggaca

SEQ ID NO: 549978 - DNA, 15 bp, Homo sapiens
atgacaaatggggac

SEQ ID NO: 549979 - DNA, 15 bp, Homo sapiens
catgacaaatgggga

SEQ ID NO: 549980 - DNA, 15 bp, Homo sapiens
gcatgacaaatgggg

SEQ ID NO: 549981 - DNA, 15 bp, Homo sapiens
tgcatgacaaatggg

SEQ ID NO: 549982 - DNA, 15 bp, Homo sapiens
atgcatgacaaatgg

SEQ ID NO: 549983 - DNA, 15 bp, Homo sapiens
aatgcatgacaaatg

SEQ ID NO: 549984 - DNA, 15 bp, Homo sapiens
gaatgcatgacaaat

SEQ ID NO: 549985 - DNA, 15 bp, Homo sapiens
tgaatgcatgacaaa

SEQ ID NO: 549986 - DNA, 15 bp, Homo sapiens
gtgaatgcatgacaa

SEQ ID NO: 549987 - DNA, 15 bp, Homo sapiens
agtgaatgcatgaca

SEQ ID NO: 549988 - DNA, 15 bp, Homo sapiens
aagtgaatgcatgac

SEQ ID NO: 549989 - DNA, 15 bp, Homo sapiens
caagtgaatgcatga

SEQ ID NO: 549990 - DNA, 15 bp, Homo sapiens
gcaagtgaatgcatg

SEQ ID NO: 549991 - DNA, 15 bp, Homo sapiens
agcaagtgaatgcat

SEQ ID NO: 549992 - DNA, 15 bp, Homo sapiens
aagcaagtgaatgca

SEQ ID NO: 549993 - DNA, 15 bp, Homo sapiens
caagcaagtgaatgc

SEQ ID NO: 549994 - DNA, 15 bp, Homo sapiens
acaagcaagtgaatg

SEQ ID NO: 549995 - DNA, 15 bp, Homo sapiens
tacaagcaagtgaat

SEQ ID NO: 549996 - DNA, 15 bp, Homo sapiens
ctacaagcaagtgaa

SEQ ID NO: 549997 - DNA, 15 bp, Homo sapiens
tctacaagcaagtga

SEQ ID NO: 549998 - DNA, 15 bp, Homo sapiens
gtctacaagcaagtg

SEQ ID NO: 549999 - DNA, 15 bp, Homo sapiens
tgtctacaagcaagt

SEQ ID NO: 550000 - DNA, 15 bp, Homo sapiens
atgtctacaagcaag

SEQ ID NO: 550001 - DNA, 15 bp, Homo sapiens
aatgtctacaagcaa

SEQ ID NO: 550002 - DNA, 15 bp, Homo sapiens
aaatgtctacaagca

SEQ ID NO: 550003 - DNA, 15 bp, Homo sapiens
caaatgtctacaagc

SEQ ID NO: 550004 - DNA, 15 bp, Homo sapiens
acaaatgtctacaag

SEQ ID NO: 550005 - DNA, 15 bp, Homo sapiens
cacaaatgtctacaa

SEQ ID NO: 550006 - DNA, 15 bp, Homo sapiens
acacaaatgtctaca

SEQ ID NO: 550007 - DNA, 15 bp, Homo sapiens
aacacaaatgtctac

SEQ ID NO: 550008 - DNA, 15 bp, Homo sapiens
caacacaaatgtcta

SEQ ID NO: 550009 - DNA, 15 bp, Homo sapiens
acaacacaaatgtct

SEQ ID NO: 550010 - DNA, 15 bp, Homo sapiens
aacaacacaaatgtc

SEQ ID NO: 550011 - DNA, 15 bp, Homo sapiens
aaacaacacaaatgt

SEQ ID NO: 550012 - DNA, 15 bp, Homo sapiens
gaaacaacacaaatg

SEQ ID NO: 550013 - DNA, 15 bp, Homo sapiens
ggaaacaacacaaat

SEQ ID NO: 550014 - DNA, 15 bp, Homo sapiens
tggaaacaacacaaa

SEQ ID NO: 550015 - DNA, 15 bp, Homo sapiens
ctggaaacaacacaa

SEQ ID NO: 550016 - DNA, 15 bp, Homo sapiens
actggaaacaacaca

SEQ ID NO: 550017 - DNA, 15 bp, Homo sapiens
aactggaaacaacac

SEQ ID NO: 550018 - DNA, 15 bp, Homo sapiens
aaactggaaacaaca

SEQ ID NO: 550019 - DNA, 15 bp, Homo sapiens
aaaactggaaacaac

SEQ ID NO: 550020 - DNA, 15 bp, Homo sapiens
caaaactggaaacaa

SEQ ID NO: 550021 - DNA, 15 bp, Homo sapiens
ccaaaactggaaaca

SEQ ID NO: 550022 - DNA, 15 bp, Homo sapiens
cccaaaactggaaac

SEQ ID NO: 550023 - DNA, 15 bp, Homo sapiens
gcccaaaactggaaa

SEQ ID NO: 550024 - DNA, 15 bp, Homo sapiens
agcccaaaactggaa

SEQ ID NO: 550025 - DNA, 15 bp, Homo sapiens
cagcccaaaactgga

SEQ ID NO: 550026 - DNA, 15 bp, Homo sapiens
acagcccaaaactgg

SEQ ID NO: 550027 - DNA, 15 bp, Homo sapiens
aacagcccaaaactg

SEQ ID NO: 550028 - DNA, 15 bp, Homo sapiens
taacagcccaaaact

SEQ ID NO: 550029 - DNA, 15 bp, Homo sapiens
ataacagcccaaaac

SEQ ID NO: 550030 - DNA, 15 bp, Homo sapiens
cataacagcccaaaa

SEQ ID NO: 550031 - DNA, 15 bp, Homo sapiens
ccataacagcccaaa

SEQ ID NO: 550032 - DNA, 15 bp, Homo sapiens
cccataacagcccaa

SEQ ID NO: 550033 - DNA, 15 bp, Homo sapiens
acccataacagccca

SEQ ID NO: 550034 - DNA, 15 bp, Homo sapiens
tacccataacagccc

SEQ ID NO: 550035 - DNA, 15 bp, Homo sapiens
gtacccataacagcc

SEQ ID NO: 550036 - DNA, 15 bp, Homo sapiens
cgtacccataacagc

SEQ ID NO: 550037 - DNA, 15 bp, Homo sapiens
ccgtacccataacag

SEQ ID NO: 550038 - DNA, 15 bp, Homo sapiens
gccgtacccataaca

SEQ ID NO: 550039 - DNA, 15 bp, Homo sapiens
agccgtacccataac

SEQ ID NO: 550040 - DNA, 15 bp, Homo sapiens
cagccgtacccataa

SEQ ID NO: 550041 - DNA, 15 bp, Homo sapiens
gcagccgtacccata

SEQ ID NO: 550042 - DNA, 15 bp, Homo sapiens
agcagccgtacccat

SEQ ID NO: 550043 - DNA, 15 bp, Homo sapiens
tagcagccgtaccca

SEQ ID NO: 550044 - DNA, 15 bp, Homo sapiens
atagcagccgtaccc

SEQ ID NO: 550045 - DNA, 15 bp, Homo sapiens
catagcagccgtacc

SEQ ID NO: 550046 - DNA, 15 bp, Homo sapiens
tcatagcagccgtac

SEQ ID NO: 550047 - DNA, 15 bp, Homo sapiens
ctcatagcagccgta

SEQ ID NO: 550048 - DNA, 15 bp, Homo sapiens
gctcatagcagccgt

SEQ ID NO: 550049 - DNA, 15 bp, Homo sapiens
tgctcatagcagccg

SEQ ID NO: 550050 - DNA, 15 bp, Homo sapiens
atgctcatagcagcc

SEQ ID NO: 550051 - DNA, 15 bp, Homo sapiens
aatgctcatagcagc

SEQ ID NO: 550052 - DNA, 15 bp, Homo sapiens
aaatgctcatagcag

SEQ ID NO: 550053 - DNA, 15 bp, Homo sapiens
caaatgctcatagca

SEQ ID NO: 550054 - DNA, 15 bp, Homo sapiens
acaaatgctcatagc

SEQ ID NO: 550055 - DNA, 15 bp, Homo sapiens
cacaaatgctcatag

SEQ ID NO: 550056 - DNA, 15 bp, Homo sapiens
ccacaaatgctcata

SEQ ID NO: 550057 - DNA, 15 bp, Homo sapiens
tccacaaatgctcat

SEQ ID NO: 550058 - DNA, 15 bp, Homo sapiens
atccacaaatgctca

SEQ ID NO: 550059 - DNA, 15 bp, Homo sapiens
tatccacaaatgctc

SEQ ID NO: 550060 - DNA, 15 bp, Homo sapiens
ttatccacaaatgct

SEQ ID NO: 550061 - DNA, 15 bp, Homo sapiens
attatccacaaatgc

SEQ ID NO: 550062 - DNA, 15 bp, Homo sapiens
gattatccacaaatg

SEQ ID NO: 550063 - DNA, 15 bp, Homo sapiens
agattatccacaaat

SEQ ID NO: 550064 - DNA, 15 bp, Homo sapiens
aagattatccacaaa

SEQ ID NO: 550065 - DNA, 15 bp, Homo sapiens
aaagattatccacaa

SEQ ID NO: 550066 - DNA, 15 bp, Homo sapiens
caaagattatccaca

SEQ ID NO: 550067 - DNA, 15 bp, Homo sapiens
acaaagattatccac

SEQ ID NO: 550068 - DNA, 15 bp, Homo sapiens
cacaaagattatcca

SEQ ID NO: 550069 - DNA, 15 bp, Homo sapiens
acacaaagattatcc

SEQ ID NO: 550070 - DNA, 15 bp, Homo sapiens
cacacaaagattatc

SEQ ID NO: 550071 - DNA, 15 bp, Homo sapiens
ccacacaaagattat

SEQ ID NO: 550072 - DNA, 15 bp, Homo sapiens
cccacacaaagatta

SEQ ID NO: 550073 - DNA, 15 bp, Homo sapiens
acccacacaaagatt

SEQ ID NO: 550074 - DNA, 15 bp, Homo sapiens
cacccacacaaagat

SEQ ID NO: 550075 - DNA, 15 bp, Homo sapiens
gcacccacacaaaga

SEQ ID NO: 550076 - DNA, 15 bp, Homo sapiens
tgcacccacacaaag

SEQ ID NO: 550077 - DNA, 15 bp, Homo sapiens
atgcacccacacaaa

SEQ ID NO: 550078 - DNA, 15 bp, Homo sapiens
catgcacccacacaa

SEQ ID NO: 550079 - DNA, 15 bp, Homo sapiens
gcatgcacccacaca

SEQ ID NO: 550080 - DNA, 15 bp, Homo sapiens
agcatgcacccacac

SEQ ID NO: 550081 - DNA, 15 bp, Homo sapiens
aagcatgcacccaca

SEQ ID NO: 550082 - DNA, 15 bp, Homo sapiens
aaagcatgcacccac

SEQ ID NO: 550083 - DNA, 15 bp, Homo sapiens
gaaagcatgcaccca

SEQ ID NO: 550084 - DNA, 15 bp, Homo sapiens
tgaaagcatgcaccc

SEQ ID NO: 550085 - DNA, 15 bp, Homo sapiens
atgaaagcatgcacc

SEQ ID NO: 550086 - DNA, 15 bp, Homo sapiens
aatgaaagcatgcac

SEQ ID NO: 550087 - DNA, 15 bp, Homo sapiens
aaatgaaagcatgca

SEQ ID NO: 550088 - DNA, 15 bp, Homo sapiens
aaaatgaaagcatgc

SEQ ID NO: 550089 - DNA, 15 bp, Homo sapiens
aaaaatgaaagcatg

SEQ ID NO: 550090 - DNA, 15 bp, Homo sapiens
gaaaaatgaaagcat

SEQ ID NO: 550091 - DNA, 15 bp, Homo sapiens
agaaaaatgaaagca

SEQ ID NO: 550092 - DNA, 15 bp, Homo sapiens
cagaaaaatgaaagc

SEQ ID NO: 550093 - DNA, 15 bp, Homo sapiens
ccagaaaaatgaaag

SEQ ID NO: 550094 - DNA, 15 bp, Homo sapiens
cccagaaaaatgaaa

SEQ ID NO: 550095 - DNA, 15 bp, Homo sapiens
tcccagaaaaatgaa

SEQ ID NO: 550096 - DNA, 15 bp, Homo sapiens
gtcccagaaaaatga

SEQ ID NO: 550097 - DNA, 15 bp, Homo sapiens
tgtcccagaaaaatg

SEQ ID NO: 550098 - DNA, 15 bp, Homo sapiens
ttgtcccagaaaaat

SEQ ID NO: 550099 - DNA, 15 bp, Homo sapiens
tttgtcccagaaaaa

SEQ ID NO: 550100 - DNA, 15 bp, Homo sapiens
atttgtcccagaaaa

SEQ ID NO: 550101 - DNA, 15 bp, Homo sapiens
tatttgtcccagaaa

SEQ ID NO: 550102 - DNA, 15 bp, Homo sapiens
gtatttgtcccagaa

SEQ ID NO: 550103 - DNA, 15 bp, Homo sapiens
agtatttgtcccaga

SEQ ID NO: 550104 - DNA, 15 bp, Homo sapiens
cagtatttgtcccag

SEQ ID NO: 550105 - DNA, 15 bp, Homo sapiens
ccagtatttgtccca

SEQ ID NO: 550106 - DNA, 15 bp, Homo sapiens
cccagtatttgtccc

SEQ ID NO: 550107 - DNA, 15 bp, Homo sapiens
ccccagtatttgtcc

SEQ ID NO: 550108 - DNA, 15 bp, Homo sapiens
cccccagtatttgtc

SEQ ID NO: 550109 - DNA, 15 bp, Homo sapiens
acccccagtatttgt

SEQ ID NO: 550110 - DNA, 15 bp, Homo sapiens
cacccccagtatttg

SEQ ID NO: 550111 - DNA, 15 bp, Homo sapiens
ccacccccagtattt

SEQ ID NO: 550112 - DNA, 15 bp, Homo sapiens
cccacccccagtatt

SEQ ID NO: 550113 - DNA, 15 bp, Homo sapiens
tcccacccccagtat

SEQ ID NO: 550114 - DNA, 15 bp, Homo sapiens
atcccacccccagta

SEQ ID NO: 550115 - DNA, 15 bp, Homo sapiens
aatcccacccccagt

SEQ ID NO: 550116 - DNA, 15 bp, Homo sapiens
caatcccacccccag

SEQ ID NO: 550117 - DNA, 15 bp, Homo sapiens
gcaatcccaccccca

SEQ ID NO: 550118 - DNA, 15 bp, Homo sapiens
agcaatcccaccccc

SEQ ID NO: 550119 - DNA, 15 bp, Homo sapiens
tagcaatcccacccc

SEQ ID NO: 550120 - DNA, 15 bp, Homo sapiens
atagcaatcccaccc

SEQ ID NO: 550121 - DNA, 15 bp, Homo sapiens
tatagcaatcccacc

SEQ ID NO: 550122 - DNA, 15 bp, Homo sapiens
atatagcaatcccac

SEQ ID NO: 550123 - DNA, 15 bp, Homo sapiens
aatatagcaatccca

SEQ ID NO: 550124 - DNA, 15 bp, Homo sapiens
caatatagcaatccc

SEQ ID NO: 550125 - DNA, 15 bp, Homo sapiens
acaatatagcaatcc

SEQ ID NO: 550126 - DNA, 15 bp, Homo sapiens
tacaatatagcaatc

SEQ ID NO: 550127 - DNA, 15 bp, Homo sapiens
ctacaatatagcaat

SEQ ID NO: 550128 - DNA, 15 bp, Homo sapiens
cctacaatatagcaa

SEQ ID NO: 550129 - DNA, 15 bp, Homo sapiens
ccctacaatatagca

SEQ ID NO: 550130 - DNA, 15 bp, Homo sapiens
accctacaatatagc

SEQ ID NO: 550131 - DNA, 15 bp, Homo sapiens
caccctacaatatag

SEQ ID NO: 550132 - DNA, 15 bp, Homo sapiens
tcaccctacaatata

SEQ ID NO: 550133 - DNA, 15 bp, Homo sapiens
ttcaccctacaatat

SEQ ID NO: 550134 - DNA, 15 bp, Homo sapiens
gttcaccctacaata

SEQ ID NO: 550135 - DNA, 15 bp, Homo sapiens
cgttcaccctacaat

SEQ ID NO: 550136 - DNA, 15 bp, Homo sapiens
acgttcaccctacaa

SEQ ID NO: 550137 - DNA, 15 bp, Homo sapiens
gacgttcaccctaca

SEQ ID NO: 550138 - DNA, 15 bp, Homo sapiens
ggacgttcaccctac

SEQ ID NO: 550139 - DNA, 15 bp, Homo sapiens
tggacgttcacccta

SEQ ID NO: 550140 - DNA, 15 bp, Homo sapiens
ctggacgttcaccct

SEQ ID NO: 550141 - DNA, 15 bp, Homo sapiens
gctggacgttcaccc

SEQ ID NO: 550142 - DNA, 15 bp, Homo sapiens
agctggacgttcacc

SEQ ID NO: 550143 - DNA, 15 bp, Homo sapiens
aagctggacgttcac

SEQ ID NO: 550144 - DNA, 15 bp, Homo sapiens
aaagctggacgttca

SEQ ID NO: 550145 - DNA, 15 bp, Homo sapiens
caaagctggacgttc

SEQ ID NO: 550146 - DNA, 15 bp, Homo sapiens
ccaaagctggacgtt

SEQ ID NO: 550147 - DNA, 15 bp, Homo sapiens
accaaagctggacgt

SEQ ID NO: 550148 - DNA, 15 bp, Homo sapiens
taccaaagctggacg

SEQ ID NO: 550149 - DNA, 15 bp, Homo sapiens
ctaccaaagctggac

SEQ ID NO: 550150 - DNA, 15 bp, Homo sapiens
tctaccaaagctgga

SEQ ID NO: 550151 - DNA, 15 bp, Homo sapiens
ttctaccaaagctgg

SEQ ID NO: 550152 - DNA, 15 bp, Homo sapiens
tttctaccaaagctg

SEQ ID NO: 550153 - DNA, 15 bp, Homo sapiens
ttttctaccaaagct

SEQ ID NO: 550154 - DNA, 15 bp, Homo sapiens
tttttctaccaaagc

SEQ ID NO: 550155 - DNA, 15 bp, Homo sapiens
ctttttctaccaaag

SEQ ID NO: 550156 - DNA, 15 bp, Homo sapiens
actttttctaccaaa

SEQ ID NO: 550157 - DNA, 15 bp, Homo sapiens
tactttttctaccaa

SEQ ID NO: 550158 - DNA, 15 bp, Homo sapiens
atactttttctacca

SEQ ID NO: 550159 - DNA, 15 bp, Homo sapiens
tatactttttctacc

SEQ ID NO: 550160 - DNA, 15 bp, Homo sapiens
atatactttttctac

SEQ ID NO: 550161 - DNA, 15 bp, Homo sapiens
aatatactttttcta

SEQ ID NO: 550162 - DNA, 15 bp, Homo sapiens
gaatatactttttct

SEQ ID NO: 550163 - DNA, 15 bp, Homo sapiens
ggaatatactttttc

SEQ ID NO: 550164 - DNA, 15 bp, Homo sapiens
tggaatatacttttt

SEQ ID NO: 550165 - DNA, 15 bp, Homo sapiens
gtggaatatactttt

SEQ ID NO: 550166 - DNA, 15 bp, Homo sapiens
tgtggaatatacttt

SEQ ID NO: 550167 - DNA, 15 bp, Homo sapiens
ctgtggaatatactt

SEQ ID NO: 550168 - DNA, 15 bp, Homo sapiens
actgtggaatatact

SEQ ID NO: 550169 - DNA, 15 bp, Homo sapiens
cactgtggaatatac

SEQ ID NO: 550170 - DNA, 15 bp, Homo sapiens
tcactgtggaatata

SEQ ID NO: 550171 - DNA, 15 bp, Homo sapiens
gtcactgtggaatat

SEQ ID NO: 550172 - DNA, 15 bp, Homo sapiens
agtcactgtggaata

SEQ ID NO: 550173 - DNA, 15 bp, Homo sapiens
cagtcactgtggaat

SEQ ID NO: 550174 - DNA, 15 bp, Homo sapiens
gcagtcactgtggaa

SEQ ID NO: 550175 - DNA, 15 bp, Homo sapiens
tgcagtcactgtgga

SEQ ID NO: 550176 - DNA, 15 bp, Homo sapiens
gtgcagtcactgtgg

SEQ ID NO: 550177 - DNA, 15 bp, Homo sapiens
agtgcagtcactgtg

SEQ ID NO: 550178 - DNA, 15 bp, Homo sapiens
tagtgcagtcactgt

SEQ ID NO: 550179 - DNA, 15 bp, Homo sapiens
ttagtgcagtcactg

SEQ ID NO: 550180 - DNA, 15 bp, Homo sapiens
attagtgcagtcact

SEQ ID NO: 550181 - DNA, 15 bp, Homo sapiens
cattagtgcagtcac

SEQ ID NO: 550182 - DNA, 15 bp, Homo sapiens
gcattagtgcagtca

SEQ ID NO: 550183 - DNA, 15 bp, Homo sapiens
tgcattagtgcagtc

SEQ ID NO: 550184 - DNA, 15 bp, Homo sapiens
gtgcattagtgcagt

SEQ ID NO: 550185 - DNA, 15 bp, Homo sapiens
agtgcattagtgcag

SEQ ID NO: 550186 - DNA, 15 bp, Homo sapiens
aagtgcattagtgca

SEQ ID NO: 550187 - DNA, 15 bp, Homo sapiens
gaagtgcattagtgc

SEQ ID NO: 550188 - DNA, 15 bp, Homo sapiens
ggaagtgcattagtg

SEQ ID NO: 550189 - DNA, 15 bp, Homo sapiens
tggaagtgcattagt

SEQ ID NO: 550190 - DNA, 15 bp, Homo sapiens
gtggaagtgcattag

SEQ ID NO: 550191 - DNA, 15 bp, Homo sapiens
ggtggaagtgcatta

SEQ ID NO: 550192 - DNA, 15 bp, Homo sapiens
tggtggaagtgcatt

SEQ ID NO: 550193 - DNA, 15 bp, Homo sapiens
ctggtggaagtgcat

SEQ ID NO: 550194 - DNA, 15 bp, Homo sapiens
gctggtggaagtgca

SEQ ID NO: 550195 - DNA, 15 bp, Homo sapiens
tgctggtggaagtgc

SEQ ID NO: 550196 - DNA, 15 bp, Homo sapiens
ttgctggtggaagtg

SEQ ID NO: 550197 - DNA, 15 bp, Homo sapiens
attgctggtggaagt

SEQ ID NO: 550198 - DNA, 15 bp, Homo sapiens
cattgctggtggaag

SEQ ID NO: 550199 - DNA, 15 bp, Homo sapiens
acattgctggtggaa

SEQ ID NO: 550200 - DNA, 15 bp, Homo sapiens
cacattgctggtgga

SEQ ID NO: 550201 - DNA, 15 bp, Homo sapiens
acacattgctggtgg

SEQ ID NO: 550202 - DNA, 15 bp, Homo sapiens
cacacattgctggtg

SEQ ID NO: 550203 - DNA, 15 bp, Homo sapiens
tcacacattgctggt

SEQ ID NO: 550204 - DNA, 15 bp, Homo sapiens
ctcacacattgctgg

SEQ ID NO: 550205 - DNA, 15 bp, Homo sapiens
gctcacacattgctg

SEQ ID NO: 550206 - DNA, 15 bp, Homo sapiens
tgctcacacattgct

SEQ ID NO: 550207 - DNA, 15 bp, Homo sapiens
gtgctcacacattgc

SEQ ID NO: 550208 - DNA, 15 bp, Homo sapiens
agtgctcacacattg

SEQ ID NO: 550209 - DNA, 15 bp, Homo sapiens
gagtgctcacacatt

SEQ ID NO: 550210 - DNA, 15 bp, Homo sapiens
agagtgctcacacat

SEQ ID NO: 550211 - DNA, 15 bp, Homo sapiens
cagagtgctcacaca

SEQ ID NO: 550212 - DNA, 15 bp, Homo sapiens
ccagagtgctcacac

SEQ ID NO: 550213 - DNA, 15 bp, Homo sapiens
gccagagtgctcaca

SEQ ID NO: 550214 - DNA, 15 bp, Homo sapiens
agccagagtgctcac

SEQ ID NO: 550215 - DNA, 15 bp, Homo sapiens
cagccagagtgctca

SEQ ID NO: 550216 - DNA, 15 bp, Homo sapiens
gcagccagagtgctc

SEQ ID NO: 550217 - DNA, 15 bp, Homo sapiens
agcagccagagtgct

SEQ ID NO: 550218 - DNA, 15 bp, Homo sapiens
gagcagccagagtgc

SEQ ID NO: 550219 - DNA, 15 bp, Homo sapiens
ggagcagccagagtg

SEQ ID NO: 550220 - DNA, 15 bp, Homo sapiens
tggagcagccagagt

SEQ ID NO: 550221 - DNA, 15 bp, Homo sapiens
gtggagcagccagag

SEQ ID NO: 550222 - DNA, 15 bp, Homo sapiens
tgtggagcagccaga

SEQ ID NO: 550223 - DNA, 15 bp, Homo sapiens
atgtggagcagccag

SEQ ID NO: 550224 - DNA, 15 bp, Homo sapiens
gatgtggagcagcca

SEQ ID NO: 550225 - DNA, 15 bp, Homo sapiens
ggatgtggagcagcc

SEQ ID NO: 550226 - DNA, 15 bp, Homo sapiens
aggatgtggagcagc

SEQ ID NO: 550227 - DNA, 15 bp, Homo sapiens
gaggatgtggagcag

SEQ ID NO: 550228 - DNA, 15 bp, Homo sapiens
tgaggatgtggagca

SEQ ID NO: 550229 - DNA, 15 bp, Homo sapiens
gtgaggatgtggagc

SEQ ID NO: 550230 - DNA, 15 bp, Homo sapiens
ggtgaggatgtggag

SEQ ID NO: 550231 - DNA, 15 bp, Homo sapiens
tggtgaggatgtgga

SEQ ID NO: 550232 - DNA, 15 bp, Homo sapiens
ctggtgaggatgtgg

SEQ ID NO: 550233 - DNA, 15 bp, Homo sapiens
gctggtgaggatgtg

SEQ ID NO: 550234 - DNA, 15 bp, Homo sapiens
tgctggtgaggatgt

SEQ ID NO: 550235 - DNA, 15 bp, Homo sapiens
gtgctggtgaggatg

SEQ ID NO: 550236 - DNA, 15 bp, Homo sapiens
agtgctggtgaggat

SEQ ID NO: 550237 - DNA, 15 bp, Homo sapiens
aagtgctggtgagga

SEQ ID NO: 550238 - DNA, 15 bp, Homo sapiens
caagtgctggtgagg

SEQ ID NO: 550239 - DNA, 15 bp, Homo sapiens
acaagtgctggtgag

SEQ ID NO: 550240 - DNA, 15 bp, Homo sapiens
aacaagtgctggtga

SEQ ID NO: 550241 - DNA, 15 bp, Homo sapiens
taacaagtgctggtg

SEQ ID NO: 550242 - DNA, 15 bp, Homo sapiens
ataacaagtgctggt

SEQ ID NO: 550243 - DNA, 15 bp, Homo sapiens
aataacaagtgctgg

SEQ ID NO: 550244 - DNA, 15 bp, Homo sapiens
caataacaagtgctg

SEQ ID NO: 550245 - DNA, 15 bp, Homo sapiens
acaataacaagtgct

SEQ ID NO: 550246 - DNA, 15 bp, Homo sapiens
gacaataacaagtgc

SEQ ID NO: 550247 - DNA, 15 bp, Homo sapiens
tgacaataacaagtg

SEQ ID NO: 550248 - DNA, 15 bp, Homo sapiens
ctgacaataacaagt

SEQ ID NO: 550249 - DNA, 15 bp, Homo sapiens
actgacaataacaag

SEQ ID NO: 550250 - DNA, 15 bp, Homo sapiens
gactgacaataacaa

SEQ ID NO: 550251 - DNA, 15 bp, Homo sapiens
agactgacaataaca

SEQ ID NO: 550252 - DNA, 15 bp, Homo sapiens
aagactgacaataac

SEQ ID NO: 550253 - DNA, 15 bp, Homo sapiens
aaagactgacaataa

SEQ ID NO: 550254 - DNA, 15 bp, Homo sapiens
aaaagactgacaata

SEQ ID NO: 550255 - DNA, 15 bp, Homo sapiens
aaaaagactgacaat

SEQ ID NO: 550256 - DNA, 15 bp, Homo sapiens
gaaaaagactgacaa

SEQ ID NO: 550257 - DNA, 15 bp, Homo sapiens
tgaaaaagactgaca

SEQ ID NO: 550258 - DNA, 15 bp, Homo sapiens
atgaaaaagactgac

SEQ ID NO: 550259 - DNA, 15 bp, Homo sapiens
aatgaaaaagactga

SEQ ID NO: 550260 - DNA, 15 bp, Homo sapiens
caatgaaaaagactg

SEQ ID NO: 550261 - DNA, 15 bp, Homo sapiens
acaatgaaaaagact

SEQ ID NO: 550262 - DNA, 15 bp, Homo sapiens
tacaatgaaaaagac

SEQ ID NO: 550263 - DNA, 15 bp, Homo sapiens
ctacaatgaaaaaga

SEQ ID NO: 550264 - DNA, 15 bp, Homo sapiens
gctacaatgaaaaag

SEQ ID NO: 550265 - DNA, 15 bp, Homo sapiens
ggctacaatgaaaaa

SEQ ID NO: 550266 - DNA, 15 bp, Homo sapiens
tggctacaatgaaaa

SEQ ID NO: 550267 - DNA, 15 bp, Homo sapiens
atggctacaatgaaa

SEQ ID NO: 550268 - DNA, 15 bp, Homo sapiens
aatggctacaatgaa

SEQ ID NO: 550269 - DNA, 15 bp, Homo sapiens
gaatggctacaatga

SEQ ID NO: 550270 - DNA, 15 bp, Homo sapiens
agaatggctacaatg

SEQ ID NO: 550271 - DNA, 15 bp, Homo sapiens
cagaatggctacaat

SEQ ID NO: 550272 - DNA, 15 bp, Homo sapiens
ccagaatggctacaa

SEQ ID NO: 550273 - DNA, 15 bp, Homo sapiens
accagaatggctaca

SEQ ID NO: 550274 - DNA, 15 bp, Homo sapiens
caccagaatggctac

SEQ ID NO: 550275 - DNA, 15 bp, Homo sapiens
acaccagaatggcta

SEQ ID NO: 550276 - DNA, 15 bp, Homo sapiens
tacaccagaatggct

SEQ ID NO: 550277 - DNA, 15 bp, Homo sapiens
atacaccagaatggc

SEQ ID NO: 550278 - DNA, 15 bp, Homo sapiens
catacaccagaatgg

SEQ ID NO: 550279 - DNA, 15 bp, Homo sapiens
ccatacaccagaatg

SEQ ID NO: 550280 - DNA, 15 bp, Homo sapiens
gccatacaccagaat

SEQ ID NO: 550281 - DNA, 15 bp, Homo sapiens
tgccatacaccagaa

SEQ ID NO: 550282 - DNA, 15 bp, Homo sapiens
atgccatacaccaga

SEQ ID NO: 550283 - DNA, 15 bp, Homo sapiens
catgccatacaccag

SEQ ID NO: 550284 - DNA, 15 bp, Homo sapiens
ccatgccatacacca

SEQ ID NO: 550285 - DNA, 15 bp, Homo sapiens
cccatgccatacacc

SEQ ID NO: 550286 - DNA, 15 bp, Homo sapiens
tcccatgccatacac

SEQ ID NO: 550287 - DNA, 15 bp, Homo sapiens
atcccatgccataca

SEQ ID NO: 550288 - DNA, 15 bp, Homo sapiens
gatcccatgccatac

SEQ ID NO: 550289 - DNA, 15 bp, Homo sapiens
agatcccatgccata

SEQ ID NO: 550290 - DNA, 15 bp, Homo sapiens
gagatcccatgccat

SEQ ID NO: 550291 - DNA, 15 bp, Homo sapiens
tgagatcccatgcca

SEQ ID NO: 550292 - DNA, 15 bp, Homo sapiens
gtgagatcccatgcc

SEQ ID NO: 550293 - DNA, 15 bp, Homo sapiens
agtgagatcccatgc

SEQ ID NO: 550294 - DNA, 15 bp, Homo sapiens
cagtgagatcccatg

SEQ ID NO: 550295 - DNA, 15 bp, Homo sapiens
acagtgagatcccat

SEQ ID NO: 550296 - DNA, 15 bp, Homo sapiens
cacagtgagatccca

SEQ ID NO: 550297 - DNA, 15 bp, Homo sapiens
tcacagtgagatccc

SEQ ID NO: 550298 - DNA, 15 bp, Homo sapiens
ctcacagtgagatcc

SEQ ID NO: 550299 - DNA, 15 bp, Homo sapiens
actcacagtgagatc

SEQ ID NO: 550300 - DNA, 15 bp, Homo sapiens
gactcacagtgagat

SEQ ID NO: 550301 - DNA, 15 bp, Homo sapiens
ggactcacagtgaga

SEQ ID NO: 550302 - DNA, 15 bp, Homo sapiens
tggactcacagtgag

SEQ ID NO: 550303 - DNA, 15 bp, Homo sapiens
ctggactcacagtga

SEQ ID NO: 550304 - DNA, 15 bp, Homo sapiens
actggactcacagtg

SEQ ID NO: 550305 - DNA, 15 bp, Homo sapiens
cactggactcacagt

SEQ ID NO: 550306 - DNA, 15 bp, Homo sapiens
ccactggactcacag

SEQ ID NO: 550307 - DNA, 15 bp, Homo sapiens
tccactggactcaca

SEQ ID NO: 550308 - DNA, 15 bp, Homo sapiens
gtccactggactcac

SEQ ID NO: 550309 - DNA, 15 bp, Homo sapiens
tgtccactggactca

SEQ ID NO: 550310 - DNA, 15 bp, Homo sapiens
atgtccactggactc

SEQ ID NO: 550311 - DNA, 15 bp, Homo sapiens
aatgtccactggact

SEQ ID NO: 550312 - DNA, 15 bp, Homo sapiens
aaatgtccactggac

SEQ ID NO: 550313 - DNA, 15 bp, Homo sapiens
gaaatgtccactgga

SEQ ID NO: 550314 - DNA, 15 bp, Homo sapiens
agaaatgtccactgg

SEQ ID NO: 550315 - DNA, 15 bp, Homo sapiens
gagaaatgtccactg

SEQ ID NO: 550316 - DNA, 15 bp, Homo sapiens
agagaaatgtccact

SEQ ID NO: 550317 - DNA, 15 bp, Homo sapiens
cagagaaatgtccac

SEQ ID NO: 550318 - DNA, 15 bp, Homo sapiens
tcagagaaatgtcca

SEQ ID NO: 550319 - DNA, 15 bp, Homo sapiens
atcagagaaatgtcc

SEQ ID NO: 550320 - DNA, 15 bp, Homo sapiens
catcagagaaatgtc

SEQ ID NO: 550321 - DNA, 15 bp, Homo sapiens
tcatcagagaaatgt

SEQ ID NO: 550322 - DNA, 15 bp, Homo sapiens
gtcatcagagaaatg

SEQ ID NO: 550323 - DNA, 15 bp, Homo sapiens
agtcatcagagaaat

SEQ ID NO: 550324 - DNA, 15 bp, Homo sapiens
tagtcatcagagaaa

SEQ ID NO: 550325 - DNA, 15 bp, Homo sapiens
ttagtcatcagagaa

SEQ ID NO: 550326 - DNA, 15 bp, Homo sapiens
cttagtcatcagaga

SEQ ID NO: 550327 - DNA, 15 bp, Homo sapiens
gcttagtcatcagag

SEQ ID NO: 550328 - DNA, 15 bp, Homo sapiens
ggcttagtcatcaga

SEQ ID NO: 550329 - DNA, 15 bp, Homo sapiens
tggcttagtcatcag

SEQ ID NO: 550330 - DNA, 15 bp, Homo sapiens
gtggcttagtcatca

SEQ ID NO: 550331 - DNA, 15 bp, Homo sapiens
ggtggcttagtcatc

SEQ ID NO: 550332 - DNA, 15 bp, Homo sapiens
gggtggcttagtcat

SEQ ID NO: 550333 - DNA, 15 bp, Homo sapiens
tgggtggcttagtca

SEQ ID NO: 550334 - DNA, 15 bp, Homo sapiens
ctgggtggcttagtc

SEQ ID NO: 550335 - DNA, 15 bp, Homo sapiens
cctgggtggcttagt

SEQ ID NO: 550336 - DNA, 15 bp, Homo sapiens
ccctgggtggcttag

SEQ ID NO: 550337 - DNA, 15 bp, Homo sapiens
gccctgggtggctta

SEQ ID NO: 550338 - DNA, 15 bp, Homo sapiens
agccctgggtggctt

SEQ ID NO: 550339 - DNA, 15 bp, Homo sapiens
cagccctgggtggct

SEQ ID NO: 550340 - DNA, 15 bp, Homo sapiens
ccagccctgggtggc

SEQ ID NO: 550341 - DNA, 15 bp, Homo sapiens
accagccctgggtgg

SEQ ID NO: 550342 - DNA, 15 bp, Homo sapiens
caccagccctgggtg

SEQ ID NO: 550343 - DNA, 15 bp, Homo sapiens
ccaccagccctgggt

SEQ ID NO: 550344 - DNA, 15 bp, Homo sapiens
cccaccagccctggg

SEQ ID NO: 550345 - DNA, 15 bp, Homo sapiens
acccaccagccctgg

SEQ ID NO: 550346 - DNA, 15 bp, Homo sapiens
cacccaccagccctg

SEQ ID NO: 550347 - DNA, 15 bp, Homo sapiens
ccacccaccagccct

SEQ ID NO: 550348 - DNA, 15 bp, Homo sapiens
gccacccaccagccc

SEQ ID NO: 550349 - DNA, 15 bp, Homo sapiens
agccacccaccagcc

SEQ ID NO: 550350 - DNA, 15 bp, Homo sapiens
gagccacccaccagc

SEQ ID NO: 550351 - DNA, 15 bp, Homo sapiens
ggagccacccaccag

SEQ ID NO: 550352 - DNA, 15 bp, Homo sapiens
tggagccacccacca

SEQ ID NO: 550353 - DNA, 15 bp, Homo sapiens
ctggagccacccacc

SEQ ID NO: 550354 - DNA, 15 bp, Homo sapiens
cctggagccacccac

SEQ ID NO: 550355 - DNA, 15 bp, Homo sapiens
tcctggagccaccca

SEQ ID NO: 550356 - DNA, 15 bp, Homo sapiens
ttcctggagccaccc

SEQ ID NO: 550357 - DNA, 15 bp, Homo sapiens
cttcctggagccacc

SEQ ID NO: 550358 - DNA, 15 bp, Homo sapiens
acttcctggagccac

SEQ ID NO: 550359 - DNA, 15 bp, Homo sapiens
gacttcctggagcca

SEQ ID NO: 550360 - DNA, 15 bp, Homo sapiens
tgacttcctggagcc

SEQ ID NO: 550361 - DNA, 15 bp, Homo sapiens
gtgacttcctggagc

SEQ ID NO: 550362 - DNA, 15 bp, Homo sapiens
tgtgacttcctggag

SEQ ID NO: 550363 - DNA, 15 bp, Homo sapiens
ctgtgacttcctgga

SEQ ID NO: 550364 - DNA, 15 bp, Homo sapiens
cctgtgacttcctgg

SEQ ID NO: 550365 - DNA, 15 bp, Homo sapiens
tcctgtgacttcctg

SEQ ID NO: 550366 - DNA, 15 bp, Homo sapiens
ttcctgtgacttcct

SEQ ID NO: 550367 - DNA, 15 bp, Homo sapiens
attcctgtgacttcc

SEQ ID NO: 550368 - DNA, 15 bp, Homo sapiens
gattcctgtgacttc

SEQ ID NO: 550369 - DNA, 15 bp, Homo sapiens
ggattcctgtgactt

SEQ ID NO: 550370 - DNA, 15 bp, Homo sapiens
aggattcctgtgact

SEQ ID NO: 550371 - DNA, 15 bp, Homo sapiens
aaggattcctgtgac

SEQ ID NO: 550372 - DNA, 15 bp, Homo sapiens
aaaggattcctgtga

SEQ ID NO: 550373 - DNA, 15 bp, Homo sapiens
gaaaggattcctgtg

SEQ ID NO: 550374 - DNA, 15 bp, Homo sapiens
agaaaggattcctgt

SEQ ID NO: 550375 - DNA, 15 bp, Homo sapiens
gagaaaggattcctg

SEQ ID NO: 550376 - DNA, 15 bp, Homo sapiens
ggagaaaggattcct

SEQ ID NO: 550377 - DNA, 15 bp, Homo sapiens
aggagaaaggattcc

SEQ ID NO: 550378 - DNA, 15 bp, Homo sapiens
taggagaaaggattc

SEQ ID NO: 550379 - DNA, 15 bp, Homo sapiens
ataggagaaaggatt

SEQ ID NO: 550380 - DNA, 15 bp, Homo sapiens
gataggagaaaggat

SEQ ID NO: 550381 - DNA, 15 bp, Homo sapiens
agataggagaaagga

SEQ ID NO: 550382 - DNA, 15 bp, Homo sapiens
gagataggagaaagg

SEQ ID NO: 550383 - DNA, 15 bp, Homo sapiens
ggagataggagaaag

SEQ ID NO: 550384 - DNA, 15 bp, Homo sapiens
aggagataggagaaa

SEQ ID NO: 550385 - DNA, 15 bp, Homo sapiens
taggagataggagaa

SEQ ID NO: 550386 - DNA, 15 bp, Homo sapiens
ataggagataggaga

SEQ ID NO: 550387 - DNA, 15 bp, Homo sapiens
aataggagataggag

SEQ ID NO: 550388 - DNA, 15 bp, Homo sapiens
gaataggagatagga

SEQ ID NO: 550389 - DNA, 15 bp, Homo sapiens
agaataggagatagg

SEQ ID NO: 550390 - DNA, 15 bp, Homo sapiens
cagaataggagatag

SEQ ID NO: 550391 - DNA, 15 bp, Homo sapiens
gcagaataggagata

SEQ ID NO: 550392 - DNA, 15 bp, Homo sapiens
agcagaataggagat

SEQ ID NO: 550393 - DNA, 15 bp, Homo sapiens
gagcagaataggaga

SEQ ID NO: 550394 - DNA, 15 bp, Homo sapiens
ggagcagaataggag

SEQ ID NO: 550395 - DNA, 15 bp, Homo sapiens
cggagcagaatagga

SEQ ID NO: 550396 - DNA, 15 bp, Homo sapiens
gcggagcagaatagg

SEQ ID NO: 550397 - DNA, 15 bp, Homo sapiens
ggcggagcagaatag

SEQ ID NO: 550398 - DNA, 15 bp, Homo sapiens
gggcggagcagaata

SEQ ID NO: 550399 - DNA, 15 bp, Homo sapiens
agggcggagcagaat

SEQ ID NO: 550400 - DNA, 15 bp, Homo sapiens
aagggcggagcagaa

SEQ ID NO: 550401 - DNA, 15 bp, Homo sapiens
gaagggcggagcaga

SEQ ID NO: 550402 - DNA, 15 bp, Homo sapiens
agaagggcggagcag

SEQ ID NO: 550403 - DNA, 15 bp, Homo sapiens
aagaagggcggagca

SEQ ID NO: 550404 - DNA, 15 bp, Homo sapiens
gaagaagggcggagc

SEQ ID NO: 550405 - DNA, 15 bp, Homo sapiens
tgaagaagggcggag

SEQ ID NO: 550406 - DNA, 15 bp, Homo sapiens
atgaagaagggcgga

SEQ ID NO: 550407 - DNA, 15 bp, Homo sapiens
catgaagaagggcgg

SEQ ID NO: 550408 - DNA, 15 bp, Homo sapiens
acatgaagaagggcg

SEQ ID NO: 550409 - DNA, 15 bp, Homo sapiens
cacatgaagaagggc

SEQ ID NO: 550410 - DNA, 15 bp, Homo sapiens
acacatgaagaaggg

SEQ ID NO: 550411 - DNA, 15 bp, Homo sapiens
cacacatgaagaagg

SEQ ID NO: 550412 - DNA, 15 bp, Homo sapiens
ccacacatgaagaag

SEQ ID NO: 550413 - DNA, 15 bp, Homo sapiens
gccacacatgaagaa

SEQ ID NO: 550414 - DNA, 15 bp, Homo sapiens
agccacacatgaaga

SEQ ID NO: 550415 - DNA, 15 bp, Homo sapiens
aagccacacatgaag

SEQ ID NO: 550416 - DNA, 15 bp, Homo sapiens
aaagccacacatgaa

SEQ ID NO: 550417 - DNA, 15 bp, Homo sapiens
gaaagccacacatga

SEQ ID NO: 550418 - DNA, 15 bp, Homo sapiens
tgaaagccacacatg

SEQ ID NO: 550419 - DNA, 15 bp, Homo sapiens
atgaaagccacacat

SEQ ID NO: 550420 - DNA, 15 bp, Homo sapiens
aatgaaagccacaca

SEQ ID NO: 550421 - DNA, 15 bp, Homo sapiens
gaatgaaagccacac

SEQ ID NO: 550422 - DNA, 15 bp, Homo sapiens
agaatgaaagccaca

SEQ ID NO: 550423 - DNA, 15 bp, Homo sapiens
aagaatgaaagccac

SEQ ID NO: 550424 - DNA, 15 bp, Homo sapiens
taagaatgaaagcca

SEQ ID NO: 550425 - DNA, 15 bp, Homo sapiens
ttaagaatgaaagcc

SEQ ID NO: 550426 - DNA, 15 bp, Homo sapiens
cttaagaatgaaagc

SEQ ID NO: 550427 - DNA, 15 bp, Homo sapiens
ccttaagaatgaaag

SEQ ID NO: 550428 - DNA, 15 bp, Homo sapiens
cccttaagaatgaaa

SEQ ID NO: 550429 - DNA, 15 bp, Homo sapiens
acccttaagaatgaa

SEQ ID NO: 550430 - DNA, 15 bp, Homo sapiens
cacccttaagaatga

SEQ ID NO: 550431 - DNA, 15 bp, Homo sapiens
gcacccttaagaatg

SEQ ID NO: 550432 - DNA, 15 bp, Homo sapiens
ggcacccttaagaat

SEQ ID NO: 550433 - DNA, 15 bp, Homo sapiens
aggcacccttaagaa

SEQ ID NO: 550434 - DNA, 15 bp, Homo sapiens
gaggcacccttaaga

SEQ ID NO: 550435 - DNA, 15 bp, Homo sapiens
tgaggcacccttaag

SEQ ID NO: 550436 - DNA, 15 bp, Homo sapiens
atgaggcacccttaa

SEQ ID NO: 550437 - DNA, 15 bp, Homo sapiens
catgaggcaccctta

SEQ ID NO: 550438 - DNA, 15 bp, Homo sapiens
tcatgaggcaccctt

SEQ ID NO: 550439 - DNA, 15 bp, Homo sapiens
atcatgaggcaccct

SEQ ID NO: 550440 - DNA, 15 bp, Homo sapiens
gatcatgaggcaccc

SEQ ID NO: 550441 - DNA, 15 bp, Homo sapiens
ggatcatgaggcacc

SEQ ID NO: 550442 - DNA, 15 bp, Homo sapiens
tggatcatgaggcac

SEQ ID NO: 550443 - DNA, 15 bp, Homo sapiens
ttggatcatgaggca

SEQ ID NO: 550444 - DNA, 15 bp, Homo sapiens
cttggatcatgaggc

SEQ ID NO: 550445 - DNA, 15 bp, Homo sapiens
tcttggatcatgagg

SEQ ID NO: 550446 - DNA, 15 bp, Homo sapiens
atcttggatcatgag

SEQ ID NO: 550447 - DNA, 15 bp, Homo sapiens
catcttggatcatga

SEQ ID NO: 550448 - DNA, 15 bp, Homo sapiens
ccatcttggatcatg

SEQ ID NO: 550449 - DNA, 15 bp, Homo sapiens
gccatcttggatcat

SEQ ID NO: 550450 - DNA, 15 bp, Homo sapiens
agccatcttggatca

SEQ ID NO: 550451 - DNA, 15 bp, Homo sapiens
cagccatcttggatc

SEQ ID NO: 550452 - DNA, 15 bp, Homo sapiens
gcagccatcttggat

SEQ ID NO: 550453 - DNA, 15 bp, Homo sapiens
agcagccatcttgga

SEQ ID NO: 550454 - DNA, 15 bp, Homo sapiens
gagcagccatcttgg

SEQ ID NO: 550455 - DNA, 15 bp, Homo sapiens
agagcagccatcttg

SEQ ID NO: 550456 - DNA, 15 bp, Homo sapiens
tagagcagccatctt

SEQ ID NO: 550457 - DNA, 15 bp, Homo sapiens
ctagagcagccatct

SEQ ID NO: 550458 - DNA, 15 bp, Homo sapiens
gctagagcagccatc

SEQ ID NO: 550459 - DNA, 15 bp, Homo sapiens
agctagagcagccat

SEQ ID NO: 550460 - DNA, 15 bp, Homo sapiens
gagctagagcagcca

SEQ ID NO: 550461 - DNA, 15 bp, Homo sapiens
ggagctagagcagcc

SEQ ID NO: 550462 - DNA, 15 bp, Homo sapiens
tggagctagagcagc

SEQ ID NO: 550463 - DNA, 15 bp, Homo sapiens
atggagctagagcag

SEQ ID NO: 550464 - DNA, 15 bp, Homo sapiens
gatggagctagagca

SEQ ID NO: 550465 - DNA, 15 bp, Homo sapiens
ggatggagctagagc

SEQ ID NO: 550466 - DNA, 15 bp, Homo sapiens
tggatggagctagag

SEQ ID NO: 550467 - DNA, 15 bp, Homo sapiens
atggatggagctaga

SEQ ID NO: 550468 - DNA, 15 bp, Homo sapiens
aatggatggagctag

SEQ ID NO: 550469 - DNA, 15 bp, Homo sapiens
caatggatggagcta

SEQ ID NO: 550470 - DNA, 15 bp, Homo sapiens
acaatggatggagct

SEQ ID NO: 550471 - DNA, 15 bp, Homo sapiens
cacaatggatggagc

SEQ ID NO: 550472 - DNA, 15 bp, Homo sapiens
tcacaatggatggag

SEQ ID NO: 550473 - DNA, 15 bp, Homo sapiens
gtcacaatggatgga

SEQ ID NO: 550474 - DNA, 15 bp, Homo sapiens
agtcacaatggatgg

SEQ ID NO: 550475 - DNA, 15 bp, Homo sapiens
cagtcacaatggatg

SEQ ID NO: 550476 - DNA, 15 bp, Homo sapiens
tcagtcacaatggat

SEQ ID NO: 550477 - DNA, 15 bp, Homo sapiens
ttcagtcacaatgga

SEQ ID NO: 550478 - DNA, 15 bp, Homo sapiens
attcagtcacaatgg

SEQ ID NO: 550479 - DNA, 15 bp, Homo sapiens
aattcagtcacaatg

SEQ ID NO: 550480 - DNA, 15 bp, Homo sapiens
gaattcagtcacaat

SEQ ID NO: 550481 - DNA, 15 bp, Homo sapiens
ggaattcagtcacaa

SEQ ID NO: 550482 - DNA, 15 bp, Homo sapiens
cggaattcagtcaca

SEQ ID NO: 550483 - DNA, 15 bp, Homo sapiens
ccggaattcagtcac

SEQ ID NO: 550484 - DNA, 15 bp, Homo sapiens
cccggaattcagtca

SEQ ID NO: 550485 - DNA, 15 bp, Homo sapiens
gcccggaattcagtc

SEQ ID NO: 550486 - DNA, 15 bp, Homo sapiens
tgcccggaattcagt

SEQ ID NO: 550487 - DNA, 15 bp, Homo sapiens
ctgcccggaattcag

SEQ ID NO: 550488 - DNA, 15 bp, Homo sapiens
gctgcccggaattca

SEQ ID NO: 550489 - DNA, 15 bp, Homo sapiens
tgctgcccggaattc

SEQ ID NO: 550490 - DNA, 15 bp, Homo sapiens
ctgctgcccggaatt

SEQ ID NO: 550491 - DNA, 15 bp, Homo sapiens
cctgctgcccggaat

SEQ ID NO: 550492 - DNA, 15 bp, Homo sapiens
tcctgctgcccggaa

SEQ ID NO: 550493 - DNA, 15 bp, Homo sapiens
ttcctgctgcccgga

SEQ ID NO: 550494 - DNA, 15 bp, Homo sapiens
cttcctgctgcccgg

SEQ ID NO: 550495 - DNA, 15 bp, Homo sapiens
ccttcctgctgcccg

SEQ ID NO: 550496 - DNA, 15 bp, Homo sapiens
cccttcctgctgccc

SEQ ID NO: 550497 - DNA, 15 bp, Homo sapiens
ccccttcctgctgcc

SEQ ID NO: 550498 - DNA, 15 bp, Homo sapiens
cccccttcctgctgc

SEQ ID NO: 550499 - DNA, 15 bp, Homo sapiens
tcccccttcctgctg

SEQ ID NO: 550500 - DNA, 15 bp, Homo sapiens
gtcccccttcctgct

SEQ ID NO: 550501 - DNA, 15 bp, Homo sapiens
agtcccccttcctgc

SEQ ID NO: 550502 - DNA, 15 bp, Homo sapiens
aagtcccccttcctg

SEQ ID NO: 550503 - DNA, 15 bp, Homo sapiens
taagtcccccttcct

SEQ ID NO: 550504 - DNA, 15 bp, Homo sapiens
ataagtcccccttcc

SEQ ID NO: 550505 - DNA, 15 bp, Homo sapiens
gataagtcccccttc

SEQ ID NO: 550506 - DNA, 15 bp, Homo sapiens
tgataagtccccctt

SEQ ID NO: 550507 - DNA, 15 bp, Homo sapiens
ttgataagtccccct

SEQ ID NO: 550508 - DNA, 15 bp, Homo sapiens
gttgataagtccccc

SEQ ID NO: 550509 - DNA, 15 bp, Homo sapiens
tgttgataagtcccc

SEQ ID NO: 550510 - DNA, 15 bp, Homo sapiens
ttgttgataagtccc

SEQ ID NO: 550511 - DNA, 15 bp, Homo sapiens
gttgttgataagtcc

SEQ ID NO: 550512 - DNA, 15 bp, Homo sapiens
agttgttgataagtc

SEQ ID NO: 550513 - DNA, 15 bp, Homo sapiens
tagttgttgataagt

SEQ ID NO: 550514 - DNA, 15 bp, Homo sapiens
gtagttgttgataag

SEQ ID NO: 550515 - DNA, 15 bp, Homo sapiens
tgtagttgttgataa

SEQ ID NO: 550516 - DNA, 15 bp, Homo sapiens
atgtagttgttgata

SEQ ID NO: 550517 - DNA, 15 bp, Homo sapiens
tatgtagttgttgat

SEQ ID NO: 550518 - DNA, 15 bp, Homo sapiens
ctatgtagttgttga

SEQ ID NO: 550519 - DNA, 15 bp, Homo sapiens
tctatgtagttgttg

SEQ ID NO: 550520 - DNA, 15 bp, Homo sapiens
ttctatgtagttgtt

SEQ ID NO: 550521 - DNA, 15 bp, Homo sapiens
tttctatgtagttgt

SEQ ID NO: 550522 - DNA, 15 bp, Homo sapiens
atttctatgtagttg

SEQ ID NO: 550523 - DNA, 15 bp, Homo sapiens
aatttctatgtagtt

SEQ ID NO: 550524 - DNA, 15 bp, Homo sapiens
aaatttctatgtagt

SEQ ID NO: 550525 - DNA, 15 bp, Homo sapiens
gaaatttctatgtag

SEQ ID NO: 550526 - DNA, 15 bp, Homo sapiens
tgaaatttctatgta

SEQ ID NO: 550527 - DNA, 15 bp, Homo sapiens
ctgaaatttctatgt

SEQ ID NO: 550528 - DNA, 15 bp, Homo sapiens
tctgaaatttctatg

SEQ ID NO: 550529 - DNA, 15 bp, Homo sapiens
atctgaaatttctat

SEQ ID NO: 550530 - DNA, 15 bp, Homo sapiens
tatctgaaatttcta

SEQ ID NO: 550531 - DNA, 15 bp, Homo sapiens
atatctgaaatttct

SEQ ID NO: 550532 - DNA, 15 bp, Homo sapiens
aatatctgaaatttc

SEQ ID NO: 550533 - DNA, 15 bp, Homo sapiens
caatatctgaaattt

SEQ ID NO: 550534 - DNA, 15 bp, Homo sapiens
tcaatatctgaaatt

SEQ ID NO: 550535 - DNA, 15 bp, Homo sapiens
atcaatatctgaaat

SEQ ID NO: 550536 - DNA, 15 bp, Homo sapiens
tatcaatatctgaaa

SEQ ID NO: 550537 - DNA, 15 bp, Homo sapiens
ttatcaatatctgaa

SEQ ID NO: 550538 - DNA, 15 bp, Homo sapiens
attatcaatatctga

SEQ ID NO: 550539 - DNA, 15 bp, Homo sapiens
cattatcaatatctg

SEQ ID NO: 550540 - DNA, 15 bp, Homo sapiens
acattatcaatatct

SEQ ID NO: 550541 - DNA, 15 bp, Homo sapiens
gacattatcaatatc

SEQ ID NO: 550542 - DNA, 15 bp, Homo sapiens
tgacattatcaatat

SEQ ID NO: 550543 - DNA, 15 bp, Homo sapiens
ctgacattatcaata

SEQ ID NO: 550544 - DNA, 15 bp, Homo sapiens
cctgacattatcaat

SEQ ID NO: 550545 - DNA, 15 bp, Homo sapiens
ccctgacattatcaa

SEQ ID NO: 550546 - DNA, 15 bp, Homo sapiens
tccctgacattatca

SEQ ID NO: 550547 - DNA, 15 bp, Homo sapiens
ctccctgacattatc

SEQ ID NO: 550548 - DNA, 15 bp, Homo sapiens
tctccctgacattat

SEQ ID NO: 550549 - DNA, 15 bp, Homo sapiens
atctccctgacatta

SEQ ID NO: 550550 - DNA, 15 bp, Homo sapiens
tatctccctgacatt

SEQ ID NO: 550551 - DNA, 15 bp, Homo sapiens
ttatctccctgacat

SEQ ID NO: 550552 - DNA, 15 bp, Homo sapiens
tttatctccctgaca

SEQ ID NO: 550553 - DNA, 15 bp, Homo sapiens
ttttatctccctgac

SEQ ID NO: 550554 - DNA, 15 bp, Homo sapiens
gttttatctccctga

SEQ ID NO: 550555 - DNA, 15 bp, Homo sapiens
tgttttatctccctg

SEQ ID NO: 550556 - DNA, 15 bp, Homo sapiens
ctgttttatctccct

SEQ ID NO: 550557 - DNA, 15 bp, Homo sapiens
cctgttttatctccc

SEQ ID NO: 550558 - DNA, 15 bp, Homo sapiens
ccctgttttatctcc

SEQ ID NO: 550559 - DNA, 15 bp, Homo sapiens
accctgttttatctc

SEQ ID NO: 550560 - DNA, 15 bp, Homo sapiens
caccctgttttatct

SEQ ID NO: 550561 - DNA, 15 bp, Homo sapiens
tcaccctgttttatc

SEQ ID NO: 550562 - DNA, 15 bp, Homo sapiens
atcaccctgttttat

SEQ ID NO: 550563 - DNA, 15 bp, Homo sapiens
catcaccctgtttta

SEQ ID NO: 550564 - DNA, 15 bp, Homo sapiens
tcatcaccctgtttt

SEQ ID NO: 550565 - DNA, 15 bp, Homo sapiens
ttcatcaccctgttt

SEQ ID NO: 550566 - DNA, 15 bp, Homo sapiens
attcatcaccctgtt

SEQ ID NO: 550567 - DNA, 15 bp, Homo sapiens
tattcatcaccctgt

SEQ ID NO: 550568 - DNA, 15 bp, Homo sapiens
atattcatcaccctg

SEQ ID NO: 550569 - DNA, 15 bp, Homo sapiens
tatattcatcaccct

SEQ ID NO: 550570 - DNA, 15 bp, Homo sapiens
ttatattcatcaccc

SEQ ID NO: 550571 - DNA, 15 bp, Homo sapiens
attatattcatcacc

SEQ ID NO: 550572 - DNA, 15 bp, Homo sapiens
cattatattcatcac

SEQ ID NO: 550573 - DNA, 15 bp, Homo sapiens
acattatattcatca

SEQ ID NO: 550574 - DNA, 15 bp, Homo sapiens
cacattatattcatc

SEQ ID NO: 550575 - DNA, 15 bp, Homo sapiens
tcacattatattcat

SEQ ID NO: 550576 - DNA, 15 bp, Homo sapiens
atcacattatattca

SEQ ID NO: 550577 - DNA, 15 bp, Homo sapiens
catcacattatattc

SEQ ID NO: 550578 - DNA, 15 bp, Homo sapiens
ccatcacattatatt

SEQ ID NO: 550579 - DNA, 15 bp, Homo sapiens
cccatcacattatat

SEQ ID NO: 550580 - DNA, 15 bp, Homo sapiens
ccccatcacattata

SEQ ID NO: 550581 - DNA, 15 bp, Homo sapiens
cccccatcacattat

SEQ ID NO: 550582 - DNA, 15 bp, Homo sapiens
tcccccatcacatta

SEQ ID NO: 550583 - DNA, 15 bp, Homo sapiens
ttcccccatcacatt

SEQ ID NO: 550584 - DNA, 15 bp, Homo sapiens
cttcccccatcacat

SEQ ID NO: 550585 - DNA, 15 bp, Homo sapiens
ccttcccccatcaca

SEQ ID NO: 550586 - DNA, 15 bp, Homo sapiens
cccttcccccatcac

SEQ ID NO: 550587 - DNA, 15 bp, Homo sapiens
gcccttcccccatca

SEQ ID NO: 550588 - DNA, 15 bp, Homo sapiens
agcccttcccccatc

SEQ ID NO: 550589 - DNA, 15 bp, Homo sapiens
cagcccttcccccat

SEQ ID NO: 550590 - DNA, 15 bp, Homo sapiens
gcagcccttccccca

SEQ ID NO: 550591 - DNA, 15 bp, Homo sapiens
agcagcccttccccc

SEQ ID NO: 550592 - DNA, 15 bp, Homo sapiens
aagcagcccttcccc

SEQ ID NO: 550593 - DNA, 15 bp, Homo sapiens
aaagcagcccttccc

SEQ ID NO: 550594 - DNA, 15 bp, Homo sapiens
taaagcagcccttcc

SEQ ID NO: 550595 - DNA, 15 bp, Homo sapiens
ctaaagcagcccttc

SEQ ID NO: 550596 - DNA, 15 bp, Homo sapiens
cctaaagcagccctt

SEQ ID NO: 550597 - DNA, 15 bp, Homo sapiens
tcctaaagcagccct

SEQ ID NO: 550598 - DNA, 15 bp, Homo sapiens
ttcctaaagcagccc

SEQ ID NO: 550599 - DNA, 15 bp, Homo sapiens
cttcctaaagcagcc

SEQ ID NO: 550600 - DNA, 15 bp, Homo sapiens
tcttcctaaagcagc

SEQ ID NO: 550601 - DNA, 15 bp, Homo sapiens
ttcttcctaaagcag

SEQ ID NO: 550602 - DNA, 15 bp, Homo sapiens
attcttcctaaagca

SEQ ID NO: 550603 - DNA, 15 bp, Homo sapiens
cattcttcctaaagc

SEQ ID NO: 550604 - DNA, 15 bp, Homo sapiens
ccattcttcctaaag

SEQ ID NO: 550605 - DNA, 15 bp, Homo sapiens
accattcttcctaaa

SEQ ID NO: 550606 - DNA, 15 bp, Homo sapiens
taccattcttcctaa

SEQ ID NO: 550607 - DNA, 15 bp, Homo sapiens
ataccattcttccta

SEQ ID NO: 550608 - DNA, 15 bp, Homo sapiens
aataccattcttcct

SEQ ID NO: 550609 - DNA, 15 bp, Homo sapiens
aaataccattcttcc

SEQ ID NO: 550610 - DNA, 15 bp, Homo sapiens
aaaataccattcttc

SEQ ID NO: 550611 - DNA, 15 bp, Homo sapiens
gaaaataccattctt

SEQ ID NO: 550612 - DNA, 15 bp, Homo sapiens
tgaaaataccattct

SEQ ID NO: 550613 - DNA, 15 bp, Homo sapiens
atgaaaataccattc

SEQ ID NO: 550614 - DNA, 15 bp, Homo sapiens
gatgaaaataccatt

SEQ ID NO: 550615 - DNA, 15 bp, Homo sapiens
ggatgaaaataccat

SEQ ID NO: 550616 - DNA, 15 bp, Homo sapiens
tggatgaaaatacca

SEQ ID NO: 550617 - DNA, 15 bp, Homo sapiens
atggatgaaaatacc

SEQ ID NO: 550618 - DNA, 15 bp, Homo sapiens
aatggatgaaaatac

SEQ ID NO: 550619 - DNA, 15 bp, Homo sapiens
aaatggatgaaaata

SEQ ID NO: 550620 - DNA, 15 bp, Homo sapiens
aaaatggatgaaaat

SEQ ID NO: 550621 - DNA, 15 bp, Homo sapiens
caaaatggatgaaaa

SEQ ID NO: 550622 - DNA, 15 bp, Homo sapiens
acaaaatggatgaaa

SEQ ID NO: 550623 - DNA, 15 bp, Homo sapiens
aacaaaatggatgaa

SEQ ID NO: 550624 - DNA, 15 bp, Homo sapiens
gaacaaaatggatga

SEQ ID NO: 550625 - DNA, 15 bp, Homo sapiens
tgaacaaaatggatg

SEQ ID NO: 550626 - DNA, 15 bp, Homo sapiens
gtgaacaaaatggat

SEQ ID NO: 550627 - DNA, 15 bp, Homo sapiens
agtgaacaaaatgga

SEQ ID NO: 550628 - DNA, 15 bp, Homo sapiens
tagtgaacaaaatgg

SEQ ID NO: 550629 - DNA, 15 bp, Homo sapiens
atagtgaacaaaatg

SEQ ID NO: 550630 - DNA, 15 bp, Homo sapiens
aatagtgaacaaaat

SEQ ID NO: 550631 - DNA, 15 bp, Homo sapiens
caatagtgaacaaaa

SEQ ID NO: 550632 - DNA, 15 bp, Homo sapiens
tcaatagtgaacaaa

SEQ ID NO: 550633 - DNA, 15 bp, Homo sapiens
ttcaatagtgaacaa

SEQ ID NO: 550634 - DNA, 15 bp, Homo sapiens
cttcaatagtgaaca

SEQ ID NO: 550635 - DNA, 15 bp, Homo sapiens
acttcaatagtgaac

SEQ ID NO: 550636 - DNA, 15 bp, Homo sapiens
cacttcaatagtgaa

SEQ ID NO: 550637 - DNA, 15 bp, Homo sapiens
gcacttcaatagtga

SEQ ID NO: 550638 - DNA, 15 bp, Homo sapiens
ggcacttcaatagtg

SEQ ID NO: 550639 - DNA, 15 bp, Homo sapiens
gggcacttcaatagt

SEQ ID NO: 550640 - DNA, 15 bp, Homo sapiens
tgggcacttcaatag

SEQ ID NO: 550641 - DNA, 15 bp, Homo sapiens
ctgggcacttcaata

SEQ ID NO: 550642 - DNA, 15 bp, Homo sapiens
cctgggcacttcaat

SEQ ID NO: 550643 - DNA, 15 bp, Homo sapiens
gcctgggcacttcaa

SEQ ID NO: 550644 - DNA, 15 bp, Homo sapiens
ggcctgggcacttca

SEQ ID NO: 550645 - DNA, 15 bp, Homo sapiens
aggcctgggcacttc

SEQ ID NO: 550646 - DNA, 15 bp, Homo sapiens
taggcctgggcactt

SEQ ID NO: 550647 - DNA, 15 bp, Homo sapiens
ctaggcctgggcact

SEQ ID NO: 550648 - DNA, 15 bp, Homo sapiens
tctaggcctgggcac

SEQ ID NO: 550649 - DNA, 15 bp, Homo sapiens
ctctaggcctgggca

SEQ ID NO: 550650 - DNA, 15 bp, Homo sapiens
gctctaggcctgggc

SEQ ID NO: 550651 - DNA, 15 bp, Homo sapiens
tgctctaggcctggg

SEQ ID NO: 550652 - DNA, 15 bp, Homo sapiens
ctgctctaggcctgg

SEQ ID NO: 550653 - DNA, 15 bp, Homo sapiens
tctgctctaggcctg

SEQ ID NO: 550654 - DNA, 15 bp, Homo sapiens
ctctgctctaggcct

SEQ ID NO: 550655 - DNA, 15 bp, Homo sapiens
gctctgctctaggcc

SEQ ID NO: 550656 - DNA, 15 bp, Homo sapiens
ggctctgctctaggc

SEQ ID NO: 550657 - DNA, 15 bp, Homo sapiens
aggctctgctctagg

SEQ ID NO: 550658 - DNA, 15 bp, Homo sapiens
caggctctgctctag

SEQ ID NO: 550659 - DNA, 15 bp, Homo sapiens
gcaggctctgctcta

SEQ ID NO: 550660 - DNA, 15 bp, Homo sapiens
ggcaggctctgctct

SEQ ID NO: 550661 - DNA, 15 bp, Homo sapiens
tggcaggctctgctc

SEQ ID NO: 550662 - DNA, 15 bp, Homo sapiens
atggcaggctctgct

SEQ ID NO: 550663 - DNA, 15 bp, Homo sapiens
tatggcaggctctgc

SEQ ID NO: 550664 - DNA, 15 bp, Homo sapiens
gtatggcaggctctg

SEQ ID NO: 550665 - DNA, 15 bp, Homo sapiens
tgtatggcaggctct

SEQ ID NO: 550666 - DNA, 15 bp, Homo sapiens
ctgtatggcaggctc

SEQ ID NO: 550667 - DNA, 15 bp, Homo sapiens
actgtatggcaggct

SEQ ID NO: 550668 - DNA, 15 bp, Homo sapiens
cactgtatggcaggc

SEQ ID NO: 550669 - DNA, 15 bp, Homo sapiens
ccactgtatggcagg

SEQ ID NO: 550670 - DNA, 15 bp, Homo sapiens
cccactgtatggcag

SEQ ID NO: 550671 - DNA, 15 bp, Homo sapiens
ccccactgtatggca

SEQ ID NO: 550672 - DNA, 15 bp, Homo sapiens
gccccactgtatggc

SEQ ID NO: 550673 - DNA, 15 bp, Homo sapiens
agccccactgtatgg

SEQ ID NO: 550674 - DNA, 15 bp, Homo sapiens
gagccccactgtatg

SEQ ID NO: 550675 - DNA, 15 bp, Homo sapiens
tgagccccactgtat

SEQ ID NO: 550676 - DNA, 15 bp, Homo sapiens
ttgagccccactgta

SEQ ID NO: 550677 - DNA, 15 bp, Homo sapiens
attgagccccactgt

SEQ ID NO: 550678 - DNA, 15 bp, Homo sapiens
tattgagccccactg

SEQ ID NO: 550679 - DNA, 15 bp, Homo sapiens
ctattgagccccact

SEQ ID NO: 550680 - DNA, 15 bp, Homo sapiens
tctattgagccccac

SEQ ID NO: 550681 - DNA, 15 bp, Homo sapiens
ctctattgagcccca

SEQ ID NO: 550682 - DNA, 15 bp, Homo sapiens
tctctattgagcccc

SEQ ID NO: 550683 - DNA, 15 bp, Homo sapiens
atctctattgagccc

SEQ ID NO: 550684 - DNA, 15 bp, Homo sapiens
catctctattgagcc

SEQ ID NO: 550685 - DNA, 15 bp, Homo sapiens
ccatctctattgagc

SEQ ID NO: 550686 - DNA, 15 bp, Homo sapiens
accatctctattgag

SEQ ID NO: 550687 - DNA, 15 bp, Homo sapiens
aaccatctctattga

SEQ ID NO: 550688 - DNA, 15 bp, Homo sapiens
taaccatctctattg

SEQ ID NO: 550689 - DNA, 15 bp, Homo sapiens
ttaaccatctctatt

SEQ ID NO: 550690 - DNA, 15 bp, Homo sapiens
cttaaccatctctat

SEQ ID NO: 550691 - DNA, 15 bp, Homo sapiens
ccttaaccatctcta

SEQ ID NO: 550692 - DNA, 15 bp, Homo sapiens
cccttaaccatctct

SEQ ID NO: 550693 - DNA, 15 bp, Homo sapiens
tcccttaaccatctc

SEQ ID NO: 550694 - DNA, 15 bp, Homo sapiens
atcccttaaccatct

SEQ ID NO: 550695 - DNA, 15 bp, Homo sapiens
aatcccttaaccatc

SEQ ID NO: 550696 - DNA, 15 bp, Homo sapiens
caatcccttaaccat

SEQ ID NO: 550697 - DNA, 15 bp, Homo sapiens
tcaatcccttaacca

SEQ ID NO: 550698 - DNA, 15 bp, Homo sapiens
ttcaatcccttaacc

SEQ ID NO: 550699 - DNA, 15 bp, Homo sapiens
tttcaatcccttaac

SEQ ID NO: 550700 - DNA, 15 bp, Homo sapiens
ttttcaatcccttaa

SEQ ID NO: 550701 - DNA, 15 bp, Homo sapiens
attttcaatccctta

SEQ ID NO: 550702 - DNA, 15 bp, Homo sapiens
aattttcaatccctt

SEQ ID NO: 550703 - DNA, 15 bp, Homo sapiens
caattttcaatccct

SEQ ID NO: 550704 - DNA, 15 bp, Homo sapiens
gcaattttcaatccc

SEQ ID NO: 550705 - DNA, 15 bp, Homo sapiens
agcaattttcaatcc

SEQ ID NO: 550706 - DNA, 15 bp, Homo sapiens
gagcaattttcaatc

SEQ ID NO: 550707 - DNA, 15 bp, Homo sapiens
tgagcaattttcaat

SEQ ID NO: 550708 - DNA, 15 bp, Homo sapiens
ctgagcaattttcaa

SEQ ID NO: 550709 - DNA, 15 bp, Homo sapiens
cctgagcaattttca

SEQ ID NO: 550710 - DNA, 15 bp, Homo sapiens
ccctgagcaattttc

SEQ ID NO: 550711 - DNA, 15 bp, Homo sapiens
tccctgagcaatttt

SEQ ID NO: 550712 - DNA, 15 bp, Homo sapiens
ttccctgagcaattt

SEQ ID NO: 550713 - DNA, 15 bp, Homo sapiens
cttccctgagcaatt

SEQ ID NO: 550714 - DNA, 15 bp, Homo sapiens
ccttccctgagcaat

SEQ ID NO: 550715 - DNA, 15 bp, Homo sapiens
accttccctgagcaa

SEQ ID NO: 550716 - DNA, 15 bp, Homo sapiens
gaccttccctgagca

SEQ ID NO: 550717 - DNA, 15 bp, Homo sapiens
agaccttccctgagc

SEQ ID NO: 550718 - DNA, 15 bp, Homo sapiens
gagaccttccctgag

SEQ ID NO: 550719 - DNA, 15 bp, Homo sapiens
tgagaccttccctga

SEQ ID NO: 550720 - DNA, 15 bp, Homo sapiens
gtgagaccttccctg

SEQ ID NO: 550721 - DNA, 15 bp, Homo sapiens
cgtgagaccttccct

SEQ ID NO: 550722 - DNA, 15 bp, Homo sapiens
ccgtgagaccttccc

SEQ ID NO: 550723 - DNA, 15 bp, Homo sapiens
tccgtgagaccttcc

SEQ ID NO: 550724 - DNA, 15 bp, Homo sapiens
ctccgtgagaccttc

SEQ ID NO: 550725 - DNA, 15 bp, Homo sapiens
tctccgtgagacctt

SEQ ID NO: 550726 - DNA, 15 bp, Homo sapiens
ttctccgtgagacct

SEQ ID NO: 550727 - DNA, 15 bp, Homo sapiens
tttctccgtgagacc

SEQ ID NO: 550728 - DNA, 15 bp, Homo sapiens
ctttctccgtgagac

SEQ ID NO: 550729 - DNA, 15 bp, Homo sapiens
actttctccgtgaga

SEQ ID NO: 550730 - DNA, 15 bp, Homo sapiens
cactttctccgtgag

SEQ ID NO: 550731 - DNA, 15 bp, Homo sapiens
tcactttctccgtga

SEQ ID NO: 550732 - DNA, 15 bp, Homo sapiens
gtcactttctccgtg

SEQ ID NO: 550733 - DNA, 15 bp, Homo sapiens
agtcactttctccgt

SEQ ID NO: 550734 - DNA, 15 bp, Homo sapiens
aagtcactttctccg

SEQ ID NO: 550735 - DNA, 15 bp, Homo sapiens
aaagtcactttctcc

SEQ ID NO: 550736 - DNA, 15 bp, Homo sapiens
taaagtcactttctc

SEQ ID NO: 550737 - DNA, 15 bp, Homo sapiens
ctaaagtcactttct

SEQ ID NO: 550738 - DNA, 15 bp, Homo sapiens
tctaaagtcactttc

SEQ ID NO: 550739 - DNA, 15 bp, Homo sapiens
gtctaaagtcacttt

SEQ ID NO: 550740 - DNA, 15 bp, Homo sapiens
agtctaaagtcactt

SEQ ID NO: 550741 - DNA, 15 bp, Homo sapiens
aagtctaaagtcact

SEQ ID NO: 550742 - DNA, 15 bp, Homo sapiens
caagtctaaagtcac

SEQ ID NO: 550743 - DNA, 15 bp, Homo sapiens
tcaagtctaaagtca

SEQ ID NO: 550744 - DNA, 15 bp, Homo sapiens
ctcaagtctaaagtc

SEQ ID NO: 550745 - DNA, 15 bp, Homo sapiens
tctcaagtctaaagt

SEQ ID NO: 550746 - DNA, 15 bp, Homo sapiens
ttctcaagtctaaag

SEQ ID NO: 550747 - DNA, 15 bp, Homo sapiens
cttctcaagtctaaa

SEQ ID NO: 550748 - DNA, 15 bp, Homo sapiens
acttctcaagtctaa

SEQ ID NO: 550749 - DNA, 15 bp, Homo sapiens
cacttctcaagtcta

SEQ ID NO: 550750 - DNA, 15 bp, Homo sapiens
tcacttctcaagtct

SEQ ID NO: 550751 - DNA, 15 bp, Homo sapiens
ctcacttctcaagtc

SEQ ID NO: 550752 - DNA, 15 bp, Homo sapiens
cctcacttctcaagt

SEQ ID NO: 550753 - DNA, 15 bp, Homo sapiens
ccctcacttctcaag

SEQ ID NO: 550754 - DNA, 15 bp, Homo sapiens
cccctcacttctcaa

SEQ ID NO: 550755 - DNA, 15 bp, Homo sapiens
gcccctcacttctca

SEQ ID NO: 550756 - DNA, 15 bp, Homo sapiens
agcccctcacttctc

SEQ ID NO: 550757 - DNA, 15 bp, Homo sapiens
gagcccctcacttct

SEQ ID NO: 550758 - DNA, 15 bp, Homo sapiens
tgagcccctcacttc

SEQ ID NO: 550759 - DNA, 15 bp, Homo sapiens
gtgagcccctcactt

SEQ ID NO: 550760 - DNA, 15 bp, Homo sapiens
agtgagcccctcact

SEQ ID NO: 550761 - DNA, 15 bp, Homo sapiens
aagtgagcccctcac

SEQ ID NO: 550762 - DNA, 15 bp, Homo sapiens
aaagtgagcccctca

SEQ ID NO: 550763 - DNA, 15 bp, Homo sapiens
aaaagtgagcccctc

SEQ ID NO: 550764 - DNA, 15 bp, Homo sapiens
caaaagtgagcccct

SEQ ID NO: 550765 - DNA, 15 bp, Homo sapiens
acaaaagtgagcccc

SEQ ID NO: 550766 - DNA, 15 bp, Homo sapiens
cacaaaagtgagccc

SEQ ID NO: 550767 - DNA, 15 bp, Homo sapiens
ccacaaaagtgagcc

SEQ ID NO: 550768 - DNA, 15 bp, Homo sapiens
cccacaaaagtgagc

SEQ ID NO: 550769 - DNA, 15 bp, Homo sapiens
gcccacaaaagtgag

SEQ ID NO: 550770 - DNA, 15 bp, Homo sapiens
tgcccacaaaagtga

SEQ ID NO: 550771 - DNA, 15 bp, Homo sapiens
atgcccacaaaagtg

SEQ ID NO: 550772 - DNA, 15 bp, Homo sapiens
gatgcccacaaaagt

SEQ ID NO: 550773 - DNA, 15 bp, Homo sapiens
tgatgcccacaaaag

SEQ ID NO: 550774 - DNA, 15 bp, Homo sapiens
ctgatgcccacaaaa

SEQ ID NO: 550775 - DNA, 15 bp, Homo sapiens
cctgatgcccacaaa

SEQ ID NO: 550776 - DNA, 15 bp, Homo sapiens
ccctgatgcccacaa

SEQ ID NO: 550777 - DNA, 15 bp, Homo sapiens
cccctgatgcccaca

SEQ ID NO: 550778 - DNA, 15 bp, Homo sapiens
tcccctgatgcccac

SEQ ID NO: 550779 - DNA, 15 bp, Homo sapiens
ttcccctgatgccca

SEQ ID NO: 550780 - DNA, 15 bp, Homo sapiens
tttcccctgatgccc

SEQ ID NO: 550781 - DNA, 15 bp, Homo sapiens
ctttcccctgatgcc

SEQ ID NO: 550782 - DNA, 15 bp, Homo sapiens
tctttcccctgatgc

SEQ ID NO: 550783 - DNA, 15 bp, Homo sapiens
atctttcccctgatg

SEQ ID NO: 550784 - DNA, 15 bp, Homo sapiens
aatctttcccctgat

SEQ ID NO: 550785 - DNA, 15 bp, Homo sapiens
caatctttcccctga

SEQ ID NO: 550786 - DNA, 15 bp, Homo sapiens
gcaatctttcccctg

SEQ ID NO: 550787 - DNA, 15 bp, Homo sapiens
ggcaatctttcccct

SEQ ID NO: 550788 - DNA, 15 bp, Homo sapiens
gggcaatctttcccc

SEQ ID NO: 550789 - DNA, 15 bp, Homo sapiens
ggggcaatctttccc

SEQ ID NO: 550790 - DNA, 15 bp, Homo sapiens
aggggcaatctttcc

SEQ ID NO: 550791 - DNA, 15 bp, Homo sapiens
caggggcaatctttc

SEQ ID NO: 550792 - DNA, 15 bp, Homo sapiens
ccaggggcaatcttt

SEQ ID NO: 550793 - DNA, 15 bp, Homo sapiens
tccaggggcaatctt

SEQ ID NO: 550794 - DNA, 15 bp, Homo sapiens
ctccaggggcaatct

SEQ ID NO: 550795 - DNA, 15 bp, Homo sapiens
cctccaggggcaatc

SEQ ID NO: 550796 - DNA, 15 bp, Homo sapiens
tcctccaggggcaat

SEQ ID NO: 550797 - DNA, 15 bp, Homo sapiens
ctcctccaggggcaa

SEQ ID NO: 550798 - DNA, 15 bp, Homo sapiens
gctcctccaggggca

SEQ ID NO: 550799 - DNA, 15 bp, Homo sapiens
tgctcctccaggggc

SEQ ID NO: 550800 - DNA, 15 bp, Homo sapiens
ttgctcctccagggg

SEQ ID NO: 550801 - DNA, 15 bp, Homo sapiens
tttgctcctccaggg

SEQ ID NO: 550802 - DNA, 15 bp, Homo sapiens
ctttgctcctccagg

SEQ ID NO: 550803 - DNA, 15 bp, Homo sapiens
tctttgctcctccag

SEQ ID NO: 550804 - DNA, 15 bp, Homo sapiens
ctctttgctcctcca

SEQ ID NO: 550805 - DNA, 15 bp, Homo sapiens
actctttgctcctcc

SEQ ID NO: 550806 - DNA, 15 bp, Homo sapiens
gactctttgctcctc

SEQ ID NO: 550807 - DNA, 15 bp, Homo sapiens
tgactctttgctcct

SEQ ID NO: 550808 - DNA, 15 bp, Homo sapiens
ctgactctttgctcc

SEQ ID NO: 550809 - DNA, 15 bp, Homo sapiens
actgactctttgctc

SEQ ID NO: 550810 - DNA, 15 bp, Homo sapiens
cactgactctttgct

SEQ ID NO: 550811 - DNA, 15 bp, Homo sapiens
gcactgactctttgc

SEQ ID NO: 550812 - DNA, 15 bp, Homo sapiens
tgcactgactctttg

SEQ ID NO: 550813 - DNA, 15 bp, Homo sapiens
ttgcactgactcttt

SEQ ID NO: 550814 - DNA, 15 bp, Homo sapiens
tttgcactgactctt

SEQ ID NO: 550815 - DNA, 15 bp, Homo sapiens
ctttgcactgactct

SEQ ID NO: 550816 - DNA, 15 bp, Homo sapiens
cctttgcactgactc

SEQ ID NO: 550817 - DNA, 15 bp, Homo sapiens
gcctttgcactgact

SEQ ID NO: 550818 - DNA, 15 bp, Homo sapiens
ggcctttgcactgac

SEQ ID NO: 550819 - DNA, 15 bp, Homo sapiens
gggcctttgcactga

SEQ ID NO: 550820 - DNA, 15 bp, Homo sapiens
agggcctttgcactg

SEQ ID NO: 550821 - DNA, 15 bp, Homo sapiens
cagggcctttgcact

SEQ ID NO: 550822 - DNA, 15 bp, Homo sapiens
acagggcctttgcac

SEQ ID NO: 550823 - DNA, 15 bp, Homo sapiens
cacagggcctttgca

SEQ ID NO: 550824 - DNA, 15 bp, Homo sapiens
ccacagggcctttgc

SEQ ID NO: 550825 - DNA, 15 bp, Homo sapiens
gccacagggcctttg

SEQ ID NO: 550826 - DNA, 15 bp, Homo sapiens
tgccacagggccttt

SEQ ID NO: 550827 - DNA, 15 bp, Homo sapiens
ctgccacagggcctt

SEQ ID NO: 550828 - DNA, 15 bp, Homo sapiens
tctgccacagggcct

SEQ ID NO: 550829 - DNA, 15 bp, Homo sapiens
ttctgccacagggcc

SEQ ID NO: 550830 - DNA, 15 bp, Homo sapiens
tttctgccacagggc

SEQ ID NO: 550831 - DNA, 15 bp, Homo sapiens
gtttctgccacaggg

SEQ ID NO: 550832 - DNA, 15 bp, Homo sapiens
agtttctgccacagg

SEQ ID NO: 550833 - DNA, 15 bp, Homo sapiens
aagtttctgccacag

SEQ ID NO: 550834 - DNA, 15 bp, Homo sapiens
caagtttctgccaca

SEQ ID NO: 550835 - DNA, 15 bp, Homo sapiens
gcaagtttctgccac

SEQ ID NO: 550836 - DNA, 15 bp, Homo sapiens
ggcaagtttctgcca

SEQ ID NO: 550837 - DNA, 15 bp, Homo sapiens
aggcaagtttctgcc

SEQ ID NO: 550838 - DNA, 15 bp, Homo sapiens
caggcaagtttctgc

SEQ ID NO: 550839 - DNA, 15 bp, Homo sapiens
ccaggcaagtttctg

SEQ ID NO: 550840 - DNA, 15 bp, Homo sapiens
accaggcaagtttct

SEQ ID NO: 550841 - DNA, 15 bp, Homo sapiens
caccaggcaagtttc

SEQ ID NO: 550842 - DNA, 15 bp, Homo sapiens
ccaccaggcaagttt

SEQ ID NO: 550843 - DNA, 15 bp, Homo sapiens
gccaccaggcaagtt

SEQ ID NO: 550844 - DNA, 15 bp, Homo sapiens
agccaccaggcaagt

SEQ ID NO: 550845 - DNA, 15 bp, Homo sapiens
gagccaccaggcaag

SEQ ID NO: 550846 - DNA, 15 bp, Homo sapiens
tgagccaccaggcaa

SEQ ID NO: 550847 - DNA, 15 bp, Homo sapiens
ctgagccaccaggca

SEQ ID NO: 550848 - DNA, 15 bp, Homo sapiens
cctgagccaccaggc

SEQ ID NO: 550849 - DNA, 15 bp, Homo sapiens
tcctgagccaccagg

SEQ ID NO: 550850 - DNA, 15 bp, Homo sapiens
ctcctgagccaccag

SEQ ID NO: 550851 - DNA, 15 bp, Homo sapiens
gctcctgagccacca

SEQ ID NO: 550852 - DNA, 15 bp, Homo sapiens
tgctcctgagccacc

SEQ ID NO: 550853 - DNA, 15 bp, Homo sapiens
gtgctcctgagccac

SEQ ID NO: 550854 - DNA, 15 bp, Homo sapiens
tgtgctcctgagcca

SEQ ID NO: 550855 - DNA, 15 bp, Homo sapiens
ctgtgctcctgagcc

SEQ ID NO: 550856 - DNA, 15 bp, Homo sapiens
gctgtgctcctgagc

SEQ ID NO: 550857 - DNA, 15 bp, Homo sapiens
tgctgtgctcctgag

SEQ ID NO: 550858 - DNA, 15 bp, Homo sapiens
ttgctgtgctcctga

SEQ ID NO: 550859 - DNA, 15 bp, Homo sapiens
cttgctgtgctcctg

SEQ ID NO: 550860 - DNA, 15 bp, Homo sapiens
ccttgctgtgctcct

SEQ ID NO: 550861 - DNA, 15 bp, Homo sapiens
gccttgctgtgctcc

SEQ ID NO: 550862 - DNA, 15 bp, Homo sapiens
ggccttgctgtgctc

SEQ ID NO: 550863 - DNA, 15 bp, Homo sapiens
tggccttgctgtgct

SEQ ID NO: 550864 - DNA, 15 bp, Homo sapiens
ctggccttgctgtgc

SEQ ID NO: 550865 - DNA, 15 bp, Homo sapiens
actggccttgctgtg

SEQ ID NO: 550866 - DNA, 15 bp, Homo sapiens
cactggccttgctgt

SEQ ID NO: 550867 - DNA, 15 bp, Homo sapiens
acactggccttgctg

SEQ ID NO: 550868 - DNA, 15 bp, Homo sapiens
cacactggccttgct

SEQ ID NO: 550869 - DNA, 15 bp, Homo sapiens
ccacactggccttgc

SEQ ID NO: 550870 - DNA, 15 bp, Homo sapiens
gccacactggccttg

SEQ ID NO: 550871 - DNA, 15 bp, Homo sapiens
agccacactggcctt

SEQ ID NO: 550872 - DNA, 15 bp, Homo sapiens
cagccacactggcct

SEQ ID NO: 550873 - DNA, 15 bp, Homo sapiens
ccagccacactggcc

SEQ ID NO: 550874 - DNA, 15 bp, Homo sapiens
tccagccacactggc

SEQ ID NO: 550875 - DNA, 15 bp, Homo sapiens
ctccagccacactgg

SEQ ID NO: 550876 - DNA, 15 bp, Homo sapiens
gctccagccacactg

SEQ ID NO: 550877 - DNA, 15 bp, Homo sapiens
tgctccagccacact

SEQ ID NO: 550878 - DNA, 15 bp, Homo sapiens
ctgctccagccacac

SEQ ID NO: 550879 - DNA, 15 bp, Homo sapiens
tcactctgctccagc

SEQ ID NO: 550880 - DNA, 15 bp, Homo sapiens
ctcactctgctccag

SEQ ID NO: 550881 - DNA, 15 bp, Homo sapiens
gctcactctgctcca

SEQ ID NO: 550882 - DNA, 15 bp, Homo sapiens
cgctcactctgctcc

SEQ ID NO: 550883 - DNA, 15 bp, Homo sapiens
tcgctcactctgctc

SEQ ID NO: 550884 - DNA, 15 bp, Homo sapiens
ctcgctcactctgct

SEQ ID NO: 550885 - DNA, 15 bp, Homo sapiens
cctcgctcactctgc

SEQ ID NO: 550886 - DNA, 15 bp, Homo sapiens
gcctcgctcactctg

SEQ ID NO: 550887 - DNA, 15 bp, Homo sapiens
tgcctcgctcactct

SEQ ID NO: 550888 - DNA, 15 bp, Homo sapiens
ctgcctcgctcactc

SEQ ID NO: 550889 - DNA, 15 bp, Homo sapiens
tctgcctcgctcact

SEQ ID NO: 550890 - DNA, 15 bp, Homo sapiens
atctgcctcgctcac

SEQ ID NO: 550891 - DNA, 15 bp, Homo sapiens
tatctgcctcgctca

SEQ ID NO: 550892 - DNA, 15 bp, Homo sapiens
ctatctgcctcgctc

SEQ ID NO: 550893 - DNA, 15 bp, Homo sapiens
cctatctgcctcgct

SEQ ID NO: 550894 - DNA, 15 bp, Homo sapiens
tcctatctgcctcgc

SEQ ID NO: 550895 - DNA, 15 bp, Homo sapiens
ttcctatctgcctcg

SEQ ID NO: 550896 - DNA, 15 bp, Homo sapiens
attcctatctgcctc

SEQ ID NO: 550897 - DNA, 15 bp, Homo sapiens
cattcctatctgcct

SEQ ID NO: 550898 - DNA, 15 bp, Homo sapiens
ccattcctatctgcc

SEQ ID NO: 550899 - DNA, 15 bp, Homo sapiens
cccattcctatctgc

SEQ ID NO: 550900 - DNA, 15 bp, Homo sapiens
ccccattcctatctg

SEQ ID NO: 550901 - DNA, 15 bp, Homo sapiens
cccccattcctatct

SEQ ID NO: 550902 - DNA, 15 bp, Homo sapiens
tcccccattcctatc

SEQ ID NO: 550903 - DNA, 15 bp, Homo sapiens
ctcccccattcctat

SEQ ID NO: 550904 - DNA, 15 bp, Homo sapiens
cctcccccattccta

SEQ ID NO: 550905 - DNA, 15 bp, Homo sapiens
tcctcccccattcct

SEQ ID NO: 550906 - DNA, 15 bp, Homo sapiens
ctcctcccccattcc

SEQ ID NO: 550907 - DNA, 15 bp, Homo sapiens
tctcctcccccattc

SEQ ID NO: 550908 - DNA, 15 bp, Homo sapiens
gtctcctcccccatt

SEQ ID NO: 550909 - DNA, 15 bp, Homo sapiens
agtctcctcccccat

SEQ ID NO: 550910 - DNA, 15 bp, Homo sapiens
cagtctcctccccca

SEQ ID NO: 550911 - DNA, 15 bp, Homo sapiens
ccagtctcctccccc

SEQ ID NO: 550912 - DNA, 15 bp, Homo sapiens
tccagtctcctcccc

SEQ ID NO: 550913 - DNA, 15 bp, Homo sapiens
ctccagtctcctccc

SEQ ID NO: 550914 - DNA, 15 bp, Homo sapiens
actccagtctcctcc

SEQ ID NO: 550915 - DNA, 15 bp, Homo sapiens
cactccagtctcctc

SEQ ID NO: 550916 - DNA, 15 bp, Homo sapiens
tcactccagtctcct

SEQ ID NO: 550917 - DNA, 15 bp, Homo sapiens
gtcactccagtctcc

SEQ ID NO: 550918 - DNA, 15 bp, Homo sapiens
agtcactccagtctc

SEQ ID NO: 550919 - DNA, 15 bp, Homo sapiens
tagtcactccagtct

SEQ ID NO: 550920 - DNA, 15 bp, Homo sapiens
atagtcactccagtc

SEQ ID NO: 550921 - DNA, 15 bp, Homo sapiens
tatagtcactccagt

SEQ ID NO: 550922 - DNA, 15 bp, Homo sapiens
ctatagtcactccag

SEQ ID NO: 550923 - DNA, 15 bp, Homo sapiens
cctatagtcactcca

SEQ ID NO: 550924 - DNA, 15 bp, Homo sapiens
ccctatagtcactcc

SEQ ID NO: 550925 - DNA, 15 bp, Homo sapiens
tccctatagtcactc

SEQ ID NO: 550926 - DNA, 15 bp, Homo sapiens
ctccctatagtcact

SEQ ID NO: 550927 - DNA, 15 bp, Homo sapiens
gctccctatagtcac

SEQ ID NO: 550928 - DNA, 15 bp, Homo sapiens
agctccctatagtca

SEQ ID NO: 550929 - DNA, 15 bp, Homo sapiens
cagctccctatagtc

SEQ ID NO: 550930 - DNA, 15 bp, Homo sapiens
ccagctccctatagt

SEQ ID NO: 550931 - DNA, 15 bp, Homo sapiens
cccagctccctatag

SEQ ID NO: 550932 - DNA, 15 bp, Homo sapiens
acccagctccctata

SEQ ID NO: 550933 - DNA, 15 bp, Homo sapiens
aacccagctccctat

SEQ ID NO: 550934 - DNA, 15 bp, Homo sapiens
caacccagctcccta

SEQ ID NO: 550935 - DNA, 15 bp, Homo sapiens
acaacccagctccct

SEQ ID NO: 550936 - DNA, 15 bp, Homo sapiens
cacaacccagctccc

SEQ ID NO: 550937 - DNA, 15 bp, Homo sapiens
gcacaacccagctcc

SEQ ID NO: 550938 - DNA, 15 bp, Homo sapiens
tgcacaacccagctc

SEQ ID NO: 550939 - DNA, 15 bp, Homo sapiens
ttgcacaacccagct

SEQ ID NO: 550940 - DNA, 15 bp, Homo sapiens
cttgcacaacccagc

SEQ ID NO: 550941 - DNA, 15 bp, Homo sapiens
tcttgcacaacccag

SEQ ID NO: 550942 - DNA, 15 bp, Homo sapiens
gtcttgcacaaccca

SEQ ID NO: 550943 - DNA, 15 bp, Homo sapiens
ggtcttgcacaaccc

SEQ ID NO: 550944 - DNA, 15 bp, Homo sapiens
aggtcttgcacaacc

SEQ ID NO: 550945 - DNA, 15 bp, Homo sapiens
gaggtcttgcacaac

SEQ ID NO: 550946 - DNA, 15 bp, Homo sapiens
tgaggtcttgcacaa

SEQ ID NO: 550947 - DNA, 15 bp, Homo sapiens
atgaggtcttgcaca

SEQ ID NO: 550948 - DNA, 15 bp, Homo sapiens
tatgaggtcttgcac

SEQ ID NO: 550949 - DNA, 15 bp, Homo sapiens
ctatgaggtcttgca

SEQ ID NO: 550950 - DNA, 15 bp, Homo sapiens
cctatgaggtcttgc

SEQ ID NO: 550951 - DNA, 15 bp, Homo sapiens
acctatgaggtcttg

SEQ ID NO: 550952 - DNA, 15 bp, Homo sapiens
gacctatgaggtctt

SEQ ID NO: 550953 - DNA, 15 bp, Homo sapiens
tgacctatgaggtct

SEQ ID NO: 550954 - DNA, 15 bp, Homo sapiens
gtgacctatgaggtc

SEQ ID NO: 550955 - DNA, 15 bp, Homo sapiens
agtgacctatgaggt

SEQ ID NO: 550956 - DNA, 15 bp, Homo sapiens
cagtgacctatgagg

SEQ ID NO: 550957 - DNA, 15 bp, Homo sapiens
acagtgacctatgag

SEQ ID NO: 550958 - DNA, 15 bp, Homo sapiens
gacagtgacctatga

SEQ ID NO: 550959 - DNA, 15 bp, Homo sapiens
tgacagtgacctatg

SEQ ID NO: 550960 - DNA, 15 bp, Homo sapiens
ctgacagtgacctat

SEQ ID NO: 550961 - DNA, 15 bp, Homo sapiens
cctgacagtgaccta

SEQ ID NO: 550962 - DNA, 15 bp, Homo sapiens
tcctgacagtgacct

SEQ ID NO: 550963 - DNA, 15 bp, Homo sapiens
ttcctgacagtgacc

SEQ ID NO: 550964 - DNA, 15 bp, Homo sapiens
attcctgacagtgac

SEQ ID NO: 550965 - DNA, 15 bp, Homo sapiens
aattcctgacagtga

SEQ ID NO: 550966 - DNA, 15 bp, Homo sapiens
aaattcctgacagtg

SEQ ID NO: 550967 - DNA, 15 bp, Homo sapiens
taaattcctgacagt

SEQ ID NO: 550968 - DNA, 15 bp, Homo sapiens
ctaaattcctgacag

SEQ ID NO: 550969 - DNA, 15 bp, Homo sapiens
tctaaattcctgaca

SEQ ID NO: 550970 - DNA, 15 bp, Homo sapiens
atctaaattcctgac

SEQ ID NO: 550971 - DNA, 15 bp, Homo sapiens
aatctaaattcctga

SEQ ID NO: 550972 - DNA, 15 bp, Homo sapiens
gaatctaaattcctg

SEQ ID NO: 550973 - DNA, 15 bp, Homo sapiens
agaatctaaattcct

SEQ ID NO: 550974 - DNA, 15 bp, Homo sapiens
tagaatctaaattcc

SEQ ID NO: 550975 - DNA, 15 bp, Homo sapiens
atagaatctaaattc

SEQ ID NO: 550976 - DNA, 15 bp, Homo sapiens
aatagaatctaaatt

SEQ ID NO: 550977 - DNA, 15 bp, Homo sapiens
gaatagaatctaaat

SEQ ID NO: 550978 - DNA, 15 bp, Homo sapiens
agaatagaatctaaa

SEQ ID NO: 550979 - DNA, 15 bp, Homo sapiens
cagaatagaatctaa

SEQ ID NO: 550980 - DNA, 15 bp, Homo sapiens
tcagaatagaatcta

SEQ ID NO: 550981 - DNA, 15 bp, Homo sapiens
ctcagaatagaatct

SEQ ID NO: 550982 - DNA, 15 bp, Homo sapiens
tctcagaatagaatc

SEQ ID NO: 550983 - DNA, 15 bp, Homo sapiens
atctcagaatagaat

SEQ ID NO: 550984 - DNA, 15 bp, Homo sapiens
tatctcagaatagaa

SEQ ID NO: 550985 - DNA, 15 bp, Homo sapiens
ttatctcagaataga

SEQ ID NO: 550986 - DNA, 15 bp, Homo sapiens
tttatctcagaatag

SEQ ID NO: 550987 - DNA, 15 bp, Homo sapiens
atttatctcagaata

SEQ ID NO: 550988 - DNA, 15 bp, Homo sapiens
tatttatctcagaat

SEQ ID NO: 550989 - DNA, 15 bp, Homo sapiens
ctatttatctcagaa

SEQ ID NO: 550990 - DNA, 15 bp, Homo sapiens
cctatttatctcaga

SEQ ID NO: 550991 - DNA, 15 bp, Homo sapiens
ccctatttatctcag

SEQ ID NO: 550992 - DNA, 15 bp, Homo sapiens
tccctatttatctca

SEQ ID NO: 550993 - DNA, 15 bp, Homo sapiens
ctccctatttatctc

SEQ ID NO: 550994 - DNA, 15 bp, Homo sapiens
cctccctatttatct

SEQ ID NO: 550995 - DNA, 15 bp, Homo sapiens
gcctccctatttatc

SEQ ID NO: 550996 - DNA, 15 bp, Homo sapiens
tgcctccctatttat

SEQ ID NO: 550997 - DNA, 15 bp, Homo sapiens
atgcctccctattta

SEQ ID NO: 550998 - DNA, 15 bp, Homo sapiens
catgcctccctattt

SEQ ID NO: 550999 - DNA, 15 bp, Homo sapiens
ccatgcctccctatt

SEQ ID NO: 551000 - DNA, 15 bp, Homo sapiens
cccatgcctccctat

SEQ ID NO: 551001 - DNA, 15 bp, Homo sapiens
ccccatgcctcccta

SEQ ID NO: 551002 - DNA, 15 bp, Homo sapiens
cccccatgcctccct

SEQ ID NO: 551003 - DNA, 15 bp, Homo sapiens
tcccccatgcctccc

SEQ ID NO: 551004 - DNA, 15 bp, Homo sapiens
ctcccccatgcctcc

SEQ ID NO: 551005 - DNA, 15 bp, Homo sapiens
cctcccccatgcctc

SEQ ID NO: 551006 - DNA, 15 bp, Homo sapiens
acctcccccatgcct

SEQ ID NO: 551007 - DNA, 15 bp, Homo sapiens
aacctcccccatgcc

SEQ ID NO: 551008 - DNA, 15 bp, Homo sapiens
aaacctcccccatgc

SEQ ID NO: 551009 - DNA, 15 bp, Homo sapiens
caaacctcccccatg

SEQ ID NO: 551010 - DNA, 15 bp, Homo sapiens
tcaaacctcccccat

SEQ ID NO: 551011 - DNA, 15 bp, Homo sapiens
ctcaaacctccccca

SEQ ID NO: 551012 - DNA, 15 bp, Homo sapiens
gctcaaacctccccc

SEQ ID NO: 551013 - DNA, 15 bp, Homo sapiens
tgctcaaacctcccc

SEQ ID NO: 551014 - DNA, 15 bp, Homo sapiens
ctgctcaaacctccc

SEQ ID NO: 551015 - DNA, 15 bp, Homo sapiens
tctgctcaaacctcc

SEQ ID NO: 551016 - DNA, 15 bp, Homo sapiens
ttctgctcaaacctc

SEQ ID NO: 551017 - DNA, 15 bp, Homo sapiens
attctgctcaaacct

SEQ ID NO: 551018 - DNA, 15 bp, Homo sapiens
cattctgctcaaacc

SEQ ID NO: 551019 - DNA, 15 bp, Homo sapiens
tcattctgctcaaac

SEQ ID NO: 551020 - DNA, 15 bp, Homo sapiens
gtcattctgctcaaa

SEQ ID NO: 551021 - DNA, 15 bp, Homo sapiens
tgtcattctgctcaa

SEQ ID NO: 551022 - DNA, 15 bp, Homo sapiens
atgtcattctgctca

SEQ ID NO: 551023 - DNA, 15 bp, Homo sapiens
catgtcattctgctc

SEQ ID NO: 551024 - DNA, 15 bp, Homo sapiens
gcatgtcattctgct

SEQ ID NO: 551025 - DNA, 15 bp, Homo sapiens
agcatgtcattctgc

SEQ ID NO: 551026 - DNA, 15 bp, Homo sapiens
gagcatgtcattctg

SEQ ID NO: 551027 - DNA, 15 bp, Homo sapiens
agagcatgtcattct

SEQ ID NO: 551028 - DNA, 15 bp, Homo sapiens
cagagcatgtcattc

SEQ ID NO: 551029 - DNA, 15 bp, Homo sapiens
tcagagcatgtcatt

SEQ ID NO: 551030 - DNA, 15 bp, Homo sapiens
gtcagagcatgtcat

SEQ ID NO: 551031 - DNA, 15 bp, Homo sapiens
agtcagagcatgtca

SEQ ID NO: 551032 - DNA, 15 bp, Homo sapiens
aagtcagagcatgtc

SEQ ID NO: 551033 - DNA, 15 bp, Homo sapiens
aaagtcagagcatgt

SEQ ID NO: 551034 - DNA, 15 bp, Homo sapiens
taaagtcagagcatg

SEQ ID NO: 551035 - DNA, 15 bp, Homo sapiens
ttaaagtcagagcat

SEQ ID NO: 551036 - DNA, 15 bp, Homo sapiens
attaaagtcagagca

SEQ ID NO: 551037 - DNA, 15 bp, Homo sapiens
gattaaagtcagagc

SEQ ID NO: 551038 - DNA, 15 bp, Homo sapiens
agattaaagtcagag

SEQ ID NO: 551039 - DNA, 15 bp, Homo sapiens
aagattaaagtcaga

SEQ ID NO: 551040 - DNA, 15 bp, Homo sapiens
taagattaaagtcag

SEQ ID NO: 551041 - DNA, 15 bp, Homo sapiens
ttaagattaaagtca

SEQ ID NO: 551042 - DNA, 15 bp, Homo sapiens
tttaagattaaagtc

SEQ ID NO: 551043 - DNA, 15 bp, Homo sapiens
ttttaagattaaagt

SEQ ID NO: 551044 - DNA, 15 bp, Homo sapiens
cttttaagattaaag

SEQ ID NO: 551045 - DNA, 15 bp, Homo sapiens
ccttttaagattaaa

SEQ ID NO: 551046 - DNA, 15 bp, Homo sapiens
tccttttaagattaa

SEQ ID NO: 551047 - DNA, 15 bp, Homo sapiens
atccttttaagatta

SEQ ID NO: 551048 - DNA, 15 bp, Homo sapiens
tatccttttaagatt

SEQ ID NO: 551049 - DNA, 15 bp, Homo sapiens
ttatccttttaagat

SEQ ID NO: 551050 - DNA, 15 bp, Homo sapiens
gttatccttttaaga

SEQ ID NO: 551051 - DNA, 15 bp, Homo sapiens
agttatccttttaag

SEQ ID NO: 551052 - DNA, 15 bp, Homo sapiens
aagttatccttttaa

SEQ ID NO: 551053 - DNA, 15 bp, Homo sapiens
caagttatcctttta

SEQ ID NO: 551054 - DNA, 15 bp, Homo sapiens
ccaagttatcctttt

SEQ ID NO: 551055 - DNA, 15 bp, Homo sapiens
tccaagttatccttt

SEQ ID NO: 551056 - DNA, 15 bp, Homo sapiens
atccaagttatcctt

SEQ ID NO: 551057 - DNA, 15 bp, Homo sapiens
aatccaagttatcct

SEQ ID NO: 551058 - DNA, 15 bp, Homo sapiens
gaatccaagttatcc

SEQ ID NO: 551059 - DNA, 15 bp, Homo sapiens
agaatccaagttatc

SEQ ID NO: 551060 - DNA, 15 bp, Homo sapiens
cagaatccaagttat

SEQ ID NO: 551061 - DNA, 15 bp, Homo sapiens
acagaatccaagtta

SEQ ID NO: 551062 - DNA, 15 bp, Homo sapiens
cacagaatccaagtt

SEQ ID NO: 551063 - DNA, 15 bp, Homo sapiens
ccacagaatccaagt

SEQ ID NO: 551064 - DNA, 15 bp, Homo sapiens
cccacagaatccaag

SEQ ID NO: 551065 - DNA, 15 bp, Homo sapiens
ccccacagaatccaa

SEQ ID NO: 551066 - DNA, 15 bp, Homo sapiens
tccccacagaatcca

SEQ ID NO: 551067 - DNA, 15 bp, Homo sapiens
ctccccacagaatcc

SEQ ID NO: 551068 - DNA, 15 bp, Homo sapiens
tctccccacagaatc

SEQ ID NO: 551069 - DNA, 15 bp, Homo sapiens
ttctccccacagaat

SEQ ID NO: 551070 - DNA, 15 bp, Homo sapiens
gttctccccacagaa

SEQ ID NO: 551071 - DNA, 15 bp, Homo sapiens
cgttctccccacaga

SEQ ID NO: 551072 - DNA, 15 bp, Homo sapiens
ccgttctccccacag

SEQ ID NO: 551073 - DNA, 15 bp, Homo sapiens
cccgttctccccaca

SEQ ID NO: 551074 - DNA, 15 bp, Homo sapiens
ccccgttctccccac

SEQ ID NO: 551075 - DNA, 15 bp, Homo sapiens
gccccgttctcccca

SEQ ID NO: 551076 - DNA, 15 bp, Homo sapiens
cgccccgttctcccc

SEQ ID NO: 551077 - DNA, 15 bp, Homo sapiens
ccgccccgttctccc

SEQ ID NO: 551078 - DNA, 15 bp, Homo sapiens
cccgccccgttctcc

SEQ ID NO: 551079 - DNA, 15 bp, Homo sapiens
ccccgccccgttctc

SEQ ID NO: 551080 - DNA, 15 bp, Homo sapiens
cccccgccccgttct

SEQ ID NO: 551081 - DNA, 15 bp, Homo sapiens
ccccccgccccgttc

SEQ ID NO: 551082 - DNA, 15 bp, Homo sapiens
gccccccgccccgtt

SEQ ID NO: 551083 - DNA, 15 bp, Homo sapiens
tgccccccgccccgt

SEQ ID NO: 551084 - DNA, 15 bp, Homo sapiens
ttgccccccgccccg

SEQ ID NO: 551085 - DNA, 15 bp, Homo sapiens
cttgccccccgcccc

SEQ ID NO: 551086 - DNA, 15 bp, Homo sapiens
tcttgccccccgccc

SEQ ID NO: 551087 - DNA, 15 bp, Homo sapiens
ctcttgccccccgcc

SEQ ID NO: 551088 - DNA, 15 bp, Homo sapiens
gctcttgccccccgc

SEQ ID NO: 551089 - DNA, 15 bp, Homo sapiens
tgctcttgccccccg

SEQ ID NO: 551090 - DNA, 15 bp, Homo sapiens
ctgctcttgcccccc

SEQ ID NO: 551091 - DNA, 15 bp, Homo sapiens
tctgctcttgccccc

SEQ ID NO: 551092 - DNA, 15 bp, Homo sapiens
ctctgctcttgcccc

SEQ ID NO: 551093 - DNA, 15 bp, Homo sapiens
cctctgctcttgccc

SEQ ID NO: 551094 - DNA, 15 bp, Homo sapiens
gcctctgctcttgcc

SEQ ID NO: 551095 - DNA, 15 bp, Homo sapiens
tgcctctgctcttgc

SEQ ID NO: 551096 - DNA, 15 bp, Homo sapiens
ctgcctctgctcttg

SEQ ID NO: 551097 - DNA, 15 bp, Homo sapiens
cctgcctctgctctt

SEQ ID NO: 551098 - DNA, 15 bp, Homo sapiens
tcctgcctctgctct

SEQ ID NO: 551099 - DNA, 15 bp, Homo sapiens
ttcctgcctctgctc

SEQ ID NO: 551100 - DNA, 15 bp, Homo sapiens
tttcctgcctctgct

SEQ ID NO: 551101 - DNA, 15 bp, Homo sapiens
ttttcctgcctctgc

SEQ ID NO: 551102 - DNA, 15 bp, Homo sapiens
gttttcctgcctctg

SEQ ID NO: 551103 - DNA, 15 bp, Homo sapiens
tgttttcctgcctct

SEQ ID NO: 551104 - DNA, 15 bp, Homo sapiens
ctgttttcctgcctc

SEQ ID NO: 551105 - DNA, 15 bp, Homo sapiens
gctgttttcctgcct

SEQ ID NO: 551106 - DNA, 15 bp, Homo sapiens
cgctgttttcctgcc

SEQ ID NO: 551107 - DNA, 15 bp, Homo sapiens
ccgctgttttcctgc

SEQ ID NO: 551108 - DNA, 15 bp, Homo sapiens
cccgctgttttcctg

SEQ ID NO: 551109 - DNA, 15 bp, Homo sapiens
ccccgctgttttcct

SEQ ID NO: 551110 - DNA, 15 bp, Homo sapiens
tccccgctgttttcc

SEQ ID NO: 551111 - DNA, 15 bp, Homo sapiens
ttccccgctgttttc

SEQ ID NO: 551112 - DNA, 15 bp, Homo sapiens
tttccccgctgtttt

SEQ ID NO: 551113 - DNA, 15 bp, Homo sapiens
gtttccccgctgttt

SEQ ID NO: 551114 - DNA, 15 bp, Homo sapiens
agtttccccgctgtt

SEQ ID NO: 551115 - DNA, 15 bp, Homo sapiens
tagtttccccgctgt

SEQ ID NO: 551116 - DNA, 15 bp, Homo sapiens
gtagtttccccgctg

SEQ ID NO: 551117 - DNA, 15 bp, Homo sapiens
cgtagtttccccgct

SEQ ID NO: 551118 - DNA, 15 bp, Homo sapiens
ccgtagtttccccgc

SEQ ID NO: 551119 - DNA, 15 bp, Homo sapiens
gccgtagtttccccg

SEQ ID NO: 551120 - DNA, 15 bp, Homo sapiens
tgccgtagtttcccc

SEQ ID NO: 551121 - DNA, 15 bp, Homo sapiens
gtgccgtagtttccc

SEQ ID NO: 551122 - DNA, 15 bp, Homo sapiens
ggtgccgtagtttcc

SEQ ID NO: 551123 - DNA, 15 bp, Homo sapiens
gggtgccgtagtttc

SEQ ID NO: 551124 - DNA, 15 bp, Homo sapiens
tgggtgccgtagttt

SEQ ID NO: 551125 - DNA, 15 bp, Homo sapiens
atgggtgccgtagtt

SEQ ID NO: 551126 - DNA, 15 bp, Homo sapiens
gatgggtgccgtagt

SEQ ID NO: 551127 - DNA, 15 bp, Homo sapiens
ggatgggtgccgtag

SEQ ID NO: 551128 - DNA, 15 bp, Homo sapiens
tggatgggtgccgta

SEQ ID NO: 551129 - DNA, 15 bp, Homo sapiens
atggatgggtgccgt

SEQ ID NO: 551130 - DNA, 15 bp, Homo sapiens
tatggatgggtgccg

SEQ ID NO: 551131 - DNA, 15 bp, Homo sapiens
gtatggatgggtgcc

SEQ ID NO: 551132 - DNA, 15 bp, Homo sapiens
tgtatggatgggtgc

SEQ ID NO: 551133 - DNA, 15 bp, Homo sapiens
ttgtatggatgggtg

SEQ ID NO: 551134 - DNA, 15 bp, Homo sapiens
cttgtatggatgggt

SEQ ID NO: 551135 - DNA, 15 bp, Homo sapiens
gcttgtatggatggg

SEQ ID NO: 551136 - DNA, 15 bp, Homo sapiens
ggcttgtatggatgg

SEQ ID NO: 551137 - DNA, 15 bp, Homo sapiens
tggcttgtatggatg

SEQ ID NO: 551138 - DNA, 15 bp, Homo sapiens
ctggcttgtatggat

SEQ ID NO: 551139 - DNA, 15 bp, Homo sapiens
cctggcttgtatgga

SEQ ID NO: 551140 - DNA, 15 bp, Homo sapiens
tcctggcttgtatgg

SEQ ID NO: 551141 - DNA, 15 bp, Homo sapiens
atcctggcttgtatg

SEQ ID NO: 551142 - DNA, 15 bp, Homo sapiens
catcctggcttgtat

SEQ ID NO: 551143 - DNA, 15 bp, Homo sapiens
ccatcctggcttgta

SEQ ID NO: 551144 - DNA, 15 bp, Homo sapiens
cccatcctggcttgt

SEQ ID NO: 551145 - DNA, 15 bp, Homo sapiens
ccccatcctggcttg

SEQ ID NO: 551146 - DNA, 15 bp, Homo sapiens
cccccatcctggctt

SEQ ID NO: 551147 - DNA, 15 bp, Homo sapiens
gcccccatcctggct

SEQ ID NO: 551148 - DNA, 15 bp, Homo sapiens
ggcccccatcctggc

SEQ ID NO: 551149 - DNA, 15 bp, Homo sapiens
tggcccccatcctgg

SEQ ID NO: 551150 - DNA, 15 bp, Homo sapiens
ctggcccccatcctg

SEQ ID NO: 551151 - DNA, 15 bp, Homo sapiens
cctggcccccatcct

SEQ ID NO: 551152 - DNA, 15 bp, Homo sapiens
tcctggcccccatcc

SEQ ID NO: 551153 - DNA, 15 bp, Homo sapiens
atcctggcccccatc

SEQ ID NO: 551154 - DNA, 15 bp, Homo sapiens
catcctggcccccat

SEQ ID NO: 551155 - DNA, 15 bp, Homo sapiens
ccatcctggccccca

SEQ ID NO: 551156 - DNA, 15 bp, Homo sapiens
accatcctggccccc

SEQ ID NO: 551157 - DNA, 15 bp, Homo sapiens
caccatcctggcccc

SEQ ID NO: 551158 - DNA, 15 bp, Homo sapiens
acaccatcctggccc

SEQ ID NO: 551159 - DNA, 15 bp, Homo sapiens
aacaccatcctggcc

SEQ ID NO: 551160 - DNA, 15 bp, Homo sapiens
caacaccatcctggc

SEQ ID NO: 551161 - DNA, 15 bp, Homo sapiens
ccaacaccatcctgg

SEQ ID NO: 551162 - DNA, 15 bp, Homo sapiens
tccaacaccatcctg

SEQ ID NO: 551163 - DNA, 15 bp, Homo sapiens
ctccaacaccatcct

SEQ ID NO: 551164 - DNA, 15 bp, Homo sapiens
tctccaacaccatcc

SEQ ID NO: 551165 - DNA, 15 bp, Homo sapiens
ctctccaacaccatc

SEQ ID NO: 551166 - DNA, 15 bp, Homo sapiens
tctctccaacaccat

SEQ ID NO: 551167 - DNA, 15 bp, Homo sapiens
ttctctccaacacca

SEQ ID NO: 551168 - DNA, 15 bp, Homo sapiens
cttctctccaacacc

SEQ ID NO: 551169 - DNA, 15 bp, Homo sapiens
acttctctccaacac

SEQ ID NO: 551170 - DNA, 15 bp, Homo sapiens
cacttctctccaaca

SEQ ID NO: 551171 - DNA, 15 bp, Homo sapiens
ccacttctctccaac

SEQ ID NO: 551172 - DNA, 15 bp, Homo sapiens
tccacttctctccaa

SEQ ID NO: 551173 - DNA, 15 bp, Homo sapiens
atccacttctctcca

SEQ ID NO: 551174 - DNA, 15 bp, Homo sapiens
catccacttctctcc

SEQ ID NO: 551175 - DNA, 15 bp, Homo sapiens
ccatccacttctctc

SEQ ID NO: 551176 - DNA, 15 bp, Homo sapiens
tccatccacttctct

SEQ ID NO: 551177 - DNA, 15 bp, Homo sapiens
atccatccacttctc

SEQ ID NO: 551178 - DNA, 15 bp, Homo sapiens
aatccatccacttct

SEQ ID NO: 551179 - DNA, 15 bp, Homo sapiens
aaatccatccacttc

SEQ ID NO: 551180 - DNA, 15 bp, Homo sapiens
caaatccatccactt

SEQ ID NO: 551181 - DNA, 15 bp, Homo sapiens
tcaaatccatccact

SEQ ID NO: 551182 - DNA, 15 bp, Homo sapiens
ctcaaatccatccac

SEQ ID NO: 551183 - DNA, 15 bp, Homo sapiens
cctcaaatccatcca

SEQ ID NO: 551184 - DNA, 15 bp, Homo sapiens
gcctcaaatccatcc

SEQ ID NO: 551185 - DNA, 15 bp, Homo sapiens
tgcctcaaatccatc

SEQ ID NO: 551186 - DNA, 15 bp, Homo sapiens
atgcctcaaatccat

SEQ ID NO: 551187 - DNA, 15 bp, Homo sapiens
catgcctcaaatcca

SEQ ID NO: 551188 - DNA, 15 bp, Homo sapiens
gcatgcctcaaatcc

SEQ ID NO: 551189 - DNA, 15 bp, Homo sapiens
agcatgcctcaaatc

SEQ ID NO: 551190 - DNA, 15 bp, Homo sapiens
aagcatgcctcaaat

SEQ ID NO: 551191 - DNA, 15 bp, Homo sapiens
aaagcatgcctcaaa

SEQ ID NO: 551192 - DNA, 15 bp, Homo sapiens
taaagcatgcctcaa

SEQ ID NO: 551193 - DNA, 15 bp, Homo sapiens
ttaaagcatgcctca

SEQ ID NO: 551194 - DNA, 15 bp, Homo sapiens
tttaaagcatgcctc

SEQ ID NO: 551195 - DNA, 15 bp, Homo sapiens
ctttaaagcatgcct

SEQ ID NO: 551196 - DNA, 15 bp, Homo sapiens
gctttaaagcatgcc

SEQ ID NO: 551197 - DNA, 15 bp, Homo sapiens
cgctttaaagcatgc

SEQ ID NO: 551198 - DNA, 15 bp, Homo sapiens
tcgctttaaagcatg

SEQ ID NO: 551199 - DNA, 15 bp, Homo sapiens
ctcgctttaaagcat

SEQ ID NO: 551200 - DNA, 15 bp, Homo sapiens
tctcgctttaaagca

SEQ ID NO: 551201 - DNA, 15 bp, Homo sapiens
ctctcgctttaaagc

SEQ ID NO: 551202 - DNA, 15 bp, Homo sapiens
gctctcgctttaaag

SEQ ID NO: 551203 - DNA, 15 bp, Homo sapiens
tgctctcgctttaaa

SEQ ID NO: 551204 - DNA, 15 bp, Homo sapiens
ctgctctcgctttaa

SEQ ID NO: 551205 - DNA, 15 bp, Homo sapiens
gctgctctcgcttta

SEQ ID NO: 551206 - DNA, 15 bp, Homo sapiens
ggctgctctcgcttt

SEQ ID NO: 551207 - DNA, 15 bp, Homo sapiens
gggctgctctcgctt

SEQ ID NO: 551208 - DNA, 15 bp, Homo sapiens
tgggctgctctcgct

SEQ ID NO: 551209 - DNA, 15 bp, Homo sapiens
ctgggctgctctcgc

SEQ ID NO: 551210 - DNA, 15 bp, Homo sapiens
gctgggctgctctcg

SEQ ID NO: 551211 - DNA, 15 bp, Homo sapiens
ggctgggctgctctc

SEQ ID NO: 551212 - DNA, 15 bp, Homo sapiens
aggctgggctgctct

SEQ ID NO: 551213 - DNA, 15 bp, Homo sapiens
aaggctgggctgctc

SEQ ID NO: 551214 - DNA, 15 bp, Homo sapiens
caaggctgggctgct

SEQ ID NO: 551215 - DNA, 15 bp, Homo sapiens
gcaaggctgggctgc

SEQ ID NO: 551216 - DNA, 15 bp, Homo sapiens
agcaaggctgggctg

SEQ ID NO: 551217 - DNA, 15 bp, Homo sapiens
cagcaaggctgggct

SEQ ID NO: 551218 - DNA, 15 bp, Homo sapiens
tcagcaaggctgggc

SEQ ID NO: 551219 - DNA, 15 bp, Homo sapiens
atcagcaaggctggg

SEQ ID NO: 551220 - DNA, 15 bp, Homo sapiens
catcagcaaggctgg

SEQ ID NO: 551221 - DNA, 15 bp, Homo sapiens
ccatcagcaaggctg

SEQ ID NO: 551222 - DNA, 15 bp, Homo sapiens
tccatcagcaaggct

SEQ ID NO: 551223 - DNA, 15 bp, Homo sapiens
ctccatcagcaaggc

SEQ ID NO: 551224 - DNA, 15 bp, Homo sapiens
cctccatcagcaagg

SEQ ID NO: 551225 - DNA, 15 bp, Homo sapiens
ccctccatcagcaag

SEQ ID NO: 551226 - DNA, 15 bp, Homo sapiens
accctccatcagcaa

SEQ ID NO: 551227 - DNA, 15 bp, Homo sapiens
caccctccatcagca

SEQ ID NO: 551228 - DNA, 15 bp, Homo sapiens
gcaccctccatcagc

SEQ ID NO: 551229 - DNA, 15 bp, Homo sapiens
agcaccctccatcag

SEQ ID NO: 551230 - DNA, 15 bp, Homo sapiens
tagcaccctccatca

SEQ ID NO: 551231 - DNA, 15 bp, Homo sapiens
ctagcaccctccatc

SEQ ID NO: 551232 - DNA, 15 bp, Homo sapiens
cctagcaccctccat

SEQ ID NO: 551233 - DNA, 15 bp, Homo sapiens
acctagcaccctcca

SEQ ID NO: 551234 - DNA, 15 bp, Homo sapiens
cacctagcaccctcc

SEQ ID NO: 551235 - DNA, 15 bp, Homo sapiens
ccacctagcaccctc

SEQ ID NO: 551236 - DNA, 15 bp, Homo sapiens
cccacctagcaccct

SEQ ID NO: 551237 - DNA, 15 bp, Homo sapiens
tcccacctagcaccc

SEQ ID NO: 551238 - DNA, 15 bp, Homo sapiens
ctcccacctagcacc

SEQ ID NO: 551239 - DNA, 15 bp, Homo sapiens
cctcccacctagcac

SEQ ID NO: 551240 - DNA, 15 bp, Homo sapiens
tcctcccacctagca

SEQ ID NO: 551241 - DNA, 15 bp, Homo sapiens
ttcctcccacctagc

SEQ ID NO: 551242 - DNA, 15 bp, Homo sapiens
tttcctcccacctag

SEQ ID NO: 551243 - DNA, 15 bp, Homo sapiens
ttttcctcccaccta

SEQ ID NO: 551244 - DNA, 15 bp, Homo sapiens
attttcctcccacct

SEQ ID NO: 551245 - DNA, 15 bp, Homo sapiens
cattttcctcccacc

SEQ ID NO: 551246 - DNA, 15 bp, Homo sapiens
ccattttcctcccac

SEQ ID NO: 551247 - DNA, 15 bp, Homo sapiens
tccattttcctccca

SEQ ID NO: 551248 - DNA, 15 bp, Homo sapiens
ctccattttcctccc

SEQ ID NO: 551249 - DNA, 15 bp, Homo sapiens
cctccattttcctcc

SEQ ID NO: 551250 - DNA, 15 bp, Homo sapiens
tcctccattttcctc

SEQ ID NO: 551251 - DNA, 15 bp, Homo sapiens
gtcctccattttcct

SEQ ID NO: 551252 - DNA, 15 bp, Homo sapiens
agtcctccattttcc

SEQ ID NO: 551253 - DNA, 15 bp, Homo sapiens
gagtcctccattttc

SEQ ID NO: 551254 - DNA, 15 bp, Homo sapiens
tgagtcctccatttt

SEQ ID NO: 551255 - DNA, 15 bp, Homo sapiens
ctgagtcctccattt

SEQ ID NO: 551256 - DNA, 15 bp, Homo sapiens
cctgagtcctccatt

SEQ ID NO: 551257 - DNA, 15 bp, Homo sapiens
tcctgagtcctccat

SEQ ID NO: 551258 - DNA, 15 bp, Homo sapiens
ttcctgagtcctcca

SEQ ID NO: 551259 - DNA, 15 bp, Homo sapiens
attcctgagtcctcc

SEQ ID NO: 551260 - DNA, 15 bp, Homo sapiens
cattcctgagtcctc

SEQ ID NO: 551261 - DNA, 15 bp, Homo sapiens
tcattcctgagtcct

SEQ ID NO: 551262 - DNA, 15 bp, Homo sapiens
gtcattcctgagtcc

SEQ ID NO: 551263 - DNA, 15 bp, Homo sapiens
agtcattcctgagtc

SEQ ID NO: 551264 - DNA, 15 bp, Homo sapiens
gagtcattcctgagt

SEQ ID NO: 551265 - DNA, 15 bp, Homo sapiens
tgagtcattcctgag

SEQ ID NO: 551266 - DNA, 15 bp, Homo sapiens
ttgagtcattcctga

SEQ ID NO: 551267 - DNA, 15 bp, Homo sapiens
gttgagtcattcctg

SEQ ID NO: 551268 - DNA, 15 bp, Homo sapiens
ggttgagtcattcct

SEQ ID NO: 551269 - DNA, 15 bp, Homo sapiens
aggttgagtcattcc

SEQ ID NO: 551270 - DNA, 15 bp, Homo sapiens
gaggttgagtcattc

SEQ ID NO: 551271 - DNA, 15 bp, Homo sapiens
agaggttgagtcatt

SEQ ID NO: 551272 - DNA, 15 bp, Homo sapiens
aagaggttgagtcat

SEQ ID NO: 551273 - DNA, 15 bp, Homo sapiens
gaagaggttgagtca

SEQ ID NO: 551274 - DNA, 15 bp, Homo sapiens
cgaagaggttgagtc

SEQ ID NO: 551275 - DNA, 15 bp, Homo sapiens
gcgaagaggttgagt

SEQ ID NO: 551276 - DNA, 15 bp, Homo sapiens
agcgaagaggttgag

SEQ ID NO: 551277 - DNA, 15 bp, Homo sapiens
aagcgaagaggttga

SEQ ID NO: 551278 - DNA, 15 bp, Homo sapiens
taagcgaagaggttg

SEQ ID NO: 551279 - DNA, 15 bp, Homo sapiens
ttaagcgaagaggtt

SEQ ID NO: 551280 - DNA, 15 bp, Homo sapiens
cttaagcgaagaggt

SEQ ID NO: 551281 - DNA, 15 bp, Homo sapiens
gcttaagcgaagagg

SEQ ID NO: 551282 - DNA, 15 bp, Homo sapiens
tgcttaagcgaagag

SEQ ID NO: 551283 - DNA, 15 bp, Homo sapiens
ttgcttaagcgaaga

SEQ ID NO: 551284 - DNA, 15 bp, Homo sapiens
gttgcttaagcgaag

SEQ ID NO: 551285 - DNA, 15 bp, Homo sapiens
agttgcttaagcgaa

SEQ ID NO: 551286 - DNA, 15 bp, Homo sapiens
aagttgcttaagcga

SEQ ID NO: 551287 - DNA, 15 bp, Homo sapiens
taagttgcttaagcg

SEQ ID NO: 551288 - DNA, 15 bp, Homo sapiens
gtaagttgcttaagc

SEQ ID NO: 551289 - DNA, 15 bp, Homo sapiens
tgtaagttgcttaag

SEQ ID NO: 551290 - DNA, 15 bp, Homo sapiens
ttgtaagttgcttaa

SEQ ID NO: 551291 - DNA, 15 bp, Homo sapiens
cttgtaagttgctta

SEQ ID NO: 551292 - DNA, 15 bp, Homo sapiens
gcttgtaagttgctt

SEQ ID NO: 551293 - DNA, 15 bp, Homo sapiens
cgcttgtaagttgct

SEQ ID NO: 551294 - DNA, 15 bp, Homo sapiens
acgcttgtaagttgc

SEQ ID NO: 551295 - DNA, 15 bp, Homo sapiens
cacgcttgtaagttg

SEQ ID NO: 551296 - DNA, 15 bp, Homo sapiens
ccacgcttgtaagtt

SEQ ID NO: 551297 - DNA, 15 bp, Homo sapiens
cccacgcttgtaagt

SEQ ID NO: 551298 - DNA, 15 bp, Homo sapiens
acccacgcttgtaag

SEQ ID NO: 551299 - DNA, 15 bp, Homo sapiens
aacccacgcttgtaa

SEQ ID NO: 551300 - DNA, 15 bp, Homo sapiens
aaacccacgcttgta

SEQ ID NO: 551301 - DNA, 15 bp, Homo sapiens
gaaacccacgcttgt

SEQ ID NO: 551302 - DNA, 15 bp, Homo sapiens
agaaacccacgcttg

SEQ ID NO: 551303 - DNA, 15 bp, Homo sapiens
aagaaacccacgctt

SEQ ID NO: 551304 - DNA, 15 bp, Homo sapiens
caagaaacccacgct

SEQ ID NO: 551305 - DNA, 15 bp, Homo sapiens
acaagaaacccacgc

SEQ ID NO: 551306 - DNA, 15 bp, Homo sapiens
tacaagaaacccacg

SEQ ID NO: 551307 - DNA, 15 bp, Homo sapiens
ttacaagaaacccac

SEQ ID NO: 551308 - DNA, 15 bp, Homo sapiens
tttacaagaaaccca

SEQ ID NO: 551309 - DNA, 15 bp, Homo sapiens
ttttacaagaaaccc

SEQ ID NO: 551310 - DNA, 15 bp, Homo sapiens
tttttacaagaaacc

SEQ ID NO: 551311 - DNA, 15 bp, Homo sapiens
gtttttacaagaaac

SEQ ID NO: 551312 - DNA, 15 bp, Homo sapiens
ggtttttacaagaaa

SEQ ID NO: 551313 - DNA, 15 bp, Homo sapiens
aggtttttacaagaa

SEQ ID NO: 551314 - DNA, 15 bp, Homo sapiens
aaggtttttacaaga

SEQ ID NO: 551315 - DNA, 15 bp, Homo sapiens
aaaggtttttacaag

SEQ ID NO: 551316 - DNA, 15 bp, Homo sapiens
aaaaggtttttacaa

SEQ ID NO: 551317 - DNA, 15 bp, Homo sapiens
taaaaggtttttaca

SEQ ID NO: 551318 - DNA, 15 bp, Homo sapiens
ataaaaggtttttac

SEQ ID NO: 551319 - DNA, 15 bp, Homo sapiens
aataaaaggttttta

SEQ ID NO: 551320 - DNA, 15 bp, Homo sapiens
aaataaaaggttttt

SEQ ID NO: 551321 - DNA, 15 bp, Homo sapiens
aaaataaaaggtttt

SEQ ID NO: 551322 - DNA, 15 bp, Homo sapiens
taaaataaaaggttt

SEQ ID NO: 551323 - DNA, 15 bp, Homo sapiens
ctaaaataaaaggtt

SEQ ID NO: 551324 - DNA, 15 bp, Homo sapiens
actaaaataaaaggt

SEQ ID NO: 551325 - DNA, 15 bp, Homo sapiens
gactaaaataaaagg

SEQ ID NO: 551326 - DNA, 15 bp, Homo sapiens
agactaaaataaaag

SEQ ID NO: 551327 - DNA, 15 bp, Homo sapiens
aagactaaaataaaa

SEQ ID NO: 551328 - DNA, 15 bp, Homo sapiens
gaagactaaaataaa

SEQ ID NO: 551329 - DNA, 15 bp, Homo sapiens
agaagactaaaataa

SEQ ID NO: 551330 - DNA, 15 bp, Homo sapiens
aagaagactaaaata

SEQ ID NO: 551331 - DNA, 15 bp, Homo sapiens
taagaagactaaaat

SEQ ID NO: 551332 - DNA, 15 bp, Homo sapiens
gtaagaagactaaaa

SEQ ID NO: 551333 - DNA, 15 bp, Homo sapiens
ggtaagaagactaaa

SEQ ID NO: 551334 - DNA, 15 bp, Homo sapiens
aggtaagaagactaa

SEQ ID NO: 551335 - DNA, 15 bp, Homo sapiens
aaggtaagaagacta

SEQ ID NO: 551336 - DNA, 15 bp, Homo sapiens
taaggtaagaagact

SEQ ID NO: 551337 - DNA, 15 bp, Homo sapiens
ctaaggtaagaagac

SEQ ID NO: 551338 - DNA, 15 bp, Homo sapiens
actaaggtaagaaga

SEQ ID NO: 551339 - DNA, 15 bp, Homo sapiens
gactaaggtaagaag

SEQ ID NO: 551340 - DNA, 15 bp, Homo sapiens
ggactaaggtaagaa

SEQ ID NO: 551341 - DNA, 15 bp, Homo sapiens
aggactaaggtaaga

SEQ ID NO: 551342 - DNA, 15 bp, Homo sapiens
aaggactaaggtaag

SEQ ID NO: 551343 - DNA, 15 bp, Homo sapiens
aaaggactaaggtaa

SEQ ID NO: 551344 - DNA, 15 bp, Homo sapiens
taaaggactaaggta

SEQ ID NO: 551345 - DNA, 15 bp, Homo sapiens
ttaaaggactaaggt

SEQ ID NO: 551346 - DNA, 15 bp, Homo sapiens
tttaaaggactaagg

SEQ ID NO: 551347 - DNA, 15 bp, Homo sapiens
ttttaaaggactaag

SEQ ID NO: 551348 - DNA, 15 bp, Homo sapiens
tttttaaaggactaa

SEQ ID NO: 551349 - DNA, 15 bp, Homo sapiens
atttttaaaggacta

SEQ ID NO: 551350 - DNA, 15 bp, Homo sapiens
gatttttaaaggact

SEQ ID NO: 551351 - DNA, 15 bp, Homo sapiens
tgatttttaaaggac

SEQ ID NO: 551352 - DNA, 15 bp, Homo sapiens
ttgatttttaaagga

SEQ ID NO: 551353 - DNA, 15 bp, Homo sapiens
tttgatttttaaagg

SEQ ID NO: 551354 - DNA, 15 bp, Homo sapiens
ttttgatttttaaag

SEQ ID NO: 551355 - DNA, 15 bp, Homo sapiens
cttttgatttttaaa

SEQ ID NO: 551356 - DNA, 15 bp, Homo sapiens
tcttttgatttttaa

SEQ ID NO: 551357 - DNA, 15 bp, Homo sapiens
ttcttttgattttta

SEQ ID NO: 551358 - DNA, 15 bp, Homo sapiens
cttcttttgattttt

SEQ ID NO: 551359 - DNA, 15 bp, Homo sapiens
acttcttttgatttt

SEQ ID NO: 551360 - DNA, 15 bp, Homo sapiens
aacttcttttgattt

SEQ ID NO: 551361 - DNA, 15 bp, Homo sapiens
caacttcttttgatt

SEQ ID NO: 551362 - DNA, 15 bp, Homo sapiens
ccaacttcttttgat

SEQ ID NO: 551363 - DNA, 15 bp, Homo sapiens
tccaacttcttttga

SEQ ID NO: 551364 - DNA, 15 bp, Homo sapiens
ttccaacttcttttg

SEQ ID NO: 551365 - DNA, 15 bp, Homo sapiens
gttccaacttctttt

SEQ ID NO: 551366 - DNA, 15 bp, Homo sapiens
tgttccaacttcttt

SEQ ID NO: 551367 - DNA, 15 bp, Homo sapiens
atgttccaacttctt

SEQ ID NO: 551368 - DNA, 15 bp, Homo sapiens
catgttccaacttct

SEQ ID NO: 551369 - DNA, 15 bp, Homo sapiens
tcatgttccaacttc

SEQ ID NO: 551370 - DNA, 15 bp, Homo sapiens
ctcatgttccaactt

SEQ ID NO: 551371 - DNA, 15 bp, Homo sapiens
gctcatgttccaact

SEQ ID NO: 551372 - DNA, 15 bp, Homo sapiens
ggctcatgttccaac

SEQ ID NO: 551373 - DNA, 15 bp, Homo sapiens
tggctcatgttccaa

SEQ ID NO: 551374 - DNA, 15 bp, Homo sapiens
ttggctcatgttcca

SEQ ID NO: 551375 - DNA, 15 bp, Homo sapiens
cttggctcatgttcc

SEQ ID NO: 551376 - DNA, 15 bp, Homo sapiens
ccttggctcatgttc

SEQ ID NO: 551377 - DNA, 15 bp, Homo sapiens
cccttggctcatgtt

SEQ ID NO: 551378 - DNA, 15 bp, Homo sapiens
acccttggctcatgt

SEQ ID NO: 551379 - DNA, 15 bp, Homo sapiens
cacccttggctcatg

SEQ ID NO: 551380 - DNA, 15 bp, Homo sapiens
acacccttggctcat

SEQ ID NO: 551381 - DNA, 15 bp, Homo sapiens
cacacccttggctca

SEQ ID NO: 551382 - DNA, 15 bp, Homo sapiens
ccacacccttggctc

SEQ ID NO: 551383 - DNA, 15 bp, Homo sapiens
accacacccttggct

SEQ ID NO: 551384 - DNA, 15 bp, Homo sapiens
caccacacccttggc

SEQ ID NO: 551385 - DNA, 15 bp, Homo sapiens
acaccacacccttgg

SEQ ID NO: 551386 - DNA, 15 bp, Homo sapiens
aacaccacacccttg

SEQ ID NO: 551387 - DNA, 15 bp, Homo sapiens
gaacaccacaccctt

SEQ ID NO: 551388 - DNA, 15 bp, Homo sapiens
ggaacaccacaccct

SEQ ID NO: 551389 - DNA, 15 bp, Homo sapiens
gggaacaccacaccc

SEQ ID NO: 551390 - DNA, 15 bp, Homo sapiens
tgggaacaccacacc

SEQ ID NO: 551391 - DNA, 15 bp, Homo sapiens
ttgggaacaccacac

SEQ ID NO: 551392 - DNA, 15 bp, Homo sapiens
cttgggaacaccaca

SEQ ID NO: 551393 - DNA, 15 bp, Homo sapiens
acttgggaacaccac

SEQ ID NO: 551394 - DNA, 15 bp, Homo sapiens
gacttgggaacacca

SEQ ID NO: 551395 - DNA, 15 bp, Homo sapiens
ggacttgggaacacc

SEQ ID NO: 551396 - DNA, 15 bp, Homo sapiens
gggacttgggaacac

SEQ ID NO: 551397 - DNA, 15 bp, Homo sapiens
tgggacttgggaaca

SEQ ID NO: 551398 - DNA, 15 bp, Homo sapiens
ctgggacttgggaac

SEQ ID NO: 551399 - DNA, 15 bp, Homo sapiens
tctgggacttgggaa

SEQ ID NO: 551400 - DNA, 15 bp, Homo sapiens
atctgggacttggga

SEQ ID NO: 551401 - DNA, 15 bp, Homo sapiens
aatctgggacttggg

SEQ ID NO: 551402 - DNA, 15 bp, Homo sapiens
caatctgggacttgg

SEQ ID NO: 551403 - DNA, 15 bp, Homo sapiens
ccaatctgggacttg

SEQ ID NO: 551404 - DNA, 15 bp, Homo sapiens
tccaatctgggactt

SEQ ID NO: 551405 - DNA, 15 bp, Homo sapiens
atccaatctgggact

SEQ ID NO: 551406 - DNA, 15 bp, Homo sapiens
aatccaatctgggac

SEQ ID NO: 551407 - DNA, 15 bp, Homo sapiens
taatccaatctggga

SEQ ID NO: 551408 - DNA, 15 bp, Homo sapiens
ctaatccaatctggg

SEQ ID NO: 551409 - DNA, 15 bp, Homo sapiens
gctaatccaatctgg

SEQ ID NO: 551410 - DNA, 15 bp, Homo sapiens
ggctaatccaatctg

SEQ ID NO: 551411 - DNA, 15 bp, Homo sapiens
aggctaatccaatct

SEQ ID NO: 551412 - DNA, 15 bp, Homo sapiens
caggctaatccaatc

SEQ ID NO: 551413 - DNA, 15 bp, Homo sapiens
acaggctaatccaat

SEQ ID NO: 551414 - DNA, 15 bp, Homo sapiens
cacaggctaatccaa

SEQ ID NO: 551415 - DNA, 15 bp, Homo sapiens
acacaggctaatcca

SEQ ID NO: 551416 - DNA, 15 bp, Homo sapiens
gacacaggctaatcc

SEQ ID NO: 551417 - DNA, 15 bp, Homo sapiens
cgacacaggctaatc

SEQ ID NO: 551418 - DNA, 15 bp, Homo sapiens
acgacacaggctaat

SEQ ID NO: 551419 - DNA, 15 bp, Homo sapiens
tacgacacaggctaa

SEQ ID NO: 551420 - DNA, 15 bp, Homo sapiens
ctacgacacaggcta

SEQ ID NO: 551421 - DNA, 15 bp, Homo sapiens
actacgacacaggct

SEQ ID NO: 551422 - DNA, 15 bp, Homo sapiens
aactacgacacaggc

SEQ ID NO: 551423 - DNA, 15 bp, Homo sapiens
caactacgacacagg

SEQ ID NO: 551424 - DNA, 15 bp, Homo sapiens
acaactacgacacag

SEQ ID NO: 551425 - DNA, 15 bp, Homo sapiens
aacaactacgacaca

SEQ ID NO: 551426 - DNA, 15 bp, Homo sapiens
gaacaactacgacac

SEQ ID NO: 551427 - DNA, 15 bp, Homo sapiens
ggaacaactacgaca

SEQ ID NO: 551428 - DNA, 15 bp, Homo sapiens
aggaacaactacgac

SEQ ID NO: 551429 - DNA, 15 bp, Homo sapiens
caggaacaactacga

SEQ ID NO: 551430 - DNA, 15 bp, Homo sapiens
gcaggaacaactacg

SEQ ID NO: 551431 - DNA, 15 bp, Homo sapiens
tgcaggaacaactac

SEQ ID NO: 551432 - DNA, 15 bp, Homo sapiens
atgcaggaacaacta

SEQ ID NO: 551433 - DNA, 15 bp, Homo sapiens
gatgcaggaacaact

SEQ ID NO: 551434 - DNA, 15 bp, Homo sapiens
agatgcaggaacaac

SEQ ID NO: 551435 - DNA, 15 bp, Homo sapiens
aagatgcaggaacaa

SEQ ID NO: 551436 - DNA, 15 bp, Homo sapiens
taagatgcaggaaca

SEQ ID NO: 551437 - DNA, 15 bp, Homo sapiens
ttaagatgcaggaac

SEQ ID NO: 551438 - DNA, 15 bp, Homo sapiens
cttaagatgcaggaa

SEQ ID NO: 551439 - DNA, 15 bp, Homo sapiens
ccttaagatgcagga

SEQ ID NO: 551440 - DNA, 15 bp, Homo sapiens
gccttaagatgcagg

SEQ ID NO: 551441 - DNA, 15 bp, Homo sapiens
ggccttaagatgcag

SEQ ID NO: 551442 - DNA, 15 bp, Homo sapiens
gggccttaagatgca

SEQ ID NO: 551443 - DNA, 15 bp, Homo sapiens
ggggccttaagatgc

SEQ ID NO: 551444 - DNA, 15 bp, Homo sapiens
tggggccttaagatg

SEQ ID NO: 551445 - DNA, 15 bp, Homo sapiens
atggggccttaagat

SEQ ID NO: 551446 - DNA, 15 bp, Homo sapiens
catggggccttaaga

SEQ ID NO: 551447 - DNA, 15 bp, Homo sapiens
ccatggggccttaag

SEQ ID NO: 551448 - DNA, 15 bp, Homo sapiens
tccatggggccttaa

SEQ ID NO: 551449 - DNA, 15 bp, Homo sapiens
ctccatggggcctta

SEQ ID NO: 551450 - DNA, 15 bp, Homo sapiens
gctccatggggcctt

SEQ ID NO: 551451 - DNA, 15 bp, Homo sapiens
agctccatggggcct

SEQ ID NO: 551452 - DNA, 15 bp, Homo sapiens
cagctccatggggcc

SEQ ID NO: 551453 - DNA, 15 bp, Homo sapiens
ccagctccatggggc

SEQ ID NO: 551454 - DNA, 15 bp, Homo sapiens
cccagctccatgggg

SEQ ID NO: 551455 - DNA, 15 bp, Homo sapiens
ccccagctccatggg

SEQ ID NO: 551456 - DNA, 15 bp, Homo sapiens
tccccagctccatgg

SEQ ID NO: 551457 - DNA, 15 bp, Homo sapiens
atccccagctccatg

SEQ ID NO: 551458 - DNA, 15 bp, Homo sapiens
catccccagctccat

SEQ ID NO: 551459 - DNA, 15 bp, Homo sapiens
gcatccccagctcca

SEQ ID NO: 551460 - DNA, 15 bp, Homo sapiens
ggcatccccagctcc

SEQ ID NO: 551461 - DNA, 15 bp, Homo sapiens
aggcatccccagctc

SEQ ID NO: 551462 - DNA, 15 bp, Homo sapiens
caggcatccccagct

SEQ ID NO: 551463 - DNA, 15 bp, Homo sapiens
ccaggcatccccagc

SEQ ID NO: 551464 - DNA, 15 bp, Homo sapiens
tccaggcatccccag

SEQ ID NO: 551465 - DNA, 15 bp, Homo sapiens
ctccaggcatcccca

SEQ ID NO: 551466 - DNA, 15 bp, Homo sapiens
gctccaggcatcccc

SEQ ID NO: 551467 - DNA, 15 bp, Homo sapiens
ggctccaggcatccc

SEQ ID NO: 551468 - DNA, 15 bp, Homo sapiens
gggctccaggcatcc

SEQ ID NO: 551469 - DNA, 15 bp, Homo sapiens
agggctccaggcatc

SEQ ID NO: 551470 - DNA, 15 bp, Homo sapiens
cagggctccaggcat

SEQ ID NO: 551471 - DNA, 15 bp, Homo sapiens
ccagggctccaggca

SEQ ID NO: 551472 - DNA, 15 bp, Homo sapiens
cccagggctccaggc

SEQ ID NO: 551473 - DNA, 15 bp, Homo sapiens
tcccagggctccagg

SEQ ID NO: 551474 - DNA, 15 bp, Homo sapiens
atcccagggctccag

SEQ ID NO: 551475 - DNA, 15 bp, Homo sapiens
aatcccagggctcca

SEQ ID NO: 551476 - DNA, 15 bp, Homo sapiens
caatcccagggctcc

SEQ ID NO: 551477 - DNA, 15 bp, Homo sapiens
tcaatcccagggctc

SEQ ID NO: 551478 - DNA, 15 bp, Homo sapiens
ctcaatcccagggct

SEQ ID NO: 551479 - DNA, 15 bp, Homo sapiens
tctcaatcccagggc

SEQ ID NO: 551480 - DNA, 15 bp, Homo sapiens
ctctcaatcccaggg

SEQ ID NO: 551481 - DNA, 15 bp, Homo sapiens
actctcaatcccagg

SEQ ID NO: 551482 - DNA, 15 bp, Homo sapiens
cactctcaatcccag

SEQ ID NO: 551483 - DNA, 15 bp, Homo sapiens
acactctcaatccca

SEQ ID NO: 551484 - DNA, 15 bp, Homo sapiens
tacactctcaatccc

SEQ ID NO: 551485 - DNA, 15 bp, Homo sapiens
ctacactctcaatcc

SEQ ID NO: 551486 - DNA, 15 bp, Homo sapiens
actacactctcaatc

SEQ ID NO: 551487 - DNA, 15 bp, Homo sapiens
gactacactctcaat

SEQ ID NO: 551488 - DNA, 15 bp, Homo sapiens
tgactacactctcaa

SEQ ID NO: 551489 - DNA, 15 bp, Homo sapiens
ctgactacactctca

SEQ ID NO: 551490 - DNA, 15 bp, Homo sapiens
gctgactacactctc

SEQ ID NO: 551491 - DNA, 15 bp, Homo sapiens
ggctgactacactct

SEQ ID NO: 551492 - DNA, 15 bp, Homo sapiens
tggctgactacactc

SEQ ID NO: 551493 - DNA, 15 bp, Homo sapiens
gtggctgactacact

SEQ ID NO: 551494 - DNA, 15 bp, Homo sapiens
agtggctgactacac

SEQ ID NO: 551495 - DNA, 15 bp, Homo sapiens
cagtggctgactaca

SEQ ID NO: 551496 - DNA, 15 bp, Homo sapiens
tcagtggctgactac

SEQ ID NO: 551497 - DNA, 15 bp, Homo sapiens
gtcagtggctgacta

SEQ ID NO: 551498 - DNA, 15 bp, Homo sapiens
agtcagtggctgact

SEQ ID NO: 551499 - DNA, 15 bp, Homo sapiens
cagtcagtggctgac

SEQ ID NO: 551500 - DNA, 15 bp, Homo sapiens
gcagtcagtggctga

SEQ ID NO: 551501 - DNA, 15 bp, Homo sapiens
agcagtcagtggctg

SEQ ID NO: 551502 - DNA, 15 bp, Homo sapiens
cagcagtcagtggct

SEQ ID NO: 551503 - DNA, 15 bp, Homo sapiens
ccagcagtcagtggc

SEQ ID NO: 551504 - DNA, 15 bp, Homo sapiens
accagcagtcagtgg

SEQ ID NO: 551505 - DNA, 15 bp, Homo sapiens
gaccagcagtcagtg

SEQ ID NO: 551506 - DNA, 15 bp, Homo sapiens
ggaccagcagtcagt

SEQ ID NO: 551507 - DNA, 15 bp, Homo sapiens
tggaccagcagtcag

SEQ ID NO: 551508 - DNA, 15 bp, Homo sapiens
ctggaccagcagtca

SEQ ID NO: 551509 - DNA, 15 bp, Homo sapiens
tctggaccagcagtc

SEQ ID NO: 551510 - DNA, 15 bp, Homo sapiens
ctctggaccagcagt

SEQ ID NO: 551511 - DNA, 15 bp, Homo sapiens
actctggaccagcag

SEQ ID NO: 551512 - DNA, 15 bp, Homo sapiens
cactctggaccagca

SEQ ID NO: 551513 - DNA, 15 bp, Homo sapiens
ccactctggaccagc

SEQ ID NO: 551514 - DNA, 15 bp, Homo sapiens
cccactctggaccag

SEQ ID NO: 551515 - DNA, 15 bp, Homo sapiens
gcccactctggacca

SEQ ID NO: 551516 - DNA, 15 bp, Homo sapiens
tgcccactctggacc

SEQ ID NO: 551517 - DNA, 15 bp, Homo sapiens
ctgcccactctggac

SEQ ID NO: 551518 - DNA, 15 bp, Homo sapiens
cctgcccactctgga

SEQ ID NO: 551519 - DNA, 15 bp, Homo sapiens
ccctgcccactctgg

SEQ ID NO: 551520 - DNA, 15 bp, Homo sapiens
gccctgcccactctg

SEQ ID NO: 551521 - DNA, 15 bp, Homo sapiens
ggccctgcccactct

SEQ ID NO: 551522 - DNA, 15 bp, Homo sapiens
aggccctgcccactc

SEQ ID NO: 551523 - DNA, 15 bp, Homo sapiens
caggccctgcccact

SEQ ID NO: 551524 - DNA, 15 bp, Homo sapiens
ccaggccctgcccac

SEQ ID NO: 551525 - DNA, 15 bp, Homo sapiens
gccaggccctgccca

SEQ ID NO: 551526 - DNA, 15 bp, Homo sapiens
ggccaggccctgccc

SEQ ID NO: 551527 - DNA, 15 bp, Homo sapiens
aggccaggccctgcc

SEQ ID NO: 551528 - DNA, 15 bp, Homo sapiens
aaggccaggccctgc

SEQ ID NO: 551529 - DNA, 15 bp, Homo sapiens
caaggccaggccctg

SEQ ID NO: 551530 - DNA, 15 bp, Homo sapiens
acaaggccaggccct

SEQ ID NO: 551531 - DNA, 15 bp, Homo sapiens
gacaaggccaggccc

SEQ ID NO: 551532 - DNA, 15 bp, Homo sapiens
ggacaaggccaggcc

SEQ ID NO: 551533 - DNA, 15 bp, Homo sapiens
gggacaaggccaggc

SEQ ID NO: 551534 - DNA, 15 bp, Homo sapiens
tgggacaaggccagg

SEQ ID NO: 551535 - DNA, 15 bp, Homo sapiens
ctgggacaaggccag

SEQ ID NO: 551536 - DNA, 15 bp, Homo sapiens
tctgggacaaggcca

SEQ ID NO: 551537 - DNA, 15 bp, Homo sapiens
ttctgggacaaggcc

SEQ ID NO: 551538 - DNA, 15 bp, Homo sapiens
gttctgggacaaggc

SEQ ID NO: 551539 - DNA, 15 bp, Homo sapiens
agttctgggacaagg

SEQ ID NO: 551540 - DNA, 15 bp, Homo sapiens
tagttctgggacaag

SEQ ID NO: 551541 - DNA, 15 bp, Homo sapiens
ctagttctgggacaa

SEQ ID NO: 551542 - DNA, 15 bp, Homo sapiens
cctagttctgggaca

SEQ ID NO: 551543 - DNA, 15 bp, Homo sapiens
gcctagttctgggac

SEQ ID NO: 551544 - DNA, 15 bp, Homo sapiens
agcctagttctggga

SEQ ID NO: 551545 - DNA, 15 bp, Homo sapiens
aagcctagttctggg

SEQ ID NO: 551546 - DNA, 15 bp, Homo sapiens
gaagcctagttctgg

SEQ ID NO: 551547 - DNA, 15 bp, Homo sapiens
cgaagcctagttctg

SEQ ID NO: 551548 - DNA, 15 bp, Homo sapiens
acgaagcctagttct

SEQ ID NO: 551549 - DNA, 15 bp, Homo sapiens
gacgaagcctagttc

SEQ ID NO: 551550 - DNA, 15 bp, Homo sapiens
agacgaagcctagtt

SEQ ID NO: 551551 - DNA, 15 bp, Homo sapiens
cagacgaagcctagt

SEQ ID NO: 551552 - DNA, 15 bp, Homo sapiens
ccagacgaagcctag

SEQ ID NO: 551553 - DNA, 15 bp, Homo sapiens
cccagacgaagccta

SEQ ID NO: 551554 - DNA, 15 bp, Homo sapiens
gcccagacgaagcct

SEQ ID NO: 551555 - DNA, 15 bp, Homo sapiens
tgcccagacgaagcc

SEQ ID NO: 551556 - DNA, 15 bp, Homo sapiens
ttgcccagacgaagc

SEQ ID NO: 551557 - DNA, 15 bp, Homo sapiens
tttgcccagacgaag

SEQ ID NO: 551558 - DNA, 15 bp, Homo sapiens
atttgcccagacgaa

SEQ ID NO: 551559 - DNA, 15 bp, Homo sapiens
aatttgcccagacga

SEQ ID NO: 551560 - DNA, 15 bp, Homo sapiens
caatttgcccagacg

SEQ ID NO: 551561 - DNA, 15 bp, Homo sapiens
ccaatttgcccagac

SEQ ID NO: 551562 - DNA, 15 bp, Homo sapiens
gccaatttgcccaga

SEQ ID NO: 551563 - DNA, 15 bp, Homo sapiens
agccaatttgcccag

SEQ ID NO: 551564 - DNA, 15 bp, Homo sapiens
aagccaatttgccca

SEQ ID NO: 551565 - DNA, 15 bp, Homo sapiens
gaagccaatttgccc

SEQ ID NO: 551566 - DNA, 15 bp, Homo sapiens
agaagccaatttgcc

SEQ ID NO: 551567 - DNA, 15 bp, Homo sapiens
aagaagccaatttgc

SEQ ID NO: 551568 - DNA, 15 bp, Homo sapiens
caagaagccaatttg

SEQ ID NO: 551569 - DNA, 15 bp, Homo sapiens
ccaagaagccaattt

SEQ ID NO: 551570 - DNA, 15 bp, Homo sapiens
gccaagaagccaatt

SEQ ID NO: 551571 - DNA, 15 bp, Homo sapiens
agccaagaagccaat

SEQ ID NO: 551572 - DNA, 15 bp, Homo sapiens
gagccaagaagccaa

SEQ ID NO: 551573 - DNA, 15 bp, Homo sapiens
tgagccaagaagcca

SEQ ID NO: 551574 - DNA, 15 bp, Homo sapiens
atgagccaagaagcc

SEQ ID NO: 551575 - DNA, 15 bp, Homo sapiens
aatgagccaagaagc

SEQ ID NO: 551576 - DNA, 15 bp, Homo sapiens
aaatgagccaagaag

SEQ ID NO: 551577 - DNA, 15 bp, Homo sapiens
caaatgagccaagaa

SEQ ID NO: 551578 - DNA, 15 bp, Homo sapiens
ccaaatgagccaaga

SEQ ID NO: 551579 - DNA, 15 bp, Homo sapiens
accaaatgagccaag

SEQ ID NO: 551580 - DNA, 15 bp, Homo sapiens
gaccaaatgagccaa

SEQ ID NO: 551581 - DNA, 15 bp, Homo sapiens
tgaccaaatgagcca

SEQ ID NO: 551582 - DNA, 15 bp, Homo sapiens
ctgaccaaatgagcc

SEQ ID NO: 551583 - DNA, 15 bp, Homo sapiens
tctgaccaaatgagc

SEQ ID NO: 551584 - DNA, 15 bp, Homo sapiens
ctctgaccaaatgag

SEQ ID NO: 551585 - DNA, 15 bp, Homo sapiens
cctctgaccaaatga

SEQ ID NO: 551586 - DNA, 15 bp, Homo sapiens
acctctgaccaaatg

SEQ ID NO: 551587 - DNA, 15 bp, Homo sapiens
cacctctgaccaaat

SEQ ID NO: 551588 - DNA, 15 bp, Homo sapiens
acacctctgaccaaa

SEQ ID NO: 551589 - DNA, 15 bp, Homo sapiens
cacacctctgaccaa

SEQ ID NO: 551590 - DNA, 15 bp, Homo sapiens
acacacctctgacca

SEQ ID NO: 551591 - DNA, 15 bp, Homo sapiens
aacacacctctgacc

SEQ ID NO: 551592 - DNA, 15 bp, Homo sapiens
aaacacacctctgac

SEQ ID NO: 551593 - DNA, 15 bp, Homo sapiens
gaaacacacctctga

SEQ ID NO: 551594 - DNA, 15 bp, Homo sapiens
agaaacacacctctg

SEQ ID NO: 551595 - DNA, 15 bp, Homo sapiens
aagaaacacacctct

SEQ ID NO: 551596 - DNA, 15 bp, Homo sapiens
caagaaacacacctc

SEQ ID NO: 551597 - DNA, 15 bp, Homo sapiens
ccaagaaacacacct

SEQ ID NO: 551598 - DNA, 15 bp, Homo sapiens
tccaagaaacacacc

SEQ ID NO: 551599 - DNA, 15 bp, Homo sapiens
ttccaagaaacacac

SEQ ID NO: 551600 - DNA, 15 bp, Homo sapiens
cttccaagaaacaca

SEQ ID NO: 551601 - DNA, 15 bp, Homo sapiens
gcttccaagaaacac

SEQ ID NO: 551602 - DNA, 15 bp, Homo sapiens
ggcttccaagaaaca

SEQ ID NO: 551603 - DNA, 15 bp, Homo sapiens
aggcttccaagaaac

SEQ ID NO: 551604 - DNA, 15 bp, Homo sapiens
caggcttccaagaaa

SEQ ID NO: 551605 - DNA, 15 bp, Homo sapiens
acaggcttccaagaa

SEQ ID NO: 551606 - DNA, 15 bp, Homo sapiens
aacaggcttccaaga

SEQ ID NO: 551607 - DNA, 15 bp, Homo sapiens
aaacaggcttccaag

SEQ ID NO: 551608 - DNA, 15 bp, Homo sapiens
aaaacaggcttccaa

SEQ ID NO: 551609 - DNA, 15 bp, Homo sapiens
gaaaacaggcttcca

SEQ ID NO: 551610 - DNA, 15 bp, Homo sapiens
agaaaacaggcttcc

SEQ ID NO: 551611 - DNA, 15 bp, Homo sapiens
gagaaaacaggcttc

SEQ ID NO: 551612 - DNA, 15 bp, Homo sapiens
agagaaaacaggctt

SEQ ID NO: 551613 - DNA, 15 bp, Homo sapiens
aagagaaaacaggct

SEQ ID NO: 551614 - DNA, 15 bp, Homo sapiens
gaagagaaaacaggc

SEQ ID NO: 551615 - DNA, 15 bp, Homo sapiens
agaagagaaaacagg

SEQ ID NO: 551616 - DNA, 15 bp, Homo sapiens
gagaagagaaaacag

SEQ ID NO: 551617 - DNA, 15 bp, Homo sapiens
tgagaagagaaaaca

SEQ ID NO: 551618 - DNA, 15 bp, Homo sapiens
atgagaagagaaaac

SEQ ID NO: 551619 - DNA, 15 bp, Homo sapiens
tatgagaagagaaaa

SEQ ID NO: 551620 - DNA, 15 bp, Homo sapiens
ctatgagaagagaaa

SEQ ID NO: 551621 - DNA, 15 bp, Homo sapiens
cctatgagaagagaa

SEQ ID NO: 551622 - DNA, 15 bp, Homo sapiens
tcctatgagaagaga

SEQ ID NO: 551623 - DNA, 15 bp, Homo sapiens
ctcctatgagaagag

SEQ ID NO: 551624 - DNA, 15 bp, Homo sapiens
cctcctatgagaaga

SEQ ID NO: 551625 - DNA, 15 bp, Homo sapiens
tcctcctatgagaag

SEQ ID NO: 551626 - DNA, 15 bp, Homo sapiens
ctcctcctatgagaa

SEQ ID NO: 551627 - DNA, 15 bp, Homo sapiens
cctcctcctatgaga

SEQ ID NO: 551628 - DNA, 15 bp, Homo sapiens
tcctcctcctatgag

SEQ ID NO: 551629 - DNA, 15 bp, Homo sapiens
ttcctcctcctatga

SEQ ID NO: 551630 - DNA, 15 bp, Homo sapiens
attcctcctcctatg

SEQ ID NO: 551631 - DNA, 15 bp, Homo sapiens
aattcctcctcctat

SEQ ID NO: 551632 - DNA, 15 bp, Homo sapiens
taattcctcctccta

SEQ ID NO: 551633 - DNA, 15 bp, Homo sapiens
ctaattcctcctcct

SEQ ID NO: 551634 - DNA, 15 bp, Homo sapiens
tctaattcctcctcc

SEQ ID NO: 551635 - DNA, 15 bp, Homo sapiens
gtctaattcctcctc

SEQ ID NO: 551636 - DNA, 15 bp, Homo sapiens
ggtctaattcctcct

SEQ ID NO: 551637 - DNA, 15 bp, Homo sapiens
aggtctaattcctcc

SEQ ID NO: 551638 - DNA, 15 bp, Homo sapiens
aaggtctaattcctc

SEQ ID NO: 551639 - DNA, 15 bp, Homo sapiens
caaggtctaattcct

SEQ ID NO: 551640 - DNA, 15 bp, Homo sapiens
gcaaggtctaattcc

SEQ ID NO: 551641 - DNA, 15 bp, Homo sapiens
tgcaaggtctaattc

SEQ ID NO: 551642 - DNA, 15 bp, Homo sapiens
ttgcaaggtctaatt

SEQ ID NO: 551643 - DNA, 15 bp, Homo sapiens
attgcaaggtctaat

SEQ ID NO: 551644 - DNA, 15 bp, Homo sapiens
aattgcaaggtctaa

SEQ ID NO: 551645 - DNA, 15 bp, Homo sapiens
gaattgcaaggtcta

SEQ ID NO: 551646 - DNA, 15 bp, Homo sapiens
tgaattgcaaggtct

SEQ ID NO: 551647 - DNA, 15 bp, Homo sapiens
ctgaattgcaaggtc

SEQ ID NO: 551648 - DNA, 15 bp, Homo sapiens
actgaattgcaaggt

SEQ ID NO: 551649 - DNA, 15 bp, Homo sapiens
cactgaattgcaagg

SEQ ID NO: 551650 - DNA, 15 bp, Homo sapiens
ccactgaattgcaag

SEQ ID NO: 551651 - DNA, 15 bp, Homo sapiens
gccactgaattgcaa

SEQ ID NO: 551652 - DNA, 15 bp, Homo sapiens
ggccactgaattgca

SEQ ID NO: 551653 - DNA, 15 bp, Homo sapiens
tggccactgaattgc

SEQ ID NO: 551654 - DNA, 15 bp, Homo sapiens
ctggccactgaattg

SEQ ID NO: 551655 - DNA, 15 bp, Homo sapiens
cctggccactgaatt

SEQ ID NO: 551656 - DNA, 15 bp, Homo sapiens
acctggccactgaat

SEQ ID NO: 551657 - DNA, 15 bp, Homo sapiens
gacctggccactgaa

SEQ ID NO: 551658 - DNA, 15 bp, Homo sapiens
tgacctggccactga

SEQ ID NO: 551659 - DNA, 15 bp, Homo sapiens
ttgacctggccactg

SEQ ID NO: 551660 - DNA, 15 bp, Homo sapiens
cttgacctggccact

SEQ ID NO: 551661 - DNA, 15 bp, Homo sapiens
acttgacctggccac

SEQ ID NO: 551662 - DNA, 15 bp, Homo sapiens
aacttgacctggcca

SEQ ID NO: 551663 - DNA, 15 bp, Homo sapiens
taacttgacctggcc

SEQ ID NO: 551664 - DNA, 15 bp, Homo sapiens
ttaacttgacctggc

SEQ ID NO: 551665 - DNA, 15 bp, Homo sapiens
attaacttgacctgg

SEQ ID NO: 551666 - DNA, 15 bp, Homo sapiens
cattaacttgacctg

SEQ ID NO: 551667 - DNA, 15 bp, Homo sapiens
tcattaacttgacct

SEQ ID NO: 551668 - DNA, 15 bp, Homo sapiens
atcattaacttgacc

SEQ ID NO: 551669 - DNA, 15 bp, Homo sapiens
aatcattaacttgac

SEQ ID NO: 551670 - DNA, 15 bp, Homo sapiens
gaatcattaacttga

SEQ ID NO: 551671 - DNA, 15 bp, Homo sapiens
tgaatcattaacttg

SEQ ID NO: 551672 - DNA, 15 bp, Homo sapiens
atgaatcattaactt

SEQ ID NO: 551673 - DNA, 15 bp, Homo sapiens
aatgaatcattaact

SEQ ID NO: 551674 - DNA, 15 bp, Homo sapiens
aaatgaatcattaac

SEQ ID NO: 551675 - DNA, 15 bp, Homo sapiens
caaatgaatcattaa

SEQ ID NO: 551676 - DNA, 15 bp, Homo sapiens
acaaatgaatcatta

SEQ ID NO: 551677 - DNA, 15 bp, Homo sapiens
cacaaatgaatcatt

SEQ ID NO: 551678 - DNA, 15 bp, Homo sapiens
tcacaaatgaatcat

SEQ ID NO: 551679 - DNA, 15 bp, Homo sapiens
ttcacaaatgaatca

SEQ ID NO: 551680 - DNA, 15 bp, Homo sapiens
cttcacaaatgaatc

SEQ ID NO: 551681 - DNA, 15 bp, Homo sapiens
gcttcacaaatgaat

SEQ ID NO: 551682 - DNA, 15 bp, Homo sapiens
agcttcacaaatgaa

SEQ ID NO: 551683 - DNA, 15 bp, Homo sapiens
gagcttcacaaatga

SEQ ID NO: 551684 - DNA, 15 bp, Homo sapiens
ggagcttcacaaatg

SEQ ID NO: 551685 - DNA, 15 bp, Homo sapiens
gggagcttcacaaat

SEQ ID NO: 551686 - DNA, 15 bp, Homo sapiens
cgggagcttcacaaa

SEQ ID NO: 551687 - DNA, 15 bp, Homo sapiens
acgggagcttcacaa

SEQ ID NO: 551688 - DNA, 15 bp, Homo sapiens
cacgggagcttcaca

SEQ ID NO: 551689 - DNA, 15 bp, Homo sapiens
gcacgggagcttcac

SEQ ID NO: 551690 - DNA, 15 bp, Homo sapiens
tgcacgggagcttca

SEQ ID NO: 551691 - DNA, 15 bp, Homo sapiens
ttgcacgggagcttc

SEQ ID NO: 551692 - DNA, 15 bp, Homo sapiens
cttgcacgggagctt

SEQ ID NO: 551693 - DNA, 15 bp, Homo sapiens
ccttgcacgggagct

SEQ ID NO: 551694 - DNA, 15 bp, Homo sapiens
tccttgcacgggagc

SEQ ID NO: 551695 - DNA, 15 bp, Homo sapiens
ctccttgcacgggag

SEQ ID NO: 551696 - DNA, 15 bp, Homo sapiens
gctccttgcacggga

SEQ ID NO: 551697 - DNA, 15 bp, Homo sapiens
ggctccttgcacggg

SEQ ID NO: 551698 - DNA, 15 bp, Homo sapiens
gggctccttgcacgg

SEQ ID NO: 551699 - DNA, 15 bp, Homo sapiens
tgggctccttgcacg

SEQ ID NO: 551700 - DNA, 15 bp, Homo sapiens
ctgggctccttgcac

SEQ ID NO: 551701 - DNA, 15 bp, Homo sapiens
gctgggctccttgca

SEQ ID NO: 551702 - DNA, 15 bp, Homo sapiens
cgctgggctccttgc

SEQ ID NO: 551703 - DNA, 15 bp, Homo sapiens
ccgctgggctccttg

SEQ ID NO: 551704 - DNA, 15 bp, Homo sapiens
cccgctgggctcctt

SEQ ID NO: 551705 - DNA, 15 bp, Homo sapiens
ccccgctgggctcct

SEQ ID NO: 551706 - DNA, 15 bp, Homo sapiens
tccccgctgggctcc

SEQ ID NO: 551707 - DNA, 15 bp, Homo sapiens
atccccgctgggctc

SEQ ID NO: 551708 - DNA, 15 bp, Homo sapiens
catccccgctgggct

SEQ ID NO: 551709 - DNA, 15 bp, Homo sapiens
ccatccccgctgggc

SEQ ID NO: 551710 - DNA, 15 bp, Homo sapiens
gccatccccgctggg

SEQ ID NO: 551711 - DNA, 15 bp, Homo sapiens
ggccatccccgctgg

SEQ ID NO: 551712 - DNA, 15 bp, Homo sapiens
aggccatccccgctg

SEQ ID NO: 551713 - DNA, 15 bp, Homo sapiens
taggccatccccgct

SEQ ID NO: 551714 - DNA, 15 bp, Homo sapiens
ctaggccatccccgc

SEQ ID NO: 551715 - DNA, 15 bp, Homo sapiens
cctaggccatccccg

SEQ ID NO: 551716 - DNA, 15 bp, Homo sapiens
tcctaggccatcccc

SEQ ID NO: 551717 - DNA, 15 bp, Homo sapiens
ctcctaggccatccc

SEQ ID NO: 551718 - DNA, 15 bp, Homo sapiens
tctcctaggccatcc

SEQ ID NO: 551719 - DNA, 15 bp, Homo sapiens
ctctcctaggccatc

SEQ ID NO: 551720 - DNA, 15 bp, Homo sapiens
tctctcctaggccat

SEQ ID NO: 551721 - DNA, 15 bp, Homo sapiens
ttctctcctaggcca

SEQ ID NO: 551722 - DNA, 15 bp, Homo sapiens
cttctctcctaggcc

SEQ ID NO: 551723 - DNA, 15 bp, Homo sapiens
gcttctctcctaggc

SEQ ID NO: 551724 - DNA, 15 bp, Homo sapiens
cgcttctctcctagg

SEQ ID NO: 551725 - DNA, 15 bp, Homo sapiens
acgcttctctcctag

SEQ ID NO: 551726 - DNA, 15 bp, Homo sapiens
cacgcttctctccta

SEQ ID NO: 551727 - DNA, 15 bp, Homo sapiens
tcacgcttctctcct

SEQ ID NO: 551728 - DNA, 15 bp, Homo sapiens
ctcacgcttctctcc

SEQ ID NO: 551729 - DNA, 15 bp, Homo sapiens
cctcacgcttctctc

SEQ ID NO: 551730 - DNA, 15 bp, Homo sapiens
ccctcacgcttctct

SEQ ID NO: 551731 - DNA, 15 bp, Homo sapiens
gccctcacgcttctc

SEQ ID NO: 551732 - DNA, 15 bp, Homo sapiens
tgccctcacgcttct

SEQ ID NO: 551733 - DNA, 15 bp, Homo sapiens
gtgccctcacgcttc

SEQ ID NO: 551734 - DNA, 15 bp, Homo sapiens
tgtgccctcacgctt

SEQ ID NO: 551735 - DNA, 15 bp, Homo sapiens
ctgtgccctcacgct

SEQ ID NO: 551736 - DNA, 15 bp, Homo sapiens
cctgtgccctcacgc

SEQ ID NO: 551737 - DNA, 15 bp, Homo sapiens
gcctgtgccctcacg

SEQ ID NO: 551738 - DNA, 15 bp, Homo sapiens
ggcctgtgccctcac

SEQ ID NO: 551739 - DNA, 15 bp, Homo sapiens
aggcctgtgccctca

SEQ ID NO: 551740 - DNA, 15 bp, Homo sapiens
taggcctgtgccctc

SEQ ID NO: 551741 - DNA, 15 bp, Homo sapiens
ctaggcctgtgccct

SEQ ID NO: 551742 - DNA, 15 bp, Homo sapiens
tctaggcctgtgccc

SEQ ID NO: 551743 - DNA, 15 bp, Homo sapiens
gtctaggcctgtgcc

SEQ ID NO: 551744 - DNA, 15 bp, Homo sapiens
cgtctaggcctgtgc

SEQ ID NO: 551745 - DNA, 15 bp, Homo sapiens
acgtctaggcctgtg

SEQ ID NO: 551746 - DNA, 15 bp, Homo sapiens
cacgtctaggcctgt

SEQ ID NO: 551747 - DNA, 15 bp, Homo sapiens
ccacgtctaggcctg

SEQ ID NO: 551748 - DNA, 15 bp, Homo sapiens
tccacgtctaggcct

SEQ ID NO: 551749 - DNA, 15 bp, Homo sapiens
atccacgtctaggcc

SEQ ID NO: 551750 - DNA, 15 bp, Homo sapiens
tatccacgtctaggc

SEQ ID NO: 551751 - DNA, 15 bp, Homo sapiens
gtatccacgtctagg

SEQ ID NO: 551752 - DNA, 15 bp, Homo sapiens
cgtatccacgtctag

SEQ ID NO: 551753 - DNA, 15 bp, Homo sapiens
ccgtatccacgtcta

SEQ ID NO: 551754 - DNA, 15 bp, Homo sapiens
tccgtatccacgtct

SEQ ID NO: 551755 - DNA, 15 bp, Homo sapiens
ctccgtatccacgtc

SEQ ID NO: 551756 - DNA, 15 bp, Homo sapiens
gctccgtatccacgt

SEQ ID NO: 551757 - DNA, 15 bp, Homo sapiens
ggctccgtatccacg

SEQ ID NO: 551758 - DNA, 15 bp, Homo sapiens
aggctccgtatccac

SEQ ID NO: 551759 - DNA, 15 bp, Homo sapiens
caggctccgtatcca

SEQ ID NO: 551760 - DNA, 15 bp, Homo sapiens
ccaggctccgtatcc

SEQ ID NO: 551761 - DNA, 15 bp, Homo sapiens
cccaggctccgtatc

SEQ ID NO: 551762 - DNA, 15 bp, Homo sapiens
ccccaggctccgtat

SEQ ID NO: 551763 - DNA, 15 bp, Homo sapiens
gccccaggctccgta

SEQ ID NO: 551764 - DNA, 15 bp, Homo sapiens
agccccaggctccgt

SEQ ID NO: 551765 - DNA, 15 bp, Homo sapiens
gagccccaggctccg

SEQ ID NO: 551766 - DNA, 15 bp, Homo sapiens
agagccccaggctcc

SEQ ID NO: 551767 - DNA, 15 bp, Homo sapiens
cagagccccaggctc

SEQ ID NO: 551768 - DNA, 15 bp, Homo sapiens
acagagccccaggct

SEQ ID NO: 551769 - DNA, 15 bp, Homo sapiens
gacagagccccaggc

SEQ ID NO: 551770 - DNA, 15 bp, Homo sapiens
agacagagccccagg

SEQ ID NO: 551771 - DNA, 15 bp, Homo sapiens
gagacagagccccag

SEQ ID NO: 551772 - DNA, 15 bp, Homo sapiens
agagacagagcccca

SEQ ID NO: 551773 - DNA, 15 bp, Homo sapiens
gagagacagagcccc

SEQ ID NO: 551774 - DNA, 15 bp, Homo sapiens
ggagagacagagccc

SEQ ID NO: 551775 - DNA, 15 bp, Homo sapiens
gggagagacagagcc

SEQ ID NO: 551776 - DNA, 15 bp, Homo sapiens
agggagagacagagc

SEQ ID NO: 551777 - DNA, 15 bp, Homo sapiens
cagggagagacagag

SEQ ID NO: 551778 - DNA, 15 bp, Homo sapiens
gcagggagagacaga

SEQ ID NO: 551779 - DNA, 15 bp, Homo sapiens
agcagggagagacag

SEQ ID NO: 551780 - DNA, 15 bp, Homo sapiens
gagcagggagagaca

SEQ ID NO: 551781 - DNA, 15 bp, Homo sapiens
ggagcagggagagac

SEQ ID NO: 551782 - DNA, 15 bp, Homo sapiens
aggagcagggagaga

SEQ ID NO: 551783 - DNA, 15 bp, Homo sapiens
caggagcagggagag

SEQ ID NO: 551784 - DNA, 15 bp, Homo sapiens
acaggagcagggaga

SEQ ID NO: 551785 - DNA, 15 bp, Homo sapiens
cacaggagcagggag

SEQ ID NO: 551786 - DNA, 15 bp, Homo sapiens
tcacaggagcaggga

SEQ ID NO: 551787 - DNA, 15 bp, Homo sapiens
gtcacaggagcaggg

SEQ ID NO: 551788 - DNA, 15 bp, Homo sapiens
ggtcacaggagcagg

SEQ ID NO: 551789 - DNA, 15 bp, Homo sapiens
aggtcacaggagcag

SEQ ID NO: 551790 - DNA, 15 bp, Homo sapiens
aaggtcacaggagca

SEQ ID NO: 551791 - DNA, 15 bp, Homo sapiens
caaggtcacaggagc

SEQ ID NO: 551792 - DNA, 15 bp, Homo sapiens
ccaaggtcacaggag

SEQ ID NO: 551793 - DNA, 15 bp, Homo sapiens
accaaggtcacagga

SEQ ID NO: 551794 - DNA, 15 bp, Homo sapiens
gaccaaggtcacagg

SEQ ID NO: 551795 - DNA, 15 bp, Homo sapiens
tgaccaaggtcacag

SEQ ID NO: 551796 - DNA, 15 bp, Homo sapiens
ctgaccaaggtcaca

SEQ ID NO: 551797 - DNA, 15 bp, Homo sapiens
cctgaccaaggtcac

SEQ ID NO: 551798 - DNA, 15 bp, Homo sapiens
gcctgaccaaggtca

SEQ ID NO: 551799 - DNA, 15 bp, Homo sapiens
tgcctgaccaaggtc

SEQ ID NO: 551800 - DNA, 15 bp, Homo sapiens
atgcctgaccaaggt

SEQ ID NO: 551801 - DNA, 15 bp, Homo sapiens
aatgcctgaccaagg

SEQ ID NO: 551802 - DNA, 15 bp, Homo sapiens
aaatgcctgaccaag

SEQ ID NO: 551803 - DNA, 15 bp, Homo sapiens
caaatgcctgaccaa

SEQ ID NO: 551804 - DNA, 15 bp, Homo sapiens
ccaaatgcctgacca

SEQ ID NO: 551805 - DNA, 15 bp, Homo sapiens
gccaaatgcctgacc

SEQ ID NO: 551806 - DNA, 15 bp, Homo sapiens
agccaaatgcctgac

SEQ ID NO: 551807 - DNA, 15 bp, Homo sapiens
aagccaaatgcctga

SEQ ID NO: 551808 - DNA, 15 bp, Homo sapiens
aaagccaaatgcctg

SEQ ID NO: 551809 - DNA, 15 bp, Homo sapiens
caaagccaaatgcct

SEQ ID NO: 551810 - DNA, 15 bp, Homo sapiens
ccaaagccaaatgcc

SEQ ID NO: 551811 - DNA, 15 bp, Homo sapiens
tccaaagccaaatgc

SEQ ID NO: 551812 - DNA, 15 bp, Homo sapiens
ctccaaagccaaatg

SEQ ID NO: 551813 - DNA, 15 bp, Homo sapiens
gctccaaagccaaat

SEQ ID NO: 551814 - DNA, 15 bp, Homo sapiens
ggctccaaagccaaa

SEQ ID NO: 551815 - DNA, 15 bp, Homo sapiens
aggctccaaagccaa

SEQ ID NO: 551816 - DNA, 15 bp, Homo sapiens
gaggctccaaagcca

SEQ ID NO: 551817 - DNA, 15 bp, Homo sapiens
tgaggctccaaagcc

SEQ ID NO: 551818 - DNA, 15 bp, Homo sapiens
ctgaggctccaaagc

SEQ ID NO: 551819 - DNA, 15 bp, Homo sapiens
actgaggctccaaag

SEQ ID NO: 551820 - DNA, 15 bp, Homo sapiens
cactgaggctccaaa

SEQ ID NO: 551821 - DNA, 15 bp, Homo sapiens
acactgaggctccaa

SEQ ID NO: 551822 - DNA, 15 bp, Homo sapiens
gacactgaggctcca

SEQ ID NO: 551823 - DNA, 15 bp, Homo sapiens
agacactgaggctcc

SEQ ID NO: 551824 - DNA, 15 bp, Homo sapiens
cagacactgaggctc

SEQ ID NO: 551825 - DNA, 15 bp, Homo sapiens
gcagacactgaggct

SEQ ID NO: 551826 - DNA, 15 bp, Homo sapiens
agcagacactgaggc

SEQ ID NO: 551827 - DNA, 15 bp, Homo sapiens
aagcagacactgagg

SEQ ID NO: 551828 - DNA, 15 bp, Homo sapiens
gaagcagacactgag

SEQ ID NO: 551829 - DNA, 15 bp, Homo sapiens
cgaagcagacactga

SEQ ID NO: 551830 - DNA, 15 bp, Homo sapiens
tcgaagcagacactg

SEQ ID NO: 551831 - DNA, 15 bp, Homo sapiens
atcgaagcagacact

SEQ ID NO: 551832 - DNA, 15 bp, Homo sapiens
catcgaagcagacac

SEQ ID NO: 551833 - DNA, 15 bp, Homo sapiens
tcatcgaagcagaca

SEQ ID NO: 551834 - DNA, 15 bp, Homo sapiens
ctcatcgaagcagac

SEQ ID NO: 551835 - DNA, 15 bp, Homo sapiens
tctcatcgaagcaga

SEQ ID NO: 551836 - DNA, 15 bp, Homo sapiens
atctcatcgaagcag

SEQ ID NO: 551837 - DNA, 15 bp, Homo sapiens
catctcatcgaagca

SEQ ID NO: 551838 - DNA, 15 bp, Homo sapiens
tcatctcatcgaagc

SEQ ID NO: 551839 - DNA, 15 bp, Homo sapiens
ctcatctcatcgaag

SEQ ID NO: 551840 - DNA, 15 bp, Homo sapiens
gctcatctcatcgaa

SEQ ID NO: 551841 - DNA, 15 bp, Homo sapiens
ggctcatctcatcga

SEQ ID NO: 551842 - DNA, 15 bp, Homo sapiens
tggctcatctcatcg

SEQ ID NO: 551843 - DNA, 15 bp, Homo sapiens
atggctcatctcatc

SEQ ID NO: 551844 - DNA, 15 bp, Homo sapiens
aatggctcatctcat

SEQ ID NO: 551845 - DNA, 15 bp, Homo sapiens
caatggctcatctca

SEQ ID NO: 551846 - DNA, 15 bp, Homo sapiens
tcaatggctcatctc

SEQ ID NO: 551847 - DNA, 15 bp, Homo sapiens
ctcaatggctcatct

SEQ ID NO: 551848 - DNA, 15 bp, Homo sapiens
tctcaatggctcatc

SEQ ID NO: 551849 - DNA, 15 bp, Homo sapiens
ttctcaatggctcat

SEQ ID NO: 551850 - DNA, 15 bp, Homo sapiens
attctcaatggctca

SEQ ID NO: 551851 - DNA, 15 bp, Homo sapiens
aattctcaatggctc

SEQ ID NO: 551852 - DNA, 15 bp, Homo sapiens
aaattctcaatggct

SEQ ID NO: 551853 - DNA, 15 bp, Homo sapiens
taaattctcaatggc

SEQ ID NO: 551854 - DNA, 15 bp, Homo sapiens
ttaaattctcaatgg

SEQ ID NO: 551855 - DNA, 15 bp, Homo sapiens
cttaaattctcaatg

SEQ ID NO: 551856 - DNA, 15 bp, Homo sapiens
tcttaaattctcaat

SEQ ID NO: 551857 - DNA, 15 bp, Homo sapiens
ctcttaaattctcaa

SEQ ID NO: 551858 - DNA, 15 bp, Homo sapiens
cctcttaaattctca

SEQ ID NO: 551859 - DNA, 15 bp, Homo sapiens
acctcttaaattctc

SEQ ID NO: 551860 - DNA, 15 bp, Homo sapiens
cacctcttaaattct

SEQ ID NO: 551861 - DNA, 15 bp, Homo sapiens
tcacctcttaaattc

SEQ ID NO: 551862 - DNA, 15 bp, Homo sapiens
ttcacctcttaaatt

SEQ ID NO: 551863 - DNA, 15 bp, Homo sapiens
cttcacctcttaaat

SEQ ID NO: 551864 - DNA, 15 bp, Homo sapiens
acttcacctcttaaa

SEQ ID NO: 551865 - DNA, 15 bp, Homo sapiens
tacttcacctcttaa

SEQ ID NO: 551866 - DNA, 15 bp, Homo sapiens
ctacttcacctctta

SEQ ID NO: 551867 - DNA, 15 bp, Homo sapiens
cctacttcacctctt

SEQ ID NO: 551868 - DNA, 15 bp, Homo sapiens
acctacttcacctct

SEQ ID NO: 551869 - DNA, 15 bp, Homo sapiens
cacctacttcacctc

SEQ ID NO: 551870 - DNA, 15 bp, Homo sapiens
ccacctacttcacct

SEQ ID NO: 551871 - DNA, 15 bp, Homo sapiens
tccacctacttcacc

SEQ ID NO: 551872 - DNA, 15 bp, Homo sapiens
ttccacctacttcac

SEQ ID NO: 551873 - DNA, 15 bp, Homo sapiens
cttccacctacttca

SEQ ID NO: 551874 - DNA, 15 bp, Homo sapiens
acttccacctacttc

SEQ ID NO: 551875 - DNA, 15 bp, Homo sapiens
cacttccacctactt

SEQ ID NO: 551876 - DNA, 15 bp, Homo sapiens
acacttccacctact

SEQ ID NO: 551877 - DNA, 15 bp, Homo sapiens
aacacttccacctac

SEQ ID NO: 551878 - DNA, 15 bp, Homo sapiens
aaacacttccaccta

SEQ ID NO: 551879 - DNA, 15 bp, Homo sapiens
gaaacacttccacct

SEQ ID NO: 551880 - DNA, 15 bp, Homo sapiens
cgaaacacttccacc

SEQ ID NO: 551881 - DNA, 15 bp, Homo sapiens
gcgaaacacttccac

SEQ ID NO: 551882 - DNA, 15 bp, Homo sapiens
agcgaaacacttcca

SEQ ID NO: 551883 - DNA, 15 bp, Homo sapiens
tagcgaaacacttcc

SEQ ID NO: 551884 - DNA, 15 bp, Homo sapiens
gtagcgaaacacttc

SEQ ID NO: 551885 - DNA, 15 bp, Homo sapiens
ggtagcgaaacactt

SEQ ID NO: 551886 - DNA, 15 bp, Homo sapiens
aggtagcgaaacact

SEQ ID NO: 551887 - DNA, 15 bp, Homo sapiens
caggtagcgaaacac

SEQ ID NO: 551888 - DNA, 15 bp, Homo sapiens
tcaggtagcgaaaca

SEQ ID NO: 551889 - DNA, 15 bp, Homo sapiens
ttcaggtagcgaaac

SEQ ID NO: 551890 - DNA, 15 bp, Homo sapiens
gttcaggtagcgaaa

SEQ ID NO: 551891 - DNA, 15 bp, Homo sapiens
tgttcaggtagcgaa

SEQ ID NO: 551892 - DNA, 15 bp, Homo sapiens
ctgttcaggtagcga

SEQ ID NO: 551893 - DNA, 15 bp, Homo sapiens
cctgttcaggtagcg

SEQ ID NO: 551894 - DNA, 15 bp, Homo sapiens
ccctgttcaggtagc

SEQ ID NO: 551895 - DNA, 15 bp, Homo sapiens
gccctgttcaggtag

SEQ ID NO: 551896 - DNA, 15 bp, Homo sapiens
ggccctgttcaggta

SEQ ID NO: 551897 - DNA, 15 bp, Homo sapiens
cggccctgttcaggt

SEQ ID NO: 551898 - DNA, 15 bp, Homo sapiens
ccggccctgttcagg

SEQ ID NO: 551899 - DNA, 15 bp, Homo sapiens
cccggccctgttcag

SEQ ID NO: 551900 - DNA, 15 bp, Homo sapiens
gcccggccctgttca

SEQ ID NO: 551901 - DNA, 15 bp, Homo sapiens
tgcccggccctgttc

SEQ ID NO: 551902 - DNA, 15 bp, Homo sapiens
ctgcccggccctgtt

SEQ ID NO: 551903 - DNA, 15 bp, Homo sapiens
tctgcccggccctgt

SEQ ID NO: 551904 - DNA, 15 bp, Homo sapiens
atctgcccggccctg

SEQ ID NO: 551905 - DNA, 15 bp, Homo sapiens
gatctgcccggccct

SEQ ID NO: 551906 - DNA, 15 bp, Homo sapiens
cgatctgcccggccc

SEQ ID NO: 551907 - DNA, 15 bp, Homo sapiens
acgatctgcccggcc

SEQ ID NO: 551908 - DNA, 15 bp, Homo sapiens
gacgatctgcccggc

SEQ ID NO: 551909 - DNA, 15 bp, Homo sapiens
ggacgatctgcccgg

SEQ ID NO: 551910 - DNA, 15 bp, Homo sapiens
tggacgatctgcccg

SEQ ID NO: 551911 - DNA, 15 bp, Homo sapiens
ctggacgatctgccc

SEQ ID NO: 551912 - DNA, 15 bp, Homo sapiens
tctggacgatctgcc

SEQ ID NO: 551913 - DNA, 15 bp, Homo sapiens
gtctggacgatctgc

SEQ ID NO: 551914 - DNA, 15 bp, Homo sapiens
cgtctggacgatctg

SEQ ID NO: 551915 - DNA, 15 bp, Homo sapiens
tcgtctggacgatct

SEQ ID NO: 551916 - DNA, 15 bp, Homo sapiens
atcgtctggacgatc

SEQ ID NO: 551917 - DNA, 15 bp, Homo sapiens
aatcgtctggacgat

SEQ ID NO: 551918 - DNA, 15 bp, Homo sapiens
gaatcgtctggacga

SEQ ID NO: 551919 - DNA, 15 bp, Homo sapiens
agaatcgtctggacg

SEQ ID NO: 551920 - DNA, 15 bp, Homo sapiens
cagaatcgtctggac

SEQ ID NO: 551921 - DNA, 15 bp, Homo sapiens
gcagaatcgtctgga

SEQ ID NO: 551922 - DNA, 15 bp, Homo sapiens
agcagaatcgtctgg

SEQ ID NO: 551923 - DNA, 15 bp, Homo sapiens
gagcagaatcgtctg

SEQ ID NO: 551924 - DNA, 15 bp, Homo sapiens
ggagcagaatcgtct

SEQ ID NO: 551925 - DNA, 15 bp, Homo sapiens
gggagcagaatcgtc

SEQ ID NO: 551926 - DNA, 15 bp, Homo sapiens
ggggagcagaatcgt

SEQ ID NO: 551927 - DNA, 15 bp, Homo sapiens
aggggagcagaatcg

SEQ ID NO: 551928 - DNA, 15 bp, Homo sapiens
caggggagcagaatc

SEQ ID NO: 551929 - DNA, 15 bp, Homo sapiens
ccaggggagcagaat

SEQ ID NO: 551930 - DNA, 15 bp, Homo sapiens
accaggggagcagaa

SEQ ID NO: 551931 - DNA, 15 bp, Homo sapiens
caccaggggagcaga

SEQ ID NO: 551932 - DNA, 15 bp, Homo sapiens
acaccaggggagcag

SEQ ID NO: 551933 - DNA, 15 bp, Homo sapiens
gacaccaggggagca

SEQ ID NO: 551934 - DNA, 15 bp, Homo sapiens
agacaccaggggagc

SEQ ID NO: 551935 - DNA, 15 bp, Homo sapiens
cagacaccaggggag

SEQ ID NO: 551936 - DNA, 15 bp, Homo sapiens
tcagacaccagggga

SEQ ID NO: 551937 - DNA, 15 bp, Homo sapiens
ctcagacaccagggg

SEQ ID NO: 551938 - DNA, 15 bp, Homo sapiens
cctcagacaccaggg

SEQ ID NO: 551939 - DNA, 15 bp, Homo sapiens
ccctcagacaccagg

SEQ ID NO: 551940 - DNA, 15 bp, Homo sapiens
gccctcagacaccag

SEQ ID NO: 551941 - DNA, 15 bp, Homo sapiens
tgccctcagacacca

SEQ ID NO: 551942 - DNA, 15 bp, Homo sapiens
ctgccctcagacacc

SEQ ID NO: 551943 - DNA, 15 bp, Homo sapiens
cctgccctcagacac

SEQ ID NO: 551944 - DNA, 15 bp, Homo sapiens
ccctgccctcagaca

SEQ ID NO: 551945 - DNA, 15 bp, Homo sapiens
cccctgccctcagac

SEQ ID NO: 551946 - DNA, 15 bp, Homo sapiens
gcccctgccctcaga

SEQ ID NO: 551947 - DNA, 15 bp, Homo sapiens
cgcccctgccctcag

SEQ ID NO: 551948 - DNA, 15 bp, Homo sapiens
acgcccctgccctca

SEQ ID NO: 551949 - DNA, 15 bp, Homo sapiens
gacgcccctgccctc

SEQ ID NO: 551950 - DNA, 15 bp, Homo sapiens
agacgcccctgccct

SEQ ID NO: 551951 - DNA, 15 bp, Homo sapiens
gagacgcccctgccc

SEQ ID NO: 551952 - DNA, 15 bp, Homo sapiens
tgagacgcccctgcc

SEQ ID NO: 551953 - DNA, 15 bp, Homo sapiens
ctgagacgcccctgc

SEQ ID NO: 551954 - DNA, 15 bp, Homo sapiens
cctgagacgcccctg

SEQ ID NO: 551955 - DNA, 15 bp, Homo sapiens
ccctgagacgcccct

SEQ ID NO: 551956 - DNA, 15 bp, Homo sapiens
gccctgagacgcccc

SEQ ID NO: 551957 - DNA, 15 bp, Homo sapiens
tgccctgagacgccc

SEQ ID NO: 551958 - DNA, 15 bp, Homo sapiens
ctgccctgagacgcc

SEQ ID NO: 551959 - DNA, 15 bp, Homo sapiens
cctgccctgagacgc

SEQ ID NO: 551960 - DNA, 15 bp, Homo sapiens
ccctgccctgagacg

SEQ ID NO: 551961 - DNA, 15 bp, Homo sapiens
cccctgccctgagac

SEQ ID NO: 551962 - DNA, 15 bp, Homo sapiens
gcccctgccctgaga

SEQ ID NO: 551963 - DNA, 15 bp, Homo sapiens
ggcccctgccctgag

SEQ ID NO: 551964 - DNA, 15 bp, Homo sapiens
gggcccctgccctga

SEQ ID NO: 551965 - DNA, 15 bp, Homo sapiens
ggggcccctgccctg

SEQ ID NO: 551966 - DNA, 15 bp, Homo sapiens
tggggcccctgccct

SEQ ID NO: 551967 - DNA, 15 bp, Homo sapiens
atggggcccctgccc

SEQ ID NO: 551968 - DNA, 15 bp, Homo sapiens
gatggggcccctgcc

SEQ ID NO: 551969 - DNA, 15 bp, Homo sapiens
cgatggggcccctgc

SEQ ID NO: 551970 - DNA, 15 bp, Homo sapiens
acgatggggcccctg

SEQ ID NO: 551971 - DNA, 15 bp, Homo sapiens
cacgatggggcccct

SEQ ID NO: 551972 - DNA, 15 bp, Homo sapiens
acacgatggggcccc

SEQ ID NO: 551973 - DNA, 15 bp, Homo sapiens
aacacgatggggccc

SEQ ID NO: 551974 - DNA, 15 bp, Homo sapiens
gaacacgatggggcc

SEQ ID NO: 551975 - DNA, 15 bp, Homo sapiens
tgaacacgatggggc

SEQ ID NO: 551976 - DNA, 15 bp, Homo sapiens
atgaacacgatgggg

SEQ ID NO: 551977 - DNA, 15 bp, Homo sapiens
gatgaacacgatggg

SEQ ID NO: 551978 - DNA, 15 bp, Homo sapiens
ggatgaacacgatgg

SEQ ID NO: 551979 - DNA, 15 bp, Homo sapiens
gggatgaacacgatg

SEQ ID NO: 551980 - DNA, 15 bp, Homo sapiens
agggatgaacacgat

SEQ ID NO: 551981 - DNA, 15 bp, Homo sapiens
cagggatgaacacga

SEQ ID NO: 551982 - DNA, 15 bp, Homo sapiens
acagggatgaacacg

SEQ ID NO: 551983 - DNA, 15 bp, Homo sapiens
cacagggatgaacac

SEQ ID NO: 551984 - DNA, 15 bp, Homo sapiens
acacagggatgaaca

SEQ ID NO: 551985 - DNA, 15 bp, Homo sapiens
gacacagggatgaac

SEQ ID NO: 551986 - DNA, 15 bp, Homo sapiens
agacacagggatgaa

SEQ ID NO: 551987 - DNA, 15 bp, Homo sapiens
aagacacagggatga

SEQ ID NO: 551988 - DNA, 15 bp, Homo sapiens
aaagacacagggatg

SEQ ID NO: 551989 - DNA, 15 bp, Homo sapiens
taaagacacagggat

SEQ ID NO: 551990 - DNA, 15 bp, Homo sapiens
ttaaagacacaggga

SEQ ID NO: 551991 - DNA, 15 bp, Homo sapiens
tttaaagacacaggg

SEQ ID NO: 551992 - DNA, 15 bp, Homo sapiens
atttaaagacacagg

SEQ ID NO: 551993 - DNA, 15 bp, Homo sapiens
aatttaaagacacag

SEQ ID NO: 551994 - DNA, 15 bp, Homo sapiens
gaatttaaagacaca

SEQ ID NO: 551995 - DNA, 15 bp, Homo sapiens
ggaatttaaagacac

SEQ ID NO: 551996 - DNA, 15 bp, Homo sapiens
aggaatttaaagaca

SEQ ID NO: 551997 - DNA, 15 bp, Homo sapiens
taggaatttaaagac

SEQ ID NO: 551998 - DNA, 15 bp, Homo sapiens
ctaggaatttaaaga

SEQ ID NO: 551999 - DNA, 15 bp, Homo sapiens
gctaggaatttaaag

SEQ ID NO: 552000 - DNA, 15 bp, Homo sapiens
tgctaggaatttaaa

SEQ ID NO: 552001 - DNA, 15 bp, Homo sapiens
atgctaggaatttaa

SEQ ID NO: 552002 - DNA, 15 bp, Homo sapiens
tatgctaggaattta

SEQ ID NO: 552003 - DNA, 15 bp, Homo sapiens
ctatgctaggaattt

SEQ ID NO: 552004 - DNA, 15 bp, Homo sapiens
gctatgctaggaatt

SEQ ID NO: 552005 - DNA, 15 bp, Homo sapiens
tgctatgctaggaat

SEQ ID NO: 552006 - DNA, 15 bp, Homo sapiens
atgctatgctaggaa

SEQ ID NO: 552007 - DNA, 15 bp, Homo sapiens
gatgctatgctagga

SEQ ID NO: 552008 - DNA, 15 bp, Homo sapiens
agatgctatgctagg

SEQ ID NO: 552009 - DNA, 15 bp, Homo sapiens
tagatgctatgctag

SEQ ID NO: 552010 - DNA, 15 bp, Homo sapiens
ctagatgctatgcta

SEQ ID NO: 552011 - DNA, 15 bp, Homo sapiens
gctagatgctatgct

SEQ ID NO: 552012 - DNA, 15 bp, Homo sapiens
tgctagatgctatgc

SEQ ID NO: 552013 - DNA, 15 bp, Homo sapiens
atgctagatgctatg

SEQ ID NO: 552014 - DNA, 15 bp, Homo sapiens
catgctagatgctat

SEQ ID NO: 552015 - DNA, 15 bp, Homo sapiens
ccatgctagatgcta

SEQ ID NO: 552016 - DNA, 15 bp, Homo sapiens
cccatgctagatgct

SEQ ID NO: 552017 - DNA, 15 bp, Homo sapiens
ccccatgctagatgc

SEQ ID NO: 552018 - DNA, 15 bp, Homo sapiens
gccccatgctagatg

SEQ ID NO: 552019 - DNA, 15 bp, Homo sapiens
cgccccatgctagat

SEQ ID NO: 552020 - DNA, 15 bp, Homo sapiens
ccgccccatgctaga

SEQ ID NO: 552021 - DNA, 15 bp, Homo sapiens
tccgccccatgctag

SEQ ID NO: 552022 - DNA, 15 bp, Homo sapiens
atccgccccatgcta

SEQ ID NO: 552023 - DNA, 15 bp, Homo sapiens
catccgccccatgct

SEQ ID NO: 552024 - DNA, 15 bp, Homo sapiens
tcatccgccccatgc

SEQ ID NO: 552025 - DNA, 15 bp, Homo sapiens
atcatccgccccatg

SEQ ID NO: 552026 - DNA, 15 bp, Homo sapiens
aatcatccgccccat

SEQ ID NO: 552027 - DNA, 15 bp, Homo sapiens
caatcatccgcccca

SEQ ID NO: 552028 - DNA, 15 bp, Homo sapiens
acaatcatccgcccc

SEQ ID NO: 552029 - DNA, 15 bp, Homo sapiens
tacaatcatccgccc

SEQ ID NO: 552030 - DNA, 15 bp, Homo sapiens
gtacaatcatccgcc

SEQ ID NO: 552031 - DNA, 15 bp, Homo sapiens
tgtacaatcatccgc

SEQ ID NO: 552032 - DNA, 15 bp, Homo sapiens
ctgtacaatcatccg

SEQ ID NO: 552033 - DNA, 15 bp, Homo sapiens
cctgtacaatcatcc

SEQ ID NO: 552034 - DNA, 15 bp, Homo sapiens
ccctgtacaatcatc

SEQ ID NO: 552035 - DNA, 15 bp, Homo sapiens
gccctgtacaatcat

SEQ ID NO: 552036 - DNA, 15 bp, Homo sapiens
tgccctgtacaatca

SEQ ID NO: 552037 - DNA, 15 bp, Homo sapiens
atgccctgtacaatc

SEQ ID NO: 552038 - DNA, 15 bp, Homo sapiens
catgccctgtacaat

SEQ ID NO: 552039 - DNA, 15 bp, Homo sapiens
tcatgccctgtacaa

SEQ ID NO: 552040 - DNA, 15 bp, Homo sapiens
ttcatgccctgtaca

SEQ ID NO: 552041 - DNA, 15 bp, Homo sapiens
gttcatgccctgtac

SEQ ID NO: 552042 - DNA, 15 bp, Homo sapiens
agttcatgccctgta

SEQ ID NO: 552043 - DNA, 15 bp, Homo sapiens
cagttcatgccctgt

SEQ ID NO: 552044 - DNA, 15 bp, Homo sapiens
gcagttcatgccctg

SEQ ID NO: 552045 - DNA, 15 bp, Homo sapiens
tgcagttcatgccct

SEQ ID NO: 552046 - DNA, 15 bp, Homo sapiens
ttgcagttcatgccc

SEQ ID NO: 552047 - DNA, 15 bp, Homo sapiens
attgcagttcatgcc

SEQ ID NO: 552048 - DNA, 15 bp, Homo sapiens
gattgcagttcatgc

SEQ ID NO: 552049 - DNA, 15 bp, Homo sapiens
ggattgcagttcatg

SEQ ID NO: 552050 - DNA, 15 bp, Homo sapiens
gggattgcagttcat

SEQ ID NO: 552051 - DNA, 15 bp, Homo sapiens
tgggattgcagttca

SEQ ID NO: 552052 - DNA, 15 bp, Homo sapiens
ttgggattgcagttc

SEQ ID NO: 552053 - DNA, 15 bp, Homo sapiens
attgggattgcagtt

SEQ ID NO: 552054 - DNA, 15 bp, Homo sapiens
cattgggattgcagt

SEQ ID NO: 552055 - DNA, 15 bp, Homo sapiens
tcattgggattgcag

SEQ ID NO: 552056 - DNA, 15 bp, Homo sapiens
ctcattgggattgca

SEQ ID NO: 552057 - DNA, 15 bp, Homo sapiens
cctcattgggattgc

SEQ ID NO: 552058 - DNA, 15 bp, Homo sapiens
acctcattgggattg

SEQ ID NO: 552059 - DNA, 15 bp, Homo sapiens
gacctcattgggatt

SEQ ID NO: 552060 - DNA, 15 bp, Homo sapiens
tgacctcattgggat

SEQ ID NO: 552061 - DNA, 15 bp, Homo sapiens
ctgacctcattggga

SEQ ID NO: 552062 - DNA, 15 bp, Homo sapiens
tctgacctcattggg

SEQ ID NO: 552063 - DNA, 15 bp, Homo sapiens
ctctgacctcattgg

SEQ ID NO: 552064 - DNA, 15 bp, Homo sapiens
gctctgacctcattg

SEQ ID NO: 552065 - DNA, 15 bp, Homo sapiens
tgctctgacctcatt

SEQ ID NO: 552066 - DNA, 15 bp, Homo sapiens
ctgctctgacctcat

SEQ ID NO: 552067 - DNA, 15 bp, Homo sapiens
gctgctctgacctca

SEQ ID NO: 552068 - DNA, 15 bp, Homo sapiens
ggctgctctgacctc

SEQ ID NO: 552069 - DNA, 15 bp, Homo sapiens
aggctgctctgacct

SEQ ID NO: 552070 - DNA, 15 bp, Homo sapiens
gaggctgctctgacc

SEQ ID NO: 552071 - DNA, 15 bp, Homo sapiens
tgaggctgctctgac

SEQ ID NO: 552072 - DNA, 15 bp, Homo sapiens
gtgaggctgctctga

SEQ ID NO: 552073 - DNA, 15 bp, Homo sapiens
agtgaggctgctctg

SEQ ID NO: 552074 - DNA, 15 bp, Homo sapiens
cagtgaggctgctct

SEQ ID NO: 552075 - DNA, 15 bp, Homo sapiens
acagtgaggctgctc

SEQ ID NO: 552076 - DNA, 15 bp, Homo sapiens
tacagtgaggctgct

SEQ ID NO: 552077 - DNA, 15 bp, Homo sapiens
ctacagtgaggctgc

SEQ ID NO: 552078 - DNA, 15 bp, Homo sapiens
cctacagtgaggctg

SEQ ID NO: 552079 - DNA, 15 bp, Homo sapiens
gcctacagtgaggct

SEQ ID NO: 552080 - DNA, 15 bp, Homo sapiens
ggcctacagtgaggc

SEQ ID NO: 552081 - DNA, 15 bp, Homo sapiens
cggcctacagtgagg

SEQ ID NO: 552082 - DNA, 15 bp, Homo sapiens
tcggcctacagtgag

SEQ ID NO: 552083 - DNA, 15 bp, Homo sapiens
ctcggcctacagtga

SEQ ID NO: 552084 - DNA, 15 bp, Homo sapiens
cctcggcctacagtg

SEQ ID NO: 552085 - DNA, 15 bp, Homo sapiens
acctcggcctacagt

SEQ ID NO: 552086 - DNA, 15 bp, Homo sapiens
gacctcggcctacag

SEQ ID NO: 552087 - DNA, 15 bp, Homo sapiens
cgacctcggcctaca

SEQ ID NO: 552088 - DNA, 15 bp, Homo sapiens
acgacctcggcctac

SEQ ID NO: 552089 - DNA, 15 bp, Homo sapiens
aacgacctcggccta

SEQ ID NO: 552090 - DNA, 15 bp, Homo sapiens
gaacgacctcggcct

SEQ ID NO: 552091 - DNA, 15 bp, Homo sapiens
ggaacgacctcggcc

SEQ ID NO: 552092 - DNA, 15 bp, Homo sapiens
tggaacgacctcggc

SEQ ID NO: 552093 - DNA, 15 bp, Homo sapiens
ctggaacgacctcgg

SEQ ID NO: 552094 - DNA, 15 bp, Homo sapiens
actggaacgacctcg

SEQ ID NO: 552095 - DNA, 15 bp, Homo sapiens
cactggaacgacctc

SEQ ID NO: 552096 - DNA, 15 bp, Homo sapiens
ccactggaacgacct

SEQ ID NO: 552097 - DNA, 15 bp, Homo sapiens
cccactggaacgacc

SEQ ID NO: 552098 - DNA, 15 bp, Homo sapiens
gcccactggaacgac

SEQ ID NO: 552099 - DNA, 15 bp, Homo sapiens
agcccactggaacga

SEQ ID NO: 552100 - DNA, 15 bp, Homo sapiens
aagcccactggaacg

SEQ ID NO: 552101 - DNA, 15 bp, Homo sapiens
gaagcccactggaac

SEQ ID NO: 552102 - DNA, 15 bp, Homo sapiens
tgaagcccactggaa

SEQ ID NO: 552103 - DNA, 15 bp, Homo sapiens
atgaagcccactgga

SEQ ID NO: 552104 - DNA, 15 bp, Homo sapiens
catgaagcccactgg

SEQ ID NO: 552105 - DNA, 15 bp, Homo sapiens
ccatgaagcccactg

SEQ ID NO: 552106 - DNA, 15 bp, Homo sapiens
tccatgaagcccact

SEQ ID NO: 552107 - DNA, 15 bp, Homo sapiens
ctccatgaagcccac

SEQ ID NO: 552108 - DNA, 15 bp, Homo sapiens
cctccatgaagccca

SEQ ID NO: 552109 - DNA, 15 bp, Homo sapiens
tcctccatgaagccc

SEQ ID NO: 552110 - DNA, 15 bp, Homo sapiens
ctcctccatgaagcc

SEQ ID NO: 552111 - DNA, 15 bp, Homo sapiens
cctcctccatgaagc

SEQ ID NO: 552112 - DNA, 15 bp, Homo sapiens
acctcctccatgaag

SEQ ID NO: 552113 - DNA, 15 bp, Homo sapiens
cacctcctccatgaa

SEQ ID NO: 552114 - DNA, 15 bp, Homo sapiens
ccacctcctccatga

SEQ ID NO: 552115 - DNA, 15 bp, Homo sapiens
gccacctcctccatg

SEQ ID NO: 552116 - DNA, 15 bp, Homo sapiens
tgccacctcctccat

SEQ ID NO: 552117 - DNA, 15 bp, Homo sapiens
gtgccacctcctcca

SEQ ID NO: 552118 - DNA, 15 bp, Homo sapiens
ggtgccacctcctcc

SEQ ID NO: 552119 - DNA, 15 bp, Homo sapiens
aggtgccacctcctc

SEQ ID NO: 552120 - DNA, 15 bp, Homo sapiens
caggtgccacctcct

SEQ ID NO: 552121 - DNA, 15 bp, Homo sapiens
ccaggtgccacctcc

SEQ ID NO: 552122 - DNA, 15 bp, Homo sapiens
cccaggtgccacctc

SEQ ID NO: 552123 - DNA, 15 bp, Homo sapiens
gcccaggtgccacct

SEQ ID NO: 552124 - DNA, 15 bp, Homo sapiens
cgcccaggtgccacc

SEQ ID NO: 552125 - DNA, 15 bp, Homo sapiens
tcgcccaggtgccac

SEQ ID NO: 552126 - DNA, 15 bp, Homo sapiens
ctcgcccaggtgcca

SEQ ID NO: 552127 - DNA, 15 bp, Homo sapiens
gctcgcccaggtgcc

SEQ ID NO: 552128 - DNA, 15 bp, Homo sapiens
cgctcgcccaggtgc

SEQ ID NO: 552129 - DNA, 15 bp, Homo sapiens
ccgctcgcccaggtg

SEQ ID NO: 552130 - DNA, 15 bp, Homo sapiens
cccgctcgcccaggt

SEQ ID NO: 552131 - DNA, 15 bp, Homo sapiens
ccccgctcgcccagg

SEQ ID NO: 552132 - DNA, 15 bp, Homo sapiens
accccgctcgcccag

SEQ ID NO: 552133 - DNA, 15 bp, Homo sapiens
caccccgctcgccca

SEQ ID NO: 552134 - DNA, 15 bp, Homo sapiens
acaccccgctcgccc

SEQ ID NO: 552135 - DNA, 15 bp, Homo sapiens
aacaccccgctcgcc

SEQ ID NO: 552136 - DNA, 15 bp, Homo sapiens
taacaccccgctcgc

SEQ ID NO: 552137 - DNA, 15 bp, Homo sapiens
ctaacaccccgctcg

SEQ ID NO: 552138 - DNA, 15 bp, Homo sapiens
cctaacaccccgctc

SEQ ID NO: 552139 - DNA, 15 bp, Homo sapiens
acctaacaccccgct

SEQ ID NO: 552140 - DNA, 15 bp, Homo sapiens
aacctaacaccccgc

SEQ ID NO: 552141 - DNA, 15 bp, Homo sapiens
aaacctaacaccccg

SEQ ID NO: 552142 - DNA, 15 bp, Homo sapiens
caaacctaacacccc

SEQ ID NO: 552143 - DNA, 15 bp, Homo sapiens
ccaaacctaacaccc

SEQ ID NO: 552144 - DNA, 15 bp, Homo sapiens
tccaaacctaacacc

SEQ ID NO: 552145 - DNA, 15 bp, Homo sapiens
ctccaaacctaacac

SEQ ID NO: 552146 - DNA, 15 bp, Homo sapiens
cctccaaacctaaca

SEQ ID NO: 552147 - DNA, 15 bp, Homo sapiens
acctccaaacctaac

SEQ ID NO: 552148 - DNA, 15 bp, Homo sapiens
gacctccaaacctaa

SEQ ID NO: 552149 - DNA, 15 bp, Homo sapiens
tgacctccaaaccta

SEQ ID NO: 552150 - DNA, 15 bp, Homo sapiens
ctgacctccaaacct

SEQ ID NO: 552151 - DNA, 15 bp, Homo sapiens
cctgacctccaaacc

SEQ ID NO: 552152 - DNA, 15 bp, Homo sapiens
ccctgacctccaaac

SEQ ID NO: 552153 - DNA, 15 bp, Homo sapiens
cccctgacctccaaa

SEQ ID NO: 552154 - DNA, 15 bp, Homo sapiens
gcccctgacctccaa

SEQ ID NO: 552155 - DNA, 15 bp, Homo sapiens
ggcccctgacctcca

SEQ ID NO: 552156 - DNA, 15 bp, Homo sapiens
aggcccctgacctcc

SEQ ID NO: 552157 - DNA, 15 bp, Homo sapiens
gaggcccctgacctc

SEQ ID NO: 552158 - DNA, 15 bp, Homo sapiens
agaggcccctgacct

SEQ ID NO: 552159 - DNA, 15 bp, Homo sapiens
gagaggcccctgacc

SEQ ID NO: 552160 - DNA, 15 bp, Homo sapiens
ggagaggcccctgac

SEQ ID NO: 552161 - DNA, 15 bp, Homo sapiens
tggagaggcccctga

SEQ ID NO: 552162 - DNA, 15 bp, Homo sapiens
ctggagaggcccctg

SEQ ID NO: 552163 - DNA, 15 bp, Homo sapiens
cctggagaggcccct

SEQ ID NO: 552164 - DNA, 15 bp, Homo sapiens
acctggagaggcccc

SEQ ID NO: 552165 - DNA, 15 bp, Homo sapiens
cacctggagaggccc

SEQ ID NO: 552166 - DNA, 15 bp, Homo sapiens
gcacctggagaggcc

SEQ ID NO: 552167 - DNA, 15 bp, Homo sapiens
tgcacctggagaggc

SEQ ID NO: 552168 - DNA, 15 bp, Homo sapiens
ctgcacctggagagg

SEQ ID NO: 552169 - DNA, 15 bp, Homo sapiens
cctgcacctggagag

SEQ ID NO: 552170 - DNA, 15 bp, Homo sapiens
ccctgcacctggaga

SEQ ID NO: 552171 - DNA, 15 bp, Homo sapiens
cccctgcacctggag

SEQ ID NO: 552172 - DNA, 15 bp, Homo sapiens
tcccctgcacctgga

SEQ ID NO: 552173 - DNA, 15 bp, Homo sapiens
ctcccctgcacctgg

SEQ ID NO: 552174 - DNA, 15 bp, Homo sapiens
tctcccctgcacctg

SEQ ID NO: 552175 - DNA, 15 bp, Homo sapiens
ctctcccctgcacct

SEQ ID NO: 552176 - DNA, 15 bp, Homo sapiens
actctcccctgcacc

SEQ ID NO: 552177 - DNA, 15 bp, Homo sapiens
cactctcccctgcac

SEQ ID NO: 552178 - DNA, 15 bp, Homo sapiens
gcactctcccctgca

SEQ ID NO: 552179 - DNA, 15 bp, Homo sapiens
agcactctcccctgc

SEQ ID NO: 552180 - DNA, 15 bp, Homo sapiens
cagcactctcccctg

SEQ ID NO: 552181 - DNA, 15 bp, Homo sapiens
acagcactctcccct

SEQ ID NO: 552182 - DNA, 15 bp, Homo sapiens
cacagcactctcccc

SEQ ID NO: 552183 - DNA, 15 bp, Homo sapiens
ccacagcactctccc

SEQ ID NO: 552184 - DNA, 15 bp, Homo sapiens
cccacagcactctcc

SEQ ID NO: 552185 - DNA, 15 bp, Homo sapiens
acccacagcactctc

SEQ ID NO: 552186 - DNA, 15 bp, Homo sapiens
cacccacagcactct

SEQ ID NO: 552187 - DNA, 15 bp, Homo sapiens
ccacccacagcactc

SEQ ID NO: 552188 - DNA, 15 bp, Homo sapiens
accacccacagcact

SEQ ID NO: 552189 - DNA, 15 bp, Homo sapiens
taccacccacagcac

SEQ ID NO: 552190 - DNA, 15 bp, Homo sapiens
ctaccacccacagca

SEQ ID NO: 552191 - DNA, 15 bp, Homo sapiens
cctaccacccacagc

SEQ ID NO: 552192 - DNA, 15 bp, Homo sapiens
tcctaccacccacag

SEQ ID NO: 552193 - DNA, 15 bp, Homo sapiens
ttcctaccacccaca

SEQ ID NO: 552194 - DNA, 15 bp, Homo sapiens
cttcctaccacccac

SEQ ID NO: 552195 - DNA, 15 bp, Homo sapiens
tcttcctaccaccca

SEQ ID NO: 552196 - DNA, 15 bp, Homo sapiens
ctcttcctaccaccc

SEQ ID NO: 552197 - DNA, 15 bp, Homo sapiens
tctcttcctaccacc

SEQ ID NO: 552198 - DNA, 15 bp, Homo sapiens
ttctcttcctaccac

SEQ ID NO: 552199 - DNA, 15 bp, Homo sapiens
attctcttcctacca

SEQ ID NO: 552200 - DNA, 15 bp, Homo sapiens
cattctcttcctacc

SEQ ID NO: 552201 - DNA, 15 bp, Homo sapiens
gcattctcttcctac

SEQ ID NO: 552202 - DNA, 15 bp, Homo sapiens
agcattctcttccta

SEQ ID NO: 552203 - DNA, 15 bp, Homo sapiens
tagcattctcttcct

SEQ ID NO: 552204 - DNA, 15 bp, Homo sapiens
ttagcattctcttcc

SEQ ID NO: 552205 - DNA, 15 bp, Homo sapiens
tttagcattctcttc

SEQ ID NO: 552206 - DNA, 15 bp, Homo sapiens
ttttagcattctctt

SEQ ID NO: 552207 - DNA, 15 bp, Homo sapiens
tttttagcattctct

SEQ ID NO: 552208 - DNA, 15 bp, Homo sapiens
atttttagcattctc

SEQ ID NO: 552209 - DNA, 15 bp, Homo sapiens
aatttttagcattct

SEQ ID NO: 552210 - DNA, 15 bp, Homo sapiens
taatttttagcattc

SEQ ID NO: 552211 - DNA, 15 bp, Homo sapiens
ttaatttttagcatt

SEQ ID NO: 552212 - DNA, 15 bp, Homo sapiens
attaatttttagcat

SEQ ID NO: 552213 - DNA, 15 bp, Homo sapiens
cattaatttttagca

SEQ ID NO: 552214 - DNA, 15 bp, Homo sapiens
acattaatttttagc

SEQ ID NO: 552215 - DNA, 15 bp, Homo sapiens
gacattaatttttag

SEQ ID NO: 552216 - DNA, 15 bp, Homo sapiens
agacattaattttta

SEQ ID NO: 552217 - DNA, 15 bp, Homo sapiens
tagacattaattttt

SEQ ID NO: 552218 - DNA, 15 bp, Homo sapiens
atagacattaatttt

SEQ ID NO: 552219 - DNA, 15 bp, Homo sapiens
catagacattaattt

SEQ ID NO: 552220 - DNA, 15 bp, Homo sapiens
tcatagacattaatt

SEQ ID NO: 552221 - DNA, 15 bp, Homo sapiens
ttcatagacattaat

SEQ ID NO: 552222 - DNA, 15 bp, Homo sapiens
tttcatagacattaa

SEQ ID NO: 552223 - DNA, 15 bp, Homo sapiens
atttcatagacatta

SEQ ID NO: 552224 - DNA, 15 bp, Homo sapiens
gatttcatagacatt

SEQ ID NO: 552225 - DNA, 15 bp, Homo sapiens
agatttcatagacat

SEQ ID NO: 552226 - DNA, 15 bp, Homo sapiens
aagatttcatagaca

SEQ ID NO: 552227 - DNA, 15 bp, Homo sapiens
gaagatttcatagac

SEQ ID NO: 552228 - DNA, 15 bp, Homo sapiens
tgaagatttcataga

SEQ ID NO: 552229 - DNA, 15 bp, Homo sapiens
atgaagatttcatag

SEQ ID NO: 552230 - DNA, 15 bp, Homo sapiens
gatgaagatttcata

SEQ ID NO: 552231 - DNA, 15 bp, Homo sapiens
agatgaagatttcat

SEQ ID NO: 552232 - DNA, 15 bp, Homo sapiens
gagatgaagatttca

SEQ ID NO: 552233 - DNA, 15 bp, Homo sapiens
tgagatgaagatttc

SEQ ID NO: 552234 - DNA, 15 bp, Homo sapiens
atgagatgaagattt

SEQ ID NO: 552235 - DNA, 15 bp, Homo sapiens
gatgagatgaagatt

SEQ ID NO: 552236 - DNA, 15 bp, Homo sapiens
ggatgagatgaagat

SEQ ID NO: 552237 - DNA, 15 bp, Homo sapiens
tggatgagatgaaga

SEQ ID NO: 552238 - DNA, 15 bp, Homo sapiens
atggatgagatgaag

SEQ ID NO: 552239 - DNA, 15 bp, Homo sapiens
gatggatgagatgaa

SEQ ID NO: 552240 - DNA, 15 bp, Homo sapiens
tgatggatgagatga

SEQ ID NO: 552241 - DNA, 15 bp, Homo sapiens
gtgatggatgagatg

SEQ ID NO: 552242 - DNA, 15 bp, Homo sapiens
tgtgatggatgagat

SEQ ID NO: 552243 - DNA, 15 bp, Homo sapiens
gtgtgatggatgaga

SEQ ID NO: 552244 - DNA, 15 bp, Homo sapiens
tgtgtgatggatgag

SEQ ID NO: 552245 - DNA, 15 bp, Homo sapiens
atgtgtgatggatga

SEQ ID NO: 552246 - DNA, 15 bp, Homo sapiens
aatgtgtgatggatg

SEQ ID NO: 552247 - DNA, 15 bp, Homo sapiens
aaatgtgtgatggat

SEQ ID NO: 552248 - DNA, 15 bp, Homo sapiens
taaatgtgtgatgga

SEQ ID NO: 552249 - DNA, 15 bp, Homo sapiens
gtaaatgtgtgatgg

SEQ ID NO: 552250 - DNA, 15 bp, Homo sapiens
ggtaaatgtgtgatg

SEQ ID NO: 552251 - DNA, 15 bp, Homo sapiens
cggtaaatgtgtgat

SEQ ID NO: 552252 - DNA, 15 bp, Homo sapiens
tcggtaaatgtgtga

SEQ ID NO: 552253 - DNA, 15 bp, Homo sapiens
ctcggtaaatgtgtg

SEQ ID NO: 552254 - DNA, 15 bp, Homo sapiens
actcggtaaatgtgt

SEQ ID NO: 552255 - DNA, 15 bp, Homo sapiens
aactcggtaaatgtg

SEQ ID NO: 552256 - DNA, 15 bp, Homo sapiens
caactcggtaaatgt

SEQ ID NO: 552257 - DNA, 15 bp, Homo sapiens
acaactcggtaaatg

SEQ ID NO: 552258 - DNA, 15 bp, Homo sapiens
aacaactcggtaaat

SEQ ID NO: 552259 - DNA, 15 bp, Homo sapiens
caacaactcggtaaa

SEQ ID NO: 552260 - DNA, 15 bp, Homo sapiens
gcaacaactcggtaa

SEQ ID NO: 552261 - DNA, 15 bp, Homo sapiens
ggcaacaactcggta

SEQ ID NO: 552262 - DNA, 15 bp, Homo sapiens
gggcaacaactcggt

SEQ ID NO: 552263 - DNA, 15 bp, Homo sapiens
ggggcaacaactcgg

SEQ ID NO: 552264 - DNA, 15 bp, Homo sapiens
cggggcaacaactcg

SEQ ID NO: 552265 - DNA, 15 bp, Homo sapiens
ccggggcaacaactc

SEQ ID NO: 552266 - DNA, 15 bp, Homo sapiens
gccggggcaacaact

SEQ ID NO: 552267 - DNA, 15 bp, Homo sapiens
ggccggggcaacaac

SEQ ID NO: 552268 - DNA, 15 bp, Homo sapiens
aggccggggcaacaa

SEQ ID NO: 552269 - DNA, 15 bp, Homo sapiens
taggccggggcaaca

SEQ ID NO: 552270 - DNA, 15 bp, Homo sapiens
ttaggccggggcaac

SEQ ID NO: 552271 - DNA, 15 bp, Homo sapiens
tttaggccggggcaa

SEQ ID NO: 552272 - DNA, 15 bp, Homo sapiens
gtttaggccggggca

SEQ ID NO: 552273 - DNA, 15 bp, Homo sapiens
tgtttaggccggggc

SEQ ID NO: 552274 - DNA, 15 bp, Homo sapiens
ctgtttaggccgggg

SEQ ID NO: 552275 - DNA, 15 bp, Homo sapiens
cctgtttaggccggg

SEQ ID NO: 552276 - DNA, 15 bp, Homo sapiens
gcctgtttaggccgg

SEQ ID NO: 552277 - DNA, 15 bp, Homo sapiens
cgcctgtttaggccg

SEQ ID NO: 552278 - DNA, 15 bp, Homo sapiens
ccgcctgtttaggcc

SEQ ID NO: 552279 - DNA, 15 bp, Homo sapiens
accgcctgtttaggc

SEQ ID NO: 552280 - DNA, 15 bp, Homo sapiens
taccgcctgtttagg

SEQ ID NO: 552281 - DNA, 15 bp, Homo sapiens
gtaccgcctgtttag

SEQ ID NO: 552282 - DNA, 15 bp, Homo sapiens
agtaccgcctgttta

SEQ ID NO: 552283 - DNA, 15 bp, Homo sapiens
gagtaccgcctgttt

SEQ ID NO: 552284 - DNA, 15 bp, Homo sapiens
agagtaccgcctgtt

SEQ ID NO: 552285 - DNA, 15 bp, Homo sapiens
gagagtaccgcctgt

SEQ ID NO: 552286 - DNA, 15 bp, Homo sapiens
agagagtaccgcctg

SEQ ID NO: 552287 - DNA, 15 bp, Homo sapiens
cagagagtaccgcct

SEQ ID NO: 552288 - DNA, 15 bp, Homo sapiens
acagagagtaccgcc

SEQ ID NO: 552289 - DNA, 15 bp, Homo sapiens
cacagagagtaccgc

SEQ ID NO: 552290 - DNA, 15 bp, Homo sapiens
acacagagagtaccg

SEQ ID NO: 552291 - DNA, 15 bp, Homo sapiens
tacacagagagtacc

SEQ ID NO: 552292 - DNA, 15 bp, Homo sapiens
atacacagagagtac

SEQ ID NO: 552293 - DNA, 15 bp, Homo sapiens
aatacacagagagta

SEQ ID NO: 552294 - DNA, 15 bp, Homo sapiens
aaatacacagagagt

SEQ ID NO: 552295 - DNA, 15 bp, Homo sapiens
taaatacacagagag

SEQ ID NO: 552296 - DNA, 15 bp, Homo sapiens
ttaaatacacagaga

SEQ ID NO: 552297 - DNA, 15 bp, Homo sapiens
tttaaatacacagag

SEQ ID NO: 552298 - DNA, 15 bp, Homo sapiens
ttttaaatacacaga

SEQ ID NO: 552299 - DNA, 15 bp, Homo sapiens
tttttaaatacacag

SEQ ID NO: 552300 - DNA, 15 bp, Homo sapiens
ttttttaaatacaca

SEQ ID NO: 552301 - DNA, 15 bp, Homo sapiens
tttttttaaatacac

SEQ ID NO: 552302 - DNA, 15 bp, Homo sapiens
ttttttttaaataca

SEQ ID NO: 552303 - DNA, 15 bp, Homo sapiens
tttttttttaaatac

SEQ ID NO: 552304 - DNA, 15 bp, Homo sapiens
ttttttttttaaata

SEQ ID NO: 552305 - DNA, 15 bp, Homo sapiens
tttttttttttaaat

SEQ ID NO: 552306 - DNA, 15 bp, Homo sapiens
ttttttttttttaaa

SEQ ID NO: 552307 - DNA, 15 bp, Homo sapiens
attttttttttttta

SEQ ID NO: 552308 - DNA, 15 bp, Homo sapiens
ggatttttttttttt

SEQ ID NO: 552309 - DNA, 15 bp, Homo sapiens
gggattttttttttt

SEQ ID NO: 552310 - DNA, 15 bp, Homo sapiens
agggatttttttttt

SEQ ID NO: 552311 - DNA, 15 bp, Homo sapiens
aagggattttttttt

SEQ ID NO: 552312 - DNA, 15 bp, Homo sapiens
gaagggatttttttt

SEQ ID NO: 552313 - DNA, 15 bp, Homo sapiens
agaagggattttttt

SEQ ID NO: 552314 - DNA, 15 bp, Homo sapiens
aagaagggatttttt

SEQ ID NO: 552315 - DNA, 15 bp, Homo sapiens
taagaagggattttt

SEQ ID NO: 552316 - DNA, 15 bp, Homo sapiens
ttaagaagggatttt

SEQ ID NO: 552317 - DNA, 15 bp, Homo sapiens
cttaagaagggattt

SEQ ID NO: 552318 - DNA, 15 bp, Homo sapiens
acttaagaagggatt

SEQ ID NO: 552319 - DNA, 15 bp, Homo sapiens
tacttaagaagggat

SEQ ID NO: 552320 - DNA, 15 bp, Homo sapiens
atacttaagaaggga

SEQ ID NO: 552321 - DNA, 15 bp, Homo sapiens
catacttaagaaggg

SEQ ID NO: 552322 - DNA, 15 bp, Homo sapiens
tcatacttaagaagg

SEQ ID NO: 552323 - DNA, 15 bp, Homo sapiens
ctcatacttaagaag

SEQ ID NO: 552324 - DNA, 15 bp, Homo sapiens
gctcatacttaagaa

SEQ ID NO: 552325 - DNA, 15 bp, Homo sapiens
agctcatacttaaga

SEQ ID NO: 552326 - DNA, 15 bp, Homo sapiens
cagctcatacttaag

SEQ ID NO: 552327 - DNA, 15 bp, Homo sapiens
acagctcatacttaa

SEQ ID NO: 552328 - DNA, 15 bp, Homo sapiens
aacagctcatactta

SEQ ID NO: 552329 - DNA, 15 bp, Homo sapiens
aaacagctcatactt

SEQ ID NO: 552330 - DNA, 15 bp, Homo sapiens
taaacagctcatact

SEQ ID NO: 552331 - DNA, 15 bp, Homo sapiens
ttaaacagctcatac

SEQ ID NO: 552332 - DNA, 15 bp, Homo sapiens
tttaaacagctcata

SEQ ID NO: 552333 - DNA, 15 bp, Homo sapiens
ttttaaacagctcat

SEQ ID NO: 552334 - DNA, 15 bp, Homo sapiens
gttttaaacagctca

SEQ ID NO: 552335 - DNA, 15 bp, Homo sapiens
tgttttaaacagctc

SEQ ID NO: 552336 - DNA, 15 bp, Homo sapiens
gtgttttaaacagct

SEQ ID NO: 552337 - DNA, 15 bp, Homo sapiens
tgtgttttaaacagc

SEQ ID NO: 552338 - DNA, 15 bp, Homo sapiens
gtgtgttttaaacag

SEQ ID NO: 552339 - DNA, 15 bp, Homo sapiens
tgtgtgttttaaaca

SEQ ID NO: 552340 - DNA, 15 bp, Homo sapiens
ttgtgtgttttaaac

SEQ ID NO: 552341 - DNA, 15 bp, Homo sapiens
tttgtgtgttttaaa

SEQ ID NO: 552342 - DNA, 15 bp, Homo sapiens
ctttgtgtgttttaa

SEQ ID NO: 552343 - DNA, 15 bp, Homo sapiens
cctttgtgtgtttta

SEQ ID NO: 552344 - DNA, 15 bp, Homo sapiens
tcctttgtgtgtttt

SEQ ID NO: 552345 - DNA, 15 bp, Homo sapiens
ctcctttgtgtgttt

SEQ ID NO: 552346 - DNA, 15 bp, Homo sapiens
cctcctttgtgtgtt

SEQ ID NO: 552347 - DNA, 15 bp, Homo sapiens
tcctcctttgtgtgt

SEQ ID NO: 552348 - DNA, 15 bp, Homo sapiens
gtcctcctttgtgtg

SEQ ID NO: 552349 - DNA, 15 bp, Homo sapiens
agtcctcctttgtgt

SEQ ID NO: 552350 - DNA, 15 bp, Homo sapiens
tagtcctcctttgtg

SEQ ID NO: 552351 - DNA, 15 bp, Homo sapiens
ctagtcctcctttgt

SEQ ID NO: 552352 - DNA, 15 bp, Homo sapiens
gctagtcctcctttg

SEQ ID NO: 552353 - DNA, 15 bp, Homo sapiens
cgctagtcctccttt

SEQ ID NO: 552354 - DNA, 15 bp, Homo sapiens
acgctagtcctcctt

SEQ ID NO: 552355 - DNA, 15 bp, Homo sapiens
aacgctagtcctcct

SEQ ID NO: 552356 - DNA, 15 bp, Homo sapiens
taacgctagtcctcc

SEQ ID NO: 552357 - DNA, 15 bp, Homo sapiens
gtaacgctagtcctc

SEQ ID NO: 552358 - DNA, 15 bp, Homo sapiens
ggtaacgctagtcct

SEQ ID NO: 552359 - DNA, 15 bp, Homo sapiens
tggtaacgctagtcc

SEQ ID NO: 552360 - DNA, 15 bp, Homo sapiens
gtggtaacgctagtc

SEQ ID NO: 552361 - DNA, 15 bp, Homo sapiens
ggtggtaacgctagt

SEQ ID NO: 552362 - DNA, 15 bp, Homo sapiens
gggtggtaacgctag

SEQ ID NO: 552363 - DNA, 15 bp, Homo sapiens
cgggtggtaacgcta

SEQ ID NO: 552364 - DNA, 15 bp, Homo sapiens
gcgggtggtaacgct

SEQ ID NO: 552365 - DNA, 15 bp, Homo sapiens
agcgggtggtaacgc

SEQ ID NO: 552366 - DNA, 15 bp, Homo sapiens
tagcgggtggtaacg

SEQ ID NO: 552367 - DNA, 15 bp, Homo sapiens
ctagcgggtggtaac

SEQ ID NO: 552368 - DNA, 15 bp, Homo sapiens
tctagcgggtggtaa

SEQ ID NO: 552369 - DNA, 15 bp, Homo sapiens
gtctagcgggtggta

SEQ ID NO: 552370 - DNA, 15 bp, Homo sapiens
tgtctagcgggtggt

SEQ ID NO: 552371 - DNA, 15 bp, Homo sapiens
atgtctagcgggtgg

SEQ ID NO: 552372 - DNA, 15 bp, Homo sapiens
aatgtctagcgggtg

SEQ ID NO: 552373 - DNA, 15 bp, Homo sapiens
aaatgtctagcgggt

SEQ ID NO: 552374 - DNA, 15 bp, Homo sapiens
gaaatgtctagcggg

SEQ ID NO: 552375 - DNA, 15 bp, Homo sapiens
ggaaatgtctagcgg

SEQ ID NO: 552376 - DNA, 15 bp, Homo sapiens
tggaaatgtctagcg

SEQ ID NO: 552377 - DNA, 15 bp, Homo sapiens
gtggaaatgtctagc

SEQ ID NO: 552378 - DNA, 15 bp, Homo sapiens
cgtggaaatgtctag

SEQ ID NO: 552379 - DNA, 15 bp, Homo sapiens
acgtggaaatgtcta

SEQ ID NO: 552380 - DNA, 15 bp, Homo sapiens
aacgtggaaatgtct

SEQ ID NO: 552381 - DNA, 15 bp, Homo sapiens
caacgtggaaatgtc

SEQ ID NO: 552382 - DNA, 15 bp, Homo sapiens
tcaacgtggaaatgt

SEQ ID NO: 552383 - DNA, 15 bp, Homo sapiens
atcaacgtggaaatg

SEQ ID NO: 552384 - DNA, 15 bp, Homo sapiens
aatcaacgtggaaat

SEQ ID NO: 552385 - DNA, 15 bp, Homo sapiens
taatcaacgtggaaa

SEQ ID NO: 552386 - DNA, 15 bp, Homo sapiens
ataatcaacgtggaa

SEQ ID NO: 552387 - DNA, 15 bp, Homo sapiens
tataatcaacgtgga

SEQ ID NO: 552388 - DNA, 15 bp, Homo sapiens
atataatcaacgtgg

SEQ ID NO: 552389 - DNA, 15 bp, Homo sapiens
catataatcaacgtg

SEQ ID NO: 552390 - DNA, 15 bp, Homo sapiens
ccatataatcaacgt

SEQ ID NO: 552391 - DNA, 15 bp, Homo sapiens
accatataatcaacg

SEQ ID NO: 552392 - DNA, 15 bp, Homo sapiens
aaccatataatcaac

SEQ ID NO: 552393 - DNA, 15 bp, Homo sapiens
aaaccatataatcaa

SEQ ID NO: 552394 - DNA, 15 bp, Homo sapiens
gaaaccatataatca

SEQ ID NO: 552395 - DNA, 15 bp, Homo sapiens
tgaaaccatataatc

SEQ ID NO: 552396 - DNA, 15 bp, Homo sapiens
ctgaaaccatataat

SEQ ID NO: 552397 - DNA, 15 bp, Homo sapiens
cctgaaaccatataa

SEQ ID NO: 552398 - DNA, 15 bp, Homo sapiens
acctgaaaccatata

SEQ ID NO: 552399 - DNA, 15 bp, Homo sapiens
gacctgaaaccatat

SEQ ID NO: 552400 - DNA, 15 bp, Homo sapiens
agacctgaaaccata

SEQ ID NO: 552401 - DNA, 15 bp, Homo sapiens
gagacctgaaaccat

SEQ ID NO: 552402 - DNA, 15 bp, Homo sapiens
tgagacctgaaacca

SEQ ID NO: 552403 - DNA, 15 bp, Homo sapiens
gtgagacctgaaacc

SEQ ID NO: 552404 - DNA, 15 bp, Homo sapiens
agtgagacctgaaac

SEQ ID NO: 552405 - DNA, 15 bp, Homo sapiens
aagtgagacctgaaa

SEQ ID NO: 552406 - DNA, 15 bp, Homo sapiens
aaagtgagacctgaa

SEQ ID NO: 552407 - DNA, 15 bp, Homo sapiens
aaaagtgagacctga

SEQ ID NO: 552408 - DNA, 15 bp, Homo sapiens
caaaagtgagacctg

SEQ ID NO: 552409 - DNA, 15 bp, Homo sapiens
gcaaaagtgagacct

SEQ ID NO: 552410 - DNA, 15 bp, Homo sapiens
agcaaaagtgagacc

SEQ ID NO: 552411 - DNA, 15 bp, Homo sapiens
gagcaaaagtgagac

SEQ ID NO: 552412 - DNA, 15 bp, Homo sapiens
tgagcaaaagtgaga

SEQ ID NO: 552413 - DNA, 15 bp, Homo sapiens
atgagcaaaagtgag

SEQ ID NO: 552414 - DNA, 15 bp, Homo sapiens
aatgagcaaaagtga

SEQ ID NO: 552415 - DNA, 15 bp, Homo sapiens
gaatgagcaaaagtg

SEQ ID NO: 552416 - DNA, 15 bp, Homo sapiens
tgaatgagcaaaagt

SEQ ID NO: 552417 - DNA, 15 bp, Homo sapiens
gtgaatgagcaaaag

SEQ ID NO: 552418 - DNA, 15 bp, Homo sapiens
ggtgaatgagcaaaa

SEQ ID NO: 552419 - DNA, 15 bp, Homo sapiens
gggtgaatgagcaaa

SEQ ID NO: 552420 - DNA, 15 bp, Homo sapiens
tgggtgaatgagcaa

SEQ ID NO: 552421 - DNA, 15 bp, Homo sapiens
ctgggtgaatgagca

SEQ ID NO: 552422 - DNA, 15 bp, Homo sapiens
tctgggtgaatgagc

SEQ ID NO: 552423 - DNA, 15 bp, Homo sapiens
ttctgggtgaatgag

SEQ ID NO: 552424 - DNA, 15 bp, Homo sapiens
tttctgggtgaatga

SEQ ID NO: 552425 - DNA, 15 bp, Homo sapiens
ttttctgggtgaatg

SEQ ID NO: 552426 - DNA, 15 bp, Homo sapiens
attttctgggtgaat

SEQ ID NO: 552427 - DNA, 15 bp, Homo sapiens
tattttctgggtgaa

SEQ ID NO: 552428 - DNA, 15 bp, Homo sapiens
atattttctgggtga

SEQ ID NO: 552429 - DNA, 15 bp, Homo sapiens
aatattttctgggtg

SEQ ID NO: 552430 - DNA, 15 bp, Homo sapiens
aaatattttctgggt

SEQ ID NO: 552431 - DNA, 15 bp, Homo sapiens
taaatattttctggg

SEQ ID NO: 552432 - DNA, 15 bp, Homo sapiens
gtaaatattttctgg

SEQ ID NO: 552433 - DNA, 15 bp, Homo sapiens
tgtaaatattttctg

SEQ ID NO: 552434 - DNA, 15 bp, Homo sapiens
ctgtaaatattttct

SEQ ID NO: 552435 - DNA, 15 bp, Homo sapiens
tctgtaaatattttc

SEQ ID NO: 552436 - DNA, 15 bp, Homo sapiens
ctctgtaaatatttt

SEQ ID NO: 552437 - DNA, 15 bp, Homo sapiens
gctctgtaaatattt

SEQ ID NO: 552438 - DNA, 15 bp, Homo sapiens
agctctgtaaatatt

SEQ ID NO: 552439 - DNA, 15 bp, Homo sapiens
gagctctgtaaatat

SEQ ID NO: 552440 - DNA, 15 bp, Homo sapiens
ggagctctgtaaata

SEQ ID NO: 552441 - DNA, 15 bp, Homo sapiens
aggagctctgtaaat

SEQ ID NO: 552442 - DNA, 15 bp, Homo sapiens
caggagctctgtaaa

SEQ ID NO: 552443 - DNA, 15 bp, Homo sapiens
gcaggagctctgtaa

SEQ ID NO: 552444 - DNA, 15 bp, Homo sapiens
tgcaggagctctgta

SEQ ID NO: 552445 - DNA, 15 bp, Homo sapiens
ttgcaggagctctgt

SEQ ID NO: 552446 - DNA, 15 bp, Homo sapiens
cttgcaggagctctg

SEQ ID NO: 552447 - DNA, 15 bp, Homo sapiens
ccttgcaggagctct

SEQ ID NO: 552448 - DNA, 15 bp, Homo sapiens
accttgcaggagctc

SEQ ID NO: 552449 - DNA, 15 bp, Homo sapiens
caccttgcaggagct

SEQ ID NO: 552450 - DNA, 15 bp, Homo sapiens
gcaccttgcaggagc

SEQ ID NO: 552451 - DNA, 15 bp, Homo sapiens
ggcaccttgcaggag

SEQ ID NO: 552452 - DNA, 15 bp, Homo sapiens
tggcaccttgcagga

SEQ ID NO: 552453 - DNA, 15 bp, Homo sapiens
ttggcaccttgcagg

SEQ ID NO: 552454 - DNA, 15 bp, Homo sapiens
cttggcaccttgcag

SEQ ID NO: 552455 - DNA, 15 bp, Homo sapiens
tcttggcaccttgca

SEQ ID NO: 552456 - DNA, 15 bp, Homo sapiens
ctcttggcaccttgc

SEQ ID NO: 552457 - DNA, 15 bp, Homo sapiens
gctcttggcaccttg

SEQ ID NO: 552458 - DNA, 15 bp, Homo sapiens
agctcttggcacctt

SEQ ID NO: 552459 - DNA, 15 bp, Homo sapiens
cagctcttggcacct

SEQ ID NO: 552460 - DNA, 15 bp, Homo sapiens
acagctcttggcacc

SEQ ID NO: 552461 - DNA, 15 bp, Homo sapiens
gacagctcttggcac

SEQ ID NO: 552462 - DNA, 15 bp, Homo sapiens
ggacagctcttggca

SEQ ID NO: 552463 - DNA, 15 bp, Homo sapiens
gggacagctcttggc

SEQ ID NO: 552464 - DNA, 15 bp, Homo sapiens
tgggacagctcttgg

SEQ ID NO: 552465 - DNA, 15 bp, Homo sapiens
ctgggacagctcttg

SEQ ID NO: 552466 - DNA, 15 bp, Homo sapiens
cctgggacagctctt

SEQ ID NO: 552467 - DNA, 15 bp, Homo sapiens
gcctgggacagctct

SEQ ID NO: 552468 - DNA, 15 bp, Homo sapiens
ggcctgggacagctc

SEQ ID NO: 552469 - DNA, 15 bp, Homo sapiens
gggcctgggacagct

SEQ ID NO: 552470 - DNA, 15 bp, Homo sapiens
agggcctgggacagc

SEQ ID NO: 552471 - DNA, 15 bp, Homo sapiens
cagggcctgggacag

SEQ ID NO: 552472 - DNA, 15 bp, Homo sapiens
tcagggcctgggaca

SEQ ID NO: 552473 - DNA, 15 bp, Homo sapiens
ctcagggcctgggac

SEQ ID NO: 552474 - DNA, 15 bp, Homo sapiens
cctcagggcctggga

SEQ ID NO: 552475 - DNA, 15 bp, Homo sapiens
tcctcagggcctggg

SEQ ID NO: 552476 - DNA, 15 bp, Homo sapiens
gtcctcagggcctgg

SEQ ID NO: 552477 - DNA, 15 bp, Homo sapiens
tgtcctcagggcctg

SEQ ID NO: 552478 - DNA, 15 bp, Homo sapiens
ctgtcctcagggcct

SEQ ID NO: 552479 - DNA, 15 bp, Homo sapiens
tctgtcctcagggcc

SEQ ID NO: 552480 - DNA, 15 bp, Homo sapiens
gtctgtcctcagggc

SEQ ID NO: 552481 - DNA, 15 bp, Homo sapiens
tgtctgtcctcaggg

SEQ ID NO: 552482 - DNA, 15 bp, Homo sapiens
gtgtctgtcctcagg

SEQ ID NO: 552483 - DNA, 15 bp, Homo sapiens
tgtgtctgtcctcag

SEQ ID NO: 552484 - DNA, 15 bp, Homo sapiens
atgtgtctgtcctca

SEQ ID NO: 552485 - DNA, 15 bp, Homo sapiens
gatgtgtctgtcctc

SEQ ID NO: 552486 - DNA, 15 bp, Homo sapiens
cgatgtgtctgtcct

SEQ ID NO: 552487 - DNA, 15 bp, Homo sapiens
gcgatgtgtctgtcc

SEQ ID NO: 552488 - DNA, 15 bp, Homo sapiens
ggcgatgtgtctgtc

SEQ ID NO: 552489 - DNA, 15 bp, Homo sapiens
tggcgatgtgtctgt

SEQ ID NO: 552490 - DNA, 15 bp, Homo sapiens
ttggcgatgtgtctg

SEQ ID NO: 552491 - DNA, 15 bp, Homo sapiens
tttggcgatgtgtct

SEQ ID NO: 552492 - DNA, 15 bp, Homo sapiens
gtttggcgatgtgtc

SEQ ID NO: 552493 - DNA, 15 bp, Homo sapiens
tgtttggcgatgtgt

SEQ ID NO: 552494 - DNA, 15 bp, Homo sapiens
ttgtttggcgatgtg

SEQ ID NO: 552495 - DNA, 15 bp, Homo sapiens
tttgtttggcgatgt

SEQ ID NO: 552496 - DNA, 15 bp, Homo sapiens
ctttgtttggcgatg

SEQ ID NO: 552497 - DNA, 15 bp, Homo sapiens
gctttgtttggcgat

SEQ ID NO: 552498 - DNA, 15 bp, Homo sapiens
tgctttgtttggcga

SEQ ID NO: 552499 - DNA, 15 bp, Homo sapiens
ctgctttgtttggcg

SEQ ID NO: 552500 - DNA, 15 bp, Homo sapiens
gctgctttgtttggc

SEQ ID NO: 552501 - DNA, 15 bp, Homo sapiens
agctgctttgtttgg

SEQ ID NO: 552502 - DNA, 15 bp, Homo sapiens
cagctgctttgtttg

SEQ ID NO: 552503 - DNA, 15 bp, Homo sapiens
tcagctgctttgttt

SEQ ID NO: 552504 - DNA, 15 bp, Homo sapiens
ctcagctgctttgtt

SEQ ID NO: 552505 - DNA, 15 bp, Homo sapiens
cctcagctgctttgt

SEQ ID NO: 552506 - DNA, 15 bp, Homo sapiens
tcctcagctgctttg

SEQ ID NO: 552507 - DNA, 15 bp, Homo sapiens
atcctcagctgcttt

SEQ ID NO: 552508 - DNA, 15 bp, Homo sapiens
gatcctcagctgctt

SEQ ID NO: 552509 - DNA, 15 bp, Homo sapiens
agatcctcagctgct

SEQ ID NO: 552510 - DNA, 15 bp, Homo sapiens
aagatcctcagctgc

SEQ ID NO: 552511 - DNA, 15 bp, Homo sapiens
caagatcctcagctg

SEQ ID NO: 552512 - DNA, 15 bp, Homo sapiens
gcaagatcctcagct

SEQ ID NO: 552513 - DNA, 15 bp, Homo sapiens
ggcaagatcctcagc

SEQ ID NO: 552514 - DNA, 15 bp, Homo sapiens
gggcaagatcctcag

SEQ ID NO: 552515 - DNA, 15 bp, Homo sapiens
agggcaagatcctca

SEQ ID NO: 552516 - DNA, 15 bp, Homo sapiens
aagggcaagatcctc

SEQ ID NO: 552517 - DNA, 15 bp, Homo sapiens
caagggcaagatcct

SEQ ID NO: 552518 - DNA, 15 bp, Homo sapiens
acaagggcaagatcc

SEQ ID NO: 552519 - DNA, 15 bp, Homo sapiens
cacaagggcaagatc

SEQ ID NO: 552520 - DNA, 15 bp, Homo sapiens
ccacaagggcaagat

SEQ ID NO: 552521 - DNA, 15 bp, Homo sapiens
cccacaagggcaaga

SEQ ID NO: 552522 - DNA, 15 bp, Homo sapiens
acccacaagggcaag

SEQ ID NO: 552523 - DNA, 15 bp, Homo sapiens
aacccacaagggcaa

SEQ ID NO: 552524 - DNA, 15 bp, Homo sapiens
aaacccacaagggca

SEQ ID NO: 552525 - DNA, 15 bp, Homo sapiens
taaacccacaagggc

SEQ ID NO: 552526 - DNA, 15 bp, Homo sapiens
ataaacccacaaggg

SEQ ID NO: 552527 - DNA, 15 bp, Homo sapiens
cataaacccacaagg

SEQ ID NO: 552528 - DNA, 15 bp, Homo sapiens
ccataaacccacaag

SEQ ID NO: 552529 - DNA, 15 bp, Homo sapiens
gccataaacccacaa

SEQ ID NO: 552530 - DNA, 15 bp, Homo sapiens
ggccataaacccaca

SEQ ID NO: 552531 - DNA, 15 bp, Homo sapiens
tggccataaacccac

SEQ ID NO: 552532 - DNA, 15 bp, Homo sapiens
ctggccataaaccca

SEQ ID NO: 552533 - DNA, 15 bp, Homo sapiens
cctggccataaaccc

SEQ ID NO: 552534 - DNA, 15 bp, Homo sapiens
gcctggccataaacc

SEQ ID NO: 552535 - DNA, 15 bp, Homo sapiens
tgcctggccataaac

SEQ ID NO: 552536 - DNA, 15 bp, Homo sapiens
ctgcctggccataaa

SEQ ID NO: 552537 - DNA, 15 bp, Homo sapiens
cctgcctggccataa

SEQ ID NO: 552538 - DNA, 15 bp, Homo sapiens
acctgcctggccata

SEQ ID NO: 552539 - DNA, 15 bp, Homo sapiens
cacctgcctggccat

SEQ ID NO: 552540 - DNA, 15 bp, Homo sapiens
tcacctgcctggcca

SEQ ID NO: 552541 - DNA, 15 bp, Homo sapiens
atcacctgcctggcc

SEQ ID NO: 552542 - DNA, 15 bp, Homo sapiens
tatcacctgcctggc

SEQ ID NO: 552543 - DNA, 15 bp, Homo sapiens
gtatcacctgcctgg

SEQ ID NO: 552544 - DNA, 15 bp, Homo sapiens
tgtatcacctgcctg

SEQ ID NO: 552545 - DNA, 15 bp, Homo sapiens
ctgtatcacctgcct

SEQ ID NO: 552546 - DNA, 15 bp, Homo sapiens
tctgtatcacctgcc

SEQ ID NO: 552547 - DNA, 15 bp, Homo sapiens
atctgtatcacctgc

SEQ ID NO: 552548 - DNA, 15 bp, Homo sapiens
catctgtatcacctg

SEQ ID NO: 552549 - DNA, 15 bp, Homo sapiens
ccatctgtatcacct

SEQ ID NO: 552550 - DNA, 15 bp, Homo sapiens
tccatctgtatcacc

SEQ ID NO: 552551 - DNA, 15 bp, Homo sapiens
gtccatctgtatcac

SEQ ID NO: 552552 - DNA, 15 bp, Homo sapiens
tgtccatctgtatca

SEQ ID NO: 552553 - DNA, 15 bp, Homo sapiens
ctgtccatctgtatc

SEQ ID NO: 552554 - DNA, 15 bp, Homo sapiens
gctgtccatctgtat

SEQ ID NO: 552555 - DNA, 15 bp, Homo sapiens
tgctgtccatctgta

SEQ ID NO: 552556 - DNA, 15 bp, Homo sapiens
ttgctgtccatctgt

SEQ ID NO: 552557 - DNA, 15 bp, Homo sapiens
attgctgtccatctg

SEQ ID NO: 552558 - DNA, 15 bp, Homo sapiens
tattgctgtccatct

SEQ ID NO: 552559 - DNA, 15 bp, Homo sapiens
ttattgctgtccatc

SEQ ID NO: 552560 - DNA, 15 bp, Homo sapiens
tttattgctgtccat

SEQ ID NO: 552561 - DNA, 15 bp, Homo sapiens
gtttattgctgtcca

SEQ ID NO: 552562 - DNA, 15 bp, Homo sapiens
ggtttattgctgtcc

SEQ ID NO: 552563 - DNA, 15 bp, Homo sapiens
aggtttattgctgtc

SEQ ID NO: 552564 - DNA, 15 bp, Homo sapiens
caggtttattgctgt

SEQ ID NO: 552565 - DNA, 15 bp, Homo sapiens
tcaggtttattgctg

SEQ ID NO: 552566 - DNA, 15 bp, Homo sapiens
atcaggtttattgct

SEQ ID NO: 552567 - DNA, 15 bp, Homo sapiens
tatcaggtttattgc

SEQ ID NO: 552568 - DNA, 15 bp, Homo sapiens
ttatcaggtttattg

SEQ ID NO: 552569 - DNA, 15 bp, Homo sapiens
cttatcaggtttatt

SEQ ID NO: 552570 - DNA, 15 bp, Homo sapiens
gcttatcaggtttat

SEQ ID NO: 552571 - DNA, 15 bp, Homo sapiens
agcttatcaggttta

SEQ ID NO: 552572 - DNA, 15 bp, Homo sapiens
tagcttatcaggttt

SEQ ID NO: 552573 - DNA, 15 bp, Homo sapiens
ttagcttatcaggtt

SEQ ID NO: 552574 - DNA, 15 bp, Homo sapiens
attagcttatcaggt

SEQ ID NO: 552575 - DNA, 15 bp, Homo sapiens
aattagcttatcagg

SEQ ID NO: 552576 - DNA, 15 bp, Homo sapiens
taattagcttatcag

SEQ ID NO: 552577 - DNA, 15 bp, Homo sapiens
ataattagcttatca

SEQ ID NO: 552578 - DNA, 15 bp, Homo sapiens
tataattagcttatc

SEQ ID NO: 552579 - DNA, 15 bp, Homo sapiens
gtataattagcttat

SEQ ID NO: 552580 - DNA, 15 bp, Homo sapiens
ggtataattagctta

SEQ ID NO: 552581 - DNA, 15 bp, Homo sapiens
cggtataattagctt

SEQ ID NO: 552582 - DNA, 15 bp, Homo sapiens
acggtataattagct

SEQ ID NO: 552583 - DNA, 15 bp, Homo sapiens
cacggtataattagc

SEQ ID NO: 552584 - DNA, 15 bp, Homo sapiens
acacggtataattag

SEQ ID NO: 552585 - DNA, 15 bp, Homo sapiens
cacacggtataatta

SEQ ID NO: 552586 - DNA, 15 bp, Homo sapiens
gcacacggtataatt

SEQ ID NO: 552587 - DNA, 15 bp, Homo sapiens
agcacacggtataat

SEQ ID NO: 552588 - DNA, 15 bp, Homo sapiens
gagcacacggtataa

SEQ ID NO: 552589 - DNA, 15 bp, Homo sapiens
cgagcacacggtata

SEQ ID NO: 552590 - DNA, 15 bp, Homo sapiens
tcgagcacacggtat

SEQ ID NO: 552591 - DNA, 15 bp, Homo sapiens
ttcgagcacacggta

SEQ ID NO: 552592 - DNA, 15 bp, Homo sapiens
cttcgagcacacggt

SEQ ID NO: 552593 - DNA, 15 bp, Homo sapiens
ccttcgagcacacgg

SEQ ID NO: 552594 - DNA, 15 bp, Homo sapiens
gccttcgagcacacg

SEQ ID NO: 552595 - DNA, 15 bp, Homo sapiens
ggccttcgagcacac

SEQ ID NO: 552596 - DNA, 15 bp, Homo sapiens
tggccttcgagcaca

SEQ ID NO: 552597 - DNA, 15 bp, Homo sapiens
gtggccttcgagcac

SEQ ID NO: 552598 - DNA, 15 bp, Homo sapiens
tgtggccttcgagca

SEQ ID NO: 552599 - DNA, 15 bp, Homo sapiens
ttgtggccttcgagc

SEQ ID NO: 552600 - DNA, 15 bp, Homo sapiens
cttgtggccttcgag

SEQ ID NO: 552601 - DNA, 15 bp, Homo sapiens
gcttgtggccttcga

SEQ ID NO: 552602 - DNA, 15 bp, Homo sapiens
tgcttgtggccttcg

SEQ ID NO: 552603 - DNA, 15 bp, Homo sapiens
ctgcttgtggccttc

SEQ ID NO: 552604 - DNA, 15 bp, Homo sapiens
gctgcttgtggcctt

SEQ ID NO: 552605 - DNA, 15 bp, Homo sapiens
tgctgcttgtggcct

SEQ ID NO: 552606 - DNA, 15 bp, Homo sapiens
atgctgcttgtggcc

SEQ ID NO: 552607 - DNA, 15 bp, Homo sapiens
catgctgcttgtggc

SEQ ID NO: 552608 - DNA, 15 bp, Homo sapiens
ccatgctgcttgtgg

SEQ ID NO: 552609 - DNA, 15 bp, Homo sapiens
tccatgctgcttgtg

SEQ ID NO: 552610 - DNA, 15 bp, Homo sapiens
ttccatgctgcttgt

SEQ ID NO: 552611 - DNA, 15 bp, Homo sapiens
tttccatgctgcttg

SEQ ID NO: 552612 - DNA, 15 bp, Homo sapiens
gtttccatgctgctt

SEQ ID NO: 552613 - DNA, 15 bp, Homo sapiens
tgtttccatgctgct

SEQ ID NO: 552614 - DNA, 15 bp, Homo sapiens
ttgtttccatgctgc

SEQ ID NO: 552615 - DNA, 15 bp, Homo sapiens
gttgtttccatgctg

SEQ ID NO: 552616 - DNA, 15 bp, Homo sapiens
tgttgtttccatgct

SEQ ID NO: 552617 - DNA, 15 bp, Homo sapiens
gtgttgtttccatgc

SEQ ID NO: 552618 - DNA, 15 bp, Homo sapiens
cgtgttgtttccatg

SEQ ID NO: 552619 - DNA, 15 bp, Homo sapiens
ccgtgttgtttccat

SEQ ID NO: 552620 - DNA, 15 bp, Homo sapiens
gccgtgttgtttcca

SEQ ID NO: 552621 - DNA, 15 bp, Homo sapiens
tgccgtgttgtttcc

SEQ ID NO: 552622 - DNA, 15 bp, Homo sapiens
ctgccgtgttgtttc

SEQ ID NO: 552623 - DNA, 15 bp, Homo sapiens
cctgccgtgttgttt

SEQ ID NO: 552624 - DNA, 15 bp, Homo sapiens
acctgccgtgttgtt

SEQ ID NO: 552625 - DNA, 15 bp, Homo sapiens
gacctgccgtgttgt

SEQ ID NO: 552626 - DNA, 15 bp, Homo sapiens
cgacctgccgtgttg

SEQ ID NO: 552627 - DNA, 15 bp, Homo sapiens
ccgacctgccgtgtt

SEQ ID NO: 552628 - DNA, 15 bp, Homo sapiens
cccgacctgccgtgt

SEQ ID NO: 552629 - DNA, 15 bp, Homo sapiens
tcccgacctgccgtg

SEQ ID NO: 552630 - DNA, 15 bp, Homo sapiens
ctcccgacctgccgt

SEQ ID NO: 552631 - DNA, 15 bp, Homo sapiens
cctcccgacctgccg

SEQ ID NO: 552632 - DNA, 15 bp, Homo sapiens
acctcccgacctgcc

SEQ ID NO: 552633 - DNA, 15 bp, Homo sapiens
gacctcccgacctgc

SEQ ID NO: 552634 - DNA, 15 bp, Homo sapiens
tgacctcccgacctg

SEQ ID NO: 552635 - DNA, 15 bp, Homo sapiens
ctgacctcccgacct

SEQ ID NO: 552636 - DNA, 15 bp, Homo sapiens
cctgacctcccgacc

SEQ ID NO: 552637 - DNA, 15 bp, Homo sapiens
tcctgacctcccgac

SEQ ID NO: 552638 - DNA, 15 bp, Homo sapiens
ctcctgacctcccga

SEQ ID NO: 552639 - DNA, 15 bp, Homo sapiens
actcctgacctcccg

SEQ ID NO: 552640 - DNA, 15 bp, Homo sapiens
aactcctgacctccc

SEQ ID NO: 552641 - DNA, 15 bp, Homo sapiens
aaactcctgacctcc

SEQ ID NO: 552642 - DNA, 15 bp, Homo sapiens
aaaactcctgacctc

SEQ ID NO: 552643 - DNA, 15 bp, Homo sapiens
taaaactcctgacct

SEQ ID NO: 552644 - DNA, 15 bp, Homo sapiens
ctaaaactcctgacc

SEQ ID NO: 552645 - DNA, 15 bp, Homo sapiens
cctaaaactcctgac

SEQ ID NO: 552646 - DNA, 15 bp, Homo sapiens
ccctaaaactcctga

SEQ ID NO: 552647 - DNA, 15 bp, Homo sapiens
cccctaaaactcctg

SEQ ID NO: 552648 - DNA, 15 bp, Homo sapiens
gcccctaaaactcct

SEQ ID NO: 552649 - DNA, 15 bp, Homo sapiens
tgcccctaaaactcc

SEQ ID NO: 552650 - DNA, 15 bp, Homo sapiens
ctgcccctaaaactc

SEQ ID NO: 552651 - DNA, 15 bp, Homo sapiens
cctgcccctaaaact

SEQ ID NO: 552652 - DNA, 15 bp, Homo sapiens
acctgcccctaaaac

SEQ ID NO: 552653 - DNA, 15 bp, Homo sapiens
aacctgcccctaaaa

SEQ ID NO: 552654 - DNA, 15 bp, Homo sapiens
caacctgcccctaaa

SEQ ID NO: 552655 - DNA, 15 bp, Homo sapiens
ccaacctgcccctaa

SEQ ID NO: 552656 - DNA, 15 bp, Homo sapiens
tccaacctgccccta

SEQ ID NO: 552657 - DNA, 15 bp, Homo sapiens
atccaacctgcccct

SEQ ID NO: 552658 - DNA, 15 bp, Homo sapiens
catccaacctgcccc

SEQ ID NO: 552659 - DNA, 15 bp, Homo sapiens
tcatccaacctgccc

SEQ ID NO: 552660 - DNA, 15 bp, Homo sapiens
ctcatccaacctgcc

SEQ ID NO: 552661 - DNA, 15 bp, Homo sapiens
gctcatccaacctgc

SEQ ID NO: 552662 - DNA, 15 bp, Homo sapiens
ggctcatccaacctg

SEQ ID NO: 552663 - DNA, 15 bp, Homo sapiens
aggctcatccaacct

SEQ ID NO: 552664 - DNA, 15 bp, Homo sapiens
aaggctcatccaacc

SEQ ID NO: 552665 - DNA, 15 bp, Homo sapiens
gaaggctcatccaac

SEQ ID NO: 552666 - DNA, 15 bp, Homo sapiens
agaaggctcatccaa

SEQ ID NO: 552667 - DNA, 15 bp, Homo sapiens
cagaaggctcatcca

SEQ ID NO: 552668 - DNA, 15 bp, Homo sapiens
tcagaaggctcatcc

SEQ ID NO: 552669 - DNA, 15 bp, Homo sapiens
ctcagaaggctcatc

SEQ ID NO: 552670 - DNA, 15 bp, Homo sapiens
tctcagaaggctcat

SEQ ID NO: 552671 - DNA, 15 bp, Homo sapiens
ttctcagaaggctca

SEQ ID NO: 552672 - DNA, 15 bp, Homo sapiens
cttctcagaaggctc

SEQ ID NO: 552673 - DNA, 15 bp, Homo sapiens
ccttctcagaaggct

SEQ ID NO: 552674 - DNA, 15 bp, Homo sapiens
cccttctcagaaggc

SEQ ID NO: 552675 - DNA, 15 bp, Homo sapiens
ccccttctcagaagg

SEQ ID NO: 552676 - DNA, 15 bp, Homo sapiens
cccccttctcagaag

SEQ ID NO: 552677 - DNA, 15 bp, Homo sapiens
gcccccttctcagaa

SEQ ID NO: 552678 - DNA, 15 bp, Homo sapiens
tgcccccttctcaga

SEQ ID NO: 552679 - DNA, 15 bp, Homo sapiens
atgcccccttctcag

SEQ ID NO: 552680 - DNA, 15 bp, Homo sapiens
catgcccccttctca

SEQ ID NO: 552681 - DNA, 15 bp, Homo sapiens
acatgcccccttctc

SEQ ID NO: 552682 - DNA, 15 bp, Homo sapiens
tacatgcccccttct

SEQ ID NO: 552683 - DNA, 15 bp, Homo sapiens
ttacatgcccccttc

SEQ ID NO: 552684 - DNA, 15 bp, Homo sapiens
cttacatgccccctt

SEQ ID NO: 552685 - DNA, 15 bp, Homo sapiens
gcttacatgccccct

SEQ ID NO: 552686 - DNA, 15 bp, Homo sapiens
tgcttacatgccccc

SEQ ID NO: 552687 - DNA, 15 bp, Homo sapiens
ctgcttacatgcccc

SEQ ID NO: 552688 - DNA, 15 bp, Homo sapiens
tctgcttacatgccc

SEQ ID NO: 552689 - DNA, 15 bp, Homo sapiens
ctctgcttacatgcc

SEQ ID NO: 552690 - DNA, 15 bp, Homo sapiens
tctctgcttacatgc

SEQ ID NO: 552691 - DNA, 15 bp, Homo sapiens
atctctgcttacatg

SEQ ID NO: 552692 - DNA, 15 bp, Homo sapiens
aatctctgcttacat

SEQ ID NO: 552693 - DNA, 15 bp, Homo sapiens
gaatctctgcttaca

SEQ ID NO: 552694 - DNA, 15 bp, Homo sapiens
cgaatctctgcttac

SEQ ID NO: 552695 - DNA, 15 bp, Homo sapiens
tcgaatctctgctta

SEQ ID NO: 552696 - DNA, 15 bp, Homo sapiens
ttcgaatctctgctt

SEQ ID NO: 552697 - DNA, 15 bp, Homo sapiens
cttcgaatctctgct

SEQ ID NO: 552698 - DNA, 15 bp, Homo sapiens
ccttcgaatctctgc

SEQ ID NO: 552699 - DNA, 15 bp, Homo sapiens
cccttcgaatctctg

SEQ ID NO: 552700 - DNA, 15 bp, Homo sapiens
ccccttcgaatctct

SEQ ID NO: 552701 - DNA, 15 bp, Homo sapiens
accccttcgaatctc

SEQ ID NO: 552702 - DNA, 15 bp, Homo sapiens
caccccttcgaatct

SEQ ID NO: 552703 - DNA, 15 bp, Homo sapiens
tcaccccttcgaatc

SEQ ID NO: 552704 - DNA, 15 bp, Homo sapiens
ctcaccccttcgaat

SEQ ID NO: 552705 - DNA, 15 bp, Homo sapiens
cctcaccccttcgaa

SEQ ID NO: 552706 - DNA, 15 bp, Homo sapiens
ccctcaccccttcga

SEQ ID NO: 552707 - DNA, 15 bp, Homo sapiens
tccctcaccccttcg

SEQ ID NO: 552708 - DNA, 15 bp, Homo sapiens
atccctcaccccttc

SEQ ID NO: 552709 - DNA, 15 bp, Homo sapiens
aatccctcacccctt

SEQ ID NO: 552710 - DNA, 15 bp, Homo sapiens
aaatccctcacccct

SEQ ID NO: 552711 - DNA, 15 bp, Homo sapiens
caaatccctcacccc

SEQ ID NO: 552712 - DNA, 15 bp, Homo sapiens
tcaaatccctcaccc

SEQ ID NO: 552713 - DNA, 15 bp, Homo sapiens
gtcaaatccctcacc

SEQ ID NO: 552714 - DNA, 15 bp, Homo sapiens
ggtcaaatccctcac

SEQ ID NO: 552715 - DNA, 15 bp, Homo sapiens
tggtcaaatccctca

SEQ ID NO: 552716 - DNA, 15 bp, Homo sapiens
gtggtcaaatccctc

SEQ ID NO: 552717 - DNA, 15 bp, Homo sapiens
cgtggtcaaatccct

SEQ ID NO: 552718 - DNA, 15 bp, Homo sapiens
acgtggtcaaatccc

SEQ ID NO: 552719 - DNA, 15 bp, Homo sapiens
cacgtggtcaaatcc

SEQ ID NO: 552720 - DNA, 15 bp, Homo sapiens
acacgtggtcaaatc

SEQ ID NO: 552721 - DNA, 15 bp, Homo sapiens
aacacgtggtcaaat

SEQ ID NO: 552722 - DNA, 15 bp, Homo sapiens
aaacacgtggtcaaa

SEQ ID NO: 552723 - DNA, 15 bp, Homo sapiens
taaacacgtggtcaa

SEQ ID NO: 552724 - DNA, 15 bp, Homo sapiens
ctaaacacgtggtca

SEQ ID NO: 552725 - DNA, 15 bp, Homo sapiens
cctaaacacgtggtc

SEQ ID NO: 552726 - DNA, 15 bp, Homo sapiens
tcctaaacacgtggt

SEQ ID NO: 552727 - DNA, 15 bp, Homo sapiens
ctcctaaacacgtgg

SEQ ID NO: 552728 - DNA, 15 bp, Homo sapiens
cctcctaaacacgtg

SEQ ID NO: 552729 - DNA, 15 bp, Homo sapiens
tcctcctaaacacgt

SEQ ID NO: 552730 - DNA, 15 bp, Homo sapiens
ttcctcctaaacacg

SEQ ID NO: 552731 - DNA, 15 bp, Homo sapiens
cttcctcctaaacac

SEQ ID NO: 552732 - DNA, 15 bp, Homo sapiens
gcttcctcctaaaca

SEQ ID NO: 552733 - DNA, 15 bp, Homo sapiens
tgcttcctcctaaac

SEQ ID NO: 552734 - DNA, 15 bp, Homo sapiens
ctgcttcctcctaaa

SEQ ID NO: 552735 - DNA, 15 bp, Homo sapiens
actgcttcctcctaa

SEQ ID NO: 552736 - DNA, 15 bp, Homo sapiens
cactgcttcctccta

SEQ ID NO: 552737 - DNA, 15 bp, Homo sapiens
ccactgcttcctcct

SEQ ID NO: 552738 - DNA, 15 bp, Homo sapiens
cccactgcttcctcc

SEQ ID NO: 552739 - DNA, 15 bp, Homo sapiens
acccactgcttcctc

SEQ ID NO: 552740 - DNA, 15 bp, Homo sapiens
cacccactgcttcct

SEQ ID NO: 552741 - DNA, 15 bp, Homo sapiens
gcacccactgcttcc

SEQ ID NO: 552742 - DNA, 15 bp, Homo sapiens
tgcacccactgcttc

SEQ ID NO: 552743 - DNA, 15 bp, Homo sapiens
ttgcacccactgctt

SEQ ID NO: 552744 - DNA, 15 bp, Homo sapiens
tttgcacccactgct

SEQ ID NO: 552745 - DNA, 15 bp, Homo sapiens
ctttgcacccactgc

SEQ ID NO: 552746 - DNA, 15 bp, Homo sapiens
cctttgcacccactg

SEQ ID NO: 552747 - DNA, 15 bp, Homo sapiens
gcctttgcacccact

SEQ ID NO: 552748 - DNA, 15 bp, Homo sapiens
ggcctttgcacccac

SEQ ID NO: 552749 - DNA, 15 bp, Homo sapiens
gggcctttgcaccca

SEQ ID NO: 552750 - DNA, 15 bp, Homo sapiens
agggcctttgcaccc

SEQ ID NO: 552751 - DNA, 15 bp, Homo sapiens
cagggcctttgcacc

SEQ ID NO: 552752 - DNA, 15 bp, Homo sapiens
ccagggcctttgcac

SEQ ID NO: 552753 - DNA, 15 bp, Homo sapiens
cccagggcctttgca

SEQ ID NO: 552754 - DNA, 15 bp, Homo sapiens
ccccagggcctttgc

SEQ ID NO: 552755 - DNA, 15 bp, Homo sapiens
gccccagggcctttg

SEQ ID NO: 552756 - DNA, 15 bp, Homo sapiens
tgccccagggccttt

SEQ ID NO: 552757 - DNA, 15 bp, Homo sapiens
ctgccccagggcctt

SEQ ID NO: 552758 - DNA, 15 bp, Homo sapiens
cctgccccagggcct

SEQ ID NO: 552759 - DNA, 15 bp, Homo sapiens
tcctgccccagggcc

SEQ ID NO: 552760 - DNA, 15 bp, Homo sapiens
ctcctgccccagggc

SEQ ID NO: 552761 - DNA, 15 bp, Homo sapiens
gctcctgccccaggg

SEQ ID NO: 552762 - DNA, 15 bp, Homo sapiens
cgctcctgccccagg

SEQ ID NO: 552763 - DNA, 15 bp, Homo sapiens
acgctcctgccccag

SEQ ID NO: 552764 - DNA, 15 bp, Homo sapiens
cacgctcctgcccca

SEQ ID NO: 552765 - DNA, 15 bp, Homo sapiens
ccacgctcctgcccc

SEQ ID NO: 552766 - DNA, 15 bp, Homo sapiens
gccacgctcctgccc

SEQ ID NO: 552767 - DNA, 15 bp, Homo sapiens
ggccacgctcctgcc

SEQ ID NO: 552768 - DNA, 15 bp, Homo sapiens
aggccacgctcctgc

SEQ ID NO: 552769 - DNA, 15 bp, Homo sapiens
gaggccacgctcctg

SEQ ID NO: 552770 - DNA, 15 bp, Homo sapiens
agaggccacgctcct

SEQ ID NO: 552771 - DNA, 15 bp, Homo sapiens
aagaggccacgctcc

SEQ ID NO: 552772 - DNA, 15 bp, Homo sapiens
caagaggccacgctc

SEQ ID NO: 552773 - DNA, 15 bp, Homo sapiens
ccaagaggccacgct

SEQ ID NO: 552774 - DNA, 15 bp, Homo sapiens
tccaagaggccacgc

SEQ ID NO: 552775 - DNA, 15 bp, Homo sapiens
gtccaagaggccacg

SEQ ID NO: 552776 - DNA, 15 bp, Homo sapiens
tgtccaagaggccac

SEQ ID NO: 552777 - DNA, 15 bp, Homo sapiens
ctgtccaagaggcca

SEQ ID NO: 552778 - DNA, 15 bp, Homo sapiens
cctgtccaagaggcc

SEQ ID NO: 552779 - DNA, 15 bp, Homo sapiens
tcctgtccaagaggc

SEQ ID NO: 552780 - DNA, 15 bp, Homo sapiens
atcctgtccaagagg

SEQ ID NO: 552781 - DNA, 15 bp, Homo sapiens
tatcctgtccaagag

SEQ ID NO: 552782 - DNA, 15 bp, Homo sapiens
ctatcctgtccaaga

SEQ ID NO: 552783 - DNA, 15 bp, Homo sapiens
gctatcctgtccaag

SEQ ID NO: 552784 - DNA, 15 bp, Homo sapiens
tgctatcctgtccaa

SEQ ID NO: 552785 - DNA, 15 bp, Homo sapiens
ttgctatcctgtcca

SEQ ID NO: 552786 - DNA, 15 bp, Homo sapiens
cttgctatcctgtcc

SEQ ID NO: 552787 - DNA, 15 bp, Homo sapiens
ccttgctatcctgtc

SEQ ID NO: 552788 - DNA, 15 bp, Homo sapiens
tccttgctatcctgt

SEQ ID NO: 552789 - DNA, 15 bp, Homo sapiens
ctccttgctatcctg

SEQ ID NO: 552790 - DNA, 15 bp, Homo sapiens
cctccttgctatcct

SEQ ID NO: 552791 - DNA, 15 bp, Homo sapiens
gcctccttgctatcc

SEQ ID NO: 552792 - DNA, 15 bp, Homo sapiens
agcctccttgctatc

SEQ ID NO: 552793 - DNA, 15 bp, Homo sapiens
cagcctccttgctat

SEQ ID NO: 552794 - DNA, 15 bp, Homo sapiens
acagcctccttgcta

SEQ ID NO: 552795 - DNA, 15 bp, Homo sapiens
cacagcctccttgct

SEQ ID NO: 552796 - DNA, 15 bp, Homo sapiens
ccacagcctccttgc

SEQ ID NO: 552797 - DNA, 15 bp, Homo sapiens
cccacagcctccttg

SEQ ID NO: 552798 - DNA, 15 bp, Homo sapiens
ccccacagcctcctt

SEQ ID NO: 552799 - DNA, 15 bp, Homo sapiens
gccccacagcctcct

SEQ ID NO: 552800 - DNA, 15 bp, Homo sapiens
agccccacagcctcc

SEQ ID NO: 552801 - DNA, 15 bp, Homo sapiens
cagccccacagcctc

SEQ ID NO: 552802 - DNA, 15 bp, Homo sapiens
ccagccccacagcct

SEQ ID NO: 552803 - DNA, 15 bp, Homo sapiens
cccagccccacagcc

SEQ ID NO: 552804 - DNA, 15 bp, Homo sapiens
gcccagccccacagc

SEQ ID NO: 552805 - DNA, 15 bp, Homo sapiens
agcccagccccacag

SEQ ID NO: 552806 - DNA, 15 bp, Homo sapiens
cagcccagccccaca

SEQ ID NO: 552807 - DNA, 15 bp, Homo sapiens
tcagcccagccccac

SEQ ID NO: 552808 - DNA, 15 bp, Homo sapiens
ctcagcccagcccca

SEQ ID NO: 552809 - DNA, 15 bp, Homo sapiens
actcagcccagcccc

SEQ ID NO: 552810 - DNA, 15 bp, Homo sapiens
tactcagcccagccc

SEQ ID NO: 552811 - DNA, 15 bp, Homo sapiens
ttactcagcccagcc

SEQ ID NO: 552812 - DNA, 15 bp, Homo sapiens
gttactcagcccagc

SEQ ID NO: 552813 - DNA, 15 bp, Homo sapiens
tgttactcagcccag

SEQ ID NO: 552814 - DNA, 15 bp, Homo sapiens
ctgttactcagccca

SEQ ID NO: 552815 - DNA, 15 bp, Homo sapiens
tctgttactcagccc

SEQ ID NO: 552816 - DNA, 15 bp, Homo sapiens
gtctgttactcagcc

SEQ ID NO: 552817 - DNA, 15 bp, Homo sapiens
tgtctgttactcagc

SEQ ID NO: 552818 - DNA, 15 bp, Homo sapiens
ctgtctgttactcag

SEQ ID NO: 552819 - DNA, 15 bp, Homo sapiens
actgtctgttactca

SEQ ID NO: 552820 - DNA, 15 bp, Homo sapiens
cactgtctgttactc

SEQ ID NO: 552821 - DNA, 15 bp, Homo sapiens
ccactgtctgttact

SEQ ID NO: 552822 - DNA, 15 bp, Homo sapiens
accactgtctgttac

SEQ ID NO: 552823 - DNA, 15 bp, Homo sapiens
aaccactgtctgtta

SEQ ID NO: 552824 - DNA, 15 bp, Homo sapiens
caaccactgtctgtt

SEQ ID NO: 552825 - DNA, 15 bp, Homo sapiens
acaaccactgtctgt

SEQ ID NO: 552826 - DNA, 15 bp, Homo sapiens
cacaaccactgtctg

SEQ ID NO: 552827 - DNA, 15 bp, Homo sapiens
ccacaaccactgtct

SEQ ID NO: 552828 - DNA, 15 bp, Homo sapiens
tccacaaccactgtc

SEQ ID NO: 552829 - DNA, 15 bp, Homo sapiens
ttccacaaccactgt

SEQ ID NO: 552830 - DNA, 15 bp, Homo sapiens
attccacaaccactg

SEQ ID NO: 552831 - DNA, 15 bp, Homo sapiens
cattccacaaccact

SEQ ID NO: 552832 - DNA, 15 bp, Homo sapiens
tcattccacaaccac

SEQ ID NO: 552833 - DNA, 15 bp, Homo sapiens
ctcattccacaacca

SEQ ID NO: 552834 - DNA, 15 bp, Homo sapiens
tctcattccacaacc

SEQ ID NO: 552835 - DNA, 15 bp, Homo sapiens
gtctcattccacaac

SEQ ID NO: 552836 - DNA, 15 bp, Homo sapiens
ggtctcattccacaa

SEQ ID NO: 552837 - DNA, 15 bp, Homo sapiens
tggtctcattccaca

SEQ ID NO: 552838 - DNA, 15 bp, Homo sapiens
gtggtctcattccac

SEQ ID NO: 552839 - DNA, 15 bp, Homo sapiens
ggtggtctcattcca

SEQ ID NO: 552840 - DNA, 15 bp, Homo sapiens
cggtggtctcattcc

SEQ ID NO: 552841 - DNA, 15 bp, Homo sapiens
gcggtggtctcattc

SEQ ID NO: 552842 - DNA, 15 bp, Homo sapiens
agcggtggtctcatt

SEQ ID NO: 552843 - DNA, 15 bp, Homo sapiens
aagcggtggtctcat

SEQ ID NO: 552844 - DNA, 15 bp, Homo sapiens
gaagcggtggtctca

SEQ ID NO: 552845 - DNA, 15 bp, Homo sapiens
agaagcggtggtctc

SEQ ID NO: 552846 - DNA, 15 bp, Homo sapiens
cagaagcggtggtct

SEQ ID NO: 552847 - DNA, 15 bp, Homo sapiens
gcagaagcggtggtc

SEQ ID NO: 552848 - DNA, 15 bp, Homo sapiens
agcagaagcggtggt

SEQ ID NO: 552849 - DNA, 15 bp, Homo sapiens
cagcagaagcggtgg

SEQ ID NO: 552850 - DNA, 15 bp, Homo sapiens
acagcagaagcggtg

SEQ ID NO: 552851 - DNA, 15 bp, Homo sapiens
aacagcagaagcggt

SEQ ID NO: 552852 - DNA, 15 bp, Homo sapiens
caacagcagaagcgg

SEQ ID NO: 552853 - DNA, 15 bp, Homo sapiens
acaacagcagaagcg

SEQ ID NO: 552854 - DNA, 15 bp, Homo sapiens
gacaacagcagaagc

SEQ ID NO: 552855 - DNA, 15 bp, Homo sapiens
ggacaacagcagaag

SEQ ID NO: 552856 - DNA, 15 bp, Homo sapiens
aggacaacagcagaa

SEQ ID NO: 552857 - DNA, 15 bp, Homo sapiens
aaggacaacagcaga

SEQ ID NO: 552858 - DNA, 15 bp, Homo sapiens
gaaggacaacagcag

SEQ ID NO: 552859 - DNA, 15 bp, Homo sapiens
ggaaggacaacagca

SEQ ID NO: 552860 - DNA, 15 bp, Homo sapiens
gggaaggacaacagc

SEQ ID NO: 552861 - DNA, 15 bp, Homo sapiens
tgggaaggacaacag

SEQ ID NO: 552862 - DNA, 15 bp, Homo sapiens
ctgggaaggacaaca

SEQ ID NO: 552863 - DNA, 15 bp, Homo sapiens
gctgggaaggacaac

SEQ ID NO: 552864 - DNA, 15 bp, Homo sapiens
agctgggaaggacaa

SEQ ID NO: 552865 - DNA, 15 bp, Homo sapiens
aagctgggaaggaca

SEQ ID NO: 552866 - DNA, 15 bp, Homo sapiens
gaagctgggaaggac

SEQ ID NO: 552867 - DNA, 15 bp, Homo sapiens
agaagctgggaagga

SEQ ID NO: 552868 - DNA, 15 bp, Homo sapiens
gagaagctgggaagg

SEQ ID NO: 552869 - DNA, 15 bp, Homo sapiens
ggagaagctgggaag

SEQ ID NO: 552870 - DNA, 15 bp, Homo sapiens
gggagaagctgggaa

SEQ ID NO: 552871 - DNA, 15 bp, Homo sapiens
ggggagaagctggga

SEQ ID NO: 552872 - DNA, 15 bp, Homo sapiens
tggggagaagctggg

SEQ ID NO: 552873 - DNA, 15 bp, Homo sapiens
ctggggagaagctgg

SEQ ID NO: 552874 - DNA, 15 bp, Homo sapiens
gctggggagaagctg

SEQ ID NO: 552875 - DNA, 15 bp, Homo sapiens
ggctggggagaagct

SEQ ID NO: 552876 - DNA, 15 bp, Homo sapiens
aggctggggagaagc

SEQ ID NO: 552877 - DNA, 15 bp, Homo sapiens
gaggctggggagaag

SEQ ID NO: 552878 - DNA, 15 bp, Homo sapiens
ggaggctggggagaa

SEQ ID NO: 552879 - DNA, 15 bp, Homo sapiens
gggaggctggggaga

SEQ ID NO: 552880 - DNA, 15 bp, Homo sapiens
ggggaggctggggag

SEQ ID NO: 552881 - DNA, 15 bp, Homo sapiens
aggggaggctgggga

SEQ ID NO: 552882 - DNA, 15 bp, Homo sapiens
aaggggaggctgggg

SEQ ID NO: 552883 - DNA, 15 bp, Homo sapiens
aaaggggaggctggg

SEQ ID NO: 552884 - DNA, 15 bp, Homo sapiens
aaaaggggaggctgg

SEQ ID NO: 552885 - DNA, 15 bp, Homo sapiens
gaaaaggggaggctg

SEQ ID NO: 552886 - DNA, 15 bp, Homo sapiens
ggaaaaggggaggct

SEQ ID NO: 552887 - DNA, 15 bp, Homo sapiens
gggaaaaggggaggc

SEQ ID NO: 552888 - DNA, 15 bp, Homo sapiens
agggaaaaggggagg

SEQ ID NO: 552889 - DNA, 15 bp, Homo sapiens
tagggaaaaggggag

SEQ ID NO: 552890 - DNA, 15 bp, Homo sapiens
ctagggaaaagggga

SEQ ID NO: 552891 - DNA, 15 bp, Homo sapiens
actagggaaaagggg

SEQ ID NO: 552892 - DNA, 15 bp, Homo sapiens
aactagggaaaaggg

SEQ ID NO: 552893 - DNA, 15 bp, Homo sapiens
aaactagggaaaagg

SEQ ID NO: 552894 - DNA, 15 bp, Homo sapiens
taaactagggaaaag

SEQ ID NO: 552895 - DNA, 15 bp, Homo sapiens
ataaactagggaaaa

SEQ ID NO: 552896 - DNA, 15 bp, Homo sapiens
tataaactagggaaa

SEQ ID NO: 552897 - DNA, 15 bp, Homo sapiens
ttataaactagggaa

SEQ ID NO: 552898 - DNA, 15 bp, Homo sapiens
cttataaactaggga

SEQ ID NO: 552899 - DNA, 15 bp, Homo sapiens
tcttataaactaggg

SEQ ID NO: 552900 - DNA, 15 bp, Homo sapiens
gtcttataaactagg

SEQ ID NO: 552901 - DNA, 15 bp, Homo sapiens
tgtcttataaactag

SEQ ID NO: 552902 - DNA, 15 bp, Homo sapiens
ctgtcttataaacta

SEQ ID NO: 552903 - DNA, 15 bp, Homo sapiens
cctgtcttataaact

SEQ ID NO: 552904 - DNA, 15 bp, Homo sapiens
tcctgtcttataaac

SEQ ID NO: 552905 - DNA, 15 bp, Homo sapiens
ctcctgtcttataaa

SEQ ID NO: 552906 - DNA, 15 bp, Homo sapiens
tctcctgtcttataa

SEQ ID NO: 552907 - DNA, 15 bp, Homo sapiens
ttctcctgtcttata

SEQ ID NO: 552908 - DNA, 15 bp, Homo sapiens
tttctcctgtcttat

SEQ ID NO: 552909 - DNA, 15 bp, Homo sapiens
ttttctcctgtctta

SEQ ID NO: 552910 - DNA, 15 bp, Homo sapiens
cttttctcctgtctt

SEQ ID NO: 552911 - DNA, 15 bp, Homo sapiens
ccttttctcctgtct

SEQ ID NO: 552912 - DNA, 15 bp, Homo sapiens
cccttttctcctgtc

SEQ ID NO: 552913 - DNA, 15 bp, Homo sapiens
tcccttttctcctgt

SEQ ID NO: 552914 - DNA, 15 bp, Homo sapiens
ctcccttttctcctg

SEQ ID NO: 552915 - DNA, 15 bp, Homo sapiens
tctcccttttctcct

SEQ ID NO: 552916 - DNA, 15 bp, Homo sapiens
ttctcccttttctcc

SEQ ID NO: 552917 - DNA, 15 bp, Homo sapiens
tttctcccttttctc

SEQ ID NO: 552918 - DNA, 15 bp, Homo sapiens
ctttctcccttttct

SEQ ID NO: 552919 - DNA, 15 bp, Homo sapiens
gctttctcccttttc

SEQ ID NO: 552920 - DNA, 15 bp, Homo sapiens
tgctttctccctttt

SEQ ID NO: 552921 - DNA, 15 bp, Homo sapiens
ttgctttctcccttt

SEQ ID NO: 552922 - DNA, 15 bp, Homo sapiens
tttgctttctccctt

SEQ ID NO: 552923 - DNA, 15 bp, Homo sapiens
ttttgctttctccct

SEQ ID NO: 552924 - DNA, 15 bp, Homo sapiens
tttttgctttctccc

SEQ ID NO: 552925 - DNA, 15 bp, Homo sapiens
ctttttgctttctcc

SEQ ID NO: 552926 - DNA, 15 bp, Homo sapiens
tctttttgctttctc

SEQ ID NO: 552927 - DNA, 15 bp, Homo sapiens
atctttttgctttct

SEQ ID NO: 552928 - DNA, 15 bp, Homo sapiens
catctttttgctttc

SEQ ID NO: 552929 - DNA, 15 bp, Homo sapiens
ccatctttttgcttt

SEQ ID NO: 552930 - DNA, 15 bp, Homo sapiens
tccatctttttgctt

SEQ ID NO: 552931 - DNA, 15 bp, Homo sapiens
ttccatctttttgct

SEQ ID NO: 552932 - DNA, 15 bp, Homo sapiens
tttccatctttttgc

SEQ ID NO: 552933 - DNA, 15 bp, Homo sapiens
ctttccatctttttg

SEQ ID NO: 552934 - DNA, 15 bp, Homo sapiens
tctttccatcttttt

SEQ ID NO: 552935 - DNA, 15 bp, Homo sapiens
ttctttccatctttt

SEQ ID NO: 552936 - DNA, 15 bp, Homo sapiens
tttctttccatcttt

SEQ ID NO: 552937 - DNA, 15 bp, Homo sapiens
gtttctttccatctt

SEQ ID NO: 552938 - DNA, 15 bp, Homo sapiens
tgtttctttccatct

SEQ ID NO: 552939 - DNA, 15 bp, Homo sapiens
ctgtttctttccatc

SEQ ID NO: 552940 - DNA, 15 bp, Homo sapiens
tctgtttctttccat

SEQ ID NO: 552941 - DNA, 15 bp, Homo sapiens
ttctgtttctttcca

SEQ ID NO: 552942 - DNA, 15 bp, Homo sapiens
cttctgtttctttcc

SEQ ID NO: 552943 - DNA, 15 bp, Homo sapiens
acttctgtttctttc

SEQ ID NO: 552944 - DNA, 15 bp, Homo sapiens
tacttctgtttcttt

SEQ ID NO: 552945 - DNA, 15 bp, Homo sapiens
ttacttctgtttctt

SEQ ID NO: 552946 - DNA, 15 bp, Homo sapiens
cttacttctgtttct

SEQ ID NO: 552947 - DNA, 15 bp, Homo sapiens
tcttacttctgtttc

SEQ ID NO: 552948 - DNA, 15 bp, Homo sapiens
atcttacttctgttt

SEQ ID NO: 552949 - DNA, 15 bp, Homo sapiens
tatcttacttctgtt

SEQ ID NO: 552950 - DNA, 15 bp, Homo sapiens
ttatcttacttctgt

SEQ ID NO: 552951 - DNA, 15 bp, Homo sapiens
tttatcttacttctg

SEQ ID NO: 552952 - DNA, 15 bp, Homo sapiens
atttatcttacttct

SEQ ID NO: 552953 - DNA, 15 bp, Homo sapiens
tatttatcttacttc

SEQ ID NO: 552954 - DNA, 15 bp, Homo sapiens
ctatttatcttactt

SEQ ID NO: 552955 - DNA, 15 bp, Homo sapiens
gctatttatcttact

SEQ ID NO: 552956 - DNA, 15 bp, Homo sapiens
agctatttatcttac

SEQ ID NO: 552957 - DNA, 15 bp, Homo sapiens
tagctatttatctta

SEQ ID NO: 552958 - DNA, 15 bp, Homo sapiens
ctagctatttatctt

SEQ ID NO: 552959 - DNA, 15 bp, Homo sapiens
tctagctatttatct

SEQ ID NO: 552960 - DNA, 15 bp, Homo sapiens
gtctagctatttatc

SEQ ID NO: 552961 - DNA, 15 bp, Homo sapiens
cgtctagctatttat

SEQ ID NO: 552962 - DNA, 15 bp, Homo sapiens
tcgtctagctattta

SEQ ID NO: 552963 - DNA, 15 bp, Homo sapiens
gtcgtctagctattt

SEQ ID NO: 552964 - DNA, 15 bp, Homo sapiens
ggtcgtctagctatt

SEQ ID NO: 552965 - DNA, 15 bp, Homo sapiens
aggtcgtctagctat

SEQ ID NO: 552966 - DNA, 15 bp, Homo sapiens
aaggtcgtctagcta

SEQ ID NO: 552967 - DNA, 15 bp, Homo sapiens
caaggtcgtctagct

SEQ ID NO: 552968 - DNA, 15 bp, Homo sapiens
ccaaggtcgtctagc

SEQ ID NO: 552969 - DNA, 15 bp, Homo sapiens
gccaaggtcgtctag

SEQ ID NO: 552970 - DNA, 15 bp, Homo sapiens
cgccaaggtcgtcta

SEQ ID NO: 552971 - DNA, 15 bp, Homo sapiens
gcgccaaggtcgtct

SEQ ID NO: 552972 - DNA, 15 bp, Homo sapiens
ggcgccaaggtcgtc

SEQ ID NO: 552973 - DNA, 15 bp, Homo sapiens
tggcgccaaggtcgt

SEQ ID NO: 552974 - DNA, 15 bp, Homo sapiens
gtggcgccaaggtcg

SEQ ID NO: 552975 - DNA, 15 bp, Homo sapiens
ggtggcgccaaggtc

SEQ ID NO: 552976 - DNA, 15 bp, Homo sapiens
tggtggcgccaaggt

SEQ ID NO: 552977 - DNA, 15 bp, Homo sapiens
gtggtggcgccaagg

SEQ ID NO: 552978 - DNA, 15 bp, Homo sapiens
ggtggtggcgccaag

SEQ ID NO: 552979 - DNA, 15 bp, Homo sapiens
aggtggtggcgccaa

SEQ ID NO: 552980 - DNA, 15 bp, Homo sapiens
caggtggtggcgcca

SEQ ID NO: 552981 - DNA, 15 bp, Homo sapiens
ccaggtggtggcgcc

SEQ ID NO: 552982 - DNA, 15 bp, Homo sapiens
gccaggtggtggcgc

SEQ ID NO: 552983 - DNA, 15 bp, Homo sapiens
ggccaggtggtggcg

SEQ ID NO: 552984 - DNA, 15 bp, Homo sapiens
gggccaggtggtggc

SEQ ID NO: 552985 - DNA, 15 bp, Homo sapiens
agggccaggtggtgg

SEQ ID NO: 552986 - DNA, 15 bp, Homo sapiens
cagggccaggtggtg

SEQ ID NO: 552987 - DNA, 15 bp, Homo sapiens
ccagggccaggtggt

SEQ ID NO: 552988 - DNA, 15 bp, Homo sapiens
accagggccaggtgg

SEQ ID NO: 552989 - DNA, 15 bp, Homo sapiens
caccagggccaggtg

SEQ ID NO: 552990 - DNA, 15 bp, Homo sapiens
ccaccagggccaggt

SEQ ID NO: 552991 - DNA, 15 bp, Homo sapiens
accaccagggccagg

SEQ ID NO: 552992 - DNA, 15 bp, Homo sapiens
aaccaccagggccag

SEQ ID NO: 552993 - DNA, 15 bp, Homo sapiens
taaccaccagggcca

SEQ ID NO: 552994 - DNA, 15 bp, Homo sapiens
ttaaccaccagggcc

SEQ ID NO: 552995 - DNA, 15 bp, Homo sapiens
tttaaccaccagggc

SEQ ID NO: 552996 - DNA, 15 bp, Homo sapiens
ttttaaccaccaggg

SEQ ID NO: 552997 - DNA, 15 bp, Homo sapiens
attttaaccaccagg

SEQ ID NO: 552998 - DNA, 15 bp, Homo sapiens
tattttaaccaccag

SEQ ID NO: 552999 - DNA, 15 bp, Homo sapiens
ttattttaaccacca

SEQ ID NO: 553000 - DNA, 15 bp, Homo sapiens
attattttaaccacc

SEQ ID NO: 553001 - DNA, 15 bp, Homo sapiens
tattattttaaccac

SEQ ID NO: 553002 - DNA, 15 bp, Homo sapiens
ttattattttaacca

SEQ ID NO: 553003 - DNA, 15 bp, Homo sapiens
attattattttaacc

SEQ ID NO: 553004 - DNA, 15 bp, Homo sapiens
tattattattttaac

SEQ ID NO: 553005 - DNA, 15 bp, Homo sapiens
ttattattattttaa

SEQ ID NO: 553006 - DNA, 15 bp, Homo sapiens
attattattatttta

SEQ ID NO: 553007 - DNA, 15 bp, Homo sapiens
tattattattatttt

SEQ ID NO: 553008 - DNA, 15 bp, Homo sapiens
ttattattattattt

SEQ ID NO: 553009 - DNA, 15 bp, Homo sapiens
attattattattatt

SEQ ID NO: 553010 - DNA, 15 bp, Homo sapiens
tattattattattat

SEQ ID NO: 553011 - DNA, 15 bp, Homo sapiens
ttattattattatta

SEQ ID NO: 553012 - DNA, 15 bp, Homo sapiens
atattattattatta

SEQ ID NO: 553013 - DNA, 15 bp, Homo sapiens
aatattattattatt

SEQ ID NO: 553014 - DNA, 15 bp, Homo sapiens
taatattattattat

SEQ ID NO: 553015 - DNA, 15 bp, Homo sapiens
ttaatattattatta

SEQ ID NO: 553016 - DNA, 15 bp, Homo sapiens
gttaatattattatt

SEQ ID NO: 553017 - DNA, 15 bp, Homo sapiens
ggttaatattattat

SEQ ID NO: 553018 - DNA, 15 bp, Homo sapiens
gggttaatattatta

SEQ ID NO: 553019 - DNA, 15 bp, Homo sapiens
ggggttaatattatt

SEQ ID NO: 553020 - DNA, 15 bp, Homo sapiens
aggggttaatattat

SEQ ID NO: 553021 - DNA, 15 bp, Homo sapiens
caggggttaatatta

SEQ ID NO: 553022 - DNA, 15 bp, Homo sapiens
tcaggggttaatatt

SEQ ID NO: 553023 - DNA, 15 bp, Homo sapiens
gtcaggggttaatat

SEQ ID NO: 553024 - DNA, 15 bp, Homo sapiens
ggtcaggggttaata

SEQ ID NO: 553025 - DNA, 15 bp, Homo sapiens
tggtcaggggttaat

SEQ ID NO: 553026 - DNA, 15 bp, Homo sapiens
ttggtcaggggttaa

SEQ ID NO: 553027 - DNA, 15 bp, Homo sapiens
tttggtcaggggtta

SEQ ID NO: 553028 - DNA, 15 bp, Homo sapiens
ttttggtcaggggtt

SEQ ID NO: 553029 - DNA, 15 bp, Homo sapiens
gttttggtcaggggt

SEQ ID NO: 553030 - DNA, 15 bp, Homo sapiens
agttttggtcagggg

SEQ ID NO: 553031 - DNA, 15 bp, Homo sapiens
tagttttggtcaggg

SEQ ID NO: 553032 - DNA, 15 bp, Homo sapiens
gtagttttggtcagg

SEQ ID NO: 553033 - DNA, 15 bp, Homo sapiens
agtagttttggtcag

SEQ ID NO: 553034 - DNA, 15 bp, Homo sapiens
cagtagttttggtca

SEQ ID NO: 553035 - DNA, 15 bp, Homo sapiens
ccagtagttttggtc

SEQ ID NO: 553036 - DNA, 15 bp, Homo sapiens
accagtagttttggt

SEQ ID NO: 553037 - DNA, 15 bp, Homo sapiens
caccagtagttttgg

SEQ ID NO: 553038 - DNA, 15 bp, Homo sapiens
acaccagtagttttg

SEQ ID NO: 553039 - DNA, 15 bp, Homo sapiens
aacaccagtagtttt

SEQ ID NO: 553040 - DNA, 15 bp, Homo sapiens
taacaccagtagttt

SEQ ID NO: 553041 - DNA, 15 bp, Homo sapiens
ataacaccagtagtt

SEQ ID NO: 553042 - DNA, 15 bp, Homo sapiens
gataacaccagtagt

SEQ ID NO: 553043 - DNA, 15 bp, Homo sapiens
agataacaccagtag

SEQ ID NO: 553044 - DNA, 15 bp, Homo sapiens
cagataacaccagta

SEQ ID NO: 553045 - DNA, 15 bp, Homo sapiens
acagataacaccagt

SEQ ID NO: 553046 - DNA, 15 bp, Homo sapiens
tacagataacaccag

SEQ ID NO: 553047 - DNA, 15 bp, Homo sapiens
ttacagataacacca

SEQ ID NO: 553048 - DNA, 15 bp, Homo sapiens
tttacagataacacc

SEQ ID NO: 553049 - DNA, 15 bp, Homo sapiens
atttacagataacac

SEQ ID NO: 553050 - DNA, 15 bp, Homo sapiens
aatttacagataaca

SEQ ID NO: 553051 - DNA, 15 bp, Homo sapiens
gaatttacagataac

SEQ ID NO: 553052 - DNA, 15 bp, Homo sapiens
ggaatttacagataa

SEQ ID NO: 553053 - DNA, 15 bp, Homo sapiens
tggaatttacagata

SEQ ID NO: 553054 - DNA, 15 bp, Homo sapiens
ctggaatttacagat

SEQ ID NO: 553055 - DNA, 15 bp, Homo sapiens
tctggaatttacaga

SEQ ID NO: 553056 - DNA, 15 bp, Homo sapiens
gtctggaatttacag

SEQ ID NO: 553057 - DNA, 15 bp, Homo sapiens
cgtctggaatttaca

SEQ ID NO: 553058 - DNA, 15 bp, Homo sapiens
acgtctggaatttac

SEQ ID NO: 553059 - DNA, 15 bp, Homo sapiens
aacgtctggaattta

SEQ ID NO: 553060 - DNA, 15 bp, Homo sapiens
caacgtctggaattt

SEQ ID NO: 553061 - DNA, 15 bp, Homo sapiens
acaacgtctggaatt

SEQ ID NO: 553062 - DNA, 15 bp, Homo sapiens
tacaacgtctggaat

SEQ ID NO: 553063 - DNA, 15 bp, Homo sapiens
atacaacgtctggaa

SEQ ID NO: 553064 - DNA, 15 bp, Homo sapiens
catacaacgtctgga

SEQ ID NO: 553065 - DNA, 15 bp, Homo sapiens
tcatacaacgtctgg

SEQ ID NO: 553066 - DNA, 15 bp, Homo sapiens
ctcatacaacgtctg

SEQ ID NO: 553067 - DNA, 15 bp, Homo sapiens
tctcatacaacgtct

SEQ ID NO: 553068 - DNA, 15 bp, Homo sapiens
ttctcatacaacgtc

SEQ ID NO: 553069 - DNA, 15 bp, Homo sapiens
tttctcatacaacgt

SEQ ID NO: 553070 - DNA, 15 bp, Homo sapiens
ctttctcatacaacg

SEQ ID NO: 553071 - DNA, 15 bp, Homo sapiens
gctttctcatacaac

SEQ ID NO: 553072 - DNA, 15 bp, Homo sapiens
tgctttctcatacaa

SEQ ID NO: 553073 - DNA, 15 bp, Homo sapiens
gtgctttctcataca

SEQ ID NO: 553074 - DNA, 15 bp, Homo sapiens
agtgctttctcatac

SEQ ID NO: 553075 - DNA, 15 bp, Homo sapiens
cagtgctttctcata

SEQ ID NO: 553076 - DNA, 15 bp, Homo sapiens
acagtgctttctcat

SEQ ID NO: 553077 - DNA, 15 bp, Homo sapiens
tacagtgctttctca

SEQ ID NO: 553078 - DNA, 15 bp, Homo sapiens
ttacagtgctttctc

SEQ ID NO: 553079 - DNA, 15 bp, Homo sapiens
tttacagtgctttct

SEQ ID NO: 553080 - DNA, 15 bp, Homo sapiens
ttttacagtgctttc

SEQ ID NO: 553081 - DNA, 15 bp, Homo sapiens
gttttacagtgcttt

SEQ ID NO: 553082 - DNA, 15 bp, Homo sapiens
agttttacagtgctt

SEQ ID NO: 553083 - DNA, 15 bp, Homo sapiens
aagttttacagtgct

SEQ ID NO: 553084 - DNA, 15 bp, Homo sapiens
aaagttttacagtgc

SEQ ID NO: 553085 - DNA, 15 bp, Homo sapiens
aaaagttttacagtg

SEQ ID NO: 553086 - DNA, 15 bp, Homo sapiens
aaaaagttttacagt

SEQ ID NO: 553087 - DNA, 15 bp, Homo sapiens
caaaaagttttacag

SEQ ID NO: 553088 - DNA, 15 bp, Homo sapiens
acaaaaagttttaca

SEQ ID NO: 553089 - DNA, 15 bp, Homo sapiens
aacaaaaagttttac

SEQ ID NO: 553090 - DNA, 15 bp, Homo sapiens
gaacaaaaagtttta

SEQ ID NO: 553091 - DNA, 15 bp, Homo sapiens
agaacaaaaagtttt

SEQ ID NO: 553092 - DNA, 15 bp, Homo sapiens
cagaacaaaaagttt

SEQ ID NO: 553093 - DNA, 15 bp, Homo sapiens
acagaacaaaaagtt

SEQ ID NO: 553094 - DNA, 15 bp, Homo sapiens
aacagaacaaaaagt

SEQ ID NO: 553095 - DNA, 15 bp, Homo sapiens
taacagaacaaaaag

SEQ ID NO: 553096 - DNA, 15 bp, Homo sapiens
ctaacagaacaaaaa

SEQ ID NO: 553097 - DNA, 15 bp, Homo sapiens
gctaacagaacaaaa

SEQ ID NO: 553098 - DNA, 15 bp, Homo sapiens
agctaacagaacaaa

SEQ ID NO: 553099 - DNA, 15 bp, Homo sapiens
cagctaacagaacaa

SEQ ID NO: 553100 - DNA, 15 bp, Homo sapiens
tcagctaacagaaca

SEQ ID NO: 553101 - DNA, 15 bp, Homo sapiens
atcagctaacagaac

SEQ ID NO: 553102 - DNA, 15 bp, Homo sapiens
catcagctaacagaa

SEQ ID NO: 553103 - DNA, 15 bp, Homo sapiens
acatcagctaacaga

SEQ ID NO: 553104 - DNA, 15 bp, Homo sapiens
tacatcagctaacag

SEQ ID NO: 553105 - DNA, 15 bp, Homo sapiens
atacatcagctaaca

SEQ ID NO: 553106 - DNA, 15 bp, Homo sapiens
catacatcagctaac

SEQ ID NO: 553107 - DNA, 15 bp, Homo sapiens
acatacatcagctaa

SEQ ID NO: 553108 - DNA, 15 bp, Homo sapiens
tacatacatcagcta

SEQ ID NO: 553109 - DNA, 15 bp, Homo sapiens
ctacatacatcagct

SEQ ID NO: 553110 - DNA, 15 bp, Homo sapiens
gctacatacatcagc

SEQ ID NO: 553111 - DNA, 15 bp, Homo sapiens
ggctacatacatcag

SEQ ID NO: 553112 - DNA, 15 bp, Homo sapiens
gggctacatacatca

SEQ ID NO: 553113 - DNA, 15 bp, Homo sapiens
ggggctacatacatc

SEQ ID NO: 553114 - DNA, 15 bp, Homo sapiens
gggggctacatacat

SEQ ID NO: 553115 - DNA, 15 bp, Homo sapiens
tgggggctacataca

SEQ ID NO: 553116 - DNA, 15 bp, Homo sapiens
ctgggggctacatac

SEQ ID NO: 553117 - DNA, 15 bp, Homo sapiens
actgggggctacata

SEQ ID NO: 553118 - DNA, 15 bp, Homo sapiens
gactgggggctacat

SEQ ID NO: 553119 - DNA, 15 bp, Homo sapiens
tgactgggggctaca

SEQ ID NO: 553120 - DNA, 15 bp, Homo sapiens
gtgactgggggctac

SEQ ID NO: 553121 - DNA, 15 bp, Homo sapiens
cgtgactgggggcta

SEQ ID NO: 553122 - DNA, 15 bp, Homo sapiens
acgtgactgggggct

SEQ ID NO: 553123 - DNA, 15 bp, Homo sapiens
aacgtgactgggggc

SEQ ID NO: 553124 - DNA, 15 bp, Homo sapiens
gaacgtgactggggg

SEQ ID NO: 553125 - DNA, 15 bp, Homo sapiens
ggaacgtgactgggg

SEQ ID NO: 553126 - DNA, 15 bp, Homo sapiens
aggaacgtgactggg

SEQ ID NO: 553127 - DNA, 15 bp, Homo sapiens
gaggaacgtgactgg

SEQ ID NO: 553128 - DNA, 15 bp, Homo sapiens
tgaggaacgtgactg

SEQ ID NO: 553129 - DNA, 15 bp, Homo sapiens
gtgaggaacgtgact

SEQ ID NO: 553130 - DNA, 15 bp, Homo sapiens
tgtgaggaacgtgac

SEQ ID NO: 553131 - DNA, 15 bp, Homo sapiens
gtgtgaggaacgtga

SEQ ID NO: 553132 - DNA, 15 bp, Homo sapiens
agtgtgaggaacgtg

SEQ ID NO: 553133 - DNA, 15 bp, Homo sapiens
aagtgtgaggaacgt

SEQ ID NO: 553134 - DNA, 15 bp, Homo sapiens
taagtgtgaggaacg

SEQ ID NO: 553135 - DNA, 15 bp, Homo sapiens
gtaagtgtgaggaac

SEQ ID NO: 553136 - DNA, 15 bp, Homo sapiens
agtaagtgtgaggaa

SEQ ID NO: 553137 - DNA, 15 bp, Homo sapiens
gagtaagtgtgagga

SEQ ID NO: 553138 - DNA, 15 bp, Homo sapiens
cgagtaagtgtgagg

SEQ ID NO: 553139 - DNA, 15 bp, Homo sapiens
tcgagtaagtgtgag

SEQ ID NO: 553140 - DNA, 15 bp, Homo sapiens
atcgagtaagtgtga

SEQ ID NO: 553141 - DNA, 15 bp, Homo sapiens
gatcgagtaagtgtg

SEQ ID NO: 553142 - DNA, 15 bp, Homo sapiens
agatcgagtaagtgt

SEQ ID NO: 553143 - DNA, 15 bp, Homo sapiens
tagatcgagtaagtg

SEQ ID NO: 553144 - DNA, 15 bp, Homo sapiens
atagatcgagtaagt

SEQ ID NO: 553145 - DNA, 15 bp, Homo sapiens
aatagatcgagtaag

SEQ ID NO: 553146 - DNA, 15 bp, Homo sapiens
taatagatcgagtaa

SEQ ID NO: 553147 - DNA, 15 bp, Homo sapiens
ataatagatcgagta

SEQ ID NO: 553148 - DNA, 15 bp, Homo sapiens
cataatagatcgagt

SEQ ID NO: 553149 - DNA, 15 bp, Homo sapiens
tcataatagatcgag

SEQ ID NO: 553150 - DNA, 15 bp, Homo sapiens
gtcataatagatcga

SEQ ID NO: 553151 - DNA, 15 bp, Homo sapiens
ggtcataatagatcg

SEQ ID NO: 553152 - DNA, 15 bp, Homo sapiens
gggtcataatagatc

SEQ ID NO: 553153 - DNA, 15 bp, Homo sapiens
agggtcataatagat

SEQ ID NO: 553154 - DNA, 15 bp, Homo sapiens
aagggtcataataga

SEQ ID NO: 553155 - DNA, 15 bp, Homo sapiens
aaagggtcataatag

SEQ ID NO: 553156 - DNA, 15 bp, Homo sapiens
gaaagggtcataata

SEQ ID NO: 553157 - DNA, 15 bp, Homo sapiens
tgaaagggtcataat

SEQ ID NO: 553158 - DNA, 15 bp, Homo sapiens
gtgaaagggtcataa

SEQ ID NO: 553159 - DNA, 15 bp, Homo sapiens
tgtgaaagggtcata

SEQ ID NO: 553160 - DNA, 15 bp, Homo sapiens
atgtgaaagggtcat

SEQ ID NO: 553161 - DNA, 15 bp, Homo sapiens
catgtgaaagggtca

SEQ ID NO: 553162 - DNA, 15 bp, Homo sapiens
ccatgtgaaagggtc

SEQ ID NO: 553163 - DNA, 15 bp, Homo sapiens
tccatgtgaaagggt

SEQ ID NO: 553164 - DNA, 15 bp, Homo sapiens
gtccatgtgaaaggg

SEQ ID NO: 553165 - DNA, 15 bp, Homo sapiens
ggtccatgtgaaagg

SEQ ID NO: 553166 - DNA, 15 bp, Homo sapiens
gggtccatgtgaaag

SEQ ID NO: 553167 - DNA, 15 bp, Homo sapiens
ggggtccatgtgaaa

SEQ ID NO: 553168 - DNA, 15 bp, Homo sapiens
aggggtccatgtgaa

SEQ ID NO: 553169 - DNA, 15 bp, Homo sapiens
aaggggtccatgtga

SEQ ID NO: 553170 - DNA, 15 bp, Homo sapiens
taaggggtccatgtg

SEQ ID NO: 553171 - DNA, 15 bp, Homo sapiens
ctaaggggtccatgt

SEQ ID NO: 553172 - DNA, 15 bp, Homo sapiens
tctaaggggtccatg

SEQ ID NO: 553173 - DNA, 15 bp, Homo sapiens
ctctaaggggtccat

SEQ ID NO: 553174 - DNA, 15 bp, Homo sapiens
actctaaggggtcca

SEQ ID NO: 553175 - DNA, 15 bp, Homo sapiens
aactctaaggggtcc

SEQ ID NO: 553176 - DNA, 15 bp, Homo sapiens
caactctaaggggtc

SEQ ID NO: 553177 - DNA, 15 bp, Homo sapiens
acaactctaaggggt

SEQ ID NO: 553178 - DNA, 15 bp, Homo sapiens
tacaactctaagggg

SEQ ID NO: 553179 - DNA, 15 bp, Homo sapiens
ttacaactctaaggg

SEQ ID NO: 553180 - DNA, 15 bp, Homo sapiens
cttacaactctaagg

SEQ ID NO: 553181 - DNA, 15 bp, Homo sapiens
gcttacaactctaag

SEQ ID NO: 553182 - DNA, 15 bp, Homo sapiens
ggcttacaactctaa

SEQ ID NO: 553183 - DNA, 15 bp, Homo sapiens
gggcttacaactcta

SEQ ID NO: 553184 - DNA, 15 bp, Homo sapiens
agggcttacaactct

SEQ ID NO: 553185 - DNA, 15 bp, Homo sapiens
aagggcttacaactc

SEQ ID NO: 553186 - DNA, 15 bp, Homo sapiens
taagggcttacaact

SEQ ID NO: 553187 - DNA, 15 bp, Homo sapiens
ttaagggcttacaac

SEQ ID NO: 553188 - DNA, 15 bp, Homo sapiens
tttaagggcttacaa

SEQ ID NO: 553189 - DNA, 15 bp, Homo sapiens
ttttaagggcttaca

SEQ ID NO: 553190 - DNA, 15 bp, Homo sapiens
cttttaagggcttac

SEQ ID NO: 553191 - DNA, 15 bp, Homo sapiens
ccttttaagggctta

SEQ ID NO: 553192 - DNA, 15 bp, Homo sapiens
cccttttaagggctt

SEQ ID NO: 553193 - DNA, 15 bp, Homo sapiens
gcccttttaagggct

SEQ ID NO: 553194 - DNA, 15 bp, Homo sapiens
agcccttttaagggc

SEQ ID NO: 553195 - DNA, 15 bp, Homo sapiens
tagcccttttaaggg

SEQ ID NO: 553196 - DNA, 15 bp, Homo sapiens
ctagcccttttaagg

SEQ ID NO: 553197 - DNA, 15 bp, Homo sapiens
cctagcccttttaag

SEQ ID NO: 553198 - DNA, 15 bp, Homo sapiens
tcctagcccttttaa

SEQ ID NO: 553199 - DNA, 15 bp, Homo sapiens
ttcctagccctttta

SEQ ID NO: 553200 - DNA, 15 bp, Homo sapiens
attcctagccctttt

SEQ ID NO: 553201 - DNA, 15 bp, Homo sapiens
aattcctagcccttt

SEQ ID NO: 553202 - DNA, 15 bp, Homo sapiens
aaattcctagccctt

SEQ ID NO: 553203 - DNA, 15 bp, Homo sapiens
gaaattcctagccct

SEQ ID NO: 553204 - DNA, 15 bp, Homo sapiens
agaaattcctagccc

SEQ ID NO: 553205 - DNA, 15 bp, Homo sapiens
aagaaattcctagcc

SEQ ID NO: 553206 - DNA, 15 bp, Homo sapiens
aaagaaattcctagc

SEQ ID NO: 553207 - DNA, 15 bp, Homo sapiens
aaaagaaattcctag

SEQ ID NO: 553208 - DNA, 15 bp, Homo sapiens
aaaaagaaattccta

SEQ ID NO: 553209 - DNA, 15 bp, Homo sapiens
gaaaaagaaattcct

SEQ ID NO: 553210 - DNA, 15 bp, Homo sapiens
cgaaaaagaaattcc

SEQ ID NO: 553211 - DNA, 15 bp, Homo sapiens
ccgaaaaagaaattc

SEQ ID NO: 553212 - DNA, 15 bp, Homo sapiens
cccgaaaaagaaatt

SEQ ID NO: 553213 - DNA, 15 bp, Homo sapiens
ccccgaaaaagaaat

SEQ ID NO: 553214 - DNA, 15 bp, Homo sapiens
tccccgaaaaagaaa

SEQ ID NO: 553215 - DNA, 15 bp, Homo sapiens
ctccccgaaaaagaa

SEQ ID NO: 553216 - DNA, 15 bp, Homo sapiens
gctccccgaaaaaga

SEQ ID NO: 553217 - DNA, 15 bp, Homo sapiens
agctccccgaaaaag

SEQ ID NO: 553218 - DNA, 15 bp, Homo sapiens
gagctccccgaaaaa

SEQ ID NO: 553219 - DNA, 15 bp, Homo sapiens
cgagctccccgaaaa

SEQ ID NO: 553220 - DNA, 15 bp, Homo sapiens
ccgagctccccgaaa

SEQ ID NO: 553221 - DNA, 15 bp, Homo sapiens
gccgagctccccgaa

SEQ ID NO: 553222 - DNA, 15 bp, Homo sapiens
agccgagctccccga

SEQ ID NO: 553223 - DNA, 15 bp, Homo sapiens
gagccgagctccccg

SEQ ID NO: 553224 - DNA, 15 bp, Homo sapiens
agagccgagctcccc

SEQ ID NO: 553225 - DNA, 15 bp, Homo sapiens
aagagccgagctccc

SEQ ID NO: 553226 - DNA, 15 bp, Homo sapiens
taagagccgagctcc

SEQ ID NO: 553227 - DNA, 15 bp, Homo sapiens
ttaagagccgagctc

SEQ ID NO: 553228 - DNA, 15 bp, Homo sapiens
cttaagagccgagct

SEQ ID NO: 553229 - DNA, 15 bp, Homo sapiens
tcttaagagccgagc

SEQ ID NO: 553230 - DNA, 15 bp, Homo sapiens
gtcttaagagccgag

SEQ ID NO: 553231 - DNA, 15 bp, Homo sapiens
cgtcttaagagccga

SEQ ID NO: 553232 - DNA, 15 bp, Homo sapiens
gcgtcttaagagccg

SEQ ID NO: 553233 - DNA, 15 bp, Homo sapiens
cgcgtcttaagagcc

SEQ ID NO: 553234 - DNA, 15 bp, Homo sapiens
tcgcgtcttaagagc

SEQ ID NO: 553235 - DNA, 15 bp, Homo sapiens
ctcgcgtcttaagag

SEQ ID NO: 553236 - DNA, 15 bp, Homo sapiens
actcgcgtcttaaga

SEQ ID NO: 553237 - DNA, 15 bp, Homo sapiens
gactcgcgtcttaag

SEQ ID NO: 553238 - DNA, 15 bp, Homo sapiens
agactcgcgtcttaa

SEQ ID NO: 553239 - DNA, 15 bp, Homo sapiens
cagactcgcgtctta

SEQ ID NO: 553240 - DNA, 15 bp, Homo sapiens
gcagactcgcgtctt

SEQ ID NO: 553241 - DNA, 15 bp, Homo sapiens
ggcagactcgcgtct

SEQ ID NO: 553242 - DNA, 15 bp, Homo sapiens
cggcagactcgcgtc

SEQ ID NO: 553243 - DNA, 15 bp, Homo sapiens
tcggcagactcgcgt

SEQ ID NO: 553244 - DNA, 15 bp, Homo sapiens
atcggcagactcgcg

SEQ ID NO: 553245 - DNA, 15 bp, Homo sapiens
catcggcagactcgc

SEQ ID NO: 553246 - DNA, 15 bp, Homo sapiens
gcatcggcagactcg

SEQ ID NO: 553247 - DNA, 15 bp, Homo sapiens
agcatcggcagactc

SEQ ID NO: 553248 - DNA, 15 bp, Homo sapiens
gagcatcggcagact

SEQ ID NO: 553249 - DNA, 15 bp, Homo sapiens
ggagcatcggcagac

SEQ ID NO: 553250 - DNA, 15 bp, Homo sapiens
gggagcatcggcaga

SEQ ID NO: 553251 - DNA, 15 bp, Homo sapiens
cgggagcatcggcag

SEQ ID NO: 553252 - DNA, 15 bp, Homo sapiens
ccgggagcatcggca

SEQ ID NO: 553253 - DNA, 15 bp, Homo sapiens
gccgggagcatcggc

SEQ ID NO: 553254 - DNA, 15 bp, Homo sapiens
ggccgggagcatcgg

SEQ ID NO: 553255 - DNA, 15 bp, Homo sapiens
cggccgggagcatcg

SEQ ID NO: 553256 - DNA, 15 bp, Homo sapiens
tcggccgggagcatc

SEQ ID NO: 553257 - DNA, 15 bp, Homo sapiens
ttcggccgggagcat

SEQ ID NO: 553258 - DNA, 15 bp, Homo sapiens
attcggccgggagca

SEQ ID NO: 553259 - DNA, 15 bp, Homo sapiens
tattcggccgggagc

SEQ ID NO: 553260 - DNA, 15 bp, Homo sapiens
ttattcggccgggag

SEQ ID NO: 553261 - DNA, 15 bp, Homo sapiens
tttattcggccggga

SEQ ID NO: 553262 - DNA, 15 bp, Homo sapiens
ttttattcggccggg

SEQ ID NO: 553263 - DNA, 15 bp, Homo sapiens
tttttattcggccgg

SEQ ID NO: 553264 - DNA, 15 bp, Homo sapiens
gtttttattcggccg

SEQ ID NO: 553265 - DNA, 15 bp, Homo sapiens
ggtttttattcggcc

SEQ ID NO: 553266 - DNA, 15 bp, Homo sapiens
aggtttttattcggc

SEQ ID NO: 553267 - DNA, 15 bp, Homo sapiens
gaggtttttattcgg

SEQ ID NO: 553268 - DNA, 15 bp, Homo sapiens
agaggtttttattcg

SEQ ID NO: 553269 - DNA, 15 bp, Homo sapiens
aagaggtttttattc

SEQ ID NO: 553270 - DNA, 15 bp, Homo sapiens
gaagaggtttttatt

SEQ ID NO: 553271 - DNA, 15 bp, Homo sapiens
ggaagaggtttttat

SEQ ID NO: 553272 - DNA, 15 bp, Homo sapiens
aggaagaggttttta

SEQ ID NO: 553273 - DNA, 15 bp, Homo sapiens
aaggaagaggttttt

SEQ ID NO: 553274 - DNA, 15 bp, Homo sapiens
gaaggaagaggtttt

SEQ ID NO: 553275 - DNA, 15 bp, Homo sapiens
agaaggaagaggttt

SEQ ID NO: 553276 - DNA, 15 bp, Homo sapiens
aagaaggaagaggtt

SEQ ID NO: 553277 - DNA, 15 bp, Homo sapiens
aaagaaggaagaggt

SEQ ID NO: 553278 - DNA, 15 bp, Homo sapiens
taaagaaggaagagg

SEQ ID NO: 553279 - DNA, 15 bp, Homo sapiens
ttaaagaaggaagag

SEQ ID NO: 553280 - DNA, 15 bp, Homo sapiens
attaaagaaggaaga

SEQ ID NO: 553281 - DNA, 15 bp, Homo sapiens
gattaaagaaggaag

SEQ ID NO: 553282 - DNA, 15 bp, Homo sapiens
ggattaaagaaggaa

SEQ ID NO: 553283 - DNA, 15 bp, Homo sapiens
cggattaaagaagga

SEQ ID NO: 553284 - DNA, 15 bp, Homo sapiens
ccggattaaagaagg

SEQ ID NO: 553285 - DNA, 15 bp, Homo sapiens
accggattaaagaag

SEQ ID NO: 553286 - DNA, 15 bp, Homo sapiens
caccggattaaagaa

SEQ ID NO: 553287 - DNA, 15 bp, Homo sapiens
acaccggattaaaga

SEQ ID NO: 553288 - DNA, 15 bp, Homo sapiens
gacaccggattaaag

SEQ ID NO: 553289 - DNA, 15 bp, Homo sapiens
agacaccggattaaa

SEQ ID NO: 553290 - DNA, 15 bp, Homo sapiens
cagacaccggattaa

SEQ ID NO: 553291 - DNA, 15 bp, Homo sapiens
tcagacaccggatta

SEQ ID NO: 553292 - DNA, 15 bp, Homo sapiens
ctcagacaccggatt

SEQ ID NO: 553293 - DNA, 15 bp, Homo sapiens
cctcagacaccggat

SEQ ID NO: 553294 - DNA, 15 bp, Homo sapiens
tcctcagacaccgga

SEQ ID NO: 553295 - DNA, 15 bp, Homo sapiens
ctcctcagacaccgg

SEQ ID NO: 553296 - DNA, 15 bp, Homo sapiens
actcctcagacaccg

SEQ ID NO: 553297 - DNA, 15 bp, Homo sapiens
aactcctcagacacc

SEQ ID NO: 553298 - DNA, 15 bp, Homo sapiens
aaactcctcagacac

SEQ ID NO: 553299 - DNA, 15 bp, Homo sapiens
aaaactcctcagaca

SEQ ID NO: 553300 - DNA, 15 bp, Homo sapiens
caaaactcctcagac

SEQ ID NO: 553301 - DNA, 15 bp, Homo sapiens
acaaaactcctcaga

SEQ ID NO: 553302 - DNA, 15 bp, Homo sapiens
gacaaaactcctcag

SEQ ID NO: 553303 - DNA, 15 bp, Homo sapiens
agacaaaactcctca

SEQ ID NO: 553304 - DNA, 15 bp, Homo sapiens
cagacaaaactcctc

SEQ ID NO: 553305 - DNA, 15 bp, Homo sapiens
acagacaaaactcct

SEQ ID NO: 553306 - DNA, 15 bp, Homo sapiens
cacagacaaaactcc

SEQ ID NO: 553307 - DNA, 15 bp, Homo sapiens
tcacagacaaaactc

SEQ ID NO: 553308 - DNA, 15 bp, Homo sapiens
gtcacagacaaaact

SEQ ID NO: 553309 - DNA, 15 bp, Homo sapiens
agtcacagacaaaac

SEQ ID NO: 553310 - DNA, 15 bp, Homo sapiens
aagtcacagacaaaa

SEQ ID NO: 553311 - DNA, 15 bp, Homo sapiens
caagtcacagacaaa

SEQ ID NO: 553312 - DNA, 15 bp, Homo sapiens
acaagtcacagacaa

SEQ ID NO: 553313 - DNA, 15 bp, Homo sapiens
gacaagtcacagaca

SEQ ID NO: 553314 - DNA, 15 bp, Homo sapiens
ggacaagtcacagac

SEQ ID NO: 553315 - DNA, 15 bp, Homo sapiens
aggacaagtcacaga

SEQ ID NO: 553316 - DNA, 15 bp, Homo sapiens
caggacaagtcacag

SEQ ID NO: 553317 - DNA, 15 bp, Homo sapiens
gcaggacaagtcaca

SEQ ID NO: 553318 - DNA, 15 bp, Homo sapiens
agcaggacaagtcac

SEQ ID NO: 553319 - DNA, 15 bp, Homo sapiens
tagcaggacaagtca

SEQ ID NO: 553320 - DNA, 15 bp, Homo sapiens
gtagcaggacaagtc

SEQ ID NO: 553321 - DNA, 15 bp, Homo sapiens
tgtagcaggacaagt

SEQ ID NO: 553322 - DNA, 15 bp, Homo sapiens
ctgtagcaggacaag

SEQ ID NO: 553323 - DNA, 15 bp, Homo sapiens
actgtagcaggacaa

SEQ ID NO: 553324 - DNA, 15 bp, Homo sapiens
aactgtagcaggaca

SEQ ID NO: 553325 - DNA, 15 bp, Homo sapiens
caactgtagcaggac

SEQ ID NO: 553326 - DNA, 15 bp, Homo sapiens
ccaactgtagcagga

SEQ ID NO: 553327 - DNA, 15 bp, Homo sapiens
tccaactgtagcagg

SEQ ID NO: 553328 - DNA, 15 bp, Homo sapiens
atccaactgtagcag

SEQ ID NO: 553329 - DNA, 15 bp, Homo sapiens
catccaactgtagca

SEQ ID NO: 553330 - DNA, 15 bp, Homo sapiens
acatccaactgtagc

SEQ ID NO: 553331 - DNA, 15 bp, Homo sapiens
cacatccaactgtag

SEQ ID NO: 553332 - DNA, 15 bp, Homo sapiens
ccacatccaactgta

SEQ ID NO: 553333 - DNA, 15 bp, Homo sapiens
cccacatccaactgt

SEQ ID NO: 553334 - DNA, 15 bp, Homo sapiens
ccccacatccaactg

SEQ ID NO: 553335 - DNA, 15 bp, Homo sapiens
gccccacatccaact

SEQ ID NO: 553336 - DNA, 15 bp, Homo sapiens
ggccccacatccaac

SEQ ID NO: 553337 - DNA, 15 bp, Homo sapiens
tggccccacatccaa

SEQ ID NO: 553338 - DNA, 15 bp, Homo sapiens
ctggccccacatcca

SEQ ID NO: 553339 - DNA, 15 bp, Homo sapiens
tctggccccacatcc

SEQ ID NO: 553340 - DNA, 15 bp, Homo sapiens
ctctggccccacatc

SEQ ID NO: 553341 - DNA, 15 bp, Homo sapiens
tctctggccccacat

SEQ ID NO: 553342 - DNA, 15 bp, Homo sapiens
ctctctggccccaca

SEQ ID NO: 553343 - DNA, 15 bp, Homo sapiens
tctctctggccccac

SEQ ID NO: 553344 - DNA, 15 bp, Homo sapiens
ttctctctggcccca

SEQ ID NO: 553345 - DNA, 15 bp, Homo sapiens
gttctctctggcccc

SEQ ID NO: 553346 - DNA, 15 bp, Homo sapiens
tgttctctctggccc

SEQ ID NO: 553347 - DNA, 15 bp, Homo sapiens
gtgttctctctggcc

SEQ ID NO: 553348 - DNA, 15 bp, Homo sapiens
tgtgttctctctggc

SEQ ID NO: 553349 - DNA, 15 bp, Homo sapiens
ctgtgttctctctgg

SEQ ID NO: 553350 - DNA, 15 bp, Homo sapiens
cctgtgttctctctg

SEQ ID NO: 553351 - DNA, 15 bp, Homo sapiens
ccctgtgttctctct

SEQ ID NO: 553352 - DNA, 15 bp, Homo sapiens
cccctgtgttctctc

SEQ ID NO: 553353 - DNA, 15 bp, Homo sapiens
gcccctgtgttctct

SEQ ID NO: 553354 - DNA, 15 bp, Homo sapiens
ggcccctgtgttctc

SEQ ID NO: 553355 - DNA, 15 bp, Homo sapiens
tggcccctgtgttct

SEQ ID NO: 553356 - DNA, 15 bp, Homo sapiens
ctggcccctgtgttc

SEQ ID NO: 553357 - DNA, 15 bp, Homo sapiens
tctggcccctgtgtt

SEQ ID NO: 553358 - DNA, 15 bp, Homo sapiens
gtctggcccctgtgt

SEQ ID NO: 553359 - DNA, 15 bp, Homo sapiens
ggtctggcccctgtg

SEQ ID NO: 553360 - DNA, 15 bp, Homo sapiens
tggtctggcccctgt

SEQ ID NO: 553361 - DNA, 15 bp, Homo sapiens
ctggtctggcccctg

SEQ ID NO: 553362 - DNA, 15 bp, Homo sapiens
cctggtctggcccct

SEQ ID NO: 553363 - DNA, 15 bp, Homo sapiens
gcctggtctggcccc

SEQ ID NO: 553364 - DNA, 15 bp, Homo sapiens
tgcctggtctggccc

SEQ ID NO: 553365 - DNA, 15 bp, Homo sapiens
ctgcctggtctggcc

SEQ ID NO: 553366 - DNA, 15 bp, Homo sapiens
tctgcctggtctggc

SEQ ID NO: 553367 - DNA, 15 bp, Homo sapiens
ctctgcctggtctgg

SEQ ID NO: 553368 - DNA, 15 bp, Homo sapiens
cctctgcctggtctg

SEQ ID NO: 553369 - DNA, 15 bp, Homo sapiens
ccctctgcctggtct

SEQ ID NO: 553370 - DNA, 15 bp, Homo sapiens
cccctctgcctggtc

SEQ ID NO: 553371 - DNA, 15 bp, Homo sapiens
gcccctctgcctggt

SEQ ID NO: 553372 - DNA, 15 bp, Homo sapiens
agcccctctgcctgg

SEQ ID NO: 553373 - DNA, 15 bp, Homo sapiens
aagcccctctgcctg

SEQ ID NO: 553374 - DNA, 15 bp, Homo sapiens
caagcccctctgcct

SEQ ID NO: 553375 - DNA, 15 bp, Homo sapiens
acaagcccctctgcc

SEQ ID NO: 553376 - DNA, 15 bp, Homo sapiens
tacaagcccctctgc

SEQ ID NO: 553377 - DNA, 15 bp, Homo sapiens
ctacaagcccctctg

SEQ ID NO: 553378 - DNA, 15 bp, Homo sapiens
cctacaagcccctct

SEQ ID NO: 553379 - DNA, 15 bp, Homo sapiens
gcctacaagcccctc

SEQ ID NO: 553380 - DNA, 15 bp, Homo sapiens
ggcctacaagcccct

SEQ ID NO: 553381 - DNA, 15 bp, Homo sapiens
tggcctacaagcccc

SEQ ID NO: 553382 - DNA, 15 bp, Homo sapiens
ttggcctacaagccc

SEQ ID NO: 553383 - DNA, 15 bp, Homo sapiens
attggcctacaagcc

SEQ ID NO: 553384 - DNA, 15 bp, Homo sapiens
cattggcctacaagc

SEQ ID NO: 553385 - DNA, 15 bp, Homo sapiens
acattggcctacaag

SEQ ID NO: 553386 - DNA, 15 bp, Homo sapiens
aacattggcctacaa

SEQ ID NO: 553387 - DNA, 15 bp, Homo sapiens
gaacattggcctaca

SEQ ID NO: 553388 - DNA, 15 bp, Homo sapiens
cgaacattggcctac

SEQ ID NO: 553389 - DNA, 15 bp, Homo sapiens
ccgaacattggccta

SEQ ID NO: 553390 - DNA, 15 bp, Homo sapiens
tccgaacattggcct

SEQ ID NO: 553391 - DNA, 15 bp, Homo sapiens
gtccgaacattggcc

SEQ ID NO: 553392 - DNA, 15 bp, Homo sapiens
cgtccgaacattggc

SEQ ID NO: 553393 - DNA, 15 bp, Homo sapiens
ccgtccgaacattgg

SEQ ID NO: 553394 - DNA, 15 bp, Homo sapiens
accgtccgaacattg

SEQ ID NO: 553395 - DNA, 15 bp, Homo sapiens
caccgtccgaacatt

SEQ ID NO: 553396 - DNA, 15 bp, Homo sapiens
ccaccgtccgaacat

SEQ ID NO: 553397 - DNA, 15 bp, Homo sapiens
gccaccgtccgaaca

SEQ ID NO: 553398 - DNA, 15 bp, Homo sapiens
agccaccgtccgaac

SEQ ID NO: 553399 - DNA, 15 bp, Homo sapiens
gagccaccgtccgaa

SEQ ID NO: 553400 - DNA, 15 bp, Homo sapiens
cgagccaccgtccga

SEQ ID NO: 553401 - DNA, 15 bp, Homo sapiens
acgagccaccgtccg

SEQ ID NO: 553402 - DNA, 15 bp, Homo sapiens
tacgagccaccgtcc

SEQ ID NO: 553403 - DNA, 15 bp, Homo sapiens
atacgagccaccgtc

SEQ ID NO: 553404 - DNA, 15 bp, Homo sapiens
catacgagccaccgt

SEQ ID NO: 553405 - DNA, 15 bp, Homo sapiens
acatacgagccaccg

SEQ ID NO: 553406 - DNA, 15 bp, Homo sapiens
aacatacgagccacc

SEQ ID NO: 553407 - DNA, 15 bp, Homo sapiens
taacatacgagccac

SEQ ID NO: 553408 - DNA, 15 bp, Homo sapiens
ataacatacgagcca

SEQ ID NO: 553409 - DNA, 15 bp, Homo sapiens
aataacatacgagcc

SEQ ID NO: 553410 - DNA, 15 bp, Homo sapiens
aaataacatacgagc

SEQ ID NO: 553411 - DNA, 15 bp, Homo sapiens
aaaataacatacgag

SEQ ID NO: 553412 - DNA, 15 bp, Homo sapiens
gaaaataacatacga

SEQ ID NO: 553413 - DNA, 15 bp, Homo sapiens
tgaaaataacatacg

SEQ ID NO: 553414 - DNA, 15 bp, Homo sapiens
ttgaaaataacatac

SEQ ID NO: 553415 - DNA, 15 bp, Homo sapiens
cttgaaaataacata

SEQ ID NO: 553416 - DNA, 15 bp, Homo sapiens
tcttgaaaataacat

SEQ ID NO: 553417 - DNA, 15 bp, Homo sapiens
ttcttgaaaataaca

SEQ ID NO: 553418 - DNA, 15 bp, Homo sapiens
tttcttgaaaataac

SEQ ID NO: 553419 - DNA, 15 bp, Homo sapiens
atttcttgaaaataa

SEQ ID NO: 553420 - DNA, 15 bp, Homo sapiens
tatttcttgaaaata

SEQ ID NO: 553421 - DNA, 15 bp, Homo sapiens
ttatttcttgaaaat

SEQ ID NO: 553422 - DNA, 15 bp, Homo sapiens
gttatttcttgaaaa

SEQ ID NO: 553423 - DNA, 15 bp, Homo sapiens
tgttatttcttgaaa

SEQ ID NO: 553424 - DNA, 15 bp, Homo sapiens
atgttatttcttgaa

SEQ ID NO: 553425 - DNA, 15 bp, Homo sapiens
catgttatttcttga

SEQ ID NO: 553426 - DNA, 15 bp, Homo sapiens
acatgttatttcttg

SEQ ID NO: 553427 - DNA, 15 bp, Homo sapiens
aacatgttatttctt

SEQ ID NO: 553428 - DNA, 15 bp, Homo sapiens
gaacatgttatttct

SEQ ID NO: 553429 - DNA, 15 bp, Homo sapiens
tgaacatgttatttc

SEQ ID NO: 553430 - DNA, 15 bp, Homo sapiens
gtgaacatgttattt

SEQ ID NO: 553431 - DNA, 15 bp, Homo sapiens
tgtgaacatgttatt

SEQ ID NO: 553432 - DNA, 15 bp, Homo sapiens
ttgtgaacatgttat

SEQ ID NO: 553433 - DNA, 15 bp, Homo sapiens
attgtgaacatgtta

SEQ ID NO: 553434 - DNA, 15 bp, Homo sapiens
cattgtgaacatgtt

SEQ ID NO: 553435 - DNA, 15 bp, Homo sapiens
tcattgtgaacatgt

SEQ ID NO: 553436 - DNA, 15 bp, Homo sapiens
gtcattgtgaacatg

SEQ ID NO: 553437 - DNA, 15 bp, Homo sapiens
tgtcattgtgaacat

SEQ ID NO: 553438 - DNA, 15 bp, Homo sapiens
ctgtcattgtgaaca

SEQ ID NO: 553439 - DNA, 15 bp, Homo sapiens
actgtcattgtgaac

SEQ ID NO: 553440 - DNA, 15 bp, Homo sapiens
aactgtcattgtgaa

SEQ ID NO: 553441 - DNA, 15 bp, Homo sapiens
taactgtcattgtga

SEQ ID NO: 553442 - DNA, 15 bp, Homo sapiens
ttaactgtcattgtg

SEQ ID NO: 553443 - DNA, 15 bp, Homo sapiens
tttaactgtcattgt

SEQ ID NO: 553444 - DNA, 15 bp, Homo sapiens
ctttaactgtcattg

SEQ ID NO: 553445 - DNA, 15 bp, Homo sapiens
gctttaactgtcatt

SEQ ID NO: 553446 - DNA, 15 bp, Homo sapiens
agctttaactgtcat

SEQ ID NO: 553447 - DNA, 15 bp, Homo sapiens
aagctttaactgtca

SEQ ID NO: 553448 - DNA, 15 bp, Homo sapiens
aaagctttaactgtc

SEQ ID NO: 553449 - DNA, 15 bp, Homo sapiens
gaaagctttaactgt

SEQ ID NO: 553450 - DNA, 15 bp, Homo sapiens
ggaaagctttaactg

SEQ ID NO: 553451 - DNA, 15 bp, Homo sapiens
gggaaagctttaact

SEQ ID NO: 553452 - DNA, 15 bp, Homo sapiens
ggggaaagctttaac

SEQ ID NO: 553453 - DNA, 15 bp, Homo sapiens
tggggaaagctttaa

SEQ ID NO: 553454 - DNA, 15 bp, Homo sapiens
gtggggaaagcttta

SEQ ID NO: 553455 - DNA, 15 bp, Homo sapiens
tgtggggaaagcttt

SEQ ID NO: 553456 - DNA, 15 bp, Homo sapiens
atgtggggaaagctt

SEQ ID NO: 553457 - DNA, 15 bp, Homo sapiens
gatgtggggaaagct

SEQ ID NO: 553458 - DNA, 15 bp, Homo sapiens
ggatgtggggaaagc

SEQ ID NO: 553459 - DNA, 15 bp, Homo sapiens
gggatgtggggaaag

SEQ ID NO: 553460 - DNA, 15 bp, Homo sapiens
ggggatgtggggaaa

SEQ ID NO: 553461 - DNA, 15 bp, Homo sapiens
tggggatgtggggaa

SEQ ID NO: 553462 - DNA, 15 bp, Homo sapiens
ctggggatgtgggga

SEQ ID NO: 553463 - DNA, 15 bp, Homo sapiens
gctggggatgtgggg

SEQ ID NO: 553464 - DNA, 15 bp, Homo sapiens
ggctggggatgtggg

SEQ ID NO: 553465 - DNA, 15 bp, Homo sapiens
gggctggggatgtgg

SEQ ID NO: 553466 - DNA, 15 bp, Homo sapiens
ggggctggggatgtg

SEQ ID NO: 553467 - DNA, 15 bp, Homo sapiens
gggggctggggatgt

SEQ ID NO: 553468 - DNA, 15 bp, Homo sapiens
tgggggctggggatg

SEQ ID NO: 553469 - DNA, 15 bp, Homo sapiens
ctgggggctggggat

SEQ ID NO: 553470 - DNA, 15 bp, Homo sapiens
gctgggggctgggga

SEQ ID NO: 553471 - DNA, 15 bp, Homo sapiens
ggctgggggctgggg

SEQ ID NO: 553472 - DNA, 15 bp, Homo sapiens
gggctgggggctggg

SEQ ID NO: 553473 - DNA, 15 bp, Homo sapiens
agggctgggggctgg

SEQ ID NO: 553474 - DNA, 15 bp, Homo sapiens
gagggctgggggctg

SEQ ID NO: 553475 - DNA, 15 bp, Homo sapiens
agagggctgggggct

SEQ ID NO: 553476 - DNA, 15 bp, Homo sapiens
gagagggctgggggc

SEQ ID NO: 553477 - DNA, 15 bp, Homo sapiens
ggagagggctggggg

SEQ ID NO: 553478 - DNA, 15 bp, Homo sapiens
aggagagggctgggg

SEQ ID NO: 553479 - DNA, 15 bp, Homo sapiens
caggagagggctggg

SEQ ID NO: 553480 - DNA, 15 bp, Homo sapiens
tcaggagagggctgg

SEQ ID NO: 553481 - DNA, 15 bp, Homo sapiens
ctcaggagagggctg

SEQ ID NO: 553482 - DNA, 15 bp, Homo sapiens
tctcaggagagggct

SEQ ID NO: 553483 - DNA, 15 bp, Homo sapiens
atctcaggagagggc

SEQ ID NO: 553484 - DNA, 15 bp, Homo sapiens
aatctcaggagaggg

SEQ ID NO: 553485 - DNA, 15 bp, Homo sapiens
caatctcaggagagg

SEQ ID NO: 553486 - DNA, 15 bp, Homo sapiens
acaatctcaggagag

SEQ ID NO: 553487 - DNA, 15 bp, Homo sapiens
aacaatctcaggaga

SEQ ID NO: 553488 - DNA, 15 bp, Homo sapiens
aaacaatctcaggag

SEQ ID NO: 553489 - DNA, 15 bp, Homo sapiens
caaacaatctcagga

SEQ ID NO: 553490 - DNA, 15 bp, Homo sapiens
gcaaacaatctcagg

SEQ ID NO: 553491 - DNA, 15 bp, Homo sapiens
tgcaaacaatctcag

SEQ ID NO: 553492 - DNA, 15 bp, Homo sapiens
ctgcaaacaatctca

SEQ ID NO: 553493 - DNA, 15 bp, Homo sapiens
cctgcaaacaatctc

SEQ ID NO: 553494 - DNA, 15 bp, Homo sapiens
acctgcaaacaatct

SEQ ID NO: 553495 - DNA, 15 bp, Homo sapiens
tacctgcaaacaatc

SEQ ID NO: 553496 - DNA, 15 bp, Homo sapiens
atacctgcaaacaat

SEQ ID NO: 553497 - DNA, 15 bp, Homo sapiens
gatacctgcaaacaa

SEQ ID NO: 553498 - DNA, 15 bp, Homo sapiens
tgatacctgcaaaca

SEQ ID NO: 553499 - DNA, 15 bp, Homo sapiens
atgatacctgcaaac

SEQ ID NO: 553500 - DNA, 15 bp, Homo sapiens
aatgatacctgcaaa

SEQ ID NO: 553501 - DNA, 15 bp, Homo sapiens
aaatgatacctgcaa

SEQ ID NO: 553502 - DNA, 15 bp, Homo sapiens
gaaatgatacctgca

SEQ ID NO: 553503 - DNA, 15 bp, Homo sapiens
ggaaatgatacctgc

SEQ ID NO: 553504 - DNA, 15 bp, Homo sapiens
gggaaatgatacctg

SEQ ID NO: 553505 - DNA, 15 bp, Homo sapiens
agggaaatgatacct

SEQ ID NO: 553506 - DNA, 15 bp, Homo sapiens
cagggaaatgatacc

SEQ ID NO: 553507 - DNA, 15 bp, Homo sapiens
tcagggaaatgatac

SEQ ID NO: 553508 - DNA, 15 bp, Homo sapiens
ttcagggaaatgata

SEQ ID NO: 553509 - DNA, 15 bp, Homo sapiens
attcagggaaatgat

SEQ ID NO: 553510 - DNA, 15 bp, Homo sapiens
cattcagggaaatga

SEQ ID NO: 553511 - DNA, 15 bp, Homo sapiens
acattcagggaaatg

SEQ ID NO: 553512 - DNA, 15 bp, Homo sapiens
aacattcagggaaat

SEQ ID NO: 553513 - DNA, 15 bp, Homo sapiens
aaacattcagggaaa

SEQ ID NO: 553514 - DNA, 15 bp, Homo sapiens
aaaacattcagggaa

SEQ ID NO: 553515 - DNA, 15 bp, Homo sapiens
aaaaacattcaggga

SEQ ID NO: 553516 - DNA, 15 bp, Homo sapiens
gaaaaacattcaggg

SEQ ID NO: 553517 - DNA, 15 bp, Homo sapiens
agaaaaacattcagg

SEQ ID NO: 553518 - DNA, 15 bp, Homo sapiens
tagaaaaacattcag

SEQ ID NO: 553519 - DNA, 15 bp, Homo sapiens
gtagaaaaacattca

SEQ ID NO: 553520 - DNA, 15 bp, Homo sapiens
tgtagaaaaacattc

SEQ ID NO: 553521 - DNA, 15 bp, Homo sapiens
atgtagaaaaacatt

SEQ ID NO: 553522 - DNA, 15 bp, Homo sapiens
aatgtagaaaaacat

SEQ ID NO: 553523 - DNA, 15 bp, Homo sapiens
aaatgtagaaaaaca

SEQ ID NO: 553524 - DNA, 15 bp, Homo sapiens
gaaatgtagaaaaac

SEQ ID NO: 553525 - DNA, 15 bp, Homo sapiens
ggaaatgtagaaaaa

SEQ ID NO: 553526 - DNA, 15 bp, Homo sapiens
tggaaatgtagaaaa

SEQ ID NO: 553527 - DNA, 15 bp, Homo sapiens
gtggaaatgtagaaa

SEQ ID NO: 553528 - DNA, 15 bp, Homo sapiens
tgtggaaatgtagaa

SEQ ID NO: 553529 - DNA, 15 bp, Homo sapiens
atgtggaaatgtaga

SEQ ID NO: 553530 - DNA, 15 bp, Homo sapiens
catgtggaaatgtag

SEQ ID NO: 553531 - DNA, 15 bp, Homo sapiens
ccatgtggaaatgta

SEQ ID NO: 553532 - DNA, 15 bp, Homo sapiens
cccatgtggaaatgt

SEQ ID NO: 553533 - DNA, 15 bp, Homo sapiens
acccatgtggaaatg

SEQ ID NO: 553534 - DNA, 15 bp, Homo sapiens
aacccatgtggaaat

SEQ ID NO: 553535 - DNA, 15 bp, Homo sapiens
aaacccatgtggaaa

SEQ ID NO: 553536 - DNA, 15 bp, Homo sapiens
caaacccatgtggaa

SEQ ID NO: 553537 - DNA, 15 bp, Homo sapiens
acaaacccatgtgga

SEQ ID NO: 553538 - DNA, 15 bp, Homo sapiens
gacaaacccatgtgg

SEQ ID NO: 553539 - DNA, 15 bp, Homo sapiens
agacaaacccatgtg

SEQ ID NO: 553540 - DNA, 15 bp, Homo sapiens
aagacaaacccatgt

SEQ ID NO: 553541 - DNA, 15 bp, Homo sapiens
gaagacaaacccatg

SEQ ID NO: 553542 - DNA, 15 bp, Homo sapiens
tgaagacaaacccat

SEQ ID NO: 553543 - DNA, 15 bp, Homo sapiens
ctgaagacaaaccca

SEQ ID NO: 553544 - DNA, 15 bp, Homo sapiens
tctgaagacaaaccc

SEQ ID NO: 553545 - DNA, 15 bp, Homo sapiens
ttctgaagacaaacc

SEQ ID NO: 553546 - DNA, 15 bp, Homo sapiens
tttctgaagacaaac

SEQ ID NO: 553547 - DNA, 15 bp, Homo sapiens
ctttctgaagacaaa

SEQ ID NO: 553548 - DNA, 15 bp, Homo sapiens
tctttctgaagacaa

SEQ ID NO: 553549 - DNA, 15 bp, Homo sapiens
ttctttctgaagaca

SEQ ID NO: 553550 - DNA, 15 bp, Homo sapiens
attctttctgaagac

SEQ ID NO: 553551 - DNA, 15 bp, Homo sapiens
tattctttctgaaga

SEQ ID NO: 553552 - DNA, 15 bp, Homo sapiens
atattctttctgaag

SEQ ID NO: 553553 - DNA, 15 bp, Homo sapiens
tatattctttctgaa

SEQ ID NO: 553554 - DNA, 15 bp, Homo sapiens
ctatattctttctga

SEQ ID NO: 553555 - DNA, 15 bp, Homo sapiens
tctatattctttctg

SEQ ID NO: 553556 - DNA, 15 bp, Homo sapiens
ctctatattctttct

SEQ ID NO: 553557 - DNA, 15 bp, Homo sapiens
actctatattctttc

SEQ ID NO: 553558 - DNA, 15 bp, Homo sapiens
tactctatattcttt

SEQ ID NO: 553559 - DNA, 15 bp, Homo sapiens
atactctatattctt

SEQ ID NO: 553560 - DNA, 15 bp, Homo sapiens
aatactctatattct

SEQ ID NO: 553561 - DNA, 15 bp, Homo sapiens
taatactctatattc

SEQ ID NO: 553562 - DNA, 15 bp, Homo sapiens
ataatactctatatt

SEQ ID NO: 553563 - DNA, 15 bp, Homo sapiens
aataatactctatat

SEQ ID NO: 553564 - DNA, 15 bp, Homo sapiens
aaataatactctata

SEQ ID NO: 553565 - DNA, 15 bp, Homo sapiens
gaaataatactctat

SEQ ID NO: 553566 - DNA, 15 bp, Homo sapiens
tgaaataatactcta

SEQ ID NO: 553567 - DNA, 15 bp, Homo sapiens
atgaaataatactct

SEQ ID NO: 553568 - DNA, 15 bp, Homo sapiens
catgaaataatactc

SEQ ID NO: 553569 - DNA, 15 bp, Homo sapiens
acatgaaataatact

SEQ ID NO: 553570 - DNA, 15 bp, Homo sapiens
cacatgaaataatac

SEQ ID NO: 553571 - DNA, 15 bp, Homo sapiens
acacatgaaataata

SEQ ID NO: 553572 - DNA, 15 bp, Homo sapiens
aacacatgaaataat

SEQ ID NO: 553573 - DNA, 15 bp, Homo sapiens
aaacacatgaaataa

SEQ ID NO: 553574 - DNA, 15 bp, Homo sapiens
caaacacatgaaata

SEQ ID NO: 553575 - DNA, 15 bp, Homo sapiens
ccaaacacatgaaat

SEQ ID NO: 553576 - DNA, 15 bp, Homo sapiens
tccaaacacatgaaa

SEQ ID NO: 553577 - DNA, 15 bp, Homo sapiens
ttccaaacacatgaa

SEQ ID NO: 553578 - DNA, 15 bp, Homo sapiens
tttccaaacacatga

SEQ ID NO: 553579 - DNA, 15 bp, Homo sapiens
ttttccaaacacatg

SEQ ID NO: 553580 - DNA, 15 bp, Homo sapiens
attttccaaacacat

SEQ ID NO: 553581 - DNA, 15 bp, Homo sapiens
aattttccaaacaca

SEQ ID NO: 553582 - DNA, 15 bp, Homo sapiens
gaattttccaaacac

SEQ ID NO: 553583 - DNA, 15 bp, Homo sapiens
tgaattttccaaaca

SEQ ID NO: 553584 - DNA, 15 bp, Homo sapiens
gtgaattttccaaac

SEQ ID NO: 553585 - DNA, 15 bp, Homo sapiens
tgtgaattttccaaa

SEQ ID NO: 553586 - DNA, 15 bp, Homo sapiens
atgtgaattttccaa

SEQ ID NO: 553587 - DNA, 15 bp, Homo sapiens
gatgtgaattttcca

SEQ ID NO: 553588 - DNA, 15 bp, Homo sapiens
tgatgtgaattttcc

SEQ ID NO: 553589 - DNA, 15 bp, Homo sapiens
ttgatgtgaattttc

SEQ ID NO: 553590 - DNA, 15 bp, Homo sapiens
cttgatgtgaatttt

SEQ ID NO: 553591 - DNA, 15 bp, Homo sapiens
tcttgatgtgaattt

SEQ ID NO: 553592 - DNA, 15 bp, Homo sapiens
ctcttgatgtgaatt

SEQ ID NO: 553593 - DNA, 15 bp, Homo sapiens
cctcttgatgtgaat

SEQ ID NO: 553594 - DNA, 15 bp, Homo sapiens
gcctcttgatgtgaa

SEQ ID NO: 553595 - DNA, 15 bp, Homo sapiens
ggcctcttgatgtga

SEQ ID NO: 553596 - DNA, 15 bp, Homo sapiens
gggcctcttgatgtg

SEQ ID NO: 553597 - DNA, 15 bp, Homo sapiens
tgggcctcttgatgt

SEQ ID NO: 553598 - DNA, 15 bp, Homo sapiens
atgggcctcttgatg

SEQ ID NO: 553599 - DNA, 15 bp, Homo sapiens
catgggcctcttgat

SEQ ID NO: 553600 - DNA, 15 bp, Homo sapiens
acatgggcctcttga

SEQ ID NO: 553601 - DNA, 15 bp, Homo sapiens
gacatgggcctcttg

SEQ ID NO: 553602 - DNA, 15 bp, Homo sapiens
tgacatgggcctctt

SEQ ID NO: 553603 - DNA, 15 bp, Homo sapiens
ttgacatgggcctct

SEQ ID NO: 553604 - DNA, 15 bp, Homo sapiens
attgacatgggcctc

SEQ ID NO: 553605 - DNA, 15 bp, Homo sapiens
aattgacatgggcct

SEQ ID NO: 553606 - DNA, 15 bp, Homo sapiens
caattgacatgggcc

SEQ ID NO: 553607 - DNA, 15 bp, Homo sapiens
acaattgacatgggc

SEQ ID NO: 553608 - DNA, 15 bp, Homo sapiens
aacaattgacatggg

SEQ ID NO: 553609 - DNA, 15 bp, Homo sapiens
aaacaattgacatgg

SEQ ID NO: 553610 - DNA, 15 bp, Homo sapiens
gaaacaattgacatg

SEQ ID NO: 553611 - DNA, 15 bp, Homo sapiens
agaaacaattgacat

SEQ ID NO: 553612 - DNA, 15 bp, Homo sapiens
aagaaacaattgaca

SEQ ID NO: 553613 - DNA, 15 bp, Homo sapiens
aaagaaacaattgac

SEQ ID NO: 553614 - DNA, 15 bp, Homo sapiens
gaaagaaacaattga

SEQ ID NO: 553615 - DNA, 15 bp, Homo sapiens
agaaagaaacaattg

SEQ ID NO: 553616 - DNA, 15 bp, Homo sapiens
aagaaagaaacaatt

SEQ ID NO: 553617 - DNA, 15 bp, Homo sapiens
aaagaaagaaacaat

SEQ ID NO: 553618 - DNA, 15 bp, Homo sapiens
taaagaaagaaacaa

SEQ ID NO: 553619 - DNA, 15 bp, Homo sapiens
ctaaagaaagaaaca

SEQ ID NO: 553620 - DNA, 15 bp, Homo sapiens
gctaaagaaagaaac

SEQ ID NO: 553621 - DNA, 15 bp, Homo sapiens
ggctaaagaaagaaa

SEQ ID NO: 553622 - DNA, 15 bp, Homo sapiens
aggctaaagaaagaa

SEQ ID NO: 553623 - DNA, 15 bp, Homo sapiens
aaggctaaagaaaga

SEQ ID NO: 553624 - DNA, 15 bp, Homo sapiens
aaaggctaaagaaag

SEQ ID NO: 553625 - DNA, 15 bp, Homo sapiens
aaaaggctaaagaaa

SEQ ID NO: 553626 - DNA, 15 bp, Homo sapiens
gaaaaggctaaagaa

SEQ ID NO: 553627 - DNA, 15 bp, Homo sapiens
agaaaaggctaaaga

SEQ ID NO: 553628 - DNA, 15 bp, Homo sapiens
aagaaaaggctaaag

SEQ ID NO: 553629 - DNA, 15 bp, Homo sapiens
gaagaaaaggctaaa

SEQ ID NO: 553630 - DNA, 15 bp, Homo sapiens
tgaagaaaaggctaa

SEQ ID NO: 553631 - DNA, 15 bp, Homo sapiens
gtgaagaaaaggcta

SEQ ID NO: 553632 - DNA, 15 bp, Homo sapiens
agtgaagaaaaggct

SEQ ID NO: 553633 - DNA, 15 bp, Homo sapiens
gagtgaagaaaaggc

SEQ ID NO: 553634 - DNA, 15 bp, Homo sapiens
tgagtgaagaaaagg

SEQ ID NO: 553635 - DNA, 15 bp, Homo sapiens
ttgagtgaagaaaag

SEQ ID NO: 553636 - DNA, 15 bp, Homo sapiens
cttgagtgaagaaaa

SEQ ID NO: 553637 - DNA, 15 bp, Homo sapiens
tcttgagtgaagaaa

SEQ ID NO: 553638 - DNA, 15 bp, Homo sapiens
atcttgagtgaagaa

SEQ ID NO: 553639 - DNA, 15 bp, Homo sapiens
aatcttgagtgaaga

SEQ ID NO: 553640 - DNA, 15 bp, Homo sapiens
aaatcttgagtgaag

SEQ ID NO: 553641 - DNA, 15 bp, Homo sapiens
aaaatcttgagtgaa

SEQ ID NO: 553642 - DNA, 15 bp, Homo sapiens
aaaaatcttgagtga

SEQ ID NO: 553643 - DNA, 15 bp, Homo sapiens
aaaaaatcttgagtg

SEQ ID NO: 553644 - DNA, 15 bp, Homo sapiens
aaaaaaatcttgagt

SEQ ID NO: 553645 - DNA, 15 bp, Homo sapiens
aaaaaaaatcttgag

SEQ ID NO: 553646 - DNA, 15 bp, Homo sapiens
aaaaaaaaatcttga

SEQ ID NO: 553647 - DNA, 15 bp, Homo sapiens
gaaaaaaaaatcttg

SEQ ID NO: 553648 - DNA, 15 bp, Homo sapiens
agaaaaaaaaatctt

SEQ ID NO: 553649 - DNA, 15 bp, Homo sapiens
aagaaaaaaaaatct

SEQ ID NO: 553650 - DNA, 15 bp, Homo sapiens
aaagaaaaaaaaatc

SEQ ID NO: 553651 - DNA, 15 bp, Homo sapiens
taaagaaaaaaaaat

SEQ ID NO: 553652 - DNA, 15 bp, Homo sapiens
ttaaagaaaaaaaaa

SEQ ID NO: 553653 - DNA, 15 bp, Homo sapiens
tttaaagaaaaaaaa

SEQ ID NO: 553654 - DNA, 15 bp, Homo sapiens
ttttaaagaaaaaaa

SEQ ID NO: 553655 - DNA, 15 bp, Homo sapiens
tttttaaagaaaaaa

SEQ ID NO: 553656 - DNA, 15 bp, Homo sapiens
atttttaaagaaaaa

SEQ ID NO: 553657 - DNA, 15 bp, Homo sapiens
tatttttaaagaaaa

SEQ ID NO: 553658 - DNA, 15 bp, Homo sapiens
ttatttttaaagaaa

SEQ ID NO: 553659 - DNA, 15 bp, Homo sapiens
tttatttttaaagaa

SEQ ID NO: 553660 - DNA, 15 bp, Homo sapiens
ttttatttttaaaga

SEQ ID NO: 553661 - DNA, 15 bp, Homo sapiens
tttttatttttaaag

SEQ ID NO: 553662 - DNA, 15 bp, Homo sapiens
atttttatttttaaa

SEQ ID NO: 553663 - DNA, 15 bp, Homo sapiens
aatttttatttttaa

SEQ ID NO: 553664 - DNA, 15 bp, Homo sapiens
caatttttattttta

SEQ ID NO: 553665 - DNA, 15 bp, Homo sapiens
tcaatttttattttt

SEQ ID NO: 553666 - DNA, 15 bp, Homo sapiens
ctcaatttttatttt

SEQ ID NO: 553667 - DNA, 15 bp, Homo sapiens
cctcaatttttattt

SEQ ID NO: 553668 - DNA, 15 bp, Homo sapiens
gcctcaatttttatt

SEQ ID NO: 553669 - DNA, 15 bp, Homo sapiens
ggcctcaatttttat

SEQ ID NO: 553670 - DNA, 15 bp, Homo sapiens
tggcctcaattttta

SEQ ID NO: 553671 - DNA, 15 bp, Homo sapiens
ctggcctcaattttt

SEQ ID NO: 553672 - DNA, 15 bp, Homo sapiens
cctggcctcaatttt

SEQ ID NO: 553673 - DNA, 15 bp, Homo sapiens
acctggcctcaattt

SEQ ID NO: 553674 - DNA, 15 bp, Homo sapiens
cacctggcctcaatt

SEQ ID NO: 553675 - DNA, 15 bp, Homo sapiens
gcacctggcctcaat

SEQ ID NO: 553676 - DNA, 15 bp, Homo sapiens
tgcacctggcctcaa

SEQ ID NO: 553677 - DNA, 15 bp, Homo sapiens
ctgcacctggcctca

SEQ ID NO: 553678 - DNA, 15 bp, Homo sapiens
actgcacctggcctc

SEQ ID NO: 553679 - DNA, 15 bp, Homo sapiens
cactgcacctggcct

SEQ ID NO: 553680 - DNA, 15 bp, Homo sapiens
ccactgcacctggcc

SEQ ID NO: 553681 - DNA, 15 bp, Homo sapiens
gccactgcacctggc

SEQ ID NO: 553682 - DNA, 15 bp, Homo sapiens
agccactgcacctgg

SEQ ID NO: 553683 - DNA, 15 bp, Homo sapiens
cagccactgcacctg

SEQ ID NO: 553684 - DNA, 15 bp, Homo sapiens
tcagccactgcacct

SEQ ID NO: 553685 - DNA, 15 bp, Homo sapiens
gtcagccactgcacc

SEQ ID NO: 553686 - DNA, 15 bp, Homo sapiens
tgtcagccactgcac

SEQ ID NO: 553687 - DNA, 15 bp, Homo sapiens
gtgtcagccactgca

SEQ ID NO: 553688 - DNA, 15 bp, Homo sapiens
ggtgtcagccactgc

SEQ ID NO: 553689 - DNA, 15 bp, Homo sapiens
aggtgtcagccactg

SEQ ID NO: 553690 - DNA, 15 bp, Homo sapiens
taggtgtcagccact

SEQ ID NO: 553691 - DNA, 15 bp, Homo sapiens
ataggtgtcagccac

SEQ ID NO: 553692 - DNA, 15 bp, Homo sapiens
tataggtgtcagcca

SEQ ID NO: 553693 - DNA, 15 bp, Homo sapiens
ttataggtgtcagcc

SEQ ID NO: 553694 - DNA, 15 bp, Homo sapiens
attataggtgtcagc

SEQ ID NO: 553695 - DNA, 15 bp, Homo sapiens
gattataggtgtcag

SEQ ID NO: 553696 - DNA, 15 bp, Homo sapiens
ggattataggtgtca

SEQ ID NO: 553697 - DNA, 15 bp, Homo sapiens
gggattataggtgtc

SEQ ID NO: 553698 - DNA, 15 bp, Homo sapiens
agcctcccaaagtgc

SEQ ID NO: 553699 - DNA, 15 bp, Homo sapiens
cagcctcccaaagtg

SEQ ID NO: 553700 - DNA, 15 bp, Homo sapiens
tcagcctcccaaagt

SEQ ID NO: 553701 - DNA, 15 bp, Homo sapiens
ttcagcctcccaaag

SEQ ID NO: 553702 - DNA, 15 bp, Homo sapiens
cttcagcctcccaaa

SEQ ID NO: 553703 - DNA, 15 bp, Homo sapiens
gcttcagcctcccaa

SEQ ID NO: 553704 - DNA, 15 bp, Homo sapiens
cgcttcagcctccca

SEQ ID NO: 553705 - DNA, 15 bp, Homo sapiens
gtggatcctgctgat

SEQ ID NO: 553706 - DNA, 15 bp, Homo sapiens
ggtggatcctgctga

SEQ ID NO: 553707 - DNA, 15 bp, Homo sapiens
aggtggatcctgctg

SEQ ID NO: 553708 - DNA, 15 bp, Homo sapiens
gaggtggatcctgct

SEQ ID NO: 553709 - DNA, 15 bp, Homo sapiens
cgaggtggatcctgc

SEQ ID NO: 553710 - DNA, 15 bp, Homo sapiens
acgaggtggatcctg

SEQ ID NO: 553711 - DNA, 15 bp, Homo sapiens
cacgaggtggatcct

SEQ ID NO: 553712 - DNA, 15 bp, Homo sapiens
ccacgaggtggatcc

SEQ ID NO: 553713 - DNA, 15 bp, Homo sapiens
tccacgaggtggatc

SEQ ID NO: 553714 - DNA, 15 bp, Homo sapiens
gtccacgaggtggat

SEQ ID NO: 553715 - DNA, 15 bp, Homo sapiens
tgtccacgaggtgga

SEQ ID NO: 553716 - DNA, 15 bp, Homo sapiens
ttgtccacgaggtgg

SEQ ID NO: 553717 - DNA, 15 bp, Homo sapiens
cttgtccacgaggtg

SEQ ID NO: 553718 - DNA, 15 bp, Homo sapiens
acttgtccacgaggt

SEQ ID NO: 553719 - DNA, 15 bp, Homo sapiens
cacttgtccacgagg

SEQ ID NO: 553720 - DNA, 15 bp, Homo sapiens
ccacttgtccacgag

SEQ ID NO: 553721 - DNA, 15 bp, Homo sapiens
tccacttgtccacga

SEQ ID NO: 553722 - DNA, 15 bp, Homo sapiens
ttccacttgtccacg

SEQ ID NO: 553723 - DNA, 15 bp, Homo sapiens
gttccacttgtccac

SEQ ID NO: 553724 - DNA, 15 bp, Homo sapiens
cgttccacttgtcca

SEQ ID NO: 553725 - DNA, 15 bp, Homo sapiens
ccgttccacttgtcc

SEQ ID NO: 553726 - DNA, 15 bp, Homo sapiens
cccgttccacttgtc

SEQ ID NO: 553727 - DNA, 15 bp, Homo sapiens
gcccgttccacttgt

SEQ ID NO: 553728 - DNA, 15 bp, Homo sapiens
agcccgttccacttg

SEQ ID NO: 553729 - DNA, 15 bp, Homo sapiens
cagcccgttccactt

SEQ ID NO: 553730 - DNA, 15 bp, Homo sapiens
tcagcccgttccact

SEQ ID NO: 553731 - DNA, 15 bp, Homo sapiens
ctcagcccgttccac

SEQ ID NO: 553732 - DNA, 15 bp, Homo sapiens
gctcagcccgttcca

SEQ ID NO: 553733 - DNA, 15 bp, Homo sapiens
tgctcagcccgttcc

SEQ ID NO: 553734 - DNA, 15 bp, Homo sapiens
ttgctcagcccgttc

SEQ ID NO: 553735 - DNA, 15 bp, Homo sapiens
cttgctcagcccgtt

SEQ ID NO: 553736 - DNA, 15 bp, Homo sapiens
ccttgctcagcccgt

SEQ ID NO: 553737 - DNA, 15 bp, Homo sapiens
accttgctcagcccg

SEQ ID NO: 553738 - DNA, 15 bp, Homo sapiens
caccttgctcagccc

SEQ ID NO: 553739 - DNA, 15 bp, Homo sapiens
tcaccttgctcagcc

SEQ ID NO: 553740 - DNA, 15 bp, Homo sapiens
ctcaccttgctcagc

SEQ ID NO: 553741 - DNA, 15 bp, Homo sapiens
cctcaccttgctcag

SEQ ID NO: 553742 - DNA, 15 bp, Homo sapiens
ccctcaccttgctca

SEQ ID NO: 553743 - DNA, 15 bp, Homo sapiens
cccctcaccttgctc

SEQ ID NO: 553744 - DNA, 15 bp, Homo sapiens
gcccctcaccttgct

SEQ ID NO: 553745 - DNA, 15 bp, Homo sapiens
cgcccctcaccttgc

SEQ ID NO: 553746 - DNA, 15 bp, Homo sapiens
tcgcccctcaccttg

SEQ ID NO: 553747 - DNA, 15 bp, Homo sapiens
ctcgcccctcacctt

SEQ ID NO: 553748 - DNA, 15 bp, Homo sapiens
tctcgcccctcacct

SEQ ID NO: 553749 - DNA, 15 bp, Homo sapiens
ctctcgcccctcacc

SEQ ID NO: 553750 - DNA, 15 bp, Homo sapiens
cctctcgcccctcac

SEQ ID NO: 553751 - DNA, 15 bp, Homo sapiens
gcctctcgcccctca

SEQ ID NO: 553752 - DNA, 15 bp, Homo sapiens
cgcctctcgcccctc

SEQ ID NO: 553753 - DNA, 15 bp, Homo sapiens
tcgcctctcgcccct

SEQ ID NO: 553754 - DNA, 15 bp, Homo sapiens
ctcgcctctcgcccc

SEQ ID NO: 553755 - DNA, 15 bp, Homo sapiens
cctcgcctctcgccc

SEQ ID NO: 553756 - DNA, 15 bp, Homo sapiens
ccctcgcctctcgcc

SEQ ID NO: 553757 - DNA, 15 bp, Homo sapiens
gccctcgcctctcgc

SEQ ID NO: 553758 - DNA, 15 bp, Homo sapiens
ggccctcgcctctcg

SEQ ID NO: 553759 - DNA, 15 bp, Homo sapiens
gggccctcgcctctc

SEQ ID NO: 553760 - DNA, 15 bp, Homo sapiens
ggggccctcgcctct

SEQ ID NO: 553761 - DNA, 15 bp, Homo sapiens
aggggccctcgcctc

SEQ ID NO: 553762 - DNA, 15 bp, Homo sapiens
caggggccctcgcct

SEQ ID NO: 553763 - DNA, 15 bp, Homo sapiens
acaggggccctcgcc

SEQ ID NO: 553764 - DNA, 15 bp, Homo sapiens
gacaggggccctcgc

SEQ ID NO: 553765 - DNA, 15 bp, Homo sapiens
cgacaggggccctcg

SEQ ID NO: 553766 - DNA, 15 bp, Homo sapiens
gcgacaggggccctc

SEQ ID NO: 553767 - DNA, 15 bp, Homo sapiens
ggcgacaggggccct

SEQ ID NO: 553768 - DNA, 15 bp, Homo sapiens
tggcgacaggggccc

SEQ ID NO: 553769 - DNA, 15 bp, Homo sapiens
ctggcgacaggggcc

SEQ ID NO: 553770 - DNA, 15 bp, Homo sapiens
cctggcgacaggggc

SEQ ID NO: 553771 - DNA, 15 bp, Homo sapiens
ccctggcgacagggg

SEQ ID NO: 553772 - DNA, 15 bp, Homo sapiens
tccctggcgacaggg

SEQ ID NO: 553773 - DNA, 15 bp, Homo sapiens
ctccctggcgacagg

SEQ ID NO: 553774 - DNA, 15 bp, Homo sapiens
tctccctggcgacag

SEQ ID NO: 553775 - DNA, 15 bp, Homo sapiens
ctctccctggcgaca

SEQ ID NO: 553776 - DNA, 15 bp, Homo sapiens
cctctccctggcgac

SEQ ID NO: 553777 - DNA, 15 bp, Homo sapiens
ccctctccctggcga

SEQ ID NO: 553778 - DNA, 15 bp, Homo sapiens
cccctctccctggcg

SEQ ID NO: 553779 - DNA, 15 bp, Homo sapiens
tcccctctccctggc

SEQ ID NO: 553780 - DNA, 15 bp, Homo sapiens
ctcccctctccctgg

SEQ ID NO: 553781 - DNA, 15 bp, Homo sapiens
cctcccctctccctg

SEQ ID NO: 553782 - DNA, 15 bp, Homo sapiens
ccctcccctctccct

SEQ ID NO: 553783 - DNA, 15 bp, Homo sapiens
accctcccctctccc

SEQ ID NO: 553784 - DNA, 15 bp, Homo sapiens
caccctcccctctcc

SEQ ID NO: 553785 - DNA, 15 bp, Homo sapiens
ccaccctcccctctc

SEQ ID NO: 553786 - DNA, 15 bp, Homo sapiens
cccaccctcccctct

SEQ ID NO: 553787 - DNA, 15 bp, Homo sapiens
gcccaccctcccctc

SEQ ID NO: 553788 - DNA, 15 bp, Homo sapiens
ggcccaccctcccct

SEQ ID NO: 553789 - DNA, 15 bp, Homo sapiens
gggcccaccctcccc

SEQ ID NO: 553790 - DNA, 15 bp, Homo sapiens
cgggcccaccctccc

SEQ ID NO: 553791 - DNA, 15 bp, Homo sapiens
ccgggcccaccctcc

SEQ ID NO: 553792 - DNA, 15 bp, Homo sapiens
gccgggcccaccctc

SEQ ID NO: 553793 - DNA, 15 bp, Homo sapiens
ggccgggcccaccct

SEQ ID NO: 553794 - DNA, 15 bp, Homo sapiens
tggccgggcccaccc

SEQ ID NO: 553795 - DNA, 15 bp, Homo sapiens
atggccgggcccacc

SEQ ID NO: 553796 - DNA, 15 bp, Homo sapiens
catggccgggcccac

SEQ ID NO: 553797 - DNA, 15 bp, Homo sapiens
ccatggccgggccca

SEQ ID NO: 553798 - DNA, 15 bp, Homo sapiens
gccatggccgggccc

SEQ ID NO: 553799 - DNA, 15 bp, Homo sapiens
agccatggccgggcc

SEQ ID NO: 553800 - DNA, 15 bp, Homo sapiens
cagccatggccgggc

SEQ ID NO: 553801 - DNA, 15 bp, Homo sapiens
gcagccatggccggg

SEQ ID NO: 553802 - DNA, 15 bp, Homo sapiens
agcagccatggccgg

SEQ ID NO: 553803 - DNA, 15 bp, Homo sapiens
gagcagccatggccg

SEQ ID NO: 553804 - DNA, 15 bp, Homo sapiens
cgagcagccatggcc

SEQ ID NO: 553805 - DNA, 15 bp, Homo sapiens
ccgagcagccatggc

SEQ ID NO: 553806 - DNA, 15 bp, Homo sapiens
cccgagcagccatgg

SEQ ID NO: 553807 - DNA, 15 bp, Homo sapiens
tcccgagcagccatg

SEQ ID NO: 553808 - DNA, 15 bp, Homo sapiens
ctcccgagcagccat

SEQ ID NO: 553809 - DNA, 15 bp, Homo sapiens
actcccgagcagcca

SEQ ID NO: 553810 - DNA, 15 bp, Homo sapiens
cactcccgagcagcc

SEQ ID NO: 553811 - DNA, 15 bp, Homo sapiens
ccactcccgagcagc

SEQ ID NO: 553812 - DNA, 15 bp, Homo sapiens
gccactcccgagcag

SEQ ID NO: 553813 - DNA, 15 bp, Homo sapiens
tgccactcccgagca

SEQ ID NO: 553814 - DNA, 15 bp, Homo sapiens
ctgccactcccgagc

SEQ ID NO: 553815 - DNA, 15 bp, Homo sapiens
cctgccactcccgag

SEQ ID NO: 553816 - DNA, 15 bp, Homo sapiens
ccctgccactcccga

SEQ ID NO: 553817 - DNA, 15 bp, Homo sapiens
tccctgccactcccg

SEQ ID NO: 553818 - DNA, 15 bp, Homo sapiens
gtccctgccactccc

SEQ ID NO: 553819 - DNA, 15 bp, Homo sapiens
ggtccctgccactcc

SEQ ID NO: 553820 - DNA, 15 bp, Homo sapiens
tggtccctgccactc

SEQ ID NO: 553821 - DNA, 15 bp, Homo sapiens
ctggtccctgccact

SEQ ID NO: 553822 - DNA, 15 bp, Homo sapiens
tctggtccctgccac

SEQ ID NO: 553823 - DNA, 15 bp, Homo sapiens
ctctggtccctgcca

SEQ ID NO: 553824 - DNA, 15 bp, Homo sapiens
tctctggtccctgcc

SEQ ID NO: 553825 - DNA, 15 bp, Homo sapiens
ctctctggtccctgc

SEQ ID NO: 553826 - DNA, 15 bp, Homo sapiens
gctctctggtccctg

SEQ ID NO: 553827 - DNA, 15 bp, Homo sapiens
agctctctggtccct

SEQ ID NO: 553828 - DNA, 15 bp, Homo sapiens
gagctctctggtccc

SEQ ID NO: 553829 - DNA, 15 bp, Homo sapiens
ggagctctctggtcc

SEQ ID NO: 553830 - DNA, 15 bp, Homo sapiens
aggagctctctggtc

SEQ ID NO: 553831 - DNA, 15 bp, Homo sapiens
aaggagctctctggt

SEQ ID NO: 553832 - DNA, 15 bp, Homo sapiens
gaaggagctctctgg

SEQ ID NO: 553833 - DNA, 15 bp, Homo sapiens
agaaggagctctctg

SEQ ID NO: 553834 - DNA, 15 bp, Homo sapiens
aagaaggagctctct

SEQ ID NO: 553835 - DNA, 15 bp, Homo sapiens
gaagaaggagctctc

SEQ ID NO: 553836 - DNA, 15 bp, Homo sapiens
ggaagaaggagctct

SEQ ID NO: 553837 - DNA, 15 bp, Homo sapiens
aggaagaaggagctc

SEQ ID NO: 553838 - DNA, 15 bp, Homo sapiens
aaggaagaaggagct

SEQ ID NO: 553839 - DNA, 15 bp, Homo sapiens
aaaggaagaaggagc

SEQ ID NO: 553840 - DNA, 15 bp, Homo sapiens
caaaggaagaaggag

SEQ ID NO: 553841 - DNA, 15 bp, Homo sapiens
acaaaggaagaagga

SEQ ID NO: 553842 - DNA, 15 bp, Homo sapiens
gacaaaggaagaagg

SEQ ID NO: 553843 - DNA, 15 bp, Homo sapiens
cgacaaaggaagaag

SEQ ID NO: 553844 - DNA, 15 bp, Homo sapiens
acgacaaaggaagaa

SEQ ID NO: 553845 - DNA, 15 bp, Homo sapiens
cacgacaaaggaaga

SEQ ID NO: 553846 - DNA, 15 bp, Homo sapiens
tcacgacaaaggaag

SEQ ID NO: 553847 - DNA, 15 bp, Homo sapiens
ttcacgacaaaggaa

SEQ ID NO: 553848 - DNA, 15 bp, Homo sapiens
cttcacgacaaagga

SEQ ID NO: 553849 - DNA, 15 bp, Homo sapiens
tcttcacgacaaagg

SEQ ID NO: 553850 - DNA, 15 bp, Homo sapiens
ctcttcacgacaaag

SEQ ID NO: 553851 - DNA, 15 bp, Homo sapiens
cctcttcacgacaaa

SEQ ID NO: 553852 - DNA, 15 bp, Homo sapiens
ccctcttcacgacaa

SEQ ID NO: 553853 - DNA, 15 bp, Homo sapiens
accctcttcacgaca

SEQ ID NO: 553854 - DNA, 15 bp, Homo sapiens
caccctcttcacgac

SEQ ID NO: 553855 - DNA, 15 bp, Homo sapiens
gcaccctcttcacga

SEQ ID NO: 553856 - DNA, 15 bp, Homo sapiens
agcaccctcttcacg

SEQ ID NO: 553857 - DNA, 15 bp, Homo sapiens
cagcaccctcttcac

SEQ ID NO: 553858 - DNA, 15 bp, Homo sapiens
ccagcaccctcttca

SEQ ID NO: 553859 - DNA, 15 bp, Homo sapiens
cccagcaccctcttc

SEQ ID NO: 553860 - DNA, 15 bp, Homo sapiens
tcccagcaccctctt

SEQ ID NO: 553861 - DNA, 15 bp, Homo sapiens
ctcccagcaccctct

SEQ ID NO: 553862 - DNA, 15 bp, Homo sapiens
cctcccagcaccctc

SEQ ID NO: 553863 - DNA, 15 bp, Homo sapiens
tcctcccagcaccct

SEQ ID NO: 553864 - DNA, 15 bp, Homo sapiens
atcctcccagcaccc

SEQ ID NO: 553865 - DNA, 15 bp, Homo sapiens
catcctcccagcacc

SEQ ID NO: 553866 - DNA, 15 bp, Homo sapiens
tcatcctcccagcac

SEQ ID NO: 553867 - DNA, 15 bp, Homo sapiens
ttcatcctcccagca

SEQ ID NO: 553868 - DNA, 15 bp, Homo sapiens
gttcatcctcccagc

SEQ ID NO: 553869 - DNA, 15 bp, Homo sapiens
tgttcatcctcccag

SEQ ID NO: 553870 - DNA, 15 bp, Homo sapiens
gtgttcatcctccca

SEQ ID NO: 553871 - DNA, 15 bp, Homo sapiens
agtgttcatcctccc

SEQ ID NO: 553872 - DNA, 15 bp, Homo sapiens
gagtgttcatcctcc

SEQ ID NO: 553873 - DNA, 15 bp, Homo sapiens
agagtgttcatcctc

SEQ ID NO: 553874 - DNA, 15 bp, Homo sapiens
aagagtgttcatcct

SEQ ID NO: 553875 - DNA, 15 bp, Homo sapiens
caagagtgttcatcc

SEQ ID NO: 553876 - DNA, 15 bp, Homo sapiens
tcaagagtgttcatc

SEQ ID NO: 553877 - DNA, 15 bp, Homo sapiens
ttcaagagtgttcat

SEQ ID NO: 553878 - DNA, 15 bp, Homo sapiens
cttcaagagtgttca

SEQ ID NO: 553879 - DNA, 15 bp, Homo sapiens
acttcaagagtgttc

SEQ ID NO: 553880 - DNA, 15 bp, Homo sapiens
aacttcaagagtgtt

SEQ ID NO: 553881 - DNA, 15 bp, Homo sapiens
caacttcaagagtgt

SEQ ID NO: 553882 - DNA, 15 bp, Homo sapiens
ccaacttcaagagtg

SEQ ID NO: 553883 - DNA, 15 bp, Homo sapiens
tccaacttcaagagt

SEQ ID NO: 553884 - DNA, 15 bp, Homo sapiens
ctccaacttcaagag

SEQ ID NO: 553885 - DNA, 15 bp, Homo sapiens
cctccaacttcaaga

SEQ ID NO: 553886 - DNA, 15 bp, Homo sapiens
tcctccaacttcaag

SEQ ID NO: 553887 - DNA, 15 bp, Homo sapiens
ctcctccaacttcaa

SEQ ID NO: 553888 - DNA, 15 bp, Homo sapiens
cctcctccaacttca

SEQ ID NO: 553889 - DNA, 15 bp, Homo sapiens
ccctcctccaacttc

SEQ ID NO: 553890 - DNA, 15 bp, Homo sapiens
tccctcctccaactt

SEQ ID NO: 553891 - DNA, 15 bp, Homo sapiens
atccctcctccaact

SEQ ID NO: 553892 - DNA, 15 bp, Homo sapiens
aatccctcctccaac

SEQ ID NO: 553893 - DNA, 15 bp, Homo sapiens
aaatccctcctccaa

SEQ ID NO: 553894 - DNA, 15 bp, Homo sapiens
aaaatccctcctcca

SEQ ID NO: 553895 - DNA, 15 bp, Homo sapiens
taaaatccctcctcc

SEQ ID NO: 553896 - DNA, 15 bp, Homo sapiens
gtaaaatccctcctc

SEQ ID NO: 553897 - DNA, 15 bp, Homo sapiens
ggtaaaatccctcct

SEQ ID NO: 553898 - DNA, 15 bp, Homo sapiens
aggtaaaatccctcc

SEQ ID NO: 553899 - DNA, 15 bp, Homo sapiens
gaggtaaaatccctc

SEQ ID NO: 553900 - DNA, 15 bp, Homo sapiens
agaggtaaaatccct

SEQ ID NO: 553901 - DNA, 15 bp, Homo sapiens
cagaggtaaaatccc

SEQ ID NO: 553902 - DNA, 15 bp, Homo sapiens
ccagaggtaaaatcc

SEQ ID NO: 553903 - DNA, 15 bp, Homo sapiens
accagaggtaaaatc

SEQ ID NO: 553904 - DNA, 15 bp, Homo sapiens
aaccagaggtaaaat

SEQ ID NO: 553905 - DNA, 15 bp, Homo sapiens
taaccagaggtaaaa

SEQ ID NO: 553906 - DNA, 15 bp, Homo sapiens
ttaaccagaggtaaa

SEQ ID NO: 553907 - DNA, 15 bp, Homo sapiens
tttaaccagaggtaa

SEQ ID NO: 553908 - DNA, 15 bp, Homo sapiens
ctttaaccagaggta

SEQ ID NO: 553909 - DNA, 15 bp, Homo sapiens
gctttaaccagaggt

SEQ ID NO: 553910 - DNA, 15 bp, Homo sapiens
agctttaaccagagg

SEQ ID NO: 553911 - DNA, 15 bp, Homo sapiens
aagctttaaccagag

SEQ ID NO: 553912 - DNA, 15 bp, Homo sapiens
caagctttaaccaga

SEQ ID NO: 553913 - DNA, 15 bp, Homo sapiens
tcaagctttaaccag

SEQ ID NO: 553914 - DNA, 15 bp, Homo sapiens
gtcaagctttaacca

SEQ ID NO: 553915 - DNA, 15 bp, Homo sapiens
ggtcaagctttaacc

SEQ ID NO: 553916 - DNA, 15 bp, Homo sapiens
tggtcaagctttaac

SEQ ID NO: 553917 - DNA, 15 bp, Homo sapiens
gtggtcaagctttaa

SEQ ID NO: 553918 - DNA, 15 bp, Homo sapiens
ggtggtcaagcttta

SEQ ID NO: 553919 - DNA, 15 bp, Homo sapiens
gggtggtcaagcttt

SEQ ID NO: 553920 - DNA, 15 bp, Homo sapiens
tgggtggtcaagctt

SEQ ID NO: 553921 - DNA, 15 bp, Homo sapiens
ctgggtggtcaagct

SEQ ID NO: 553922 - DNA, 15 bp, Homo sapiens
tctgggtggtcaagc

SEQ ID NO: 553923 - DNA, 15 bp, Homo sapiens
ctctgggtggtcaag

SEQ ID NO: 553924 - DNA, 15 bp, Homo sapiens
cctctgggtggtcaa

SEQ ID NO: 553925 - DNA, 15 bp, Homo sapiens
ccctctgggtggtca

SEQ ID NO: 553926 - DNA, 15 bp, Homo sapiens
cccctctgggtggtc

SEQ ID NO: 553927 - DNA, 15 bp, Homo sapiens
gcccctctgggtggt

SEQ ID NO: 553928 - DNA, 15 bp, Homo sapiens
tgcccctctgggtgg

SEQ ID NO: 553929 - DNA, 15 bp, Homo sapiens
ctgcccctctgggtg

SEQ ID NO: 553930 - DNA, 15 bp, Homo sapiens
cctgcccctctgggt

SEQ ID NO: 553931 - DNA, 15 bp, Homo sapiens
acctgcccctctggg

SEQ ID NO: 553932 - DNA, 15 bp, Homo sapiens
cacctgcccctctgg

SEQ ID NO: 553933 - DNA, 15 bp, Homo sapiens
ccacctgcccctctg

SEQ ID NO: 553934 - DNA, 15 bp, Homo sapiens
cccacctgcccctct

SEQ ID NO: 553935 - DNA, 15 bp, Homo sapiens
ccccacctgcccctc

SEQ ID NO: 553936 - DNA, 15 bp, Homo sapiens
accccacctgcccct

SEQ ID NO: 553937 - DNA, 15 bp, Homo sapiens
aaccccacctgcccc

SEQ ID NO: 553938 - DNA, 15 bp, Homo sapiens
taaccccacctgccc

SEQ ID NO: 553939 - DNA, 15 bp, Homo sapiens
ctaaccccacctgcc

SEQ ID NO: 553940 - DNA, 15 bp, Homo sapiens
actaaccccacctgc

SEQ ID NO: 553941 - DNA, 15 bp, Homo sapiens
cactaaccccacctg

SEQ ID NO: 553942 - DNA, 15 bp, Homo sapiens
tcactaaccccacct

SEQ ID NO: 553943 - DNA, 15 bp, Homo sapiens
atcactaaccccacc

SEQ ID NO: 553944 - DNA, 15 bp, Homo sapiens
aatcactaaccccac

SEQ ID NO: 553945 - DNA, 15 bp, Homo sapiens
caatcactaacccca

SEQ ID NO: 553946 - DNA, 15 bp, Homo sapiens
gcaatcactaacccc

SEQ ID NO: 553947 - DNA, 15 bp, Homo sapiens
agcaatcactaaccc

SEQ ID NO: 553948 - DNA, 15 bp, Homo sapiens
aagcaatcactaacc

SEQ ID NO: 553949 - DNA, 15 bp, Homo sapiens
taagcaatcactaac

SEQ ID NO: 553950 - DNA, 15 bp, Homo sapiens
gtaagcaatcactaa

SEQ ID NO: 553951 - DNA, 15 bp, Homo sapiens
agtaagcaatcacta

SEQ ID NO: 553952 - DNA, 15 bp, Homo sapiens
cagtaagcaatcact

SEQ ID NO: 553953 - DNA, 15 bp, Homo sapiens
tcagtaagcaatcac

SEQ ID NO: 553954 - DNA, 15 bp, Homo sapiens
ctcagtaagcaatca

SEQ ID NO: 553955 - DNA, 15 bp, Homo sapiens
gctcagtaagcaatc

SEQ ID NO: 553956 - DNA, 15 bp, Homo sapiens
agctcagtaagcaat

SEQ ID NO: 553957 - DNA, 15 bp, Homo sapiens
aagctcagtaagcaa

SEQ ID NO: 553958 - DNA, 15 bp, Homo sapiens
taagctcagtaagca

SEQ ID NO: 553959 - DNA, 15 bp, Homo sapiens
gtaagctcagtaagc

SEQ ID NO: 553960 - DNA, 15 bp, Homo sapiens
agtaagctcagtaag

SEQ ID NO: 553961 - DNA, 15 bp, Homo sapiens
cagtaagctcagtaa

SEQ ID NO: 553962 - DNA, 15 bp, Homo sapiens
tcagtaagctcagta

SEQ ID NO: 553963 - DNA, 15 bp, Homo sapiens
ctcagtaagctcagt

SEQ ID NO: 553964 - DNA, 15 bp, Homo sapiens
gctcagtaagctcag

SEQ ID NO: 553965 - DNA, 15 bp, Homo sapiens
tgctcagtaagctca

SEQ ID NO: 553966 - DNA, 15 bp, Homo sapiens
gtgctcagtaagctc

SEQ ID NO: 553967 - DNA, 15 bp, Homo sapiens
ggtgctcagtaagct

SEQ ID NO: 553968 - DNA, 15 bp, Homo sapiens
aggtgctcagtaagc

SEQ ID NO: 553969 - DNA, 15 bp, Homo sapiens
caggtgctcagtaag

SEQ ID NO: 553970 - DNA, 15 bp, Homo sapiens
ccaggtgctcagtaa

SEQ ID NO: 553971 - DNA, 15 bp, Homo sapiens
gccaggtgctcagta

SEQ ID NO: 553972 - DNA, 15 bp, Homo sapiens
tgccaggtgctcagt

SEQ ID NO: 553973 - DNA, 15 bp, Homo sapiens
atgccaggtgctcag

SEQ ID NO: 553974 - DNA, 15 bp, Homo sapiens
gatgccaggtgctca

SEQ ID NO: 553975 - DNA, 15 bp, Homo sapiens
agatgccaggtgctc

SEQ ID NO: 553976 - DNA, 15 bp, Homo sapiens
cagatgccaggtgct

SEQ ID NO: 553977 - DNA, 15 bp, Homo sapiens
gcagatgccaggtgc

SEQ ID NO: 553978 - DNA, 15 bp, Homo sapiens
agcagatgccaggtg

SEQ ID NO: 553979 - DNA, 15 bp, Homo sapiens
cagcagatgccaggt

SEQ ID NO: 553980 - DNA, 15 bp, Homo sapiens
ccagcagatgccagg

SEQ ID NO: 553981 - DNA, 15 bp, Homo sapiens
cccagcagatgccag

SEQ ID NO: 553982 - DNA, 15 bp, Homo sapiens
tcccagcagatgcca

SEQ ID NO: 553983 - DNA, 15 bp, Homo sapiens
ttcccagcagatgcc

SEQ ID NO: 553984 - DNA, 15 bp, Homo sapiens
gttcccagcagatgc

SEQ ID NO: 553985 - DNA, 15 bp, Homo sapiens
agttcccagcagatg

SEQ ID NO: 553986 - DNA, 15 bp, Homo sapiens
cagttcccagcagat

SEQ ID NO: 553987 - DNA, 15 bp, Homo sapiens
tcagttcccagcaga

SEQ ID NO: 553988 - DNA, 15 bp, Homo sapiens
ctcagttcccagcag

SEQ ID NO: 553989 - DNA, 15 bp, Homo sapiens
actcagttcccagca

SEQ ID NO: 553990 - DNA, 15 bp, Homo sapiens
cactcagttcccagc

SEQ ID NO: 553991 - DNA, 15 bp, Homo sapiens
gcactcagttcccag

SEQ ID NO: 553992 - DNA, 15 bp, Homo sapiens
agcactcagttccca

SEQ ID NO: 553993 - DNA, 15 bp, Homo sapiens
aagcactcagttccc

SEQ ID NO: 553994 - DNA, 15 bp, Homo sapiens
aaagcactcagttcc

SEQ ID NO: 553995 - DNA, 15 bp, Homo sapiens
gaaagcactcagttc

SEQ ID NO: 553996 - DNA, 15 bp, Homo sapiens
agaaagcactcagtt

SEQ ID NO: 553997 - DNA, 15 bp, Homo sapiens
aagaaagcactcagt

SEQ ID NO: 553998 - DNA, 15 bp, Homo sapiens
gaagaaagcactcag

SEQ ID NO: 553999 - DNA, 15 bp, Homo sapiens
ggaagaaagcactca

SEQ ID NO: 554000 - DNA, 15 bp, Homo sapiens
aggaagaaagcactc

SEQ ID NO: 554001 - DNA, 15 bp, Homo sapiens
aaggaagaaagcact

SEQ ID NO: 554002 - DNA, 15 bp, Homo sapiens
aaaggaagaaagcac

SEQ ID NO: 554003 - DNA, 15 bp, Homo sapiens
gaaaggaagaaagca

SEQ ID NO: 554004 - DNA, 15 bp, Homo sapiens
cgaaaggaagaaagc

SEQ ID NO: 554005 - DNA, 15 bp, Homo sapiens
tcgaaaggaagaaag

SEQ ID NO: 554006 - DNA, 15 bp, Homo sapiens
atcgaaaggaagaaa

SEQ ID NO: 554007 - DNA, 15 bp, Homo sapiens
aatcgaaaggaagaa

SEQ ID NO: 554008 - DNA, 15 bp, Homo sapiens
gaatcgaaaggaaga

SEQ ID NO: 554009 - DNA, 15 bp, Homo sapiens
agaatcgaaaggaag

SEQ ID NO: 554010 - DNA, 15 bp, Homo sapiens
aagaatcgaaaggaa

SEQ ID NO: 554011 - DNA, 15 bp, Homo sapiens
aaagaatcgaaagga

SEQ ID NO: 554012 - DNA, 15 bp, Homo sapiens
taaagaatcgaaagg

SEQ ID NO: 554013 - DNA, 15 bp, Homo sapiens
gtaaagaatcgaaag

SEQ ID NO: 554014 - DNA, 15 bp, Homo sapiens
agtaaagaatcgaaa

SEQ ID NO: 554015 - DNA, 15 bp, Homo sapiens
aagtaaagaatcgaa

SEQ ID NO: 554016 - DNA, 15 bp, Homo sapiens
taagtaaagaatcga

SEQ ID NO: 554017 - DNA, 15 bp, Homo sapiens
gtaagtaaagaatcg

SEQ ID NO: 554018 - DNA, 15 bp, Homo sapiens
tgtaagtaaagaatc

SEQ ID NO: 554019 - DNA, 15 bp, Homo sapiens
ttgtaagtaaagaat

SEQ ID NO: 554020 - DNA, 15 bp, Homo sapiens
tttgtaagtaaagaa

SEQ ID NO: 554021 - DNA, 15 bp, Homo sapiens
ttttgtaagtaaaga

SEQ ID NO: 554022 - DNA, 15 bp, Homo sapiens
tttttgtaagtaaag

SEQ ID NO: 554023 - DNA, 15 bp, Homo sapiens
atttttgtaagtaaa

SEQ ID NO: 554024 - DNA, 15 bp, Homo sapiens
catttttgtaagtaa

SEQ ID NO: 554025 - DNA, 15 bp, Homo sapiens
acatttttgtaagta

SEQ ID NO: 554026 - DNA, 15 bp, Homo sapiens
aacatttttgtaagt

SEQ ID NO: 554027 - DNA, 15 bp, Homo sapiens
aaacatttttgtaag

SEQ ID NO: 554028 - DNA, 15 bp, Homo sapiens
aaaacatttttgtaa

SEQ ID NO: 554029 - DNA, 15 bp, Homo sapiens
caaaacatttttgta

SEQ ID NO: 554030 - DNA, 15 bp, Homo sapiens
tcaaaacatttttgt

SEQ ID NO: 554031 - DNA, 15 bp, Homo sapiens
ttcaaaacatttttg

SEQ ID NO: 554032 - DNA, 15 bp, Homo sapiens
cttcaaaacattttt

SEQ ID NO: 554033 - DNA, 15 bp, Homo sapiens
ccttcaaaacatttt

SEQ ID NO: 554034 - DNA, 15 bp, Homo sapiens
gccttcaaaacattt

SEQ ID NO: 554035 - DNA, 15 bp, Homo sapiens
ggccttcaaaacatt

SEQ ID NO: 554036 - DNA, 15 bp, Homo sapiens
cggccttcaaaacat

SEQ ID NO: 554037 - DNA, 15 bp, Homo sapiens
ccggccttcaaaaca

SEQ ID NO: 554038 - DNA, 15 bp, Homo sapiens
cccggccttcaaaac

SEQ ID NO: 554039 - DNA, 15 bp, Homo sapiens
gcccggccttcaaaa

SEQ ID NO: 554040 - DNA, 15 bp, Homo sapiens
cgcccggccttcaaa

SEQ ID NO: 554041 - DNA, 15 bp, Homo sapiens
acgcccggccttcaa

SEQ ID NO: 554042 - DNA, 15 bp, Homo sapiens
cacgcccggccttca

SEQ ID NO: 554043 - DNA, 15 bp, Homo sapiens
ccacgcccggccttc

SEQ ID NO: 554044 - DNA, 15 bp, Homo sapiens
accacgcccggcctt

SEQ ID NO: 554045 - DNA, 15 bp, Homo sapiens
taccacgcccggcct

SEQ ID NO: 554046 - DNA, 15 bp, Homo sapiens
ctaccacgcccggcc

SEQ ID NO: 554047 - DNA, 15 bp, Homo sapiens
actaccacgcccggc

SEQ ID NO: 554048 - DNA, 15 bp, Homo sapiens
aactaccacgcccgg

SEQ ID NO: 554049 - DNA, 15 bp, Homo sapiens
gaactaccacgcccg

SEQ ID NO: 554050 - DNA, 15 bp, Homo sapiens
tgaactaccacgccc

SEQ ID NO: 554051 - DNA, 15 bp, Homo sapiens
atgaactaccacgcc

SEQ ID NO: 554052 - DNA, 15 bp, Homo sapiens
catgaactaccacgc

SEQ ID NO: 554053 - DNA, 15 bp, Homo sapiens
gcatgaactaccacg

SEQ ID NO: 554054 - DNA, 15 bp, Homo sapiens
ggcatgaactaccac

SEQ ID NO: 554055 - DNA, 15 bp, Homo sapiens
aggcatgaactacca

SEQ ID NO: 554056 - DNA, 15 bp, Homo sapiens
caggcatgaactacc

SEQ ID NO: 554057 - DNA, 15 bp, Homo sapiens
acaggcatgaactac

SEQ ID NO: 554058 - DNA, 15 bp, Homo sapiens
tacaggcatgaacta

SEQ ID NO: 554059 - DNA, 15 bp, Homo sapiens
ttacaggcatgaact

SEQ ID NO: 554060 - DNA, 15 bp, Homo sapiens
attacaggcatgaac

SEQ ID NO: 554061 - DNA, 15 bp, Homo sapiens
gattacaggcatgaa

SEQ ID NO: 554062 - DNA, 15 bp, Homo sapiens
acctcggcctcccaa

SEQ ID NO: 554063 - DNA, 15 bp, Homo sapiens
cacctcggcctccca

SEQ ID NO: 554064 - DNA, 15 bp, Homo sapiens
ccacctcggcctccc

SEQ ID NO: 554065 - DNA, 15 bp, Homo sapiens
cccacctcggcctcc

SEQ ID NO: 554066 - DNA, 15 bp, Homo sapiens
ccccacctcggcctc

SEQ ID NO: 554067 - DNA, 15 bp, Homo sapiens
cccccacctcggcct

SEQ ID NO: 554068 - DNA, 15 bp, Homo sapiens
ccccccacctcggcc

SEQ ID NO: 554069 - DNA, 15 bp, Homo sapiens
cccccccacctcggc

SEQ ID NO: 554070 - DNA, 15 bp, Homo sapiens
tcccccccacctcgg

SEQ ID NO: 554071 - DNA, 15 bp, Homo sapiens
atcccccccacctcg

SEQ ID NO: 554072 - DNA, 15 bp, Homo sapiens
gatcccccccacctc

SEQ ID NO: 554073 - DNA, 15 bp, Homo sapiens
tgatcccccccacct

SEQ ID NO: 554074 - DNA, 15 bp, Homo sapiens
gtgatcccccccacc

SEQ ID NO: 554075 - DNA, 15 bp, Homo sapiens
ggtgatcccccccac

SEQ ID NO: 554076 - DNA, 15 bp, Homo sapiens
aggtgatccccccca

SEQ ID NO: 554077 - DNA, 15 bp, Homo sapiens
caggtgatccccccc

SEQ ID NO: 554078 - DNA, 15 bp, Homo sapiens
tcaggtgatcccccc

SEQ ID NO: 554079 - DNA, 15 bp, Homo sapiens
ctcaggtgatccccc

SEQ ID NO: 554080 - DNA, 15 bp, Homo sapiens
cctcaggtgatcccc

SEQ ID NO: 554081 - DNA, 15 bp, Homo sapiens
acctcaggtgatccc

SEQ ID NO: 554082 - DNA, 15 bp, Homo sapiens
cgaactcctgacctc

SEQ ID NO: 554083 - DNA, 15 bp, Homo sapiens
tggctggtctcgaac

SEQ ID NO: 554084 - DNA, 15 bp, Homo sapiens
ctggctggtctcgaa

SEQ ID NO: 554085 - DNA, 15 bp, Homo sapiens
cctggctggtctcga

SEQ ID NO: 554086 - DNA, 15 bp, Homo sapiens
gcctggctggtctcg

SEQ ID NO: 554087 - DNA, 15 bp, Homo sapiens
ggcctggctggtctc

SEQ ID NO: 554088 - DNA, 15 bp, Homo sapiens
tggcctggctggtct

SEQ ID NO: 554089 - DNA, 15 bp, Homo sapiens
ttggcctggctggtc

SEQ ID NO: 554090 - DNA, 15 bp, Homo sapiens
gttggcctggctggt

SEQ ID NO: 554091 - DNA, 15 bp, Homo sapiens
tgttggcctggctgg

SEQ ID NO: 554092 - DNA, 15 bp, Homo sapiens
atgttggcctggctg

SEQ ID NO: 554093 - DNA, 15 bp, Homo sapiens
catgttggcctggct

SEQ ID NO: 554094 - DNA, 15 bp, Homo sapiens
ccatgttggcctggc

SEQ ID NO: 554095 - DNA, 15 bp, Homo sapiens
gccatgttggcctgg

SEQ ID NO: 554096 - DNA, 15 bp, Homo sapiens
tgccatgttggcctg

SEQ ID NO: 554097 - DNA, 15 bp, Homo sapiens
ttgccatgttggcct

SEQ ID NO: 554098 - DNA, 15 bp, Homo sapiens
tttgccatgttggcc

SEQ ID NO: 554099 - DNA, 15 bp, Homo sapiens
ttttgccatgttggc

SEQ ID NO: 554100 - DNA, 15 bp, Homo sapiens
gttttgccatgttgg

SEQ ID NO: 554101 - DNA, 15 bp, Homo sapiens
ggttttgccatgttg

SEQ ID NO: 554102 - DNA, 15 bp, Homo sapiens
gggttttgccatgtt

SEQ ID NO: 554103 - DNA, 15 bp, Homo sapiens
agggttttgccatgt

SEQ ID NO: 554104 - DNA, 15 bp, Homo sapiens
cagggttttgccatg

SEQ ID NO: 554105 - DNA, 15 bp, Homo sapiens
acagggttttgccat

SEQ ID NO: 554106 - DNA, 15 bp, Homo sapiens
gacagggttttgcca

SEQ ID NO: 554107 - DNA, 15 bp, Homo sapiens
agacagggttttgcc

SEQ ID NO: 554108 - DNA, 15 bp, Homo sapiens
gagacagggttttgc

SEQ ID NO: 554109 - DNA, 15 bp, Homo sapiens
agagacagggttttg

SEQ ID NO: 554110 - DNA, 15 bp, Homo sapiens
tagagacagggtttt

SEQ ID NO: 554111 - DNA, 15 bp, Homo sapiens
attttagtagagaca

SEQ ID NO: 554112 - DNA, 15 bp, Homo sapiens
tattttagtagagac

SEQ ID NO: 554113 - DNA, 15 bp, Homo sapiens
gtattttagtagaga

SEQ ID NO: 554114 - DNA, 15 bp, Homo sapiens
tgtattttagtagag

SEQ ID NO: 554115 - DNA, 15 bp, Homo sapiens
ttgtattttagtaga

SEQ ID NO: 554116 - DNA, 15 bp, Homo sapiens
tttgtattttagtag

SEQ ID NO: 554117 - DNA, 15 bp, Homo sapiens
ttttgtattttagta

SEQ ID NO: 554118 - DNA, 15 bp, Homo sapiens
tttttgtattttagt

SEQ ID NO: 554119 - DNA, 15 bp, Homo sapiens
ttttttgtattttag

SEQ ID NO: 554120 - DNA, 15 bp, Homo sapiens
attttttgtatttta

SEQ ID NO: 554121 - DNA, 15 bp, Homo sapiens
aattttttgtatttt

SEQ ID NO: 554122 - DNA, 15 bp, Homo sapiens
taattttttgtattt

SEQ ID NO: 554123 - DNA, 15 bp, Homo sapiens
ctaattttttgtatt

SEQ ID NO: 554124 - DNA, 15 bp, Homo sapiens
gctaattttttgtat

SEQ ID NO: 554125 - DNA, 15 bp, Homo sapiens
agctaattttttgta

SEQ ID NO: 554126 - DNA, 15 bp, Homo sapiens
cccagctaatttttt

SEQ ID NO: 554127 - DNA, 15 bp, Homo sapiens
acccagctaattttt

SEQ ID NO: 554128 - DNA, 15 bp, Homo sapiens
cacccagctaatttt

SEQ ID NO: 554129 - DNA, 15 bp, Homo sapiens
acacccagctaattt

SEQ ID NO: 554130 - DNA, 15 bp, Homo sapiens
cacacccagctaatt

SEQ ID NO: 554131 - DNA, 15 bp, Homo sapiens
ccacacccagctaat

SEQ ID NO: 554132 - DNA, 15 bp, Homo sapiens
accacacccagctaa

SEQ ID NO: 554133 - DNA, 15 bp, Homo sapiens
caccacacccagcta

SEQ ID NO: 554134 - DNA, 15 bp, Homo sapiens
acaccacacccagct

SEQ ID NO: 554135 - DNA, 15 bp, Homo sapiens
aacaccacacccagc

SEQ ID NO: 554136 - DNA, 15 bp, Homo sapiens
caacaccacacccag

SEQ ID NO: 554137 - DNA, 15 bp, Homo sapiens
gcaacaccacaccca

SEQ ID NO: 554138 - DNA, 15 bp, Homo sapiens
tgcaacaccacaccc

SEQ ID NO: 554139 - DNA, 15 bp, Homo sapiens
atgcaacaccacacc

SEQ ID NO: 554140 - DNA, 15 bp, Homo sapiens
catgcaacaccacac

SEQ ID NO: 554141 - DNA, 15 bp, Homo sapiens
gcatgcaacaccaca

SEQ ID NO: 554142 - DNA, 15 bp, Homo sapiens
ggcatgcaacaccac

SEQ ID NO: 554143 - DNA, 15 bp, Homo sapiens
aggcatgcaacacca

SEQ ID NO: 554144 - DNA, 15 bp, Homo sapiens
caggcatgcaacacc

SEQ ID NO: 554145 - DNA, 15 bp, Homo sapiens
acaggcatgcaacac

SEQ ID NO: 554146 - DNA, 15 bp, Homo sapiens
tacaggcatgcaaca

SEQ ID NO: 554147 - DNA, 15 bp, Homo sapiens
ttacaggcatgcaac

SEQ ID NO: 554148 - DNA, 15 bp, Homo sapiens
attacaggcatgcaa

SEQ ID NO: 554149 - DNA, 15 bp, Homo sapiens
gattacaggcatgca

SEQ ID NO: 554150 - DNA, 15 bp, Homo sapiens
ggattacaggcatgc

SEQ ID NO: 554151 - DNA, 15 bp, Homo sapiens
atgagtagctgggat

SEQ ID NO: 554152 - DNA, 15 bp, Homo sapiens
catgagtagctggga

SEQ ID NO: 554153 - DNA, 15 bp, Homo sapiens
tcatgagtagctggg

SEQ ID NO: 554154 - DNA, 15 bp, Homo sapiens
ctcatgagtagctgg

SEQ ID NO: 554155 - DNA, 15 bp, Homo sapiens
gctcatgagtagctg

SEQ ID NO: 554156 - DNA, 15 bp, Homo sapiens
agctcatgagtagct

SEQ ID NO: 554157 - DNA, 15 bp, Homo sapiens
cagctcatgagtagc

SEQ ID NO: 554158 - DNA, 15 bp, Homo sapiens
tcagctcatgagtag

SEQ ID NO: 554159 - DNA, 15 bp, Homo sapiens
ctcagctcatgagta

SEQ ID NO: 554160 - DNA, 15 bp, Homo sapiens
cctcagctcatgagt

SEQ ID NO: 554161 - DNA, 15 bp, Homo sapiens
gcctcagctcatgag

SEQ ID NO: 554162 - DNA, 15 bp, Homo sapiens
tgcctcagctcatga

SEQ ID NO: 554163 - DNA, 15 bp, Homo sapiens
ctgcctcagctcatg

SEQ ID NO: 554164 - DNA, 15 bp, Homo sapiens
cctgcctcagctcat

SEQ ID NO: 554165 - DNA, 15 bp, Homo sapiens
tcctgcctcagctca

SEQ ID NO: 554166 - DNA, 15 bp, Homo sapiens
ctcctgcctcagctc

SEQ ID NO: 554167 - DNA, 15 bp, Homo sapiens
tctcctgcctcagct

SEQ ID NO: 554168 - DNA, 15 bp, Homo sapiens
cctgtgttcaagcga

SEQ ID NO: 554169 - DNA, 15 bp, Homo sapiens
tcctgtgttcaagcg

SEQ ID NO: 554170 - DNA, 15 bp, Homo sapiens
ctcctgtgttcaagc

SEQ ID NO: 554171 - DNA, 15 bp, Homo sapiens
cctcctgtgttcaag

SEQ ID NO: 554172 - DNA, 15 bp, Homo sapiens
acctcctgtgttcaa

SEQ ID NO: 554173 - DNA, 15 bp, Homo sapiens
cacctcctgtgttca

SEQ ID NO: 554174 - DNA, 15 bp, Homo sapiens
tcacctcctgtgttc

SEQ ID NO: 554175 - DNA, 15 bp, Homo sapiens
ttcacctcctgtgtt

SEQ ID NO: 554176 - DNA, 15 bp, Homo sapiens
cttcacctcctgtgt

SEQ ID NO: 554177 - DNA, 15 bp, Homo sapiens
ccttcacctcctgtg

SEQ ID NO: 554178 - DNA, 15 bp, Homo sapiens
accttcacctcctgt

SEQ ID NO: 554179 - DNA, 15 bp, Homo sapiens
aaccttcacctcctg

SEQ ID NO: 554180 - DNA, 15 bp, Homo sapiens
caaccttcacctcct

SEQ ID NO: 554181 - DNA, 15 bp, Homo sapiens
gcaaccttcacctcc

SEQ ID NO: 554182 - DNA, 15 bp, Homo sapiens
tgcaaccttcacctc

SEQ ID NO: 554183 - DNA, 15 bp, Homo sapiens
ctgcaaccttcacct

SEQ ID NO: 554184 - DNA, 15 bp, Homo sapiens
actgcaaccttcacc

SEQ ID NO: 554185 - DNA, 15 bp, Homo sapiens
cactgcaaccttcac

SEQ ID NO: 554186 - DNA, 15 bp, Homo sapiens
tcactgcaaccttca

SEQ ID NO: 554187 - DNA, 15 bp, Homo sapiens
cgtgatctcagctca

SEQ ID NO: 554188 - DNA, 15 bp, Homo sapiens
gcgtgatctcagctc

SEQ ID NO: 554189 - DNA, 15 bp, Homo sapiens
tgcgtgatctcagct

SEQ ID NO: 554190 - DNA, 15 bp, Homo sapiens
ttgcgtgatctcagc

SEQ ID NO: 554191 - DNA, 15 bp, Homo sapiens
attgcgtgatctcag

SEQ ID NO: 554192 - DNA, 15 bp, Homo sapiens
aattgcgtgatctca

SEQ ID NO: 554193 - DNA, 15 bp, Homo sapiens
aaattgcgtgatctc

SEQ ID NO: 554194 - DNA, 15 bp, Homo sapiens
gaaattgcgtgatct

SEQ ID NO: 554195 - DNA, 15 bp, Homo sapiens
tgaaattgcgtgatc

SEQ ID NO: 554196 - DNA, 15 bp, Homo sapiens
gtgaaattgcgtgat

SEQ ID NO: 554197 - DNA, 15 bp, Homo sapiens
agtgaaattgcgtga

SEQ ID NO: 554198 - DNA, 15 bp, Homo sapiens
aagtgaaattgcgtg

SEQ ID NO: 554199 - DNA, 15 bp, Homo sapiens
gaagtgaaattgcgt

SEQ ID NO: 554200 - DNA, 15 bp, Homo sapiens
tgaagtgaaattgcg

SEQ ID NO: 554201 - DNA, 15 bp, Homo sapiens
ctgaagtgaaattgc

SEQ ID NO: 554202 - DNA, 15 bp, Homo sapiens
gctgaagtgaaattg

SEQ ID NO: 554203 - DNA, 15 bp, Homo sapiens
ggctgaagtgaaatt

SEQ ID NO: 554204 - DNA, 15 bp, Homo sapiens
aggctgaagtgaaat

SEQ ID NO: 554205 - DNA, 15 bp, Homo sapiens
caggctgaagtgaaa

SEQ ID NO: 554206 - DNA, 15 bp, Homo sapiens
ccaggctgaagtgaa

SEQ ID NO: 554207 - DNA, 15 bp, Homo sapiens
cccaggctgaagtga

SEQ ID NO: 554208 - DNA, 15 bp, Homo sapiens
acccaggctgaagtg

SEQ ID NO: 554209 - DNA, 15 bp, Homo sapiens
cacccaggctgaagt

SEQ ID NO: 554210 - DNA, 15 bp, Homo sapiens
tcacccaggctgaag

SEQ ID NO: 554211 - DNA, 15 bp, Homo sapiens
ctcacccaggctgaa

SEQ ID NO: 554212 - DNA, 15 bp, Homo sapiens
tctcacccaggctga

SEQ ID NO: 554213 - DNA, 15 bp, Homo sapiens
ttctcacccaggctg

SEQ ID NO: 554214 - DNA, 15 bp, Homo sapiens
cttctcacccaggct

SEQ ID NO: 554215 - DNA, 15 bp, Homo sapiens
tcttctcacccaggc

SEQ ID NO: 554216 - DNA, 15 bp, Homo sapiens
ctcttctcacccagg

SEQ ID NO: 554217 - DNA, 15 bp, Homo sapiens
actcttctcacccag

SEQ ID NO: 554218 - DNA, 15 bp, Homo sapiens
cactcttctcaccca

SEQ ID NO: 554219 - DNA, 15 bp, Homo sapiens
tcactcttctcaccc

SEQ ID NO: 554220 - DNA, 15 bp, Homo sapiens
ttcactcttctcacc

SEQ ID NO: 554221 - DNA, 15 bp, Homo sapiens
tttcactcttctcac

SEQ ID NO: 554222 - DNA, 15 bp, Homo sapiens
gtttcactcttctca

SEQ ID NO: 554223 - DNA, 15 bp, Homo sapiens
agtttcactcttctc

SEQ ID NO: 554224 - DNA, 15 bp, Homo sapiens
gagtttcactcttct

SEQ ID NO: 554225 - DNA, 15 bp, Homo sapiens
cgagtttcactcttc

SEQ ID NO: 554226 - DNA, 15 bp, Homo sapiens
ccgagtttcactctt

SEQ ID NO: 554227 - DNA, 15 bp, Homo sapiens
accgagtttcactct

SEQ ID NO: 554228 - DNA, 15 bp, Homo sapiens
gaccgagtttcactc

SEQ ID NO: 554229 - DNA, 15 bp, Homo sapiens
agaccgagtttcact

SEQ ID NO: 554230 - DNA, 15 bp, Homo sapiens
gagaccgagtttcac

SEQ ID NO: 554231 - DNA, 15 bp, Homo sapiens
ggagaccgagtttca

SEQ ID NO: 554232 - DNA, 15 bp, Homo sapiens
tggagaccgagtttc

SEQ ID NO: 554233 - DNA, 15 bp, Homo sapiens
ttggagaccgagttt

SEQ ID NO: 554234 - DNA, 15 bp, Homo sapiens
tttggagaccgagtt

SEQ ID NO: 554235 - DNA, 15 bp, Homo sapiens
ttttggagaccgagt

SEQ ID NO: 554236 - DNA, 15 bp, Homo sapiens
tttttggagaccgag

SEQ ID NO: 554237 - DNA, 15 bp, Homo sapiens
ttttttggagaccga

SEQ ID NO: 554238 - DNA, 15 bp, Homo sapiens
tttttttggagaccg

SEQ ID NO: 554239 - DNA, 15 bp, Homo sapiens
ttttttttggagacc

SEQ ID NO: 554240 - DNA, 15 bp, Homo sapiens
cttttttttggagac

SEQ ID NO: 554241 - DNA, 15 bp, Homo sapiens
tcttttttttggaga

SEQ ID NO: 554242 - DNA, 15 bp, Homo sapiens
ctcttttttttggag

SEQ ID NO: 554243 - DNA, 15 bp, Homo sapiens
tctcttttttttgga

SEQ ID NO: 554244 - DNA, 15 bp, Homo sapiens
ttctcttttttttgg

SEQ ID NO: 554245 - DNA, 15 bp, Homo sapiens
cttctcttttttttg

SEQ ID NO: 554246 - DNA, 15 bp, Homo sapiens
tcttctctttttttt

SEQ ID NO: 554247 - DNA, 15 bp, Homo sapiens
ctcttctcttttttt

SEQ ID NO: 554248 - DNA, 15 bp, Homo sapiens
tctcttctctttttt

SEQ ID NO: 554249 - DNA, 15 bp, Homo sapiens
atctcttctcttttt

SEQ ID NO: 554250 - DNA, 15 bp, Homo sapiens
aatctcttctctttt

SEQ ID NO: 554251 - DNA, 15 bp, Homo sapiens
gaatctcttctcttt

SEQ ID NO: 554252 - DNA, 15 bp, Homo sapiens
tgaatctcttctctt

SEQ ID NO: 554253 - DNA, 15 bp, Homo sapiens
gtgaatctcttctct

SEQ ID NO: 554254 - DNA, 15 bp, Homo sapiens
tgtgaatctcttctc

SEQ ID NO: 554255 - DNA, 15 bp, Homo sapiens
atgtgaatctcttct

SEQ ID NO: 554256 - DNA, 15 bp, Homo sapiens
aatgtgaatctcttc

SEQ ID NO: 554257 - DNA, 15 bp, Homo sapiens
taatgtgaatctctt

SEQ ID NO: 554258 - DNA, 15 bp, Homo sapiens
gtaatgtgaatctct

SEQ ID NO: 554259 - DNA, 15 bp, Homo sapiens
tgtaatgtgaatctc

SEQ ID NO: 554260 - DNA, 15 bp, Homo sapiens
ttgtaatgtgaatct

SEQ ID NO: 554261 - DNA, 15 bp, Homo sapiens
tttgtaatgtgaatc

SEQ ID NO: 554262 - DNA, 15 bp, Homo sapiens
ttttgtaatgtgaat

SEQ ID NO: 554263 - DNA, 15 bp, Homo sapiens
attttgtaatgtgaa

SEQ ID NO: 554264 - DNA, 15 bp, Homo sapiens
tattttgtaatgtga

SEQ ID NO: 554265 - DNA, 15 bp, Homo sapiens
ttattttgtaatgtg

SEQ ID NO: 554266 - DNA, 15 bp, Homo sapiens
tttattttgtaatgt

SEQ ID NO: 554267 - DNA, 15 bp, Homo sapiens
ttttattttgtaatg

SEQ ID NO: 554268 - DNA, 15 bp, Homo sapiens
gttttattttgtaat

SEQ ID NO: 554269 - DNA, 15 bp, Homo sapiens
tgttttattttgtaa

SEQ ID NO: 554270 - DNA, 15 bp, Homo sapiens
ttgttttattttgta

SEQ ID NO: 554271 - DNA, 15 bp, Homo sapiens
cttgttttattttgt

SEQ ID NO: 554272 - DNA, 15 bp, Homo sapiens
tcttgttttattttg

SEQ ID NO: 554273 - DNA, 15 bp, Homo sapiens
ctcttgttttatttt

SEQ ID NO: 554274 - DNA, 15 bp, Homo sapiens
tctcttgttttattt

SEQ ID NO: 554275 - DNA, 15 bp, Homo sapiens
ctctcttgttttatt

SEQ ID NO: 554276 - DNA, 15 bp, Homo sapiens
cctctcttgttttat

SEQ ID NO: 554277 - DNA, 15 bp, Homo sapiens
ccctctcttgtttta

SEQ ID NO: 554278 - DNA, 15 bp, Homo sapiens
tccctctcttgtttt

SEQ ID NO: 554279 - DNA, 15 bp, Homo sapiens
ctccctctcttgttt

SEQ ID NO: 554280 - DNA, 15 bp, Homo sapiens
tctccctctcttgtt

SEQ ID NO: 554281 - DNA, 15 bp, Homo sapiens
atctccctctcttgt

SEQ ID NO: 554282 - DNA, 15 bp, Homo sapiens
tatctccctctcttg

SEQ ID NO: 554283 - DNA, 15 bp, Homo sapiens
ttatctccctctctt

SEQ ID NO: 554284 - DNA, 15 bp, Homo sapiens
cttatctccctctct

SEQ ID NO: 554285 - DNA, 15 bp, Homo sapiens
acttatctccctctc

SEQ ID NO: 554286 - DNA, 15 bp, Homo sapiens
cacttatctccctct

SEQ ID NO: 554287 - DNA, 15 bp, Homo sapiens
gcacttatctccctc

SEQ ID NO: 554288 - DNA, 15 bp, Homo sapiens
ggcacttatctccct

SEQ ID NO: 554289 - DNA, 15 bp, Homo sapiens
gggcacttatctccc

SEQ ID NO: 554290 - DNA, 15 bp, Homo sapiens
agggcacttatctcc

SEQ ID NO: 554291 - DNA, 15 bp, Homo sapiens
aagggcacttatctc

SEQ ID NO: 554292 - DNA, 15 bp, Homo sapiens
taagggcacttatct

SEQ ID NO: 554293 - DNA, 15 bp, Homo sapiens
ctaagggcacttatc

SEQ ID NO: 554294 - DNA, 15 bp, Homo sapiens
actaagggcacttat

SEQ ID NO: 554295 - DNA, 15 bp, Homo sapiens
tactaagggcactta

SEQ ID NO: 554296 - DNA, 15 bp, Homo sapiens
atactaagggcactt

SEQ ID NO: 554297 - DNA, 15 bp, Homo sapiens
gatactaagggcact

SEQ ID NO: 554298 - DNA, 15 bp, Homo sapiens
tgatactaagggcac

SEQ ID NO: 554299 - DNA, 15 bp, Homo sapiens
gtgatactaagggca

SEQ ID NO: 554300 - DNA, 15 bp, Homo sapiens
ggtgatactaagggc

SEQ ID NO: 554301 - DNA, 15 bp, Homo sapiens
aggtgatactaaggg

SEQ ID NO: 554302 - DNA, 15 bp, Homo sapiens
gaggtgatactaagg

SEQ ID NO: 554303 - DNA, 15 bp, Homo sapiens
ggaggtgatactaag

SEQ ID NO: 554304 - DNA, 15 bp, Homo sapiens
gggaggtgatactaa

SEQ ID NO: 554305 - DNA, 15 bp, Homo sapiens
tgggaggtgatacta

SEQ ID NO: 554306 - DNA, 15 bp, Homo sapiens
gtgggaggtgatact

SEQ ID NO: 554307 - DNA, 15 bp, Homo sapiens
ggtgggaggtgatac

SEQ ID NO: 554308 - DNA, 15 bp, Homo sapiens
gggtgggaggtgata

SEQ ID NO: 554309 - DNA, 15 bp, Homo sapiens
ggggtgggaggtgat

SEQ ID NO: 554310 - DNA, 15 bp, Homo sapiens
aggggtgggaggtga

SEQ ID NO: 554311 - DNA, 15 bp, Homo sapiens
taggggtgggaggtg

SEQ ID NO: 554312 - DNA, 15 bp, Homo sapiens
gtaggggtgggaggt

SEQ ID NO: 554313 - DNA, 15 bp, Homo sapiens
ggtaggggtgggagg

SEQ ID NO: 554314 - DNA, 15 bp, Homo sapiens
gggtaggggtgggag

SEQ ID NO: 554315 - DNA, 15 bp, Homo sapiens
ggggtaggggtggga

SEQ ID NO: 554316 - DNA, 15 bp, Homo sapiens
aggggtaggggtggg

SEQ ID NO: 554317 - DNA, 15 bp, Homo sapiens
aaggggtaggggtgg

SEQ ID NO: 554318 - DNA, 15 bp, Homo sapiens
caaggggtaggggtg

SEQ ID NO: 554319 - DNA, 15 bp, Homo sapiens
gcaaggggtaggggt

SEQ ID NO: 554320 - DNA, 15 bp, Homo sapiens
ggcaaggggtagggg

SEQ ID NO: 554321 - DNA, 15 bp, Homo sapiens
gggcaaggggtaggg

SEQ ID NO: 554322 - DNA, 15 bp, Homo sapiens
ggggcaaggggtagg

SEQ ID NO: 554323 - DNA, 15 bp, Homo sapiens
tggggcaaggggtag

SEQ ID NO: 554324 - DNA, 15 bp, Homo sapiens
ctggggcaaggggta

SEQ ID NO: 554325 - DNA, 15 bp, Homo sapiens
tctggggcaaggggt

SEQ ID NO: 554326 - DNA, 15 bp, Homo sapiens
ctctggggcaagggg

SEQ ID NO: 554327 - DNA, 15 bp, Homo sapiens
cctctggggcaaggg

SEQ ID NO: 554328 - DNA, 15 bp, Homo sapiens
tcctctggggcaagg

SEQ ID NO: 554329 - DNA, 15 bp, Homo sapiens
ttcctctggggcaag

SEQ ID NO: 554330 - DNA, 15 bp, Homo sapiens
tttcctctggggcaa

SEQ ID NO: 554331 - DNA, 15 bp, Homo sapiens
gtttcctctggggca

SEQ ID NO: 554332 - DNA, 15 bp, Homo sapiens
ggtttcctctggggc

SEQ ID NO: 554333 - DNA, 15 bp, Homo sapiens
gggtttcctctgggg

SEQ ID NO: 554334 - DNA, 15 bp, Homo sapiens
tgggtttcctctggg

SEQ ID NO: 554335 - DNA, 15 bp, Homo sapiens
gtgggtttcctctgg

SEQ ID NO: 554336 - DNA, 15 bp, Homo sapiens
tgtgggtttcctctg

SEQ ID NO: 554337 - DNA, 15 bp, Homo sapiens
ttgtgggtttcctct

SEQ ID NO: 554338 - DNA, 15 bp, Homo sapiens
attgtgggtttcctc

SEQ ID NO: 554339 - DNA, 15 bp, Homo sapiens
aattgtgggtttcct

SEQ ID NO: 554340 - DNA, 15 bp, Homo sapiens
taattgtgggtttcc

SEQ ID NO: 554341 - DNA, 15 bp, Homo sapiens
ataattgtgggtttc

SEQ ID NO: 554342 - DNA, 15 bp, Homo sapiens
gataattgtgggttt

SEQ ID NO: 554343 - DNA, 15 bp, Homo sapiens
tgataattgtgggtt

SEQ ID NO: 554344 - DNA, 15 bp, Homo sapiens
ctgataattgtgggt

SEQ ID NO: 554345 - DNA, 15 bp, Homo sapiens
actgataattgtggg

SEQ ID NO: 554346 - DNA, 15 bp, Homo sapiens
aactgataattgtgg

SEQ ID NO: 554347 - DNA, 15 bp, Homo sapiens
aaactgataattgtg

SEQ ID NO: 554348 - DNA, 15 bp, Homo sapiens
caaactgataattgt

SEQ ID NO: 554349 - DNA, 15 bp, Homo sapiens
ccaaactgataattg

SEQ ID NO: 554350 - DNA, 15 bp, Homo sapiens
cccaaactgataatt

SEQ ID NO: 554351 - DNA, 15 bp, Homo sapiens
tcccaaactgataat

SEQ ID NO: 554352 - DNA, 15 bp, Homo sapiens
atcccaaactgataa

SEQ ID NO: 554353 - DNA, 15 bp, Homo sapiens
tatcccaaactgata

SEQ ID NO: 554354 - DNA, 15 bp, Homo sapiens
atatcccaaactgat

SEQ ID NO: 554355 - DNA, 15 bp, Homo sapiens
tatatcccaaactga

SEQ ID NO: 554356 - DNA, 15 bp, Homo sapiens
atatatcccaaactg

SEQ ID NO: 554357 - DNA, 15 bp, Homo sapiens
aatatatcccaaact

SEQ ID NO: 554358 - DNA, 15 bp, Homo sapiens
gaatatatcccaaac

SEQ ID NO: 554359 - DNA, 15 bp, Homo sapiens
agaatatatcccaaa

SEQ ID NO: 554360 - DNA, 15 bp, Homo sapiens
aagaatatatcccaa

SEQ ID NO: 554361 - DNA, 15 bp, Homo sapiens
gaagaatatatccca

SEQ ID NO: 554362 - DNA, 15 bp, Homo sapiens
ggaagaatatatccc

SEQ ID NO: 554363 - DNA, 15 bp, Homo sapiens
gggaagaatatatcc

SEQ ID NO: 554364 - DNA, 15 bp, Homo sapiens
tgggaagaatatatc

SEQ ID NO: 554365 - DNA, 15 bp, Homo sapiens
atgggaagaatatat

SEQ ID NO: 554366 - DNA, 15 bp, Homo sapiens
gatgggaagaatata

SEQ ID NO: 554367 - DNA, 15 bp, Homo sapiens
ggatgggaagaatat

SEQ ID NO: 554368 - DNA, 15 bp, Homo sapiens
tggatgggaagaata

SEQ ID NO: 554369 - DNA, 15 bp, Homo sapiens
atggatgggaagaat

SEQ ID NO: 554370 - DNA, 15 bp, Homo sapiens
aatggatgggaagaa

SEQ ID NO: 554371 - DNA, 15 bp, Homo sapiens
aaatggatgggaaga

SEQ ID NO: 554372 - DNA, 15 bp, Homo sapiens
aaaatggatgggaag

SEQ ID NO: 554373 - DNA, 15 bp, Homo sapiens
aaaaatggatgggaa

SEQ ID NO: 554374 - DNA, 15 bp, Homo sapiens
taaaaatggatggga

SEQ ID NO: 554375 - DNA, 15 bp, Homo sapiens
gtaaaaatggatggg

SEQ ID NO: 554376 - DNA, 15 bp, Homo sapiens
ggtaaaaatggatgg

SEQ ID NO: 554377 - DNA, 15 bp, Homo sapiens
gggtaaaaatggatg

SEQ ID NO: 554378 - DNA, 15 bp, Homo sapiens
tgggtaaaaatggat

SEQ ID NO: 554379 - DNA, 15 bp, Homo sapiens
atgggtaaaaatgga

SEQ ID NO: 554380 - DNA, 15 bp, Homo sapiens
catgggtaaaaatgg

SEQ ID NO: 554381 - DNA, 15 bp, Homo sapiens
acatgggtaaaaatg

SEQ ID NO: 554382 - DNA, 15 bp, Homo sapiens
cacatgggtaaaaat

SEQ ID NO: 554383 - DNA, 15 bp, Homo sapiens
gcacatgggtaaaaa

SEQ ID NO: 554384 - DNA, 15 bp, Homo sapiens
tgcacatgggtaaaa

SEQ ID NO: 554385 - DNA, 15 bp, Homo sapiens
gtgcacatgggtaaa

SEQ ID NO: 554386 - DNA, 15 bp, Homo sapiens
tgtgcacatgggtaa

SEQ ID NO: 554387 - DNA, 15 bp, Homo sapiens
gtgtgcacatgggta

SEQ ID NO: 554388 - DNA, 15 bp, Homo sapiens
ggtgtgcacatgggt

SEQ ID NO: 554389 - DNA, 15 bp, Homo sapiens
aggtgtgcacatggg

SEQ ID NO: 554390 - DNA, 15 bp, Homo sapiens
taggtgtgcacatgg

SEQ ID NO: 554391 - DNA, 15 bp, Homo sapiens
ataggtgtgcacatg

SEQ ID NO: 554392 - DNA, 15 bp, Homo sapiens
tataggtgtgcacat

SEQ ID NO: 554393 - DNA, 15 bp, Homo sapiens
atataggtgtgcaca

SEQ ID NO: 554394 - DNA, 15 bp, Homo sapiens
catataggtgtgcac

SEQ ID NO: 554395 - DNA, 15 bp, Homo sapiens
acatataggtgtgca

SEQ ID NO: 554396 - DNA, 15 bp, Homo sapiens
tacatataggtgtgc

SEQ ID NO: 554397 - DNA, 15 bp, Homo sapiens
gtacatataggtgtg

SEQ ID NO: 554398 - DNA, 15 bp, Homo sapiens
cgtacatataggtgt

SEQ ID NO: 554399 - DNA, 15 bp, Homo sapiens
gcgtacatataggtg

SEQ ID NO: 554400 - DNA, 15 bp, Homo sapiens
tgcgtacatataggt

SEQ ID NO: 554401 - DNA, 15 bp, Homo sapiens
ctgcgtacatatagg

SEQ ID NO: 554402 - DNA, 15 bp, Homo sapiens
tctgcgtacatatag

SEQ ID NO: 554403 - DNA, 15 bp, Homo sapiens
ctctgcgtacatata

SEQ ID NO: 554404 - DNA, 15 bp, Homo sapiens
tctctgcgtacatat

SEQ ID NO: 554405 - DNA, 15 bp, Homo sapiens
ttctctgcgtacata

SEQ ID NO: 554406 - DNA, 15 bp, Homo sapiens
tttctctgcgtacat

SEQ ID NO: 554407 - DNA, 15 bp, Homo sapiens
atttctctgcgtaca

SEQ ID NO: 554408 - DNA, 15 bp, Homo sapiens
tatttctctgcgtac

SEQ ID NO: 554409 - DNA, 15 bp, Homo sapiens
gtatttctctgcgta

SEQ ID NO: 554410 - DNA, 15 bp, Homo sapiens
cgtatttctctgcgt

SEQ ID NO: 554411 - DNA, 15 bp, Homo sapiens
ccgtatttctctgcg

SEQ ID NO: 554412 - DNA, 15 bp, Homo sapiens
tccgtatttctctgc

SEQ ID NO: 554413 - DNA, 15 bp, Homo sapiens
ttccgtatttctctg

SEQ ID NO: 554414 - DNA, 15 bp, Homo sapiens
attccgtatttctct

SEQ ID NO: 554415 - DNA, 15 bp, Homo sapiens
aattccgtatttctc

SEQ ID NO: 554416 - DNA, 15 bp, Homo sapiens
caattccgtatttct

SEQ ID NO: 554417 - DNA, 15 bp, Homo sapiens
acaattccgtatttc

SEQ ID NO: 554418 - DNA, 15 bp, Homo sapiens
aacaattccgtattt

SEQ ID NO: 554419 - DNA, 15 bp, Homo sapiens
aaacaattccgtatt

SEQ ID NO: 554420 - DNA, 15 bp, Homo sapiens
gaaacaattccgtat

SEQ ID NO: 554421 - DNA, 15 bp, Homo sapiens
agaaacaattccgta

SEQ ID NO: 554422 - DNA, 15 bp, Homo sapiens
aagaaacaattccgt

SEQ ID NO: 554423 - DNA, 15 bp, Homo sapiens
gaagaaacaattccg

SEQ ID NO: 554424 - DNA, 15 bp, Homo sapiens
agaagaaacaattcc

SEQ ID NO: 554425 - DNA, 15 bp, Homo sapiens
aagaagaaacaattc

SEQ ID NO: 554426 - DNA, 15 bp, Homo sapiens
aaagaagaaacaatt

SEQ ID NO: 554427 - DNA, 15 bp, Homo sapiens
caaagaagaaacaat

SEQ ID NO: 554428 - DNA, 15 bp, Homo sapiens
tcaaagaagaaacaa

SEQ ID NO: 554429 - DNA, 15 bp, Homo sapiens
ttcaaagaagaaaca

SEQ ID NO: 554430 - DNA, 15 bp, Homo sapiens
gttcaaagaagaaac

SEQ ID NO: 554431 - DNA, 15 bp, Homo sapiens
tgttcaaagaagaaa

SEQ ID NO: 554432 - DNA, 15 bp, Homo sapiens
atgttcaaagaagaa

SEQ ID NO: 554433 - DNA, 15 bp, Homo sapiens
gatgttcaaagaaga

SEQ ID NO: 554434 - DNA, 15 bp, Homo sapiens
tgatgttcaaagaag

SEQ ID NO: 554435 - DNA, 15 bp, Homo sapiens
atgatgttcaaagaa

SEQ ID NO: 554436 - DNA, 15 bp, Homo sapiens
catgatgttcaaaga

SEQ ID NO: 554437 - DNA, 15 bp, Homo sapiens
tcatgatgttcaaag

SEQ ID NO: 554438 - DNA, 15 bp, Homo sapiens
ttcatgatgttcaaa

SEQ ID NO: 554439 - DNA, 15 bp, Homo sapiens
tttcatgatgttcaa

SEQ ID NO: 554440 - DNA, 15 bp, Homo sapiens
atttcatgatgttca

SEQ ID NO: 554441 - DNA, 15 bp, Homo sapiens
gatttcatgatgttc

SEQ ID NO: 554442 - DNA, 15 bp, Homo sapiens
tgatttcatgatgtt

SEQ ID NO: 554443 - DNA, 15 bp, Homo sapiens
atgatttcatgatgt

SEQ ID NO: 554444 - DNA, 15 bp, Homo sapiens
tatgatttcatgatg

SEQ ID NO: 554445 - DNA, 15 bp, Homo sapiens
gtatgatttcatgat

SEQ ID NO: 554446 - DNA, 15 bp, Homo sapiens
agtatgatttcatga

SEQ ID NO: 554447 - DNA, 15 bp, Homo sapiens
tagtatgatttcatg

SEQ ID NO: 554448 - DNA, 15 bp, Homo sapiens
gtagtatgatttcat

SEQ ID NO: 554449 - DNA, 15 bp, Homo sapiens
cgtagtatgatttca

SEQ ID NO: 554450 - DNA, 15 bp, Homo sapiens
acgtagtatgatttc

SEQ ID NO: 554451 - DNA, 15 bp, Homo sapiens
cacgtagtatgattt

SEQ ID NO: 554452 - DNA, 15 bp, Homo sapiens
gcacgtagtatgatt

SEQ ID NO: 554453 - DNA, 15 bp, Homo sapiens
tgcacgtagtatgat

SEQ ID NO: 554454 - DNA, 15 bp, Homo sapiens
atgcacgtagtatga

SEQ ID NO: 554455 - DNA, 15 bp, Homo sapiens
aatgcacgtagtatg

SEQ ID NO: 554456 - DNA, 15 bp, Homo sapiens
caatgcacgtagtat

SEQ ID NO: 554457 - DNA, 15 bp, Homo sapiens
acaatgcacgtagta

SEQ ID NO: 554458 - DNA, 15 bp, Homo sapiens
aacaatgcacgtagt

SEQ ID NO: 554459 - DNA, 15 bp, Homo sapiens
aaacaatgcacgtag

SEQ ID NO: 554460 - DNA, 15 bp, Homo sapiens
aaaacaatgcacgta

SEQ ID NO: 554461 - DNA, 15 bp, Homo sapiens
caaaacaatgcacgt

SEQ ID NO: 554462 - DNA, 15 bp, Homo sapiens
gcaaaacaatgcacg

SEQ ID NO: 554463 - DNA, 15 bp, Homo sapiens
tgcaaaacaatgcac

SEQ ID NO: 554464 - DNA, 15 bp, Homo sapiens
ttgcaaaacaatgca

SEQ ID NO: 554465 - DNA, 15 bp, Homo sapiens
gttgcaaaacaatgc

SEQ ID NO: 554466 - DNA, 15 bp, Homo sapiens
agttgcaaaacaatg

SEQ ID NO: 554467 - DNA, 15 bp, Homo sapiens
cagttgcaaaacaat

SEQ ID NO: 554468 - DNA, 15 bp, Homo sapiens
ccagttgcaaaacaa

SEQ ID NO: 554469 - DNA, 15 bp, Homo sapiens
gccagttgcaaaaca

SEQ ID NO: 554470 - DNA, 15 bp, Homo sapiens
agccagttgcaaaac

SEQ ID NO: 554471 - DNA, 15 bp, Homo sapiens
aagccagttgcaaaa

SEQ ID NO: 554472 - DNA, 15 bp, Homo sapiens
aaagccagttgcaaa

SEQ ID NO: 554473 - DNA, 15 bp, Homo sapiens
aaaagccagttgcaa

SEQ ID NO: 554474 - DNA, 15 bp, Homo sapiens
aaaaagccagttgca

SEQ ID NO: 554475 - DNA, 15 bp, Homo sapiens
aaaaaagccagttgc

SEQ ID NO: 554476 - DNA, 15 bp, Homo sapiens
gaaaaaagccagttg

SEQ ID NO: 554477 - DNA, 15 bp, Homo sapiens
tgaaaaaagccagtt

SEQ ID NO: 554478 - DNA, 15 bp, Homo sapiens
gtgaaaaaagccagt

SEQ ID NO: 554479 - DNA, 15 bp, Homo sapiens
ggtgaaaaaagccag

SEQ ID NO: 554480 - DNA, 15 bp, Homo sapiens
aggtgaaaaaagcca

SEQ ID NO: 554481 - DNA, 15 bp, Homo sapiens
aaggtgaaaaaagcc

SEQ ID NO: 554482 - DNA, 15 bp, Homo sapiens
gaaggtgaaaaaagc

SEQ ID NO: 554483 - DNA, 15 bp, Homo sapiens
cgaaggtgaaaaaag

SEQ ID NO: 554484 - DNA, 15 bp, Homo sapiens
acgaaggtgaaaaaa

SEQ ID NO: 554485 - DNA, 15 bp, Homo sapiens
cacgaaggtgaaaaa

SEQ ID NO: 554486 - DNA, 15 bp, Homo sapiens
tcacgaaggtgaaaa

SEQ ID NO: 554487 - DNA, 15 bp, Homo sapiens
gtcacgaaggtgaaa

SEQ ID NO: 554488 - DNA, 15 bp, Homo sapiens
ggtcacgaaggtgaa

SEQ ID NO: 554489 - DNA, 15 bp, Homo sapiens
aggtcacgaaggtga

SEQ ID NO: 554490 - DNA, 15 bp, Homo sapiens
aaggtcacgaaggtg

SEQ ID NO: 554491 - DNA, 15 bp, Homo sapiens
aaaggtcacgaaggt

SEQ ID NO: 554492 - DNA, 15 bp, Homo sapiens
aaaaggtcacgaagg

SEQ ID NO: 554493 - DNA, 15 bp, Homo sapiens
gaaaaggtcacgaag

SEQ ID NO: 554494 - DNA, 15 bp, Homo sapiens
agaaaaggtcacgaa

SEQ ID NO: 554495 - DNA, 15 bp, Homo sapiens
gagaaaaggtcacga

SEQ ID NO: 554496 - DNA, 15 bp, Homo sapiens
tgagaaaaggtcacg

SEQ ID NO: 554497 - DNA, 15 bp, Homo sapiens
ttgagaaaaggtcac

SEQ ID NO: 554498 - DNA, 15 bp, Homo sapiens
attgagaaaaggtca

SEQ ID NO: 554499 - DNA, 15 bp, Homo sapiens
tattgagaaaaggtc

SEQ ID NO: 554500 - DNA, 15 bp, Homo sapiens
atattgagaaaaggt

SEQ ID NO: 554501 - DNA, 15 bp, Homo sapiens
catattgagaaaagg

SEQ ID NO: 554502 - DNA, 15 bp, Homo sapiens
acatattgagaaaag

SEQ ID NO: 554503 - DNA, 15 bp, Homo sapiens
cacatattgagaaaa

SEQ ID NO: 554504 - DNA, 15 bp, Homo sapiens
acacatattgagaaa

SEQ ID NO: 554505 - DNA, 15 bp, Homo sapiens
cacacatattgagaa

SEQ ID NO: 554506 - DNA, 15 bp, Homo sapiens
tcacacatattgaga

SEQ ID NO: 554507 - DNA, 15 bp, Homo sapiens
ttcacacatattgag

SEQ ID NO: 554508 - DNA, 15 bp, Homo sapiens
tttcacacatattga

SEQ ID NO: 554509 - DNA, 15 bp, Homo sapiens
ttttcacacatattg

SEQ ID NO: 554510 - DNA, 15 bp, Homo sapiens
attttcacacatatt

SEQ ID NO: 554511 - DNA, 15 bp, Homo sapiens
cattttcacacatat

SEQ ID NO: 554512 - DNA, 15 bp, Homo sapiens
tcattttcacacata

SEQ ID NO: 554513 - DNA, 15 bp, Homo sapiens
gtcattttcacacat

SEQ ID NO: 554514 - DNA, 15 bp, Homo sapiens
agtcattttcacaca

SEQ ID NO: 554515 - DNA, 15 bp, Homo sapiens
cagtcattttcacac

SEQ ID NO: 554516 - DNA, 15 bp, Homo sapiens
acagtcattttcaca

SEQ ID NO: 554517 - DNA, 15 bp, Homo sapiens
cacagtcattttcac

SEQ ID NO: 554518 - DNA, 15 bp, Homo sapiens
acacagtcattttca

SEQ ID NO: 554519 - DNA, 15 bp, Homo sapiens
cacacagtcattttc

SEQ ID NO: 554520 - DNA, 15 bp, Homo sapiens
tcacacagtcatttt

SEQ ID NO: 554521 - DNA, 15 bp, Homo sapiens
gtcacacagtcattt

SEQ ID NO: 554522 - DNA, 15 bp, Homo sapiens
agtcacacagtcatt

SEQ ID NO: 554523 - DNA, 15 bp, Homo sapiens
aagtcacacagtcat

SEQ ID NO: 554524 - DNA, 15 bp, Homo sapiens
gaagtcacacagtca

SEQ ID NO: 554525 - DNA, 15 bp, Homo sapiens
ggaagtcacacagtc

SEQ ID NO: 554526 - DNA, 15 bp, Homo sapiens
gggaagtcacacagt

SEQ ID NO: 554527 - DNA, 15 bp, Homo sapiens
tgggaagtcacacag

SEQ ID NO: 554528 - DNA, 15 bp, Homo sapiens
gtgggaagtcacaca

SEQ ID NO: 554529 - DNA, 15 bp, Homo sapiens
agtgggaagtcacac

SEQ ID NO: 554530 - DNA, 15 bp, Homo sapiens
gagtgggaagtcaca

SEQ ID NO: 554531 - DNA, 15 bp, Homo sapiens
ggagtgggaagtcac

SEQ ID NO: 554532 - DNA, 15 bp, Homo sapiens
gggagtgggaagtca

SEQ ID NO: 554533 - DNA, 15 bp, Homo sapiens
ggggagtgggaagtc

SEQ ID NO: 554534 - DNA, 15 bp, Homo sapiens
tggggagtgggaagt

SEQ ID NO: 554535 - DNA, 15 bp, Homo sapiens
gtggggagtgggaag

SEQ ID NO: 554536 - DNA, 15 bp, Homo sapiens
agtggggagtgggaa

SEQ ID NO: 554537 - DNA, 15 bp, Homo sapiens
gagtggggagtggga

SEQ ID NO: 554538 - DNA, 15 bp, Homo sapiens
ggagtggggagtggg

SEQ ID NO: 554539 - DNA, 15 bp, Homo sapiens
gggagtggggagtgg

SEQ ID NO: 554540 - DNA, 15 bp, Homo sapiens
ggggagtggggagtg

SEQ ID NO: 554541 - DNA, 15 bp, Homo sapiens
cggggagtggggagt

SEQ ID NO: 554542 - DNA, 15 bp, Homo sapiens
acggggagtggggag

SEQ ID NO: 554543 - DNA, 15 bp, Homo sapiens
cacggggagtgggga

SEQ ID NO: 554544 - DNA, 15 bp, Homo sapiens
ccacggggagtgggg

SEQ ID NO: 554545 - DNA, 15 bp, Homo sapiens
accacggggagtggg

SEQ ID NO: 554546 - DNA, 15 bp, Homo sapiens
taccacggggagtgg

SEQ ID NO: 554547 - DNA, 15 bp, Homo sapiens
ctaccacggggagtg

SEQ ID NO: 554548 - DNA, 15 bp, Homo sapiens
actaccacggggagt

SEQ ID NO: 554549 - DNA, 15 bp, Homo sapiens
aactaccacggggag

SEQ ID NO: 554550 - DNA, 15 bp, Homo sapiens
taactaccacgggga

SEQ ID NO: 554551 - DNA, 15 bp, Homo sapiens
gtaactaccacgggg

SEQ ID NO: 554552 - DNA, 15 bp, Homo sapiens
agtaactaccacggg

SEQ ID NO: 554553 - DNA, 15 bp, Homo sapiens
cagtaactaccacgg

SEQ ID NO: 554554 - DNA, 15 bp, Homo sapiens
gcagtaactaccacg

SEQ ID NO: 554555 - DNA, 15 bp, Homo sapiens
tgcagtaactaccac

SEQ ID NO: 554556 - DNA, 15 bp, Homo sapiens
ttgcagtaactacca

SEQ ID NO: 554557 - DNA, 15 bp, Homo sapiens
tttgcagtaactacc

SEQ ID NO: 554558 - DNA, 15 bp, Homo sapiens
ctttgcagtaactac

SEQ ID NO: 554559 - DNA, 15 bp, Homo sapiens
tctttgcagtaacta

SEQ ID NO: 554560 - DNA, 15 bp, Homo sapiens
gtctttgcagtaact

SEQ ID NO: 554561 - DNA, 15 bp, Homo sapiens
ggtctttgcagtaac

SEQ ID NO: 554562 - DNA, 15 bp, Homo sapiens
gggtctttgcagtaa

SEQ ID NO: 554563 - DNA, 15 bp, Homo sapiens
agggtctttgcagta

SEQ ID NO: 554564 - DNA, 15 bp, Homo sapiens
cagggtctttgcagt

SEQ ID NO: 554565 - DNA, 15 bp, Homo sapiens
tcagggtctttgcag

SEQ ID NO: 554566 - DNA, 15 bp, Homo sapiens
ctcagggtctttgca

SEQ ID NO: 554567 - DNA, 15 bp, Homo sapiens
cctcagggtctttgc

SEQ ID NO: 554568 - DNA, 15 bp, Homo sapiens
ccctcagggtctttg

SEQ ID NO: 554569 - DNA, 15 bp, Homo sapiens
gccctcagggtcttt

SEQ ID NO: 554570 - DNA, 15 bp, Homo sapiens
agccctcagggtctt

SEQ ID NO: 554571 - DNA, 15 bp, Homo sapiens
tagccctcagggtct

SEQ ID NO: 554572 - DNA, 15 bp, Homo sapiens
ctagccctcagggtc

SEQ ID NO: 554573 - DNA, 15 bp, Homo sapiens
cctagccctcagggt

SEQ ID NO: 554574 - DNA, 15 bp, Homo sapiens
ccctagccctcaggg

SEQ ID NO: 554575 - DNA, 15 bp, Homo sapiens
tccctagccctcagg

SEQ ID NO: 554576 - DNA, 15 bp, Homo sapiens
gtccctagccctcag

SEQ ID NO: 554577 - DNA, 15 bp, Homo sapiens
tgtccctagccctca

SEQ ID NO: 554578 - DNA, 15 bp, Homo sapiens
ttgtccctagccctc

SEQ ID NO: 554579 - DNA, 15 bp, Homo sapiens
tttgtccctagccct

SEQ ID NO: 554580 - DNA, 15 bp, Homo sapiens
atttgtccctagccc

SEQ ID NO: 554581 - DNA, 15 bp, Homo sapiens
gatttgtccctagcc

SEQ ID NO: 554582 - DNA, 15 bp, Homo sapiens
cgatttgtccctagc

SEQ ID NO: 554583 - DNA, 15 bp, Homo sapiens
acgatttgtccctag

SEQ ID NO: 554584 - DNA, 15 bp, Homo sapiens
tacgatttgtcccta

SEQ ID NO: 554585 - DNA, 15 bp, Homo sapiens
gtacgatttgtccct

SEQ ID NO: 554586 - DNA, 15 bp, Homo sapiens
ggtacgatttgtccc

SEQ ID NO: 554587 - DNA, 15 bp, Homo sapiens
gggtacgatttgtcc

SEQ ID NO: 554588 - DNA, 15 bp, Homo sapiens
ggggtacgatttgtc

SEQ ID NO: 554589 - DNA, 15 bp, Homo sapiens
tggggtacgatttgt

SEQ ID NO: 554590 - DNA, 15 bp, Homo sapiens
ttggggtacgatttg

SEQ ID NO: 554591 - DNA, 15 bp, Homo sapiens
gttggggtacgattt

SEQ ID NO: 554592 - DNA, 15 bp, Homo sapiens
ggttggggtacgatt

SEQ ID NO: 554593 - DNA, 15 bp, Homo sapiens
cggttggggtacgat

SEQ ID NO: 554594 - DNA, 15 bp, Homo sapiens
ccggttggggtacga

SEQ ID NO: 554595 - DNA, 15 bp, Homo sapiens
accggttggggtacg

SEQ ID NO: 554596 - DNA, 15 bp, Homo sapiens
caccggttggggtac

SEQ ID NO: 554597 - DNA, 15 bp, Homo sapiens
gcaccggttggggta

SEQ ID NO: 554598 - DNA, 15 bp, Homo sapiens
ggcaccggttggggt

SEQ ID NO: 554599 - DNA, 15 bp, Homo sapiens
gggcaccggttgggg

SEQ ID NO: 554600 - DNA, 15 bp, Homo sapiens
tgggcaccggttggg

SEQ ID NO: 554601 - DNA, 15 bp, Homo sapiens
ctgggcaccggttgg

SEQ ID NO: 554602 - DNA, 15 bp, Homo sapiens
tctgggcaccggttg

SEQ ID NO: 554603 - DNA, 15 bp, Homo sapiens
ctctgggcaccggtt

SEQ ID NO: 554604 - DNA, 15 bp, Homo sapiens
actctgggcaccggt

SEQ ID NO: 554605 - DNA, 15 bp, Homo sapiens
cactctgggcaccgg

SEQ ID NO: 554606 - DNA, 15 bp, Homo sapiens
ccactctgggcaccg

SEQ ID NO: 554607 - DNA, 15 bp, Homo sapiens
gccactctgggcacc

SEQ ID NO: 554608 - DNA, 15 bp, Homo sapiens
tgccactctgggcac

SEQ ID NO: 554609 - DNA, 15 bp, Homo sapiens
ttgccactctgggca

SEQ ID NO: 554610 - DNA, 15 bp, Homo sapiens
tttgccactctgggc

SEQ ID NO: 554611 - DNA, 15 bp, Homo sapiens
ttttgccactctggg

SEQ ID NO: 554612 - DNA, 15 bp, Homo sapiens
tttttgccactctgg

SEQ ID NO: 554613 - DNA, 15 bp, Homo sapiens
atttttgccactctg

SEQ ID NO: 554614 - DNA, 15 bp, Homo sapiens
gatttttgccactct

SEQ ID NO: 554615 - DNA, 15 bp, Homo sapiens
tgatttttgccactc

SEQ ID NO: 554616 - DNA, 15 bp, Homo sapiens
gtgatttttgccact

SEQ ID NO: 554617 - DNA, 15 bp, Homo sapiens
ggtgatttttgccac

SEQ ID NO: 554618 - DNA, 15 bp, Homo sapiens
tggtgatttttgcca

SEQ ID NO: 554619 - DNA, 15 bp, Homo sapiens
atggtgatttttgcc

SEQ ID NO: 554620 - DNA, 15 bp, Homo sapiens
gatggtgatttttgc

SEQ ID NO: 554621 - DNA, 15 bp, Homo sapiens
agatggtgatttttg

SEQ ID NO: 554622 - DNA, 15 bp, Homo sapiens
cagatggtgattttt

SEQ ID NO: 554623 - DNA, 15 bp, Homo sapiens
gcagatggtgatttt

SEQ ID NO: 554624 - DNA, 15 bp, Homo sapiens
tgcagatggtgattt

SEQ ID NO: 554625 - DNA, 15 bp, Homo sapiens
ttgcagatggtgatt

SEQ ID NO: 554626 - DNA, 15 bp, Homo sapiens
gttgcagatggtgat

SEQ ID NO: 554627 - DNA, 15 bp, Homo sapiens
agttgcagatggtga

SEQ ID NO: 554628 - DNA, 15 bp, Homo sapiens
cagttgcagatggtg

SEQ ID NO: 554629 - DNA, 15 bp, Homo sapiens
ccagttgcagatggt

SEQ ID NO: 554630 - DNA, 15 bp, Homo sapiens
gccagttgcagatgg

SEQ ID NO: 554631 - DNA, 15 bp, Homo sapiens
tgccagttgcagatg

SEQ ID NO: 554632 - DNA, 15 bp, Homo sapiens
ctgccagttgcagat

SEQ ID NO: 554633 - DNA, 15 bp, Homo sapiens
actgccagttgcaga

SEQ ID NO: 554634 - DNA, 15 bp, Homo sapiens
tactgccagttgcag

SEQ ID NO: 554635 - DNA, 15 bp, Homo sapiens
ctactgccagttgca

SEQ ID NO: 554636 - DNA, 15 bp, Homo sapiens
gctactgccagttgc

SEQ ID NO: 554637 - DNA, 15 bp, Homo sapiens
ggctactgccagttg

SEQ ID NO: 554638 - DNA, 15 bp, Homo sapiens
tggctactgccagtt

SEQ ID NO: 554639 - DNA, 15 bp, Homo sapiens
atggctactgccagt

SEQ ID NO: 554640 - DNA, 15 bp, Homo sapiens
aatggctactgccag

SEQ ID NO: 554641 - DNA, 15 bp, Homo sapiens
gaatggctactgcca

SEQ ID NO: 554642 - DNA, 15 bp, Homo sapiens
tgaatggctactgcc

SEQ ID NO: 554643 - DNA, 15 bp, Homo sapiens
gtgaatggctactgc

SEQ ID NO: 554644 - DNA, 15 bp, Homo sapiens
cgtgaatggctactg

SEQ ID NO: 554645 - DNA, 15 bp, Homo sapiens
tcgtgaatggctact

SEQ ID NO: 554646 - DNA, 15 bp, Homo sapiens
atcgtgaatggctac

SEQ ID NO: 554647 - DNA, 15 bp, Homo sapiens
tatcgtgaatggcta

SEQ ID NO: 554648 - DNA, 15 bp, Homo sapiens
ctatcgtgaatggct

SEQ ID NO: 554649 - DNA, 15 bp, Homo sapiens
tctatcgtgaatggc

SEQ ID NO: 554650 - DNA, 15 bp, Homo sapiens
atctatcgtgaatgg

SEQ ID NO: 554651 - DNA, 15 bp, Homo sapiens
catctatcgtgaatg

SEQ ID NO: 554652 - DNA, 15 bp, Homo sapiens
ccatctatcgtgaat

SEQ ID NO: 554653 - DNA, 15 bp, Homo sapiens
tccatctatcgtgaa

SEQ ID NO: 554654 - DNA, 15 bp, Homo sapiens
ctccatctatcgtga

SEQ ID NO: 554655 - DNA, 15 bp, Homo sapiens
actccatctatcgtg

SEQ ID NO: 554656 - DNA, 15 bp, Homo sapiens
aactccatctatcgt

SEQ ID NO: 554657 - DNA, 15 bp, Homo sapiens
gaactccatctatcg

SEQ ID NO: 554658 - DNA, 15 bp, Homo sapiens
tgaactccatctatc

SEQ ID NO: 554659 - DNA, 15 bp, Homo sapiens
gtgaactccatctat

SEQ ID NO: 554660 - DNA, 15 bp, Homo sapiens
tgtgaactccatcta

SEQ ID NO: 554661 - DNA, 15 bp, Homo sapiens
atgtgaactccatct

SEQ ID NO: 554662 - DNA, 15 bp, Homo sapiens
aatgtgaactccatc

SEQ ID NO: 554663 - DNA, 15 bp, Homo sapiens
gaatgtgaactccat

SEQ ID NO: 554664 - DNA, 15 bp, Homo sapiens
tgaatgtgaactcca

SEQ ID NO: 554665 - DNA, 15 bp, Homo sapiens
atgaatgtgaactcc

SEQ ID NO: 554666 - DNA, 15 bp, Homo sapiens
aatgaatgtgaactc

SEQ ID NO: 554667 - DNA, 15 bp, Homo sapiens
caatgaatgtgaact

SEQ ID NO: 554668 - DNA, 15 bp, Homo sapiens
acaatgaatgtgaac

SEQ ID NO: 554669 - DNA, 15 bp, Homo sapiens
cacaatgaatgtgaa

SEQ ID NO: 554670 - DNA, 15 bp, Homo sapiens
ccacaatgaatgtga

SEQ ID NO: 554671 - DNA, 15 bp, Homo sapiens
gccacaatgaatgtg

SEQ ID NO: 554672 - DNA, 15 bp, Homo sapiens
agccacaatgaatgt

SEQ ID NO: 554673 - DNA, 15 bp, Homo sapiens
aagccacaatgaatg

SEQ ID NO: 554674 - DNA, 15 bp, Homo sapiens
caagccacaatgaat

SEQ ID NO: 554675 - DNA, 15 bp, Homo sapiens
acaagccacaatgaa

SEQ ID NO: 554676 - DNA, 15 bp, Homo sapiens
tacaagccacaatga

SEQ ID NO: 554677 - DNA, 15 bp, Homo sapiens
atacaagccacaatg

SEQ ID NO: 554678 - DNA, 15 bp, Homo sapiens
tatacaagccacaat

SEQ ID NO: 554679 - DNA, 15 bp, Homo sapiens
atatacaagccacaa

SEQ ID NO: 554680 - DNA, 15 bp, Homo sapiens
aatatacaagccaca

SEQ ID NO: 554681 - DNA, 15 bp, Homo sapiens
gaatatacaagccac

SEQ ID NO: 554682 - DNA, 15 bp, Homo sapiens
ggaatatacaagcca

SEQ ID NO: 554683 - DNA, 15 bp, Homo sapiens
tggaatatacaagcc

SEQ ID NO: 554684 - DNA, 15 bp, Homo sapiens
ttggaatatacaagc

SEQ ID NO: 554685 - DNA, 15 bp, Homo sapiens
attggaatatacaag

SEQ ID NO: 554686 - DNA, 15 bp, Homo sapiens
tattggaatatacaa

SEQ ID NO: 554687 - DNA, 15 bp, Homo sapiens
atattggaatataca

SEQ ID NO: 554688 - DNA, 15 bp, Homo sapiens
tatattggaatatac

SEQ ID NO: 554689 - DNA, 15 bp, Homo sapiens
gtatattggaatata

SEQ ID NO: 554690 - DNA, 15 bp, Homo sapiens
agtatattggaatat

SEQ ID NO: 554691 - DNA, 15 bp, Homo sapiens
cagtatattggaata

SEQ ID NO: 554692 - DNA, 15 bp, Homo sapiens
acagtatattggaat

SEQ ID NO: 554693 - DNA, 15 bp, Homo sapiens
tacagtatattggaa

SEQ ID NO: 554694 - DNA, 15 bp, Homo sapiens
gtacagtatattgga

SEQ ID NO: 554695 - DNA, 15 bp, Homo sapiens
tgtacagtatattgg

SEQ ID NO: 554696 - DNA, 15 bp, Homo sapiens
atgtacagtatattg

SEQ ID NO: 554697 - DNA, 15 bp, Homo sapiens
catgtacagtatatt

SEQ ID NO: 554698 - DNA, 15 bp, Homo sapiens
acatgtacagtatat

SEQ ID NO: 554699 - DNA, 15 bp, Homo sapiens
cacatgtacagtata

SEQ ID NO: 554700 - DNA, 15 bp, Homo sapiens
gcacatgtacagtat

SEQ ID NO: 554701 - DNA, 15 bp, Homo sapiens
tgcacatgtacagta

SEQ ID NO: 554702 - DNA, 15 bp, Homo sapiens
gtgcacatgtacagt

SEQ ID NO: 554703 - DNA, 15 bp, Homo sapiens
cgtgcacatgtacag

SEQ ID NO: 554704 - DNA, 15 bp, Homo sapiens
acgtgcacatgtaca

SEQ ID NO: 554705 - DNA, 15 bp, Homo sapiens
cacgtgcacatgtac

SEQ ID NO: 554706 - DNA, 15 bp, Homo sapiens
tcacgtgcacatgta

SEQ ID NO: 554707 - DNA, 15 bp, Homo sapiens
atcacgtgcacatgt

SEQ ID NO: 554708 - DNA, 15 bp, Homo sapiens
aatcacgtgcacatg

SEQ ID NO: 554709 - DNA, 15 bp, Homo sapiens
aaatcacgtgcacat

SEQ ID NO: 554710 - DNA, 15 bp, Homo sapiens
aaaatcacgtgcaca

SEQ ID NO: 554711 - DNA, 15 bp, Homo sapiens
taaaatcacgtgcac

SEQ ID NO: 554712 - DNA, 15 bp, Homo sapiens
ttaaaatcacgtgca

SEQ ID NO: 554713 - DNA, 15 bp, Homo sapiens
tttaaaatcacgtgc

SEQ ID NO: 554714 - DNA, 15 bp, Homo sapiens
gtttaaaatcacgtg

SEQ ID NO: 554715 - DNA, 15 bp, Homo sapiens
tgtttaaaatcacgt

SEQ ID NO: 554716 - DNA, 15 bp, Homo sapiens
atgtttaaaatcacg

SEQ ID NO: 554717 - DNA, 15 bp, Homo sapiens
gatgtttaaaatcac

SEQ ID NO: 554718 - DNA, 15 bp, Homo sapiens
ggatgtttaaaatca

SEQ ID NO: 554719 - DNA, 15 bp, Homo sapiens
aggatgtttaaaatc

SEQ ID NO: 554720 - DNA, 15 bp, Homo sapiens
gaggatgtttaaaat

SEQ ID NO: 554721 - DNA, 15 bp, Homo sapiens
tgaggatgtttaaaa

SEQ ID NO: 554722 - DNA, 15 bp, Homo sapiens
atgaggatgtttaaa

SEQ ID NO: 554723 - DNA, 15 bp, Homo sapiens
gatgaggatgtttaa

SEQ ID NO: 554724 - DNA, 15 bp, Homo sapiens
tgatgaggatgttta

SEQ ID NO: 554725 - DNA, 15 bp, Homo sapiens
atgatgaggatgttt

SEQ ID NO: 554726 - DNA, 15 bp, Homo sapiens
tatgatgaggatgtt

SEQ ID NO: 554727 - DNA, 15 bp, Homo sapiens
gtatgatgaggatgt

SEQ ID NO: 554728 - DNA, 15 bp, Homo sapiens
tgtatgatgaggatg

SEQ ID NO: 554729 - DNA, 15 bp, Homo sapiens
ctgtatgatgaggat

SEQ ID NO: 554730 - DNA, 15 bp, Homo sapiens
tctgtatgatgagga

SEQ ID NO: 554731 - DNA, 15 bp, Homo sapiens
ttctgtatgatgagg

SEQ ID NO: 554732 - DNA, 15 bp, Homo sapiens
cttctgtatgatgag

SEQ ID NO: 554733 - DNA, 15 bp, Homo sapiens
tcttctgtatgatga

SEQ ID NO: 554734 - DNA, 15 bp, Homo sapiens
atcttctgtatgatg

SEQ ID NO: 554735 - DNA, 15 bp, Homo sapiens
aatcttctgtatgat

SEQ ID NO: 554736 - DNA, 15 bp, Homo sapiens
caatcttctgtatga

SEQ ID NO: 554737 - DNA, 15 bp, Homo sapiens
ccaatcttctgtatg

SEQ ID NO: 554738 - DNA, 15 bp, Homo sapiens
tccaatcttctgtat

SEQ ID NO: 554739 - DNA, 15 bp, Homo sapiens
ttccaatcttctgta

SEQ ID NO: 554740 - DNA, 15 bp, Homo sapiens
tttccaatcttctgt

SEQ ID NO: 554741 - DNA, 15 bp, Homo sapiens
ctttccaatcttctg

SEQ ID NO: 554742 - DNA, 15 bp, Homo sapiens
actttccaatcttct

SEQ ID NO: 554743 - DNA, 15 bp, Homo sapiens
cactttccaatcttc

SEQ ID NO: 554744 - DNA, 15 bp, Homo sapiens
tcactttccaatctt

SEQ ID NO: 554745 - DNA, 15 bp, Homo sapiens
ctcactttccaatct

SEQ ID NO: 554746 - DNA, 15 bp, Homo sapiens
gctcactttccaatc

SEQ ID NO: 554747 - DNA, 15 bp, Homo sapiens
tgctcactttccaat

SEQ ID NO: 554748 - DNA, 15 bp, Homo sapiens
ctgctcactttccaa

SEQ ID NO: 554749 - DNA, 15 bp, Homo sapiens
actgctcactttcca

SEQ ID NO: 554750 - DNA, 15 bp, Homo sapiens
aactgctcactttcc

SEQ ID NO: 554751 - DNA, 15 bp, Homo sapiens
caactgctcactttc

SEQ ID NO: 554752 - DNA, 15 bp, Homo sapiens
ccaactgctcacttt

SEQ ID NO: 554753 - DNA, 15 bp, Homo sapiens
accaactgctcactt

SEQ ID NO: 554754 - DNA, 15 bp, Homo sapiens
aaccaactgctcact

SEQ ID NO: 554755 - DNA, 15 bp, Homo sapiens
aaaccaactgctcac

SEQ ID NO: 554756 - DNA, 15 bp, Homo sapiens
aaaaccaactgctca

SEQ ID NO: 554757 - DNA, 15 bp, Homo sapiens
caaaaccaactgctc

SEQ ID NO: 554758 - DNA, 15 bp, Homo sapiens
acaaaaccaactgct

SEQ ID NO: 554759 - DNA, 15 bp, Homo sapiens
gacaaaaccaactgc

SEQ ID NO: 554760 - DNA, 15 bp, Homo sapiens
cgacaaaaccaactg

SEQ ID NO: 554761 - DNA, 15 bp, Homo sapiens
tcgacaaaaccaact

SEQ ID NO: 554762 - DNA, 15 bp, Homo sapiens
ctcgacaaaaccaac

SEQ ID NO: 554763 - DNA, 15 bp, Homo sapiens
actcgacaaaaccaa

SEQ ID NO: 554764 - DNA, 15 bp, Homo sapiens
gactcgacaaaacca

SEQ ID NO: 554765 - DNA, 15 bp, Homo sapiens
agactcgacaaaacc

SEQ ID NO: 554766 - DNA, 15 bp, Homo sapiens
cagactcgacaaaac

SEQ ID NO: 554767 - DNA, 15 bp, Homo sapiens
ccagactcgacaaaa

SEQ ID NO: 554768 - DNA, 15 bp, Homo sapiens
cccagactcgacaaa

SEQ ID NO: 554769 - DNA, 15 bp, Homo sapiens
acccagactcgacaa

SEQ ID NO: 554770 - DNA, 15 bp, Homo sapiens
gacccagactcgaca

SEQ ID NO: 554771 - DNA, 15 bp, Homo sapiens
agacccagactcgac

SEQ ID NO: 554772 - DNA, 15 bp, Homo sapiens
gagacccagactcga

SEQ ID NO: 554773 - DNA, 15 bp, Homo sapiens
cgagacccagactcg

SEQ ID NO: 554774 - DNA, 15 bp, Homo sapiens
gcgagacccagactc

SEQ ID NO: 554775 - DNA, 15 bp, Homo sapiens
agcgagacccagact

SEQ ID NO: 554776 - DNA, 15 bp, Homo sapiens
gagcgagacccagac

SEQ ID NO: 554777 - DNA, 15 bp, Homo sapiens
ggagcgagacccaga

SEQ ID NO: 554778 - DNA, 15 bp, Homo sapiens
gggagcgagacccag

SEQ ID NO: 554779 - DNA, 15 bp, Homo sapiens
ggggagcgagaccca

SEQ ID NO: 554780 - DNA, 15 bp, Homo sapiens
tggggagcgagaccc

SEQ ID NO: 554781 - DNA, 15 bp, Homo sapiens
ctggggagcgagacc

SEQ ID NO: 554782 - DNA, 15 bp, Homo sapiens
tctggggagcgagac

SEQ ID NO: 554783 - DNA, 15 bp, Homo sapiens
ctctggggagcgaga

SEQ ID NO: 554784 - DNA, 15 bp, Homo sapiens
actctggggagcgag

SEQ ID NO: 554785 - DNA, 15 bp, Homo sapiens
gactctggggagcga

SEQ ID NO: 554786 - DNA, 15 bp, Homo sapiens
tgactctggggagcg

SEQ ID NO: 554787 - DNA, 15 bp, Homo sapiens
ctgactctggggagc

SEQ ID NO: 554788 - DNA, 15 bp, Homo sapiens
actgactctggggag

SEQ ID NO: 554789 - DNA, 15 bp, Homo sapiens
aactgactctgggga

SEQ ID NO: 554790 - DNA, 15 bp, Homo sapiens
taactgactctgggg

SEQ ID NO: 554791 - DNA, 15 bp, Homo sapiens
ttaactgactctggg

SEQ ID NO: 554792 - DNA, 15 bp, Homo sapiens
gttaactgactctgg

SEQ ID NO: 554793 - DNA, 15 bp, Homo sapiens
ggttaactgactctg

SEQ ID NO: 554794 - DNA, 15 bp, Homo sapiens
aggttaactgactct

SEQ ID NO: 554795 - DNA, 15 bp, Homo sapiens
caggttaactgactc

SEQ ID NO: 554796 - DNA, 15 bp, Homo sapiens
tcaggttaactgact

SEQ ID NO: 554797 - DNA, 15 bp, Homo sapiens
gtcaggttaactgac

SEQ ID NO: 554798 - DNA, 15 bp, Homo sapiens
tgtcaggttaactga

SEQ ID NO: 554799 - DNA, 15 bp, Homo sapiens
ctgtcaggttaactg

SEQ ID NO: 554800 - DNA, 15 bp, Homo sapiens
cctgtcaggttaact

SEQ ID NO: 554801 - DNA, 15 bp, Homo sapiens
acctgtcaggttaac

SEQ ID NO: 554802 - DNA, 15 bp, Homo sapiens
aacctgtcaggttaa

SEQ ID NO: 554803 - DNA, 15 bp, Homo sapiens
gaacctgtcaggtta

SEQ ID NO: 554804 - DNA, 15 bp, Homo sapiens
agaacctgtcaggtt

SEQ ID NO: 554805 - DNA, 15 bp, Homo sapiens
cagaacctgtcaggt

SEQ ID NO: 554806 - DNA, 15 bp, Homo sapiens
acagaacctgtcagg

SEQ ID NO: 554807 - DNA, 15 bp, Homo sapiens
aacagaacctgtcag

SEQ ID NO: 554808 - DNA, 15 bp, Homo sapiens
aaacagaacctgtca

SEQ ID NO: 554809 - DNA, 15 bp, Homo sapiens
aaaacagaacctgtc

SEQ ID NO: 554810 - DNA, 15 bp, Homo sapiens
caaaacagaacctgt

SEQ ID NO: 554811 - DNA, 15 bp, Homo sapiens
ccaaaacagaacctg

SEQ ID NO: 554812 - DNA, 15 bp, Homo sapiens
cccaaaacagaacct

SEQ ID NO: 554813 - DNA, 15 bp, Homo sapiens
ccccaaaacagaacc

SEQ ID NO: 554814 - DNA, 15 bp, Homo sapiens
accccaaaacagaac

SEQ ID NO: 554815 - DNA, 15 bp, Homo sapiens
aaccccaaaacagaa

SEQ ID NO: 554816 - DNA, 15 bp, Homo sapiens
caaccccaaaacaga

SEQ ID NO: 554817 - DNA, 15 bp, Homo sapiens
gcaaccccaaaacag

SEQ ID NO: 554818 - DNA, 15 bp, Homo sapiens
ggcaaccccaaaaca

SEQ ID NO: 554819 - DNA, 15 bp, Homo sapiens
gggcaaccccaaaac

SEQ ID NO: 554820 - DNA, 15 bp, Homo sapiens
cgggcaaccccaaaa

SEQ ID NO: 554821 - DNA, 15 bp, Homo sapiens
ccgggcaaccccaaa

SEQ ID NO: 554822 - DNA, 15 bp, Homo sapiens
accgggcaaccccaa

SEQ ID NO: 554823 - DNA, 15 bp, Homo sapiens
caccgggcaacccca

SEQ ID NO: 554824 - DNA, 15 bp, Homo sapiens
ccaccgggcaacccc

SEQ ID NO: 554825 - DNA, 15 bp, Homo sapiens
accaccgggcaaccc

SEQ ID NO: 554826 - DNA, 15 bp, Homo sapiens
caccaccgggcaacc

SEQ ID NO: 554827 - DNA, 15 bp, Homo sapiens
ccaccaccgggcaac

SEQ ID NO: 554828 - DNA, 15 bp, Homo sapiens
gccaccaccgggcaa

SEQ ID NO: 554829 - DNA, 15 bp, Homo sapiens
ggccaccaccgggca

SEQ ID NO: 554830 - DNA, 15 bp, Homo sapiens
tggccaccaccgggc

SEQ ID NO: 554831 - DNA, 15 bp, Homo sapiens
gtggccaccaccggg

SEQ ID NO: 554832 - DNA, 15 bp, Homo sapiens
ggtggccaccaccgg

SEQ ID NO: 554833 - DNA, 15 bp, Homo sapiens
tggtggccaccaccg

SEQ ID NO: 554834 - DNA, 15 bp, Homo sapiens
atggtggccaccacc

SEQ ID NO: 554835 - DNA, 15 bp, Homo sapiens
aatggtggccaccac

SEQ ID NO: 554836 - DNA, 15 bp, Homo sapiens
taatggtggccacca

SEQ ID NO: 554837 - DNA, 15 bp, Homo sapiens
ataatggtggccacc

SEQ ID NO: 554838 - DNA, 15 bp, Homo sapiens
cataatggtggccac

SEQ ID NO: 554839 - DNA, 15 bp, Homo sapiens
tcataatggtggcca

SEQ ID NO: 554840 - DNA, 15 bp, Homo sapiens
atcataatggtggcc

SEQ ID NO: 554841 - DNA, 15 bp, Homo sapiens
aatcataatggtggc

SEQ ID NO: 554842 - DNA, 15 bp, Homo sapiens
aaatcataatggtgg

SEQ ID NO: 554843 - DNA, 15 bp, Homo sapiens
aaaatcataatggtg

SEQ ID NO: 554844 - DNA, 15 bp, Homo sapiens
taaaatcataatggt

SEQ ID NO: 554845 - DNA, 15 bp, Homo sapiens
ttaaaatcataatgg

SEQ ID NO: 554846 - DNA, 15 bp, Homo sapiens
cttaaaatcataatg

SEQ ID NO: 554847 - DNA, 15 bp, Homo sapiens
acttaaaatcataat

SEQ ID NO: 554848 - DNA, 15 bp, Homo sapiens
tacttaaaatcataa

SEQ ID NO: 554849 - DNA, 15 bp, Homo sapiens
ctacttaaaatcata

SEQ ID NO: 554850 - DNA, 15 bp, Homo sapiens
actacttaaaatcat

SEQ ID NO: 554851 - DNA, 15 bp, Homo sapiens
aactacttaaaatca

SEQ ID NO: 554852 - DNA, 15 bp, Homo sapiens
aaactacttaaaatc

SEQ ID NO: 554853 - DNA, 15 bp, Homo sapiens
caaactacttaaaat

SEQ ID NO: 554854 - DNA, 15 bp, Homo sapiens
gcaaactacttaaaa

SEQ ID NO: 554855 - DNA, 15 bp, Homo sapiens
ggcaaactacttaaa

SEQ ID NO: 554856 - DNA, 15 bp, Homo sapiens
aggcaaactacttaa

SEQ ID NO: 554857 - DNA, 15 bp, Homo sapiens
caggcaaactactta

SEQ ID NO: 554858 - DNA, 15 bp, Homo sapiens
acaggcaaactactt

SEQ ID NO: 554859 - DNA, 15 bp, Homo sapiens
cacaggcaaactact

SEQ ID NO: 554860 - DNA, 15 bp, Homo sapiens
acacaggcaaactac

SEQ ID NO: 554861 - DNA, 15 bp, Homo sapiens
cacacaggcaaacta

SEQ ID NO: 554862 - DNA, 15 bp, Homo sapiens
gcacacaggcaaact

SEQ ID NO: 554863 - DNA, 15 bp, Homo sapiens
ggcacacaggcaaac

SEQ ID NO: 554864 - DNA, 15 bp, Homo sapiens
cggcacacaggcaaa

SEQ ID NO: 554865 - DNA, 15 bp, Homo sapiens
tcggcacacaggcaa

SEQ ID NO: 554866 - DNA, 15 bp, Homo sapiens
atcggcacacaggca

SEQ ID NO: 554867 - DNA, 15 bp, Homo sapiens
aatcggcacacaggc

SEQ ID NO: 554868 - DNA, 15 bp, Homo sapiens
caatcggcacacagg

SEQ ID NO: 554869 - DNA, 15 bp, Homo sapiens
acaatcggcacacag

SEQ ID NO: 554870 - DNA, 15 bp, Homo sapiens
aacaatcggcacaca

SEQ ID NO: 554871 - DNA, 15 bp, Homo sapiens
aaacaatcggcacac

SEQ ID NO: 554872 - DNA, 15 bp, Homo sapiens
aaaacaatcggcaca

SEQ ID NO: 554873 - DNA, 15 bp, Homo sapiens
gaaaacaatcggcac

SEQ ID NO: 554874 - DNA, 15 bp, Homo sapiens
tgaaaacaatcggca

SEQ ID NO: 554875 - DNA, 15 bp, Homo sapiens
ctgaaaacaatcggc

SEQ ID NO: 554876 - DNA, 15 bp, Homo sapiens
cctgaaaacaatcgg

SEQ ID NO: 554877 - DNA, 15 bp, Homo sapiens
tcctgaaaacaatcg

SEQ ID NO: 554878 - DNA, 15 bp, Homo sapiens
ctcctgaaaacaatc

SEQ ID NO: 554879 - DNA, 15 bp, Homo sapiens
cctcctgaaaacaat

SEQ ID NO: 554880 - DNA, 15 bp, Homo sapiens
acctcctgaaaacaa

SEQ ID NO: 554881 - DNA, 15 bp, Homo sapiens
cacctcctgaaaaca

SEQ ID NO: 554882 - DNA, 15 bp, Homo sapiens
gcacctcctgaaaac

SEQ ID NO: 554883 - DNA, 15 bp, Homo sapiens
ggcacctcctgaaaa

SEQ ID NO: 554884 - DNA, 15 bp, Homo sapiens
aggcacctcctgaaa

SEQ ID NO: 554885 - DNA, 15 bp, Homo sapiens
caggcacctcctgaa

SEQ ID NO: 554886 - DNA, 15 bp, Homo sapiens
acaggcacctcctga

SEQ ID NO: 554887 - DNA, 15 bp, Homo sapiens
aacaggcacctcctg

SEQ ID NO: 554888 - DNA, 15 bp, Homo sapiens
caacaggcacctcct

SEQ ID NO: 554889 - DNA, 15 bp, Homo sapiens
tcaacaggcacctcc

SEQ ID NO: 554890 - DNA, 15 bp, Homo sapiens
gtcaacaggcacctc

SEQ ID NO: 554891 - DNA, 15 bp, Homo sapiens
agtcaacaggcacct

SEQ ID NO: 554892 - DNA, 15 bp, Homo sapiens
aagtcaacaggcacc

SEQ ID NO: 554893 - DNA, 15 bp, Homo sapiens
gaagtcaacaggcac

SEQ ID NO: 554894 - DNA, 15 bp, Homo sapiens
ggaagtcaacaggca

SEQ ID NO: 554895 - DNA, 15 bp, Homo sapiens
cggaagtcaacaggc

SEQ ID NO: 554896 - DNA, 15 bp, Homo sapiens
gcggaagtcaacagg

SEQ ID NO: 554897 - DNA, 15 bp, Homo sapiens
agcggaagtcaacag

SEQ ID NO: 554898 - DNA, 15 bp, Homo sapiens
gagcggaagtcaaca

SEQ ID NO: 554899 - DNA, 15 bp, Homo sapiens
agagcggaagtcaac

SEQ ID NO: 554900 - DNA, 15 bp, Homo sapiens
cagagcggaagtcaa

SEQ ID NO: 554901 - DNA, 15 bp, Homo sapiens
tcagagcggaagtca

SEQ ID NO: 554902 - DNA, 15 bp, Homo sapiens
ctcagagcggaagtc

SEQ ID NO: 554903 - DNA, 15 bp, Homo sapiens
cctcagagcggaagt

SEQ ID NO: 554904 - DNA, 15 bp, Homo sapiens
ccctcagagcggaag

SEQ ID NO: 554905 - DNA, 15 bp, Homo sapiens
gccctcagagcggaa

SEQ ID NO: 554906 - DNA, 15 bp, Homo sapiens
agccctcagagcgga

SEQ ID NO: 554907 - DNA, 15 bp, Homo sapiens
cagccctcagagcgg

SEQ ID NO: 554908 - DNA, 15 bp, Homo sapiens
tcagccctcagagcg

SEQ ID NO: 554909 - DNA, 15 bp, Homo sapiens
ctcagccctcagagc

SEQ ID NO: 554910 - DNA, 15 bp, Homo sapiens
gctcagccctcagag

SEQ ID NO: 554911 - DNA, 15 bp, Homo sapiens
tgctcagccctcaga

SEQ ID NO: 554912 - DNA, 15 bp, Homo sapiens
gtgctcagccctcag

SEQ ID NO: 554913 - DNA, 15 bp, Homo sapiens
tgtgctcagccctca

SEQ ID NO: 554914 - DNA, 15 bp, Homo sapiens
ctgtgctcagccctc

SEQ ID NO: 554915 - DNA, 15 bp, Homo sapiens
gctgtgctcagccct

SEQ ID NO: 554916 - DNA, 15 bp, Homo sapiens
ggctgtgctcagccc

SEQ ID NO: 554917 - DNA, 15 bp, Homo sapiens
cggctgtgctcagcc

SEQ ID NO: 554918 - DNA, 15 bp, Homo sapiens
gcggctgtgctcagc

SEQ ID NO: 554919 - DNA, 15 bp, Homo sapiens
cgcggctgtgctcag

SEQ ID NO: 554920 - DNA, 15 bp, Homo sapiens
gcgcggctgtgctca

SEQ ID NO: 554921 - DNA, 15 bp, Homo sapiens
ggcgcggctgtgctc

SEQ ID NO: 554922 - DNA, 15 bp, Homo sapiens
gggcgcggctgtgct

SEQ ID NO: 554923 - DNA, 15 bp, Homo sapiens
ggggcgcggctgtgc

SEQ ID NO: 554924 - DNA, 15 bp, Homo sapiens
tggggcgcggctgtg

SEQ ID NO: 554925 - DNA, 15 bp, Homo sapiens
gtggggcgcggctgt

SEQ ID NO: 554926 - DNA, 15 bp, Homo sapiens
ggtggggcgcggctg

SEQ ID NO: 554927 - DNA, 15 bp, Homo sapiens
aggtggggcgcggct

SEQ ID NO: 554928 - DNA, 15 bp, Homo sapiens
gaggtggggcgcggc

SEQ ID NO: 554929 - DNA, 15 bp, Homo sapiens
agaggtggggcgcgg

SEQ ID NO: 554930 - DNA, 15 bp, Homo sapiens
gagaggtggggcgcg

SEQ ID NO: 554931 - DNA, 15 bp, Homo sapiens
tgagaggtggggcgc

SEQ ID NO: 554932 - DNA, 15 bp, Homo sapiens
gtgagaggtggggcg

SEQ ID NO: 554933 - DNA, 15 bp, Homo sapiens
ggtgagaggtggggc

SEQ ID NO: 554934 - DNA, 15 bp, Homo sapiens
aggtgagaggtgggg

SEQ ID NO: 554935 - DNA, 15 bp, Homo sapiens
gaggtgagaggtggg

SEQ ID NO: 554936 - DNA, 15 bp, Homo sapiens
tgaggtgagaggtgg

SEQ ID NO: 554937 - DNA, 15 bp, Homo sapiens
gtgaggtgagaggtg

SEQ ID NO: 554938 - DNA, 15 bp, Homo sapiens
ggtgaggtgagaggt

SEQ ID NO: 554939 - DNA, 15 bp, Homo sapiens
aggtgaggtgagagg

SEQ ID NO: 554940 - DNA, 15 bp, Homo sapiens
caggtgaggtgagag

SEQ ID NO: 554941 - DNA, 15 bp, Homo sapiens
gcaggtgaggtgaga

SEQ ID NO: 554942 - DNA, 15 bp, Homo sapiens
agcaggtgaggtgag

SEQ ID NO: 554943 - DNA, 15 bp, Homo sapiens
gagcaggtgaggtga

SEQ ID NO: 554944 - DNA, 15 bp, Homo sapiens
tgagcaggtgaggtg

SEQ ID NO: 554945 - DNA, 15 bp, Homo sapiens
gtgagcaggtgaggt

SEQ ID NO: 554946 - DNA, 15 bp, Homo sapiens
ggtgagcaggtgagg

SEQ ID NO: 554947 - DNA, 15 bp, Homo sapiens
tggtgagcaggtgag

SEQ ID NO: 554948 - DNA, 15 bp, Homo sapiens
gtggtgagcaggtga

SEQ ID NO: 554949 - DNA, 15 bp, Homo sapiens
tgtggtgagcaggtg

SEQ ID NO: 554950 - DNA, 15 bp, Homo sapiens
gtgtggtgagcaggt

SEQ ID NO: 554951 - DNA, 15 bp, Homo sapiens
agtgtggtgagcagg

SEQ ID NO: 554952 - DNA, 15 bp, Homo sapiens
aagtgtggtgagcag

SEQ ID NO: 554953 - DNA, 15 bp, Homo sapiens
gaagtgtggtgagca

SEQ ID NO: 554954 - DNA, 15 bp, Homo sapiens
agaagtgtggtgagc

SEQ ID NO: 554955 - DNA, 15 bp, Homo sapiens
aagaagtgtggtgag

SEQ ID NO: 554956 - DNA, 15 bp, Homo sapiens
aaagaagtgtggtga

SEQ ID NO: 554957 - DNA, 15 bp, Homo sapiens
aaaagaagtgtggtg

SEQ ID NO: 554958 - DNA, 15 bp, Homo sapiens
gaaaagaagtgtggt

SEQ ID NO: 554959 - DNA, 15 bp, Homo sapiens
ggaaaagaagtgtgg

SEQ ID NO: 554960 - DNA, 15 bp, Homo sapiens
tggaaaagaagtgtg

SEQ ID NO: 554961 - DNA, 15 bp, Homo sapiens
ctggaaaagaagtgt

SEQ ID NO: 554962 - DNA, 15 bp, Homo sapiens
tctggaaaagaagtg

SEQ ID NO: 554963 - DNA, 15 bp, Homo sapiens
atctggaaaagaagt

SEQ ID NO: 554964 - DNA, 15 bp, Homo sapiens
aatctggaaaagaag

SEQ ID NO: 554965 - DNA, 15 bp, Homo sapiens
gaatctggaaaagaa

SEQ ID NO: 554966 - DNA, 15 bp, Homo sapiens
tgaatctggaaaaga

SEQ ID NO: 554967 - DNA, 15 bp, Homo sapiens
ctgaatctggaaaag

SEQ ID NO: 554968 - DNA, 15 bp, Homo sapiens
cctgaatctggaaaa

SEQ ID NO: 554969 - DNA, 15 bp, Homo sapiens
gcctgaatctggaaa

SEQ ID NO: 554970 - DNA, 15 bp, Homo sapiens
agcctgaatctggaa

SEQ ID NO: 554971 - DNA, 15 bp, Homo sapiens
cagcctgaatctgga

SEQ ID NO: 554972 - DNA, 15 bp, Homo sapiens
ccagcctgaatctgg

SEQ ID NO: 554973 - DNA, 15 bp, Homo sapiens
tccagcctgaatctg

SEQ ID NO: 554974 - DNA, 15 bp, Homo sapiens
ttccagcctgaatct

SEQ ID NO: 554975 - DNA, 15 bp, Homo sapiens
tttccagcctgaatc

SEQ ID NO: 554976 - DNA, 15 bp, Homo sapiens
atttccagcctgaat

SEQ ID NO: 554977 - DNA, 15 bp, Homo sapiens
catttccagcctgaa

SEQ ID NO: 554978 - DNA, 15 bp, Homo sapiens
acatttccagcctga

SEQ ID NO: 554979 - DNA, 15 bp, Homo sapiens
cacatttccagcctg

SEQ ID NO: 554980 - DNA, 15 bp, Homo sapiens
ccacatttccagcct

SEQ ID NO: 554981 - DNA, 15 bp, Homo sapiens
cccacatttccagcc

SEQ ID NO: 554982 - DNA, 15 bp, Homo sapiens
acccacatttccagc

SEQ ID NO: 554983 - DNA, 15 bp, Homo sapiens
cacccacatttccag

SEQ ID NO: 554984 - DNA, 15 bp, Homo sapiens
tcacccacatttcca

SEQ ID NO: 554985 - DNA, 15 bp, Homo sapiens
atcacccacatttcc

SEQ ID NO: 554986 - DNA, 15 bp, Homo sapiens
tatcacccacatttc

SEQ ID NO: 554987 - DNA, 15 bp, Homo sapiens
ctatcacccacattt

SEQ ID NO: 554988 - DNA, 15 bp, Homo sapiens
cctatcacccacatt

SEQ ID NO: 554989 - DNA, 15 bp, Homo sapiens
gcctatcacccacat

SEQ ID NO: 554990 - DNA, 15 bp, Homo sapiens
ggcctatcacccaca

SEQ ID NO: 554991 - DNA, 15 bp, Homo sapiens
aggcctatcacccac

SEQ ID NO: 554992 - DNA, 15 bp, Homo sapiens
taggcctatcaccca

SEQ ID NO: 554993 - DNA, 15 bp, Homo sapiens
ataggcctatcaccc

SEQ ID NO: 554994 - DNA, 15 bp, Homo sapiens
aataggcctatcacc

SEQ ID NO: 554995 - DNA, 15 bp, Homo sapiens
aaataggcctatcac

SEQ ID NO: 554996 - DNA, 15 bp, Homo sapiens
aaaataggcctatca

SEQ ID NO: 554997 - DNA, 15 bp, Homo sapiens
caaaataggcctatc

SEQ ID NO: 554998 - DNA, 15 bp, Homo sapiens
gcaaaataggcctat

SEQ ID NO: 554999 - DNA, 15 bp, Homo sapiens
tgcaaaataggccta

SEQ ID NO: 555000 - DNA, 15 bp, Homo sapiens
ctgcaaaataggcct

SEQ ID NO: 555001 - DNA, 15 bp, Homo sapiens
tctgcaaaataggcc

SEQ ID NO: 555002 - DNA, 15 bp, Homo sapiens
atctgcaaaataggc

SEQ ID NO: 555003 - DNA, 15 bp, Homo sapiens
catctgcaaaatagg

SEQ ID NO: 555004 - DNA, 15 bp, Homo sapiens
tcatctgcaaaatag

SEQ ID NO: 555005 - DNA, 15 bp, Homo sapiens
ttcatctgcaaaata

SEQ ID NO: 555006 - DNA, 15 bp, Homo sapiens
tttcatctgcaaaat

SEQ ID NO: 555007 - DNA, 15 bp, Homo sapiens
ctttcatctgcaaaa

SEQ ID NO: 555008 - DNA, 15 bp, Homo sapiens
tctttcatctgcaaa

SEQ ID NO: 555009 - DNA, 15 bp, Homo sapiens
ttctttcatctgcaa

SEQ ID NO: 555010 - DNA, 15 bp, Homo sapiens
gttctttcatctgca

SEQ ID NO: 555011 - DNA, 15 bp, Homo sapiens
agttctttcatctgc

SEQ ID NO: 555012 - DNA, 15 bp, Homo sapiens
cagttctttcatctg

SEQ ID NO: 555013 - DNA, 15 bp, Homo sapiens
tcagttctttcatct

SEQ ID NO: 555014 - DNA, 15 bp, Homo sapiens
ctcagttctttcatc

SEQ ID NO: 555015 - DNA, 15 bp, Homo sapiens
actcagttctttcat

SEQ ID NO: 555016 - DNA, 15 bp, Homo sapiens
gactcagttctttca

SEQ ID NO: 555017 - DNA, 15 bp, Homo sapiens
ggactcagttctttc

SEQ ID NO: 555018 - DNA, 15 bp, Homo sapiens
gggactcagttcttt

SEQ ID NO: 555019 - DNA, 15 bp, Homo sapiens
agggactcagttctt

SEQ ID NO: 555020 - DNA, 15 bp, Homo sapiens
tagggactcagttct

SEQ ID NO: 555021 - DNA, 15 bp, Homo sapiens
ctagggactcagttc

SEQ ID NO: 555022 - DNA, 15 bp, Homo sapiens
gctagggactcagtt

SEQ ID NO: 555023 - DNA, 15 bp, Homo sapiens
cgctagggactcagt

SEQ ID NO: 555024 - DNA, 15 bp, Homo sapiens
tcgctagggactcag

SEQ ID NO: 555025 - DNA, 15 bp, Homo sapiens
ttcgctagggactca

SEQ ID NO: 555026 - DNA, 15 bp, Homo sapiens
cttcgctagggactc

SEQ ID NO: 555027 - DNA, 15 bp, Homo sapiens
acttcgctagggact

SEQ ID NO: 555028 - DNA, 15 bp, Homo sapiens
aacttcgctagggac

SEQ ID NO: 555029 - DNA, 15 bp, Homo sapiens
taacttcgctaggga

SEQ ID NO: 555030 - DNA, 15 bp, Homo sapiens
gtaacttcgctaggg

SEQ ID NO: 555031 - DNA, 15 bp, Homo sapiens
tgtaacttcgctagg

SEQ ID NO: 555032 - DNA, 15 bp, Homo sapiens
gtgtaacttcgctag

SEQ ID NO: 555033 - DNA, 15 bp, Homo sapiens
tgtgtaacttcgcta

SEQ ID NO: 555034 - DNA, 15 bp, Homo sapiens
atgtgtaacttcgct

SEQ ID NO: 555035 - DNA, 15 bp, Homo sapiens
aatgtgtaacttcgc

SEQ ID NO: 555036 - DNA, 15 bp, Homo sapiens
gaatgtgtaacttcg

SEQ ID NO: 555037 - DNA, 15 bp, Homo sapiens
tgaatgtgtaacttc

SEQ ID NO: 555038 - DNA, 15 bp, Homo sapiens
ctgaatgtgtaactt

SEQ ID NO: 555039 - DNA, 15 bp, Homo sapiens
cctgaatgtgtaact

SEQ ID NO: 555040 - DNA, 15 bp, Homo sapiens
ccctgaatgtgtaac

SEQ ID NO: 555041 - DNA, 15 bp, Homo sapiens
cccctgaatgtgtaa

SEQ ID NO: 555042 - DNA, 15 bp, Homo sapiens
acccctgaatgtgta

SEQ ID NO: 555043 - DNA, 15 bp, Homo sapiens
gacccctgaatgtgt

SEQ ID NO: 555044 - DNA, 15 bp, Homo sapiens
agacccctgaatgtg

SEQ ID NO: 555045 - DNA, 15 bp, Homo sapiens
cagacccctgaatgt

SEQ ID NO: 555046 - DNA, 15 bp, Homo sapiens
ccagacccctgaatg

SEQ ID NO: 555047 - DNA, 15 bp, Homo sapiens
cccagacccctgaat

SEQ ID NO: 555048 - DNA, 15 bp, Homo sapiens
tcccagacccctgaa

SEQ ID NO: 555049 - DNA, 15 bp, Homo sapiens
ctcccagacccctga

SEQ ID NO: 555050 - DNA, 15 bp, Homo sapiens
cctcccagacccctg

SEQ ID NO: 555051 - DNA, 15 bp, Homo sapiens
ccctcccagacccct

SEQ ID NO: 555052 - DNA, 15 bp, Homo sapiens
cccctcccagacccc

SEQ ID NO: 555053 - DNA, 15 bp, Homo sapiens
ccccctcccagaccc

SEQ ID NO: 555054 - DNA, 15 bp, Homo sapiens
tccccctcccagacc

SEQ ID NO: 555055 - DNA, 15 bp, Homo sapiens
ttccccctcccagac

SEQ ID NO: 555056 - DNA, 15 bp, Homo sapiens
cttccccctcccaga

SEQ ID NO: 555057 - DNA, 15 bp, Homo sapiens
gcttccccctcccag

SEQ ID NO: 555058 - DNA, 15 bp, Homo sapiens
agcttccccctccca

SEQ ID NO: 555059 - DNA, 15 bp, Homo sapiens
cagcttccccctccc

SEQ ID NO: 555060 - DNA, 15 bp, Homo sapiens
acagcttccccctcc

SEQ ID NO: 555061 - DNA, 15 bp, Homo sapiens
cacagcttccccctc

SEQ ID NO: 555062 - DNA, 15 bp, Homo sapiens
ccacagcttccccct

SEQ ID NO: 555063 - DNA, 15 bp, Homo sapiens
accacagcttccccc

SEQ ID NO: 555064 - DNA, 15 bp, Homo sapiens
taccacagcttcccc

SEQ ID NO: 555065 - DNA, 15 bp, Homo sapiens
ctaccacagcttccc

SEQ ID NO: 555066 - DNA, 15 bp, Homo sapiens
cctaccacagcttcc

SEQ ID NO: 555067 - DNA, 15 bp, Homo sapiens
gcctaccacagcttc

SEQ ID NO: 555068 - DNA, 15 bp, Homo sapiens
tgcctaccacagctt

SEQ ID NO: 555069 - DNA, 15 bp, Homo sapiens
atgcctaccacagct

SEQ ID NO: 555070 - DNA, 15 bp, Homo sapiens
aatgcctaccacagc

SEQ ID NO: 555071 - DNA, 15 bp, Homo sapiens
gaatgcctaccacag

SEQ ID NO: 555072 - DNA, 15 bp, Homo sapiens
agaatgcctaccaca

SEQ ID NO: 555073 - DNA, 15 bp, Homo sapiens
gagaatgcctaccac

SEQ ID NO: 555074 - DNA, 15 bp, Homo sapiens
agagaatgcctacca

SEQ ID NO: 555075 - DNA, 15 bp, Homo sapiens
gagagaatgcctacc

SEQ ID NO: 555076 - DNA, 15 bp, Homo sapiens
agagagaatgcctac

SEQ ID NO: 555077 - DNA, 15 bp, Homo sapiens
cagagagaatgccta

SEQ ID NO: 555078 - DNA, 15 bp, Homo sapiens
acagagagaatgcct

SEQ ID NO: 555079 - DNA, 15 bp, Homo sapiens
cacagagagaatgcc

SEQ ID NO: 555080 - DNA, 15 bp, Homo sapiens
acacagagagaatgc

SEQ ID NO: 555081 - DNA, 15 bp, Homo sapiens
cacacagagagaatg

SEQ ID NO: 555082 - DNA, 15 bp, Homo sapiens
acacacagagagaat

SEQ ID NO: 555083 - DNA, 15 bp, Homo sapiens
gacacacagagagaa

SEQ ID NO: 555084 - DNA, 15 bp, Homo sapiens
agacacacagagaga

SEQ ID NO: 555085 - DNA, 15 bp, Homo sapiens
tagacacacagagag

SEQ ID NO: 555086 - DNA, 15 bp, Homo sapiens
gtagacacacagaga

SEQ ID NO: 555087 - DNA, 15 bp, Homo sapiens
tgtagacacacagag

SEQ ID NO: 555088 - DNA, 15 bp, Homo sapiens
atgtagacacacaga

SEQ ID NO: 555089 - DNA, 15 bp, Homo sapiens
tatgtagacacacag

SEQ ID NO: 555090 - DNA, 15 bp, Homo sapiens
ctatgtagacacaca

SEQ ID NO: 555091 - DNA, 15 bp, Homo sapiens
gctatgtagacacac

SEQ ID NO: 555092 - DNA, 15 bp, Homo sapiens
ggctatgtagacaca

SEQ ID NO: 555093 - DNA, 15 bp, Homo sapiens
aggctatgtagacac

SEQ ID NO: 555094 - DNA, 15 bp, Homo sapiens
caggctatgtagaca

SEQ ID NO: 555095 - DNA, 15 bp, Homo sapiens
gcaggctatgtagac

SEQ ID NO: 555096 - DNA, 15 bp, Homo sapiens
ggcaggctatgtaga

SEQ ID NO: 555097 - DNA, 15 bp, Homo sapiens
gggcaggctatgtag

SEQ ID NO: 555098 - DNA, 15 bp, Homo sapiens
agggcaggctatgta

SEQ ID NO: 555099 - DNA, 15 bp, Homo sapiens
gagggcaggctatgt

SEQ ID NO: 555100 - DNA, 15 bp, Homo sapiens
agagggcaggctatg

SEQ ID NO: 555101 - DNA, 15 bp, Homo sapiens
aagagggcaggctat

SEQ ID NO: 555102 - DNA, 15 bp, Homo sapiens
gaagagggcaggcta

SEQ ID NO: 555103 - DNA, 15 bp, Homo sapiens
ggaagagggcaggct

SEQ ID NO: 555104 - DNA, 15 bp, Homo sapiens
gggaagagggcaggc

SEQ ID NO: 555105 - DNA, 15 bp, Homo sapiens
tgggaagagggcagg

SEQ ID NO: 555106 - DNA, 15 bp, Homo sapiens
gtgggaagagggcag

SEQ ID NO: 555107 - DNA, 15 bp, Homo sapiens
ggtgggaagagggca

SEQ ID NO: 555108 - DNA, 15 bp, Homo sapiens
cggtgggaagagggc

SEQ ID NO: 555109 - DNA, 15 bp, Homo sapiens
acggtgggaagaggg

SEQ ID NO: 555110 - DNA, 15 bp, Homo sapiens
cacggtgggaagagg

SEQ ID NO: 555111 - DNA, 15 bp, Homo sapiens
gcacggtgggaagag

SEQ ID NO: 555112 - DNA, 15 bp, Homo sapiens
ggcacggtgggaaga

SEQ ID NO: 555113 - DNA, 15 bp, Homo sapiens
tggcacggtgggaag

SEQ ID NO: 555114 - DNA, 15 bp, Homo sapiens
ctggcacggtgggaa

SEQ ID NO: 555115 - DNA, 15 bp, Homo sapiens
actggcacggtggga

SEQ ID NO: 555116 - DNA, 15 bp, Homo sapiens
tactggcacggtggg

SEQ ID NO: 555117 - DNA, 15 bp, Homo sapiens
atactggcacggtgg

SEQ ID NO: 555118 - DNA, 15 bp, Homo sapiens
aatactggcacggtg

SEQ ID NO: 555119 - DNA, 15 bp, Homo sapiens
caatactggcacggt

SEQ ID NO: 555120 - DNA, 15 bp, Homo sapiens
ccaatactggcacgg

SEQ ID NO: 555121 - DNA, 15 bp, Homo sapiens
cccaatactggcacg

SEQ ID NO: 555122 - DNA, 15 bp, Homo sapiens
tcccaatactggcac

SEQ ID NO: 555123 - DNA, 15 bp, Homo sapiens
ttcccaatactggca

SEQ ID NO: 555124 - DNA, 15 bp, Homo sapiens
attcccaatactggc

SEQ ID NO: 555125 - DNA, 15 bp, Homo sapiens
aattcccaatactgg

SEQ ID NO: 555126 - DNA, 15 bp, Homo sapiens
caattcccaatactg

SEQ ID NO: 555127 - DNA, 15 bp, Homo sapiens
tcaattcccaatact

SEQ ID NO: 555128 - DNA, 15 bp, Homo sapiens
ctcaattcccaatac

SEQ ID NO: 555129 - DNA, 15 bp, Homo sapiens
actcaattcccaata

SEQ ID NO: 555130 - DNA, 15 bp, Homo sapiens
cactcaattcccaat

SEQ ID NO: 555131 - DNA, 15 bp, Homo sapiens
ccactcaattcccaa

SEQ ID NO: 555132 - DNA, 15 bp, Homo sapiens
gccactcaattccca

SEQ ID NO: 555133 - DNA, 15 bp, Homo sapiens
ggccactcaattccc

SEQ ID NO: 555134 - DNA, 15 bp, Homo sapiens
cggccactcaattcc

SEQ ID NO: 555135 - DNA, 15 bp, Homo sapiens
acggccactcaattc

SEQ ID NO: 555136 - DNA, 15 bp, Homo sapiens
cacggccactcaatt

SEQ ID NO: 555137 - DNA, 15 bp, Homo sapiens
gcacggccactcaat

SEQ ID NO: 555138 - DNA, 15 bp, Homo sapiens
cgcacggccactcaa

SEQ ID NO: 555139 - DNA, 15 bp, Homo sapiens
acgcacggccactca

SEQ ID NO: 555140 - DNA, 15 bp, Homo sapiens
cacgcacggccactc

SEQ ID NO: 555141 - DNA, 15 bp, Homo sapiens
gcacgcacggccact

SEQ ID NO: 555142 - DNA, 15 bp, Homo sapiens
tgcacgcacggccac

SEQ ID NO: 555143 - DNA, 15 bp, Homo sapiens
gtgcacgcacggcca

SEQ ID NO: 555144 - DNA, 15 bp, Homo sapiens
ggtgcacgcacggcc

SEQ ID NO: 555145 - DNA, 15 bp, Homo sapiens
tggtgcacgcacggc

SEQ ID NO: 555146 - DNA, 15 bp, Homo sapiens
ctggtgcacgcacgg

SEQ ID NO: 555147 - DNA, 15 bp, Homo sapiens
cctggtgcacgcacg

SEQ ID NO: 555148 - DNA, 15 bp, Homo sapiens
ccctggtgcacgcac

SEQ ID NO: 555149 - DNA, 15 bp, Homo sapiens
accctggtgcacgca

SEQ ID NO: 555150 - DNA, 15 bp, Homo sapiens
caccctggtgcacgc

SEQ ID NO: 555151 - DNA, 15 bp, Homo sapiens
tcaccctggtgcacg

SEQ ID NO: 555152 - DNA, 15 bp, Homo sapiens
ctcaccctggtgcac

SEQ ID NO: 555153 - DNA, 15 bp, Homo sapiens
actcaccctggtgca

SEQ ID NO: 555154 - DNA, 15 bp, Homo sapiens
aactcaccctggtgc

SEQ ID NO: 555155 - DNA, 15 bp, Homo sapiens
taactcaccctggtg

SEQ ID NO: 555156 - DNA, 15 bp, Homo sapiens
ctaactcaccctggt

SEQ ID NO: 555157 - DNA, 15 bp, Homo sapiens
cctaactcaccctgg

SEQ ID NO: 555158 - DNA, 15 bp, Homo sapiens
acctaactcaccctg

SEQ ID NO: 555159 - DNA, 15 bp, Homo sapiens
cacctaactcaccct

SEQ ID NO: 555160 - DNA, 15 bp, Homo sapiens
acacctaactcaccc

SEQ ID NO: 555161 - DNA, 15 bp, Homo sapiens
cacacctaactcacc

SEQ ID NO: 555162 - DNA, 15 bp, Homo sapiens
gcacacctaactcac

SEQ ID NO: 555163 - DNA, 15 bp, Homo sapiens
tgcacacctaactca

SEQ ID NO: 555164 - DNA, 15 bp, Homo sapiens
ctgcacacctaactc

SEQ ID NO: 555165 - DNA, 15 bp, Homo sapiens
gctgcacacctaact

SEQ ID NO: 555166 - DNA, 15 bp, Homo sapiens
tgctgcacacctaac

SEQ ID NO: 555167 - DNA, 15 bp, Homo sapiens
gtgctgcacacctaa

SEQ ID NO: 555168 - DNA, 15 bp, Homo sapiens
ggtgctgcacaccta

SEQ ID NO: 555169 - DNA, 15 bp, Homo sapiens
aggtgctgcacacct

SEQ ID NO: 555170 - DNA, 15 bp, Homo sapiens
caggtgctgcacacc

SEQ ID NO: 555171 - DNA, 15 bp, Homo sapiens
tcaggtgctgcacac

SEQ ID NO: 555172 - DNA, 15 bp, Homo sapiens
ctcaggtgctgcaca

SEQ ID NO: 555173 - DNA, 15 bp, Homo sapiens
tctcaggtgctgcac

SEQ ID NO: 555174 - DNA, 15 bp, Homo sapiens
ctctcaggtgctgca

SEQ ID NO: 555175 - DNA, 15 bp, Homo sapiens
cctctcaggtgctgc

SEQ ID NO: 555176 - DNA, 15 bp, Homo sapiens
ccctctcaggtgctg

SEQ ID NO: 555177 - DNA, 15 bp, Homo sapiens
gccctctcaggtgct

SEQ ID NO: 555178 - DNA, 15 bp, Homo sapiens
agccctctcaggtgc

SEQ ID NO: 555179 - DNA, 15 bp, Homo sapiens
aagccctctcaggtg

SEQ ID NO: 555180 - DNA, 15 bp, Homo sapiens
taagccctctcaggt

SEQ ID NO: 555181 - DNA, 15 bp, Homo sapiens
ataagccctctcagg

SEQ ID NO: 555182 - DNA, 15 bp, Homo sapiens
aataagccctctcag

SEQ ID NO: 555183 - DNA, 15 bp, Homo sapiens
taataagccctctca

SEQ ID NO: 555184 - DNA, 15 bp, Homo sapiens
ttaataagccctctc

SEQ ID NO: 555185 - DNA, 15 bp, Homo sapiens
cttaataagccctct

SEQ ID NO: 555186 - DNA, 15 bp, Homo sapiens
ccttaataagccctc

SEQ ID NO: 555187 - DNA, 15 bp, Homo sapiens
cccttaataagccct

SEQ ID NO: 555188 - DNA, 15 bp, Homo sapiens
ccccttaataagccc

SEQ ID NO: 555189 - DNA, 15 bp, Homo sapiens
gccccttaataagcc

SEQ ID NO: 555190 - DNA, 15 bp, Homo sapiens
ggccccttaataagc

SEQ ID NO: 555191 - DNA, 15 bp, Homo sapiens
aggccccttaataag

SEQ ID NO: 555192 - DNA, 15 bp, Homo sapiens
aaggccccttaataa

SEQ ID NO: 555193 - DNA, 15 bp, Homo sapiens
caaggccccttaata

SEQ ID NO: 555194 - DNA, 15 bp, Homo sapiens
ccaaggccccttaat

SEQ ID NO: 555195 - DNA, 15 bp, Homo sapiens
gccaaggccccttaa

SEQ ID NO: 555196 - DNA, 15 bp, Homo sapiens
ggccaaggcccctta

SEQ ID NO: 555197 - DNA, 15 bp, Homo sapiens
gggccaaggcccctt

SEQ ID NO: 555198 - DNA, 15 bp, Homo sapiens
agggccaaggcccct

SEQ ID NO: 555199 - DNA, 15 bp, Homo sapiens
tagggccaaggcccc

SEQ ID NO: 555200 - DNA, 15 bp, Homo sapiens
gtagggccaaggccc

SEQ ID NO: 555201 - DNA, 15 bp, Homo sapiens
agtagggccaaggcc

SEQ ID NO: 555202 - DNA, 15 bp, Homo sapiens
cagtagggccaaggc

SEQ ID NO: 555203 - DNA, 15 bp, Homo sapiens
tcagtagggccaagg

SEQ ID NO: 555204 - DNA, 15 bp, Homo sapiens
ctcagtagggccaag

SEQ ID NO: 555205 - DNA, 15 bp, Homo sapiens
cctcagtagggccaa

SEQ ID NO: 555206 - DNA, 15 bp, Homo sapiens
ccctcagtagggcca

SEQ ID NO: 555207 - DNA, 15 bp, Homo sapiens
cccctcagtagggcc

SEQ ID NO: 555208 - DNA, 15 bp, Homo sapiens
acccctcagtagggc

SEQ ID NO: 555209 - DNA, 15 bp, Homo sapiens
gacccctcagtaggg

SEQ ID NO: 555210 - DNA, 15 bp, Homo sapiens
agacccctcagtagg

SEQ ID NO: 555211 - DNA, 15 bp, Homo sapiens
tagacccctcagtag

SEQ ID NO: 555212 - DNA, 15 bp, Homo sapiens
ctagacccctcagta

SEQ ID NO: 555213 - DNA, 15 bp, Homo sapiens
actagacccctcagt

SEQ ID NO: 555214 - DNA, 15 bp, Homo sapiens
gactagacccctcag

SEQ ID NO: 555215 - DNA, 15 bp, Homo sapiens
agactagacccctca

SEQ ID NO: 555216 - DNA, 15 bp, Homo sapiens
cagactagacccctc

SEQ ID NO: 555217 - DNA, 15 bp, Homo sapiens
ccagactagacccct

SEQ ID NO: 555218 - DNA, 15 bp, Homo sapiens
tccagactagacccc

SEQ ID NO: 555219 - DNA, 15 bp, Homo sapiens
atccagactagaccc

SEQ ID NO: 555220 - DNA, 15 bp, Homo sapiens
catccagactagacc

SEQ ID NO: 555221 - DNA, 15 bp, Homo sapiens
gcatccagactagac

SEQ ID NO: 555222 - DNA, 15 bp, Homo sapiens
agcatccagactaga

SEQ ID NO: 555223 - DNA, 15 bp, Homo sapiens
aagcatccagactag

SEQ ID NO: 555224 - DNA, 15 bp, Homo sapiens
gaagcatccagacta

SEQ ID NO: 555225 - DNA, 15 bp, Homo sapiens
ggaagcatccagact

SEQ ID NO: 555226 - DNA, 15 bp, Homo sapiens
gggaagcatccagac

SEQ ID NO: 555227 - DNA, 15 bp, Homo sapiens
ggggaagcatccaga

SEQ ID NO: 555228 - DNA, 15 bp, Homo sapiens
gggggaagcatccag

SEQ ID NO: 555229 - DNA, 15 bp, Homo sapiens
ggggggaagcatcca

SEQ ID NO: 555230 - DNA, 15 bp, Homo sapiens
tggggggaagcatcc

SEQ ID NO: 555231 - DNA, 15 bp, Homo sapiens
ctggggggaagcatc

SEQ ID NO: 555232 - DNA, 15 bp, Homo sapiens
cctggggggaagcat

SEQ ID NO: 555233 - DNA, 15 bp, Homo sapiens
acctggggggaagca

SEQ ID NO: 555234 - DNA, 15 bp, Homo sapiens
aacctggggggaagc

SEQ ID NO: 555235 - DNA, 15 bp, Homo sapiens
caacctggggggaag

SEQ ID NO: 555236 - DNA, 15 bp, Homo sapiens
tcaacctggggggaa

SEQ ID NO: 555237 - DNA, 15 bp, Homo sapiens
gtcaacctgggggga

SEQ ID NO: 555238 - DNA, 15 bp, Homo sapiens
agtcaacctgggggg

SEQ ID NO: 555239 - DNA, 15 bp, Homo sapiens
aagtcaacctggggg

SEQ ID NO: 555240 - DNA, 15 bp, Homo sapiens
gaagtcaacctgggg

SEQ ID NO: 555241 - DNA, 15 bp, Homo sapiens
agaagtcaacctggg

SEQ ID NO: 555242 - DNA, 15 bp, Homo sapiens
cagaagtcaacctgg

SEQ ID NO: 555243 - DNA, 15 bp, Homo sapiens
ccagaagtcaacctg

SEQ ID NO: 555244 - DNA, 15 bp, Homo sapiens
gccagaagtcaacct

SEQ ID NO: 555245 - DNA, 15 bp, Homo sapiens
tgccagaagtcaacc

SEQ ID NO: 555246 - DNA, 15 bp, Homo sapiens
atgccagaagtcaac

SEQ ID NO: 555247 - DNA, 15 bp, Homo sapiens
aatgccagaagtcaa

SEQ ID NO: 555248 - DNA, 15 bp, Homo sapiens
gaatgccagaagtca

SEQ ID NO: 555249 - DNA, 15 bp, Homo sapiens
ggaatgccagaagtc

SEQ ID NO: 555250 - DNA, 15 bp, Homo sapiens
cggaatgccagaagt

SEQ ID NO: 555251 - DNA, 15 bp, Homo sapiens
tcggaatgccagaag

SEQ ID NO: 555252 - DNA, 15 bp, Homo sapiens
atcggaatgccagaa

SEQ ID NO: 555253 - DNA, 15 bp, Homo sapiens
gatcggaatgccaga

SEQ ID NO: 555254 - DNA, 15 bp, Homo sapiens
tgatcggaatgccag

SEQ ID NO: 555255 - DNA, 15 bp, Homo sapiens
ctgatcggaatgcca

SEQ ID NO: 555256 - DNA, 15 bp, Homo sapiens
actgatcggaatgcc

SEQ ID NO: 555257 - DNA, 15 bp, Homo sapiens
cactgatcggaatgc

SEQ ID NO: 555258 - DNA, 15 bp, Homo sapiens
gcactgatcggaatg

SEQ ID NO: 555259 - DNA, 15 bp, Homo sapiens
tgcactgatcggaat

SEQ ID NO: 555260 - DNA, 15 bp, Homo sapiens
ttgcactgatcggaa

SEQ ID NO: 555261 - DNA, 15 bp, Homo sapiens
gttgcactgatcgga

SEQ ID NO: 555262 - DNA, 15 bp, Homo sapiens
tgttgcactgatcgg

SEQ ID NO: 555263 - DNA, 15 bp, Homo sapiens
atgttgcactgatcg

SEQ ID NO: 555264 - DNA, 15 bp, Homo sapiens
catgttgcactgatc

SEQ ID NO: 555265 - DNA, 15 bp, Homo sapiens
tcatgttgcactgat

SEQ ID NO: 555266 - DNA, 15 bp, Homo sapiens
atcatgttgcactga

SEQ ID NO: 555267 - DNA, 15 bp, Homo sapiens
gatcatgttgcactg

SEQ ID NO: 555268 - DNA, 15 bp, Homo sapiens
tgatcatgttgcact

SEQ ID NO: 555269 - DNA, 15 bp, Homo sapiens
ttgatcatgttgcac

SEQ ID NO: 555270 - DNA, 15 bp, Homo sapiens
attgatcatgttgca

SEQ ID NO: 555271 - DNA, 15 bp, Homo sapiens
cattgatcatgttgc

SEQ ID NO: 555272 - DNA, 15 bp, Homo sapiens
ccattgatcatgttg

SEQ ID NO: 555273 - DNA, 15 bp, Homo sapiens
tccattgatcatgtt

SEQ ID NO: 555274 - DNA, 15 bp, Homo sapiens
ttccattgatcatgt

SEQ ID NO: 555275 - DNA, 15 bp, Homo sapiens
gttccattgatcatg

SEQ ID NO: 555276 - DNA, 15 bp, Homo sapiens
agttccattgatcat

SEQ ID NO: 555277 - DNA, 15 bp, Homo sapiens
aagttccattgatca

SEQ ID NO: 555278 - DNA, 15 bp, Homo sapiens
gaagttccattgatc

SEQ ID NO: 555279 - DNA, 15 bp, Homo sapiens
agaagttccattgat

SEQ ID NO: 555280 - DNA, 15 bp, Homo sapiens
cagaagttccattga

SEQ ID NO: 555281 - DNA, 15 bp, Homo sapiens
ccagaagttccattg

SEQ ID NO: 555282 - DNA, 15 bp, Homo sapiens
cccagaagttccatt

SEQ ID NO: 555283 - DNA, 15 bp, Homo sapiens
gcccagaagttccat

SEQ ID NO: 555284 - DNA, 15 bp, Homo sapiens
tgcccagaagttcca

SEQ ID NO: 555285 - DNA, 15 bp, Homo sapiens
ttgcccagaagttcc

SEQ ID NO: 555286 - DNA, 15 bp, Homo sapiens
tttgcccagaagttc

SEQ ID NO: 555287 - DNA, 15 bp, Homo sapiens
atttgcccagaagtt

SEQ ID NO: 555288 - DNA, 15 bp, Homo sapiens
catttgcccagaagt

SEQ ID NO: 555289 - DNA, 15 bp, Homo sapiens
acatttgcccagaag

SEQ ID NO: 555290 - DNA, 15 bp, Homo sapiens
cacatttgcccagaa

SEQ ID NO: 555291 - DNA, 15 bp, Homo sapiens
ccacatttgcccaga

SEQ ID NO: 555292 - DNA, 15 bp, Homo sapiens
gccacatttgcccag

SEQ ID NO: 555293 - DNA, 15 bp, Homo sapiens
ggccacatttgccca

SEQ ID NO: 555294 - DNA, 15 bp, Homo sapiens
cggccacatttgccc

SEQ ID NO: 555295 - DNA, 15 bp, Homo sapiens
gcggccacatttgcc

SEQ ID NO: 555296 - DNA, 15 bp, Homo sapiens
ggcggccacatttgc

SEQ ID NO: 555297 - DNA, 15 bp, Homo sapiens
gggcggccacatttg

SEQ ID NO: 555298 - DNA, 15 bp, Homo sapiens
agggcggccacattt

SEQ ID NO: 555299 - DNA, 15 bp, Homo sapiens
aagggcggccacatt

SEQ ID NO: 555300 - DNA, 15 bp, Homo sapiens
gaagggcggccacat

SEQ ID NO: 555301 - DNA, 15 bp, Homo sapiens
tgaagggcggccaca

SEQ ID NO: 555302 - DNA, 15 bp, Homo sapiens
atgaagggcggccac

SEQ ID NO: 555303 - DNA, 15 bp, Homo sapiens
catgaagggcggcca

SEQ ID NO: 555304 - DNA, 15 bp, Homo sapiens
tcatgaagggcggcc

SEQ ID NO: 555305 - DNA, 15 bp, Homo sapiens
gtcatgaagggcggc

SEQ ID NO: 555306 - DNA, 15 bp, Homo sapiens
agtcatgaagggcgg

SEQ ID NO: 555307 - DNA, 15 bp, Homo sapiens
gagtcatgaagggcg

SEQ ID NO: 555308 - DNA, 15 bp, Homo sapiens
ggagtcatgaagggc

SEQ ID NO: 555309 - DNA, 15 bp, Homo sapiens
aggagtcatgaaggg

SEQ ID NO: 555310 - DNA, 15 bp, Homo sapiens
caggagtcatgaagg

SEQ ID NO: 555311 - DNA, 15 bp, Homo sapiens
tcaggagtcatgaag

SEQ ID NO: 555312 - DNA, 15 bp, Homo sapiens
ctcaggagtcatgaa

SEQ ID NO: 555313 - DNA, 15 bp, Homo sapiens
actcaggagtcatga

SEQ ID NO: 555314 - DNA, 15 bp, Homo sapiens
gactcaggagtcatg

SEQ ID NO: 555315 - DNA, 15 bp, Homo sapiens
ggactcaggagtcat

SEQ ID NO: 555316 - DNA, 15 bp, Homo sapiens
aggactcaggagtca

SEQ ID NO: 555317 - DNA, 15 bp, Homo sapiens
gaggactcaggagtc

SEQ ID NO: 555318 - DNA, 15 bp, Homo sapiens
cgaggactcaggagt

SEQ ID NO: 555319 - DNA, 15 bp, Homo sapiens
gcgaggactcaggag

SEQ ID NO: 555320 - DNA, 15 bp, Homo sapiens
agcgaggactcagga

SEQ ID NO: 555321 - DNA, 15 bp, Homo sapiens
cagcgaggactcagg

SEQ ID NO: 555322 - DNA, 15 bp, Homo sapiens
ccagcgaggactcag

SEQ ID NO: 555323 - DNA, 15 bp, Homo sapiens
tccagcgaggactca

SEQ ID NO: 555324 - DNA, 15 bp, Homo sapiens
ctccagcgaggactc

SEQ ID NO: 555325 - DNA, 15 bp, Homo sapiens
actccagcgaggact

SEQ ID NO: 555326 - DNA, 15 bp, Homo sapiens
aactccagcgaggac

SEQ ID NO: 555327 - DNA, 15 bp, Homo sapiens
gaactccagcgagga

SEQ ID NO: 555328 - DNA, 15 bp, Homo sapiens
agaactccagcgagg

SEQ ID NO: 555329 - DNA, 15 bp, Homo sapiens
tagaactccagcgag

SEQ ID NO: 555330 - DNA, 15 bp, Homo sapiens
gtagaactccagcga

SEQ ID NO: 555331 - DNA, 15 bp, Homo sapiens
tgtagaactccagcg

SEQ ID NO: 555332 - DNA, 15 bp, Homo sapiens
ctgtagaactccagc

SEQ ID NO: 555333 - DNA, 15 bp, Homo sapiens
gctgtagaactccag

SEQ ID NO: 555334 - DNA, 15 bp, Homo sapiens
ggctgtagaactcca

SEQ ID NO: 555335 - DNA, 15 bp, Homo sapiens
gggctgtagaactcc

SEQ ID NO: 555336 - DNA, 15 bp, Homo sapiens
cgggctgtagaactc

SEQ ID NO: 555337 - DNA, 15 bp, Homo sapiens
ccgggctgtagaact

SEQ ID NO: 555338 - DNA, 15 bp, Homo sapiens
tccgggctgtagaac

SEQ ID NO: 555339 - DNA, 15 bp, Homo sapiens
ctccgggctgtagaa

SEQ ID NO: 555340 - DNA, 15 bp, Homo sapiens
cctccgggctgtaga

SEQ ID NO: 555341 - DNA, 15 bp, Homo sapiens
gcctccgggctgtag

SEQ ID NO: 555342 - DNA, 15 bp, Homo sapiens
ggcctccgggctgta

SEQ ID NO: 555343 - DNA, 15 bp, Homo sapiens
aggcctccgggctgt

SEQ ID NO: 555344 - DNA, 15 bp, Homo sapiens
caggcctccgggctg

SEQ ID NO: 555345 - DNA, 15 bp, Homo sapiens
gcaggcctccgggct

SEQ ID NO: 555346 - DNA, 15 bp, Homo sapiens
ggcaggcctccgggc

SEQ ID NO: 555347 - DNA, 15 bp, Homo sapiens
cggcaggcctccggg

SEQ ID NO: 555348 - DNA, 15 bp, Homo sapiens
ccggcaggcctccgg

SEQ ID NO: 555349 - DNA, 15 bp, Homo sapiens
accggcaggcctccg

SEQ ID NO: 555350 - DNA, 15 bp, Homo sapiens
taccggcaggcctcc

SEQ ID NO: 555351 - DNA, 15 bp, Homo sapiens
ttaccggcaggcctc

SEQ ID NO: 555352 - DNA, 15 bp, Homo sapiens
attaccggcaggcct

SEQ ID NO: 555353 - DNA, 15 bp, Homo sapiens
gattaccggcaggcc

SEQ ID NO: 555354 - DNA, 15 bp, Homo sapiens
tgattaccggcaggc

SEQ ID NO: 555355 - DNA, 15 bp, Homo sapiens
gtgattaccggcagg

SEQ ID NO: 555356 - DNA, 15 bp, Homo sapiens
agtgattaccggcag

SEQ ID NO: 555357 - DNA, 15 bp, Homo sapiens
cagtgattaccggca

SEQ ID NO: 555358 - DNA, 15 bp, Homo sapiens
ccagtgattaccggc

SEQ ID NO: 555359 - DNA, 15 bp, Homo sapiens
cccagtgattaccgg

SEQ ID NO: 555360 - DNA, 15 bp, Homo sapiens
tcccagtgattaccg

SEQ ID NO: 555361 - DNA, 15 bp, Homo sapiens
gtcccagtgattacc

SEQ ID NO: 555362 - DNA, 15 bp, Homo sapiens
agtcccagtgattac

SEQ ID NO: 555363 - DNA, 15 bp, Homo sapiens
gagtcccagtgatta

SEQ ID NO: 555364 - DNA, 15 bp, Homo sapiens
cgagtcccagtgatt

SEQ ID NO: 555365 - DNA, 15 bp, Homo sapiens
ccgagtcccagtgat

SEQ ID NO: 555366 - DNA, 15 bp, Homo sapiens
cccgagtcccagtga

SEQ ID NO: 555367 - DNA, 15 bp, Homo sapiens
ccccgagtcccagtg

SEQ ID NO: 555368 - DNA, 15 bp, Homo sapiens
gccccgagtcccagt

SEQ ID NO: 555369 - DNA, 15 bp, Homo sapiens
ggccccgagtcccag

SEQ ID NO: 555370 - DNA, 15 bp, Homo sapiens
aggccccgagtccca

SEQ ID NO: 555371 - DNA, 15 bp, Homo sapiens
gaggccccgagtccc

SEQ ID NO: 555372 - DNA, 15 bp, Homo sapiens
ggaggccccgagtcc

SEQ ID NO: 555373 - DNA, 15 bp, Homo sapiens
aggaggccccgagtc

SEQ ID NO: 555374 - DNA, 15 bp, Homo sapiens
caggaggccccgagt

SEQ ID NO: 555375 - DNA, 15 bp, Homo sapiens
ccaggaggccccgag

SEQ ID NO: 555376 - DNA, 15 bp, Homo sapiens
cccaggaggccccga

SEQ ID NO: 555377 - DNA, 15 bp, Homo sapiens
acccaggaggccccg

SEQ ID NO: 555378 - DNA, 15 bp, Homo sapiens
aacccaggaggcccc

SEQ ID NO: 555379 - DNA, 15 bp, Homo sapiens
aaacccaggaggccc

SEQ ID NO: 555380 - DNA, 15 bp, Homo sapiens
gaaacccaggaggcc

SEQ ID NO: 555381 - DNA, 15 bp, Homo sapiens
ggaaacccaggaggc

SEQ ID NO: 555382 - DNA, 15 bp, Homo sapiens
aggaaacccaggagg

SEQ ID NO: 555383 - DNA, 15 bp, Homo sapiens
caggaaacccaggag

SEQ ID NO: 555384 - DNA, 15 bp, Homo sapiens
ccaggaaacccagga

SEQ ID NO: 555385 - DNA, 15 bp, Homo sapiens
cccaggaaacccagg

SEQ ID NO: 555386 - DNA, 15 bp, Homo sapiens
acccaggaaacccag

SEQ ID NO: 555387 - DNA, 15 bp, Homo sapiens
tacccaggaaaccca

SEQ ID NO: 555388 - DNA, 15 bp, Homo sapiens
ctacccaggaaaccc

SEQ ID NO: 555389 - DNA, 15 bp, Homo sapiens
gctacccaggaaacc

SEQ ID NO: 555390 - DNA, 15 bp, Homo sapiens
agctacccaggaaac

SEQ ID NO: 555391 - DNA, 15 bp, Homo sapiens
gagctacccaggaaa

SEQ ID NO: 555392 - DNA, 15 bp, Homo sapiens
tgagctacccaggaa

SEQ ID NO: 555393 - DNA, 15 bp, Homo sapiens
atgagctacccagga

SEQ ID NO: 555394 - DNA, 15 bp, Homo sapiens
catgagctacccagg

SEQ ID NO: 555395 - DNA, 15 bp, Homo sapiens
ccatgagctacccag

SEQ ID NO: 555396 - DNA, 15 bp, Homo sapiens
gccatgagctaccca

SEQ ID NO: 555397 - DNA, 15 bp, Homo sapiens
ggccatgagctaccc

SEQ ID NO: 555398 - DNA, 15 bp, Homo sapiens
tggccatgagctacc

SEQ ID NO: 555399 - DNA, 15 bp, Homo sapiens
ttggccatgagctac

SEQ ID NO: 555400 - DNA, 15 bp, Homo sapiens
tttggccatgagcta

SEQ ID NO: 555401 - DNA, 15 bp, Homo sapiens
atttggccatgagct

SEQ ID NO: 555402 - DNA, 15 bp, Homo sapiens
aatttggccatgagc

SEQ ID NO: 555403 - DNA, 15 bp, Homo sapiens
gaatttggccatgag

SEQ ID NO: 555404 - DNA, 15 bp, Homo sapiens
agaatttggccatga

SEQ ID NO: 555405 - DNA, 15 bp, Homo sapiens
cagaatttggccatg

SEQ ID NO: 555406 - DNA, 15 bp, Homo sapiens
acagaatttggccat

SEQ ID NO: 555407 - DNA, 15 bp, Homo sapiens
cacagaatttggcca

SEQ ID NO: 555408 - DNA, 15 bp, Homo sapiens
ccacagaatttggcc

SEQ ID NO: 555409 - DNA, 15 bp, Homo sapiens
accacagaatttggc

SEQ ID NO: 555410 - DNA, 15 bp, Homo sapiens
caccacagaatttgg

SEQ ID NO: 555411 - DNA, 15 bp, Homo sapiens
acaccacagaatttg

SEQ ID NO: 555412 - DNA, 15 bp, Homo sapiens
aacaccacagaattt

SEQ ID NO: 555413 - DNA, 15 bp, Homo sapiens
caacaccacagaatt

SEQ ID NO: 555414 - DNA, 15 bp, Homo sapiens
ccaacaccacagaat

SEQ ID NO: 555415 - DNA, 15 bp, Homo sapiens
gccaacaccacagaa

SEQ ID NO: 555416 - DNA, 15 bp, Homo sapiens
agccaacaccacaga

SEQ ID NO: 555417 - DNA, 15 bp, Homo sapiens
cagccaacaccacag

SEQ ID NO: 555418 - DNA, 15 bp, Homo sapiens
acagccaacaccaca

SEQ ID NO: 555419 - DNA, 15 bp, Homo sapiens
cacagccaacaccac

SEQ ID NO: 555420 - DNA, 15 bp, Homo sapiens
gcacagccaacacca

SEQ ID NO: 555421 - DNA, 15 bp, Homo sapiens
tgcacagccaacacc

SEQ ID NO: 555422 - DNA, 15 bp, Homo sapiens
gtgcacagccaacac

SEQ ID NO: 555423 - DNA, 15 bp, Homo sapiens
agtgcacagccaaca

SEQ ID NO: 555424 - DNA, 15 bp, Homo sapiens
aagtgcacagccaac

SEQ ID NO: 555425 - DNA, 15 bp, Homo sapiens
caagtgcacagccaa

SEQ ID NO: 555426 - DNA, 15 bp, Homo sapiens
ccaagtgcacagcca

SEQ ID NO: 555427 - DNA, 15 bp, Homo sapiens
tccaagtgcacagcc

SEQ ID NO: 555428 - DNA, 15 bp, Homo sapiens
ttccaagtgcacagc

SEQ ID NO: 555429 - DNA, 15 bp, Homo sapiens
tttccaagtgcacag

SEQ ID NO: 555430 - DNA, 15 bp, Homo sapiens
ctttccaagtgcaca

SEQ ID NO: 555431 - DNA, 15 bp, Homo sapiens
gctttccaagtgcac

SEQ ID NO: 555432 - DNA, 15 bp, Homo sapiens
tgctttccaagtgca

SEQ ID NO: 555433 - DNA, 15 bp, Homo sapiens
atgctttccaagtgc

SEQ ID NO: 555434 - DNA, 15 bp, Homo sapiens
aatgctttccaagtg

SEQ ID NO: 555435 - DNA, 15 bp, Homo sapiens
aaatgctttccaagt

SEQ ID NO: 555436 - DNA, 15 bp, Homo sapiens
aaaatgctttccaag

SEQ ID NO: 555437 - DNA, 15 bp, Homo sapiens
caaaatgctttccaa

SEQ ID NO: 555438 - DNA, 15 bp, Homo sapiens
tcaaaatgctttcca

SEQ ID NO: 555439 - DNA, 15 bp, Homo sapiens
gtcaaaatgctttcc

SEQ ID NO: 555440 - DNA, 15 bp, Homo sapiens
agtcaaaatgctttc

SEQ ID NO: 555441 - DNA, 15 bp, Homo sapiens
gagtcaaaatgcttt

SEQ ID NO: 555442 - DNA, 15 bp, Homo sapiens
tgagtcaaaatgctt

SEQ ID NO: 555443 - DNA, 15 bp, Homo sapiens
atgagtcaaaatgct

SEQ ID NO: 555444 - DNA, 15 bp, Homo sapiens
gatgagtcaaaatgc

SEQ ID NO: 555445 - DNA, 15 bp, Homo sapiens
cgatgagtcaaaatg

SEQ ID NO: 555446 - DNA, 15 bp, Homo sapiens
acgatgagtcaaaat

SEQ ID NO: 555447 - DNA, 15 bp, Homo sapiens
cacgatgagtcaaaa

SEQ ID NO: 555448 - DNA, 15 bp, Homo sapiens
ccacgatgagtcaaa

SEQ ID NO: 555449 - DNA, 15 bp, Homo sapiens
tccacgatgagtcaa

SEQ ID NO: 555450 - DNA, 15 bp, Homo sapiens
atccacgatgagtca

SEQ ID NO: 555451 - DNA, 15 bp, Homo sapiens
aatccacgatgagtc

SEQ ID NO: 555452 - DNA, 15 bp, Homo sapiens
aaatccacgatgagt

SEQ ID NO: 555453 - DNA, 15 bp, Homo sapiens
caaatccacgatgag

SEQ ID NO: 555454 - DNA, 15 bp, Homo sapiens
tcaaatccacgatga

SEQ ID NO: 555455 - DNA, 15 bp, Homo sapiens
gtcaaatccacgatg

SEQ ID NO: 555456 - DNA, 15 bp, Homo sapiens
agtcaaatccacgat

SEQ ID NO: 555457 - DNA, 15 bp, Homo sapiens
gagtcaaatccacga

SEQ ID NO: 555458 - DNA, 15 bp, Homo sapiens
tgagtcaaatccacg

SEQ ID NO: 555459 - DNA, 15 bp, Homo sapiens
ctgagtcaaatccac

SEQ ID NO: 555460 - DNA, 15 bp, Homo sapiens
actgagtcaaatcca

SEQ ID NO: 555461 - DNA, 15 bp, Homo sapiens
tactgagtcaaatcc

SEQ ID NO: 555462 - DNA, 15 bp, Homo sapiens
ctactgagtcaaatc

SEQ ID NO: 555463 - DNA, 15 bp, Homo sapiens
gctactgagtcaaat

SEQ ID NO: 555464 - DNA, 15 bp, Homo sapiens
ggctactgagtcaaa

SEQ ID NO: 555465 - DNA, 15 bp, Homo sapiens
gggctactgagtcaa

SEQ ID NO: 555466 - DNA, 15 bp, Homo sapiens
agggctactgagtca

SEQ ID NO: 555467 - DNA, 15 bp, Homo sapiens
aagggctactgagtc

SEQ ID NO: 555468 - DNA, 15 bp, Homo sapiens
caagggctactgagt

SEQ ID NO: 555469 - DNA, 15 bp, Homo sapiens
ccaagggctactgag

SEQ ID NO: 555470 - DNA, 15 bp, Homo sapiens
gccaagggctactga

SEQ ID NO: 555471 - DNA, 15 bp, Homo sapiens
tgccaagggctactg

SEQ ID NO: 555472 - DNA, 15 bp, Homo sapiens
gtgccaagggctact

SEQ ID NO: 555473 - DNA, 15 bp, Homo sapiens
ggtgccaagggctac

SEQ ID NO: 555474 - DNA, 15 bp, Homo sapiens
tggtgccaagggcta

SEQ ID NO: 555475 - DNA, 15 bp, Homo sapiens
ctggtgccaagggct

SEQ ID NO: 555476 - DNA, 15 bp, Homo sapiens
gctggtgccaagggc

SEQ ID NO: 555477 - DNA, 15 bp, Homo sapiens
agctggtgccaaggg

SEQ ID NO: 555478 - DNA, 15 bp, Homo sapiens
aagctggtgccaagg

SEQ ID NO: 555479 - DNA, 15 bp, Homo sapiens
caagctggtgccaag

SEQ ID NO: 555480 - DNA, 15 bp, Homo sapiens
tcaagctggtgccaa

SEQ ID NO: 555481 - DNA, 15 bp, Homo sapiens
ttcaagctggtgcca

SEQ ID NO: 555482 - DNA, 15 bp, Homo sapiens
attcaagctggtgcc

SEQ ID NO: 555483 - DNA, 15 bp, Homo sapiens
aattcaagctggtgc

SEQ ID NO: 555484 - DNA, 15 bp, Homo sapiens
gaattcaagctggtg

SEQ ID NO: 555485 - DNA, 15 bp, Homo sapiens
agaattcaagctggt

SEQ ID NO: 555486 - DNA, 15 bp, Homo sapiens
gagaattcaagctgg

SEQ ID NO: 555487 - DNA, 15 bp, Homo sapiens
agagaattcaagctg

SEQ ID NO: 555488 - DNA, 15 bp, Homo sapiens
aagagaattcaagct

SEQ ID NO: 555489 - DNA, 15 bp, Homo sapiens
aaagagaattcaagc

SEQ ID NO: 555490 - DNA, 15 bp, Homo sapiens
caaagagaattcaag

SEQ ID NO: 555491 - DNA, 15 bp, Homo sapiens
ccaaagagaattcaa

SEQ ID NO: 555492 - DNA, 15 bp, Homo sapiens
accaaagagaattca

SEQ ID NO: 555493 - DNA, 15 bp, Homo sapiens
gaccaaagagaattc

SEQ ID NO: 555494 - DNA, 15 bp, Homo sapiens
tgaccaaagagaatt

SEQ ID NO: 555495 - DNA, 15 bp, Homo sapiens
gtgaccaaagagaat

SEQ ID NO: 555496 - DNA, 15 bp, Homo sapiens
tgtgaccaaagagaa

SEQ ID NO: 555497 - DNA, 15 bp, Homo sapiens
gtgtgaccaaagaga

SEQ ID NO: 555498 - DNA, 15 bp, Homo sapiens
ggtgtgaccaaagag

SEQ ID NO: 555499 - DNA, 15 bp, Homo sapiens
tggtgtgaccaaaga

SEQ ID NO: 555500 - DNA, 15 bp, Homo sapiens
gtggtgtgaccaaag

SEQ ID NO: 555501 - DNA, 15 bp, Homo sapiens
ggtggtgtgaccaaa

SEQ ID NO: 555502 - DNA, 15 bp, Homo sapiens
tggtggtgtgaccaa

SEQ ID NO: 555503 - DNA, 15 bp, Homo sapiens
ttggtggtgtgacca

SEQ ID NO: 555504 - DNA, 15 bp, Homo sapiens
tttggtggtgtgacc

SEQ ID NO: 555505 - DNA, 15 bp, Homo sapiens
ttttggtggtgtgac

SEQ ID NO: 555506 - DNA, 15 bp, Homo sapiens
cttttggtggtgtga

SEQ ID NO: 555507 - DNA, 15 bp, Homo sapiens
gcttttggtggtgtg

SEQ ID NO: 555508 - DNA, 15 bp, Homo sapiens
ggcttttggtggtgt

SEQ ID NO: 555509 - DNA, 15 bp, Homo sapiens
tggcttttggtggtg

SEQ ID NO: 555510 - DNA, 15 bp, Homo sapiens
ttggcttttggtggt

SEQ ID NO: 555511 - DNA, 15 bp, Homo sapiens
tttggcttttggtgg

SEQ ID NO: 555512 - DNA, 15 bp, Homo sapiens
gtttggcttttggtg

SEQ ID NO: 555513 - DNA, 15 bp, Homo sapiens
agtttggcttttggt

SEQ ID NO: 555514 - DNA, 15 bp, Homo sapiens
gagtttggcttttgg

SEQ ID NO: 555515 - DNA, 15 bp, Homo sapiens
ggagtttggcttttg

SEQ ID NO: 555516 - DNA, 15 bp, Homo sapiens
tggagtttggctttt

SEQ ID NO: 555517 - DNA, 15 bp, Homo sapiens
ctggagtttggcttt

SEQ ID NO: 555518 - DNA, 15 bp, Homo sapiens
gctggagtttggctt

SEQ ID NO: 555519 - DNA, 15 bp, Homo sapiens
agctggagtttggct

SEQ ID NO: 555520 - DNA, 15 bp, Homo sapiens
cagctggagtttggc

SEQ ID NO: 555521 - DNA, 15 bp, Homo sapiens
gcagctggagtttgg

SEQ ID NO: 555522 - DNA, 15 bp, Homo sapiens
ggcagctggagtttg

SEQ ID NO: 555523 - DNA, 15 bp, Homo sapiens
tggcagctggagttt

SEQ ID NO: 555524 - DNA, 15 bp, Homo sapiens
ttggcagctggagtt

SEQ ID NO: 555525 - DNA, 15 bp, Homo sapiens
attggcagctggagt

SEQ ID NO: 555526 - DNA, 15 bp, Homo sapiens
cattggcagctggag

SEQ ID NO: 555527 - DNA, 15 bp, Homo sapiens
gcattggcagctgga

SEQ ID NO: 555528 - DNA, 15 bp, Homo sapiens
ggcattggcagctgg

SEQ ID NO: 555529 - DNA, 15 bp, Homo sapiens
aggcattggcagctg

SEQ ID NO: 555530 - DNA, 15 bp, Homo sapiens
gaggcattggcagct

SEQ ID NO: 555531 - DNA, 15 bp, Homo sapiens
agaggcattggcagc

SEQ ID NO: 555532 - DNA, 15 bp, Homo sapiens
tagaggcattggcag

SEQ ID NO: 555533 - DNA, 15 bp, Homo sapiens
gtagaggcattggca

SEQ ID NO: 555534 - DNA, 15 bp, Homo sapiens
tgtagaggcattggc

SEQ ID NO: 555535 - DNA, 15 bp, Homo sapiens
gtgtagaggcattgg

SEQ ID NO: 555536 - DNA, 15 bp, Homo sapiens
tgtgtagaggcattg

SEQ ID NO: 555537 - DNA, 15 bp, Homo sapiens
ctgtgtagaggcatt

SEQ ID NO: 555538 - DNA, 15 bp, Homo sapiens
gctgtgtagaggcat

SEQ ID NO: 555539 - DNA, 15 bp, Homo sapiens
ggctgtgtagaggca

SEQ ID NO: 555540 - DNA, 15 bp, Homo sapiens
gggctgtgtagaggc

SEQ ID NO: 555541 - DNA, 15 bp, Homo sapiens
tgggctgtgtagagg

SEQ ID NO: 555542 - DNA, 15 bp, Homo sapiens
ttgggctgtgtagag

SEQ ID NO: 555543 - DNA, 15 bp, Homo sapiens
tttgggctgtgtaga

SEQ ID NO: 555544 - DNA, 15 bp, Homo sapiens
ctttgggctgtgtag

SEQ ID NO: 555545 - DNA, 15 bp, Homo sapiens
tctttgggctgtgta

SEQ ID NO: 555546 - DNA, 15 bp, Homo sapiens
ctctttgggctgtgt

SEQ ID NO: 555547 - DNA, 15 bp, Homo sapiens
tctctttgggctgtg

SEQ ID NO: 555548 - DNA, 15 bp, Homo sapiens
ctctctttgggctgt

SEQ ID NO: 555549 - DNA, 15 bp, Homo sapiens
cctctctttgggctg

SEQ ID NO: 555550 - DNA, 15 bp, Homo sapiens
gcctctctttgggct

SEQ ID NO: 555551 - DNA, 15 bp, Homo sapiens
agcctctctttgggc

SEQ ID NO: 555552 - DNA, 15 bp, Homo sapiens
cagcctctctttggg

SEQ ID NO: 555553 - DNA, 15 bp, Homo sapiens
gcagcctctctttgg

SEQ ID NO: 555554 - DNA, 15 bp, Homo sapiens
agcagcctctctttg

SEQ ID NO: 555555 - DNA, 15 bp, Homo sapiens
cagcagcctctcttt

SEQ ID NO: 555556 - DNA, 15 bp, Homo sapiens
ccagcagcctctctt

SEQ ID NO: 555557 - DNA, 15 bp, Homo sapiens
accagcagcctctct

SEQ ID NO: 555558 - DNA, 15 bp, Homo sapiens
caccagcagcctctc

SEQ ID NO: 555559 - DNA, 15 bp, Homo sapiens
ccaccagcagcctct

SEQ ID NO: 555560 - DNA, 15 bp, Homo sapiens
accaccagcagcctc

SEQ ID NO: 555561 - DNA, 15 bp, Homo sapiens
caccaccagcagcct

SEQ ID NO: 555562 - DNA, 15 bp, Homo sapiens
ccaccaccagcagcc

SEQ ID NO: 555563 - DNA, 15 bp, Homo sapiens
accaccaccagcagc

SEQ ID NO: 555564 - DNA, 15 bp, Homo sapiens
aaccaccaccagcag

SEQ ID NO: 555565 - DNA, 15 bp, Homo sapiens
aaaccaccaccagca

SEQ ID NO: 555566 - DNA, 15 bp, Homo sapiens
caaaccaccaccagc

SEQ ID NO: 555567 - DNA, 15 bp, Homo sapiens
gcaaaccaccaccag

SEQ ID NO: 555568 - DNA, 15 bp, Homo sapiens
tgcaaaccaccacca

SEQ ID NO: 555569 - DNA, 15 bp, Homo sapiens
ctgcaaaccaccacc

SEQ ID NO: 555570 - DNA, 15 bp, Homo sapiens
gctgcaaaccaccac

SEQ ID NO: 555571 - DNA, 15 bp, Homo sapiens
ggctgcaaaccacca

SEQ ID NO: 555572 - DNA, 15 bp, Homo sapiens
tggctgcaaaccacc

SEQ ID NO: 555573 - DNA, 15 bp, Homo sapiens
ctggctgcaaaccac

SEQ ID NO: 555574 - DNA, 15 bp, Homo sapiens
cctggctgcaaacca

SEQ ID NO: 555575 - DNA, 15 bp, Homo sapiens
acctggctgcaaacc

SEQ ID NO: 555576 - DNA, 15 bp, Homo sapiens
cacctggctgcaaac

SEQ ID NO: 555577 - DNA, 15 bp, Homo sapiens
ccacctggctgcaaa

SEQ ID NO: 555578 - DNA, 15 bp, Homo sapiens
accacctggctgcaa

SEQ ID NO: 555579 - DNA, 15 bp, Homo sapiens
caccacctggctgca

SEQ ID NO: 555580 - DNA, 15 bp, Homo sapiens
gcaccacctggctgc

SEQ ID NO: 555581 - DNA, 15 bp, Homo sapiens
agcaccacctggctg

SEQ ID NO: 555582 - DNA, 15 bp, Homo sapiens
cagcaccacctggct

SEQ ID NO: 555583 - DNA, 15 bp, Homo sapiens
ccagcaccacctggc

SEQ ID NO: 555584 - DNA, 15 bp, Homo sapiens
cccagcaccacctgg

SEQ ID NO: 555585 - DNA, 15 bp, Homo sapiens
gcccagcaccacctg

SEQ ID NO: 555586 - DNA, 15 bp, Homo sapiens
agcccagcaccacct

SEQ ID NO: 555587 - DNA, 15 bp, Homo sapiens
cagcccagcaccacc

SEQ ID NO: 555588 - DNA, 15 bp, Homo sapiens
ccagcccagcaccac

SEQ ID NO: 555589 - DNA, 15 bp, Homo sapiens
cccagcccagcacca

SEQ ID NO: 555590 - DNA, 15 bp, Homo sapiens
tcccagcccagcacc

SEQ ID NO: 555591 - DNA, 15 bp, Homo sapiens
ctcccagcccagcac

SEQ ID NO: 555592 - DNA, 15 bp, Homo sapiens
cctcccagcccagca

SEQ ID NO: 555593 - DNA, 15 bp, Homo sapiens
tcctcccagcccagc

SEQ ID NO: 555594 - DNA, 15 bp, Homo sapiens
ctcctcccagcccag

SEQ ID NO: 555595 - DNA, 15 bp, Homo sapiens
cctcctcccagccca

SEQ ID NO: 555596 - DNA, 15 bp, Homo sapiens
ccctcctcccagccc

SEQ ID NO: 555597 - DNA, 15 bp, Homo sapiens
cccctcctcccagcc

SEQ ID NO: 555598 - DNA, 15 bp, Homo sapiens
ccccctcctcccagc

SEQ ID NO: 555599 - DNA, 15 bp, Homo sapiens
gccccctcctcccag

SEQ ID NO: 555600 - DNA, 15 bp, Homo sapiens
tgccccctcctccca

SEQ ID NO: 555601 - DNA, 15 bp, Homo sapiens
ctgccccctcctccc

SEQ ID NO: 555602 - DNA, 15 bp, Homo sapiens
cctgccccctcctcc

SEQ ID NO: 555603 - DNA, 15 bp, Homo sapiens
tcctgccccctcctc

SEQ ID NO: 555604 - DNA, 15 bp, Homo sapiens
gtcctgccccctcct

SEQ ID NO: 555605 - DNA, 15 bp, Homo sapiens
tgtcctgccccctcc

SEQ ID NO: 555606 - DNA, 15 bp, Homo sapiens
atgtcctgccccctc

SEQ ID NO: 555607 - DNA, 15 bp, Homo sapiens
catgtcctgccccct

SEQ ID NO: 555608 - DNA, 15 bp, Homo sapiens
acatgtcctgccccc

SEQ ID NO: 555609 - DNA, 15 bp, Homo sapiens
gacatgtcctgcccc

SEQ ID NO: 555610 - DNA, 15 bp, Homo sapiens
tgacatgtcctgccc

SEQ ID NO: 555611 - DNA, 15 bp, Homo sapiens
ttgacatgtcctgcc

SEQ ID NO: 555612 - DNA, 15 bp, Homo sapiens
cttgacatgtcctgc

SEQ ID NO: 555613 - DNA, 15 bp, Homo sapiens
acttgacatgtcctg

SEQ ID NO: 555614 - DNA, 15 bp, Homo sapiens
gacttgacatgtcct

SEQ ID NO: 555615 - DNA, 15 bp, Homo sapiens
tgacttgacatgtcc

SEQ ID NO: 555616 - DNA, 15 bp, Homo sapiens
gtgacttgacatgtc

SEQ ID NO: 555617 - DNA, 15 bp, Homo sapiens
tgtgacttgacatgt

SEQ ID NO: 555618 - DNA, 15 bp, Homo sapiens
ctgtgacttgacatg

SEQ ID NO: 555619 - DNA, 15 bp, Homo sapiens
cctgtgacttgacat

SEQ ID NO: 555620 - DNA, 15 bp, Homo sapiens
ccctgtgacttgaca

SEQ ID NO: 555621 - DNA, 15 bp, Homo sapiens
cccctgtgacttgac

SEQ ID NO: 555622 - DNA, 15 bp, Homo sapiens
ccccctgtgacttga

SEQ ID NO: 555623 - DNA, 15 bp, Homo sapiens
gccccctgtgacttg

SEQ ID NO: 555624 - DNA, 15 bp, Homo sapiens
ggccccctgtgactt

SEQ ID NO: 555625 - DNA, 15 bp, Homo sapiens
tggccccctgtgact

SEQ ID NO: 555626 - DNA, 15 bp, Homo sapiens
atggccccctgtgac

SEQ ID NO: 555627 - DNA, 15 bp, Homo sapiens
tatggccccctgtga

SEQ ID NO: 555628 - DNA, 15 bp, Homo sapiens
ttatggccccctgtg

SEQ ID NO: 555629 - DNA, 15 bp, Homo sapiens
tttatggccccctgt

SEQ ID NO: 555630 - DNA, 15 bp, Homo sapiens
ttttatggccccctg

SEQ ID NO: 555631 - DNA, 15 bp, Homo sapiens
attttatggccccct

SEQ ID NO: 555632 - DNA, 15 bp, Homo sapiens
cattttatggccccc

SEQ ID NO: 555633 - DNA, 15 bp, Homo sapiens
ccattttatggcccc

SEQ ID NO: 555634 - DNA, 15 bp, Homo sapiens
tccattttatggccc

SEQ ID NO: 555635 - DNA, 15 bp, Homo sapiens
ctccattttatggcc

SEQ ID NO: 555636 - DNA, 15 bp, Homo sapiens
cctccattttatggc

SEQ ID NO: 555637 - DNA, 15 bp, Homo sapiens
gcctccattttatgg

SEQ ID NO: 555638 - DNA, 15 bp, Homo sapiens
cgcctccattttatg

SEQ ID NO: 555639 - DNA, 15 bp, Homo sapiens
tcgcctccattttat

SEQ ID NO: 555640 - DNA, 15 bp, Homo sapiens
ctcgcctccatttta

SEQ ID NO: 555641 - DNA, 15 bp, Homo sapiens
tctcgcctccatttt

SEQ ID NO: 555642 - DNA, 15 bp, Homo sapiens
ctctcgcctccattt

SEQ ID NO: 555643 - DNA, 15 bp, Homo sapiens
cctctcgcctccatt

SEQ ID NO: 555644 - DNA, 15 bp, Homo sapiens
acctctcgcctccat

SEQ ID NO: 555645 - DNA, 15 bp, Homo sapiens
cacctctcgcctcca

SEQ ID NO: 555646 - DNA, 15 bp, Homo sapiens
ccacctctcgcctcc

SEQ ID NO: 555647 - DNA, 15 bp, Homo sapiens
cccacctctcgcctc

SEQ ID NO: 555648 - DNA, 15 bp, Homo sapiens
gcccacctctcgcct

SEQ ID NO: 555649 - DNA, 15 bp, Homo sapiens
agcccacctctcgcc

SEQ ID NO: 555650 - DNA, 15 bp, Homo sapiens
gagcccacctctcgc

SEQ ID NO: 555651 - DNA, 15 bp, Homo sapiens
ggagcccacctctcg

SEQ ID NO: 555652 - DNA, 15 bp, Homo sapiens
gggagcccacctctc

SEQ ID NO: 555653 - DNA, 15 bp, Homo sapiens
agggagcccacctct

SEQ ID NO: 555654 - DNA, 15 bp, Homo sapiens
gagggagcccacctc

SEQ ID NO: 555655 - DNA, 15 bp, Homo sapiens
agagggagcccacct

SEQ ID NO: 555656 - DNA, 15 bp, Homo sapiens
cagagggagcccacc

SEQ ID NO: 555657 - DNA, 15 bp, Homo sapiens
ccagagggagcccac

SEQ ID NO: 555658 - DNA, 15 bp, Homo sapiens
gccagagggagccca

SEQ ID NO: 555659 - DNA, 15 bp, Homo sapiens
cgccagagggagccc

SEQ ID NO: 555660 - DNA, 15 bp, Homo sapiens
acgccagagggagcc

SEQ ID NO: 555661 - DNA, 15 bp, Homo sapiens
gacgccagagggagc

SEQ ID NO: 555662 - DNA, 15 bp, Homo sapiens
agacgccagagggag

SEQ ID NO: 555663 - DNA, 15 bp, Homo sapiens
cagacgccagaggga

SEQ ID NO: 555664 - DNA, 15 bp, Homo sapiens
ccagacgccagaggg

SEQ ID NO: 555665 - DNA, 15 bp, Homo sapiens
gccagacgccagagg

SEQ ID NO: 555666 - DNA, 15 bp, Homo sapiens
agccagacgccagag

SEQ ID NO: 555667 - DNA, 15 bp, Homo sapiens
cagccagacgccaga

SEQ ID NO: 555668 - DNA, 15 bp, Homo sapiens
ccagccagacgccag

SEQ ID NO: 555669 - DNA, 15 bp, Homo sapiens
accagccagacgcca

SEQ ID NO: 555670 - DNA, 15 bp, Homo sapiens
caccagccagacgcc

SEQ ID NO: 555671 - DNA, 15 bp, Homo sapiens
ccaccagccagacgc

SEQ ID NO: 555672 - DNA, 15 bp, Homo sapiens
gccaccagccagacg

SEQ ID NO: 555673 - DNA, 15 bp, Homo sapiens
ggccaccagccagac

SEQ ID NO: 555674 - DNA, 15 bp, Homo sapiens
gggccaccagccaga

SEQ ID NO: 555675 - DNA, 15 bp, Homo sapiens
ggggccaccagccag

SEQ ID NO: 555676 - DNA, 15 bp, Homo sapiens
gggggccaccagcca

SEQ ID NO: 555677 - DNA, 15 bp, Homo sapiens
tgggggccaccagcc

SEQ ID NO: 555678 - DNA, 15 bp, Homo sapiens
atgggggccaccagc

SEQ ID NO: 555679 - DNA, 15 bp, Homo sapiens
catgggggccaccag

SEQ ID NO: 555680 - DNA, 15 bp, Homo sapiens
tcatgggggccacca

SEQ ID NO: 555681 - DNA, 15 bp, Homo sapiens
gtcatgggggccacc

SEQ ID NO: 555682 - DNA, 15 bp, Homo sapiens
ggtcatgggggccac

SEQ ID NO: 555683 - DNA, 15 bp, Homo sapiens
tggtcatgggggcca

SEQ ID NO: 555684 - DNA, 15 bp, Homo sapiens
atggtcatgggggcc

SEQ ID NO: 555685 - DNA, 15 bp, Homo sapiens
gatggtcatgggggc

SEQ ID NO: 555686 - DNA, 15 bp, Homo sapiens
agatggtcatggggg

SEQ ID NO: 555687 - DNA, 15 bp, Homo sapiens
cagatggtcatgggg

SEQ ID NO: 555688 - DNA, 15 bp, Homo sapiens
ccagatggtcatggg

SEQ ID NO: 555689 - DNA, 15 bp, Homo sapiens
cccagatggtcatgg

SEQ ID NO: 555690 - DNA, 15 bp, Homo sapiens
acccagatggtcatg

SEQ ID NO: 555691 - DNA, 15 bp, Homo sapiens
cacccagatggtcat

SEQ ID NO: 555692 - DNA, 15 bp, Homo sapiens
gcacccagatggtca

SEQ ID NO: 555693 - DNA, 15 bp, Homo sapiens
agcacccagatggtc

SEQ ID NO: 555694 - DNA, 15 bp, Homo sapiens
cagcacccagatggt

SEQ ID NO: 555695 - DNA, 15 bp, Homo sapiens
tcagcacccagatgg

SEQ ID NO: 555696 - DNA, 15 bp, Homo sapiens
ctcagcacccagatg

SEQ ID NO: 555697 - DNA, 15 bp, Homo sapiens
tctcagcacccagat

SEQ ID NO: 555698 - DNA, 15 bp, Homo sapiens
gtctcagcacccaga

SEQ ID NO: 555699 - DNA, 15 bp, Homo sapiens
tgtctcagcacccag

SEQ ID NO: 555700 - DNA, 15 bp, Homo sapiens
atgtctcagcaccca

SEQ ID NO: 555701 - DNA, 15 bp, Homo sapiens
gatgtctcagcaccc

SEQ ID NO: 555702 - DNA, 15 bp, Homo sapiens
tgatgtctcagcacc

SEQ ID NO: 555703 - DNA, 15 bp, Homo sapiens
ctgatgtctcagcac

SEQ ID NO: 555704 - DNA, 15 bp, Homo sapiens
gctgatgtctcagca

SEQ ID NO: 555705 - DNA, 15 bp, Homo sapiens
agctgatgtctcagc

SEQ ID NO: 555706 - DNA, 15 bp, Homo sapiens
cagctgatgtctcag

SEQ ID NO: 555707 - DNA, 15 bp, Homo sapiens
ccagctgatgtctca

SEQ ID NO: 555708 - DNA, 15 bp, Homo sapiens
gccagctgatgtctc

SEQ ID NO: 555709 - DNA, 15 bp, Homo sapiens
agccagctgatgtct

SEQ ID NO: 555710 - DNA, 15 bp, Homo sapiens
gagccagctgatgtc

SEQ ID NO: 555711 - DNA, 15 bp, Homo sapiens
agagccagctgatgt

SEQ ID NO: 555712 - DNA, 15 bp, Homo sapiens
cagagccagctgatg

SEQ ID NO: 555713 - DNA, 15 bp, Homo sapiens
gcagagccagctgat

SEQ ID NO: 555714 - DNA, 15 bp, Homo sapiens
agcagagccagctga

SEQ ID NO: 555715 - DNA, 15 bp, Homo sapiens
aagcagagccagctg

SEQ ID NO: 555716 - DNA, 15 bp, Homo sapiens
caagcagagccagct

SEQ ID NO: 555717 - DNA, 15 bp, Homo sapiens
ccaagcagagccagc

SEQ ID NO: 555718 - DNA, 15 bp, Homo sapiens
gccaagcagagccag

SEQ ID NO: 555719 - DNA, 15 bp, Homo sapiens
ggccaagcagagcca

SEQ ID NO: 555720 - DNA, 15 bp, Homo sapiens
gggccaagcagagcc

SEQ ID NO: 555721 - DNA, 15 bp, Homo sapiens
ggggccaagcagagc

SEQ ID NO: 555722 - DNA, 15 bp, Homo sapiens
aggggccaagcagag

SEQ ID NO: 555723 - DNA, 15 bp, Homo sapiens
aaggggccaagcaga

SEQ ID NO: 555724 - DNA, 15 bp, Homo sapiens
gaaggggccaagcag

SEQ ID NO: 555725 - DNA, 15 bp, Homo sapiens
tgaaggggccaagca

SEQ ID NO: 555726 - DNA, 15 bp, Homo sapiens
ctgaaggggccaagc

SEQ ID NO: 555727 - DNA, 15 bp, Homo sapiens
cctgaaggggccaag

SEQ ID NO: 555728 - DNA, 15 bp, Homo sapiens
gcctgaaggggccaa

SEQ ID NO: 555729 - DNA, 15 bp, Homo sapiens
agcctgaaggggcca

SEQ ID NO: 555730 - DNA, 15 bp, Homo sapiens
gagcctgaaggggcc

SEQ ID NO: 555731 - DNA, 15 bp, Homo sapiens
tgagcctgaaggggc

SEQ ID NO: 555732 - DNA, 15 bp, Homo sapiens
ctgagcctgaagggg

SEQ ID NO: 555733 - DNA, 15 bp, Homo sapiens
gctgagcctgaaggg

SEQ ID NO: 555734 - DNA, 15 bp, Homo sapiens
agctgagcctgaagg

SEQ ID NO: 555735 - DNA, 15 bp, Homo sapiens
gagctgagcctgaag

SEQ ID NO: 555736 - DNA, 15 bp, Homo sapiens
agagctgagcctgaa

SEQ ID NO: 555737 - DNA, 15 bp, Homo sapiens
cagagctgagcctga

SEQ ID NO: 555738 - DNA, 15 bp, Homo sapiens
acagagctgagcctg

SEQ ID NO: 555739 - DNA, 15 bp, Homo sapiens
cacagagctgagcct

SEQ ID NO: 555740 - DNA, 15 bp, Homo sapiens
acacagagctgagcc

SEQ ID NO: 555741 - DNA, 15 bp, Homo sapiens
gacacagagctgagc

SEQ ID NO: 555742 - DNA, 15 bp, Homo sapiens
ggacacagagctgag

SEQ ID NO: 555743 - DNA, 15 bp, Homo sapiens
gggacacagagctga

SEQ ID NO: 555744 - DNA, 15 bp, Homo sapiens
tgggacacagagctg

SEQ ID NO: 555745 - DNA, 15 bp, Homo sapiens
atgggacacagagct

SEQ ID NO: 555746 - DNA, 15 bp, Homo sapiens
catgggacacagagc

SEQ ID NO: 555747 - DNA, 15 bp, Homo sapiens
ccatgggacacagag

SEQ ID NO: 555748 - DNA, 15 bp, Homo sapiens
accatgggacacaga

SEQ ID NO: 555749 - DNA, 15 bp, Homo sapiens
gaccatgggacacag

SEQ ID NO: 555750 - DNA, 15 bp, Homo sapiens
ggaccatgggacaca

SEQ ID NO: 555751 - DNA, 15 bp, Homo sapiens
gggaccatgggacac

SEQ ID NO: 555752 - DNA, 15 bp, Homo sapiens
tgggaccatgggaca

SEQ ID NO: 555753 - DNA, 15 bp, Homo sapiens
ctgggaccatgggac

SEQ ID NO: 555754 - DNA, 15 bp, Homo sapiens
actgggaccatggga

SEQ ID NO: 555755 - DNA, 15 bp, Homo sapiens
aactgggaccatggg

SEQ ID NO: 555756 - DNA, 15 bp, Homo sapiens
caactgggaccatgg

SEQ ID NO: 555757 - DNA, 15 bp, Homo sapiens
acaactgggaccatg

SEQ ID NO: 555758 - DNA, 15 bp, Homo sapiens
cacaactgggaccat

SEQ ID NO: 555759 - DNA, 15 bp, Homo sapiens
ccacaactgggacca

SEQ ID NO: 555760 - DNA, 15 bp, Homo sapiens
cccacaactgggacc

SEQ ID NO: 555761 - DNA, 15 bp, Homo sapiens
ccccacaactgggac

SEQ ID NO: 555762 - DNA, 15 bp, Homo sapiens
accccacaactggga

SEQ ID NO: 555763 - DNA, 15 bp, Homo sapiens
taccccacaactggg

SEQ ID NO: 555764 - DNA, 15 bp, Homo sapiens
ttaccccacaactgg

SEQ ID NO: 555765 - DNA, 15 bp, Homo sapiens
cttaccccacaactg

SEQ ID NO: 555766 - DNA, 15 bp, Homo sapiens
tcttaccccacaact

SEQ ID NO: 555767 - DNA, 15 bp, Homo sapiens
ctcttaccccacaac

SEQ ID NO: 555768 - DNA, 15 bp, Homo sapiens
actcttaccccacaa

SEQ ID NO: 555769 - DNA, 15 bp, Homo sapiens
tactcttaccccaca

SEQ ID NO: 555770 - DNA, 15 bp, Homo sapiens
ctactcttaccccac

SEQ ID NO: 555771 - DNA, 15 bp, Homo sapiens
tctactcttacccca

SEQ ID NO: 555772 - DNA, 15 bp, Homo sapiens
gtctactcttacccc

SEQ ID NO: 555773 - DNA, 15 bp, Homo sapiens
tgtctactcttaccc

SEQ ID NO: 555774 - DNA, 15 bp, Homo sapiens
ctgtctactcttacc

SEQ ID NO: 555775 - DNA, 15 bp, Homo sapiens
actgtctactcttac

SEQ ID NO: 555776 - DNA, 15 bp, Homo sapiens
cactgtctactctta

SEQ ID NO: 555777 - DNA, 15 bp, Homo sapiens
ccactgtctactctt

SEQ ID NO: 555778 - DNA, 15 bp, Homo sapiens
cccactgtctactct

SEQ ID NO: 555779 - DNA, 15 bp, Homo sapiens
acccactgtctactc

SEQ ID NO: 555780 - DNA, 15 bp, Homo sapiens
cacccactgtctact

SEQ ID NO: 555781 - DNA, 15 bp, Homo sapiens
ccacccactgtctac

SEQ ID NO: 555782 - DNA, 15 bp, Homo sapiens
gccacccactgtcta

SEQ ID NO: 555783 - DNA, 15 bp, Homo sapiens
agccacccactgtct

SEQ ID NO: 555784 - DNA, 15 bp, Homo sapiens
gagccacccactgtc

SEQ ID NO: 555785 - DNA, 15 bp, Homo sapiens
ggagccacccactgt

SEQ ID NO: 555786 - DNA, 15 bp, Homo sapiens
aggagccacccactg

SEQ ID NO: 555787 - DNA, 15 bp, Homo sapiens
taggagccacccact

SEQ ID NO: 555788 - DNA, 15 bp, Homo sapiens
gtaggagccacccac

SEQ ID NO: 555789 - DNA, 15 bp, Homo sapiens
tgtaggagccaccca

SEQ ID NO: 555790 - DNA, 15 bp, Homo sapiens
ctgtaggagccaccc

SEQ ID NO: 555791 - DNA, 15 bp, Homo sapiens
gctgtaggagccacc

SEQ ID NO: 555792 - DNA, 15 bp, Homo sapiens
ggctgtaggagccac

SEQ ID NO: 555793 - DNA, 15 bp, Homo sapiens
gggctgtaggagcca

SEQ ID NO: 555794 - DNA, 15 bp, Homo sapiens
agggctgtaggagcc

SEQ ID NO: 555795 - DNA, 15 bp, Homo sapiens
aagggctgtaggagc

SEQ ID NO: 555796 - DNA, 15 bp, Homo sapiens
aaagggctgtaggag

SEQ ID NO: 555797 - DNA, 15 bp, Homo sapiens
aaaagggctgtagga

SEQ ID NO: 555798 - DNA, 15 bp, Homo sapiens
gaaaagggctgtagg

SEQ ID NO: 555799 - DNA, 15 bp, Homo sapiens
agaaaagggctgtag

SEQ ID NO: 555800 - DNA, 15 bp, Homo sapiens
cagaaaagggctgta

SEQ ID NO: 555801 - DNA, 15 bp, Homo sapiens
ccagaaaagggctgt

SEQ ID NO: 555802 - DNA, 15 bp, Homo sapiens
tccagaaaagggctg

SEQ ID NO: 555803 - DNA, 15 bp, Homo sapiens
ctccagaaaagggct

SEQ ID NO: 555804 - DNA, 15 bp, Homo sapiens
cctccagaaaagggc

SEQ ID NO: 555805 - DNA, 15 bp, Homo sapiens
gcctccagaaaaggg

SEQ ID NO: 555806 - DNA, 15 bp, Homo sapiens
ggcctccagaaaagg

SEQ ID NO: 555807 - DNA, 15 bp, Homo sapiens
aggcctccagaaaag

SEQ ID NO: 555808 - DNA, 15 bp, Homo sapiens
aaggcctccagaaaa

SEQ ID NO: 555809 - DNA, 15 bp, Homo sapiens
caaggcctccagaaa

SEQ ID NO: 555810 - DNA, 15 bp, Homo sapiens
gcaaggcctccagaa

SEQ ID NO: 555811 - DNA, 15 bp, Homo sapiens
agcaaggcctccaga

SEQ ID NO: 555812 - DNA, 15 bp, Homo sapiens
cagcaaggcctccag

SEQ ID NO: 555813 - DNA, 15 bp, Homo sapiens
acagcaaggcctcca

SEQ ID NO: 555814 - DNA, 15 bp, Homo sapiens
cacagcaaggcctcc

SEQ ID NO: 555815 - DNA, 15 bp, Homo sapiens
acacagcaaggcctc

SEQ ID NO: 555816 - DNA, 15 bp, Homo sapiens
gacacagcaaggcct

SEQ ID NO: 555817 - DNA, 15 bp, Homo sapiens
cgacacagcaaggcc

SEQ ID NO: 555818 - DNA, 15 bp, Homo sapiens
acgacacagcaaggc

SEQ ID NO: 555819 - DNA, 15 bp, Homo sapiens
cacgacacagcaagg

SEQ ID NO: 555820 - DNA, 15 bp, Homo sapiens
acacgacacagcaag

SEQ ID NO: 555821 - DNA, 15 bp, Homo sapiens
aacacgacacagcaa

SEQ ID NO: 555822 - DNA, 15 bp, Homo sapiens
gaacacgacacagca

SEQ ID NO: 555823 - DNA, 15 bp, Homo sapiens
ggaacacgacacagc

SEQ ID NO: 555824 - DNA, 15 bp, Homo sapiens
tggaacacgacacag

SEQ ID NO: 555825 - DNA, 15 bp, Homo sapiens
atggaacacgacaca

SEQ ID NO: 555826 - DNA, 15 bp, Homo sapiens
aatggaacacgacac

SEQ ID NO: 555827 - DNA, 15 bp, Homo sapiens
gaatggaacacgaca

SEQ ID NO: 555828 - DNA, 15 bp, Homo sapiens
agaatggaacacgac

SEQ ID NO: 555829 - DNA, 15 bp, Homo sapiens
cagaatggaacacga

SEQ ID NO: 555830 - DNA, 15 bp, Homo sapiens
ccagaatggaacacg

SEQ ID NO: 555831 - DNA, 15 bp, Homo sapiens
accagaatggaacac

SEQ ID NO: 555832 - DNA, 15 bp, Homo sapiens
gaccagaatggaaca

SEQ ID NO: 555833 - DNA, 15 bp, Homo sapiens
tgaccagaatggaac

SEQ ID NO: 555834 - DNA, 15 bp, Homo sapiens
gtgaccagaatggaa

SEQ ID NO: 555835 - DNA, 15 bp, Homo sapiens
agtgaccagaatgga

SEQ ID NO: 555836 - DNA, 15 bp, Homo sapiens
gagtgaccagaatgg

SEQ ID NO: 555837 - DNA, 15 bp, Homo sapiens
agagtgaccagaatg

SEQ ID NO: 555838 - DNA, 15 bp, Homo sapiens
cagagtgaccagaat

SEQ ID NO: 555839 - DNA, 15 bp, Homo sapiens
ccagagtgaccagaa

SEQ ID NO: 555840 - DNA, 15 bp, Homo sapiens
tccagagtgaccaga

SEQ ID NO: 555841 - DNA, 15 bp, Homo sapiens
ttccagagtgaccag

SEQ ID NO: 555842 - DNA, 15 bp, Homo sapiens
tttccagagtgacca

SEQ ID NO: 555843 - DNA, 15 bp, Homo sapiens
ttttccagagtgacc

SEQ ID NO: 555844 - DNA, 15 bp, Homo sapiens
cttttccagagtgac

SEQ ID NO: 555845 - DNA, 15 bp, Homo sapiens
acttttccagagtga

SEQ ID NO: 555846 - DNA, 15 bp, Homo sapiens
gacttttccagagtg

SEQ ID NO: 555847 - DNA, 15 bp, Homo sapiens
ggacttttccagagt

SEQ ID NO: 555848 - DNA, 15 bp, Homo sapiens
aggacttttccagag

SEQ ID NO: 555849 - DNA, 15 bp, Homo sapiens
aaggacttttccaga

SEQ ID NO: 555850 - DNA, 15 bp, Homo sapiens
aaaggacttttccag

SEQ ID NO: 555851 - DNA, 15 bp, Homo sapiens
taaaggacttttcca

SEQ ID NO: 555852 - DNA, 15 bp, Homo sapiens
gtaaaggacttttcc

SEQ ID NO: 555853 - DNA, 15 bp, Homo sapiens
agtaaaggacttttc

SEQ ID NO: 555854 - DNA, 15 bp, Homo sapiens
aagtaaaggactttt

SEQ ID NO: 555855 - DNA, 15 bp, Homo sapiens
taagtaaaggacttt

SEQ ID NO: 555856 - DNA, 15 bp, Homo sapiens
ctaagtaaaggactt

SEQ ID NO: 555857 - DNA, 15 bp, Homo sapiens
cctaagtaaaggact

SEQ ID NO: 555858 - DNA, 15 bp, Homo sapiens
tcctaagtaaaggac

SEQ ID NO: 555859 - DNA, 15 bp, Homo sapiens
ttcctaagtaaagga

SEQ ID NO: 555860 - DNA, 15 bp, Homo sapiens
attcctaagtaaagg

SEQ ID NO: 555861 - DNA, 15 bp, Homo sapiens
aattcctaagtaaag

SEQ ID NO: 555862 - DNA, 15 bp, Homo sapiens
gaattcctaagtaaa

SEQ ID NO: 555863 - DNA, 15 bp, Homo sapiens
tgaattcctaagtaa

SEQ ID NO: 555864 - DNA, 15 bp, Homo sapiens
gtgaattcctaagta

SEQ ID NO: 555865 - DNA, 15 bp, Homo sapiens
agtgaattcctaagt

SEQ ID NO: 555866 - DNA, 15 bp, Homo sapiens
gagtgaattcctaag

SEQ ID NO: 555867 - DNA, 15 bp, Homo sapiens
tgagtgaattcctaa

SEQ ID NO: 555868 - DNA, 15 bp, Homo sapiens
atgagtgaattccta

SEQ ID NO: 555869 - DNA, 15 bp, Homo sapiens
catgagtgaattcct

SEQ ID NO: 555870 - DNA, 15 bp, Homo sapiens
acatgagtgaattcc

SEQ ID NO: 555871 - DNA, 15 bp, Homo sapiens
cacatgagtgaattc

SEQ ID NO: 555872 - DNA, 15 bp, Homo sapiens
ccacatgagtgaatt

SEQ ID NO: 555873 - DNA, 15 bp, Homo sapiens
tccacatgagtgaat

SEQ ID NO: 555874 - DNA, 15 bp, Homo sapiens
gtccacatgagtgaa

SEQ ID NO: 555875 - DNA, 15 bp, Homo sapiens
ggtccacatgagtga

SEQ ID NO: 555876 - DNA, 15 bp, Homo sapiens
aggtccacatgagtg

SEQ ID NO: 555877 - DNA, 15 bp, Homo sapiens
aaggtccacatgagt

SEQ ID NO: 555878 - DNA, 15 bp, Homo sapiens
caaggtccacatgag

SEQ ID NO: 555879 - DNA, 15 bp, Homo sapiens
tcaaggtccacatga

SEQ ID NO: 555880 - DNA, 15 bp, Homo sapiens
gtcaaggtccacatg

SEQ ID NO: 555881 - DNA, 15 bp, Homo sapiens
agtcaaggtccacat

SEQ ID NO: 555882 - DNA, 15 bp, Homo sapiens
aagtcaaggtccaca

SEQ ID NO: 555883 - DNA, 15 bp, Homo sapiens
taagtcaaggtccac

SEQ ID NO: 555884 - DNA, 15 bp, Homo sapiens
ataagtcaaggtcca

SEQ ID NO: 555885 - DNA, 15 bp, Homo sapiens
gataagtcaaggtcc

SEQ ID NO: 555886 - DNA, 15 bp, Homo sapiens
agataagtcaaggtc

SEQ ID NO: 555887 - DNA, 15 bp, Homo sapiens
cagataagtcaaggt

SEQ ID NO: 555888 - DNA, 15 bp, Homo sapiens
gcagataagtcaagg

SEQ ID NO: 555889 - DNA, 15 bp, Homo sapiens
ggcagataagtcaag

SEQ ID NO: 555890 - DNA, 15 bp, Homo sapiens
gggcagataagtcaa

SEQ ID NO: 555891 - DNA, 15 bp, Homo sapiens
agggcagataagtca

SEQ ID NO: 555892 - DNA, 15 bp, Homo sapiens
gagggcagataagtc

SEQ ID NO: 555893 - DNA, 15 bp, Homo sapiens
ggagggcagataagt

SEQ ID NO: 555894 - DNA, 15 bp, Homo sapiens
gggagggcagataag

SEQ ID NO: 555895 - DNA, 15 bp, Homo sapiens
tgggagggcagataa

SEQ ID NO: 555896 - DNA, 15 bp, Homo sapiens
ctgggagggcagata

SEQ ID NO: 555897 - DNA, 15 bp, Homo sapiens
gctgggagggcagat

SEQ ID NO: 555898 - DNA, 15 bp, Homo sapiens
tgctgggagggcaga

SEQ ID NO: 555899 - DNA, 15 bp, Homo sapiens
ttgctgggagggcag

SEQ ID NO: 555900 - DNA, 15 bp, Homo sapiens
tttgctgggagggca

SEQ ID NO: 555901 - DNA, 15 bp, Homo sapiens
gtttgctgggagggc

SEQ ID NO: 555902 - DNA, 15 bp, Homo sapiens
ggtttgctgggaggg

SEQ ID NO: 555903 - DNA, 15 bp, Homo sapiens
gggtttgctgggagg

SEQ ID NO: 555904 - DNA, 15 bp, Homo sapiens
agggtttgctgggag

SEQ ID NO: 555905 - DNA, 15 bp, Homo sapiens
cagggtttgctggga

SEQ ID NO: 555906 - DNA, 15 bp, Homo sapiens
acagggtttgctggg

SEQ ID NO: 555907 - DNA, 15 bp, Homo sapiens
cacagggtttgctgg

SEQ ID NO: 555908 - DNA, 15 bp, Homo sapiens
tcacagggtttgctg

SEQ ID NO: 555909 - DNA, 15 bp, Homo sapiens
ttcacagggtttgct

SEQ ID NO: 555910 - DNA, 15 bp, Homo sapiens
cttcacagggtttgc

SEQ ID NO: 555911 - DNA, 15 bp, Homo sapiens
gcttcacagggtttg

SEQ ID NO: 555912 - DNA, 15 bp, Homo sapiens
ggcttcacagggttt

SEQ ID NO: 555913 - DNA, 15 bp, Homo sapiens
gggcttcacagggtt

SEQ ID NO: 555914 - DNA, 15 bp, Homo sapiens
agggcttcacagggt

SEQ ID NO: 555915 - DNA, 15 bp, Homo sapiens
tagggcttcacaggg

SEQ ID NO: 555916 - DNA, 15 bp, Homo sapiens
gtagggcttcacagg

SEQ ID NO: 555917 - DNA, 15 bp, Homo sapiens
agtagggcttcacag

SEQ ID NO: 555918 - DNA, 15 bp, Homo sapiens
cagtagggcttcaca

SEQ ID NO: 555919 - DNA, 15 bp, Homo sapiens
acagtagggcttcac

SEQ ID NO: 555920 - DNA, 15 bp, Homo sapiens
cacagtagggcttca

SEQ ID NO: 555921 - DNA, 15 bp, Homo sapiens
acacagtagggcttc

SEQ ID NO: 555922 - DNA, 15 bp, Homo sapiens
cacacagtagggctt

SEQ ID NO: 555923 - DNA, 15 bp, Homo sapiens
gcacacagtagggct

SEQ ID NO: 555924 - DNA, 15 bp, Homo sapiens
ggcacacagtagggc

SEQ ID NO: 555925 - DNA, 15 bp, Homo sapiens
tggcacacagtaggg

SEQ ID NO: 555926 - DNA, 15 bp, Homo sapiens
ctggcacacagtagg

SEQ ID NO: 555927 - DNA, 15 bp, Homo sapiens
cctggcacacagtag

SEQ ID NO: 555928 - DNA, 15 bp, Homo sapiens
acctggcacacagta

SEQ ID NO: 555929 - DNA, 15 bp, Homo sapiens
cacctggcacacagt

SEQ ID NO: 555930 - DNA, 15 bp, Homo sapiens
gcacctggcacacag

SEQ ID NO: 555931 - DNA, 15 bp, Homo sapiens
ggcacctggcacaca

SEQ ID NO: 555932 - DNA, 15 bp, Homo sapiens
gggcacctggcacac

SEQ ID NO: 555933 - DNA, 15 bp, Homo sapiens
cgggcacctggcaca

SEQ ID NO: 555934 - DNA, 15 bp, Homo sapiens
ccgggcacctggcac

SEQ ID NO: 555935 - DNA, 15 bp, Homo sapiens
accgggcacctggca

SEQ ID NO: 555936 - DNA, 15 bp, Homo sapiens
taccgggcacctggc

SEQ ID NO: 555937 - DNA, 15 bp, Homo sapiens
ctaccgggcacctgg

SEQ ID NO: 555938 - DNA, 15 bp, Homo sapiens
actaccgggcacctg

SEQ ID NO: 555939 - DNA, 15 bp, Homo sapiens
cactaccgggcacct

SEQ ID NO: 555940 - DNA, 15 bp, Homo sapiens
tcactaccgggcacc

SEQ ID NO: 555941 - DNA, 15 bp, Homo sapiens
ctcactaccgggcac

SEQ ID NO: 555942 - DNA, 15 bp, Homo sapiens
tctcactaccgggca

SEQ ID NO: 555943 - DNA, 15 bp, Homo sapiens
ctctcactaccgggc

SEQ ID NO: 555944 - DNA, 15 bp, Homo sapiens
cctctcactaccggg

SEQ ID NO: 555945 - DNA, 15 bp, Homo sapiens
ccctctcactaccgg

SEQ ID NO: 555946 - DNA, 15 bp, Homo sapiens
accctctcactaccg

SEQ ID NO: 555947 - DNA, 15 bp, Homo sapiens
caccctctcactacc

SEQ ID NO: 555948 - DNA, 15 bp, Homo sapiens
ccaccctctcactac

SEQ ID NO: 555949 - DNA, 15 bp, Homo sapiens
cccaccctctcacta

SEQ ID NO: 555950 - DNA, 15 bp, Homo sapiens
gcccaccctctcact

SEQ ID NO: 555951 - DNA, 15 bp, Homo sapiens
ggcccaccctctcac

SEQ ID NO: 555952 - DNA, 15 bp, Homo sapiens
tggcccaccctctca

SEQ ID NO: 555953 - DNA, 15 bp, Homo sapiens
ttggcccaccctctc

SEQ ID NO: 555954 - DNA, 15 bp, Homo sapiens
cttggcccaccctct

SEQ ID NO: 555955 - DNA, 15 bp, Homo sapiens
acttggcccaccctc

SEQ ID NO: 555956 - DNA, 15 bp, Homo sapiens
gacttggcccaccct

SEQ ID NO: 555957 - DNA, 15 bp, Homo sapiens
agacttggcccaccc

SEQ ID NO: 555958 - DNA, 15 bp, Homo sapiens
gagacttggcccacc

SEQ ID NO: 555959 - DNA, 15 bp, Homo sapiens
ggagacttggcccac

SEQ ID NO: 555960 - DNA, 15 bp, Homo sapiens
cggagacttggccca

SEQ ID NO: 555961 - DNA, 15 bp, Homo sapiens
acggagacttggccc

SEQ ID NO: 555962 - DNA, 15 bp, Homo sapiens
aacggagacttggcc

SEQ ID NO: 555963 - DNA, 15 bp, Homo sapiens
gaacggagacttggc

SEQ ID NO: 555964 - DNA, 15 bp, Homo sapiens
ggaacggagacttgg

SEQ ID NO: 555965 - DNA, 15 bp, Homo sapiens
gggaacggagacttg

SEQ ID NO: 555966 - DNA, 15 bp, Homo sapiens
ggggaacggagactt

SEQ ID NO: 555967 - DNA, 15 bp, Homo sapiens
tggggaacggagact

SEQ ID NO: 555968 - DNA, 15 bp, Homo sapiens
ctggggaacggagac

SEQ ID NO: 555969 - DNA, 15 bp, Homo sapiens
cctggggaacggaga

SEQ ID NO: 555970 - DNA, 15 bp, Homo sapiens
tcctggggaacggag

SEQ ID NO: 555971 - DNA, 15 bp, Homo sapiens
ctcctggggaacgga

SEQ ID NO: 555972 - DNA, 15 bp, Homo sapiens
cctcctggggaacgg

SEQ ID NO: 555973 - DNA, 15 bp, Homo sapiens
gcctcctggggaacg

SEQ ID NO: 555974 - DNA, 15 bp, Homo sapiens
agcctcctggggaac

SEQ ID NO: 555975 - DNA, 15 bp, Homo sapiens
cagcctcctggggaa

SEQ ID NO: 555976 - DNA, 15 bp, Homo sapiens
acagcctcctgggga

SEQ ID NO: 555977 - DNA, 15 bp, Homo sapiens
cacagcctcctgggg

SEQ ID NO: 555978 - DNA, 15 bp, Homo sapiens
acacagcctcctggg

SEQ ID NO: 555979 - DNA, 15 bp, Homo sapiens
gacacagcctcctgg

SEQ ID NO: 555980 - DNA, 15 bp, Homo sapiens
ggacacagcctcctg

SEQ ID NO: 555981 - DNA, 15 bp, Homo sapiens
aggacacagcctcct

SEQ ID NO: 555982 - DNA, 15 bp, Homo sapiens
taggacacagcctcc

SEQ ID NO: 555983 - DNA, 15 bp, Homo sapiens
ataggacacagcctc

SEQ ID NO: 555984 - DNA, 15 bp, Homo sapiens
gataggacacagcct

SEQ ID NO: 555985 - DNA, 15 bp, Homo sapiens
tgataggacacagcc

SEQ ID NO: 555986 - DNA, 15 bp, Homo sapiens
ctgataggacacagc

SEQ ID NO: 555987 - DNA, 15 bp, Homo sapiens
cctgataggacacag

SEQ ID NO: 555988 - DNA, 15 bp, Homo sapiens
ccctgataggacaca

SEQ ID NO: 555989 - DNA, 15 bp, Homo sapiens
gccctgataggacac

SEQ ID NO: 555990 - DNA, 15 bp, Homo sapiens
tgccctgataggaca

SEQ ID NO: 555991 - DNA, 15 bp, Homo sapiens
ttgccctgataggac

SEQ ID NO: 555992 - DNA, 15 bp, Homo sapiens
gttgccctgatagga

SEQ ID NO: 555993 - DNA, 15 bp, Homo sapiens
agttgccctgatagg

SEQ ID NO: 555994 - DNA, 15 bp, Homo sapiens
gagttgccctgatag

SEQ ID NO: 555995 - DNA, 15 bp, Homo sapiens
tgagttgccctgata

SEQ ID NO: 555996 - DNA, 15 bp, Homo sapiens
ctgagttgccctgat

SEQ ID NO: 555997 - DNA, 15 bp, Homo sapiens
cctgagttgccctga

SEQ ID NO: 555998 - DNA, 15 bp, Homo sapiens
gcctgagttgccctg

SEQ ID NO: 555999 - DNA, 15 bp, Homo sapiens
tgcctgagttgccct

SEQ ID NO: 556000 - DNA, 15 bp, Homo sapiens
ttgcctgagttgccc

SEQ ID NO: 556001 - DNA, 15 bp, Homo sapiens
tttgcctgagttgcc

SEQ ID NO: 556002 - DNA, 15 bp, Homo sapiens
atttgcctgagttgc

SEQ ID NO: 556003 - DNA, 15 bp, Homo sapiens
catttgcctgagttg

SEQ ID NO: 556004 - DNA, 15 bp, Homo sapiens
gcatttgcctgagtt

SEQ ID NO: 556005 - DNA, 15 bp, Homo sapiens
tgcatttgcctgagt

SEQ ID NO: 556006 - DNA, 15 bp, Homo sapiens
gtgcatttgcctgag

SEQ ID NO: 556007 - DNA, 15 bp, Homo sapiens
tgtgcatttgcctga

SEQ ID NO: 556008 - DNA, 15 bp, Homo sapiens
ttgtgcatttgcctg

SEQ ID NO: 556009 - DNA, 15 bp, Homo sapiens
tttgtgcatttgcct

SEQ ID NO: 556010 - DNA, 15 bp, Homo sapiens
gtttgtgcatttgcc

SEQ ID NO: 556011 - DNA, 15 bp, Homo sapiens
tgtttgtgcatttgc

SEQ ID NO: 556012 - DNA, 15 bp, Homo sapiens
gtgtttgtgcatttg

SEQ ID NO: 556013 - DNA, 15 bp, Homo sapiens
agtgtttgtgcattt

SEQ ID NO: 556014 - DNA, 15 bp, Homo sapiens
tagtgtttgtgcatt

SEQ ID NO: 556015 - DNA, 15 bp, Homo sapiens
ctagtgtttgtgcat

SEQ ID NO: 556016 - DNA, 15 bp, Homo sapiens
tctagtgtttgtgca

SEQ ID NO: 556017 - DNA, 15 bp, Homo sapiens
ctctagtgtttgtgc

SEQ ID NO: 556018 - DNA, 15 bp, Homo sapiens
actctagtgtttgtg

SEQ ID NO: 556019 - DNA, 15 bp, Homo sapiens
cactctagtgtttgt

SEQ ID NO: 556020 - DNA, 15 bp, Homo sapiens
acactctagtgtttg

SEQ ID NO: 556021 - DNA, 15 bp, Homo sapiens
gacactctagtgttt

SEQ ID NO: 556022 - DNA, 15 bp, Homo sapiens
tgacactctagtgtt

SEQ ID NO: 556023 - DNA, 15 bp, Homo sapiens
ctgacactctagtgt

SEQ ID NO: 556024 - DNA, 15 bp, Homo sapiens
tctgacactctagtg

SEQ ID NO: 556025 - DNA, 15 bp, Homo sapiens
ctctgacactctagt

SEQ ID NO: 556026 - DNA, 15 bp, Homo sapiens
tctctgacactctag

SEQ ID NO: 556027 - DNA, 15 bp, Homo sapiens
ctctctgacactcta

SEQ ID NO: 556028 - DNA, 15 bp, Homo sapiens
actctctgacactct

SEQ ID NO: 556029 - DNA, 15 bp, Homo sapiens
cactctctgacactc

SEQ ID NO: 556030 - DNA, 15 bp, Homo sapiens
tcactctctgacact

SEQ ID NO: 556031 - DNA, 15 bp, Homo sapiens
gtcactctctgacac

SEQ ID NO: 556032 - DNA, 15 bp, Homo sapiens
tgtcactctctgaca

SEQ ID NO: 556033 - DNA, 15 bp, Homo sapiens
ctgtcactctctgac

SEQ ID NO: 556034 - DNA, 15 bp, Homo sapiens
actgtcactctctga

SEQ ID NO: 556035 - DNA, 15 bp, Homo sapiens
cactgtcactctctg

SEQ ID NO: 556036 - DNA, 15 bp, Homo sapiens
gcactgtcactctct

SEQ ID NO: 556037 - DNA, 15 bp, Homo sapiens
agcactgtcactctc

SEQ ID NO: 556038 - DNA, 15 bp, Homo sapiens
aagcactgtcactct

SEQ ID NO: 556039 - DNA, 15 bp, Homo sapiens
aaagcactgtcactc

SEQ ID NO: 556040 - DNA, 15 bp, Homo sapiens
aaaagcactgtcact

SEQ ID NO: 556041 - DNA, 15 bp, Homo sapiens
caaaagcactgtcac

SEQ ID NO: 556042 - DNA, 15 bp, Homo sapiens
gcaaaagcactgtca

SEQ ID NO: 556043 - DNA, 15 bp, Homo sapiens
agcaaaagcactgtc

SEQ ID NO: 556044 - DNA, 15 bp, Homo sapiens
gagcaaaagcactgt

SEQ ID NO: 556045 - DNA, 15 bp, Homo sapiens
agagcaaaagcactg

SEQ ID NO: 556046 - DNA, 15 bp, Homo sapiens
cagagcaaaagcact

SEQ ID NO: 556047 - DNA, 15 bp, Homo sapiens
acagagcaaaagcac

SEQ ID NO: 556048 - DNA, 15 bp, Homo sapiens
cacagagcaaaagca

SEQ ID NO: 556049 - DNA, 15 bp, Homo sapiens
acacagagcaaaagc

SEQ ID NO: 556050 - DNA, 15 bp, Homo sapiens
cacacagagcaaaag

SEQ ID NO: 556051 - DNA, 15 bp, Homo sapiens
ccacacagagcaaaa

SEQ ID NO: 556052 - DNA, 15 bp, Homo sapiens
gccacacagagcaaa

SEQ ID NO: 556053 - DNA, 15 bp, Homo sapiens
ggccacacagagcaa

SEQ ID NO: 556054 - DNA, 15 bp, Homo sapiens
tggccacacagagca

SEQ ID NO: 556055 - DNA, 15 bp, Homo sapiens
gtggccacacagagc

SEQ ID NO: 556056 - DNA, 15 bp, Homo sapiens
agtggccacacagag

SEQ ID NO: 556057 - DNA, 15 bp, Homo sapiens
aagtggccacacaga

SEQ ID NO: 556058 - DNA, 15 bp, Homo sapiens
aaagtggccacacag

SEQ ID NO: 556059 - DNA, 15 bp, Homo sapiens
aaaagtggccacaca

SEQ ID NO: 556060 - DNA, 15 bp, Homo sapiens
aaaaagtggccacac

SEQ ID NO: 556061 - DNA, 15 bp, Homo sapiens
taaaaagtggccaca

SEQ ID NO: 556062 - DNA, 15 bp, Homo sapiens
gtaaaaagtggccac

SEQ ID NO: 556063 - DNA, 15 bp, Homo sapiens
agtaaaaagtggcca

SEQ ID NO: 556064 - DNA, 15 bp, Homo sapiens
tagtaaaaagtggcc

SEQ ID NO: 556065 - DNA, 15 bp, Homo sapiens
atagtaaaaagtggc

SEQ ID NO: 556066 - DNA, 15 bp, Homo sapiens
aatagtaaaaagtgg

SEQ ID NO: 556067 - DNA, 15 bp, Homo sapiens
aaatagtaaaaagtg

SEQ ID NO: 556068 - DNA, 15 bp, Homo sapiens
aaaatagtaaaaagt

SEQ ID NO: 556069 - DNA, 15 bp, Homo sapiens
taaaatagtaaaaag

SEQ ID NO: 556070 - DNA, 15 bp, Homo sapiens
ttaaaatagtaaaaa

SEQ ID NO: 556071 - DNA, 15 bp, Homo sapiens
cttaaaatagtaaaa

SEQ ID NO: 556072 - DNA, 15 bp, Homo sapiens
acttaaaatagtaaa

SEQ ID NO: 556073 - DNA, 15 bp, Homo sapiens
aacttaaaatagtaa

SEQ ID NO: 556074 - DNA, 15 bp, Homo sapiens
aaacttaaaatagta

SEQ ID NO: 556075 - DNA, 15 bp, Homo sapiens
aaaacttaaaatagt

SEQ ID NO: 556076 - DNA, 15 bp, Homo sapiens
aaaaacttaaaatag

SEQ ID NO: 556077 - DNA, 15 bp, Homo sapiens
taaaaacttaaaata

SEQ ID NO: 556078 - DNA, 15 bp, Homo sapiens
gtaaaaacttaaaat

SEQ ID NO: 556079 - DNA, 15 bp, Homo sapiens
agtaaaaacttaaaa

SEQ ID NO: 556080 - DNA, 15 bp, Homo sapiens
aagtaaaaacttaaa

SEQ ID NO: 556081 - DNA, 15 bp, Homo sapiens
taagtaaaaacttaa

SEQ ID NO: 556082 - DNA, 15 bp, Homo sapiens
ataagtaaaaactta

SEQ ID NO: 556083 - DNA, 15 bp, Homo sapiens
aataagtaaaaactt

SEQ ID NO: 556084 - DNA, 15 bp, Homo sapiens
aaataagtaaaaact

SEQ ID NO: 556085 - DNA, 15 bp, Homo sapiens
taaataagtaaaaac

SEQ ID NO: 556086 - DNA, 15 bp, Homo sapiens
ataaataagtaaaaa

SEQ ID NO: 556087 - DNA, 15 bp, Homo sapiens
aataaataagtaaaa

SEQ ID NO: 556088 - DNA, 15 bp, Homo sapiens
aaataaataagtaaa

SEQ ID NO: 556089 - DNA, 15 bp, Homo sapiens
taaataaataagtaa

SEQ ID NO: 556090 - DNA, 15 bp, Homo sapiens
ataaataaataagta

SEQ ID NO: 556091 - DNA, 15 bp, Homo sapiens
aataaataaataagt

SEQ ID NO: 556092 - DNA, 15 bp, Homo sapiens
aaataaataaataag

SEQ ID NO: 556093 - DNA, 15 bp, Homo sapiens
ttaaataaataaata

SEQ ID NO: 556094 - DNA, 15 bp, Homo sapiens
attaaataaataaat

SEQ ID NO: 556095 - DNA, 15 bp, Homo sapiens
aattaaataaataaa

SEQ ID NO: 556096 - DNA, 15 bp, Homo sapiens
aaattaaataaataa

SEQ ID NO: 556097 - DNA, 15 bp, Homo sapiens
aaaattaaataaata

SEQ ID NO: 556098 - DNA, 15 bp, Homo sapiens
aaaaattaaataaat

SEQ ID NO: 556099 - DNA, 15 bp, Homo sapiens
aaaaaattaaataaa

SEQ ID NO: 556100 - DNA, 15 bp, Homo sapiens
taaaaaattaaataa

SEQ ID NO: 556101 - DNA, 15 bp, Homo sapiens
ctaaaaaattaaata

SEQ ID NO: 556102 - DNA, 15 bp, Homo sapiens
tctaaaaaattaaat

SEQ ID NO: 556103 - DNA, 15 bp, Homo sapiens
ctctaaaaaattaaa

SEQ ID NO: 556104 - DNA, 15 bp, Homo sapiens
tctctaaaaaattaa

SEQ ID NO: 556105 - DNA, 15 bp, Homo sapiens
atctctaaaaaatta

SEQ ID NO: 556106 - DNA, 15 bp, Homo sapiens
catctctaaaaaatt

SEQ ID NO: 556107 - DNA, 15 bp, Homo sapiens
ccatctctaaaaaat

SEQ ID NO: 556108 - DNA, 15 bp, Homo sapiens
ccccatctctaaaaa

SEQ ID NO: 556109 - DNA, 15 bp, Homo sapiens
tccccatctctaaaa

SEQ ID NO: 556110 - DNA, 15 bp, Homo sapiens
atccccatctctaaa

SEQ ID NO: 556111 - DNA, 15 bp, Homo sapiens
gatccccatctctaa

SEQ ID NO: 556112 - DNA, 15 bp, Homo sapiens
agatccccatctcta

SEQ ID NO: 556113 - DNA, 15 bp, Homo sapiens
gagatccccatctct

SEQ ID NO: 556114 - DNA, 15 bp, Homo sapiens
cgagatccccatctc

SEQ ID NO: 556115 - DNA, 15 bp, Homo sapiens
gcgagatccccatct

SEQ ID NO: 556116 - DNA, 15 bp, Homo sapiens
agcgagatccccatc

SEQ ID NO: 556117 - DNA, 15 bp, Homo sapiens
tagcgagatccccat

SEQ ID NO: 556118 - DNA, 15 bp, Homo sapiens
atagcgagatcccca

SEQ ID NO: 556119 - DNA, 15 bp, Homo sapiens
catagcgagatcccc

SEQ ID NO: 556120 - DNA, 15 bp, Homo sapiens
acatagcgagatccc

SEQ ID NO: 556121 - DNA, 15 bp, Homo sapiens
aacatagcgagatcc

SEQ ID NO: 556122 - DNA, 15 bp, Homo sapiens
caacatagcgagatc

SEQ ID NO: 556123 - DNA, 15 bp, Homo sapiens
gcaacatagcgagat

SEQ ID NO: 556124 - DNA, 15 bp, Homo sapiens
ggcaacatagcgaga

SEQ ID NO: 556125 - DNA, 15 bp, Homo sapiens
gggcaacatagcgag

SEQ ID NO: 556126 - DNA, 15 bp, Homo sapiens
tgggcaacatagcga

SEQ ID NO: 556127 - DNA, 15 bp, Homo sapiens
ctgggcaacatagcg

SEQ ID NO: 556128 - DNA, 15 bp, Homo sapiens
tagcctgggcaacat

SEQ ID NO: 556129 - DNA, 15 bp, Homo sapiens
ctagcctgggcaaca

SEQ ID NO: 556130 - DNA, 15 bp, Homo sapiens
actagcctgggcaac

SEQ ID NO: 556131 - DNA, 15 bp, Homo sapiens
gactagcctgggcaa

SEQ ID NO: 556132 - DNA, 15 bp, Homo sapiens
agactagcctgggca

SEQ ID NO: 556133 - DNA, 15 bp, Homo sapiens
aagactagcctgggc

SEQ ID NO: 556134 - DNA, 15 bp, Homo sapiens
caagactagcctggg

SEQ ID NO: 556135 - DNA, 15 bp, Homo sapiens
tcaagactagcctgg

SEQ ID NO: 556136 - DNA, 15 bp, Homo sapiens
ttcaagactagcctg

SEQ ID NO: 556137 - DNA, 15 bp, Homo sapiens
gttcaagactagcct

SEQ ID NO: 556138 - DNA, 15 bp, Homo sapiens
agttcaagactagcc

SEQ ID NO: 556139 - DNA, 15 bp, Homo sapiens
gagttcaagactagc

SEQ ID NO: 556140 - DNA, 15 bp, Homo sapiens
ggagttcaagactag

SEQ ID NO: 556141 - DNA, 15 bp, Homo sapiens
aggagttcaagacta

SEQ ID NO: 556142 - DNA, 15 bp, Homo sapiens
taggagttcaagact

SEQ ID NO: 556143 - DNA, 15 bp, Homo sapiens
ctaggagttcaagac

SEQ ID NO: 556144 - DNA, 15 bp, Homo sapiens
gctaggagttcaaga

SEQ ID NO: 556145 - DNA, 15 bp, Homo sapiens
ggctaggagttcaag

SEQ ID NO: 556146 - DNA, 15 bp, Homo sapiens
aggctaggagttcaa

SEQ ID NO: 556147 - DNA, 15 bp, Homo sapiens
gaggctaggagttca

SEQ ID NO: 556148 - DNA, 15 bp, Homo sapiens
tgaggctaggagttc

SEQ ID NO: 556149 - DNA, 15 bp, Homo sapiens
ttgaggctaggagtt

SEQ ID NO: 556150 - DNA, 15 bp, Homo sapiens
cttgaggctaggagt

SEQ ID NO: 556151 - DNA, 15 bp, Homo sapiens
ccttgaggctaggag

SEQ ID NO: 556152 - DNA, 15 bp, Homo sapiens
cccttgaggctagga

SEQ ID NO: 556153 - DNA, 15 bp, Homo sapiens
tcccttgaggctagg

SEQ ID NO: 556154 - DNA, 15 bp, Homo sapiens
atcccttgaggctag

SEQ ID NO: 556155 - DNA, 15 bp, Homo sapiens
gatcccttgaggcta

SEQ ID NO: 556156 - DNA, 15 bp, Homo sapiens
agatcccttgaggct

SEQ ID NO: 556157 - DNA, 15 bp, Homo sapiens
aagatcccttgaggc

SEQ ID NO: 556158 - DNA, 15 bp, Homo sapiens
gaagatcccttgagg

SEQ ID NO: 556159 - DNA, 15 bp, Homo sapiens
ggaagatcccttgag

SEQ ID NO: 556160 - DNA, 15 bp, Homo sapiens
aggaagatcccttga

SEQ ID NO: 556161 - DNA, 15 bp, Homo sapiens
caggaagatcccttg

SEQ ID NO: 556162 - DNA, 15 bp, Homo sapiens
gcaggaagatccctt

SEQ ID NO: 556163 - DNA, 15 bp, Homo sapiens
agcaggaagatccct

SEQ ID NO: 556164 - DNA, 15 bp, Homo sapiens
aagcaggaagatccc

SEQ ID NO: 556165 - DNA, 15 bp, Homo sapiens
gaagcaggaagatcc

SEQ ID NO: 556166 - DNA, 15 bp, Homo sapiens
tgaagcaggaagatc

SEQ ID NO: 556167 - DNA, 15 bp, Homo sapiens
ctgaagcaggaagat

SEQ ID NO: 556168 - DNA, 15 bp, Homo sapiens
gctgaagcaggaaga

SEQ ID NO: 556169 - DNA, 15 bp, Homo sapiens
ggctgaagcaggaag

SEQ ID NO: 556170 - DNA, 15 bp, Homo sapiens
aggctgaagcaggaa

SEQ ID NO: 556171 - DNA, 15 bp, Homo sapiens
gaggctgaagcagga

SEQ ID NO: 556172 - DNA, 15 bp, Homo sapiens
ggaggctgaagcagg

SEQ ID NO: 556173 - DNA, 15 bp, Homo sapiens
gggaggctgaagcag

SEQ ID NO: 556174 - DNA, 15 bp, Homo sapiens
tgggaggctgaagca

SEQ ID NO: 556175 - DNA, 15 bp, Homo sapiens
ttgggaggctgaagc

SEQ ID NO: 556176 - DNA, 15 bp, Homo sapiens
tttgggaggctgaag

SEQ ID NO: 556177 - DNA, 15 bp, Homo sapiens
ctttgggaggctgaa

SEQ ID NO: 556178 - DNA, 15 bp, Homo sapiens
caatcccagcacttt

SEQ ID NO: 556179 - DNA, 15 bp, Homo sapiens
gcaatcccagcactt

SEQ ID NO: 556180 - DNA, 15 bp, Homo sapiens
tgcaatcccagcact

SEQ ID NO: 556181 - DNA, 15 bp, Homo sapiens
ctgcaatcccagcac

SEQ ID NO: 556182 - DNA, 15 bp, Homo sapiens
cctgcaatcccagca

SEQ ID NO: 556183 - DNA, 15 bp, Homo sapiens
acctgcaatcccagc

SEQ ID NO: 556184 - DNA, 15 bp, Homo sapiens
cacctgcaatcccag

SEQ ID NO: 556185 - DNA, 15 bp, Homo sapiens
acacctgcaatccca

SEQ ID NO: 556186 - DNA, 15 bp, Homo sapiens
cacacctgcaatccc

SEQ ID NO: 556187 - DNA, 15 bp, Homo sapiens
tcacacctgcaatcc

SEQ ID NO: 556188 - DNA, 15 bp, Homo sapiens
ctcacacctgcaatc

SEQ ID NO: 556189 - DNA, 15 bp, Homo sapiens
gctcacacctgcaat

SEQ ID NO: 556190 - DNA, 15 bp, Homo sapiens
agctcacacctgcaa

SEQ ID NO: 556191 - DNA, 15 bp, Homo sapiens
tagctcacacctgca

SEQ ID NO: 556192 - DNA, 15 bp, Homo sapiens
gtagctcacacctgc

SEQ ID NO: 556193 - DNA, 15 bp, Homo sapiens
agtagctcacacctg

SEQ ID NO: 556194 - DNA, 15 bp, Homo sapiens
cagtagctcacacct

SEQ ID NO: 556195 - DNA, 15 bp, Homo sapiens
acagtagctcacacc

SEQ ID NO: 556196 - DNA, 15 bp, Homo sapiens
tacagtagctcacac

SEQ ID NO: 556197 - DNA, 15 bp, Homo sapiens
gtacagtagctcaca

SEQ ID NO: 556198 - DNA, 15 bp, Homo sapiens
ggtacagtagctcac

SEQ ID NO: 556199 - DNA, 15 bp, Homo sapiens
gggtacagtagctca

SEQ ID NO: 556200 - DNA, 15 bp, Homo sapiens
tgggtacagtagctc

SEQ ID NO: 556201 - DNA, 15 bp, Homo sapiens
ctgggtacagtagct

SEQ ID NO: 556202 - DNA, 15 bp, Homo sapiens
gctgggtacagtagc

SEQ ID NO: 556203 - DNA, 15 bp, Homo sapiens
agctgggtacagtag

SEQ ID NO: 556204 - DNA, 15 bp, Homo sapiens
cagctgggtacagta

SEQ ID NO: 556205 - DNA, 15 bp, Homo sapiens
tcagctgggtacagt

SEQ ID NO: 556206 - DNA, 15 bp, Homo sapiens
gtcagctgggtacag

SEQ ID NO: 556207 - DNA, 15 bp, Homo sapiens
agtcagctgggtaca

SEQ ID NO: 556208 - DNA, 15 bp, Homo sapiens
aagtcagctgggtac

SEQ ID NO: 556209 - DNA, 15 bp, Homo sapiens
aaagtcagctgggta

SEQ ID NO: 556210 - DNA, 15 bp, Homo sapiens
taaagtcagctgggt

SEQ ID NO: 556211 - DNA, 15 bp, Homo sapiens
ttaaagtcagctggg

SEQ ID NO: 556212 - DNA, 15 bp, Homo sapiens
tttaaagtcagctgg

SEQ ID NO: 556213 - DNA, 15 bp, Homo sapiens
ttttaaagtcagctg

SEQ ID NO: 556214 - DNA, 15 bp, Homo sapiens
cttttaaagtcagct

SEQ ID NO: 556215 - DNA, 15 bp, Homo sapiens
gcttttaaagtcagc

SEQ ID NO: 556216 - DNA, 15 bp, Homo sapiens
agcttttaaagtcag

SEQ ID NO: 556217 - DNA, 15 bp, Homo sapiens
cagcttttaaagtca

SEQ ID NO: 556218 - DNA, 15 bp, Homo sapiens
tcagcttttaaagtc

SEQ ID NO: 556219 - DNA, 15 bp, Homo sapiens
ttcagcttttaaagt

SEQ ID NO: 556220 - DNA, 15 bp, Homo sapiens
attcagcttttaaag

SEQ ID NO: 556221 - DNA, 15 bp, Homo sapiens
aattcagcttttaaa

SEQ ID NO: 556222 - DNA, 15 bp, Homo sapiens
aaattcagcttttaa

SEQ ID NO: 556223 - DNA, 15 bp, Homo sapiens
aaaattcagctttta

SEQ ID NO: 556224 - DNA, 15 bp, Homo sapiens
taaaattcagctttt

SEQ ID NO: 556225 - DNA, 15 bp, Homo sapiens
ttaaaattcagcttt

SEQ ID NO: 556226 - DNA, 15 bp, Homo sapiens
tttaaaattcagctt

SEQ ID NO: 556227 - DNA, 15 bp, Homo sapiens
gtttaaaattcagct

SEQ ID NO: 556228 - DNA, 15 bp, Homo sapiens
agtttaaaattcagc

SEQ ID NO: 556229 - DNA, 15 bp, Homo sapiens
aagtttaaaattcag

SEQ ID NO: 556230 - DNA, 15 bp, Homo sapiens
taagtttaaaattca

SEQ ID NO: 556231 - DNA, 15 bp, Homo sapiens
ttaagtttaaaattc

SEQ ID NO: 556232 - DNA, 15 bp, Homo sapiens
tttaagtttaaaatt

SEQ ID NO: 556233 - DNA, 15 bp, Homo sapiens
ctttaagtttaaaat

SEQ ID NO: 556234 - DNA, 15 bp, Homo sapiens
tctttaagtttaaaa

SEQ ID NO: 556235 - DNA, 15 bp, Homo sapiens
ttctttaagtttaaa

SEQ ID NO: 556236 - DNA, 15 bp, Homo sapiens
tttctttaagtttaa

SEQ ID NO: 556237 - DNA, 15 bp, Homo sapiens
ttttctttaagttta

SEQ ID NO: 556238 - DNA, 15 bp, Homo sapiens
cttttctttaagttt

SEQ ID NO: 556239 - DNA, 15 bp, Homo sapiens
acttttctttaagtt

SEQ ID NO: 556240 - DNA, 15 bp, Homo sapiens
aacttttctttaagt

SEQ ID NO: 556241 - DNA, 15 bp, Homo sapiens
caacttttctttaag

SEQ ID NO: 556242 - DNA, 15 bp, Homo sapiens
gcaacttttctttaa

SEQ ID NO: 556243 - DNA, 15 bp, Homo sapiens
tgcaacttttcttta

SEQ ID NO: 556244 - DNA, 15 bp, Homo sapiens
atgcaacttttcttt

SEQ ID NO: 556245 - DNA, 15 bp, Homo sapiens
catgcaacttttctt

SEQ ID NO: 556246 - DNA, 15 bp, Homo sapiens
tcatgcaacttttct

SEQ ID NO: 556247 - DNA, 15 bp, Homo sapiens
ctcatgcaacttttc

SEQ ID NO: 556248 - DNA, 15 bp, Homo sapiens
tctcatgcaactttt

SEQ ID NO: 556249 - DNA, 15 bp, Homo sapiens
ttctcatgcaacttt

SEQ ID NO: 556250 - DNA, 15 bp, Homo sapiens
tttctcatgcaactt

SEQ ID NO: 556251 - DNA, 15 bp, Homo sapiens
atttctcatgcaact

SEQ ID NO: 556252 - DNA, 15 bp, Homo sapiens
tatttctcatgcaac

SEQ ID NO: 556253 - DNA, 15 bp, Homo sapiens
gtatttctcatgcaa

SEQ ID NO: 556254 - DNA, 15 bp, Homo sapiens
tgtatttctcatgca

SEQ ID NO: 556255 - DNA, 15 bp, Homo sapiens
ttgtatttctcatgc

SEQ ID NO: 556256 - DNA, 15 bp, Homo sapiens
cttgtatttctcatg

SEQ ID NO: 556257 - DNA, 15 bp, Homo sapiens
acttgtatttctcat

SEQ ID NO: 556258 - DNA, 15 bp, Homo sapiens
cacttgtatttctca

SEQ ID NO: 556259 - DNA, 15 bp, Homo sapiens
ccacttgtatttctc

SEQ ID NO: 556260 - DNA, 15 bp, Homo sapiens
gccacttgtatttct

SEQ ID NO: 556261 - DNA, 15 bp, Homo sapiens
ggccacttgtatttc

SEQ ID NO: 556262 - DNA, 15 bp, Homo sapiens
gggccacttgtattt

SEQ ID NO: 556263 - DNA, 15 bp, Homo sapiens
ggggccacttgtatt

SEQ ID NO: 556264 - DNA, 15 bp, Homo sapiens
gggggccacttgtat

SEQ ID NO: 556265 - DNA, 15 bp, Homo sapiens
cgggggccacttgta

SEQ ID NO: 556266 - DNA, 15 bp, Homo sapiens
acgggggccacttgt

SEQ ID NO: 556267 - DNA, 15 bp, Homo sapiens
gacgggggccacttg

SEQ ID NO: 556268 - DNA, 15 bp, Homo sapiens
agacgggggccactt

SEQ ID NO: 556269 - DNA, 15 bp, Homo sapiens
gagacgggggccact

SEQ ID NO: 556270 - DNA, 15 bp, Homo sapiens
ggagacgggggccac

SEQ ID NO: 556271 - DNA, 15 bp, Homo sapiens
gggagacgggggcca

SEQ ID NO: 556272 - DNA, 15 bp, Homo sapiens
ggggagacgggggcc

SEQ ID NO: 556273 - DNA, 15 bp, Homo sapiens
aggggagacgggggc

SEQ ID NO: 556274 - DNA, 15 bp, Homo sapiens
aaggggagacggggg

SEQ ID NO: 556275 - DNA, 15 bp, Homo sapiens
gaaggggagacgggg

SEQ ID NO: 556276 - DNA, 15 bp, Homo sapiens
tgaaggggagacggg

SEQ ID NO: 556277 - DNA, 15 bp, Homo sapiens
gtgaaggggagacgg

SEQ ID NO: 556278 - DNA, 15 bp, Homo sapiens
ggtgaaggggagacg

SEQ ID NO: 556279 - DNA, 15 bp, Homo sapiens
gggtgaaggggagac

SEQ ID NO: 556280 - DNA, 15 bp, Homo sapiens
tgggtgaaggggaga

SEQ ID NO: 556281 - DNA, 15 bp, Homo sapiens
ctgggtgaaggggag

SEQ ID NO: 556282 - DNA, 15 bp, Homo sapiens
cctgggtgaagggga

SEQ ID NO: 556283 - DNA, 15 bp, Homo sapiens
acctgggtgaagggg

SEQ ID NO: 556284 - DNA, 15 bp, Homo sapiens
aacctgggtgaaggg

SEQ ID NO: 556285 - DNA, 15 bp, Homo sapiens
gaacctgggtgaagg

SEQ ID NO: 556286 - DNA, 15 bp, Homo sapiens
tgaacctgggtgaag

SEQ ID NO: 556287 - DNA, 15 bp, Homo sapiens
gtgaacctgggtgaa

SEQ ID NO: 556288 - DNA, 15 bp, Homo sapiens
agtgaacctgggtga

SEQ ID NO: 556289 - DNA, 15 bp, Homo sapiens
tagtgaacctgggtg

SEQ ID NO: 556290 - DNA, 15 bp, Homo sapiens
ctagtgaacctgggt

SEQ ID NO: 556291 - DNA, 15 bp, Homo sapiens
gctagtgaacctggg

SEQ ID NO: 556292 - DNA, 15 bp, Homo sapiens
ggctagtgaacctgg

SEQ ID NO: 556293 - DNA, 15 bp, Homo sapiens
cggctagtgaacctg

SEQ ID NO: 556294 - DNA, 15 bp, Homo sapiens
acggctagtgaacct

SEQ ID NO: 556295 - DNA, 15 bp, Homo sapiens
cacggctagtgaacc

SEQ ID NO: 556296 - DNA, 15 bp, Homo sapiens
acacggctagtgaac

SEQ ID NO: 556297 - DNA, 15 bp, Homo sapiens
aacacggctagtgaa

SEQ ID NO: 556298 - DNA, 15 bp, Homo sapiens
taacacggctagtga

SEQ ID NO: 556299 - DNA, 15 bp, Homo sapiens
ttaacacggctagtg

SEQ ID NO: 556300 - DNA, 15 bp, Homo sapiens
cttaacacggctagt

SEQ ID NO: 556301 - DNA, 15 bp, Homo sapiens
gcttaacacggctag

SEQ ID NO: 556302 - DNA, 15 bp, Homo sapiens
ggcttaacacggcta

SEQ ID NO: 556303 - DNA, 15 bp, Homo sapiens
gggcttaacacggct

SEQ ID NO: 556304 - DNA, 15 bp, Homo sapiens
ggggcttaacacggc

SEQ ID NO: 556305 - DNA, 15 bp, Homo sapiens
gggggcttaacacgg

SEQ ID NO: 556306 - DNA, 15 bp, Homo sapiens
ggggggcttaacacg

SEQ ID NO: 556307 - DNA, 15 bp, Homo sapiens
tggggggcttaacac

SEQ ID NO: 556308 - DNA, 15 bp, Homo sapiens
gtggggggcttaaca

SEQ ID NO: 556309 - DNA, 15 bp, Homo sapiens
ggtggggggcttaac

SEQ ID NO: 556310 - DNA, 15 bp, Homo sapiens
gggtggggggcttaa

SEQ ID NO: 556311 - DNA, 15 bp, Homo sapiens
ggggtggggggctta

SEQ ID NO: 556312 - DNA, 15 bp, Homo sapiens
gggggtggggggctt

SEQ ID NO: 556313 - DNA, 15 bp, Homo sapiens
agggggtggggggct

SEQ ID NO: 556314 - DNA, 15 bp, Homo sapiens
gagggggtggggggc

SEQ ID NO: 556315 - DNA, 15 bp, Homo sapiens
agagggggtgggggg

SEQ ID NO: 556316 - DNA, 15 bp, Homo sapiens
aagagggggtggggg

SEQ ID NO: 556317 - DNA, 15 bp, Homo sapiens
gaagagggggtgggg

SEQ ID NO: 556318 - DNA, 15 bp, Homo sapiens
agaagagggggtggg

SEQ ID NO: 556319 - DNA, 15 bp, Homo sapiens
gagaagagggggtgg

SEQ ID NO: 556320 - DNA, 15 bp, Homo sapiens
cgagaagagggggtg

SEQ ID NO: 556321 - DNA, 15 bp, Homo sapiens
gcgagaagagggggt

SEQ ID NO: 556322 - DNA, 15 bp, Homo sapiens
ggcgagaagaggggg

SEQ ID NO: 556323 - DNA, 15 bp, Homo sapiens
cggcgagaagagggg

SEQ ID NO: 556324 - DNA, 15 bp, Homo sapiens
tcggcgagaagaggg

SEQ ID NO: 556325 - DNA, 15 bp, Homo sapiens
ctcggcgagaagagg

SEQ ID NO: 556326 - DNA, 15 bp, Homo sapiens
actcggcgagaagag

SEQ ID NO: 556327 - DNA, 15 bp, Homo sapiens
cactcggcgagaaga

SEQ ID NO: 556328 - DNA, 15 bp, Homo sapiens
acactcggcgagaag

SEQ ID NO: 556329 - DNA, 15 bp, Homo sapiens
gacactcggcgagaa

SEQ ID NO: 556330 - DNA, 15 bp, Homo sapiens
agacactcggcgaga

SEQ ID NO: 556331 - DNA, 15 bp, Homo sapiens
aagacactcggcgag

SEQ ID NO: 556332 - DNA, 15 bp, Homo sapiens
aaagacactcggcga

SEQ ID NO: 556333 - DNA, 15 bp, Homo sapiens
aaaagacactcggcg

SEQ ID NO: 556334 - DNA, 15 bp, Homo sapiens
aaaaagacactcggc

SEQ ID NO: 556335 - DNA, 15 bp, Homo sapiens
gaaaaagacactcgg

SEQ ID NO: 556336 - DNA, 15 bp, Homo sapiens
ggaaaaagacactcg

SEQ ID NO: 556337 - DNA, 15 bp, Homo sapiens
tggaaaaagacactc

SEQ ID NO: 556338 - DNA, 15 bp, Homo sapiens
ctggaaaaagacact

SEQ ID NO: 556339 - DNA, 15 bp, Homo sapiens
tctggaaaaagacac

SEQ ID NO: 556340 - DNA, 15 bp, Homo sapiens
ttctggaaaaagaca

SEQ ID NO: 556341 - DNA, 15 bp, Homo sapiens
gttctggaaaaagac

SEQ ID NO: 556342 - DNA, 15 bp, Homo sapiens
ggttctggaaaaaga

SEQ ID NO: 556343 - DNA, 15 bp, Homo sapiens
tggttctggaaaaag

SEQ ID NO: 556344 - DNA, 15 bp, Homo sapiens
atggttctggaaaaa

SEQ ID NO: 556345 - DNA, 15 bp, Homo sapiens
gatggttctggaaaa

SEQ ID NO: 556346 - DNA, 15 bp, Homo sapiens
cgatggttctggaaa

SEQ ID NO: 556347 - DNA, 15 bp, Homo sapiens
ccgatggttctggaa

SEQ ID NO: 556348 - DNA, 15 bp, Homo sapiens
tccgatggttctgga

SEQ ID NO: 556349 - DNA, 15 bp, Homo sapiens
ctccgatggttctgg

SEQ ID NO: 556350 - DNA, 15 bp, Homo sapiens
tctccgatggttctg

SEQ ID NO: 556351 - DNA, 15 bp, Homo sapiens
ctctccgatggttct

SEQ ID NO: 556352 - DNA, 15 bp, Homo sapiens
actctccgatggttc

SEQ ID NO: 556353 - DNA, 15 bp, Homo sapiens
tactctccgatggtt

SEQ ID NO: 556354 - DNA, 15 bp, Homo sapiens
ctactctccgatggt

SEQ ID NO: 556355 - DNA, 15 bp, Homo sapiens
cctactctccgatgg

SEQ ID NO: 556356 - DNA, 15 bp, Homo sapiens
acctactctccgatg

SEQ ID NO: 556357 - DNA, 15 bp, Homo sapiens
aacctactctccgat

SEQ ID NO: 556358 - DNA, 15 bp, Homo sapiens
caacctactctccga

SEQ ID NO: 556359 - DNA, 15 bp, Homo sapiens
ccaacctactctccg

SEQ ID NO: 556360 - DNA, 15 bp, Homo sapiens
tccaacctactctcc

SEQ ID NO: 556361 - DNA, 15 bp, Homo sapiens
ctccaacctactctc

SEQ ID NO: 556362 - DNA, 15 bp, Homo sapiens
cctccaacctactct

SEQ ID NO: 556363 - DNA, 15 bp, Homo sapiens
gcctccaacctactc

SEQ ID NO: 556364 - DNA, 15 bp, Homo sapiens
agcctccaacctact

SEQ ID NO: 556365 - DNA, 15 bp, Homo sapiens
cagcctccaacctac

SEQ ID NO: 556366 - DNA, 15 bp, Homo sapiens
acagcctccaaccta

SEQ ID NO: 556367 - DNA, 15 bp, Homo sapiens
tacagcctccaacct

SEQ ID NO: 556368 - DNA, 15 bp, Homo sapiens
atacagcctccaacc

SEQ ID NO: 556369 - DNA, 15 bp, Homo sapiens
catacagcctccaac

SEQ ID NO: 556370 - DNA, 15 bp, Homo sapiens
gcatacagcctccaa

SEQ ID NO: 556371 - DNA, 15 bp, Homo sapiens
ggcatacagcctcca

SEQ ID NO: 556372 - DNA, 15 bp, Homo sapiens
gggcatacagcctcc

SEQ ID NO: 556373 - DNA, 15 bp, Homo sapiens
ggggcatacagcctc

SEQ ID NO: 556374 - DNA, 15 bp, Homo sapiens
gggggcatacagcct

SEQ ID NO: 556375 - DNA, 15 bp, Homo sapiens
agggggcatacagcc

SEQ ID NO: 556376 - DNA, 15 bp, Homo sapiens
aagggggcatacagc

SEQ ID NO: 556377 - DNA, 15 bp, Homo sapiens
taagggggcatacag

SEQ ID NO: 556378 - DNA, 15 bp, Homo sapiens
gtaagggggcataca

SEQ ID NO: 556379 - DNA, 15 bp, Homo sapiens
ggtaagggggcatac

SEQ ID NO: 556380 - DNA, 15 bp, Homo sapiens
aggtaagggggcata

SEQ ID NO: 556381 - DNA, 15 bp, Homo sapiens
gaggtaagggggcat

SEQ ID NO: 556382 - DNA, 15 bp, Homo sapiens
ggaggtaagggggca

SEQ ID NO: 556383 - DNA, 15 bp, Homo sapiens
tggaggtaagggggc

SEQ ID NO: 556384 - DNA, 15 bp, Homo sapiens
ttggaggtaaggggg

SEQ ID NO: 556385 - DNA, 15 bp, Homo sapiens
tttggaggtaagggg

SEQ ID NO: 556386 - DNA, 15 bp, Homo sapiens
atttggaggtaaggg

SEQ ID NO: 556387 - DNA, 15 bp, Homo sapiens
tatttggaggtaagg

SEQ ID NO: 556388 - DNA, 15 bp, Homo sapiens
gtatttggaggtaag

SEQ ID NO: 556389 - DNA, 15 bp, Homo sapiens
agtatttggaggtaa

SEQ ID NO: 556390 - DNA, 15 bp, Homo sapiens
gagtatttggaggta

SEQ ID NO: 556391 - DNA, 15 bp, Homo sapiens
tgagtatttggaggt

SEQ ID NO: 556392 - DNA, 15 bp, Homo sapiens
ctgagtatttggagg

SEQ ID NO: 556393 - DNA, 15 bp, Homo sapiens
actgagtatttggag

SEQ ID NO: 556394 - DNA, 15 bp, Homo sapiens
cactgagtatttgga

SEQ ID NO: 556395 - DNA, 15 bp, Homo sapiens
ccactgagtatttgg

SEQ ID NO: 556396 - DNA, 15 bp, Homo sapiens
cccactgagtatttg

SEQ ID NO: 556397 - DNA, 15 bp, Homo sapiens
acccactgagtattt

SEQ ID NO: 556398 - DNA, 15 bp, Homo sapiens
cacccactgagtatt

SEQ ID NO: 556399 - DNA, 15 bp, Homo sapiens
acacccactgagtat

SEQ ID NO: 556400 - DNA, 15 bp, Homo sapiens
aacacccactgagta

SEQ ID NO: 556401 - DNA, 15 bp, Homo sapiens
aaacacccactgagt

SEQ ID NO: 556402 - DNA, 15 bp, Homo sapiens
aaaacacccactgag

SEQ ID NO: 556403 - DNA, 15 bp, Homo sapiens
aaaaacacccactga

SEQ ID NO: 556404 - DNA, 15 bp, Homo sapiens
gaaaaacacccactg

SEQ ID NO: 556405 - DNA, 15 bp, Homo sapiens
tgaaaaacacccact

SEQ ID NO: 556406 - DNA, 15 bp, Homo sapiens
ctgaaaaacacccac

SEQ ID NO: 556407 - DNA, 15 bp, Homo sapiens
tctgaaaaacaccca

SEQ ID NO: 556408 - DNA, 15 bp, Homo sapiens
ttctgaaaaacaccc

SEQ ID NO: 556409 - DNA, 15 bp, Homo sapiens
tttctgaaaaacacc

SEQ ID NO: 556410 - DNA, 15 bp, Homo sapiens
gtttctgaaaaacac

SEQ ID NO: 556411 - DNA, 15 bp, Homo sapiens
cgtttctgaaaaaca

SEQ ID NO: 556412 - DNA, 15 bp, Homo sapiens
tcgtttctgaaaaac

SEQ ID NO: 556413 - DNA, 15 bp, Homo sapiens
ctcgtttctgaaaaa

SEQ ID NO: 556414 - DNA, 15 bp, Homo sapiens
cctcgtttctgaaaa

SEQ ID NO: 556415 - DNA, 15 bp, Homo sapiens
tcctcgtttctgaaa

SEQ ID NO: 556416 - DNA, 15 bp, Homo sapiens
gtcctcgtttctgaa

SEQ ID NO: 556417 - DNA, 15 bp, Homo sapiens
tgtcctcgtttctga

SEQ ID NO: 556418 - DNA, 15 bp, Homo sapiens
atgtcctcgtttctg

SEQ ID NO: 556419 - DNA, 15 bp, Homo sapiens
aatgtcctcgtttct

SEQ ID NO: 556420 - DNA, 15 bp, Homo sapiens
aaatgtcctcgtttc

SEQ ID NO: 556421 - DNA, 15 bp, Homo sapiens
aaaatgtcctcgttt

SEQ ID NO: 556422 - DNA, 15 bp, Homo sapiens
gaaaatgtcctcgtt

SEQ ID NO: 556423 - DNA, 15 bp, Homo sapiens
agaaaatgtcctcgt

SEQ ID NO: 556424 - DNA, 15 bp, Homo sapiens
aagaaaatgtcctcg

SEQ ID NO: 556425 - DNA, 15 bp, Homo sapiens
taagaaaatgtcctc

SEQ ID NO: 556426 - DNA, 15 bp, Homo sapiens
gtaagaaaatgtcct

SEQ ID NO: 556427 - DNA, 15 bp, Homo sapiens
tgtaagaaaatgtcc

SEQ ID NO: 556428 - DNA, 15 bp, Homo sapiens
atgtaagaaaatgtc

SEQ ID NO: 556429 - DNA, 15 bp, Homo sapiens
tatgtaagaaaatgt

SEQ ID NO: 556430 - DNA, 15 bp, Homo sapiens
ttatgtaagaaaatg

SEQ ID NO: 556431 - DNA, 15 bp, Homo sapiens
gttatgtaagaaaat

SEQ ID NO: 556432 - DNA, 15 bp, Homo sapiens
ggttatgtaagaaaa

SEQ ID NO: 556433 - DNA, 15 bp, Homo sapiens
tggttatgtaagaaa

SEQ ID NO: 556434 - DNA, 15 bp, Homo sapiens
atggttatgtaagaa

SEQ ID NO: 556435 - DNA, 15 bp, Homo sapiens
tatggttatgtaaga

SEQ ID NO: 556436 - DNA, 15 bp, Homo sapiens
ttatggttatgtaag

SEQ ID NO: 556437 - DNA, 15 bp, Homo sapiens
attatggttatgtaa

SEQ ID NO: 556438 - DNA, 15 bp, Homo sapiens
cattatggttatgta

SEQ ID NO: 556439 - DNA, 15 bp, Homo sapiens
gcattatggttatgt

SEQ ID NO: 556440 - DNA, 15 bp, Homo sapiens
agcattatggttatg

SEQ ID NO: 556441 - DNA, 15 bp, Homo sapiens
cagcattatggttat

SEQ ID NO: 556442 - DNA, 15 bp, Homo sapiens
acagcattatggtta

SEQ ID NO: 556443 - DNA, 15 bp, Homo sapiens
aacagcattatggtt

SEQ ID NO: 556444 - DNA, 15 bp, Homo sapiens
taacagcattatggt

SEQ ID NO: 556445 - DNA, 15 bp, Homo sapiens
ataacagcattatgg

SEQ ID NO: 556446 - DNA, 15 bp, Homo sapiens
gataacagcattatg

SEQ ID NO: 556447 - DNA, 15 bp, Homo sapiens
tgataacagcattat

SEQ ID NO: 556448 - DNA, 15 bp, Homo sapiens
ttgataacagcatta

SEQ ID NO: 556449 - DNA, 15 bp, Homo sapiens
tttgataacagcatt

SEQ ID NO: 556450 - DNA, 15 bp, Homo sapiens
ttttgataacagcat

SEQ ID NO: 556451 - DNA, 15 bp, Homo sapiens
attttgataacagca

SEQ ID NO: 556452 - DNA, 15 bp, Homo sapiens
cattttgataacagc

SEQ ID NO: 556453 - DNA, 15 bp, Homo sapiens
tcattttgataacag

SEQ ID NO: 556454 - DNA, 15 bp, Homo sapiens
ctcattttgataaca

SEQ ID NO: 556455 - DNA, 15 bp, Homo sapiens
tctcattttgataac

SEQ ID NO: 556456 - DNA, 15 bp, Homo sapiens
ttctcattttgataa

SEQ ID NO: 556457 - DNA, 15 bp, Homo sapiens
tttctcattttgata

SEQ ID NO: 556458 - DNA, 15 bp, Homo sapiens
ttttctcattttgat

SEQ ID NO: 556459 - DNA, 15 bp, Homo sapiens
attttctcattttga

SEQ ID NO: 556460 - DNA, 15 bp, Homo sapiens
aattttctcattttg

SEQ ID NO: 556461 - DNA, 15 bp, Homo sapiens
aaattttctcatttt

SEQ ID NO: 556462 - DNA, 15 bp, Homo sapiens
caaattttctcattt

SEQ ID NO: 556463 - DNA, 15 bp, Homo sapiens
ccaaattttctcatt

SEQ ID NO: 556464 - DNA, 15 bp, Homo sapiens
gccaaattttctcat

SEQ ID NO: 556465 - DNA, 15 bp, Homo sapiens
tgccaaattttctca

SEQ ID NO: 556466 - DNA, 15 bp, Homo sapiens
atgccaaattttctc

SEQ ID NO: 556467 - DNA, 15 bp, Homo sapiens
aatgccaaattttct

SEQ ID NO: 556468 - DNA, 15 bp, Homo sapiens
caatgccaaattttc

SEQ ID NO: 556469 - DNA, 15 bp, Homo sapiens
tcaatgccaaatttt

SEQ ID NO: 556470 - DNA, 15 bp, Homo sapiens
gtcaatgccaaattt

SEQ ID NO: 556471 - DNA, 15 bp, Homo sapiens
tgtcaatgccaaatt

SEQ ID NO: 556472 - DNA, 15 bp, Homo sapiens
atgtcaatgccaaat

SEQ ID NO: 556473 - DNA, 15 bp, Homo sapiens
tatgtcaatgccaaa

SEQ ID NO: 556474 - DNA, 15 bp, Homo sapiens
ttatgtcaatgccaa

SEQ ID NO: 556475 - DNA, 15 bp, Homo sapiens
attatgtcaatgcca

SEQ ID NO: 556476 - DNA, 15 bp, Homo sapiens
tattatgtcaatgcc

SEQ ID NO: 556477 - DNA, 15 bp, Homo sapiens
gtattatgtcaatgc

SEQ ID NO: 556478 - DNA, 15 bp, Homo sapiens
agtattatgtcaatg

SEQ ID NO: 556479 - DNA, 15 bp, Homo sapiens
cagtattatgtcaat

SEQ ID NO: 556480 - DNA, 15 bp, Homo sapiens
acagtattatgtcaa

SEQ ID NO: 556481 - DNA, 15 bp, Homo sapiens
aacagtattatgtca

SEQ ID NO: 556482 - DNA, 15 bp, Homo sapiens
taacagtattatgtc

SEQ ID NO: 556483 - DNA, 15 bp, Homo sapiens
ataacagtattatgt

SEQ ID NO: 556484 - DNA, 15 bp, Homo sapiens
gataacagtattatg

SEQ ID NO: 556485 - DNA, 15 bp, Homo sapiens
agataacagtattat

SEQ ID NO: 556486 - DNA, 15 bp, Homo sapiens
tagataacagtatta

SEQ ID NO: 556487 - DNA, 15 bp, Homo sapiens
ttagataacagtatt

SEQ ID NO: 556488 - DNA, 15 bp, Homo sapiens
cttagataacagtat

SEQ ID NO: 556489 - DNA, 15 bp, Homo sapiens
gcttagataacagta

SEQ ID NO: 556490 - DNA, 15 bp, Homo sapiens
agcttagataacagt

SEQ ID NO: 556491 - DNA, 15 bp, Homo sapiens
cagcttagataacag

SEQ ID NO: 556492 - DNA, 15 bp, Homo sapiens
ccagcttagataaca

SEQ ID NO: 556493 - DNA, 15 bp, Homo sapiens
gccagcttagataac

SEQ ID NO: 556494 - DNA, 15 bp, Homo sapiens
tgccagcttagataa

SEQ ID NO: 556495 - DNA, 15 bp, Homo sapiens
gtgccagcttagata

SEQ ID NO: 556496 - DNA, 15 bp, Homo sapiens
agtgccagcttagat

SEQ ID NO: 556497 - DNA, 15 bp, Homo sapiens
aagtgccagcttaga

SEQ ID NO: 556498 - DNA, 15 bp, Homo sapiens
aaagtgccagcttag

SEQ ID NO: 556499 - DNA, 15 bp, Homo sapiens
gaaagtgccagctta

SEQ ID NO: 556500 - DNA, 15 bp, Homo sapiens
ggaaagtgccagctt

SEQ ID NO: 556501 - DNA, 15 bp, Homo sapiens
aggaaagtgccagct

SEQ ID NO: 556502 - DNA, 15 bp, Homo sapiens
taggaaagtgccagc

SEQ ID NO: 556503 - DNA, 15 bp, Homo sapiens
ataggaaagtgccag

SEQ ID NO: 556504 - DNA, 15 bp, Homo sapiens
tataggaaagtgcca

SEQ ID NO: 556505 - DNA, 15 bp, Homo sapiens
ttataggaaagtgcc

SEQ ID NO: 556506 - DNA, 15 bp, Homo sapiens
tttataggaaagtgc

SEQ ID NO: 556507 - DNA, 15 bp, Homo sapiens
atttataggaaagtg

SEQ ID NO: 556508 - DNA, 15 bp, Homo sapiens
gatttataggaaagt

SEQ ID NO: 556509 - DNA, 15 bp, Homo sapiens
tgatttataggaaag

SEQ ID NO: 556510 - DNA, 15 bp, Homo sapiens
ttgatttataggaaa

SEQ ID NO: 556511 - DNA, 15 bp, Homo sapiens
tttgatttataggaa

SEQ ID NO: 556512 - DNA, 15 bp, Homo sapiens
ttttgatttatagga

SEQ ID NO: 556513 - DNA, 15 bp, Homo sapiens
attttgatttatagg

SEQ ID NO: 556514 - DNA, 15 bp, Homo sapiens
tattttgatttatag

SEQ ID NO: 556515 - DNA, 15 bp, Homo sapiens
atattttgatttata

SEQ ID NO: 556516 - DNA, 15 bp, Homo sapiens
catattttgatttat

SEQ ID NO: 556517 - DNA, 15 bp, Homo sapiens
gcatattttgattta

SEQ ID NO: 556518 - DNA, 15 bp, Homo sapiens
tgcatattttgattt

SEQ ID NO: 556519 - DNA, 15 bp, Homo sapiens
ttgcatattttgatt

SEQ ID NO: 556520 - DNA, 15 bp, Homo sapiens
cttgcatattttgat

SEQ ID NO: 556521 - DNA, 15 bp, Homo sapiens
ccttgcatattttga

SEQ ID NO: 556522 - DNA, 15 bp, Homo sapiens
gccttgcatattttg

SEQ ID NO: 556523 - DNA, 15 bp, Homo sapiens
tgccttgcatatttt

SEQ ID NO: 556524 - DNA, 15 bp, Homo sapiens
gtgccttgcatattt

SEQ ID NO: 556525 - DNA, 15 bp, Homo sapiens
tgtgccttgcatatt

SEQ ID NO: 556526 - DNA, 15 bp, Homo sapiens
gtgtgccttgcatat

SEQ ID NO: 556527 - DNA, 15 bp, Homo sapiens
tgtgtgccttgcata

SEQ ID NO: 556528 - DNA, 15 bp, Homo sapiens
atgtgtgccttgcat

SEQ ID NO: 556529 - DNA, 15 bp, Homo sapiens
catgtgtgccttgca

SEQ ID NO: 556530 - DNA, 15 bp, Homo sapiens
gcatgtgtgccttgc

SEQ ID NO: 556531 - DNA, 15 bp, Homo sapiens
tgcatgtgtgccttg

SEQ ID NO: 556532 - DNA, 15 bp, Homo sapiens
ttgcatgtgtgcctt

SEQ ID NO: 556533 - DNA, 15 bp, Homo sapiens
attgcatgtgtgcct

SEQ ID NO: 556534 - DNA, 15 bp, Homo sapiens
aattgcatgtgtgcc

SEQ ID NO: 556535 - DNA, 15 bp, Homo sapiens
aaattgcatgtgtgc

SEQ ID NO: 556536 - DNA, 15 bp, Homo sapiens
taaattgcatgtgtg

SEQ ID NO: 556537 - DNA, 15 bp, Homo sapiens
ttaaattgcatgtgt

SEQ ID NO: 556538 - DNA, 15 bp, Homo sapiens
tttaaattgcatgtg

SEQ ID NO: 556539 - DNA, 15 bp, Homo sapiens
ttttaaattgcatgt

SEQ ID NO: 556540 - DNA, 15 bp, Homo sapiens
attttaaattgcatg

SEQ ID NO: 556541 - DNA, 15 bp, Homo sapiens
aattttaaattgcat

SEQ ID NO: 556542 - DNA, 15 bp, Homo sapiens
aaattttaaattgca

SEQ ID NO: 556543 - DNA, 15 bp, Homo sapiens
aaaattttaaattgc

SEQ ID NO: 556544 - DNA, 15 bp, Homo sapiens
aaaaattttaaattg

SEQ ID NO: 556545 - DNA, 15 bp, Homo sapiens
aaaaaattttaaatt

SEQ ID NO: 556546 - DNA, 15 bp, Homo sapiens
taaaaaattttaaat

SEQ ID NO: 556547 - DNA, 15 bp, Homo sapiens
ctaaaaaattttaaa

SEQ ID NO: 556548 - DNA, 15 bp, Homo sapiens
actaaaaaattttaa

SEQ ID NO: 556549 - DNA, 15 bp, Homo sapiens
cactaaaaaatttta

SEQ ID NO: 556550 - DNA, 15 bp, Homo sapiens
ccactaaaaaatttt

SEQ ID NO: 556551 - DNA, 15 bp, Homo sapiens
gccactaaaaaattt

SEQ ID NO: 556552 - DNA, 15 bp, Homo sapiens
agccactaaaaaatt

SEQ ID NO: 556553 - DNA, 15 bp, Homo sapiens
cagccactaaaaaat

SEQ ID NO: 556554 - DNA, 15 bp, Homo sapiens
gcagccactaaaaaa

SEQ ID NO: 556555 - DNA, 15 bp, Homo sapiens
tgcagccactaaaaa

SEQ ID NO: 556556 - DNA, 15 bp, Homo sapiens
atgcagccactaaaa

SEQ ID NO: 556557 - DNA, 15 bp, Homo sapiens
aatgcagccactaaa

SEQ ID NO: 556558 - DNA, 15 bp, Homo sapiens
taatgcagccactaa

SEQ ID NO: 556559 - DNA, 15 bp, Homo sapiens
ttaatgcagccacta

SEQ ID NO: 556560 - DNA, 15 bp, Homo sapiens
attaatgcagccact

SEQ ID NO: 556561 - DNA, 15 bp, Homo sapiens
tattaatgcagccac

SEQ ID NO: 556562 - DNA, 15 bp, Homo sapiens
gtattaatgcagcca

SEQ ID NO: 556563 - DNA, 15 bp, Homo sapiens
tgtattaatgcagcc

SEQ ID NO: 556564 - DNA, 15 bp, Homo sapiens
ttgtattaatgcagc

SEQ ID NO: 556565 - DNA, 15 bp, Homo sapiens
cttgtattaatgcag

SEQ ID NO: 556566 - DNA, 15 bp, Homo sapiens
acttgtattaatgca

SEQ ID NO: 556567 - DNA, 15 bp, Homo sapiens
tacttgtattaatgc

SEQ ID NO: 556568 - DNA, 15 bp, Homo sapiens
ttacttgtattaatg

SEQ ID NO: 556569 - DNA, 15 bp, Homo sapiens
gttacttgtattaat

SEQ ID NO: 556570 - DNA, 15 bp, Homo sapiens
tgttacttgtattaa

SEQ ID NO: 556571 - DNA, 15 bp, Homo sapiens
ttgttacttgtatta

SEQ ID NO: 556572 - DNA, 15 bp, Homo sapiens
cttgttacttgtatt

SEQ ID NO: 556573 - DNA, 15 bp, Homo sapiens
tcttgttacttgtat

SEQ ID NO: 556574 - DNA, 15 bp, Homo sapiens
ttcttgttacttgta

SEQ ID NO: 556575 - DNA, 15 bp, Homo sapiens
tttcttgttacttgt

SEQ ID NO: 556576 - DNA, 15 bp, Homo sapiens
atttcttgttacttg

SEQ ID NO: 556577 - DNA, 15 bp, Homo sapiens
aatttcttgttactt

SEQ ID NO: 556578 - DNA, 15 bp, Homo sapiens
caatttcttgttact

SEQ ID NO: 556579 - DNA, 15 bp, Homo sapiens
ccaatttcttgttac

SEQ ID NO: 556580 - DNA, 15 bp, Homo sapiens
accaatttcttgtta

SEQ ID NO: 556581 - DNA, 15 bp, Homo sapiens
caccaatttcttgtt

SEQ ID NO: 556582 - DNA, 15 bp, Homo sapiens
tcaccaatttcttgt

SEQ ID NO: 556583 - DNA, 15 bp, Homo sapiens
ttcaccaatttcttg

SEQ ID NO: 556584 - DNA, 15 bp, Homo sapiens
tttcaccaatttctt

SEQ ID NO: 556585 - DNA, 15 bp, Homo sapiens
atttcaccaatttct

SEQ ID NO: 556586 - DNA, 15 bp, Homo sapiens
aatttcaccaatttc

SEQ ID NO: 556587 - DNA, 15 bp, Homo sapiens
taatttcaccaattt

SEQ ID NO: 556588 - DNA, 15 bp, Homo sapiens
ataatttcaccaatt

SEQ ID NO: 556589 - DNA, 15 bp, Homo sapiens
aataatttcaccaat

SEQ ID NO: 556590 - DNA, 15 bp, Homo sapiens
aaataatttcaccaa

SEQ ID NO: 556591 - DNA, 15 bp, Homo sapiens
aaaataatttcacca

SEQ ID NO: 556592 - DNA, 15 bp, Homo sapiens
aaaaataatttcacc

SEQ ID NO: 556593 - DNA, 15 bp, Homo sapiens
taaaaataatttcac

SEQ ID NO: 556594 - DNA, 15 bp, Homo sapiens
ttaaaaataatttca

SEQ ID NO: 556595 - DNA, 15 bp, Homo sapiens
attaaaaataatttc

SEQ ID NO: 556596 - DNA, 15 bp, Homo sapiens
tattaaaaataattt

SEQ ID NO: 556597 - DNA, 15 bp, Homo sapiens
ttattaaaaataatt

SEQ ID NO: 556598 - DNA, 15 bp, Homo sapiens
attattaaaaataat

SEQ ID NO: 556599 - DNA, 15 bp, Homo sapiens
cattattaaaaataa

SEQ ID NO: 556600 - DNA, 15 bp, Homo sapiens
acattattaaaaata

SEQ ID NO: 556601 - DNA, 15 bp, Homo sapiens
tacattattaaaaat

SEQ ID NO: 556602 - DNA, 15 bp, Homo sapiens
atacattattaaaaa

SEQ ID NO: 556603 - DNA, 15 bp, Homo sapiens
aatacattattaaaa

SEQ ID NO: 556604 - DNA, 15 bp, Homo sapiens
aaatacattattaaa

SEQ ID NO: 556605 - DNA, 15 bp, Homo sapiens
aaaatacattattaa

SEQ ID NO: 556606 - DNA, 15 bp, Homo sapiens
taaaatacattatta

SEQ ID NO: 556607 - DNA, 15 bp, Homo sapiens
ataaaatacattatt

SEQ ID NO: 556608 - DNA, 15 bp, Homo sapiens
aataaaatacattat

SEQ ID NO: 556609 - DNA, 15 bp, Homo sapiens
aaataaaatacatta

SEQ ID NO: 556610 - DNA, 15 bp, Homo sapiens
caaataaaatacatt

SEQ ID NO: 556611 - DNA, 15 bp, Homo sapiens
tcaaataaaatacat

SEQ ID NO: 556612 - DNA, 15 bp, Homo sapiens
gtcaaataaaataca

SEQ ID NO: 556613 - DNA, 15 bp, Homo sapiens
ggtcaaataaaatac

SEQ ID NO: 556614 - DNA, 15 bp, Homo sapiens
aggtcaaataaaata

SEQ ID NO: 556615 - DNA, 15 bp, Homo sapiens
gaggtcaaataaaat

SEQ ID NO: 556616 - DNA, 15 bp, Homo sapiens
tgaggtcaaataaaa

SEQ ID NO: 556617 - DNA, 15 bp, Homo sapiens
atgaggtcaaataaa

SEQ ID NO: 556618 - DNA, 15 bp, Homo sapiens
tatgaggtcaaataa

SEQ ID NO: 556619 - DNA, 15 bp, Homo sapiens
atatgaggtcaaata

SEQ ID NO: 556620 - DNA, 15 bp, Homo sapiens
tatatgaggtcaaat

SEQ ID NO: 556621 - DNA, 15 bp, Homo sapiens
atatatgaggtcaaa

SEQ ID NO: 556622 - DNA, 15 bp, Homo sapiens
gatatatgaggtcaa

SEQ ID NO: 556623 - DNA, 15 bp, Homo sapiens
tgatatatgaggtca

SEQ ID NO: 556624 - DNA, 15 bp, Homo sapiens
ttgatatatgaggtc

SEQ ID NO: 556625 - DNA, 15 bp, Homo sapiens
tttgatatatgaggt

SEQ ID NO: 556626 - DNA, 15 bp, Homo sapiens
ttttgatatatgagg

SEQ ID NO: 556627 - DNA, 15 bp, Homo sapiens
tttttgatatatgag

SEQ ID NO: 556628 - DNA, 15 bp, Homo sapiens
atttttgatatatga

SEQ ID NO: 556629 - DNA, 15 bp, Homo sapiens
catttttgatatatg

SEQ ID NO: 556630 - DNA, 15 bp, Homo sapiens
ccatttttgatatat

SEQ ID NO: 556631 - DNA, 15 bp, Homo sapiens
cccatttttgatata

SEQ ID NO: 556632 - DNA, 15 bp, Homo sapiens
tcccatttttgatat

SEQ ID NO: 556633 - DNA, 15 bp, Homo sapiens
atcccatttttgata

SEQ ID NO: 556634 - DNA, 15 bp, Homo sapiens
gatcccatttttgat

SEQ ID NO: 556635 - DNA, 15 bp, Homo sapiens
tgatcccatttttga

SEQ ID NO: 556636 - DNA, 15 bp, Homo sapiens
atgatcccatttttg

SEQ ID NO: 556637 - DNA, 15 bp, Homo sapiens
aatgatcccattttt

SEQ ID NO: 556638 - DNA, 15 bp, Homo sapiens
aaatgatcccatttt

SEQ ID NO: 556639 - DNA, 15 bp, Homo sapiens
gaaatgatcccattt

SEQ ID NO: 556640 - DNA, 15 bp, Homo sapiens
tgaaatgatcccatt

SEQ ID NO: 556641 - DNA, 15 bp, Homo sapiens
ttgaaatgatcccat

SEQ ID NO: 556642 - DNA, 15 bp, Homo sapiens
cttgaaatgatccca

SEQ ID NO: 556643 - DNA, 15 bp, Homo sapiens
acttgaaatgatccc

SEQ ID NO: 556644 - DNA, 15 bp, Homo sapiens
cacttgaaatgatcc

SEQ ID NO: 556645 - DNA, 15 bp, Homo sapiens
acacttgaaatgatc

SEQ ID NO: 556646 - DNA, 15 bp, Homo sapiens
aacacttgaaatgat

SEQ ID NO: 556647 - DNA, 15 bp, Homo sapiens
taacacttgaaatga

SEQ ID NO: 556648 - DNA, 15 bp, Homo sapiens
ataacacttgaaatg

SEQ ID NO: 556649 - DNA, 15 bp, Homo sapiens
aataacacttgaaat

SEQ ID NO: 556650 - DNA, 15 bp, Homo sapiens
caataacacttgaaa

SEQ ID NO: 556651 - DNA, 15 bp, Homo sapiens
tcaataacacttgaa

SEQ ID NO: 556652 - DNA, 15 bp, Homo sapiens
atcaataacacttga

SEQ ID NO: 556653 - DNA, 15 bp, Homo sapiens
catcaataacacttg

SEQ ID NO: 556654 - DNA, 15 bp, Homo sapiens
tcatcaataacactt

SEQ ID NO: 556655 - DNA, 15 bp, Homo sapiens
ctcatcaataacact

SEQ ID NO: 556656 - DNA, 15 bp, Homo sapiens
cctcatcaataacac

SEQ ID NO: 556657 - DNA, 15 bp, Homo sapiens
acctcatcaataaca

SEQ ID NO: 556658 - DNA, 15 bp, Homo sapiens
aacctcatcaataac

SEQ ID NO: 556659 - DNA, 15 bp, Homo sapiens
aaacctcatcaataa

SEQ ID NO: 556660 - DNA, 15 bp, Homo sapiens
aaaacctcatcaata

SEQ ID NO: 556661 - DNA, 15 bp, Homo sapiens
aaaaacctcatcaat

SEQ ID NO: 556662 - DNA, 15 bp, Homo sapiens
aaaaaacctcatcaa

SEQ ID NO: 556663 - DNA, 15 bp, Homo sapiens
aaaaaaacctcatca

SEQ ID NO: 556664 - DNA, 15 bp, Homo sapiens
aaaaaaaacctcatc

SEQ ID NO: 556665 - DNA, 15 bp, Homo sapiens
aaaaaaaaacctcat

SEQ ID NO: 556666 - DNA, 15 bp, Homo sapiens
aaaaaaaaaacctca

SEQ ID NO: 556667 - DNA, 15 bp, Homo sapiens
caaaaaaaaaacctc

SEQ ID NO: 556668 - DNA, 15 bp, Homo sapiens
acaaaaaaaaaacct

SEQ ID NO: 556669 - DNA, 15 bp, Homo sapiens
aacaaaaaaaaaacc

SEQ ID NO: 556670 - DNA, 15 bp, Homo sapiens
aaacaaaaaaaaaac

SEQ ID NO: 556671 - DNA, 15 bp, Homo sapiens
aaaacaaaaaaaaaa

SEQ ID NO: 556672 - DNA, 15 bp, Homo sapiens
aaaaacaaaaaaaaa

SEQ ID NO: 556673 - DNA, 15 bp, Homo sapiens
aaaaaacaaaaaaaa

SEQ ID NO: 556674 - DNA, 15 bp, Homo sapiens
aaaaaaacaaaaaaa

SEQ ID NO: 556675 - DNA, 15 bp, Homo sapiens
aaaaaaaacaaaaaa

SEQ ID NO: 556676 - DNA, 15 bp, Homo sapiens
caaaaaaaacaaaaa

SEQ ID NO: 556677 - DNA, 15 bp, Homo sapiens
gcaaaaaaaacaaaa

SEQ ID NO: 556678 - DNA, 15 bp, Homo sapiens
agcaaaaaaaacaaa

SEQ ID NO: 556679 - DNA, 15 bp, Homo sapiens
tagcaaaaaaaacaa

SEQ ID NO: 556680 - DNA, 15 bp, Homo sapiens
ctagcaaaaaaaaca

SEQ ID NO: 556681 - DNA, 15 bp, Homo sapiens
gctagcaaaaaaaac

SEQ ID NO: 556682 - DNA, 15 bp, Homo sapiens
tgctagcaaaaaaaa

SEQ ID NO: 556683 - DNA, 15 bp, Homo sapiens
ttgctagcaaaaaaa

SEQ ID NO: 556684 - DNA, 15 bp, Homo sapiens
cttgctagcaaaaaa

SEQ ID NO: 556685 - DNA, 15 bp, Homo sapiens
acttgctagcaaaaa

SEQ ID NO: 556686 - DNA, 15 bp, Homo sapiens
tacttgctagcaaaa

SEQ ID NO: 556687 - DNA, 15 bp, Homo sapiens
atacttgctagcaaa

SEQ ID NO: 556688 - DNA, 15 bp, Homo sapiens
aatacttgctagcaa

SEQ ID NO: 556689 - DNA, 15 bp, Homo sapiens
taatacttgctagca

SEQ ID NO: 556690 - DNA, 15 bp, Homo sapiens
ctaatacttgctagc

SEQ ID NO: 556691 - DNA, 15 bp, Homo sapiens
tctaatacttgctag

SEQ ID NO: 556692 - DNA, 15 bp, Homo sapiens
ttctaatacttgcta

SEQ ID NO: 556693 - DNA, 15 bp, Homo sapiens
tttctaatacttgct

SEQ ID NO: 556694 - DNA, 15 bp, Homo sapiens
atttctaatacttgc

SEQ ID NO: 556695 - DNA, 15 bp, Homo sapiens
gatttctaatacttg

SEQ ID NO: 556696 - DNA, 15 bp, Homo sapiens
agatttctaatactt

SEQ ID NO: 556697 - DNA, 15 bp, Homo sapiens
cagatttctaatact

SEQ ID NO: 556698 - DNA, 15 bp, Homo sapiens
ccagatttctaatac

SEQ ID NO: 556699 - DNA, 15 bp, Homo sapiens
tccagatttctaata

SEQ ID NO: 556700 - DNA, 15 bp, Homo sapiens
ttccagatttctaat

SEQ ID NO: 556701 - DNA, 15 bp, Homo sapiens
attccagatttctaa

SEQ ID NO: 556702 - DNA, 15 bp, Homo sapiens
cattccagatttcta

SEQ ID NO: 556703 - DNA, 15 bp, Homo sapiens
acattccagatttct

SEQ ID NO: 556704 - DNA, 15 bp, Homo sapiens
tacattccagatttc

SEQ ID NO: 556705 - DNA, 15 bp, Homo sapiens
atacattccagattt

SEQ ID NO: 556706 - DNA, 15 bp, Homo sapiens
aatacattccagatt

SEQ ID NO: 556707 - DNA, 15 bp, Homo sapiens
aaatacattccagat

SEQ ID NO: 556708 - DNA, 15 bp, Homo sapiens
aaaatacattccaga

SEQ ID NO: 556709 - DNA, 15 bp, Homo sapiens
taaaatacattccag

SEQ ID NO: 556710 - DNA, 15 bp, Homo sapiens
ataaaatacattcca

SEQ ID NO: 556711 - DNA, 15 bp, Homo sapiens
tataaaatacattcc

SEQ ID NO: 556712 - DNA, 15 bp, Homo sapiens
gtataaaatacattc

SEQ ID NO: 556713 - DNA, 15 bp, Homo sapiens
agtataaaatacatt

SEQ ID NO: 556714 - DNA, 15 bp, Homo sapiens
aagtataaaatacat

SEQ ID NO: 556715 - DNA, 15 bp, Homo sapiens
caagtataaaataca

SEQ ID NO: 556716 - DNA, 15 bp, Homo sapiens
gcaagtataaaatac

SEQ ID NO: 556717 - DNA, 15 bp, Homo sapiens
tgcaagtataaaata

SEQ ID NO: 556718 - DNA, 15 bp, Homo sapiens
atgcaagtataaaat

SEQ ID NO: 556719 - DNA, 15 bp, Homo sapiens
gatgcaagtataaaa

SEQ ID NO: 556720 - DNA, 15 bp, Homo sapiens
ggatgcaagtataaa

SEQ ID NO: 556721 - DNA, 15 bp, Homo sapiens
gggatgcaagtataa

SEQ ID NO: 556722 - DNA, 15 bp, Homo sapiens
tgggatgcaagtata

SEQ ID NO: 556723 - DNA, 15 bp, Homo sapiens
ttgggatgcaagtat

SEQ ID NO: 556724 - DNA, 15 bp, Homo sapiens
attgggatgcaagta

SEQ ID NO: 556725 - DNA, 15 bp, Homo sapiens
aattgggatgcaagt

SEQ ID NO: 556726 - DNA, 15 bp, Homo sapiens
aaattgggatgcaag

SEQ ID NO: 556727 - DNA, 15 bp, Homo sapiens
caaattgggatgcaa

SEQ ID NO: 556728 - DNA, 15 bp, Homo sapiens
ccaaattgggatgca

SEQ ID NO: 556729 - DNA, 15 bp, Homo sapiens
tccaaattgggatgc

SEQ ID NO: 556730 - DNA, 15 bp, Homo sapiens
gtccaaattgggatg

SEQ ID NO: 556731 - DNA, 15 bp, Homo sapiens
agtccaaattgggat

SEQ ID NO: 556732 - DNA, 15 bp, Homo sapiens
gagtccaaattggga

SEQ ID NO: 556733 - DNA, 15 bp, Homo sapiens
tgagtccaaattggg

SEQ ID NO: 556734 - DNA, 15 bp, Homo sapiens
gtgagtccaaattgg

SEQ ID NO: 556735 - DNA, 15 bp, Homo sapiens
ggtgagtccaaattg

SEQ ID NO: 556736 - DNA, 15 bp, Homo sapiens
gggtgagtccaaatt

SEQ ID NO: 556737 - DNA, 15 bp, Homo sapiens
ggggtgagtccaaat

SEQ ID NO: 556738 - DNA, 15 bp, Homo sapiens
tggggtgagtccaaa

SEQ ID NO: 556739 - DNA, 15 bp, Homo sapiens
atggggtgagtccaa

SEQ ID NO: 556740 - DNA, 15 bp, Homo sapiens
catggggtgagtcca

SEQ ID NO: 556741 - DNA, 15 bp, Homo sapiens
acatggggtgagtcc

SEQ ID NO: 556742 - DNA, 15 bp, Homo sapiens
gacatggggtgagtc

SEQ ID NO: 556743 - DNA, 15 bp, Homo sapiens
tgacatggggtgagt

SEQ ID NO: 556744 - DNA, 15 bp, Homo sapiens
ttgacatggggtgag

SEQ ID NO: 556745 - DNA, 15 bp, Homo sapiens
cttgacatggggtga

SEQ ID NO: 556746 - DNA, 15 bp, Homo sapiens
ccttgacatggggtg

SEQ ID NO: 556747 - DNA, 15 bp, Homo sapiens
cccttgacatggggt

SEQ ID NO: 556748 - DNA, 15 bp, Homo sapiens
gcccttgacatgggg

SEQ ID NO: 556749 - DNA, 15 bp, Homo sapiens
cgcccttgacatggg

SEQ ID NO: 556750 - DNA, 15 bp, Homo sapiens
ccgcccttgacatgg

SEQ ID NO: 556751 - DNA, 15 bp, Homo sapiens
cccgcccttgacatg

SEQ ID NO: 556752 - DNA, 15 bp, Homo sapiens
tcccgcccttgacat

SEQ ID NO: 556753 - DNA, 15 bp, Homo sapiens
atcccgcccttgaca

SEQ ID NO: 556754 - DNA, 15 bp, Homo sapiens
catcccgcccttgac

SEQ ID NO: 556755 - DNA, 15 bp, Homo sapiens
ccatcccgcccttga

SEQ ID NO: 556756 - DNA, 15 bp, Homo sapiens
tccatcccgcccttg

SEQ ID NO: 556757 - DNA, 15 bp, Homo sapiens
gtccatcccgccctt

SEQ ID NO: 556758 - DNA, 15 bp, Homo sapiens
tgtccatcccgccct

SEQ ID NO: 556759 - DNA, 15 bp, Homo sapiens
ctgtccatcccgccc

SEQ ID NO: 556760 - DNA, 15 bp, Homo sapiens
gctgtccatcccgcc

SEQ ID NO: 556761 - DNA, 15 bp, Homo sapiens
ggctgtccatcccgc

SEQ ID NO: 556762 - DNA, 15 bp, Homo sapiens
tggctgtccatcccg

SEQ ID NO: 556763 - DNA, 15 bp, Homo sapiens
atggctgtccatccc

SEQ ID NO: 556764 - DNA, 15 bp, Homo sapiens
catggctgtccatcc

SEQ ID NO: 556765 - DNA, 15 bp, Homo sapiens
gcatggctgtccatc

SEQ ID NO: 556766 - DNA, 15 bp, Homo sapiens
cgcatggctgtccat

SEQ ID NO: 556767 - DNA, 15 bp, Homo sapiens
acgcatggctgtcca

SEQ ID NO: 556768 - DNA, 15 bp, Homo sapiens
cacgcatggctgtcc

SEQ ID NO: 556769 - DNA, 15 bp, Homo sapiens
gcacgcatggctgtc

SEQ ID NO: 556770 - DNA, 15 bp, Homo sapiens
agcacgcatggctgt

SEQ ID NO: 556771 - DNA, 15 bp, Homo sapiens
cagcacgcatggctg

SEQ ID NO: 556772 - DNA, 15 bp, Homo sapiens
tcagcacgcatggct

SEQ ID NO: 556773 - DNA, 15 bp, Homo sapiens
ctcagcacgcatggc

SEQ ID NO: 556774 - DNA, 15 bp, Homo sapiens
actcagcacgcatgg

SEQ ID NO: 556775 - DNA, 15 bp, Homo sapiens
cactcagcacgcatg

SEQ ID NO: 556776 - DNA, 15 bp, Homo sapiens
ccactcagcacgcat

SEQ ID NO: 556777 - DNA, 15 bp, Homo sapiens
gccactcagcacgca

SEQ ID NO: 556778 - DNA, 15 bp, Homo sapiens
agccactcagcacgc

SEQ ID NO: 556779 - DNA, 15 bp, Homo sapiens
cagccactcagcacg

SEQ ID NO: 556780 - DNA, 15 bp, Homo sapiens
gcagccactcagcac

SEQ ID NO: 556781 - DNA, 15 bp, Homo sapiens
ggcagccactcagca

SEQ ID NO: 556782 - DNA, 15 bp, Homo sapiens
cggcagccactcagc

SEQ ID NO: 556783 - DNA, 15 bp, Homo sapiens
acggcagccactcag

SEQ ID NO: 556784 - DNA, 15 bp, Homo sapiens
cacggcagccactca

SEQ ID NO: 556785 - DNA, 15 bp, Homo sapiens
ccacggcagccactc

SEQ ID NO: 556786 - DNA, 15 bp, Homo sapiens
tccacggcagccact

SEQ ID NO: 556787 - DNA, 15 bp, Homo sapiens
gtccacggcagccac

SEQ ID NO: 556788 - DNA, 15 bp, Homo sapiens
tgtccacggcagcca

SEQ ID NO: 556789 - DNA, 15 bp, Homo sapiens
ctgtccacggcagcc

SEQ ID NO: 556790 - DNA, 15 bp, Homo sapiens
tctgtccacggcagc

SEQ ID NO: 556791 - DNA, 15 bp, Homo sapiens
ctctgtccacggcag

SEQ ID NO: 556792 - DNA, 15 bp, Homo sapiens
actctgtccacggca

SEQ ID NO: 556793 - DNA, 15 bp, Homo sapiens
cactctgtccacggc

SEQ ID NO: 556794 - DNA, 15 bp, Homo sapiens
ccactctgtccacgg

SEQ ID NO: 556795 - DNA, 15 bp, Homo sapiens
cccactctgtccacg

SEQ ID NO: 556796 - DNA, 15 bp, Homo sapiens
acccactctgtccac

SEQ ID NO: 556797 - DNA, 15 bp, Homo sapiens
tacccactctgtcca

SEQ ID NO: 556798 - DNA, 15 bp, Homo sapiens
ctacccactctgtcc

SEQ ID NO: 556799 - DNA, 15 bp, Homo sapiens
gctacccactctgtc

SEQ ID NO: 556800 - DNA, 15 bp, Homo sapiens
tgctacccactctgt

SEQ ID NO: 556801 - DNA, 15 bp, Homo sapiens
gtgctacccactctg

SEQ ID NO: 556802 - DNA, 15 bp, Homo sapiens
tgtgctacccactct

SEQ ID NO: 556803 - DNA, 15 bp, Homo sapiens
ctgtgctacccactc

SEQ ID NO: 556804 - DNA, 15 bp, Homo sapiens
actgtgctacccact

SEQ ID NO: 556805 - DNA, 15 bp, Homo sapiens
cactgtgctacccac

SEQ ID NO: 556806 - DNA, 15 bp, Homo sapiens
gcactgtgctaccca

SEQ ID NO: 556807 - DNA, 15 bp, Homo sapiens
tgcactgtgctaccc

SEQ ID NO: 556808 - DNA, 15 bp, Homo sapiens
atgcactgtgctacc

SEQ ID NO: 556809 - DNA, 15 bp, Homo sapiens
catgcactgtgctac

SEQ ID NO: 556810 - DNA, 15 bp, Homo sapiens
acatgcactgtgcta

SEQ ID NO: 556811 - DNA, 15 bp, Homo sapiens
aacatgcactgtgct

SEQ ID NO: 556812 - DNA, 15 bp, Homo sapiens
gaacatgcactgtgc

SEQ ID NO: 556813 - DNA, 15 bp, Homo sapiens
tgaacatgcactgtg

SEQ ID NO: 556814 - DNA, 15 bp, Homo sapiens
ttgaacatgcactgt

SEQ ID NO: 556815 - DNA, 15 bp, Homo sapiens
cttgaacatgcactg

SEQ ID NO: 556816 - DNA, 15 bp, Homo sapiens
acttgaacatgcact

SEQ ID NO: 556817 - DNA, 15 bp, Homo sapiens
aacttgaacatgcac

SEQ ID NO: 556818 - DNA, 15 bp, Homo sapiens
gaacttgaacatgca

SEQ ID NO: 556819 - DNA, 15 bp, Homo sapiens
tgaacttgaacatgc

SEQ ID NO: 556820 - DNA, 15 bp, Homo sapiens
ctgaacttgaacatg

SEQ ID NO: 556821 - DNA, 15 bp, Homo sapiens
tctgaacttgaacat

SEQ ID NO: 556822 - DNA, 15 bp, Homo sapiens
ttctgaacttgaaca

SEQ ID NO: 556823 - DNA, 15 bp, Homo sapiens
cttctgaacttgaac

SEQ ID NO: 556824 - DNA, 15 bp, Homo sapiens
acttctgaacttgaa

SEQ ID NO: 556825 - DNA, 15 bp, Homo sapiens
cacttctgaacttga

SEQ ID NO: 556826 - DNA, 15 bp, Homo sapiens
gcacttctgaacttg

SEQ ID NO: 556827 - DNA, 15 bp, Homo sapiens
agcacttctgaactt

SEQ ID NO: 556828 - DNA, 15 bp, Homo sapiens
aagcacttctgaact

SEQ ID NO: 556829 - DNA, 15 bp, Homo sapiens
aaagcacttctgaac

SEQ ID NO: 556830 - DNA, 15 bp, Homo sapiens
aaaagcacttctgaa

SEQ ID NO: 556831 - DNA, 15 bp, Homo sapiens
caaaagcacttctga

SEQ ID NO: 556832 - DNA, 15 bp, Homo sapiens
tcaaaagcacttctg

SEQ ID NO: 556833 - DNA, 15 bp, Homo sapiens
ctcaaaagcacttct

SEQ ID NO: 556834 - DNA, 15 bp, Homo sapiens
tctcaaaagcacttc

SEQ ID NO: 556835 - DNA, 15 bp, Homo sapiens
ttctcaaaagcactt

SEQ ID NO: 556836 - DNA, 15 bp, Homo sapiens
tttctcaaaagcact

SEQ ID NO: 556837 - DNA, 15 bp, Homo sapiens
ctttctcaaaagcac

SEQ ID NO: 556838 - DNA, 15 bp, Homo sapiens
actttctcaaaagca

SEQ ID NO: 556839 - DNA, 15 bp, Homo sapiens
tactttctcaaaagc

SEQ ID NO: 556840 - DNA, 15 bp, Homo sapiens
gtactttctcaaaag

SEQ ID NO: 556841 - DNA, 15 bp, Homo sapiens
tgtactttctcaaaa

SEQ ID NO: 556842 - DNA, 15 bp, Homo sapiens
ctgtactttctcaaa

SEQ ID NO: 556843 - DNA, 15 bp, Homo sapiens
cctgtactttctcaa

SEQ ID NO: 556844 - DNA, 15 bp, Homo sapiens
tcctgtactttctca

SEQ ID NO: 556845 - DNA, 15 bp, Homo sapiens
ctcctgtactttctc

SEQ ID NO: 556846 - DNA, 15 bp, Homo sapiens
gctcctgtactttct

SEQ ID NO: 556847 - DNA, 15 bp, Homo sapiens
tgctcctgtactttc

SEQ ID NO: 556848 - DNA, 15 bp, Homo sapiens
atgctcctgtacttt

SEQ ID NO: 556849 - DNA, 15 bp, Homo sapiens
catgctcctgtactt

SEQ ID NO: 556850 - DNA, 15 bp, Homo sapiens
tcatgctcctgtact

SEQ ID NO: 556851 - DNA, 15 bp, Homo sapiens
ttcatgctcctgtac

SEQ ID NO: 556852 - DNA, 15 bp, Homo sapiens
attcatgctcctgta

SEQ ID NO: 556853 - DNA, 15 bp, Homo sapiens
cattcatgctcctgt

SEQ ID NO: 556854 - DNA, 15 bp, Homo sapiens
ccattcatgctcctg

SEQ ID NO: 556855 - DNA, 15 bp, Homo sapiens
tccattcatgctcct

SEQ ID NO: 556856 - DNA, 15 bp, Homo sapiens
atccattcatgctcc

SEQ ID NO: 556857 - DNA, 15 bp, Homo sapiens
catccattcatgctc

SEQ ID NO: 556858 - DNA, 15 bp, Homo sapiens
ccatccattcatgct

SEQ ID NO: 556859 - DNA, 15 bp, Homo sapiens
tccatccattcatgc

SEQ ID NO: 556860 - DNA, 15 bp, Homo sapiens
ctccatccattcatg

SEQ ID NO: 556861 - DNA, 15 bp, Homo sapiens
cctccatccattcat

SEQ ID NO: 556862 - DNA, 15 bp, Homo sapiens
ccctccatccattca

SEQ ID NO: 556863 - DNA, 15 bp, Homo sapiens
accctccatccattc

SEQ ID NO: 556864 - DNA, 15 bp, Homo sapiens
caccctccatccatt

SEQ ID NO: 556865 - DNA, 15 bp, Homo sapiens
ccaccctccatccat

SEQ ID NO: 556866 - DNA, 15 bp, Homo sapiens
tccaccctccatcca

SEQ ID NO: 556867 - DNA, 15 bp, Homo sapiens
atccaccctccatcc

SEQ ID NO: 556868 - DNA, 15 bp, Homo sapiens
catccaccctccatc

SEQ ID NO: 556869 - DNA, 15 bp, Homo sapiens
ccatccaccctccat

SEQ ID NO: 556870 - DNA, 15 bp, Homo sapiens
cccatccaccctcca

SEQ ID NO: 556871 - DNA, 15 bp, Homo sapiens
ccccatccaccctcc

SEQ ID NO: 556872 - DNA, 15 bp, Homo sapiens
accccatccaccctc

SEQ ID NO: 556873 - DNA, 15 bp, Homo sapiens
caccccatccaccct

SEQ ID NO: 556874 - DNA, 15 bp, Homo sapiens
ccaccccatccaccc

SEQ ID NO: 556875 - DNA, 15 bp, Homo sapiens
cccaccccatccacc

SEQ ID NO: 556876 - DNA, 15 bp, Homo sapiens
acccaccccatccac

SEQ ID NO: 556877 - DNA, 15 bp, Homo sapiens
cacccaccccatcca

SEQ ID NO: 556878 - DNA, 15 bp, Homo sapiens
acacccaccccatcc

SEQ ID NO: 556879 - DNA, 15 bp, Homo sapiens
cacacccaccccatc

SEQ ID NO: 556880 - DNA, 15 bp, Homo sapiens
ccacacccaccccat

SEQ ID NO: 556881 - DNA, 15 bp, Homo sapiens
cccacacccacccca

SEQ ID NO: 556882 - DNA, 15 bp, Homo sapiens
ccccacacccacccc

SEQ ID NO: 556883 - DNA, 15 bp, Homo sapiens
cccccacacccaccc

SEQ ID NO: 556884 - DNA, 15 bp, Homo sapiens
tcccccacacccacc

SEQ ID NO: 556885 - DNA, 15 bp, Homo sapiens
gtcccccacacccac

SEQ ID NO: 556886 - DNA, 15 bp, Homo sapiens
cgtcccccacaccca

SEQ ID NO: 556887 - DNA, 15 bp, Homo sapiens
ccgtcccccacaccc

SEQ ID NO: 556888 - DNA, 15 bp, Homo sapiens
accgtcccccacacc

SEQ ID NO: 556889 - DNA, 15 bp, Homo sapiens
caccgtcccccacac

SEQ ID NO: 556890 - DNA, 15 bp, Homo sapiens
gcaccgtcccccaca

SEQ ID NO: 556891 - DNA, 15 bp, Homo sapiens
agcaccgtcccccac

SEQ ID NO: 556892 - DNA, 15 bp, Homo sapiens
cagcaccgtccccca

SEQ ID NO: 556893 - DNA, 15 bp, Homo sapiens
gcagcaccgtccccc

SEQ ID NO: 556894 - DNA, 15 bp, Homo sapiens
ggcagcaccgtcccc

SEQ ID NO: 556895 - DNA, 15 bp, Homo sapiens
tggcagcaccgtccc

SEQ ID NO: 556896 - DNA, 15 bp, Homo sapiens
gtggcagcaccgtcc

SEQ ID NO: 556897 - DNA, 15 bp, Homo sapiens
ggtggcagcaccgtc

SEQ ID NO: 556898 - DNA, 15 bp, Homo sapiens
gggtggcagcaccgt

SEQ ID NO: 556899 - DNA, 15 bp, Homo sapiens
cgggtggcagcaccg

SEQ ID NO: 556900 - DNA, 15 bp, Homo sapiens
tcgggtggcagcacc

SEQ ID NO: 556901 - DNA, 15 bp, Homo sapiens
ctcgggtggcagcac

SEQ ID NO: 556902 - DNA, 15 bp, Homo sapiens
cctcgggtggcagca

SEQ ID NO: 556903 - DNA, 15 bp, Homo sapiens
tcctcgggtggcagc

SEQ ID NO: 556904 - DNA, 15 bp, Homo sapiens
ttcctcgggtggcag

SEQ ID NO: 556905 - DNA, 15 bp, Homo sapiens
cttcctcgggtggca

SEQ ID NO: 556906 - DNA, 15 bp, Homo sapiens
acttcctcgggtggc

SEQ ID NO: 556907 - DNA, 15 bp, Homo sapiens
cacttcctcgggtgg

SEQ ID NO: 556908 - DNA, 15 bp, Homo sapiens
tcacttcctcgggtg

SEQ ID NO: 556909 - DNA, 15 bp, Homo sapiens
gtcacttcctcgggt

SEQ ID NO: 556910 - DNA, 15 bp, Homo sapiens
tgtcacttcctcggg

SEQ ID NO: 556911 - DNA, 15 bp, Homo sapiens
ctgtcacttcctcgg

SEQ ID NO: 556912 - DNA, 15 bp, Homo sapiens
gctgtcacttcctcg

SEQ ID NO: 556913 - DNA, 15 bp, Homo sapiens
agctgtcacttcctc

SEQ ID NO: 556914 - DNA, 15 bp, Homo sapiens
cagctgtcacttcct

SEQ ID NO: 556915 - DNA, 15 bp, Homo sapiens
tcagctgtcacttcc

SEQ ID NO: 556916 - DNA, 15 bp, Homo sapiens
ttcagctgtcacttc

SEQ ID NO: 556917 - DNA, 15 bp, Homo sapiens
gttcagctgtcactt

SEQ ID NO: 556918 - DNA, 15 bp, Homo sapiens
agttcagctgtcact

SEQ ID NO: 556919 - DNA, 15 bp, Homo sapiens
cagttcagctgtcac

SEQ ID NO: 556920 - DNA, 15 bp, Homo sapiens
tcagttcagctgtca

SEQ ID NO: 556921 - DNA, 15 bp, Homo sapiens
ctcagttcagctgtc

SEQ ID NO: 556922 - DNA, 15 bp, Homo sapiens
tctcagttcagctgt

SEQ ID NO: 556923 - DNA, 15 bp, Homo sapiens
atctcagttcagctg

SEQ ID NO: 556924 - DNA, 15 bp, Homo sapiens
gatctcagttcagct

SEQ ID NO: 556925 - DNA, 15 bp, Homo sapiens
agatctcagttcagc

SEQ ID NO: 556926 - DNA, 15 bp, Homo sapiens
cagatctcagttcag

SEQ ID NO: 556927 - DNA, 15 bp, Homo sapiens
tcagatctcagttca

SEQ ID NO: 556928 - DNA, 15 bp, Homo sapiens
gtcagatctcagttc

SEQ ID NO: 556929 - DNA, 15 bp, Homo sapiens
agtcagatctcagtt

SEQ ID NO: 556930 - DNA, 15 bp, Homo sapiens
cagtcagatctcagt

SEQ ID NO: 556931 - DNA, 15 bp, Homo sapiens
tcagtcagatctcag

SEQ ID NO: 556932 - DNA, 15 bp, Homo sapiens
ttcagtcagatctca

SEQ ID NO: 556933 - DNA, 15 bp, Homo sapiens
cttcagtcagatctc

SEQ ID NO: 556934 - DNA, 15 bp, Homo sapiens
ccttcagtcagatct

SEQ ID NO: 556935 - DNA, 15 bp, Homo sapiens
cccttcagtcagatc

SEQ ID NO: 556936 - DNA, 15 bp, Homo sapiens
gcccttcagtcagat

SEQ ID NO: 556937 - DNA, 15 bp, Homo sapiens
agcccttcagtcaga

SEQ ID NO: 556938 - DNA, 15 bp, Homo sapiens
cagcccttcagtcag

SEQ ID NO: 556939 - DNA, 15 bp, Homo sapiens
tcagcccttcagtca

SEQ ID NO: 556940 - DNA, 15 bp, Homo sapiens
ttcagcccttcagtc

SEQ ID NO: 556941 - DNA, 15 bp, Homo sapiens
cttcagcccttcagt

SEQ ID NO: 556942 - DNA, 15 bp, Homo sapiens
acttcagcccttcag

SEQ ID NO: 556943 - DNA, 15 bp, Homo sapiens
gacttcagcccttca

SEQ ID NO: 556944 - DNA, 15 bp, Homo sapiens
agacttcagcccttc

SEQ ID NO: 556945 - DNA, 15 bp, Homo sapiens
cagacttcagccctt

SEQ ID NO: 556946 - DNA, 15 bp, Homo sapiens
ccagacttcagccct

SEQ ID NO: 556947 - DNA, 15 bp, Homo sapiens
accagacttcagccc

SEQ ID NO: 556948 - DNA, 15 bp, Homo sapiens
caccagacttcagcc

SEQ ID NO: 556949 - DNA, 15 bp, Homo sapiens
ccaccagacttcagc

SEQ ID NO: 556950 - DNA, 15 bp, Homo sapiens
tccaccagacttcag

SEQ ID NO: 556951 - DNA, 15 bp, Homo sapiens
atccaccagacttca

SEQ ID NO: 556952 - DNA, 15 bp, Homo sapiens
catccaccagacttc

SEQ ID NO: 556953 - DNA, 15 bp, Homo sapiens
tcatccaccagactt

SEQ ID NO: 556954 - DNA, 15 bp, Homo sapiens
ttcatccaccagact

SEQ ID NO: 556955 - DNA, 15 bp, Homo sapiens
cttcatccaccagac

SEQ ID NO: 556956 - DNA, 15 bp, Homo sapiens
tcttcatccaccaga

SEQ ID NO: 556957 - DNA, 15 bp, Homo sapiens
atcttcatccaccag

SEQ ID NO: 556958 - DNA, 15 bp, Homo sapiens
catcttcatccacca

SEQ ID NO: 556959 - DNA, 15 bp, Homo sapiens
gcatcttcatccacc

SEQ ID NO: 556960 - DNA, 15 bp, Homo sapiens
ggcatcttcatccac

SEQ ID NO: 556961 - DNA, 15 bp, Homo sapiens
tggcatcttcatcca

SEQ ID NO: 556962 - DNA, 15 bp, Homo sapiens
ctggcatcttcatcc

SEQ ID NO: 556963 - DNA, 15 bp, Homo sapiens
tctggcatcttcatc

SEQ ID NO: 556964 - DNA, 15 bp, Homo sapiens
ctctggcatcttcat

SEQ ID NO: 556965 - DNA, 15 bp, Homo sapiens
cctctggcatcttca

SEQ ID NO: 556966 - DNA, 15 bp, Homo sapiens
tcctctggcatcttc

SEQ ID NO: 556967 - DNA, 15 bp, Homo sapiens
ctcctctggcatctt

SEQ ID NO: 556968 - DNA, 15 bp, Homo sapiens
tctcctctggcatct

SEQ ID NO: 556969 - DNA, 15 bp, Homo sapiens
gtctcctctggcatc

SEQ ID NO: 556970 - DNA, 15 bp, Homo sapiens
agtctcctctggcat

SEQ ID NO: 556971 - DNA, 15 bp, Homo sapiens
cagtctcctctggca

SEQ ID NO: 556972 - DNA, 15 bp, Homo sapiens
acagtctcctctggc

SEQ ID NO: 556973 - DNA, 15 bp, Homo sapiens
aacagtctcctctgg

SEQ ID NO: 556974 - DNA, 15 bp, Homo sapiens
gaacagtctcctctg

SEQ ID NO: 556975 - DNA, 15 bp, Homo sapiens
agaacagtctcctct

SEQ ID NO: 556976 - DNA, 15 bp, Homo sapiens
aagaacagtctcctc

SEQ ID NO: 556977 - DNA, 15 bp, Homo sapiens
taagaacagtctcct

SEQ ID NO: 556978 - DNA, 15 bp, Homo sapiens
ctaagaacagtctcc

SEQ ID NO: 556979 - DNA, 15 bp, Homo sapiens
cctaagaacagtctc

SEQ ID NO: 556980 - DNA, 15 bp, Homo sapiens
gcctaagaacagtct

SEQ ID NO: 556981 - DNA, 15 bp, Homo sapiens
tgcctaagaacagtc

SEQ ID NO: 556982 - DNA, 15 bp, Homo sapiens
ctgcctaagaacagt

SEQ ID NO: 556983 - DNA, 15 bp, Homo sapiens
tctgcctaagaacag

SEQ ID NO: 556984 - DNA, 15 bp, Homo sapiens
ctctgcctaagaaca

SEQ ID NO: 556985 - DNA, 15 bp, Homo sapiens
cctctgcctaagaac

SEQ ID NO: 556986 - DNA, 15 bp, Homo sapiens
ccctctgcctaagaa

SEQ ID NO: 556987 - DNA, 15 bp, Homo sapiens
tccctctgcctaaga

SEQ ID NO: 556988 - DNA, 15 bp, Homo sapiens
ctccctctgcctaag

SEQ ID NO: 556989 - DNA, 15 bp, Homo sapiens
gctccctctgcctaa

SEQ ID NO: 556990 - DNA, 15 bp, Homo sapiens
tgctccctctgccta

SEQ ID NO: 556991 - DNA, 15 bp, Homo sapiens
ctgctccctctgcct

SEQ ID NO: 556992 - DNA, 15 bp, Homo sapiens
actgctccctctgcc

SEQ ID NO: 556993 - DNA, 15 bp, Homo sapiens
cactgctccctctgc

SEQ ID NO: 556994 - DNA, 15 bp, Homo sapiens
tcactgctccctctg

SEQ ID NO: 556995 - DNA, 15 bp, Homo sapiens
atcactgctccctct

SEQ ID NO: 556996 - DNA, 15 bp, Homo sapiens
catcactgctccctc

SEQ ID NO: 556997 - DNA, 15 bp, Homo sapiens
gcatcactgctccct

SEQ ID NO: 556998 - DNA, 15 bp, Homo sapiens
tgcatcactgctccc

SEQ ID NO: 556999 - DNA, 15 bp, Homo sapiens
ttgcatcactgctcc

SEQ ID NO: 557000 - DNA, 15 bp, Homo sapiens
tttgcatcactgctc

SEQ ID NO: 557001 - DNA, 15 bp, Homo sapiens
ctttgcatcactgct

SEQ ID NO: 557002 - DNA, 15 bp, Homo sapiens
cctttgcatcactgc

SEQ ID NO: 557003 - DNA, 15 bp, Homo sapiens
ccctttgcatcactg

SEQ ID NO: 557004 - DNA, 15 bp, Homo sapiens
gccctttgcatcact

SEQ ID NO: 557005 - DNA, 15 bp, Homo sapiens
ggccctttgcatcac

SEQ ID NO: 557006 - DNA, 15 bp, Homo sapiens
aggccctttgcatca

SEQ ID NO: 557007 - DNA, 15 bp, Homo sapiens
caggccctttgcatc

SEQ ID NO: 557008 - DNA, 15 bp, Homo sapiens
ccaggccctttgcat

SEQ ID NO: 557009 - DNA, 15 bp, Homo sapiens
cccaggccctttgca

SEQ ID NO: 557010 - DNA, 15 bp, Homo sapiens
ccccaggccctttgc

SEQ ID NO: 557011 - DNA, 15 bp, Homo sapiens
gccccaggccctttg

SEQ ID NO: 557012 - DNA, 15 bp, Homo sapiens
tgccccaggcccttt

SEQ ID NO: 557013 - DNA, 15 bp, Homo sapiens
ctgccccaggccctt

SEQ ID NO: 557014 - DNA, 15 bp, Homo sapiens
cctgccccaggccct

SEQ ID NO: 557015 - DNA, 15 bp, Homo sapiens
tcctgccccaggccc

SEQ ID NO: 557016 - DNA, 15 bp, Homo sapiens
ctcctgccccaggcc

SEQ ID NO: 557017 - DNA, 15 bp, Homo sapiens
actcctgccccaggc

SEQ ID NO: 557018 - DNA, 15 bp, Homo sapiens
cactcctgccccagg

SEQ ID NO: 557019 - DNA, 15 bp, Homo sapiens
tcactcctgccccag

SEQ ID NO: 557020 - DNA, 15 bp, Homo sapiens
ctcactcctgcccca

SEQ ID NO: 557021 - DNA, 15 bp, Homo sapiens
actcactcctgcccc

SEQ ID NO: 557022 - DNA, 15 bp, Homo sapiens
cactcactcctgccc

SEQ ID NO: 557023 - DNA, 15 bp, Homo sapiens
acactcactcctgcc

SEQ ID NO: 557024 - DNA, 15 bp, Homo sapiens
cacactcactcctgc

SEQ ID NO: 557025 - DNA, 15 bp, Homo sapiens
gcacactcactcctg

SEQ ID NO: 557026 - DNA, 15 bp, Homo sapiens
agcacactcactcct

SEQ ID NO: 557027 - DNA, 15 bp, Homo sapiens
aagcacactcactcc

SEQ ID NO: 557028 - DNA, 15 bp, Homo sapiens
taagcacactcactc

SEQ ID NO: 557029 - DNA, 15 bp, Homo sapiens
ctaagcacactcact

SEQ ID NO: 557030 - DNA, 15 bp, Homo sapiens
cctaagcacactcac

SEQ ID NO: 557031 - DNA, 15 bp, Homo sapiens
tcctaagcacactca

SEQ ID NO: 557032 - DNA, 15 bp, Homo sapiens
ttcctaagcacactc

SEQ ID NO: 557033 - DNA, 15 bp, Homo sapiens
gttcctaagcacact

SEQ ID NO: 557034 - DNA, 15 bp, Homo sapiens
agttcctaagcacac

SEQ ID NO: 557035 - DNA, 15 bp, Homo sapiens
cagttcctaagcaca

SEQ ID NO: 557036 - DNA, 15 bp, Homo sapiens
gcagttcctaagcac

SEQ ID NO: 557037 - DNA, 15 bp, Homo sapiens
tgcagttcctaagca

SEQ ID NO: 557038 - DNA, 15 bp, Homo sapiens
ctgcagttcctaagc

SEQ ID NO: 557039 - DNA, 15 bp, Homo sapiens
cctgcagttcctaag

SEQ ID NO: 557040 - DNA, 15 bp, Homo sapiens
ccctgcagttcctaa

SEQ ID NO: 557041 - DNA, 15 bp, Homo sapiens
tccctgcagttccta

SEQ ID NO: 557042 - DNA, 15 bp, Homo sapiens
ctccctgcagttcct

SEQ ID NO: 557043 - DNA, 15 bp, Homo sapiens
cctccctgcagttcc

SEQ ID NO: 557044 - DNA, 15 bp, Homo sapiens
gcctccctgcagttc

SEQ ID NO: 557045 - DNA, 15 bp, Homo sapiens
ggcctccctgcagtt

SEQ ID NO: 557046 - DNA, 15 bp, Homo sapiens
gggcctccctgcagt

SEQ ID NO: 557047 - DNA, 15 bp, Homo sapiens
agggcctccctgcag

SEQ ID NO: 557048 - DNA, 15 bp, Homo sapiens
cagggcctccctgca

SEQ ID NO: 557049 - DNA, 15 bp, Homo sapiens
ccagggcctccctgc

SEQ ID NO: 557050 - DNA, 15 bp, Homo sapiens
cccagggcctccctg

SEQ ID NO: 557051 - DNA, 15 bp, Homo sapiens
gcccagggcctccct

SEQ ID NO: 557052 - DNA, 15 bp, Homo sapiens
tgcccagggcctccc

SEQ ID NO: 557053 - DNA, 15 bp, Homo sapiens
gtgcccagggcctcc

SEQ ID NO: 557054 - DNA, 15 bp, Homo sapiens
tgtgcccagggcctc

SEQ ID NO: 557055 - DNA, 15 bp, Homo sapiens
ctgtgcccagggcct

SEQ ID NO: 557056 - DNA, 15 bp, Homo sapiens
cctgtgcccagggcc

SEQ ID NO: 557057 - DNA, 15 bp, Homo sapiens
tcctgtgcccagggc

SEQ ID NO: 557058 - DNA, 15 bp, Homo sapiens
ttcctgtgcccaggg

SEQ ID NO: 557059 - DNA, 15 bp, Homo sapiens
cttcctgtgcccagg

SEQ ID NO: 557060 - DNA, 15 bp, Homo sapiens
acttcctgtgcccag

SEQ ID NO: 557061 - DNA, 15 bp, Homo sapiens
aacttcctgtgccca

SEQ ID NO: 557062 - DNA, 15 bp, Homo sapiens
caacttcctgtgccc

SEQ ID NO: 557063 - DNA, 15 bp, Homo sapiens
ccaacttcctgtgcc

SEQ ID NO: 557064 - DNA, 15 bp, Homo sapiens
cccaacttcctgtgc

SEQ ID NO: 557065 - DNA, 15 bp, Homo sapiens
ccccaacttcctgtg

SEQ ID NO: 557066 - DNA, 15 bp, Homo sapiens
gccccaacttcctgt

SEQ ID NO: 557067 - DNA, 15 bp, Homo sapiens
tgccccaacttcctg

SEQ ID NO: 557068 - DNA, 15 bp, Homo sapiens
ctgccccaacttcct

SEQ ID NO: 557069 - DNA, 15 bp, Homo sapiens
cctgccccaacttcc

SEQ ID NO: 557070 - DNA, 15 bp, Homo sapiens
ccctgccccaacttc

SEQ ID NO: 557071 - DNA, 15 bp, Homo sapiens
gccctgccccaactt

SEQ ID NO: 557072 - DNA, 15 bp, Homo sapiens
agccctgccccaact

SEQ ID NO: 557073 - DNA, 15 bp, Homo sapiens
cagccctgccccaac

SEQ ID NO: 557074 - DNA, 15 bp, Homo sapiens
tcagccctgccccaa

SEQ ID NO: 557075 - DNA, 15 bp, Homo sapiens
ctcagccctgcccca

SEQ ID NO: 557076 - DNA, 15 bp, Homo sapiens
gctcagccctgcccc

SEQ ID NO: 557077 - DNA, 15 bp, Homo sapiens
tgctcagccctgccc

SEQ ID NO: 557078 - DNA, 15 bp, Homo sapiens
ctgctcagccctgcc

SEQ ID NO: 557079 - DNA, 15 bp, Homo sapiens
tctgctcagccctgc

SEQ ID NO: 557080 - DNA, 15 bp, Homo sapiens
ctctgctcagccctg

SEQ ID NO: 557081 - DNA, 15 bp, Homo sapiens
gctctgctcagccct

SEQ ID NO: 557082 - DNA, 15 bp, Homo sapiens
agctctgctcagccc

SEQ ID NO: 557083 - DNA, 15 bp, Homo sapiens
aagctctgctcagcc

SEQ ID NO: 557084 - DNA, 15 bp, Homo sapiens
taagctctgctcagc

SEQ ID NO: 557085 - DNA, 15 bp, Homo sapiens
ataagctctgctcag

SEQ ID NO: 557086 - DNA, 15 bp, Homo sapiens
cataagctctgctca

SEQ ID NO: 557087 - DNA, 15 bp, Homo sapiens
gcataagctctgctc

SEQ ID NO: 557088 - DNA, 15 bp, Homo sapiens
tgcataagctctgct

SEQ ID NO: 557089 - DNA, 15 bp, Homo sapiens
ctgcataagctctgc

SEQ ID NO: 557090 - DNA, 15 bp, Homo sapiens
cctgcataagctctg

SEQ ID NO: 557091 - DNA, 15 bp, Homo sapiens
ccctgcataagctct

SEQ ID NO: 557092 - DNA, 15 bp, Homo sapiens
cccctgcataagctc

SEQ ID NO: 557093 - DNA, 15 bp, Homo sapiens
gcccctgcataagct

SEQ ID NO: 557094 - DNA, 15 bp, Homo sapiens
agcccctgcataagc

SEQ ID NO: 557095 - DNA, 15 bp, Homo sapiens
tagcccctgcataag

SEQ ID NO: 557096 - DNA, 15 bp, Homo sapiens
ctagcccctgcataa

SEQ ID NO: 557097 - DNA, 15 bp, Homo sapiens
tctagcccctgcata

SEQ ID NO: 557098 - DNA, 15 bp, Homo sapiens
atctagcccctgcat

SEQ ID NO: 557099 - DNA, 15 bp, Homo sapiens
tatctagcccctgca

SEQ ID NO: 557100 - DNA, 15 bp, Homo sapiens
ttatctagcccctgc

SEQ ID NO: 557101 - DNA, 15 bp, Homo sapiens
cttatctagcccctg

SEQ ID NO: 557102 - DNA, 15 bp, Homo sapiens
ccttatctagcccct

SEQ ID NO: 557103 - DNA, 15 bp, Homo sapiens
accttatctagcccc

SEQ ID NO: 557104 - DNA, 15 bp, Homo sapiens
gaccttatctagccc

SEQ ID NO: 557105 - DNA, 15 bp, Homo sapiens
tgaccttatctagcc

SEQ ID NO: 557106 - DNA, 15 bp, Homo sapiens
ttgaccttatctagc

SEQ ID NO: 557107 - DNA, 15 bp, Homo sapiens
attgaccttatctag

SEQ ID NO: 557108 - DNA, 15 bp, Homo sapiens
cattgaccttatcta

SEQ ID NO: 557109 - DNA, 15 bp, Homo sapiens
tcattgaccttatct

SEQ ID NO: 557110 - DNA, 15 bp, Homo sapiens
ttcattgaccttatc

SEQ ID NO: 557111 - DNA, 15 bp, Homo sapiens
attcattgaccttat

SEQ ID NO: 557112 - DNA, 15 bp, Homo sapiens
gattcattgacctta

SEQ ID NO: 557113 - DNA, 15 bp, Homo sapiens
ggattcattgacctt

SEQ ID NO: 557114 - DNA, 15 bp, Homo sapiens
aggattcattgacct

SEQ ID NO: 557115 - DNA, 15 bp, Homo sapiens
taggattcattgacc

SEQ ID NO: 557116 - DNA, 15 bp, Homo sapiens
ttaggattcattgac

SEQ ID NO: 557117 - DNA, 15 bp, Homo sapiens
attaggattcattga

SEQ ID NO: 557118 - DNA, 15 bp, Homo sapiens
cattaggattcattg

SEQ ID NO: 557119 - DNA, 15 bp, Homo sapiens
ccattaggattcatt

SEQ ID NO: 557120 - DNA, 15 bp, Homo sapiens
accattaggattcat

SEQ ID NO: 557121 - DNA, 15 bp, Homo sapiens
taccattaggattca

SEQ ID NO: 557122 - DNA, 15 bp, Homo sapiens
ctaccattaggattc

SEQ ID NO: 557123 - DNA, 15 bp, Homo sapiens
cctaccattaggatt

SEQ ID NO: 557124 - DNA, 15 bp, Homo sapiens
acctaccattaggat

SEQ ID NO: 557125 - DNA, 15 bp, Homo sapiens
aacctaccattagga

SEQ ID NO: 557126 - DNA, 15 bp, Homo sapiens
taacctaccattagg

SEQ ID NO: 557127 - DNA, 15 bp, Homo sapiens
ctaacctaccattag

SEQ ID NO: 557128 - DNA, 15 bp, Homo sapiens
tctaacctaccatta

SEQ ID NO: 557129 - DNA, 15 bp, Homo sapiens
gtctaacctaccatt

SEQ ID NO: 557130 - DNA, 15 bp, Homo sapiens
agtctaacctaccat

SEQ ID NO: 557131 - DNA, 15 bp, Homo sapiens
tagtctaacctacca

SEQ ID NO: 557132 - DNA, 15 bp, Homo sapiens
ctagtctaacctacc

SEQ ID NO: 557133 - DNA, 15 bp, Homo sapiens
tctagtctaacctac

SEQ ID NO: 557134 - DNA, 15 bp, Homo sapiens
ttctagtctaaccta

SEQ ID NO: 557135 - DNA, 15 bp, Homo sapiens
tttctagtctaacct

SEQ ID NO: 557136 - DNA, 15 bp, Homo sapiens
ctttctagtctaacc

SEQ ID NO: 557137 - DNA, 15 bp, Homo sapiens
cctttctagtctaac

SEQ ID NO: 557138 - DNA, 15 bp, Homo sapiens
ccctttctagtctaa

SEQ ID NO: 557139 - DNA, 15 bp, Homo sapiens
accctttctagtcta

SEQ ID NO: 557140 - DNA, 15 bp, Homo sapiens
gaccctttctagtct

SEQ ID NO: 557141 - DNA, 15 bp, Homo sapiens
tgaccctttctagtc

SEQ ID NO: 557142 - DNA, 15 bp, Homo sapiens
gtgaccctttctagt

SEQ ID NO: 557143 - DNA, 15 bp, Homo sapiens
tgtgaccctttctag

SEQ ID NO: 557144 - DNA, 15 bp, Homo sapiens
ctgtgaccctttcta

SEQ ID NO: 557145 - DNA, 15 bp, Homo sapiens
tctgtgaccctttct

SEQ ID NO: 557146 - DNA, 15 bp, Homo sapiens
atctgtgaccctttc

SEQ ID NO: 557147 - DNA, 15 bp, Homo sapiens
aatctgtgacccttt

SEQ ID NO: 557148 - DNA, 15 bp, Homo sapiens
aaatctgtgaccctt

SEQ ID NO: 557149 - DNA, 15 bp, Homo sapiens
aaaatctgtgaccct

SEQ ID NO: 557150 - DNA, 15 bp, Homo sapiens
gaaaatctgtgaccc

SEQ ID NO: 557151 - DNA, 15 bp, Homo sapiens
tgaaaatctgtgacc

SEQ ID NO: 557152 - DNA, 15 bp, Homo sapiens
ctgaaaatctgtgac

SEQ ID NO: 557153 - DNA, 15 bp, Homo sapiens
gctgaaaatctgtga

SEQ ID NO: 557154 - DNA, 15 bp, Homo sapiens
tgctgaaaatctgtg

SEQ ID NO: 557155 - DNA, 15 bp, Homo sapiens
ctgctgaaaatctgt

SEQ ID NO: 557156 - DNA, 15 bp, Homo sapiens
cctgctgaaaatctg

SEQ ID NO: 557157 - DNA, 15 bp, Homo sapiens
ccctgctgaaaatct

SEQ ID NO: 557158 - DNA, 15 bp, Homo sapiens
cccctgctgaaaatc

SEQ ID NO: 557159 - DNA, 15 bp, Homo sapiens
gcccctgctgaaaat

SEQ ID NO: 557160 - DNA, 15 bp, Homo sapiens
tgcccctgctgaaaa

SEQ ID NO: 557161 - DNA, 15 bp, Homo sapiens
atgcccctgctgaaa

SEQ ID NO: 557162 - DNA, 15 bp, Homo sapiens
catgcccctgctgaa

SEQ ID NO: 557163 - DNA, 15 bp, Homo sapiens
tcatgcccctgctga

SEQ ID NO: 557164 - DNA, 15 bp, Homo sapiens
atcatgcccctgctg

SEQ ID NO: 557165 - DNA, 15 bp, Homo sapiens
tatcatgcccctgct

SEQ ID NO: 557166 - DNA, 15 bp, Homo sapiens
atatcatgcccctgc

SEQ ID NO: 557167 - DNA, 15 bp, Homo sapiens
tatatcatgcccctg

SEQ ID NO: 557168 - DNA, 15 bp, Homo sapiens
atatatcatgcccct

SEQ ID NO: 557169 - DNA, 15 bp, Homo sapiens
aatatatcatgcccc

SEQ ID NO: 557170 - DNA, 15 bp, Homo sapiens
gaatatatcatgccc

SEQ ID NO: 557171 - DNA, 15 bp, Homo sapiens
agaatatatcatgcc

SEQ ID NO: 557172 - DNA, 15 bp, Homo sapiens
cagaatatatcatgc

SEQ ID NO: 557173 - DNA, 15 bp, Homo sapiens
acagaatatatcatg

SEQ ID NO: 557174 - DNA, 15 bp, Homo sapiens
aacagaatatatcat

SEQ ID NO: 557175 - DNA, 15 bp, Homo sapiens
gaacagaatatatca

SEQ ID NO: 557176 - DNA, 15 bp, Homo sapiens
agaacagaatatatc

SEQ ID NO: 557177 - DNA, 15 bp, Homo sapiens
aagaacagaatatat

SEQ ID NO: 557178 - DNA, 15 bp, Homo sapiens
aaagaacagaatata

SEQ ID NO: 557179 - DNA, 15 bp, Homo sapiens
aaaagaacagaatat

SEQ ID NO: 557180 - DNA, 15 bp, Homo sapiens
aaaaagaacagaata

SEQ ID NO: 557181 - DNA, 15 bp, Homo sapiens
aaaaaagaacagaat

SEQ ID NO: 557182 - DNA, 15 bp, Homo sapiens
aaaaaaagaacagaa

SEQ ID NO: 557183 - DNA, 15 bp, Homo sapiens
taaaaaaagaacaga

SEQ ID NO: 557184 - DNA, 15 bp, Homo sapiens
ttaaaaaaagaacag

SEQ ID NO: 557185 - DNA, 15 bp, Homo sapiens
attaaaaaaagaaca

SEQ ID NO: 557186 - DNA, 15 bp, Homo sapiens
aattaaaaaaagaac

SEQ ID NO: 557187 - DNA, 15 bp, Homo sapiens
aaattaaaaaaagaa

SEQ ID NO: 557188 - DNA, 15 bp, Homo sapiens
gaaattaaaaaaaga

SEQ ID NO: 557189 - DNA, 15 bp, Homo sapiens
tgaaattaaaaaaag

SEQ ID NO: 557190 - DNA, 15 bp, Homo sapiens
atgaaattaaaaaaa

SEQ ID NO: 557191 - DNA, 15 bp, Homo sapiens
tatgaaattaaaaaa

SEQ ID NO: 557192 - DNA, 15 bp, Homo sapiens
ttatgaaattaaaaa

SEQ ID NO: 557193 - DNA, 15 bp, Homo sapiens
gttatgaaattaaaa

SEQ ID NO: 557194 - DNA, 15 bp, Homo sapiens
agttatgaaattaaa

SEQ ID NO: 557195 - DNA, 15 bp, Homo sapiens
aagttatgaaattaa

SEQ ID NO: 557196 - DNA, 15 bp, Homo sapiens
aaagttatgaaatta

SEQ ID NO: 557197 - DNA, 15 bp, Homo sapiens
gaaagttatgaaatt

SEQ ID NO: 557198 - DNA, 15 bp, Homo sapiens
tgaaagttatgaaat

SEQ ID NO: 557199 - DNA, 15 bp, Homo sapiens
ttgaaagttatgaaa

SEQ ID NO: 557200 - DNA, 15 bp, Homo sapiens
tttgaaagttatgaa

SEQ ID NO: 557201 - DNA, 15 bp, Homo sapiens
ttttgaaagttatga

SEQ ID NO: 557202 - DNA, 15 bp, Homo sapiens
tttttgaaagttatg

SEQ ID NO: 557203 - DNA, 15 bp, Homo sapiens
gtttttgaaagttat

SEQ ID NO: 557204 - DNA, 15 bp, Homo sapiens
tgtttttgaaagtta

SEQ ID NO: 557205 - DNA, 15 bp, Homo sapiens
ttgtttttgaaagtt

SEQ ID NO: 557206 - DNA, 15 bp, Homo sapiens
attgtttttgaaagt

SEQ ID NO: 557207 - DNA, 15 bp, Homo sapiens
aattgtttttgaaag

SEQ ID NO: 557208 - DNA, 15 bp, Homo sapiens
aaattgtttttgaaa

SEQ ID NO: 557209 - DNA, 15 bp, Homo sapiens
aaaattgtttttgaa

SEQ ID NO: 557210 - DNA, 15 bp, Homo sapiens
taaaattgtttttga

SEQ ID NO: 557211 - DNA, 15 bp, Homo sapiens
ataaaattgtttttg

SEQ ID NO: 557212 - DNA, 15 bp, Homo sapiens
aataaaattgttttt

SEQ ID NO: 557213 - DNA, 15 bp, Homo sapiens
aaataaaattgtttt

SEQ ID NO: 557214 - DNA, 15 bp, Homo sapiens
aaaataaaattgttt

SEQ ID NO: 557215 - DNA, 15 bp, Homo sapiens
aaaaataaaattgtt

SEQ ID NO: 557216 - DNA, 15 bp, Homo sapiens
taaaaataaaattgt

SEQ ID NO: 557217 - DNA, 15 bp, Homo sapiens
ctaaaaataaaattg

SEQ ID NO: 557218 - DNA, 15 bp, Homo sapiens
tctaaaaataaaatt

SEQ ID NO: 557219 - DNA, 15 bp, Homo sapiens
ctctaaaaataaaat

SEQ ID NO: 557220 - DNA, 15 bp, Homo sapiens
tctctaaaaataaaa

SEQ ID NO: 557221 - DNA, 15 bp, Homo sapiens
gtctctaaaaataaa

SEQ ID NO: 557222 - DNA, 15 bp, Homo sapiens
agtctctaaaaataa

SEQ ID NO: 557223 - DNA, 15 bp, Homo sapiens
cagtctctaaaaata

SEQ ID NO: 557224 - DNA, 15 bp, Homo sapiens
ccagtctctaaaaat

SEQ ID NO: 557225 - DNA, 15 bp, Homo sapiens
cccagtctctaaaaa

SEQ ID NO: 557226 - DNA, 15 bp, Homo sapiens
acccagtctctaaaa

SEQ ID NO: 557227 - DNA, 15 bp, Homo sapiens
gacccagtctctaaa

SEQ ID NO: 557228 - DNA, 15 bp, Homo sapiens
agacccagtctctaa

SEQ ID NO: 557229 - DNA, 15 bp, Homo sapiens
gagacccagtctcta

SEQ ID NO: 557230 - DNA, 15 bp, Homo sapiens
tgagacccagtctct

SEQ ID NO: 557231 - DNA, 15 bp, Homo sapiens
gtgagacccagtctc

SEQ ID NO: 557232 - DNA, 15 bp, Homo sapiens
agtgagacccagtct

SEQ ID NO: 557233 - DNA, 15 bp, Homo sapiens
tagtgagacccagtc

SEQ ID NO: 557234 - DNA, 15 bp, Homo sapiens
atagtgagacccagt

SEQ ID NO: 557235 - DNA, 15 bp, Homo sapiens
catagtgagacccag

SEQ ID NO: 557236 - DNA, 15 bp, Homo sapiens
acatagtgagaccca

SEQ ID NO: 557237 - DNA, 15 bp, Homo sapiens
aacatagtgagaccc

SEQ ID NO: 557238 - DNA, 15 bp, Homo sapiens
gaacatagtgagacc

SEQ ID NO: 557239 - DNA, 15 bp, Homo sapiens
ggaacatagtgagac

SEQ ID NO: 557240 - DNA, 15 bp, Homo sapiens
gggaacatagtgaga

SEQ ID NO: 557241 - DNA, 15 bp, Homo sapiens
ggggaacatagtgag

SEQ ID NO: 557242 - DNA, 15 bp, Homo sapiens
tggggaacatagtga

SEQ ID NO: 557243 - DNA, 15 bp, Homo sapiens
ctggggaacatagtg

SEQ ID NO: 557244 - DNA, 15 bp, Homo sapiens
cctggggaacatagt

SEQ ID NO: 557245 - DNA, 15 bp, Homo sapiens
gcctggggaacatag

SEQ ID NO: 557246 - DNA, 15 bp, Homo sapiens
agcctggggaacata

SEQ ID NO: 557247 - DNA, 15 bp, Homo sapiens
cagcctggggaacat

SEQ ID NO: 557248 - DNA, 15 bp, Homo sapiens
ccagcctggggaaca

SEQ ID NO: 557249 - DNA, 15 bp, Homo sapiens
accagcctggggaac

SEQ ID NO: 557250 - DNA, 15 bp, Homo sapiens
gaccagcctggggaa

SEQ ID NO: 557251 - DNA, 15 bp, Homo sapiens
agaccagcctgggga

SEQ ID NO: 557252 - DNA, 15 bp, Homo sapiens
gagaccagcctgggg

SEQ ID NO: 557253 - DNA, 15 bp, Homo sapiens
gtgagaccagcctgg

SEQ ID NO: 557254 - DNA, 15 bp, Homo sapiens
tgtgagaccagcctg

SEQ ID NO: 557255 - DNA, 15 bp, Homo sapiens
gtgtgagaccagcct

SEQ ID NO: 557256 - DNA, 15 bp, Homo sapiens
agtgtgagaccagcc

SEQ ID NO: 557257 - DNA, 15 bp, Homo sapiens
gagtgtgagaccagc

SEQ ID NO: 557258 - DNA, 15 bp, Homo sapiens
ggagtgtgagaccag

SEQ ID NO: 557259 - DNA, 15 bp, Homo sapiens
aggagtgtgagacca

SEQ ID NO: 557260 - DNA, 15 bp, Homo sapiens
caggagtgtgagacc

SEQ ID NO: 557261 - DNA, 15 bp, Homo sapiens
ccaggagtgtgagac

SEQ ID NO: 557262 - DNA, 15 bp, Homo sapiens
cccaggagtgtgaga

SEQ ID NO: 557263 - DNA, 15 bp, Homo sapiens
gcccaggagtgtgag

SEQ ID NO: 557264 - DNA, 15 bp, Homo sapiens
agcccaggagtgtga

SEQ ID NO: 557265 - DNA, 15 bp, Homo sapiens
gagcccaggagtgtg

SEQ ID NO: 557266 - DNA, 15 bp, Homo sapiens
tgagcccaggagtgt

SEQ ID NO: 557267 - DNA, 15 bp, Homo sapiens
ttgagcccaggagtg

SEQ ID NO: 557268 - DNA, 15 bp, Homo sapiens
atggctcacacctgt

SEQ ID NO: 557269 - DNA, 15 bp, Homo sapiens
tatggctcacacctg

SEQ ID NO: 557270 - DNA, 15 bp, Homo sapiens
ttatggctcacacct

SEQ ID NO: 557271 - DNA, 15 bp, Homo sapiens
attatggctcacacc

SEQ ID NO: 557272 - DNA, 15 bp, Homo sapiens
cattatggctcacac

SEQ ID NO: 557273 - DNA, 15 bp, Homo sapiens
gcattatggctcaca

SEQ ID NO: 557274 - DNA, 15 bp, Homo sapiens
ggcattatggctcac

SEQ ID NO: 557275 - DNA, 15 bp, Homo sapiens
aggcattatggctca

SEQ ID NO: 557276 - DNA, 15 bp, Homo sapiens
caggcattatggctc

SEQ ID NO: 557277 - DNA, 15 bp, Homo sapiens
ccaggcattatggct

SEQ ID NO: 557278 - DNA, 15 bp, Homo sapiens
gccaggcattatggc

SEQ ID NO: 557279 - DNA, 15 bp, Homo sapiens
ggccaggcattatgg

SEQ ID NO: 557280 - DNA, 15 bp, Homo sapiens
aggccaggcattatg

SEQ ID NO: 557281 - DNA, 15 bp, Homo sapiens
gaggccaggcattat

SEQ ID NO: 557282 - DNA, 15 bp, Homo sapiens
agaggccaggcatta

SEQ ID NO: 557283 - DNA, 15 bp, Homo sapiens
cagaggccaggcatt

SEQ ID NO: 557284 - DNA, 15 bp, Homo sapiens
acagaggccaggcat

SEQ ID NO: 557285 - DNA, 15 bp, Homo sapiens
aacagaggccaggca

SEQ ID NO: 557286 - DNA, 15 bp, Homo sapiens
gaacagaggccaggc

SEQ ID NO: 557287 - DNA, 15 bp, Homo sapiens
agaacagaggccagg

SEQ ID NO: 557288 - DNA, 15 bp, Homo sapiens
aagaacagaggccag

SEQ ID NO: 557289 - DNA, 15 bp, Homo sapiens
aaagaacagaggcca

SEQ ID NO: 557290 - DNA, 15 bp, Homo sapiens
aaaagaacagaggcc

SEQ ID NO: 557291 - DNA, 15 bp, Homo sapiens
caaaagaacagaggc

SEQ ID NO: 557292 - DNA, 15 bp, Homo sapiens
acaaaagaacagagg

SEQ ID NO: 557293 - DNA, 15 bp, Homo sapiens
tacaaaagaacagag

SEQ ID NO: 557294 - DNA, 15 bp, Homo sapiens
ttacaaaagaacaga

SEQ ID NO: 557295 - DNA, 15 bp, Homo sapiens
tttacaaaagaacag

SEQ ID NO: 557296 - DNA, 15 bp, Homo sapiens
ttttacaaaagaaca

SEQ ID NO: 557297 - DNA, 15 bp, Homo sapiens
gttttacaaaagaac

SEQ ID NO: 557298 - DNA, 15 bp, Homo sapiens
agttttacaaaagaa

SEQ ID NO: 557299 - DNA, 15 bp, Homo sapiens
gagttttacaaaaga

SEQ ID NO: 557300 - DNA, 15 bp, Homo sapiens
ggagttttacaaaag

SEQ ID NO: 557301 - DNA, 15 bp, Homo sapiens
tggagttttacaaaa

SEQ ID NO: 557302 - DNA, 15 bp, Homo sapiens
atggagttttacaaa

SEQ ID NO: 557303 - DNA, 15 bp, Homo sapiens
gatggagttttacaa

SEQ ID NO: 557304 - DNA, 15 bp, Homo sapiens
agatggagttttaca

SEQ ID NO: 557305 - DNA, 15 bp, Homo sapiens
cagatggagttttac

SEQ ID NO: 557306 - DNA, 15 bp, Homo sapiens
ccagatggagtttta

SEQ ID NO: 557307 - DNA, 15 bp, Homo sapiens
gccagatggagtttt

SEQ ID NO: 557308 - DNA, 15 bp, Homo sapiens
ggccagatggagttt

SEQ ID NO: 557309 - DNA, 15 bp, Homo sapiens
tggccagatggagtt

SEQ ID NO: 557310 - DNA, 15 bp, Homo sapiens
gtggccagatggagt

SEQ ID NO: 557311 - DNA, 15 bp, Homo sapiens
cgtggccagatggag

SEQ ID NO: 557312 - DNA, 15 bp, Homo sapiens
ccgtggccagatgga

SEQ ID NO: 557313 - DNA, 15 bp, Homo sapiens
gccgtggccagatgg

SEQ ID NO: 557314 - DNA, 15 bp, Homo sapiens
agccgtggccagatg

SEQ ID NO: 557315 - DNA, 15 bp, Homo sapiens
tagccgtggccagat

SEQ ID NO: 557316 - DNA, 15 bp, Homo sapiens
ttagccgtggccaga

SEQ ID NO: 557317 - DNA, 15 bp, Homo sapiens
attagccgtggccag

SEQ ID NO: 557318 - DNA, 15 bp, Homo sapiens
tattagccgtggcca

SEQ ID NO: 557319 - DNA, 15 bp, Homo sapiens
gtattagccgtggcc

SEQ ID NO: 557320 - DNA, 15 bp, Homo sapiens
tgtattagccgtggc

SEQ ID NO: 557321 - DNA, 15 bp, Homo sapiens
atgtattagccgtgg

SEQ ID NO: 557322 - DNA, 15 bp, Homo sapiens
aatgtattagccgtg

SEQ ID NO: 557323 - DNA, 15 bp, Homo sapiens
caatgtattagccgt

SEQ ID NO: 557324 - DNA, 15 bp, Homo sapiens
tcaatgtattagccg

SEQ ID NO: 557325 - DNA, 15 bp, Homo sapiens
atcaatgtattagcc

SEQ ID NO: 557326 - DNA, 15 bp, Homo sapiens
catcaatgtattagc

SEQ ID NO: 557327 - DNA, 15 bp, Homo sapiens
acatcaatgtattag

SEQ ID NO: 557328 - DNA, 15 bp, Homo sapiens
cacatcaatgtatta

SEQ ID NO: 557329 - DNA, 15 bp, Homo sapiens
ccacatcaatgtatt

SEQ ID NO: 557330 - DNA, 15 bp, Homo sapiens
cccacatcaatgtat

SEQ ID NO: 557331 - DNA, 15 bp, Homo sapiens
acccacatcaatgta

SEQ ID NO: 557332 - DNA, 15 bp, Homo sapiens
cacccacatcaatgt

SEQ ID NO: 557333 - DNA, 15 bp, Homo sapiens
ccacccacatcaatg

SEQ ID NO: 557334 - DNA, 15 bp, Homo sapiens
cccacccacatcaat

SEQ ID NO: 557335 - DNA, 15 bp, Homo sapiens
ccccacccacatcaa

SEQ ID NO: 557336 - DNA, 15 bp, Homo sapiens
tccccacccacatca

SEQ ID NO: 557337 - DNA, 15 bp, Homo sapiens
ctccccacccacatc

SEQ ID NO: 557338 - DNA, 15 bp, Homo sapiens
cctccccacccacat

SEQ ID NO: 557339 - DNA, 15 bp, Homo sapiens
gcctccccacccaca

SEQ ID NO: 557340 - DNA, 15 bp, Homo sapiens
tgcctccccacccac

SEQ ID NO: 557341 - DNA, 15 bp, Homo sapiens
ctgcctccccaccca

SEQ ID NO: 557342 - DNA, 15 bp, Homo sapiens
tctgcctccccaccc

SEQ ID NO: 557343 - DNA, 15 bp, Homo sapiens
ctctgcctccccacc

SEQ ID NO: 557344 - DNA, 15 bp, Homo sapiens
actctgcctccccac

SEQ ID NO: 557345 - DNA, 15 bp, Homo sapiens
gactctgcctcccca

SEQ ID NO: 557346 - DNA, 15 bp, Homo sapiens
cgactctgcctcccc

SEQ ID NO: 557347 - DNA, 15 bp, Homo sapiens
ccgactctgcctccc

SEQ ID NO: 557348 - DNA, 15 bp, Homo sapiens
tccgactctgcctcc

SEQ ID NO: 557349 - DNA, 15 bp, Homo sapiens
ctccgactctgcctc

SEQ ID NO: 557350 - DNA, 15 bp, Homo sapiens
gctccgactctgcct

SEQ ID NO: 557351 - DNA, 15 bp, Homo sapiens
cgctccgactctgcc

SEQ ID NO: 557352 - DNA, 15 bp, Homo sapiens
ccgctccgactctgc

SEQ ID NO: 557353 - DNA, 15 bp, Homo sapiens
tccgctccgactctg

SEQ ID NO: 557354 - DNA, 15 bp, Homo sapiens
ctccgctccgactct

SEQ ID NO: 557355 - DNA, 15 bp, Homo sapiens
tctccgctccgactc

SEQ ID NO: 557356 - DNA, 15 bp, Homo sapiens
ctctccgctccgact

SEQ ID NO: 557357 - DNA, 15 bp, Homo sapiens
cctctccgctccgac

SEQ ID NO: 557358 - DNA, 15 bp, Homo sapiens
gcctctccgctccga

SEQ ID NO: 557359 - DNA, 15 bp, Homo sapiens
ggcctctccgctccg

SEQ ID NO: 557360 - DNA, 15 bp, Homo sapiens
aggcctctccgctcc

SEQ ID NO: 557361 - DNA, 15 bp, Homo sapiens
caggcctctccgctc

SEQ ID NO: 557362 - DNA, 15 bp, Homo sapiens
acaggcctctccgct

SEQ ID NO: 557363 - DNA, 15 bp, Homo sapiens
aacaggcctctccgc

SEQ ID NO: 557364 - DNA, 15 bp, Homo sapiens
taacaggcctctccg

SEQ ID NO: 557365 - DNA, 15 bp, Homo sapiens
ctaacaggcctctcc

SEQ ID NO: 557366 - DNA, 15 bp, Homo sapiens
cctaacaggcctctc

SEQ ID NO: 557367 - DNA, 15 bp, Homo sapiens
tcctaacaggcctct

SEQ ID NO: 557368 - DNA, 15 bp, Homo sapiens
ctcctaacaggcctc

SEQ ID NO: 557369 - DNA, 15 bp, Homo sapiens
cctcctaacaggcct

SEQ ID NO: 557370 - DNA, 15 bp, Homo sapiens
acctcctaacaggcc

SEQ ID NO: 557371 - DNA, 15 bp, Homo sapiens
gacctcctaacaggc

SEQ ID NO: 557372 - DNA, 15 bp, Homo sapiens
cgacctcctaacagg

SEQ ID NO: 557373 - DNA, 15 bp, Homo sapiens
gcgacctcctaacag

SEQ ID NO: 557374 - DNA, 15 bp, Homo sapiens
agcgacctcctaaca

SEQ ID NO: 557375 - DNA, 15 bp, Homo sapiens
cagcgacctcctaac

SEQ ID NO: 557376 - DNA, 15 bp, Homo sapiens
gcagcgacctcctaa

SEQ ID NO: 557377 - DNA, 15 bp, Homo sapiens
tgcagcgacctccta

SEQ ID NO: 557378 - DNA, 15 bp, Homo sapiens
ctgcagcgacctcct

SEQ ID NO: 557379 - DNA, 15 bp, Homo sapiens
gctgcagcgacctcc

SEQ ID NO: 557380 - DNA, 15 bp, Homo sapiens
agctgcagcgacctc

SEQ ID NO: 557381 - DNA, 15 bp, Homo sapiens
gagctgcagcgacct

SEQ ID NO: 557382 - DNA, 15 bp, Homo sapiens
ggagctgcagcgacc

SEQ ID NO: 557383 - DNA, 15 bp, Homo sapiens
cggagctgcagcgac

SEQ ID NO: 557384 - DNA, 15 bp, Homo sapiens
gcggagctgcagcga

SEQ ID NO: 557385 - DNA, 15 bp, Homo sapiens
cgcggagctgcagcg

SEQ ID NO: 557386 - DNA, 15 bp, Homo sapiens
ccgcggagctgcagc

SEQ ID NO: 557387 - DNA, 15 bp, Homo sapiens
cccgcggagctgcag

SEQ ID NO: 557388 - DNA, 15 bp, Homo sapiens
acccgcggagctgca

SEQ ID NO: 557389 - DNA, 15 bp, Homo sapiens
cacccgcggagctgc

SEQ ID NO: 557390 - DNA, 15 bp, Homo sapiens
tcacccgcggagctg

SEQ ID NO: 557391 - DNA, 15 bp, Homo sapiens
ctcacccgcggagct

SEQ ID NO: 557392 - DNA, 15 bp, Homo sapiens
tctcacccgcggagc

SEQ ID NO: 557393 - DNA, 15 bp, Homo sapiens
ctctcacccgcggag

SEQ ID NO: 557394 - DNA, 15 bp, Homo sapiens
tctctcacccgcgga

SEQ ID NO: 557395 - DNA, 15 bp, Homo sapiens
atctctcacccgcgg

SEQ ID NO: 557396 - DNA, 15 bp, Homo sapiens
catctctcacccgcg

SEQ ID NO: 557397 - DNA, 15 bp, Homo sapiens
ccatctctcacccgc

SEQ ID NO: 557398 - DNA, 15 bp, Homo sapiens
cccatctctcacccg

SEQ ID NO: 557399 - DNA, 15 bp, Homo sapiens
ccccatctctcaccc

SEQ ID NO: 557400 - DNA, 15 bp, Homo sapiens
cccccatctctcacc

SEQ ID NO: 557401 - DNA, 15 bp, Homo sapiens
gcccccatctctcac

SEQ ID NO: 557402 - DNA, 15 bp, Homo sapiens
cgcccccatctctca

SEQ ID NO: 557403 - DNA, 15 bp, Homo sapiens
ccgcccccatctctc

SEQ ID NO: 557404 - DNA, 15 bp, Homo sapiens
accgcccccatctct

SEQ ID NO: 557405 - DNA, 15 bp, Homo sapiens
aaccgcccccatctc

SEQ ID NO: 557406 - DNA, 15 bp, Homo sapiens
aaaccgcccccatct

SEQ ID NO: 557407 - DNA, 15 bp, Homo sapiens
caaaccgcccccatc

SEQ ID NO: 557408 - DNA, 15 bp, Homo sapiens
ccaaaccgcccccat

SEQ ID NO: 557409 - DNA, 15 bp, Homo sapiens
tccaaaccgccccca

SEQ ID NO: 557410 - DNA, 15 bp, Homo sapiens
gtccaaaccgccccc

SEQ ID NO: 557411 - DNA, 15 bp, Homo sapiens
ggtccaaaccgcccc

SEQ ID NO: 557412 - DNA, 15 bp, Homo sapiens
gggtccaaaccgccc

SEQ ID NO: 557413 - DNA, 15 bp, Homo sapiens
cgggtccaaaccgcc

SEQ ID NO: 557414 - DNA, 15 bp, Homo sapiens
ccgggtccaaaccgc

SEQ ID NO: 557415 - DNA, 15 bp, Homo sapiens
cccgggtccaaaccg

SEQ ID NO: 557416 - DNA, 15 bp, Homo sapiens
tcccgggtccaaacc

SEQ ID NO: 557417 - DNA, 15 bp, Homo sapiens
ctcccgggtccaaac

SEQ ID NO: 557418 - DNA, 15 bp, Homo sapiens
cctcccgggtccaaa

SEQ ID NO: 557419 - DNA, 15 bp, Homo sapiens
acctcccgggtccaa

SEQ ID NO: 557420 - DNA, 15 bp, Homo sapiens
cacctcccgggtcca

SEQ ID NO: 557421 - DNA, 15 bp, Homo sapiens
ccacctcccgggtcc

SEQ ID NO: 557422 - DNA, 15 bp, Homo sapiens
accacctcccgggtc

SEQ ID NO: 557423 - DNA, 15 bp, Homo sapiens
taccacctcccgggt

SEQ ID NO: 557424 - DNA, 15 bp, Homo sapiens
ctaccacctcccggg

SEQ ID NO: 557425 - DNA, 15 bp, Homo sapiens
gctaccacctcccgg

SEQ ID NO: 557426 - DNA, 15 bp, Homo sapiens
cgctaccacctcccg

SEQ ID NO: 557427 - DNA, 15 bp, Homo sapiens
gcgctaccacctccc

SEQ ID NO: 557428 - DNA, 15 bp, Homo sapiens
ggcgctaccacctcc

SEQ ID NO: 557429 - DNA, 15 bp, Homo sapiens
gggcgctaccacctc

SEQ ID NO: 557430 - DNA, 15 bp, Homo sapiens
cgggcgctaccacct

SEQ ID NO: 557431 - DNA, 15 bp, Homo sapiens
acgggcgctaccacc

SEQ ID NO: 557432 - DNA, 15 bp, Homo sapiens
cacgggcgctaccac

SEQ ID NO: 557433 - DNA, 15 bp, Homo sapiens
ccacgggcgctacca

SEQ ID NO: 557434 - DNA, 15 bp, Homo sapiens
cccacgggcgctacc

SEQ ID NO: 557435 - DNA, 15 bp, Homo sapiens
ccccacgggcgctac

SEQ ID NO: 557436 - DNA, 15 bp, Homo sapiens
tccccacgggcgcta

SEQ ID NO: 557437 - DNA, 15 bp, Homo sapiens
ctccccacgggcgct

SEQ ID NO: 557438 - DNA, 15 bp, Homo sapiens
tctccccacgggcgc

SEQ ID NO: 557439 - DNA, 15 bp, Homo sapiens
ttctccccacgggcg

SEQ ID NO: 557440 - DNA, 15 bp, Homo sapiens
cttctccccacgggc

SEQ ID NO: 557441 - DNA, 15 bp, Homo sapiens
acttctccccacggg

SEQ ID NO: 557442 - DNA, 15 bp, Homo sapiens
cacttctccccacgg

SEQ ID NO: 557443 - DNA, 15 bp, Homo sapiens
ccacttctccccacg

SEQ ID NO: 557444 - DNA, 15 bp, Homo sapiens
gccacttctccccac

SEQ ID NO: 557445 - DNA, 15 bp, Homo sapiens
agccacttctcccca

SEQ ID NO: 557446 - DNA, 15 bp, Homo sapiens
cagccacttctcccc

SEQ ID NO: 557447 - DNA, 15 bp, Homo sapiens
ccagccacttctccc

SEQ ID NO: 557448 - DNA, 15 bp, Homo sapiens
tccagccacttctcc

SEQ ID NO: 557449 - DNA, 15 bp, Homo sapiens
atccagccacttctc

SEQ ID NO: 557450 - DNA, 15 bp, Homo sapiens
gatccagccacttct

SEQ ID NO: 557451 - DNA, 15 bp, Homo sapiens
agatccagccacttc

SEQ ID NO: 557452 - DNA, 15 bp, Homo sapiens
cagatccagccactt

SEQ ID NO: 557453 - DNA, 15 bp, Homo sapiens
ccagatccagccact

SEQ ID NO: 557454 - DNA, 15 bp, Homo sapiens
cccagatccagccac

SEQ ID NO: 557455 - DNA, 15 bp, Homo sapiens
gcccagatccagcca

SEQ ID NO: 557456 - DNA, 15 bp, Homo sapiens
tgcccagatccagcc

SEQ ID NO: 557457 - DNA, 15 bp, Homo sapiens
ctgcccagatccagc

SEQ ID NO: 557458 - DNA, 15 bp, Homo sapiens
gctgcccagatccag

SEQ ID NO: 557459 - DNA, 15 bp, Homo sapiens
ggctgcccagatcca

SEQ ID NO: 557460 - DNA, 15 bp, Homo sapiens
aggctgcccagatcc

SEQ ID NO: 557461 - DNA, 15 bp, Homo sapiens
aaggctgcccagatc

SEQ ID NO: 557462 - DNA, 15 bp, Homo sapiens
aaaggctgcccagat

SEQ ID NO: 557463 - DNA, 15 bp, Homo sapiens
caaaggctgcccaga

SEQ ID NO: 557464 - DNA, 15 bp, Homo sapiens
ccaaaggctgcccag

SEQ ID NO: 557465 - DNA, 15 bp, Homo sapiens
gccaaaggctgccca

SEQ ID NO: 557466 - DNA, 15 bp, Homo sapiens
tgccaaaggctgccc

SEQ ID NO: 557467 - DNA, 15 bp, Homo sapiens
ctgccaaaggctgcc

SEQ ID NO: 557468 - DNA, 15 bp, Homo sapiens
cctgccaaaggctgc

SEQ ID NO: 557469 - DNA, 15 bp, Homo sapiens
ggccctgccaaaggc

SEQ ID NO: 557470 - DNA, 15 bp, Homo sapiens
aggccctgccaaagg

SEQ ID NO: 557471 - DNA, 15 bp, Homo sapiens
caggccctgccaaag

SEQ ID NO: 557472 - DNA, 15 bp, Homo sapiens
ccaggccctgccaaa

SEQ ID NO: 557473 - DNA, 15 bp, Homo sapiens
gccaggccctgccaa

SEQ ID NO: 557474 - DNA, 15 bp, Homo sapiens
agccaggccctgcca

SEQ ID NO: 557475 - DNA, 15 bp, Homo sapiens
gagccaggccctgcc

SEQ ID NO: 557476 - DNA, 15 bp, Homo sapiens
agagccaggccctgc

SEQ ID NO: 557477 - DNA, 15 bp, Homo sapiens
cagagccaggccctg

SEQ ID NO: 557478 - DNA, 15 bp, Homo sapiens
ccagagccaggccct

SEQ ID NO: 557479 - DNA, 15 bp, Homo sapiens
gccagagccaggccc

SEQ ID NO: 557480 - DNA, 15 bp, Homo sapiens
ggccagagccaggcc

SEQ ID NO: 557481 - DNA, 15 bp, Homo sapiens
cggccagagccaggc

SEQ ID NO: 557482 - DNA, 15 bp, Homo sapiens
gcggccagagccagg

SEQ ID NO: 557483 - DNA, 15 bp, Homo sapiens
ggcggccagagccag

SEQ ID NO: 557484 - DNA, 15 bp, Homo sapiens
cggcggccagagcca

SEQ ID NO: 557485 - DNA, 15 bp, Homo sapiens
ccggcggccagagcc

SEQ ID NO: 557486 - DNA, 15 bp, Homo sapiens
cccggcggccagagc

SEQ ID NO: 557487 - DNA, 15 bp, Homo sapiens
acccggcggccagag

SEQ ID NO: 557488 - DNA, 15 bp, Homo sapiens
gacccggcggccaga

SEQ ID NO: 557489 - DNA, 15 bp, Homo sapiens
agacccggcggccag

SEQ ID NO: 557490 - DNA, 15 bp, Homo sapiens
cagacccggcggcca

SEQ ID NO: 557491 - DNA, 15 bp, Homo sapiens
ccagacccggcggcc

SEQ ID NO: 557492 - DNA, 15 bp, Homo sapiens
cccagacccggcggc

SEQ ID NO: 557493 - DNA, 15 bp, Homo sapiens
acccagacccggcgg

SEQ ID NO: 557494 - DNA, 15 bp, Homo sapiens
cacccagacccggcg

SEQ ID NO: 557495 - DNA, 15 bp, Homo sapiens
acacccagacccggc

SEQ ID NO: 557496 - DNA, 15 bp, Homo sapiens
gacacccagacccgg

SEQ ID NO: 557497 - DNA, 15 bp, Homo sapiens
ggacacccagacccg

SEQ ID NO: 557498 - DNA, 15 bp, Homo sapiens
gggacacccagaccc

SEQ ID NO: 557499 - DNA, 15 bp, Homo sapiens
ggggacacccagacc

SEQ ID NO: 557500 - DNA, 15 bp, Homo sapiens
aggggacacccagac

SEQ ID NO: 557501 - DNA, 15 bp, Homo sapiens
gaggggacacccaga

SEQ ID NO: 557502 - DNA, 15 bp, Homo sapiens
agaggggacacccag

SEQ ID NO: 557503 - DNA, 15 bp, Homo sapiens
gagaggggacaccca

SEQ ID NO: 557504 - DNA, 15 bp, Homo sapiens
tgagaggggacaccc

SEQ ID NO: 557505 - DNA, 15 bp, Homo sapiens
atgagaggggacacc

SEQ ID NO: 557506 - DNA, 15 bp, Homo sapiens
gatgagaggggacac

SEQ ID NO: 557507 - DNA, 15 bp, Homo sapiens
ggatgagaggggaca

SEQ ID NO: 557508 - DNA, 15 bp, Homo sapiens
aggatgagaggggac

SEQ ID NO: 557509 - DNA, 15 bp, Homo sapiens
caggatgagagggga

SEQ ID NO: 557510 - DNA, 15 bp, Homo sapiens
acaggatgagagggg

SEQ ID NO: 557511 - DNA, 15 bp, Homo sapiens
gacaggatgagaggg

SEQ ID NO: 557512 - DNA, 15 bp, Homo sapiens
agacaggatgagagg

SEQ ID NO: 557513 - DNA, 15 bp, Homo sapiens
cagacaggatgagag

SEQ ID NO: 557514 - DNA, 15 bp, Homo sapiens
acagacaggatgaga

SEQ ID NO: 557515 - DNA, 15 bp, Homo sapiens
gacagacaggatgag

SEQ ID NO: 557516 - DNA, 15 bp, Homo sapiens
ggacagacaggatga

SEQ ID NO: 557517 - DNA, 15 bp, Homo sapiens
gggacagacaggatg

SEQ ID NO: 557518 - DNA, 15 bp, Homo sapiens
ggggacagacaggat

SEQ ID NO: 557519 - DNA, 15 bp, Homo sapiens
aggggacagacagga

SEQ ID NO: 557520 - DNA, 15 bp, Homo sapiens
caggggacagacagg

SEQ ID NO: 557521 - DNA, 15 bp, Homo sapiens
gcaggggacagacag

SEQ ID NO: 557522 - DNA, 15 bp, Homo sapiens
tgcaggggacagaca

SEQ ID NO: 557523 - DNA, 15 bp, Homo sapiens
ctgcaggggacagac

SEQ ID NO: 557524 - DNA, 15 bp, Homo sapiens
tctgcaggggacaga

SEQ ID NO: 557525 - DNA, 15 bp, Homo sapiens
atctgcaggggacag

SEQ ID NO: 557526 - DNA, 15 bp, Homo sapiens
gatctgcaggggaca

SEQ ID NO: 557527 - DNA, 15 bp, Homo sapiens
ggatctgcaggggac

SEQ ID NO: 557528 - DNA, 15 bp, Homo sapiens
tggatctgcagggga

SEQ ID NO: 557529 - DNA, 15 bp, Homo sapiens
atggatctgcagggg

SEQ ID NO: 557530 - DNA, 15 bp, Homo sapiens
catggatctgcaggg

SEQ ID NO: 557531 - DNA, 15 bp, Homo sapiens
tcatggatctgcagg

SEQ ID NO: 557532 - DNA, 15 bp, Homo sapiens
ttcatggatctgcag

SEQ ID NO: 557533 - DNA, 15 bp, Homo sapiens
cttcatggatctgca

SEQ ID NO: 557534 - DNA, 15 bp, Homo sapiens
gcttcatggatctgc

SEQ ID NO: 557535 - DNA, 15 bp, Homo sapiens
agcttcatggatctg

SEQ ID NO: 557536 - DNA, 15 bp, Homo sapiens
tagcttcatggatct

SEQ ID NO: 557537 - DNA, 15 bp, Homo sapiens
ttagcttcatggatc

SEQ ID NO: 557538 - DNA, 15 bp, Homo sapiens
attagcttcatggat

SEQ ID NO: 557539 - DNA, 15 bp, Homo sapiens
cattagcttcatgga

SEQ ID NO: 557540 - DNA, 15 bp, Homo sapiens
acattagcttcatgg

SEQ ID NO: 557541 - DNA, 15 bp, Homo sapiens
tacattagcttcatg

SEQ ID NO: 557542 - DNA, 15 bp, Homo sapiens
gtacattagcttcat

SEQ ID NO: 557543 - DNA, 15 bp, Homo sapiens
tgtacattagcttca

SEQ ID NO: 557544 - DNA, 15 bp, Homo sapiens
ttgtacattagcttc

SEQ ID NO: 557545 - DNA, 15 bp, Homo sapiens
cttgtacattagctt

SEQ ID NO: 557546 - DNA, 15 bp, Homo sapiens
ccttgtacattagct

SEQ ID NO: 557547 - DNA, 15 bp, Homo sapiens
tccttgtacattagc

SEQ ID NO: 557548 - DNA, 15 bp, Homo sapiens
ctccttgtacattag

SEQ ID NO: 557549 - DNA, 15 bp, Homo sapiens
actccttgtacatta

SEQ ID NO: 557550 - DNA, 15 bp, Homo sapiens
gactccttgtacatt

SEQ ID NO: 557551 - DNA, 15 bp, Homo sapiens
tgactccttgtacat

SEQ ID NO: 557552 - DNA, 15 bp, Homo sapiens
ctgactccttgtaca

SEQ ID NO: 557553 - DNA, 15 bp, Homo sapiens
cctgactccttgtac

SEQ ID NO: 557554 - DNA, 15 bp, Homo sapiens
ccctgactccttgta

SEQ ID NO: 557555 - DNA, 15 bp, Homo sapiens
cccctgactccttgt

SEQ ID NO: 557556 - DNA, 15 bp, Homo sapiens
acccctgactccttg

SEQ ID NO: 557557 - DNA, 15 bp, Homo sapiens
cacccctgactcctt

SEQ ID NO: 557558 - DNA, 15 bp, Homo sapiens
acacccctgactcct

SEQ ID NO: 557559 - DNA, 15 bp, Homo sapiens
aacacccctgactcc

SEQ ID NO: 557560 - DNA, 15 bp, Homo sapiens
aaacacccctgactc

SEQ ID NO: 557561 - DNA, 15 bp, Homo sapiens
caaacacccctgact

SEQ ID NO: 557562 - DNA, 15 bp, Homo sapiens
tcaaacacccctgac

SEQ ID NO: 557563 - DNA, 15 bp, Homo sapiens
ttcaaacacccctga

SEQ ID NO: 557564 - DNA, 15 bp, Homo sapiens
cttcaaacacccctg

SEQ ID NO: 557565 - DNA, 15 bp, Homo sapiens
ccttcaaacacccct

SEQ ID NO: 557566 - DNA, 15 bp, Homo sapiens
gccttcaaacacccc

SEQ ID NO: 557567 - DNA, 15 bp, Homo sapiens
tgccttcaaacaccc

SEQ ID NO: 557568 - DNA, 15 bp, Homo sapiens
atgccttcaaacacc

SEQ ID NO: 557569 - DNA, 15 bp, Homo sapiens
gatgccttcaaacac

SEQ ID NO: 557570 - DNA, 15 bp, Homo sapiens
ggatgccttcaaaca

SEQ ID NO: 557571 - DNA, 15 bp, Homo sapiens
gggatgccttcaaac

SEQ ID NO: 557572 - DNA, 15 bp, Homo sapiens
ggggatgccttcaaa

SEQ ID NO: 557573 - DNA, 15 bp, Homo sapiens
tggggatgccttcaa

SEQ ID NO: 557574 - DNA, 15 bp, Homo sapiens
gtggggatgccttca

SEQ ID NO: 557575 - DNA, 15 bp, Homo sapiens
ggtggggatgccttc

SEQ ID NO: 557576 - DNA, 15 bp, Homo sapiens
aggtggggatgcctt

SEQ ID NO: 557577 - DNA, 15 bp, Homo sapiens
taggtggggatgcct

SEQ ID NO: 557578 - DNA, 15 bp, Homo sapiens
ataggtggggatgcc

SEQ ID NO: 557579 - DNA, 15 bp, Homo sapiens
gataggtggggatgc

SEQ ID NO: 557580 - DNA, 15 bp, Homo sapiens
cgataggtggggatg

SEQ ID NO: 557581 - DNA, 15 bp, Homo sapiens
gcgataggtggggat

SEQ ID NO: 557582 - DNA, 15 bp, Homo sapiens
agcgataggtgggga

SEQ ID NO: 557583 - DNA, 15 bp, Homo sapiens
aagcgataggtgggg

SEQ ID NO: 557584 - DNA, 15 bp, Homo sapiens
gaagcgataggtggg

SEQ ID NO: 557585 - DNA, 15 bp, Homo sapiens
cgaagcgataggtgg

SEQ ID NO: 557586 - DNA, 15 bp, Homo sapiens
acgaagcgataggtg

SEQ ID NO: 557587 - DNA, 15 bp, Homo sapiens
cacgaagcgataggt

SEQ ID NO: 557588 - DNA, 15 bp, Homo sapiens
ccacgaagcgatagg

SEQ ID NO: 557589 - DNA, 15 bp, Homo sapiens
gccacgaagcgatag

SEQ ID NO: 557590 - DNA, 15 bp, Homo sapiens
agccacgaagcgata

SEQ ID NO: 557591 - DNA, 15 bp, Homo sapiens
gagccacgaagcgat

SEQ ID NO: 557592 - DNA, 15 bp, Homo sapiens
ggagccacgaagcga

SEQ ID NO: 557593 - DNA, 15 bp, Homo sapiens
gggagccacgaagcg

SEQ ID NO: 557594 - DNA, 15 bp, Homo sapiens
tgggagccacgaagc

SEQ ID NO: 557595 - DNA, 15 bp, Homo sapiens
ttgggagccacgaag

SEQ ID NO: 557596 - DNA, 15 bp, Homo sapiens
tttgggagccacgaa

SEQ ID NO: 557597 - DNA, 15 bp, Homo sapiens
ttttgggagccacga

SEQ ID NO: 557598 - DNA, 15 bp, Homo sapiens
gttttgggagccacg

SEQ ID NO: 557599 - DNA, 15 bp, Homo sapiens
ggttttgggagccac

SEQ ID NO: 557600 - DNA, 15 bp, Homo sapiens
gggttttgggagcca

SEQ ID NO: 557601 - DNA, 15 bp, Homo sapiens
agggttttgggagcc

SEQ ID NO: 557602 - DNA, 15 bp, Homo sapiens
cagggttttgggagc

SEQ ID NO: 557603 - DNA, 15 bp, Homo sapiens
acagggttttgggag

SEQ ID NO: 557604 - DNA, 15 bp, Homo sapiens
aacagggttttggga

SEQ ID NO: 557605 - DNA, 15 bp, Homo sapiens
aaacagggttttggg

SEQ ID NO: 557606 - DNA, 15 bp, Homo sapiens
caaacagggttttgg

SEQ ID NO: 557607 - DNA, 15 bp, Homo sapiens
gcaaacagggttttg

SEQ ID NO: 557608 - DNA, 15 bp, Homo sapiens
ggcaaacagggtttt

SEQ ID NO: 557609 - DNA, 15 bp, Homo sapiens
tggcaaacagggttt

SEQ ID NO: 557610 - DNA, 15 bp, Homo sapiens
ttggcaaacagggtt

SEQ ID NO: 557611 - DNA, 15 bp, Homo sapiens
gttggcaaacagggt

SEQ ID NO: 557612 - DNA, 15 bp, Homo sapiens
cgttggcaaacaggg

SEQ ID NO: 557613 - DNA, 15 bp, Homo sapiens
ccgttggcaaacagg

SEQ ID NO: 557614 - DNA, 15 bp, Homo sapiens
cccgttggcaaacag

SEQ ID NO: 557615 - DNA, 15 bp, Homo sapiens
acccgttggcaaaca

SEQ ID NO: 557616 - DNA, 15 bp, Homo sapiens
gacccgttggcaaac

SEQ ID NO: 557617 - DNA, 15 bp, Homo sapiens
ggacccgttggcaaa

SEQ ID NO: 557618 - DNA, 15 bp, Homo sapiens
tggacccgttggcaa

SEQ ID NO: 557619 - DNA, 15 bp, Homo sapiens
atggacccgttggca

SEQ ID NO: 557620 - DNA, 15 bp, Homo sapiens
gatggacccgttggc

SEQ ID NO: 557621 - DNA, 15 bp, Homo sapiens
agatggacccgttgg

SEQ ID NO: 557622 - DNA, 15 bp, Homo sapiens
tagatggacccgttg

SEQ ID NO: 557623 - DNA, 15 bp, Homo sapiens
gtagatggacccgtt

SEQ ID NO: 557624 - DNA, 15 bp, Homo sapiens
ggtagatggacccgt

SEQ ID NO: 557625 - DNA, 15 bp, Homo sapiens
gggtagatggacccg

SEQ ID NO: 557626 - DNA, 15 bp, Homo sapiens
tgggtagatggaccc

SEQ ID NO: 557627 - DNA, 15 bp, Homo sapiens
gtgggtagatggacc

SEQ ID NO: 557628 - DNA, 15 bp, Homo sapiens
ggtgggtagatggac

SEQ ID NO: 557629 - DNA, 15 bp, Homo sapiens
gggtgggtagatgga

SEQ ID NO: 557630 - DNA, 15 bp, Homo sapiens
tgggtgggtagatgg

SEQ ID NO: 557631 - DNA, 15 bp, Homo sapiens
ttgggtgggtagatg

SEQ ID NO: 557632 - DNA, 15 bp, Homo sapiens
gttgggtgggtagat

SEQ ID NO: 557633 - DNA, 15 bp, Homo sapiens
cgttgggtgggtaga

SEQ ID NO: 557634 - DNA, 15 bp, Homo sapiens
tcgttgggtgggtag

SEQ ID NO: 557635 - DNA, 15 bp, Homo sapiens
ttcgttgggtgggta

SEQ ID NO: 557636 - DNA, 15 bp, Homo sapiens
cttcgttgggtgggt

SEQ ID NO: 557637 - DNA, 15 bp, Homo sapiens
ccttcgttgggtggg

SEQ ID NO: 557638 - DNA, 15 bp, Homo sapiens
gccttcgttgggtgg

SEQ ID NO: 557639 - DNA, 15 bp, Homo sapiens
agccttcgttgggtg

SEQ ID NO: 557640 - DNA, 15 bp, Homo sapiens
aagccttcgttgggt

SEQ ID NO: 557641 - DNA, 15 bp, Homo sapiens
gaagccttcgttggg

SEQ ID NO: 557642 - DNA, 15 bp, Homo sapiens
agaagccttcgttgg

SEQ ID NO: 557643 - DNA, 15 bp, Homo sapiens
cagaagccttcgttg

SEQ ID NO: 557644 - DNA, 15 bp, Homo sapiens
gcagaagccttcgtt

SEQ ID NO: 557645 - DNA, 15 bp, Homo sapiens
ggcagaagccttcgt

SEQ ID NO: 557646 - DNA, 15 bp, Homo sapiens
gggcagaagccttcg

SEQ ID NO: 557647 - DNA, 15 bp, Homo sapiens
cgggcagaagccttc

SEQ ID NO: 557648 - DNA, 15 bp, Homo sapiens
acgggcagaagcctt

SEQ ID NO: 557649 - DNA, 15 bp, Homo sapiens
cacgggcagaagcct

SEQ ID NO: 557650 - DNA, 15 bp, Homo sapiens
gcacgggcagaagcc

SEQ ID NO: 557651 - DNA, 15 bp, Homo sapiens
ggcacgggcagaagc

SEQ ID NO: 557652 - DNA, 15 bp, Homo sapiens
aggcacgggcagaag

SEQ ID NO: 557653 - DNA, 15 bp, Homo sapiens
caggcacgggcagaa

SEQ ID NO: 557654 - DNA, 15 bp, Homo sapiens
ccaggcacgggcaga

SEQ ID NO: 557655 - DNA, 15 bp, Homo sapiens
tccaggcacgggcag

SEQ ID NO: 557656 - DNA, 15 bp, Homo sapiens
ctccaggcacgggca

SEQ ID NO: 557657 - DNA, 15 bp, Homo sapiens
actccaggcacgggc

SEQ ID NO: 557658 - DNA, 15 bp, Homo sapiens
gactccaggcacggg

SEQ ID NO: 557659 - DNA, 15 bp, Homo sapiens
agactccaggcacgg

SEQ ID NO: 557660 - DNA, 15 bp, Homo sapiens
cagactccaggcacg

SEQ ID NO: 557661 - DNA, 15 bp, Homo sapiens
ccagactccaggcac

SEQ ID NO: 557662 - DNA, 15 bp, Homo sapiens
tccagactccaggca

SEQ ID NO: 557663 - DNA, 15 bp, Homo sapiens
ttccagactccaggc

SEQ ID NO: 557664 - DNA, 15 bp, Homo sapiens
attccagactccagg

SEQ ID NO: 557665 - DNA, 15 bp, Homo sapiens
aattccagactccag

SEQ ID NO: 557666 - DNA, 15 bp, Homo sapiens
gaattccagactcca

SEQ ID NO: 557667 - DNA, 15 bp, Homo sapiens
tgaattccagactcc

SEQ ID NO: 557668 - DNA, 15 bp, Homo sapiens
ctgaattccagactc

SEQ ID NO: 557669 - DNA, 15 bp, Homo sapiens
tctgaattccagact

SEQ ID NO: 557670 - DNA, 15 bp, Homo sapiens
ttctgaattccagac

SEQ ID NO: 557671 - DNA, 15 bp, Homo sapiens
gttctgaattccaga

SEQ ID NO: 557672 - DNA, 15 bp, Homo sapiens
cgttctgaattccag

SEQ ID NO: 557673 - DNA, 15 bp, Homo sapiens
acgttctgaattcca

SEQ ID NO: 557674 - DNA, 15 bp, Homo sapiens
gacgttctgaattcc

SEQ ID NO: 557675 - DNA, 15 bp, Homo sapiens
tgacgttctgaattc

SEQ ID NO: 557676 - DNA, 15 bp, Homo sapiens
ctgacgttctgaatt

SEQ ID NO: 557677 - DNA, 15 bp, Homo sapiens
gctgacgttctgaat

SEQ ID NO: 557678 - DNA, 15 bp, Homo sapiens
tgctgacgttctgaa

SEQ ID NO: 557679 - DNA, 15 bp, Homo sapiens
gtgctgacgttctga

SEQ ID NO: 557680 - DNA, 15 bp, Homo sapiens
ggtgctgacgttctg

SEQ ID NO: 557681 - DNA, 15 bp, Homo sapiens
aggtgctgacgttct

SEQ ID NO: 557682 - DNA, 15 bp, Homo sapiens
caggtgctgacgttc

SEQ ID NO: 557683 - DNA, 15 bp, Homo sapiens
gcaggtgctgacgtt

SEQ ID NO: 557684 - DNA, 15 bp, Homo sapiens
tgcaggtgctgacgt

SEQ ID NO: 557685 - DNA, 15 bp, Homo sapiens
ctgcaggtgctgacg

SEQ ID NO: 557686 - DNA, 15 bp, Homo sapiens
cctgcaggtgctgac

SEQ ID NO: 557687 - DNA, 15 bp, Homo sapiens
acctgcaggtgctga

SEQ ID NO: 557688 - DNA, 15 bp, Homo sapiens
aacctgcaggtgctg

SEQ ID NO: 557689 - DNA, 15 bp, Homo sapiens
gaacctgcaggtgct

SEQ ID NO: 557690 - DNA, 15 bp, Homo sapiens
tgaacctgcaggtgc

SEQ ID NO: 557691 - DNA, 15 bp, Homo sapiens
ctgaacctgcaggtg

SEQ ID NO: 557692 - DNA, 15 bp, Homo sapiens
actgaacctgcaggt

SEQ ID NO: 557693 - DNA, 15 bp, Homo sapiens
tactgaacctgcagg

SEQ ID NO: 557694 - DNA, 15 bp, Homo sapiens
gtactgaacctgcag

SEQ ID NO: 557695 - DNA, 15 bp, Homo sapiens
cgtactgaacctgca

SEQ ID NO: 557696 - DNA, 15 bp, Homo sapiens
acgtactgaacctgc

SEQ ID NO: 557697 - DNA, 15 bp, Homo sapiens
cacgtactgaacctg

SEQ ID NO: 557698 - DNA, 15 bp, Homo sapiens
gcacgtactgaacct

SEQ ID NO: 557699 - DNA, 15 bp, Homo sapiens
ggcacgtactgaacc

SEQ ID NO: 557700 - DNA, 15 bp, Homo sapiens
cggcacgtactgaac

SEQ ID NO: 557701 - DNA, 15 bp, Homo sapiens
acggcacgtactgaa

SEQ ID NO: 557702 - DNA, 15 bp, Homo sapiens
gacggcacgtactga

SEQ ID NO: 557703 - DNA, 15 bp, Homo sapiens
ggacggcacgtactg

SEQ ID NO: 557704 - DNA, 15 bp, Homo sapiens
gggacggcacgtact

SEQ ID NO: 557705 - DNA, 15 bp, Homo sapiens
ggggacggcacgtac

SEQ ID NO: 557706 - DNA, 15 bp, Homo sapiens
aggggacggcacgta

SEQ ID NO: 557707 - DNA, 15 bp, Homo sapiens
caggggacggcacgt

SEQ ID NO: 557708 - DNA, 15 bp, Homo sapiens
acaggggacggcacg

SEQ ID NO: 557709 - DNA, 15 bp, Homo sapiens
cacaggggacggcac

SEQ ID NO: 557710 - DNA, 15 bp, Homo sapiens
gcacaggggacggca

SEQ ID NO: 557711 - DNA, 15 bp, Homo sapiens
agcacaggggacggc

SEQ ID NO: 557712 - DNA, 15 bp, Homo sapiens
cagcacaggggacgg

SEQ ID NO: 557713 - DNA, 15 bp, Homo sapiens
ccagcacaggggacg

SEQ ID NO: 557714 - DNA, 15 bp, Homo sapiens
cccagcacaggggac

SEQ ID NO: 557715 - DNA, 15 bp, Homo sapiens
tcccagcacagggga

SEQ ID NO: 557716 - DNA, 15 bp, Homo sapiens
atcccagcacagggg

SEQ ID NO: 557717 - DNA, 15 bp, Homo sapiens
catcccagcacaggg

SEQ ID NO: 557718 - DNA, 15 bp, Homo sapiens
ccatcccagcacagg

SEQ ID NO: 557719 - DNA, 15 bp, Homo sapiens
gccatcccagcacag

SEQ ID NO: 557720 - DNA, 15 bp, Homo sapiens
cgccatcccagcaca

SEQ ID NO: 557721 - DNA, 15 bp, Homo sapiens
ccgccatcccagcac

SEQ ID NO: 557722 - DNA, 15 bp, Homo sapiens
cccgccatcccagca

SEQ ID NO: 557723 - DNA, 15 bp, Homo sapiens
tcccgccatcccagc

SEQ ID NO: 557724 - DNA, 15 bp, Homo sapiens
ctcccgccatcccag

SEQ ID NO: 557725 - DNA, 15 bp, Homo sapiens
cctcccgccatccca

SEQ ID NO: 557726 - DNA, 15 bp, Homo sapiens
ccctcccgccatccc

SEQ ID NO: 557727 - DNA, 15 bp, Homo sapiens
accctcccgccatcc

SEQ ID NO: 557728 - DNA, 15 bp, Homo sapiens
caccctcccgccatc

SEQ ID NO: 557729 - DNA, 15 bp, Homo sapiens
acaccctcccgccat

SEQ ID NO: 557730 - DNA, 15 bp, Homo sapiens
cacaccctcccgcca

SEQ ID NO: 557731 - DNA, 15 bp, Homo sapiens
tcacaccctcccgcc

SEQ ID NO: 557732 - DNA, 15 bp, Homo sapiens
ctcacaccctcccgc

SEQ ID NO: 557733 - DNA, 15 bp, Homo sapiens
cctcacaccctcccg

SEQ ID NO: 557734 - DNA, 15 bp, Homo sapiens
ccctcacaccctccc

SEQ ID NO: 557735 - DNA, 15 bp, Homo sapiens
accctcacaccctcc

SEQ ID NO: 557736 - DNA, 15 bp, Homo sapiens
caccctcacaccctc

SEQ ID NO: 557737 - DNA, 15 bp, Homo sapiens
ccaccctcacaccct

SEQ ID NO: 557738 - DNA, 15 bp, Homo sapiens
cccaccctcacaccc

SEQ ID NO: 557739 - DNA, 15 bp, Homo sapiens
ccccaccctcacacc

SEQ ID NO: 557740 - DNA, 15 bp, Homo sapiens
gccccaccctcacac

SEQ ID NO: 557741 - DNA, 15 bp, Homo sapiens
ggccccaccctcaca

SEQ ID NO: 557742 - DNA, 15 bp, Homo sapiens
tggccccaccctcac

SEQ ID NO: 557743 - DNA, 15 bp, Homo sapiens
ctggccccaccctca

SEQ ID NO: 557744 - DNA, 15 bp, Homo sapiens
gctggccccaccctc

SEQ ID NO: 557745 - DNA, 15 bp, Homo sapiens
agctggccccaccct

SEQ ID NO: 557746 - DNA, 15 bp, Homo sapiens
cagctggccccaccc

SEQ ID NO: 557747 - DNA, 15 bp, Homo sapiens
tcagctggccccacc

SEQ ID NO: 557748 - DNA, 15 bp, Homo sapiens
ctcagctggccccac

SEQ ID NO: 557749 - DNA, 15 bp, Homo sapiens
cctcagctggcccca

SEQ ID NO: 557750 - DNA, 15 bp, Homo sapiens
ccctcagctggcccc

SEQ ID NO: 557751 - DNA, 15 bp, Homo sapiens
accctcagctggccc

SEQ ID NO: 557752 - DNA, 15 bp, Homo sapiens
aaccctcagctggcc

SEQ ID NO: 557753 - DNA, 15 bp, Homo sapiens
aaaccctcagctggc

SEQ ID NO: 557754 - DNA, 15 bp, Homo sapiens
taaaccctcagctgg

SEQ ID NO: 557755 - DNA, 15 bp, Homo sapiens
ataaaccctcagctg

SEQ ID NO: 557756 - DNA, 15 bp, Homo sapiens
gataaaccctcagct

SEQ ID NO: 557757 - DNA, 15 bp, Homo sapiens
agataaaccctcagc

SEQ ID NO: 557758 - DNA, 15 bp, Homo sapiens
cagataaaccctcag

SEQ ID NO: 557759 - DNA, 15 bp, Homo sapiens
gcagataaaccctca

SEQ ID NO: 557760 - DNA, 15 bp, Homo sapiens
ggcagataaaccctc

SEQ ID NO: 557761 - DNA, 15 bp, Homo sapiens
gggcagataaaccct

SEQ ID NO: 557762 - DNA, 15 bp, Homo sapiens
tgggcagataaaccc

SEQ ID NO: 557763 - DNA, 15 bp, Homo sapiens
ctgggcagataaacc

SEQ ID NO: 557764 - DNA, 15 bp, Homo sapiens
actgggcagataaac

SEQ ID NO: 557765 - DNA, 15 bp, Homo sapiens
cactgggcagataaa

SEQ ID NO: 557766 - DNA, 15 bp, Homo sapiens
gcactgggcagataa

SEQ ID NO: 557767 - DNA, 15 bp, Homo sapiens
agcactgggcagata

SEQ ID NO: 557768 - DNA, 15 bp, Homo sapiens
cagcactgggcagat

SEQ ID NO: 557769 - DNA, 15 bp, Homo sapiens
acagcactgggcaga

SEQ ID NO: 557770 - DNA, 15 bp, Homo sapiens
gacagcactgggcag

SEQ ID NO: 557771 - DNA, 15 bp, Homo sapiens
agacagcactgggca

SEQ ID NO: 557772 - DNA, 15 bp, Homo sapiens
cagacagcactgggc

SEQ ID NO: 557773 - DNA, 15 bp, Homo sapiens
gcagacagcactggg

SEQ ID NO: 557774 - DNA, 15 bp, Homo sapiens
agcagacagcactgg

SEQ ID NO: 557775 - DNA, 15 bp, Homo sapiens
aagcagacagcactg

SEQ ID NO: 557776 - DNA, 15 bp, Homo sapiens
taagcagacagcact

SEQ ID NO: 557777 - DNA, 15 bp, Homo sapiens
ttaagcagacagcac

SEQ ID NO: 557778 - DNA, 15 bp, Homo sapiens
attaagcagacagca

SEQ ID NO: 557779 - DNA, 15 bp, Homo sapiens
gattaagcagacagc

SEQ ID NO: 557780 - DNA, 15 bp, Homo sapiens
agattaagcagacag

SEQ ID NO: 557781 - DNA, 15 bp, Homo sapiens
gagattaagcagaca

SEQ ID NO: 557782 - DNA, 15 bp, Homo sapiens
agagattaagcagac

SEQ ID NO: 557783 - DNA, 15 bp, Homo sapiens
cagagattaagcaga

SEQ ID NO: 557784 - DNA, 15 bp, Homo sapiens
ccagagattaagcag

SEQ ID NO: 557785 - DNA, 15 bp, Homo sapiens
gccagagattaagca

SEQ ID NO: 557786 - DNA, 15 bp, Homo sapiens
ggccagagattaagc

SEQ ID NO: 557787 - DNA, 15 bp, Homo sapiens
aggccagagattaag

SEQ ID NO: 557788 - DNA, 15 bp, Homo sapiens
gaggccagagattaa

SEQ ID NO: 557789 - DNA, 15 bp, Homo sapiens
agaggccagagatta

SEQ ID NO: 557790 - DNA, 15 bp, Homo sapiens
cagaggccagagatt

SEQ ID NO: 557791 - DNA, 15 bp, Homo sapiens
acagaggccagagat

SEQ ID NO: 557792 - DNA, 15 bp, Homo sapiens
tacagaggccagaga

SEQ ID NO: 557793 - DNA, 15 bp, Homo sapiens
gtacagaggccagag

SEQ ID NO: 557794 - DNA, 15 bp, Homo sapiens
agtacagaggccaga

SEQ ID NO: 557795 - DNA, 15 bp, Homo sapiens
gagtacagaggccag

SEQ ID NO: 557796 - DNA, 15 bp, Homo sapiens
agagtacagaggcca

SEQ ID NO: 557797 - DNA, 15 bp, Homo sapiens
aagagtacagaggcc

SEQ ID NO: 557798 - DNA, 15 bp, Homo sapiens
caagagtacagaggc

SEQ ID NO: 557799 - DNA, 15 bp, Homo sapiens
tcaagagtacagagg

SEQ ID NO: 557800 - DNA, 15 bp, Homo sapiens
atcaagagtacagag

SEQ ID NO: 557801 - DNA, 15 bp, Homo sapiens
tatcaagagtacaga

SEQ ID NO: 557802 - DNA, 15 bp, Homo sapiens
ttatcaagagtacag

SEQ ID NO: 557803 - DNA, 15 bp, Homo sapiens
attatcaagagtaca

SEQ ID NO: 557804 - DNA, 15 bp, Homo sapiens
gattatcaagagtac

SEQ ID NO: 557805 - DNA, 15 bp, Homo sapiens
ggattatcaagagta

SEQ ID NO: 557806 - DNA, 15 bp, Homo sapiens
gggattatcaagagt

SEQ ID NO: 557807 - DNA, 15 bp, Homo sapiens
tgggattatcaagag

SEQ ID NO: 557808 - DNA, 15 bp, Homo sapiens
atgggattatcaaga

SEQ ID NO: 557809 - DNA, 15 bp, Homo sapiens
aatgggattatcaag

SEQ ID NO: 557810 - DNA, 15 bp, Homo sapiens
taatgggattatcaa

SEQ ID NO: 557811 - DNA, 15 bp, Homo sapiens
ctaatgggattatca

SEQ ID NO: 557812 - DNA, 15 bp, Homo sapiens
cctaatgggattatc

SEQ ID NO: 557813 - DNA, 15 bp, Homo sapiens
gcctaatgggattat

SEQ ID NO: 557814 - DNA, 15 bp, Homo sapiens
cgcctaatgggatta

SEQ ID NO: 557815 - DNA, 15 bp, Homo sapiens
tcgcctaatgggatt

SEQ ID NO: 557816 - DNA, 15 bp, Homo sapiens
ttcgcctaatgggat

SEQ ID NO: 557817 - DNA, 15 bp, Homo sapiens
cttcgcctaatggga

SEQ ID NO: 557818 - DNA, 15 bp, Homo sapiens
tcttcgcctaatggg

SEQ ID NO: 557819 - DNA, 15 bp, Homo sapiens
atcttcgcctaatgg

SEQ ID NO: 557820 - DNA, 15 bp, Homo sapiens
tatcttcgcctaatg

SEQ ID NO: 557821 - DNA, 15 bp, Homo sapiens
ttatcttcgcctaat

SEQ ID NO: 557822 - DNA, 15 bp, Homo sapiens
attatcttcgcctaa

SEQ ID NO: 557823 - DNA, 15 bp, Homo sapiens
cattatcttcgccta

SEQ ID NO: 557824 - DNA, 15 bp, Homo sapiens
tcattatcttcgcct

SEQ ID NO: 557825 - DNA, 15 bp, Homo sapiens
ctcattatcttcgcc

SEQ ID NO: 557826 - DNA, 15 bp, Homo sapiens
cctcattatcttcgc

SEQ ID NO: 557827 - DNA, 15 bp, Homo sapiens
gcctcattatcttcg

SEQ ID NO: 557828 - DNA, 15 bp, Homo sapiens
ggcctcattatcttc

SEQ ID NO: 557829 - DNA, 15 bp, Homo sapiens
cggcctcattatctt

SEQ ID NO: 557830 - DNA, 15 bp, Homo sapiens
gcggcctcattatct

SEQ ID NO: 557831 - DNA, 15 bp, Homo sapiens
tgcggcctcattatc

SEQ ID NO: 557832 - DNA, 15 bp, Homo sapiens
ctgcggcctcattat

SEQ ID NO: 557833 - DNA, 15 bp, Homo sapiens
cctgcggcctcatta

SEQ ID NO: 557834 - DNA, 15 bp, Homo sapiens
tcctgcggcctcatt

SEQ ID NO: 557835 - DNA, 15 bp, Homo sapiens
ttcctgcggcctcat

SEQ ID NO: 557836 - DNA, 15 bp, Homo sapiens
cttcctgcggcctca

SEQ ID NO: 557837 - DNA, 15 bp, Homo sapiens
tcttcctgcggcctc

SEQ ID NO: 557838 - DNA, 15 bp, Homo sapiens
atcttcctgcggcct

SEQ ID NO: 557839 - DNA, 15 bp, Homo sapiens
tatcttcctgcggcc

SEQ ID NO: 557840 - DNA, 15 bp, Homo sapiens
ttatcttcctgcggc

SEQ ID NO: 557841 - DNA, 15 bp, Homo sapiens
attatcttcctgcgg

SEQ ID NO: 557842 - DNA, 15 bp, Homo sapiens
gattatcttcctgcg

SEQ ID NO: 557843 - DNA, 15 bp, Homo sapiens
agattatcttcctgc

SEQ ID NO: 557844 - DNA, 15 bp, Homo sapiens
cagattatcttcctg

SEQ ID NO: 557845 - DNA, 15 bp, Homo sapiens
tcagattatcttcct

SEQ ID NO: 557846 - DNA, 15 bp, Homo sapiens
ttcagattatcttcc

SEQ ID NO: 557847 - DNA, 15 bp, Homo sapiens
tttcagattatcttc

SEQ ID NO: 557848 - DNA, 15 bp, Homo sapiens
ttttcagattatctt

SEQ ID NO: 557849 - DNA, 15 bp, Homo sapiens
cttttcagattatct

SEQ ID NO: 557850 - DNA, 15 bp, Homo sapiens
ccttttcagattatc

SEQ ID NO: 557851 - DNA, 15 bp, Homo sapiens
tccttttcagattat

SEQ ID NO: 557852 - DNA, 15 bp, Homo sapiens
ttccttttcagatta

SEQ ID NO: 557853 - DNA, 15 bp, Homo sapiens
cttccttttcagatt

SEQ ID NO: 557854 - DNA, 15 bp, Homo sapiens
tcttccttttcagat

SEQ ID NO: 557855 - DNA, 15 bp, Homo sapiens
ttcttccttttcaga

SEQ ID NO: 557856 - DNA, 15 bp, Homo sapiens
tttcttccttttcag

SEQ ID NO: 557857 - DNA, 15 bp, Homo sapiens
atttcttccttttca

SEQ ID NO: 557858 - DNA, 15 bp, Homo sapiens
catttcttccttttc

SEQ ID NO: 557859 - DNA, 15 bp, Homo sapiens
gcatttcttcctttt

SEQ ID NO: 557860 - DNA, 15 bp, Homo sapiens
ggcatttcttccttt

SEQ ID NO: 557861 - DNA, 15 bp, Homo sapiens
tggcatttcttcctt

SEQ ID NO: 557862 - DNA, 15 bp, Homo sapiens
ctggcatttcttcct

SEQ ID NO: 557863 - DNA, 15 bp, Homo sapiens
cctggcatttcttcc

SEQ ID NO: 557864 - DNA, 15 bp, Homo sapiens
acctggcatttcttc

SEQ ID NO: 557865 - DNA, 15 bp, Homo sapiens
gacctggcatttctt

SEQ ID NO: 557866 - DNA, 15 bp, Homo sapiens
agacctggcatttct

SEQ ID NO: 557867 - DNA, 15 bp, Homo sapiens
tagacctggcatttc

SEQ ID NO: 557868 - DNA, 15 bp, Homo sapiens
atagacctggcattt

SEQ ID NO: 557869 - DNA, 15 bp, Homo sapiens
aatagacctggcatt

SEQ ID NO: 557870 - DNA, 15 bp, Homo sapiens
taatagacctggcat

SEQ ID NO: 557871 - DNA, 15 bp, Homo sapiens
ctaatagacctggca

SEQ ID NO: 557872 - DNA, 15 bp, Homo sapiens
actaatagacctggc

SEQ ID NO: 557873 - DNA, 15 bp, Homo sapiens
aactaatagacctgg

SEQ ID NO: 557874 - DNA, 15 bp, Homo sapiens
caactaatagacctg

SEQ ID NO: 557875 - DNA, 15 bp, Homo sapiens
gcaactaatagacct

SEQ ID NO: 557876 - DNA, 15 bp, Homo sapiens
agcaactaatagacc

SEQ ID NO: 557877 - DNA, 15 bp, Homo sapiens
cagcaactaatagac

SEQ ID NO: 557878 - DNA, 15 bp, Homo sapiens
acagcaactaataga

SEQ ID NO: 557879 - DNA, 15 bp, Homo sapiens
gacagcaactaatag

SEQ ID NO: 557880 - DNA, 15 bp, Homo sapiens
tgacagcaactaata

SEQ ID NO: 557881 - DNA, 15 bp, Homo sapiens
gtgacagcaactaat

SEQ ID NO: 557882 - DNA, 15 bp, Homo sapiens
tgtgacagcaactaa

SEQ ID NO: 557883 - DNA, 15 bp, Homo sapiens
ttgtgacagcaacta

SEQ ID NO: 557884 - DNA, 15 bp, Homo sapiens
attgtgacagcaact

SEQ ID NO: 557885 - DNA, 15 bp, Homo sapiens
tattgtgacagcaac

SEQ ID NO: 557886 - DNA, 15 bp, Homo sapiens
atattgtgacagcaa

SEQ ID NO: 557887 - DNA, 15 bp, Homo sapiens
tatattgtgacagca

SEQ ID NO: 557888 - DNA, 15 bp, Homo sapiens
atatattgtgacagc

SEQ ID NO: 557889 - DNA, 15 bp, Homo sapiens
aatatattgtgacag

SEQ ID NO: 557890 - DNA, 15 bp, Homo sapiens
caatatattgtgaca

SEQ ID NO: 557891 - DNA, 15 bp, Homo sapiens
gcaatatattgtgac

SEQ ID NO: 557892 - DNA, 15 bp, Homo sapiens
ggcaatatattgtga

SEQ ID NO: 557893 - DNA, 15 bp, Homo sapiens
tggcaatatattgtg

SEQ ID NO: 557894 - DNA, 15 bp, Homo sapiens
atggcaatatattgt

SEQ ID NO: 557895 - DNA, 15 bp, Homo sapiens
catggcaatatattg

SEQ ID NO: 557896 - DNA, 15 bp, Homo sapiens
tcatggcaatatatt

SEQ ID NO: 557897 - DNA, 15 bp, Homo sapiens
ttcatggcaatatat

SEQ ID NO: 557898 - DNA, 15 bp, Homo sapiens
gttcatggcaatata

SEQ ID NO: 557899 - DNA, 15 bp, Homo sapiens
agttcatggcaatat

SEQ ID NO: 557900 - DNA, 15 bp, Homo sapiens
aagttcatggcaata

SEQ ID NO: 557901 - DNA, 15 bp, Homo sapiens
gaagttcatggcaat

SEQ ID NO: 557902 - DNA, 15 bp, Homo sapiens
tgaagttcatggcaa

SEQ ID NO: 557903 - DNA, 15 bp, Homo sapiens
ctgaagttcatggca

SEQ ID NO: 557904 - DNA, 15 bp, Homo sapiens
cctgaagttcatggc

SEQ ID NO: 557905 - DNA, 15 bp, Homo sapiens
ccctgaagttcatgg

SEQ ID NO: 557906 - DNA, 15 bp, Homo sapiens
gccctgaagttcatg

SEQ ID NO: 557907 - DNA, 15 bp, Homo sapiens
agccctgaagttcat

SEQ ID NO: 557908 - DNA, 15 bp, Homo sapiens
aagccctgaagttca

SEQ ID NO: 557909 - DNA, 15 bp, Homo sapiens
taagccctgaagttc

SEQ ID NO: 557910 - DNA, 15 bp, Homo sapiens
ctaagccctgaagtt

SEQ ID NO: 557911 - DNA, 15 bp, Homo sapiens
tctaagccctgaagt

SEQ ID NO: 557912 - DNA, 15 bp, Homo sapiens
ttctaagccctgaag

SEQ ID NO: 557913 - DNA, 15 bp, Homo sapiens
gttctaagccctgaa

SEQ ID NO: 557914 - DNA, 15 bp, Homo sapiens
tgttctaagccctga

SEQ ID NO: 557915 - DNA, 15 bp, Homo sapiens
ttgttctaagccctg

SEQ ID NO: 557916 - DNA, 15 bp, Homo sapiens
gttgttctaagccct

SEQ ID NO: 557917 - DNA, 15 bp, Homo sapiens
tgttgttctaagccc

SEQ ID NO: 557918 - DNA, 15 bp, Homo sapiens
gtgttgttctaagcc

SEQ ID NO: 557919 - DNA, 15 bp, Homo sapiens
tgtgttgttctaagc

SEQ ID NO: 557920 - DNA, 15 bp, Homo sapiens
gtgtgttgttctaag

SEQ ID NO: 557921 - DNA, 15 bp, Homo sapiens
tgtgtgttgttctaa

SEQ ID NO: 557922 - DNA, 15 bp, Homo sapiens
gtgtgtgttgttcta

SEQ ID NO: 557923 - DNA, 15 bp, Homo sapiens
agtgtgtgttgttct

SEQ ID NO: 557924 - DNA, 15 bp, Homo sapiens
cagtgtgtgttgttc

SEQ ID NO: 557925 - DNA, 15 bp, Homo sapiens
ccagtgtgtgttgtt

SEQ ID NO: 557926 - DNA, 15 bp, Homo sapiens
accagtgtgtgttgt

SEQ ID NO: 557927 - DNA, 15 bp, Homo sapiens
aaccagtgtgtgttg

SEQ ID NO: 557928 - DNA, 15 bp, Homo sapiens
taaccagtgtgtgtt

SEQ ID NO: 557929 - DNA, 15 bp, Homo sapiens
ataaccagtgtgtgt

SEQ ID NO: 557930 - DNA, 15 bp, Homo sapiens
gataaccagtgtgtg

SEQ ID NO: 557931 - DNA, 15 bp, Homo sapiens
agataaccagtgtgt

SEQ ID NO: 557932 - DNA, 15 bp, Homo sapiens
aagataaccagtgtg

SEQ ID NO: 557933 - DNA, 15 bp, Homo sapiens
caagataaccagtgt

SEQ ID NO: 557934 - DNA, 15 bp, Homo sapiens
gcaagataaccagtg

SEQ ID NO: 557935 - DNA, 15 bp, Homo sapiens
tgcaagataaccagt

SEQ ID NO: 557936 - DNA, 15 bp, Homo sapiens
ctgcaagataaccag

SEQ ID NO: 557937 - DNA, 15 bp, Homo sapiens
actgcaagataacca

SEQ ID NO: 557938 - DNA, 15 bp, Homo sapiens
aactgcaagataacc

SEQ ID NO: 557939 - DNA, 15 bp, Homo sapiens
gaactgcaagataac

SEQ ID NO: 557940 - DNA, 15 bp, Homo sapiens
agaactgcaagataa

SEQ ID NO: 557941 - DNA, 15 bp, Homo sapiens
cagaactgcaagata

SEQ ID NO: 557942 - DNA, 15 bp, Homo sapiens
acagaactgcaagat

SEQ ID NO: 557943 - DNA, 15 bp, Homo sapiens
tacagaactgcaaga

SEQ ID NO: 557944 - DNA, 15 bp, Homo sapiens
ctacagaactgcaag

SEQ ID NO: 557945 - DNA, 15 bp, Homo sapiens
actacagaactgcaa

SEQ ID NO: 557946 - DNA, 15 bp, Homo sapiens
gactacagaactgca

SEQ ID NO: 557947 - DNA, 15 bp, Homo sapiens
tgactacagaactgc

SEQ ID NO: 557948 - DNA, 15 bp, Homo sapiens
ctgactacagaactg

SEQ ID NO: 557949 - DNA, 15 bp, Homo sapiens
tctgactacagaact

SEQ ID NO: 557950 - DNA, 15 bp, Homo sapiens
ttctgactacagaac

SEQ ID NO: 557951 - DNA, 15 bp, Homo sapiens
cttctgactacagaa

SEQ ID NO: 557952 - DNA, 15 bp, Homo sapiens
acttctgactacaga

SEQ ID NO: 557953 - DNA, 15 bp, Homo sapiens
gacttctgactacag

SEQ ID NO: 557954 - DNA, 15 bp, Homo sapiens
agacttctgactaca

SEQ ID NO: 557955 - DNA, 15 bp, Homo sapiens
cagacttctgactac

SEQ ID NO: 557956 - DNA, 15 bp, Homo sapiens
gcagacttctgacta

SEQ ID NO: 557957 - DNA, 15 bp, Homo sapiens
cgcagacttctgact

SEQ ID NO: 557958 - DNA, 15 bp, Homo sapiens
acgcagacttctgac

SEQ ID NO: 557959 - DNA, 15 bp, Homo sapiens
cacgcagacttctga

SEQ ID NO: 557960 - DNA, 15 bp, Homo sapiens
ccacgcagacttctg

SEQ ID NO: 557961 - DNA, 15 bp, Homo sapiens
cccacgcagacttct

SEQ ID NO: 557962 - DNA, 15 bp, Homo sapiens
acccacgcagacttc

SEQ ID NO: 557963 - DNA, 15 bp, Homo sapiens
gacccacgcagactt

SEQ ID NO: 557964 - DNA, 15 bp, Homo sapiens
agacccacgcagact

SEQ ID NO: 557965 - DNA, 15 bp, Homo sapiens
gagacccacgcagac

SEQ ID NO: 557966 - DNA, 15 bp, Homo sapiens
tgagacccacgcaga

SEQ ID NO: 557967 - DNA, 15 bp, Homo sapiens
gtgagacccacgcag

SEQ ID NO: 557968 - DNA, 15 bp, Homo sapiens
ggtgagacccacgca

SEQ ID NO: 557969 - DNA, 15 bp, Homo sapiens
cggtgagacccacgc

SEQ ID NO: 557970 - DNA, 15 bp, Homo sapiens
gcggtgagacccacg

SEQ ID NO: 557971 - DNA, 15 bp, Homo sapiens
cgcggtgagacccac

SEQ ID NO: 557972 - DNA, 15 bp, Homo sapiens
gcgcggtgagaccca

SEQ ID NO: 557973 - DNA, 15 bp, Homo sapiens
agcgcggtgagaccc

SEQ ID NO: 557974 - DNA, 15 bp, Homo sapiens
gagcgcggtgagacc

SEQ ID NO: 557975 - DNA, 15 bp, Homo sapiens
tgagcgcggtgagac

SEQ ID NO: 557976 - DNA, 15 bp, Homo sapiens
ctgagcgcggtgaga

SEQ ID NO: 557977 - DNA, 15 bp, Homo sapiens
tctgagcgcggtgag

SEQ ID NO: 557978 - DNA, 15 bp, Homo sapiens
ttctgagcgcggtga

SEQ ID NO: 557979 - DNA, 15 bp, Homo sapiens
gttctgagcgcggtg

SEQ ID NO: 557980 - DNA, 15 bp, Homo sapiens
tgttctgagcgcggt

SEQ ID NO: 557981 - DNA, 15 bp, Homo sapiens
ttgttctgagcgcgg

SEQ ID NO: 557982 - DNA, 15 bp, Homo sapiens
cttgttctgagcgcg

SEQ ID NO: 557983 - DNA, 15 bp, Homo sapiens
ccttgttctgagcgc

SEQ ID NO: 557984 - DNA, 15 bp, Homo sapiens
gccttgttctgagcg

SEQ ID NO: 557985 - DNA, 15 bp, Homo sapiens
cgccttgttctgagc

SEQ ID NO: 557986 - DNA, 15 bp, Homo sapiens
ccgccttgttctgag

SEQ ID NO: 557987 - DNA, 15 bp, Homo sapiens
gccgccttgttctga

SEQ ID NO: 557988 - DNA, 15 bp, Homo sapiens
agccgccttgttctg

SEQ ID NO: 557989 - DNA, 15 bp, Homo sapiens
cagccgccttgttct

SEQ ID NO: 557990 - DNA, 15 bp, Homo sapiens
acagccgccttgttc

SEQ ID NO: 557991 - DNA, 15 bp, Homo sapiens
cacagccgccttgtt

SEQ ID NO: 557992 - DNA, 15 bp, Homo sapiens
acacagccgccttgt

SEQ ID NO: 557993 - DNA, 15 bp, Homo sapiens
aacacagccgccttg

SEQ ID NO: 557994 - DNA, 15 bp, Homo sapiens
gaacacagccgcctt

SEQ ID NO: 557995 - DNA, 15 bp, Homo sapiens
ggaacacagccgcct

SEQ ID NO: 557996 - DNA, 15 bp, Homo sapiens
aggaacacagccgcc

SEQ ID NO: 557997 - DNA, 15 bp, Homo sapiens
aaggaacacagccgc

SEQ ID NO: 557998 - DNA, 15 bp, Homo sapiens
gaaggaacacagccg

SEQ ID NO: 557999 - DNA, 15 bp, Homo sapiens
agaaggaacacagcc

SEQ ID NO: 558000 - DNA, 15 bp, Homo sapiens
cagaaggaacacagc

SEQ ID NO: 558001 - DNA, 15 bp, Homo sapiens
ccagaaggaacacag

SEQ ID NO: 558002 - DNA, 15 bp, Homo sapiens
tccagaaggaacaca

SEQ ID NO: 558003 - DNA, 15 bp, Homo sapiens
ctccagaaggaacac

SEQ ID NO: 558004 - DNA, 15 bp, Homo sapiens
cctccagaaggaaca

SEQ ID NO: 558005 - DNA, 15 bp, Homo sapiens
gcctccagaaggaac

SEQ ID NO: 558006 - DNA, 15 bp, Homo sapiens
agcctccagaaggaa

SEQ ID NO: 558007 - DNA, 15 bp, Homo sapiens
gagcctccagaagga

SEQ ID NO: 558008 - DNA, 15 bp, Homo sapiens
agagcctccagaagg

SEQ ID NO: 558009 - DNA, 15 bp, Homo sapiens
tagagcctccagaag

SEQ ID NO: 558010 - DNA, 15 bp, Homo sapiens
ctagagcctccagaa

SEQ ID NO: 558011 - DNA, 15 bp, Homo sapiens
cctagagcctccaga

SEQ ID NO: 558012 - DNA, 15 bp, Homo sapiens
tcctagagcctccag

SEQ ID NO: 558013 - DNA, 15 bp, Homo sapiens
ctcctagagcctcca

SEQ ID NO: 558014 - DNA, 15 bp, Homo sapiens
tctcctagagcctcc

SEQ ID NO: 558015 - DNA, 15 bp, Homo sapiens
ttctcctagagcctc

SEQ ID NO: 558016 - DNA, 15 bp, Homo sapiens
cttctcctagagcct

SEQ ID NO: 558017 - DNA, 15 bp, Homo sapiens
gcttctcctagagcc

SEQ ID NO: 558018 - DNA, 15 bp, Homo sapiens
agcttctcctagagc

SEQ ID NO: 558019 - DNA, 15 bp, Homo sapiens
cagcttctcctagag

SEQ ID NO: 558020 - DNA, 15 bp, Homo sapiens
gcagcttctcctaga

SEQ ID NO: 558021 - DNA, 15 bp, Homo sapiens
cgcagcttctcctag

SEQ ID NO: 558022 - DNA, 15 bp, Homo sapiens
acgcagcttctccta

SEQ ID NO: 558023 - DNA, 15 bp, Homo sapiens
gacgcagcttctcct

SEQ ID NO: 558024 - DNA, 15 bp, Homo sapiens
agacgcagcttctcc

SEQ ID NO: 558025 - DNA, 15 bp, Homo sapiens
cagacgcagcttctc

SEQ ID NO: 558026 - DNA, 15 bp, Homo sapiens
gcagacgcagcttct

SEQ ID NO: 558027 - DNA, 15 bp, Homo sapiens
ggcagacgcagcttc

SEQ ID NO: 558028 - DNA, 15 bp, Homo sapiens
aggcagacgcagctt

SEQ ID NO: 558029 - DNA, 15 bp, Homo sapiens
aaggcagacgcagct

SEQ ID NO: 558030 - DNA, 15 bp, Homo sapiens
aaaggcagacgcagc

SEQ ID NO: 558031 - DNA, 15 bp, Homo sapiens
aaaaggcagacgcag

SEQ ID NO: 558032 - DNA, 15 bp, Homo sapiens
gaaaaggcagacgca

SEQ ID NO: 558033 - DNA, 15 bp, Homo sapiens
agaaaaggcagacgc

SEQ ID NO: 558034 - DNA, 15 bp, Homo sapiens
cagaaaaggcagacg

SEQ ID NO: 558035 - DNA, 15 bp, Homo sapiens
ccagaaaaggcagac

SEQ ID NO: 558036 - DNA, 15 bp, Homo sapiens
gccagaaaaggcaga

SEQ ID NO: 558037 - DNA, 15 bp, Homo sapiens
agccagaaaaggcag

SEQ ID NO: 558038 - DNA, 15 bp, Homo sapiens
aagccagaaaaggca

SEQ ID NO: 558039 - DNA, 15 bp, Homo sapiens
gaagccagaaaaggc

SEQ ID NO: 558040 - DNA, 15 bp, Homo sapiens
ggaagccagaaaagg

SEQ ID NO: 558041 - DNA, 15 bp, Homo sapiens
tggaagccagaaaag

SEQ ID NO: 558042 - DNA, 15 bp, Homo sapiens
ctggaagccagaaaa

SEQ ID NO: 558043 - DNA, 15 bp, Homo sapiens
tctggaagccagaaa

SEQ ID NO: 558044 - DNA, 15 bp, Homo sapiens
ctctggaagccagaa

SEQ ID NO: 558045 - DNA, 15 bp, Homo sapiens
cctctggaagccaga

SEQ ID NO: 558046 - DNA, 15 bp, Homo sapiens
gcctctggaagccag

SEQ ID NO: 558047 - DNA, 15 bp, Homo sapiens
ggcctctggaagcca

SEQ ID NO: 558048 - DNA, 15 bp, Homo sapiens
gggcctctggaagcc

SEQ ID NO: 558049 - DNA, 15 bp, Homo sapiens
ggggcctctggaagc

SEQ ID NO: 558050 - DNA, 15 bp, Homo sapiens
aggggcctctggaag

SEQ ID NO: 558051 - DNA, 15 bp, Homo sapiens
gaggggcctctggaa

SEQ ID NO: 558052 - DNA, 15 bp, Homo sapiens
agaggggcctctgga

SEQ ID NO: 558053 - DNA, 15 bp, Homo sapiens
cagaggggcctctgg

SEQ ID NO: 558054 - DNA, 15 bp, Homo sapiens
acagaggggcctctg

SEQ ID NO: 558055 - DNA, 15 bp, Homo sapiens
cacagaggggcctct

SEQ ID NO: 558056 - DNA, 15 bp, Homo sapiens
acacagaggggcctc

SEQ ID NO: 558057 - DNA, 15 bp, Homo sapiens
aacacagaggggcct

SEQ ID NO: 558058 - DNA, 15 bp, Homo sapiens
aaacacagaggggcc

SEQ ID NO: 558059 - DNA, 15 bp, Homo sapiens
gaaacacagaggggc

SEQ ID NO: 558060 - DNA, 15 bp, Homo sapiens
agaaacacagagggg

SEQ ID NO: 558061 - DNA, 15 bp, Homo sapiens
aagaaacacagaggg

SEQ ID NO: 558062 - DNA, 15 bp, Homo sapiens
caagaaacacagagg

SEQ ID NO: 558063 - DNA, 15 bp, Homo sapiens
ccaagaaacacagag

SEQ ID NO: 558064 - DNA, 15 bp, Homo sapiens
gccaagaaacacaga

SEQ ID NO: 558065 - DNA, 15 bp, Homo sapiens
agccaagaaacacag

SEQ ID NO: 558066 - DNA, 15 bp, Homo sapiens
gagccaagaaacaca

SEQ ID NO: 558067 - DNA, 15 bp, Homo sapiens
ggagccaagaaacac

SEQ ID NO: 558068 - DNA, 15 bp, Homo sapiens
gggagccaagaaaca

SEQ ID NO: 558069 - DNA, 15 bp, Homo sapiens
cgggagccaagaaac

SEQ ID NO: 558070 - DNA, 15 bp, Homo sapiens
ccgggagccaagaaa

SEQ ID NO: 558071 - DNA, 15 bp, Homo sapiens
cccgggagccaagaa

SEQ ID NO: 558072 - DNA, 15 bp, Homo sapiens
gcccgggagccaaga

SEQ ID NO: 558073 - DNA, 15 bp, Homo sapiens
ggcccgggagccaag

SEQ ID NO: 558074 - DNA, 15 bp, Homo sapiens
gggcccgggagccaa

SEQ ID NO: 558075 - DNA, 15 bp, Homo sapiens
agggcccgggagcca

SEQ ID NO: 558076 - DNA, 15 bp, Homo sapiens
aagggcccgggagcc

SEQ ID NO: 558077 - DNA, 15 bp, Homo sapiens
gaagggcccgggagc

SEQ ID NO: 558078 - DNA, 15 bp, Homo sapiens
ggaagggcccgggag

SEQ ID NO: 558079 - DNA, 15 bp, Homo sapiens
aggaagggcccggga

SEQ ID NO: 558080 - DNA, 15 bp, Homo sapiens
gaggaagggcccggg

SEQ ID NO: 558081 - DNA, 15 bp, Homo sapiens
ggaggaagggcccgg

SEQ ID NO: 558082 - DNA, 15 bp, Homo sapiens
tggaggaagggcccg

SEQ ID NO: 558083 - DNA, 15 bp, Homo sapiens
gtggaggaagggccc

SEQ ID NO: 558084 - DNA, 15 bp, Homo sapiens
ggtggaggaagggcc

SEQ ID NO: 558085 - DNA, 15 bp, Homo sapiens
aggtggaggaagggc

SEQ ID NO: 558086 - DNA, 15 bp, Homo sapiens
aaggtggaggaaggg

SEQ ID NO: 558087 - DNA, 15 bp, Homo sapiens
aaaggtggaggaagg

SEQ ID NO: 558088 - DNA, 15 bp, Homo sapiens
caaaggtggaggaag

SEQ ID NO: 558089 - DNA, 15 bp, Homo sapiens
tcaaaggtggaggaa

SEQ ID NO: 558090 - DNA, 15 bp, Homo sapiens
ctcaaaggtggagga

SEQ ID NO: 558091 - DNA, 15 bp, Homo sapiens
cctcaaaggtggagg

SEQ ID NO: 558092 - DNA, 15 bp, Homo sapiens
gcctcaaaggtggag

SEQ ID NO: 558093 - DNA, 15 bp, Homo sapiens
ggcctcaaaggtgga

SEQ ID NO: 558094 - DNA, 15 bp, Homo sapiens
tggcctcaaaggtgg

SEQ ID NO: 558095 - DNA, 15 bp, Homo sapiens
ctggcctcaaaggtg

SEQ ID NO: 558096 - DNA, 15 bp, Homo sapiens
gctggcctcaaaggt

SEQ ID NO: 558097 - DNA, 15 bp, Homo sapiens
tgctggcctcaaagg

SEQ ID NO: 558098 - DNA, 15 bp, Homo sapiens
ttgctggcctcaaag

SEQ ID NO: 558099 - DNA, 15 bp, Homo sapiens
gttgctggcctcaaa

SEQ ID NO: 558100 - DNA, 15 bp, Homo sapiens
tgttgctggcctcaa

SEQ ID NO: 558101 - DNA, 15 bp, Homo sapiens
atgttgctggcctca

SEQ ID NO: 558102 - DNA, 15 bp, Homo sapiens
catgttgctggcctc

SEQ ID NO: 558103 - DNA, 15 bp, Homo sapiens
ccatgttgctggcct

SEQ ID NO: 558104 - DNA, 15 bp, Homo sapiens
gccatgttgctggcc

SEQ ID NO: 558105 - DNA, 15 bp, Homo sapiens
tgccatgttgctggc

SEQ ID NO: 558106 - DNA, 15 bp, Homo sapiens
atgccatgttgctgg

SEQ ID NO: 558107 - DNA, 15 bp, Homo sapiens
gatgccatgttgctg

SEQ ID NO: 558108 - DNA, 15 bp, Homo sapiens
ggatgccatgttgct

SEQ ID NO: 558109 - DNA, 15 bp, Homo sapiens
aggatgccatgttgc

SEQ ID NO: 558110 - DNA, 15 bp, Homo sapiens
aaggatgccatgttg

SEQ ID NO: 558111 - DNA, 15 bp, Homo sapiens
gaaggatgccatgtt

SEQ ID NO: 558112 - DNA, 15 bp, Homo sapiens
agaaggatgccatgt

SEQ ID NO: 558113 - DNA, 15 bp, Homo sapiens
cagaaggatgccatg

SEQ ID NO: 558114 - DNA, 15 bp, Homo sapiens
tcagaaggatgccat

SEQ ID NO: 558115 - DNA, 15 bp, Homo sapiens
atcagaaggatgcca

SEQ ID NO: 558116 - DNA, 15 bp, Homo sapiens
gatcagaaggatgcc

SEQ ID NO: 558117 - DNA, 15 bp, Homo sapiens
ggatcagaaggatgc

SEQ ID NO: 558118 - DNA, 15 bp, Homo sapiens
tggatcagaaggatg

SEQ ID NO: 558119 - DNA, 15 bp, Homo sapiens
gtggatcagaaggat

SEQ ID NO: 558120 - DNA, 15 bp, Homo sapiens
agtggatcagaagga

SEQ ID NO: 558121 - DNA, 15 bp, Homo sapiens
gagtggatcagaagg

SEQ ID NO: 558122 - DNA, 15 bp, Homo sapiens
agagtggatcagaag

SEQ ID NO: 558123 - DNA, 15 bp, Homo sapiens
cagagtggatcagaa

SEQ ID NO: 558124 - DNA, 15 bp, Homo sapiens
acagagtggatcaga

SEQ ID NO: 558125 - DNA, 15 bp, Homo sapiens
gacagagtggatcag

SEQ ID NO: 558126 - DNA, 15 bp, Homo sapiens
ggacagagtggatca

SEQ ID NO: 558127 - DNA, 15 bp, Homo sapiens
aggacagagtggatc

SEQ ID NO: 558128 - DNA, 15 bp, Homo sapiens
gaggacagagtggat

SEQ ID NO: 558129 - DNA, 15 bp, Homo sapiens
tgaggacagagtgga

SEQ ID NO: 558130 - DNA, 15 bp, Homo sapiens
atgaggacagagtgg

SEQ ID NO: 558131 - DNA, 15 bp, Homo sapiens
tatgaggacagagtg

SEQ ID NO: 558132 - DNA, 15 bp, Homo sapiens
atatgaggacagagt

SEQ ID NO: 558133 - DNA, 15 bp, Homo sapiens
gatatgaggacagag

SEQ ID NO: 558134 - DNA, 15 bp, Homo sapiens
agatatgaggacaga

SEQ ID NO: 558135 - DNA, 15 bp, Homo sapiens
gagatatgaggacag

SEQ ID NO: 558136 - DNA, 15 bp, Homo sapiens
agagatatgaggaca

SEQ ID NO: 558137 - DNA, 15 bp, Homo sapiens
aagagatatgaggac

SEQ ID NO: 558138 - DNA, 15 bp, Homo sapiens
gaagagatatgagga

SEQ ID NO: 558139 - DNA, 15 bp, Homo sapiens
ggaagagatatgagg

SEQ ID NO: 558140 - DNA, 15 bp, Homo sapiens
aggaagagatatgag

SEQ ID NO: 558141 - DNA, 15 bp, Homo sapiens
gaggaagagatatga

SEQ ID NO: 558142 - DNA, 15 bp, Homo sapiens
agaggaagagatatg

SEQ ID NO: 558143 - DNA, 15 bp, Homo sapiens
gagaggaagagatat

SEQ ID NO: 558144 - DNA, 15 bp, Homo sapiens
ggagaggaagagata

SEQ ID NO: 558145 - DNA, 15 bp, Homo sapiens
aggagaggaagagat

SEQ ID NO: 558146 - DNA, 15 bp, Homo sapiens
gaggagaggaagaga

SEQ ID NO: 558147 - DNA, 15 bp, Homo sapiens
ggaggagaggaagag

SEQ ID NO: 558148 - DNA, 15 bp, Homo sapiens
gggaggagaggaaga

SEQ ID NO: 558149 - DNA, 15 bp, Homo sapiens
agggaggagaggaag

SEQ ID NO: 558150 - DNA, 15 bp, Homo sapiens
gagggaggagaggaa

SEQ ID NO: 558151 - DNA, 15 bp, Homo sapiens
agagggaggagagga

SEQ ID NO: 558152 - DNA, 15 bp, Homo sapiens
aagagggaggagagg

SEQ ID NO: 558153 - DNA, 15 bp, Homo sapiens
gaagagggaggagag

SEQ ID NO: 558154 - DNA, 15 bp, Homo sapiens
agaagagggaggaga

SEQ ID NO: 558155 - DNA, 15 bp, Homo sapiens
cagaagagggaggag

SEQ ID NO: 558156 - DNA, 15 bp, Homo sapiens
gcagaagagggagga

SEQ ID NO: 558157 - DNA, 15 bp, Homo sapiens
ggcagaagagggagg

SEQ ID NO: 558158 - DNA, 15 bp, Homo sapiens
gggcagaagagggag

SEQ ID NO: 558159 - DNA, 15 bp, Homo sapiens
ggggcagaagaggga

SEQ ID NO: 558160 - DNA, 15 bp, Homo sapiens
gggggcagaagaggg

SEQ ID NO: 558161 - DNA, 15 bp, Homo sapiens
agggggcagaagagg

SEQ ID NO: 558162 - DNA, 15 bp, Homo sapiens
gagggggcagaagag

SEQ ID NO: 558163 - DNA, 15 bp, Homo sapiens
agagggggcagaaga

SEQ ID NO: 558164 - DNA, 15 bp, Homo sapiens
aagagggggcagaag

SEQ ID NO: 558165 - DNA, 15 bp, Homo sapiens
gaagagggggcagaa

SEQ ID NO: 558166 - DNA, 15 bp, Homo sapiens
ggaagagggggcaga

SEQ ID NO: 558167 - DNA, 15 bp, Homo sapiens
tggaagagggggcag

SEQ ID NO: 558168 - DNA, 15 bp, Homo sapiens
ctggaagagggggca

SEQ ID NO: 558169 - DNA, 15 bp, Homo sapiens
actggaagagggggc

SEQ ID NO: 558170 - DNA, 15 bp, Homo sapiens
aactggaagaggggg

SEQ ID NO: 558171 - DNA, 15 bp, Homo sapiens
gaactggaagagggg

SEQ ID NO: 558172 - DNA, 15 bp, Homo sapiens
agaactggaagaggg

SEQ ID NO: 558173 - DNA, 15 bp, Homo sapiens
tagaactggaagagg

SEQ ID NO: 558174 - DNA, 15 bp, Homo sapiens
ttagaactggaagag

SEQ ID NO: 558175 - DNA, 15 bp, Homo sapiens
cttagaactggaaga

SEQ ID NO: 558176 - DNA, 15 bp, Homo sapiens
ccttagaactggaag

SEQ ID NO: 558177 - DNA, 15 bp, Homo sapiens
tccttagaactggaa

SEQ ID NO: 558178 - DNA, 15 bp, Homo sapiens
gtccttagaactgga

SEQ ID NO: 558179 - DNA, 15 bp, Homo sapiens
ggtccttagaactgg

SEQ ID NO: 558180 - DNA, 15 bp, Homo sapiens
gggtccttagaactg

SEQ ID NO: 558181 - DNA, 15 bp, Homo sapiens
agggtccttagaact

SEQ ID NO: 558182 - DNA, 15 bp, Homo sapiens
aagggtccttagaac

SEQ ID NO: 558183 - DNA, 15 bp, Homo sapiens
taagggtccttagaa

SEQ ID NO: 558184 - DNA, 15 bp, Homo sapiens
ttaagggtccttaga

SEQ ID NO: 558185 - DNA, 15 bp, Homo sapiens
cttaagggtccttag

SEQ ID NO: 558186 - DNA, 15 bp, Homo sapiens
tcttaagggtcctta

SEQ ID NO: 558187 - DNA, 15 bp, Homo sapiens
gtcttaagggtcctt

SEQ ID NO: 558188 - DNA, 15 bp, Homo sapiens
ggtcttaagggtcct

SEQ ID NO: 558189 - DNA, 15 bp, Homo sapiens
tggtcttaagggtcc

SEQ ID NO: 558190 - DNA, 15 bp, Homo sapiens
gtggtcttaagggtc

SEQ ID NO: 558191 - DNA, 15 bp, Homo sapiens
tgtggtcttaagggt

SEQ ID NO: 558192 - DNA, 15 bp, Homo sapiens
atgtggtcttaaggg

SEQ ID NO: 558193 - DNA, 15 bp, Homo sapiens
gatgtggtcttaagg

SEQ ID NO: 558194 - DNA, 15 bp, Homo sapiens
cgatgtggtcttaag

SEQ ID NO: 558195 - DNA, 15 bp, Homo sapiens
acgatgtggtcttaa

SEQ ID NO: 558196 - DNA, 15 bp, Homo sapiens
cacgatgtggtctta

SEQ ID NO: 558197 - DNA, 15 bp, Homo sapiens
gcacgatgtggtctt

SEQ ID NO: 558198 - DNA, 15 bp, Homo sapiens
agcacgatgtggtct

SEQ ID NO: 558199 - DNA, 15 bp, Homo sapiens
gagcacgatgtggtc

SEQ ID NO: 558200 - DNA, 15 bp, Homo sapiens
agagcacgatgtggt

SEQ ID NO: 558201 - DNA, 15 bp, Homo sapiens
gagagcacgatgtgg

SEQ ID NO: 558202 - DNA, 15 bp, Homo sapiens
ggagagcacgatgtg

SEQ ID NO: 558203 - DNA, 15 bp, Homo sapiens
aggagagcacgatgt

SEQ ID NO: 558204 - DNA, 15 bp, Homo sapiens
caggagagcacgatg

SEQ ID NO: 558205 - DNA, 15 bp, Homo sapiens
ccaggagagcacgat

SEQ ID NO: 558206 - DNA, 15 bp, Homo sapiens
tccaggagagcacga

SEQ ID NO: 558207 - DNA, 15 bp, Homo sapiens
atccaggagagcacg

SEQ ID NO: 558208 - DNA, 15 bp, Homo sapiens
tatccaggagagcac

SEQ ID NO: 558209 - DNA, 15 bp, Homo sapiens
gtatccaggagagca

SEQ ID NO: 558210 - DNA, 15 bp, Homo sapiens
ggtatccaggagagc

SEQ ID NO: 558211 - DNA, 15 bp, Homo sapiens
gggtatccaggagag

SEQ ID NO: 558212 - DNA, 15 bp, Homo sapiens
ggggtatccaggaga

SEQ ID NO: 558213 - DNA, 15 bp, Homo sapiens
tggggtatccaggag

SEQ ID NO: 558214 - DNA, 15 bp, Homo sapiens
ctggggtatccagga

SEQ ID NO: 558215 - DNA, 15 bp, Homo sapiens
cctggggtatccagg

SEQ ID NO: 558216 - DNA, 15 bp, Homo sapiens
tcctggggtatccag

SEQ ID NO: 558217 - DNA, 15 bp, Homo sapiens
gtcctggggtatcca

SEQ ID NO: 558218 - DNA, 15 bp, Homo sapiens
tgtcctggggtatcc

SEQ ID NO: 558219 - DNA, 15 bp, Homo sapiens
ttgtcctggggtatc

SEQ ID NO: 558220 - DNA, 15 bp, Homo sapiens
attgtcctggggtat

SEQ ID NO: 558221 - DNA, 15 bp, Homo sapiens
gattgtcctggggta

SEQ ID NO: 558222 - DNA, 15 bp, Homo sapiens
agattgtcctggggt

SEQ ID NO: 558223 - DNA, 15 bp, Homo sapiens
gagattgtcctgggg

SEQ ID NO: 558224 - DNA, 15 bp, Homo sapiens
ggagattgtcctggg

SEQ ID NO: 558225 - DNA, 15 bp, Homo sapiens
gggagattgtcctgg

SEQ ID NO: 558226 - DNA, 15 bp, Homo sapiens
ggggagattgtcctg

SEQ ID NO: 558227 - DNA, 15 bp, Homo sapiens
tggggagattgtcct

SEQ ID NO: 558228 - DNA, 15 bp, Homo sapiens
atggggagattgtcc

SEQ ID NO: 558229 - DNA, 15 bp, Homo sapiens
gatggggagattgtc

SEQ ID NO: 558230 - DNA, 15 bp, Homo sapiens
agatggggagattgt

SEQ ID NO: 558231 - DNA, 15 bp, Homo sapiens
aagatggggagattg

SEQ ID NO: 558232 - DNA, 15 bp, Homo sapiens
caagatggggagatt

SEQ ID NO: 558233 - DNA, 15 bp, Homo sapiens
acaagatggggagat

SEQ ID NO: 558234 - DNA, 15 bp, Homo sapiens
aacaagatggggaga

SEQ ID NO: 558235 - DNA, 15 bp, Homo sapiens
aaacaagatggggag

SEQ ID NO: 558236 - DNA, 15 bp, Homo sapiens
taaacaagatgggga

SEQ ID NO: 558237 - DNA, 15 bp, Homo sapiens
ataaacaagatgggg

SEQ ID NO: 558238 - DNA, 15 bp, Homo sapiens
aataaacaagatggg

SEQ ID NO: 558239 - DNA, 15 bp, Homo sapiens
taataaacaagatgg

SEQ ID NO: 558240 - DNA, 15 bp, Homo sapiens
ataataaacaagatg

SEQ ID NO: 558241 - DNA, 15 bp, Homo sapiens
aataataaacaagat

SEQ ID NO: 558242 - DNA, 15 bp, Homo sapiens
taataataaacaaga

SEQ ID NO: 558243 - DNA, 15 bp, Homo sapiens
ataataataaacaag

SEQ ID NO: 558244 - DNA, 15 bp, Homo sapiens
aataataataaacaa

SEQ ID NO: 558245 - DNA, 15 bp, Homo sapiens
aaataataataaaca

SEQ ID NO: 558246 - DNA, 15 bp, Homo sapiens
aaaataataataaac

SEQ ID NO: 558247 - DNA, 15 bp, Homo sapiens
aaaaataataataaa

SEQ ID NO: 558248 - DNA, 15 bp, Homo sapiens
aaaaaataataataa

SEQ ID NO: 558249 - DNA, 15 bp, Homo sapiens
aaaaaaataataata

SEQ ID NO: 558250 - DNA, 15 bp, Homo sapiens
aaaaaaaataataat

SEQ ID NO: 558251 - DNA, 15 bp, Homo sapiens
caaaaaaaataataa

SEQ ID NO: 558252 - DNA, 15 bp, Homo sapiens
tcaaaaaaaataata

SEQ ID NO: 558253 - DNA, 15 bp, Homo sapiens
ctcaaaaaaaataat

SEQ ID NO: 558254 - DNA, 15 bp, Homo sapiens
tctcaaaaaaaataa

SEQ ID NO: 558255 - DNA, 15 bp, Homo sapiens
gtctcaaaaaaaata

SEQ ID NO: 558256 - DNA, 15 bp, Homo sapiens
tgtctcaaaaaaaat

SEQ ID NO: 558257 - DNA, 15 bp, Homo sapiens
gtctgtctcaaaaaa

SEQ ID NO: 558258 - DNA, 15 bp, Homo sapiens
agtctgtctcaaaaa

SEQ ID NO: 558259 - DNA, 15 bp, Homo sapiens
gagtctgtctcaaaa

SEQ ID NO: 558260 - DNA, 15 bp, Homo sapiens
agagtctgtctcaaa

SEQ ID NO: 558261 - DNA, 15 bp, Homo sapiens
gagagtctgtctcaa

SEQ ID NO: 558262 - DNA, 15 bp, Homo sapiens
tgagagtctgtctca

SEQ ID NO: 558263 - DNA, 15 bp, Homo sapiens
gtgagagtctgtctc

SEQ ID NO: 558264 - DNA, 15 bp, Homo sapiens
agtgagagtctgtct

SEQ ID NO: 558265 - DNA, 15 bp, Homo sapiens
gagtgagagtctgtc

SEQ ID NO: 558266 - DNA, 15 bp, Homo sapiens
agagtgagagtctgt

SEQ ID NO: 558267 - DNA, 15 bp, Homo sapiens
cagagtgagagtctg

SEQ ID NO: 558268 - DNA, 15 bp, Homo sapiens
acagagtgagagtct

SEQ ID NO: 558269 - DNA, 15 bp, Homo sapiens
aacagagtgagagtc

SEQ ID NO: 558270 - DNA, 15 bp, Homo sapiens
taacagagtgagagt

SEQ ID NO: 558271 - DNA, 15 bp, Homo sapiens
gtaacagagtgagag

SEQ ID NO: 558272 - DNA, 15 bp, Homo sapiens
ggtaacagagtgaga

SEQ ID NO: 558273 - DNA, 15 bp, Homo sapiens
gggtaacagagtgag

SEQ ID NO: 558274 - DNA, 15 bp, Homo sapiens
tgggtaacagagtga

SEQ ID NO: 558275 - DNA, 15 bp, Homo sapiens
ctgggtaacagagtg

SEQ ID NO: 558276 - DNA, 15 bp, Homo sapiens
cctgggtaacagagt

SEQ ID NO: 558277 - DNA, 15 bp, Homo sapiens
acctgggtaacagag

SEQ ID NO: 558278 - DNA, 15 bp, Homo sapiens
aacctgggtaacaga

SEQ ID NO: 558279 - DNA, 15 bp, Homo sapiens
caacctgggtaacag

SEQ ID NO: 558280 - DNA, 15 bp, Homo sapiens
ccaacctgggtaaca

SEQ ID NO: 558281 - DNA, 15 bp, Homo sapiens
tccaacctgggtaac

SEQ ID NO: 558282 - DNA, 15 bp, Homo sapiens
ctccaacctgggtaa

SEQ ID NO: 558283 - DNA, 15 bp, Homo sapiens
actccaacctgggta

SEQ ID NO: 558284 - DNA, 15 bp, Homo sapiens
ctgcactccaacctg

SEQ ID NO: 558285 - DNA, 15 bp, Homo sapiens
actgcactccaacct

SEQ ID NO: 558286 - DNA, 15 bp, Homo sapiens
cactgcactccaacc

SEQ ID NO: 558287 - DNA, 15 bp, Homo sapiens
ccactgcactccaac

SEQ ID NO: 558288 - DNA, 15 bp, Homo sapiens
gccactgcactccaa

SEQ ID NO: 558289 - DNA, 15 bp, Homo sapiens
ggcgccactgcactc

SEQ ID NO: 558290 - DNA, 15 bp, Homo sapiens
tggcgccactgcact

SEQ ID NO: 558291 - DNA, 15 bp, Homo sapiens
atggcgccactgcac

SEQ ID NO: 558292 - DNA, 15 bp, Homo sapiens
aatggcgccactgca

SEQ ID NO: 558293 - DNA, 15 bp, Homo sapiens
aaatggcgccactgc

SEQ ID NO: 558294 - DNA, 15 bp, Homo sapiens
gaaatggcgccactg

SEQ ID NO: 558295 - DNA, 15 bp, Homo sapiens
tgaaatggcgccact

SEQ ID NO: 558296 - DNA, 15 bp, Homo sapiens
ctgaaatggcgccac

SEQ ID NO: 558297 - DNA, 15 bp, Homo sapiens
gctgaaatggcgcca

SEQ ID NO: 558298 - DNA, 15 bp, Homo sapiens
agctgaaatggcgcc

SEQ ID NO: 558299 - DNA, 15 bp, Homo sapiens
gagctgaaatggcgc

SEQ ID NO: 558300 - DNA, 15 bp, Homo sapiens
tgagctgaaatggcg

SEQ ID NO: 558301 - DNA, 15 bp, Homo sapiens
gtgagctgaaatggc

SEQ ID NO: 558302 - DNA, 15 bp, Homo sapiens
agtgagctgaaatgg

SEQ ID NO: 558303 - DNA, 15 bp, Homo sapiens
cagtgagctgaaatg

SEQ ID NO: 558304 - DNA, 15 bp, Homo sapiens
gcagtgagctgaaat

SEQ ID NO: 558305 - DNA, 15 bp, Homo sapiens
tgcagtgagctgaaa

SEQ ID NO: 558306 - DNA, 15 bp, Homo sapiens
ttgcagtgagctgaa

SEQ ID NO: 558307 - DNA, 15 bp, Homo sapiens
tgggaggcggaggtt

SEQ ID NO: 558308 - DNA, 15 bp, Homo sapiens
ctgggaggcggaggt

SEQ ID NO: 558309 - DNA, 15 bp, Homo sapiens
cctgggaggcggagg

SEQ ID NO: 558310 - DNA, 15 bp, Homo sapiens
acctgggaggcggag

SEQ ID NO: 558311 - DNA, 15 bp, Homo sapiens
aacctgggaggcgga

SEQ ID NO: 558312 - DNA, 15 bp, Homo sapiens
gaacctgggaggcgg

SEQ ID NO: 558313 - DNA, 15 bp, Homo sapiens
tgaacctgggaggcg

SEQ ID NO: 558314 - DNA, 15 bp, Homo sapiens
acttgaacctgggag

SEQ ID NO: 558315 - DNA, 15 bp, Homo sapiens
cacttgaacctggga

SEQ ID NO: 558316 - DNA, 15 bp, Homo sapiens
tcacttgaacctggg

SEQ ID NO: 558317 - DNA, 15 bp, Homo sapiens
gatcacttgaacctg

SEQ ID NO: 558318 - DNA, 15 bp, Homo sapiens
ggatcacttgaacct

SEQ ID NO: 558319 - DNA, 15 bp, Homo sapiens
aggatcacttgaacc

SEQ ID NO: 558320 - DNA, 15 bp, Homo sapiens
gaggatcacttgaac

SEQ ID NO: 558321 - DNA, 15 bp, Homo sapiens
ggaggatcacttgaa

SEQ ID NO: 558322 - DNA, 15 bp, Homo sapiens
actactcgggaggct

SEQ ID NO: 558323 - DNA, 15 bp, Homo sapiens
aactactcgggaggc

SEQ ID NO: 558324 - DNA, 15 bp, Homo sapiens
caactactcgggagg

SEQ ID NO: 558325 - DNA, 15 bp, Homo sapiens
ccaactactcgggag

SEQ ID NO: 558326 - DNA, 15 bp, Homo sapiens
cccaactactcggga

SEQ ID NO: 558327 - DNA, 15 bp, Homo sapiens
tcccaactactcggg

SEQ ID NO: 558328 - DNA, 15 bp, Homo sapiens
gtcccaactactcgg

SEQ ID NO: 558329 - DNA, 15 bp, Homo sapiens
ggtcccaactactcg

SEQ ID NO: 558330 - DNA, 15 bp, Homo sapiens
tggtcccaactactc

SEQ ID NO: 558331 - DNA, 15 bp, Homo sapiens
gtggtcccaactact

SEQ ID NO: 558332 - DNA, 15 bp, Homo sapiens
tgtggtcccaactac

SEQ ID NO: 558333 - DNA, 15 bp, Homo sapiens
ctgtggtcccaacta

SEQ ID NO: 558334 - DNA, 15 bp, Homo sapiens
cctgtggtcccaact

SEQ ID NO: 558335 - DNA, 15 bp, Homo sapiens
gcctgtggtcccaac

SEQ ID NO: 558336 - DNA, 15 bp, Homo sapiens
cgcctgtggtcccaa

SEQ ID NO: 558337 - DNA, 15 bp, Homo sapiens
acgcctgtggtccca

SEQ ID NO: 558338 - DNA, 15 bp, Homo sapiens
cacgcctgtggtccc

SEQ ID NO: 558339 - DNA, 15 bp, Homo sapiens
gcacgcctgtggtcc

SEQ ID NO: 558340 - DNA, 15 bp, Homo sapiens
tgcacgcctgtggtc

SEQ ID NO: 558341 - DNA, 15 bp, Homo sapiens
gtgcacgcctgtggt

SEQ ID NO: 558342 - DNA, 15 bp, Homo sapiens
ggtgcacgcctgtgg

SEQ ID NO: 558343 - DNA, 15 bp, Homo sapiens
tggtgcacgcctgtg

SEQ ID NO: 558344 - DNA, 15 bp, Homo sapiens
ggtggtgcacgcctg

SEQ ID NO: 558345 - DNA, 15 bp, Homo sapiens
tggtggtgcacgcct

SEQ ID NO: 558346 - DNA, 15 bp, Homo sapiens
gtggtggtgcacgcc

SEQ ID NO: 558347 - DNA, 15 bp, Homo sapiens
tgtggtggtgcacgc

SEQ ID NO: 558348 - DNA, 15 bp, Homo sapiens
gtgtggtggtgcacg

SEQ ID NO: 558349 - DNA, 15 bp, Homo sapiens
ggtgtggtggtgcac

SEQ ID NO: 558350 - DNA, 15 bp, Homo sapiens
aggtgtggtggtgca

SEQ ID NO: 558351 - DNA, 15 bp, Homo sapiens
caggtgtggtggtgc

SEQ ID NO: 558352 - DNA, 15 bp, Homo sapiens
ccaggtgtggtggtg

SEQ ID NO: 558353 - DNA, 15 bp, Homo sapiens
gccaggtgtggtggt

SEQ ID NO: 558354 - DNA, 15 bp, Homo sapiens
agccaggtgtggtgg

SEQ ID NO: 558355 - DNA, 15 bp, Homo sapiens
caaaaaattagccag

SEQ ID NO: 558356 - DNA, 15 bp, Homo sapiens
acaaaaaattagcca

SEQ ID NO: 558357 - DNA, 15 bp, Homo sapiens
tacaaaaaattagcc

SEQ ID NO: 558358 - DNA, 15 bp, Homo sapiens
atacaaaaaattagc

SEQ ID NO: 558359 - DNA, 15 bp, Homo sapiens
aatacaaaaaattag

SEQ ID NO: 558360 - DNA, 15 bp, Homo sapiens
aaatacaaaaaatta

SEQ ID NO: 558361 - DNA, 15 bp, Homo sapiens
aaaatacaaaaaatt

SEQ ID NO: 558362 - DNA, 15 bp, Homo sapiens
caaaaatacaaaaaa

SEQ ID NO: 558363 - DNA, 15 bp, Homo sapiens
ccaaaaatacaaaaa

SEQ ID NO: 558364 - DNA, 15 bp, Homo sapiens
accaaaaatacaaaa

SEQ ID NO: 558365 - DNA, 15 bp, Homo sapiens
taccaaaaatacaaa

SEQ ID NO: 558366 - DNA, 15 bp, Homo sapiens
ctaccaaaaatacaa

SEQ ID NO: 558367 - DNA, 15 bp, Homo sapiens
tctaccaaaaataca

SEQ ID NO: 558368 - DNA, 15 bp, Homo sapiens
ctctaccaaaaatac

SEQ ID NO: 558369 - DNA, 15 bp, Homo sapiens
tctctaccaaaaata

SEQ ID NO: 558370 - DNA, 15 bp, Homo sapiens
atctctaccaaaaat

SEQ ID NO: 558371 - DNA, 15 bp, Homo sapiens
catctctaccaaaaa

SEQ ID NO: 558372 - DNA, 15 bp, Homo sapiens
ccatctctaccaaaa

SEQ ID NO: 558373 - DNA, 15 bp, Homo sapiens
cccatctctaccaaa

SEQ ID NO: 558374 - DNA, 15 bp, Homo sapiens
ccccatctctaccaa

SEQ ID NO: 558375 - DNA, 15 bp, Homo sapiens
cccccatctctacca

SEQ ID NO: 558376 - DNA, 15 bp, Homo sapiens
acccccatctctacc

SEQ ID NO: 558377 - DNA, 15 bp, Homo sapiens
aacccccatctctac

SEQ ID NO: 558378 - DNA, 15 bp, Homo sapiens
aaacccccatctcta

SEQ ID NO: 558379 - DNA, 15 bp, Homo sapiens
gaaacccccatctct

SEQ ID NO: 558380 - DNA, 15 bp, Homo sapiens
tgaaacccccatctc

SEQ ID NO: 558381 - DNA, 15 bp, Homo sapiens
gtgaaacccccatct

SEQ ID NO: 558382 - DNA, 15 bp, Homo sapiens
ggtgaaacccccatc

SEQ ID NO: 558383 - DNA, 15 bp, Homo sapiens
tggtgaaacccccat

SEQ ID NO: 558384 - DNA, 15 bp, Homo sapiens
atggtgaaaccccca

SEQ ID NO: 558385 - DNA, 15 bp, Homo sapiens
catggtgaaaccccc

SEQ ID NO: 558386 - DNA, 15 bp, Homo sapiens
agatcacttgaggtc

SEQ ID NO: 558387 - DNA, 15 bp, Homo sapiens
cagatcacttgaggt

SEQ ID NO: 558388 - DNA, 15 bp, Homo sapiens
gcagatcacttgagg

SEQ ID NO: 558389 - DNA, 15 bp, Homo sapiens
aggccgaggcaggca

SEQ ID NO: 558390 - DNA, 15 bp, Homo sapiens
ctataatcccagcac

SEQ ID NO: 558391 - DNA, 15 bp, Homo sapiens
cctataatcccagca

SEQ ID NO: 558392 - DNA, 15 bp, Homo sapiens
acctataatcccagc

SEQ ID NO: 558393 - DNA, 15 bp, Homo sapiens
cacctataatcccag

SEQ ID NO: 558394 - DNA, 15 bp, Homo sapiens
acacctataatccca

SEQ ID NO: 558395 - DNA, 15 bp, Homo sapiens
cacacctataatccc

SEQ ID NO: 558396 - DNA, 15 bp, Homo sapiens
tcacacctataatcc

SEQ ID NO: 558397 - DNA, 15 bp, Homo sapiens
ctcacacctataatc

SEQ ID NO: 558398 - DNA, 15 bp, Homo sapiens
gctcacacctataat

SEQ ID NO: 558399 - DNA, 15 bp, Homo sapiens
ggctcacacctataa

SEQ ID NO: 558400 - DNA, 15 bp, Homo sapiens
tggctcacacctata

SEQ ID NO: 558401 - DNA, 15 bp, Homo sapiens
gtggctcacacctat

SEQ ID NO: 558402 - DNA, 15 bp, Homo sapiens
ggtggctcacaccta

SEQ ID NO: 558403 - DNA, 15 bp, Homo sapiens
taggctgggcgcggt

SEQ ID NO: 558404 - DNA, 15 bp, Homo sapiens
ataggctgggcgcgg

SEQ ID NO: 558405 - DNA, 15 bp, Homo sapiens
aataggctgggcgcg

SEQ ID NO: 558406 - DNA, 15 bp, Homo sapiens
aaataggctgggcgc

SEQ ID NO: 558407 - DNA, 15 bp, Homo sapiens
aaaataggctgggcg

SEQ ID NO: 558408 - DNA, 15 bp, Homo sapiens
aaaaataggctgggc

SEQ ID NO: 558409 - DNA, 15 bp, Homo sapiens
taaaaataggctggg

SEQ ID NO: 558410 - DNA, 15 bp, Homo sapiens
ataaaaataggctgg

SEQ ID NO: 558411 - DNA, 15 bp, Homo sapiens
tataaaaataggctg

SEQ ID NO: 558412 - DNA, 15 bp, Homo sapiens
atataaaaataggct

SEQ ID NO: 558413 - DNA, 15 bp, Homo sapiens
aatataaaaataggc

SEQ ID NO: 558414 - DNA, 15 bp, Homo sapiens
aaatataaaaatagg

SEQ ID NO: 558415 - DNA, 15 bp, Homo sapiens
aaaatataaaaatag

SEQ ID NO: 558416 - DNA, 15 bp, Homo sapiens
caaaatataaaaata

SEQ ID NO: 558417 - DNA, 15 bp, Homo sapiens
tcaaaatataaaaat

SEQ ID NO: 558418 - DNA, 15 bp, Homo sapiens
ctcaaaatataaaaa

SEQ ID NO: 558419 - DNA, 15 bp, Homo sapiens
tctcaaaatataaaa

SEQ ID NO: 558420 - DNA, 15 bp, Homo sapiens
gtctcaaaatataaa

SEQ ID NO: 558421 - DNA, 15 bp, Homo sapiens
tgtctcaaaatataa

SEQ ID NO: 558422 - DNA, 15 bp, Homo sapiens
ttgtctcaaaatata

SEQ ID NO: 558423 - DNA, 15 bp, Homo sapiens
cttgtctcaaaatat

SEQ ID NO: 558424 - DNA, 15 bp, Homo sapiens
ccttgtctcaaaata

SEQ ID NO: 558425 - DNA, 15 bp, Homo sapiens
accttgtctcaaaat

SEQ ID NO: 558426 - DNA, 15 bp, Homo sapiens
taccttgtctcaaaa

SEQ ID NO: 558427 - DNA, 15 bp, Homo sapiens
ataccttgtctcaaa

SEQ ID NO: 558428 - DNA, 15 bp, Homo sapiens
gataccttgtctcaa

SEQ ID NO: 558429 - DNA, 15 bp, Homo sapiens
tgataccttgtctca

SEQ ID NO: 558430 - DNA, 15 bp, Homo sapiens
gtgataccttgtctc

SEQ ID NO: 558431 - DNA, 15 bp, Homo sapiens
agtgataccttgtct

SEQ ID NO: 558432 - DNA, 15 bp, Homo sapiens
gagtgataccttgtc

SEQ ID NO: 558433 - DNA, 15 bp, Homo sapiens
agagtgataccttgt

SEQ ID NO: 558434 - DNA, 15 bp, Homo sapiens
cagagtgataccttg

SEQ ID NO: 558435 - DNA, 15 bp, Homo sapiens
acagagtgatacctt

SEQ ID NO: 558436 - DNA, 15 bp, Homo sapiens
tacagagtgatacct

SEQ ID NO: 558437 - DNA, 15 bp, Homo sapiens
ctacagagtgatacc

SEQ ID NO: 558438 - DNA, 15 bp, Homo sapiens
gctacagagtgatac

SEQ ID NO: 558439 - DNA, 15 bp, Homo sapiens
ggctacagagtgata

SEQ ID NO: 558440 - DNA, 15 bp, Homo sapiens
aggctacagagtgat

SEQ ID NO: 558441 - DNA, 15 bp, Homo sapiens
caggctacagagtga

SEQ ID NO: 558442 - DNA, 15 bp, Homo sapiens
ccaggctacagagtg

SEQ ID NO: 558443 - DNA, 15 bp, Homo sapiens
tccaggctacagagt

SEQ ID NO: 558444 - DNA, 15 bp, Homo sapiens
ctccaggctacagag

SEQ ID NO: 558445 - DNA, 15 bp, Homo sapiens
gctccaggctacaga

SEQ ID NO: 558446 - DNA, 15 bp, Homo sapiens
agctccaggctacag

SEQ ID NO: 558447 - DNA, 15 bp, Homo sapiens
cagctccaggctaca

SEQ ID NO: 558448 - DNA, 15 bp, Homo sapiens
ccagctccaggctac

SEQ ID NO: 558449 - DNA, 15 bp, Homo sapiens
tccagctccaggcta

SEQ ID NO: 558450 - DNA, 15 bp, Homo sapiens
ctccagctccaggct

SEQ ID NO: 558451 - DNA, 15 bp, Homo sapiens
actccagctccaggc

SEQ ID NO: 558452 - DNA, 15 bp, Homo sapiens
tactccagctccagg

SEQ ID NO: 558453 - DNA, 15 bp, Homo sapiens
atactccagctccag

SEQ ID NO: 558454 - DNA, 15 bp, Homo sapiens
tatactccagctcca

SEQ ID NO: 558455 - DNA, 15 bp, Homo sapiens
ctatactccagctcc

SEQ ID NO: 558456 - DNA, 15 bp, Homo sapiens
actatactccagctc

SEQ ID NO: 558457 - DNA, 15 bp, Homo sapiens
cactatactccagct

SEQ ID NO: 558458 - DNA, 15 bp, Homo sapiens
ccactatactccagc

SEQ ID NO: 558459 - DNA, 15 bp, Homo sapiens
accactatactccag

SEQ ID NO: 558460 - DNA, 15 bp, Homo sapiens
caccactatactcca

SEQ ID NO: 558461 - DNA, 15 bp, Homo sapiens
gcaccactatactcc

SEQ ID NO: 558462 - DNA, 15 bp, Homo sapiens
cgcaccactatactc

SEQ ID NO: 558463 - DNA, 15 bp, Homo sapiens
tcgcaccactatact

SEQ ID NO: 558464 - DNA, 15 bp, Homo sapiens
atcgcaccactatac

SEQ ID NO: 558465 - DNA, 15 bp, Homo sapiens
aatcgcaccactata

SEQ ID NO: 558466 - DNA, 15 bp, Homo sapiens
taatcgcaccactat

SEQ ID NO: 558467 - DNA, 15 bp, Homo sapiens
ataatcgcaccacta

SEQ ID NO: 558468 - DNA, 15 bp, Homo sapiens
tataatcgcaccact

SEQ ID NO: 558469 - DNA, 15 bp, Homo sapiens
ctataatcgcaccac

SEQ ID NO: 558470 - DNA, 15 bp, Homo sapiens
gctataatcgcacca

SEQ ID NO: 558471 - DNA, 15 bp, Homo sapiens
agctataatcgcacc

SEQ ID NO: 558472 - DNA, 15 bp, Homo sapiens
gagctataatcgcac

SEQ ID NO: 558473 - DNA, 15 bp, Homo sapiens
tgagctataatcgca

SEQ ID NO: 558474 - DNA, 15 bp, Homo sapiens
gtgagctataatcgc

SEQ ID NO: 558475 - DNA, 15 bp, Homo sapiens
agtgagctataatcg

SEQ ID NO: 558476 - DNA, 15 bp, Homo sapiens
cagtgagctataatc

SEQ ID NO: 558477 - DNA, 15 bp, Homo sapiens
gcagtgagctataat

SEQ ID NO: 558478 - DNA, 15 bp, Homo sapiens
tgcagtgagctataa

SEQ ID NO: 558479 - DNA, 15 bp, Homo sapiens
ctgcagtgagctata

SEQ ID NO: 558480 - DNA, 15 bp, Homo sapiens
gctgcagtgagctat

SEQ ID NO: 558481 - DNA, 15 bp, Homo sapiens
ggctgcagtgagcta

SEQ ID NO: 558482 - DNA, 15 bp, Homo sapiens
tgaggtcgaggctgc

SEQ ID NO: 558483 - DNA, 15 bp, Homo sapiens
atgaggtcgaggctg

SEQ ID NO: 558484 - DNA, 15 bp, Homo sapiens
catgaggtcgaggct

SEQ ID NO: 558485 - DNA, 15 bp, Homo sapiens
ccatgaggtcgaggc

SEQ ID NO: 558486 - DNA, 15 bp, Homo sapiens
cccatgaggtcgagg

SEQ ID NO: 558487 - DNA, 15 bp, Homo sapiens
gcccatgaggtcgag

SEQ ID NO: 558488 - DNA, 15 bp, Homo sapiens
agcccatgaggtcga

SEQ ID NO: 558489 - DNA, 15 bp, Homo sapiens
gagcccatgaggtcg

SEQ ID NO: 558490 - DNA, 15 bp, Homo sapiens
tgagcccatgaggtc

SEQ ID NO: 558491 - DNA, 15 bp, Homo sapiens
ttgagcccatgaggt

SEQ ID NO: 558492 - DNA, 15 bp, Homo sapiens
cttgagcccatgagg

SEQ ID NO: 558493 - DNA, 15 bp, Homo sapiens
gcttgagcccatgag

SEQ ID NO: 558494 - DNA, 15 bp, Homo sapiens
cgcttgagcccatga

SEQ ID NO: 558495 - DNA, 15 bp, Homo sapiens
tcgcttgagcccatg

SEQ ID NO: 558496 - DNA, 15 bp, Homo sapiens
atcgcttgagcccat

SEQ ID NO: 558497 - DNA, 15 bp, Homo sapiens
agatcgcttgagccc

SEQ ID NO: 558498 - DNA, 15 bp, Homo sapiens
aagatcgcttgagcc

SEQ ID NO: 558499 - DNA, 15 bp, Homo sapiens
gaagatcgcttgagc

SEQ ID NO: 558500 - DNA, 15 bp, Homo sapiens
ggaagatcgcttgag

SEQ ID NO: 558501 - DNA, 15 bp, Homo sapiens
aggaagatcgcttga

SEQ ID NO: 558502 - DNA, 15 bp, Homo sapiens
caggaagatcgcttg

SEQ ID NO: 558503 - DNA, 15 bp, Homo sapiens
gcaggaagatcgctt

SEQ ID NO: 558504 - DNA, 15 bp, Homo sapiens
ggcaggaagatcgct

SEQ ID NO: 558505 - DNA, 15 bp, Homo sapiens
aggcaggaagatcgc

SEQ ID NO: 558506 - DNA, 15 bp, Homo sapiens
gaggcaggaagatcg

SEQ ID NO: 558507 - DNA, 15 bp, Homo sapiens
tgaggcaggaagatc

SEQ ID NO: 558508 - DNA, 15 bp, Homo sapiens
ctgaggcaggaagat

SEQ ID NO: 558509 - DNA, 15 bp, Homo sapiens
gctgaggcaggaaga

SEQ ID NO: 558510 - DNA, 15 bp, Homo sapiens
ggctgaggcaggaag

SEQ ID NO: 558511 - DNA, 15 bp, Homo sapiens
aggctgaggcaggaa

SEQ ID NO: 558512 - DNA, 15 bp, Homo sapiens
cggtcccagctactc

SEQ ID NO: 558513 - DNA, 15 bp, Homo sapiens
gcggtcccagctact

SEQ ID NO: 558514 - DNA, 15 bp, Homo sapiens
tgcggtcccagctac

SEQ ID NO: 558515 - DNA, 15 bp, Homo sapiens
ctgcggtcccagcta

SEQ ID NO: 558516 - DNA, 15 bp, Homo sapiens
cctgcggtcccagct

SEQ ID NO: 558517 - DNA, 15 bp, Homo sapiens
acctgcggtcccagc

SEQ ID NO: 558518 - DNA, 15 bp, Homo sapiens
cacctgcggtcccag

SEQ ID NO: 558519 - DNA, 15 bp, Homo sapiens
acacctgcggtccca

SEQ ID NO: 558520 - DNA, 15 bp, Homo sapiens
cacacctgcggtccc

SEQ ID NO: 558521 - DNA, 15 bp, Homo sapiens
ccacacctgcggtcc

SEQ ID NO: 558522 - DNA, 15 bp, Homo sapiens
cccacacctgcggtc

SEQ ID NO: 558523 - DNA, 15 bp, Homo sapiens
gcccacacctgcggt

SEQ ID NO: 558524 - DNA, 15 bp, Homo sapiens
ggcccacacctgcgg

SEQ ID NO: 558525 - DNA, 15 bp, Homo sapiens
tggcccacacctgcg

SEQ ID NO: 558526 - DNA, 15 bp, Homo sapiens
atggcccacacctgc

SEQ ID NO: 558527 - DNA, 15 bp, Homo sapiens
catggcccacacctg

SEQ ID NO: 558528 - DNA, 15 bp, Homo sapiens
tcatggcccacacct

SEQ ID NO: 558529 - DNA, 15 bp, Homo sapiens
atcatggcccacacc

SEQ ID NO: 558530 - DNA, 15 bp, Homo sapiens
tatcatggcccacac

SEQ ID NO: 558531 - DNA, 15 bp, Homo sapiens
gtatcatggcccaca

SEQ ID NO: 558532 - DNA, 15 bp, Homo sapiens
ggtatcatggcccac

SEQ ID NO: 558533 - DNA, 15 bp, Homo sapiens
aggtatcatggccca

SEQ ID NO: 558534 - DNA, 15 bp, Homo sapiens
taggtatcatggccc

SEQ ID NO: 558535 - DNA, 15 bp, Homo sapiens
ctaggtatcatggcc

SEQ ID NO: 558536 - DNA, 15 bp, Homo sapiens
gctaggtatcatggc

SEQ ID NO: 558537 - DNA, 15 bp, Homo sapiens
agctaggtatcatgg

SEQ ID NO: 558538 - DNA, 15 bp, Homo sapiens
tagctaggtatcatg

SEQ ID NO: 558539 - DNA, 15 bp, Homo sapiens
ttagctaggtatcat

SEQ ID NO: 558540 - DNA, 15 bp, Homo sapiens
attagctaggtatca

SEQ ID NO: 558541 - DNA, 15 bp, Homo sapiens
aattagctaggtatc

SEQ ID NO: 558542 - DNA, 15 bp, Homo sapiens
aaattagctaggtat

SEQ ID NO: 558543 - DNA, 15 bp, Homo sapiens
aaaattagctaggta

SEQ ID NO: 558544 - DNA, 15 bp, Homo sapiens
taaaattagctaggt

SEQ ID NO: 558545 - DNA, 15 bp, Homo sapiens
ataaaattagctagg

SEQ ID NO: 558546 - DNA, 15 bp, Homo sapiens
aataaaattagctag

SEQ ID NO: 558547 - DNA, 15 bp, Homo sapiens
aaataaaattagcta

SEQ ID NO: 558548 - DNA, 15 bp, Homo sapiens
aaaataaaattagct

SEQ ID NO: 558549 - DNA, 15 bp, Homo sapiens
aaaaataaaattagc

SEQ ID NO: 558550 - DNA, 15 bp, Homo sapiens
caaaaataaaattag

SEQ ID NO: 558551 - DNA, 15 bp, Homo sapiens
acaaaaataaaatta

SEQ ID NO: 558552 - DNA, 15 bp, Homo sapiens
tacaaaaataaaatt

SEQ ID NO: 558553 - DNA, 15 bp, Homo sapiens
ttacaaaaataaaat

SEQ ID NO: 558554 - DNA, 15 bp, Homo sapiens
tttacaaaaataaaa

SEQ ID NO: 558555 - DNA, 15 bp, Homo sapiens
ctttacaaaaataaa

SEQ ID NO: 558556 - DNA, 15 bp, Homo sapiens
actttacaaaaataa

SEQ ID NO: 558557 - DNA, 15 bp, Homo sapiens
aactttacaaaaata

SEQ ID NO: 558558 - DNA, 15 bp, Homo sapiens
aaactttacaaaaat

SEQ ID NO: 558559 - DNA, 15 bp, Homo sapiens
aaaactttacaaaaa

SEQ ID NO: 558560 - DNA, 15 bp, Homo sapiens
aaaaactttacaaaa

SEQ ID NO: 558561 - DNA, 15 bp, Homo sapiens
taaaaactttacaaa

SEQ ID NO: 558562 - DNA, 15 bp, Homo sapiens
ataaaaactttacaa

SEQ ID NO: 558563 - DNA, 15 bp, Homo sapiens
tataaaaactttaca

SEQ ID NO: 558564 - DNA, 15 bp, Homo sapiens
ctataaaaactttac

SEQ ID NO: 558565 - DNA, 15 bp, Homo sapiens
tctataaaaacttta

SEQ ID NO: 558566 - DNA, 15 bp, Homo sapiens
ctctataaaaacttt

SEQ ID NO: 558567 - DNA, 15 bp, Homo sapiens
tctctataaaaactt

SEQ ID NO: 558568 - DNA, 15 bp, Homo sapiens
atctctataaaaact

SEQ ID NO: 558569 - DNA, 15 bp, Homo sapiens
catctctataaaaac

SEQ ID NO: 558570 - DNA, 15 bp, Homo sapiens
acatctctataaaaa

SEQ ID NO: 558571 - DNA, 15 bp, Homo sapiens
aacatctctataaaa

SEQ ID NO: 558572 - DNA, 15 bp, Homo sapiens
caacatctctataaa

SEQ ID NO: 558573 - DNA, 15 bp, Homo sapiens
acaacatctctataa

SEQ ID NO: 558574 - DNA, 15 bp, Homo sapiens
aacaacatctctata

SEQ ID NO: 558575 - DNA, 15 bp, Homo sapiens
aaacaacatctctat

SEQ ID NO: 558576 - DNA, 15 bp, Homo sapiens
gaaacaacatctcta

SEQ ID NO: 558577 - DNA, 15 bp, Homo sapiens
tgaaacaacatctct

SEQ ID NO: 558578 - DNA, 15 bp, Homo sapiens
gtgaaacaacatctc

SEQ ID NO: 558579 - DNA, 15 bp, Homo sapiens
ggtgaaacaacatct

SEQ ID NO: 558580 - DNA, 15 bp, Homo sapiens
tggtgaaacaacatc

SEQ ID NO: 558581 - DNA, 15 bp, Homo sapiens
atggtgaaacaacat

SEQ ID NO: 558582 - DNA, 15 bp, Homo sapiens
catggtgaaacaaca

SEQ ID NO: 558583 - DNA, 15 bp, Homo sapiens
acatggtgaaacaac

SEQ ID NO: 558584 - DNA, 15 bp, Homo sapiens
aacatggtgaaacaa

SEQ ID NO: 558585 - DNA, 15 bp, Homo sapiens
tgtttgagaccagcc

SEQ ID NO: 558586 - DNA, 15 bp, Homo sapiens
gtgtttgagaccagc

SEQ ID NO: 558587 - DNA, 15 bp, Homo sapiens
ggtgtttgagaccag

SEQ ID NO: 558588 - DNA, 15 bp, Homo sapiens
aggtgtttgagacca

SEQ ID NO: 558589 - DNA, 15 bp, Homo sapiens
caggtgtttgagacc

SEQ ID NO: 558590 - DNA, 15 bp, Homo sapiens
ccaggtgtttgagac

SEQ ID NO: 558591 - DNA, 15 bp, Homo sapiens
gccaggtgtttgaga

SEQ ID NO: 558592 - DNA, 15 bp, Homo sapiens
ggccaggtgtttgag

SEQ ID NO: 558593 - DNA, 15 bp, Homo sapiens
aggccaggtgtttga

SEQ ID NO: 558594 - DNA, 15 bp, Homo sapiens
gaggccaggtgtttg

SEQ ID NO: 558595 - DNA, 15 bp, Homo sapiens
tgaggccaggtgttt

SEQ ID NO: 558596 - DNA, 15 bp, Homo sapiens
ttgaggccaggtgtt

SEQ ID NO: 558597 - DNA, 15 bp, Homo sapiens
cttgaggccaggtgt

SEQ ID NO: 558598 - DNA, 15 bp, Homo sapiens
acttgaggccaggtg

SEQ ID NO: 558599 - DNA, 15 bp, Homo sapiens
cacttgaggccaggt

SEQ ID NO: 558600 - DNA, 15 bp, Homo sapiens
atcacttgaggccag

SEQ ID NO: 558601 - DNA, 15 bp, Homo sapiens
tggatcacttgaggc

SEQ ID NO: 558602 - DNA, 15 bp, Homo sapiens
gaggcaggtggatca

SEQ ID NO: 558603 - DNA, 15 bp, Homo sapiens
agaggcaggtggatc

SEQ ID NO: 558604 - DNA, 15 bp, Homo sapiens
cagaggcaggtggat

SEQ ID NO: 558605 - DNA, 15 bp, Homo sapiens
gcagaggcaggtgga

SEQ ID NO: 558606 - DNA, 15 bp, Homo sapiens
cgcagaggcaggtgg

SEQ ID NO: 558607 - DNA, 15 bp, Homo sapiens
acgcagaggcaggtg

SEQ ID NO: 558608 - DNA, 15 bp, Homo sapiens
cacgcagaggcaggt

SEQ ID NO: 558609 - DNA, 15 bp, Homo sapiens
acacgcagaggcagg

SEQ ID NO: 558610 - DNA, 15 bp, Homo sapiens
aacacgcagaggcag

SEQ ID NO: 558611 - DNA, 15 bp, Homo sapiens
taacacgcagaggca

SEQ ID NO: 558612 - DNA, 15 bp, Homo sapiens
ttaacacgcagaggc

SEQ ID NO: 558613 - DNA, 15 bp, Homo sapiens
tttaacacgcagagg

SEQ ID NO: 558614 - DNA, 15 bp, Homo sapiens
ctttaacacgcagag

SEQ ID NO: 558615 - DNA, 15 bp, Homo sapiens
gctttaacacgcaga

SEQ ID NO: 558616 - DNA, 15 bp, Homo sapiens
tgctttaacacgcag

SEQ ID NO: 558617 - DNA, 15 bp, Homo sapiens
ttgctttaacacgca

SEQ ID NO: 558618 - DNA, 15 bp, Homo sapiens
attgctttaacacgc

SEQ ID NO: 558619 - DNA, 15 bp, Homo sapiens
cattgctttaacacg

SEQ ID NO: 558620 - DNA, 15 bp, Homo sapiens
ccattgctttaacac

SEQ ID NO: 558621 - DNA, 15 bp, Homo sapiens
cccattgctttaaca

SEQ ID NO: 558622 - DNA, 15 bp, Homo sapiens
tcccattgctttaac

SEQ ID NO: 558623 - DNA, 15 bp, Homo sapiens
atcccattgctttaa

SEQ ID NO: 558624 - DNA, 15 bp, Homo sapiens
aatcccattgcttta

SEQ ID NO: 558625 - DNA, 15 bp, Homo sapiens
taatcccattgcttt

SEQ ID NO: 558626 - DNA, 15 bp, Homo sapiens
gtaatcccattgctt

SEQ ID NO: 558627 - DNA, 15 bp, Homo sapiens
tgtaatcccattgct

SEQ ID NO: 558628 - DNA, 15 bp, Homo sapiens
ctgtaatcccattgc

SEQ ID NO: 558629 - DNA, 15 bp, Homo sapiens
cctgtaatcccattg

SEQ ID NO: 558630 - DNA, 15 bp, Homo sapiens
acctgtaatcccatt

SEQ ID NO: 558631 - DNA, 15 bp, Homo sapiens
cacctgtaatcccat

SEQ ID NO: 558632 - DNA, 15 bp, Homo sapiens
agtggctcacacctg

SEQ ID NO: 558633 - DNA, 15 bp, Homo sapiens
cagtggctcacacct

SEQ ID NO: 558634 - DNA, 15 bp, Homo sapiens
acagtggctcacacc

SEQ ID NO: 558635 - DNA, 15 bp, Homo sapiens
cacagtggctcacac

SEQ ID NO: 558636 - DNA, 15 bp, Homo sapiens
gcacagtggctcaca

SEQ ID NO: 558637 - DNA, 15 bp, Homo sapiens
ggcacagtggctcac

SEQ ID NO: 558638 - DNA, 15 bp, Homo sapiens
gggcacagtggctca

SEQ ID NO: 558639 - DNA, 15 bp, Homo sapiens
cgggcacagtggctc

SEQ ID NO: 558640 - DNA, 15 bp, Homo sapiens
ccgggcacagtggct

SEQ ID NO: 558641 - DNA, 15 bp, Homo sapiens
gccgggcacagtggc

SEQ ID NO: 558642 - DNA, 15 bp, Homo sapiens
ggccgggcacagtgg

SEQ ID NO: 558643 - DNA, 15 bp, Homo sapiens
gggccgggcacagtg

SEQ ID NO: 558644 - DNA, 15 bp, Homo sapiens
tgggccgggcacagt

SEQ ID NO: 558645 - DNA, 15 bp, Homo sapiens
ttgggccgggcacag

SEQ ID NO: 558646 - DNA, 15 bp, Homo sapiens
attgggccgggcaca

SEQ ID NO: 558647 - DNA, 15 bp, Homo sapiens
aattgggccgggcac

SEQ ID NO: 558648 - DNA, 15 bp, Homo sapiens
aaattgggccgggca

SEQ ID NO: 558649 - DNA, 15 bp, Homo sapiens
gaaattgggccgggc

SEQ ID NO: 558650 - DNA, 15 bp, Homo sapiens
agaaattgggccggg

SEQ ID NO: 558651 - DNA, 15 bp, Homo sapiens
cagaaattgggccgg

SEQ ID NO: 558652 - DNA, 15 bp, Homo sapiens
ccagaaattgggccg

SEQ ID NO: 558653 - DNA, 15 bp, Homo sapiens
tccagaaattgggcc

SEQ ID NO: 558654 - DNA, 15 bp, Homo sapiens
gtccagaaattgggc

SEQ ID NO: 558655 - DNA, 15 bp, Homo sapiens
ggtccagaaattggg

SEQ ID NO: 558656 - DNA, 15 bp, Homo sapiens
aggtccagaaattgg

SEQ ID NO: 558657 - DNA, 15 bp, Homo sapiens
aaggtccagaaattg

SEQ ID NO: 558658 - DNA, 15 bp, Homo sapiens
gaaggtccagaaatt

SEQ ID NO: 558659 - DNA, 15 bp, Homo sapiens
tgaaggtccagaaat

SEQ ID NO: 558660 - DNA, 15 bp, Homo sapiens
ttgaaggtccagaaa

SEQ ID NO: 558661 - DNA, 15 bp, Homo sapiens
cttgaaggtccagaa

SEQ ID NO: 558662 - DNA, 15 bp, Homo sapiens
ccttgaaggtccaga

SEQ ID NO: 558663 - DNA, 15 bp, Homo sapiens
gccttgaaggtccag

SEQ ID NO: 558664 - DNA, 15 bp, Homo sapiens
tgccttgaaggtcca

SEQ ID NO: 558665 - DNA, 15 bp, Homo sapiens
ctgccttgaaggtcc

SEQ ID NO: 558666 - DNA, 15 bp, Homo sapiens
gctgccttgaaggtc

SEQ ID NO: 558667 - DNA, 15 bp, Homo sapiens
agctgccttgaaggt

SEQ ID NO: 558668 - DNA, 15 bp, Homo sapiens
cagctgccttgaagg

SEQ ID NO: 558669 - DNA, 15 bp, Homo sapiens
gcagctgccttgaag

SEQ ID NO: 558670 - DNA, 15 bp, Homo sapiens
agcagctgccttgaa

SEQ ID NO: 558671 - DNA, 15 bp, Homo sapiens
cagcagctgccttga

SEQ ID NO: 558672 - DNA, 15 bp, Homo sapiens
tcagcagctgccttg

SEQ ID NO: 558673 - DNA, 15 bp, Homo sapiens
ctcagcagctgcctt

SEQ ID NO: 558674 - DNA, 15 bp, Homo sapiens
gctcagcagctgcct

SEQ ID NO: 558675 - DNA, 15 bp, Homo sapiens
tgctcagcagctgcc

SEQ ID NO: 558676 - DNA, 15 bp, Homo sapiens
ctgctcagcagctgc

SEQ ID NO: 558677 - DNA, 15 bp, Homo sapiens
cctgctcagcagctg

SEQ ID NO: 558678 - DNA, 15 bp, Homo sapiens
gcctgctcagcagct

SEQ ID NO: 558679 - DNA, 15 bp, Homo sapiens
ggcctgctcagcagc

SEQ ID NO: 558680 - DNA, 15 bp, Homo sapiens
gggcctgctcagcag

SEQ ID NO: 558681 - DNA, 15 bp, Homo sapiens
tgggcctgctcagca

SEQ ID NO: 558682 - DNA, 15 bp, Homo sapiens
ctgggcctgctcagc

SEQ ID NO: 558683 - DNA, 15 bp, Homo sapiens
gctgggcctgctcag

SEQ ID NO: 558684 - DNA, 15 bp, Homo sapiens
cgctgggcctgctca

SEQ ID NO: 558685 - DNA, 15 bp, Homo sapiens
gcgctgggcctgctc

SEQ ID NO: 558686 - DNA, 15 bp, Homo sapiens
ggcgctgggcctgct

SEQ ID NO: 558687 - DNA, 15 bp, Homo sapiens
gggcgctgggcctgc

SEQ ID NO: 558688 - DNA, 15 bp, Homo sapiens
cgggcgctgggcctg

SEQ ID NO: 558689 - DNA, 15 bp, Homo sapiens
acgggcgctgggcct

SEQ ID NO: 558690 - DNA, 15 bp, Homo sapiens
aacgggcgctgggcc

SEQ ID NO: 558691 - DNA, 15 bp, Homo sapiens
aaacgggcgctgggc

SEQ ID NO: 558692 - DNA, 15 bp, Homo sapiens
taaacgggcgctggg

SEQ ID NO: 558693 - DNA, 15 bp, Homo sapiens
gtaaacgggcgctgg

SEQ ID NO: 558694 - DNA, 15 bp, Homo sapiens
ggtaaacgggcgctg

SEQ ID NO: 558695 - DNA, 15 bp, Homo sapiens
gggtaaacgggcgct

SEQ ID NO: 558696 - DNA, 15 bp, Homo sapiens
agggtaaacgggcgc

SEQ ID NO: 558697 - DNA, 15 bp, Homo sapiens
cagggtaaacgggcg

SEQ ID NO: 558698 - DNA, 15 bp, Homo sapiens
acagggtaaacgggc

SEQ ID NO: 558699 - DNA, 15 bp, Homo sapiens
cacagggtaaacggg

SEQ ID NO: 558700 - DNA, 15 bp, Homo sapiens
tcacagggtaaacgg

SEQ ID NO: 558701 - DNA, 15 bp, Homo sapiens
gtcacagggtaaacg

SEQ ID NO: 558702 - DNA, 15 bp, Homo sapiens
ggtcacagggtaaac

SEQ ID NO: 558703 - DNA, 15 bp, Homo sapiens
aggtcacagggtaaa

SEQ ID NO: 558704 - DNA, 15 bp, Homo sapiens
caggtcacagggtaa

SEQ ID NO: 558705 - DNA, 15 bp, Homo sapiens
tcaggtcacagggta

SEQ ID NO: 558706 - DNA, 15 bp, Homo sapiens
gtcaggtcacagggt

SEQ ID NO: 558707 - DNA, 15 bp, Homo sapiens
tgtcaggtcacaggg

SEQ ID NO: 558708 - DNA, 15 bp, Homo sapiens
atgtcaggtcacagg

SEQ ID NO: 558709 - DNA, 15 bp, Homo sapiens
tatgtcaggtcacag

SEQ ID NO: 558710 - DNA, 15 bp, Homo sapiens
ctatgtcaggtcaca

SEQ ID NO: 558711 - DNA, 15 bp, Homo sapiens
actatgtcaggtcac

SEQ ID NO: 558712 - DNA, 15 bp, Homo sapiens
gactatgtcaggtca

SEQ ID NO: 558713 - DNA, 15 bp, Homo sapiens
tgactatgtcaggtc

SEQ ID NO: 558714 - DNA, 15 bp, Homo sapiens
atgactatgtcaggt

SEQ ID NO: 558715 - DNA, 15 bp, Homo sapiens
catgactatgtcagg

SEQ ID NO: 558716 - DNA, 15 bp, Homo sapiens
ccatgactatgtcag

SEQ ID NO: 558717 - DNA, 15 bp, Homo sapiens
cccatgactatgtca

SEQ ID NO: 558718 - DNA, 15 bp, Homo sapiens
acccatgactatgtc

SEQ ID NO: 558719 - DNA, 15 bp, Homo sapiens
aacccatgactatgt

SEQ ID NO: 558720 - DNA, 15 bp, Homo sapiens
gaacccatgactatg

SEQ ID NO: 558721 - DNA, 15 bp, Homo sapiens
agaacccatgactat

SEQ ID NO: 558722 - DNA, 15 bp, Homo sapiens
cagaacccatgacta

SEQ ID NO: 558723 - DNA, 15 bp, Homo sapiens
ccagaacccatgact

SEQ ID NO: 558724 - DNA, 15 bp, Homo sapiens
cccagaacccatgac

SEQ ID NO: 558725 - DNA, 15 bp, Homo sapiens
ccccagaacccatga

SEQ ID NO: 558726 - DNA, 15 bp, Homo sapiens
gccccagaacccatg

SEQ ID NO: 558727 - DNA, 15 bp, Homo sapiens
agccccagaacccat

SEQ ID NO: 558728 - DNA, 15 bp, Homo sapiens
aagccccagaaccca

SEQ ID NO: 558729 - DNA, 15 bp, Homo sapiens
taagccccagaaccc

SEQ ID NO: 558730 - DNA, 15 bp, Homo sapiens
ctaagccccagaacc

SEQ ID NO: 558731 - DNA, 15 bp, Homo sapiens
cctaagccccagaac

SEQ ID NO: 558732 - DNA, 15 bp, Homo sapiens
ccctaagccccagaa

SEQ ID NO: 558733 - DNA, 15 bp, Homo sapiens
gccctaagccccaga

SEQ ID NO: 558734 - DNA, 15 bp, Homo sapiens
tgccctaagccccag

SEQ ID NO: 558735 - DNA, 15 bp, Homo sapiens
atgccctaagcccca

SEQ ID NO: 558736 - DNA, 15 bp, Homo sapiens
catgccctaagcccc

SEQ ID NO: 558737 - DNA, 15 bp, Homo sapiens
acatgccctaagccc

SEQ ID NO: 558738 - DNA, 15 bp, Homo sapiens
tacatgccctaagcc

SEQ ID NO: 558739 - DNA, 15 bp, Homo sapiens
gtacatgccctaagc

SEQ ID NO: 558740 - DNA, 15 bp, Homo sapiens
cgtacatgccctaag

SEQ ID NO: 558741 - DNA, 15 bp, Homo sapiens
acgtacatgccctaa

SEQ ID NO: 558742 - DNA, 15 bp, Homo sapiens
cacgtacatgcccta

SEQ ID NO: 558743 - DNA, 15 bp, Homo sapiens
acacgtacatgccct

SEQ ID NO: 558744 - DNA, 15 bp, Homo sapiens
gacacgtacatgccc

SEQ ID NO: 558745 - DNA, 15 bp, Homo sapiens
ggacacgtacatgcc

SEQ ID NO: 558746 - DNA, 15 bp, Homo sapiens
aggacacgtacatgc

SEQ ID NO: 558747 - DNA, 15 bp, Homo sapiens
taggacacgtacatg

SEQ ID NO: 558748 - DNA, 15 bp, Homo sapiens
ttaggacacgtacat

SEQ ID NO: 558749 - DNA, 15 bp, Homo sapiens
tttaggacacgtaca

SEQ ID NO: 558750 - DNA, 15 bp, Homo sapiens
atttaggacacgtac

SEQ ID NO: 558751 - DNA, 15 bp, Homo sapiens
catttaggacacgta

SEQ ID NO: 558752 - DNA, 15 bp, Homo sapiens
tcatttaggacacgt

SEQ ID NO: 558753 - DNA, 15 bp, Homo sapiens
gtcatttaggacacg

SEQ ID NO: 558754 - DNA, 15 bp, Homo sapiens
tgtcatttaggacac

SEQ ID NO: 558755 - DNA, 15 bp, Homo sapiens
atgtcatttaggaca

SEQ ID NO: 558756 - DNA, 15 bp, Homo sapiens
catgtcatttaggac

SEQ ID NO: 558757 - DNA, 15 bp, Homo sapiens
tcatgtcatttagga

SEQ ID NO: 558758 - DNA, 15 bp, Homo sapiens
ttcatgtcatttagg

SEQ ID NO: 558759 - DNA, 15 bp, Homo sapiens
tttcatgtcatttag

SEQ ID NO: 558760 - DNA, 15 bp, Homo sapiens
atttcatgtcattta

SEQ ID NO: 558761 - DNA, 15 bp, Homo sapiens
ggaagcaggtgctgc

SEQ ID NO: 558762 - DNA, 15 bp, Homo sapiens
aggaagcaggtgctg

SEQ ID NO: 558763 - DNA, 15 bp, Homo sapiens
aaggaagcaggtgct

SEQ ID NO: 558764 - DNA, 15 bp, Homo sapiens
aaaggaagcaggtgc

SEQ ID NO: 558765 - DNA, 15 bp, Homo sapiens
taaaggaagcaggtg

SEQ ID NO: 558766 - DNA, 15 bp, Homo sapiens
ctaaaggaagcaggt

SEQ ID NO: 558767 - DNA, 15 bp, Homo sapiens
gctaaaggaagcagg

SEQ ID NO: 558768 - DNA, 15 bp, Homo sapiens
tgctaaaggaagcag

SEQ ID NO: 558769 - DNA, 15 bp, Homo sapiens
gtgctaaaggaagca

SEQ ID NO: 558770 - DNA, 15 bp, Homo sapiens
agtgctaaaggaagc

SEQ ID NO: 558771 - DNA, 15 bp, Homo sapiens
cagtgctaaaggaag

SEQ ID NO: 558772 - DNA, 15 bp, Homo sapiens
ccagtgctaaaggaa

SEQ ID NO: 558773 - DNA, 15 bp, Homo sapiens
accagtgctaaagga

SEQ ID NO: 558774 - DNA, 15 bp, Homo sapiens
caccagtgctaaagg

SEQ ID NO: 558775 - DNA, 15 bp, Homo sapiens
tcaccagtgctaaag

SEQ ID NO: 558776 - DNA, 15 bp, Homo sapiens
ttcaccagtgctaaa

SEQ ID NO: 558777 - DNA, 15 bp, Homo sapiens
attcaccagtgctaa

SEQ ID NO: 558778 - DNA, 15 bp, Homo sapiens
cattcaccagtgcta

SEQ ID NO: 558779 - DNA, 15 bp, Homo sapiens
tcattcaccagtgct

SEQ ID NO: 558780 - DNA, 15 bp, Homo sapiens
atcattcaccagtgc

SEQ ID NO: 558781 - DNA, 15 bp, Homo sapiens
aatcattcaccagtg

SEQ ID NO: 558782 - DNA, 15 bp, Homo sapiens
gaatcattcaccagt

SEQ ID NO: 558783 - DNA, 15 bp, Homo sapiens
agaatcattcaccag

SEQ ID NO: 558784 - DNA, 15 bp, Homo sapiens
aagaatcattcacca

SEQ ID NO: 558785 - DNA, 15 bp, Homo sapiens
gaagaatcattcacc

SEQ ID NO: 558786 - DNA, 15 bp, Homo sapiens
ggaagaatcattcac

SEQ ID NO: 558787 - DNA, 15 bp, Homo sapiens
aggaagaatcattca

SEQ ID NO: 558788 - DNA, 15 bp, Homo sapiens
gaggaagaatcattc

SEQ ID NO: 558789 - DNA, 15 bp, Homo sapiens
agaggaagaatcatt

SEQ ID NO: 558790 - DNA, 15 bp, Homo sapiens
aagaggaagaatcat

SEQ ID NO: 558791 - DNA, 15 bp, Homo sapiens
gaagaggaagaatca

SEQ ID NO: 558792 - DNA, 15 bp, Homo sapiens
ggaagaggaagaatc

SEQ ID NO: 558793 - DNA, 15 bp, Homo sapiens
gggaagaggaagaat

SEQ ID NO: 558794 - DNA, 15 bp, Homo sapiens
ggggaagaggaagaa

SEQ ID NO: 558795 - DNA, 15 bp, Homo sapiens
aggggaagaggaaga

SEQ ID NO: 558796 - DNA, 15 bp, Homo sapiens
caggggaagaggaag

SEQ ID NO: 558797 - DNA, 15 bp, Homo sapiens
acaggggaagaggaa

SEQ ID NO: 558798 - DNA, 15 bp, Homo sapiens
gacaggggaagagga

SEQ ID NO: 558799 - DNA, 15 bp, Homo sapiens
agacaggggaagagg

SEQ ID NO: 558800 - DNA, 15 bp, Homo sapiens
gagacaggggaagag

SEQ ID NO: 558801 - DNA, 15 bp, Homo sapiens
tgagacaggggaaga

SEQ ID NO: 558802 - DNA, 15 bp, Homo sapiens
ctgagacaggggaag

SEQ ID NO: 558803 - DNA, 15 bp, Homo sapiens
cctgagacaggggaa

SEQ ID NO: 558804 - DNA, 15 bp, Homo sapiens
ccctgagacagggga

SEQ ID NO: 558805 - DNA, 15 bp, Homo sapiens
tccctgagacagggg

SEQ ID NO: 558806 - DNA, 15 bp, Homo sapiens
ttccctgagacaggg

SEQ ID NO: 558807 - DNA, 15 bp, Homo sapiens
cttccctgagacagg

SEQ ID NO: 558808 - DNA, 15 bp, Homo sapiens
ccttccctgagacag

SEQ ID NO: 558809 - DNA, 15 bp, Homo sapiens
gccttccctgagaca

SEQ ID NO: 558810 - DNA, 15 bp, Homo sapiens
agccttccctgagac

SEQ ID NO: 558811 - DNA, 15 bp, Homo sapiens
aagccttccctgaga

SEQ ID NO: 558812 - DNA, 15 bp, Homo sapiens
caagccttccctgag

SEQ ID NO: 558813 - DNA, 15 bp, Homo sapiens
gcaagccttccctga

SEQ ID NO: 558814 - DNA, 15 bp, Homo sapiens
ggcaagccttccctg

SEQ ID NO: 558815 - DNA, 15 bp, Homo sapiens
aggcaagccttccct

SEQ ID NO: 558816 - DNA, 15 bp, Homo sapiens
caggcaagccttccc

SEQ ID NO: 558817 - DNA, 15 bp, Homo sapiens
gcaggcaagccttcc

SEQ ID NO: 558818 - DNA, 15 bp, Homo sapiens
agcaggcaagccttc

SEQ ID NO: 558819 - DNA, 15 bp, Homo sapiens
aagcaggcaagcctt

SEQ ID NO: 558820 - DNA, 15 bp, Homo sapiens
gaagcaggcaagcct

SEQ ID NO: 558821 - DNA, 15 bp, Homo sapiens
ggaagcaggcaagcc

SEQ ID NO: 558822 - DNA, 15 bp, Homo sapiens
tggaagcaggcaagc

SEQ ID NO: 558823 - DNA, 15 bp, Homo sapiens
atggaagcaggcaag

SEQ ID NO: 558824 - DNA, 15 bp, Homo sapiens
catggaagcaggcaa

SEQ ID NO: 558825 - DNA, 15 bp, Homo sapiens
gcatggaagcaggca

SEQ ID NO: 558826 - DNA, 15 bp, Homo sapiens
agcatggaagcaggc

SEQ ID NO: 558827 - DNA, 15 bp, Homo sapiens
aagcatggaagcagg

SEQ ID NO: 558828 - DNA, 15 bp, Homo sapiens
caagcatggaagcag

SEQ ID NO: 558829 - DNA, 15 bp, Homo sapiens
gcaagcatggaagca

SEQ ID NO: 558830 - DNA, 15 bp, Homo sapiens
tgcaagcatggaagc

SEQ ID NO: 558831 - DNA, 15 bp, Homo sapiens
atgcaagcatggaag

SEQ ID NO: 558832 - DNA, 15 bp, Homo sapiens
catgcaagcatggaa

SEQ ID NO: 558833 - DNA, 15 bp, Homo sapiens
gcatgcaagcatgga

SEQ ID NO: 558834 - DNA, 15 bp, Homo sapiens
agcatgcaagcatgg

SEQ ID NO: 558835 - DNA, 15 bp, Homo sapiens
cagcatgcaagcatg

SEQ ID NO: 558836 - DNA, 15 bp, Homo sapiens
ccagcatgcaagcat

SEQ ID NO: 558837 - DNA, 15 bp, Homo sapiens
cccagcatgcaagca

SEQ ID NO: 558838 - DNA, 15 bp, Homo sapiens
acccagcatgcaagc

SEQ ID NO: 558839 - DNA, 15 bp, Homo sapiens
cacccagcatgcaag

SEQ ID NO: 558840 - DNA, 15 bp, Homo sapiens
tcacccagcatgcaa

SEQ ID NO: 558841 - DNA, 15 bp, Homo sapiens
gtcacccagcatgca

SEQ ID NO: 558842 - DNA, 15 bp, Homo sapiens
tgtcacccagcatgc

SEQ ID NO: 558843 - DNA, 15 bp, Homo sapiens
ttgtcacccagcatg

SEQ ID NO: 558844 - DNA, 15 bp, Homo sapiens
attgtcacccagcat

SEQ ID NO: 558845 - DNA, 15 bp, Homo sapiens
tattgtcacccagca

SEQ ID NO: 558846 - DNA, 15 bp, Homo sapiens
ttattgtcacccagc

SEQ ID NO: 558847 - DNA, 15 bp, Homo sapiens
tttattgtcacccag

SEQ ID NO: 558848 - DNA, 15 bp, Homo sapiens
ctttattgtcaccca

SEQ ID NO: 558849 - DNA, 15 bp, Homo sapiens
gctttattgtcaccc

SEQ ID NO: 558850 - DNA, 15 bp, Homo sapiens
tgctttattgtcacc

SEQ ID NO: 558851 - DNA, 15 bp, Homo sapiens
atgctttattgtcac

SEQ ID NO: 558852 - DNA, 15 bp, Homo sapiens
aatgctttattgtca

SEQ ID NO: 558853 - DNA, 15 bp, Homo sapiens
gaatgctttattgtc

SEQ ID NO: 558854 - DNA, 15 bp, Homo sapiens
ggaatgctttattgt

SEQ ID NO: 558855 - DNA, 15 bp, Homo sapiens
aggaatgctttattg

SEQ ID NO: 558856 - DNA, 15 bp, Homo sapiens
caggaatgctttatt

SEQ ID NO: 558857 - DNA, 15 bp, Homo sapiens
ccaggaatgctttat

SEQ ID NO: 558858 - DNA, 15 bp, Homo sapiens
accaggaatgcttta

SEQ ID NO: 558859 - DNA, 15 bp, Homo sapiens
aaccaggaatgcttt

SEQ ID NO: 558860 - DNA, 15 bp, Homo sapiens
gaaccaggaatgctt

SEQ ID NO: 558861 - DNA, 15 bp, Homo sapiens
agaaccaggaatgct

SEQ ID NO: 558862 - DNA, 15 bp, Homo sapiens
aagaaccaggaatgc

SEQ ID NO: 558863 - DNA, 15 bp, Homo sapiens
gaagaaccaggaatg

SEQ ID NO: 558864 - DNA, 15 bp, Homo sapiens
tgaagaaccaggaat

SEQ ID NO: 558865 - DNA, 15 bp, Homo sapiens
gtgaagaaccaggaa

SEQ ID NO: 558866 - DNA, 15 bp, Homo sapiens
ggtgaagaaccagga

SEQ ID NO: 558867 - DNA, 15 bp, Homo sapiens
aggtgaagaaccagg

SEQ ID NO: 558868 - DNA, 15 bp, Homo sapiens
aaggtgaagaaccag

SEQ ID NO: 558869 - DNA, 15 bp, Homo sapiens
caaggtgaagaacca

SEQ ID NO: 558870 - DNA, 15 bp, Homo sapiens
ccaaggtgaagaacc

SEQ ID NO: 558871 - DNA, 15 bp, Homo sapiens
gccaaggtgaagaac

SEQ ID NO: 558872 - DNA, 15 bp, Homo sapiens
agccaaggtgaagaa

SEQ ID NO: 558873 - DNA, 15 bp, Homo sapiens
aagccaaggtgaaga

SEQ ID NO: 558874 - DNA, 15 bp, Homo sapiens
aaagccaaggtgaag

SEQ ID NO: 558875 - DNA, 15 bp, Homo sapiens
gaaagccaaggtgaa

SEQ ID NO: 558876 - DNA, 15 bp, Homo sapiens
tgaaagccaaggtga

SEQ ID NO: 558877 - DNA, 15 bp, Homo sapiens
ctgaaagccaaggtg

SEQ ID NO: 558878 - DNA, 15 bp, Homo sapiens
tctgaaagccaaggt

SEQ ID NO: 558879 - DNA, 15 bp, Homo sapiens
gtctgaaagccaagg

SEQ ID NO: 558880 - DNA, 15 bp, Homo sapiens
ggtctgaaagccaag

SEQ ID NO: 558881 - DNA, 15 bp, Homo sapiens
aggtctgaaagccaa

SEQ ID NO: 558882 - DNA, 15 bp, Homo sapiens
caggtctgaaagcca

SEQ ID NO: 558883 - DNA, 15 bp, Homo sapiens
tcaggtctgaaagcc

SEQ ID NO: 558884 - DNA, 15 bp, Homo sapiens
ttcaggtctgaaagc

SEQ ID NO: 558885 - DNA, 15 bp, Homo sapiens
tttcaggtctgaaag

SEQ ID NO: 558886 - DNA, 15 bp, Homo sapiens
gtttcaggtctgaaa

SEQ ID NO: 558887 - DNA, 15 bp, Homo sapiens
ggtttcaggtctgaa

SEQ ID NO: 558888 - DNA, 15 bp, Homo sapiens
gggtttcaggtctga

SEQ ID NO: 558889 - DNA, 15 bp, Homo sapiens
cgggtttcaggtctg

SEQ ID NO: 558890 - DNA, 15 bp, Homo sapiens
tcgggtttcaggtct

SEQ ID NO: 558891 - DNA, 15 bp, Homo sapiens
gtcgggtttcaggtc

SEQ ID NO: 558892 - DNA, 15 bp, Homo sapiens
agtcgggtttcaggt

SEQ ID NO: 558893 - DNA, 15 bp, Homo sapiens
aagtcgggtttcagg

SEQ ID NO: 558894 - DNA, 15 bp, Homo sapiens
gaagtcgggtttcag

SEQ ID NO: 558895 - DNA, 15 bp, Homo sapiens
ggaagtcgggtttca

SEQ ID NO: 558896 - DNA, 15 bp, Homo sapiens
aggaagtcgggtttc

SEQ ID NO: 558897 - DNA, 15 bp, Homo sapiens
aaggaagtcgggttt

SEQ ID NO: 558898 - DNA, 15 bp, Homo sapiens
aaaggaagtcgggtt

SEQ ID NO: 558899 - DNA, 15 bp, Homo sapiens
gaaaggaagtcgggt

SEQ ID NO: 558900 - DNA, 15 bp, Homo sapiens
tgaaaggaagtcggg

SEQ ID NO: 558901 - DNA, 15 bp, Homo sapiens
ttgaaaggaagtcgg

SEQ ID NO: 558902 - DNA, 15 bp, Homo sapiens
tttgaaaggaagtcg

SEQ ID NO: 558903 - DNA, 15 bp, Homo sapiens
ttttgaaaggaagtc

SEQ ID NO: 558904 - DNA, 15 bp, Homo sapiens
attttgaaaggaagt

SEQ ID NO: 558905 - DNA, 15 bp, Homo sapiens
aattttgaaaggaag

SEQ ID NO: 558906 - DNA, 15 bp, Homo sapiens
gaattttgaaaggaa

SEQ ID NO: 558907 - DNA, 15 bp, Homo sapiens
ggaattttgaaagga

SEQ ID NO: 558908 - DNA, 15 bp, Homo sapiens
aggaattttgaaagg

SEQ ID NO: 558909 - DNA, 15 bp, Homo sapiens
caggaattttgaaag

SEQ ID NO: 558910 - DNA, 15 bp, Homo sapiens
acaggaattttgaaa

SEQ ID NO: 558911 - DNA, 15 bp, Homo sapiens
gacaggaattttgaa

SEQ ID NO: 558912 - DNA, 15 bp, Homo sapiens
ggacaggaattttga

SEQ ID NO: 558913 - DNA, 15 bp, Homo sapiens
aggacaggaattttg

SEQ ID NO: 558914 - DNA, 15 bp, Homo sapiens
gaggacaggaatttt

SEQ ID NO: 558915 - DNA, 15 bp, Homo sapiens
cgaggacaggaattt

SEQ ID NO: 558916 - DNA, 15 bp, Homo sapiens
ccgaggacaggaatt

SEQ ID NO: 558917 - DNA, 15 bp, Homo sapiens
cccgaggacaggaat

SEQ ID NO: 558918 - DNA, 15 bp, Homo sapiens
ccccgaggacaggaa

SEQ ID NO: 558919 - DNA, 15 bp, Homo sapiens
cccccgaggacagga

SEQ ID NO: 558920 - DNA, 15 bp, Homo sapiens
ccccccgaggacagg

SEQ ID NO: 558921 - DNA, 15 bp, Homo sapiens
tccccccgaggacag

SEQ ID NO: 558922 - DNA, 15 bp, Homo sapiens
ttccccccgaggaca

SEQ ID NO: 558923 - DNA, 15 bp, Homo sapiens
tttccccccgaggac

SEQ ID NO: 558924 - DNA, 15 bp, Homo sapiens
ttttccccccgagga

SEQ ID NO: 558925 - DNA, 15 bp, Homo sapiens
cttttccccccgagg

SEQ ID NO: 558926 - DNA, 15 bp, Homo sapiens
ccttttccccccgag

SEQ ID NO: 558927 - DNA, 15 bp, Homo sapiens
accttttccccccga

SEQ ID NO: 558928 - DNA, 15 bp, Homo sapiens
aaccttttccccccg

SEQ ID NO: 558929 - DNA, 15 bp, Homo sapiens
aaaccttttcccccc

SEQ ID NO: 558930 - DNA, 15 bp, Homo sapiens
gaaaccttttccccc

SEQ ID NO: 558931 - DNA, 15 bp, Homo sapiens
ggaaaccttttcccc

SEQ ID NO: 558932 - DNA, 15 bp, Homo sapiens
tggaaaccttttccc

SEQ ID NO: 558933 - DNA, 15 bp, Homo sapiens
gtggaaaccttttcc

SEQ ID NO: 558934 - DNA, 15 bp, Homo sapiens
tgtggaaaccttttc

SEQ ID NO: 558935 - DNA, 15 bp, Homo sapiens
ttgtggaaacctttt

SEQ ID NO: 558936 - DNA, 15 bp, Homo sapiens
attgtggaaaccttt

SEQ ID NO: 558937 - DNA, 15 bp, Homo sapiens
cattgtggaaacctt

SEQ ID NO: 558938 - DNA, 15 bp, Homo sapiens
acattgtggaaacct

SEQ ID NO: 558939 - DNA, 15 bp, Homo sapiens
cacattgtggaaacc

SEQ ID NO: 558940 - DNA, 15 bp, Homo sapiens
tcacattgtggaaac

SEQ ID NO: 558941 - DNA, 15 bp, Homo sapiens
ctcacattgtggaaa

SEQ ID NO: 558942 - DNA, 15 bp, Homo sapiens
tctcacattgtggaa

SEQ ID NO: 558943 - DNA, 15 bp, Homo sapiens
atctcacattgtgga

SEQ ID NO: 558944 - DNA, 15 bp, Homo sapiens
catctcacattgtgg

SEQ ID NO: 558945 - DNA, 15 bp, Homo sapiens
ccatctcacattgtg

SEQ ID NO: 558946 - DNA, 15 bp, Homo sapiens
accatctcacattgt

SEQ ID NO: 558947 - DNA, 15 bp, Homo sapiens
taccatctcacattg

SEQ ID NO: 558948 - DNA, 15 bp, Homo sapiens
ctaccatctcacatt

SEQ ID NO: 558949 - DNA, 15 bp, Homo sapiens
gctaccatctcacat

SEQ ID NO: 558950 - DNA, 15 bp, Homo sapiens
ggctaccatctcaca

SEQ ID NO: 558951 - DNA, 15 bp, Homo sapiens
aggctaccatctcac

SEQ ID NO: 558952 - DNA, 15 bp, Homo sapiens
caggctaccatctca

SEQ ID NO: 558953 - DNA, 15 bp, Homo sapiens
ccaggctaccatctc

SEQ ID NO: 558954 - DNA, 15 bp, Homo sapiens
tccaggctaccatct

SEQ ID NO: 558955 - DNA, 15 bp, Homo sapiens
gtccaggctaccatc

SEQ ID NO: 558956 - DNA, 15 bp, Homo sapiens
tgtccaggctaccat

SEQ ID NO: 558957 - DNA, 15 bp, Homo sapiens
gtgtccaggctacca

SEQ ID NO: 558958 - DNA, 15 bp, Homo sapiens
ggtgtccaggctacc

SEQ ID NO: 558959 - DNA, 15 bp, Homo sapiens
tggtgtccaggctac

SEQ ID NO: 558960 - DNA, 15 bp, Homo sapiens
ctggtgtccaggcta

SEQ ID NO: 558961 - DNA, 15 bp, Homo sapiens
gctggtgtccaggct

SEQ ID NO: 558962 - DNA, 15 bp, Homo sapiens
agctggtgtccaggc

SEQ ID NO: 558963 - DNA, 15 bp, Homo sapiens
cagctggtgtccagg

SEQ ID NO: 558964 - DNA, 15 bp, Homo sapiens
acagctggtgtccag

SEQ ID NO: 558965 - DNA, 15 bp, Homo sapiens
gacagctggtgtcca

SEQ ID NO: 558966 - DNA, 15 bp, Homo sapiens
tgacagctggtgtcc

SEQ ID NO: 558967 - DNA, 15 bp, Homo sapiens
atgacagctggtgtc

SEQ ID NO: 558968 - DNA, 15 bp, Homo sapiens
gatgacagctggtgt

SEQ ID NO: 558969 - DNA, 15 bp, Homo sapiens
tgatgacagctggtg

SEQ ID NO: 558970 - DNA, 15 bp, Homo sapiens
atgatgacagctggt

SEQ ID NO: 558971 - DNA, 15 bp, Homo sapiens
catgatgacagctgg

SEQ ID NO: 558972 - DNA, 15 bp, Homo sapiens
acatgatgacagctg

SEQ ID NO: 558973 - DNA, 15 bp, Homo sapiens
aacatgatgacagct

SEQ ID NO: 558974 - DNA, 15 bp, Homo sapiens
caacatgatgacagc

SEQ ID NO: 558975 - DNA, 15 bp, Homo sapiens
gcaacatgatgacag

SEQ ID NO: 558976 - DNA, 15 bp, Homo sapiens
agcaacatgatgaca

SEQ ID NO: 558977 - DNA, 15 bp, Homo sapiens
cagcaacatgatgac

SEQ ID NO: 558978 - DNA, 15 bp, Homo sapiens
gcagcaacatgatga

SEQ ID NO: 558979 - DNA, 15 bp, Homo sapiens
agcagcaacatgatg

SEQ ID NO: 558980 - DNA, 15 bp, Homo sapiens
gagcagcaacatgat

SEQ ID NO: 558981 - DNA, 15 bp, Homo sapiens
agagcagcaacatga

SEQ ID NO: 558982 - DNA, 15 bp, Homo sapiens
tagagcagcaacatg

SEQ ID NO: 558983 - DNA, 15 bp, Homo sapiens
ctagagcagcaacat

SEQ ID NO: 558984 - DNA, 15 bp, Homo sapiens
gctagagcagcaaca

SEQ ID NO: 558985 - DNA, 15 bp, Homo sapiens
cgctagagcagcaac

SEQ ID NO: 558986 - DNA, 15 bp, Homo sapiens
acgctagagcagcaa

SEQ ID NO: 558987 - DNA, 15 bp, Homo sapiens
aacgctagagcagca

SEQ ID NO: 558988 - DNA, 15 bp, Homo sapiens
aaacgctagagcagc

SEQ ID NO: 558989 - DNA, 15 bp, Homo sapiens
caaacgctagagcag

SEQ ID NO: 558990 - DNA, 15 bp, Homo sapiens
tcaaacgctagagca

SEQ ID NO: 558991 - DNA, 15 bp, Homo sapiens
ctcaaacgctagagc

SEQ ID NO: 558992 - DNA, 15 bp, Homo sapiens
gctcaaacgctagag

SEQ ID NO: 558993 - DNA, 15 bp, Homo sapiens
agctcaaacgctaga

SEQ ID NO: 558994 - DNA, 15 bp, Homo sapiens
gagctcaaacgctag

SEQ ID NO: 558995 - DNA, 15 bp, Homo sapiens
ggagctcaaacgcta

SEQ ID NO: 558996 - DNA, 15 bp, Homo sapiens
gggagctcaaacgct

SEQ ID NO: 558997 - DNA, 15 bp, Homo sapiens
cgggagctcaaacgc

SEQ ID NO: 558998 - DNA, 15 bp, Homo sapiens
tcgggagctcaaacg

SEQ ID NO: 558999 - DNA, 15 bp, Homo sapiens
atcgggagctcaaac

SEQ ID NO: 559000 - DNA, 15 bp, Homo sapiens
catcgggagctcaaa

SEQ ID NO: 559001 - DNA, 15 bp, Homo sapiens
tcatcgggagctcaa

SEQ ID NO: 559002 - DNA, 15 bp, Homo sapiens
ttcatcgggagctca

SEQ ID NO: 559003 - DNA, 15 bp, Homo sapiens
gttcatcgggagctc

SEQ ID NO: 559004 - DNA, 15 bp, Homo sapiens
tgttcatcgggagct

SEQ ID NO: 559005 - DNA, 15 bp, Homo sapiens
ttgttcatcgggagc

SEQ ID NO: 559006 - DNA, 15 bp, Homo sapiens
attgttcatcgggag

SEQ ID NO: 559007 - DNA, 15 bp, Homo sapiens
cattgttcatcggga

SEQ ID NO: 559008 - DNA, 15 bp, Homo sapiens
tcattgttcatcggg

SEQ ID NO: 559009 - DNA, 15 bp, Homo sapiens
gtcattgttcatcgg

SEQ ID NO: 559010 - DNA, 15 bp, Homo sapiens
ggtcattgttcatcg

SEQ ID NO: 559011 - DNA, 15 bp, Homo sapiens
tggtcattgttcatc

SEQ ID NO: 559012 - DNA, 15 bp, Homo sapiens
atggtcattgttcat

SEQ ID NO: 559013 - DNA, 15 bp, Homo sapiens
aatggtcattgttca

SEQ ID NO: 559014 - DNA, 15 bp, Homo sapiens
caatggtcattgttc

SEQ ID NO: 559015 - DNA, 15 bp, Homo sapiens
ccaatggtcattgtt

SEQ ID NO: 559016 - DNA, 15 bp, Homo sapiens
cccaatggtcattgt

SEQ ID NO: 559017 - DNA, 15 bp, Homo sapiens
acccaatggtcattg

SEQ ID NO: 559018 - DNA, 15 bp, Homo sapiens
gacccaatggtcatt

SEQ ID NO: 559019 - DNA, 15 bp, Homo sapiens
ggacccaatggtcat

SEQ ID NO: 559020 - DNA, 15 bp, Homo sapiens
tggacccaatggtca

SEQ ID NO: 559021 - DNA, 15 bp, Homo sapiens
ttggacccaatggtc

SEQ ID NO: 559022 - DNA, 15 bp, Homo sapiens
gttggacccaatggt

SEQ ID NO: 559023 - DNA, 15 bp, Homo sapiens
ggttggacccaatgg

SEQ ID NO: 559024 - DNA, 15 bp, Homo sapiens
tggttggacccaatg

SEQ ID NO: 559025 - DNA, 15 bp, Homo sapiens
ctggttggacccaat

SEQ ID NO: 559026 - DNA, 15 bp, Homo sapiens
gctggttggacccaa

SEQ ID NO: 559027 - DNA, 15 bp, Homo sapiens
ggctggttggaccca

SEQ ID NO: 559028 - DNA, 15 bp, Homo sapiens
gggctggttggaccc

SEQ ID NO: 559029 - DNA, 15 bp, Homo sapiens
agggctggttggacc

SEQ ID NO: 559030 - DNA, 15 bp, Homo sapiens
aagggctggttggac

SEQ ID NO: 559031 - DNA, 15 bp, Homo sapiens
aaagggctggttgga

SEQ ID NO: 559032 - DNA, 15 bp, Homo sapiens
aaaagggctggttgg

SEQ ID NO: 559033 - DNA, 15 bp, Homo sapiens
caaaagggctggttg

SEQ ID NO: 559034 - DNA, 15 bp, Homo sapiens
ccaaaagggctggtt

SEQ ID NO: 559035 - DNA, 15 bp, Homo sapiens
cccaaaagggctggt

SEQ ID NO: 559036 - DNA, 15 bp, Homo sapiens
tcccaaaagggctgg

SEQ ID NO: 559037 - DNA, 15 bp, Homo sapiens
ctcccaaaagggctg

SEQ ID NO: 559038 - DNA, 15 bp, Homo sapiens
gctcccaaaagggct

SEQ ID NO: 559039 - DNA, 15 bp, Homo sapiens
ggctcccaaaagggc

SEQ ID NO: 559040 - DNA, 15 bp, Homo sapiens
gggctcccaaaaggg

SEQ ID NO: 559041 - DNA, 15 bp, Homo sapiens
ggggctcccaaaagg

SEQ ID NO: 559042 - DNA, 15 bp, Homo sapiens
gggggctcccaaaag

SEQ ID NO: 559043 - DNA, 15 bp, Homo sapiens
agggggctcccaaaa

SEQ ID NO: 559044 - DNA, 15 bp, Homo sapiens
aagggggctcccaaa

SEQ ID NO: 559045 - DNA, 15 bp, Homo sapiens
gaagggggctcccaa

SEQ ID NO: 559046 - DNA, 15 bp, Homo sapiens
agaagggggctccca

SEQ ID NO: 559047 - DNA, 15 bp, Homo sapiens
gagaagggggctccc

SEQ ID NO: 559048 - DNA, 15 bp, Homo sapiens
agagaagggggctcc

SEQ ID NO: 559049 - DNA, 15 bp, Homo sapiens
cagagaagggggctc

SEQ ID NO: 559050 - DNA, 15 bp, Homo sapiens
acagagaagggggct

SEQ ID NO: 559051 - DNA, 15 bp, Homo sapiens
aacagagaagggggc

SEQ ID NO: 559052 - DNA, 15 bp, Homo sapiens
taacagagaaggggg

SEQ ID NO: 559053 - DNA, 15 bp, Homo sapiens
gtaacagagaagggg

SEQ ID NO: 559054 - DNA, 15 bp, Homo sapiens
agtaacagagaaggg

SEQ ID NO: 559055 - DNA, 15 bp, Homo sapiens
cagtaacagagaagg

SEQ ID NO: 559056 - DNA, 15 bp, Homo sapiens
gcagtaacagagaag

SEQ ID NO: 559057 - DNA, 15 bp, Homo sapiens
ggcagtaacagagaa

SEQ ID NO: 559058 - DNA, 15 bp, Homo sapiens
gggcagtaacagaga

SEQ ID NO: 559059 - DNA, 15 bp, Homo sapiens
ggggcagtaacagag

SEQ ID NO: 559060 - DNA, 15 bp, Homo sapiens
tggggcagtaacaga

SEQ ID NO: 559061 - DNA, 15 bp, Homo sapiens
ctggggcagtaacag

SEQ ID NO: 559062 - DNA, 15 bp, Homo sapiens
cctggggcagtaaca

SEQ ID NO: 559063 - DNA, 15 bp, Homo sapiens
ccctggggcagtaac

SEQ ID NO: 559064 - DNA, 15 bp, Homo sapiens
cccctggggcagtaa

SEQ ID NO: 559065 - DNA, 15 bp, Homo sapiens
ccccctggggcagta

SEQ ID NO: 559066 - DNA, 15 bp, Homo sapiens
tccccctggggcagt

SEQ ID NO: 559067 - DNA, 15 bp, Homo sapiens
ctccccctggggcag

SEQ ID NO: 559068 - DNA, 15 bp, Homo sapiens
gctccccctggggca

SEQ ID NO: 559069 - DNA, 15 bp, Homo sapiens
ggctccccctggggc

SEQ ID NO: 559070 - DNA, 15 bp, Homo sapiens
tggctccccctgggg

SEQ ID NO: 559071 - DNA, 15 bp, Homo sapiens
ctggctccccctggg

SEQ ID NO: 559072 - DNA, 15 bp, Homo sapiens
tctggctccccctgg

SEQ ID NO: 559073 - DNA, 15 bp, Homo sapiens
ttctggctccccctg

SEQ ID NO: 559074 - DNA, 15 bp, Homo sapiens
gttctggctccccct

SEQ ID NO: 559075 - DNA, 15 bp, Homo sapiens
ggttctggctccccc

SEQ ID NO: 559076 - DNA, 15 bp, Homo sapiens
gggttctggctcccc

SEQ ID NO: 559077 - DNA, 15 bp, Homo sapiens
tgggttctggctccc

SEQ ID NO: 559078 - DNA, 15 bp, Homo sapiens
ctgggttctggctcc

SEQ ID NO: 559079 - DNA, 15 bp, Homo sapiens
gctgggttctggctc

SEQ ID NO: 559080 - DNA, 15 bp, Homo sapiens
tgctgggttctggct

SEQ ID NO: 559081 - DNA, 15 bp, Homo sapiens
ctgctgggttctggc

SEQ ID NO: 559082 - DNA, 15 bp, Homo sapiens
cctgctgggttctgg

SEQ ID NO: 559083 - DNA, 15 bp, Homo sapiens
ccctgctgggttctg

SEQ ID NO: 559084 - DNA, 15 bp, Homo sapiens
gccctgctgggttct

SEQ ID NO: 559085 - DNA, 15 bp, Homo sapiens
agccctgctgggttc

SEQ ID NO: 559086 - DNA, 15 bp, Homo sapiens
cagccctgctgggtt

SEQ ID NO: 559087 - DNA, 15 bp, Homo sapiens
acagccctgctgggt

SEQ ID NO: 559088 - DNA, 15 bp, Homo sapiens
cacagccctgctggg

SEQ ID NO: 559089 - DNA, 15 bp, Homo sapiens
tcacagccctgctgg

SEQ ID NO: 559090 - DNA, 15 bp, Homo sapiens
gtcacagccctgctg

SEQ ID NO: 559091 - DNA, 15 bp, Homo sapiens
agtcacagccctgct

SEQ ID NO: 559092 - DNA, 15 bp, Homo sapiens
gagtcacagccctgc

SEQ ID NO: 559093 - DNA, 15 bp, Homo sapiens
ggagtcacagccctg

SEQ ID NO: 559094 - DNA, 15 bp, Homo sapiens
tggagtcacagccct

SEQ ID NO: 559095 - DNA, 15 bp, Homo sapiens
ctggagtcacagccc

SEQ ID NO: 559096 - DNA, 15 bp, Homo sapiens
gctggagtcacagcc

SEQ ID NO: 559097 - DNA, 15 bp, Homo sapiens
cgctggagtcacagc

SEQ ID NO: 559098 - DNA, 15 bp, Homo sapiens
tcgctggagtcacag

SEQ ID NO: 559099 - DNA, 15 bp, Homo sapiens
ctcgctggagtcaca

SEQ ID NO: 559100 - DNA, 15 bp, Homo sapiens
gctcgctggagtcac

SEQ ID NO: 559101 - DNA, 15 bp, Homo sapiens
tgctcgctggagtca

SEQ ID NO: 559102 - DNA, 15 bp, Homo sapiens
ttgctcgctggagtc

SEQ ID NO: 559103 - DNA, 15 bp, Homo sapiens
tttgctcgctggagt

SEQ ID NO: 559104 - DNA, 15 bp, Homo sapiens
ttttgctcgctggag

SEQ ID NO: 559105 - DNA, 15 bp, Homo sapiens
attttgctcgctgga

SEQ ID NO: 559106 - DNA, 15 bp, Homo sapiens
cattttgctcgctgg

SEQ ID NO: 559107 - DNA, 15 bp, Homo sapiens
ccattttgctcgctg

SEQ ID NO: 559108 - DNA, 15 bp, Homo sapiens
tccattttgctcgct

SEQ ID NO: 559109 - DNA, 15 bp, Homo sapiens
ttccattttgctcgc

SEQ ID NO: 559110 - DNA, 15 bp, Homo sapiens
gttccattttgctcg

SEQ ID NO: 559111 - DNA, 15 bp, Homo sapiens
agttccattttgctc

SEQ ID NO: 559112 - DNA, 15 bp, Homo sapiens
gagttccattttgct

SEQ ID NO: 559113 - DNA, 15 bp, Homo sapiens
ggagttccattttgc

SEQ ID NO: 559114 - DNA, 15 bp, Homo sapiens
gggagttccattttg

SEQ ID NO: 559115 - DNA, 15 bp, Homo sapiens
agggagttccatttt

SEQ ID NO: 559116 - DNA, 15 bp, Homo sapiens
gagggagttccattt

SEQ ID NO: 559117 - DNA, 15 bp, Homo sapiens
ggagggagttccatt

SEQ ID NO: 559118 - DNA, 15 bp, Homo sapiens
tggagggagttccat

SEQ ID NO: 559119 - DNA, 15 bp, Homo sapiens
ctggagggagttcca

SEQ ID NO: 559120 - DNA, 15 bp, Homo sapiens
actggagggagttcc

SEQ ID NO: 559121 - DNA, 15 bp, Homo sapiens
aactggagggagttc

SEQ ID NO: 559122 - DNA, 15 bp, Homo sapiens
aaactggagggagtt

SEQ ID NO: 559123 - DNA, 15 bp, Homo sapiens
gaaactggagggagt

SEQ ID NO: 559124 - DNA, 15 bp, Homo sapiens
agaaactggagggag

SEQ ID NO: 559125 - DNA, 15 bp, Homo sapiens
tagaaactggaggga

SEQ ID NO: 559126 - DNA, 15 bp, Homo sapiens
ctagaaactggaggg

SEQ ID NO: 559127 - DNA, 15 bp, Homo sapiens
tctagaaactggagg

SEQ ID NO: 559128 - DNA, 15 bp, Homo sapiens
gtctagaaactggag

SEQ ID NO: 559129 - DNA, 15 bp, Homo sapiens
agtctagaaactgga

SEQ ID NO: 559130 - DNA, 15 bp, Homo sapiens
cagtctagaaactgg

SEQ ID NO: 559131 - DNA, 15 bp, Homo sapiens
tcagtctagaaactg

SEQ ID NO: 559132 - DNA, 15 bp, Homo sapiens
ttcagtctagaaact

SEQ ID NO: 559133 - DNA, 15 bp, Homo sapiens
attcagtctagaaac

SEQ ID NO: 559134 - DNA, 15 bp, Homo sapiens
aattcagtctagaaa

SEQ ID NO: 559135 - DNA, 15 bp, Homo sapiens
taattcagtctagaa

SEQ ID NO: 559136 - DNA, 15 bp, Homo sapiens
ataattcagtctaga

SEQ ID NO: 559137 - DNA, 15 bp, Homo sapiens
cataattcagtctag

SEQ ID NO: 559138 - DNA, 15 bp, Homo sapiens
acataattcagtcta

SEQ ID NO: 559139 - DNA, 15 bp, Homo sapiens
tacataattcagtct

SEQ ID NO: 559140 - DNA, 15 bp, Homo sapiens
ctacataattcagtc

SEQ ID NO: 559141 - DNA, 15 bp, Homo sapiens
cctacataattcagt

SEQ ID NO: 559142 - DNA, 15 bp, Homo sapiens
ccctacataattcag

SEQ ID NO: 559143 - DNA, 15 bp, Homo sapiens
tccctacataattca

SEQ ID NO: 559144 - DNA, 15 bp, Homo sapiens
ctccctacataattc

SEQ ID NO: 559145 - DNA, 15 bp, Homo sapiens
cctccctacataatt

SEQ ID NO: 559146 - DNA, 15 bp, Homo sapiens
tcctccctacataat

SEQ ID NO: 559147 - DNA, 15 bp, Homo sapiens
gtcctccctacataa

SEQ ID NO: 559148 - DNA, 15 bp, Homo sapiens
tgtcctccctacata

SEQ ID NO: 559149 - DNA, 15 bp, Homo sapiens
ctgtcctccctacat

SEQ ID NO: 559150 - DNA, 15 bp, Homo sapiens
tctgtcctccctaca

SEQ ID NO: 559151 - DNA, 15 bp, Homo sapiens
ttctgtcctccctac

SEQ ID NO: 559152 - DNA, 15 bp, Homo sapiens
cttctgtcctcccta

SEQ ID NO: 559153 - DNA, 15 bp, Homo sapiens
ccttctgtcctccct

SEQ ID NO: 559154 - DNA, 15 bp, Homo sapiens
tccttctgtcctccc

SEQ ID NO: 559155 - DNA, 15 bp, Homo sapiens
gtccttctgtcctcc

SEQ ID NO: 559156 - DNA, 15 bp, Homo sapiens
agtccttctgtcctc

SEQ ID NO: 559157 - DNA, 15 bp, Homo sapiens
gagtccttctgtcct

SEQ ID NO: 559158 - DNA, 15 bp, Homo sapiens
tgagtccttctgtcc

SEQ ID NO: 559159 - DNA, 15 bp, Homo sapiens
ctgagtccttctgtc

SEQ ID NO: 559160 - DNA, 15 bp, Homo sapiens
tctgagtccttctgt

SEQ ID NO: 559161 - DNA, 15 bp, Homo sapiens
ttctgagtccttctg

SEQ ID NO: 559162 - DNA, 15 bp, Homo sapiens
gttctgagtccttct

SEQ ID NO: 559163 - DNA, 15 bp, Homo sapiens
ggttctgagtccttc

SEQ ID NO: 559164 - DNA, 15 bp, Homo sapiens
gggttctgagtcctt

SEQ ID NO: 559165 - DNA, 15 bp, Homo sapiens
tgggttctgagtcct

SEQ ID NO: 559166 - DNA, 15 bp, Homo sapiens
gtgggttctgagtcc

SEQ ID NO: 559167 - DNA, 15 bp, Homo sapiens
tgtgggttctgagtc

SEQ ID NO: 559168 - DNA, 15 bp, Homo sapiens
gtgtgggttctgagt

SEQ ID NO: 559169 - DNA, 15 bp, Homo sapiens
agtgtgggttctgag

SEQ ID NO: 559170 - DNA, 15 bp, Homo sapiens
gagtgtgggttctga

SEQ ID NO: 559171 - DNA, 15 bp, Homo sapiens
ggagtgtgggttctg

SEQ ID NO: 559172 - DNA, 15 bp, Homo sapiens
gggagtgtgggttct

SEQ ID NO: 559173 - DNA, 15 bp, Homo sapiens
tgggagtgtgggttc

SEQ ID NO: 559174 - DNA, 15 bp, Homo sapiens
ctgggagtgtgggtt

SEQ ID NO: 559175 - DNA, 15 bp, Homo sapiens
tctgggagtgtgggt

SEQ ID NO: 559176 - DNA, 15 bp, Homo sapiens
gtctgggagtgtggg

SEQ ID NO: 559177 - DNA, 15 bp, Homo sapiens
ggtctgggagtgtgg

SEQ ID NO: 559178 - DNA, 15 bp, Homo sapiens
tggtctgggagtgtg

SEQ ID NO: 559179 - DNA, 15 bp, Homo sapiens
atggtctgggagtgt

SEQ ID NO: 559180 - DNA, 15 bp, Homo sapiens
catggtctgggagtg

SEQ ID NO: 559181 - DNA, 15 bp, Homo sapiens
tcatggtctgggagt

SEQ ID NO: 559182 - DNA, 15 bp, Homo sapiens
ttcatggtctgggag

SEQ ID NO: 559183 - DNA, 15 bp, Homo sapiens
attcatggtctggga

SEQ ID NO: 559184 - DNA, 15 bp, Homo sapiens
tattcatggtctggg

SEQ ID NO: 559185 - DNA, 15 bp, Homo sapiens
gtattcatggtctgg

SEQ ID NO: 559186 - DNA, 15 bp, Homo sapiens
ggtattcatggtctg

SEQ ID NO: 559187 - DNA, 15 bp, Homo sapiens
aggtattcatggtct

SEQ ID NO: 559188 - DNA, 15 bp, Homo sapiens
aaggtattcatggtc

SEQ ID NO: 559189 - DNA, 15 bp, Homo sapiens
gaaggtattcatggt

SEQ ID NO: 559190 - DNA, 15 bp, Homo sapiens
ggaaggtattcatgg

SEQ ID NO: 559191 - DNA, 15 bp, Homo sapiens
gggaaggtattcatg

SEQ ID NO: 559192 - DNA, 15 bp, Homo sapiens
cgggaaggtattcat

SEQ ID NO: 559193 - DNA, 15 bp, Homo sapiens
acgggaaggtattca

SEQ ID NO: 559194 - DNA, 15 bp, Homo sapiens
cacgggaaggtattc

SEQ ID NO: 559195 - DNA, 15 bp, Homo sapiens
ccacgggaaggtatt

SEQ ID NO: 559196 - DNA, 15 bp, Homo sapiens
gccacgggaaggtat

SEQ ID NO: 559197 - DNA, 15 bp, Homo sapiens
tgccacgggaaggta

SEQ ID NO: 559198 - DNA, 15 bp, Homo sapiens
ctgccacgggaaggt

SEQ ID NO: 559199 - DNA, 15 bp, Homo sapiens
tctgccacgggaagg

SEQ ID NO: 559200 - DNA, 15 bp, Homo sapiens
ctctgccacgggaag

SEQ ID NO: 559201 - DNA, 15 bp, Homo sapiens
gctctgccacgggaa

SEQ ID NO: 559202 - DNA, 15 bp, Homo sapiens
tgctctgccacggga

SEQ ID NO: 559203 - DNA, 15 bp, Homo sapiens
atgctctgccacggg

SEQ ID NO: 559204 - DNA, 15 bp, Homo sapiens
gatgctctgccacgg

SEQ ID NO: 559205 - DNA, 15 bp, Homo sapiens
tgatgctctgccacg

SEQ ID NO: 559206 - DNA, 15 bp, Homo sapiens
gtgatgctctgccac

SEQ ID NO: 559207 - DNA, 15 bp, Homo sapiens
ggtgatgctctgcca

SEQ ID NO: 559208 - DNA, 15 bp, Homo sapiens
tggtgatgctctgcc

SEQ ID NO: 559209 - DNA, 15 bp, Homo sapiens
atggtgatgctctgc

SEQ ID NO: 559210 - DNA, 15 bp, Homo sapiens
tatggtgatgctctg

SEQ ID NO: 559211 - DNA, 15 bp, Homo sapiens
ctatggtgatgctct

SEQ ID NO: 559212 - DNA, 15 bp, Homo sapiens
cctatggtgatgctc

SEQ ID NO: 559213 - DNA, 15 bp, Homo sapiens
acctatggtgatgct

SEQ ID NO: 559214 - DNA, 15 bp, Homo sapiens
cacctatggtgatgc

SEQ ID NO: 559215 - DNA, 15 bp, Homo sapiens
acacctatggtgatg

SEQ ID NO: 559216 - DNA, 15 bp, Homo sapiens
gacacctatggtgat

SEQ ID NO: 559217 - DNA, 15 bp, Homo sapiens
ggacacctatggtga

SEQ ID NO: 559218 - DNA, 15 bp, Homo sapiens
tggacacctatggtg

SEQ ID NO: 559219 - DNA, 15 bp, Homo sapiens
gtggacacctatggt

SEQ ID NO: 559220 - DNA, 15 bp, Homo sapiens
tgtggacacctatgg

SEQ ID NO: 559221 - DNA, 15 bp, Homo sapiens
ttgtggacacctatg

SEQ ID NO: 559222 - DNA, 15 bp, Homo sapiens
cttgtggacacctat

SEQ ID NO: 559223 - DNA, 15 bp, Homo sapiens
acttgtggacaccta

SEQ ID NO: 559224 - DNA, 15 bp, Homo sapiens
cacttgtggacacct

SEQ ID NO: 559225 - DNA, 15 bp, Homo sapiens
tcacttgtggacacc

SEQ ID NO: 559226 - DNA, 15 bp, Homo sapiens
gtcacttgtggacac

SEQ ID NO: 559227 - DNA, 15 bp, Homo sapiens
cgtcacttgtggaca

SEQ ID NO: 559228 - DNA, 15 bp, Homo sapiens
tcgtcacttgtggac

SEQ ID NO: 559229 - DNA, 15 bp, Homo sapiens
gtcgtcacttgtgga

SEQ ID NO: 559230 - DNA, 15 bp, Homo sapiens
cgtcgtcacttgtgg

SEQ ID NO: 559231 - DNA, 15 bp, Homo sapiens
gcgtcgtcacttgtg

SEQ ID NO: 559232 - DNA, 15 bp, Homo sapiens
tgcgtcgtcacttgt

SEQ ID NO: 559233 - DNA, 15 bp, Homo sapiens
gtgcgtcgtcacttg

SEQ ID NO: 559234 - DNA, 15 bp, Homo sapiens
tgtgcgtcgtcactt

SEQ ID NO: 559235 - DNA, 15 bp, Homo sapiens
ctgtgcgtcgtcact

SEQ ID NO: 559236 - DNA, 15 bp, Homo sapiens
gctgtgcgtcgtcac

SEQ ID NO: 559237 - DNA, 15 bp, Homo sapiens
ggctgtgcgtcgtca

SEQ ID NO: 559238 - DNA, 15 bp, Homo sapiens
tggctgtgcgtcgtc

SEQ ID NO: 559239 - DNA, 15 bp, Homo sapiens
gtggctgtgcgtcgt

SEQ ID NO: 559240 - DNA, 15 bp, Homo sapiens
tgtggctgtgcgtcg

SEQ ID NO: 559241 - DNA, 15 bp, Homo sapiens
atgtggctgtgcgtc

SEQ ID NO: 559242 - DNA, 15 bp, Homo sapiens
catgtggctgtgcgt

SEQ ID NO: 559243 - DNA, 15 bp, Homo sapiens
tcatgtggctgtgcg

SEQ ID NO: 559244 - DNA, 15 bp, Homo sapiens
ctcatgtggctgtgc

SEQ ID NO: 559245 - DNA, 15 bp, Homo sapiens
ccctcatgtggctgt

SEQ ID NO: 559246 - DNA, 15 bp, Homo sapiens
cccctcatgtggctg

SEQ ID NO: 559247 - DNA, 15 bp, Homo sapiens
ccccctcatgtggct

SEQ ID NO: 559248 - DNA, 15 bp, Homo sapiens
accccctcatgtggc

SEQ ID NO: 559249 - DNA, 15 bp, Homo sapiens
gaccccctcatgtgg

SEQ ID NO: 559250 - DNA, 15 bp, Homo sapiens
ggaccccctcatgtg

SEQ ID NO: 559251 - DNA, 15 bp, Homo sapiens
gggaccccctcatgt

SEQ ID NO: 559252 - DNA, 15 bp, Homo sapiens
agggaccccctcatg

SEQ ID NO: 559253 - DNA, 15 bp, Homo sapiens
cagggaccccctcat

SEQ ID NO: 559254 - DNA, 15 bp, Homo sapiens
ccagggaccccctca

SEQ ID NO: 559255 - DNA, 15 bp, Homo sapiens
cccagggaccccctc

SEQ ID NO: 559256 - DNA, 15 bp, Homo sapiens
ccccagggaccccct

SEQ ID NO: 559257 - DNA, 15 bp, Homo sapiens
tccccagggaccccc

SEQ ID NO: 559258 - DNA, 15 bp, Homo sapiens
gtccccagggacccc

SEQ ID NO: 559259 - DNA, 15 bp, Homo sapiens
agtccccagggaccc

SEQ ID NO: 559260 - DNA, 15 bp, Homo sapiens
cagtccccagggacc

SEQ ID NO: 559261 - DNA, 15 bp, Homo sapiens
ccagtccccagggac

SEQ ID NO: 559262 - DNA, 15 bp, Homo sapiens
gccagtccccaggga

SEQ ID NO: 559263 - DNA, 15 bp, Homo sapiens
agccagtccccaggg

SEQ ID NO: 559264 - DNA, 15 bp, Homo sapiens
cagccagtccccagg

SEQ ID NO: 559265 - DNA, 15 bp, Homo sapiens
tcagccagtccccag

SEQ ID NO: 559266 - DNA, 15 bp, Homo sapiens
ctcagccagtcccca

SEQ ID NO: 559267 - DNA, 15 bp, Homo sapiens
cctcagccagtcccc

SEQ ID NO: 559268 - DNA, 15 bp, Homo sapiens
ccctcagccagtccc

SEQ ID NO: 559269 - DNA, 15 bp, Homo sapiens
tccctcagccagtcc

SEQ ID NO: 559270 - DNA, 15 bp, Homo sapiens
gtccctcagccagtc

SEQ ID NO: 559271 - DNA, 15 bp, Homo sapiens
agtccctcagccagt

SEQ ID NO: 559272 - DNA, 15 bp, Homo sapiens
cagtccctcagccag

SEQ ID NO: 559273 - DNA, 15 bp, Homo sapiens
ccagtccctcagcca

SEQ ID NO: 559274 - DNA, 15 bp, Homo sapiens
cccagtccctcagcc

SEQ ID NO: 559275 - DNA, 15 bp, Homo sapiens
gcccagtccctcagc

SEQ ID NO: 559276 - DNA, 15 bp, Homo sapiens
ggcccagtccctcag

SEQ ID NO: 559277 - DNA, 15 bp, Homo sapiens
tggcccagtccctca

SEQ ID NO: 559278 - DNA, 15 bp, Homo sapiens
ctggcccagtccctc

SEQ ID NO: 559279 - DNA, 15 bp, Homo sapiens
tctggcccagtccct

SEQ ID NO: 559280 - DNA, 15 bp, Homo sapiens
ctctggcccagtccc

SEQ ID NO: 559281 - DNA, 15 bp, Homo sapiens
cctctggcccagtcc

SEQ ID NO: 559282 - DNA, 15 bp, Homo sapiens
tcctctggcccagtc

SEQ ID NO: 559283 - DNA, 15 bp, Homo sapiens
ctcctctggcccagt

SEQ ID NO: 559284 - DNA, 15 bp, Homo sapiens
cctcctctggcccag

SEQ ID NO: 559285 - DNA, 15 bp, Homo sapiens
gcctcctctggccca

SEQ ID NO: 559286 - DNA, 15 bp, Homo sapiens
ggcctcctctggccc

SEQ ID NO: 559287 - DNA, 15 bp, Homo sapiens
tggcctcctctggcc

SEQ ID NO: 559288 - DNA, 15 bp, Homo sapiens
atggcctcctctggc

SEQ ID NO: 559289 - DNA, 15 bp, Homo sapiens
catggcctcctctgg

SEQ ID NO: 559290 - DNA, 15 bp, Homo sapiens
tcatggcctcctctg

SEQ ID NO: 559291 - DNA, 15 bp, Homo sapiens
gtcatggcctcctct

SEQ ID NO: 559292 - DNA, 15 bp, Homo sapiens
tgtcatggcctcctc

SEQ ID NO: 559293 - DNA, 15 bp, Homo sapiens
ctgtcatggcctcct

SEQ ID NO: 559294 - DNA, 15 bp, Homo sapiens
gctgtcatggcctcc

SEQ ID NO: 559295 - DNA, 15 bp, Homo sapiens
ggctgtcatggcctc

SEQ ID NO: 559296 - DNA, 15 bp, Homo sapiens
aggctgtcatggcct

SEQ ID NO: 559297 - DNA, 15 bp, Homo sapiens
gaggctgtcatggcc

SEQ ID NO: 559298 - DNA, 15 bp, Homo sapiens
tgaggctgtcatggc

SEQ ID NO: 559299 - DNA, 15 bp, Homo sapiens
atgaggctgtcatgg

SEQ ID NO: 559300 - DNA, 15 bp, Homo sapiens
gatgaggctgtcatg

SEQ ID NO: 559301 - DNA, 15 bp, Homo sapiens
ggatgaggctgtcat

SEQ ID NO: 559302 - DNA, 15 bp, Homo sapiens
gggatgaggctgtca

SEQ ID NO: 559303 - DNA, 15 bp, Homo sapiens
agggatgaggctgtc

SEQ ID NO: 559304 - DNA, 15 bp, Homo sapiens
gagggatgaggctgt

SEQ ID NO: 559305 - DNA, 15 bp, Homo sapiens
agagggatgaggctg

SEQ ID NO: 559306 - DNA, 15 bp, Homo sapiens
cagagggatgaggct

SEQ ID NO: 559307 - DNA, 15 bp, Homo sapiens
acagagggatgaggc

SEQ ID NO: 559308 - DNA, 15 bp, Homo sapiens
gacagagggatgagg

SEQ ID NO: 559309 - DNA, 15 bp, Homo sapiens
agacagagggatgag

SEQ ID NO: 559310 - DNA, 15 bp, Homo sapiens
gagacagagggatga

SEQ ID NO: 559311 - DNA, 15 bp, Homo sapiens
ggagacagagggatg

SEQ ID NO: 559312 - DNA, 15 bp, Homo sapiens
aggagacagagggat

SEQ ID NO: 559313 - DNA, 15 bp, Homo sapiens
aaggagacagaggga

SEQ ID NO: 559314 - DNA, 15 bp, Homo sapiens
gaaggagacagaggg

SEQ ID NO: 559315 - DNA, 15 bp, Homo sapiens
agaaggagacagagg

SEQ ID NO: 559316 - DNA, 15 bp, Homo sapiens
cagaaggagacagag

SEQ ID NO: 559317 - DNA, 15 bp, Homo sapiens
acagaaggagacaga

SEQ ID NO: 559318 - DNA, 15 bp, Homo sapiens
gacagaaggagacag

SEQ ID NO: 559319 - DNA, 15 bp, Homo sapiens
agacagaaggagaca

SEQ ID NO: 559320 - DNA, 15 bp, Homo sapiens
cagacagaaggagac

SEQ ID NO: 559321 - DNA, 15 bp, Homo sapiens
acagacagaaggaga

SEQ ID NO: 559322 - DNA, 15 bp, Homo sapiens
gacagacagaaggag

SEQ ID NO: 559323 - DNA, 15 bp, Homo sapiens
agacagacagaagga

SEQ ID NO: 559324 - DNA, 15 bp, Homo sapiens
gagacagacagaagg

SEQ ID NO: 559325 - DNA, 15 bp, Homo sapiens
ggagacagacagaag

SEQ ID NO: 559326 - DNA, 15 bp, Homo sapiens
tggagacagacagaa

SEQ ID NO: 559327 - DNA, 15 bp, Homo sapiens
ttggagacagacaga

SEQ ID NO: 559328 - DNA, 15 bp, Homo sapiens
tttggagacagacag

SEQ ID NO: 559329 - DNA, 15 bp, Homo sapiens
atttggagacagaca

SEQ ID NO: 559330 - DNA, 15 bp, Homo sapiens
aatttggagacagac

SEQ ID NO: 559331 - DNA, 15 bp, Homo sapiens
caatttggagacaga

SEQ ID NO: 559332 - DNA, 15 bp, Homo sapiens
acaatttggagacag

SEQ ID NO: 559333 - DNA, 15 bp, Homo sapiens
gacaatttggagaca

SEQ ID NO: 559334 - DNA, 15 bp, Homo sapiens
ggacaatttggagac

SEQ ID NO: 559335 - DNA, 15 bp, Homo sapiens
tggacaatttggaga

SEQ ID NO: 559336 - DNA, 15 bp, Homo sapiens
gtggacaatttggag

SEQ ID NO: 559337 - DNA, 15 bp, Homo sapiens
ggtggacaatttgga

SEQ ID NO: 559338 - DNA, 15 bp, Homo sapiens
tggtggacaatttgg

SEQ ID NO: 559339 - DNA, 15 bp, Homo sapiens
ctggtggacaatttg

SEQ ID NO: 559340 - DNA, 15 bp, Homo sapiens
tctggtggacaattt

SEQ ID NO: 559341 - DNA, 15 bp, Homo sapiens
ttctggtggacaatt

SEQ ID NO: 559342 - DNA, 15 bp, Homo sapiens
attctggtggacaat

SEQ ID NO: 559343 - DNA, 15 bp, Homo sapiens
cattctggtggacaa

SEQ ID NO: 559344 - DNA, 15 bp, Homo sapiens
ccattctggtggaca

SEQ ID NO: 559345 - DNA, 15 bp, Homo sapiens
cccattctggtggac

SEQ ID NO: 559346 - DNA, 15 bp, Homo sapiens
ccccattctggtgga

SEQ ID NO: 559347 - DNA, 15 bp, Homo sapiens
tccccattctggtgg

SEQ ID NO: 559348 - DNA, 15 bp, Homo sapiens
gtccccattctggtg

SEQ ID NO: 559349 - DNA, 15 bp, Homo sapiens
tgtccccattctggt

SEQ ID NO: 559350 - DNA, 15 bp, Homo sapiens
ctgtccccattctgg

SEQ ID NO: 559351 - DNA, 15 bp, Homo sapiens
cctgtccccattctg

SEQ ID NO: 559352 - DNA, 15 bp, Homo sapiens
ccctgtccccattct

SEQ ID NO: 559353 - DNA, 15 bp, Homo sapiens
tccctgtccccattc

SEQ ID NO: 559354 - DNA, 15 bp, Homo sapiens
ttccctgtccccatt

SEQ ID NO: 559355 - DNA, 15 bp, Homo sapiens
cttccctgtccccat

SEQ ID NO: 559356 - DNA, 15 bp, Homo sapiens
ccttccctgtcccca

SEQ ID NO: 559357 - DNA, 15 bp, Homo sapiens
tccttccctgtcccc

SEQ ID NO: 559358 - DNA, 15 bp, Homo sapiens
ctccttccctgtccc

SEQ ID NO: 559359 - DNA, 15 bp, Homo sapiens
cctccttccctgtcc

SEQ ID NO: 559360 - DNA, 15 bp, Homo sapiens
ccctccttccctgtc

SEQ ID NO: 559361 - DNA, 15 bp, Homo sapiens
accctccttccctgt

SEQ ID NO: 559362 - DNA, 15 bp, Homo sapiens
gaccctccttccctg

SEQ ID NO: 559363 - DNA, 15 bp, Homo sapiens
tgaccctccttccct

SEQ ID NO: 559364 - DNA, 15 bp, Homo sapiens
ctgaccctccttccc

SEQ ID NO: 559365 - DNA, 15 bp, Homo sapiens
cctgaccctccttcc

SEQ ID NO: 559366 - DNA, 15 bp, Homo sapiens
tcctgaccctccttc

SEQ ID NO: 559367 - DNA, 15 bp, Homo sapiens
ttcctgaccctcctt

SEQ ID NO: 559368 - DNA, 15 bp, Homo sapiens
cttcctgaccctcct

SEQ ID NO: 559369 - DNA, 15 bp, Homo sapiens
gcttcctgaccctcc

SEQ ID NO: 559370 - DNA, 15 bp, Homo sapiens
tgcttcctgaccctc

SEQ ID NO: 559371 - DNA, 15 bp, Homo sapiens
gtgcttcctgaccct

SEQ ID NO: 559372 - DNA, 15 bp, Homo sapiens
tgtgcttcctgaccc

SEQ ID NO: 559373 - DNA, 15 bp, Homo sapiens
ctgtgcttcctgacc

SEQ ID NO: 559374 - DNA, 15 bp, Homo sapiens
tctgtgcttcctgac

SEQ ID NO: 559375 - DNA, 15 bp, Homo sapiens
ttctgtgcttcctga

SEQ ID NO: 559376 - DNA, 15 bp, Homo sapiens
cttctgtgcttcctg

SEQ ID NO: 559377 - DNA, 15 bp, Homo sapiens
ccttctgtgcttcct

SEQ ID NO: 559378 - DNA, 15 bp, Homo sapiens
accttctgtgcttcc

SEQ ID NO: 559379 - DNA, 15 bp, Homo sapiens
gaccttctgtgcttc

SEQ ID NO: 559380 - DNA, 15 bp, Homo sapiens
agaccttctgtgctt

SEQ ID NO: 559381 - DNA, 15 bp, Homo sapiens
tagaccttctgtgct

SEQ ID NO: 559382 - DNA, 15 bp, Homo sapiens
ctagaccttctgtgc

SEQ ID NO: 559383 - DNA, 15 bp, Homo sapiens
cctagaccttctgtg

SEQ ID NO: 559384 - DNA, 15 bp, Homo sapiens
gcctagaccttctgt

SEQ ID NO: 559385 - DNA, 15 bp, Homo sapiens
agcctagaccttctg

SEQ ID NO: 559386 - DNA, 15 bp, Homo sapiens
cagcctagaccttct

SEQ ID NO: 559387 - DNA, 15 bp, Homo sapiens
acagcctagaccttc

SEQ ID NO: 559388 - DNA, 15 bp, Homo sapiens
cacagcctagacctt

SEQ ID NO: 559389 - DNA, 15 bp, Homo sapiens
ccacagcctagacct

SEQ ID NO: 559390 - DNA, 15 bp, Homo sapiens
gccacagcctagacc

SEQ ID NO: 559391 - DNA, 15 bp, Homo sapiens
agccacagcctagac

SEQ ID NO: 559392 - DNA, 15 bp, Homo sapiens
tagccacagcctaga

SEQ ID NO: 559393 - DNA, 15 bp, Homo sapiens
ctagccacagcctag

SEQ ID NO: 559394 - DNA, 15 bp, Homo sapiens
cctagccacagccta

SEQ ID NO: 559395 - DNA, 15 bp, Homo sapiens
ccctagccacagcct

SEQ ID NO: 559396 - DNA, 15 bp, Homo sapiens
accctagccacagcc

SEQ ID NO: 559397 - DNA, 15 bp, Homo sapiens
gaccctagccacagc

SEQ ID NO: 559398 - DNA, 15 bp, Homo sapiens
ggaccctagccacag

SEQ ID NO: 559399 - DNA, 15 bp, Homo sapiens
gggaccctagccaca

SEQ ID NO: 559400 - DNA, 15 bp, Homo sapiens
agggaccctagccac

SEQ ID NO: 559401 - DNA, 15 bp, Homo sapiens
aagggaccctagcca

SEQ ID NO: 559402 - DNA, 15 bp, Homo sapiens
aaagggaccctagcc

SEQ ID NO: 559403 - DNA, 15 bp, Homo sapiens
gaaagggaccctagc

SEQ ID NO: 559404 - DNA, 15 bp, Homo sapiens
ggaaagggaccctag

SEQ ID NO: 559405 - DNA, 15 bp, Homo sapiens
gggaaagggacccta

SEQ ID NO: 559406 - DNA, 15 bp, Homo sapiens
agggaaagggaccct

SEQ ID NO: 559407 - DNA, 15 bp, Homo sapiens
cagggaaagggaccc

SEQ ID NO: 559408 - DNA, 15 bp, Homo sapiens
gcagggaaagggacc

SEQ ID NO: 559409 - DNA, 15 bp, Homo sapiens
ggcagggaaagggac

SEQ ID NO: 559410 - DNA, 15 bp, Homo sapiens
cggcagggaaaggga

SEQ ID NO: 559411 - DNA, 15 bp, Homo sapiens
gcggcagggaaaggg

SEQ ID NO: 559412 - DNA, 15 bp, Homo sapiens
tgcggcagggaaagg

SEQ ID NO: 559413 - DNA, 15 bp, Homo sapiens
ctgcggcagggaaag

SEQ ID NO: 559414 - DNA, 15 bp, Homo sapiens
gctgcggcagggaaa

SEQ ID NO: 559415 - DNA, 15 bp, Homo sapiens
ggctgcggcagggaa

SEQ ID NO: 559416 - DNA, 15 bp, Homo sapiens
gggctgcggcaggga

SEQ ID NO: 559417 - DNA, 15 bp, Homo sapiens
ggggctgcggcaggg

SEQ ID NO: 559418 - DNA, 15 bp, Homo sapiens
gggggctgcggcagg

SEQ ID NO: 559419 - DNA, 15 bp, Homo sapiens
tgggggctgcggcag

SEQ ID NO: 559420 - DNA, 15 bp, Homo sapiens
ttgggggctgcggca

SEQ ID NO: 559421 - DNA, 15 bp, Homo sapiens
tttgggggctgcggc

SEQ ID NO: 559422 - DNA, 15 bp, Homo sapiens
atttgggggctgcgg

SEQ ID NO: 559423 - DNA, 15 bp, Homo sapiens
gatttgggggctgcg

SEQ ID NO: 559424 - DNA, 15 bp, Homo sapiens
tgatttgggggctgc

SEQ ID NO: 559425 - DNA, 15 bp, Homo sapiens
ctgatttgggggctg

SEQ ID NO: 559426 - DNA, 15 bp, Homo sapiens
gctgatttgggggct

SEQ ID NO: 559427 - DNA, 15 bp, Homo sapiens
tgctgatttgggggc

SEQ ID NO: 559428 - DNA, 15 bp, Homo sapiens
atgctgatttggggg

SEQ ID NO: 559429 - DNA, 15 bp, Homo sapiens
gatgctgatttgggg

SEQ ID NO: 559430 - DNA, 15 bp, Homo sapiens
ggatgctgatttggg

SEQ ID NO: 559431 - DNA, 15 bp, Homo sapiens
gggatgctgatttgg

SEQ ID NO: 559432 - DNA, 15 bp, Homo sapiens
tgggatgctgatttg

SEQ ID NO: 559433 - DNA, 15 bp, Homo sapiens
gtgggatgctgattt

SEQ ID NO: 559434 - DNA, 15 bp, Homo sapiens
ggtgggatgctgatt

SEQ ID NO: 559435 - DNA, 15 bp, Homo sapiens
gggtgggatgctgat

SEQ ID NO: 559436 - DNA, 15 bp, Homo sapiens
agggtgggatgctga

SEQ ID NO: 559437 - DNA, 15 bp, Homo sapiens
gagggtgggatgctg

SEQ ID NO: 559438 - DNA, 15 bp, Homo sapiens
tgagggtgggatgct

SEQ ID NO: 559439 - DNA, 15 bp, Homo sapiens
ttgagggtgggatgc

SEQ ID NO: 559440 - DNA, 15 bp, Homo sapiens
tttgagggtgggatg

SEQ ID NO: 559441 - DNA, 15 bp, Homo sapiens
atttgagggtgggat

SEQ ID NO: 559442 - DNA, 15 bp, Homo sapiens
gatttgagggtggga

SEQ ID NO: 559443 - DNA, 15 bp, Homo sapiens
ggatttgagggtggg

SEQ ID NO: 559444 - DNA, 15 bp, Homo sapiens
tggatttgagggtgg

SEQ ID NO: 559445 - DNA, 15 bp, Homo sapiens
ctggatttgagggtg

SEQ ID NO: 559446 - DNA, 15 bp, Homo sapiens
actggatttgagggt

SEQ ID NO: 559447 - DNA, 15 bp, Homo sapiens
tactggatttgaggg

SEQ ID NO: 559448 - DNA, 15 bp, Homo sapiens
ttactggatttgagg

SEQ ID NO: 559449 - DNA, 15 bp, Homo sapiens
cttactggatttgag

SEQ ID NO: 559450 - DNA, 15 bp, Homo sapiens
tcttactggatttga

SEQ ID NO: 559451 - DNA, 15 bp, Homo sapiens
ttcttactggatttg

SEQ ID NO: 559452 - DNA, 15 bp, Homo sapiens
attcttactggattt

SEQ ID NO: 559453 - DNA, 15 bp, Homo sapiens
cattcttactggatt

SEQ ID NO: 559454 - DNA, 15 bp, Homo sapiens
gcattcttactggat

SEQ ID NO: 559455 - DNA, 15 bp, Homo sapiens
agcattcttactgga

SEQ ID NO: 559456 - DNA, 15 bp, Homo sapiens
tagcattcttactgg

SEQ ID NO: 559457 - DNA, 15 bp, Homo sapiens
gtagcattcttactg

SEQ ID NO: 559458 - DNA, 15 bp, Homo sapiens
cgtagcattcttact

SEQ ID NO: 559459 - DNA, 15 bp, Homo sapiens
tcgtagcattcttac

SEQ ID NO: 559460 - DNA, 15 bp, Homo sapiens
atcgtagcattctta

SEQ ID NO: 559461 - DNA, 15 bp, Homo sapiens
gatcgtagcattctt

SEQ ID NO: 559462 - DNA, 15 bp, Homo sapiens
cgatcgtagcattct

SEQ ID NO: 559463 - DNA, 15 bp, Homo sapiens
ccgatcgtagcattc

SEQ ID NO: 559464 - DNA, 15 bp, Homo sapiens
gccgatcgtagcatt

SEQ ID NO: 559465 - DNA, 15 bp, Homo sapiens
tgccgatcgtagcat

SEQ ID NO: 559466 - DNA, 15 bp, Homo sapiens
ctgccgatcgtagca

SEQ ID NO: 559467 - DNA, 15 bp, Homo sapiens
actgccgatcgtagc

SEQ ID NO: 559468 - DNA, 15 bp, Homo sapiens
cactgccgatcgtag

SEQ ID NO: 559469 - DNA, 15 bp, Homo sapiens
acactgccgatcgta

SEQ ID NO: 559470 - DNA, 15 bp, Homo sapiens
cacactgccgatcgt

SEQ ID NO: 559471 - DNA, 15 bp, Homo sapiens
ccacactgccgatcg

SEQ ID NO: 559472 - DNA, 15 bp, Homo sapiens
gccacactgccgatc

SEQ ID NO: 559473 - DNA, 15 bp, Homo sapiens
agccacactgccgat

SEQ ID NO: 559474 - DNA, 15 bp, Homo sapiens
gagccacactgccga

SEQ ID NO: 559475 - DNA, 15 bp, Homo sapiens
ggagccacactgccg

SEQ ID NO: 559476 - DNA, 15 bp, Homo sapiens
gggagccacactgcc

SEQ ID NO: 559477 - DNA, 15 bp, Homo sapiens
agggagccacactgc

SEQ ID NO: 559478 - DNA, 15 bp, Homo sapiens
gagggagccacactg

SEQ ID NO: 559479 - DNA, 15 bp, Homo sapiens
ggagggagccacact

SEQ ID NO: 559480 - DNA, 15 bp, Homo sapiens
gggagggagccacac

SEQ ID NO: 559481 - DNA, 15 bp, Homo sapiens
agggagggagccaca

SEQ ID NO: 559482 - DNA, 15 bp, Homo sapiens
cagggagggagccac

SEQ ID NO: 559483 - DNA, 15 bp, Homo sapiens
gcagggagggagcca

SEQ ID NO: 559484 - DNA, 15 bp, Homo sapiens
tgcagggagggagcc

SEQ ID NO: 559485 - DNA, 15 bp, Homo sapiens
ctgcagggagggagc

SEQ ID NO: 559486 - DNA, 15 bp, Homo sapiens
cctgcagggagggag

SEQ ID NO: 559487 - DNA, 15 bp, Homo sapiens
acctgcagggaggga

SEQ ID NO: 559488 - DNA, 15 bp, Homo sapiens
aacctgcagggaggg

SEQ ID NO: 559489 - DNA, 15 bp, Homo sapiens
aaacctgcagggagg

SEQ ID NO: 559490 - DNA, 15 bp, Homo sapiens
gaaacctgcagggag

SEQ ID NO: 559491 - DNA, 15 bp, Homo sapiens
tgaaacctgcaggga

SEQ ID NO: 559492 - DNA, 15 bp, Homo sapiens
gtgaaacctgcaggg

SEQ ID NO: 559493 - DNA, 15 bp, Homo sapiens
agtgaaacctgcagg

SEQ ID NO: 559494 - DNA, 15 bp, Homo sapiens
cagtgaaacctgcag

SEQ ID NO: 559495 - DNA, 15 bp, Homo sapiens
ccagtgaaacctgca

SEQ ID NO: 559496 - DNA, 15 bp, Homo sapiens
tccagtgaaacctgc

SEQ ID NO: 559497 - DNA, 15 bp, Homo sapiens
ctccagtgaaacctg

SEQ ID NO: 559498 - DNA, 15 bp, Homo sapiens
cctccagtgaaacct

SEQ ID NO: 559499 - DNA, 15 bp, Homo sapiens
gcctccagtgaaacc

SEQ ID NO: 559500 - DNA, 15 bp, Homo sapiens
ggcctccagtgaaac

SEQ ID NO: 559501 - DNA, 15 bp, Homo sapiens
tggcctccagtgaaa

SEQ ID NO: 559502 - DNA, 15 bp, Homo sapiens
gtggcctccagtgaa

SEQ ID NO: 559503 - DNA, 15 bp, Homo sapiens
cgtggcctccagtga

SEQ ID NO: 559504 - DNA, 15 bp, Homo sapiens
acgtggcctccagtg

SEQ ID NO: 559505 - DNA, 15 bp, Homo sapiens
tacgtggcctccagt

SEQ ID NO: 559506 - DNA, 15 bp, Homo sapiens
ttacgtggcctccag

SEQ ID NO: 559507 - DNA, 15 bp, Homo sapiens
cttacgtggcctcca

SEQ ID NO: 559508 - DNA, 15 bp, Homo sapiens
acttacgtggcctcc

SEQ ID NO: 559509 - DNA, 15 bp, Homo sapiens
cacttacgtggcctc

SEQ ID NO: 559510 - DNA, 15 bp, Homo sapiens
tcacttacgtggcct

SEQ ID NO: 559511 - DNA, 15 bp, Homo sapiens
ttcacttacgtggcc

SEQ ID NO: 559512 - DNA, 15 bp, Homo sapiens
tttcacttacgtggc

SEQ ID NO: 559513 - DNA, 15 bp, Homo sapiens
atttcacttacgtgg

SEQ ID NO: 559514 - DNA, 15 bp, Homo sapiens
aatttcacttacgtg

SEQ ID NO: 559515 - DNA, 15 bp, Homo sapiens
aaatttcacttacgt

SEQ ID NO: 559516 - DNA, 15 bp, Homo sapiens
taaatttcacttacg

SEQ ID NO: 559517 - DNA, 15 bp, Homo sapiens
ataaatttcacttac

SEQ ID NO: 559518 - DNA, 15 bp, Homo sapiens
gataaatttcactta

SEQ ID NO: 559519 - DNA, 15 bp, Homo sapiens
ggataaatttcactt

SEQ ID NO: 559520 - DNA, 15 bp, Homo sapiens
gggataaatttcact

SEQ ID NO: 559521 - DNA, 15 bp, Homo sapiens
tgggataaatttcac

SEQ ID NO: 559522 - DNA, 15 bp, Homo sapiens
atgggataaatttca

SEQ ID NO: 559523 - DNA, 15 bp, Homo sapiens
aatgggataaatttc

SEQ ID NO: 559524 - DNA, 15 bp, Homo sapiens
taatgggataaattt

SEQ ID NO: 559525 - DNA, 15 bp, Homo sapiens
ataatgggataaatt

SEQ ID NO: 559526 - DNA, 15 bp, Homo sapiens
cataatgggataaat

SEQ ID NO: 559527 - DNA, 15 bp, Homo sapiens
acataatgggataaa

SEQ ID NO: 559528 - DNA, 15 bp, Homo sapiens
cacataatgggataa

SEQ ID NO: 559529 - DNA, 15 bp, Homo sapiens
acacataatgggata

SEQ ID NO: 559530 - DNA, 15 bp, Homo sapiens
cacacataatgggat

SEQ ID NO: 559531 - DNA, 15 bp, Homo sapiens
acacacataatggga

SEQ ID NO: 559532 - DNA, 15 bp, Homo sapiens
aacacacataatggg

SEQ ID NO: 559533 - DNA, 15 bp, Homo sapiens
aaacacacataatgg

SEQ ID NO: 559534 - DNA, 15 bp, Homo sapiens
aaaacacacataatg

SEQ ID NO: 559535 - DNA, 15 bp, Homo sapiens
caaaacacacataat

SEQ ID NO: 559536 - DNA, 15 bp, Homo sapiens
tcaaaacacacataa

SEQ ID NO: 559537 - DNA, 15 bp, Homo sapiens
atcaaaacacacata

SEQ ID NO: 559538 - DNA, 15 bp, Homo sapiens
catcaaaacacacat

SEQ ID NO: 559539 - DNA, 15 bp, Homo sapiens
acatcaaaacacaca

SEQ ID NO: 559540 - DNA, 15 bp, Homo sapiens
tacatcaaaacacac

SEQ ID NO: 559541 - DNA, 15 bp, Homo sapiens
ctacatcaaaacaca

SEQ ID NO: 559542 - DNA, 15 bp, Homo sapiens
gctacatcaaaacac

SEQ ID NO: 559543 - DNA, 15 bp, Homo sapiens
tgctacatcaaaaca

SEQ ID NO: 559544 - DNA, 15 bp, Homo sapiens
ctgctacatcaaaac

SEQ ID NO: 559545 - DNA, 15 bp, Homo sapiens
cctgctacatcaaaa

SEQ ID NO: 559546 - DNA, 15 bp, Homo sapiens
tcctgctacatcaaa

SEQ ID NO: 559547 - DNA, 15 bp, Homo sapiens
gtcctgctacatcaa

SEQ ID NO: 559548 - DNA, 15 bp, Homo sapiens
ggtcctgctacatca

SEQ ID NO: 559549 - DNA, 15 bp, Homo sapiens
aggtcctgctacatc

SEQ ID NO: 559550 - DNA, 15 bp, Homo sapiens
aaggtcctgctacat

SEQ ID NO: 559551 - DNA, 15 bp, Homo sapiens
taaggtcctgctaca

SEQ ID NO: 559552 - DNA, 15 bp, Homo sapiens
gtaaggtcctgctac

SEQ ID NO: 559553 - DNA, 15 bp, Homo sapiens
ggtaaggtcctgcta

SEQ ID NO: 559554 - DNA, 15 bp, Homo sapiens
tggtaaggtcctgct

SEQ ID NO: 559555 - DNA, 15 bp, Homo sapiens
ctggtaaggtcctgc

SEQ ID NO: 559556 - DNA, 15 bp, Homo sapiens
actggtaaggtcctg

SEQ ID NO: 559557 - DNA, 15 bp, Homo sapiens
aactggtaaggtcct

SEQ ID NO: 559558 - DNA, 15 bp, Homo sapiens
aaactggtaaggtcc

SEQ ID NO: 559559 - DNA, 15 bp, Homo sapiens
aaaactggtaaggtc

SEQ ID NO: 559560 - DNA, 15 bp, Homo sapiens
aaaaactggtaaggt

SEQ ID NO: 559561 - DNA, 15 bp, Homo sapiens
aaaaaactggtaagg

SEQ ID NO: 559562 - DNA, 15 bp, Homo sapiens
aaaaaaactggtaag

SEQ ID NO: 559563 - DNA, 15 bp, Homo sapiens
aaaaaaaactggtaa

SEQ ID NO: 559564 - DNA, 15 bp, Homo sapiens
caaaaaaaactggta

SEQ ID NO: 559565 - DNA, 15 bp, Homo sapiens
acaaaaaaaactggt

SEQ ID NO: 559566 - DNA, 15 bp, Homo sapiens
aacaaaaaaaactgg

SEQ ID NO: 559567 - DNA, 15 bp, Homo sapiens
aaacaaaaaaaactg

SEQ ID NO: 559568 - DNA, 15 bp, Homo sapiens
aaaacaaaaaaaact

SEQ ID NO: 559569 - DNA, 15 bp, Homo sapiens
aaaaacaaaaaaaac

SEQ ID NO: 559570 - DNA, 15 bp, Homo sapiens
taaaaaaacaaaaaa

SEQ ID NO: 559571 - DNA, 15 bp, Homo sapiens
ataaaaaaacaaaaa

SEQ ID NO: 559572 - DNA, 15 bp, Homo sapiens
aataaaaaaacaaaa

SEQ ID NO: 559573 - DNA, 15 bp, Homo sapiens
aaataaaaaaacaaa

SEQ ID NO: 559574 - DNA, 15 bp, Homo sapiens
aaaataaaaaaacaa

SEQ ID NO: 559575 - DNA, 15 bp, Homo sapiens
aaaaataaaaaaaca

SEQ ID NO: 559576 - DNA, 15 bp, Homo sapiens
taaaaataaaaaaac

SEQ ID NO: 559577 - DNA, 15 bp, Homo sapiens
ataaaaataaaaaaa

SEQ ID NO: 559578 - DNA, 15 bp, Homo sapiens
aataaaaataaaaaa

SEQ ID NO: 559579 - DNA, 15 bp, Homo sapiens
aaaaataaaaataaa

SEQ ID NO: 559580 - DNA, 15 bp, Homo sapiens
aaaaaataaaaataa

SEQ ID NO: 559581 - DNA, 15 bp, Homo sapiens
aaaaaaataaaaata

SEQ ID NO: 559582 - DNA, 15 bp, Homo sapiens
aaaaaaaataaaaat

SEQ ID NO: 559583 - DNA, 15 bp, Homo sapiens
caaaaaaaataaaaa

SEQ ID NO: 559584 - DNA, 15 bp, Homo sapiens
ccaaaaaaaataaaa

SEQ ID NO: 559585 - DNA, 15 bp, Homo sapiens
accaaaaaaaataaa

SEQ ID NO: 559586 - DNA, 15 bp, Homo sapiens
aaccaaaaaaaataa

SEQ ID NO: 559587 - DNA, 15 bp, Homo sapiens
aaaccaaaaaaaata

SEQ ID NO: 559588 - DNA, 15 bp, Homo sapiens
gaaaccaaaaaaaat

SEQ ID NO: 559589 - DNA, 15 bp, Homo sapiens
agaaaccaaaaaaaa

SEQ ID NO: 559590 - DNA, 15 bp, Homo sapiens
aagaaaccaaaaaaa

SEQ ID NO: 559591 - DNA, 15 bp, Homo sapiens
aaagaaaccaaaaaa

SEQ ID NO: 559592 - DNA, 15 bp, Homo sapiens
aaaagaaaccaaaaa

SEQ ID NO: 559593 - DNA, 15 bp, Homo sapiens
aaaaagaaaccaaaa

SEQ ID NO: 559594 - DNA, 15 bp, Homo sapiens
aaaaaagaaaccaaa

SEQ ID NO: 559595 - DNA, 15 bp, Homo sapiens
caaaaaagaaaccaa

SEQ ID NO: 559596 - DNA, 15 bp, Homo sapiens
tcaaaaaagaaacca

SEQ ID NO: 559597 - DNA, 15 bp, Homo sapiens
ctcaaaaaagaaacc

SEQ ID NO: 559598 - DNA, 15 bp, Homo sapiens
tctcaaaaaagaaac

SEQ ID NO: 559599 - DNA, 15 bp, Homo sapiens
aacacagcaagactc

SEQ ID NO: 559600 - DNA, 15 bp, Homo sapiens
caacacagcaagact

SEQ ID NO: 559601 - DNA, 15 bp, Homo sapiens
gcaacacagcaagac

SEQ ID NO: 559602 - DNA, 15 bp, Homo sapiens
ggcaacacagcaaga

SEQ ID NO: 559603 - DNA, 15 bp, Homo sapiens
gggcaacacagcaag

SEQ ID NO: 559604 - DNA, 15 bp, Homo sapiens
tgggcaacacagcaa

SEQ ID NO: 559605 - DNA, 15 bp, Homo sapiens
ctgggcaacacagca

SEQ ID NO: 559606 - DNA, 15 bp, Homo sapiens
aagattgtgccactg

SEQ ID NO: 559607 - DNA, 15 bp, Homo sapiens
caagattgtgccact

SEQ ID NO: 559608 - DNA, 15 bp, Homo sapiens
ccaagattgtgccac

SEQ ID NO: 559609 - DNA, 15 bp, Homo sapiens
gccaagattgtgcca

SEQ ID NO: 559610 - DNA, 15 bp, Homo sapiens
agccaagattgtgcc

SEQ ID NO: 559611 - DNA, 15 bp, Homo sapiens
gagccaagattgtgc

SEQ ID NO: 559612 - DNA, 15 bp, Homo sapiens
tgagccaagattgtg

SEQ ID NO: 559613 - DNA, 15 bp, Homo sapiens
gtgagccaagattgt

SEQ ID NO: 559614 - DNA, 15 bp, Homo sapiens
tggaggttgcagtga

SEQ ID NO: 559615 - DNA, 15 bp, Homo sapiens
gtggaggttgcagtg

SEQ ID NO: 559616 - DNA, 15 bp, Homo sapiens
ggtggaggttgcagt

SEQ ID NO: 559617 - DNA, 15 bp, Homo sapiens
aggtggaggttgcag

SEQ ID NO: 559618 - DNA, 15 bp, Homo sapiens
gaggtggaggttgca

SEQ ID NO: 559619 - DNA, 15 bp, Homo sapiens
ggaggtggaggttgc

SEQ ID NO: 559620 - DNA, 15 bp, Homo sapiens
gggaggtggaggttg

SEQ ID NO: 559621 - DNA, 15 bp, Homo sapiens
cgggaggtggaggtt

SEQ ID NO: 559622 - DNA, 15 bp, Homo sapiens
ccgggaggtggaggt

SEQ ID NO: 559623 - DNA, 15 bp, Homo sapiens
cccgggaggtggagg

SEQ ID NO: 559624 - DNA, 15 bp, Homo sapiens
acccgggaggtggag

SEQ ID NO: 559625 - DNA, 15 bp, Homo sapiens
aacccgggaggtgga

SEQ ID NO: 559626 - DNA, 15 bp, Homo sapiens
gaacccgggaggtgg

SEQ ID NO: 559627 - DNA, 15 bp, Homo sapiens
tgaacccgggaggtg

SEQ ID NO: 559628 - DNA, 15 bp, Homo sapiens
ttgaacccgggaggt

SEQ ID NO: 559629 - DNA, 15 bp, Homo sapiens
ccacttgaacccggg

SEQ ID NO: 559630 - DNA, 15 bp, Homo sapiens
cccacttgaacccgg

SEQ ID NO: 559631 - DNA, 15 bp, Homo sapiens
tcccacttgaacccg

SEQ ID NO: 559632 - DNA, 15 bp, Homo sapiens
ctcccacttgaaccc

SEQ ID NO: 559633 - DNA, 15 bp, Homo sapiens
gctcccacttgaacc

SEQ ID NO: 559634 - DNA, 15 bp, Homo sapiens
ggctcccacttgaac

SEQ ID NO: 559635 - DNA, 15 bp, Homo sapiens
aggctcccacttgaa

SEQ ID NO: 559636 - DNA, 15 bp, Homo sapiens
gaggctcccacttga

SEQ ID NO: 559637 - DNA, 15 bp, Homo sapiens
tgaggctcccacttg

SEQ ID NO: 559638 - DNA, 15 bp, Homo sapiens
ctgaggctcccactt

SEQ ID NO: 559639 - DNA, 15 bp, Homo sapiens
gctgaggctcccact

SEQ ID NO: 559640 - DNA, 15 bp, Homo sapiens
ggctgaggctcccac

SEQ ID NO: 559641 - DNA, 15 bp, Homo sapiens
aggctgaggctccca

SEQ ID NO: 559642 - DNA, 15 bp, Homo sapiens
gaggctgaggctccc

SEQ ID NO: 559643 - DNA, 15 bp, Homo sapiens
tgaggctgaggctcc

SEQ ID NO: 559644 - DNA, 15 bp, Homo sapiens
ctgaggctgaggctc

SEQ ID NO: 559645 - DNA, 15 bp, Homo sapiens
gctgaggctgaggct

SEQ ID NO: 559646 - DNA, 15 bp, Homo sapiens
ggctgaggctgaggc

SEQ ID NO: 559647 - DNA, 15 bp, Homo sapiens
aggctgaggctgagg

SEQ ID NO: 559648 - DNA, 15 bp, Homo sapiens
gaggctgaggctgag

SEQ ID NO: 559649 - DNA, 15 bp, Homo sapiens
tgaggctgaggctga

SEQ ID NO: 559650 - DNA, 15 bp, Homo sapiens
ctgaggctgaggctg

SEQ ID NO: 559651 - DNA, 15 bp, Homo sapiens
ggaggctgaggctga

SEQ ID NO: 559652 - DNA, 15 bp, Homo sapiens
gggaggctgaggctg

SEQ ID NO: 559653 - DNA, 15 bp, Homo sapiens
cgggaggctgaggct

SEQ ID NO: 559654 - DNA, 15 bp, Homo sapiens
gctcgggaggctgag

SEQ ID NO: 559655 - DNA, 15 bp, Homo sapiens
tgctcgggaggctga

SEQ ID NO: 559656 - DNA, 15 bp, Homo sapiens
ctgctcgggaggctg

SEQ ID NO: 559657 - DNA, 15 bp, Homo sapiens
actgctcgggaggct

SEQ ID NO: 559658 - DNA, 15 bp, Homo sapiens
aactgctcgggaggc

SEQ ID NO: 559659 - DNA, 15 bp, Homo sapiens
caactgctcgggagg

SEQ ID NO: 559660 - DNA, 15 bp, Homo sapiens
ccaactgctcgggag

SEQ ID NO: 559661 - DNA, 15 bp, Homo sapiens
cccaactgctcggga

SEQ ID NO: 559662 - DNA, 15 bp, Homo sapiens
tcccaactgctcggg

SEQ ID NO: 559663 - DNA, 15 bp, Homo sapiens
atcccaactgctcgg

SEQ ID NO: 559664 - DNA, 15 bp, Homo sapiens
aatcccaactgctcg

SEQ ID NO: 559665 - DNA, 15 bp, Homo sapiens
taatcccaactgctc

SEQ ID NO: 559666 - DNA, 15 bp, Homo sapiens
gtaatcccaactgct

SEQ ID NO: 559667 - DNA, 15 bp, Homo sapiens
tgtaatcccaactgc

SEQ ID NO: 559668 - DNA, 15 bp, Homo sapiens
ctgtaatcccaactg

SEQ ID NO: 559669 - DNA, 15 bp, Homo sapiens
ggtgcctgtaatccc

SEQ ID NO: 559670 - DNA, 15 bp, Homo sapiens
aggtgcctgtaatcc

SEQ ID NO: 559671 - DNA, 15 bp, Homo sapiens
caggtgcctgtaatc

SEQ ID NO: 559672 - DNA, 15 bp, Homo sapiens
gcaggtgcctgtaat

SEQ ID NO: 559673 - DNA, 15 bp, Homo sapiens
ggcaggtgcctgtaa

SEQ ID NO: 559674 - DNA, 15 bp, Homo sapiens
tggcaggtgcctgta

SEQ ID NO: 559675 - DNA, 15 bp, Homo sapiens
gtggcaggtgcctgt

SEQ ID NO: 559676 - DNA, 15 bp, Homo sapiens
ggtggcaggtgcctg

SEQ ID NO: 559677 - DNA, 15 bp, Homo sapiens
atggtggcaggtgcc

SEQ ID NO: 559678 - DNA, 15 bp, Homo sapiens
catggtggcaggtgc

SEQ ID NO: 559679 - DNA, 15 bp, Homo sapiens
gcatggtggcaggtg

SEQ ID NO: 559680 - DNA, 15 bp, Homo sapiens
ggcatggtggcaggt

SEQ ID NO: 559681 - DNA, 15 bp, Homo sapiens
aggcatggtggcagg

SEQ ID NO: 559682 - DNA, 15 bp, Homo sapiens
caggcatggtggcag

SEQ ID NO: 559683 - DNA, 15 bp, Homo sapiens
aatatacaaaaatta

SEQ ID NO: 559684 - DNA, 15 bp, Homo sapiens
caatatacaaaaatt

SEQ ID NO: 559685 - DNA, 15 bp, Homo sapiens
tcaatatacaaaaat

SEQ ID NO: 559686 - DNA, 15 bp, Homo sapiens
ctcaatatacaaaaa

SEQ ID NO: 559687 - DNA, 15 bp, Homo sapiens
actcaatatacaaaa

SEQ ID NO: 559688 - DNA, 15 bp, Homo sapiens
tactcaatatacaaa

SEQ ID NO: 559689 - DNA, 15 bp, Homo sapiens
ctactcaatatacaa

SEQ ID NO: 559690 - DNA, 15 bp, Homo sapiens
tctactcaatataca

SEQ ID NO: 559691 - DNA, 15 bp, Homo sapiens
ctctactcaatatac

SEQ ID NO: 559692 - DNA, 15 bp, Homo sapiens
cctctactcaatata

SEQ ID NO: 559693 - DNA, 15 bp, Homo sapiens
gcctctactcaatat

SEQ ID NO: 559694 - DNA, 15 bp, Homo sapiens
cgcctctactcaata

SEQ ID NO: 559695 - DNA, 15 bp, Homo sapiens
ccgcctctactcaat

SEQ ID NO: 559696 - DNA, 15 bp, Homo sapiens
cccgcctctactcaa

SEQ ID NO: 559697 - DNA, 15 bp, Homo sapiens
ccccgcctctactca

SEQ ID NO: 559698 - DNA, 15 bp, Homo sapiens
accccgcctctactc

SEQ ID NO: 559699 - DNA, 15 bp, Homo sapiens
aaccccgcctctact

SEQ ID NO: 559700 - DNA, 15 bp, Homo sapiens
aaaccccgcctctac

SEQ ID NO: 559701 - DNA, 15 bp, Homo sapiens
atgaggtcaggagtt

SEQ ID NO: 559702 - DNA, 15 bp, Homo sapiens
catgaggtcaggagt

SEQ ID NO: 559703 - DNA, 15 bp, Homo sapiens
gatcatgaggtcagg

SEQ ID NO: 559704 - DNA, 15 bp, Homo sapiens
agatcatgaggtcag

SEQ ID NO: 559705 - DNA, 15 bp, Homo sapiens
cagatcatgaggtca

SEQ ID NO: 559706 - DNA, 15 bp, Homo sapiens
gcagatcatgaggtc

SEQ ID NO: 559707 - DNA, 15 bp, Homo sapiens
ggcagatcatgaggt

SEQ ID NO: 559708 - DNA, 15 bp, Homo sapiens
cggcagatcatgagg

SEQ ID NO: 559709 - DNA, 15 bp, Homo sapiens
gcggcagatcatgag

SEQ ID NO: 559710 - DNA, 15 bp, Homo sapiens
ggcggcagatcatga

SEQ ID NO: 559711 - DNA, 15 bp, Homo sapiens
aggcggcagatcatg

SEQ ID NO: 559712 - DNA, 15 bp, Homo sapiens
aaggcggcagatcat

SEQ ID NO: 559713 - DNA, 15 bp, Homo sapiens
caaggcggcagatca

SEQ ID NO: 559714 - DNA, 15 bp, Homo sapiens
ccaaggcggcagatc

SEQ ID NO: 559715 - DNA, 15 bp, Homo sapiens
gccaaggcggcagat

SEQ ID NO: 559716 - DNA, 15 bp, Homo sapiens
ggccaaggcggcaga

SEQ ID NO: 559717 - DNA, 15 bp, Homo sapiens
aggccaaggcggcag

SEQ ID NO: 559718 - DNA, 15 bp, Homo sapiens
gaggccaaggcggca

SEQ ID NO: 559719 - DNA, 15 bp, Homo sapiens
ggaggccaaggcggc

SEQ ID NO: 559720 - DNA, 15 bp, Homo sapiens
aactttgggaggcca

SEQ ID NO: 559721 - DNA, 15 bp, Homo sapiens
acctgtaatcccaga

SEQ ID NO: 559722 - DNA, 15 bp, Homo sapiens
aggcacagtggctca

SEQ ID NO: 559723 - DNA, 15 bp, Homo sapiens
caggcacagtggctc

SEQ ID NO: 559724 - DNA, 15 bp, Homo sapiens
ccaggcacagtggct

SEQ ID NO: 559725 - DNA, 15 bp, Homo sapiens
ggccaggcacagtgg

SEQ ID NO: 559726 - DNA, 15 bp, Homo sapiens
cggccaggcacagtg

SEQ ID NO: 559727 - DNA, 15 bp, Homo sapiens
ccggccaggcacagt

SEQ ID NO: 559728 - DNA, 15 bp, Homo sapiens
gccggccaggcacag

SEQ ID NO: 559729 - DNA, 15 bp, Homo sapiens
ggccggccaggcaca

SEQ ID NO: 559730 - DNA, 15 bp, Homo sapiens
aggccggccaggcac

SEQ ID NO: 559731 - DNA, 15 bp, Homo sapiens
aaggccggccaggca

SEQ ID NO: 559732 - DNA, 15 bp, Homo sapiens
taaggccggccaggc

SEQ ID NO: 559733 - DNA, 15 bp, Homo sapiens
ataaggccggccagg

SEQ ID NO: 559734 - DNA, 15 bp, Homo sapiens
gataaggccggccag

SEQ ID NO: 559735 - DNA, 15 bp, Homo sapiens
tgataaggccggcca

SEQ ID NO: 559736 - DNA, 15 bp, Homo sapiens
ctgataaggccggcc

SEQ ID NO: 559737 - DNA, 15 bp, Homo sapiens
actgataaggccggc

SEQ ID NO: 559738 - DNA, 15 bp, Homo sapiens
aactgataaggccgg

SEQ ID NO: 559739 - DNA, 15 bp, Homo sapiens
aaactgataaggccg

SEQ ID NO: 559740 - DNA, 15 bp, Homo sapiens
aaaactgataaggcc

SEQ ID NO: 559741 - DNA, 15 bp, Homo sapiens
aaaaactgataaggc

SEQ ID NO: 559742 - DNA, 15 bp, Homo sapiens
taaaaactgataagg

SEQ ID NO: 559743 - DNA, 15 bp, Homo sapiens
ataaaaactgataag

SEQ ID NO: 559744 - DNA, 15 bp, Homo sapiens
cataaaaactgataa

SEQ ID NO: 559745 - DNA, 15 bp, Homo sapiens
acataaaaactgata

SEQ ID NO: 559746 - DNA, 15 bp, Homo sapiens
tacataaaaactgat

SEQ ID NO: 559747 - DNA, 15 bp, Homo sapiens
ttacataaaaactga

SEQ ID NO: 559748 - DNA, 15 bp, Homo sapiens
attacataaaaactg

SEQ ID NO: 559749 - DNA, 15 bp, Homo sapiens
aattacataaaaact

SEQ ID NO: 559750 - DNA, 15 bp, Homo sapiens
aaattacataaaaac

SEQ ID NO: 559751 - DNA, 15 bp, Homo sapiens
caaattacataaaaa

SEQ ID NO: 559752 - DNA, 15 bp, Homo sapiens
acaaattacataaaa

SEQ ID NO: 559753 - DNA, 15 bp, Homo sapiens
gacaaattacataaa

SEQ ID NO: 559754 - DNA, 15 bp, Homo sapiens
ggacaaattacataa

SEQ ID NO: 559755 - DNA, 15 bp, Homo sapiens
aggacaaattacata

SEQ ID NO: 559756 - DNA, 15 bp, Homo sapiens
caggacaaattacat

SEQ ID NO: 559757 - DNA, 15 bp, Homo sapiens
tcaggacaaattaca

SEQ ID NO: 559758 - DNA, 15 bp, Homo sapiens
atcaggacaaattac

SEQ ID NO: 559759 - DNA, 15 bp, Homo sapiens
aatcaggacaaatta

SEQ ID NO: 559760 - DNA, 15 bp, Homo sapiens
aaatcaggacaaatt

SEQ ID NO: 559761 - DNA, 15 bp, Homo sapiens
taaatcaggacaaat

SEQ ID NO: 559762 - DNA, 15 bp, Homo sapiens
ttaaatcaggacaaa

SEQ ID NO: 559763 - DNA, 15 bp, Homo sapiens
tttaaatcaggacaa

SEQ ID NO: 559764 - DNA, 15 bp, Homo sapiens
ttttaaatcaggaca

SEQ ID NO: 559765 - DNA, 15 bp, Homo sapiens
tttttaaatcaggac

SEQ ID NO: 559766 - DNA, 15 bp, Homo sapiens
ttttttaaatcagga

SEQ ID NO: 559767 - DNA, 15 bp, Homo sapiens
tttttttaaatcagg

SEQ ID NO: 559768 - DNA, 15 bp, Homo sapiens
ttttttttaaatcag

SEQ ID NO: 559769 - DNA, 15 bp, Homo sapiens
tttttttttaaatca

SEQ ID NO: 559770 - DNA, 15 bp, Homo sapiens
ttttttttttaaatc

SEQ ID NO: 559771 - DNA, 15 bp, Homo sapiens
gatttttttttttta

SEQ ID NO: 559772 - DNA, 15 bp, Homo sapiens
gtgattttttttttt

SEQ ID NO: 559773 - DNA, 15 bp, Homo sapiens
tgtgatttttttttt

SEQ ID NO: 559774 - DNA, 15 bp, Homo sapiens
atgtgattttttttt

SEQ ID NO: 559775 - DNA, 15 bp, Homo sapiens
catgtgatttttttt

SEQ ID NO: 559776 - DNA, 15 bp, Homo sapiens
gcatgtgattttttt

SEQ ID NO: 559777 - DNA, 15 bp, Homo sapiens
cgcatgtgatttttt

SEQ ID NO: 559778 - DNA, 15 bp, Homo sapiens
ccgcatgtgattttt

SEQ ID NO: 559779 - DNA, 15 bp, Homo sapiens
cccgcatgtgatttt

SEQ ID NO: 559780 - DNA, 15 bp, Homo sapiens
acccgcatgtgattt

SEQ ID NO: 559781 - DNA, 15 bp, Homo sapiens
tacccgcatgtgatt

SEQ ID NO: 559782 - DNA, 15 bp, Homo sapiens
ttacccgcatgtgat

SEQ ID NO: 559783 - DNA, 15 bp, Homo sapiens
tttacccgcatgtga

SEQ ID NO: 559784 - DNA, 15 bp, Homo sapiens
gtttacccgcatgtg

SEQ ID NO: 559785 - DNA, 15 bp, Homo sapiens
agtttacccgcatgt

SEQ ID NO: 559786 - DNA, 15 bp, Homo sapiens
gagtttacccgcatg

SEQ ID NO: 559787 - DNA, 15 bp, Homo sapiens
tgagtttacccgcat

SEQ ID NO: 559788 - DNA, 15 bp, Homo sapiens
ttgagtttacccgca

SEQ ID NO: 559789 - DNA, 15 bp, Homo sapiens
gttgagtttacccgc

SEQ ID NO: 559790 - DNA, 15 bp, Homo sapiens
tgttgagtttacccg

SEQ ID NO: 559791 - DNA, 15 bp, Homo sapiens
atgttgagtttaccc

SEQ ID NO: 559792 - DNA, 15 bp, Homo sapiens
tatgttgagtttacc

SEQ ID NO: 559793 - DNA, 15 bp, Homo sapiens
atatgttgagtttac

SEQ ID NO: 559794 - DNA, 15 bp, Homo sapiens
aatatgttgagttta

SEQ ID NO: 559795 - DNA, 15 bp, Homo sapiens
aaatatgttgagttt

SEQ ID NO: 559796 - DNA, 15 bp, Homo sapiens
aaaatatgttgagtt

SEQ ID NO: 559797 - DNA, 15 bp, Homo sapiens
taaaatatgttgagt

SEQ ID NO: 559798 - DNA, 15 bp, Homo sapiens
ttaaaatatgttgag

SEQ ID NO: 559799 - DNA, 15 bp, Homo sapiens
attaaaatatgttga

SEQ ID NO: 559800 - DNA, 15 bp, Homo sapiens
aattaaaatatgttg

SEQ ID NO: 559801 - DNA, 15 bp, Homo sapiens
aaattaaaatatgtt

SEQ ID NO: 559802 - DNA, 15 bp, Homo sapiens
gaaattaaaatatgt

SEQ ID NO: 559803 - DNA, 15 bp, Homo sapiens
agaaattaaaatatg

SEQ ID NO: 559804 - DNA, 15 bp, Homo sapiens
gagaaattaaaatat

SEQ ID NO: 559805 - DNA, 15 bp, Homo sapiens
agagaaattaaaata

SEQ ID NO: 559806 - DNA, 15 bp, Homo sapiens
aagagaaattaaaat

SEQ ID NO: 559807 - DNA, 15 bp, Homo sapiens
aaagagaaattaaaa

SEQ ID NO: 559808 - DNA, 15 bp, Homo sapiens
taaagagaaattaaa

SEQ ID NO: 559809 - DNA, 15 bp, Homo sapiens
ctaaagagaaattaa

SEQ ID NO: 559810 - DNA, 15 bp, Homo sapiens
tctaaagagaaatta

SEQ ID NO: 559811 - DNA, 15 bp, Homo sapiens
ctctaaagagaaatt

SEQ ID NO: 559812 - DNA, 15 bp, Homo sapiens
tctctaaagagaaat

SEQ ID NO: 559813 - DNA, 15 bp, Homo sapiens
ttctctaaagagaaa

SEQ ID NO: 559814 - DNA, 15 bp, Homo sapiens
tttctctaaagagaa

SEQ ID NO: 559815 - DNA, 15 bp, Homo sapiens
atttctctaaagaga

SEQ ID NO: 559816 - DNA, 15 bp, Homo sapiens
aatttctctaaagag

SEQ ID NO: 559817 - DNA, 15 bp, Homo sapiens
aaatttctctaaaga

SEQ ID NO: 559818 - DNA, 15 bp, Homo sapiens
aaaatttctctaaag

SEQ ID NO: 559819 - DNA, 15 bp, Homo sapiens
gaaaatttctctaaa

SEQ ID NO: 559820 - DNA, 15 bp, Homo sapiens
ggaaaatttctctaa

SEQ ID NO: 559821 - DNA, 15 bp, Homo sapiens
tggaaaatttctcta

SEQ ID NO: 559822 - DNA, 15 bp, Homo sapiens
gtggaaaatttctct

SEQ ID NO: 559823 - DNA, 15 bp, Homo sapiens
agtggaaaatttctc

SEQ ID NO: 559824 - DNA, 15 bp, Homo sapiens
aagtggaaaatttct

SEQ ID NO: 559825 - DNA, 15 bp, Homo sapiens
caagtggaaaatttc

SEQ ID NO: 559826 - DNA, 15 bp, Homo sapiens
tcaagtggaaaattt

SEQ ID NO: 559827 - DNA, 15 bp, Homo sapiens
ctcaagtggaaaatt

SEQ ID NO: 559828 - DNA, 15 bp, Homo sapiens
gctcaagtggaaaat

SEQ ID NO: 559829 - DNA, 15 bp, Homo sapiens
ggctcaagtggaaaa

SEQ ID NO: 559830 - DNA, 15 bp, Homo sapiens
tggctcaagtggaaa

SEQ ID NO: 559831 - DNA, 15 bp, Homo sapiens
ctggctcaagtggaa

SEQ ID NO: 559832 - DNA, 15 bp, Homo sapiens
cctggctcaagtgga

SEQ ID NO: 559833 - DNA, 15 bp, Homo sapiens
acctggctcaagtgg

SEQ ID NO: 559834 - DNA, 15 bp, Homo sapiens
tacctggctcaagtg

SEQ ID NO: 559835 - DNA, 15 bp, Homo sapiens
atacctggctcaagt

SEQ ID NO: 559836 - DNA, 15 bp, Homo sapiens
catacctggctcaag

SEQ ID NO: 559837 - DNA, 15 bp, Homo sapiens
ccatacctggctcaa

SEQ ID NO: 559838 - DNA, 15 bp, Homo sapiens
accatacctggctca

SEQ ID NO: 559839 - DNA, 15 bp, Homo sapiens
caccatacctggctc

SEQ ID NO: 559840 - DNA, 15 bp, Homo sapiens
ccaccatacctggct

SEQ ID NO: 559841 - DNA, 15 bp, Homo sapiens
gccaccatacctggc

SEQ ID NO: 559842 - DNA, 15 bp, Homo sapiens
agccaccatacctgg

SEQ ID NO: 559843 - DNA, 15 bp, Homo sapiens
gagccaccatacctg

SEQ ID NO: 559844 - DNA, 15 bp, Homo sapiens
agagccaccatacct

SEQ ID NO: 559845 - DNA, 15 bp, Homo sapiens
aagagccaccatacc

SEQ ID NO: 559846 - DNA, 15 bp, Homo sapiens
caagagccaccatac

SEQ ID NO: 559847 - DNA, 15 bp, Homo sapiens
gcaagagccaccata

SEQ ID NO: 559848 - DNA, 15 bp, Homo sapiens
ggcaagagccaccat

SEQ ID NO: 559849 - DNA, 15 bp, Homo sapiens
aggcaagagccacca

SEQ ID NO: 559850 - DNA, 15 bp, Homo sapiens
caggcaagagccacc

SEQ ID NO: 559851 - DNA, 15 bp, Homo sapiens
acaggcaagagccac

SEQ ID NO: 559852 - DNA, 15 bp, Homo sapiens
tacaggcaagagcca

SEQ ID NO: 559853 - DNA, 15 bp, Homo sapiens
ttacaggcaagagcc

SEQ ID NO: 559854 - DNA, 15 bp, Homo sapiens
attacaggcaagagc

SEQ ID NO: 559855 - DNA, 15 bp, Homo sapiens
gattacaggcaagag

SEQ ID NO: 559856 - DNA, 15 bp, Homo sapiens
agattacaggcaaga

SEQ ID NO: 559857 - DNA, 15 bp, Homo sapiens
cagattacaggcaag

SEQ ID NO: 559858 - DNA, 15 bp, Homo sapiens
tcagattacaggcaa

SEQ ID NO: 559859 - DNA, 15 bp, Homo sapiens
ctcagattacaggca

SEQ ID NO: 559860 - DNA, 15 bp, Homo sapiens
gctcagattacaggc

SEQ ID NO: 559861 - DNA, 15 bp, Homo sapiens
agctcagattacagg

SEQ ID NO: 559862 - DNA, 15 bp, Homo sapiens
tagctcagattacag

SEQ ID NO: 559863 - DNA, 15 bp, Homo sapiens
gtagctcagattaca

SEQ ID NO: 559864 - DNA, 15 bp, Homo sapiens
agtagctcagattac

SEQ ID NO: 559865 - DNA, 15 bp, Homo sapiens
gagtagctcagatta

SEQ ID NO: 559866 - DNA, 15 bp, Homo sapiens
cgagtagctcagatt

SEQ ID NO: 559867 - DNA, 15 bp, Homo sapiens
ccgagtagctcagat

SEQ ID NO: 559868 - DNA, 15 bp, Homo sapiens
cccgagtagctcaga

SEQ ID NO: 559869 - DNA, 15 bp, Homo sapiens
tcccgagtagctcag

SEQ ID NO: 559870 - DNA, 15 bp, Homo sapiens
ctcccgagtagctca

SEQ ID NO: 559871 - DNA, 15 bp, Homo sapiens
cctcccgagtagctc

SEQ ID NO: 559872 - DNA, 15 bp, Homo sapiens
acctcaacctcccga

SEQ ID NO: 559873 - DNA, 15 bp, Homo sapiens
cacctcaacctcccg

SEQ ID NO: 559874 - DNA, 15 bp, Homo sapiens
ccacctcaacctccc

SEQ ID NO: 559875 - DNA, 15 bp, Homo sapiens
cccacctcaacctcc

SEQ ID NO: 559876 - DNA, 15 bp, Homo sapiens
tcccacctcaacctc

SEQ ID NO: 559877 - DNA, 15 bp, Homo sapiens
ctcccacctcaacct

SEQ ID NO: 559878 - DNA, 15 bp, Homo sapiens
cctcccacctcaacc

SEQ ID NO: 559879 - DNA, 15 bp, Homo sapiens
tcctcccacctcaac

SEQ ID NO: 559880 - DNA, 15 bp, Homo sapiens
atcctcccacctcaa

SEQ ID NO: 559881 - DNA, 15 bp, Homo sapiens
gatcctcccacctca

SEQ ID NO: 559882 - DNA, 15 bp, Homo sapiens
caagtgatcctccca

SEQ ID NO: 559883 - DNA, 15 bp, Homo sapiens
tcaagtgatcctccc

SEQ ID NO: 559884 - DNA, 15 bp, Homo sapiens
ctcaagtgatcctcc

SEQ ID NO: 559885 - DNA, 15 bp, Homo sapiens
gctcaagtgatcctc

SEQ ID NO: 559886 - DNA, 15 bp, Homo sapiens
ggctcaagtgatcct

SEQ ID NO: 559887 - DNA, 15 bp, Homo sapiens
ccaactcctgggctc

SEQ ID NO: 559888 - DNA, 15 bp, Homo sapiens
tccaactcctgggct

SEQ ID NO: 559889 - DNA, 15 bp, Homo sapiens
ctccaactcctgggc

SEQ ID NO: 559890 - DNA, 15 bp, Homo sapiens
cctccaactcctggg

SEQ ID NO: 559891 - DNA, 15 bp, Homo sapiens
gcctccaactcctgg

SEQ ID NO: 559892 - DNA, 15 bp, Homo sapiens
agcctccaactcctg

SEQ ID NO: 559893 - DNA, 15 bp, Homo sapiens
cagcctccaactcct

SEQ ID NO: 559894 - DNA, 15 bp, Homo sapiens
gcagcctccaactcc

SEQ ID NO: 559895 - DNA, 15 bp, Homo sapiens
tgcagcctccaactc

SEQ ID NO: 559896 - DNA, 15 bp, Homo sapiens
ctgcagcctccaact

SEQ ID NO: 559897 - DNA, 15 bp, Homo sapiens
actgcagcctccaac

SEQ ID NO: 559898 - DNA, 15 bp, Homo sapiens
cactgcagcctccaa

SEQ ID NO: 559899 - DNA, 15 bp, Homo sapiens
ggctcactgcagcct

SEQ ID NO: 559900 - DNA, 15 bp, Homo sapiens
tggctcactgcagcc

SEQ ID NO: 559901 - DNA, 15 bp, Homo sapiens
atggctcactgcagc

SEQ ID NO: 559902 - DNA, 15 bp, Homo sapiens
catggctcactgcag

SEQ ID NO: 559903 - DNA, 15 bp, Homo sapiens
tcatggctcactgca

SEQ ID NO: 559904 - DNA, 15 bp, Homo sapiens
atcatggctcactgc

SEQ ID NO: 559905 - DNA, 15 bp, Homo sapiens
gatcatggctcactg

SEQ ID NO: 559906 - DNA, 15 bp, Homo sapiens
cgatcatggctcact

SEQ ID NO: 559907 - DNA, 15 bp, Homo sapiens
gcgatcatggctcac

SEQ ID NO: 559908 - DNA, 15 bp, Homo sapiens
tgcgatcatggctca

SEQ ID NO: 559909 - DNA, 15 bp, Homo sapiens
gtgcgatcatggctc

SEQ ID NO: 559910 - DNA, 15 bp, Homo sapiens
ggtgcgatcatggct

SEQ ID NO: 559911 - DNA, 15 bp, Homo sapiens
tggtgcgatcatggc

SEQ ID NO: 559912 - DNA, 15 bp, Homo sapiens
atggtgcgatcatgg

SEQ ID NO: 559913 - DNA, 15 bp, Homo sapiens
aatggtgcgatcatg

SEQ ID NO: 559914 - DNA, 15 bp, Homo sapiens
caatggtgcgatcat

SEQ ID NO: 559915 - DNA, 15 bp, Homo sapiens
gcaatggtgcgatca

SEQ ID NO: 559916 - DNA, 15 bp, Homo sapiens
tgcaatggtgcgatc

SEQ ID NO: 559917 - DNA, 15 bp, Homo sapiens
gtgcaatggtgcgat

SEQ ID NO: 559918 - DNA, 15 bp, Homo sapiens
agtgcaatggtgcga

SEQ ID NO: 559919 - DNA, 15 bp, Homo sapiens
gagtgcaatggtgcg

SEQ ID NO: 559920 - DNA, 15 bp, Homo sapiens
tccaggctggagtgc

SEQ ID NO: 559921 - DNA, 15 bp, Homo sapiens
gtccaggctggagtg

SEQ ID NO: 559922 - DNA, 15 bp, Homo sapiens
tgtccaggctggagt

SEQ ID NO: 559923 - DNA, 15 bp, Homo sapiens
ttgtccaggctggag

SEQ ID NO: 559924 - DNA, 15 bp, Homo sapiens
gttgtccaggctgga

SEQ ID NO: 559925 - DNA, 15 bp, Homo sapiens
tgttgtccaggctgg

SEQ ID NO: 559926 - DNA, 15 bp, Homo sapiens
ctgttgtccaggctg

SEQ ID NO: 559927 - DNA, 15 bp, Homo sapiens
tctgttgtccaggct

SEQ ID NO: 559928 - DNA, 15 bp, Homo sapiens
ctctgttgtccaggc

SEQ ID NO: 559929 - DNA, 15 bp, Homo sapiens
actctgttgtccagg

SEQ ID NO: 559930 - DNA, 15 bp, Homo sapiens
cactctgttgtccag

SEQ ID NO: 559931 - DNA, 15 bp, Homo sapiens
tcactctgttgtcca

SEQ ID NO: 559932 - DNA, 15 bp, Homo sapiens
ctcactctgttgtcc

SEQ ID NO: 559933 - DNA, 15 bp, Homo sapiens
tctcactctgttgtc

SEQ ID NO: 559934 - DNA, 15 bp, Homo sapiens
atctcactctgttgt

SEQ ID NO: 559935 - DNA, 15 bp, Homo sapiens
gatctcactctgttg

SEQ ID NO: 559936 - DNA, 15 bp, Homo sapiens
ggatctcactctgtt

SEQ ID NO: 559937 - DNA, 15 bp, Homo sapiens
aggatctcactctgt

SEQ ID NO: 559938 - DNA, 15 bp, Homo sapiens
caggatctcactctg

SEQ ID NO: 559939 - DNA, 15 bp, Homo sapiens
acaggatctcactct

SEQ ID NO: 559940 - DNA, 15 bp, Homo sapiens
gacaggatctcactc

SEQ ID NO: 559941 - DNA, 15 bp, Homo sapiens
agacaggatctcact

SEQ ID NO: 559942 - DNA, 15 bp, Homo sapiens
gagacaggatctcac

SEQ ID NO: 559943 - DNA, 15 bp, Homo sapiens
tgagacaggatctca

SEQ ID NO: 559944 - DNA, 15 bp, Homo sapiens
ttgagacaggatctc

SEQ ID NO: 559945 - DNA, 15 bp, Homo sapiens
tttgagacaggatct

SEQ ID NO: 559946 - DNA, 15 bp, Homo sapiens
ttttgagacaggatc

SEQ ID NO: 559947 - DNA, 15 bp, Homo sapiens
tttttgagacaggat

SEQ ID NO: 559948 - DNA, 15 bp, Homo sapiens
atttttgagacagga

SEQ ID NO: 559949 - DNA, 15 bp, Homo sapiens
aatttttgagacagg

SEQ ID NO: 559950 - DNA, 15 bp, Homo sapiens
taatttttgagacag

SEQ ID NO: 559951 - DNA, 15 bp, Homo sapiens
ttaatttttgagaca

SEQ ID NO: 559952 - DNA, 15 bp, Homo sapiens
tttaatttttgagac

SEQ ID NO: 559953 - DNA, 15 bp, Homo sapiens
ttttaatttttgaga

SEQ ID NO: 559954 - DNA, 15 bp, Homo sapiens
tttttaatttttgag

SEQ ID NO: 559955 - DNA, 15 bp, Homo sapiens
ttttttaatttttga

SEQ ID NO: 559956 - DNA, 15 bp, Homo sapiens
tttttttaatttttg

SEQ ID NO: 559957 - DNA, 15 bp, Homo sapiens
ctttttttaattttt

SEQ ID NO: 559958 - DNA, 15 bp, Homo sapiens
gctttttttaatttt

SEQ ID NO: 559959 - DNA, 15 bp, Homo sapiens
tgctttttttaattt

SEQ ID NO: 559960 - DNA, 15 bp, Homo sapiens
ctgctttttttaatt

SEQ ID NO: 559961 - DNA, 15 bp, Homo sapiens
actgctttttttaat

SEQ ID NO: 559962 - DNA, 15 bp, Homo sapiens
tactgctttttttaa

SEQ ID NO: 559963 - DNA, 15 bp, Homo sapiens
ttactgcttttttta

SEQ ID NO: 559964 - DNA, 15 bp, Homo sapiens
attactgcttttttt

SEQ ID NO: 559965 - DNA, 15 bp, Homo sapiens
aattactgctttttt

SEQ ID NO: 559966 - DNA, 15 bp, Homo sapiens
aaattactgcttttt

SEQ ID NO: 559967 - DNA, 15 bp, Homo sapiens
aaaattactgctttt

SEQ ID NO: 559968 - DNA, 15 bp, Homo sapiens
aaaaattactgcttt

SEQ ID NO: 559969 - DNA, 15 bp, Homo sapiens
aaaaaattactgctt

SEQ ID NO: 559970 - DNA, 15 bp, Homo sapiens
gaaaaaattactgct

SEQ ID NO: 559971 - DNA, 15 bp, Homo sapiens
agaaaaaattactgc

SEQ ID NO: 559972 - DNA, 15 bp, Homo sapiens
aagaaaaaattactg

SEQ ID NO: 559973 - DNA, 15 bp, Homo sapiens
gaagaaaaaattact

SEQ ID NO: 559974 - DNA, 15 bp, Homo sapiens
agaagaaaaaattac

SEQ ID NO: 559975 - DNA, 15 bp, Homo sapiens
gagaagaaaaaatta

SEQ ID NO: 559976 - DNA, 15 bp, Homo sapiens
tgagaagaaaaaatt

SEQ ID NO: 559977 - DNA, 15 bp, Homo sapiens
ttgagaagaaaaaat

SEQ ID NO: 559978 - DNA, 15 bp, Homo sapiens
cttgagaagaaaaaa

SEQ ID NO: 559979 - DNA, 15 bp, Homo sapiens
acttgagaagaaaaa

SEQ ID NO: 559980 - DNA, 15 bp, Homo sapiens
gacttgagaagaaaa

SEQ ID NO: 559981 - DNA, 15 bp, Homo sapiens
tgacttgagaagaaa

SEQ ID NO: 559982 - DNA, 15 bp, Homo sapiens
atgacttgagaagaa

SEQ ID NO: 559983 - DNA, 15 bp, Homo sapiens
aatgacttgagaaga

SEQ ID NO: 559984 - DNA, 15 bp, Homo sapiens
gaatgacttgagaag

SEQ ID NO: 559985 - DNA, 15 bp, Homo sapiens
agaatgacttgagaa

SEQ ID NO: 559986 - DNA, 15 bp, Homo sapiens
aagaatgacttgaga

SEQ ID NO: 559987 - DNA, 15 bp, Homo sapiens
aaagaatgacttgag

SEQ ID NO: 559988 - DNA, 15 bp, Homo sapiens
aaaagaatgacttga

SEQ ID NO: 559989 - DNA, 15 bp, Homo sapiens
taaaagaatgacttg

SEQ ID NO: 559990 - DNA, 15 bp, Homo sapiens
ttaaaagaatgactt

SEQ ID NO: 559991 - DNA, 15 bp, Homo sapiens
tttaaaagaatgact

SEQ ID NO: 559992 - DNA, 15 bp, Homo sapiens
ttttaaaagaatgac

SEQ ID NO: 559993 - DNA, 15 bp, Homo sapiens
attttaaaagaatga

SEQ ID NO: 559994 - DNA, 15 bp, Homo sapiens
tattttaaaagaatg

SEQ ID NO: 559995 - DNA, 15 bp, Homo sapiens
ttattttaaaagaat

SEQ ID NO: 559996 - DNA, 15 bp, Homo sapiens
tttattttaaaagaa

SEQ ID NO: 559997 - DNA, 15 bp, Homo sapiens
atttattttaaaaga

SEQ ID NO: 559998 - DNA, 15 bp, Homo sapiens
gatttattttaaaag

SEQ ID NO: 559999 - DNA, 15 bp, Homo sapiens
tgatttattttaaaa

SEQ ID NO: 560000 - DNA, 15 bp, Homo sapiens
ttgatttattttaaa

SEQ ID NO: 560001 - DNA, 15 bp, Homo sapiens
tttgatttattttaa

SEQ ID NO: 560002 - DNA, 15 bp, Homo sapiens
ttttgatttatttta

SEQ ID NO: 560003 - DNA, 15 bp, Homo sapiens
cttttgatttatttt

SEQ ID NO: 560004 - DNA, 15 bp, Homo sapiens
acttttgatttattt

SEQ ID NO: 560005 - DNA, 15 bp, Homo sapiens
tacttttgatttatt

SEQ ID NO: 560006 - DNA, 15 bp, Homo sapiens
atacttttgatttat

SEQ ID NO: 560007 - DNA, 15 bp, Homo sapiens
aatacttttgattta

SEQ ID NO: 560008 - DNA, 15 bp, Homo sapiens
aaatacttttgattt

SEQ ID NO: 560009 - DNA, 15 bp, Homo sapiens
aaaatacttttgatt

SEQ ID NO: 560010 - DNA, 15 bp, Homo sapiens
taaaatacttttgat

SEQ ID NO: 560011 - DNA, 15 bp, Homo sapiens
ttaaaatacttttga

SEQ ID NO: 560012 - DNA, 15 bp, Homo sapiens
gttaaaatacttttg

SEQ ID NO: 560013 - DNA, 15 bp, Homo sapiens
tgttaaaatactttt

SEQ ID NO: 560014 - DNA, 15 bp, Homo sapiens
ctgttaaaatacttt

SEQ ID NO: 560015 - DNA, 15 bp, Homo sapiens
tctgttaaaatactt

SEQ ID NO: 560016 - DNA, 15 bp, Homo sapiens
ttctgttaaaatact

SEQ ID NO: 560017 - DNA, 15 bp, Homo sapiens
gttctgttaaaatac

SEQ ID NO: 560018 - DNA, 15 bp, Homo sapiens
tgttctgttaaaata

SEQ ID NO: 560019 - DNA, 15 bp, Homo sapiens
ttgttctgttaaaat

SEQ ID NO: 560020 - DNA, 15 bp, Homo sapiens
attgttctgttaaaa

SEQ ID NO: 560021 - DNA, 15 bp, Homo sapiens
gattgttctgttaaa

SEQ ID NO: 560022 - DNA, 15 bp, Homo sapiens
agattgttctgttaa

SEQ ID NO: 560023 - DNA, 15 bp, Homo sapiens
cagattgttctgtta

SEQ ID NO: 560024 - DNA, 15 bp, Homo sapiens
acagattgttctgtt

SEQ ID NO: 560025 - DNA, 15 bp, Homo sapiens
aacagattgttctgt

SEQ ID NO: 560026 - DNA, 15 bp, Homo sapiens
gaacagattgttctg

SEQ ID NO: 560027 - DNA, 15 bp, Homo sapiens
ggaacagattgttct

SEQ ID NO: 560028 - DNA, 15 bp, Homo sapiens
aggaacagattgttc

SEQ ID NO: 560029 - DNA, 15 bp, Homo sapiens
gaggaacagattgtt

SEQ ID NO: 560030 - DNA, 15 bp, Homo sapiens
cgaggaacagattgt

SEQ ID NO: 560031 - DNA, 15 bp, Homo sapiens
acgaggaacagattg

SEQ ID NO: 560032 - DNA, 15 bp, Homo sapiens
aacgaggaacagatt

SEQ ID NO: 560033 - DNA, 15 bp, Homo sapiens
caacgaggaacagat

SEQ ID NO: 560034 - DNA, 15 bp, Homo sapiens
tcaacgaggaacaga

SEQ ID NO: 560035 - DNA, 15 bp, Homo sapiens
atcaacgaggaacag

SEQ ID NO: 560036 - DNA, 15 bp, Homo sapiens
aatcaacgaggaaca

SEQ ID NO: 560037 - DNA, 15 bp, Homo sapiens
aaatcaacgaggaac

SEQ ID NO: 560038 - DNA, 15 bp, Homo sapiens
aaaatcaacgaggaa

SEQ ID NO: 560039 - DNA, 15 bp, Homo sapiens
taaaatcaacgagga

SEQ ID NO: 560040 - DNA, 15 bp, Homo sapiens
ttaaaatcaacgagg

SEQ ID NO: 560041 - DNA, 15 bp, Homo sapiens
tttaaaatcaacgag

SEQ ID NO: 560042 - DNA, 15 bp, Homo sapiens
gtttaaaatcaacga

SEQ ID NO: 560043 - DNA, 15 bp, Homo sapiens
tgtttaaaatcaacg

SEQ ID NO: 560044 - DNA, 15 bp, Homo sapiens
ctgtttaaaatcaac

SEQ ID NO: 560045 - DNA, 15 bp, Homo sapiens
gctgtttaaaatcaa

SEQ ID NO: 560046 - DNA, 15 bp, Homo sapiens
ggctgtttaaaatca

SEQ ID NO: 560047 - DNA, 15 bp, Homo sapiens
gggctgtttaaaatc

SEQ ID NO: 560048 - DNA, 15 bp, Homo sapiens
ggggctgtttaaaat

SEQ ID NO: 560049 - DNA, 15 bp, Homo sapiens
gggggctgtttaaaa

SEQ ID NO: 560050 - DNA, 15 bp, Homo sapiens
ggggggctgtttaaa

SEQ ID NO: 560051 - DNA, 15 bp, Homo sapiens
tggggggctgtttaa

SEQ ID NO: 560052 - DNA, 15 bp, Homo sapiens
ctggggggctgttta

SEQ ID NO: 560053 - DNA, 15 bp, Homo sapiens
gctggggggctgttt

SEQ ID NO: 560054 - DNA, 15 bp, Homo sapiens
agctggggggctgtt

SEQ ID NO: 560055 - DNA, 15 bp, Homo sapiens
tagctggggggctgt

SEQ ID NO: 560056 - DNA, 15 bp, Homo sapiens
ttagctggggggctg

SEQ ID NO: 560057 - DNA, 15 bp, Homo sapiens
cttagctggggggct

SEQ ID NO: 560058 - DNA, 15 bp, Homo sapiens
acttagctggggggc

SEQ ID NO: 560059 - DNA, 15 bp, Homo sapiens
gacttagctgggggg

SEQ ID NO: 560060 - DNA, 15 bp, Homo sapiens
ggacttagctggggg

SEQ ID NO: 560061 - DNA, 15 bp, Homo sapiens
tggacttagctgggg

SEQ ID NO: 560062 - DNA, 15 bp, Homo sapiens
gtggacttagctggg

SEQ ID NO: 560063 - DNA, 15 bp, Homo sapiens
agtggacttagctgg

SEQ ID NO: 560064 - DNA, 15 bp, Homo sapiens
cagtggacttagctg

SEQ ID NO: 560065 - DNA, 15 bp, Homo sapiens
ccagtggacttagct

SEQ ID NO: 560066 - DNA, 15 bp, Homo sapiens
accagtggacttagc

SEQ ID NO: 560067 - DNA, 15 bp, Homo sapiens
aaccagtggacttag

SEQ ID NO: 560068 - DNA, 15 bp, Homo sapiens
caaccagtggactta

SEQ ID NO: 560069 - DNA, 15 bp, Homo sapiens
acaaccagtggactt

SEQ ID NO: 560070 - DNA, 15 bp, Homo sapiens
gacaaccagtggact

SEQ ID NO: 560071 - DNA, 15 bp, Homo sapiens
cgacaaccagtggac

SEQ ID NO: 560072 - DNA, 15 bp, Homo sapiens
ccgacaaccagtgga

SEQ ID NO: 560073 - DNA, 15 bp, Homo sapiens
accgacaaccagtgg

SEQ ID NO: 560074 - DNA, 15 bp, Homo sapiens
gaccgacaaccagtg

SEQ ID NO: 560075 - DNA, 15 bp, Homo sapiens
agaccgacaaccagt

SEQ ID NO: 560076 - DNA, 15 bp, Homo sapiens
gagaccgacaaccag

SEQ ID NO: 560077 - DNA, 15 bp, Homo sapiens
ggagaccgacaacca

SEQ ID NO: 560078 - DNA, 15 bp, Homo sapiens
tggagaccgacaacc

SEQ ID NO: 560079 - DNA, 15 bp, Homo sapiens
atggagaccgacaac

SEQ ID NO: 560080 - DNA, 15 bp, Homo sapiens
catggagaccgacaa

SEQ ID NO: 560081 - DNA, 15 bp, Homo sapiens
ccatggagaccgaca

SEQ ID NO: 560082 - DNA, 15 bp, Homo sapiens
gccatggagaccgac

SEQ ID NO: 560083 - DNA, 15 bp, Homo sapiens
ggccatggagaccga

SEQ ID NO: 560084 - DNA, 15 bp, Homo sapiens
gggccatggagaccg

SEQ ID NO: 560085 - DNA, 15 bp, Homo sapiens
tgggccatggagacc

SEQ ID NO: 560086 - DNA, 15 bp, Homo sapiens
atgggccatggagac

SEQ ID NO: 560087 - DNA, 15 bp, Homo sapiens
gatgggccatggaga

SEQ ID NO: 560088 - DNA, 15 bp, Homo sapiens
agatgggccatggag

SEQ ID NO: 560089 - DNA, 15 bp, Homo sapiens
gagatgggccatgga

SEQ ID NO: 560090 - DNA, 15 bp, Homo sapiens
ggagatgggccatgg

SEQ ID NO: 560091 - DNA, 15 bp, Homo sapiens
gggagatgggccatg

SEQ ID NO: 560092 - DNA, 15 bp, Homo sapiens
ggggagatgggccat

SEQ ID NO: 560093 - DNA, 15 bp, Homo sapiens
tggggagatgggcca

SEQ ID NO: 560094 - DNA, 15 bp, Homo sapiens
gtggggagatgggcc

SEQ ID NO: 560095 - DNA, 15 bp, Homo sapiens
ggtggggagatgggc

SEQ ID NO: 560096 - DNA, 15 bp, Homo sapiens
aggtggggagatggg

SEQ ID NO: 560097 - DNA, 15 bp, Homo sapiens
aaggtggggagatgg

SEQ ID NO: 560098 - DNA, 15 bp, Homo sapiens
caaggtggggagatg

SEQ ID NO: 560099 - DNA, 15 bp, Homo sapiens
gcaaggtggggagat

SEQ ID NO: 560100 - DNA, 15 bp, Homo sapiens
agcaaggtggggaga

SEQ ID NO: 560101 - DNA, 15 bp, Homo sapiens
aagcaaggtggggag

SEQ ID NO: 560102 - DNA, 15 bp, Homo sapiens
gaagcaaggtgggga

SEQ ID NO: 560103 - DNA, 15 bp, Homo sapiens
ggaagcaaggtgggg

SEQ ID NO: 560104 - DNA, 15 bp, Homo sapiens
aggaagcaaggtggg

SEQ ID NO: 560105 - DNA, 15 bp, Homo sapiens
gaggaagcaaggtgg

SEQ ID NO: 560106 - DNA, 15 bp, Homo sapiens
cgaggaagcaaggtg

SEQ ID NO: 560107 - DNA, 15 bp, Homo sapiens
gcgaggaagcaaggt

SEQ ID NO: 560108 - DNA, 15 bp, Homo sapiens
agcgaggaagcaagg

SEQ ID NO: 560109 - DNA, 15 bp, Homo sapiens
cagcgaggaagcaag

SEQ ID NO: 560110 - DNA, 15 bp, Homo sapiens
ccagcgaggaagcaa

SEQ ID NO: 560111 - DNA, 15 bp, Homo sapiens
gccagcgaggaagca

SEQ ID NO: 560112 - DNA, 15 bp, Homo sapiens
agccagcgaggaagc

SEQ ID NO: 560113 - DNA, 15 bp, Homo sapiens
aagccagcgaggaag

SEQ ID NO: 560114 - DNA, 15 bp, Homo sapiens
taagccagcgaggaa

SEQ ID NO: 560115 - DNA, 15 bp, Homo sapiens
ttaagccagcgagga

SEQ ID NO: 560116 - DNA, 15 bp, Homo sapiens
tttaagccagcgagg

SEQ ID NO: 560117 - DNA, 15 bp, Homo sapiens
atttaagccagcgag

SEQ ID NO: 560118 - DNA, 15 bp, Homo sapiens
aatttaagccagcga

SEQ ID NO: 560119 - DNA, 15 bp, Homo sapiens
aaatttaagccagcg

SEQ ID NO: 560120 - DNA, 15 bp, Homo sapiens
aaaatttaagccagc

SEQ ID NO: 560121 - DNA, 15 bp, Homo sapiens
gaaaatttaagccag

SEQ ID NO: 560122 - DNA, 15 bp, Homo sapiens
tgaaaatttaagcca

SEQ ID NO: 560123 - DNA, 15 bp, Homo sapiens
ttgaaaatttaagcc

SEQ ID NO: 560124 - DNA, 15 bp, Homo sapiens
cttgaaaatttaagc

SEQ ID NO: 560125 - DNA, 15 bp, Homo sapiens
acttgaaaatttaag

SEQ ID NO: 560126 - DNA, 15 bp, Homo sapiens
cacttgaaaatttaa

SEQ ID NO: 560127 - DNA, 15 bp, Homo sapiens
ccacttgaaaattta

SEQ ID NO: 560128 - DNA, 15 bp, Homo sapiens
tccacttgaaaattt

SEQ ID NO: 560129 - DNA, 15 bp, Homo sapiens
gtccacttgaaaatt

SEQ ID NO: 560130 - DNA, 15 bp, Homo sapiens
cgtccacttgaaaat

SEQ ID NO: 560131 - DNA, 15 bp, Homo sapiens
tcgtccacttgaaaa

SEQ ID NO: 560132 - DNA, 15 bp, Homo sapiens
ctcgtccacttgaaa

SEQ ID NO: 560133 - DNA, 15 bp, Homo sapiens
gctcgtccacttgaa

SEQ ID NO: 560134 - DNA, 15 bp, Homo sapiens
ggctcgtccacttga

SEQ ID NO: 560135 - DNA, 15 bp, Homo sapiens
gggctcgtccacttg

SEQ ID NO: 560136 - DNA, 15 bp, Homo sapiens
agggctcgtccactt

SEQ ID NO: 560137 - DNA, 15 bp, Homo sapiens
aagggctcgtccact

SEQ ID NO: 560138 - DNA, 15 bp, Homo sapiens
aaagggctcgtccac

SEQ ID NO: 560139 - DNA, 15 bp, Homo sapiens
aaaagggctcgtcca

SEQ ID NO: 560140 - DNA, 15 bp, Homo sapiens
gaaaagggctcgtcc

SEQ ID NO: 560141 - DNA, 15 bp, Homo sapiens
tgaaaagggctcgtc

SEQ ID NO: 560142 - DNA, 15 bp, Homo sapiens
ctgaaaagggctcgt

SEQ ID NO: 560143 - DNA, 15 bp, Homo sapiens
gctgaaaagggctcg

SEQ ID NO: 560144 - DNA, 15 bp, Homo sapiens
agctgaaaagggctc

SEQ ID NO: 560145 - DNA, 15 bp, Homo sapiens
aagctgaaaagggct

SEQ ID NO: 560146 - DNA, 15 bp, Homo sapiens
caagctgaaaagggc

SEQ ID NO: 560147 - DNA, 15 bp, Homo sapiens
ccaagctgaaaaggg

SEQ ID NO: 560148 - DNA, 15 bp, Homo sapiens
gccaagctgaaaagg

SEQ ID NO: 560149 - DNA, 15 bp, Homo sapiens
agccaagctgaaaag

SEQ ID NO: 560150 - DNA, 15 bp, Homo sapiens
aagccaagctgaaaa

SEQ ID NO: 560151 - DNA, 15 bp, Homo sapiens
caagccaagctgaaa

SEQ ID NO: 560152 - DNA, 15 bp, Homo sapiens
acaagccaagctgaa

SEQ ID NO: 560153 - DNA, 15 bp, Homo sapiens
gacaagccaagctga

SEQ ID NO: 560154 - DNA, 15 bp, Homo sapiens
ggacaagccaagctg

SEQ ID NO: 560155 - DNA, 15 bp, Homo sapiens
tggacaagccaagct

SEQ ID NO: 560156 - DNA, 15 bp, Homo sapiens
gtggacaagccaagc

SEQ ID NO: 560157 - DNA, 15 bp, Homo sapiens
ggtggacaagccaag

SEQ ID NO: 560158 - DNA, 15 bp, Homo sapiens
aggtggacaagccaa

SEQ ID NO: 560159 - DNA, 15 bp, Homo sapiens
gaggtggacaagcca

SEQ ID NO: 560160 - DNA, 15 bp, Homo sapiens
ggaggtggacaagcc

SEQ ID NO: 560161 - DNA, 15 bp, Homo sapiens
gggaggtggacaagc

SEQ ID NO: 560162 - DNA, 15 bp, Homo sapiens
tgggaggtggacaag

SEQ ID NO: 560163 - DNA, 15 bp, Homo sapiens
ctgggaggtggacaa

SEQ ID NO: 560164 - DNA, 15 bp, Homo sapiens
cctgggaggtggaca

SEQ ID NO: 560165 - DNA, 15 bp, Homo sapiens
acctgggaggtggac

SEQ ID NO: 560166 - DNA, 15 bp, Homo sapiens
cacctgggaggtgga

SEQ ID NO: 560167 - DNA, 15 bp, Homo sapiens
acacctgggaggtgg

SEQ ID NO: 560168 - DNA, 15 bp, Homo sapiens
cacacctgggaggtg

SEQ ID NO: 560169 - DNA, 15 bp, Homo sapiens
acacacctgggaggt

SEQ ID NO: 560170 - DNA, 15 bp, Homo sapiens
aacacacctgggagg

SEQ ID NO: 560171 - DNA, 15 bp, Homo sapiens
aaacacacctgggag

SEQ ID NO: 560172 - DNA, 15 bp, Homo sapiens
gaaacacacctggga

SEQ ID NO: 560173 - DNA, 15 bp, Homo sapiens
ggaaacacacctggg

SEQ ID NO: 560174 - DNA, 15 bp, Homo sapiens
aggaaacacacctgg

SEQ ID NO: 560175 - DNA, 15 bp, Homo sapiens
caggaaacacacctg

SEQ ID NO: 560176 - DNA, 15 bp, Homo sapiens
tcaggaaacacacct

SEQ ID NO: 560177 - DNA, 15 bp, Homo sapiens
ttcaggaaacacacc

SEQ ID NO: 560178 - DNA, 15 bp, Homo sapiens
cttcaggaaacacac

SEQ ID NO: 560179 - DNA, 15 bp, Homo sapiens
tcttcaggaaacaca

SEQ ID NO: 560180 - DNA, 15 bp, Homo sapiens
atcttcaggaaacac

SEQ ID NO: 560181 - DNA, 15 bp, Homo sapiens
catcttcaggaaaca

SEQ ID NO: 560182 - DNA, 15 bp, Homo sapiens
gcatcttcaggaaac

SEQ ID NO: 560183 - DNA, 15 bp, Homo sapiens
agcatcttcaggaaa

SEQ ID NO: 560184 - DNA, 15 bp, Homo sapiens
aagcatcttcaggaa

SEQ ID NO: 560185 - DNA, 15 bp, Homo sapiens
caagcatcttcagga

SEQ ID NO: 560186 - DNA, 15 bp, Homo sapiens
acaagcatcttcagg

SEQ ID NO: 560187 - DNA, 15 bp, Homo sapiens
tacaagcatcttcag

SEQ ID NO: 560188 - DNA, 15 bp, Homo sapiens
gtacaagcatcttca

SEQ ID NO: 560189 - DNA, 15 bp, Homo sapiens
agtacaagcatcttc

SEQ ID NO: 560190 - DNA, 15 bp, Homo sapiens
aagtacaagcatctt

SEQ ID NO: 560191 - DNA, 15 bp, Homo sapiens
taagtacaagcatct

SEQ ID NO: 560192 - DNA, 15 bp, Homo sapiens
ataagtacaagcatc

SEQ ID NO: 560193 - DNA, 15 bp, Homo sapiens
cataagtacaagcat

SEQ ID NO: 560194 - DNA, 15 bp, Homo sapiens
acataagtacaagca

SEQ ID NO: 560195 - DNA, 15 bp, Homo sapiens
gacataagtacaagc

SEQ ID NO: 560196 - DNA, 15 bp, Homo sapiens
agacataagtacaag

SEQ ID NO: 560197 - DNA, 15 bp, Homo sapiens
tagacataagtacaa

SEQ ID NO: 560198 - DNA, 15 bp, Homo sapiens
ttagacataagtaca

SEQ ID NO: 560199 - DNA, 15 bp, Homo sapiens
cttagacataagtac

SEQ ID NO: 560200 - DNA, 15 bp, Homo sapiens
tcttagacataagta

SEQ ID NO: 560201 - DNA, 15 bp, Homo sapiens
ctcttagacataagt

SEQ ID NO: 560202 - DNA, 15 bp, Homo sapiens
gctcttagacataag

SEQ ID NO: 560203 - DNA, 15 bp, Homo sapiens
cgctcttagacataa

SEQ ID NO: 560204 - DNA, 15 bp, Homo sapiens
ccgctcttagacata

SEQ ID NO: 560205 - DNA, 15 bp, Homo sapiens
gccgctcttagacat

SEQ ID NO: 560206 - DNA, 15 bp, Homo sapiens
tgccgctcttagaca

SEQ ID NO: 560207 - DNA, 15 bp, Homo sapiens
ctgccgctcttagac

SEQ ID NO: 560208 - DNA, 15 bp, Homo sapiens
gctgccgctcttaga

SEQ ID NO: 560209 - DNA, 15 bp, Homo sapiens
agctgccgctcttag

SEQ ID NO: 560210 - DNA, 15 bp, Homo sapiens
gagctgccgctctta

SEQ ID NO: 560211 - DNA, 15 bp, Homo sapiens
ggagctgccgctctt

SEQ ID NO: 560212 - DNA, 15 bp, Homo sapiens
gggagctgccgctct

SEQ ID NO: 560213 - DNA, 15 bp, Homo sapiens
ggggagctgccgctc

SEQ ID NO: 560214 - DNA, 15 bp, Homo sapiens
tggggagctgccgct

SEQ ID NO: 560215 - DNA, 15 bp, Homo sapiens
gtggggagctgccgc

SEQ ID NO: 560216 - DNA, 15 bp, Homo sapiens
tgtggggagctgccg

SEQ ID NO: 560217 - DNA, 15 bp, Homo sapiens
atgtggggagctgcc

SEQ ID NO: 560218 - DNA, 15 bp, Homo sapiens
gatgtggggagctgc

SEQ ID NO: 560219 - DNA, 15 bp, Homo sapiens
agatgtggggagctg

SEQ ID NO: 560220 - DNA, 15 bp, Homo sapiens
gagatgtggggagct

SEQ ID NO: 560221 - DNA, 15 bp, Homo sapiens
tgagatgtggggagc

SEQ ID NO: 560222 - DNA, 15 bp, Homo sapiens
ctgagatgtggggag

SEQ ID NO: 560223 - DNA, 15 bp, Homo sapiens
gctgagatgtgggga

SEQ ID NO: 560224 - DNA, 15 bp, Homo sapiens
ggctgagatgtgggg

SEQ ID NO: 560225 - DNA, 15 bp, Homo sapiens
tggctgagatgtggg

SEQ ID NO: 560226 - DNA, 15 bp, Homo sapiens
gtggctgagatgtgg

SEQ ID NO: 560227 - DNA, 15 bp, Homo sapiens
ggtggctgagatgtg

SEQ ID NO: 560228 - DNA, 15 bp, Homo sapiens
aggtggctgagatgt

SEQ ID NO: 560229 - DNA, 15 bp, Homo sapiens
caggtggctgagatg

SEQ ID NO: 560230 - DNA, 15 bp, Homo sapiens
gcaggtggctgagat

SEQ ID NO: 560231 - DNA, 15 bp, Homo sapiens
tgcaggtggctgaga

SEQ ID NO: 560232 - DNA, 15 bp, Homo sapiens
ttgcaggtggctgag

SEQ ID NO: 560233 - DNA, 15 bp, Homo sapiens
attgcaggtggctga

SEQ ID NO: 560234 - DNA, 15 bp, Homo sapiens
gattgcaggtggctg

SEQ ID NO: 560235 - DNA, 15 bp, Homo sapiens
cgattgcaggtggct

SEQ ID NO: 560236 - DNA, 15 bp, Homo sapiens
acgattgcaggtggc

SEQ ID NO: 560237 - DNA, 15 bp, Homo sapiens
aacgattgcaggtgg

SEQ ID NO: 560238 - DNA, 15 bp, Homo sapiens
caacgattgcaggtg

SEQ ID NO: 560239 - DNA, 15 bp, Homo sapiens
tcaacgattgcaggt

SEQ ID NO: 560240 - DNA, 15 bp, Homo sapiens
ctcaacgattgcagg

SEQ ID NO: 560241 - DNA, 15 bp, Homo sapiens
cctcaacgattgcag

SEQ ID NO: 560242 - DNA, 15 bp, Homo sapiens
ccctcaacgattgca

SEQ ID NO: 560243 - DNA, 15 bp, Homo sapiens
accctcaacgattgc

SEQ ID NO: 560244 - DNA, 15 bp, Homo sapiens
aaccctcaacgattg

SEQ ID NO: 560245 - DNA, 15 bp, Homo sapiens
caaccctcaacgatt

SEQ ID NO: 560246 - DNA, 15 bp, Homo sapiens
acaaccctcaacgat

SEQ ID NO: 560247 - DNA, 15 bp, Homo sapiens
aacaaccctcaacga

SEQ ID NO: 560248 - DNA, 15 bp, Homo sapiens
caacaaccctcaacg

SEQ ID NO: 560249 - DNA, 15 bp, Homo sapiens
ccaacaaccctcaac

SEQ ID NO: 560250 - DNA, 15 bp, Homo sapiens
tccaacaaccctcaa

SEQ ID NO: 560251 - DNA, 15 bp, Homo sapiens
gtccaacaaccctca

SEQ ID NO: 560252 - DNA, 15 bp, Homo sapiens
agtccaacaaccctc

SEQ ID NO: 560253 - DNA, 15 bp, Homo sapiens
gagtccaacaaccct

SEQ ID NO: 560254 - DNA, 15 bp, Homo sapiens
agagtccaacaaccc

SEQ ID NO: 560255 - DNA, 15 bp, Homo sapiens
tagagtccaacaacc

SEQ ID NO: 560256 - DNA, 15 bp, Homo sapiens
ttagagtccaacaac

SEQ ID NO: 560257 - DNA, 15 bp, Homo sapiens
tttagagtccaacaa

SEQ ID NO: 560258 - DNA, 15 bp, Homo sapiens
gtttagagtccaaca

SEQ ID NO: 560259 - DNA, 15 bp, Homo sapiens
agtttagagtccaac

SEQ ID NO: 560260 - DNA, 15 bp, Homo sapiens
aagtttagagtccaa

SEQ ID NO: 560261 - DNA, 15 bp, Homo sapiens
taagtttagagtcca

SEQ ID NO: 560262 - DNA, 15 bp, Homo sapiens
ataagtttagagtcc

SEQ ID NO: 560263 - DNA, 15 bp, Homo sapiens
cataagtttagagtc

SEQ ID NO: 560264 - DNA, 15 bp, Homo sapiens
acataagtttagagt

SEQ ID NO: 560265 - DNA, 15 bp, Homo sapiens
cacataagtttagag

SEQ ID NO: 560266 - DNA, 15 bp, Homo sapiens
gcacataagtttaga

SEQ ID NO: 560267 - DNA, 15 bp, Homo sapiens
ggcacataagtttag

SEQ ID NO: 560268 - DNA, 15 bp, Homo sapiens
aggcacataagttta

SEQ ID NO: 560269 - DNA, 15 bp, Homo sapiens
aaggcacataagttt

SEQ ID NO: 560270 - DNA, 15 bp, Homo sapiens
aaaggcacataagtt

SEQ ID NO: 560271 - DNA, 15 bp, Homo sapiens
gaaaggcacataagt

SEQ ID NO: 560272 - DNA, 15 bp, Homo sapiens
ggaaaggcacataag

SEQ ID NO: 560273 - DNA, 15 bp, Homo sapiens
aggaaaggcacataa

SEQ ID NO: 560274 - DNA, 15 bp, Homo sapiens
caggaaaggcacata

SEQ ID NO: 560275 - DNA, 15 bp, Homo sapiens
acaggaaaggcacat
